United States Patent Application Publication US 2008/0113351 A1 - sequence listing, part 9

SEQ ID NO: 201548 - DNA, 19 bp, Homo sapiens
  siRNA target sequence for SI (NM_001041.1,3445-3463).
ggaatacttggggaatgtt

SEQ ID NO: 201549 - DNA, 19 bp, Homo sapiens
  siRNA target sequence for SI (NM_001041.1,3477-3495).
ccccctggttacaaactta

SEQ ID NO: 201550 - DNA, 19 bp, Homo sapiens
  siRNA target sequence for SI (NM_001041.1,3478-3496).
cccctggttacaaacttaa

SEQ ID NO: 201551 - DNA, 19 bp, Homo sapiens
  siRNA target sequence for SI (NM_001041.1,3479-3497).
ccctggttacaaacttaat

SEQ ID NO: 201552 - DNA, 19 bp, Homo sapiens
  siRNA target sequence for SI (NM_001041.1,3480-3498).
cctggttacaaacttaatt

SEQ ID NO: 201553 - DNA, 19 bp, Homo sapiens
  siRNA target sequence for SI (NM_001041.1,3504-3522).
ggatttcatccctattaca

SEQ ID NO: 201554 - DNA, 19 bp, Homo sapiens
  siRNA target sequence for SI (NM_001041.1,3541-3559).
gcaatgctcatggtgtttt

SEQ ID NO: 201555 - DNA, 19 bp, Homo sapiens
  siRNA target sequence for SI (NM_001041.1,3549-3567).
catggtgttttcttactca

SEQ ID NO: 201556 - DNA, 19 bp, Homo sapiens
  siRNA target sequence for SI (NM_001041.1,3596-3614).
gccaactcctgctctaact

SEQ ID NO: 201557 - DNA, 19 bp, Homo sapiens
  siRNA target sequence for SI (NM_001041.1,3598-3616).
caactcctgctctaactta

SEQ ID NO: 201558 - DNA, 19 bp, Homo sapiens
  siRNA target sequence for SI (NM_001041.1,3683-3701).
gcaataccatgaagtaatt

SEQ ID NO: 201559 - DNA, 19 bp, Homo sapiens
  siRNA target sequence for SI (NM_001041.1,3708-3726).
ccagtcatgccagcttatt

SEQ ID NO: 201560 - DNA, 19 bp, Homo sapiens
  siRNA target sequence for SI (NM_001041.1,3741-3759).
caattatgtcgttatggat

SEQ ID NO: 201561 - DNA, 19 bp, Homo sapiens
  siRNA target sequence for SI (NM_001041.1,3857-3875).
gcagctagactttacaatt

SEQ ID NO: 201562 - DNA, 19 bp, Homo sapiens
  siRNA target sequence for SI (NM_001041.1,3860-3878).
gctagactttacaattggt

SEQ ID NO: 201563 - DNA, 19 bp, Homo sapiens
  siRNA target sequence for SI (NM_001041.1,3890-3908).
ggaccttcctcagtttgtt

SEQ ID NO: 201564 - DNA, 19 bp, Homo sapiens
  siRNA target sequence for SI (NM_001041.1,3924-3942).
gaaggaatgagatacatta

SEQ ID NO: 201565 - DNA, 19 bp, Homo sapiens
  siRNA target sequence for SI (NM_001041.1,3947-3965).
cctggatccagcaatttca

SEQ ID NO: 201566 - DNA, 19 bp, Homo sapiens
  siRNA target sequence for SI (NM_001041.1,4030-4048).
ggccaaacaccaatgacat

SEQ ID NO: 201567 - DNA, 19 bp, Homo sapiens
  siRNA target sequence for SI (NM_001041.1,4046-4064).
catttgttgggcaaaggtt

SEQ ID NO: 201568 - DNA, 19 bp, Homo sapiens
  siRNA target sequence for SI (NM_001041.1,4067-4085).
gccagatttgcccaacata

SEQ ID NO: 201569 - DNA, 19 bp, Homo sapiens
  siRNA target sequence for SI (NM_001041.1,4076-4094).
gcccaacataacaatagat

SEQ ID NO: 201570 - DNA, 19 bp, Homo sapiens
  siRNA target sequence for SI (NM_001041.1,4251-4269).
gagccatcaagttttgtaa

SEQ ID NO: 201571 - DNA, 19 bp, Homo sapiens
  siRNA target sequence for SI (NM_001041.1,4272-4290).
ggaacaactactaatcaat

SEQ ID NO: 201572 - DNA, 19 bp, Homo sapiens
  siRNA target sequence for SI (NM_001041.1,4291-4309).
gcagaaatgacgaactaaa

SEQ ID NO: 201573 - DNA, 19 bp, Homo sapiens
  siRNA target sequence for SI (NM_001041.1,4336-4354).
caaaaagaactgatggatt

SEQ ID NO: 201574 - DNA, 19 bp, Homo sapiens
  siRNA target sequence for SI (NM_001041.1,4377-4395).
gaagctgagcagattctta

SEQ ID NO: 201575 - DNA, 19 bp, Homo sapiens
  siRNA target sequence for SI (NM_001041.1,4381-4399).
ctgagcagattcttagtga

SEQ ID NO: 201576 - DNA, 19 bp, Homo sapiens
  siRNA target sequence for SI (NM_001041.1,4405-4423).
catcagttttgcattacga

SEQ ID NO: 201577 - DNA, 19 bp, Homo sapiens
  siRNA target sequence for SI (NM_001041.1,4421-4439).
cgatgttcacaatctctat

SEQ ID NO: 201578 - DNA, 19 bp, Homo sapiens
  siRNA target sequence for SI (NM_001041.1,4425-4443).
gttcacaatctctatggat

SEQ ID NO: 201579 - DNA, 19 bp, Homo sapiens
  siRNA target sequence for SI (NM_001041.1,4587-4605).
gacaaatcaatcattggta

SEQ ID NO: 201580 - DNA, 19 bp, Homo sapiens
  siRNA target sequence for SI (NM_001041.1,4598-4616).
cattggtatgatggaattt

SEQ ID NO: 201581 - DNA, 19 bp, Homo sapiens
  siRNA target sequence for SI (NM_001041.1,4603-4621).
gtatgatggaatttagtct

SEQ ID NO: 201582 - DNA, 19 bp, Homo sapiens
  siRNA target sequence for SI (NM_001041.1,4664-4682).
caacaactcagaatatcat

SEQ ID NO: 201583 - DNA, 19 bp, Homo sapiens
  siRNA target sequence for SI (NM_001041.1,4736-4754).
caacattgcaaatactaga

SEQ ID NO: 201584 - DNA, 19 bp, Homo sapiens
  siRNA target sequence for SI (NM_001041.1,4867-4885).
ctaatggtggcactgttat

SEQ ID NO: 201585 - DNA, 19 bp, Homo sapiens
  siRNA target sequence for SI (NM_001041.1,4898-4916).
gcatgagttctttgatgaa

SEQ ID NO: 201586 - DNA, 19 bp, Homo sapiens
  siRNA target sequence for SI (NM_001041.1,4899-4917).
catgagttctttgatgaaa

SEQ ID NO: 201587 - DNA, 19 bp, Homo sapiens
  siRNA target sequence for SI (NM_001041.1,4952-4970).
gggtccagcatttatggtt

SEQ ID NO: 201588 - DNA, 19 bp, Homo sapiens
  siRNA target sequence for SI (NM_001041.1,4953-4971).
ggtccagcatttatggtta

SEQ ID NO: 201589 - DNA, 19 bp, Homo sapiens
  siRNA target sequence for SI (NM_001041.1,4982-5000).
ggaaccttatgttcaaact

SEQ ID NO: 201590 - DNA, 19 bp, Homo sapiens
  siRNA target sequence for SI (NM_001041.1,4986-5004).
ccttatgttcaaactgtaa

SEQ ID NO: 201591 - DNA, 19 bp, Homo sapiens
  siRNA target sequence for SI (NM_001041.1,4987-5005).
cttatgttcaaactgtaaa

SEQ ID NO: 201592 - DNA, 19 bp, Homo sapiens
  siRNA target sequence for SI (NM_001041.1,5025-5043).
cggtggtttgactaccata

SEQ ID NO: 201593 - DNA, 19 bp, Homo sapiens
  siRNA target sequence for SI (NM_001041.1,5036-5054).
ctaccatacaggcaaagat

SEQ ID NO: 201594 - DNA, 19 bp, Homo sapiens
  siRNA target sequence for SI (NM_001041.1,5039-5057).
ccatacaggcaaagatatt

SEQ ID NO: 201595 - DNA, 19 bp, Homo sapiens
  siRNA target sequence for SI (NM_001041.1,5059-5077).
gcgtcagaggacaatttca

SEQ ID NO: 201596 - DNA, 19 bp, Homo sapiens
  siRNA target sequence for SI (NM_001041.1,5170-5188).
gtcgacaaaaacacatgaa

SEQ ID NO: 201597 - DNA, 19 bp, Homo sapiens
  siRNA target sequence for SI (NM_001041.1,5239-5257).
gggatgatggagagagtat

SEQ ID NO: 201598 - DNA, 19 bp, Homo sapiens
  siRNA target sequence for SI (NM_001041.1,5240-5258).
ggatgatggagagagtata

SEQ ID NO: 201599 - DNA, 19 bp, Homo sapiens
  siRNA target sequence for SI (NM_001041.1,5244-5262).
gatggagagagtatagaca

SEQ ID NO: 201600 - DNA, 19 bp, Homo sapiens
  siRNA target sequence for SI (NM_001041.1,5263-5281).
cctatgaaagagacctata

SEQ ID NO: 201601 - DNA, 19 bp, Homo sapiens
  siRNA target sequence for SI (NM_001041.1,5264-5282).
ctatgaaagagacctatat

SEQ ID NO: 201602 - DNA, 19 bp, Homo sapiens
  siRNA target sequence for SI (NM_001041.1,5268-5286).
gaaagagacctatatttat

SEQ ID NO: 201603 - DNA, 19 bp, Homo sapiens
  siRNA target sequence for SI (NM_001041.1,5272-5290).
gagacctatatttatctgt

SEQ ID NO: 201604 - DNA, 19 bp, Homo sapiens
  siRNA target sequence for SI (NM_001041.1,5312-5330).
caccttaacaagcactata

SEQ ID NO: 201605 - DNA, 19 bp, Homo sapiens
  siRNA target sequence for SI (NM_001041.1,5365-5383).
ggcttggatcccttcatgt

SEQ ID NO: 201606 - DNA, 19 bp, Homo sapiens
  siRNA target sequence for SI (NM_001041.1,5367-5385).
cttggatcccttcatgtat

SEQ ID NO: 201607 - DNA, 19 bp, Homo sapiens
  siRNA target sequence for SI (NM_001041.1,5412-5430).
gcagttactctaacgtata

SEQ ID NO: 201608 - DNA, 19 bp, Homo sapiens
  siRNA target sequence for SI (NM_001041.1,5413-5431).
cagttactctaacgtataa

SEQ ID NO: 201609 - DNA, 19 bp, Homo sapiens
  siRNA target sequence for SI (NM_001041.1,5421-5439).
ctaacgtataacggaaata

SEQ ID NO: 201610 - DNA, 19 bp, Homo sapiens
  siRNA target sequence for SI (NM_001041.1,5446-5464).
cgcttccttttaatgaaga

SEQ ID NO: 201611 - DNA, 19 bp, Homo sapiens
  siRNA target sequence for SI (NM_001041.1,5463-5481).
gacactaccaacatgatat

SEQ ID NO: 201612 - DNA, 19 bp, Homo sapiens
  siRNA target sequence for SI (NM_001041.1,5465-5483).
cactaccaacatgatatta

SEQ ID NO: 201613 - DNA, 19 bp, Homo sapiens
  siRNA target sequence for SI (NM_001041.1,5470-5488).
ccaacatgatattacgtat

SEQ ID NO: 201614 - DNA, 19 bp, Homo sapiens
  siRNA target sequence for SI (NM_001041.1,5495-5513).
gaccacacacaatgttact

SEQ ID NO: 201615 - DNA, 19 bp, Homo sapiens
  siRNA target sequence for SI (NM_001041.1,5498-5516).
cacacacaatgttactcta

SEQ ID NO: 201616 - DNA, 19 bp, Homo sapiens
  siRNA target sequence for GCS1 (NM_006302.1,272-290).
ccgtcgtggtcctgtcttt

SEQ ID NO: 201617 - DNA, 19 bp, Homo sapiens
  siRNA target sequence for GCS1 (NM_006302.1,885-903).
ggatacagcccccaagtat

SEQ ID NO: 201618 - DNA, 19 bp, Homo sapiens
  siRNA target sequence for GCS1 (NM_006302.1,951-969).
gacagagatggtaaagagt

SEQ ID NO: 201619 - DNA, 19 bp, Homo sapiens
  siRNA target sequence for GCS1 (NM_006302.1,960-978).
ggtaaagagtcgcctaaat

SEQ ID NO: 201620 - DNA, 19 bp, Homo sapiens
  siRNA target sequence for GCS1 (NM_006302.1,961-979).
gtaaagagtcgcctaaata

SEQ ID NO: 201621 - DNA, 19 bp, Homo sapiens
  siRNA target sequence for GCS1 (NM_006302.1,1076-1094).
ggcaggggcagttcttgat

SEQ ID NO: 201622 - DNA, 19 bp, Homo sapiens
  siRNA target sequence for GCS1 (NM_006302.1,1077-1095).
gcaggggcagttcttgata

SEQ ID NO: 201623 - DNA, 19 bp, Homo sapiens
  siRNA target sequence for GCS1 (NM_006302.1,1098-1116).
gcaggtgaccctgaaaatt

SEQ ID NO: 201624 - DNA, 19 bp, Homo sapiens
  siRNA target sequence for GCS1 (NM_006302.1,1125-1143).
catagagtttgtgtttgaa

SEQ ID NO: 201625 - DNA, 19 bp, Homo sapiens
  siRNA target sequence for GCS1 (NM_006302.1,1330-1348).
ggtggaattggctacttct

SEQ ID NO: 201626 - DNA, 19 bp, Homo sapiens
  siRNA target sequence for GCS1 (NM_006302.1,1683-1701).
gcctgtagcccatatgcta

SEQ ID NO: 201627 - DNA, 19 bp, Homo sapiens
  siRNA target sequence for AGL (NM_000028.1,481-499).
gggacacagtaaacagatt

SEQ ID NO: 201628 - DNA, 19 bp, Homo sapiens
  siRNA target sequence for AGL (NM_000028.1,485-503).
cacagtaaacagattcgaa

SEQ ID NO: 201629 - DNA, 19 bp, Homo sapiens
  siRNA target sequence for AGL (NM_000028.1,577-595).
ccgattaggcccaacttta

SEQ ID NO: 201630 - DNA, 19 bp, Homo sapiens
  siRNA target sequence for AGL (NM_000028.1,579-597).
gattaggcccaactttaca

SEQ ID NO: 201631 - DNA, 19 bp, Homo sapiens
  siRNA target sequence for AGL (NM_000028.1,842-860).
ctacccttggactgtgtta

SEQ ID NO: 201632 - DNA, 19 bp, Homo sapiens
  siRNA target sequence for AGL (NM_000028.1,847-865).
cttggactgtgttactctt

SEQ ID NO: 201633 - DNA, 19 bp, Homo sapiens
  siRNA target sequence for AGL (NM_000028.1,885-903).
gtttgggaccttttgatga

SEQ ID NO: 201634 - DNA, 19 bp, Homo sapiens
  siRNA target sequence for AGL (NM_000028.1,902-920).
gaatgggaaagcagactta

SEQ ID NO: 201635 - DNA, 19 bp, Homo sapiens
  siRNA target sequence for AGL (NM_000028.1,932-950).
gaatcaggctacaacatga

SEQ ID NO: 201636 - DNA, 19 bp, Homo sapiens
  siRNA target sequence for AGL (NM_000028.1,936-954).
caggctacaacatgattca

SEQ ID NO: 201637 - DNA, 19 bp, Homo sapiens
  siRNA target sequence for AGL (NM_000028.1,938-956).
ggctacaacatgattcatt

SEQ ID NO: 201638 - DNA, 19 bp, Homo sapiens
  siRNA target sequence for AGL (NM_000028.1,939-957).
gctacaacatgattcattt

SEQ ID NO: 201639 - DNA, 19 bp, Homo sapiens
  siRNA target sequence for AGL (NM_000028.1,967-985).
gcagactcttggactatct

SEQ ID NO: 201640 - DNA, 19 bp, Homo sapiens
  siRNA target sequence for AGL (NM_000028.1,968-986).
cagactcttggactatcta

SEQ ID NO: 201641 - DNA, 19 bp, Homo sapiens
  siRNA target sequence for AGL (NM_000028.1,999-1017).
cccttgccaatcagttaga

SEQ ID NO: 201642 - DNA, 19 bp, Homo sapiens
  siRNA target sequence for AGL (NM_000028.1,1001-1019).
cttgccaatcagttagaat

SEQ ID NO: 201643 - DNA, 19 bp, Homo sapiens
  siRNA target sequence for AGL (NM_000028.1,1004-1022).
gccaatcagttagaattaa

SEQ ID NO: 201644 - DNA, 19 bp, Homo sapiens
  siRNA target sequence for AGL (NM_000028.1,1006-1024).
caatcagttagaattaaat

SEQ ID NO: 201645 - DNA, 19 bp, Homo sapiens
  siRNA target sequence for AGL (NM_000028.1,1051-1069).
gtatacctggaatgatgtt

SEQ ID NO: 201646 - DNA, 19 bp, Homo sapiens
  siRNA target sequence for AGL (NM_000028.1,1070-1088).
ggacagctagtggaaaaat

SEQ ID NO: 201647 - DNA, 19 bp, Homo sapiens
  siRNA target sequence for AGL (NM_000028.1,1119-1137).
ctgatgttgtctacaatca

SEQ ID NO: 201648 - DNA, 19 bp, Homo sapiens
  siRNA target sequence for AGL (NM_000028.1,1132-1150).
caatcatactgctgctaat

SEQ ID NO: 201649 - DNA, 19 bp, Homo sapiens
  siRNA target sequence for AGL (NM_000028.1,1136-1154).
catactgctgctaatagta

SEQ ID NO: 201650 - DNA, 19 bp, Homo sapiens
  siRNA target sequence for AGL (NM_000028.1,1142-1160).
gctgctaatagtaaatgga

SEQ ID NO: 201651 - DNA, 19 bp, Homo sapiens
  siRNA target sequence for AGL (NM_000028.1,1173-1191).
cagaatgtgcctataatct

SEQ ID NO: 201652 - DNA, 19 bp, Homo sapiens
  siRNA target sequence for AGL (NM_000028.1,1179-1197).
gtgcctataatcttgtgaa

SEQ ID NO: 201653 - DNA, 19 bp, Homo sapiens
  siRNA target sequence for AGL (NM_000028.1,1181-1199).
gcctataatcttgtgaatt

SEQ ID NO: 201654 - DNA, 19 bp, Homo sapiens
  siRNA target sequence for AGL (NM_000028.1,1193-1211).
gtgaattctccacacttaa

SEQ ID NO: 201655 - DNA, 19 bp, Homo sapiens
  siRNA target sequence for AGL (NM_000028.1,1243-1261).
gcgtttctcctgtgatgtt

SEQ ID NO: 201656 - DNA, 19 bp, Homo sapiens
  siRNA target sequence for AGL (NM_000028.1,1399-1417).
caaagcggttgagcaattt

SEQ ID NO: 201657 - DNA, 19 bp, Homo sapiens
  siRNA target sequence for AGL (NM_000028.1,1403-1421).
gcggttgagcaatttagaa

SEQ ID NO: 201658 - DNA, 19 bp, Homo sapiens
  siRNA target sequence for AGL (NM_000028.1,1405-1423).
ggttgagcaatttagaaga

SEQ ID NO: 201659 - DNA, 19 bp, Homo sapiens
  siRNA target sequence for AGL (NM_000028.1,1453-1471).
caagtctgatccaaaccaa

SEQ ID NO: 201660 - DNA, 19 bp, Homo sapiens
  siRNA target sequence for AGL (NM_000028.1,1468-1486).
ccaacaccttacgattatt

SEQ ID NO: 201661 - DNA, 19 bp, Homo sapiens
  siRNA target sequence for AGL (NM_000028.1,1474-1492).
ccttacgattattcaagat

SEQ ID NO: 201662 - DNA, 19 bp, Homo sapiens
  siRNA target sequence for AGL (NM_000028.1,1628-1646).
gagaagcatcgactcatta

SEQ ID NO: 201663 - DNA, 19 bp, Homo sapiens
  siRNA target sequence for AGL (NM_000028.1,1633-1651).
gcatcgactcattaactat

SEQ ID NO: 201664 - DNA, 19 bp, Homo sapiens
  siRNA target sequence for AGL (NM_000028.1,1638-1656).
gactcattaactatcatca

SEQ ID NO: 201665 - DNA, 19 bp, Homo sapiens
  siRNA target sequence for AGL (NM_000028.1,1707-1725).
ctggccatggtccaaaact

SEQ ID NO: 201666 - DNA, 19 bp, Homo sapiens
  siRNA target sequence for AGL (NM_000028.1,1724-1742).
ctaggacctgtcactagaa

SEQ ID NO: 201667 - DNA, 19 bp, Homo sapiens
  siRNA target sequence for AGL (NM_000028.1,1754-1772).
gttaccaggtattttactt

SEQ ID NO: 201668 - DNA, 19 bp, Homo sapiens
  siRNA target sequence for AGL (NM_000028.1,1775-1793).
ccatttgaagagatagact

SEQ ID NO: 201669 - DNA, 19 bp, Homo sapiens
  siRNA target sequence for AGL (NM_000028.1,1895-1913).
gaaccgggttcagaagttt

SEQ ID NO: 201670 - DNA, 19 bp, Homo sapiens
  siRNA target sequence for AGL (NM_000028.1,1899-1917).
cgggttcagaagtttacct

SEQ ID NO: 201671 - DNA, 19 bp, Homo sapiens
  siRNA target sequence for AGL (NM_000028.1,1900-1918).
gggttcagaagtttaccta

SEQ ID NO: 201672 - DNA, 19 bp, Homo sapiens
  siRNA target sequence for AGL (NM_000028.1,1901-1919).
ggttcagaagtttacctaa

SEQ ID NO: 201673 - DNA, 19 bp, Homo sapiens
  siRNA target sequence for AGL (NM_000028.1,1938-1956).
ggggagacagtgttaaatt

SEQ ID NO: 201674 - DNA, 19 bp, Homo sapiens
  siRNA target sequence for AGL (NM_000028.1,1939-1957).
gggagacagtgttaaatta

SEQ ID NO: 201675 - DNA, 19 bp, Homo sapiens
  siRNA target sequence for AGL (NM_000028.1,1991-2009).
ctctgggcacacatgaaaa

SEQ ID NO: 201676 - DNA, 19 bp, Homo sapiens
  siRNA target sequence for AGL (NM_000028.1,2039-2057).
cagggagtacgtcttgata

SEQ ID NO: 201677 - DNA, 19 bp, Homo sapiens
  siRNA target sequence for AGL (NM_000028.1,2042-2060).
ggagtacgtcttgataact

SEQ ID NO: 201678 - DNA, 19 bp, Homo sapiens
  siRNA target sequence for AGL (NM_000028.1,2078-2096).
cacgtagctgagtacatgt

SEQ ID NO: 201679 - DNA, 19 bp, Homo sapiens
  siRNA target sequence for AGL (NM_000028.1,2095-2113).
gttggatgctgctaggaat

SEQ ID NO: 201680 - DNA, 19 bp, Homo sapiens
  siRNA target sequence for AGL (NM_000028.1,2116-2134).
gcaacccaatttatatgta

SEQ ID NO: 201681 - DNA, 19 bp, Homo sapiens
  siRNA target sequence for AGL (NM_000028.1,2213-2231).
gaggcaatgagtgcatata

SEQ ID NO: 201682 - DNA, 19 bp, Homo sapiens
  siRNA target sequence for AGL (NM_000028.1,2298-2316).
cctgtttgaggcctttaat

SEQ ID NO: 201683 - DNA, 19 bp, Homo sapiens
  siRNA target sequence for AGL (NM_000028.1,2328-2346).
cacatgccctgtttatgga

SEQ ID NO: 201684 - DNA, 19 bp, Homo sapiens
  siRNA target sequence for AGL (NM_000028.1,2344-2362).
ggatattacgcatgataat

SEQ ID NO: 201685 - DNA, 19 bp, Homo sapiens
  siRNA target sequence for AGL (NM_000028.1,2377-2395).
gcatagatcagcgtatgat

SEQ ID NO: 201686 - DNA, 19 bp, Homo sapiens
  siRNA target sequence for AGL (NM_000028.1,2393-2411).
gatgctcttccaagtacta

SEQ ID NO: 201687 - DNA, 19 bp, Homo sapiens
  siRNA target sequence for AGL (NM_000028.1,2445-2463).
gtacaagaggctatgatga

SEQ ID NO: 201688 - DNA, 19 bp, Homo sapiens
  siRNA target sequence for AGL (NM_000028.1,2451-2469).
gaggctatgatgaattagt

SEQ ID NO: 201689 - DNA, 19 bp, Homo sapiens
  siRNA target sequence for AGL (NM_000028.1,2498-2516).
gaacggttttacactaagt

SEQ ID NO: 201690 - DNA, 19 bp, Homo sapiens
  siRNA target sequence for AGL (NM_000028.1,2583-2601).
ggtgtgctatcagtaaact

SEQ ID NO: 201691 - DNA, 19 bp, Homo sapiens
  siRNA target sequence for AGL (NM_000028.1,2584-2602).
gtgtgctatcagtaaactt

SEQ ID NO: 201692 - DNA, 19 bp, Homo sapiens
  siRNA target sequence for AGL (NM_000028.1,2660-2678).
gacatagtggcagtaacaa

SEQ ID NO: 201693 - DNA, 19 bp, Homo sapiens
  siRNA target sequence for AGL (NM_000028.1,2662-2680).
catagtggcagtaacaaga

SEQ ID NO: 201694 - DNA, 19 bp, Homo sapiens
  siRNA target sequence for AGL (NM_000028.1,2733-2751).
ggaatcccaagacttcatt

SEQ ID NO: 201695 - DNA, 19 bp, Homo sapiens
  siRNA target sequence for AGL (NM_000028.1,2804-2822).
gttcttgaagctagaacta

SEQ ID NO: 201696 - DNA, 19 bp, Homo sapiens
  siRNA target sequence for AGL (NM_000028.1,2810-2828).
gaagctagaactattgaga

SEQ ID NO: 201697 - DNA, 19 bp, Homo sapiens
  siRNA target sequence for AGL (NM_000028.1,2827-2845).
gagaaacacgaaaccttat

SEQ ID NO: 201698 - DNA, 19 bp, Homo sapiens
  siRNA target sequence for AGL (NM_000028.1,2847-2865).
ggaaggatgagaattcaat

SEQ ID NO: 201699 - DNA, 19 bp, Homo sapiens
  siRNA target sequence for AGL (NM_000028.1,2898-2916).
gagaacatattcagcttaa

SEQ ID NO: 201700 - DNA, 19 bp, Homo sapiens
  siRNA target sequence for AGL (NM_000028.1,2903-2921).
catattcagcttaatgaaa

SEQ ID NO: 201701 - DNA, 19 bp, Homo sapiens
  siRNA target sequence for AGL (NM_000028.1,2911-2929).
gcttaatgaaagtaaaatt

SEQ ID NO: 201702 - DNA, 19 bp, Homo sapiens
  siRNA target sequence for AGL (NM_000028.1,2952-2970).
caaaagggcccaatgaata

SEQ ID NO: 201703 - DNA, 19 bp, Homo sapiens
  siRNA target sequence for AGL (NM_000028.1,2959-2977).
gcccaatgaatatattcaa

SEQ ID NO: 201704 - DNA, 19 bp, Homo sapiens
  siRNA target sequence for AGL (NM_000028.1,3000-3018).
ctccaggaagtgttattat

SEQ ID NO: 201705 - DNA, 19 bp, Homo sapiens
  siRNA target sequence for AGL (NM_000028.1,3045-3063).
cacaagtcgctgttggaat

SEQ ID NO: 201706 - DNA, 19 bp, Homo sapiens
  siRNA target sequence for AGL (NM_000028.1,3083-3101).
caattcagtcctcacttta

SEQ ID NO: 201707 - DNA, 19 bp, Homo sapiens
  siRNA target sequence for AGL (NM_000028.1,3109-3127).
cagcctagctgttgacaat

SEQ ID NO: 201708 - DNA, 19 bp, Homo sapiens
  siRNA target sequence for AGL (NM_000028.1,3122-3140).
gacaatgcagatcctatat

SEQ ID NO: 201709 - DNA, 19 bp, Homo sapiens
  siRNA target sequence for AGL (NM_000028.1,3128-3146).
gcagatcctatattaaaaa

SEQ ID NO: 201710 - DNA, 19 bp, Homo sapiens
  siRNA target sequence for AGL (NM_000028.1,3177-3195).
ctttggctgagctaaatca

SEQ ID NO: 201711 - DNA, 19 bp, Homo sapiens
  siRNA target sequence for AGL (NM_000028.1,3185-3203).
gagctaaatcagatccttt

SEQ ID NO: 201712 - DNA, 19 bp, Homo sapiens
  siRNA target sequence for AGL (NM_000028.1,3196-3214).
gatcctttaccgatgtgaa

SEQ ID NO: 201713 - DNA, 19 bp, Homo sapiens
  siRNA target sequence for AGL (NM_000028.1,3199-3217).
cctttaccgatgtgaatca

SEQ ID NO: 201714 - DNA, 19 bp, Homo sapiens
  siRNA target sequence for AGL (NM_000028.1,3233-3251).
ggtggagggtgctatgaca

SEQ ID NO: 201715 - DNA, 19 bp, Homo sapiens
  siRNA target sequence for AGL (NM_000028.1,3239-3257).
gggtgctatgacataccaa

SEQ ID NO: 201716 - DNA, 19 bp, Homo sapiens
  siRNA target sequence for AGL (NM_000028.1,3240-3258).
ggtgctatgacataccaaa

SEQ ID NO: 201717 - DNA, 19 bp, Homo sapiens
  siRNA target sequence for AGL (NM_000028.1,3259-3277).
ctggtcagcccttaaatat

SEQ ID NO: 201718 - DNA, 19 bp, Homo sapiens
  siRNA target sequence for AGL (NM_000028.1,3262-3280).
gtcagcccttaaatatgca

SEQ ID NO: 201719 - DNA, 19 bp, Homo sapiens
  siRNA target sequence for AGL (NM_000028.1,3279-3297).
caggtcttcaaggtttaat

SEQ ID NO: 201720 - DNA, 19 bp, Homo sapiens
  siRNA target sequence for AGL (NM_000028.1,3287-3305).
caaggtttaatgtctgtat

SEQ ID NO: 201721 - DNA, 19 bp, Homo sapiens
  siRNA target sequence for AGL (NM_000028.1,3298-3316).
gtctgtattggcagaaata

SEQ ID NO: 201722 - DNA, 19 bp, Homo sapiens
  siRNA target sequence for AGL (NM_000028.1,3329-3347).
gacttggggcatccttttt

SEQ ID NO: 201723 - DNA, 19 bp, Homo sapiens
  siRNA target sequence for AGL (NM_000028.1,3334-3352).
ggggcatcctttttgtaat

SEQ ID NO: 201724 - DNA, 19 bp, Homo sapiens
  siRNA target sequence for AGL (NM_000028.1,3336-3354).
ggcatcctttttgtaataa

SEQ ID NO: 201725 - DNA, 19 bp, Homo sapiens
  siRNA target sequence for AGL (NM_000028.1,3338-3356).
catcctttttgtaataatt

SEQ ID NO: 201726 - DNA, 19 bp, Homo sapiens
  siRNA target sequence for AGL (NM_000028.1,3341-3359).
cctttttgtaataatttga

SEQ ID NO: 201727 - DNA, 19 bp, Homo sapiens
  siRNA target sequence for AGL (NM_000028.1,3363-3381).
ctggagattggatgattga

SEQ ID NO: 201728 - DNA, 19 bp, Homo sapiens
  siRNA target sequence for AGL (NM_000028.1,3366-3384).
gagattggatgattgacta

SEQ ID NO: 201729 - DNA, 19 bp, Homo sapiens
  siRNA target sequence for AGL (NM_000028.1,3388-3406).
cagtaaccggcttatttca

SEQ ID NO: 201730 - DNA, 19 bp, Homo sapiens
  siRNA target sequence for AGL (NM_000028.1,3422-3440).
gctgaagttggtaaatggt

SEQ ID NO: 201731 - DNA, 19 bp, Homo sapiens
  siRNA target sequence for AGL (NM_000028.1,3438-3456).
ggttgcaggctatgttctt

SEQ ID NO: 201732 - DNA, 19 bp, Homo sapiens
  siRNA target sequence for AGL (NM_000028.1,3466-3484).
gcagatcccacgttacctt

SEQ ID NO: 201733 - DNA, 19 bp, Homo sapiens
  siRNA target sequence for AGL (NM_000028.1,3467-3485).
cagatcccacgttacctta

SEQ ID NO: 201734 - DNA, 19 bp, Homo sapiens
  siRNA target sequence for AGL (NM_000028.1,3663-3681).
ccctaatggatgtacctta

SEQ ID NO: 201735 - DNA, 19 bp, Homo sapiens
  siRNA target sequence for AGL (NM_000028.1,3664-3682).
cctaatggatgtaccttat

SEQ ID NO: 201736 - DNA, 19 bp, Homo sapiens
  siRNA target sequence for AGL (NM_000028.1,3671-3689).
gatgtaccttataggttaa

SEQ ID NO: 201737 - DNA, 19 bp, Homo sapiens
  siRNA target sequence for AGL (NM_000028.1,3771-3789).
gctggggaagggatacttt

SEQ ID NO: 201738 - DNA, 19 bp, Homo sapiens
  siRNA target sequence for AGL (NM_000028.1,3814-3832).
gattactggacgctatgta

SEQ ID NO: 201739 - DNA, 19 bp, Homo sapiens
  siRNA target sequence for AGL (NM_000028.1,3830-3848).
gtagaagccaggaatatta

SEQ ID NO: 201740 - DNA, 19 bp, Homo sapiens
  siRNA target sequence for AGL (NM_000028.1,3874-3892).
gcatggtctcattcctaat

SEQ ID NO: 201741 - DNA, 19 bp, Homo sapiens
  siRNA target sequence for AGL (NM_000028.1,3879-3897).
gtctcattcctaatctact

SEQ ID NO: 201742 - DNA, 19 bp, Homo sapiens
  siRNA target sequence for AGL (NM_000028.1,3953-3971).
cagtgtatccaggattact

SEQ ID NO: 201743 - DNA, 19 bp, Homo sapiens
  siRNA target sequence for AGL (NM_000028.1,3964-3982).
ggattactgtaaaatggtt

SEQ ID NO: 201744 - DNA, 19 bp, Homo sapiens
  siRNA target sequence for AGL (NM_000028.1,3970-3988).
ctgtaaaatggttccaaat

SEQ ID NO: 201745 - DNA, 19 bp, Homo sapiens
  siRNA target sequence for AGL (NM_000028.1,4024-4042).
gtatcctacagatgattct

SEQ ID NO: 201746 - DNA, 19 bp, Homo sapiens
  siRNA target sequence for AGL (NM_000028.1,4062-4080).
cactggatcagccattgtt

SEQ ID NO: 201747 - DNA, 19 bp, Homo sapiens
  siRNA target sequence for AGL (NM_000028.1,4072-4090).
gccattgtttgaagtcata

SEQ ID NO: 201748 - DNA, 19 bp, Homo sapiens
  siRNA target sequence for AGL (NM_000028.1,4109-4127).
cacatgcagggcatacagt

SEQ ID NO: 201749 - DNA, 19 bp, Homo sapiens
  siRNA target sequence for AGL (NM_000028.1,4146-4164).
gtccccagatagatcgaaa

SEQ ID NO: 201750 - DNA, 19 bp, Homo sapiens
  siRNA target sequence for AGL (NM_000028.1,4149-4167).
cccagatagatcgaaacat

SEQ ID NO: 201751 - DNA, 19 bp, Homo sapiens
  siRNA target sequence for AGL (NM_000028.1,4151-4169).
cagatagatcgaaacatga

SEQ ID NO: 201752 - DNA, 19 bp, Homo sapiens
  siRNA target sequence for AGL (NM_000028.1,4168-4186).
gaaggacgaaggttttaat

SEQ ID NO: 201753 - DNA, 19 bp, Homo sapiens
  siRNA target sequence for AGL (NM_000028.1,4361-4379).
cgctggttgctggaattat

SEQ ID NO: 201754 - DNA, 19 bp, Homo sapiens
  siRNA target sequence for AGL (NM_000028.1,4365-4383).
ggttgctggaattatccaa

SEQ ID NO: 201755 - DNA, 19 bp, Homo sapiens
  siRNA target sequence for AGL (NM_000028.1,4503-4521).
ccgaagacccttcagattt

SEQ ID NO: 201756 - DNA, 19 bp, Homo sapiens
  siRNA target sequence for AGL (NM_000028.1,4504-4522).
cgaagacccttcagattta

SEQ ID NO: 201757 - DNA, 19 bp, Homo sapiens
  siRNA target sequence for AGL (NM_000028.1,4549-4567).
caaacgtggcatatacaaa

SEQ ID NO: 201758 - DNA, 19 bp, Homo sapiens
  siRNA target sequence for AGL (NM_000028.1,4609-4627).
caggcctaattttaccata

SEQ ID NO: 201759 - DNA, 19 bp, Homo sapiens
  siRNA target sequence for AGL (NM_000028.1,4613-4631).
cctaattttaccatagcaa

SEQ ID NO: 201760 - DNA, 19 bp, Homo sapiens
  siRNA target sequence for AGL (NM_000028.1,4706-4724).
ggtccccttggcatgaaaa

SEQ ID NO: 201761 - DNA, 19 bp, Homo sapiens
  siRNA target sequence for AGL (NM_000028.1,4730-4748).
gatccagatgatatggttt

SEQ ID NO: 201762 - DNA, 19 bp, Homo sapiens
  siRNA target sequence for AGL (NM_000028.1,4733-4751).
ccagatgatatggtttact

SEQ ID NO: 201763 - DNA, 19 bp, Homo sapiens
  siRNA target sequence for AGL (NM_000028.1,4750-4768).
ctgtggaatttatgacaat

SEQ ID NO: 201764 - DNA, 19 bp, Homo sapiens
  siRNA target sequence for AGL (NM_000028.1,4755-4773).
gaatttatgacaatgcatt

SEQ ID NO: 201765 - DNA, 19 bp, Homo sapiens
  siRNA target sequence for AGL (NM_000028.1,4777-4795).
caatgacaactacaatctt

SEQ ID NO: 201766 - DNA, 19 bp, Homo sapiens
  siRNA target sequence for AGL (NM_000028.1,4783-4801).
caactacaatcttgctaaa

SEQ ID NO: 201767 - DNA, 19 bp, Homo sapiens
  siRNA target sequence for AGL (NM_000028.1,4853-4871).
cttcgtgcaaaattatatt

SEQ ID NO: 201768 - DNA, 19 bp, Homo sapiens
  siRNA target sequence for AGL (NM_000028.1,4891-4909).
ggagactactgcaaagact

SEQ ID NO: 201769 - DNA, 19 bp, Homo sapiens
  siRNA target sequence for AGL (NM_000028.1,4906-4924).
gactatagttttggttaaa

SEQ ID NO: 201770 - DNA, 19 bp, Homo sapiens
  siRNA target sequence for AGL (NM_000028.1,4935-4953).
cccgacattatgttcatct

SEQ ID NO: 201771 - DNA, 19 bp, Homo sapiens
  siRNA target sequence for AGL (NM_000028.1,4936-4954).
ccgacattatgttcatctt

SEQ ID NO: 201772 - DNA, 19 bp, Homo sapiens
  siRNA target sequence for AGL (NM_000028.1,5034-5052).
cctggtcaattgctactat

SEQ ID NO: 201773 - DNA, 19 bp, Homo sapiens
  siRNA target sequence for AGL (NM_000028.1,5035-5053).
ctggtcaattgctactatt

SEQ ID NO: 201774 - DNA, 19 bp, Homo sapiens
  siRNA target sequence for AGL (NM_000028.1,5038-5056).
gtcaattgctactattctt

SEQ ID NO: 201775 - DNA, 19 bp, Homo sapiens
  siRNA target sequence for AGL (NM_000028.1,5049-5067).
ctattcttgagacacttta

SEQ ID NO: 201776 - DNA, 19 bp, Homo sapiens
  siRNA target sequence for AGL (NM_000028.1,5054-5072).
cttgagacactttatgatt

SEQ ID NO: 201777 - DNA, 19 bp, Homo sapiens
  siRNA target sequence for KIAA1128 (NM_018999.1,569-587).
cccggcagccagaagtact

SEQ ID NO: 201778 - DNA, 19 bp, Homo sapiens
  siRNA target sequence for KIAA1128 (NM_018999.1,573-591).
gcagccagaagtactcaat

SEQ ID NO: 201779 - DNA, 19 bp, Homo sapiens
  siRNA target sequence for KIAA1128 (NM_018999.1,598-616).
gaacatttggggtatggat

SEQ ID NO: 201780 - DNA, 19 bp, Homo sapiens
  siRNA target sequence for KIAA1128 (NM_018999.1,601-619).
catttggggtatggattta

SEQ ID NO: 201781 - DNA, 19 bp, Homo sapiens
  siRNA target sequence for KIAA1128 (NM_018999.1,664-682).
ggcccaggtgtaacttcta

SEQ ID NO: 201782 - DNA, 19 bp, Homo sapiens
  siRNA target sequence for KIAA1128 (NM_018999.1,680-698).
ctactttaggttatagaat

SEQ ID NO: 201783 - DNA, 19 bp, Homo sapiens
  siRNA target sequence for KIAA1128 (NM_018999.1,703-721).
catccctctctactgaaat

SEQ ID NO: 201784 - DNA, 19 bp, Homo sapiens
  siRNA target sequence for KIAA1128 (NM_018999.1,733-751).
ccattttctgggactatga

SEQ ID NO: 201785 - DNA, 19 bp, Homo sapiens
  siRNA target sequence for KIAA1128 (NM_018999.1,746-764).
ctatgacagttgatggaaa

SEQ ID NO: 201786 - DNA, 19 bp, Homo sapiens
  siRNA target sequence for KIAA1128 (NM_018999.1,830-848).
ctaataaggaccaagaact

SEQ ID NO: 201787 - DNA, 19 bp, Homo sapiens
  siRNA target sequence for KIAA1128 (NM_018999.1,909-927).
gagatacctgagtgatgat

SEQ ID NO: 201788 - DNA, 19 bp, Homo sapiens
  siRNA target sequence for KIAA1128 (NM_018999.1,911-929).
gatacctgagtgatgatgt

SEQ ID NO: 201789 - DNA, 19 bp, Homo sapiens
  siRNA target sequence for KIAA1128 (NM_018999.1,954-972).
gtcatcttctgataagaat

SEQ ID NO: 201790 - DNA, 19 bp, Homo sapiens
  siRNA target sequence for KIAA1128 (NM_018999.1,956-974).
catcttctgataagaatga

SEQ ID NO: 201791 - DNA, 19 bp, Homo sapiens
  siRNA target sequence for KIAA1128 (NM_018999.1,959-977).
cttctgataagaatgattt

SEQ ID NO: 201792 - DNA, 19 bp, Homo sapiens
  siRNA target sequence for KIAA1128 (NM_018999.1,992-1010).
gtgatgattttatagatat

SEQ ID NO: 201793 - DNA, 19 bp, Homo sapiens
  siRNA target sequence for KIAA1128 (NM_018999.1,1078-1096).
gggccaccacaggatatgt

SEQ ID NO: 201794 - DNA, 19 bp, Homo sapiens
  siRNA target sequence for KIAA1128 (NM_018999.1,1079-1097).
ggccaccacaggatatgtt

SEQ ID NO: 201795 - DNA, 19 bp, Homo sapiens
  siRNA target sequence for KIAA1128 (NM_018999.1,1082-1100).
caccacaggatatgtttga

SEQ ID NO: 201796 - DNA, 19 bp, Homo sapiens
  siRNA target sequence for KIAA1128 (NM_018999.1,1159-1177).
gtctctgacaggagtgaat

SEQ ID NO: 201797 - DNA, 19 bp, Homo sapiens
  siRNA target sequence for KIAA1128 (NM_018999.1,1161-1179).
ctctgacaggagtgaatgt

SEQ ID NO: 201798 - DNA, 19 bp, Homo sapiens
  siRNA target sequence for KIAA1128 (NM_018999.1,1169-1187).
ggagtgaatgtacaaaaca

SEQ ID NO: 201799 - DNA, 19 bp, Homo sapiens
  siRNA target sequence for KIAA1128 (NM_018999.1,1170-1188).
gagtgaatgtacaaaacat

SEQ ID NO: 201800 - DNA, 19 bp, Homo sapiens
  siRNA target sequence for KIAA1128 (NM_018999.1,1186-1204).
catacttctgggaataatt

SEQ ID NO: 201801 - DNA, 19 bp, Homo sapiens
  siRNA target sequence for KIAA1128 (NM_018999.1,1227-1245).
cagagctggttcttcgttt

SEQ ID NO: 201802 - DNA, 19 bp, Homo sapiens
  siRNA target sequence for KIAA1128 (NM_018999.1,1232-1250).
ctggttcttcgtttgaact

SEQ ID NO: 201803 - DNA, 19 bp, Homo sapiens
  siRNA target sequence for KIAA1128 (NM_018999.1,1246-1264).
gaactctctccatctgata

SEQ ID NO: 201804 - DNA, 19 bp, Homo sapiens
  siRNA target sequence for KIAA1128 (NM_018999.1,1265-1283).
gctctgatggaacatacat

SEQ ID NO: 201805 - DNA, 19 bp, Homo sapiens
  siRNA target sequence for KIAA1128 (NM_018999.1,1277-1295).
catacatgtgggatgaaga

SEQ ID NO: 201806 - DNA, 19 bp, Homo sapiens
  siRNA target sequence for KIAA1128 (NM_018999.1,1297-1315).
ggcttggaacccattggaa

SEQ ID NO: 201807 - DNA, 19 bp, Homo sapiens
  siRNA target sequence for KIAA1128 (NM_018999.1,1298-1316).
gcttggaacccattggaaa

SEQ ID NO: 201808 - DNA, 19 bp, Homo sapiens
  siRNA target sequence for KIAA1128 (NM_018999.1,1324-1342).
ccagttgggagctatgagt

SEQ ID NO: 201809 - DNA, 19 bp, Homo sapiens
  siRNA target sequence for KIAA1128 (NM_018999.1,1398-1416).
ggatgatgatcttatgctt

SEQ ID NO: 201810 - DNA, 19 bp, Homo sapiens
  siRNA target sequence for KIAA1128 (NM_018999.1,1453-1471).
gtggagtgtgacaatatga

SEQ ID NO: 201811 - DNA, 19 bp, Homo sapiens
  siRNA target sequence for KIAA1128 (NM_018999.1,1482-1500).
ccgaccagacagaaatgtt

SEQ ID NO: 201812 - DNA, 19 bp, Homo sapiens
  siRNA target sequence for KIAA1128 (NM_018999.1,1544-1562).
ggagtggacaggagcatta

SEQ ID NO: 201813 - DNA, 19 bp, Homo sapiens
  siRNA target sequence for KIAA1128 (NM_018999.1,1584-1602).
ctatcatcaccatggaaaa

SEQ ID NO: 201814 - DNA, 19 bp, Homo sapiens
  siRNA target sequence for KIAA1128 (NM_018999.1,1618-1636).
ggctctccctatagagaat

SEQ ID NO: 201815 - DNA, 19 bp, Homo sapiens
  siRNA target sequence for KIAA1128 (NM_018999.1,1620-1638).
ctctccctatagagaatct

SEQ ID NO: 201816 - DNA, 19 bp, Homo sapiens
  siRNA target sequence for KIAA1128 (NM_018999.1,1689-1707).
gaagatgtttgttgatgta

SEQ ID NO: 201817 - DNA, 19 bp, Homo sapiens
  siRNA target sequence for KIAA1128 (NM_018999.1,1758-1776).
ggattgcactgctgtaaaa

SEQ ID NO: 201818 - DNA, 19 bp, Homo sapiens
  siRNA target sequence for KIAA1128 (NM_018999.1,1759-1777).
gattgcactgctgtaaaaa

SEQ ID NO: 201819 - DNA, 19 bp, Homo sapiens
  siRNA target sequence for KIAA1128 (NM_018999.1,1879-1897).
ggtgataaagtatataaga

SEQ ID NO: 201820 - DNA, 19 bp, Homo sapiens
  siRNA target sequence for KIAA1128 (NM_018999.1,1880-1898).
gtgataaagtatataagaa

SEQ ID NO: 201821 - DNA, 19 bp, Homo sapiens
  siRNA target sequence for KIAA1128 (NM_018999.1,2019-2037).
ggaaaaatgcacttatgct

SEQ ID NO: 201822 - DNA, 19 bp, Homo sapiens
  siRNA target sequence for KIAA1128 (NM_018999.1,2149-2167).
cgcagacagacctcaagta

SEQ ID NO: 201823 - DNA, 19 bp, Homo sapiens
  siRNA target sequence for KIAA1128 (NM_018999.1,2206-2224).
cacccagggaaaactaata

SEQ ID NO: 201824 - DNA, 19 bp, Homo sapiens
  siRNA target sequence for KIAA1128 (NM_018999.1,2208-2226).
cccagggaaaactaataaa

SEQ ID NO: 201825 - DNA, 19 bp, Homo sapiens
  siRNA target sequence for NEU1 (NM_000434.2,410-428).
gctgaggcgaggaaaatgt

SEQ ID NO: 201826 - DNA, 19 bp, Homo sapiens
  siRNA target sequence for NEU1 (NM_000434.2,495-513).
ctcctacagcgttcattgt

SEQ ID NO: 201827 - DNA, 19 bp, Homo sapiens
  siRNA target sequence for NEU1 (NM_000434.2,497-515).
cctacagcgttcattgtca

SEQ ID NO: 201828 - DNA, 19 bp, Homo sapiens
  siRNA target sequence for NEU1 (NM_000434.2,498-516).
ctacagcgttcattgtcaa

SEQ ID NO: 201829 - DNA, 19 bp, Homo sapiens
  siRNA target sequence for NEU1 (NM_000434.2,571-589).
gacaggagtagtatttctt

SEQ ID NO: 201830 - DNA, 19 bp, Homo sapiens
  siRNA target sequence for NEU1 (NM_000434.2,629-647).
gcctctaccatgttggtat

SEQ ID NO: 201831 - DNA, 19 bp, Homo sapiens
  siRNA target sequence for NEU1 (NM_000434.2,726-744).
gaccgggctctggtattca

SEQ ID NO: 201832 - DNA, 19 bp, Homo sapiens
  siRNA target sequence for NEU1 (NM_000434.2,819-837).
gtctcctcagcgatgatca

SEQ ID NO: 201833 - DNA, 19 bp, Homo sapiens
  siRNA target sequence for NEU1 (NM_000434.2,965-983).
gcccgaaaccagaacaact

SEQ ID NO: 201834 - DNA, 19 bp, Homo sapiens
  siRNA target sequence for NEU1 (NM_000434.2,1015-1033).
ctatgatgcctgtgataca

SEQ ID NO: 201835 - DNA, 19 bp, Homo sapiens
  siRNA target sequence for NEU1 (NM_000434.2,1019-1037).
gatgcctgtgatacactaa

SEQ ID NO: 201836 - DNA, 19 bp, Homo sapiens
  siRNA target sequence for NEU1 (NM_000434.2,1104-1122).
ccagctccggcattgtctt

SEQ ID NO: 201837 - DNA, 19 bp, Homo sapiens
  siRNA target sequence for NEU1 (NM_000434.2,1297-1315).
ctacgtcctgtatgagaaa

SEQ ID NO: 201838 - DNA, 19 bp, Homo sapiens
  siRNA target sequence for NEU1 (NM_000434.2,1348-1366).
ggccaaaatcagtgtctat

SEQ ID NO: 201839 - DNA, 19 bp, Homo sapiens
  siRNA target sequence for NEU2 (NM_005383.1,255-273).
gaacccatgccccttgtat

SEQ ID NO: 201840 - DNA, 19 bp, Homo sapiens
  siRNA target sequence for NEU2 (NM_005383.1,534-552).
ctacgcctaccggaaactt

SEQ ID NO: 201841 - DNA, 19 bp, Homo sapiens
  siRNA target sequence for NEU2 (NM_005383.1,746-764).
ccaatgacgggcttgattt

SEQ ID NO: 201842 - DNA, 19 bp, Homo sapiens
  siRNA target sequence for NEU2 (NM_005383.1,1057-1075).
ctgtacgaagccaatgatt

SEQ ID NO: 201843 - DNA, 19 bp, Homo sapiens
  siRNA target sequence for NEU2 (NM_005383.1,1072-1090).
gattacgaggagattgtct

SEQ ID NO: 201844 - DNA, 19 bp, Homo sapiens
  siRNA target sequence for NEU2 (NM_005383.1,1078-1096).
gaggagattgtctttctca

SEQ ID NO: 201845 - DNA, 19 bp, Homo sapiens
  siRNA target sequence for NEU3 (NM_006656.4,522-540).
cgagctacagaccaatata

SEQ ID NO: 201846 - DNA, 19 bp, Homo sapiens
  siRNA target sequence for NEU3 (NM_006656.4,525-543).
gctacagaccaatataaga

SEQ ID NO: 201847 - DNA, 19 bp, Homo sapiens
  siRNA target sequence for NEU3 (NM_006656.4,838-856).
gtcctccgtctcagttgtt

SEQ ID NO: 201848 - DNA, 19 bp, Homo sapiens
  siRNA target sequence for NEU3 (NM_006656.4,915-933).
cgggcttcggcgaatgaga

SEQ ID NO: 201849 - DNA, 19 bp, Homo sapiens
  siRNA target sequence for NEU3 (NM_006656.4,1078-1096).
gatgacagagggattacct

SEQ ID NO: 201850 - DNA, 19 bp, Homo sapiens
  siRNA target sequence for NEU3 (NM_006656.4,1359-1377).
cacagagcgtcaacagatt

SEQ ID NO: 201851 - DNA, 19 bp, Homo sapiens
  siRNA target sequence for NEU3 (NM_006656.4,1361-1379).
cagagcgtcaacagattgt

SEQ ID NO: 201852 - DNA, 19 bp, Homo sapiens
  siRNA target sequence for NEU3 (NM_006656.4,1363-1381).
gagcgtcaacagattgtgt

SEQ ID NO: 201853 - DNA, 19 bp, Homo sapiens
  siRNA target sequence for NEU3 (NM_006656.4,1399-1417).
cgcctttgcttcatctaca

SEQ ID NO: 201854 - DNA, 19 bp, Homo sapiens
  siRNA target sequence for NEU3 (NM_006656.4,1555-1573).
cctgcgtatacctactaca

SEQ ID NO: 201855 - DNA, 19 bp, Homo sapiens
  siRNA target sequence for NEU3 (NM_006656.4,1556-1574).
ctgcgtatacctactacat

SEQ ID NO: 201856 - DNA, 19 bp, Homo sapiens
  siRNA target sequence for NEU3 (NM_006656.4,1597-1615).
cagctaccatgtaaaacca

SEQ ID NO: 201857 - DNA, 19 bp, Homo sapiens
  siRNA target sequence for NEU3 (NM_006656.4,1618-1636).
cctcattctctgatgatct

SEQ ID NO: 201858 - DNA, 19 bp, Homo sapiens
  siRNA target sequence for NEU3 (NM_006656.4,1621-1639).
cattctctgatgatctaca

SEQ ID NO: 201859 - DNA, 19 bp, Homo sapiens
  siRNA target sequence for NEU3 (NM_006656.4,1675-1693).
ctcattaggcccatggtta

SEQ ID NO: 201860 - DNA, 19 bp, Homo sapiens
  siRNA target sequence for NEU3 (NM_006656.4,1684-1702).
cccatggttacagtagaat

SEQ ID NO: 201861 - DNA, 19 bp, Homo sapiens
  siRNA target sequence for NEU3 (NM_006656.4,1686-1704).
catggttacagtagaatgt

SEQ ID NO: 201862 - DNA, 19 bp, Homo sapiens
  siRNA target sequence for NEU3 (NM_006656.4,1987-2005).
gctggaacaccgtcagaat

SEQ ID NO: 201863 - DNA, 19 bp, Homo sapiens
  siRNA target sequence for NEU3 (NM_006656.4,1990-2008).
ggaacaccgtcagaatcat

SEQ ID NO: 201864 - DNA, 19 bp, Homo sapiens
  siRNA target sequence for NEU3 (NM_006656.4,2000-2018).
cagaatcatggctcttgta

SEQ ID NO: 201865 - DNA, 19 bp, Homo sapiens
  siRNA target sequence for NEU3 (NM_006656.4,2045-2063).
gggttgacctaggtatcta

SEQ ID NO: 201866 - DNA, 19 bp, Homo sapiens
  siRNA target sequence for NEU3 (NM_006656.4,2046-2064).
ggttgacctaggtatctat

SEQ ID NO: 201867 - DNA, 19 bp, Homo sapiens
  siRNA target sequence for NEU3 (NM_006656.4,2050-2068).
gacctaggtatctatctca

SEQ ID NO: 201868 - DNA, 19 bp, Homo sapiens
  siRNA target sequence for NEU3 (NM_006656.4,2164-2182).
ggcttgtttgggtgtttgt

SEQ ID NO: 201869 - DNA, 19 bp, Homo sapiens
  siRNA target sequence for NEU3 (NM_006656.4,2219-2237).
ccttccgcctgtttacaca

SEQ ID NO: 201870 - DNA, 19 bp, Homo sapiens
  siRNA target sequence for NEU3 (NM_006656.4,2285-2303).
ggaacccaagccaattcaa

SEQ ID NO: 201871 - DNA, 19 bp, Homo sapiens
  siRNA target sequence for NEU3 (NM_006656.4,2286-2304).
gaacccaagccaattcaaa

SEQ ID NO: 201872 - DNA, 19 bp, Homo sapiens
  siRNA target sequence for FLJ90231 (NM_173581.1,93-111).
ggtggaaccaactttggtt

SEQ ID NO: 201873 - DNA, 19 bp, Homo sapiens
  siRNA target sequence for FLJ90231 (NM_173581.1,94-112).
gtggaaccaactttggttt

SEQ ID NO: 201874 - DNA, 19 bp, Homo sapiens
  siRNA target sequence for FLJ90231 (NM_173581.1,213-231).
ctgaagcttcaaaaactct

SEQ ID NO: 201875 - DNA, 19 bp, Homo sapiens
  siRNA target sequence for FLJ90231 (NM_173581.1,257-275).
gccccgagtacccaaactt

SEQ ID NO: 201876 - DNA, 19 bp, Homo sapiens
  siRNA target sequence for FLJ90231 (NM_173581.1,329-347).
ggacgccctatcctactta

SEQ ID NO: 201877 - DNA, 19 bp, Homo sapiens
  siRNA target sequence for FLJ90231 (NM_173581.1,330-348).
gacgccctatcctacttaa

SEQ ID NO: 201878 - DNA, 19 bp, Homo sapiens
  siRNA target sequence for FLJ90231 (NM_173581.1,332-350).
cgccctatcctacttaaat

SEQ ID NO: 201879 - DNA, 19 bp, Homo sapiens
  siRNA target sequence for FLJ90231 (NM_173581.1,334-352).
ccctatcctacttaaatga

SEQ ID NO: 201880 - DNA, 19 bp, Homo sapiens
  siRNA target sequence for FLJ90231 (NM_173581.1,384-402).
gagaaccttcccataaaca

SEQ ID NO: 201881 - DNA, 19 bp, Homo sapiens
  siRNA target sequence for FLJ90231 (NM_173581.1,386-404).
gaaccttcccataaacaat

SEQ ID NO: 201882 - DNA, 19 bp, Homo sapiens
  siRNA target sequence for FLJ90231 (NM_173581.1,584-602).
gatcctggtggagaatcaa

SEQ ID NO: 201883 - DNA, 19 bp, Homo sapiens
  siRNA target sequence for FLJ90231 (NM_173581.1,596-614).
gaatcaaggacgagtcaat

SEQ ID NO: 201884 - DNA, 19 bp, Homo sapiens
  siRNA target sequence for FLJ90231 (NM_173581.1,600-618).
caaggacgagtcaattttt

SEQ ID NO: 201885 - DNA, 19 bp, Homo sapiens
  siRNA target sequence for FLJ90231 (NM_173581.1,603-621).
ggacgagtcaatttttcat

SEQ ID NO: 201886 - DNA, 19 bp, Homo sapiens
  siRNA target sequence for FLJ90231 (NM_173581.1,869-887).
catcaatggacgtaacctt

SEQ ID NO: 201887 - DNA, 19 bp, Homo sapiens
  siRNA target sequence for FLJ90231 (NM_173581.1,879-897).
cgtaaccttgggcgatatt

SEQ ID NO: 201888 - DNA, 19 bp, Homo sapiens
  siRNA target sequence for FLJ90231 (NM_173581.1,884-902).
ccttgggcgatattggaat

SEQ ID NO: 201889 - DNA, 19 bp, Homo sapiens
  siRNA target sequence for FLJ90231 (NM_173581.1,885-903).
cttgggcgatattggaata

SEQ ID NO: 201890 - DNA, 19 bp, Homo sapiens
  siRNA target sequence for FLJ90231 (NM_173581.1,954-972).
gacaatgaggtcatcttgt

SEQ ID NO: 201891 - DNA, 19 bp, Homo sapiens
  siRNA target sequence for GLB1 (NM_000404.1,207-225).
ctacatctcaggaagcatt

SEQ ID NO: 201892 - DNA, 19 bp, Homo sapiens
  siRNA target sequence for GLB1 (NM_000404.1,306-324).
gtatgtgccctggaacttt

SEQ ID NO: 201893 - DNA, 19 bp, Homo sapiens
  siRNA target sequence for GLB1 (NM_000404.1,503-521).
gctcctccgacccagatta

SEQ ID NO: 201894 - DNA, 19 bp, Homo sapiens
  siRNA target sequence for GLB1 (NM_000404.1,585-603).
gaatggagggccagttata

SEQ ID NO: 201895 - DNA, 19 bp, Homo sapiens
  siRNA target sequence for GLB1 (NM_000404.1,590-608).
gagggccagttataacagt

SEQ ID NO: 201896 - DNA, 19 bp, Homo sapiens
  siRNA target sequence for GLB1 (NM_000404.1,697-715).
gatgatgtggttctgttta

SEQ ID NO: 201897 - DNA, 19 bp, Homo sapiens
  siRNA target sequence for GLB1 (NM_000404.1,721-739).
gatggagcacataaaacat

SEQ ID NO: 201898 - DNA, 19 bp, Homo sapiens
  siRNA target sequence for GLB1 (NM_000404.1,838-856).
cccaaaggacccttgatca

SEQ ID NO: 201899 - DNA, 19 bp, Homo sapiens
  siRNA target sequence for GLB1 (NM_000404.1,839-857).
ccaaaggacccttgatcaa

SEQ ID NO: 201900 - DNA, 19 bp, Homo sapiens
  siRNA target sequence for GLB1 (NM_000404.1,840-858).
caaaggacccttgatcaat

SEQ ID NO: 201901 - DNA, 19 bp, Homo sapiens
  siRNA target sequence for GLB1 (NM_000404.1,847-865).
cccttgatcaattctgaat

SEQ ID NO: 201902 - DNA, 19 bp, Homo sapiens
  siRNA target sequence for GLB1 (NM_000404.1,848-866).
ccttgatcaattctgaatt

SEQ ID NO: 201903 - DNA, 19 bp, Homo sapiens
  siRNA target sequence for GLB1 (NM_000404.1,898-916).
cctcactccacaatcaaga

SEQ ID NO: 201904 - DNA, 19 bp, Homo sapiens
  siRNA target sequence for GLB1 (NM_000404.1,929-947).
cttcctccctctatgatat

SEQ ID NO: 201905 - DNA, 19 bp, Homo sapiens
  siRNA target sequence for GLB1 (NM_000404.1,932-950).
cctccctctatgatatact

SEQ ID NO: 201906 - DNA, 19 bp, Homo sapiens
  siRNA target sequence for GLB1 (NM_000404.1,933-951).
ctccctctatgatatactt

SEQ ID NO: 201907 - DNA, 19 bp, Homo sapiens
  siRNA target sequence for GLB1 (NM_000404.1,959-977).
gggcgagtgtgaacttgta

SEQ ID NO: 201908 - DNA, 19 bp, Homo sapiens
  siRNA target sequence for GLB1 (NM_000404.1,1084-1102).
gacctcactgagaagtatt

SEQ ID NO: 201909 - DNA, 19 bp, Homo sapiens
  siRNA target sequence for GLB1 (NM_000404.1,1086-1104).
cctcactgagaagtatttt

SEQ ID NO: 201910 - DNA, 19 bp, Homo sapiens
  siRNA target sequence for GLB1 (NM_000404.1,1157-1175).
ctccatctacaccaaagtt

SEQ ID NO: 201911 - DNA, 19 bp, Homo sapiens
  siRNA target sequence for GLB1 (NM_000404.1,1163-1181).
ctacaccaaagtttgcata

SEQ ID NO: 201912 - DNA, 19 bp, Homo sapiens
  siRNA target sequence for GLB1 (NM_000404.1,1178-1196).
catatggaaaggtcacttt

SEQ ID NO: 201913 - DNA, 19 bp, Homo sapiens
  siRNA target sequence for GLB1 (NM_000404.1,1240-1258).
ccctctgggcccatcaaaa

SEQ ID NO: 201914 - DNA, 19 bp, Homo sapiens
  siRNA target sequence for GLB1 (NM_000404.1,1248-1266).
gcccatcaaaagcctttat

SEQ ID NO: 201915 - DNA, 19 bp, Homo sapiens
  siRNA target sequence for GLB1 (NM_000404.1,1261-1279).
ctttatcccttgacattta

SEQ ID NO: 201916 - DNA, 19 bp, Homo sapiens
  siRNA target sequence for GLB1 (NM_000404.1,1274-1292).
catttatccaggtgaaaca

SEQ ID NO: 201917 - DNA, 19 bp, Homo sapiens
  siRNA target sequence for GLB1 (NM_000404.1,1377-1395).
ccacgatcgagcatatgtt

SEQ ID NO: 201918 - DNA, 19 bp, Homo sapiens
  siRNA target sequence for GLB1 (NM_000404.1,1438-1456).
gtgatcactctgaacataa

SEQ ID NO: 201919 - DNA, 19 bp, Homo sapiens
  siRNA target sequence for GLB1 (NM_000404.1,1440-1458).
gatcactctgaacataaca

SEQ ID NO: 201920 - DNA, 19 bp, Homo sapiens
  siRNA target sequence for GLB1 (NM_000404.1,1497-1515).
catgggacgtgtgaactat

SEQ ID NO: 201921 - DNA, 19 bp, Homo sapiens
  siRNA target sequence for GLB1 (NM_000404.1,1507-1525).
gtgaactatggtgcatata

SEQ ID NO: 201922 - DNA, 19 bp, Homo sapiens
  siRNA target sequence for GLB1 (NM_000404.1,1516-1534).
ggtgcatatatcaacgatt

SEQ ID NO: 201923 - DNA, 19 bp, Homo sapiens
  siRNA target sequence for GLB1 (NM_000404.1,1519-1537).
gcatatatcaacgatttta

SEQ ID NO: 201924 - DNA, 19 bp, Homo sapiens
  siRNA target sequence for GLB1 (NM_000404.1,1530-1548).
cgattttaagggtttggtt

SEQ ID NO: 201925 - DNA, 19 bp, Homo sapiens
  siRNA target sequence for GLB1 (NM_000404.1,1578-1596).
cacggactggacgatcttt

SEQ ID NO: 201926 - DNA, 19 bp, Homo sapiens
  siRNA target sequence for GLB1 (NM_000404.1,1672-1690).
gcctgggcccacaactcat

SEQ ID NO: 201927 - DNA, 19 bp, Homo sapiens
  siRNA target sequence for GLB1 (NM_000404.1,1681-1699).
cacaactcatccaactaca

SEQ ID NO: 201928 - DNA, 19 bp, Homo sapiens
  siRNA target sequence for GLB1 (NM_000404.1,1805-1823).
ggattaatggctttaacct

SEQ ID NO: 201929 - DNA, 19 bp, Homo sapiens
  siRNA target sequence for GLB1 (NM_000404.1,1806-1824).
gattaatggctttaacctt

SEQ ID NO: 201930 - DNA, 19 bp, Homo sapiens
  siRNA target sequence for GLB1 (NM_000404.1,2019-2037).
ctccaaacctgttgaaaaa

SEQ ID NO: 201931 - DNA, 19 bp, Homo sapiens
  siRNA target sequence for GLB1 (NM_000404.1,2056-2074).
ccgcaaaaaaacaaagatt

SEQ ID NO: 201932 - DNA, 19 bp, Homo sapiens
  siRNA target sequence for LOC112937 (NM_138416.1,496-514).
ccgtcccagcctaggttta

SEQ ID NO: 201933 - DNA, 19 bp, Homo sapiens
  siRNA target sequence for LOC112937 (NM_138416.1,502-520).
cagcctaggtttaattggt

SEQ ID NO: 201934 - DNA, 19 bp, Homo sapiens
  siRNA target sequence for LOC112937 (NM_138416.1,556-574).
gtgggacttggaactgaaa

SEQ ID NO: 201935 - DNA, 19 bp, Homo sapiens
  siRNA target sequence for LOC112937 (NM_138416.1,696-714).
ggcctgtggcttcaatact

SEQ ID NO: 201936 - DNA, 19 bp, Homo sapiens
  siRNA target sequence for LOC112937 (NM_138416.1,1039-1057).
gagtatggctcattcaata

SEQ ID NO: 201937 - DNA, 19 bp, Homo sapiens
  siRNA target sequence for LOC112937 (NM_138416.1,1045-1063).
ggctcattcaataaggata

SEQ ID NO: 201938 - DNA, 19 bp, Homo sapiens
  siRNA target sequence for LOC112937 (NM_138416.1,1046-1064).
gctcattcaataaggataa

SEQ ID NO: 201939 - DNA, 19 bp, Homo sapiens
  siRNA target sequence for LOC112937 (NM_138416.1,1198-1216).
cttcaccaggatactttca

SEQ ID NO: 201940 - DNA, 19 bp, Homo sapiens
  siRNA target sequence for LOC89944 (NM_138342.2,653-671).
ccgaagcagtggaccttta

SEQ ID NO: 201941 - DNA, 19 bp, Homo sapiens
  siRNA target sequence for LOC89944 (NM_138342.2,654-672).
cgaagcagtggacctttat

SEQ ID NO: 201942 - DNA, 19 bp, Homo sapiens
  siRNA target sequence for LOC89944 (NM_138342.2,655-673).
gaagcagtggacctttatt

SEQ ID NO: 201943 - DNA, 19 bp, Homo sapiens
  siRNA target sequence for LOC89944 (NM_138342.2,714-732).
gcgtgggggacctatcatt

SEQ ID NO: 201944 - DNA, 19 bp, Homo sapiens
  siRNA target sequence for LOC89944 (NM_138342.2,883-901).
gtcttggccaccatcaact

SEQ ID NO: 201945 - DNA, 19 bp, Homo sapiens
  siRNA target sequence for LOC89944 (NM_138342.2,1005-1023).
gtggggaggccctcacaat

SEQ ID NO: 201946 - DNA, 19 bp, Homo sapiens
  siRNA target sequence for LOC89944 (NM_138342.2,1007-1025).
ggggaggccctcacaatat

SEQ ID NO: 201947 - DNA, 19 bp, Homo sapiens
  siRNA target sequence for LOC89944 (NM_138342.2,1009-1027).
ggaggccctcacaatatct

SEQ ID NO: 201948 - DNA, 19 bp, Homo sapiens
  siRNA target sequence for LOC89944 (NM_138342.2,1010-1028).
gaggccctcacaatatctt

SEQ ID NO: 201949 - DNA, 19 bp, Homo sapiens
  siRNA target sequence for LOC89944 (NM_138342.2,1136-1154).
ccatgcacttccatgacta

SEQ ID NO: 201950 - DNA, 19 bp, Homo sapiens
  siRNA target sequence for LOC89944 (NM_138342.2,1430-1448).
ccttcgggtacattctcta

SEQ ID NO: 201951 - DNA, 19 bp, Homo sapiens
  siRNA target sequence for LOC89944 (NM_138342.2,1435-1453).
gggtacattctctatgaga

SEQ ID NO: 201952 - DNA, 19 bp, Homo sapiens
  siRNA target sequence for LOC89944 (NM_138342.2,1507-1525).
gtgtttgtgaacacagtat

SEQ ID NO: 201953 - DNA, 19 bp, Homo sapiens
  siRNA target sequence for LOC89944 (NM_138342.2,1542-1560).
ctacaagacaacgaagatt

SEQ ID NO: 201954 - DNA, 19 bp, Homo sapiens
  siRNA target sequence for LOC89944 (NM_138342.2,1650-1668).
gcgcaaaggcttaattgga

SEQ ID NO: 201955 - DNA, 19 bp, Homo sapiens
  siRNA target sequence for LOC89944 (NM_138342.2,1651-1669).
cgcaaaggcttaattggaa

SEQ ID NO: 201956 - DNA, 19 bp, Homo sapiens
  siRNA target sequence for LOC89944 (NM_138342.2,1684-1702).
gattcacccctgaaaaact

SEQ ID NO: 201957 - DNA, 19 bp, Homo sapiens
  siRNA target sequence for LOC89944 (NM_138342.2,1706-1724).
gaatctatagcctggatat

SEQ ID NO: 201958 - DNA, 19 bp, Homo sapiens
  siRNA target sequence for LOC89944 (NM_138342.2,1764-1782).
gagttccctcccagaaaca

SEQ ID NO: 201959 - DNA, 19 bp, Homo sapiens
  siRNA target sequence for LOC89944 (NM_138342.2,2038-2056).
ggcaggaaccagtacatta

SEQ ID NO: 201960 - DNA, 19 bp, Homo sapiens
  siRNA target sequence for GLA (NM_000169.1,196-214).
cactgggagcgcttcatgt

SEQ ID NO: 201961 - DNA, 19 bp, Homo sapiens
  siRNA target sequence for GLA (NM_000169.1,302-320).
ggaaggatgcaggttatga

SEQ ID NO: 201962 - DNA, 19 bp, Homo sapiens
  siRNA target sequence for GLA (NM_000169.1,345-363).
gatggctccccaaagagat

SEQ ID NO: 201963 - DNA, 19 bp, Homo sapiens
  siRNA target sequence for GLA (NM_000169.1,407-425).
ggattcgccagctagctaa

SEQ ID NO: 201964 - DNA, 19 bp, Homo sapiens
  siRNA target sequence for GLA (NM_000169.1,408-426).
gattcgccagctagctaat

SEQ ID NO: 201965 - DNA, 19 bp, Homo sapiens
  siRNA target sequence for GLA (NM_000169.1,413-431).
gccagctagctaattatgt

SEQ ID NO: 201966 - DNA, 19 bp, Homo sapiens
  siRNA target sequence for GLA (NM_000169.1,414-432).
ccagctagctaattatgtt

SEQ ID NO: 201967 - DNA, 19 bp, Homo sapiens
  siRNA target sequence for GLA (NM_000169.1,447-465).
gaagctagggatttatgca

SEQ ID NO: 201968 - DNA, 19 bp, Homo sapiens
  siRNA target sequence for GLA (NM_000169.1,497-515).
ctgggagttttggatacta

SEQ ID NO: 201969 - DNA, 19 bp, Homo sapiens
  siRNA target sequence for GLA (NM_000169.1,546-564).
gggagtagatctgctaaaa

SEQ ID NO: 201970 - DNA, 19 bp, Homo sapiens
  siRNA target sequence for GLA (NM_000169.1,547-565).
ggagtagatctgctaaaat

SEQ ID NO: 201971 - DNA, 19 bp, Homo sapiens
  siRNA target sequence for GLA (NM_000169.1,548-566).
gagtagatctgctaaaatt

SEQ ID NO: 201972 - DNA, 19 bp, Homo sapiens
  siRNA target sequence for GLA (NM_000169.1,665-683).
gtgagtggcctctttatat

SEQ ID NO: 201973 - DNA, 19 bp, Homo sapiens
  siRNA target sequence for GLA (NM_000169.1,667-685).
gagtggcctctttatatgt

SEQ ID NO: 201974 - DNA, 19 bp, Homo sapiens
  siRNA target sequence for GLA (NM_000169.1,690-708).
ctttcaaaagcccaattat

SEQ ID NO: 201975 - DNA, 19 bp, Homo sapiens
  siRNA target sequence for GLA (NM_000169.1,718-736).
cgacagtactgcaatcact

SEQ ID NO: 201976 - DNA, 19 bp, Homo sapiens
  siRNA target sequence for GLA (NM_000169.1,728-746).
gcaatcactggcgaaattt

SEQ ID NO: 201977 - DNA, 19 bp, Homo sapiens
  siRNA target sequence for GLA (NM_000169.1,729-747).
caatcactggcgaaatttt

SEQ ID NO: 201978 - DNA, 19 bp, Homo sapiens
  siRNA target sequence for GLA (NM_000169.1,738-756).
gcgaaattttgctgacatt

SEQ ID NO: 201979 - DNA, 19 bp, Homo sapiens
  siRNA target sequence for GLA (NM_000169.1,740-758).
gaaattttgctgacattga

SEQ ID NO: 201980 - DNA, 19 bp, Homo sapiens
  siRNA target sequence for GLA (NM_000169.1,807-825).
ccaggagagaattgttgat

SEQ ID NO: 201981 - DNA, 19 bp, Homo sapiens
  siRNA target sequence for GLA (NM_000169.1,861-879).
gttagtgattggcaacttt

SEQ ID NO: 201982 - DNA, 19 bp, Homo sapiens
  siRNA target sequence for GLA (NM_000169.1,1002-1020).
ggacgtaattgccatcaat

SEQ ID NO: 201983 - DNA, 19 bp, Homo sapiens
  siRNA target sequence for GLA (NM_000169.1,1055-1073).
gacagggagacaactttga

SEQ ID NO: 201984 - DNA, 19 bp, Homo sapiens
  siRNA target sequence for GLA (NM_000169.1,1103-1121).
cctgggctgtagctatgat

SEQ ID NO: 201985 - DNA, 19 bp, Homo sapiens
  siRNA target sequence for GLA (NM_000169.1,1104-1122).
ctgggctgtagctatgata

SEQ ID NO: 201986 - DNA, 19 bp, Homo sapiens
  siRNA target sequence for GLA (NM_000169.1,1106-1124).
gggctgtagctatgataaa

SEQ ID NO: 201987 - DNA, 19 bp, Homo sapiens
  siRNA target sequence for GLA (NM_000169.1,1138-1156).
ggtggacctcgctcttata

SEQ ID NO: 201988 - DNA, 19 bp, Homo sapiens
  siRNA target sequence for GLA (NM_000169.1,1141-1159).
ggacctcgctcttatacca

SEQ ID NO: 201989 - DNA, 19 bp, Homo sapiens
  siRNA target sequence for GLA (NM_000169.1,1142-1160).
gacctcgctcttataccat

SEQ ID NO: 201990 - DNA, 19 bp, Homo sapiens
  siRNA target sequence for GLA (NM_000169.1,1235-1253).
ggaagctagggttctatga

SEQ ID NO: 201991 - DNA, 19 bp, Homo sapiens
  siRNA target sequence for GLA (NM_000169.1,1236-1254).
gaagctagggttctatgaa

SEQ ID NO: 201992 - DNA, 19 bp, Homo sapiens
  siRNA target sequence for GLA (NM_000169.1,1302-1320).
gcttcagctagaaaataca

SEQ ID NO: 201993 - DNA, 19 bp, Homo sapiens
  siRNA target sequence for GBE1 (NM_000158.1,175-193).
gagatcgacccgtacttga

SEQ ID NO: 201994 - DNA, 19 bp, Homo sapiens
  siRNA target sequence for GBE1 (NM_000158.1,217-235).
cgcaggtataagcagttta

SEQ ID NO: 201995 - DNA, 19 bp, Homo sapiens
  siRNA target sequence for GBE1 (NM_000158.1,265-283).
gaaggtggtattgataagt

SEQ ID NO: 201996 - DNA, 19 bp, Homo sapiens
  siRNA target sequence for GBE1 (NM_000158.1,271-289).
ggtattgataagttttcca

SEQ ID NO: 201997 - DNA, 19 bp, Homo sapiens
  siRNA target sequence for GBE1 (NM_000158.1,287-305).
ccagaggctatgaatcatt

SEQ ID NO: 201998 - DNA, 19 bp, Homo sapiens
  siRNA target sequence for GBE1 (NM_000158.1,322-340).
gctgatggtggtttatact

SEQ ID NO: 201999 - DNA, 19 bp, Homo sapiens
  siRNA target sequence for GBE1 (NM_000158.1,394-412).
ggttggaatccattttcgt

SEQ ID NO: 202000 - DNA, 19 bp, Homo sapiens
  siRNA target sequence for GBE1 (NM_000158.1,395-413).
gttggaatccattttcgta

SEQ ID NO: 202001 - DNA, 19 bp, Homo sapiens
  siRNA target sequence for GBE1 (NM_000158.1,404-422).
cattttcgtacccatacaa

SEQ ID NO: 202002 - DNA, 19 bp, Homo sapiens
  siRNA target sequence for GBE1 (NM_000158.1,410-428).
cgtacccatacaaaaaact

SEQ ID NO: 202003 - DNA, 19 bp, Homo sapiens
  siRNA target sequence for GBE1 (NM_000158.1,456-474).
cccaccaaagcagaataaa

SEQ ID NO: 202004 - DNA, 19 bp, Homo sapiens
  siRNA target sequence for GBE1 (NM_000158.1,457-475).
ccaccaaagcagaataaat

SEQ ID NO: 202005 - DNA, 19 bp, Homo sapiens
  siRNA target sequence for GBE1 (NM_000158.1,484-502).
gtgcctcatggatccaaat

SEQ ID NO: 202006 - DNA, 19 bp, Homo sapiens
  siRNA target sequence for GBE1 (NM_000158.1,487-505).
cctcatggatccaaattaa

SEQ ID NO: 202007 - DNA, 19 bp, Homo sapiens
  siRNA target sequence for GBE1 (NM_000158.1,488-506).
ctcatggatccaaattaaa

SEQ ID NO: 202008 - DNA, 19 bp, Homo sapiens
  siRNA target sequence for GBE1 (NM_000158.1,507-525).
ggtagttattactagtaaa

SEQ ID NO: 202009 - DNA, 19 bp, Homo sapiens
  siRNA target sequence for GBE1 (NM_000158.1,529-547).
ggagagatcttgtatcgta

SEQ ID NO: 202010 - DNA, 19 bp, Homo sapiens
  siRNA target sequence for GBE1 (NM_000158.1,530-548).
gagagatcttgtatcgtat

SEQ ID NO: 202011 - DNA, 19 bp, Homo sapiens
  siRNA target sequence for GBE1 (NM_000158.1,570-588).
ggttcgtgaaggtgataat

SEQ ID NO: 202012 - DNA, 19 bp, Homo sapiens
  siRNA target sequence for GBE1 (NM_000158.1,574-592).
cgtgaaggtgataatgtga

SEQ ID NO: 202013 - DNA, 19 bp, Homo sapiens
  siRNA target sequence for GBE1 (NM_000158.1,616-634).
ccagaacactcatatgagt

SEQ ID NO: 202014 - DNA, 19 bp, Homo sapiens
  siRNA target sequence for GBE1 (NM_000158.1,617-635).
cagaacactcatatgagtt

SEQ ID NO: 202015 - DNA, 19 bp, Homo sapiens
  siRNA target sequence for GBE1 (NM_000158.1,619-637).
gaacactcatatgagttta

SEQ ID NO: 202016 - DNA, 19 bp, Homo sapiens
  siRNA target sequence for GBE1 (NM_000158.1,624-642).
ctcatatgagtttaagcat

SEQ ID NO: 202017 - DNA, 19 bp, Homo sapiens
  siRNA target sequence for GBE1 (NM_000158.1,658-676).
ccacggagtctaagaattt

SEQ ID NO: 202018 - DNA, 19 bp, Homo sapiens
  siRNA target sequence for GBE1 (NM_000158.1,710-728).
gaaaagtagcttcttataa

SEQ ID NO: 202019 - DNA, 19 bp, Homo sapiens
  siRNA target sequence for GBE1 (NM_000158.1,740-758).
gcaatgtactaccaagaat

SEQ ID NO: 202020 - DNA, 19 bp, Homo sapiens
  siRNA target sequence for GBE1 (NM_000158.1,769-787).
ggatacaactgcattcagt

SEQ ID NO: 202021 - DNA, 19 bp, Homo sapiens
  siRNA target sequence for GBE1 (NM_000158.1,770-788).
gatacaactgcattcagtt

SEQ ID NO: 202022 - DNA, 19 bp, Homo sapiens
  siRNA target sequence for GBE1 (NM_000158.1,794-812).
caatcatggagcatgctta

SEQ ID NO: 202023 - DNA, 19 bp, Homo sapiens
  siRNA target sequence for GBE1 (NM_000158.1,798-816).
catggagcatgcttactat

SEQ ID NO: 202024 - DNA, 19 bp, Homo sapiens
  siRNA target sequence for GBE1 (NM_000158.1,817-835).
gccagctttggttaccaaa

SEQ ID NO: 202025 - DNA, 19 bp, Homo sapiens
  siRNA target sequence for GBE1 (NM_000158.1,818-836).
ccagctttggttaccaaat

SEQ ID NO: 202026 - DNA, 19 bp, Homo sapiens
  siRNA target sequence for GBE1 (NM_000158.1,965-983).
cagcagatggattgaatat

SEQ ID NO: 202027 - DNA, 19 bp, Homo sapiens
  siRNA target sequence for GBE1 (NM_000158.1,1022-1040).
ctagagggactcatgatct

SEQ ID NO: 202028 - DNA, 19 bp, Homo sapiens
  siRNA target sequence for GBE1 (NM_000158.1,1039-1057).
ctttgggatagcagattgt

SEQ ID NO: 202029 - DNA, 19 bp, Homo sapiens
  siRNA target sequence for GBE1 (NM_000158.1,1128-1146).
ctttgatggatttcgtttt

SEQ ID NO: 202030 - DNA, 19 bp, Homo sapiens
  siRNA target sequence for GBE1 (NM_000158.1,1150-1168).
ggtgttacgtccatgcttt

SEQ ID NO: 202031 - DNA, 19 bp, Homo sapiens
  siRNA target sequence for GBE1 (NM_000158.1,1157-1175).
cgtccatgctttatcatca

SEQ ID NO: 202032 - DNA, 19 bp, Homo sapiens
  siRNA target sequence for GBE1 (NM_000158.1,1254-1272).
cctcatgttggcaaatcat

SEQ ID NO: 202033 - DNA, 19 bp, Homo sapiens
  siRNA target sequence for GBE1 (NM_000158.1,1260-1278).
gttggcaaatcatttggtt

SEQ ID NO: 202034 - DNA, 19 bp, Homo sapiens
  siRNA target sequence for GBE1 (NM_000158.1,1283-1301).
cgctgtgtcccgattctat

SEQ ID NO: 202035 - DNA, 19 bp, Homo sapiens
  siRNA target sequence for GBE1 (NM_000158.1,1284-1302).
gctgtgtcccgattctata

SEQ ID NO: 202036 - DNA, 19 bp, Homo sapiens
  siRNA target sequence for GBE1 (NM_000158.1,1285-1303).
ctgtgtcccgattctataa

SEQ ID NO: 202037 - DNA, 19 bp, Homo sapiens
  siRNA target sequence for GBE1 (NM_000158.1,1287-1305).
gtgtcccgattctataaca

SEQ ID NO: 202038 - DNA, 19 bp, Homo sapiens
  siRNA target sequence for GBE1 (NM_000158.1,1293-1311).
cgattctataacaatagct

SEQ ID NO: 202039 - DNA, 19 bp, Homo sapiens
  siRNA target sequence for GBE1 (NM_000158.1,1357-1375).
ggagggggtggttttgact

SEQ ID NO: 202040 - DNA, 19 bp, Homo sapiens
  siRNA target sequence for GBE1 (NM_000158.1,1358-1376).
gagggggtggttttgacta

SEQ ID NO: 202041 - DNA, 19 bp, Homo sapiens
  siRNA target sequence for GBE1 (NM_000158.1,1443-1461).
gaacatgggcgatatagta

SEQ ID NO: 202042 - DNA, 19 bp, Homo sapiens
  siRNA target sequence for GBE1 (NM_000158.1,1525-1543).
gcattggttggggataagt

SEQ ID NO: 202043 - DNA, 19 bp, Homo sapiens
  siRNA target sequence for GBE1 (NM_000158.1,1537-1555).
gataagtcgctggcatttt

SEQ ID NO: 202044 - DNA, 19 bp, Homo sapiens
  siRNA target sequence for GBE1 (NM_000158.1,1560-1578).
gatggatgccgaaatgtat

SEQ ID NO: 202045 - DNA, 19 bp, Homo sapiens
  siRNA target sequence for GBE1 (NM_000158.1,1564-1582).
gatgccgaaatgtatacaa

SEQ ID NO: 202046 - DNA, 19 bp, Homo sapiens
  siRNA target sequence for GBE1 (NM_000158.1,1567-1585).
gccgaaatgtatacaaaca

SEQ ID NO: 202047 - DNA, 19 bp, Homo sapiens
  siRNA target sequence for GBE1 (NM_000158.1,1568-1586).
ccgaaatgtatacaaacat

SEQ ID NO: 202048 - DNA, 19 bp, Homo sapiens
  siRNA target sequence for GBE1 (NM_000158.1,1624-1642).
ggaatacagcttcataaaa

SEQ ID NO: 202049 - DNA, 19 bp, Homo sapiens
  siRNA target sequence for GBE1 (NM_000158.1,1670-1688).
gtggagaaggctatctcaa

SEQ ID NO: 202050 - DNA, 19 bp, Homo sapiens
  siRNA target sequence for GBE1 (NM_000158.1,1672-1690).
ggagaaggctatctcaatt

SEQ ID NO: 202051 - DNA, 19 bp, Homo sapiens
  siRNA target sequence for GBE1 (NM_000158.1,1673-1691).
gagaaggctatctcaattt

SEQ ID NO: 202052 - DNA, 19 bp, Homo sapiens
  siRNA target sequence for GBE1 (NM_000158.1,1686-1704).
caatttcatgggtaatgaa

SEQ ID NO: 202053 - DNA, 19 bp, Homo sapiens
  siRNA target sequence for GBE1 (NM_000158.1,1711-1729).
catcctgaatggttagact

SEQ ID NO: 202054 - DNA, 19 bp, Homo sapiens
  siRNA target sequence for GBE1 (NM_000158.1,1721-1739).
ggttagacttcccaagaaa

SEQ ID NO: 202055 - DNA, 19 bp, Homo sapiens
  siRNA target sequence for GBE1 (NM_000158.1,1722-1740).
gttagacttcccaagaaaa

SEQ ID NO: 202056 - DNA, 19 bp, Homo sapiens
  siRNA target sequence for GBE1 (NM_000158.1,1767-1785).
caggcggcagtttcattta

SEQ ID NO: 202057 - DNA, 19 bp, Homo sapiens
  siRNA target sequence for GBE1 (NM_000158.1,1770-1788).
gcggcagtttcatttaact

SEQ ID NO: 202058 - DNA, 19 bp, Homo sapiens
  siRNA target sequence for GBE1 (NM_000158.1,1795-1813).
gaccttcttcgctacaagt

SEQ ID NO: 202059 - DNA, 19 bp, Homo sapiens
  siRNA target sequence for GBE1 (NM_000158.1,1801-1819).
cttcgctacaagttcctaa

SEQ ID NO: 202060 - DNA, 19 bp, Homo sapiens
  siRNA target sequence for GBE1 (NM_000158.1,1804-1822).
cgctacaagttcctaaata

SEQ ID NO: 202061 - DNA, 19 bp, Homo sapiens
  siRNA target sequence for GBE1 (NM_000158.1,1833-1851).
ggatatgaatagattggaa

SEQ ID NO: 202062 - DNA, 19 bp, Homo sapiens
  siRNA target sequence for GBE1 (NM_000158.1,1879-1897).
caggcctacgtgagtgaaa

SEQ ID NO: 202063 - DNA, 19 bp, Homo sapiens
  siRNA target sequence for GBE1 (NM_000158.1,1881-1899).
ggcctacgtgagtgaaaaa

SEQ ID NO: 202064 - DNA, 19 bp, Homo sapiens
  siRNA target sequence for GBE1 (NM_000158.1,1906-1924).
ggcaataagatcattgctt

SEQ ID NO: 202065 - DNA, 19 bp, Homo sapiens
  siRNA target sequence for GBE1 (NM_000158.1,1931-1949).
gagcaggtcttcttttcat

SEQ ID NO: 202066 - DNA, 19 bp, Homo sapiens
  siRNA target sequence for GBE1 (NM_000158.1,1933-1951).
gcaggtcttcttttcattt

SEQ ID NO: 202067 - DNA, 19 bp, Homo sapiens
  siRNA target sequence for GBE1 (NM_000158.1,2016-2034).
caaaattgtgctagattca

SEQ ID NO: 202068 - DNA, 19 bp, Homo sapiens
  siRNA target sequence for GBE1 (NM_000158.1,2114-2132).
gtccctattctcttttggt

SEQ ID NO: 202069 - DNA, 19 bp, Homo sapiens
  siRNA target sequence for SLC3A1 (NM_000341.2,139-157).
caacgggtttgtccataat

SEQ ID NO: 202070 - DNA, 19 bp, Homo sapiens
  siRNA target sequence for SLC3A1 (NM_000341.2,142-160).
cgggtttgtccataatgaa

SEQ ID NO: 202071 - DNA, 19 bp, Homo sapiens
  siRNA target sequence for SLC3A1 (NM_000341.2,382-400).
ggccaccatagccatcatt

SEQ ID NO: 202072 - DNA, 19 bp, Homo sapiens
  siRNA target sequence for SLC3A1 (NM_000341.2,462-480).
ggtctttcaaggacagtaa

SEQ ID NO: 202073 - DNA, 19 bp, Homo sapiens
  siRNA target sequence for SLC3A1 (NM_000341.2,465-483).
ctttcaaggacagtaacaa

SEQ ID NO: 202074 - DNA, 19 bp, Homo sapiens
  siRNA target sequence for SLC3A1 (NM_000341.2,493-511).
cggagatctgaaaggtatt

SEQ ID NO: 202075 - DNA, 19 bp, Homo sapiens
  siRNA target sequence for SLC3A1 (NM_000341.2,500-518).
ctgaaaggtattcaagata

SEQ ID NO: 202076 - DNA, 19 bp, Homo sapiens
  siRNA target sequence for SLC3A1 (NM_000341.2,664-682).
ggttgcagccatacatgat

SEQ ID NO: 202077 - DNA, 19 bp, Homo sapiens
  siRNA target sequence for SLC3A1 (NM_000341.2,665-683).
gttgcagccatacatgata

SEQ ID NO: 202078 - DNA, 19 bp, Homo sapiens
  siRNA target sequence for SLC3A1 (NM_000341.2,713-731).
ccaaaccacacgagtgata

SEQ ID NO: 202079 - DNA, 19 bp, Homo sapiens
  siRNA target sequence for SLC3A1 (NM_000341.2,718-736).
ccacacgagtgataaacat

SEQ ID NO: 202080 - DNA, 19 bp, Homo sapiens
  siRNA target sequence for SLC3A1 (NM_000341.2,719-737).
cacacgagtgataaacata

SEQ ID NO: 202081 - DNA, 19 bp, Homo sapiens
  siRNA target sequence for SLC3A1 (NM_000341.2,755-773).
cggacacggacaggaaaat

SEQ ID NO: 202082 - DNA, 19 bp, Homo sapiens
  siRNA target sequence for SLC3A1 (NM_000341.2,827-845).
ccacccaacaactggttaa

SEQ ID NO: 202083 - DNA, 19 bp, Homo sapiens
  siRNA target sequence for SLC3A1 (NM_000341.2,875-893).
gacgaagtgcgaaaccaat

SEQ ID NO: 202084 - DNA, 19 bp, Homo sapiens
  siRNA target sequence for SLC3A1 (NM_000341.2,878-896).
gaagtgcgaaaccaatgtt

SEQ ID NO: 202085 - DNA, 19 bp, Homo sapiens
  siRNA target sequence for SLC3A1 (NM_000341.2,917-935).
gagcaacctgatttaaatt

SEQ ID NO: 202086 - DNA, 19 bp, Homo sapiens
  siRNA target sequence for SLC3A1 (NM_000341.2,937-955).
ccgcaatcctgatgttcaa

SEQ ID NO: 202087 - DNA, 19 bp, Homo sapiens
  siRNA target sequence for SLC3A1 (NM_000341.2,939-957).
gcaatcctgatgttcaaga

SEQ ID NO: 202088 - DNA, 19 bp, Homo sapiens
  siRNA target sequence for SLC3A1 (NM_000341.2,1055-1073).
gatgagatccaagtaaata

SEQ ID NO: 202089 - DNA, 19 bp, Homo sapiens
  siRNA target sequence for SLC3A1 (NM_000341.2,1085-1103).
ccggacacggtcacacaat

SEQ ID NO: 202090 - DNA, 19 bp, Homo sapiens
  siRNA target sequence for SLC3A1 (NM_000341.2,1086-1104).
cggacacggtcacacaata

SEQ ID NO: 202091 - DNA, 19 bp, Homo sapiens
  siRNA target sequence for SLC3A1 (NM_000341.2,1107-1125).
cggagctgtaccatgactt

SEQ ID NO: 202092 - DNA, 19 bp, Homo sapiens
  siRNA target sequence for SLC3A1 (NM_000341.2,1170-1188).
ggcagaccatggaccaata

SEQ ID NO: 202093 - DNA, 19 bp, Homo sapiens
  siRNA target sequence for SLC3A1 (NM_000341.2,1230-1248).
cctatgcagagagtattga

SEQ ID NO: 202094 - DNA, 19 bp, Homo sapiens
  siRNA target sequence for SLC3A1 (NM_000341.2,1247-1265).
gacaggaccgtgatgtact

SEQ ID NO: 202095 - DNA, 19 bp, Homo sapiens
  siRNA target sequence for SLC3A1 (NM_000341.2,1249-1267).
caggaccgtgatgtactat

SEQ ID NO: 202096 - DNA, 19 bp, Homo sapiens
  siRNA target sequence for SLC3A1 (NM_000341.2,1318-1336).
catgctagacactgtttct

SEQ ID NO: 202097 - DNA, 19 bp, Homo sapiens
  siRNA target sequence for SLC3A1 (NM_000341.2,1345-1363).
cgtgtatgaggttatcaca

SEQ ID NO: 202098 - DNA, 19 bp, Homo sapiens
  siRNA target sequence for SLC3A1 (NM_000341.2,1362-1380).
catcctggatggaaaacat

SEQ ID NO: 202099 - DNA, 19 bp, Homo sapiens
  siRNA target sequence for SLC3A1 (NM_000341.2,1440-1458).
cgcgtttggggaatcagta

SEQ ID NO: 202100 - DNA, 19 bp, Homo sapiens
  siRNA target sequence for SLC3A1 (NM_000341.2,1441-1459).
gcgtttggggaatcagtat

SEQ ID NO: 202101 - DNA, 19 bp, Homo sapiens
  siRNA target sequence for SLC3A1 (NM_000341.2,1471-1489).
gaacatgcttcttttcaca

SEQ ID NO: 202102 - DNA, 19 bp, Homo sapiens
  siRNA target sequence for SLC3A1 (NM_000341.2,1494-1512).
ctggaactcctataactta

SEQ ID NO: 202103 - DNA, 19 bp, Homo sapiens
  siRNA target sequence for SLC3A1 (NM_000341.2,1547-1565).
gccgcaaatctcaatgaaa

SEQ ID NO: 202104 - DNA, 19 bp, Homo sapiens
  siRNA target sequence for SLC3A1 (NM_000341.2,1556-1574).
ctcaatgaaagctatgata

SEQ ID NO: 202105 - DNA, 19 bp, Homo sapiens
  siRNA target sequence for SLC3A1 (NM_000341.2,1603-1621).
gcagtgggacaatagttca

SEQ ID NO: 202106 - DNA, 19 bp, Homo sapiens
  siRNA target sequence for SLC3A1 (NM_000341.2,1604-1622).
cagtgggacaatagttcaa

SEQ ID NO: 202107 - DNA, 19 bp, Homo sapiens
  siRNA target sequence for SLC3A1 (NM_000341.2,1629-1647).
gtttttctgaagctagtaa

SEQ ID NO: 202108 - DNA, 19 bp, Homo sapiens
  siRNA target sequence for SLC3A1 (NM_000341.2,1651-1669).
ctggttacctaccaattca

SEQ ID NO: 202109 - DNA, 19 bp, Homo sapiens
  siRNA target sequence for SLC3A1 (NM_000341.2,1653-1671).
ggttacctaccaattcaga

SEQ ID NO: 202110 - DNA, 19 bp, Homo sapiens
  siRNA target sequence for SLC3A1 (NM_000341.2,1654-1672).
gttacctaccaattcagat

SEQ ID NO: 202111 - DNA, 19 bp, Homo sapiens
  siRNA target sequence for SLC3A1 (NM_000341.2,1675-1693).
ccacactgtgaatgttgat

SEQ ID NO: 202112 - DNA, 19 bp, Homo sapiens
  siRNA target sequence for SLC3A1 (NM_000341.2,1710-1728).
ccagatcggctttgaagtt

SEQ ID NO: 202113 - DNA, 19 bp, Homo sapiens
  siRNA target sequence for SLC3A1 (NM_000341.2,1716-1734).
cggctttgaagttatatca

SEQ ID NO: 202114 - DNA, 19 bp, Homo sapiens
  siRNA target sequence for SLC3A1 (NM_000341.2,1798-1816).
gaatgacagccactatgtt

SEQ ID NO: 202115 - DNA, 19 bp, Homo sapiens
  siRNA target sequence for SLC3A1 (NM_000341.2,1838-1856).
ggcatcgacagaatcttta

SEQ ID NO: 202116 - DNA, 19 bp, Homo sapiens
  siRNA target sequence for SLC3A1 (NM_000341.2,1839-1857).
gcatcgacagaatctttat

SEQ ID NO: 202117 - DNA, 19 bp, Homo sapiens
  siRNA target sequence for SLC3A1 (NM_000341.2,1911-1929).
cgggccttcccgctaaaat

SEQ ID NO: 202118 - DNA, 19 bp, Homo sapiens
  siRNA target sequence for SLC3A1 (NM_000341.2,1956-1974).
ccgacaaaggcagtaaagt

SEQ ID NO: 202119 - DNA, 19 bp, Homo sapiens
  siRNA target sequence for SLC3A1 (NM_000341.2,1957-1975).
cgacaaaggcagtaaagtt

SEQ ID NO: 202120 - DNA, 19 bp, Homo sapiens
  siRNA target sequence for SLC3A1 (NM_000341.2,1960-1978).
caaaggcagtaaagttgat

SEQ ID NO: 202121 - DNA, 19 bp, Homo sapiens
  siRNA target sequence for SLC3A1 (NM_000341.2,2004-2022).
gagagggactcatctttga

SEQ ID NO: 202122 - DNA, 19 bp, Homo sapiens
  siRNA target sequence for SLC3A1 (NM_000341.2,2010-2028).
gactcatctttgaacacaa

SEQ ID NO: 202123 - DNA, 19 bp, Homo sapiens
  siRNA target sequence for SLC3A1 (NM_000341.2,2094-2112).
gctattccagtgtactgaa

SEQ ID NO: 202124 - DNA, 19 bp, Homo sapiens
  siRNA target sequence for SLC3A1 (NM_000341.2,2108-2126).
ctgaacatactgtatacct

SEQ ID NO: 202125 - DNA, 19 bp, Homo sapiens
  siRNA target sequence for SLC3A2 (NM_002394.3,573-591).
ggcgggagccgagaagaat

SEQ ID NO: 202126 - DNA, 19 bp, Homo sapiens
  siRNA target sequence for SLC3A2 (NM_002394.3,760-778).
gctggtgccgtggtcataa

SEQ ID NO: 202127 - DNA, 19 bp, Homo sapiens
  siRNA target sequence for SLC3A2 (NM_002394.3,761-779).
ctggtgccgtggtcataat

SEQ ID NO: 202128 - DNA, 19 bp, Homo sapiens
  siRNA target sequence for SLC3A2 (NM_002394.3,946-964).
gtgctgggtccaattcaca

SEQ ID NO: 202129 - DNA, 19 bp, Homo sapiens
  siRNA target sequence for SLC3A2 (NM_002394.3,1002-1020).
gcagatcgaccccaatttt

SEQ ID NO: 202130 - DNA, 19 bp, Homo sapiens
  siRNA target sequence for SLC3A2 (NM_002394.3,1047-1065).
cttgcaatcggctaaaaaa

SEQ ID NO: 202131 - DNA, 19 bp, Homo sapiens
  siRNA target sequence for SLC3A2 (NM_002394.3,1204-1222).
caggttcgggacatagaga

SEQ ID NO: 202132 - DNA, 19 bp, Homo sapiens
  siRNA target sequence for SLC3A2 (NM_002394.3,1206-1224).
ggttcgggacatagagaat

SEQ ID NO: 202133 - DNA, 19 bp, Homo sapiens
  siRNA target sequence for SLC3A2 (NM_002394.3,1210-1228).
cgggacatagagaatctga

SEQ ID NO: 202134 - DNA, 19 bp, Homo sapiens
  siRNA target sequence for SLC3A2 (NM_002394.3,1211-1229).
gggacatagagaatctgaa

SEQ ID NO: 202135 - DNA, 19 bp, Homo sapiens
  siRNA target sequence for SLC3A2 (NM_002394.3,1338-1356).
cctactcgaatccaacaaa

SEQ ID NO: 202136 - DNA, 19 bp, Homo sapiens
  siRNA target sequence for SLC3A2 (NM_002394.3,1383-1401).
gtctgattctggttctact

SEQ ID NO: 202137 - DNA, 19 bp, Homo sapiens
  siRNA target sequence for SLC3A2 (NM_002394.3,1418-1436).
ccctagtcacacagtattt

SEQ ID NO: 202138 - DNA, 19 bp, Homo sapiens
  siRNA target sequence for SLC3A2 (NM_002394.3,1420-1438).
ctagtcacacagtatttga

SEQ ID NO: 202139 - DNA, 19 bp, Homo sapiens
  siRNA target sequence for LOC129530 (NM_174898.1,375-393).
gacgtcacggcctgaacta

SEQ ID NO: 202140 - DNA, 19 bp, Homo sapiens
  siRNA target sequence for LOC129530 (NM_174898.1,377-395).
cgtcacggcctgaactact

SEQ ID NO: 202141 - DNA, 19 bp, Homo sapiens
  siRNA target sequence for LOC129530 (NM_174898.1,417-435).
ggctggctgaaatagacat

SEQ ID NO: 202142 - DNA, 19 bp, Homo sapiens
  siRNA target sequence for LOC129530 (NM_174898.1,436-454).
gccatacctcctgaaatat

SEQ ID NO: 202143 - DNA, 19 bp, Homo sapiens
  siRNA target sequence for LOC129530 (NM_174898.1,526-544).
gaagtctcccggtgacaaa

SEQ ID NO: 202144 - DNA, 19 bp, Homo sapiens
  siRNA target sequence for LOC129530 (NM_174898.1,603-621).
ccacatcctggattagtga

SEQ ID NO: 202145 - DNA, 19 bp, Homo sapiens
  siRNA target sequence for LYG2 (NM_175735.3,177-195).
cccttcagtcactcaatga

SEQ ID NO: 202146 - DNA, 19 bp, Homo sapiens
  siRNA target sequence for LYG2 (NM_175735.3,178-196).
ccttcagtcactcaatgaa

SEQ ID NO: 202147 - DNA, 19 bp, Homo sapiens
  siRNA target sequence for LYG2 (NM_175735.3,237-255).
gacatcatgaccatgaaga

SEQ ID NO: 202148 - DNA, 19 bp, Homo sapiens
  siRNA target sequence for LYG2 (NM_175735.3,298-316).
ggatccgtggttctgaaat

SEQ ID NO: 202149 - DNA, 19 bp, Homo sapiens
  siRNA target sequence for LYG2 (NM_175735.3,329-347).
ggatttgagggccataaaa

SEQ ID NO: 202150 - DNA, 19 bp, Homo sapiens
  siRNA target sequence for LYG2 (NM_175735.3,369-387).
gaagtcgggcagagacatt

SEQ ID NO: 202151 - DNA, 19 bp, Homo sapiens
  siRNA target sequence for LYG2 (NM_175735.3,483-501).
ggcttgatgcagcttgata

SEQ ID NO: 202152 - DNA, 19 bp, Homo sapiens
  siRNA target sequence for LYG2 (NM_175735.3,484-502).
gcttgatgcagcttgataa

SEQ ID NO: 202153 - DNA, 19 bp, Homo sapiens
  siRNA target sequence for LYG2 (NM_175735.3,485-503).
cttgatgcagcttgataaa

SEQ ID NO: 202154 - DNA, 19 bp, Homo sapiens
  siRNA target sequence for LYG2 (NM_175735.3,521-539).
cggtgcctgggatagcaaa

SEQ ID NO: 202155 - DNA, 19 bp, Homo sapiens
  siRNA target sequence for LYG2 (NM_175735.3,552-570).
caggctactgggattctaa

SEQ ID NO: 202156 - DNA, 19 bp, Homo sapiens
  siRNA target sequence for LYG2 (NM_175735.3,554-572).
ggctactgggattctaaca

SEQ ID NO: 202157 - DNA, 19 bp, Homo sapiens
  siRNA target sequence for LYG2 (NM_175735.3,633-651).
ggtggtctctcagctttta

SEQ ID NO: 202158 - DNA, 19 bp, Homo sapiens
  siRNA target sequence for LYG2 (NM_175735.3,636-654).
ggtctctcagcttttaagt

SEQ ID NO: 202159 - DNA, 19 bp, Homo sapiens
  siRNA target sequence for LYG2 (NM_175735.3,673-691).
ccaccccatcggacataga

SEQ ID NO: 202160 - DNA, 19 bp, Homo sapiens
  siRNA target sequence for LYG2 (NM_175735.3,676-694).
ccccatcggacatagacaa

SEQ ID NO: 202161 - DNA, 19 bp, Homo sapiens
  siRNA target sequence for LYG2 (NM_175735.3,677-695).
cccatcggacatagacaat

SEQ ID NO: 202162 - DNA, 19 bp, Homo sapiens
  siRNA target sequence for LYG2 (NM_175735.3,679-697).
catcggacatagacaatga

SEQ ID NO: 202163 - DNA, 19 bp, Homo sapiens
  siRNA target sequence for LYG2 (NM_175735.3,682-700).
cggacatagacaatgactt

SEQ ID NO: 202164 - DNA, 19 bp, Homo sapiens
  siRNA target sequence for LYG2 (NM_175735.3,717-735).
gctcgagctaagttctata

SEQ ID NO: 202165 - DNA, 19 bp, Homo sapiens
  siRNA target sequence for LYG2 (NM_175735.3,720-738).
cgagctaagttctataaaa

SEQ ID NO: 202166 - DNA, 19 bp, Homo sapiens
  siRNA target sequence for LYZ (NM_000239.1,48-66).
ggcttgtcctcctttctgt

SEQ ID NO: 202167 - DNA, 19 bp, Homo sapiens
  siRNA target sequence for LYZ (NM_000239.1,261-279).
gccgctactggtgtaatga

SEQ ID NO: 202168 - DNA, 19 bp, Homo sapiens
  siRNA target sequence for LYZ (NM_000239.1,262-280).
ccgctactggtgtaatgat

SEQ ID NO: 202169 - DNA, 19 bp, Homo sapiens
  siRNA target sequence for LYZ (NM_000239.1,296-314).
gcagttaatgcctgtcatt

SEQ ID NO: 202170 - DNA, 19 bp, Homo sapiens
  siRNA target sequence for LYZ (NM_000239.1,297-315).
cagttaatgcctgtcattt

SEQ ID NO: 202171 - DNA, 19 bp, Homo sapiens
  siRNA target sequence for LYZ (NM_000239.1,299-317).
gttaatgcctgtcatttat

SEQ ID NO: 202172 - DNA, 19 bp, Homo sapiens
  siRNA target sequence for LYZ (NM_000239.1,326-344).
gctttgctgcaagataaca

SEQ ID NO: 202173 - DNA, 19 bp, Homo sapiens
  siRNA target sequence for LYZ (NM_000239.1,327-345).
ctttgctgcaagataacat

SEQ ID NO: 202174 - DNA, 19 bp, Homo sapiens
  siRNA target sequence for LYZ (NM_000239.1,406-424).
ggtggcatggagaaatcgt

SEQ ID NO: 202175 - DNA, 19 bp, Homo sapiens
  siRNA target sequence for LYZ (NM_000239.1,433-451).
cagagatgtccgtcagtat

SEQ ID NO: 202176 - DNA, 19 bp, Homo sapiens
  siRNA target sequence for LYZ (NM_000239.1,435-453).
gagatgtccgtcagtatgt

SEQ ID NO: 202177 - DNA, 19 bp, Homo sapiens
  siRNA target sequence for PARG (NM_003631.1,369-387).
gcgccacctcgcttgtttt

SEQ ID NO: 202178 - DNA, 19 bp, Homo sapiens
  siRNA target sequence for PARG (NM_003631.1,372-390).
ccacctcgcttgttttcaa

SEQ ID NO: 202179 - DNA, 19 bp, Homo sapiens
  siRNA target sequence for PARG (NM_003631.1,375-393).
cctcgcttgttttcaaaca

SEQ ID NO: 202180 - DNA, 19 bp, Homo sapiens
  siRNA target sequence for PARG (NM_003631.1,376-394).
ctcgcttgttttcaaacaa

SEQ ID NO: 202181 - DNA, 19 bp, Homo sapiens
  siRNA target sequence for PARG (NM_003631.1,512-530).
gataacttttaccaacata

SEQ ID NO: 202182 - DNA, 19 bp, Homo sapiens
  siRNA target sequence for PARG (NM_003631.1,555-573).
ctcagctaagtcttgataa

SEQ ID NO: 202183 - DNA, 19 bp, Homo sapiens
  siRNA target sequence for PARG (NM_003631.1,557-575).
cagctaagtcttgataagt

SEQ ID NO: 202184 - DNA, 19 bp, Homo sapiens
  siRNA target sequence for PARG (NM_003631.1,559-577).
gctaagtcttgataagtca

SEQ ID NO: 202185 - DNA, 19 bp, Homo sapiens
  siRNA target sequence for PARG (NM_003631.1,569-587).
gataagtcactcactgaaa

SEQ ID NO: 202186 - DNA, 19 bp, Homo sapiens
  siRNA target sequence for PARG (NM_003631.1,697-715).
ggtaccagagcagtttagt

SEQ ID NO: 202187 - DNA, 19 bp, Homo sapiens
  siRNA target sequence for PARG (NM_003631.1,704-722).
gagcagtttagtaatgcta

SEQ ID NO: 202188 - DNA, 19 bp, Homo sapiens
  siRNA target sequence for PARG (NM_003631.1,709-727).
gtttagtaatgctaacatt

SEQ ID NO: 202189 - DNA, 19 bp, Homo sapiens
  siRNA target sequence for PARG (NM_003631.1,732-750).
ggtcacctcaaaatgatga

SEQ ID NO: 202190 - DNA, 19 bp, Homo sapiens
  siRNA target sequence for PARG (NM_003631.1,733-751).
gtcacctcaaaatgatgat

SEQ ID NO: 202191 - DNA, 19 bp, Homo sapiens
  siRNA target sequence for PARG (NM_003631.1,826-844).
gcagactacggaagatgaa

SEQ ID NO: 202192 - DNA, 19 bp, Homo sapiens
  siRNA target sequence for PARG (NM_003631.1,912-930).
gttgtcagcaagatgagat

SEQ ID NO: 202193 - DNA, 19 bp, Homo sapiens
  siRNA target sequence for PARG (NM_003631.1,915-933).
gtcagcaagatgagataga

SEQ ID NO: 202194 - DNA, 19 bp, Homo sapiens
  siRNA target sequence for PARG (NM_003631.1,977-995).
gttggtactgggtcaaaaa

SEQ ID NO: 202195 - DNA, 19 bp, Homo sapiens
  siRNA target sequence for PARG (NM_003631.1,1000-1018).
caacaaattgattagacaa

SEQ ID NO: 202196 - DNA, 19 bp, Homo sapiens
  siRNA target sequence for PARG (NM_003631.1,1073-1091).
ccgatggatgtggataatt

SEQ ID NO: 202197 - DNA, 19 bp, Homo sapiens
  siRNA target sequence for PARG (NM_003631.1,1126-1144).
ggagacaagtccaggtttt

SEQ ID NO: 202198 - DNA, 19 bp, Homo sapiens
  siRNA target sequence for PARG (NM_003631.1,1171-1189).
ccaaacagcaaataaacct

SEQ ID NO: 202199 - DNA, 19 bp, Homo sapiens
  siRNA target sequence for PARG (NM_003631.1,1206-1224).
gagacgctgacattgaatt

SEQ ID NO: 202200 - DNA, 19 bp, Homo sapiens
  siRNA target sequence for PARG (NM_003631.1,1227-1245).
ggaaacggtactctactaa

SEQ ID NO: 202201 - DNA, 19 bp, Homo sapiens
  siRNA target sequence for PARG (NM_003631.1,1246-1264).
gggcggtgaagttagatta

SEQ ID NO: 202202 - DNA, 19 bp, Homo sapiens
  siRNA target sequence for PARG (NM_003631.1,1249-1267).
cggtgaagttagattacat

SEQ ID NO: 202203 - DNA, 19 bp, Homo sapiens
  siRNA target sequence for PARG (NM_003631.1,1256-1274).
gttagattacatttccaat

SEQ ID NO: 202204 - DNA, 19 bp, Homo sapiens
  siRNA target sequence for PARG (NM_003631.1,1349-1367).
gtagaatgcagaaattcta

SEQ ID NO: 202205 - DNA, 19 bp, Homo sapiens
  siRNA target sequence for PARG (NM_003631.1,1476-1494).
ggaagatccctaaatacgt

SEQ ID NO: 202206 - DNA, 19 bp, Homo sapiens
  siRNA target sequence for PARG (NM_003631.1,1535-1553).
cccattgaggagatgagaa

SEQ ID NO: 202207 - DNA, 19 bp, Homo sapiens
  siRNA target sequence for PARG (NM_003631.1,1683-1701).
gggataacaagcatgttaa

SEQ ID NO: 202208 - DNA, 19 bp, Homo sapiens
  siRNA target sequence for PARG (NM_003631.1,1767-1785).
gccggtgggagctcattca

SEQ ID NO: 202209 - DNA, 19 bp, Homo sapiens
  siRNA target sequence for PARG (NM_003631.1,1769-1787).
cggtgggagctcattcaga

SEQ ID NO: 202210 - DNA, 19 bp, Homo sapiens
  siRNA target sequence for PARG (NM_003631.1,1869-1887).
gggactttacagctttgat

SEQ ID NO: 202211 - DNA, 19 bp, Homo sapiens
  siRNA target sequence for PARG (NM_003631.1,1894-1912).
ctgggataaggtacttgaa

SEQ ID NO: 202212 - DNA, 19 bp, Homo sapiens
  siRNA target sequence for PARG (NM_003631.1,1967-1985).
gcactctgtctgccaaata

SEQ ID NO: 202213 - DNA, 19 bp, Homo sapiens
  siRNA target sequence for PARG (NM_003631.1,1970-1988).
ctctgtctgccaaatattt

SEQ ID NO: 202214 - DNA, 19 bp, Homo sapiens
  siRNA target sequence for PARG (NM_003631.1,1998-2016).
caataccactcctgaaaca

SEQ ID NO: 202215 - DNA, 19 bp, Homo sapiens
  siRNA target sequence for PARG (NM_003631.1,2037-2055).
caatgtcgcaggaacagat

SEQ ID NO: 202216 - DNA, 19 bp, Homo sapiens
  siRNA target sequence for PARG (NM_003631.1,2048-2066).
gaacagattgccagtcttt

SEQ ID NO: 202217 - DNA, 19 bp, Homo sapiens
  siRNA target sequence for PARG (NM_003631.1,2053-2071).
gattgccagtcttttagct

SEQ ID NO: 202218 - DNA, 19 bp, Homo sapiens
  siRNA target sequence for PARG (NM_003631.1,2110-2128).
gatgaaatcggagtattct

SEQ ID NO: 202219 - DNA, 19 bp, Homo sapiens
  siRNA target sequence for PARG (NM_003631.1,2113-2131).
gaaatcggagtattctagt

SEQ ID NO: 202220 - DNA, 19 bp, Homo sapiens
  siRNA target sequence for PARG (NM_003631.1,2130-2148).
gttacccagacattaactt

SEQ ID NO: 202221 - DNA, 19 bp, Homo sapiens
  siRNA target sequence for PARG (NM_003631.1,2138-2156).
gacattaacttcaatcgat

SEQ ID NO: 202222 - DNA, 19 bp, Homo sapiens
  siRNA target sequence for PARG (NM_003631.1,2326-2344).
cacttacgaaggtaccata

SEQ ID NO: 202223 - DNA, 19 bp, Homo sapiens
  siRNA target sequence for PARG (NM_003631.1,2361-2379).
gcatgctacaggtggattt

SEQ ID NO: 202224 - DNA, 19 bp, Homo sapiens
  siRNA target sequence for PARG (NM_003631.1,2365-2383).
gctacaggtggattttgca

SEQ ID NO: 202225 - DNA, 19 bp, Homo sapiens
  siRNA target sequence for PARG (NM_003631.1,2366-2384).
ctacaggtggattttgcaa

SEQ ID NO: 202226 - DNA, 19 bp, Homo sapiens
  siRNA target sequence for PARG (NM_003631.1,2432-2450).
gaaatccgctttttaatca

SEQ ID NO: 202227 - DNA, 19 bp, Homo sapiens
  siRNA target sequence for PARG (NM_003631.1,2486-2504).
gtgctggatcacaatgaat

SEQ ID NO: 202228 - DNA, 19 bp, Homo sapiens
  siRNA target sequence for PARG (NM_003631.1,2491-2509).
ggatcacaatgaatgtcta

SEQ ID NO: 202229 - DNA, 19 bp, Homo sapiens
  siRNA target sequence for PARG (NM_003631.1,2523-2541).
ctgagcagtacagtgaata

SEQ ID NO: 202230 - DNA, 19 bp, Homo sapiens
  siRNA target sequence for PARG (NM_003631.1,2548-2566).
ctatgctgagacatatcgt

SEQ ID NO: 202231 - DNA, 19 bp, Homo sapiens
  siRNA target sequence for PARG (NM_003631.1,2579-2597).
cacgaagatgggagtgaaa

SEQ ID NO: 202232 - DNA, 19 bp, Homo sapiens
  siRNA target sequence for PARG (NM_003631.1,2655-2673).
gacgctacctcgatcagtt

SEQ ID NO: 202233 - DNA, 19 bp, Homo sapiens
  siRNA target sequence for PARG (NM_003631.1,2658-2676).
gctacctcgatcagtttgt

SEQ ID NO: 202234 - DNA, 19 bp, Homo sapiens
  siRNA target sequence for PARG (NM_003631.1,2698-2716).
gctgaacaaggcttactgt

SEQ ID NO: 202235 - DNA, 19 bp, Homo sapiens
  siRNA target sequence for PARG (NM_003631.1,2725-2743).
ccgtcctggagtttcttca

SEQ ID NO: 202236 - DNA, 19 bp, Homo sapiens
  siRNA target sequence for PARG (NM_003631.1,2792-2810).
gggggtgatgccaggttaa

SEQ ID NO: 202237 - DNA, 19 bp, Homo sapiens
  siRNA target sequence for PARG (NM_003631.1,2793-2811).
ggggtgatgccaggttaaa

SEQ ID NO: 202238 - DNA, 19 bp, Homo sapiens
  siRNA target sequence for PARG (NM_003631.1,2794-2812).
gggtgatgccaggttaaaa

SEQ ID NO: 202239 - DNA, 19 bp, Homo sapiens
  siRNA target sequence for PARG (NM_003631.1,2844-2862).
ctgagcgagatgtggttta

SEQ ID NO: 202240 - DNA, 19 bp, Homo sapiens
  siRNA target sequence for PARG (NM_003631.1,2846-2864).
gagcgagatgtggtttatt

SEQ ID NO: 202241 - DNA, 19 bp, Homo sapiens
  siRNA target sequence for PARG (NM_003631.1,2935-2953).
cactgttggagatgtgtat

SEQ ID NO: 202242 - DNA, 19 bp, Homo sapiens
  siRNA target sequence for PARG (NM_003631.1,2957-2975).
ctgttgctacgatactaca

SEQ ID NO: 202243 - DNA, 19 bp, Homo sapiens
  siRNA target sequence for PARG (NM_003631.1,2959-2977).
gttgctacgatactacaat

SEQ ID NO: 202244 - DNA, 19 bp, Homo sapiens
  siRNA target sequence for PARG (NM_003631.1,2962-2980).
gctacgatactacaatgaa

SEQ ID NO: 202245 - DNA, 19 bp, Homo sapiens
  siRNA target sequence for PARG (NM_003631.1,2966-2984).
cgatactacaatgaagaat

SEQ ID NO: 202246 - DNA, 19 bp, Homo sapiens
  siRNA target sequence for PARG (NM_003631.1,2978-2996).
gaagaatgcagaaactgtt

SEQ ID NO: 202247 - DNA, 19 bp, Homo sapiens
  siRNA target sequence for GUSB (NM_000181.1,570-588).
ccaccagggaccatccaat

SEQ ID NO: 202248 - DNA, 19 bp, Homo sapiens
  siRNA target sequence for GUSB (NM_000181.1,574-592).
cagggaccatccaatacct

SEQ ID NO: 202249 - DNA, 19 bp, Homo sapiens
  siRNA target sequence for GUSB (NM_000181.1,593-611).
gactgacacctccaagtat

SEQ ID NO: 202250 - DNA, 19 bp, Homo sapiens
  siRNA target sequence for GUSB (NM_000181.1,909-927).
gaacgccctgcctatctgt

SEQ ID NO: 202251 - DNA, 19 bp, Homo sapiens
  siRNA target sequence for GUSB (NM_000181.1,1186-1204).
cctatgcagaggaagtgat

SEQ ID NO: 202252 - DNA, 19 bp, Homo sapiens
  siRNA target sequence for GUSB (NM_000181.1,1263-1281).
gcgctgccgcagttcttca

SEQ ID NO: 202253 - DNA, 19 bp, Homo sapiens
  siRNA target sequence for GUSB (NM_000181.1,1380-1398).
cctgcgtcccacctagaat

SEQ ID NO: 202254 - DNA, 19 bp, Homo sapiens
  siRNA target sequence for GUSB (NM_000181.1,1465-1483).
cctttgtgagcaactctaa

SEQ ID NO: 202255 - DNA, 19 bp, Homo sapiens
  siRNA target sequence for GUSB (NM_000181.1,1604-1622).
gaactggtataagaagtat

SEQ ID NO: 202256 - DNA, 19 bp, Homo sapiens
  siRNA target sequence for GUSB (NM_000181.1,1609-1627).
ggtataagaagtatcagaa

SEQ ID NO: 202257 - DNA, 19 bp, Homo sapiens
  siRNA target sequence for GUSB (NM_000181.1,1646-1664).
gtatggagcagaaacgatt

SEQ ID NO: 202258 - DNA, 19 bp, Homo sapiens
  siRNA target sequence for GUSB (NM_000181.1,1822-1840).
cgagagtgctggggaataa

SEQ ID NO: 202259 - DNA, 19 bp, Homo sapiens
  siRNA target sequence for HPSE (NM_006665.2,449-467).
gatcccaagaaggaatcaa

SEQ ID NO: 202260 - DNA, 19 bp, Homo sapiens
  siRNA target sequence for HPSE (NM_006665.2,497-515).
caagtcaaccaggatattt

SEQ ID NO: 202261 - DNA, 19 bp, Homo sapiens
  siRNA target sequence for HPSE (NM_006665.2,548-566).
gagaagttacggttggaat

SEQ ID NO: 202262 - DNA, 19 bp, Homo sapiens
  siRNA target sequence for HPSE (NM_006665.2,567-585).
ggccctaccaggagcaatt

SEQ ID NO: 202263 - DNA, 19 bp, Homo sapiens
  siRNA target sequence for HPSE (NM_006665.2,570-588).
cctaccaggagcaattgct

SEQ ID NO: 202264 - DNA, 19 bp, Homo sapiens
  siRNA target sequence for HPSE (NM_006665.2,596-614).
gaacactaccagaaaaagt

SEQ ID NO: 202265 - DNA, 19 bp, Homo sapiens
  siRNA target sequence for HPSE (NM_006665.2,599-617).
cactaccagaaaaagttca

SEQ ID NO: 202266 - DNA, 19 bp, Homo sapiens
  siRNA target sequence for HPSE (NM_006665.2,644-662).
gtagatgtgctatacactt

SEQ ID NO: 202267 - DNA, 19 bp, Homo sapiens
  siRNA target sequence for HPSE (NM_006665.2,650-668).
gtgctatacacttttgcaa

SEQ ID NO: 202268 - DNA, 19 bp, Homo sapiens
  siRNA target sequence for HPSE (NM_006665.2,675-693).
caggactggacttgatctt

SEQ ID NO: 202269 - DNA, 19 bp, Homo sapiens
  siRNA target sequence for HPSE (NM_006665.2,685-703).
cttgatctttggcctaaat

SEQ ID NO: 202270 - DNA, 19 bp, Homo sapiens
  siRNA target sequence for HPSE (NM_006665.2,698-716).
ctaaatgcgttattaagaa

SEQ ID NO: 202271 - DNA, 19 bp, Homo sapiens
  siRNA target sequence for HPSE (NM_006665.2,727-745).
gcagtggaacagttctaat

SEQ ID NO: 202272 - DNA, 19 bp, Homo sapiens
  siRNA target sequence for HPSE (NM_006665.2,730-748).
gtggaacagttctaatgct

SEQ ID NO: 202273 - DNA, 19 bp, Homo sapiens
  siRNA target sequence for HPSE (NM_006665.2,768-786).
gctcttccaaggggtataa

SEQ ID NO: 202274 - DNA, 19 bp, Homo sapiens
  siRNA target sequence for HPSE (NM_006665.2,809-827).
gaacctaacagtttcctta

SEQ ID NO: 202275 - DNA, 19 bp, Homo sapiens
  siRNA target sequence for HPSE (NM_006665.2,812-830).
cctaacagtttccttaaga

SEQ ID NO: 202276 - DNA, 19 bp, Homo sapiens
  siRNA target sequence for HPSE (NM_006665.2,824-842).
cttaagaaggctgatattt

SEQ ID NO: 202277 - DNA, 19 bp, Homo sapiens
  siRNA target sequence for HPSE (NM_006665.2,853-871).
gtcgcagttaggagaagat

SEQ ID NO: 202278 - DNA, 19 bp, Homo sapiens
  siRNA target sequence for HPSE (NM_006665.2,855-873).
cgcagttaggagaagattt

SEQ ID NO: 202279 - DNA, 19 bp, Homo sapiens
  siRNA target sequence for HPSE (NM_006665.2,856-874).
gcagttaggagaagatttt

SEQ ID NO: 202280 - DNA, 19 bp, Homo sapiens
  siRNA target sequence for HPSE (NM_006665.2,857-875).
cagttaggagaagatttta

SEQ ID NO: 202281 - DNA, 19 bp, Homo sapiens
  siRNA target sequence for HPSE (NM_006665.2,901-919).
gtccaccttcaaaaatgca

SEQ ID NO: 202282 - DNA, 19 bp, Homo sapiens
  siRNA target sequence for HPSE (NM_006665.2,1001-1019).
gtgattgattcagttacat

SEQ ID NO: 202283 - DNA, 19 bp, Homo sapiens
  siRNA target sequence for HPSE (NM_006665.2,1021-1039).
gcatcactactatttgaat

SEQ ID NO: 202284 - DNA, 19 bp, Homo sapiens
  siRNA target sequence for HPSE (NM_006665.2,1073-1091).
cctgatgtattggacattt

SEQ ID NO: 202285 - DNA, 19 bp, Homo sapiens
  siRNA target sequence for HPSE (NM_006665.2,1150-1168).
ggtctggttaggagaaaca

SEQ ID NO: 202286 - DNA, 19 bp, Homo sapiens
  siRNA target sequence for HPSE (NM_006665.2,1184-1202).
ggcggagcgcccttgctat

SEQ ID NO: 202287 - DNA, 19 bp, Homo sapiens
  siRNA target sequence for HPSE (NM_006665.2,1209-1227).
cctttgcagctggctttat

SEQ ID NO: 202288 - DNA, 19 bp, Homo sapiens
  siRNA target sequence for HPSE (NM_006665.2,1221-1239).
gctttatgtggctggataa

SEQ ID NO: 202289 - DNA, 19 bp, Homo sapiens
  siRNA target sequence for HPSE (NM_006665.2,1251-1269).
cagcccgaatgggaataga

SEQ ID NO: 202290 - DNA, 19 bp, Homo sapiens
  siRNA target sequence for HPSE (NM_006665.2,1254-1272).
cccgaatgggaatagaagt

SEQ ID NO: 202291 - DNA, 19 bp, Homo sapiens
  siRNA target sequence for HPSE (NM_006665.2,1274-1292).
gtgatgaggcaagtattct

SEQ ID NO: 202292 - DNA, 19 bp, Homo sapiens
  siRNA target sequence for HPSE (NM_006665.2,1330-1348).
cgatcctttacctgattat

SEQ ID NO: 202293 - DNA, 19 bp, Homo sapiens
  siRNA target sequence for HPSE (NM_006665.2,1331-1349).
gatcctttacctgattatt

SEQ ID NO: 202294 - DNA, 19 bp, Homo sapiens
  siRNA target sequence for HPSE (NM_006665.2,1341-1359).
ctgattattggctatctct

SEQ ID NO: 202295 - DNA, 19 bp, Homo sapiens
  siRNA target sequence for HPSE (NM_006665.2,1350-1368).
ggctatctcttctgttcaa

SEQ ID NO: 202296 - DNA, 19 bp, Homo sapiens
  siRNA target sequence for HPSE (NM_006665.2,1398-1416).
caagcgtgcaaggttcaaa

SEQ ID NO: 202297 - DNA, 19 bp, Homo sapiens
  siRNA target sequence for HPSE (NM_006665.2,1402-1420).
cgtgcaaggttcaaagaga

SEQ ID NO: 202298 - DNA, 19 bp, Homo sapiens
  siRNA target sequence for HPSE (NM_006665.2,1419-1437).
gaaggaagcttcgagtata

SEQ ID NO: 202299 - DNA, 19 bp, Homo sapiens
  siRNA target sequence for HPSE (NM_006665.2,1422-1440).
ggaagcttcgagtatacct

SEQ ID NO: 202300 - DNA, 19 bp, Homo sapiens
  siRNA target sequence for HPSE (NM_006665.2,1423-1441).
gaagcttcgagtatacctt

SEQ ID NO: 202301 - DNA, 19 bp, Homo sapiens
  siRNA target sequence for HPSE (NM_006665.2,1438-1456).
ccttcattgcacaaacact

SEQ ID NO: 202302 - DNA, 19 bp, Homo sapiens
  siRNA target sequence for HPSE (NM_006665.2,1453-1471).
cactgacaatccaaggtat

SEQ ID NO: 202303 - DNA, 19 bp, Homo sapiens
  siRNA target sequence for HPSE (NM_006665.2,1455-1473).
ctgacaatccaaggtataa

SEQ ID NO: 202304 - DNA, 19 bp, Homo sapiens
  siRNA target sequence for HPSE (NM_006665.2,1488-1506).
ctctgtatgccataaacct

SEQ ID NO: 202305 - DNA, 19 bp, Homo sapiens
  siRNA target sequence for HPSE (NM_006665.2,1508-1526).
cataatgtcaccaagtact

SEQ ID NO: 202306 - DNA, 19 bp, Homo sapiens
  siRNA target sequence for HPSE (NM_006665.2,1528-1546).
gcggttaccctatcctttt

SEQ ID NO: 202307 - DNA, 19 bp, Homo sapiens
  siRNA target sequence for HPSE (NM_006665.2,1529-1547).
cggttaccctatccttttt

SEQ ID NO: 202308 - DNA, 19 bp, Homo sapiens
  siRNA target sequence for HPSE (NM_006665.2,1586-1604).
ggacctcatggattacttt

SEQ ID NO: 202309 - DNA, 19 bp, Homo sapiens
  siRNA target sequence for HPSE (NM_006665.2,1606-1624).
caaatctgtccaactcaat

SEQ ID NO: 202310 - DNA, 19 bp, Homo sapiens
  siRNA target sequence for HPSE (NM_006665.2,1615-1633).
ccaactcaatggtctaact

SEQ ID NO: 202311 - DNA, 19 bp, Homo sapiens
  siRNA target sequence for HPSE (NM_006665.2,1619-1637).
ctcaatggtctaactctaa

SEQ ID NO: 202312 - DNA, 19 bp, Homo sapiens
  siRNA target sequence for HPSE (NM_006665.2,1660-1678).
gccacctttaatggaaaaa

SEQ ID NO: 202313 - DNA, 19 bp, Homo sapiens
  siRNA target sequence for HPSE (NM_006665.2,1702-1720).
gggcttgccagctttctca

SEQ ID NO: 202314 - DNA, 19 bp, Homo sapiens
  siRNA target sequence for HPSE (NM_006665.2,1703-1721).
ggcttgccagctttctcat

SEQ ID NO: 202315 - DNA, 19 bp, Homo sapiens
  siRNA target sequence for HPSE (NM_006665.2,1708-1726).
gccagctttctcatatagt

SEQ ID NO: 202316 - DNA, 19 bp, Homo sapiens
  siRNA target sequence for IDUA (NM_000203.2,499-517).
gggccacttcactgacttt

SEQ ID NO: 202317 - DNA, 19 bp, Homo sapiens
  siRNA target sequence for IDUA (NM_000203.2,812-830).
cacgacggtaccaacttct

SEQ ID NO: 202318 - DNA, 19 bp, Homo sapiens
  siRNA target sequence for IDUA (NM_000203.2,815-833).
gacggtaccaacttcttca

SEQ ID NO: 202319 - DNA, 19 bp, Homo sapiens
  siRNA target sequence for IDUA (NM_000203.2,848-866).
gtgcggctggactacatct

SEQ ID NO: 202320 - DNA, 19 bp, Homo sapiens
  siRNA target sequence for GBA (NM_000157.1,570-588).
gaagaaggaatcggatata

SEQ ID NO: 202321 - DNA, 19 bp, Homo sapiens
  siRNA target sequence for GBA (NM_000157.1,1411-1429).
ccaattgggtgcgtaactt

SEQ ID NO: 202322 - DNA, 19 bp, Homo sapiens
  siRNA target sequence for GBA (NM_000157.1,1412-1430).
caattgggtgcgtaacttt

SEQ ID NO: 202323 - DNA, 19 bp, Homo sapiens
  siRNA target sequence for GBA (NM_000157.1,1433-1451).
cgacagtcccatcattgta

SEQ ID NO: 202324 - DNA, 19 bp, Homo sapiens
  siRNA target sequence for GALC (NM_000153.1,410-428).
ggcaacctcccgacttcta

SEQ ID NO: 202325 - DNA, 19 bp, Homo sapiens
  siRNA target sequence for GALC (NM_000153.1,415-433).
cctcccgacttctagtaaa

SEQ ID NO: 202326 - DNA, 19 bp, Homo sapiens
  siRNA target sequence for GALC (NM_000153.1,416-434).
ctcccgacttctagtaaat

SEQ ID NO: 202327 - DNA, 19 bp, Homo sapiens
  siRNA target sequence for GALC (NM_000153.1,418-436).
cccgacttctagtaaatta

SEQ ID NO: 202328 - DNA, 19 bp, Homo sapiens
  siRNA target sequence for GALC (NM_000153.1,444-462).
ccctatcgttctcagatat

SEQ ID NO: 202329 - DNA, 19 bp, Homo sapiens
  siRNA target sequence for GALC (NM_000153.1,445-463).
cctatcgttctcagatatt

SEQ ID NO: 202330 - DNA, 19 bp, Homo sapiens
  siRNA target sequence for GALC (NM_000153.1,451-469).
gttctcagatattggatta

SEQ ID NO: 202331 - DNA, 19 bp, Homo sapiens
  siRNA target sequence for GALC (NM_000153.1,473-491).
ctttaagccgaattttggt

SEQ ID NO: 202332 - DNA, 19 bp, Homo sapiens
  siRNA target sequence for GALC (NM_000153.1,552-570).
gagccctcccacatgcatt

SEQ ID NO: 202333 - DNA, 19 bp, Homo sapiens
  siRNA target sequence for GALC (NM_000153.1,554-572).
gccctcccacatgcattat

SEQ ID NO: 202334 - DNA, 19 bp, Homo sapiens
  siRNA target sequence for GALC (NM_000153.1,632-650).
gaggaatcccaatattaca

SEQ ID NO: 202335 - DNA, 19 bp, Homo sapiens
  siRNA target sequence for GALC (NM_000153.1,634-652).
ggaatcccaatattacact

SEQ ID NO: 202336 - DNA, 19 bp, Homo sapiens
  siRNA target sequence for GALC (NM_000153.1,694-712).
gtttcgactggccttatgt

SEQ ID NO: 202337 - DNA, 19 bp, Homo sapiens
  siRNA target sequence for GALC (NM_000153.1,698-716).
cgactggccttatgtcaat

SEQ ID NO: 202338 - DNA, 19 bp, Homo sapiens
  siRNA target sequence for GALC (NM_000153.1,701-719).
ctggccttatgtcaatctt

SEQ ID NO: 202339 - DNA, 19 bp, Homo sapiens
  siRNA target sequence for GALC (NM_000153.1,759-777).
gccaagcgttaccatgatt

SEQ ID NO: 202340 - DNA, 19 bp, Homo sapiens
  siRNA target sequence for GALC (NM_000153.1,760-778).
ccaagcgttaccatgattt

SEQ ID NO: 202341 - DNA, 19 bp, Homo sapiens
  siRNA target sequence for GALC (NM_000153.1,865-883).
gtctccagcgagtgaaaat

SEQ ID NO: 202342 - DNA, 19 bp, Homo sapiens
  siRNA target sequence for GALC (NM_000153.1,867-885).
ctccagcgagtgaaaatca

SEQ ID NO: 202343 - DNA, 19 bp, Homo sapiens
  siRNA target sequence for GALC (NM_000153.1,869-887).
ccagcgagtgaaaatcata

SEQ ID NO: 202344 - DNA, 19 bp, Homo sapiens
  siRNA target sequence for GALC (NM_000153.1,1072-1090).
gctgctggggtcgcatttt

SEQ ID NO: 202345 - DNA, 19 bp, Homo sapiens
  siRNA target sequence for GALC (NM_000153.1,1073-1091).
ctgctggggtcgcatttta

SEQ ID NO: 202346 - DNA, 19 bp, Homo sapiens
  siRNA target sequence for GALC (NM_000153.1,1075-1093).
gctggggtcgcattttaaa

SEQ ID NO: 202347 - DNA, 19 bp, Homo sapiens
  siRNA target sequence for GALC (NM_000153.1,1076-1094).
ctggggtcgcattttaaat

SEQ ID NO: 202348 - DNA, 19 bp, Homo sapiens
  siRNA target sequence for GALC (NM_000153.1,1080-1098).
ggtcgcattttaaatcaga

SEQ ID NO: 202349 - DNA, 19 bp, Homo sapiens
  siRNA target sequence for GALC (NM_000153.1,1081-1099).
gtcgcattttaaatcagaa

SEQ ID NO: 202350 - DNA, 19 bp, Homo sapiens
  siRNA target sequence for GALC (NM_000153.1,1083-1101).
cgcattttaaatcagaatt

SEQ ID NO: 202351 - DNA, 19 bp, Homo sapiens
  siRNA target sequence for GALC (NM_000153.1,1124-1142).
cacaatcgcatggaattta

SEQ ID NO: 202352 - DNA, 19 bp, Homo sapiens
  siRNA target sequence for GALC (NM_000153.1,1135-1153).
ggaatttagtggctagtta

SEQ ID NO: 202353 - DNA, 19 bp, Homo sapiens
  siRNA target sequence for GALC (NM_000153.1,1173-1191).
gggagatgcgggttgatga

SEQ ID NO: 202354 - DNA, 19 bp, Homo sapiens
  siRNA target sequence for GALC (NM_000153.1,1212-1230).
gggcactacgtggtagaat

SEQ ID NO: 202355 - DNA, 19 bp, Homo sapiens
  siRNA target sequence for GALC (NM_000153.1,1214-1232).
gcactacgtggtagaatct

SEQ ID NO: 202356 - DNA, 19 bp, Homo sapiens
  siRNA target sequence for GALC (NM_000153.1,1267-1285).
ctcaacctggctggtatta

SEQ ID NO: 202357 - DNA, 19 bp, Homo sapiens
  siRNA target sequence for GALC (NM_000153.1,1401-1419).
cggccatttcttccttatt

SEQ ID NO: 202358 - DNA, 19 bp, Homo sapiens
  siRNA target sequence for GALC (NM_000153.1,1479-1497).
gagctacaggtatggtata

SEQ ID NO: 202359 - DNA, 19 bp, Homo sapiens
  siRNA target sequence for GALC (NM_000153.1,1482-1500).
ctacaggtatggtatacca

SEQ ID NO: 202360 - DNA, 19 bp, Homo sapiens
  siRNA target sequence for GALC (NM_000153.1,1487-1505).
ggtatggtataccaaactt

SEQ ID NO: 202361 - DNA, 19 bp, Homo sapiens
  siRNA target sequence for GALC (NM_000153.1,1562-1580).
cagcgatggcagtttcaca

SEQ ID NO: 202362 - DNA, 19 bp, Homo sapiens
  siRNA target sequence for GALC (NM_000153.1,1667-1685).
gcccttcccaagtacctat

SEQ ID NO: 202363 - DNA, 19 bp, Homo sapiens
  siRNA target sequence for GALC (NM_000153.1,1668-1686).
cccttcccaagtacctata

SEQ ID NO: 202364 - DNA, 19 bp, Homo sapiens
  siRNA target sequence for GALC (NM_000153.1,1669-1687).
ccttcccaagtacctataa

SEQ ID NO: 202365 - DNA, 19 bp, Homo sapiens
  siRNA target sequence for GALC (NM_000153.1,1678-1696).
gtacctataaggatgattt

SEQ ID NO: 202366 - DNA, 19 bp, Homo sapiens
  siRNA target sequence for GALC (NM_000153.1,1681-1699).
cctataaggatgatttcaa

SEQ ID NO: 202367 - DNA, 19 bp, Homo sapiens
  siRNA target sequence for GALC (NM_000153.1,1728-1746).
ccaaactttgctgatcaaa

SEQ ID NO: 202368 - DNA, 19 bp, Homo sapiens
  siRNA target sequence for GALC (NM_000153.1,1738-1756).
ctgatcaaactggtgtatt

SEQ ID NO: 202369 - DNA, 19 bp, Homo sapiens
  siRNA target sequence for GALC (NM_000153.1,1843-1861).
ccgatgcatccaacacaat

SEQ ID NO: 202370 - DNA, 19 bp, Homo sapiens
  siRNA target sequence for GALC (NM_000153.1,1856-1874).
cacaatcagtattatagga

SEQ ID NO: 202371 - DNA, 19 bp, Homo sapiens
  siRNA target sequence for GALC (NM_000153.1,1885-1903).
ggaccaatctgactataaa

SEQ ID NO: 202372 - DNA, 19 bp, Homo sapiens
  siRNA target sequence for GALC (NM_000153.1,1943-1961).
gttcattgcaggaagagta

SEQ ID NO: 202373 - DNA, 19 bp, Homo sapiens
  siRNA target sequence for GALC (NM_000153.1,2033-2051).
ggttacaggtgatttagct

SEQ ID NO: 202374 - DNA, 19 bp, Homo sapiens
  siRNA target sequence for GALC (NM_000153.1,2068-2086).
ctttaggacgtgttgaagt

SEQ ID NO: 202375 - DNA, 19 bp, Homo sapiens
  siRNA target sequence for GALC (NM_000153.1,2102-2120).
gtatacactcacgttaact

SEQ ID NO: 202376 - DNA, 19 bp, Homo sapiens
  siRNA target sequence for GALC (NM_000153.1,2107-2125).
cactcacgttaactattaa

SEQ ID NO: 202377 - DNA, 19 bp, Homo sapiens
  siRNA target sequence for GALC (NM_000153.1,2214-2232).
ggaactcactcctttgaat

SEQ ID NO: 202378 - DNA, 19 bp, Homo sapiens
  siRNA target sequence for GALC (NM_000153.1,2215-2233).
gaactcactcctttgaatt

SEQ ID NO: 202379 - DNA, 19 bp, Homo sapiens
  siRNA target sequence for GALC (NM_000153.1,2236-2254).
cacagtttgacaactttct

SEQ ID NO: 202380 - DNA, 19 bp, Homo sapiens
  siRNA target sequence for FUCA1 (NM_000147.2,418-436).
cacgaaggcttcacaaact

SEQ ID NO: 202381 - DNA, 19 bp, Homo sapiens
  siRNA target sequence for FUCA1 (NM_000147.2,479-497).
ggcctcatcgggatttggt

SEQ ID NO: 202382 - DNA, 19 bp, Homo sapiens
  siRNA target sequence for FUCA1 (NM_000147.2,480-498).
gcctcatcgggatttggtt

SEQ ID NO: 202383 - DNA, 19 bp, Homo sapiens
  siRNA target sequence for FUCA1 (NM_000147.2,488-506).
gggatttggttggtgaatt

SEQ ID NO: 202384 - DNA, 19 bp, Homo sapiens
  siRNA target sequence for FUCA1 (NM_000147.2,564-582).
gtggttccatccactctat

SEQ ID NO: 202385 - DNA, 19 bp, Homo sapiens
  siRNA target sequence for FUCA1 (NM_000147.2,566-584).
ggttccatccactctatct

SEQ ID NO: 202386 - DNA, 19 bp, Homo sapiens
  siRNA target sequence for FUCA1 (NM_000147.2,567-585).
gttccatccactctatcta

SEQ ID NO: 202387 - DNA, 19 bp, Homo sapiens
  siRNA target sequence for FUCA1 (NM_000147.2,574-592).
ccactctatctacttgata

SEQ ID NO: 202388 - DNA, 19 bp, Homo sapiens
  siRNA target sequence for FUCA1 (NM_000147.2,577-595).
ctctatctacttgataaga

SEQ ID NO: 202389 - DNA, 19 bp, Homo sapiens
  siRNA target sequence for FUCA1 (NM_000147.2,579-597).
ctatctacttgataagaaa

SEQ ID NO: 202390 - DNA, 19 bp, Homo sapiens
  siRNA target sequence for FUCA1 (NM_000147.2,643-661).
gagctgtacgaccttgtta

SEQ ID NO: 202391 - DNA, 19 bp, Homo sapiens
  siRNA target sequence for FUCA1 (NM_000147.2,646-664).
ctgtacgaccttgttaaca

SEQ ID NO: 202392 - DNA, 19 bp, Homo sapiens
  siRNA target sequence for FUCA1 (NM_000147.2,722-740).
ggaactccacaaattttct

SEQ ID NO: 202393 - DNA, 19 bp, Homo sapiens
  siRNA target sequence for FUCA1 (NM_000147.2,723-741).
gaactccacaaattttctt

SEQ ID NO: 202394 - DNA, 19 bp, Homo sapiens
  siRNA target sequence for FUCA1 (NM_000147.2,771-789).
ggatgaggtggtagtaaat

SEQ ID NO: 202395 - DNA, 19 bp, Homo sapiens
  siRNA target sequence for FUCA1 (NM_000147.2,815-833).
gtcaccatggaggatacta

SEQ ID NO: 202396 - DNA, 19 bp, Homo sapiens
  siRNA target sequence for FUCA1 (NM_000147.2,890-908).
gcaccagcattgacaagtt

SEQ ID NO: 202397 - DNA, 19 bp, Homo sapiens
  siRNA target sequence for FUCA1 (NM_000147.2,976-994).
ctggttcagacagtaagtt

SEQ ID NO: 202398 - DNA, 19 bp, Homo sapiens
  siRNA target sequence for FUCA1 (NM_000147.2,1014-1032).
gaacattggaccaactaaa

SEQ ID NO: 202399 - DNA, 19 bp, Homo sapiens
  siRNA target sequence for FUCA1 (NM_000147.2,1045-1063).
gttcccatcttccaagaaa

SEQ ID NO: 202400 - DNA, 19 bp, Homo sapiens
  siRNA target sequence for FUCA1 (NM_000147.2,1080-1098).
gaaatggctgagcatcaat

SEQ ID NO: 202401 - DNA, 19 bp, Homo sapiens
  siRNA target sequence for FUCA1 (NM_000147.2,1172-1190).
caaagggatcggctgttta

SEQ ID NO: 202402 - DNA, 19 bp, Homo sapiens
  siRNA target sequence for FUCA1 (NM_000147.2,1210-1228).
ccagaaaatggagtcttaa

SEQ ID NO: 202403 - DNA, 19 bp, Homo sapiens
  siRNA target sequence for FUCA1 (NM_000147.2,1231-1249).
cttgaatcccccataacta

SEQ ID NO: 202404 - DNA, 19 bp, Homo sapiens
  siRNA target sequence for FUCA1 (NM_000147.2,1298-1316).
ggtccacagatccagataa

SEQ ID NO: 202405 - DNA, 19 bp, Homo sapiens
  siRNA target sequence for FUCA1 (NM_000147.2,1302-1320).
cacagatccagataaaggt

SEQ ID NO: 202406 - DNA, 19 bp, Homo sapiens
  siRNA target sequence for FUCA1 (NM_000147.2,1310-1328).
cagataaaggtctcttcat

SEQ ID NO: 202407 - DNA, 19 bp, Homo sapiens
  siRNA target sequence for FUCA1 (NM_000147.2,1366-1384).
gagtttgcttggactataa

SEQ ID NO: 202408 - DNA, 19 bp, Homo sapiens
  siRNA target sequence for TREH (NM_007180.1,134-152).
ccctgtgagagtgagattt

SEQ ID NO: 202409 - DNA, 19 bp, Homo sapiens
  siRNA target sequence for TREH (NM_007180.1,135-153).
cctgtgagagtgagattta

SEQ ID NO: 202410 - DNA, 19 bp, Homo sapiens
  siRNA target sequence for TREH (NM_007180.1,166-184).
gctcctaaaccaagttcaa

SEQ ID NO: 202411 - DNA, 19 bp, Homo sapiens
  siRNA target sequence for TREH (NM_007180.1,220-238).
ggacatgccactgtctata

SEQ ID NO: 202412 - DNA, 19 bp, Homo sapiens
  siRNA target sequence for TREH (NM_007180.1,232-250).
gtctatagctccagaacaa

SEQ ID NO: 202413 - DNA, 19 bp, Homo sapiens
  siRNA target sequence for TREH (NM_007180.1,234-252).
ctatagctccagaacaagt

SEQ ID NO: 202414 - DNA, 19 bp, Homo sapiens
  siRNA target sequence for TREH (NM_007180.1,318-336).
cgtttgtccacgaacactt

SEQ ID NO: 202415 - DNA, 19 bp, Homo sapiens
  siRNA target sequence for TREH (NM_007180.1,547-565).
gcctggcggtcgctttgtt

SEQ ID NO: 202416 - DNA, 19 bp, Homo sapiens
  siRNA target sequence for TREH (NM_007180.1,549-567).
ctggcggtcgctttgttga

SEQ ID NO: 202417 - DNA, 19 bp, Homo sapiens
  siRNA target sequence for TREH (NM_007180.1,552-570).
gcggtcgctttgttgagtt

SEQ ID NO: 202418 - DNA, 19 bp, Homo sapiens
  siRNA target sequence for TREH (NM_007180.1,558-576).
gctttgttgagttctacta

SEQ ID NO: 202419 - DNA, 19 bp, Homo sapiens
  siRNA target sequence for TREH (NM_007180.1,738-756).
ccctcatgatggattgcta

SEQ ID NO: 202420 - DNA, 19 bp, Homo sapiens
  siRNA target sequence for TREH (NM_007180.1,769-787).
caatgacaccgcctttcta

SEQ ID NO: 202421 - DNA, 19 bp, Homo sapiens
  siRNA target sequence for TREH (NM_007180.1,800-818).
gaaacactagccttggaat

SEQ ID NO: 202422 - DNA, 19 bp, Homo sapiens
  siRNA target sequence for TREH (NM_007180.1,821-839).
gacttttggaccaagaaca

SEQ ID NO: 202423 - DNA, 19 bp, Homo sapiens
  siRNA target sequence for TREH (NM_007180.1,874-892).
cctcctgaatcgctattat

SEQ ID NO: 202424 - DNA, 19 bp, Homo sapiens
  siRNA target sequence for TREH (NM_007180.1,1066-1084).
cggcatccgaacaagcaaa

SEQ ID NO: 202425 - DNA, 19 bp, Homo sapiens
  siRNA target sequence for TREH (NM_007180.1,1127-1145).
gagctgatgagcaacttct

SEQ ID NO: 202426 - DNA, 19 bp, Homo sapiens
  siRNA target sequence for TREH (NM_007180.1,1129-1147).
gctgatgagcaacttctat

SEQ ID NO: 202427 - DNA, 19 bp, Homo sapiens
  siRNA target sequence for TREH (NM_007180.1,1169-1187).
caggccacgaagtacagaa

SEQ ID NO: 202428 - DNA, 19 bp, Homo sapiens
  siRNA target sequence for TREH (NM_007180.1,1242-1260).
ccggagcctggttcgatta

SEQ ID NO: 202429 - DNA, 19 bp, Homo sapiens
  siRNA target sequence for TREH (NM_007180.1,1245-1263).
gagcctggttcgattacga

SEQ ID NO: 202430 - DNA, 19 bp, Homo sapiens
  siRNA target sequence for TREH (NM_007180.1,1349-1367).
gcggacaaggctctgaaat

SEQ ID NO: 202431 - DNA, 19 bp, Homo sapiens
  siRNA target sequence for TREH (NM_007180.1,1350-1368).
cggacaaggctctgaaata

SEQ ID NO: 202432 - DNA, 19 bp, Homo sapiens
  siRNA target sequence for TREH (NM_007180.1,1492-1510).
ggccaaggcacctttacgt

SEQ ID NO: 202433 - DNA, 19 bp, Homo sapiens
  siRNA target sequence for TREH (NM_007180.1,1543-1561).
gaattggatccgaaccaat

SEQ ID NO: 202434 - DNA, 19 bp, Homo sapiens
  siRNA target sequence for TREH (NM_007180.1,1549-1567).
gatccgaaccaattttgat

SEQ ID NO: 202435 - DNA, 19 bp, Homo sapiens
  siRNA target sequence for TREH (NM_007180.1,1584-1602).
cagccatgtatgagaagta

SEQ ID NO: 202436 - DNA, 19 bp, Homo sapiens
  siRNA target sequence for LCT (NM_002299.2,20-38).
gtcttggcatgtagtcttt

SEQ ID NO: 202437 - DNA, 19 bp, Homo sapiens
  siRNA target sequence for LCT (NM_002299.2,22-40).
cttggcatgtagtctttat

SEQ ID NO: 202438 - DNA, 19 bp, Homo sapiens
  siRNA target sequence for LCT (NM_002299.2,76-94).
gggagtctgatagaaattt

SEQ ID NO: 202439 - DNA, 19 bp, Homo sapiens
  siRNA target sequence for LCT (NM_002299.2,103-121).
ccgctggtcctctaaccaa

SEQ ID NO: 202440 - DNA, 19 bp, Homo sapiens
  siRNA target sequence for LCT (NM_002299.2,104-122).
cgctggtcctctaaccaat

SEQ ID NO: 202441 - DNA, 19 bp, Homo sapiens
  siRNA target sequence for LCT (NM_002299.2,178-196).
caggggacaaagacatgta

SEQ ID NO: 202442 - DNA, 19 bp, Homo sapiens
  siRNA target sequence for LCT (NM_002299.2,181-199).
gggacaaagacatgtatgt

SEQ ID NO: 202443 - DNA, 19 bp, Homo sapiens
  siRNA target sequence for LCT (NM_002299.2,220-238).
ctttcctgccagaatactt

SEQ ID NO: 202444 - DNA, 19 bp, Homo sapiens
  siRNA target sequence for LCT (NM_002299.2,260-278).
gatcacccattataaggta

SEQ ID NO: 202445 - DNA, 19 bp, Homo sapiens
  siRNA target sequence for LCT (NM_002299.2,265-283).
cccattataaggtatttct

SEQ ID NO: 202446 - DNA, 19 bp, Homo sapiens
  siRNA target sequence for LCT (NM_002299.2,267-285).
cattataaggtatttctgt

SEQ ID NO: 202447 - DNA, 19 bp, Homo sapiens
  siRNA target sequence for LCT (NM_002299.2,555-573).
cttccccaccaggaatcaa

SEQ ID NO: 202448 - DNA, 19 bp, Homo sapiens
  siRNA target sequence for LCT (NM_002299.2,623-641).
gatttaccacgaaagctat

SEQ ID NO: 202449 - DNA, 19 bp, Homo sapiens
  siRNA target sequence for LCT (NM_002299.2,629-647).
ccacgaaagctatgctttt

SEQ ID NO: 202450 - DNA, 19 bp, Homo sapiens
  siRNA target sequence for LCT (NM_002299.2,669-687).
gtcctgcgagctgaagata

SEQ ID NO: 202451 - DNA, 19 bp, Homo sapiens
  siRNA target sequence for LCT (NM_002299.2,727-745).
cccaggacacggtcgattt

SEQ ID NO: 202452 - DNA, 19 bp, Homo sapiens
  siRNA target sequence for LCT (NM_002299.2,749-767).
ctctcttgatttgtcttat

SEQ ID NO: 202453 - DNA, 19 bp, Homo sapiens
  siRNA target sequence for LCT (NM_002299.2,751-769).
ctcttgatttgtcttatga

SEQ ID NO: 202454 - DNA, 19 bp, Homo sapiens
  siRNA target sequence for LCT (NM_002299.2,761-779).
gtcttatgaatgccaaaat

SEQ ID NO: 202455 - DNA, 19 bp, Homo sapiens
  siRNA target sequence for LCT (NM_002299.2,791-809).
gcggcagaagctgagtaaa

SEQ ID NO: 202456 - DNA, 19 bp, Homo sapiens
  siRNA target sequence for LCT (NM_002299.2,792-810).
cggcagaagctgagtaaat

SEQ ID NO: 202457 - DNA, 19 bp, Homo sapiens
  siRNA target sequence for LCT (NM_002299.2,793-811).
ggcagaagctgagtaaatt

SEQ ID NO: 202458 - DNA, 19 bp, Homo sapiens
  siRNA target sequence for LCT (NM_002299.2,907-925).
gcctttttgaagccataaa

SEQ ID NO: 202459 - DNA, 19 bp, Homo sapiens
  siRNA target sequence for LCT (NM_002299.2,938-956).
gctcaccattgggtttgat

SEQ ID NO: 202460 - DNA, 19 bp, Homo sapiens
  siRNA target sequence for LCT (NM_002299.2,939-957).
ctcaccattgggtttgata

SEQ ID NO: 202461 - DNA, 19 bp, Homo sapiens
  siRNA target sequence for LCT (NM_002299.2,948-966).
gggtttgatattaatgagt

SEQ ID NO: 202462 - DNA, 19 bp, Homo sapiens
  siRNA target sequence for LCT (NM_002299.2,949-967).
ggtttgatattaatgagtt

SEQ ID NO: 202463 - DNA, 19 bp, Homo sapiens
  siRNA target sequence for LCT (NM_002299.2,954-972).
gatattaatgagtttctga

SEQ ID NO: 202464 - DNA, 19 bp, Homo sapiens
  siRNA target sequence for LCT (NM_002299.2,963-981).
gagtttctgagttgttcat

SEQ ID NO: 202465 - DNA, 19 bp, Homo sapiens
  siRNA target sequence for LCT (NM_002299.2,1101-1119).
gaagcatttgccaatcagt

SEQ ID NO: 202466 - DNA, 19 bp, Homo sapiens
  siRNA target sequence for LCT (NM_002299.2,1137-1155).
gccttcctgcaggatactt

SEQ ID NO: 202467 - DNA, 19 bp, Homo sapiens
  siRNA target sequence for LCT (NM_002299.2,1425-1443).
ccaggcgttgcctactaca

SEQ ID NO: 202468 - DNA, 19 bp, Homo sapiens
  siRNA target sequence for LCT (NM_002299.2,1426-1444).
caggcgttgcctactacaa

SEQ ID NO: 202469 - DNA, 19 bp, Homo sapiens
  siRNA target sequence for LCT (NM_002299.2,1702-1720).
gagtggcctcttttaaggt

SEQ ID NO: 202470 - DNA, 19 bp, Homo sapiens
  siRNA target sequence for LCT (NM_002299.2,1750-1768).
gaacttggcaccactacaa

SEQ ID NO: 202471 - DNA, 19 bp, Homo sapiens
  siRNA target sequence for LCT (NM_002299.2,1948-1966).
ggacccagatccaacagat

SEQ ID NO: 202472 - DNA, 19 bp, Homo sapiens
  siRNA target sequence for LCT (NM_002299.2,2052-2070).
ctgggtctgtcgcattaca

SEQ ID NO: 202473 - DNA, 19 bp, Homo sapiens
  siRNA target sequence for LCT (NM_002299.2,2105-2123).
ctgcatccctagctatgat

SEQ ID NO: 202474 - DNA, 19 bp, Homo sapiens
  siRNA target sequence for LCT (NM_002299.2,2226-2244).
gtatccctggaatacacaa

SEQ ID NO: 202475 - DNA, 19 bp, Homo sapiens
  siRNA target sequence for LCT (NM_002299.2,2242-2260).
caagaggaaaagttccaat

SEQ ID NO: 202476 - DNA, 19 bp, Homo sapiens
  siRNA target sequence for LCT (NM_002299.2,2245-2263).
gaggaaaagttccaatata

SEQ ID NO: 202477 - DNA, 19 bp, Homo sapiens
  siRNA target sequence for LCT (NM_002299.2,2306-2324).
ctttgatgattccttaaga

SEQ ID NO: 202478 - DNA, 19 bp, Homo sapiens
  siRNA target sequence for LCT (NM_002299.2,2317-2335).
ccttaagagtagactactt

SEQ ID NO: 202479 - DNA, 19 bp, Homo sapiens
  siRNA target sequence for LCT (NM_002299.2,2323-2341).
gagtagactacttcaatca

SEQ ID NO: 202480 - DNA, 19 bp, Homo sapiens
  siRNA target sequence for LCT (NM_002299.2,2328-2346).
gactacttcaatcaatata

SEQ ID NO: 202481 - DNA, 19 bp, Homo sapiens
  siRNA target sequence for LCT (NM_002299.2,2384-2402).
ggatgttcgttcctacatt

SEQ ID NO: 202482 - DNA, 19 bp, Homo sapiens
  siRNA target sequence for LCT (NM_002299.2,2519-2537).
ctttttcactagcatcata

SEQ ID NO: 202483 - DNA, 19 bp, Homo sapiens
  siRNA target sequence for LCT (NM_002299.2,2555-2573).
caccaagggggcaaaaaga

SEQ ID NO: 202484 - DNA, 19 bp, Homo sapiens
  siRNA target sequence for LCT (NM_002299.2,2557-2575).
ccaagggggcaaaaagact

SEQ ID NO: 202485 - DNA, 19 bp, Homo sapiens
  siRNA target sequence for LCT (NM_002299.2,2576-2594).
gctaccacctaatacagta

SEQ ID NO: 202486 - DNA, 19 bp, Homo sapiens
  siRNA target sequence for LCT (NM_002299.2,2577-2595).
ctaccacctaatacagtaa

SEQ ID NO: 202487 - DNA, 19 bp, Homo sapiens
  siRNA target sequence for LCT (NM_002299.2,2655-2673).
gtcgtttgggaaaagttct

SEQ ID NO: 202488 - DNA, 19 bp, Homo sapiens
  siRNA target sequence for LCT (NM_002299.2,2713-2731).
ggacgtttcgggatgactt

SEQ ID NO: 202489 - DNA, 19 bp, Homo sapiens
  siRNA target sequence for LCT (NM_002299.2,2714-2732).
gacgtttcgggatgacttt

SEQ ID NO: 202490 - DNA, 19 bp, Homo sapiens
  siRNA target sequence for LCT (NM_002299.2,2746-2764).
cctcttccgcttatcagat

SEQ ID NO: 202491 - DNA, 19 bp, Homo sapiens
  siRNA target sequence for LCT (NM_002299.2,2747-2765).
ctcttccgcttatcagatt

SEQ ID NO: 202492 - DNA, 19 bp, Homo sapiens
  siRNA target sequence for LCT (NM_002299.2,2749-2767).
cttccgcttatcagattga

SEQ ID NO: 202493 - DNA, 19 bp, Homo sapiens
  siRNA target sequence for LCT (NM_002299.2,2824-2842).
caccagggagcaatgtgaa

SEQ ID NO: 202494 - DNA, 19 bp, Homo sapiens
  siRNA target sequence for LCT (NM_002299.2,2928-2946).
gcctaccgcttctctatct

SEQ ID NO: 202495 - DNA, 19 bp, Homo sapiens
  siRNA target sequence for LCT (NM_002299.2,2970-2988).
gggagaaacagctctatca

SEQ ID NO: 202496 - DNA, 19 bp, Homo sapiens
  siRNA target sequence for LCT (NM_002299.2,2971-2989).
ggagaaacagctctatcaa

SEQ ID NO: 202497 - DNA, 19 bp, Homo sapiens
  siRNA target sequence for LCT (NM_002299.2,2992-3010).
gtcatggggttgattatta

SEQ ID NO: 202498 - DNA, 19 bp, Homo sapiens
  siRNA target sequence for LCT (NM_002299.2,2994-3012).
catggggttgattattaca

SEQ ID NO: 202499 - DNA, 19 bp, Homo sapiens
  siRNA target sequence for LCT (NM_002299.2,3032-3050).
ggtggcaagcaacatcttt

SEQ ID NO: 202500 - DNA, 19 bp, Homo sapiens
  siRNA target sequence for LCT (NM_002299.2,3118-3136).
ctgccttgattgacttgtt

SEQ ID NO: 202501 - DNA, 19 bp, Homo sapiens
  siRNA target sequence for LCT (NM_002299.2,3138-3156).
gacagctacgcagactttt

SEQ ID NO: 202502 - DNA, 19 bp, Homo sapiens
  siRNA target sequence for LCT (NM_002299.2,3142-3160).
gctacgcagacttttgttt

SEQ ID NO: 202503 - DNA, 19 bp, Homo sapiens
  siRNA target sequence for LCT (NM_002299.2,3161-3179).
ccagacctttggtgataga

SEQ ID NO: 202504 - DNA, 19 bp, Homo sapiens
  siRNA target sequence for LCT (NM_002299.2,3171-3189).
ggtgatagagtcaagtttt

SEQ ID NO: 202505 - DNA, 19 bp, Homo sapiens
  siRNA target sequence for LCT (NM_002299.2,3270-3288).
ggctgggcaccatatagga

SEQ ID NO: 202506 - DNA, 19 bp, Homo sapiens
  siRNA target sequence for LCT (NM_002299.2,3271-3289).
gctgggcaccatataggat

SEQ ID NO: 202507 - DNA, 19 bp, Homo sapiens
  siRNA target sequence for LCT (NM_002299.2,3312-3330).
catgccagagtctatcaca

SEQ ID NO: 202508 - DNA, 19 bp, Homo sapiens
  siRNA target sequence for LCT (NM_002299.2,3327-3345).
cacacgtacgatgagaaat

SEQ ID NO: 202509 - DNA, 19 bp, Homo sapiens
  siRNA target sequence for LCT (NM_002299.2,3732-3750).
ccttccacggcaatgaaca

SEQ ID NO: 202510 - DNA, 19 bp, Homo sapiens
  siRNA target sequence for LCT (NM_002299.2,3853-3871).
cgaacacggaggatactga

SEQ ID NO: 202511 - DNA, 19 bp, Homo sapiens
  siRNA target sequence for LCT (NM_002299.2,3859-3877).
cggaggatactgataggat

SEQ ID NO: 202512 - DNA, 19 bp, Homo sapiens
  siRNA target sequence for LCT (NM_002299.2,3863-3881).
ggatactgataggatattt

SEQ ID NO: 202513 - DNA, 19 bp, Homo sapiens
  siRNA target sequence for LCT (NM_002299.2,3916-3934).
cctacaggctcgatggtat

SEQ ID NO: 202514 - DNA, 19 bp, Homo sapiens
  siRNA target sequence for LCT (NM_002299.2,3917-3935).
ctacaggctcgatggtata

SEQ ID NO: 202515 - DNA, 19 bp, Homo sapiens
  siRNA target sequence for LCT (NM_002299.2,3958-3976).
ggtctctgatggacaactt

SEQ ID NO: 202516 - DNA, 19 bp, Homo sapiens
  siRNA target sequence for LCT (NM_002299.2,4008-4026).
ggactgtaccatgttgatt

SEQ ID NO: 202517 - DNA, 19 bp, Homo sapiens
  siRNA target sequence for LCT (NM_002299.2,4109-4127).
ggccagggaggatgagttt

SEQ ID NO: 202518 - DNA, 19 bp, Homo sapiens
  siRNA target sequence for LCT (NM_002299.2,4111-4129).
ccagggaggatgagtttct

SEQ ID NO: 202519 - DNA, 19 bp, Homo sapiens
  siRNA target sequence for LCT (NM_002299.2,4223-4241).
catttgggacacgttttct

SEQ ID NO: 202520 - DNA, 19 bp, Homo sapiens
  siRNA target sequence for LCT (NM_002299.2,4246-4264).
caccactgagggttgagaa

SEQ ID NO: 202521 - DNA, 19 bp, Homo sapiens
  siRNA target sequence for LCT (NM_002299.2,4341-4359).
gtgtcccactaccgttttt

SEQ ID NO: 202522 - DNA, 19 bp, Homo sapiens
  siRNA target sequence for LCT (NM_002299.2,4345-4363).
cccactaccgtttttccat

SEQ ID NO: 202523 - DNA, 19 bp, Homo sapiens
  siRNA target sequence for LCT (NM_002299.2,4389-4407).
ggaaccaccaggtacatca

SEQ ID NO: 202524 - DNA, 19 bp, Homo sapiens
  siRNA target sequence for LCT (NM_002299.2,4390-4408).
gaaccaccaggtacatcaa

SEQ ID NO: 202525 - DNA, 19 bp, Homo sapiens
  siRNA target sequence for LCT (NM_002299.2,4471-4489).
cccaggtgaccatttacca

SEQ ID NO: 202526 - DNA, 19 bp, Homo sapiens
  siRNA target sequence for LCT (NM_002299.2,4540-4558).
ccatcgtgcagcggtttaa

SEQ ID NO: 202527 - DNA, 19 bp, Homo sapiens
  siRNA target sequence for LCT (NM_002299.2,4623-4641).
gagccctttgtcattgctt

SEQ ID NO: 202528 - DNA, 19 bp, Homo sapiens
  siRNA target sequence for LCT (NM_002299.2,4668-4686).
gctccaggagtctccaata

SEQ ID NO: 202529 - DNA, 19 bp, Homo sapiens
  siRNA target sequence for LCT (NM_002299.2,4710-4728).
gttggccacaatctaataa

SEQ ID NO: 202530 - DNA, 19 bp, Homo sapiens
  siRNA target sequence for LCT (NM_002299.2,4858-4876).
cagccaggagatatgttca

SEQ ID NO: 202531 - DNA, 19 bp, Homo sapiens
  siRNA target sequence for LCT (NM_002299.2,4888-4906).
gctggtttgcacatcctat

SEQ ID NO: 202532 - DNA, 19 bp, Homo sapiens
  siRNA target sequence for LCT (NM_002299.2,4896-4914).
gcacatcctattttcaaga

SEQ ID NO: 202533 - DNA, 19 bp, Homo sapiens
  siRNA target sequence for LCT (NM_002299.2,4965-4983).
gctgcaggcctcaacaagt

SEQ ID NO: 202534 - DNA, 19 bp, Homo sapiens
  siRNA target sequence for LCT (NM_002299.2,4982-5000).
gtctcggctgccagaattt

SEQ ID NO: 202535 - DNA, 19 bp, Homo sapiens
  siRNA target sequence for LCT (NM_002299.2,4987-5005).
ggctgccagaatttacaga

SEQ ID NO: 202536 - DNA, 19 bp, Homo sapiens
  siRNA target sequence for LCT (NM_002299.2,5072-5090).
cgcctacaacctcaactat

SEQ ID NO: 202537 - DNA, 19 bp, Homo sapiens
  siRNA target sequence for LCT (NM_002299.2,5203-5221).
ggatcctgaactggttaaa

SEQ ID NO: 202538 - DNA, 19 bp, Homo sapiens
  siRNA target sequence for LCT (NM_002299.2,5265-5283).
gtgtcccagcgggaagaaa

SEQ ID NO: 202539 - DNA, 19 bp, Homo sapiens
  siRNA target sequence for LCT (NM_002299.2,5315-5333).
ccttcggacttacatcaat

SEQ ID NO: 202540 - DNA, 19 bp, Homo sapiens
  siRNA target sequence for LCT (NM_002299.2,5363-5381).
ggaccttcgaggatacaca

SEQ ID NO: 202541 - DNA, 19 bp, Homo sapiens
  siRNA target sequence for LCT (NM_002299.2,5389-5407).
gtgcgatggacaattttga

SEQ ID NO: 202542 - DNA, 19 bp, Homo sapiens
  siRNA target sequence for LCT (NM_002299.2,5391-5409).
gcgatggacaattttgagt

SEQ ID NO: 202543 - DNA, 19 bp, Homo sapiens
  siRNA target sequence for LCT (NM_002299.2,5429-5447).
gagatttggtctgcatttt

SEQ ID NO: 202544 - DNA, 19 bp, Homo sapiens
  siRNA target sequence for LCT (NM_002299.2,5507-5525).
ctctgtggtccgatgcaat

SEQ ID NO: 202545 - DNA, 19 bp, Homo sapiens
  siRNA target sequence for LCT (NM_002299.2,5656-5674).
cagctttgtacgttctctt

SEQ ID NO: 202546 - DNA, 19 bp, Homo sapiens
  siRNA target sequence for LCT (NM_002299.2,5706-5724).
gcatttctgtcatacaagt

SEQ ID NO: 202547 - DNA, 19 bp, Homo sapiens
  siRNA target sequence for LCT (NM_002299.2,5707-5725).
catttctgtcatacaagta

SEQ ID NO: 202548 - DNA, 19 bp, Homo sapiens
  siRNA target sequence for LCT (NM_002299.2,5726-5744).
ctgcaagcgctctaagcaa

SEQ ID NO: 202549 - DNA, 19 bp, Homo sapiens
  siRNA target sequence for LCT (NM_002299.2,5757-5775).
cgaagccaacaggaattga

SEQ ID NO: 202550 - DNA, 19 bp, Homo sapiens
  siRNA target sequence for CSMD1 (NM_033225.1,396-414).
gggtcccaatggcactatt

SEQ ID NO: 202551 - DNA, 19 bp, Homo sapiens
  siRNA target sequence for CSMD1 (NM_033225.1,476-494).
cgggcgagcgcaataggat

SEQ ID NO: 202552 - DNA, 19 bp, Homo sapiens
  siRNA target sequence for CSMD1 (NM_033225.1,477-495).
gggcgagcgcaataggata

SEQ ID NO: 202553 - DNA, 19 bp, Homo sapiens
  siRNA target sequence for CSMD1 (NM_033225.1,481-499).
gagcgcaataggatacagt

SEQ ID NO: 202554 - DNA, 19 bp, Homo sapiens
  siRNA target sequence for CSMD1 (NM_033225.1,498-516).
gttgtccttccataccttt

SEQ ID NO: 202555 - DNA, 19 bp, Homo sapiens
  siRNA target sequence for CSMD1 (NM_033225.1,675-693).
ccaaggtttcaaagcatta

SEQ ID NO: 202556 - DNA, 19 bp, Homo sapiens
  siRNA target sequence for CSMD1 (NM_033225.1,751-769).
ctgcatggaacgagattca

SEQ ID NO: 202557 - DNA, 19 bp, Homo sapiens
  siRNA target sequence for CSMD1 (NM_033225.1,840-858).
catcgtcagcccaggaaat

SEQ ID NO: 202558 - DNA, 19 bp, Homo sapiens
  siRNA target sequence for CSMD1 (NM_033225.1,959-977).
cttcagagtacgagaacaa

SEQ ID NO: 202559 - DNA, 19 bp, Homo sapiens
  siRNA target sequence for CSMD1 (NM_033225.1,1037-1055).
ctgactttcagctagaaga

SEQ ID NO: 202560 - DNA, 19 bp, Homo sapiens
  siRNA target sequence for CSMD1 (NM_033225.1,1083-1101).
cacggaagctccatccata

SEQ ID NO: 202561 - DNA, 19 bp, Homo sapiens
  siRNA target sequence for CSMD1 (NM_033225.1,1182-1200).
ccaccgacgcaaaggattt

SEQ ID NO: 202562 - DNA, 19 bp, Homo sapiens
  siRNA target sequence for CSMD1 (NM_033225.1,1183-1201).
caccgacgcaaaggattta

SEQ ID NO: 202563 - DNA, 19 bp, Homo sapiens
  siRNA target sequence for CSMD1 (NM_033225.1,1266-1284).
caaggatggaagccataaa

SEQ ID NO: 202564 - DNA, 19 bp, Homo sapiens
  siRNA target sequence for CSMD1 (NM_033225.1,1298-1316).
gccaaggaggtgttgcatt

SEQ ID NO: 202565 - DNA, 19 bp, Homo sapiens
  siRNA target sequence for CSMD1 (NM_033225.1,1380-1398).
cagtagggttggtgcaaat

SEQ ID NO: 202566 - DNA, 19 bp, Homo sapiens
  siRNA target sequence for CSMD1 (NM_033225.1,1382-1400).
gtagggttggtgcaaatgt

SEQ ID NO: 202567 - DNA, 19 bp, Homo sapiens
  siRNA target sequence for CSMD1 (NM_033225.1,1537-1555).
gggcccagcggcgtcatta

SEQ ID NO: 202568 - DNA, 19 bp, Homo sapiens
  siRNA target sequence for CSMD1 (NM_033225.1,1540-1558).
cccagcggcgtcattacct

SEQ ID NO: 202569 - DNA, 19 bp, Homo sapiens
  siRNA target sequence for CSMD1 (NM_033225.1,1549-1567).
gtcattacctcccctaatt

SEQ ID NO: 202570 - DNA, 19 bp, Homo sapiens
  siRNA target sequence for CSMD1 (NM_033225.1,1562-1580).
ctaattatccggttcagta

SEQ ID NO: 202571 - DNA, 19 bp, Homo sapiens
  siRNA target sequence for CSMD1 (NM_033225.1,1753-1771).
gttcctgacctcattgtga

SEQ ID NO: 202572 - DNA, 19 bp, Homo sapiens
  siRNA target sequence for CSMD1 (NM_033225.1,1795-1813).
catctgcagtcggatgata

SEQ ID NO: 202573 - DNA, 19 bp, Homo sapiens
  siRNA target sequence for CSMD1 (NM_033225.1,1800-1818).
gcagtcggatgatagcatt

SEQ ID NO: 202574 - DNA, 19 bp, Homo sapiens
  siRNA target sequence for CSMD1 (NM_033225.1,1821-1839).
ctcacctgggtttaaagct

SEQ ID NO: 202575 - DNA, 19 bp, Homo sapiens
  siRNA target sequence for CSMD1 (NM_033225.1,1927-1945).
gatacactcacctttgaat

SEQ ID NO: 202576 - DNA, 19 bp, Homo sapiens
  siRNA target sequence for CSMD1 (NM_033225.1,1983-2001).
cacctgtcagcagaacaat

SEQ ID NO: 202577 - DNA, 19 bp, Homo sapiens
  siRNA target sequence for CSMD1 (NM_033225.1,2046-2064).
caactttacggcatcatct

SEQ ID NO: 202578 - DNA, 19 bp, Homo sapiens
  siRNA target sequence for CSMD1 (NM_033225.1,2054-2072).
cggcatcatctgggattat

SEQ ID NO: 202579 - DNA, 19 bp, Homo sapiens
  siRNA target sequence for CSMD1 (NM_033225.1,2055-2073).
ggcatcatctgggattatt

SEQ ID NO: 202580 - DNA, 19 bp, Homo sapiens
  siRNA target sequence for CSMD1 (NM_033225.1,2095-2113).
gaatatgggaacaacatga

SEQ ID NO: 202581 - DNA, 19 bp, Homo sapiens
  siRNA target sequence for CSMD1 (NM_033225.1,2147-2165).
gtcgaattcacctaatctt

SEQ ID NO: 202582 - DNA, 19 bp, Homo sapiens
  siRNA target sequence for CSMD1 (NM_033225.1,2279-2297).
ccagcagtgggcatatagt

SEQ ID NO: 202583 - DNA, 19 bp, Homo sapiens
  siRNA target sequence for CSMD1 (NM_033225.1,2290-2308).
catatagttcgcttggaat

SEQ ID NO: 202584 - DNA, 19 bp, Homo sapiens
  siRNA target sequence for CSMD1 (NM_033225.1,2330-2348).
ctggcagagggttcaacat

SEQ ID NO: 202585 - DNA, 19 bp, Homo sapiens
  siRNA target sequence for CSMD1 (NM_033225.1,2336-2354).
gagggttcaacatcactta

SEQ ID NO: 202586 - DNA, 19 bp, Homo sapiens
  siRNA target sequence for CSMD1 (NM_033225.1,2357-2375).
ccacatttggtcagaatga

SEQ ID NO: 202587 - DNA, 19 bp, Homo sapiens
  siRNA target sequence for CSMD1 (NM_033225.1,2479-2497).
cagggatccgagtccatta

SEQ ID NO: 202588 - DNA, 19 bp, Homo sapiens
  siRNA target sequence for CSMD1 (NM_033225.1,2578-2596).
gcgtccagcggagtcattt

SEQ ID NO: 202589 - DNA, 19 bp, Homo sapiens
  siRNA target sequence for CSMD1 (NM_033225.1,2579-2597).
cgtccagcggagtcatttt

SEQ ID NO: 202590 - DNA, 19 bp, Homo sapiens
  siRNA target sequence for CSMD1 (NM_033225.1,2626-2644).
gattctttacattgtgaat

SEQ ID NO: 202591 - DNA, 19 bp, Homo sapiens
  siRNA target sequence for CSMD1 (NM_033225.1,2646-2664).
gataattgaagcaaaacca

SEQ ID NO: 202592 - DNA, 19 bp, Homo sapiens
  siRNA target sequence for CSMD1 (NM_033225.1,3153-3171).
ctgcacgtggaccattgaa

SEQ ID NO: 202593 - DNA, 19 bp, Homo sapiens
  siRNA target sequence for CSMD1 (NM_033225.1,3155-3173).
gcacgtggaccattgaagt

SEQ ID NO: 202594 - DNA, 19 bp, Homo sapiens
  siRNA target sequence for CSMD1 (NM_033225.1,3220-3238).
gagagttcccacgactatt

SEQ ID NO: 202595 - DNA, 19 bp, Homo sapiens
  siRNA target sequence for CSMD1 (NM_033225.1,3222-3240).
gagttcccacgactattta

SEQ ID NO: 202596 - DNA, 19 bp, Homo sapiens
  siRNA target sequence for CSMD1 (NM_033225.1,3227-3245).
cccacgactatttactgat

SEQ ID NO: 202597 - DNA, 19 bp, Homo sapiens
  siRNA target sequence for CSMD1 (NM_033225.1,3293-3311).
cggtgttgcctcatacgat

SEQ ID NO: 202598 - DNA, 19 bp, Homo sapiens
  siRNA target sequence for CSMD1 (NM_033225.1,3338-3356).
ctgcccagcttcggtttat

SEQ ID NO: 202599 - DNA, 19 bp, Homo sapiens
  siRNA target sequence for CSMD1 (NM_033225.1,3342-3360).
ccagcttcggtttatatca

SEQ ID NO: 202600 - DNA, 19 bp, Homo sapiens
  siRNA target sequence for CSMD1 (NM_033225.1,3359-3377).
cagacttctcaatttcgta

SEQ ID NO: 202601 - DNA, 19 bp, Homo sapiens
  siRNA target sequence for CSMD1 (NM_033225.1,3374-3392).
cgtacgagggcttcaatat

SEQ ID NO: 202602 - DNA, 19 bp, Homo sapiens
  siRNA target sequence for CSMD1 (NM_033225.1,3378-3396).
cgagggcttcaatatcaca

SEQ ID NO: 202603 - DNA, 19 bp, Homo sapiens
  siRNA target sequence for CSMD1 (NM_033225.1,3379-3397).
gagggcttcaatatcacat

SEQ ID NO: 202604 - DNA, 19 bp, Homo sapiens
  siRNA target sequence for CSMD1 (NM_033225.1,3440-3458).
ctgccttcagccgaagaat

SEQ ID NO: 202605 - DNA, 19 bp, Homo sapiens
  siRNA target sequence for CSMD1 (NM_033225.1,3444-3462).
cttcagccgaagaattggt

SEQ ID NO: 202606 - DNA, 19 bp, Homo sapiens
  siRNA target sequence for CSMD1 (NM_033225.1,3447-3465).
cagccgaagaattggtttt

SEQ ID NO: 202607 - DNA, 19 bp, Homo sapiens
  siRNA target sequence for CSMD1 (NM_033225.1,3449-3467).
gccgaagaattggttttca

SEQ ID NO: 202608 - DNA, 19 bp, Homo sapiens
  siRNA target sequence for CSMD1 (NM_033225.1,3451-3469).
cgaagaattggttttcact

SEQ ID NO: 202609 - DNA, 19 bp, Homo sapiens
  siRNA target sequence for CSMD1 (NM_033225.1,3478-3496).
ggagactctctgacgtttt

SEQ ID NO: 202610 - DNA, 19 bp, Homo sapiens
  siRNA target sequence for CSMD1 (NM_033225.1,3498-3516).
ctgcttcctgggatatcgt

SEQ ID NO: 202611 - DNA, 19 bp, Homo sapiens
  siRNA target sequence for CSMD1 (NM_033225.1,3500-3518).
gcttcctgggatatcgttt

SEQ ID NO: 202612 - DNA, 19 bp, Homo sapiens
  siRNA target sequence for CSMD1 (NM_033225.1,3501-3519).
cttcctgggatatcgttta

SEQ ID NO: 202613 - DNA, 19 bp, Homo sapiens
  siRNA target sequence for CSMD1 (NM_033225.1,3504-3522).
cctgggatatcgtttagaa

SEQ ID NO: 202614 - DNA, 19 bp, Homo sapiens
  siRNA target sequence for CSMD1 (NM_033225.1,3520-3538).
gaaggtgccaccaagctta

SEQ ID NO: 202615 - DNA, 19 bp, Homo sapiens
  siRNA target sequence for CSMD1 (NM_033225.1,3649-3667).
ccatccaattatgataata

SEQ ID NO: 202616 - DNA, 19 bp, Homo sapiens
  siRNA target sequence for CSMD1 (NM_033225.1,3793-3811).
ccactgggcacgttcacta

SEQ ID NO: 202617 - DNA, 19 bp, Homo sapiens
  siRNA target sequence for CSMD1 (NM_033225.1,3798-3816).
gggcacgttcactaaaaat

SEQ ID NO: 202618 - DNA, 19 bp, Homo sapiens
  siRNA target sequence for CSMD1 (NM_033225.1,3800-3818).
gcacgttcactaaaaatga

SEQ ID NO: 202619 - DNA, 19 bp, Homo sapiens
  siRNA target sequence for CSMD1 (NM_033225.1,3801-3819).
cacgttcactaaaaatgaa

SEQ ID NO: 202620 - DNA, 19 bp, Homo sapiens
  siRNA target sequence for CSMD1 (NM_033225.1,3834-3852).
cctaaacagcacatccaat

SEQ ID NO: 202621 - DNA, 19 bp, Homo sapiens
  siRNA target sequence for CSMD1 (NM_033225.1,3865-3883).
gagttcaacaccaatggat

SEQ ID NO: 202622 - DNA, 19 bp, Homo sapiens
  siRNA target sequence for CSMD1 (NM_033225.1,3890-3908).
ccgaccaaggttttcaact

SEQ ID NO: 202623 - DNA, 19 bp, Homo sapiens
  siRNA target sequence for CSMD1 (NM_033225.1,3898-3916).
ggttttcaactcacctata

SEQ ID NO: 202624 - DNA, 19 bp, Homo sapiens
  siRNA target sequence for CSMD1 (NM_033225.1,3955-3973).
cctaactacggctatagga

SEQ ID NO: 202625 - DNA, 19 bp, Homo sapiens
  siRNA target sequence for CSMD1 (NM_033225.1,3956-3974).
ctaactacggctataggat

SEQ ID NO: 202626 - DNA, 19 bp, Homo sapiens
  siRNA target sequence for CSMD1 (NM_033225.1,3966-3984).
ctataggatccgtgatgaa

SEQ ID NO: 202627 - DNA, 19 bp, Homo sapiens
  siRNA target sequence for CSMD1 (NM_033225.1,3976-3994).
cgtgatgaaggccacttta

SEQ ID NO: 202628 - DNA, 19 bp, Homo sapiens
  siRNA target sequence for CSMD1 (NM_033225.1,3990-4008).
ctttaccgacactgtagtt

SEQ ID NO: 202629 - DNA, 19 bp, Homo sapiens
  siRNA target sequence for CSMD1 (NM_033225.1,3995-4013).
ccgacactgtagttctgta

SEQ ID NO: 202630 - DNA, 19 bp, Homo sapiens
  siRNA target sequence for CSMD1 (NM_033225.1,4172-4190).
cagctccgtatgacaacaa

SEQ ID NO: 202631 - DNA, 19 bp, Homo sapiens
  siRNA target sequence for CSMD1 (NM_033225.1,4232-4250).
ccattagcctccatttcat

SEQ ID NO: 202632 - DNA, 19 bp, Homo sapiens
  siRNA target sequence for CSMD1 (NM_033225.1,4434-4452).
gttctccacctcaattgca

SEQ ID NO: 202633 - DNA, 19 bp, Homo sapiens
  siRNA target sequence for CSMD1 (NM_033225.1,4587-4605).
gctgaataaccggttcttt

SEQ ID NO: 202634 - DNA, 19 bp, Homo sapiens
  siRNA target sequence for CSMD1 (NM_033225.1,4588-4606).
ctgaataaccggttctttt

SEQ ID NO: 202635 - DNA, 19 bp, Homo sapiens
  siRNA target sequence for CSMD1 (NM_033225.1,4636-4654).
gcttgtggagggaatctga

SEQ ID NO: 202636 - DNA, 19 bp, Homo sapiens
  siRNA target sequence for CSMD1 (NM_033225.1,4735-4753).
gtgaacccggactttgtca

SEQ ID NO: 202637 - DNA, 19 bp, Homo sapiens
  siRNA target sequence for CSMD1 (NM_033225.1,4750-4768).
gtcatcgccttgatattca

SEQ ID NO: 202638 - DNA, 19 bp, Homo sapiens
  siRNA target sequence for CSMD1 (NM_033225.1,4752-4770).
catcgccttgatattcaaa

SEQ ID NO: 202639 - DNA, 19 bp, Homo sapiens
  siRNA target sequence for CSMD1 (NM_033225.1,4755-4773).
cgccttgatattcaaaagt

SEQ ID NO: 202640 - DNA, 19 bp, Homo sapiens
  siRNA target sequence for CSMD1 (NM_033225.1,4756-4774).
gccttgatattcaaaagtt

SEQ ID NO: 202641 - DNA, 19 bp, Homo sapiens
  siRNA target sequence for CSMD1 (NM_033225.1,4797-4815).
cttcctacacatctatgaa

SEQ ID NO: 202642 - DNA, 19 bp, Homo sapiens
  siRNA target sequence for CSMD1 (NM_033225.1,4859-4877).
ctcaggccccagaaagaat

SEQ ID NO: 202643 - DNA, 19 bp, Homo sapiens
  siRNA target sequence for CSMD1 (NM_033225.1,4939-4957).
gggttcgccattgaattta

SEQ ID NO: 202644 - DNA, 19 bp, Homo sapiens
  siRNA target sequence for CSMD1 (NM_033225.1,4940-4958).
ggttcgccattgaatttaa

SEQ ID NO: 202645 - DNA, 19 bp, Homo sapiens
  siRNA target sequence for CSMD1 (NM_033225.1,4979-4997).
gttttgacccaggaaatat

SEQ ID NO: 202646 - DNA, 19 bp, Homo sapiens
  siRNA target sequence for CSMD1 (NM_033225.1,5061-5079).
ctctggctataagattctt

SEQ ID NO: 202647 - DNA, 19 bp, Homo sapiens
  siRNA target sequence for CSMD1 (NM_033225.1,5169-5187).
ccagtacacgggatcagaa

SEQ ID NO: 202648 - DNA, 19 bp, Homo sapiens
  siRNA target sequence for CSMD1 (NM_033225.1,5208-5226).
ctacccccataattacaca

SEQ ID NO: 202649 - DNA, 19 bp, Homo sapiens
  siRNA target sequence for CSMD1 (NM_033225.1,5230-5248).
ggtcaaatatgcctctatt

SEQ ID NO: 202650 - DNA, 19 bp, Homo sapiens
  siRNA target sequence for CSMD1 (NM_033225.1,5233-5251).
caaatatgcctctattcca

SEQ ID NO: 202651 - DNA, 19 bp, Homo sapiens
  siRNA target sequence for CSMD1 (NM_033225.1,5250-5268).
catcacggtaccaaaggaa

SEQ ID NO: 202652 - DNA, 19 bp, Homo sapiens
  siRNA target sequence for CSMD1 (NM_033225.1,5255-5273).
cggtaccaaaggaattcgt

SEQ ID NO: 202653 - DNA, 19 bp, Homo sapiens
  siRNA target sequence for CSMD1 (NM_033225.1,5378-5396).
ctcactcaggggaaacatt

SEQ ID NO: 202654 - DNA, 19 bp, Homo sapiens
  siRNA target sequence for CSMD1 (NM_033225.1,5397-5415).
gcccttggctacgtcaaat

SEQ ID NO: 202655 - DNA, 19 bp, Homo sapiens
  siRNA target sequence for CSMD1 (NM_033225.1,5399-5417).
ccttggctacgtcaaatca

SEQ ID NO: 202656 - DNA, 19 bp, Homo sapiens
  siRNA target sequence for CSMD1 (NM_033225.1,5400-5418).
cttggctacgtcaaatcaa

SEQ ID NO: 202657 - DNA, 19 bp, Homo sapiens
  siRNA target sequence for CSMD1 (NM_033225.1,5405-5423).
ctacgtcaaatcaaattct

SEQ ID NO: 202658 - DNA, 19 bp, Homo sapiens
  siRNA target sequence for CSMD1 (NM_033225.1,5462-5480).
gcttccacttcgtgtatca

SEQ ID NO: 202659 - DNA, 19 bp, Homo sapiens
  siRNA target sequence for CSMD1 (NM_033225.1,5463-5481).
cttccacttcgtgtatcaa

SEQ ID NO: 202660 - DNA, 19 bp, Homo sapiens
  siRNA target sequence for CSMD1 (NM_033225.1,5708-5726).
ctcaacgaagaggtacaat

SEQ ID NO: 202661 - DNA, 19 bp, Homo sapiens
  siRNA target sequence for CSMD1 (NM_033225.1,5744-5762).
ctgagccatacggaaacaa

SEQ ID NO: 202662 - DNA, 19 bp, Homo sapiens
  siRNA target sequence for CSMD1 (NM_033225.1,5746-5764).
gagccatacggaaacaact

SEQ ID NO: 202663 - DNA, 19 bp, Homo sapiens
  siRNA target sequence for CSMD1 (NM_033225.1,5749-5767).
ccatacggaaacaacttga

SEQ ID NO: 202664 - DNA, 19 bp, Homo sapiens
  siRNA target sequence for CSMD1 (NM_033225.1,5750-5768).
catacggaaacaacttgaa

SEQ ID NO: 202665 - DNA, 19 bp, Homo sapiens
  siRNA target sequence for CSMD1 (NM_033225.1,5769-5787).
ctgtatatggaagatcata

SEQ ID NO: 202666 - DNA, 19 bp, Homo sapiens
  siRNA target sequence for CSMD1 (NM_033225.1,5792-5810).
cggagggctcgggaattca

SEQ ID NO: 202667 - DNA, 19 bp, Homo sapiens
  siRNA target sequence for CSMD1 (NM_033225.1,5923-5941).
ccggcactgctgaacagta

SEQ ID NO: 202668 - DNA, 19 bp, Homo sapiens
  siRNA target sequence for CSMD1 (NM_033225.1,5926-5944).
gcactgctgaacagtactt

SEQ ID NO: 202669 - DNA, 19 bp, Homo sapiens
  siRNA target sequence for CSMD1 (NM_033225.1,5939-5957).
gtacttccaaccaactcta

SEQ ID NO: 202670 - DNA, 19 bp, Homo sapiens
  siRNA target sequence for CSMD1 (NM_033225.1,6133-6151).
cagggccgttcccacattt

SEQ ID NO: 202671 - DNA, 19 bp, Homo sapiens
  siRNA target sequence for CSMD1 (NM_033225.1,6168-6186).
cgttcgccgttggaactat

SEQ ID NO: 202672 - DNA, 19 bp, Homo sapiens
  siRNA target sequence for CSMD1 (NM_033225.1,6265-6283).
ggttcttaccccaacaact

SEQ ID NO: 202673 - DNA, 19 bp, Homo sapiens
  siRNA target sequence for CSMD1 (NM_033225.1,6266-6284).
gttcttaccccaacaactt

SEQ ID NO: 202674 - DNA, 19 bp, Homo sapiens
  siRNA target sequence for CSMD1 (NM_033225.1,6323-6341).
gtgcacatattcagtttct

SEQ ID NO: 202675 - DNA, 19 bp, Homo sapiens
  siRNA target sequence for CSMD1 (NM_033225.1,6350-6368).
ctaccgaagctaatcatga

SEQ ID NO: 202676 - DNA, 19 bp, Homo sapiens
  siRNA target sequence for CSMD1 (NM_033225.1,6353-6371).
ccgaagctaatcatgactt

SEQ ID NO: 202677 - DNA, 19 bp, Homo sapiens
  siRNA target sequence for CSMD1 (NM_033225.1,6404-6422).
gccccatgattggacaatt

SEQ ID NO: 202678 - DNA, 19 bp, Homo sapiens
  siRNA target sequence for CSMD1 (NM_033225.1,6405-6423).
ccccatgattggacaattt

SEQ ID NO: 202679 - DNA, 19 bp, Homo sapiens
  siRNA target sequence for CSMD1 (NM_033225.1,6471-6489).
cctcatccacttttatagt

SEQ ID NO: 202680 - DNA, 19 bp, Homo sapiens
  siRNA target sequence for CSMD1 (NM_033225.1,6497-6515).
cgcaaaaccggcaaggatt

SEQ ID NO: 202681 - DNA, 19 bp, Homo sapiens
  siRNA target sequence for CSMD1 (NM_033225.1,6504-6522).
ccggcaaggatttaaactt

SEQ ID NO: 202682 - DNA, 19 bp, Homo sapiens
  siRNA target sequence for CSMD1 (NM_033225.1,6523-6541).
gcttaccaagcctatgaat

SEQ ID NO: 202683 - DNA, 19 bp, Homo sapiens
  siRNA target sequence for CSMD1 (NM_033225.1,6524-6542).
cttaccaagcctatgaatt

SEQ ID NO: 202684 - DNA, 19 bp, Homo sapiens
  siRNA target sequence for CSMD1 (NM_033225.1,6554-6572).
cagatccacccccatttca

SEQ ID NO: 202685 - DNA, 19 bp, Homo sapiens
  siRNA target sequence for CSMD1 (NM_033225.1,6600-6618).
cagcgtggggcaatcagta

SEQ ID NO: 202686 - DNA, 19 bp, Homo sapiens
  siRNA target sequence for CSMD1 (NM_033225.1,6603-6621).
cgtggggcaatcagtatct

SEQ ID NO: 202687 - DNA, 19 bp, Homo sapiens
  siRNA target sequence for CSMD1 (NM_033225.1,6604-6622).
gtggggcaatcagtatctt

SEQ ID NO: 202688 - DNA, 19 bp, Homo sapiens
  siRNA target sequence for CSMD1 (NM_033225.1,6627-6645).
gtgttatcctgggtacatt

SEQ ID NO: 202689 - DNA, 19 bp, Homo sapiens
  siRNA target sequence for CSMD1 (NM_033225.1,6629-6647).
gttatcctgggtacattct

SEQ ID NO: 202690 - DNA, 19 bp, Homo sapiens
  siRNA target sequence for CSMD1 (NM_033225.1,6676-6694).
catgggatcaacagaaact

SEQ ID NO: 202691 - DNA, 19 bp, Homo sapiens
  siRNA target sequence for CSMD1 (NM_033225.1,6829-6847).
ccagggcacggagtttaca

SEQ ID NO: 202692 - DNA, 19 bp, Homo sapiens
  siRNA target sequence for CSMD1 (NM_033225.1,6830-6848).
cagggcacggagtttacat

SEQ ID NO: 202693 - DNA, 19 bp, Homo sapiens
  siRNA target sequence for CSMD1 (NM_033225.1,6833-6851).
ggcacggagtttacatcaa

SEQ ID NO: 202694 - DNA, 19 bp, Homo sapiens
  siRNA target sequence for CSMD1 (NM_033225.1,6838-6856).
ggagtttacatcaacttca

SEQ ID NO: 202695 - DNA, 19 bp, Homo sapiens
  siRNA target sequence for CSMD1 (NM_033225.1,6869-6887).
cggaagctgtcaacgatta

SEQ ID NO: 202696 - DNA, 19 bp, Homo sapiens
  siRNA target sequence for CSMD1 (NM_033225.1,6871-6889).
gaagctgtcaacgattaca

SEQ ID NO: 202697 - DNA, 19 bp, Homo sapiens
  siRNA target sequence for CSMD1 (NM_033225.1,6899-6917).
gggacggtcccgatcagaa

SEQ ID NO: 202698 - DNA, 19 bp, Homo sapiens
  siRNA target sequence for CSMD1 (NM_033225.1,6955-6973).
ctcgaaacggcgtatagct

SEQ ID NO: 202699 - DNA, 19 bp, Homo sapiens
  siRNA target sequence for CSMD1 (NM_033225.1,7044-7062).
cgcatttcagctcaagaaa

SEQ ID NO: 202700 - DNA, 19 bp, Homo sapiens
  siRNA target sequence for CSMD1 (NM_033225.1,7084-7102).
ccacaggcagaaatgctta

SEQ ID NO: 202701 - DNA, 19 bp, Homo sapiens
  siRNA target sequence for CSMD1 (NM_033225.1,7107-7125).
ggatgatgatttcgaaata

SEQ ID NO: 202702 - DNA, 19 bp, Homo sapiens
  siRNA target sequence for CSMD1 (NM_033225.1,7168-7186).
gtggggaccgacattctga

SEQ ID NO: 202703 - DNA, 19 bp, Homo sapiens
  siRNA target sequence for CSMD1 (NM_033225.1,7271-7289).
gatcatcgggagtcattct

SEQ ID NO: 202704 - DNA, 19 bp, Homo sapiens
  siRNA target sequence for CSMD1 (NM_033225.1,7294-7312).
ccagggtatccgggtaatt

SEQ ID NO: 202705 - DNA, 19 bp, Homo sapiens
  siRNA target sequence for CSMD1 (NM_033225.1,7295-7313).
cagggtatccgggtaatta

SEQ ID NO: 202706 - DNA, 19 bp, Homo sapiens
  siRNA target sequence for CSMD1 (NM_033225.1,7298-7316).
ggtatccgggtaattattt

SEQ ID NO: 202707 - DNA, 19 bp, Homo sapiens
  siRNA target sequence for CSMD1 (NM_033225.1,7303-7321).
ccgggtaattattttaact

SEQ ID NO: 202708 - DNA, 19 bp, Homo sapiens
  siRNA target sequence for CSMD1 (NM_033225.1,7328-7346).
cttgctcttggagtattaa

SEQ ID NO: 202709 - DNA, 19 bp, Homo sapiens
  siRNA target sequence for CSMD1 (NM_033225.1,7340-7358).
gtattaaagtggaaccaaa

SEQ ID NO: 202710 - DNA, 19 bp, Homo sapiens
  siRNA target sequence for CSMD1 (NM_033225.1,7348-7366).
gtggaaccaaactacaaca

SEQ ID NO: 202711 - DNA, 19 bp, Homo sapiens
  siRNA target sequence for CSMD1 (NM_033225.1,7354-7372).
ccaaactacaacattacca

SEQ ID NO: 202712 - DNA, 19 bp, Homo sapiens
  siRNA target sequence for CSMD1 (NM_033225.1,7355-7373).
caaactacaacattaccat

SEQ ID NO: 202713 - DNA, 19 bp, Homo sapiens
  siRNA target sequence for CSMD1 (NM_033225.1,7370-7388).
ccatctttgtggacacatt

SEQ ID NO: 202714 - DNA, 19 bp, Homo sapiens
  siRNA target sequence for CSMD1 (NM_033225.1,7447-7465).
cctctgctagtagtcttaa

SEQ ID NO: 202715 - DNA, 19 bp, Homo sapiens
  siRNA target sequence for CSMD1 (NM_033225.1,7468-7486).
gggaatcatactgaacaat

SEQ ID NO: 202716 - DNA, 19 bp, Homo sapiens
  siRNA target sequence for CSMD1 (NM_033225.1,7470-7488).
gaatcatactgaacaatca

SEQ ID NO: 202717 - DNA, 19 bp, Homo sapiens
  siRNA target sequence for CSMD1 (NM_033225.1,7534-7552).
gaccatgccaccagtaaga

SEQ ID NO: 202718 - DNA, 19 bp, Homo sapiens
  siRNA target sequence for CSMD1 (NM_033225.1,7544-7562).
ccagtaagaaaggattcaa

SEQ ID NO: 202719 - DNA, 19 bp, Homo sapiens
  siRNA target sequence for CSMD1 (NM_033225.1,7547-7565).
gtaagaaaggattcaagat

SEQ ID NO: 202720 - DNA, 19 bp, Homo sapiens
  siRNA target sequence for CSMD1 (NM_033225.1,7576-7594).
gcaccttactgcagtttga

SEQ ID NO: 202721 - DNA, 19 bp, Homo sapiens
  siRNA target sequence for CSMD1 (NM_033225.1,7687-7705).
gtcggccacagcaatgcaa

SEQ ID NO: 202722 - DNA, 19 bp, Homo sapiens
  siRNA target sequence for CSMD1 (NM_033225.1,7811-7829).
ccgggaacgagttcacttt

SEQ ID NO: 202723 - DNA, 19 bp, Homo sapiens
  siRNA target sequence for CSMD1 (NM_033225.1,7821-7839).
gttcactttggacagtaaa

SEQ ID NO: 202724 - DNA, 19 bp, Homo sapiens
  siRNA target sequence for CSMD1 (NM_033225.1,7833-7851).
cagtaaagtggtctatgaa

SEQ ID NO: 202725 - DNA, 19 bp, Homo sapiens
  siRNA target sequence for CSMD1 (NM_033225.1,8007-8025).
ggtttcaggatccttgaat

SEQ ID NO: 202726 - DNA, 19 bp, Homo sapiens
  siRNA target sequence for CSMD1 (NM_033225.1,8012-8030).
caggatccttgaatgagta

SEQ ID NO: 202727 - DNA, 19 bp, Homo sapiens
  siRNA target sequence for CSMD1 (NM_033225.1,8054-8072).
gcagtcctggttactactt

SEQ ID NO: 202728 - DNA, 19 bp, Homo sapiens
  siRNA target sequence for CSMD1 (NM_033225.1,8213-8231).
gagacacggtggtttacca

SEQ ID NO: 202729 - DNA, 19 bp, Homo sapiens
  siRNA target sequence for CSMD1 (NM_033225.1,8257-8275).
ggaacttccgtgaggatat

SEQ ID NO: 202730 - DNA, 19 bp, Homo sapiens
  siRNA target sequence for CSMD1 (NM_033225.1,8311-8329).
gtctgtgtccccatcacat

SEQ ID NO: 202731 - DNA, 19 bp, Homo sapiens
  siRNA target sequence for CSMD1 (NM_033225.1,8346-8364).
ccctgcccacggattcact

SEQ ID NO: 202732 - DNA, 19 bp, Homo sapiens
  siRNA target sequence for CSMD1 (NM_033225.1,8347-8365).
cctgcccacggattcacta

SEQ ID NO: 202733 - DNA, 19 bp, Homo sapiens
  siRNA target sequence for CSMD1 (NM_033225.1,8348-8366).
ctgcccacggattcactaa

SEQ ID NO: 202734 - DNA, 19 bp, Homo sapiens
  siRNA target sequence for CSMD1 (NM_033225.1,8363-8381).
ctaatggcagtgagttcaa

SEQ ID NO: 202735 - DNA, 19 bp, Homo sapiens
  siRNA target sequence for CSMD1 (NM_033225.1,8383-8401).
ctgaatgatgtcgtgaatt

SEQ ID NO: 202736 - DNA, 19 bp, Homo sapiens
  siRNA target sequence for CSMD1 (NM_033225.1,8405-8423).
cctgcaacacgggctattt

SEQ ID NO: 202737 - DNA, 19 bp, Homo sapiens
  siRNA target sequence for CSMD1 (NM_033225.1,8550-8568).
gaacttccctgagagtttt

SEQ ID NO: 202738 - DNA, 19 bp, Homo sapiens
  siRNA target sequence for CSMD1 (NM_033225.1,8556-8574).
ccctgagagttttgagtat

SEQ ID NO: 202739 - DNA, 19 bp, Homo sapiens
  siRNA target sequence for CSMD1 (NM_033225.1,8582-8600).
gtatcctgtaccattgcaa

SEQ ID NO: 202740 - DNA, 19 bp, Homo sapiens
  siRNA target sequence for CSMD1 (NM_033225.1,8671-8689).
cccaagtgtttggctatat

SEQ ID NO: 202741 - DNA, 19 bp, Homo sapiens
  siRNA target sequence for CSMD1 (NM_033225.1,8908-8926).
cggcttggtgatgacttta

SEQ ID NO: 202742 - DNA, 19 bp, Homo sapiens
  siRNA target sequence for CSMD1 (NM_033225.1,9065-9083).
cacccaccaacggaatgat

SEQ ID NO: 202743 - DNA, 19 bp, Homo sapiens
  siRNA target sequence for CSMD1 (NM_033225.1,9108-9126).
ctccagctcggtcatctat

SEQ ID NO: 202744 - DNA, 19 bp, Homo sapiens
  siRNA target sequence for CSMD1 (NM_033225.1,9205-9223).
cccgactgcacaattataa

SEQ ID NO: 202745 - DNA, 19 bp, Homo sapiens
  siRNA target sequence for CSMD1 (NM_033225.1,9207-9225).
cgactgcacaattataagt

SEQ ID NO: 202746 - DNA, 19 bp, Homo sapiens
  siRNA target sequence for CSMD1 (NM_033225.1,9208-9226).
gactgcacaattataagtt

SEQ ID NO: 202747 - DNA, 19 bp, Homo sapiens
  siRNA target sequence for CSMD1 (NM_033225.1,9342-9360).
cactattcgctgtaccaaa

SEQ ID NO: 202748 - DNA, 19 bp, Homo sapiens
  siRNA target sequence for CSMD1 (NM_033225.1,9457-9475).
cgctggggctccagcataa

SEQ ID NO: 202749 - DNA, 19 bp, Homo sapiens
  siRNA target sequence for CSMD1 (NM_033225.1,9459-9477).
ctggggctccagcataagt

SEQ ID NO: 202750 - DNA, 19 bp, Homo sapiens
  siRNA target sequence for CSMD1 (NM_033225.1,9461-9479).
ggggctccagcataagtta

SEQ ID NO: 202751 - DNA, 19 bp, Homo sapiens
  siRNA target sequence for CSMD1 (NM_033225.1,9463-9481).
ggctccagcataagttaca

SEQ ID NO: 202752 - DNA, 19 bp, Homo sapiens
  siRNA target sequence for CSMD1 (NM_033225.1,9610-9628).
cgacttagtgggaaaagtt

SEQ ID NO: 202753 - DNA, 19 bp, Homo sapiens
  siRNA target sequence for CSMD1 (NM_033225.1,9611-9629).
gacttagtgggaaaagttt

SEQ ID NO: 202754 - DNA, 19 bp, Homo sapiens
  siRNA target sequence for CSMD1 (NM_033225.1,9632-9650).
cctataagtccgaagtctt

SEQ ID NO: 202755 - DNA, 19 bp, Homo sapiens
  siRNA target sequence for CSMD1 (NM_033225.1,9655-9673).
cagtgcaaatctccattta

SEQ ID NO: 202756 - DNA, 19 bp, Homo sapiens
  siRNA target sequence for CSMD1 (NM_033225.1,9657-9675).
gtgcaaatctccatttata

SEQ ID NO: 202757 - DNA, 19 bp, Homo sapiens
  siRNA target sequence for CSMD1 (NM_033225.1,9659-9677).
gcaaatctccatttatact

SEQ ID NO: 202758 - DNA, 19 bp, Homo sapiens
  siRNA target sequence for CSMD1 (NM_033225.1,9714-9732).
cacgtggagcggcatacaa

SEQ ID NO: 202759 - DNA, 19 bp, Homo sapiens
  siRNA target sequence for CSMD1 (NM_033225.1,9771-9789).
ccctggtacgccacacttt

SEQ ID NO: 202760 - DNA, 19 bp, Homo sapiens
  siRNA target sequence for CSMD1 (NM_033225.1,9776-9794).
gtacgccacactttggaat

SEQ ID NO: 202761 - DNA, 19 bp, Homo sapiens
  siRNA target sequence for CSMD1 (NM_033225.1,9779-9797).
cgccacactttggaataca

SEQ ID NO: 202762 - DNA, 19 bp, Homo sapiens
  siRNA target sequence for CSMD1 (NM_033225.1,9820-9838).
gttggaagcacggtttttt

SEQ ID NO: 202763 - DNA, 19 bp, Homo sapiens
  siRNA target sequence for CSMD1 (NM_033225.1,9823-9841).
ggaagcacggtttttttca

SEQ ID NO: 202764 - DNA, 19 bp, Homo sapiens
  siRNA target sequence for CSMD1 (NM_033225.1,9845-9863).
gcagaaaaggctaccatat

SEQ ID NO: 202765 - DNA, 19 bp, Homo sapiens
  siRNA target sequence for CSMD1 (NM_033225.1,9846-9864).
cagaaaaggctaccatatt

SEQ ID NO: 202766 - DNA, 19 bp, Homo sapiens
  siRNA target sequence for CSMD1 (NM_033225.1,9848-9866).
gaaaaggctaccatattca

SEQ ID NO: 202767 - DNA, 19 bp, Homo sapiens
  siRNA target sequence for CSMD1 (NM_033225.1,9885-9903).
ctgccttgccaatttaaca

SEQ ID NO: 202768 - DNA, 19 bp, Homo sapiens
  siRNA target sequence for CSMD1 (NM_033225.1,9910-9928).
gggatacagaccgaatgta

SEQ ID NO: 202769 - DNA, 19 bp, Homo sapiens
  siRNA target sequence for CSMD1 (NM_033225.1,9912-9930).
gatacagaccgaatgtata

SEQ ID NO: 202770 - DNA, 19 bp, Homo sapiens
  siRNA target sequence for CSMD1 (NM_033225.1,9980-9998).
ccatcgatcttcctacttt

SEQ ID NO: 202771 - DNA, 19 bp, Homo sapiens
  siRNA target sequence for CSMD1 (NM_033225.1,10022-10040).
gccatccaggctttttcct

SEQ ID NO: 202772 - DNA, 19 bp, Homo sapiens
  siRNA target sequence for CSMD1 (NM_033225.1,10091-10109).
gaaagtcgcctgtgtgtaa

SEQ ID NO: 202773 - DNA, 19 bp, Homo sapiens
  siRNA target sequence for CSMD1 (NM_033225.1,10095-10113).
gtcgcctgtgtgtaaaagt

SEQ ID NO: 202774 - DNA, 19 bp, Homo sapiens
  siRNA target sequence for CSMD1 (NM_033225.1,10156-10174).
gttccttcagatgtctttt

SEQ ID NO: 202775 - DNA, 19 bp, Homo sapiens
  siRNA target sequence for CSMD1 (NM_033225.1,10165-10183).
gatgtctttttcgtcaatt

SEQ ID NO: 202776 - DNA, 19 bp, Homo sapiens
  siRNA target sequence for CSMD1 (NM_033225.1,10184-10202).
cactgtggaaggggtatta

SEQ ID NO: 202777 - DNA, 19 bp, Homo sapiens
  siRNA target sequence for CSMD1 (NM_033225.1,10188-10206).
gtggaaggggtattatgaa

SEQ ID NO: 202778 - DNA, 19 bp, Homo sapiens
  siRNA target sequence for CSMD1 (NM_033225.1,10472-10490).
gtgacattcatggaaaaga

SEQ ID NO: 202779 - DNA, 19 bp, Homo sapiens
  siRNA target sequence for CSMD1 (NM_033225.1,10622-10640).
cagggtttgcattttacct

SEQ ID NO: 202780 - DNA, 19 bp, Homo sapiens
  siRNA target sequence for CSMD1 (NM_033225.1,10701-10719).
caatggacaagcatcgttt

SEQ ID NO: 202781 - DNA, 19 bp, Homo sapiens
  siRNA target sequence for CSMD1 (NM_033225.1,10726-10744).
cccatgtatgatacaaact

SEQ ID NO: 202782 - DNA, 19 bp, Homo sapiens
  siRNA target sequence for CSMD1 (NM_033225.1,10728-10746).
catgtatgatacaaactta

SEQ ID NO: 202783 - DNA, 19 bp, Homo sapiens
  siRNA target sequence for CSMD1 (NM_033225.1,10731-10749).
gtatgatacaaacttaaaa

SEQ ID NO: 202784 - DNA, 19 bp, Homo sapiens
  siRNA target sequence for G2AN (NM_014610.3,130-148).
gtggatagaagcaacttta

SEQ ID NO: 202785 - DNA, 19 bp, Homo sapiens
  siRNA target sequence for G2AN (NM_014610.3,174-192).
caagcgacagagaagcata

SEQ ID NO: 202786 - DNA, 19 bp, Homo sapiens
  siRNA target sequence for G2AN (NM_014610.3,301-319).
gagcttcaggggcttcaaa

SEQ ID NO: 202787 - DNA, 19 bp, Homo sapiens
  siRNA target sequence for G2AN (NM_014610.3,304-322).
cttcaggggcttcaaaaga

SEQ ID NO: 202788 - DNA, 19 bp, Homo sapiens
  siRNA target sequence for G2AN (NM_014610.3,307-325).
caggggcttcaaaagaaca

SEQ ID NO: 202789 - DNA, 19 bp, Homo sapiens
  siRNA target sequence for G2AN (NM_014610.3,327-345).
gactcggttcaggattgat

SEQ ID NO: 202790 - DNA, 19 bp, Homo sapiens
  siRNA target sequence for G2AN (NM_014610.3,329-347).
ctcggttcaggattgatga

SEQ ID NO: 202791 - DNA, 19 bp, Homo sapiens
  siRNA target sequence for G2AN (NM_014610.3,390-408).
ggtggctgatccaccaata

SEQ ID NO: 202792 - DNA, 19 bp, Homo sapiens
  siRNA target sequence for G2AN (NM_014610.3,466-484).
ggaccctacaagatcatct

SEQ ID NO: 202793 - DNA, 19 bp, Homo sapiens
  siRNA target sequence for G2AN (NM_014610.3,467-485).
gaccctacaagatcatctt

SEQ ID NO: 202794 - DNA, 19 bp, Homo sapiens
  siRNA target sequence for G2AN (NM_014610.3,514-532).
ctagaggaccgaagtcttt

SEQ ID NO: 202795 - DNA, 19 bp, Homo sapiens
  siRNA target sequence for G2AN (NM_014610.3,591-609).
ctctttctcggataaggtt

SEQ ID NO: 202796 - DNA, 19 bp, Homo sapiens
  siRNA target sequence for G2AN (NM_014610.3,593-611).
ctttctcggataaggttaa

SEQ ID NO: 202797 - DNA, 19 bp, Homo sapiens
  siRNA target sequence for G2AN (NM_014610.3,613-631).
ctcacgcttggtagcatat

SEQ ID NO: 202798 - DNA, 19 bp, Homo sapiens
  siRNA target sequence for G2AN (NM_014610.3,634-652).
gataagatcaagaaccttt

SEQ ID NO: 202799 - DNA, 19 bp, Homo sapiens
  siRNA target sequence for G2AN (NM_014610.3,777-795).
ggaggagacattcaaaact

SEQ ID NO: 202800 - DNA, 19 bp, Homo sapiens
  siRNA target sequence for G2AN (NM_014610.3,851-869).
caggcatggagcatgtcta

SEQ ID NO: 202801 - DNA, 19 bp, Homo sapiens
  siRNA target sequence for G2AN (NM_014610.3,1024-1042).
cgcgacttgggcatcttct

SEQ ID NO: 202802 - DNA, 19 bp, Homo sapiens
  siRNA target sequence for G2AN (NM_014610.3,1335-1353).
ggatcagggctttgatgat

SEQ ID NO: 202803 - DNA, 19 bp, Homo sapiens
  siRNA target sequence for G2AN (NM_014610.3,1374-1392).
catctggctagacattgaa

SEQ ID NO: 202804 - DNA, 19 bp, Homo sapiens
  siRNA target sequence for G2AN (NM_014610.3,1399-1417).
gatggcaagcggtatttca

SEQ ID NO: 202805 - DNA, 19 bp, Homo sapiens
  siRNA target sequence for G2AN (NM_014610.3,1459-1477).
gagcgcttggcttctaaga

SEQ ID NO: 202806 - DNA, 19 bp, Homo sapiens
  siRNA target sequence for G2AN (NM_014610.3,1575-1593).
ccgggatggctctgactat

SEQ ID NO: 202807 - DNA, 19 bp, Homo sapiens
  siRNA target sequence for G2AN (NM_014610.3,1621-1639).
ggttaccctgacttcacta

SEQ ID NO: 202808 - DNA, 19 bp, Homo sapiens
  siRNA target sequence for G2AN (NM_014610.3,1622-1640).
gttaccctgacttcactaa

SEQ ID NO: 202809 - DNA, 19 bp, Homo sapiens
  siRNA target sequence for G2AN (NM_014610.3,1654-1672).
gcctggtgggctaacatgt

SEQ ID NO: 202810 - DNA, 19 bp, Homo sapiens
  siRNA target sequence for G2AN (NM_014610.3,1655-1673).
cctggtgggctaacatgtt

SEQ ID NO: 202811 - DNA, 19 bp, Homo sapiens
  siRNA target sequence for G2AN (NM_014610.3,1770-1788).
caaggatgcccagcattat

SEQ ID NO: 202812 - DNA, 19 bp, Homo sapiens
  siRNA target sequence for G2AN (NM_014610.3,1801-1819).
caccgggatgtgcataaca

SEQ ID NO: 202813 - DNA, 19 bp, Homo sapiens
  siRNA target sequence for G2AN (NM_014610.3,1804-1822).
cgggatgtgcataacatct

SEQ ID NO: 202814 - DNA, 19 bp, Homo sapiens
  siRNA target sequence for G2AN (NM_014610.3,1805-1823).
gggatgtgcataacatcta

SEQ ID NO: 202815 - DNA, 19 bp, Homo sapiens
  siRNA target sequence for G2AN (NM_014610.3,1806-1824).
ggatgtgcataacatctat

SEQ ID NO: 202816 - DNA, 19 bp, Homo sapiens
  siRNA target sequence for G2AN (NM_014610.3,1958-1976).
ctgccgagtgggaccattt

SEQ ID NO: 202817 - DNA, 19 bp, Homo sapiens
  siRNA target sequence for G2AN (NM_014610.3,1961-1979).
ccgagtgggaccatttgaa

SEQ ID NO: 202818 - DNA, 19 bp, Homo sapiens
  siRNA target sequence for G2AN (NM_014610.3,1969-1987).
gaccatttgaagatctcta

SEQ ID NO: 202819 - DNA, 19 bp, Homo sapiens
  siRNA target sequence for G2AN (NM_014610.3,2167-2185).
ccatctcagcacaatgata

SEQ ID NO: 202820 - DNA, 19 bp, Homo sapiens
  siRNA target sequence for G2AN (NM_014610.3,2168-2186).
catctcagcacaatgatat

SEQ ID NO: 202821 - DNA, 19 bp, Homo sapiens
  siRNA target sequence for G2AN (NM_014610.3,2171-2189).
ctcagcacaatgatataat

SEQ ID NO: 202822 - DNA, 19 bp, Homo sapiens
  siRNA target sequence for G2AN (NM_014610.3,2197-2215).
gccttgggccagcgatatt

SEQ ID NO: 202823 - DNA, 19 bp, Homo sapiens
  siRNA target sequence for G2AN (NM_014610.3,2199-2217).
cttgggccagcgatattct

SEQ ID NO: 202824 - DNA, 19 bp, Homo sapiens
  siRNA target sequence for G2AN (NM_198334.1,588-606).
ggtctcgcaaggatcaaaa

SEQ ID NO: 202825 - DNA, 19 bp, Homo sapiens
  siRNA target sequence for G2AN (NM_198334.1,2238-2256).
ggatgtgactaccttcaat

SEQ ID NO: 202826 - DNA, 19 bp, Homo sapiens
  siRNA target sequence for G2AN (NM_198334.1,2249-2267).
ccttcaatatagatgatca

SEQ ID NO: 202827 - DNA, 19 bp, Homo sapiens
  siRNA target sequence for G2AN (NM_198334.1,2350-2368).
ggggaggtgtggtatgaca

SEQ ID NO: 202828 - DNA, 19 bp, Homo sapiens
  siRNA target sequence for G2AN (NM_198334.1,2352-2370).
ggaggtgtggtatgacatt

SEQ ID NO: 202829 - DNA, 19 bp, Homo sapiens
  siRNA target sequence for G2AN (NM_198334.1,2355-2373).
ggtgtggtatgacattcaa

SEQ ID NO: 202830 - DNA, 19 bp, Homo sapiens
  siRNA target sequence for G2AN (NM_198334.1,2406-2424).
gtacctgcctgtaactcta

SEQ ID NO: 202831 - DNA, 19 bp, Homo sapiens
  siRNA target sequence for G2AN (NM_198334.1,2485-2503).
cggtcttcagaatgtatga

SEQ ID NO: 202832 - DNA, 19 bp, Homo sapiens
  siRNA target sequence for G2AN (NM_198334.1,2511-2529).
ccccatcactctctttgtt

SEQ ID NO: 202833 - DNA, 19 bp, Homo sapiens
  siRNA target sequence for G2AN (NM_198334.1,2575-2593).
gatgggcacacgttcaact

SEQ ID NO: 202834 - DNA, 19 bp, Homo sapiens
  siRNA target sequence for G2AN (NM_198334.1,2579-2597).
ggcacacgttcaactatca

SEQ ID NO: 202835 - DNA, 19 bp, Homo sapiens
  siRNA target sequence for G2AN (NM_198334.1,2581-2599).
cacacgttcaactatcaga

SEQ ID NO: 202836 - DNA, 19 bp, Homo sapiens
  siRNA target sequence for G2AN (NM_198334.1,2613-2631).
cctgctgcgtcgattctca

SEQ ID NO: 202837 - DNA, 19 bp, Homo sapiens
  siRNA target sequence for G2AN (NM_198334.1,2614-2632).
ctgctgcgtcgattctcat

SEQ ID NO: 202838 - DNA, 19 bp, Homo sapiens
  siRNA target sequence for G2AN (NM_198334.1,2617-2635).
ctgcgtcgattctcattct

SEQ ID NO: 202839 - DNA, 19 bp, Homo sapiens
  siRNA target sequence for G2AN (NM_198334.1,2742-2760).
ggtactccagacaaaagga

SEQ ID NO: 202840 - DNA, 19 bp, Homo sapiens
  siRNA target sequence for G2AN (NM_198334.1,2743-2761).
gtactccagacaaaaggat

SEQ ID NO: 202841 - DNA, 19 bp, Homo sapiens
  siRNA target sequence for G2AN (NM_198334.1,2840-2858).
catctgattggagtattca

SEQ ID NO: 202842 - DNA, 19 bp, Homo sapiens
  siRNA target sequence for GBA3 (NM_020973.2,251-269).
cagcttggattgactcatt

SEQ ID NO: 202843 - DNA, 19 bp, Homo sapiens
  siRNA target sequence for GBA3 (NM_020973.2,308-326).
gggacgacaggtttcatca

SEQ ID NO: 202844 - DNA, 19 bp, Homo sapiens
  siRNA target sequence for GBA3 (NM_020973.2,309-327).
ggacgacaggtttcatcaa

SEQ ID NO: 202845 - DNA, 19 bp, Homo sapiens
  siRNA target sequence for GBA3 (NM_020973.2,341-359).
gattattacaacaagatca

SEQ ID NO: 202846 - DNA, 19 bp, Homo sapiens
  siRNA target sequence for GBA3 (NM_020973.2,361-379).
cgatgatttgttaaaaaat

SEQ ID NO: 202847 - DNA, 19 bp, Homo sapiens
  siRNA target sequence for GBA3 (NM_020973.2,397-415).
gaccctctaccactttgat

SEQ ID NO: 202848 - DNA, 19 bp, Homo sapiens
  siRNA target sequence for GBA3 (NM_020973.2,448-466).
gttgtcagaggcaatcatt

SEQ ID NO: 202849 - DNA, 19 bp, Homo sapiens
  siRNA target sequence for GBA3 (NM_020973.2,523-541).
gcagtggatcaccataaat

SEQ ID NO: 202850 - DNA, 19 bp, Homo sapiens
  siRNA target sequence for GBA3 (NM_020973.2,558-576).
ctgtgatgtcatatgactt

SEQ ID NO: 202851 - DNA, 19 bp, Homo sapiens
  siRNA target sequence for GBA3 (NM_020973.2,604-622).
ctttgggactggaggttat

SEQ ID NO: 202852 - DNA, 19 bp, Homo sapiens
  siRNA target sequence for GBA3 (NM_020973.2,618-636).
gttatcaggcagctcataa

SEQ ID NO: 202853 - DNA, 19 bp, Homo sapiens
  siRNA target sequence for GBA3 (NM_020973.2,623-641).
caggcagctcataatttga

SEQ ID NO: 202854 - DNA, 19 bp, Homo sapiens
  siRNA target sequence for GBA3 (NM_020973.2,625-643).
ggcagctcataatttgatt

SEQ ID NO: 202855 - DNA, 19 bp, Homo sapiens
  siRNA target sequence for GBA3 (NM_020973.2,664-682).
gcacagctatgattcctta

SEQ ID NO: 202856 - DNA, 19 bp, Homo sapiens
  siRNA target sequence for GBA3 (NM_020973.2,665-683).
cacagctatgattccttat

SEQ ID NO: 202857 - DNA, 19 bp, Homo sapiens
  siRNA target sequence for GBA3 (NM_020973.2,667-685).
cagctatgattccttattt

SEQ ID NO: 202858 - DNA, 19 bp, Homo sapiens
  siRNA target sequence for GBA3 (NM_020973.2,702-720).
gtatggtgtctctatcact

SEQ ID NO: 202859 - DNA, 19 bp, Homo sapiens
  siRNA target sequence for GBA3 (NM_020973.2,776-794).
gctaaaagagccatcactt

SEQ ID NO: 202860 - DNA, 19 bp, Homo sapiens
  siRNA target sequence for GBA3 (NM_020973.2,777-795).
ctaaaagagccatcacttt

SEQ ID NO: 202861 - DNA, 19 bp, Homo sapiens
  siRNA target sequence for GBA3 (NM_020973.2,867-885).
cctccatgagtcaaaagca

SEQ ID NO: 202862 - DNA, 19 bp, Homo sapiens
  siRNA target sequence for GBA3 (NM_020973.2,868-886).
ctccatgagtcaaaagcaa

SEQ ID NO: 202863 - DNA, 19 bp, Homo sapiens
  siRNA target sequence for GBA3 (NM_020973.2,897-915).
catcgaggcttccagaatt

SEQ ID NO: 202864 - DNA, 19 bp, Homo sapiens
  siRNA target sequence for GBA3 (NM_020973.2,978-996).
caactcgcttaatcaagta

SEQ ID NO: 202865 - DNA, 19 bp, Homo sapiens
  siRNA target sequence for GBA3 (NM_020973.2,1033-1051).
ggatgcggaaattgaattt

SEQ ID NO: 202866 - DNA, 19 bp, Homo sapiens
  siRNA target sequence for GBA3 (NM_020973.2,1034-1052).
gatgcggaaattgaatttt

SEQ ID NO: 202867 - DNA, 19 bp, Homo sapiens
  siRNA target sequence for GBA3 (NM_020973.2,1093-1111).
ggtaccatggggagtatgt

SEQ ID NO: 202868 - DNA, 19 bp, Homo sapiens
  siRNA target sequence for GBA3 (NM_020973.2,1094-1112).
gtaccatggggagtatgta

SEQ ID NO: 202869 - DNA, 19 bp, Homo sapiens
  siRNA target sequence for GBA3 (NM_020973.2,1101-1119).
ggggagtatgtaaactact

SEQ ID NO: 202870 - DNA, 19 bp, Homo sapiens
  siRNA target sequence for GBA3 (NM_020973.2,1118-1136).
ctgaaatatattaaggata

SEQ ID NO: 202871 - DNA, 19 bp, Homo sapiens
  siRNA target sequence for GBA3 (NM_020973.2,1137-1155).
catataataaccctgtaat

SEQ ID NO: 202872 - DNA, 19 bp, Homo sapiens
  siRNA target sequence for GBA3 (NM_020973.2,1209-1227).
ctcaacgctgggagtattt

SEQ ID NO: 202873 - DNA, 19 bp, Homo sapiens
  siRNA target sequence for GBA3 (NM_020973.2,1211-1229).
caacgctgggagtatttca

SEQ ID NO: 202874 - DNA, 19 bp, Homo sapiens
  siRNA target sequence for GBA3 (NM_020973.2,1296-1314).
catggtctcttctggataa

SEQ ID NO: 202875 - DNA, 19 bp, Homo sapiens
  siRNA target sequence for GBA3 (NM_020973.2,1299-1317).
ggtctcttctggataactt

SEQ ID NO: 202876 - DNA, 19 bp, Homo sapiens
  siRNA target sequence for GBA3 (NM_020973.2,1349-1367).
ggtctcttccacgttgatt

SEQ ID NO: 202877 - DNA, 19 bp, Homo sapiens
  siRNA target sequence for GBA3 (NM_020973.2,1350-1368).
gtctcttccacgttgattt

SEQ ID NO: 202878 - DNA, 19 bp, Homo sapiens
  siRNA target sequence for GBA3 (NM_020973.2,1354-1372).
cttccacgttgattttgaa

SEQ ID NO: 202879 - DNA, 19 bp, Homo sapiens
  siRNA target sequence for KL (NM_004795.2,268-286).
cgtccatctgggatacgtt

SEQ ID NO: 202880 - DNA, 19 bp, Homo sapiens
  siRNA target sequence for KL (NM_004795.2,690-708).
ggcggtcaggtcaagtact

SEQ ID NO: 202881 - DNA, 19 bp, Homo sapiens
  siRNA target sequence for KL (NM_004795.2,845-863).
gcatctctacaatacttct

SEQ ID NO: 202882 - DNA, 19 bp, Homo sapiens
  siRNA target sequence for KL (NM_004795.2,913-931).
ggatcaatcctcgaagaat

SEQ ID NO: 202883 - DNA, 19 bp, Homo sapiens
  siRNA target sequence for KL (NM_004795.2,932-950).
gaccgaccacagcatcaaa

SEQ ID NO: 202884 - DNA, 19 bp, Homo sapiens
  siRNA target sequence for KL (NM_004795.2,986-1004).
gtttgccaaacccgtattt

SEQ ID NO: 202885 - DNA, 19 bp, Homo sapiens
  siRNA target sequence for KL (NM_004795.2,991-1009).
ccaaacccgtatttattga

SEQ ID NO: 202886 - DNA, 19 bp, Homo sapiens
  siRNA target sequence for KL (NM_004795.2,992-1010).
caaacccgtatttattgat

SEQ ID NO: 202887 - DNA, 19 bp, Homo sapiens
  siRNA target sequence for KL (NM_004795.2,1020-1038).
cccgagagcatgaagaata

SEQ ID NO: 202888 - DNA, 19 bp, Homo sapiens
  siRNA target sequence for KL (NM_004795.2,1021-1039).
ccgagagcatgaagaataa

SEQ ID NO: 202889 - DNA, 19 bp, Homo sapiens
  siRNA target sequence for KL (NM_004795.2,1031-1049).
gaagaataacctttcatct

SEQ ID NO: 202890 - DNA, 19 bp, Homo sapiens
  siRNA target sequence for KL (NM_004795.2,1057-1075).
ctgattttactgaatctga

SEQ ID NO: 202891 - DNA, 19 bp, Homo sapiens
  siRNA target sequence for KL (NM_004795.2,1123-1141).
gacccaccttgagttttca

SEQ ID NO: 202892 - DNA, 19 bp, Homo sapiens
  siRNA target sequence for KL (NM_004795.2,1126-1144).
ccaccttgagttttcaact

SEQ ID NO: 202893 - DNA, 19 bp, Homo sapiens
  siRNA target sequence for KL (NM_004795.2,1160-1178).
gaagttccgccaattggaa

SEQ ID NO: 202894 - DNA, 19 bp, Homo sapiens
  siRNA target sequence for KL (NM_004795.2,1205-1223).
ctggattgaccttgaattt

SEQ ID NO: 202895 - DNA, 19 bp, Homo sapiens
  siRNA target sequence for KL (NM_004795.2,1280-1298).
gagagatgatgccaaatat

SEQ ID NO: 202896 - DNA, 19 bp, Homo sapiens
  siRNA target sequence for KL (NM_004795.2,1381-1399).
ggtccctcatggatggttt

SEQ ID NO: 202897 - DNA, 19 bp, Homo sapiens
  siRNA target sequence for KL (NM_004795.2,1456-1474).
gccaggacaagatgttgtt

SEQ ID NO: 202898 - DNA, 19 bp, Homo sapiens
  siRNA target sequence for KL (NM_004795.2,1489-1507).
ccttgttctaccaaaagct

SEQ ID NO: 202899 - DNA, 19 bp, Homo sapiens
  siRNA target sequence for KL (NM_004795.2,1574-1592).
ctttgcttggggagttgtt

SEQ ID NO: 202900 - DNA, 19 bp, Homo sapiens
  siRNA target sequence for KL (NM_004795.2,1579-1597).
cttggggagttgttgacaa

SEQ ID NO: 202901 - DNA, 19 bp, Homo sapiens
  siRNA target sequence for KL (NM_004795.2,1582-1600).
ggggagttgttgacaacta

SEQ ID NO: 202902 - DNA, 19 bp, Homo sapiens
  siRNA target sequence for KL (NM_004795.2,1584-1602).
ggagttgttgacaactaca

SEQ ID NO: 202903 - DNA, 19 bp, Homo sapiens
  siRNA target sequence for KL (NM_004795.2,1585-1603).
gagttgttgacaactacat

SEQ ID NO: 202904 - DNA, 19 bp, Homo sapiens
  siRNA target sequence for KL (NM_004795.2,1628-1646).
gtttaccgacctgaatgtt

SEQ ID NO: 202905 - DNA, 19 bp, Homo sapiens
  siRNA target sequence for KL (NM_004795.2,1656-1674).
gatgtccaccacagtaaaa

SEQ ID NO: 202906 - DNA, 19 bp, Homo sapiens
  siRNA target sequence for KL (NM_004795.2,1702-1720).
ccaagaagaggaaatccta

SEQ ID NO: 202907 - DNA, 19 bp, Homo sapiens
  siRNA target sequence for KL (NM_004795.2,1766-1784).
ggaaatgcacgttacacat

SEQ ID NO: 202908 - DNA, 19 bp, Homo sapiens
  siRNA target sequence for KL (NM_004795.2,1767-1785).
gaaatgcacgttacacatt

SEQ ID NO: 202909 - DNA, 19 bp, Homo sapiens
  siRNA target sequence for KL (NM_004795.2,2017-2035).
cccgactgtgctttcaaga

SEQ ID NO: 202910 - DNA, 19 bp, Homo sapiens
  siRNA target sequence for KL (NM_004795.2,2040-2058).
ggccatcacgtcaagcttt

SEQ ID NO: 202911 - DNA, 19 bp, Homo sapiens
  siRNA target sequence for KL (NM_004795.2,2049-2067).
gtcaagctttggataacga

SEQ ID NO: 202912 - DNA, 19 bp, Homo sapiens
  siRNA target sequence for KL (NM_004795.2,2066-2084).
gatgaatgagccgtataca

SEQ ID NO: 202913 - DNA, 19 bp, Homo sapiens
  siRNA target sequence for KL (NM_004795.2,2073-2091).
gagccgtatacaaggaata

SEQ ID NO: 202914 - DNA, 19 bp, Homo sapiens
  siRNA target sequence for KL (NM_004795.2,2131-2149).
ccctggcttggcatgtgta

SEQ ID NO: 202915 - DNA, 19 bp, Homo sapiens
  siRNA target sequence for KL (NM_004795.2,2159-2177).
gtttaggcatgctcagaat

SEQ ID NO: 202916 - DNA, 19 bp, Homo sapiens
  siRNA target sequence for KL (NM_004795.2,2174-2192).
gaatgggaaaatatccata

SEQ ID NO: 202917 - DNA, 19 bp, Homo sapiens
  siRNA target sequence for KL (NM_004795.2,2194-2212).
ccttgcaggctgattggat

SEQ ID NO: 202918 - DNA, 19 bp, Homo sapiens
  siRNA target sequence for KL (NM_004795.2,2195-2213).
cttgcaggctgattggata

SEQ ID NO: 202919 - DNA, 19 bp, Homo sapiens
  siRNA target sequence for KL (NM_004795.2,2198-2216).
gcaggctgattggatagaa

SEQ ID NO: 202920 - DNA, 19 bp, Homo sapiens
  siRNA target sequence for KL (NM_004795.2,2260-2278).
gagttttggaatttgacat

SEQ ID NO: 202921 - DNA, 19 bp, Homo sapiens
  siRNA target sequence for KL (NM_004795.2,2303-2321).
cggctctggagattatcca

SEQ ID NO: 202922 - DNA, 19 bp, Homo sapiens
  siRNA target sequence for KL (NM_004795.2,2304-2322).
ggctctggagattatccat

SEQ ID NO: 202923 - DNA, 19 bp, Homo sapiens
  siRNA target sequence for KL (NM_004795.2,2393-2411).
gctaatccagggtaccttt

SEQ ID NO: 202924 - DNA, 19 bp, Homo sapiens
  siRNA target sequence for KL (NM_004795.2,2421-2439).
gctttaagccattatacca

SEQ ID NO: 202925 - DNA, 19 bp, Homo sapiens
  siRNA target sequence for KL (NM_004795.2,2444-2462).
ccttgtagactcagaaaaa

SEQ ID NO: 202926 - DNA, 19 bp, Homo sapiens
  siRNA target sequence for KL (NM_004795.2,2603-2621).
cctccccatgtacataata

SEQ ID NO: 202927 - DNA, 19 bp, Homo sapiens
  siRNA target sequence for KL (NM_004795.2,2604-2622).
ctccccatgtacataatat

SEQ ID NO: 202928 - DNA, 19 bp, Homo sapiens
  siRNA target sequence for KL (NM_004795.2,2658-2676).
gaccagctgagggtgtatt

SEQ ID NO: 202929 - DNA, 19 bp, Homo sapiens
  siRNA target sequence for KL (NM_004795.2,2681-2699).
gcagaattacataaacgaa

SEQ ID NO: 202930 - DNA, 19 bp, Homo sapiens
  siRNA target sequence for KL (NM_004795.2,2701-2719).
ctctcaaagcccacatact

SEQ ID NO: 202931 - DNA, 19 bp, Homo sapiens
  siRNA target sequence for KL (NM_004795.2,2710-2728).
cccacatactggatggtat

SEQ ID NO: 202932 - DNA, 19 bp, Homo sapiens
  siRNA target sequence for KL (NM_004795.2,2714-2732).
catactggatggtatcaat

SEQ ID NO: 202933 - DNA, 19 bp, Homo sapiens
  siRNA target sequence for KL (NM_004795.2,2779-2797).
ggtttggcctctatcgtta

SEQ ID NO: 202934 - DNA, 19 bp, Homo sapiens
  siRNA target sequence for KL (NM_004795.2,2780-2798).
gtttggcctctatcgttat

SEQ ID NO: 202935 - DNA, 19 bp, Homo sapiens
  siRNA target sequence for KL (NM_004795.2,2794-2812).
gttatgctgcagatcagtt

SEQ ID NO: 202936 - DNA, 19 bp, Homo sapiens
  siRNA target sequence for KL (NM_004795.2,2816-2834).
gcccaaggcatccatgaaa

SEQ ID NO: 202937 - DNA, 19 bp, Homo sapiens
  siRNA target sequence for KL (NM_004795.2,2818-2836).
ccaaggcatccatgaaaca

SEQ ID NO: 202938 - DNA, 19 bp, Homo sapiens
  siRNA target sequence for KL (NM_004795.2,2819-2837).
caaggcatccatgaaacat

SEQ ID NO: 202939 - DNA, 19 bp, Homo sapiens
  siRNA target sequence for KL (NM_004795.2,2823-2841).
gcatccatgaaacattaca

SEQ ID NO: 202940 - DNA, 19 bp, Homo sapiens
  siRNA target sequence for KL (NM_004795.2,2877-2895).
gaaactctggaaagatttt

SEQ ID NO: 202941 - DNA, 19 bp, Homo sapiens
  siRNA target sequence for KL (NM_004795.2,2915-2933).
gtgtactgagtgcagtttt

SEQ ID NO: 202942 - DNA, 19 bp, Homo sapiens
  siRNA target sequence for KL (NM_004795.2,2920-2938).
ctgagtgcagtttttttca

SEQ ID NO: 202943 - DNA, 19 bp, Homo sapiens
  siRNA target sequence for KL (NM_004795.2,2922-2940).
gagtgcagtttttttcaca

SEQ ID NO: 202944 - DNA, 19 bp, Homo sapiens
  siRNA target sequence for KL (NM_004795.2,2957-2975).
ggctttcatagcttttcta

SEQ ID NO: 202945 - DNA, 19 bp, Homo sapiens
  siRNA target sequence for KL (NM_153683.1,1612-1630).
gtcagctgacaaaaccaat

SEQ ID NO: 202946 - DNA, 19 bp, Homo sapiens
  siRNA target sequence for LOC152831 (NM_175737.2,128-146).
gggaatgaatggattttct

SEQ ID NO: 202947 - DNA, 19 bp, Homo sapiens
  siRNA target sequence for LOC152831 (NM_175737.2,166-184).
cacacgctataggaataca

SEQ ID NO: 202948 - DNA, 19 bp, Homo sapiens
  siRNA target sequence for LOC152831 (NM_175737.2,168-186).
cacgctataggaatacaat

SEQ ID NO: 202949 - DNA, 19 bp, Homo sapiens
  siRNA target sequence for LOC152831 (NM_175737.2,170-188).
cgctataggaatacaatgt

SEQ ID NO: 202950 - DNA, 19 bp, Homo sapiens
  siRNA target sequence for LOC152831 (NM_175737.2,187-205).
gtccaacgggggattgcaa

SEQ ID NO: 202951 - DNA, 19 bp, Homo sapiens
  siRNA target sequence for LOC152831 (NM_175737.2,193-211).
cgggggattgcaaagatct

SEQ ID NO: 202952 - DNA, 19 bp, Homo sapiens
  siRNA target sequence for LOC152831 (NM_175737.2,407-425).
ggaaaaggaccttctatat

SEQ ID NO: 202953 - DNA, 19 bp, Homo sapiens
  siRNA target sequence for LOC152831 (NM_175737.2,416-434).
ccttctatatgggatcatt

SEQ ID NO: 202954 - DNA, 19 bp, Homo sapiens
  siRNA target sequence for LOC152831 (NM_175737.2,458-476).
gtcagcagcacgaatggtt

SEQ ID NO: 202955 - DNA, 19 bp, Homo sapiens
  siRNA target sequence for LOC152831 (NM_175737.2,520-538).
ggattttataggagtttct

SEQ ID NO: 202956 - DNA, 19 bp, Homo sapiens
  siRNA target sequence for LOC152831 (NM_175737.2,530-548).
ggagtttctttttatcaat

SEQ ID NO: 202957 - DNA, 19 bp, Homo sapiens
  siRNA target sequence for LOC152831 (NM_175737.2,567-585).
ggcttttccccgatggaat

SEQ ID NO: 202958 - DNA, 19 bp, Homo sapiens
  siRNA target sequence for LOC152831 (NM_175737.2,568-586).
gcttttccccgatggaata

SEQ ID NO: 202959 - DNA, 19 bp, Homo sapiens
  siRNA target sequence for LOC152831 (NM_175737.2,574-592).
ccccgatggaatagtaaca

SEQ ID NO: 202960 - DNA, 19 bp, Homo sapiens
  siRNA target sequence for LOC152831 (NM_175737.2,576-594).
ccgatggaatagtaacagt

SEQ ID NO: 202961 - DNA, 19 bp, Homo sapiens
  siRNA target sequence for LOC152831 (NM_175737.2,577-595).
cgatggaatagtaacagtt

SEQ ID NO: 202962 - DNA, 19 bp, Homo sapiens
  siRNA target sequence for LOC152831 (NM_175737.2,608-626).
ggtctgcagtactacagta

SEQ ID NO: 202963 - DNA, 19 bp, Homo sapiens
  siRNA target sequence for LOC152831 (NM_175737.2,635-653).
gacgctctagtgcttagaa

SEQ ID NO: 202964 - DNA, 19 bp, Homo sapiens
  siRNA target sequence for LOC152831 (NM_175737.2,663-681).
ctatagttactttatacca

SEQ ID NO: 202965 - DNA, 19 bp, Homo sapiens
  siRNA target sequence for LOC152831 (NM_175737.2,692-710).
cctttggcactacaagaaa

SEQ ID NO: 202966 - DNA, 19 bp, Homo sapiens
  siRNA target sequence for LOC152831 (NM_175737.2,716-734).
ggggggtggaaaaatgata

SEQ ID NO: 202967 - DNA, 19 bp, Homo sapiens
  siRNA target sequence for LOC152831 (NM_175737.2,721-739).
gtggaaaaatgataccata

SEQ ID NO: 202968 - DNA, 19 bp, Homo sapiens
  siRNA target sequence for LOC152831 (NM_175737.2,723-741).
ggaaaaatgataccataat

SEQ ID NO: 202969 - DNA, 19 bp, Homo sapiens
  siRNA target sequence for LOC152831 (NM_175737.2,731-749).
gataccataatagatatct

SEQ ID NO: 202970 - DNA, 19 bp, Homo sapiens
  siRNA target sequence for LOC152831 (NM_175737.2,781-799).
gtttggggaccgtgtcaaa

SEQ ID NO: 202971 - DNA, 19 bp, Homo sapiens
  siRNA target sequence for LOC152831 (NM_175737.2,785-803).
ggggaccgtgtcaaatatt

SEQ ID NO: 202972 - DNA, 19 bp, Homo sapiens
  siRNA target sequence for LOC152831 (NM_175737.2,788-806).
gaccgtgtcaaatattgga

SEQ ID NO: 202973 - DNA, 19 bp, Homo sapiens
  siRNA target sequence for LOC152831 (NM_175737.2,790-808).
ccgtgtcaaatattggatt

SEQ ID NO: 202974 - DNA, 19 bp, Homo sapiens
  siRNA target sequence for LOC152831 (NM_175737.2,791-809).
cgtgtcaaatattggatta

SEQ ID NO: 202975 - DNA, 19 bp, Homo sapiens
  siRNA target sequence for LOC152831 (NM_175737.2,794-812).
gtcaaatattggattacaa

SEQ ID NO: 202976 - DNA, 19 bp, Homo sapiens
  siRNA target sequence for LOC152831 (NM_175737.2,900-918).
ctgtgggacacaacttgat

SEQ ID NO: 202977 - DNA, 19 bp, Homo sapiens
  siRNA target sequence for LOC152831 (NM_175737.2,902-920).
gtgggacacaacttgatca

SEQ ID NO: 202978 - DNA, 19 bp, Homo sapiens
  siRNA target sequence for LOC152831 (NM_175737.2,919-937).
caaggctcactcgaaagtt

SEQ ID NO: 202979 - DNA, 19 bp, Homo sapiens
  siRNA target sequence for LOC152831 (NM_175737.2,930-948).
cgaaagtttggcataacta

SEQ ID NO: 202980 - DNA, 19 bp, Homo sapiens
  siRNA target sequence for LOC152831 (NM_175737.2,935-953).
gtttggcataactacaaca

SEQ ID NO: 202981 - DNA, 19 bp, Homo sapiens
  siRNA target sequence for LOC152831 (NM_175737.2,971-989).
cagaagggttggttatcga

SEQ ID NO: 202982 - DNA, 19 bp, Homo sapiens
  siRNA target sequence for LOC152831 (NM_175737.2,988-1006).
gatcacgttgggatctcat

SEQ ID NO: 202983 - DNA, 19 bp, Homo sapiens
  siRNA target sequence for LOC152831 (NM_175737.2,993-1011).
cgttgggatctcattggat

SEQ ID NO: 202984 - DNA, 19 bp, Homo sapiens
  siRNA target sequence for LOC152831 (NM_175737.2,1016-1034).
ccaaaccggtcggaaaaca

SEQ ID NO: 202985 - DNA, 19 bp, Homo sapiens
  siRNA target sequence for LOC152831 (NM_175737.2,1026-1044).
cggaaaacacgatggatat

SEQ ID NO: 202986 - DNA, 19 bp, Homo sapiens
  siRNA target sequence for LOC152831 (NM_175737.2,1028-1046).
gaaaacacgatggatatat

SEQ ID NO: 202987 - DNA, 19 bp, Homo sapiens
  siRNA target sequence for LOC152831 (NM_175737.2,1033-1051).
cacgatggatatattcaaa

SEQ ID NO: 202988 - DNA, 19 bp, Homo sapiens
  siRNA target sequence for LOC152831 (NM_175737.2,1289-1307).
gaagcgctgaactggatta

SEQ ID NO: 202989 - DNA, 19 bp, Homo sapiens
  siRNA target sequence for LOC152831 (NM_175737.2,1321-1339).
caaccctcgaatcttgatt

SEQ ID NO: 202990 - DNA, 19 bp, Homo sapiens
  siRNA target sequence for LOC152831 (NM_175737.2,1357-1375).
cacagacagtcgtgtgaaa

SEQ ID NO: 202991 - DNA, 19 bp, Homo sapiens
  siRNA target sequence for LOC152831 (NM_175737.2,1389-1407).
cggccatctacatgatgaa

SEQ ID NO: 202992 - DNA, 19 bp, Homo sapiens
  siRNA target sequence for LOC152831 (NM_175737.2,1424-1442).
gtgcttcaagcaataaggt

SEQ ID NO: 202993 - DNA, 19 bp, Homo sapiens
  siRNA target sequence for LOC152831 (NM_175737.2,1426-1444).
gcttcaagcaataaggtta

SEQ ID NO: 202994 - DNA, 19 bp, Homo sapiens
  siRNA target sequence for LOC152831 (NM_175737.2,1433-1451).
gcaataaggttagatgaaa

SEQ ID NO: 202995 - DNA, 19 bp, Homo sapiens
  siRNA target sequence for LOC152831 (NM_175737.2,1434-1452).
caataaggttagatgaaat

SEQ ID NO: 202996 - DNA, 19 bp, Homo sapiens
  siRNA target sequence for LOC152831 (NM_175737.2,1448-1466).
gaaatacgagtgtttggtt

SEQ ID NO: 202997 - DNA, 19 bp, Homo sapiens
  siRNA target sequence for LOC152831 (NM_175737.2,1513-1531).
caccatccgccgaggatta

SEQ ID NO: 202998 - DNA, 19 bp, Homo sapiens
  siRNA target sequence for LOC152831 (NM_175737.2,1515-1533).
ccatccgccgaggattatt

SEQ ID NO: 202999 - DNA, 19 bp, Homo sapiens
  siRNA target sequence for LOC152831 (NM_175737.2,1516-1534).
catccgccgaggattattt

SEQ ID NO: 203000 - DNA, 19 bp, Homo sapiens
  siRNA target sequence for LOC152831 (NM_175737.2,1562-1580).
gagcggaaacctaagtctt

SEQ ID NO: 203001 - DNA, 19 bp, Homo sapiens
  siRNA target sequence for LOC152831 (NM_175737.2,1581-1599).
cagcacactactacaaaca

SEQ ID NO: 203002 - DNA, 19 bp, Homo sapiens
  siRNA target sequence for LOC152831 (NM_175737.2,1583-1601).
gcacactactacaaacaga

SEQ ID NO: 203003 - DNA, 19 bp, Homo sapiens
  siRNA target sequence for LOC152831 (NM_175737.2,1584-1602).
cacactactacaaacagat

SEQ ID NO: 203004 - DNA, 19 bp, Homo sapiens
  siRNA target sequence for LOC152831 (NM_175737.2,1600-1618).
gatcatacgagaaaatggt

SEQ ID NO: 203005 - DNA, 19 bp, Homo sapiens
  siRNA target sequence for LOC152831 (NM_175737.2,1814-1832).
cccgctcaatgcacagatt

SEQ ID NO: 203006 - DNA, 19 bp, Homo sapiens
  siRNA target sequence for LOC152831 (NM_175737.2,1816-1834).
cgctcaatgcacagatttt

SEQ ID NO: 203007 - DNA, 19 bp, Homo sapiens
  siRNA target sequence for LOC152831 (NM_175737.2,2183-2201).
cggctaagtgacatctaca

SEQ ID NO: 203008 - DNA, 19 bp, Homo sapiens
  siRNA target sequence for LOC152831 (NM_175737.2,2449-2467).
ggccatgagggaatacatt

SEQ ID NO: 203009 - DNA, 19 bp, Homo sapiens
  siRNA target sequence for LOC152831 (NM_175737.2,2674-2692).
cacgcgcctggctgtgatt

SEQ ID NO: 203010 - DNA, 19 bp, Homo sapiens
  siRNA target sequence for LOC152831 (NM_175737.2,2739-2757).
gcgacatggacatttacat

SEQ ID NO: 203011 - DNA, 19 bp, Homo sapiens
  siRNA target sequence for LOC152831 (NM_175737.2,2924-2942).
ggattcttcacatctgatt

SEQ ID NO: 203012 - DNA, 19 bp, Homo sapiens
  siRNA target sequence for LOC152831 (NM_175737.2,2948-2966).
gctaaatcctcaatacaat

SEQ ID NO: 203013 - DNA, 19 bp, Homo sapiens
  siRNA target sequence for LOC152831 (NM_175737.2,3024-3042).
gcagtcagacccaagaaaa

SEQ ID NO: 203014 - DNA, 19 bp, Homo sapiens
  siRNA target sequence for LOC152831 (NM_175737.2,3114-3132).
ccaccctggttctactctt

SEQ ID NO: 203015 - DNA, 19 bp, Homo sapiens
  siRNA target sequence for LOC152831 (NM_175737.2,3115-3133).
caccctggttctactctta

SEQ ID NO: 203016 - DNA, 19 bp, Homo sapiens
  siRNA target sequence for LOC152831 (NM_175737.2,3187-3205).
cttacaacacataccatta

SEQ ID NO: 203017 - DNA, 19 bp, Homo sapiens
  siRNA target sequence for RIMS3 (NM_014747.1,825-843).
ccgacggcacgttcatctt

SEQ ID NO: 203018 - DNA, 19 bp, Homo sapiens
  siRNA target sequence for RIMS3 (NM_014747.1,1043-1061).
ctcccagccacctatatca

SEQ ID NO: 203019 - DNA, 19 bp, Homo sapiens
  siRNA target sequence for RIMS3 (NM_014747.1,1049-1067).
gccacctatatcaaggttt

SEQ ID NO: 203020 - DNA, 19 bp, Homo sapiens
  siRNA target sequence for RIMS3 (NM_014747.1,1050-1068).
ccacctatatcaaggttta

SEQ ID NO: 203021 - DNA, 19 bp, Homo sapiens
  siRNA target sequence for RIMS3 (NM_014747.1,1053-1071).
cctatatcaaggtttacct

SEQ ID NO: 203022 - DNA, 19 bp, Homo sapiens
  siRNA target sequence for UNG (NM_003362.2,413-431).
gttcgggaaaccgtatttt

SEQ ID NO: 203023 - DNA, 19 bp, Homo sapiens
  siRNA target sequence for UNG (NM_003362.2,418-436).
ggaaaccgtattttatcaa

SEQ ID NO: 203024 - DNA, 19 bp, Homo sapiens
  siRNA target sequence for UNG (NM_003362.2,424-442).
cgtattttatcaagctaat

SEQ ID NO: 203025 - DNA, 19 bp, Homo sapiens
  siRNA target sequence for UNG (NM_003362.2,467-485).
gcattacactgtttatcca

SEQ ID NO: 203026 - DNA, 19 bp, Homo sapiens
  siRNA target sequence for UNG (NM_003362.2,511-529).
cccagatgtgtgacataaa

SEQ ID NO: 203027 - DNA, 19 bp, Homo sapiens
  siRNA target sequence for UNG (NM_003362.2,512-530).
ccagatgtgtgacataaaa

SEQ ID NO: 203028 - DNA, 19 bp, Homo sapiens
  siRNA target sequence for UNG (NM_003362.2,515-533).
gatgtgtgacataaaagat

SEQ ID NO: 203029 - DNA, 19 bp, Homo sapiens
  siRNA target sequence for UNG (NM_003362.2,551-569).
gggacaggatccatatcat

SEQ ID NO: 203030 - DNA, 19 bp, Homo sapiens
  siRNA target sequence for UNG (NM_003362.2,562-580).
catatcatggacctaatca

SEQ ID NO: 203031 - DNA, 19 bp, Homo sapiens
  siRNA target sequence for UNG (NM_003362.2,587-605).
cgggctctgctttagtgtt

SEQ ID NO: 203032 - DNA, 19 bp, Homo sapiens
  siRNA target sequence for UNG (NM_003362.2,658-676).
ctacagacatagaggattt

SEQ ID NO: 203033 - DNA, 19 bp, Homo sapiens
  siRNA target sequence for UNG (NM_003362.2,835-853).
cgaatggccttgttttctt

SEQ ID NO: 203034 - DNA, 19 bp, Homo sapiens
  siRNA target sequence for UNG (NM_003362.2,878-896).
gaagggcagtgccattgat

SEQ ID NO: 203035 - DNA, 19 bp, Homo sapiens
  siRNA target sequence for UNG (NM_003362.2,883-901).
gcagtgccattgataggaa

SEQ ID NO: 203036 - DNA, 19 bp, Homo sapiens
  siRNA target sequence for UNG (NM_003362.2,898-916).
ggaagcggcaccatgtact

SEQ ID NO: 203037 - DNA, 19 bp, Homo sapiens
  siRNA target sequence for UNG (NM_003362.2,899-917).
gaagcggcaccatgtacta

SEQ ID NO: 203038 - DNA, 19 bp, Homo sapiens
  siRNA target sequence for UNG (NM_003362.2,932-950).
ctcccctttgtcagtgtat

SEQ ID NO: 203039 - DNA, 19 bp, Homo sapiens
  siRNA target sequence for UNG (NM_003362.2,1008-1026).
ggcaagaagcccattgact

SEQ ID NO: 203040 - DNA, 19 bp, Homo sapiens
  siRNA target sequence for UNG2 (NM_021147.1,1009-1027).
gatccttcgtttcctttta

SEQ ID NO: 203041 - DNA, 19 bp, Homo sapiens
  siRNA target sequence for BST1 (NM_004334.1,390-408).
cagactatgacctttttat

SEQ ID NO: 203042 - DNA, 19 bp, Homo sapiens
  siRNA target sequence for BST1 (NM_004334.1,488-506).
gacaacacccgtcgtttta

SEQ ID NO: 203043 - DNA, 19 bp, Homo sapiens
  siRNA target sequence for BST1 (NM_004334.1,510-528).
ccctgagcgatgttctgta

SEQ ID NO: 203044 - DNA, 19 bp, Homo sapiens
  siRNA target sequence for BST1 (NM_004334.1,553-571).
ctggtgtcgacagaaaaat

SEQ ID NO: 203045 - DNA, 19 bp, Homo sapiens
  siRNA target sequence for BST1 (NM_004334.1,555-573).
ggtgtcgacagaaaaatga

SEQ ID NO: 203046 - DNA, 19 bp, Homo sapiens
  siRNA target sequence for BST1 (NM_004334.1,574-592).
ctctggactcgattaccaa

SEQ ID NO: 203047 - DNA, 19 bp, Homo sapiens
  siRNA target sequence for BST1 (NM_004334.1,650-668).
gcatccatccagtattcca

SEQ ID NO: 203048 - DNA, 19 bp, Homo sapiens
  siRNA target sequence for BST1 (NM_004334.1,661-679).
gtattccaaggatagttct

SEQ ID NO: 203049 - DNA, 19 bp, Homo sapiens
  siRNA target sequence for BST1 (NM_004334.1,689-707).
cacgtcatgctgaatggtt

SEQ ID NO: 203050 - DNA, 19 bp, Homo sapiens
  siRNA target sequence for BST1 (NM_004334.1,722-740).
gcctatcccatcaaaggtt

SEQ ID NO: 203051 - DNA, 19 bp, Homo sapiens
  siRNA target sequence for BST1 (NM_004334.1,723-741).
cctatcccatcaaaggttt

SEQ ID NO: 203052 - DNA, 19 bp, Homo sapiens
  siRNA target sequence for BST1 (NM_004334.1,793-811).
cgagatctgggttatgcat

SEQ ID NO: 203053 - DNA, 19 bp, Homo sapiens
  siRNA target sequence for BST1 (NM_004334.1,889-907).
gttccagtacagctgtatt

SEQ ID NO: 203054 - DNA, 19 bp, Homo sapiens
  siRNA target sequence for BST1 (NM_004334.1,892-910).
ccagtacagctgtattaat

SEQ ID NO: 203055 - DNA, 19 bp, Homo sapiens
  siRNA target sequence for BST1 (NM_004334.1,895-913).
gtacagctgtattaatgat

SEQ ID NO: 203056 - DNA, 19 bp, Homo sapiens
  siRNA target sequence for BST1 (NM_004334.1,920-938).
ccagtgaagctcttacagt

SEQ ID NO: 203057 - DNA, 19 bp, Homo sapiens
  siRNA target sequence for BST1 (NM_004334.1,999-1017).
gaaaagccccaagtcttta

SEQ ID NO: 203058 - DNA, 19 bp, Homo sapiens
  siRNA target sequence for BST1 (NM_004334.1,1006-1024).
cccaagtctttatacagaa

SEQ ID NO: 203059 - DNA, 19 bp, Homo sapiens
  siRNA target sequence for CD38 (NM_001775.2,300-318).
gcgcgatgcgtcaagtaca

SEQ ID NO: 203060 - DNA, 19 bp, Homo sapiens
  siRNA target sequence for CD38 (NM_001775.2,307-325).
gcgtcaagtacactgaaat

SEQ ID NO: 203061 - DNA, 19 bp, Homo sapiens
  siRNA target sequence for CD38 (NM_001775.2,308-326).
cgtcaagtacactgaaatt

SEQ ID NO: 203062 - DNA, 19 bp, Homo sapiens
  siRNA target sequence for CD38 (NM_001775.2,311-329).
caagtacactgaaattcat

SEQ ID NO: 203063 - DNA, 19 bp, Homo sapiens
  siRNA target sequence for CD38 (NM_001775.2,331-349).
ctgagatgagacatgtaga

SEQ ID NO: 203064 - DNA, 19 bp, Homo sapiens
  siRNA target sequence for CD38 (NM_001775.2,345-363).
gtagactgccaaagtgtat

SEQ ID NO: 203065 - DNA, 19 bp, Homo sapiens
  siRNA target sequence for CD38 (NM_001775.2,370-388).
ctttcaagggtgcatttat

SEQ ID NO: 203066 - DNA, 19 bp, Homo sapiens
  siRNA target sequence for CD38 (NM_001775.2,407-425).
cattactgaagaagactat

SEQ ID NO: 203067 - DNA, 19 bp, Homo sapiens
  siRNA target sequence for CD38 (NM_001775.2,454-472).
ccgtaccttgcaacaagat

SEQ ID NO: 203068 - DNA, 19 bp, Homo sapiens
  siRNA target sequence for CD38 (NM_001775.2,455-473).
cgtaccttgcaacaagatt

SEQ ID NO: 203069 - DNA, 19 bp, Homo sapiens
  siRNA target sequence for CD38 (NM_001775.2,519-537).
gtccagcgggacatgttca

SEQ ID NO: 203070 - DNA, 19 bp, Homo sapiens
  siRNA target sequence for CD38 (NM_001775.2,580-598).
catggtgtggtgaattcaa

SEQ ID NO: 203071 - DNA, 19 bp, Homo sapiens
  siRNA target sequence for CD38 (NM_001775.2,605-623).
caaaataaactatcaatct

SEQ ID NO: 203072 - DNA, 19 bp, Homo sapiens
  siRNA target sequence for CD38 (NM_001775.2,647-665).
cagcaacaaccctgtttca

SEQ ID NO: 203073 - DNA, 19 bp, Homo sapiens
  siRNA target sequence for CD38 (NM_001775.2,739-757).
cccgcagtaaaatctttga

SEQ ID NO: 203074 - DNA, 19 bp, Homo sapiens
  siRNA target sequence for CD38 (NM_001775.2,742-760).
gcagtaaaatctttgacaa

SEQ ID NO: 203075 - DNA, 19 bp, Homo sapiens
  siRNA target sequence for CD38 (NM_001775.2,775-793).
ggagtgtggaagtccataa

SEQ ID NO: 203076 - DNA, 19 bp, Homo sapiens
  siRNA target sequence for CD38 (NM_001775.2,776-794).
gagtgtggaagtccataat

SEQ ID NO: 203077 - DNA, 19 bp, Homo sapiens
  siRNA target sequence for CD38 (NM_001775.2,907-925).
gcaaaaggaatattcaatt

SEQ ID NO: 203078 - DNA, 19 bp, Homo sapiens
  siRNA target sequence for ASML3B (NM_014474.1,215-233).
gaccctgactacaaggtat

SEQ ID NO: 203079 - DNA, 19 bp, Homo sapiens
  siRNA target sequence for ASML3B (NM_014474.1,299-317).
ggtgactacctctgtgatt

SEQ ID NO: 203080 - DNA, 19 bp, Homo sapiens
  siRNA target sequence for ASML3B (NM_014474.1,371-389).
gagccagacttcattctct

SEQ ID NO: 203081 - DNA, 19 bp, Homo sapiens
  siRNA target sequence for ASML3B (NM_014474.1,482-500).
gaggtctttccagatacta

SEQ ID NO: 203082 - DNA, 19 bp, Homo sapiens
  siRNA target sequence for ASML3B (NM_014474.1,574-592).
caatcagatagcagaacta

SEQ ID NO: 203083 - DNA, 19 bp, Homo sapiens
  siRNA target sequence for ASML3B (NM_014474.1,595-613).
gaaaccctggcttagtaat

SEQ ID NO: 203084 - DNA, 19 bp, Homo sapiens
  siRNA target sequence for ASML3B (NM_014474.1,599-617).
ccctggcttagtaatgagt

SEQ ID NO: 203085 - DNA, 19 bp, Homo sapiens
  siRNA target sequence for ASML3B (NM_014474.1,616-634).
gtccatcgctctcttcaaa

SEQ ID NO: 203086 - DNA, 19 bp, Homo sapiens
  siRNA target sequence for ASML3B (NM_014474.1,618-636).
ccatcgctctcttcaaaaa

SEQ ID NO: 203087 - DNA, 19 bp, Homo sapiens
  siRNA target sequence for ASML3B (NM_014474.1,622-640).
cgctctcttcaaaaaaggt

SEQ ID NO: 203088 - DNA, 19 bp, Homo sapiens
  siRNA target sequence for ASML3B (NM_014474.1,781-799).
gctgaccgatgcatccaaa

SEQ ID NO: 203089 - DNA, 19 bp, Homo sapiens
  siRNA target sequence for ASML3B (NM_014474.1,804-822).
gggacatggtgtacattgt

SEQ ID NO: 203090 - DNA, 19 bp, Homo sapiens
  siRNA target sequence for ASML3B (NM_014474.1,871-889).
gttccgggagggcttcaat

SEQ ID NO: 203091 - DNA, 19 bp, Homo sapiens
  siRNA target sequence for ASML3B (NM_014474.1,874-892).
ccgggagggcttcaatgaa

SEQ ID NO: 203092 - DNA, 19 bp, Homo sapiens
  siRNA target sequence for ASML3B (NM_014474.1,998-1016).
cccataagcgccatgttca

SEQ ID NO: 203093 - DNA, 19 bp, Homo sapiens
  siRNA target sequence for ASML3B (NM_014474.1,999-1017).
ccataagcgccatgttcat

SEQ ID NO: 203094 - DNA, 19 bp, Homo sapiens
  siRNA target sequence for ASML3B (NM_014474.1,1060-1078).
ggtcaatggggccaacaat

SEQ ID NO: 203095 - DNA, 19 bp, Homo sapiens
  siRNA target sequence for ASML3B (NM_014474.1,1083-1101).
ccatccgggtgttcgaata

SEQ ID NO: 203096 - DNA, 19 bp, Homo sapiens
  siRNA target sequence for ASML3B (NM_014474.1,1084-1102).
catccgggtgttcgaatat

SEQ ID NO: 203097 - DNA, 19 bp, Homo sapiens
  siRNA target sequence for ASML3B (NM_014474.1,1289-1307).
cagcgctactacgtctata

SEQ ID NO: 203098 - DNA, 19 bp, Homo sapiens
  siRNA target sequence for ASML3B (NM_014474.1,1292-1310).
cgctactacgtctataact

SEQ ID NO: 203099 - DNA, 19 bp, Homo sapiens
  siRNA target sequence for CTBS (NM_004388.1,158-176).
gccaccatccagatttcga

SEQ ID NO: 203100 - DNA, 19 bp, Homo sapiens
  siRNA target sequence for CTBS (NM_004388.1,167-185).
cagatttcgaggtctttgt

SEQ ID NO: 203101 - DNA, 19 bp, Homo sapiens
  siRNA target sequence for CTBS (NM_004388.1,220-238).
gattggtcacagattacaa

SEQ ID NO: 203102 - DNA, 19 bp, Homo sapiens
  siRNA target sequence for CTBS (NM_004388.1,279-297).
ctacgctcattcaaaagga

SEQ ID NO: 203103 - DNA, 19 bp, Homo sapiens
  siRNA target sequence for CTBS (NM_004388.1,296-314).
gagccagagtagtacttaa

SEQ ID NO: 203104 - DNA, 19 bp, Homo sapiens
  siRNA target sequence for CTBS (NM_004388.1,362-380).
cctggatagctcaaaaact

SEQ ID NO: 203105 - DNA, 19 bp, Homo sapiens
  siRNA target sequence for CTBS (NM_004388.1,363-381).
ctggatagctcaaaaactt

SEQ ID NO: 203106 - DNA, 19 bp, Homo sapiens
  siRNA target sequence for CTBS (NM_004388.1,365-383).
ggatagctcaaaaacttaa

SEQ ID NO: 203107 - DNA, 19 bp, Homo sapiens
  siRNA target sequence for CTBS (NM_004388.1,395-413).
cacaatatatggatggaat

SEQ ID NO: 203108 - DNA, 19 bp, Homo sapiens
  siRNA target sequence for CTBS (NM_004388.1,449-467).
cacctgaatatgatgcatt

SEQ ID NO: 203109 - DNA, 19 bp, Homo sapiens
  siRNA target sequence for CTBS (NM_004388.1,495-513).
ctctttccatcgtgaaatt

SEQ ID NO: 203110 - DNA, 19 bp, Homo sapiens
  siRNA target sequence for CTBS (NM_004388.1,497-515).
ctttccatcgtgaaattga

SEQ ID NO: 203111 - DNA, 19 bp, Homo sapiens
  siRNA target sequence for CTBS (NM_004388.1,516-534).
gggatcacaggtaaccttt

SEQ ID NO: 203112 - DNA, 19 bp, Homo sapiens
  siRNA target sequence for CTBS (NM_004388.1,545-563).
ggtctccaaagaacataga

SEQ ID NO: 203113 - DNA, 19 bp, Homo sapiens
  siRNA target sequence for CTBS (NM_004388.1,558-576).
catagacagaagatgctat

SEQ ID NO: 203114 - DNA, 19 bp, Homo sapiens
  siRNA target sequence for CTBS (NM_004388.1,564-582).
cagaagatgctataattat

SEQ ID NO: 203115 - DNA, 19 bp, Homo sapiens
  siRNA target sequence for CTBS (NM_004388.1,621-639).
gtcttatgatgaacaaagt

SEQ ID NO: 203116 - DNA, 19 bp, Homo sapiens
  siRNA target sequence for CTBS (NM_004388.1,665-683).
cagccaatgctccctataa

SEQ ID NO: 203117 - DNA, 19 bp, Homo sapiens
  siRNA target sequence for CTBS (NM_004388.1,674-692).
ctccctataatcagacatt

SEQ ID NO: 203118 - DNA, 19 bp, Homo sapiens
  siRNA target sequence for CTBS (NM_004388.1,678-696).
ctataatcagacattaact

SEQ ID NO: 203119 - DNA, 19 bp, Homo sapiens
  siRNA target sequence for CTBS (NM_004388.1,695-713).
ctggatataatgactacat

SEQ ID NO: 203120 - DNA, 19 bp, Homo sapiens
  siRNA target sequence for CTBS (NM_004388.1,714-732).
caagatgagcattaatcct

SEQ ID NO: 203121 - DNA, 19 bp, Homo sapiens
  siRNA target sequence for CTBS (NM_004388.1,723-741).
cattaatcctaagaaactt

SEQ ID NO: 203122 - DNA, 19 bp, Homo sapiens
  siRNA target sequence for CTBS (NM_004388.1,754-772).
ccttggtatggttatgatt

SEQ ID NO: 203123 - DNA, 19 bp, Homo sapiens
  siRNA target sequence for CTBS (NM_004388.1,755-773).
cttggtatggttatgatta

SEQ ID NO: 203124 - DNA, 19 bp, Homo sapiens
  siRNA target sequence for CTBS (NM_004388.1,795-813).
ggatcatgtttgtaccatt

SEQ ID NO: 203125 - DNA, 19 bp, Homo sapiens
  siRNA target sequence for CTBS (NM_004388.1,859-877).
cgtcaggtgccctacaaaa

SEQ ID NO: 203126 - DNA, 19 bp, Homo sapiens
  siRNA target sequence for CTBS (NM_004388.1,862-880).
caggtgccctacaaaacga

SEQ ID NO: 203127 - DNA, 19 bp, Homo sapiens
  siRNA target sequence for CTBS (NM_004388.1,868-886).
ccctacaaaacgatcatga

SEQ ID NO: 203128 - DNA, 19 bp, Homo sapiens
  siRNA target sequence for CTBS (NM_004388.1,869-887).
cctacaaaacgatcatgaa

SEQ ID NO: 203129 - DNA, 19 bp, Homo sapiens
  siRNA target sequence for CTBS (NM_004388.1,928-946).
gatcagcgggctccttatt

SEQ ID NO: 203130 - DNA, 19 bp, Homo sapiens
  siRNA target sequence for CTBS (NM_004388.1,931-949).
cagcgggctccttattata

SEQ ID NO: 203131 - DNA, 19 bp, Homo sapiens
  siRNA target sequence for CTBS (NM_004388.1,934-952).
cgggctccttattataact

SEQ ID NO: 203132 - DNA, 19 bp, Homo sapiens
  siRNA target sequence for CTBS (NM_004388.1,935-953).
gggctccttattataacta

SEQ ID NO: 203133 - DNA, 19 bp, Homo sapiens
  siRNA target sequence for CTBS (NM_004388.1,965-983).
ctggccactttcatcaagt

SEQ ID NO: 203134 - DNA, 19 bp, Homo sapiens
  siRNA target sequence for CTBS (NM_004388.1,976-994).
catcaagtatggtatgata

SEQ ID NO: 203135 - DNA, 19 bp, Homo sapiens
  siRNA target sequence for CTBS (NM_004388.1,996-1014).
ccctcagagtatttcttta

SEQ ID NO: 203136 - DNA, 19 bp, Homo sapiens
  siRNA target sequence for FLJ21865 (NM_022759.1,145-163).
cgggaaggagcatcaaaga

SEQ ID NO: 203137 - DNA, 19 bp, Homo sapiens
  siRNA target sequence for FLJ21865 (NM_022759.1,152-170).
gagcatcaaagatgaagaa

SEQ ID NO: 203138 - DNA, 19 bp, Homo sapiens
  siRNA target sequence for FLJ21865 (NM_022759.1,186-204).
cgagaggtggtcagttttt

SEQ ID NO: 203139 - DNA, 19 bp, Homo sapiens
  siRNA target sequence for FLJ21865 (NM_022759.1,209-227).
ggaccccctgccagttaga

SEQ ID NO: 203140 - DNA, 19 bp, Homo sapiens
  siRNA target sequence for FLJ21865 (NM_022759.1,210-228).
gaccccctgccagttagat

SEQ ID NO: 203141 - DNA, 19 bp, Homo sapiens
  siRNA target sequence for FLJ21865 (NM_022759.1,212-230).
ccccctgccagttagatat

SEQ ID NO: 203142 - DNA, 19 bp, Homo sapiens
  siRNA target sequence for FLJ21865 (NM_022759.1,219-237).
ccagttagatattatgaca

SEQ ID NO: 203143 - DNA, 19 bp, Homo sapiens
  siRNA target sequence for FLJ21865 (NM_022759.1,565-583).
gcgtgctggggactttcat

SEQ ID NO: 203144 - DNA, 19 bp, Homo sapiens
  siRNA target sequence for FLJ21865 (NM_022759.1,807-825).
ctggtgctctggtatgaca

SEQ ID NO: 203145 - DNA, 19 bp, Homo sapiens
  siRNA target sequence for FLJ21865 (NM_022759.1,898-916).
gcgacggcttcttcactaa

SEQ ID NO: 203146 - DNA, 19 bp, Homo sapiens
  siRNA target sequence for FLJ21865 (NM_022759.1,900-918).
gacggcttcttcactaact

SEQ ID NO: 203147 - DNA, 19 bp, Homo sapiens
  siRNA target sequence for FLJ21865 (NM_022759.1,902-920).
cggcttcttcactaactat

SEQ ID NO: 203148 - DNA, 19 bp, Homo sapiens
  siRNA target sequence for FLJ21865 (NM_022759.1,903-921).
ggcttcttcactaactata

SEQ ID NO: 203149 - DNA, 19 bp, Homo sapiens
  siRNA target sequence for FLJ21865 (NM_022759.1,986-1004).
cgtgggcgtggatgtgttt

SEQ ID NO: 203150 - DNA, 19 bp, Homo sapiens
  siRNA target sequence for SMPDL3A (NM_006714.2,171-189).
ccggcgataggacagtttt

SEQ ID NO: 203151 - DNA, 19 bp, Homo sapiens
  siRNA target sequence for SMPDL3A (NM_006714.2,190-208).
ggcatgtgactgacttaca

SEQ ID NO: 203152 - DNA, 19 bp, Homo sapiens
  siRNA target sequence for SMPDL3A (NM_006714.2,192-210).
catgtgactgacttacact

SEQ ID NO: 203153 - DNA, 19 bp, Homo sapiens
  siRNA target sequence for SMPDL3A (NM_006714.2,251-269).
gtgtgcttcatctaaaggt

SEQ ID NO: 203154 - DNA, 19 bp, Homo sapiens
  siRNA target sequence for SMPDL3A (NM_006714.2,308-326).
gtgtgattctccatatcaa

SEQ ID NO: 203155 - DNA, 19 bp, Homo sapiens
  siRNA target sequence for SMPDL3A (NM_006714.2,366-384).
caagaagcatctttcatga

SEQ ID NO: 203156 - DNA, 19 bp, Homo sapiens
  siRNA target sequence for SMPDL3A (NM_006714.2,369-387).
gaagcatctttcatgatat

SEQ ID NO: 203157 - DNA, 19 bp, Homo sapiens
  siRNA target sequence for SMPDL3A (NM_006714.2,395-413).
ggatagcccacctcatgtt

SEQ ID NO: 203158 - DNA, 19 bp, Homo sapiens
  siRNA target sequence for SMPDL3A (NM_006714.2,435-453).
gacactgttataaatgtga

SEQ ID NO: 203159 - DNA, 19 bp, Homo sapiens
  siRNA target sequence for SMPDL3A (NM_006714.2,450-468).
gtgatcactaatatgacaa

SEQ ID NO: 203160 - DNA, 19 bp, Homo sapiens
  siRNA target sequence for SMPDL3A (NM_006714.2,476-494).
ccagagtctctttccaaat

SEQ ID NO: 203161 - DNA, 19 bp, Homo sapiens
  siRNA target sequence for SMPDL3A (NM_006714.2,506-524).
ccctgcgctgggtaatcat

SEQ ID NO: 203162 - DNA, 19 bp, Homo sapiens
  siRNA target sequence for SMPDL3A (NM_006714.2,508-526).
ctgcgctgggtaatcatga

SEQ ID NO: 203163 - DNA, 19 bp, Homo sapiens
  siRNA target sequence for SMPDL3A (NM_006714.2,511-529).
cgctgggtaatcatgacta

SEQ ID NO: 203164 - DNA, 19 bp, Homo sapiens
  siRNA target sequence for SMPDL3A (NM_006714.2,512-530).
gctgggtaatcatgactat

SEQ ID NO: 203165 - DNA, 19 bp, Homo sapiens
  siRNA target sequence for SMPDL3A (NM_006714.2,513-531).
ctgggtaatcatgactatt

SEQ ID NO: 203166 - DNA, 19 bp, Homo sapiens
  siRNA target sequence for SMPDL3A (NM_006714.2,548-566).
gcctgtagtcaccagtaaa

SEQ ID NO: 203167 - DNA, 19 bp, Homo sapiens
  siRNA target sequence for SMPDL3A (NM_006714.2,552-570).
gtagtcaccagtaaagtgt

SEQ ID NO: 203168 - DNA, 19 bp, Homo sapiens
  siRNA target sequence for SMPDL3A (NM_006714.2,609-627).
gaagaagctattagtactt

SEQ ID NO: 203169 - DNA, 19 bp, Homo sapiens
  siRNA target sequence for SMPDL3A (NM_006714.2,612-630).
gaagctattagtactttaa

SEQ ID NO: 203170 - DNA, 19 bp, Homo sapiens
  siRNA target sequence for SMPDL3A (NM_006714.2,615-633).
gctattagtactttaagga

SEQ ID NO: 203171 - DNA, 19 bp, Homo sapiens
  siRNA target sequence for SMPDL3A (NM_006714.2,653-671).
gaaagttacaactaatcca

SEQ ID NO: 203172 - DNA, 19 bp, Homo sapiens
  siRNA target sequence for SMPDL3A (NM_006714.2,664-682).
ctaatccaaaccttaggat

SEQ ID NO: 203173 - DNA, 19 bp, Homo sapiens
  siRNA target sequence for SMPDL3A (NM_006714.2,669-687).
ccaaaccttaggatcatca

SEQ ID NO: 203174 - DNA, 19 bp, Homo sapiens
  siRNA target sequence for SMPDL3A (NM_006714.2,675-693).
cttaggatcatcagtctaa

SEQ ID NO: 203175 - DNA, 19 bp, Homo sapiens
  siRNA target sequence for SMPDL3A (NM_006714.2,680-698).
gatcatcagtctaaacaca

SEQ ID NO: 203176 - DNA, 19 bp, Homo sapiens
  siRNA target sequence for SMPDL3A (NM_006714.2,710-728).
cggcccaaatataatgaca

SEQ ID NO: 203177 - DNA, 19 bp, Homo sapiens
  siRNA target sequence for SMPDL3A (NM_006714.2,743-761).
cccagccaaccagtttgaa

SEQ ID NO: 203178 - DNA, 19 bp, Homo sapiens
  siRNA target sequence for SMPDL3A (NM_006714.2,753-771).
cagtttgaatggctagaaa

SEQ ID NO: 203179 - DNA, 19 bp, Homo sapiens
  siRNA target sequence for SMPDL3A (NM_006714.2,759-777).
gaatggctagaaagtacat

SEQ ID NO: 203180 - DNA, 19 bp, Homo sapiens
  siRNA target sequence for SMPDL3A (NM_006714.2,768-786).
gaaagtacattgaacaact

SEQ ID NO: 203181 - DNA, 19 bp, Homo sapiens
  siRNA target sequence for SMPDL3A (NM_006714.2,833-851).
ggggtatctgccatcttca

SEQ ID NO: 203182 - DNA, 19 bp, Homo sapiens
  siRNA target sequence for SMPDL3A (NM_006714.2,843-861).
ccatcttcacagaacatca

SEQ ID NO: 203183 - DNA, 19 bp, Homo sapiens
  siRNA target sequence for SMPDL3A (NM_006714.2,878-896).
ctataatgagaaattgata

SEQ ID NO: 203184 - DNA, 19 bp, Homo sapiens
  siRNA target sequence for SMPDL3A (NM_006714.2,953-971).
cagagacagcattatggtt

SEQ ID NO: 203185 - DNA, 19 bp, Homo sapiens
  siRNA target sequence for SMPDL3A (NM_006714.2,957-975).
gacagcattatggttcttt

SEQ ID NO: 203186 - DNA, 19 bp, Homo sapiens
  siRNA target sequence for SMPDL3A (NM_006714.2,959-977).
cagcattatggttctttca

SEQ ID NO: 203187 - DNA, 19 bp, Homo sapiens
  siRNA target sequence for SMPDL3A (NM_006714.2,987-1005).
ggaagtccagtaaattctt

SEQ ID NO: 203188 - DNA, 19 bp, Homo sapiens
  siRNA target sequence for SMPDL3A (NM_006714.2,991-1009).
gtccagtaaattctttgtt

SEQ ID NO: 203189 - DNA, 19 bp, Homo sapiens
  siRNA target sequence for SMPDL3A (NM_006714.2,1058-1076).
caacaatcctggtatcaga

SEQ ID NO: 203190 - DNA, 19 bp, Homo sapiens
  siRNA target sequence for SMPDL3A (NM_006714.2,1066-1084).
ctggtatcagactgtttca

SEQ ID NO: 203191 - DNA, 19 bp, Homo sapiens
  siRNA target sequence for SMPDL3A (NM_006714.2,1092-1110).
cctcgtgattataaattat

SEQ ID NO: 203192 - DNA, 19 bp, Homo sapiens
  siRNA target sequence for SMPDL3A (NM_006714.2,1096-1114).
gtgattataaattattgga

SEQ ID NO: 203193 - DNA, 19 bp, Homo sapiens
  siRNA target sequence for SMPDL3A (NM_006714.2,1113-1131).
gatatgttgcagtattact

SEQ ID NO: 203194 - DNA, 19 bp, Homo sapiens
  siRNA target sequence for SMPDL3A (NM_006714.2,1118-1136).
gttgcagtattacttgaat

SEQ ID NO: 203195 - DNA, 19 bp, Homo sapiens
  siRNA target sequence for SMPDL3A (NM_006714.2,1137-1155).
ctgacagaggcgaatctaa

SEQ ID NO: 203196 - DNA, 19 bp, Homo sapiens
  siRNA target sequence for SMPDL3A (NM_006714.2,1171-1189).
ggaagctggagtatatcct

SEQ ID NO: 203197 - DNA, 19 bp, Homo sapiens
  siRNA target sequence for SMPDL3A (NM_006714.2,1192-1210).
cccagacctacgacattga

SEQ ID NO: 203198 - DNA, 19 bp, Homo sapiens
  siRNA target sequence for SMPDL3A (NM_006714.2,1193-1211).
ccagacctacgacattgaa

SEQ ID NO: 203199 - DNA, 19 bp, Homo sapiens
  siRNA target sequence for SMPDL3A (NM_006714.2,1196-1214).
gacctacgacattgaagat

SEQ ID NO: 203200 - DNA, 19 bp, Homo sapiens
  siRNA target sequence for SMPDL3A (NM_006714.2,1198-1216).
cctacgacattgaagattt

SEQ ID NO: 203201 - DNA, 19 bp, Homo sapiens
  siRNA target sequence for SMPDL3A (NM_006714.2,1212-1230).
gatttgcagccggaaagtt

SEQ ID NO: 203202 - DNA, 19 bp, Homo sapiens
  siRNA target sequence for SMPDL3A (NM_006714.2,1217-1235).
gcagccggaaagtttatat

SEQ ID NO: 203203 - DNA, 19 bp, Homo sapiens
  siRNA target sequence for SMPDL3A (NM_006714.2,1236-1254).
ggattagctaaacaattta

SEQ ID NO: 203204 - DNA, 19 bp, Homo sapiens
  siRNA target sequence for SMPDL3A (NM_006714.2,1260-1278).
ctagacagtaagcagttta

SEQ ID NO: 203205 - DNA, 19 bp, Homo sapiens
  siRNA target sequence for SMPDL3A (NM_006714.2,1315-1333).
gcagtgtaacatgtgataa

SEQ ID NO: 203206 - DNA, 19 bp, Homo sapiens
  siRNA target sequence for SMPDL3A (NM_006714.2,1350-1368).
cagatttgtgcaattatga

SEQ ID NO: 203207 - DNA, 19 bp, Homo sapiens
  siRNA target sequence for TDG (NM_003211.2,493-511).
gaaaagtagaccgttttaa

SEQ ID NO: 203208 - DNA, 19 bp, Homo sapiens
  siRNA target sequence for TDG (NM_003211.2,539-557).
caagactctccccgatatt

SEQ ID NO: 203209 - DNA, 19 bp, Homo sapiens
  siRNA target sequence for TDG (NM_003211.2,551-569).
cgatattttgaccttcaat

SEQ ID NO: 203210 - DNA, 19 bp, Homo sapiens
  siRNA target sequence for TDG (NM_003211.2,562-580).
ccttcaatctggacattgt

SEQ ID NO: 203211 - DNA, 19 bp, Homo sapiens
  siRNA target sequence for TDG (NM_003211.2,566-584).
caatctggacattgtcatt

SEQ ID NO: 203212 - DNA, 19 bp, Homo sapiens
  siRNA target sequence for TDG (NM_003211.2,589-607).
gcataaacccgggactaat

SEQ ID NO: 203213 - DNA, 19 bp, Homo sapiens
  siRNA target sequence for TDG (NM_003211.2,640-658).
ctggaaaccatttttggaa

SEQ ID NO: 203214 - DNA, 19 bp, Homo sapiens
  siRNA target sequence for TDG (NM_003211.2,648-666).
catttttggaagtgtttgt

SEQ ID NO: 203215 - DNA, 19 bp, Homo sapiens
  siRNA target sequence for TDG (NM_003211.2,717-735).
ctaccagggaagtatggta

SEQ ID NO: 203216 - DNA, 19 bp, Homo sapiens
  siRNA target sequence for TDG (NM_003211.2,785-803).
ctccagtaaagaatttcgt

SEQ ID NO: 203217 - DNA, 19 bp, Homo sapiens
  siRNA target sequence for TDG (NM_003211.2,808-826).
gaggacgtattctagtaca

SEQ ID NO: 203218 - DNA, 19 bp, Homo sapiens
  siRNA target sequence for TDG (NM_003211.2,811-829).
gacgtattctagtacagaa

SEQ ID NO: 203219 - DNA, 19 bp, Homo sapiens
  siRNA target sequence for TDG (NM_003211.2,836-854).
gaaatatcagccacgaata

SEQ ID NO: 203220 - DNA, 19 bp, Homo sapiens
  siRNA target sequence for TDG (NM_003211.2,845-863).
gccacgaatagcagtgttt

SEQ ID NO: 203221 - DNA, 19 bp, Homo sapiens
  siRNA target sequence for TDG (NM_003211.2,846-864).
ccacgaatagcagtgttta

SEQ ID NO: 203222 - DNA, 19 bp, Homo sapiens
  siRNA target sequence for TDG (NM_003211.2,847-865).
cacgaatagcagtgtttaa

SEQ ID NO: 203223 - DNA, 19 bp, Homo sapiens
  siRNA target sequence for TDG (NM_003211.2,1015-1033).
ctcgagcccaagacaaagt

SEQ ID NO: 203224 - DNA, 19 bp, Homo sapiens
  siRNA target sequence for TDG (NM_003211.2,1018-1036).
gagcccaagacaaagttca

SEQ ID NO: 203225 - DNA, 19 bp, Homo sapiens
  siRNA target sequence for TDG (NM_003211.2,1021-1039).
cccaagacaaagttcatta

SEQ ID NO: 203226 - DNA, 19 bp, Homo sapiens
  siRNA target sequence for TDG (NM_003211.2,1028-1046).
caaagttcattactacata

SEQ ID NO: 203227 - DNA, 19 bp, Homo sapiens
  siRNA target sequence for TDG (NM_003211.2,1097-1115).
cgttcaagaggtgcaatat

SEQ ID NO: 203228 - DNA, 19 bp, Homo sapiens
  siRNA target sequence for TDG (NM_003211.2,1098-1116).
gttcaagaggtgcaatata

SEQ ID NO: 203229 - DNA, 19 bp, Homo sapiens
  siRNA target sequence for TDG (NM_003211.2,1204-1222).
gtggtgcttacggagaaaa

SEQ ID NO: 203230 - DNA, 19 bp, Homo sapiens
  siRNA target sequence for TDG (NM_003211.2,1209-1227).
gcttacggagaaaatccat

SEQ ID NO: 203231 - DNA, 19 bp, Homo sapiens
  siRNA target sequence for PIGL (NM_004278.2,70-88).
gggactcctcagaacgaat

SEQ ID NO: 203232 - DNA, 19 bp, Homo sapiens
  siRNA target sequence for PIGL (NM_004278.2,158-176).
cgatgaagccatgtttttt

SEQ ID NO: 203233 - DNA, 19 bp, Homo sapiens
  siRNA target sequence for PIGL (NM_004278.2,259-277).
gagagactcgtaagaaaga

SEQ ID NO: 203234 - DNA, 19 bp, Homo sapiens
  siRNA target sequence for PIGL (NM_004278.2,265-283).
ctcgtaagaaagaactttt

SEQ ID NO: 203235 - DNA, 19 bp, Homo sapiens
  siRNA target sequence for PIGL (NM_004278.2,309-327).
ccactctccagtgtaatga

SEQ ID NO: 203236 - DNA, 19 bp, Homo sapiens
  siRNA target sequence for PIGL (NM_004278.2,310-328).
cactctccagtgtaatgat

SEQ ID NO: 203237 - DNA, 19 bp, Homo sapiens
  siRNA target sequence for PIGL (NM_004278.2,316-334).
ccagtgtaatgattattga

SEQ ID NO: 203238 - DNA, 19 bp, Homo sapiens
  siRNA target sequence for PIGL (NM_004278.2,443-461).
cgatgcagggggagtaagt

SEQ ID NO: 203239 - DNA, 19 bp, Homo sapiens
  siRNA target sequence for PIGL (NM_004278.2,460-478).
gtggccacagcaatcacat

SEQ ID NO: 203240 - DNA, 19 bp, Homo sapiens
  siRNA target sequence for PIGL (NM_004278.2,511-529).
cagaagggaagttacctaa

SEQ ID NO: 203241 - DNA, 19 bp, Homo sapiens
  siRNA target sequence for PIGL (NM_004278.2,547-565).
cgcttcagtctgtgaatgt

SEQ ID NO: 203242 - DNA, 19 bp, Homo sapiens
  siRNA target sequence for PIGL (NM_004278.2,632-650).
cgtgctcaacagcaaagaa

SEQ ID NO: 203243 - DNA, 19 bp, Homo sapiens
  siRNA target sequence for PIGL (NM_004278.2,708-726).
cgcctctacattatcttct

SEQ ID NO: 203244 - DNA, 19 bp, Homo sapiens
  siRNA target sequence for PIGL (NM_004278.2,727-745).
cccggtacatgagaatcaa

SEQ ID NO: 203245 - DNA, 19 bp, Homo sapiens
  siRNA target sequence for PIGL (NM_004278.2,729-747).
cggtacatgagaatcaact

SEQ ID NO: 203246 - DNA, 19 bp, Homo sapiens
  siRNA target sequence for ASAH1 (NM_004315.2,354-372).
gttccatggtacaccataa

SEQ ID NO: 203247 - DNA, 19 bp, Homo sapiens
  siRNA target sequence for ASAH1 (NM_004315.2,358-376).
catggtacaccataaatct

SEQ ID NO: 203248 - DNA, 19 bp, Homo sapiens
  siRNA target sequence for ASAH1 (NM_004315.2,361-379).
ggtacaccataaatcttga

SEQ ID NO: 203249 - DNA, 19 bp, Homo sapiens
  siRNA target sequence for ASAH1 (NM_004315.2,378-396).
gacttaccaccctacaaaa

SEQ ID NO: 203250 - DNA, 19 bp, Homo sapiens
  siRNA target sequence for ASAH1 (NM_004315.2,380-398).
cttaccaccctacaaaaga

SEQ ID NO: 203251 - DNA, 19 bp, Homo sapiens
  siRNA target sequence for ASAH1 (NM_004315.2,497-515).
gcaggtggtggatgaaaaa

SEQ ID NO: 203252 - DNA, 19 bp, Homo sapiens
  siRNA target sequence for ASAH1 (NM_004315.2,498-516).
caggtggtggatgaaaaat

SEQ ID NO: 203253 - DNA, 19 bp, Homo sapiens
  siRNA target sequence for ASAH1 (NM_004315.2,544-562).
gcccttttgaagaggaaat

SEQ ID NO: 203254 - DNA, 19 bp, Homo sapiens
  siRNA target sequence for ASAH1 (NM_004315.2,546-564).
ccttttgaagaggaaatga

SEQ ID NO: 203255 - DNA, 19 bp, Homo sapiens
  siRNA target sequence for ASAH1 (NM_004315.2,566-584).
gggtattgccgctgttact

SEQ ID NO: 203256 - DNA, 19 bp, Homo sapiens
  siRNA target sequence for ASAH1 (NM_004315.2,568-586).
gtattgccgctgttactga

SEQ ID NO: 203257 - DNA, 19 bp, Homo sapiens
  siRNA target sequence for ASAH1 (NM_004315.2,649-667).
caatagtagcagaagacaa

SEQ ID NO: 203258 - DNA, 19 bp, Homo sapiens
  siRNA target sequence for ASAH1 (NM_004315.2,714-732).
cttgggtggaacataaata

SEQ ID NO: 203259 - DNA, 19 bp, Homo sapiens
  siRNA target sequence for ASAH1 (NM_004315.2,746-764).
cataactgagcaactaaaa

SEQ ID NO: 203260 - DNA, 19 bp, Homo sapiens
  siRNA target sequence for ASAH1 (NM_004315.2,833-851).
ctatgtgggcatgttaaca

SEQ ID NO: 203261 - DNA, 19 bp, Homo sapiens
  siRNA target sequence for ASAH1 (NM_004315.2,882-900).
ctgaatgaacgtttcagta

SEQ ID NO: 203262 - DNA, 19 bp, Homo sapiens
  siRNA target sequence for ASAH1 (NM_004315.2,884-902).
gaatgaacgtttcagtata

SEQ ID NO: 203263 - DNA, 19 bp, Homo sapiens
  siRNA target sequence for ASAH1 (NM_004315.2,1045-1063).
ccccagcctactttatcct

SEQ ID NO: 203264 - DNA, 19 bp, Homo sapiens
  siRNA target sequence for ASAH1 (NM_004315.2,1080-1098).
ggggaaggttgtgtgatta

SEQ ID NO: 203265 - DNA, 19 bp, Homo sapiens
  siRNA target sequence for ASAH1 (NM_004315.2,1101-1119).
cgagacagaaaggaatcat

SEQ ID NO: 203266 - DNA, 19 bp, Homo sapiens
  siRNA target sequence for ASAH1 (NM_004315.2,1156-1174).
ggtatgtggtacaaacaaa

SEQ ID NO: 203267 - DNA, 19 bp, Homo sapiens
  siRNA target sequence for ASAH1 (NM_004315.2,1249-1267).
gccaagagaatatctcatt

SEQ ID NO: 203268 - DNA, 19 bp, Homo sapiens
  siRNA target sequence for ASAH1 (NM_004315.2,1264-1282).
catttgaaaccatgtatga

SEQ ID NO: 203269 - DNA, 19 bp, Homo sapiens
  siRNA target sequence for ASAH1 (NM_004315.2,1310-1328).
caagctgaccgtatacaca

SEQ ID NO: 203270 - DNA, 19 bp, Homo sapiens
  siRNA target sequence for ASAH1 (NM_004315.2,1319-1337).
cgtatacacaaccttgata

SEQ ID NO: 203271 - DNA, 19 bp, Homo sapiens
  siRNA target sequence for ASAH1 (NM_004315.2,1325-1343).
cacaaccttgatagatgtt

SEQ ID NO: 203272 - DNA, 19 bp, Homo sapiens
  siRNA target sequence for ASAH1 (NM_004315.2,1376-1394).
ctgccctgacccttgtata

SEQ ID NO: 203273 - DNA, 19 bp, Homo sapiens
  siRNA target sequence for ASAH1 (NM_004315.2,1380-1398).
cctgacccttgtataggtt

SEQ ID NO: 203274 - DNA, 19 bp, Homo sapiens
  siRNA target sequence for AGA (NM_000027.2,144-162).
cccctggtcgtcaacactt

SEQ ID NO: 203275 - DNA, 19 bp, Homo sapiens
  siRNA target sequence for AGA (NM_000027.2,158-176).
cacttggccctttaagaat

SEQ ID NO: 203276 - DNA, 19 bp, Homo sapiens
  siRNA target sequence for AGA (NM_000027.2,189-207).
gcgtggagggcattagcat

SEQ ID NO: 203277 - DNA, 19 bp, Homo sapiens
  siRNA target sequence for AGA (NM_000027.2,400-418).
gtgtggcacggaaagtact

SEQ ID NO: 203278 - DNA, 19 bp, Homo sapiens
  siRNA target sequence for AGA (NM_000027.2,408-426).
cggaaagtactggaacata

SEQ ID NO: 203279 - DNA, 19 bp, Homo sapiens
  siRNA target sequence for AGA (NM_000027.2,452-470).
gtcagccaccacatttgct

SEQ ID NO: 203280 - DNA, 19 bp, Homo sapiens
  siRNA target sequence for AGA (NM_000027.2,471-489).
caaagtatggggtttatca

SEQ ID NO: 203281 - DNA, 19 bp, Homo sapiens
  siRNA target sequence for AGA (NM_000027.2,475-493).
gtatggggtttatcaatga

SEQ ID NO: 203282 - DNA, 19 bp, Homo sapiens
  siRNA target sequence for AGA (NM_000027.2,544-562).
ggaattgccagccaaatta

SEQ ID NO: 203283 - DNA, 19 bp, Homo sapiens
  siRNA target sequence for AGA (NM_000027.2,579-597).
ccagatccctcaaaatact

SEQ ID NO: 203284 - DNA, 19 bp, Homo sapiens
  siRNA target sequence for AGA (NM_000027.2,608-626).
caaaccacctggtatctta

SEQ ID NO: 203285 - DNA, 19 bp, Homo sapiens
  siRNA target sequence for AGA (NM_000027.2,630-648).
caggatattcctatccata

SEQ ID NO: 203286 - DNA, 19 bp, Homo sapiens
  siRNA target sequence for AGA (NM_000027.2,632-650).
ggatattcctatccataaa

SEQ ID NO: 203287 - DNA, 19 bp, Homo sapiens
  siRNA target sequence for AGA (NM_000027.2,684-702).
ggcatggttgtaatccata

SEQ ID NO: 203288 - DNA, 19 bp, Homo sapiens
  siRNA target sequence for AGA (NM_000027.2,689-707).
ggttgtaatccataagaca

SEQ ID NO: 203289 - DNA, 19 bp, Homo sapiens
  siRNA target sequence for AGA (NM_000027.2,717-735).
gctgctggtacatctacaa

SEQ ID NO: 203290 - DNA, 19 bp, Homo sapiens
  siRNA target sequence for AGA (NM_000027.2,727-745).
catctacaaatggtataaa

SEQ ID NO: 203291 - DNA, 19 bp, Homo sapiens
  siRNA target sequence for AGA (NM_000027.2,829-847).
ccactgggaatggtgatat

SEQ ID NO: 203292 - DNA, 19 bp, Homo sapiens
  siRNA target sequence for AGA (NM_000027.2,910-928).
ccatagcttgccaaaaagt

SEQ ID NO: 203293 - DNA, 19 bp, Homo sapiens
  siRNA target sequence for AGA (NM_000027.2,962-980).
ctttggggctgttatatgt

SEQ ID NO: 203294 - DNA, 19 bp, Homo sapiens
  siRNA target sequence for AGA (NM_000027.2,982-1000).
ccaatgtgactggaagtta

SEQ ID NO: 203295 - DNA, 19 bp, Homo sapiens
  siRNA target sequence for AGA (NM_000027.2,1001-1019).
cggtgctgcttgcaataaa

SEQ ID NO: 203296 - DNA, 19 bp, Homo sapiens
  siRNA target sequence for AGA (NM_000027.2,1003-1021).
gtgctgcttgcaataaact

SEQ ID NO: 203297 - DNA, 19 bp, Homo sapiens
  siRNA target sequence for AGA (NM_000027.2,1037-1055).
gtttagtttcatggtttat

SEQ ID NO: 203298 - DNA, 19 bp, Homo sapiens
  siRNA target sequence for ASRGL1 (NM_025080.2,305-323).
caaatggtgaggttgaaat

SEQ ID NO: 203299 - DNA, 19 bp, Homo sapiens
  siRNA target sequence for ASRGL1 (NM_025080.2,369-387).
gtccgcagtccagtgtata

SEQ ID NO: 203300 - DNA, 19 bp, Homo sapiens
  siRNA target sequence for ASRGL1 (NM_025080.2,373-391).
gcagtccagtgtatagcaa

SEQ ID NO: 203301 - DNA, 19 bp, Homo sapiens
  siRNA target sequence for ASRGL1 (NM_025080.2,374-392).
cagtccagtgtatagcaaa

SEQ ID NO: 203302 - DNA, 19 bp, Homo sapiens
  siRNA target sequence for ASRGL1 (NM_025080.2,383-401).
gtatagcaaatcccattaa

SEQ ID NO: 203303 - DNA, 19 bp, Homo sapiens
  siRNA target sequence for ASRGL1 (NM_025080.2,407-425).
ctcggcttgtcatggaaaa

SEQ ID NO: 203304 - DNA, 19 bp, Homo sapiens
  siRNA target sequence for ASRGL1 (NM_025080.2,645-663).
ctccacaggcggtatcgtt

SEQ ID NO: 203305 - DNA, 19 bp, Homo sapiens
  siRNA target sequence for ASRGL1 (NM_025080.2,647-665).
ccacaggcggtatcgttaa

SEQ ID NO: 203306 - DNA, 19 bp, Homo sapiens
  siRNA target sequence for ASRGL1 (NM_025080.2,648-666).
cacaggcggtatcgttaat

SEQ ID NO: 203307 - DNA, 19 bp, Homo sapiens
  siRNA target sequence for ASRGL1 (NM_025080.2,650-668).
caggcggtatcgttaataa

SEQ ID NO: 203308 - DNA, 19 bp, Homo sapiens
  siRNA target sequence for ASRGL1 (NM_025080.2,652-670).
ggcggtatcgttaataaaa

SEQ ID NO: 203309 - DNA, 19 bp, Homo sapiens
  siRNA target sequence for ASRGL1 (NM_025080.2,653-671).
gcggtatcgttaataaaat

SEQ ID NO: 203310 - DNA, 19 bp, Homo sapiens
  siRNA target sequence for ASRGL1 (NM_025080.2,710-728).
gaggttatgccgacaatga

SEQ ID NO: 203311 - DNA, 19 bp, Homo sapiens
  siRNA target sequence for ASRGL1 (NM_025080.2,712-730).
ggttatgccgacaatgaca

SEQ ID NO: 203312 - DNA, 19 bp, Homo sapiens
  siRNA target sequence for ASRGL1 (NM_025080.2,713-731).
gttatgccgacaatgacat

SEQ ID NO: 203313 - DNA, 19 bp, Homo sapiens
  siRNA target sequence for ASRGL1 (NM_025080.2,838-856).
gacctatcgttgggttata

SEQ ID NO: 203314 - DNA, 19 bp, Homo sapiens
  siRNA target sequence for ASRGL1 (NM_025080.2,841-859).
ctatcgttgggttatatga

SEQ ID NO: 203315 - DNA, 19 bp, Homo sapiens
  siRNA target sequence for ASRGL1 (NM_025080.2,985-1003).
gatcctgacgatactacta

SEQ ID NO: 203316 - DNA, 19 bp, Homo sapiens
  siRNA target sequence for ASRGL1 (NM_025080.2,988-1006).
cctgacgatactactatca

SEQ ID NO: 203317 - DNA, 19 bp, Homo sapiens
  siRNA target sequence for C20orf13 (NM_017714.1,139-157).
caggtttcggctggtaaaa

SEQ ID NO: 203318 - DNA, 19 bp, Homo sapiens
  siRNA target sequence for C20orf13 (NM_017714.1,141-159).
ggtttcggctggtaaaata

SEQ ID NO: 203319 - DNA, 19 bp, Homo sapiens
  siRNA target sequence for C20orf13 (NM_017714.1,142-160).
gtttcggctggtaaaataa

SEQ ID NO: 203320 - DNA, 19 bp, Homo sapiens
  siRNA target sequence for C20orf13 (NM_017714.1,236-254).
gttatcattctgaatccaa

SEQ ID NO: 203321 - DNA, 19 bp, Homo sapiens
  siRNA target sequence for C20orf13 (NM_017714.1,257-275).
ccaaggagtataaacatgt

SEQ ID NO: 203322 - DNA, 19 bp, Homo sapiens
  siRNA target sequence for C20orf13 (NM_017714.1,361-379).
cttgaggattctcctttta

SEQ ID NO: 203323 - DNA, 19 bp, Homo sapiens
  siRNA target sequence for C20orf13 (NM_017714.1,388-406).
ggaatgggatctaatctaa

SEQ ID NO: 203324 - DNA, 19 bp, Homo sapiens
  siRNA target sequence for C20orf13 (NM_017714.1,389-407).
gaatgggatctaatctaaa

SEQ ID NO: 203325 - DNA, 19 bp, Homo sapiens
  siRNA target sequence for C20orf13 (NM_017714.1,478-496).
gcactgagtggaatcaaga

SEQ ID NO: 203326 - DNA, 19 bp, Homo sapiens
  siRNA target sequence for C20orf13 (NM_017714.1,513-531).
caacagactcttatgtgaa

SEQ ID NO: 203327 - DNA, 19 bp, Homo sapiens
  siRNA target sequence for C20orf13 (NM_017714.1,546-564).
gctctcggctggcagaatt

SEQ ID NO: 203328 - DNA, 19 bp, Homo sapiens
  siRNA target sequence for C20orf13 (NM_017714.1,594-612).
ctacagatgggcagtagat

SEQ ID NO: 203329 - DNA, 19 bp, Homo sapiens
  siRNA target sequence for C20orf13 (NM_017714.1,648-666).
cacaagattcagtttagct

SEQ ID NO: 203330 - DNA, 19 bp, Homo sapiens
  siRNA target sequence for C20orf13 (NM_017714.1,990-1008).
ggctagagaatgttcacat

SEQ ID NO: 203331 - DNA, 19 bp, Homo sapiens
  siRNA target sequence for C20orf13 (NM_017714.1,1038-1056).
cctgttggagactatgcaa

SEQ ID NO: 203332 - DNA, 19 bp, Homo sapiens
  siRNA target sequence for C20orf13 (NM_017714.1,1039-1057).
ctgttggagactatgcaaa

SEQ ID NO: 203333 - DNA, 19 bp, Homo sapiens
  siRNA target sequence for C20orf13 (NM_017714.1,1045-1063).
gagactatgcaaaacaagt

SEQ ID NO: 203334 - DNA, 19 bp, Homo sapiens
  siRNA target sequence for C20orf13 (NM_017714.1,1047-1065).
gactatgcaaaacaagttt

SEQ ID NO: 203335 - DNA, 19 bp, Homo sapiens
  siRNA target sequence for C20orf13 (NM_017714.1,1053-1071).
gcaaaacaagtttatcagt

SEQ ID NO: 203336 - DNA, 19 bp, Homo sapiens
  siRNA target sequence for C20orf13 (NM_017714.1,1120-1138).
ctccgttcatgcagatgtt

SEQ ID NO: 203337 - DNA, 19 bp, Homo sapiens
  siRNA target sequence for C20orf13 (NM_017714.1,1122-1140).
ccgttcatgcagatgttct

SEQ ID NO: 203338 - DNA, 19 bp, Homo sapiens
  siRNA target sequence for C20orf13 (NM_017714.1,1174-1192).
cttctagtggaatttctgt

SEQ ID NO: 203339 - DNA, 19 bp, Homo sapiens
  siRNA target sequence for C20orf13 (NM_017714.1,1249-1267).
gccaagactcacatttcaa

SEQ ID NO: 203340 - DNA, 19 bp, Homo sapiens
  siRNA target sequence for ASPA (NM_000049.1,235-253).
ccggagtatttctggttaa

SEQ ID NO: 203341 - DNA, 19 bp, Homo sapiens
  siRNA target sequence for ASPA (NM_000049.1,238-256).
gagtatttctggttaagca

SEQ ID NO: 203342 - DNA, 19 bp, Homo sapiens
  siRNA target sequence for ASPA (NM_000049.1,292-310).
ggctggaggtaaaaccatt

SEQ ID NO: 203343 - DNA, 19 bp, Homo sapiens
  siRNA target sequence for ASPA (NM_000049.1,293-311).
gctggaggtaaaaccattt

SEQ ID NO: 203344 - DNA, 19 bp, Homo sapiens
  siRNA target sequence for ASPA (NM_000049.1,297-315).
gaggtaaaaccatttatta

SEQ ID NO: 203345 - DNA, 19 bp, Homo sapiens
  siRNA target sequence for ASPA (NM_000049.1,300-318).
gtaaaaccatttattacta

SEQ ID NO: 203346 - DNA, 19 bp, Homo sapiens
  siRNA target sequence for ASPA (NM_000049.1,332-350).
gaagaagtgtaccagatat

SEQ ID NO: 203347 - DNA, 19 bp, Homo sapiens
  siRNA target sequence for ASPA (NM_000049.1,358-376).
gtgacctgaatcgcatttt

SEQ ID NO: 203348 - DNA, 19 bp, Homo sapiens
  siRNA target sequence for ASPA (NM_000049.1,369-387).
cgcatttttgaccttgaaa

SEQ ID NO: 203349 - DNA, 19 bp, Homo sapiens
  siRNA target sequence for ASPA (NM_000049.1,428-446).
gagaagggctcaagaaata

SEQ ID NO: 203350 - DNA, 19 bp, Homo sapiens
  siRNA target sequence for ASPA (NM_000049.1,526-544).
ggtgcactcttattcttga

SEQ ID NO: 203351 - DNA, 19 bp, Homo sapiens
  siRNA target sequence for ASPA (NM_000049.1,540-558).
cttgaggattccaggaata

SEQ ID NO: 203352 - DNA, 19 bp, Homo sapiens
  siRNA target sequence for ASPA (NM_000049.1,543-561).
gaggattccaggaataact

SEQ ID NO: 203353 - DNA, 19 bp, Homo sapiens
  siRNA target sequence for ASPA (NM_000049.1,609-627).
ccctgctacgtttatctga

SEQ ID NO: 203354 - DNA, 19 bp, Homo sapiens
  siRNA target sequence for ASPA (NM_000049.1,610-628).
cctgctacgtttatctgat

SEQ ID NO: 203355 - DNA, 19 bp, Homo sapiens
  siRNA target sequence for ASPA (NM_000049.1,611-629).
ctgctacgtttatctgatt

SEQ ID NO: 203356 - DNA, 19 bp, Homo sapiens
  siRNA target sequence for ASPA (NM_000049.1,613-631).
gctacgtttatctgattga

SEQ ID NO: 203357 - DNA, 19 bp, Homo sapiens
  siRNA target sequence for ASPA (NM_000049.1,630-648).
gagcatccttccctcaaat

SEQ ID NO: 203358 - DNA, 19 bp, Homo sapiens
  siRNA target sequence for ASPA (NM_000049.1,674-692).
gtatcctgtgggtatagaa

SEQ ID NO: 203359 - DNA, 19 bp, Homo sapiens
  siRNA target sequence for ASPA (NM_000049.1,723-741).
gctgatatcttggatcaaa

SEQ ID NO: 203360 - DNA, 19 bp, Homo sapiens
  siRNA target sequence for ASPA (NM_000049.1,724-742).
ctgatatcttggatcaaat

SEQ ID NO: 203361 - DNA, 19 bp, Homo sapiens
  siRNA target sequence for ASPA (NM_000049.1,811-829).
gcgccattgaggtctataa

SEQ ID NO: 203362 - DNA, 19 bp, Homo sapiens
  siRNA target sequence for ASPA (NM_000049.1,812-830).
cgccattgaggtctataaa

SEQ ID NO: 203363 - DNA, 19 bp, Homo sapiens
  siRNA target sequence for ASPA (NM_000049.1,813-831).
gccattgaggtctataaaa

SEQ ID NO: 203364 - DNA, 19 bp, Homo sapiens
  siRNA target sequence for ASPA (NM_000049.1,814-832).
ccattgaggtctataaaat

SEQ ID NO: 203365 - DNA, 19 bp, Homo sapiens
  siRNA target sequence for ASPA (NM_000049.1,877-895).
ctgctatcatccatcctaa

SEQ ID NO: 203366 - DNA, 19 bp, Homo sapiens
  siRNA target sequence for ASPA (NM_000049.1,892-910).
ctaatctgcaggatcaaga

SEQ ID NO: 203367 - DNA, 19 bp, Homo sapiens
  siRNA target sequence for ASPA (NM_000049.1,988-1006).
ccgtgtaccccgtgtttgt

SEQ ID NO: 203368 - DNA, 19 bp, Homo sapiens
  siRNA target sequence for ASPA (NM_000049.1,990-1008).
gtgtaccccgtgtttgtga

SEQ ID NO: 203369 - DNA, 19 bp, Homo sapiens
  siRNA target sequence for ASPA (NM_000049.1,1005-1023).
gtgaatgaggccgcatatt

SEQ ID NO: 203370 - DNA, 19 bp, Homo sapiens
  siRNA target sequence for ASPA (NM_000049.1,1011-1029).
gaggccgcatattacgaaa

SEQ ID NO: 203371 - DNA, 19 bp, Homo sapiens
  siRNA target sequence for ASPA (NM_000049.1,1014-1032).
gccgcatattacgaaaaga

SEQ ID NO: 203372 - DNA, 19 bp, Homo sapiens
  siRNA target sequence for ASPA (NM_000049.1,1015-1033).
ccgcatattacgaaaagaa

SEQ ID NO: 203373 - DNA, 19 bp, Homo sapiens
  siRNA target sequence for ASPA (NM_000049.1,1016-1034).
cgcatattacgaaaagaaa

SEQ ID NO: 203374 - DNA, 19 bp, Homo sapiens
  siRNA target sequence for ASPA (NM_000049.1,1059-1077).
ctaacgctcaatgcaaaaa

SEQ ID NO: 203375 - DNA, 19 bp, Homo sapiens
  siRNA target sequence for ASPA (NM_000049.1,1063-1081).
cgctcaatgcaaaaagtat

SEQ ID NO: 203376 - DNA, 19 bp, Homo sapiens
  siRNA target sequence for ASPA (NM_000049.1,1078-1096).
gtattcgctgctgtttaca

SEQ ID NO: 203377 - DNA, 19 bp, Homo sapiens
  siRNA target sequence for GA (NM_013267.2,446-464).
cgcagcaccaggatcatga

SEQ ID NO: 203378 - DNA, 19 bp, Homo sapiens
  siRNA target sequence for GA (NM_013267.2,451-469).
caccaggatcatgattcat

SEQ ID NO: 203379 - DNA, 19 bp, Homo sapiens
  siRNA target sequence for GA (NM_013267.2,453-471).
ccaggatcatgattcatca

SEQ ID NO: 203380 - DNA, 19 bp, Homo sapiens
  siRNA target sequence for GA (NM_013267.2,496-514).
ggtgatttgctcttttaca

SEQ ID NO: 203381 - DNA, 19 bp, Homo sapiens
  siRNA target sequence for GA (NM_013267.2,504-522).
gctcttttacactattgct

SEQ ID NO: 203382 - DNA, 19 bp, Homo sapiens
  siRNA target sequence for GA (NM_013267.2,521-539).
ctgaaggacaggaacgaat

SEQ ID NO: 203383 - DNA, 19 bp, Homo sapiens
  siRNA target sequence for GA (NM_013267.2,536-554).
gaatccctatccacaagtt

SEQ ID NO: 203384 - DNA, 19 bp, Homo sapiens
  siRNA target sequence for GA (NM_013267.2,684-702).
gtgtgtgagcagcaacatt

SEQ ID NO: 203385 - DNA, 19 bp, Homo sapiens
  siRNA target sequence for GA (NM_013267.2,717-735).
ggcattccgaaagaagttt

SEQ ID NO: 203386 - DNA, 19 bp, Homo sapiens
  siRNA target sequence for GA (NM_013267.2,719-737).
cattccgaaagaagtttgt

SEQ ID NO: 203387 - DNA, 19 bp, Homo sapiens
  siRNA target sequence for GA (NM_013267.2,830-848).
ctcagctggccaagtcaaa

SEQ ID NO: 203388 - DNA, 19 bp, Homo sapiens
  siRNA target sequence for GA (NM_013267.2,899-917).
ctgtgggccacacaaagat

SEQ ID NO: 203389 - DNA, 19 bp, Homo sapiens
  siRNA target sequence for GA (NM_013267.2,1246-1264).
gccatcggctattatctca

SEQ ID NO: 203390 - DNA, 19 bp, Homo sapiens
  siRNA target sequence for GA (NM_013267.2,1247-1265).
ccatcggctattatctcaa

SEQ ID NO: 203391 - DNA, 19 bp, Homo sapiens
  siRNA target sequence for GA (NM_013267.2,1252-1270).
ggctattatctcaaggaaa

SEQ ID NO: 203392 - DNA, 19 bp, Homo sapiens
  siRNA target sequence for GA (NM_013267.2,1304-1322).
ctgcccttgatctctactt

SEQ ID NO: 203393 - DNA, 19 bp, Homo sapiens
  siRNA target sequence for GA (NM_013267.2,1338-1356).
ggaggtcacttgtgaatca

SEQ ID NO: 203394 - DNA, 19 bp, Homo sapiens
  siRNA target sequence for GA (NM_013267.2,1638-1656).
gttggtgtctctcttcaat

SEQ ID NO: 203395 - DNA, 19 bp, Homo sapiens
  siRNA target sequence for GA (NM_013267.2,1680-1698).
gcactgtgctcggaagtta

SEQ ID NO: 203396 - DNA, 19 bp, Homo sapiens
  siRNA target sequence for GA (NM_013267.2,1707-1725).
gcgtgaaggggcagaaatt

SEQ ID NO: 203397 - DNA, 19 bp, Homo sapiens
  siRNA target sequence for GA (NM_013267.2,1776-1794).
ctcagctcttcgaaggttt

SEQ ID NO: 203398 - DNA, 19 bp, Homo sapiens
  siRNA target sequence for GA (NM_013267.2,1795-1813).
gccttgtcagccatggata

SEQ ID NO: 203399 - DNA, 19 bp, Homo sapiens
  siRNA target sequence for GA (NM_013267.2,1796-1814).
ccttgtcagccatggatat

SEQ ID NO: 203400 - DNA, 19 bp, Homo sapiens
  siRNA target sequence for GA (NM_013267.2,1867-1885).
ggacacatcgaagttgtta

SEQ ID NO: 203401 - DNA, 19 bp, Homo sapiens
  siRNA target sequence for GA (NM_013267.2,1868-1886).
gacacatcgaagttgttaa

SEQ ID NO: 203402 - DNA, 19 bp, Homo sapiens
  siRNA target sequence for GA (NM_013267.2,1870-1888).
cacatcgaagttgttaaat

SEQ ID NO: 203403 - DNA, 19 bp, Homo sapiens
  siRNA target sequence for GA (NM_013267.2,1890-1908).
cctgatcgaggcttgcaaa

SEQ ID NO: 203404 - DNA, 19 bp, Homo sapiens
  siRNA target sequence for GA (NM_013267.2,1896-1914).
cgaggcttgcaaagtgaat

SEQ ID NO: 203405 - DNA, 19 bp, Homo sapiens
  siRNA target sequence for GA (NM_013267.2,1984-2002).
gtcaaactgcttcaagatt

SEQ ID NO: 203406 - DNA, 19 bp, Homo sapiens
  siRNA target sequence for GA (NM_013267.2,2054-2072).
ccctgtccaaagagaactt

SEQ ID NO: 203407 - DNA, 19 bp, Homo sapiens
  siRNA target sequence for GA (NM_013267.2,2055-2073).
cctgtccaaagagaactta

SEQ ID NO: 203408 - DNA, 19 bp, Homo sapiens
  siRNA target sequence for GA (NM_013267.2,2058-2076).
gtccaaagagaacttagaa

SEQ ID NO: 203409 - DNA, 19 bp, Homo sapiens
  siRNA target sequence for GLS (NM_014905.2,451-469).
gctctccttcggagatctt

SEQ ID NO: 203410 - DNA, 19 bp, Homo sapiens
  siRNA target sequence for GLS (NM_014905.2,640-658).
ctagcttggaagatttgct

SEQ ID NO: 203411 - DNA, 19 bp, Homo sapiens
  siRNA target sequence for GLS (NM_014905.2,648-666).
gaagatttgctgttctata

SEQ ID NO: 203412 - DNA, 19 bp, Homo sapiens
  siRNA target sequence for GLS (NM_014905.2,740-758).
gtctgatcccaggttgaaa

SEQ ID NO: 203413 - DNA, 19 bp, Homo sapiens
  siRNA target sequence for GLS (NM_014905.2,748-766).
ccaggttgaaagagtgtat

SEQ ID NO: 203414 - DNA, 19 bp, Homo sapiens
  siRNA target sequence for GLS (NM_014905.2,767-785).
ggatatgttaagattaact

SEQ ID NO: 203415 - DNA, 19 bp, Homo sapiens
  siRNA target sequence for GLS (NM_014905.2,838-856).
gtgttcagagcaacattgt

SEQ ID NO: 203416 - DNA, 19 bp, Homo sapiens
  siRNA target sequence for GLS (NM_014905.2,860-878).
gttgacacaagcatttaga

SEQ ID NO: 203417 - DNA, 19 bp, Homo sapiens
  siRNA target sequence for GLS (NM_014905.2,888-906).
gtgattcctgactttatgt

SEQ ID NO: 203418 - DNA, 19 bp, Homo sapiens
  siRNA target sequence for GLS (NM_014905.2,890-908).
gattcctgactttatgtct

SEQ ID NO: 203419 - DNA, 19 bp, Homo sapiens
  siRNA target sequence for GLS (NM_014905.2,914-932).
ctcacacattgatgagtta

SEQ ID NO: 203420 - DNA, 19 bp, Homo sapiens
  siRNA target sequence for GLS (NM_014905.2,1019-1037).
gtctgtttgtacagtagat

SEQ ID NO: 203421 - DNA, 19 bp, Homo sapiens
  siRNA target sequence for GLS (NM_014905.2,1083-1101).
cagtcctgtgtaaaacctt

SEQ ID NO: 203422 - DNA, 19 bp, Homo sapiens
  siRNA target sequence for GLS (NM_014905.2,1168-1186).
cgagtggactaagattcaa

SEQ ID NO: 203423 - DNA, 19 bp, Homo sapiens
  siRNA target sequence for GLS (NM_014905.2,1174-1192).
gactaagattcaacaaact

SEQ ID NO: 203424 - DNA, 19 bp, Homo sapiens
  siRNA target sequence for GLS (NM_014905.2,1209-1227).
gataaaccacataatccta

SEQ ID NO: 203425 - DNA, 19 bp, Homo sapiens
  siRNA target sequence for GLS (NM_014905.2,1215-1233).
ccacataatcctatggtaa

SEQ ID NO: 203426 - DNA, 19 bp, Homo sapiens
  siRNA target sequence for GLS (NM_014905.2,1216-1234).
cacataatcctatggtaaa

SEQ ID NO: 203427 - DNA, 19 bp, Homo sapiens
  siRNA target sequence for GLS (NM_014905.2,1248-1266).
gttgtgacttcactaataa

SEQ ID NO: 203428 - DNA, 19 bp, Homo sapiens
  siRNA target sequence for GLS (NM_014905.2,1296-1314).
gactatgtcatgcagtttt

SEQ ID NO: 203429 - DNA, 19 bp, Homo sapiens
  siRNA target sequence for GLS (NM_014905.2,1360-1378).
cgtttcagtctgaaagaga

SEQ ID NO: 203430 - DNA, 19 bp, Homo sapiens
  siRNA target sequence for GLS (NM_014905.2,1384-1402).
gagatcgaaattttgcaat

SEQ ID NO: 203431 - DNA, 19 bp, Homo sapiens
  siRNA target sequence for GLS (NM_014905.2,1389-1407).
cgaaattttgcaataggat

SEQ ID NO: 203432 - DNA, 19 bp, Homo sapiens
  siRNA target sequence for GLS (NM_014905.2,1441-1459).
gcacagacatggttggtat

SEQ ID NO: 203433 - DNA, 19 bp, Homo sapiens
  siRNA target sequence for GLS (NM_014905.2,1442-1460).
cacagacatggttggtata

SEQ ID NO: 203434 - DNA, 19 bp, Homo sapiens
  siRNA target sequence for GLS (NM_014905.2,1455-1473).
ggtatattagacttctact

SEQ ID NO: 203435 - DNA, 19 bp, Homo sapiens
  siRNA target sequence for GLS (NM_014905.2,1456-1474).
gtatattagacttctactt

SEQ ID NO: 203436 - DNA, 19 bp, Homo sapiens
  siRNA target sequence for GLS (NM_014905.2,1539-1557).
ggtggtttctgcccaatta

SEQ ID NO: 203437 - DNA, 19 bp, Homo sapiens
  siRNA target sequence for GLS (NM_014905.2,1550-1568).
cccaattactggtgaaaga

SEQ ID NO: 203438 - DNA, 19 bp, Homo sapiens
  siRNA target sequence for GLS (NM_014905.2,1552-1570).
caattactggtgaaagagt

SEQ ID NO: 203439 - DNA, 19 bp, Homo sapiens
  siRNA target sequence for GLS (NM_014905.2,1578-1596).
cctgaagcagttcgaaata

SEQ ID NO: 203440 - DNA, 19 bp, Homo sapiens
  siRNA target sequence for GLS (NM_014905.2,1581-1599).
gaagcagttcgaaatacat

SEQ ID NO: 203441 - DNA, 19 bp, Homo sapiens
  siRNA target sequence for GLS (NM_014905.2,1584-1602).
gcagttcgaaatacattga

SEQ ID NO: 203442 - DNA, 19 bp, Homo sapiens
  siRNA target sequence for GLS (NM_014905.2,1656-1674).
gttggtcttcctgcaaaat

SEQ ID NO: 203443 - DNA, 19 bp, Homo sapiens
  siRNA target sequence for GLS (NM_014905.2,1684-1702).
ctgggggcattcttttagt

SEQ ID NO: 203444 - DNA, 19 bp, Homo sapiens
  siRNA target sequence for GLS (NM_014905.2,1687-1705).
ggggcattcttttagttgt

SEQ ID NO: 203445 - DNA, 19 bp, Homo sapiens
  siRNA target sequence for GLS (NM_014905.2,1762-1780).
gtgttaagggaattcactt

SEQ ID NO: 203446 - DNA, 19 bp, Homo sapiens
  siRNA target sequence for GLS (NM_014905.2,1783-1801).
gtcacgatcttgtttctct

SEQ ID NO: 203447 - DNA, 19 bp, Homo sapiens
  siRNA target sequence for GLS (NM_014905.2,1798-1816).
ctctgtgtaatttccataa

SEQ ID NO: 203448 - DNA, 19 bp, Homo sapiens
  siRNA target sequence for GLS (NM_014905.2,1869-1887).
ggtgatcaaagggtaaagt

SEQ ID NO: 203449 - DNA, 19 bp, Homo sapiens
  siRNA target sequence for GLS (NM_014905.2,1879-1897).
gggtaaagtcagtgataaa

SEQ ID NO: 203450 - DNA, 19 bp, Homo sapiens
  siRNA target sequence for GLS (NM_014905.2,1880-1898).
ggtaaagtcagtgataaat

SEQ ID NO: 203451 - DNA, 19 bp, Homo sapiens
  siRNA target sequence for GLS (NM_014905.2,1967-1985).
ggaacagcgggactatgat

SEQ ID NO: 203452 - DNA, 19 bp, Homo sapiens
  siRNA target sequence for GLS (NM_014905.2,1968-1986).
gaacagcgggactatgatt

SEQ ID NO: 203453 - DNA, 19 bp, Homo sapiens
  siRNA target sequence for GLS (NM_014905.2,1971-1989).
cagcgggactatgattcta

SEQ ID NO: 203454 - DNA, 19 bp, Homo sapiens
  siRNA target sequence for GLS (NM_014905.2,1973-1991).
gcgggactatgattctaga

SEQ ID NO: 203455 - DNA, 19 bp, Homo sapiens
  siRNA target sequence for GLS (NM_014905.2,1974-1992).
cgggactatgattctagaa

SEQ ID NO: 203456 - DNA, 19 bp, Homo sapiens
  siRNA target sequence for GLS (NM_014905.2,2078-2096).
ggacaggtggaataacact

SEQ ID NO: 203457 - DNA, 19 bp, Homo sapiens
  siRNA target sequence for GLS (NM_014905.2,2209-2227).
ccgtccataagaatcttga

SEQ ID NO: 203458 - DNA, 19 bp, Homo sapiens
  siRNA target sequence for GLS (NM_014905.2,2210-2228).
cgtccataagaatcttgat

SEQ ID NO: 203459 - DNA, 19 bp, Homo sapiens
  siRNA target sequence for FLJ31204 (NM_174912.2,194-212).
gccgagcagctttagtctt

SEQ ID NO: 203460 - DNA, 19 bp, Homo sapiens
  siRNA target sequence for FLJ31204 (NM_174912.2,195-213).
ccgagcagctttagtctta

SEQ ID NO: 203461 - DNA, 19 bp, Homo sapiens
  siRNA target sequence for FLJ31204 (NM_174912.2,328-346).
gttgttcaggcttatatca

SEQ ID NO: 203462 - DNA, 19 bp, Homo sapiens
  siRNA target sequence for FLJ31204 (NM_174912.2,337-355).
gcttatatcaacagaatca

SEQ ID NO: 203463 - DNA, 19 bp, Homo sapiens
  siRNA target sequence for FLJ31204 (NM_174912.2,360-378).
cgtgaacccaatgatcaat

SEQ ID NO: 203464 - DNA, 19 bp, Homo sapiens
  siRNA target sequence for FLJ31204 (NM_174912.2,418-436).
gctcatgctgtagatcaaa

SEQ ID NO: 203465 - DNA, 19 bp, Homo sapiens
  siRNA target sequence for FLJ31204 (NM_174912.2,489-507).
ccttggggttcctttgaca

SEQ ID NO: 203466 - DNA, 19 bp, Homo sapiens
  siRNA target sequence for FLJ31204 (NM_174912.2,529-547).
caaggaatgcccaattctt

SEQ ID NO: 203467 - DNA, 19 bp, Homo sapiens
  siRNA target sequence for FLJ31204 (NM_174912.2,590-608).
ccactgtggtggcattact

SEQ ID NO: 203468 - DNA, 19 bp, Homo sapiens
  siRNA target sequence for FLJ31204 (NM_174912.2,631-649).
cttggcataaccaactgta

SEQ ID NO: 203469 - DNA, 19 bp, Homo sapiens
  siRNA target sequence for FLJ31204 (NM_174912.2,665-683).
ggtatgaatccagtaacaa

SEQ ID NO: 203470 - DNA, 19 bp, Homo sapiens
  siRNA target sequence for FLJ31204 (NM_174912.2,670-688).
gaatccagtaacaagatct

SEQ ID NO: 203471 - DNA, 19 bp, Homo sapiens
  siRNA target sequence for FLJ31204 (NM_174912.2,695-713).
gatcaaacaacccatatga

SEQ ID NO: 203472 - DNA, 19 bp, Homo sapiens
  siRNA target sequence for FLJ31204 (NM_174912.2,707-725).
catatgatttacagcatat

SEQ ID NO: 203473 - DNA, 19 bp, Homo sapiens
  siRNA target sequence for FLJ31204 (NM_174912.2,764-782).
cagctgcctgctcagttat

SEQ ID NO: 203474 - DNA, 19 bp, Homo sapiens
  siRNA target sequence for FLJ31204 (NM_174912.2,820-838).
cctgctttcttcaatggta

SEQ ID NO: 203475 - DNA, 19 bp, Homo sapiens
  siRNA target sequence for FLJ31204 (NM_174912.2,828-846).
cttcaatggtatatttgga

SEQ ID NO: 203476 - DNA, 19 bp, Homo sapiens
  siRNA target sequence for FLJ31204 (NM_174912.2,982-1000).
ggacctgggatcaaaaggt

SEQ ID NO: 203477 - DNA, 19 bp, Homo sapiens
  siRNA target sequence for FLJ31204 (NM_174912.2,983-1001).
gacctgggatcaaaaggtt

SEQ ID NO: 203478 - DNA, 19 bp, Homo sapiens
  siRNA target sequence for FLJ31204 (NM_174912.2,1087-1105).
gaccaagatctcattatga

SEQ ID NO: 203479 - DNA, 19 bp, Homo sapiens
  siRNA target sequence for FLJ31204 (NM_174912.2,1120-1138).
gtggttcaccttgaaacta

SEQ ID NO: 203480 - DNA, 19 bp, Homo sapiens
  siRNA target sequence for FLJ31204 (NM_174912.2,1245-1263).
gaaatttgtagatttgctt

SEQ ID NO: 203481 - DNA, 19 bp, Homo sapiens
  siRNA target sequence for FLJ31204 (NM_174912.2,1265-1283).
gtgaccatgggaaacatgt

SEQ ID NO: 203482 - DNA, 19 bp, Homo sapiens
  siRNA target sequence for FLJ31204 (NM_174912.2,1286-1304).
gtcctctgtgggagttgat

SEQ ID NO: 203483 - DNA, 19 bp, Homo sapiens
  siRNA target sequence for FLJ31204 (NM_174912.2,1329-1347).
gtacaccatcccttccatt

SEQ ID NO: 203484 - DNA, 19 bp, Homo sapiens
  siRNA target sequence for FLJ31204 (NM_174912.2,1343-1361).
ccattggactggctttgtt

SEQ ID NO: 203485 - DNA, 19 bp, Homo sapiens
  siRNA target sequence for FLJ31204 (NM_174912.2,1387-1405).
gagaaataccaaaagttta

SEQ ID NO: 203486 - DNA, 19 bp, Homo sapiens
  siRNA target sequence for FLJ31204 (NM_174912.2,1427-1445).
gtaaagagctggtggatat

SEQ ID NO: 203487 - DNA, 19 bp, Homo sapiens
  siRNA target sequence for FLJ31204 (NM_174912.2,1453-1471).
gatgatggtgtgttcttat

SEQ ID NO: 203488 - DNA, 19 bp, Homo sapiens
  siRNA target sequence for FLJ31204 (NM_174912.2,1485-1503).
cacagtggcacctaagcat

SEQ ID NO: 203489 - DNA, 19 bp, Homo sapiens
  siRNA target sequence for FLJ31204 (NM_174912.2,1629-1647).
ggctggaccctttaatgat

SEQ ID NO: 203490 - DNA, 19 bp, Homo sapiens
  siRNA target sequence for FLJ31204 (NM_174912.2,1631-1649).
ctggaccctttaatgatca

SEQ ID NO: 203491 - DNA, 19 bp, Homo sapiens
  siRNA target sequence for FLJ31204 (NM_174912.2,1634-1652).
gaccctttaatgatcatct

SEQ ID NO: 203492 - DNA, 19 bp, Homo sapiens
  siRNA target sequence for QRSL1 (NM_018292.2,114-132).
cggagcctccgagaagttt

SEQ ID NO: 203493 - DNA, 19 bp, Homo sapiens
  siRNA target sequence for QRSL1 (NM_018292.2,116-134).
gagcctccgagaagtttct

SEQ ID NO: 203494 - DNA, 19 bp, Homo sapiens
  siRNA target sequence for QRSL1 (NM_018292.2,184-202).
gtctctctcttatcaagaa

SEQ ID NO: 203495 - DNA, 19 bp, Homo sapiens
  siRNA target sequence for QRSL1 (NM_018292.2,235-253).
cagaagaggtggccttaaa

SEQ ID NO: 203496 - DNA, 19 bp, Homo sapiens
  siRNA target sequence for QRSL1 (NM_018292.2,264-282).
gaatcagaaaagagatata

SEQ ID NO: 203497 - DNA, 19 bp, Homo sapiens
  siRNA target sequence for QRSL1 (NM_018292.2,387-405).
ggttatataccaccttata

SEQ ID NO: 203498 - DNA, 19 bp, Homo sapiens
  siRNA target sequence for QRSL1 (NM_018292.2,388-406).
gttatataccaccttataa

SEQ ID NO: 203499 - DNA, 19 bp, Homo sapiens
  siRNA target sequence for QRSL1 (NM_018292.2,431-449).
ggatcagggagctctacta

SEQ ID NO: 203500 - DNA, 19 bp, Homo sapiens
  siRNA target sequence for QRSL1 (NM_018292.2,432-450).
gatcagggagctctactaa

SEQ ID NO: 203501 - DNA, 19 bp, Homo sapiens
  siRNA target sequence for QRSL1 (NM_018292.2,490-508).
ggagcacagatggtgtatt

SEQ ID NO: 203502 - DNA, 19 bp, Homo sapiens
  siRNA target sequence for QRSL1 (NM_018292.2,636-654).
gctgtatcggcgttcacat

SEQ ID NO: 203503 - DNA, 19 bp, Homo sapiens
  siRNA target sequence for QRSL1 (NM_018292.2,659-677).
cgcggctttaggatcagat

SEQ ID NO: 203504 - DNA, 19 bp, Homo sapiens
  siRNA target sequence for QRSL1 (NM_018292.2,660-678).
gcggctttaggatcagata

SEQ ID NO: 203505 - DNA, 19 bp, Homo sapiens
  siRNA target sequence for QRSL1 (NM_018292.2,712-730).
gtgggcttgttggtttcaa

SEQ ID NO: 203506 - DNA, 19 bp, Homo sapiens
  siRNA target sequence for QRSL1 (NM_018292.2,717-735).
cttgttggtttcaaaccaa

SEQ ID NO: 203507 - DNA, 19 bp, Homo sapiens
  siRNA target sequence for QRSL1 (NM_018292.2,732-750).
ccaagctatggcttagttt

SEQ ID NO: 203508 - DNA, 19 bp, Homo sapiens
  siRNA target sequence for QRSL1 (NM_018292.2,762-780).
ctcattcccctggtgaatt

SEQ ID NO: 203509 - DNA, 19 bp, Homo sapiens
  siRNA target sequence for QRSL1 (NM_018292.2,786-804).
gatgtgccaggaatcttaa

SEQ ID NO: 203510 - DNA, 19 bp, Homo sapiens
  siRNA target sequence for QRSL1 (NM_018292.2,863-881).
ggactctaccacagtacat

SEQ ID NO: 203511 - DNA, 19 bp, Homo sapiens
  siRNA target sequence for QRSL1 (NM_018292.2,866-884).
ctctaccacagtacatgaa

SEQ ID NO: 203512 - DNA, 19 bp, Homo sapiens
  siRNA target sequence for QRSL1 (NM_018292.2,871-889).
ccacagtacatgaacctat

SEQ ID NO: 203513 - DNA, 19 bp, Homo sapiens
  siRNA target sequence for QRSL1 (NM_018292.2,876-894).
gtacatgaacctattaata

SEQ ID NO: 203514 - DNA, 19 bp, Homo sapiens
  siRNA target sequence for QRSL1 (NM_018292.2,882-900).
gaacctattaataaaccat

SEQ ID NO: 203515 - DNA, 19 bp, Homo sapiens
  siRNA target sequence for QRSL1 (NM_018292.2,918-936).
gcagatgtgagcaaactat

SEQ ID NO: 203516 - DNA, 19 bp, Homo sapiens
  siRNA target sequence for QRSL1 (NM_018292.2,926-944).
gagcaaactatgtatagga

SEQ ID NO: 203517 - DNA, 19 bp, Homo sapiens
  siRNA target sequence for QRSL1 (NM_018292.2,933-951).
ctatgtataggaattccaa

SEQ ID NO: 203518 - DNA, 19 bp, Homo sapiens
  siRNA target sequence for QRSL1 (NM_018292.2,960-978).
cttgtaccggaattatcaa

SEQ ID NO: 203519 - DNA, 19 bp, Homo sapiens
  siRNA target sequence for QRSL1 (NM_018292.2,1077-1095).
gtctgctaccatgtattgt

SEQ ID NO: 203520 - DNA, 19 bp, Homo sapiens
  siRNA target sequence for QRSL1 (NM_018292.2,1111-1129).
catcgaatatggcaagatt

SEQ ID NO: 203521 - DNA, 19 bp, Homo sapiens
  siRNA target sequence for QRSL1 (NM_018292.2,1114-1132).
cgaatatggcaagatttga

SEQ ID NO: 203522 - DNA, 19 bp, Homo sapiens
  siRNA target sequence for QRSL1 (NM_018292.2,1115-1133).
gaatatggcaagatttgat

SEQ ID NO: 203523 - DNA, 19 bp, Homo sapiens
  siRNA target sequence for QRSL1 (NM_018292.2,1126-1144).
gatttgatgggctacaata

SEQ ID NO: 203524 - DNA, 19 bp, Homo sapiens
  siRNA target sequence for QRSL1 (NM_018292.2,1231-1249).
gaattctctcaggaaactt

SEQ ID NO: 203525 - DNA, 19 bp, Homo sapiens
  siRNA target sequence for QRSL1 (NM_018292.2,1299-1317).
gtgagacgcctcattgcta

SEQ ID NO: 203526 - DNA, 19 bp, Homo sapiens
  siRNA target sequence for QRSL1 (NM_018292.2,1301-1319).
gagacgcctcattgctaat

SEQ ID NO: 203527 - DNA, 19 bp, Homo sapiens
  siRNA target sequence for QRSL1 (NM_018292.2,1303-1321).
gacgcctcattgctaatga

SEQ ID NO: 203528 - DNA, 19 bp, Homo sapiens
  siRNA target sequence for QRSL1 (NM_018292.2,1425-1443).
cgaagtgcccaggatgata

SEQ ID NO: 203529 - DNA, 19 bp, Homo sapiens
  siRNA target sequence for QRSL1 (NM_018292.2,1508-1526).
ccaagggttgccaatagga

SEQ ID NO: 203530 - DNA, 19 bp, Homo sapiens
  siRNA target sequence for QRSL1 (NM_018292.2,1518-1536).
ccaataggactgcagttta

SEQ ID NO: 203531 - DNA, 19 bp, Homo sapiens
  siRNA target sequence for QRSL1 (NM_018292.2,1519-1537).
caataggactgcagtttat

SEQ ID NO: 203532 - DNA, 19 bp, Homo sapiens
  siRNA target sequence for QRSL1 (NM_018292.2,1623-1641).
gaactcatggatgattgtt

SEQ ID NO: 203533 - DNA, 19 bp, Homo sapiens
  siRNA target sequence for UPB1 (NM_016327.1,119-137).
ccgacttgcaggaagtgaa

SEQ ID NO: 203534 - DNA, 19 bp, Homo sapiens
  siRNA target sequence for UPB1 (NM_016327.1,284-302).
ggctggttcagaacagaat

SEQ ID NO: 203535 - DNA, 19 bp, Homo sapiens
  siRNA target sequence for UPB1 (NM_016327.1,336-354).
ggtctctgcccttcataga

SEQ ID NO: 203536 - DNA, 19 bp, Homo sapiens
  siRNA target sequence for UPB1 (NM_016327.1,344-362).
cccttcatagacgcataaa

SEQ ID NO: 203537 - DNA, 19 bp, Homo sapiens
  siRNA target sequence for UPB1 (NM_016327.1,383-401).
caatgtgtggagtcaacat

SEQ ID NO: 203538 - DNA, 19 bp, Homo sapiens
  siRNA target sequence for UPB1 (NM_016327.1,493-511).
gggcccaccaccagattct

SEQ ID NO: 203539 - DNA, 19 bp, Homo sapiens
  siRNA target sequence for UPB1 (NM_016327.1,495-513).
gcccaccaccagattctgt

SEQ ID NO: 203540 - DNA, 19 bp, Homo sapiens
  siRNA target sequence for UPB1 (NM_016327.1,572-590).
gcgagcatggggatgtttt

SEQ ID NO: 203541 - DNA, 19 bp, Homo sapiens
  siRNA target sequence for UPB1 (NM_016327.1,580-598).
ggggatgttttgtggaata

SEQ ID NO: 203542 - DNA, 19 bp, Homo sapiens
  siRNA target sequence for UPB1 (NM_016327.1,670-688).
gatttcaacgagtcaactt

SEQ ID NO: 203543 - DNA, 19 bp, Homo sapiens
  siRNA target sequence for UPB1 (NM_016327.1,737-755).
gaaggatcgcggtgaacat

SEQ ID NO: 203544 - DNA, 19 bp, Homo sapiens
  siRNA target sequence for UPB1 (NM_016327.1,806-824).
gggctgagatcatcttcaa

SEQ ID NO: 203545 - DNA, 19 bp, Homo sapiens
  siRNA target sequence for UPB1 (NM_016327.1,984-1002).
ggactttggctacttttat

SEQ ID NO: 203546 - DNA, 19 bp, Homo sapiens
  siRNA target sequence for UPB1 (NM_016327.1,1079-1097).
ctaagctcgacctaaacct

SEQ ID NO: 203547 - DNA, 19 bp, Homo sapiens
  siRNA target sequence for UPB1 (NM_016327.1,1114-1132).
gatgtctggaacttcaaga

SEQ ID NO: 203548 - DNA, 19 bp, Homo sapiens
  siRNA target sequence for UPB1 (NM_016327.1,1117-1135).
gtctggaacttcaagatga

SEQ ID NO: 203549 - DNA, 19 bp, Homo sapiens
  siRNA target sequence for UPB1 (NM_016327.1,1193-1211).
gccccaccatcgtgaaaga

SEQ ID NO: 203550 - DNA, 19 bp, Homo sapiens
  siRNA target sequence for VNN3 (NM_018399.2,125-143).
ggtgcactggacactttta

SEQ ID NO: 203551 - DNA, 19 bp, Homo sapiens
  siRNA target sequence for VNN3 (NM_018399.2,126-144).
gtgcactggacacttttat

SEQ ID NO: 203552 - DNA, 19 bp, Homo sapiens
  siRNA target sequence for VNN3 (NM_018399.2,160-178).
gcatgcggtgatattacca

SEQ ID NO: 203553 - DNA, 19 bp, Homo sapiens
  siRNA target sequence for VNN3 (NM_018399.2,161-179).
catgcggtgatattaccaa

SEQ ID NO: 203554 - DNA, 19 bp, Homo sapiens
  siRNA target sequence for VNN3 (NM_018399.2,212-230).
gctttgctcctgatgaaca

SEQ ID NO: 203555 - DNA, 19 bp, Homo sapiens
  siRNA target sequence for VNN3 (NM_018399.2,226-244).
gaacaagaacatagatgtt

SEQ ID NO: 203556 - DNA, 19 bp, Homo sapiens
  siRNA target sequence for VNN3 (NM_018399.2,337-355).
gagcatttacccctatcta

SEQ ID NO: 203557 - DNA, 19 bp, Homo sapiens
  siRNA target sequence for VNN3 (NM_018399.2,339-357).
gcatttacccctatctaga

SEQ ID NO: 203558 - DNA, 19 bp, Homo sapiens
  siRNA target sequence for VNN3 (NM_018399.2,591-609).
gctaccataagtacaatct

SEQ ID NO: 203559 - DNA, 19 bp, Homo sapiens
  siRNA target sequence for VNN3 (NM_018399.2,592-610).
ctaccataagtacaatctt

SEQ ID NO: 203560 - DNA, 19 bp, Homo sapiens
  siRNA target sequence for VNN3 (NM_018399.2,750-768).
caattgacagcattctcta

SEQ ID NO: 203561 - DNA, 19 bp, Homo sapiens
  siRNA target sequence for VNN3 (NM_018399.2,835-853).
ggccatgggagtcaatcta

SEQ ID NO: 203562 - DNA, 19 bp, Homo sapiens
  siRNA target sequence for VNN3 (NM_018399.2,837-855).
ccatgggagtcaatctact

SEQ ID NO: 203563 - DNA, 19 bp, Homo sapiens
  siRNA target sequence for VNN3 (NM_018399.2,847-865).
caatctacttgctgcaaat

SEQ ID NO: 203564 - DNA, 19 bp, Homo sapiens
  siRNA target sequence for VNN3 (NM_018399.2,1060-1078).
ctctgaacagtcagatttt

SEQ ID NO: 203565 - DNA, 19 bp, Homo sapiens
  siRNA target sequence for VNN3 (NM_018399.2,1108-1126).
cttcaccaagcttaagaga

SEQ ID NO: 203566 - DNA, 19 bp, Homo sapiens
  siRNA target sequence for VNN3 (NM_018399.2,1111-1129).
caccaagcttaagagaaat

SEQ ID NO: 203567 - DNA, 19 bp, Homo sapiens
  siRNA target sequence for VNN3 (NM_018399.2,1164-1182).
gttgtcacttaacttacaa

SEQ ID NO: 203568 - DNA, 19 bp, Homo sapiens
  siRNA target sequence for VNN3 (NM_018399.2,1169-1187).
cacttaacttacaagatgt

SEQ ID NO: 203569 - DNA, 19 bp, Homo sapiens
  siRNA target sequence for VNN3 (NM_018399.2,1195-1213).
gcgaacagacgagatctat

SEQ ID NO: 203570 - DNA, 19 bp, Homo sapiens
  siRNA target sequence for VNN3 (NM_018399.2,1210-1228).
ctatgccctaggtgctttt

SEQ ID NO: 203571 - DNA, 19 bp, Homo sapiens
  siRNA target sequence for VNN3 (NM_018399.2,1244-1262).
gtagaaggccaatattact

SEQ ID NO: 203572 - DNA, 19 bp, Homo sapiens
  siRNA target sequence for VNN3 (NM_018399.2,1250-1268).
ggccaatattacttacaga

SEQ ID NO: 203573 - DNA, 19 bp, Homo sapiens
  siRNA target sequence for VNN3 (NM_018399.2,1265-1283).
cagatatgtgcattactga

SEQ ID NO: 203574 - DNA, 19 bp, Homo sapiens
  siRNA target sequence for VNN3 (NM_018399.2,1368-1386).
catttggaacgcgttatgt

SEQ ID NO: 203575 - DNA, 19 bp, Homo sapiens
  siRNA target sequence for VNN3 (NM_018399.2,1390-1408).
cccacagatcattctaagt

SEQ ID NO: 203576 - DNA, 19 bp, Homo sapiens
  siRNA target sequence for VNN3 (NM_018399.2,1496-1514).
gttatggccctgtatggaa

SEQ ID NO: 203577 - DNA, 19 bp, Homo sapiens
  siRNA target sequence for ADA (NM_000022.1,157-175).
ccatcaagcctgaaaccat

SEQ ID NO: 203578 - DNA, 19 bp, Homo sapiens
  siRNA target sequence for ADA (NM_000022.1,316-334).
gctgccgggaggctatcaa

SEQ ID NO: 203579 - DNA, 19 bp, Homo sapiens
  siRNA target sequence for ADA (NM_000022.1,317-335).
ctgccgggaggctatcaaa

SEQ ID NO: 203580 - DNA, 19 bp, Homo sapiens
  siRNA target sequence for ADA (NM_000022.1,588-606).
gtggtggagctgtgtaaga

SEQ ID NO: 203581 - DNA, 19 bp, Homo sapiens
  siRNA target sequence for ADA (NM_000022.1,750-768).
ggctcggccgaagtagtaa

SEQ ID NO: 203582 - DNA, 19 bp, Homo sapiens
  siRNA target sequence for ADA (NM_000022.1,751-769).
gctcggccgaagtagtaaa

SEQ ID NO: 203583 - DNA, 19 bp, Homo sapiens
  siRNA target sequence for ADA (NM_000022.1,752-770).
ctcggccgaagtagtaaaa

SEQ ID NO: 203584 - DNA, 19 bp, Homo sapiens
  siRNA target sequence for ADA (NM_000022.1,754-772).
cggccgaagtagtaaaaga

SEQ ID NO: 203585 - DNA, 19 bp, Homo sapiens
  siRNA target sequence for ADA (NM_000022.1,771-789).
gaggctgtggacatactca

SEQ ID NO: 203586 - DNA, 19 bp, Homo sapiens
  siRNA target sequence for ADA (NM_000022.1,920-938).
cacggagcatgcagtcatt

SEQ ID NO: 203587 - DNA, 19 bp, Homo sapiens
  siRNA target sequence for ADA (NM_000022.1,978-996).
gatgacccgctcatcttca

SEQ ID NO: 203588 - DNA, 19 bp, Homo sapiens
  siRNA target sequence for ADA (NM_000022.1,981-999).
gacccgctcatcttcaagt

SEQ ID NO: 203589 - DNA, 19 bp, Homo sapiens
  siRNA target sequence for ADA (NM_000022.1,1000-1018).
ccaccctggacactgatta

SEQ ID NO: 203590 - DNA, 19 bp, Homo sapiens
  siRNA target sequence for ADA (NM_000022.1,1033-1051).
gggacatgggctttactga

SEQ ID NO: 203591 - DNA, 19 bp, Homo sapiens
  siRNA target sequence for ADA (NM_000022.1,1034-1052).
ggacatgggctttactgaa

SEQ ID NO: 203592 - DNA, 19 bp, Homo sapiens
  siRNA target sequence for ADA (NM_000022.1,1076-1094).
caatgcggccaaatctagt

SEQ ID NO: 203593 - DNA, 19 bp, Homo sapiens
  siRNA target sequence for AMPD1 (NM_000036.1,135-153).
gcgcaactttgctgaaaaa

SEQ ID NO: 203594 - DNA, 19 bp, Homo sapiens
  siRNA target sequence for AMPD1 (NM_000036.1,181-199).
ggaggtcgtcaggagattt

SEQ ID NO: 203595 - DNA, 19 bp, Homo sapiens
  siRNA target sequence for AMPD1 (NM_000036.1,192-210).
ggagatttccccctttgat

SEQ ID NO: 203596 - DNA, 19 bp, Homo sapiens
  siRNA target sequence for AMPD1 (NM_000036.1,222-240).
ctgtccgatttctcatcat

SEQ ID NO: 203597 - DNA, 19 bp, Homo sapiens
  siRNA target sequence for AMPD1 (NM_000036.1,224-242).
gtccgatttctcatcatga

SEQ ID NO: 203598 - DNA, 19 bp, Homo sapiens
  siRNA target sequence for AMPD1 (NM_000036.1,313-331).
caaggacggaagactgtta

SEQ ID NO: 203599 - DNA, 19 bp, Homo sapiens
  siRNA target sequence for AMPD1 (NM_000036.1,316-334).
ggacggaagactgttaatt

SEQ ID NO: 203600 - DNA, 19 bp, Homo sapiens
  siRNA target sequence for AMPD1 (NM_000036.1,317-335).
gacggaagactgttaattt

SEQ ID NO: 203601 - DNA, 19 bp, Homo sapiens
  siRNA target sequence for AMPD1 (NM_000036.1,319-337).
cggaagactgttaatttgt

SEQ ID NO: 203602 - DNA, 19 bp, Homo sapiens
  siRNA target sequence for AMPD1 (NM_000036.1,365-383).
ccaaactgtcccacattga

SEQ ID NO: 203603 - DNA, 19 bp, Homo sapiens
  siRNA target sequence for AMPD1 (NM_000036.1,411-429).
ccagaccgtgcctgatttt

SEQ ID NO: 203604 - DNA, 19 bp, Homo sapiens
  siRNA target sequence for AMPD1 (NM_000036.1,438-456).
gcagattactggtgactat

SEQ ID NO: 203605 - DNA, 19 bp, Homo sapiens
  siRNA target sequence for AMPD1 (NM_000036.1,459-477).
ctctggggttacagttgaa

SEQ ID NO: 203606 - DNA, 19 bp, Homo sapiens
  siRNA target sequence for AMPD1 (NM_000036.1,504-522).
gtatcgggcactatgcata

SEQ ID NO: 203607 - DNA, 19 bp, Homo sapiens
  siRNA target sequence for AMPD1 (NM_000036.1,518-536).
gcatacgtgagaaatacat

SEQ ID NO: 203608 - DNA, 19 bp, Homo sapiens
  siRNA target sequence for AMPD1 (NM_000036.1,573-591).
caaatacttgcggaacatt

SEQ ID NO: 203609 - DNA, 19 bp, Homo sapiens
  siRNA target sequence for AMPD1 (NM_000036.1,621-639).
cttctatccagtctttact

SEQ ID NO: 203610 - DNA, 19 bp, Homo sapiens
  siRNA target sequence for AMPD1 (NM_000036.1,694-712).
ctgggctatcacctcaaaa

SEQ ID NO: 203611 - DNA, 19 bp, Homo sapiens
  siRNA target sequence for AMPD1 (NM_000036.1,724-742).
gtagtttacgtctatccta

SEQ ID NO: 203612 - DNA, 19 bp, Homo sapiens
  siRNA target sequence for AMPD1 (NM_000036.1,800-818).
ccttcttagacgatatgaa

SEQ ID NO: 203613 - DNA, 19 bp, Homo sapiens
  siRNA target sequence for AMPD1 (NM_000036.1,804-822).
cttagacgatatgaatttt

SEQ ID NO: 203614 - DNA, 19 bp, Homo sapiens
  siRNA target sequence for AMPD1 (NM_000036.1,810-828).
cgatatgaattttttactt

SEQ ID NO: 203615 - DNA, 19 bp, Homo sapiens
  siRNA target sequence for AMPD1 (NM_000036.1,844-862).
ggacctgttaagacctata

SEQ ID NO: 203616 - DNA, 19 bp, Homo sapiens
  siRNA target sequence for AMPD1 (NM_000036.1,951-969).
cccccaccgagatttttat

SEQ ID NO: 203617 - DNA, 19 bp, Homo sapiens
  siRNA target sequence for AMPD1 (NM_000036.1,952-970).
ccccaccgagatttttata

SEQ ID NO: 203618 - DNA, 19 bp, Homo sapiens
  siRNA target sequence for AMPD1 (NM_000036.1,953-971).
cccaccgagatttttataa

SEQ ID NO: 203619 - DNA, 19 bp, Homo sapiens
  siRNA target sequence for AMPD1 (NM_000036.1,955-973).
caccgagatttttataact

SEQ ID NO: 203620 - DNA, 19 bp, Homo sapiens
  siRNA target sequence for AMPD1 (NM_000036.1,1030-1048).
ctgcgttttattaagaaat

SEQ ID NO: 203621 - DNA, 19 bp, Homo sapiens
  siRNA target sequence for AMPD1 (NM_000036.1,1032-1050).
gcgttttattaagaaatct

SEQ ID NO: 203622 - DNA, 19 bp, Homo sapiens
  siRNA target sequence for AMPD1 (NM_000036.1,1063-1081).
gctgacagagtggtctata

SEQ ID NO: 203623 - DNA, 19 bp, Homo sapiens
  siRNA target sequence for AMPD1 (NM_000036.1,1099-1117).
ctgaccctaaaggaacttt

SEQ ID NO: 203624 - DNA, 19 bp, Homo sapiens
  siRNA target sequence for AMPD1 (NM_000036.1,1101-1119).
gaccctaaaggaacttttt

SEQ ID NO: 203625 - DNA, 19 bp, Homo sapiens
  siRNA target sequence for AMPD1 (NM_000036.1,1185-1203).
gaccttccagcgttttgat

SEQ ID NO: 203626 - DNA, 19 bp, Homo sapiens
  siRNA target sequence for AMPD1 (NM_000036.1,1187-1205).
ccttccagcgttttgataa

SEQ ID NO: 203627 - DNA, 19 bp, Homo sapiens
  siRNA target sequence for AMPD1 (NM_000036.1,1194-1212).
gcgttttgataagttcaat

SEQ ID NO: 203628 - DNA, 19 bp, Homo sapiens
  siRNA target sequence for AMPD1 (NM_000036.1,1243-1261).
ctacgggacctctacttga

SEQ ID NO: 203629 - DNA, 19 bp, Homo sapiens
  siRNA target sequence for AMPD1 (NM_000036.1,1384-1402).
gatgagtggagcaaactct

SEQ ID NO: 203630 - DNA, 19 bp, Homo sapiens
  siRNA target sequence for AMPD1 (NM_000036.1,1429-1447).
cactgccccaacatgacat

SEQ ID NO: 203631 - DNA, 19 bp, Homo sapiens
  siRNA target sequence for AMPD1 (NM_000036.1,1458-1476).
ggttcccaggatctatgat

SEQ ID NO: 203632 - DNA, 19 bp, Homo sapiens
  siRNA target sequence for AMPD1 (NM_000036.1,1463-1481).
ccaggatctatgatgtgtt

SEQ ID NO: 203633 - DNA, 19 bp, Homo sapiens
  siRNA target sequence for AMPD1 (NM_000036.1,1585-1603).
gtcttcctcaagcatatca

SEQ ID NO: 203634 - DNA, 19 bp, Homo sapiens
  siRNA target sequence for AMPD1 (NM_000036.1,1678-1696).
gagtggacattggaaaaga

SEQ ID NO: 203635 - DNA, 19 bp, Homo sapiens
  siRNA target sequence for AMPD1 (NM_000036.1,1717-1735).
gcctactacatgtatgcaa

SEQ ID NO: 203636 - DNA, 19 bp, Homo sapiens
  siRNA target sequence for AMPD1 (NM_000036.1,1718-1736).
cctactacatgtatgcaaa

SEQ ID NO: 203637 - DNA, 19 bp, Homo sapiens
  siRNA target sequence for AMPD1 (NM_000036.1,1772-1790).
gcatgaatacgtttctgtt

SEQ ID NO: 203638 - DNA, 19 bp, Homo sapiens
  siRNA target sequence for AMPD1 (NM_000036.1,1845-1863).
gatagcagatgatatctct

SEQ ID NO: 203639 - DNA, 19 bp, Homo sapiens
  siRNA target sequence for AMPD1 (NM_000036.1,1886-1904).
gtcccgtgctacagtactt

SEQ ID NO: 203640 - DNA, 19 bp, Homo sapiens
  siRNA target sequence for AMPD1 (NM_000036.1,1889-1907).
ccgtgctacagtacttgtt

SEQ ID NO: 203641 - DNA, 19 bp, Homo sapiens
  siRNA target sequence for AMPD1 (NM_000036.1,1890-1908).
cgtgctacagtacttgttt

SEQ ID NO: 203642 - DNA, 19 bp, Homo sapiens
  siRNA target sequence for AMPD1 (NM_000036.1,1929-1947).
cgccatgtcaccactaagt

SEQ ID NO: 203643 - DNA, 19 bp, Homo sapiens
  siRNA target sequence for AMPD1 (NM_000036.1,1931-1949).
ccatgtcaccactaagtaa

SEQ ID NO: 203644 - DNA, 19 bp, Homo sapiens
  siRNA target sequence for AMPD1 (NM_000036.1,1935-1953).
gtcaccactaagtaacaat

SEQ ID NO: 203645 - DNA, 19 bp, Homo sapiens
  siRNA target sequence for AMPD1 (NM_000036.1,1946-1964).
gtaacaatagcctatttct

SEQ ID NO: 203646 - DNA, 19 bp, Homo sapiens
  siRNA target sequence for AMPD1 (NM_000036.1,1966-1984).
gagtatgccaaaaatcctt

SEQ ID NO: 203647 - DNA, 19 bp, Homo sapiens
  siRNA target sequence for AMPD1 (NM_000036.1,2055-2073).
caaggagcccctaatggaa

SEQ ID NO: 203648 - DNA, 19 bp, Homo sapiens
  siRNA target sequence for AMPD1 (NM_000036.1,2059-2077).
gagcccctaatggaagaat

SEQ ID NO: 203649 - DNA, 19 bp, Homo sapiens
  siRNA target sequence for AMPD1 (NM_000036.1,2145-2163).
cttgcagtgtggaatttct

SEQ ID NO: 203650 - DNA, 19 bp, Homo sapiens
  siRNA target sequence for AMPD1 (NM_000036.1,2282-2300).
gttatgaactcaatttaat

SEQ ID NO: 203651 - DNA, 19 bp, Homo sapiens
  siRNA target sequence for AMPD1 (NM_000036.1,2302-2320).
gctgagggtcttaaatcaa

SEQ ID NO: 203652 - DNA, 19 bp, Homo sapiens
  siRNA target sequence for AMPD2 (NM_004037.5,595-613).
gccatggcatcctatccat

SEQ ID NO: 203653 - DNA, 19 bp, Homo sapiens
  siRNA target sequence for AMPD2 (NM_004037.5,634-652).
gccaaatatccctttaaga

SEQ ID NO: 203654 - DNA, 19 bp, Homo sapiens
  siRNA target sequence for AMPD2 (NM_004037.5,777-795).
cctgcgcacgtctatggat

SEQ ID NO: 203655 - DNA, 19 bp, Homo sapiens
  siRNA target sequence for AMPD2 (NM_004037.5,788-806).
ctatggatggcaaatgcaa

SEQ ID NO: 203656 - DNA, 19 bp, Homo sapiens
  siRNA target sequence for AMPD2 (NM_004037.5,856-874).
cgtagtgccccgtatgagt

SEQ ID NO: 203657 - DNA, 19 bp, Homo sapiens
  siRNA target sequence for AMPD2 (NM_004037.5,857-875).
gtagtgccccgtatgagtt

SEQ ID NO: 203658 - DNA, 19 bp, Homo sapiens
  siRNA target sequence for AMPD2 (NM_004037.5,974-992).
gggccaagcaagatttcct

SEQ ID NO: 203659 - DNA, 19 bp, Homo sapiens
  siRNA target sequence for AMPD2 (NM_004037.5,1269-1287).
ggagacccggacctatgaa

SEQ ID NO: 203660 - DNA, 19 bp, Homo sapiens
  siRNA target sequence for AMPD2 (NM_004037.5,1536-1554).
caatggccccataaagtca

SEQ ID NO: 203661 - DNA, 19 bp, Homo sapiens
  siRNA target sequence for AMPD2 (NM_004037.5,1540-1558).
ggccccataaagtcattct

SEQ ID NO: 203662 - DNA, 19 bp, Homo sapiens
  siRNA target sequence for AMPD2 (NM_004037.5,1600-1618).
catgtgctactcaatgaga

SEQ ID NO: 203663 - DNA, 19 bp, Homo sapiens
  siRNA target sequence for AMPD2 (NM_004037.5,1645-1663).
gtgccacaccgagatttct

SEQ ID NO: 203664 - DNA, 19 bp, Homo sapiens
  siRNA target sequence for AMPD2 (NM_004037.5,1648-1666).
ccacaccgagatttctaca

SEQ ID NO: 203665 - DNA, 19 bp, Homo sapiens
  siRNA target sequence for AMPD2 (NM_004037.5,1649-1667).
cacaccgagatttctacaa

SEQ ID NO: 203666 - DNA, 19 bp, Homo sapiens
  siRNA target sequence for AMPD2 (NM_004037.5,1651-1669).
caccgagatttctacaaca

SEQ ID NO: 203667 - DNA, 19 bp, Homo sapiens
  siRNA target sequence for AMPD2 (NM_004037.5,1867-1885).
catgcggacaggaacactt

SEQ ID NO: 203668 - DNA, 19 bp, Homo sapiens
  siRNA target sequence for AMPD2 (NM_004037.5,1872-1890).
ggacaggaacactttccat

SEQ ID NO: 203669 - DNA, 19 bp, Homo sapiens
  siRNA target sequence for AMPD2 (NM_004037.5,1934-1952).
ccgtcctccgagagatctt

SEQ ID NO: 203670 - DNA, 19 bp, Homo sapiens
  siRNA target sequence for AMPD2 (NM_004037.5,1942-1960).
cgagagatcttcatcaaga

SEQ ID NO: 203671 - DNA, 19 bp, Homo sapiens
  siRNA target sequence for AMPD2 (NM_004037.5,1971-1989).
ggtatctgggaagtacttt

SEQ ID NO: 203672 - DNA, 19 bp, Homo sapiens
  siRNA target sequence for AMPD2 (NM_004037.5,2270-2288).
cggaactgcatctcttctt

SEQ ID NO: 203673 - DNA, 19 bp, Homo sapiens
  siRNA target sequence for AMPD2 (NM_004037.5,2271-2289).
ggaactgcatctcttctta

SEQ ID NO: 203674 - DNA, 19 bp, Homo sapiens
  siRNA target sequence for AMPD2 (NM_004037.5,2802-2820).
cagctcctgcgatatgtgt

SEQ ID NO: 203675 - DNA, 19 bp, Homo sapiens
  siRNA target sequence for AMPD2 (NM_004037.5,2851-2869).
ggcttctcgcacaaggtaa

SEQ ID NO: 203676 - DNA, 19 bp, Homo sapiens
  siRNA target sequence for AMPD2 (NM_004037.5,2852-2870).
gcttctcgcacaaggtaaa

SEQ ID NO: 203677 - DNA, 19 bp, Homo sapiens
  siRNA target sequence for AMPD2 (NM_004037.5,2877-2895).
ctggctgggacccaactat

SEQ ID NO: 203678 - DNA, 19 bp, Homo sapiens
  siRNA target sequence for AMPD3 (NM_000480.1,511-529).
gccccatcgggcaaaagga

SEQ ID NO: 203679 - DNA, 19 bp, Homo sapiens
  siRNA target sequence for AMPD3 (NM_000480.1,512-530).
ccccatcgggcaaaaggaa

SEQ ID NO: 203680 - DNA, 19 bp, Homo sapiens
  siRNA target sequence for AMPD3 (NM_000480.1,576-594).
gtggagaccgcaaaaagaa

SEQ ID NO: 203681 - DNA, 19 bp, Homo sapiens
  siRNA target sequence for AMPD3 (NM_000480.1,643-661).
cgccacagcaagattggaa

SEQ ID NO: 203682 - DNA, 19 bp, Homo sapiens
  siRNA target sequence for AMPD3 (NM_000480.1,773-791).
catcagcggagattactgt

SEQ ID NO: 203683 - DNA, 19 bp, Homo sapiens
  siRNA target sequence for AMPD3 (NM_000480.1,1012-1030).
caccccccaacctggatta

SEQ ID NO: 203684 - DNA, 19 bp, Homo sapiens
  siRNA target sequence for AMPD3 (NM_000480.1,1170-1188).
gatggccccacgaaaacct

SEQ ID NO: 203685 - DNA, 19 bp, Homo sapiens
  siRNA target sequence for AMPD3 (NM_000480.1,1175-1193).
ccccacgaaaacctattgt

SEQ ID NO: 203686 - DNA, 19 bp, Homo sapiens
  siRNA target sequence for AMPD3 (NM_000480.1,1177-1195).
ccacgaaaacctattgtca

SEQ ID NO: 203687 - DNA, 19 bp, Homo sapiens
  siRNA target sequence for AMPD3 (NM_000480.1,1192-1210).
gtcaccggcgactgaactt

SEQ ID NO: 203688 - DNA, 19 bp, Homo sapiens
  siRNA target sequence for AMPD3 (NM_000480.1,1219-1237).
ccaagttcagccttcatga

SEQ ID NO: 203689 - DNA, 19 bp, Homo sapiens
  siRNA target sequence for AMPD3 (NM_000480.1,1228-1246).
gccttcatgagatgttaaa

SEQ ID NO: 203690 - DNA, 19 bp, Homo sapiens
  siRNA target sequence for AMPD3 (NM_000480.1,1233-1251).
catgagatgttaaacgaaa

SEQ ID NO: 203691 - DNA, 19 bp, Homo sapiens
  siRNA target sequence for AMPD3 (NM_000480.1,1247-1265).
cgaaatgtccgagttcaaa

SEQ ID NO: 203692 - DNA, 19 bp, Homo sapiens
  siRNA target sequence for AMPD3 (NM_000480.1,1255-1273).
ccgagttcaaagagttgaa

SEQ ID NO: 203693 - DNA, 19 bp, Homo sapiens
  siRNA target sequence for AMPD3 (NM_000480.1,1530-1548).
gacaagttcaactccaaat

SEQ ID NO: 203694 - DNA, 19 bp, Homo sapiens
  siRNA target sequence for AMPD3 (NM_000480.1,1569-1587).
gagctgcgtgacctgtatt

SEQ ID NO: 203695 - DNA, 19 bp, Homo sapiens
  siRNA target sequence for AMPD3 (NM_000480.1,1572-1590).
ctgcgtgacctgtatttga

SEQ ID NO: 203696 - DNA, 19 bp, Homo sapiens
  siRNA target sequence for AMPD3 (NM_000480.1,1574-1592).
gcgtgacctgtatttgaaa

SEQ ID NO: 203697 - DNA, 19 bp, Homo sapiens
  siRNA target sequence for AMPD3 (NM_000480.1,1803-1821).
gacatatttaggtcaaaga

SEQ ID NO: 203698 - DNA, 19 bp, Homo sapiens
  siRNA target sequence for AMPD3 (NM_000480.1,1869-1887).
cttttcaaggccactatca

SEQ ID NO: 203699 - DNA, 19 bp, Homo sapiens
  siRNA target sequence for AMPD3 (NM_000480.1,1882-1900).
ctatcaacccccaagatca

SEQ ID NO: 203700 - DNA, 19 bp, Homo sapiens
  siRNA target sequence for AMPD3 (NM_000480.1,1964-1982).
gcacagcgaccacatgttt

SEQ ID NO: 203701 - DNA, 19 bp, Homo sapiens
  siRNA target sequence for AMPD3 (NM_000480.1,1965-1983).
cacagcgaccacatgtttt

SEQ ID NO: 203702 - DNA, 19 bp, Homo sapiens
  siRNA target sequence for AMPD3 (NM_000480.1,2171-2189).
cctcactgctgacaacatt

SEQ ID NO: 203703 - DNA, 19 bp, Homo sapiens
  siRNA target sequence for AMPD3 (NM_000480.1,2215-2233).
gtccggtattgcagtatct

SEQ ID NO: 203704 - DNA, 19 bp, Homo sapiens
  siRNA target sequence for AMPD3 (NM_000480.1,2217-2235).
ccggtattgcagtatctct

SEQ ID NO: 203705 - DNA, 19 bp, Homo sapiens
  siRNA target sequence for AMPD3 (NM_000480.1,2218-2236).
cggtattgcagtatctcta

SEQ ID NO: 203706 - DNA, 19 bp, Homo sapiens
  siRNA target sequence for AMPD3 (NM_000480.1,2282-2300).
cagtttgttcctcgaatat

SEQ ID NO: 203707 - DNA, 19 bp, Homo sapiens
  siRNA target sequence for AMPD3 (NM_000480.1,2328-2346).
cacaagggactgcatgttt

SEQ ID NO: 203708 - DNA, 19 bp, Homo sapiens
  siRNA target sequence for AMPD3 (NM_000480.1,2330-2348).
caagggactgcatgtttct

SEQ ID NO: 203709 - DNA, 19 bp, Homo sapiens
  siRNA target sequence for AMPD3 (NM_000480.1,2383-2401).
cgaaggaagcacttatgga

SEQ ID NO: 203710 - DNA, 19 bp, Homo sapiens
  siRNA target sequence for AMPD3 (NM_000480.1,2584-2602).
ggatggcattccgatatga

SEQ ID NO: 203711 - DNA, 19 bp, Homo sapiens
  siRNA target sequence for AMPD3 (NM_000480.1,2595-2613).
cgatatgagaccttatgca

SEQ ID NO: 203712 - DNA, 19 bp, Homo sapiens
  siRNA target sequence for AMPD3 (NM_000480.1,2596-2614).
gatatgagaccttatgcaa

SEQ ID NO: 203713 - DNA, 19 bp, Homo sapiens
  siRNA target sequence for ATIC (NM_004044.4,40-58).
ggccagctcgccttattta

SEQ ID NO: 203714 - DNA, 19 bp, Homo sapiens
  siRNA target sequence for ATIC (NM_004044.4,42-60).
ccagctcgccttatttagt

SEQ ID NO: 203715 - DNA, 19 bp, Homo sapiens
  siRNA target sequence for ATIC (NM_004044.4,102-120).
gaccgctcttggtttgaat

SEQ ID NO: 203716 - DNA, 19 bp, Homo sapiens
  siRNA target sequence for ATIC (NM_004044.4,104-122).
ccgctcttggtttgaatct

SEQ ID NO: 203717 - DNA, 19 bp, Homo sapiens
  siRNA target sequence for ATIC (NM_004044.4,210-228).
gttggggggacgtgtgaaa

SEQ ID NO: 203718 - DNA, 19 bp, Homo sapiens
  siRNA target sequence for ATIC (NM_004044.4,214-232).
gggggacgtgtgaaaactt

SEQ ID NO: 203719 - DNA, 19 bp, Homo sapiens
  siRNA target sequence for ATIC (NM_004044.4,215-233).
ggggacgtgtgaaaacttt

SEQ ID NO: 203720 - DNA, 19 bp, Homo sapiens
  siRNA target sequence for ATIC (NM_004044.4,253-271).
ggaatcctagctcgtaata

SEQ ID NO: 203721 - DNA, 19 bp, Homo sapiens
  siRNA target sequence for ATIC (NM_004044.4,254-272).
gaatcctagctcgtaatat

SEQ ID NO: 203722 - DNA, 19 bp, Homo sapiens
  siRNA target sequence for ATIC (NM_004044.4,258-276).
cctagctcgtaatattcca

SEQ ID NO: 203723 - DNA, 19 bp, Homo sapiens
  siRNA target sequence for ATIC (NM_004044.4,265-283).
cgtaatattccagaagata

SEQ ID NO: 203724 - DNA, 19 bp, Homo sapiens
  siRNA target sequence for ATIC (NM_004044.4,294-312).
ggccagacttgatttcaat

SEQ ID NO: 203725 - DNA, 19 bp, Homo sapiens
  siRNA target sequence for ATIC (NM_004044.4,322-340).
gttgttgcctgcaatctct

SEQ ID NO: 203726 - DNA, 19 bp, Homo sapiens
  siRNA target sequence for ATIC (NM_004044.4,405-423).
cattggtggagtaacctta

SEQ ID NO: 203727 - DNA, 19 bp, Homo sapiens
  siRNA target sequence for ATIC (NM_004044.4,409-427).
ggtggagtaaccttactga

SEQ ID NO: 203728 - DNA, 19 bp, Homo sapiens
  siRNA target sequence for ATIC (NM_004044.4,705-723).
gcttcccatcacagttcta

SEQ ID NO: 203729 - DNA, 19 bp, Homo sapiens
  siRNA target sequence for ATIC (NM_004044.4,706-724).
cttcccatcacagttctaa

SEQ ID NO: 203730 - DNA, 19 bp, Homo sapiens
  siRNA target sequence for ATIC (NM_004044.4,730-748).
gcccctggatttataaact

SEQ ID NO: 203731 - DNA, 19 bp, Homo sapiens
  siRNA target sequence for ATIC (NM_004044.4,787-805).
ctcaaggaggctttaggta

SEQ ID NO: 203732 - DNA, 19 bp, Homo sapiens
  siRNA target sequence for ATIC (NM_004044.4,789-807).
caaggaggctttaggtatt

SEQ ID NO: 203733 - DNA, 19 bp, Homo sapiens
  siRNA target sequence for ATIC (NM_004044.4,792-810).
ggaggctttaggtattcca

SEQ ID NO: 203734 - DNA, 19 bp, Homo sapiens
  siRNA target sequence for ATIC (NM_004044.4,813-831).
cgctgcctctttcaaacat

SEQ ID NO: 203735 - DNA, 19 bp, Homo sapiens
  siRNA target sequence for ATIC (NM_004044.4,890-908).
gcatggtttatgatctcta

SEQ ID NO: 203736 - DNA, 19 bp, Homo sapiens
  siRNA target sequence for ATIC (NM_004044.4,891-909).
catggtttatgatctctat

SEQ ID NO: 203737 - DNA, 19 bp, Homo sapiens
  siRNA target sequence for ATIC (NM_004044.4,947-965).
caagaggggctgataggat

SEQ ID NO: 203738 - DNA, 19 bp, Homo sapiens
  siRNA target sequence for ATIC (NM_004044.4,952-970).
ggggctgataggatgtctt

SEQ ID NO: 203739 - DNA, 19 bp, Homo sapiens
  siRNA target sequence for ATIC (NM_004044.4,985-1003).
gttgcattgtccgatgttt

SEQ ID NO: 203740 - DNA, 19 bp, Homo sapiens
  siRNA target sequence for ATIC (NM_004044.4,993-1011).
gtccgatgtttgtgatgta

SEQ ID NO: 203741 - DNA, 19 bp, Homo sapiens
  siRNA target sequence for ATIC (NM_004044.4,1006-1024).
gatgtaccaactgcaaaaa

SEQ ID NO: 203742 - DNA, 19 bp, Homo sapiens
  siRNA target sequence for ATIC (NM_004044.4,1009-1027).
gtaccaactgcaaaaatta

SEQ ID NO: 203743 - DNA, 19 bp, Homo sapiens
  siRNA target sequence for ATIC (NM_004044.4,1036-1054).
gaagtatctgatggtataa

SEQ ID NO: 203744 - DNA, 19 bp, Homo sapiens
  siRNA target sequence for ATIC (NM_004044.4,1075-1093).
gaagccttgacaatacttt

SEQ ID NO: 203745 - DNA, 19 bp, Homo sapiens
  siRNA target sequence for ATIC (NM_004044.4,1128-1146).
gatggaccaatcttacaaa

SEQ ID NO: 203746 - DNA, 19 bp, Homo sapiens
  siRNA target sequence for ATIC (NM_004044.4,1207-1225).
ggtgtcgtcgacaagtcat

SEQ ID NO: 203747 - DNA, 19 bp, Homo sapiens
  siRNA target sequence for ATIC (NM_004044.4,1208-1226).
gtgtcgtcgacaagtcatt

SEQ ID NO: 203748 - DNA, 19 bp, Homo sapiens
  siRNA target sequence for ATIC (NM_004044.4,1210-1228).
gtcgtcgacaagtcattat

SEQ ID NO: 203749 - DNA, 19 bp, Homo sapiens
  siRNA target sequence for ATIC (NM_004044.4,1212-1230).
cgtcgacaagtcattattt

SEQ ID NO: 203750 - DNA, 19 bp, Homo sapiens
  siRNA target sequence for ATIC (NM_004044.4,1216-1234).
gacaagtcattatttagca

SEQ ID NO: 203751 - DNA, 19 bp, Homo sapiens
  siRNA target sequence for ATIC (NM_004044.4,1233-1251).
caatgttgttaccaaaaat

SEQ ID NO: 203752 - DNA, 19 bp, Homo sapiens
  siRNA target sequence for ATIC (NM_004044.4,1337-1355).
ccaagaacgggcaggttat

SEQ ID NO: 203753 - DNA, 19 bp, Homo sapiens
  siRNA target sequence for ATIC (NM_004044.4,1370-1388).
gacagcagtctcgtataca

SEQ ID NO: 203754 - DNA, 19 bp, Homo sapiens
  siRNA target sequence for ATIC (NM_004044.4,1372-1390).
cagcagtctcgtatacact

SEQ ID NO: 203755 - DNA, 19 bp, Homo sapiens
  siRNA target sequence for ATIC (NM_004044.4,1394-1412).
ctcgccttgcaggagataa

SEQ ID NO: 203756 - DNA, 19 bp, Homo sapiens
  siRNA target sequence for ATIC (NM_004044.4,1403-1421).
caggagataaggcaaacta

SEQ ID NO: 203757 - DNA, 19 bp, Homo sapiens
  siRNA target sequence for ATIC (NM_004044.4,1405-1423).
ggagataaggcaaactatt

SEQ ID NO: 203758 - DNA, 19 bp, Homo sapiens
  siRNA target sequence for ATIC (NM_004044.4,1447-1465).
gtgctttcgatgaagttta

SEQ ID NO: 203759 - DNA, 19 bp, Homo sapiens
  siRNA target sequence for ATIC (NM_004044.4,1493-1511).
ccaatgccatcgatcaata

SEQ ID NO: 203760 - DNA, 19 bp, Homo sapiens
  siRNA target sequence for ATIC (NM_004044.4,1498-1516).
gccatcgatcaatatgtga

SEQ ID NO: 203761 - DNA, 19 bp, Homo sapiens
  siRNA target sequence for ATIC (NM_004044.4,1529-1547).
gcgaggatgaagatttgat

SEQ ID NO: 203762 - DNA, 19 bp, Homo sapiens
  siRNA target sequence for ATIC (NM_004044.4,1570-1588).
gaagtccctgagttactca

SEQ ID NO: 203763 - DNA, 19 bp, Homo sapiens
  siRNA target sequence for ATIC (NM_004044.4,1621-1639).
ctgactgaagtttctatca

SEQ ID NO: 203764 - DNA, 19 bp, Homo sapiens
  siRNA target sequence for ATIC (NM_004044.4,1656-1674).
ccctttccgagataacgta

SEQ ID NO: 203765 - DNA, 19 bp, Homo sapiens
  siRNA target sequence for ATIC (NM_004044.4,1689-1707).
gagtggtgtggcgtacatt

SEQ ID NO: 203766 - DNA, 19 bp, Homo sapiens
  siRNA target sequence for ATIC (NM_004044.4,1754-1772).
gcgacgaactgggaatcat

SEQ ID NO: 203767 - DNA, 19 bp, Homo sapiens
  siRNA target sequence for GCH1 (NM_000161.1,324-342).
gcagcgaggaggataacga

SEQ ID NO: 203768 - DNA, 19 bp, Homo sapiens
  siRNA target sequence for GCH1 (NM_000161.1,494-512).
gtcctaaacgatgctatat

SEQ ID NO: 203769 - DNA, 19 bp, Homo sapiens
  siRNA target sequence for GCH1 (NM_000161.1,496-514).
cctaaacgatgctatattt

SEQ ID NO: 203770 - DNA, 19 bp, Homo sapiens
  siRNA target sequence for GCH1 (NM_000161.1,502-520).
cgatgctatatttgatgaa

SEQ ID NO: 203771 - DNA, 19 bp, Homo sapiens
  siRNA target sequence for GCH1 (NM_000161.1,544-562).
gaaggacatagacatgttt

SEQ ID NO: 203772 - DNA, 19 bp, Homo sapiens
  siRNA target sequence for GCH1 (NM_000161.1,564-582).
ccatgtgtgagcatcactt

SEQ ID NO: 203773 - DNA, 19 bp, Homo sapiens
  siRNA target sequence for GCH1 (NM_000161.1,650-668).
cttgcgaggattgtagaaa

SEQ ID NO: 203774 - DNA, 19 bp, Homo sapiens
  siRNA target sequence for GCH1 (NM_000161.1,654-672).
cgaggattgtagaaatcta

SEQ ID NO: 203775 - DNA, 19 bp, Homo sapiens
  siRNA target sequence for GCH1 (NM_000161.1,658-676).
gattgtagaaatctatagt

SEQ ID NO: 203776 - DNA, 19 bp, Homo sapiens
  siRNA target sequence for GCH1 (NM_000161.1,670-688).
ctatagtagaagactacaa

SEQ ID NO: 203777 - DNA, 19 bp, Homo sapiens
  siRNA target sequence for GCH1 (NM_000161.1,695-713).
gagcgccttacaaaacaaa

SEQ ID NO: 203778 - DNA, 19 bp, Homo sapiens
  siRNA target sequence for GCH1 (NM_000161.1,697-715).
gcgccttacaaaacaaatt

SEQ ID NO: 203779 - DNA, 19 bp, Homo sapiens
  siRNA target sequence for GCH1 (NM_000161.1,794-812).
cgaggtgtacagaaaatga

SEQ ID NO: 203780 - DNA, 19 bp, Homo sapiens
  siRNA target sequence for GCH1 (NM_000161.1,797-815).
ggtgtacagaaaatgaaca

SEQ ID NO: 203781 - DNA, 19 bp, Homo sapiens
  siRNA target sequence for GCH1 (NM_000161.1,875-893).
gagttcctgactctcatta

SEQ ID NO: 203782 - DNA, 19 bp, Homo sapiens
  siRNA target sequence for DDAH1 (NM_012137.2,395-413).
ggaggttgacatgatgaaa

SEQ ID NO: 203783 - DNA, 19 bp, Homo sapiens
  siRNA target sequence for DDAH1 (NM_012137.2,479-497).
cggagatgttttattcaca

SEQ ID NO: 203784 - DNA, 19 bp, Homo sapiens
  siRNA target sequence for DDAH1 (NM_012137.2,537-555).
caacgaggtgctgaaatct

SEQ ID NO: 203785 - DNA, 19 bp, Homo sapiens
  siRNA target sequence for DDAH1 (NM_012137.2,549-567).
gaaatcttggctgatactt

SEQ ID NO: 203786 - DNA, 19 bp, Homo sapiens
  siRNA target sequence for DDAH1 (NM_012137.2,597-615).
gtggcagatgggttgcatt

SEQ ID NO: 203787 - DNA, 19 bp, Homo sapiens
  siRNA target sequence for DDAH1 (NM_012137.2,653-671).
cgcaattgggtctagtgaa

SEQ ID NO: 203788 - DNA, 19 bp, Homo sapiens
  siRNA target sequence for DDAH1 (NM_012137.2,654-672).
gcaattgggtctagtgaat

SEQ ID NO: 203789 - DNA, 19 bp, Homo sapiens
  siRNA target sequence for DDAH1 (NM_012137.2,675-693).
gcacagaaggcccttaaga

SEQ ID NO: 203790 - DNA, 19 bp, Homo sapiens
  siRNA target sequence for DDAH1 (NM_012137.2,714-732).
caccgctacgacaaactca

SEQ ID NO: 203791 - DNA, 19 bp, Homo sapiens
  siRNA target sequence for DDAH1 (NM_012137.2,731-749).
cactgtgcctgatgacata

SEQ ID NO: 203792 - DNA, 19 bp, Homo sapiens
  siRNA target sequence for DDAH1 (NM_012137.2,744-762).
gacatagcagcaaactgta

SEQ ID NO: 203793 - DNA, 19 bp, Homo sapiens
  siRNA target sequence for DDAH1 (NM_012137.2,746-764).
catagcagcaaactgtata

SEQ ID NO: 203794 - DNA, 19 bp, Homo sapiens
  siRNA target sequence for DDAH1 (NM_012137.2,751-769).
cagcaaactgtatatatct

SEQ ID NO: 203795 - DNA, 19 bp, Homo sapiens
  siRNA target sequence for DDAH1 (NM_012137.2,753-771).
gcaaactgtatatatctaa

SEQ ID NO: 203796 - DNA, 19 bp, Homo sapiens
  siRNA target sequence for DDAH1 (NM_012137.2,916-934).
gctgctcagttttaattaa

SEQ ID NO: 203797 - DNA, 19 bp, Homo sapiens
  siRNA target sequence for DDAH2 (NM_013974.1,446-464).
ggctacagctgctagaact

SEQ ID NO: 203798 - DNA, 19 bp, Homo sapiens
  siRNA target sequence for DDAH2 (NM_013974.1,608-626).
ggctccgaattgtggaaat

SEQ ID NO: 203799 - DNA, 19 bp, Homo sapiens
  siRNA target sequence for DDAH2 (NM_013974.1,612-630).
ccgaattgtggaaatagga

SEQ ID NO: 203800 - DNA, 19 bp, Homo sapiens
  siRNA target sequence for CRMP1 (NM_001313.2,293-311).
cgatgaccaatccctttat

SEQ ID NO: 203801 - DNA, 19 bp, Homo sapiens
  siRNA target sequence for CRMP1 (NM_001313.2,329-347).
ggatggacttatcaaacaa

SEQ ID NO: 203802 - DNA, 19 bp, Homo sapiens
  siRNA target sequence for CRMP1 (NM_001313.2,407-425).
ggttattcccggaggtatt

SEQ ID NO: 203803 - DNA, 19 bp, Homo sapiens
  siRNA target sequence for CRMP1 (NM_001313.2,466-484).
ctgcggctgatgacttctt

SEQ ID NO: 203804 - DNA, 19 bp, Homo sapiens
  siRNA target sequence for CRMP1 (NM_001313.2,512-530).
cgggaccacgatgatcatt

SEQ ID NO: 203805 - DNA, 19 bp, Homo sapiens
  siRNA target sequence for CRMP1 (NM_001313.2,588-606).
gaagcagctgacaccaaat

SEQ ID NO: 203806 - DNA, 19 bp, Homo sapiens
  siRNA target sequence for CRMP1 (NM_001313.2,684-702).
caggacaaaggcgtcaatt

SEQ ID NO: 203807 - DNA, 19 bp, Homo sapiens
  siRNA target sequence for CRMP1 (NM_001313.2,713-731).
ctacatggcctataaggat

SEQ ID NO: 203808 - DNA, 19 bp, Homo sapiens
  siRNA target sequence for CRMP1 (NM_001313.2,756-774).
ctctatgaagcctttacct

SEQ ID NO: 203809 - DNA, 19 bp, Homo sapiens
  siRNA target sequence for CRMP1 (NM_001313.2,1321-1339).
cggtggctactggcaaaat

SEQ ID NO: 203810 - DNA, 19 bp, Homo sapiens
  siRNA target sequence for CRMP1 (NM_001313.2,1325-1343).
ggctactggcaaaatggat

SEQ ID NO: 203811 - DNA, 19 bp, Homo sapiens
  siRNA target sequence for CRMP1 (NM_001313.2,1450-1468).
gggaccccgacaagttgaa

SEQ ID NO: 203812 - DNA, 19 bp, Homo sapiens
  siRNA target sequence for CRMP1 (NM_001313.2,1458-1476).
gacaagttgaagaccataa

SEQ ID NO: 203813 - DNA, 19 bp, Homo sapiens
  siRNA target sequence for CRMP1 (NM_001313.2,1460-1478).
caagttgaagaccataaca

SEQ ID NO: 203814 - DNA, 19 bp, Homo sapiens
  siRNA target sequence for CRMP1 (NM_001313.2,1471-1489).
ccataacagccaaaagtca

SEQ ID NO: 203815 - DNA, 19 bp, Homo sapiens
  siRNA target sequence for CRMP1 (NM_001313.2,1585-1603).
gaaacatcaacgtcaacaa

SEQ ID NO: 203816 - DNA, 19 bp, Homo sapiens
  siRNA target sequence for CRMP1 (NM_001313.2,1656-1674).
cgcgtcaaaatcaggaata

SEQ ID NO: 203817 - DNA, 19 bp, Homo sapiens
  siRNA target sequence for CRMP1 (NM_001313.2,1694-1712).
ggtttccaggggcatgtat

SEQ ID NO: 203818 - DNA, 19 bp, Homo sapiens
  siRNA target sequence for CRMP1 (NM_001313.2,1737-1755).
gctacacccaaatatgcaa

SEQ ID NO: 203819 - DNA, 19 bp, Homo sapiens
  siRNA target sequence for DPYS (NM_001385.1,167-185).
gcgtggtcaacgatgactt

SEQ ID NO: 203820 - DNA, 19 bp, Homo sapiens
  siRNA target sequence for DPYS (NM_001385.1,539-557).
ggtggagtgaccaggttaa

SEQ ID NO: 203821 - DNA, 19 bp, Homo sapiens
  siRNA target sequence for DPYS (NM_001385.1,540-558).
gtggagtgaccaggttaaa

SEQ ID NO: 203822 - DNA, 19 bp, Homo sapiens
  siRNA target sequence for DPYS (NM_001385.1,542-560).
ggagtgaccaggttaaaga

SEQ ID NO: 203823 - DNA, 19 bp, Homo sapiens
  siRNA target sequence for DPYS (NM_001385.1,573-591).
ccttgtgcaagataaaggt

SEQ ID NO: 203824 - DNA, 19 bp, Homo sapiens
  siRNA target sequence for DPYS (NM_001385.1,589-607).
ggtgttaactctttcaaga

SEQ ID NO: 203825 - DNA, 19 bp, Homo sapiens
  siRNA target sequence for DPYS (NM_001385.1,590-608).
gtgttaactctttcaagat

SEQ ID NO: 203826 - DNA, 19 bp, Homo sapiens
  siRNA target sequence for DPYS (NM_001385.1,609-627).
gtttatggcctataaagat

SEQ ID NO: 203827 - DNA, 19 bp, Homo sapiens
  siRNA target sequence for DPYS (NM_001385.1,617-635).
cctataaagatctgtacat

SEQ ID NO: 203828 - DNA, 19 bp, Homo sapiens
  siRNA target sequence for DPYS (NM_001385.1,666-684).
ctctcggtgcaaggaaatt

SEQ ID NO: 203829 - DNA, 19 bp, Homo sapiens
  siRNA target sequence for DPYS (NM_001385.1,707-725).
cggaaaatggagacttaat

SEQ ID NO: 203830 - DNA, 19 bp, Homo sapiens
  siRNA target sequence for DPYS (NM_001385.1,747-765).
gttggctctggggataaca

SEQ ID NO: 203831 - DNA, 19 bp, Homo sapiens
  siRNA target sequence for DPYS (NM_001385.1,849-867).
gaactgtcctctctacatt

SEQ ID NO: 203832 - DNA, 19 bp, Homo sapiens
  siRNA target sequence for DPYS (NM_001385.1,972-990).
cactcactactggaataaa

SEQ ID NO: 203833 - DNA, 19 bp, Homo sapiens
  siRNA target sequence for DPYS (NM_001385.1,974-992).
ctcactactggaataaaga

SEQ ID NO: 203834 - DNA, 19 bp, Homo sapiens
  siRNA target sequence for DPYS (NM_001385.1,1049-1067).
cacccgacttcctcatgaa

SEQ ID NO: 203835 - DNA, 19 bp, Homo sapiens
  siRNA target sequence for DPYS (NM_001385.1,1091-1109).
ccacaacagggactgataa

SEQ ID NO: 203836 - DNA, 19 bp, Homo sapiens
  siRNA target sequence for DPYS (NM_001385.1,1103-1121).
ctgataactgcactttcaa

SEQ ID NO: 203837 - DNA, 19 bp, Homo sapiens
  siRNA target sequence for DPYS (NM_001385.1,1105-1123).
gataactgcactttcaaca

SEQ ID NO: 203838 - DNA, 19 bp, Homo sapiens
  siRNA target sequence for DPYS (NM_001385.1,1138-1156).
cttgggaaggatgatttta

SEQ ID NO: 203839 - DNA, 19 bp, Homo sapiens
  siRNA target sequence for DPYS (NM_001385.1,1189-1207).
gatcggatgtccgtaatat

SEQ ID NO: 203840 - DNA, 19 bp, Homo sapiens
  siRNA target sequence for DPYS (NM_001385.1,1216-1234).
ggcgtgcatagtggtaaaa

SEQ ID NO: 203841 - DNA, 19 bp, Homo sapiens
  siRNA target sequence for DPYS (NM_001385.1,1221-1239).
gcatagtggtaaaatggat

SEQ ID NO: 203842 - DNA, 19 bp, Homo sapiens
  siRNA target sequence for DPYS (NM_001385.1,1322-1340).
gatcagatgctgacattgt

SEQ ID NO: 203843 - DNA, 19 bp, Homo sapiens
  siRNA target sequence for DPYS (NM_001385.1,1367-1385).
ctatctcagcaaaaactca

SEQ ID NO: 203844 - DNA, 19 bp, Homo sapiens
  siRNA target sequence for DPYS (NM_001385.1,1392-1410).
ggctgttaacttcaacatt

SEQ ID NO: 203845 - DNA, 19 bp, Homo sapiens
  siRNA target sequence for DPYS (NM_001385.1,1434-1452).
ggtgccccttgtgactatt

SEQ ID NO: 203846 - DNA, 19 bp, Homo sapiens
  siRNA target sequence for DPYS (NM_001385.1,1437-1455).
gccccttgtgactatttca

SEQ ID NO: 203847 - DNA, 19 bp, Homo sapiens
  siRNA target sequence for DPYS (NM_001385.1,1438-1456).
ccccttgtgactatttcaa

SEQ ID NO: 203848 - DNA, 19 bp, Homo sapiens
  siRNA target sequence for DPYSL2 (NM_001386.3,312-330).
cgagcgatcgtcttctgat

SEQ ID NO: 203849 - DNA, 19 bp, Homo sapiens
  siRNA target sequence for DPYSL2 (NM_001386.3,315-333).
gcgatcgtcttctgatcaa

SEQ ID NO: 203850 - DNA, 19 bp, Homo sapiens
  siRNA target sequence for DPYSL2 (NM_001386.3,316-334).
cgatcgtcttctgatcaaa

SEQ ID NO: 203851 - DNA, 19 bp, Homo sapiens
  siRNA target sequence for DPYSL2 (NM_001386.3,363-381).
cgttctatgcagacatata

SEQ ID NO: 203852 - DNA, 19 bp, Homo sapiens
  siRNA target sequence for DPYSL2 (NM_001386.3,389-407).
gatgggttgatcaagcaaa

SEQ ID NO: 203853 - DNA, 19 bp, Homo sapiens
  siRNA target sequence for DPYSL2 (NM_001386.3,394-412).
gttgatcaagcaaatagga

SEQ ID NO: 203854 - DNA, 19 bp, Homo sapiens
  siRNA target sequence for DPYSL2 (NM_001386.3,525-543).
cgtctgctgatgatttctt

SEQ ID NO: 203855 - DNA, 19 bp, Homo sapiens
  siRNA target sequence for DPYSL2 (NM_001386.3,566-584).
gctgggggaaccactatga

SEQ ID NO: 203856 - DNA, 19 bp, Homo sapiens
  siRNA target sequence for DPYSL2 (NM_001386.3,569-587).
gggggaaccactatgatca

SEQ ID NO: 203857 - DNA, 19 bp, Homo sapiens
  siRNA target sequence for DPYSL2 (NM_001386.3,570-588).
ggggaaccactatgatcat

SEQ ID NO: 203858 - DNA, 19 bp, Homo sapiens
  siRNA target sequence for DPYSL2 (NM_001386.3,571-589).
gggaaccactatgatcatt

SEQ ID NO: 203859 - DNA, 19 bp, Homo sapiens
  siRNA target sequence for DPYSL2 (NM_001386.3,746-764).
gatcacggggtaaattcct

SEQ ID NO: 203860 - DNA, 19 bp, Homo sapiens
  siRNA target sequence for DPYSL2 (NM_001386.3,772-790).
gtacatggctttcaaagat

SEQ ID NO: 203861 - DNA, 19 bp, Homo sapiens
  siRNA target sequence for DPYSL2 (NM_001386.3,800-818).
ctaacggattgccagattt

SEQ ID NO: 203862 - DNA, 19 bp, Homo sapiens
  siRNA target sequence for DPYSL2 (NM_001386.3,804-822).
cggattgccagatttatga

SEQ ID NO: 203863 - DNA, 19 bp, Homo sapiens
  siRNA target sequence for DPYSL2 (NM_001386.3,805-823).
ggattgccagatttatgaa

SEQ ID NO: 203864 - DNA, 19 bp, Homo sapiens
  siRNA target sequence for DPYSL2 (NM_001386.3,829-847).
gagtgtgatccgggatatt

SEQ ID NO: 203865 - DNA, 19 bp, Homo sapiens
  siRNA target sequence for DPYSL2 (NM_001386.3,1011-1029).
ccaactgcccgctgtatat

SEQ ID NO: 203866 - DNA, 19 bp, Homo sapiens
  siRNA target sequence for DPYSL2 (NM_001386.3,1266-1284).
gtgcccattgcacgtttaa

SEQ ID NO: 203867 - DNA, 19 bp, Homo sapiens
  siRNA target sequence for DPYSL2 (NM_001386.3,1268-1286).
gcccattgcacgtttaaca

SEQ ID NO: 203868 - DNA, 19 bp, Homo sapiens
  siRNA target sequence for DPYSL2 (NM_001386.3,1270-1288).
ccattgcacgtttaacact

SEQ ID NO: 203869 - DNA, 19 bp, Homo sapiens
  siRNA target sequence for DPYSL2 (NM_001386.3,1510-1528).
ggaccccgacagcgttaaa

SEQ ID NO: 203870 - DNA, 19 bp, Homo sapiens
  siRNA target sequence for DPYSL2 (NM_001386.3,1511-1529).
gaccccgacagcgttaaaa

SEQ ID NO: 203871 - DNA, 19 bp, Homo sapiens
  siRNA target sequence for DPYSL2 (NM_001386.3,1514-1532).
cccgacagcgttaaaacca

SEQ ID NO: 203872 - DNA, 19 bp, Homo sapiens
  siRNA target sequence for DPYSL2 (NM_001386.3,1515-1533).
ccgacagcgttaaaaccat

SEQ ID NO: 203873 - DNA, 19 bp, Homo sapiens
  siRNA target sequence for DPYSL2 (NM_001386.3,1557-1575).
ctctcgagtacaacatctt

SEQ ID NO: 203874 - DNA, 19 bp, Homo sapiens
  siRNA target sequence for DPYSL2 (NM_001386.3,1686-1704).
ggaagcccttccctgattt

SEQ ID NO: 203875 - DNA, 19 bp, Homo sapiens
  siRNA target sequence for DPYSL2 (NM_001386.3,1876-1894).
gcaccagtctggattcagt

SEQ ID NO: 203876 - DNA, 19 bp, Homo sapiens
  siRNA target sequence for DPYSL2 (NM_001386.3,1877-1895).
caccagtctggattcagtt

SEQ ID NO: 203877 - DNA, 19 bp, Homo sapiens
  siRNA target sequence for DPYSL3 (NM_001387.1,316-334).
gcatcgatgtccatactca

SEQ ID NO: 203878 - DNA, 19 bp, Homo sapiens
  siRNA target sequence for DPYSL3 (NM_001387.1,462-480).
gaggcctatgagaaatgga

SEQ ID NO: 203879 - DNA, 19 bp, Homo sapiens
  siRNA target sequence for DPYSL3 (NM_001387.1,497-515).
gaagagttgctgtgactat

SEQ ID NO: 203880 - DNA, 19 bp, Homo sapiens
  siRNA target sequence for DPYSL3 (NM_001387.1,614-632).
ggcttataaggatttgtat

SEQ ID NO: 203881 - DNA, 19 bp, Homo sapiens
  siRNA target sequence for DPYSL3 (NM_001387.1,624-642).
gatttgtatcaagtatcta

SEQ ID NO: 203882 - DNA, 19 bp, Homo sapiens
  siRNA target sequence for DPYSL3 (NM_001387.1,629-647).
gtatcaagtatctaacaca

SEQ ID NO: 203883 - DNA, 19 bp, Homo sapiens
  siRNA target sequence for DPYSL3 (NM_001387.1,640-658).
ctaacacagagctctatga

SEQ ID NO: 203884 - DNA, 19 bp, Homo sapiens
  siRNA target sequence for DPYSL3 (NM_001387.1,646-664).
cagagctctatgagatctt

SEQ ID NO: 203885 - DNA, 19 bp, Homo sapiens
  siRNA target sequence for DPYSL3 (NM_001387.1,686-704).
ggccattgctcaagttcat

SEQ ID NO: 203886 - DNA, 19 bp, Homo sapiens
  siRNA target sequence for DPYSL3 (NM_001387.1,735-753).
caaacccgcatgttggaaa

SEQ ID NO: 203887 - DNA, 19 bp, Homo sapiens
  siRNA target sequence for DPYSL3 (NM_001387.1,832-850).
ccattgccagccaaaccaa

SEQ ID NO: 203888 - DNA, 19 bp, Homo sapiens
  siRNA target sequence for DPYSL3 (NM_001387.1,833-851).
cattgccagccaaaccaat

SEQ ID NO: 203889 - DNA, 19 bp, Homo sapiens
  siRNA target sequence for DPYSL3 (NM_001387.1,853-871).
gccctctctacgtcacaaa

SEQ ID NO: 203890 - DNA, 19 bp, Homo sapiens
  siRNA target sequence for DPYSL3 (NM_001387.1,1042-1060).
caactactccggactacat

SEQ ID NO: 203891 - DNA, 19 bp, Homo sapiens
  siRNA target sequence for DPYSL3 (NM_001387.1,1045-1063).
ctactccggactacatcaa

SEQ ID NO: 203892 - DNA, 19 bp, Homo sapiens
  siRNA target sequence for DPYSL3 (NM_001387.1,1296-1314).
ccccgcaagggaagaatat

SEQ ID NO: 203893 - DNA, 19 bp, Homo sapiens
  siRNA target sequence for DPYSL3 (NM_001387.1,1298-1316).
ccgcaagggaagaatatct

SEQ ID NO: 203894 - DNA, 19 bp, Homo sapiens
  siRNA target sequence for DPYSL3 (NM_001387.1,1499-1517).
gggggctggccgcttcata

SEQ ID NO: 203895 - DNA, 19 bp, Homo sapiens
  siRNA target sequence for DPYSL3 (NM_001387.1,1525-1543).
gcccgttctccgactatgt

SEQ ID NO: 203896 - DNA, 19 bp, Homo sapiens
  siRNA target sequence for DPYSL3 (NM_001387.1,1527-1545).
ccgttctccgactatgtct

SEQ ID NO: 203897 - DNA, 19 bp, Homo sapiens
  siRNA target sequence for DPYSL3 (NM_001387.1,1528-1546).
cgttctccgactatgtcta

SEQ ID NO: 203898 - DNA, 19 bp, Homo sapiens
  siRNA target sequence for IGSF2 (NM_004258.1,102-120).
gaaaggaccactgtttaga

SEQ ID NO: 203899 - DNA, 19 bp, Homo sapiens
  siRNA target sequence for IGSF2 (NM_004258.1,138-156).
cagcattggctgcaatgta

SEQ ID NO: 203900 - DNA, 19 bp, Homo sapiens
  siRNA target sequence for IGSF2 (NM_004258.1,258-276).
cttctcttacgcagtatat

SEQ ID NO: 203901 - DNA, 19 bp, Homo sapiens
  siRNA target sequence for IGSF2 (NM_004258.1,599-617).
gccaagccactgagattat

SEQ ID NO: 203902 - DNA, 19 bp, Homo sapiens
  siRNA target sequence for IGSF2 (NM_004258.1,600-618).
ccaagccactgagattatt

SEQ ID NO: 203903 - DNA, 19 bp, Homo sapiens
  siRNA target sequence for IGSF2 (NM_004258.1,601-619).
caagccactgagattattt

SEQ ID NO: 203904 - DNA, 19 bp, Homo sapiens
  siRNA target sequence for IGSF2 (NM_004258.1,643-661).
gtccctgggcccttgtata

SEQ ID NO: 203905 - DNA, 19 bp, Homo sapiens
  siRNA target sequence for IGSF2 (NM_004258.1,647-665).
ctgggcccttgtatacaga

SEQ ID NO: 203906 - DNA, 19 bp, Homo sapiens
  siRNA target sequence for IGSF2 (NM_004258.1,680-698).
gtgacgtacagctcaacaa

SEQ ID NO: 203907 - DNA, 19 bp, Homo sapiens
  siRNA target sequence for IGSF2 (NM_004258.1,767-785).
gtgaggcaacggaatggat

SEQ ID NO: 203908 - DNA, 19 bp, Homo sapiens
  siRNA target sequence for IGSF2 (NM_004258.1,796-814).
gatgaaacttggatgttca

SEQ ID NO: 203909 - DNA, 19 bp, Homo sapiens
  siRNA target sequence for IGSF2 (NM_004258.1,984-1002).
caatgggactgaaattgct

SEQ ID NO: 203910 - DNA, 19 bp, Homo sapiens
  siRNA target sequence for IGSF2 (NM_004258.1,990-1008).
gactgaaattgctcacatt

SEQ ID NO: 203911 - DNA, 19 bp, Homo sapiens
  siRNA target sequence for IGSF2 (NM_004258.1,1303-1321).
gagacactcgcctttctct

SEQ ID NO: 203912 - DNA, 19 bp, Homo sapiens
  siRNA target sequence for IGSF2 (NM_004258.1,1598-1616).
ggactcagaagatttcagt

SEQ ID NO: 203913 - DNA, 19 bp, Homo sapiens
  siRNA target sequence for IGSF2 (NM_004258.1,1632-1650).
ggagtcaagtttacaagtt

SEQ ID NO: 203914 - DNA, 19 bp, Homo sapiens
  siRNA target sequence for IGSF2 (NM_004258.1,1633-1651).
gagtcaagtttacaagtta

SEQ ID NO: 203915 - DNA, 19 bp, Homo sapiens
  siRNA target sequence for IGSF2 (NM_004258.1,1635-1653).
gtcaagtttacaagttagt

SEQ ID NO: 203916 - DNA, 19 bp, Homo sapiens
  siRNA target sequence for IGSF2 (NM_004258.1,1637-1655).
caagtttacaagttagtct

SEQ ID NO: 203917 - DNA, 19 bp, Homo sapiens
  siRNA target sequence for IGSF2 (NM_004258.1,1806-1824).
cacccacaatggcactatt

SEQ ID NO: 203918 - DNA, 19 bp, Homo sapiens
  siRNA target sequence for IGSF2 (NM_004258.1,1840-1858).
ctatcccggttccaaaaga

SEQ ID NO: 203919 - DNA, 19 bp, Homo sapiens
  siRNA target sequence for IGSF2 (NM_004258.1,1862-1880).
cgaaagtgtcgcagtcttt

SEQ ID NO: 203920 - DNA, 19 bp, Homo sapiens
  siRNA target sequence for IGSF2 (NM_004258.1,1863-1881).
gaaagtgtcgcagtcttta

SEQ ID NO: 203921 - DNA, 19 bp, Homo sapiens
  siRNA target sequence for IGSF2 (NM_004258.1,1869-1887).
gtcgcagtctttatttcgt

SEQ ID NO: 203922 - DNA, 19 bp, Homo sapiens
  siRNA target sequence for IGSF2 (NM_004258.1,1961-1979).
gaaattccctatacaacaa

SEQ ID NO: 203923 - DNA, 19 bp, Homo sapiens
  siRNA target sequence for IGSF2 (NM_004258.1,2019-2037).
gatagccgtcactttacca

SEQ ID NO: 203924 - DNA, 19 bp, Homo sapiens
  siRNA target sequence for IGSF2 (NM_004258.1,2088-2106).
caactccaacactgatata

SEQ ID NO: 203925 - DNA, 19 bp, Homo sapiens
  siRNA target sequence for IGSF2 (NM_004258.1,2094-2112).
caacactgatatagaatgt

SEQ ID NO: 203926 - DNA, 19 bp, Homo sapiens
  siRNA target sequence for IGSF2 (NM_004258.1,2124-2142).
ccggtccaatggaaacctt

SEQ ID NO: 203927 - DNA, 19 bp, Homo sapiens
  siRNA target sequence for IGSF2 (NM_004258.1,2205-2223).
ggagatggaccaaaccaat

SEQ ID NO: 203928 - DNA, 19 bp, Homo sapiens
  siRNA target sequence for IGSF2 (NM_004258.1,2208-2226).
gatggaccaaaccaatgtt

SEQ ID NO: 203929 - DNA, 19 bp, Homo sapiens
  siRNA target sequence for IGSF2 (NM_004258.1,2212-2230).
gaccaaaccaatgttataa

SEQ ID NO: 203930 - DNA, 19 bp, Homo sapiens
  siRNA target sequence for IGSF2 (NM_004258.1,2286-2304).
ggtttcccaagacttattt

SEQ ID NO: 203931 - DNA, 19 bp, Homo sapiens
  siRNA target sequence for IGSF2 (NM_004258.1,2331-2349).
cagcgatcggggcaaatat

SEQ ID NO: 203932 - DNA, 19 bp, Homo sapiens
  siRNA target sequence for IGSF2 (NM_004258.1,2333-2351).
gcgatcggggcaaatatca

SEQ ID NO: 203933 - DNA, 19 bp, Homo sapiens
  siRNA target sequence for IGSF2 (NM_004258.1,2335-2353).
gatcggggcaaatatcact

SEQ ID NO: 203934 - DNA, 19 bp, Homo sapiens
  siRNA target sequence for IGSF2 (NM_004258.1,2365-2383).
gaatggctcctgtctacaa

SEQ ID NO: 203935 - DNA, 19 bp, Homo sapiens
  siRNA target sequence for IGSF2 (NM_004258.1,2395-2413).
cacaagcttggagaaaaga

SEQ ID NO: 203936 - DNA, 19 bp, Homo sapiens
  siRNA target sequence for IGSF2 (NM_004258.1,2417-2435).
caggactaacagaattgaa

SEQ ID NO: 203937 - DNA, 19 bp, Homo sapiens
  siRNA target sequence for IGSF2 (NM_004258.1,2458-2476).
gtacgtgtctccaaagtgt

SEQ ID NO: 203938 - DNA, 19 bp, Homo sapiens
  siRNA target sequence for IGSF2 (NM_004258.1,2607-2625).
ggtgcacttgcaacatgat

SEQ ID NO: 203939 - DNA, 19 bp, Homo sapiens
  siRNA target sequence for IGSF2 (NM_004258.1,2657-2675).
ggaggcacctgcactgtta

SEQ ID NO: 203940 - DNA, 19 bp, Homo sapiens
  siRNA target sequence for IGSF2 (NM_004258.1,2725-2743).
gaggatgcaggaatgtact

SEQ ID NO: 203941 - DNA, 19 bp, Homo sapiens
  siRNA target sequence for IGSF2 (NM_004258.1,3034-3052).
ggaggtgtgaccacaaata

SEQ ID NO: 203942 - DNA, 19 bp, Homo sapiens
  siRNA target sequence for IGSF2 (NM_004258.1,3037-3055).
ggtgtgaccacaaatagga

SEQ ID NO: 203943 - DNA, 19 bp, Homo sapiens
  siRNA target sequence for MGC35366 (NM_152435.1,398-416).
cacgaatttgcaatgaagt

SEQ ID NO: 203944 - DNA, 19 bp, Homo sapiens
  siRNA target sequence for MGC35366 (NM_152435.1,422-440).
ggagccacctacatggaaa

SEQ ID NO: 203945 - DNA, 19 bp, Homo sapiens
  siRNA target sequence for MGC35366 (NM_152435.1,565-583).
ggagtgcaagagtggatat

SEQ ID NO: 203946 - DNA, 19 bp, Homo sapiens
  siRNA target sequence for MGC35366 (NM_152435.1,716-734).
gctgatgacatcatcaata

SEQ ID NO: 203947 - DNA, 19 bp, Homo sapiens
  siRNA target sequence for MGC35366 (NM_152435.1,787-805).
caatatagacgtattttgt

SEQ ID NO: 203948 - DNA, 19 bp, Homo sapiens
  siRNA target sequence for MGC35366 (NM_152435.1,826-844).
cgattccaccagaaggatt

SEQ ID NO: 203949 - DNA, 19 bp, Homo sapiens
  siRNA target sequence for MGC35366 (NM_152435.1,1106-1124).
gatttcaaccccaatgcat

SEQ ID NO: 203950 - DNA, 19 bp, Homo sapiens
  siRNA target sequence for MGC35366 (NM_152435.1,1114-1132).
ccccaatgcatattgcttt

SEQ ID NO: 203951 - DNA, 19 bp, Homo sapiens
  siRNA target sequence for MGC35366 (NM_152435.1,1117-1135).
caatgcatattgcttttca

SEQ ID NO: 203952 - DNA, 19 bp, Homo sapiens
  siRNA target sequence for MGC35366 (NM_152435.1,1154-1172).
ctggcctgtgtaaacatga

SEQ ID NO: 203953 - DNA, 19 bp, Homo sapiens
  siRNA target sequence for MGC35366 (NM_152435.1,1157-1175).
gcctgtgtaaacatgagaa

SEQ ID NO: 203954 - DNA, 19 bp, Homo sapiens
  siRNA target sequence for MGC35366 (NM_152435.1,1268-1286).
cagggagatctcattatca

SEQ ID NO: 203955 - DNA, 19 bp, Homo sapiens
  siRNA target sequence for MGC35366 (NM_152435.1,1271-1289).
ggagatctcattatcatca

SEQ ID NO: 203956 - DNA, 19 bp, Homo sapiens
  siRNA target sequence for MGC35366 (NM_152435.1,1293-1311).
catcccgatgggagcattt

SEQ ID NO: 203957 - DNA, 19 bp, Homo sapiens
  siRNA target sequence for MGC35366 (NM_152435.1,1296-1314).
cccgatgggagcatttgat

SEQ ID NO: 203958 - DNA, 19 bp, Homo sapiens
  siRNA target sequence for MGC35366 (NM_152435.1,1297-1315).
ccgatgggagcatttgatt

SEQ ID NO: 203959 - DNA, 19 bp, Homo sapiens
  siRNA target sequence for MGC35366 (NM_152435.1,1298-1316).
cgatgggagcatttgattt

SEQ ID NO: 203960 - DNA, 19 bp, Homo sapiens
  siRNA target sequence for MGC35366 (NM_152435.1,1321-1339).
gttcggaggccatcatgaa

SEQ ID NO: 203961 - DNA, 19 bp, Homo sapiens
  siRNA target sequence for NIT1 (NM_005600.1,143-161).
cctcaactctcagtacttt

SEQ ID NO: 203962 - DNA, 19 bp, Homo sapiens
  siRNA target sequence for NIT1 (NM_005600.1,246-264).
cgccagacaagcaacagaa

SEQ ID NO: 203963 - DNA, 19 bp, Homo sapiens
  siRNA target sequence for NIT1 (NM_005600.1,326-344).
ctgcctgaggcatttgact

SEQ ID NO: 203964 - DNA, 19 bp, Homo sapiens
  siRNA target sequence for NIT1 (NM_005600.1,590-608).
caggggcctatgtgtgaaa

SEQ ID NO: 203965 - DNA, 19 bp, Homo sapiens
  siRNA target sequence for NIT1 (NM_005600.1,652-670).
cacaccagcaggcaagatt

SEQ ID NO: 203966 - DNA, 19 bp, Homo sapiens
  siRNA target sequence for NIT1 (NM_005600.1,674-692).
ctagctgtctgctatgaca

SEQ ID NO: 203967 - DNA, 19 bp, Homo sapiens
  siRNA target sequence for NIT1 (NM_005600.1,737-755).
gagatacttacctatcctt

SEQ ID NO: 203968 - DNA, 19 bp, Homo sapiens
  siRNA target sequence for NIT1 (NM_005600.1,957-975).
cccgaatagacctcaacta

SEQ ID NO: 203969 - DNA, 19 bp, Homo sapiens
  siRNA target sequence for BTD (NM_000060.1,188-206).
ccatcacgaggctgaatat

SEQ ID NO: 203970 - DNA, 19 bp, Homo sapiens
  siRNA target sequence for BTD (NM_000060.1,189-207).
catcacgaggctgaatatt

SEQ ID NO: 203971 - DNA, 19 bp, Homo sapiens
  siRNA target sequence for BTD (NM_000060.1,345-363).
gatgtacagattatagtgt

SEQ ID NO: 203972 - DNA, 19 bp, Homo sapiens
  siRNA target sequence for BTD (NM_000060.1,467-485).
ggagcctcaccgcttcaat

SEQ ID NO: 203973 - DNA, 19 bp, Homo sapiens
  siRNA target sequence for BTD (NM_000060.1,471-489).
cctcaccgcttcaatgaca

SEQ ID NO: 203974 - DNA, 19 bp, Homo sapiens
  siRNA target sequence for BTD (NM_000060.1,498-516).
ctccagcgcctgagttgta

SEQ ID NO: 203975 - DNA, 19 bp, Homo sapiens
  siRNA target sequence for BTD (NM_000060.1,519-537).
gccatcaggggagatatgt

SEQ ID NO: 203976 - DNA, 19 bp, Homo sapiens
  siRNA target sequence for BTD (NM_000060.1,557-575).
gacaaaggagccttgtcat

SEQ ID NO: 203977 - DNA, 19 bp, Homo sapiens
  siRNA target sequence for BTD (NM_000060.1,603-621).
gggagataccagttcaaca

SEQ ID NO: 203978 - DNA, 19 bp, Homo sapiens
  siRNA target sequence for BTD (NM_000060.1,629-647).
cgtgttcagcaataatgga

SEQ ID NO: 203979 - DNA, 19 bp, Homo sapiens
  siRNA target sequence for BTD (NM_000060.1,657-675).
gaccgctaccgtaaacaca

SEQ ID NO: 203980 - DNA, 19 bp, Homo sapiens
  siRNA target sequence for BTD (NM_000060.1,683-701).
ctttgaggcagcattcgat

SEQ ID NO: 203981 - DNA, 19 bp, Homo sapiens
  siRNA target sequence for BTD (NM_000060.1,706-724).
ctcttaaagtggatctcat

SEQ ID NO: 203982 - DNA, 19 bp, Homo sapiens
  siRNA target sequence for BTD (NM_000060.1,863-881).
cccactcttggcagcaatt

SEQ ID NO: 203983 - DNA, 19 bp, Homo sapiens
  siRNA target sequence for BTD (NM_000060.1,865-883).
cactcttggcagcaattga

SEQ ID NO: 203984 - DNA, 19 bp, Homo sapiens
  siRNA target sequence for BTD (NM_000060.1,917-935).
caacgttctggcagctaat

SEQ ID NO: 203985 - DNA, 19 bp, Homo sapiens
  siRNA target sequence for BTD (NM_000060.1,997-1015).
ggtaccatgacatggaaaa

SEQ ID NO: 203986 - DNA, 19 bp, Homo sapiens
  siRNA target sequence for BTD (NM_000060.1,1018-1036).
ccaaaagtcaccttataat

SEQ ID NO: 203987 - DNA, 19 bp, Homo sapiens
  siRNA target sequence for BTD (NM_000060.1,1096-1114).
cggacccatcccatagtaa

SEQ ID NO: 203988 - DNA, 19 bp, Homo sapiens
  siRNA target sequence for BTD (NM_000060.1,1098-1116).
gacccatcccatagtaagt

SEQ ID NO: 203989 - DNA, 19 bp, Homo sapiens
  siRNA target sequence for BTD (NM_000060.1,1100-1118).
cccatcccatagtaagttt

SEQ ID NO: 203990 - DNA, 19 bp, Homo sapiens
  siRNA target sequence for BTD (NM_000060.1,1101-1119).
ccatcccatagtaagtttt

SEQ ID NO: 203991 - DNA, 19 bp, Homo sapiens
  siRNA target sequence for BTD (NM_000060.1,1102-1120).
catcccatagtaagttttt

SEQ ID NO: 203992 - DNA, 19 bp, Homo sapiens
  siRNA target sequence for BTD (NM_000060.1,1222-1240).
ctgagatgatgtatgacaa

SEQ ID NO: 203993 - DNA, 19 bp, Homo sapiens
  siRNA target sequence for BTD (NM_000060.1,1292-1310).
caatggcctctgctgttat

SEQ ID NO: 203994 - DNA, 19 bp, Homo sapiens
  siRNA target sequence for BTD (NM_000060.1,1303-1321).
gctgttatttactttacga

SEQ ID NO: 203995 - DNA, 19 bp, Homo sapiens
  siRNA target sequence for BTD (NM_000060.1,1468-1486).
ccacggggatatttgagtt

SEQ ID NO: 203996 - DNA, 19 bp, Homo sapiens
  siRNA target sequence for BTD (NM_000060.1,1471-1489).
cggggatatttgagtttca

SEQ ID NO: 203997 - DNA, 19 bp, Homo sapiens
  siRNA target sequence for BTD (NM_000060.1,1488-1506).
cacctgtggggcaacttca

SEQ ID NO: 203998 - DNA, 19 bp, Homo sapiens
  siRNA target sequence for BTD (NM_000060.1,1514-1532).
ctatatctttcctttgttt

SEQ ID NO: 203999 - DNA, 19 bp, Homo sapiens
  siRNA target sequence for BTD (NM_000060.1,1540-1558).
cagggatgaccctagaagt

SEQ ID NO: 204000 - DNA, 19 bp, Homo sapiens
  siRNA target sequence for BTD (NM_000060.1,1576-1594).
gggagaatgaccactattt

SEQ ID NO: 204001 - DNA, 19 bp, Homo sapiens
  siRNA target sequence for BTD (NM_000060.1,1589-1607).
ctatttcctgaggaaaagt

SEQ ID NO: 204002 - DNA, 19 bp, Homo sapiens
  siRNA target sequence for NIT2 (NM_020202.2,94-112).
cctcatccagcttcagatt

SEQ ID NO: 204003 - DNA, 19 bp, Homo sapiens
  siRNA target sequence for NIT2 (NM_020202.2,117-135).
ccatcaaatcagataacgt

SEQ ID NO: 204004 - DNA, 19 bp, Homo sapiens
  siRNA target sequence for NIT2 (NM_020202.2,168-186).
caacgcaaggagccaaaat

SEQ ID NO: 204005 - DNA, 19 bp, Homo sapiens
  siRNA target sequence for NIT2 (NM_020202.2,171-189).
cgcaaggagccaaaatagt

SEQ ID NO: 204006 - DNA, 19 bp, Homo sapiens
  siRNA target sequence for NIT2 (NM_020202.2,192-210).
ctttgccggaatgctttaa

SEQ ID NO: 204007 - DNA, 19 bp, Homo sapiens
  siRNA target sequence for NIT2 (NM_020202.2,196-214).
gccggaatgctttaattct

SEQ ID NO: 204008 - DNA, 19 bp, Homo sapiens
  siRNA target sequence for NIT2 (NM_020202.2,205-223).
ctttaattctccatatgga

SEQ ID NO: 204009 - DNA, 19 bp, Homo sapiens
  siRNA target sequence for NIT2 (NM_020202.2,291-309).
caaaggaatgcagcatata

SEQ ID NO: 204010 - DNA, 19 bp, Homo sapiens
  siRNA target sequence for NIT2 (NM_020202.2,384-402).
gaactttactagcaaagta

SEQ ID NO: 204011 - DNA, 19 bp, Homo sapiens
  siRNA target sequence for NIT2 (NM_020202.2,578-596).
ggctgccagctgttggtat

SEQ ID NO: 204012 - DNA, 19 bp, Homo sapiens
  siRNA target sequence for NIT2 (NM_020202.2,579-597).
gctgccagctgttggtata

SEQ ID NO: 204013 - DNA, 19 bp, Homo sapiens
  siRNA target sequence for NIT2 (NM_020202.2,627-645).
cagcccattgggagttact

SEQ ID NO: 204014 - DNA, 19 bp, Homo sapiens
  siRNA target sequence for NIT2 (NM_020202.2,828-846).
ctgaaatacgccagcaaat

SEQ ID NO: 204015 - DNA, 19 bp, Homo sapiens
  siRNA target sequence for VNN1 (NM_004666.1,30-48).
ccagcttacgtggcaattt

SEQ ID NO: 204016 - DNA, 19 bp, Homo sapiens
  siRNA target sequence for VNN1 (NM_004666.1,31-49).
cagcttacgtggcaatttt

SEQ ID NO: 204017 - DNA, 19 bp, Homo sapiens
  siRNA target sequence for VNN1 (NM_004666.1,34-52).
cttacgtggcaattttgct

SEQ ID NO: 204018 - DNA, 19 bp, Homo sapiens
  siRNA target sequence for VNN1 (NM_004666.1,219-237).
gatcagggtgcgcatatta

SEQ ID NO: 204019 - DNA, 19 bp, Homo sapiens
  siRNA target sequence for VNN1 (NM_004666.1,282-300).
gactctctctacccatatt

SEQ ID NO: 204020 - DNA, 19 bp, Homo sapiens
  siRNA target sequence for VNN1 (NM_004666.1,286-304).
ctctctacccatatttgga

SEQ ID NO: 204021 - DNA, 19 bp, Homo sapiens
  siRNA target sequence for VNN1 (NM_004666.1,308-326).
catcccagaccctgaagta

SEQ ID NO: 204022 - DNA, 19 bp, Homo sapiens
  siRNA target sequence for VNN1 (NM_004666.1,329-347).
ctggatcccctgtaataat

SEQ ID NO: 204023 - DNA, 19 bp, Homo sapiens
  siRNA target sequence for VNN1 (NM_004666.1,338-356).
ctgtaataatcgtaacaga

SEQ ID NO: 204024 - DNA, 19 bp, Homo sapiens
  siRNA target sequence for VNN1 (NM_004666.1,340-358).
gtaataatcgtaacagatt

SEQ ID NO: 204025 - DNA, 19 bp, Homo sapiens
  siRNA target sequence for VNN1 (NM_004666.1,365-383).
gaccccagtacaagaaaga

SEQ ID NO: 204026 - DNA, 19 bp, Homo sapiens
  siRNA target sequence for VNN1 (NM_004666.1,539-557).
ctaccataagcaaaacctt

SEQ ID NO: 204027 - DNA, 19 bp, Homo sapiens
  siRNA target sequence for VNN1 (NM_004666.1,563-581).
gggtgaaaatcaattcaat

SEQ ID NO: 204028 - DNA, 19 bp, Homo sapiens
  siRNA target sequence for VNN1 (NM_004666.1,595-613).
ctgagattgtgactttcaa

SEQ ID NO: 204029 - DNA, 19 bp, Homo sapiens
  siRNA target sequence for VNN1 (NM_004666.1,695-713).
ccacgtggacaccatagta

SEQ ID NO: 204030 - DNA, 19 bp, Homo sapiens
  siRNA target sequence for VNN1 (NM_004666.1,696-714).
cacgtggacaccatagtat

SEQ ID NO: 204031 - DNA, 19 bp, Homo sapiens
  siRNA target sequence for VNN1 (NM_004666.1,716-734).
cccaacagcttggatgaat

SEQ ID NO: 204032 - DNA, 19 bp, Homo sapiens
  siRNA target sequence for VNN1 (NM_004666.1,851-869).
ctatgcacccaattcttca

SEQ ID NO: 204033 - DNA, 19 bp, Homo sapiens
  siRNA target sequence for VNN1 (NM_004666.1,967-985).
cctatgccagcagtataga

SEQ ID NO: 204034 - DNA, 19 bp, Homo sapiens
  siRNA target sequence for VNN1 (NM_004666.1,968-986).
ctatgccagcagtatagaa

SEQ ID NO: 204035 - DNA, 19 bp, Homo sapiens
  siRNA target sequence for VNN1 (NM_004666.1,1177-1195).
ctgtggaagggcgctatta

SEQ ID NO: 204036 - DNA, 19 bp, Homo sapiens
  siRNA target sequence for VNN1 (NM_004666.1,1181-1199).
ggaagggcgctattatcta

SEQ ID NO: 204037 - DNA, 19 bp, Homo sapiens
  siRNA target sequence for VNN1 (NM_004666.1,1186-1204).
ggcgctattatctacagat

SEQ ID NO: 204038 - DNA, 19 bp, Homo sapiens
  siRNA target sequence for VNN1 (NM_004666.1,1187-1205).
gcgctattatctacagatt

SEQ ID NO: 204039 - DNA, 19 bp, Homo sapiens
  siRNA target sequence for VNN1 (NM_004666.1,1188-1206).
cgctattatctacagattt

SEQ ID NO: 204040 - DNA, 19 bp, Homo sapiens
  siRNA target sequence for VNN1 (NM_004666.1,1190-1208).
ctattatctacagatttgt

SEQ ID NO: 204041 - DNA, 19 bp, Homo sapiens
  siRNA target sequence for VNN1 (NM_004666.1,1202-1220).
gatttgtaccctgttgaaa

SEQ ID NO: 204042 - DNA, 19 bp, Homo sapiens
  siRNA target sequence for VNN1 (NM_004666.1,1207-1225).
gtaccctgttgaaatgtaa

SEQ ID NO: 204043 - DNA, 19 bp, Homo sapiens
  siRNA target sequence for VNN1 (NM_004666.1,1212-1230).
ctgttgaaatgtaaaacga

SEQ ID NO: 204044 - DNA, 19 bp, Homo sapiens
  siRNA target sequence for VNN1 (NM_004666.1,1222-1240).
gtaaaacgactaatttaaa

SEQ ID NO: 204045 - DNA, 19 bp, Homo sapiens
  siRNA target sequence for VNN1 (NM_004666.1,1247-1265).
cggtgactcagctgaaaca

SEQ ID NO: 204046 - DNA, 19 bp, Homo sapiens
  siRNA target sequence for VNN1 (NM_004666.1,1307-1325).
cggaacccagtatgtcttt

SEQ ID NO: 204047 - DNA, 19 bp, Homo sapiens
  siRNA target sequence for VNN1 (NM_004666.1,1415-1433).
cggacctgtcttaacagta

SEQ ID NO: 204048 - DNA, 19 bp, Homo sapiens
  siRNA target sequence for VNN1 (NM_004666.1,1461-1479).
gactgggcatcaaatgctt

SEQ ID NO: 204049 - DNA, 19 bp, Homo sapiens
  siRNA target sequence for VNN1 (NM_004666.1,1495-1513).
cacaagcaagaataataat

SEQ ID NO: 204050 - DNA, 19 bp, Homo sapiens
  siRNA target sequence for VNN1 (NM_004666.1,1521-1539).
gttatagcacctattgtat

SEQ ID NO: 204051 - DNA, 19 bp, Homo sapiens
  siRNA target sequence for VNN2 (NM_004665.2,14-32).
ggtcacttcctcttttcca

SEQ ID NO: 204052 - DNA, 19 bp, Homo sapiens
  siRNA target sequence for VNN2 (NM_004665.2,41-59).
ggcagtttttgccctaata

SEQ ID NO: 204053 - DNA, 19 bp, Homo sapiens
  siRNA target sequence for VNN2 (NM_004665.2,42-60).
gcagtttttgccctaataa

SEQ ID NO: 204054 - DNA, 19 bp, Homo sapiens
  siRNA target sequence for VNN2 (NM_004665.2,72-90).
ggtactcaggacagtttta

SEQ ID NO: 204055 - DNA, 19 bp, Homo sapiens
  siRNA target sequence for VNN2 (NM_004665.2,101-119).
gtatgaacatgctgtcatt

SEQ ID NO: 204056 - DNA, 19 bp, Homo sapiens
  siRNA target sequence for VNN2 (NM_004665.2,221-239).
gcagggtgctcgaatcatt

SEQ ID NO: 204057 - DNA, 19 bp, Homo sapiens
  siRNA target sequence for VNN2 (NM_004665.2,225-243).
ggtgctcgaatcattgtga

SEQ ID NO: 204058 - DNA, 19 bp, Homo sapiens
  siRNA target sequence for VNN2 (NM_004665.2,256-274).
cactttatggatggaaatt

SEQ ID NO: 204059 - DNA, 19 bp, Homo sapiens
  siRNA target sequence for VNN2 (NM_004665.2,340-358).
gtcaagacccccacagatt

SEQ ID NO: 204060 - DNA, 19 bp, Homo sapiens
  siRNA target sequence for VNN2 (NM_004665.2,461-479).
ctccacatgtcctcctaat

SEQ ID NO: 204061 - DNA, 19 bp, Homo sapiens
  siRNA target sequence for VNN2 (NM_004665.2,475-493).
ctaatggctactttcaata

SEQ ID NO: 204062 - DNA, 19 bp, Homo sapiens
  siRNA target sequence for VNN2 (NM_004665.2,480-498).
ggctactttcaatacaata

SEQ ID NO: 204063 - DNA, 19 bp, Homo sapiens
  siRNA target sequence for VNN2 (NM_004665.2,500-518).
caatgtggtgtataataca

SEQ ID NO: 204064 - DNA, 19 bp, Homo sapiens
  siRNA target sequence for VNN2 (NM_004665.2,592-610).
cggagttggtgactttcaa

SEQ ID NO: 204065 - DNA, 19 bp, Homo sapiens
  siRNA target sequence for VNN2 (NM_004665.2,594-612).
gagttggtgactttcaaca

SEQ ID NO: 204066 - DNA, 19 bp, Homo sapiens
  siRNA target sequence for VNN2 (NM_004665.2,611-629).
caccgcatttggaaggttt

SEQ ID NO: 204067 - DNA, 19 bp, Homo sapiens
  siRNA target sequence for VNN2 (NM_004665.2,693-711).
catgtggacaccatactgt

SEQ ID NO: 204068 - DNA, 19 bp, Homo sapiens
  siRNA target sequence for VNN2 (NM_004665.2,731-749).
cgttttgccccttttgaca

SEQ ID NO: 204069 - DNA, 19 bp, Homo sapiens
  siRNA target sequence for VNN2 (NM_004665.2,737-755).
gccccttttgacagctatt

SEQ ID NO: 204070 - DNA, 19 bp, Homo sapiens
  siRNA target sequence for VNN2 (NM_004665.2,739-757).
cccttttgacagctattga

SEQ ID NO: 204071 - DNA, 19 bp, Homo sapiens
  siRNA target sequence for VNN2 (NM_004665.2,746-764).
gacagctattgaattccat

SEQ ID NO: 204072 - DNA, 19 bp, Homo sapiens
  siRNA target sequence for VNN2 (NM_004665.2,775-793).
caatgggaatgggagttaa

SEQ ID NO: 204073 - DNA, 19 bp, Homo sapiens
  siRNA target sequence for VNN2 (NM_004665.2,865-883).
ccaaagtgtatcattatga

SEQ ID NO: 204074 - DNA, 19 bp, Homo sapiens
  siRNA target sequence for VNN2 (NM_004665.2,949-967).
cctacccaacagctgttaa

SEQ ID NO: 204075 - DNA, 19 bp, Homo sapiens
  siRNA target sequence for VNN2 (NM_004665.2,950-968).
ctacccaacagctgttaat

SEQ ID NO: 204076 - DNA, 19 bp, Homo sapiens
  siRNA target sequence for VNN2 (NM_004665.2,986-1004).
caccatcaaaccatttcca

SEQ ID NO: 204077 - DNA, 19 bp, Homo sapiens
  siRNA target sequence for VNN2 (NM_004665.2,1100-1118).
ggagctttgctgtcattta

SEQ ID NO: 204078 - DNA, 19 bp, Homo sapiens
  siRNA target sequence for VNN2 (NM_004665.2,1157-1175).
cgttctaggagcttttaca

SEQ ID NO: 204079 - DNA, 19 bp, Homo sapiens
  siRNA target sequence for VNN2 (NM_004665.2,1232-1250).
caaaactactaatttgaca

SEQ ID NO: 204080 - DNA, 19 bp, Homo sapiens
  siRNA target sequence for VNN2 (NM_004665.2,1392-1410).
gatgggcgtttggtaaaca

SEQ ID NO: 204081 - DNA, 19 bp, Homo sapiens
  siRNA target sequence for VNN2 (NM_004665.2,1395-1413).
gggcgtttggtaaacaaga

SEQ ID NO: 204082 - DNA, 19 bp, Homo sapiens
  siRNA target sequence for VNN2 (NM_004665.2,1396-1414).
ggcgtttggtaaacaagaa

SEQ ID NO: 204083 - DNA, 19 bp, Homo sapiens
  siRNA target sequence for VNN2 (NM_004665.2,1417-1435).
gatcatctgggcctatact

SEQ ID NO: 204084 - DNA, 19 bp, Homo sapiens
  siRNA target sequence for VNN2 (NM_004665.2,1423-1441).
ctgggcctatactaacagt

SEQ ID NO: 204085 - DNA, 19 bp, Homo sapiens
  siRNA target sequence for VNN2 (NM_004665.2,1498-1516).
gcaattcagcaataactta

SEQ ID NO: 204086 - DNA, 19 bp, Homo sapiens
  siRNA target sequence for VNN2 (NM_004665.2,1517-1535).
cctgctaatattcatatta

SEQ ID NO: 204087 - DNA, 19 bp, Homo sapiens
  siRNA target sequence for VNN2 (NM_004665.2,1541-1559).
gatcatagctttgcaaaat

SEQ ID NO: 204088 - DNA, 19 bp, Homo sapiens
  siRNA target sequence for VNN2 (NM_004665.2,1544-1562).
catagctttgcaaaatatt

SEQ ID NO: 204089 - DNA, 19 bp, Homo sapiens
  siRNA target sequence for ABHD6 (NM_020676.3,117-135).
gatcttgatgtggttaaca

SEQ ID NO: 204090 - DNA, 19 bp, Homo sapiens
  siRNA target sequence for ABHD6 (NM_020676.3,120-138).
cttgatgtggttaacatgt

SEQ ID NO: 204091 - DNA, 19 bp, Homo sapiens
  siRNA target sequence for ABHD6 (NM_020676.3,126-144).
gtggttaacatgtttgtga

SEQ ID NO: 204092 - DNA, 19 bp, Homo sapiens
  siRNA target sequence for ABHD6 (NM_020676.3,200-218).
gtggccttcagcactgata

SEQ ID NO: 204093 - DNA, 19 bp, Homo sapiens
  siRNA target sequence for ABHD6 (NM_020676.3,254-272).
catgcaagtccgctatgtt

SEQ ID NO: 204094 - DNA, 19 bp, Homo sapiens
  siRNA target sequence for ABHD6 (NM_020676.3,265-283).
gctatgttcaccatgaaga

SEQ ID NO: 204095 - DNA, 19 bp, Homo sapiens
  siRNA target sequence for ABHD6 (NM_020676.3,282-300).
gactatcagttctgttatt

SEQ ID NO: 204096 - DNA, 19 bp, Homo sapiens
  siRNA target sequence for ABHD6 (NM_020676.3,338-356).
catgctccacggattctct

SEQ ID NO: 204097 - DNA, 19 bp, Homo sapiens
  siRNA target sequence for ABHD6 (NM_020676.3,461-479).
ggatgacctgtccatagat

SEQ ID NO: 204098 - DNA, 19 bp, Homo sapiens
  siRNA target sequence for ABHD6 (NM_020676.3,472-490).
ccatagatgggcaagttaa

SEQ ID NO: 204099 - DNA, 19 bp, Homo sapiens
  siRNA target sequence for ABHD6 (NM_020676.3,491-509).
gaggatacaccagtttgta

SEQ ID NO: 204100 - DNA, 19 bp, Homo sapiens
  siRNA target sequence for ABHD6 (NM_020676.3,494-512).
gatacaccagtttgtagaa

SEQ ID NO: 204101 - DNA, 19 bp, Homo sapiens
  siRNA target sequence for ABHD6 (NM_020676.3,577-595).
gggtgtatgctgcttacta

SEQ ID NO: 204102 - DNA, 19 bp, Homo sapiens
  siRNA target sequence for ABHD6 (NM_020676.3,633-651).
gctggcctgcagtactcaa

SEQ ID NO: 204103 - DNA, 19 bp, Homo sapiens
  siRNA target sequence for ABHD6 (NM_020676.3,641-659).
gcagtactcaactgacaat

SEQ ID NO: 204104 - DNA, 19 bp, Homo sapiens
  siRNA target sequence for ABHD6 (NM_020676.3,647-665).
ctcaactgacaatcaattt

SEQ ID NO: 204105 - DNA, 19 bp, Homo sapiens
  siRNA target sequence for ABHD6 (NM_020676.3,724-742).
cgtctaccccagaagagat

SEQ ID NO: 204106 - DNA, 19 bp, Homo sapiens
  siRNA target sequence for ABHD6 (NM_020676.3,816-834).
gtccgcatccctcataaca

SEQ ID NO: 204107 - DNA, 19 bp, Homo sapiens
  siRNA target sequence for ABHD6 (NM_020676.3,915-933).
gttccgacgcagatcatct

SEQ ID NO: 204108 - DNA, 19 bp, Homo sapiens
  siRNA target sequence for ABHD6 (NM_020676.3,926-944).
gatcatctgggggaaacaa

SEQ ID NO: 204109 - DNA, 19 bp, Homo sapiens
  siRNA target sequence for ABHD6 (NM_020676.3,1029-1047).
cactcagtagtgatggaaa

SEQ ID NO: 204110 - DNA, 19 bp, Homo sapiens
  siRNA target sequence for ABHD6 (NM_020676.3,1060-1078).
cagccaagctcataatcga

SEQ ID NO: 204111 - DNA, 19 bp, Homo sapiens
  siRNA target sequence for ABHD6 (NM_020676.3,1067-1085).
gctcataatcgacttttta

SEQ ID NO: 204112 - DNA, 19 bp, Homo sapiens
  siRNA target sequence for ABHD7 (NM_173567.2,177-195).
ccatccacctgctcaaact

SEQ ID NO: 204113 - DNA, 19 bp, Homo sapiens
  siRNA target sequence for ABHD7 (NM_173567.2,178-196).
catccacctgctcaaactt

SEQ ID NO: 204114 - DNA, 19 bp, Homo sapiens
  siRNA target sequence for ABHD7 (NM_173567.2,307-325).
caaggattcagggttaaga

SEQ ID NO: 204115 - DNA, 19 bp, Homo sapiens
  siRNA target sequence for ABHD7 (NM_173567.2,397-415).
gtattcttggcgttaccaa

SEQ ID NO: 204116 - DNA, 19 bp, Homo sapiens
  siRNA target sequence for ABHD7 (NM_173567.2,408-426).
gttaccaactgagagaatt

SEQ ID NO: 204117 - DNA, 19 bp, Homo sapiens
  siRNA target sequence for ABHD7 (NM_173567.2,485-503).
cccattcatcgacagaatt

SEQ ID NO: 204118 - DNA, 19 bp, Homo sapiens
  siRNA target sequence for ABHD7 (NM_173567.2,486-504).
ccattcatcgacagaatta

SEQ ID NO: 204119 - DNA, 19 bp, Homo sapiens
  siRNA target sequence for ABHD7 (NM_173567.2,491-509).
catcgacagaattataaat

SEQ ID NO: 204120 - DNA, 19 bp, Homo sapiens
  siRNA target sequence for ABHD7 (NM_173567.2,495-513).
gacagaattataaattgga

SEQ ID NO: 204121 - DNA, 19 bp, Homo sapiens
  siRNA target sequence for ABHD7 (NM_173567.2,545-563).
gattctttagggtatagca

SEQ ID NO: 204122 - DNA, 19 bp, Homo sapiens
  siRNA target sequence for ABHD7 (NM_173567.2,595-613).
catgattgcttggctaatt

SEQ ID NO: 204123 - DNA, 19 bp, Homo sapiens
  siRNA target sequence for ABHD7 (NM_173567.2,606-624).
ggctaattgccatctgtta

SEQ ID NO: 204124 - DNA, 19 bp, Homo sapiens
  siRNA target sequence for ABHD7 (NM_173567.2,629-647).
gaaatggtgatgaagctta

SEQ ID NO: 204125 - DNA, 19 bp, Homo sapiens
  siRNA target sequence for ABHD7 (NM_173567.2,634-652).
ggtgatgaagcttattgtt

SEQ ID NO: 204126 - DNA, 19 bp, Homo sapiens
  siRNA target sequence for ABHD7 (NM_173567.2,700-718).
ccctgctcagctgttgaaa

SEQ ID NO: 204127 - DNA, 19 bp, Homo sapiens
  siRNA target sequence for ABHD7 (NM_173567.2,712-730).
gttgaaatccagttattat

SEQ ID NO: 204128 - DNA, 19 bp, Homo sapiens
  siRNA target sequence for ABHD7 (NM_173567.2,747-765).
catggttcccagaatttat

SEQ ID NO: 204129 - DNA, 19 bp, Homo sapiens
  siRNA target sequence for ABHD7 (NM_173567.2,852-870).
cagaggatcttgaagctta

SEQ ID NO: 204130 - DNA, 19 bp, Homo sapiens
  siRNA target sequence for ABHD7 (NM_173567.2,896-914).
gcattaagtggcccaatta

SEQ ID NO: 204131 - DNA, 19 bp, Homo sapiens
  siRNA target sequence for ABHD7 (NM_173567.2,917-935).
cattaccgaaatatcttca

SEQ ID NO: 204132 - DNA, 19 bp, Homo sapiens
  siRNA target sequence for ABHD7 (NM_173567.2,936-954).
gctgcctgcctctcaaaca

SEQ ID NO: 204133 - DNA, 19 bp, Homo sapiens
  siRNA target sequence for ABHD7 (NM_173567.2,961-979).
ggtgaccactccaacacta

SEQ ID NO: 204134 - DNA, 19 bp, Homo sapiens
  siRNA target sequence for ABHD7 (NM_173567.2,964-982).
gaccactccaacactacta

SEQ ID NO: 204135 - DNA, 19 bp, Homo sapiens
  siRNA target sequence for ABHD7 (NM_173567.2,966-984).
ccactccaacactactact

SEQ ID NO: 204136 - DNA, 19 bp, Homo sapiens
  siRNA target sequence for ABHD7 (NM_173567.2,990-1008).
gagagaatgacgcattcat

SEQ ID NO: 204137 - DNA, 19 bp, Homo sapiens
  siRNA target sequence for ABHD7 (NM_173567.2,1002-1020).
cattcatggaggttgagat

SEQ ID NO: 204138 - DNA, 19 bp, Homo sapiens
  siRNA target sequence for ABHD7 (NM_173567.2,1057-1075).
caggctaactattttgtca

SEQ ID NO: 204139 - DNA, 19 bp, Homo sapiens
  siRNA target sequence for ABHD7 (NM_173567.2,1106-1124).
cctgacatagtgaacaaat

SEQ ID NO: 204140 - DNA, 19 bp, Homo sapiens
  siRNA target sequence for ABHD8 (NM_024527.2,203-221).
gggtgaccgacggtatctt

SEQ ID NO: 204141 - DNA, 19 bp, Homo sapiens
  siRNA target sequence for ABHD8 (NM_024527.2,205-223).
gtgaccgacggtatcttct

SEQ ID NO: 204142 - DNA, 19 bp, Homo sapiens
  siRNA target sequence for ABHD8 (NM_024527.2,282-300).
cgatggctacacctttgta

SEQ ID NO: 204143 - DNA, 19 bp, Homo sapiens
  siRNA target sequence for ABHD8 (NM_024527.2,652-670).
cccaagaggaccatccata

SEQ ID NO: 204144 - DNA, 19 bp, Homo sapiens
  siRNA target sequence for ABHD8 (NM_024527.2,713-731).
ccgacgtggtgctcttttt

SEQ ID NO: 204145 - DNA, 19 bp, Homo sapiens
  siRNA target sequence for ABHD8 (NM_024527.2,858-876).
cgcagcctacaccttctat

SEQ ID NO: 204146 - DNA, 19 bp, Homo sapiens
  siRNA target sequence for ABHD8 (NM_024527.2,1000-1018).
cacaaggtgatcatgatca

SEQ ID NO: 204147 - DNA, 19 bp, Homo sapiens
  siRNA target sequence for ABHD8 (NM_024527.2,1002-1020).
caaggtgatcatgatcaat

SEQ ID NO: 204148 - DNA, 19 bp, Homo sapiens
  siRNA target sequence for ABHD8 (NM_024527.2,1288-1306).
cacggcatgcacgataagt

SEQ ID NO: 204149 - DNA, 19 bp, Homo sapiens
  siRNA target sequence for ABHD8 (NM_024527.2,1290-1308).
cggcatgcacgataagttt

SEQ ID NO: 204150 - DNA, 19 bp, Homo sapiens
  siRNA target sequence for ABHD9 (NM_024794.1,462-480).
ctgcgtctgcactatgtct

SEQ ID NO: 204151 - DNA, 19 bp, Homo sapiens
  siRNA target sequence for ABHD9 (NM_024794.1,499-517).
gacccctcatgctgtttct

SEQ ID NO: 204152 - DNA, 19 bp, Homo sapiens
  siRNA target sequence for ABHD9 (NM_024794.1,662-680).
gctggtggacatcaaagat

SEQ ID NO: 204153 - DNA, 19 bp, Homo sapiens
  siRNA target sequence for ABHD9 (NM_024794.1,812-830).
gtcggtgtaccaagactat

SEQ ID NO: 204154 - DNA, 19 bp, Homo sapiens
  siRNA target sequence for ABHD9 (NM_024794.1,1207-1225).
caggcatagggcattggat

SEQ ID NO: 204155 - DNA, 19 bp, Homo sapiens
  siRNA target sequence for ABHD9 (NM_024794.1,1245-1263).
gagatgcaccagtacatgt

SEQ ID NO: 204156 - DNA, 19 bp, Homo sapiens
  siRNA target sequence for EPHX1 (NM_000120.2,336-354).
cgggacaaagaggaaactt

SEQ ID NO: 204157 - DNA, 19 bp, Homo sapiens
  siRNA target sequence for EPHX1 (NM_000120.2,465-483).
caccagaggatcgataagt

SEQ ID NO: 204158 - DNA, 19 bp, Homo sapiens
  siRNA target sequence for EPHX1 (NM_000120.2,557-575).
ctcctactggcggaatgaa

SEQ ID NO: 204159 - DNA, 19 bp, Homo sapiens
  siRNA target sequence for EPHX1 (NM_000120.2,559-577).
cctactggcggaatgaatt

SEQ ID NO: 204160 - DNA, 19 bp, Homo sapiens
  siRNA target sequence for EPHX1 (NM_000120.2,560-578).
ctactggcggaatgaattt

SEQ ID NO: 204161 - DNA, 19 bp, Homo sapiens
  siRNA target sequence for EPHX1 (NM_000120.2,615-633).
cctcacttcaagactaaga

SEQ ID NO: 204162 - DNA, 19 bp, Homo sapiens
  siRNA target sequence for EPHX1 (NM_000120.2,729-747).
ggctctttctacgagtttt

SEQ ID NO: 204163 - DNA, 19 bp, Homo sapiens
  siRNA target sequence for EPHX1 (NM_000120.2,730-748).
gctctttctacgagtttta

SEQ ID NO: 204164 - DNA, 19 bp, Homo sapiens
  siRNA target sequence for EPHX1 (NM_000120.2,731-749).
ctctttctacgagttttat

SEQ ID NO: 204165 - DNA, 19 bp, Homo sapiens
  siRNA target sequence for EPHX1 (NM_000120.2,733-751).
ctttctacgagttttataa

SEQ ID NO: 204166 - DNA, 19 bp, Homo sapiens
  siRNA target sequence for EPHX1 (NM_000120.2,791-809).
gagcgatgagcacgttttt

SEQ ID NO: 204167 - DNA, 19 bp, Homo sapiens
  siRNA target sequence for EPHX1 (NM_000120.2,793-811).
gcgatgagcacgtttttga

SEQ ID NO: 204168 - DNA, 19 bp, Homo sapiens
  siRNA target sequence for EPHX1 (NM_000120.2,794-812).
cgatgagcacgtttttgaa

SEQ ID NO: 204169 - DNA, 19 bp, Homo sapiens
  siRNA target sequence for EPHX1 (NM_000120.2,883-901).
ccaccgccaggatctttta

SEQ ID NO: 204170 - DNA, 19 bp, Homo sapiens
  siRNA target sequence for EPHX1 (NM_000120.2,921-939).
ggcttccaggaattctaca

SEQ ID NO: 204171 - DNA, 19 bp, Homo sapiens
  siRNA target sequence for EPHX1 (NM_000120.2,922-940).
gcttccaggaattctacat

SEQ ID NO: 204172 - DNA, 19 bp, Homo sapiens
  siRNA target sequence for EPHX1 (NM_000120.2,1032-1050).
gttttaagcaacttctcta

SEQ ID NO: 204173 - DNA, 19 bp, Homo sapiens
  siRNA target sequence for EPHX1 (NM_000120.2,1073-1091).
gcgtttcgggaggtttctt

SEQ ID NO: 204174 - DNA, 19 bp, Homo sapiens
  siRNA target sequence for EPHX1 (NM_000120.2,1125-1143).
cccgtcaaggagaaggtat

SEQ ID NO: 204175 - DNA, 19 bp, Homo sapiens
  siRNA target sequence for EPHX1 (NM_000120.2,1202-1220).
cgtaggctctgctctgaat

SEQ ID NO: 204176 - DNA, 19 bp, Homo sapiens
  siRNA target sequence for EPHX1 (NM_000120.2,1232-1250).
gggtctggctgcctatatt

SEQ ID NO: 204177 - DNA, 19 bp, Homo sapiens
  siRNA target sequence for EPHX1 (NM_000120.2,1234-1252).
gtctggctgcctatattct

SEQ ID NO: 204178 - DNA, 19 bp, Homo sapiens
  siRNA target sequence for EPHX1 (NM_000120.2,1240-1258).
ctgcctatattctagagaa

SEQ ID NO: 204179 - DNA, 19 bp, Homo sapiens
  siRNA target sequence for EPHX1 (NM_000120.2,1244-1262).
ctatattctagagaagttt

SEQ ID NO: 204180 - DNA, 19 bp, Homo sapiens
  siRNA target sequence for EPHX2 (NM_001979.3,169-187).
gacttctgaatgatgcttt

SEQ ID NO: 204181 - DNA, 19 bp, Homo sapiens
  siRNA target sequence for EPHX2 (NM_001979.3,210-228).
gccactacccggcttatga

SEQ ID NO: 204182 - DNA, 19 bp, Homo sapiens
  siRNA target sequence for EPHX2 (NM_001979.3,211-229).
ccactacccggcttatgaa

SEQ ID NO: 204183 - DNA, 19 bp, Homo sapiens
  siRNA target sequence for EPHX2 (NM_001979.3,212-230).
cactacccggcttatgaaa

SEQ ID NO: 204184 - DNA, 19 bp, Homo sapiens
  siRNA target sequence for EPHX2 (NM_001979.3,258-276).
ccactcatggaagaaaact

SEQ ID NO: 204185 - DNA, 19 bp, Homo sapiens
  siRNA target sequence for EPHX2 (NM_001979.3,286-304).
gctccgagaccgctaaagt

SEQ ID NO: 204186 - DNA, 19 bp, Homo sapiens
  siRNA target sequence for EPHX2 (NM_001979.3,348-366).
gcgatttcagccagaaaga

SEQ ID NO: 204187 - DNA, 19 bp, Homo sapiens
  siRNA target sequence for EPHX2 (NM_001979.3,349-367).
cgatttcagccagaaagat

SEQ ID NO: 204188 - DNA, 19 bp, Homo sapiens
  siRNA target sequence for EPHX2 (NM_001979.3,549-567).
gaacctcagatctacaagt

SEQ ID NO: 204189 - DNA, 19 bp, Homo sapiens
  siRNA target sequence for EPHX2 (NM_001979.3,593-611).
ccccagtgaggtcgttttt

SEQ ID NO: 204190 - DNA, 19 bp, Homo sapiens
  siRNA target sequence for EPHX2 (NM_001979.3,594-612).
cccagtgaggtcgtttttt

SEQ ID NO: 204191 - DNA, 19 bp, Homo sapiens
  siRNA target sequence for EPHX2 (NM_001979.3,618-636).
gacatcggggctaatctga

SEQ ID NO: 204192 - DNA, 19 bp, Homo sapiens
  siRNA target sequence for EPHX2 (NM_001979.3,682-700).
ctgacacggccctgaaaga

SEQ ID NO: 204193 - DNA, 19 bp, Homo sapiens
  siRNA target sequence for EPHX2 (NM_001979.3,750-768).
ccgacctcttgcaatccaa

SEQ ID NO: 204194 - DNA, 19 bp, Homo sapiens
  siRNA target sequence for EPHX2 (NM_001979.3,780-798).
catgggtacgtgacagtaa

SEQ ID NO: 204195 - DNA, 19 bp, Homo sapiens
  siRNA target sequence for EPHX2 (NM_001979.3,803-821).
cagggtccgtctgcatttt

SEQ ID NO: 204196 - DNA, 19 bp, Homo sapiens
  siRNA target sequence for EPHX2 (NM_001979.3,805-823).
gggtccgtctgcattttgt

SEQ ID NO: 204197 - DNA, 19 bp, Homo sapiens
  siRNA target sequence for EPHX2 (NM_001979.3,919-937).
gttaccgggtcctagctat

SEQ ID NO: 204198 - DNA, 19 bp, Homo sapiens
  siRNA target sequence for EPHX2 (NM_001979.3,929-947).
cctagctatggacatgaaa

SEQ ID NO: 204199 - DNA, 19 bp, Homo sapiens
  siRNA target sequence for EPHX2 (NM_001979.3,964-982).
ctgctcctcccgaaataga

SEQ ID NO: 204200 - DNA, 19 bp, Homo sapiens
  siRNA target sequence for EPHX2 (NM_001979.3,967-985).
ctcctcccgaaatagaaga

SEQ ID NO: 204201 - DNA, 19 bp, Homo sapiens
  siRNA target sequence for EPHX2 (NM_001979.3,969-987).
cctcccgaaatagaagaat

SEQ ID NO: 204202 - DNA, 19 bp, Homo sapiens
  siRNA target sequence for EPHX2 (NM_001979.3,991-1009).
gcatggaagtgttatgtaa

SEQ ID NO: 204203 - DNA, 19 bp, Homo sapiens
  siRNA target sequence for EPHX2 (NM_001979.3,1090-1108).
ggtacatggctctcttcta

SEQ ID NO: 204204 - DNA, 19 bp, Homo sapiens
  siRNA target sequence for EPHX2 (NM_001979.3,1124-1142).
ggcggtggccagtttgaat

SEQ ID NO: 204205 - DNA, 19 bp, Homo sapiens
  siRNA target sequence for EPHX2 (NM_001979.3,1125-1143).
gcggtggccagtttgaata

SEQ ID NO: 204206 - DNA, 19 bp, Homo sapiens
  siRNA target sequence for EPHX2 (NM_001979.3,1127-1145).
ggtggccagtttgaatact

SEQ ID NO: 204207 - DNA, 19 bp, Homo sapiens
  siRNA target sequence for EPHX2 (NM_001979.3,1175-1193).
ccctttggagagtatcaaa

SEQ ID NO: 204208 - DNA, 19 bp, Homo sapiens
  siRNA target sequence for EPHX2 (NM_001979.3,1195-1213).
ccaacccagtatttgatta

SEQ ID NO: 204209 - DNA, 19 bp, Homo sapiens
  siRNA target sequence for EPHX2 (NM_001979.3,1296-1314).
gcaagcgatgagagtgttt

SEQ ID NO: 204210 - DNA, 19 bp, Homo sapiens
  siRNA target sequence for EPHX2 (NM_001979.3,1297-1315).
caagcgatgagagtgtttt

SEQ ID NO: 204211 - DNA, 19 bp, Homo sapiens
  siRNA target sequence for EPHX2 (NM_001979.3,1309-1327).
gtgttttatccatgcataa

SEQ ID NO: 204212 - DNA, 19 bp, Homo sapiens
  siRNA target sequence for EPHX2 (NM_001979.3,1427-1445).
caagaagtctggtttcaga

SEQ ID NO: 204213 - DNA, 19 bp, Homo sapiens
  siRNA target sequence for EPHX2 (NM_001979.3,1481-1499).
ctggaagtgggcttgcaaa

SEQ ID NO: 204214 - DNA, 19 bp, Homo sapiens
  siRNA target sequence for EPHX2 (NM_001979.3,1656-1674).
ccaaccgaggtgaatcaga

SEQ ID NO: 204215 - DNA, 19 bp, Homo sapiens
  siRNA target sequence for EPHX2 (NM_001979.3,1710-1728).
ccaccggtggtctcaaaga

SEQ ID NO: 204216 - DNA, 19 bp, Homo sapiens
  siRNA target sequence for EPHX2 (NM_001979.3,1713-1731).
ccggtggtctcaaagatgt

SEQ ID NO: 204217 - DNA, 19 bp, Homo sapiens
  siRNA target sequence for MEST (NM_002402.2,417-435).
gaagtccagagatagttgt

SEQ ID NO: 204218 - DNA, 19 bp, Homo sapiens
  siRNA target sequence for MEST (NM_002402.2,423-441).
cagagatagttgtgctttt

SEQ ID NO: 204219 - DNA, 19 bp, Homo sapiens
  siRNA target sequence for MEST (NM_002402.2,436-454).
gcttttacacggttttcca

SEQ ID NO: 204220 - DNA, 19 bp, Homo sapiens
  siRNA target sequence for MEST (NM_002402.2,437-455).
cttttacacggttttccaa

SEQ ID NO: 204221 - DNA, 19 bp, Homo sapiens
  siRNA target sequence for MEST (NM_002402.2,512-530).
gtgattgcccttgatttct

SEQ ID NO: 204222 - DNA, 19 bp, Homo sapiens
  siRNA target sequence for MEST (NM_002402.2,554-572).
ccgagaccacatcactatt

SEQ ID NO: 204223 - DNA, 19 bp, Homo sapiens
  siRNA target sequence for MEST (NM_002402.2,632-650).
cgcaggatcaaccttcttt

SEQ ID NO: 204224 - DNA, 19 bp, Homo sapiens
  siRNA target sequence for MEST (NM_002402.2,636-654).
ggatcaaccttctttctca

SEQ ID NO: 204225 - DNA, 19 bp, Homo sapiens
  siRNA target sequence for MEST (NM_002402.2,637-655).
gatcaaccttctttctcat

SEQ ID NO: 204226 - DNA, 19 bp, Homo sapiens
  siRNA target sequence for MEST (NM_002402.2,708-726).
gatctggtcggcttaccat

SEQ ID NO: 204227 - DNA, 19 bp, Homo sapiens
  siRNA target sequence for MEST (NM_002402.2,711-729).
ctggtcggcttaccataaa

SEQ ID NO: 204228 - DNA, 19 bp, Homo sapiens
  siRNA target sequence for MEST (NM_002402.2,713-731).
ggtcggcttaccataaaga

SEQ ID NO: 204229 - DNA, 19 bp, Homo sapiens
  siRNA target sequence for MEST (NM_002402.2,742-760).
gtcaaatggaggtatcttt

SEQ ID NO: 204230 - DNA, 19 bp, Homo sapiens
  siRNA target sequence for MEST (NM_002402.2,827-845).
ctcacacgactgatgaact

SEQ ID NO: 204231 - DNA, 19 bp, Homo sapiens
  siRNA target sequence for MEST (NM_002402.2,831-849).
cacgactgatgaacttctt

SEQ ID NO: 204232 - DNA, 19 bp, Homo sapiens
  siRNA target sequence for MEST (NM_002402.2,836-854).
ctgatgaacttctttgtat

SEQ ID NO: 204233 - DNA, 19 bp, Homo sapiens
  siRNA target sequence for MEST (NM_002402.2,925-943).
ggcagggatccgcaacaat

SEQ ID NO: 204234 - DNA, 19 bp, Homo sapiens
  siRNA target sequence for MEST (NM_002402.2,937-955).
caacaatgacgggaactta

SEQ ID NO: 204235 - DNA, 19 bp, Homo sapiens
  siRNA target sequence for MEST (NM_002402.2,1031-1049).
gtaactatccccattcatt

SEQ ID NO: 204236 - DNA, 19 bp, Homo sapiens
  siRNA target sequence for AHCY (NM_000687.1,274-292).
ggtccagctgcaacatctt

SEQ ID NO: 204237 - DNA, 19 bp, Homo sapiens
  siRNA target sequence for AHCY (NM_000687.1,528-546).
gtccacaacctctacaaga

SEQ ID NO: 204238 - DNA, 19 bp, Homo sapiens
  siRNA target sequence for AHCY (NM_000687.1,631-649).
gccgggagtccctcataga

SEQ ID NO: 204239 - DNA, 19 bp, Homo sapiens
  siRNA target sequence for AHCY (NM_000687.1,632-650).
ccgggagtccctcatagat

SEQ ID NO: 204240 - DNA, 19 bp, Homo sapiens
  siRNA target sequence for AHCY (NM_000687.1,849-867).
gagggcaacatctttgtca

SEQ ID NO: 204241 - DNA, 19 bp, Homo sapiens
  siRNA target sequence for AHCY (NM_000687.1,866-884).
caccaccacaggctgtatt

SEQ ID NO: 204242 - DNA, 19 bp, Homo sapiens
  siRNA target sequence for AHCY (NM_000687.1,868-886).
ccaccacaggctgtattga

SEQ ID NO: 204243 - DNA, 19 bp, Homo sapiens
  siRNA target sequence for AHCY (NM_000687.1,1023-1041).
gaccggtatcggttgaaga

SEQ ID NO: 204244 - DNA, 19 bp, Homo sapiens
  siRNA target sequence for AHCY (NM_000687.1,1025-1043).
ccggtatcggttgaagaat

SEQ ID NO: 204245 - DNA, 19 bp, Homo sapiens
  siRNA target sequence for AHCY (NM_000687.1,1165-1183).
ggacccatccagacaagta

SEQ ID NO: 204246 - DNA, 19 bp, Homo sapiens
  siRNA target sequence for AHCYL1 (NM_006621.3,794-812).
cttggctggtgctaaaata

SEQ ID NO: 204247 - DNA, 19 bp, Homo sapiens
  siRNA target sequence for AHCYL1 (NM_006621.3,836-854).
ccagacagcggtgttgatt

SEQ ID NO: 204248 - DNA, 19 bp, Homo sapiens
  siRNA target sequence for AHCYL1 (NM_006621.3,883-901).
gccgctggtctgcttgtaa

SEQ ID NO: 204249 - DNA, 19 bp, Homo sapiens
  siRNA target sequence for AHCYL1 (NM_006621.3,885-903).
cgctggtctgcttgtaaca

SEQ ID NO: 204250 - DNA, 19 bp, Homo sapiens
  siRNA target sequence for AHCYL1 (NM_006621.3,889-907).
ggtctgcttgtaacatcta

SEQ ID NO: 204251 - DNA, 19 bp, Homo sapiens
  siRNA target sequence for AHCYL1 (NM_006621.3,894-912).
gcttgtaacatctactcaa

SEQ ID NO: 204252 - DNA, 19 bp, Homo sapiens
  siRNA target sequence for AHCYL1 (NM_006621.3,905-923).
ctactcaactcagaatgaa

SEQ ID NO: 204253 - DNA, 19 bp, Homo sapiens
  siRNA target sequence for AHCYL1 (NM_006621.3,908-926).
ctcaactcagaatgaagta

SEQ ID NO: 204254 - DNA, 19 bp, Homo sapiens
  siRNA target sequence for AHCYL1 (NM_006621.3,1026-1044).
gggtggcaggccaacatga

SEQ ID NO: 204255 - DNA, 19 bp, Homo sapiens
  siRNA target sequence for AHCYL1 (NM_006621.3,1027-1045).
ggtggcaggccaacatgat

SEQ ID NO: 204256 - DNA, 19 bp, Homo sapiens
  siRNA target sequence for AHCYL1 (NM_006621.3,1190-1208).
ggccatgaacgtcaatgat

SEQ ID NO: 204257 - DNA, 19 bp, Homo sapiens
  siRNA target sequence for AHCYL1 (NM_006621.3,1193-1211).
catgaacgtcaatgattct

SEQ ID NO: 204258 - DNA, 19 bp, Homo sapiens
  siRNA target sequence for AHCYL1 (NM_006621.3,1196-1214).
gaacgtcaatgattctgtt

SEQ ID NO: 204259 - DNA, 19 bp, Homo sapiens
  siRNA target sequence for AHCYL1 (NM_006621.3,1206-1224).
gattctgttaccaaacaga

SEQ ID NO: 204260 - DNA, 19 bp, Homo sapiens
  siRNA target sequence for AHCYL1 (NM_006621.3,1241-1259).
ctgctgccgagaatccatt

SEQ ID NO: 204261 - DNA, 19 bp, Homo sapiens
  siRNA target sequence for AHCYL1 (NM_006621.3,1243-1261).
gctgccgagaatccatttt

SEQ ID NO: 204262 - DNA, 19 bp, Homo sapiens
  siRNA target sequence for AHCYL1 (NM_006621.3,1246-1264).
gccgagaatccattttgga

SEQ ID NO: 204263 - DNA, 19 bp, Homo sapiens
  siRNA target sequence for AHCYL1 (NM_006621.3,1247-1265).
ccgagaatccattttggat

SEQ ID NO: 204264 - DNA, 19 bp, Homo sapiens
  siRNA target sequence for AHCYL1 (NM_006621.3,1368-1386).
ggagcaattgtctacatta

SEQ ID NO: 204265 - DNA, 19 bp, Homo sapiens
  siRNA target sequence for AHCYL1 (NM_006621.3,1429-1447).
ggttcagggtggtaaagct

SEQ ID NO: 204266 - DNA, 19 bp, Homo sapiens
  siRNA target sequence for AHCYL1 (NM_006621.3,1430-1448).
gttcagggtggtaaagcta

SEQ ID NO: 204267 - DNA, 19 bp, Homo sapiens
  siRNA target sequence for AHCYL1 (NM_006621.3,1435-1453).
gggtggtaaagctaaatga

SEQ ID NO: 204268 - DNA, 19 bp, Homo sapiens
  siRNA target sequence for AHCYL1 (NM_006621.3,1436-1454).
ggtggtaaagctaaatgaa

SEQ ID NO: 204269 - DNA, 19 bp, Homo sapiens
  siRNA target sequence for AHCYL1 (NM_006621.3,1462-1480).
ggcaagtcgatgtcgtaat

SEQ ID NO: 204270 - DNA, 19 bp, Homo sapiens
  siRNA target sequence for AHCYL1 (NM_006621.3,1463-1481).
gcaagtcgatgtcgtaata

SEQ ID NO: 204271 - DNA, 19 bp, Homo sapiens
  siRNA target sequence for AHCYL1 (NM_006621.3,1464-1482).
caagtcgatgtcgtaataa

SEQ ID NO: 204272 - DNA, 19 bp, Homo sapiens
  siRNA target sequence for AHCYL1 (NM_006621.3,1467-1485).
gtcgatgtcgtaataactt

SEQ ID NO: 204273 - DNA, 19 bp, Homo sapiens
  siRNA target sequence for AHCYL1 (NM_006621.3,1517-1535).
gcacttggatcgcatgaaa

SEQ ID NO: 204274 - DNA, 19 bp, Homo sapiens
  siRNA target sequence for AHCYL1 (NM_006621.3,1523-1541).
ggatcgcatgaaaaacagt

SEQ ID NO: 204275 - DNA, 19 bp, Homo sapiens
  siRNA target sequence for AHCYL1 (NM_006621.3,1527-1545).
cgcatgaaaaacagttgta

SEQ ID NO: 204276 - DNA, 19 bp, Homo sapiens
  siRNA target sequence for AHCYL1 (NM_006621.3,1528-1546).
gcatgaaaaacagttgtat

SEQ ID NO: 204277 - DNA, 19 bp, Homo sapiens
  siRNA target sequence for AHCYL1 (NM_006621.3,1538-1556).
cagttgtatcgtatgcaat

SEQ ID NO: 204278 - DNA, 19 bp, Homo sapiens
  siRNA target sequence for AHCYL1 (NM_006621.3,1540-1558).
gttgtatcgtatgcaatat

SEQ ID NO: 204279 - DNA, 19 bp, Homo sapiens
  siRNA target sequence for AHCYL1 (NM_006621.3,1560-1578).
ggccactccaacacagaaa

SEQ ID NO: 204280 - DNA, 19 bp, Homo sapiens
  siRNA target sequence for AHCYL1 (NM_006621.3,1561-1579).
gccactccaacacagaaat

SEQ ID NO: 204281 - DNA, 19 bp, Homo sapiens
  siRNA target sequence for AHCYL1 (NM_006621.3,1681-1699).
cagagggtcgtctactcaa

SEQ ID NO: 204282 - DNA, 19 bp, Homo sapiens
  siRNA target sequence for AHCYL1 (NM_006621.3,1683-1701).
gagggtcgtctactcaatt

SEQ ID NO: 204283 - DNA, 19 bp, Homo sapiens
  siRNA target sequence for AHCYL1 (NM_006621.3,1686-1704).
ggtcgtctactcaatttga

SEQ ID NO: 204284 - DNA, 19 bp, Homo sapiens
  siRNA target sequence for AHCYL1 (NM_006621.3,1754-1772).
ggctttggcactgatagaa

SEQ ID NO: 204285 - DNA, 19 bp, Homo sapiens
  siRNA target sequence for AHCYL1 (NM_006621.3,1760-1778).
ggcactgatagaactctat

SEQ ID NO: 204286 - DNA, 19 bp, Homo sapiens
  siRNA target sequence for AHCYL1 (NM_006621.3,1761-1779).
gcactgatagaactctata

SEQ ID NO: 204287 - DNA, 19 bp, Homo sapiens
  siRNA target sequence for AHCYL1 (NM_006621.3,1766-1784).
gatagaactctataatgca

SEQ ID NO: 204288 - DNA, 19 bp, Homo sapiens
  siRNA target sequence for AHCYL1 (NM_006621.3,1783-1801).
cacccgaggggcgatacaa

SEQ ID NO: 204289 - DNA, 19 bp, Homo sapiens
  siRNA target sequence for AHCYL1 (NM_006621.3,1817-1835).
gcttcctaagaaaatggat

SEQ ID NO: 204290 - DNA, 19 bp, Homo sapiens
  siRNA target sequence for AHCYL1 (NM_006621.3,1850-1868).
cttgcatctgccatcattt

SEQ ID NO: 204291 - DNA, 19 bp, Homo sapiens
  siRNA target sequence for AHCYL1 (NM_006621.3,1931-1949).
gccattcaaacctaattat

SEQ ID NO: 204292 - DNA, 19 bp, Homo sapiens
  siRNA target sequence for KIAA0828 (NM_015328.1,453-471).
caaacgtcccaccaaaatt

SEQ ID NO: 204293 - DNA, 19 bp, Homo sapiens
  siRNA target sequence for KIAA0828 (NM_015328.1,480-498).
ctctttgtctcgttccatt

SEQ ID NO: 204294 - DNA, 19 bp, Homo sapiens
  siRNA target sequence for KIAA0828 (NM_015328.1,525-543).
ctcagcggcttcatataca

SEQ ID NO: 204295 - DNA, 19 bp, Homo sapiens
  siRNA target sequence for KIAA0828 (NM_015328.1,527-545).
cagcggcttcatatacaga

SEQ ID NO: 204296 - DNA, 19 bp, Homo sapiens
  siRNA target sequence for KIAA0828 (NM_015328.1,529-547).
gcggcttcatatacagata

SEQ ID NO: 204297 - DNA, 19 bp, Homo sapiens
  siRNA target sequence for KIAA0828 (NM_015328.1,605-623).
gtgacttctgtgttaagaa

SEQ ID NO: 204298 - DNA, 19 bp, Homo sapiens
  siRNA target sequence for KIAA0828 (NM_015328.1,639-657).
gtttggacgaagagaaatt

SEQ ID NO: 204299 - DNA, 19 bp, Homo sapiens
  siRNA target sequence for KIAA0828 (NM_015328.1,643-661).
ggacgaagagaaattgaaa

SEQ ID NO: 204300 - DNA, 19 bp, Homo sapiens
  siRNA target sequence for KIAA0828 (NM_015328.1,834-852).
ctattccactctcaatgaa

SEQ ID NO: 204301 - DNA, 19 bp, Homo sapiens
  siRNA target sequence for KIAA0828 (NM_015328.1,918-936).
cttttggtggtgtatcgat

SEQ ID NO: 204302 - DNA, 19 bp, Homo sapiens
  siRNA target sequence for KIAA0828 (NM_015328.1,924-942).
gtggtgtatcgatagatgt

SEQ ID NO: 204303 - DNA, 19 bp, Homo sapiens
  siRNA target sequence for KIAA0828 (NM_015328.1,955-973).
ggctggcagccaaacatga

SEQ ID NO: 204304 - DNA, 19 bp, Homo sapiens
  siRNA target sequence for KIAA0828 (NM_015328.1,979-997).
gatgatggaggggatctta

SEQ ID NO: 204305 - DNA, 19 bp, Homo sapiens
  siRNA target sequence for KIAA0828 (NM_015328.1,991-1009).
gatcttacccactggattt

SEQ ID NO: 204306 - DNA, 19 bp, Homo sapiens
  siRNA target sequence for KIAA0828 (NM_015328.1,994-1012).
cttacccactggatttata

SEQ ID NO: 204307 - DNA, 19 bp, Homo sapiens
  siRNA target sequence for KIAA0828 (NM_015328.1,1035-1053).
gaaaatcaagggcatagta

SEQ ID NO: 204308 - DNA, 19 bp, Homo sapiens
  siRNA target sequence for KIAA0828 (NM_015328.1,1167-1185).
ctactgttgccgtgaatca

SEQ ID NO: 204309 - DNA, 19 bp, Homo sapiens
  siRNA target sequence for KIAA0828 (NM_015328.1,1170-1188).
ctgttgccgtgaatcaatt

SEQ ID NO: 204310 - DNA, 19 bp, Homo sapiens
  siRNA target sequence for KIAA0828 (NM_015328.1,1172-1190).
gttgccgtgaatcaattct

SEQ ID NO: 204311 - DNA, 19 bp, Homo sapiens
  siRNA target sequence for KIAA0828 (NM_015328.1,1175-1193).
gccgtgaatcaattcttga

SEQ ID NO: 204312 - DNA, 19 bp, Homo sapiens
  siRNA target sequence for KIAA0828 (NM_015328.1,1176-1194).
ccgtgaatcaattcttgat

SEQ ID NO: 204313 - DNA, 19 bp, Homo sapiens
  siRNA target sequence for KIAA0828 (NM_015328.1,1347-1365).
ctgtatggatggatttcga

SEQ ID NO: 204314 - DNA, 19 bp, Homo sapiens
  siRNA target sequence for KIAA0828 (NM_015328.1,1357-1375).
ggatttcgactggtgaaat

SEQ ID NO: 204315 - DNA, 19 bp, Homo sapiens
  siRNA target sequence for KIAA0828 (NM_015328.1,1390-1408).
cgacaagtggacattgtta

SEQ ID NO: 204316 - DNA, 19 bp, Homo sapiens
  siRNA target sequence for KIAA0828 (NM_015328.1,1391-1409).
gacaagtggacattgttat

SEQ ID NO: 204317 - DNA, 19 bp, Homo sapiens
  siRNA target sequence for KIAA0828 (NM_015328.1,1415-1433).
gtacaggtaacaagaatgt

SEQ ID NO: 204318 - DNA, 19 bp, Homo sapiens
  siRNA target sequence for KIAA0828 (NM_015328.1,1447-1465).
cacttggaccgtatgaaga

SEQ ID NO: 204319 - DNA, 19 bp, Homo sapiens
  siRNA target sequence for KIAA0828 (NM_015328.1,1449-1467).
cttggaccgtatgaagaat

SEQ ID NO: 204320 - DNA, 19 bp, Homo sapiens
  siRNA target sequence for KIAA0828 (NM_015328.1,1453-1471).
gaccgtatgaagaatagct

SEQ ID NO: 204321 - DNA, 19 bp, Homo sapiens
  siRNA target sequence for KIAA0828 (NM_015328.1,1469-1487).
gctgcatcgtttgtaacat

SEQ ID NO: 204322 - DNA, 19 bp, Homo sapiens
  siRNA target sequence for KIAA0828 (NM_015328.1,1545-1563).
ggagcgagtgagatctcaa

SEQ ID NO: 204323 - DNA, 19 bp, Homo sapiens
  siRNA target sequence for KIAA0828 (NM_015328.1,1548-1566).
gcgagtgagatctcaagtt

SEQ ID NO: 204324 - DNA, 19 bp, Homo sapiens
  siRNA target sequence for KIAA0828 (NM_015328.1,1550-1568).
gagtgagatctcaagttga

SEQ ID NO: 204325 - DNA, 19 bp, Homo sapiens
  siRNA target sequence for KIAA0828 (NM_015328.1,1561-1579).
caagttgaccatgtgatat

SEQ ID NO: 204326 - DNA, 19 bp, Homo sapiens
  siRNA target sequence for KIAA0828 (NM_015328.1,1637-1655).
gctccacagtgcctacatt

SEQ ID NO: 204327 - DNA, 19 bp, Homo sapiens
  siRNA target sequence for KIAA0828 (NM_015328.1,1649-1667).
ctacatttgtgctctcaat

SEQ ID NO: 204328 - DNA, 19 bp, Homo sapiens
  siRNA target sequence for KIAA0828 (NM_015328.1,1712-1730).
ctcctgagggtcgctataa

SEQ ID NO: 204329 - DNA, 19 bp, Homo sapiens
  siRNA target sequence for KIAA0828 (NM_015328.1,1715-1733).
ctgagggtcgctataagca

SEQ ID NO: 204330 - DNA, 19 bp, Homo sapiens
  siRNA target sequence for KIAA0828 (NM_015328.1,1870-1888).
cctaattactacaggtatt

SEQ ID NO: 204331 - DNA, 19 bp, Homo sapiens
  siRNA target sequence for FAH (NM_000137.1,223-241).
ccaaacaccaggatgtctt

SEQ ID NO: 204332 - DNA, 19 bp, Homo sapiens
  siRNA target sequence for FAH (NM_000137.1,457-475).
ctaccaacgtcggaatcat

SEQ ID NO: 204333 - DNA, 19 bp, Homo sapiens
  siRNA target sequence for FAH (NM_000137.1,460-478).
ccaacgtcggaatcatgtt

SEQ ID NO: 204334 - DNA, 19 bp, Homo sapiens
  siRNA target sequence for FAH (NM_000137.1,608-626).
ctctaagcctcccgtatat

SEQ ID NO: 204335 - DNA, 19 bp, Homo sapiens
  siRNA target sequence for FAH (NM_000137.1,696-714).
gagccgatccccatttcca

SEQ ID NO: 204336 - DNA, 19 bp, Homo sapiens
  siRNA target sequence for FAH (NM_000137.1,755-773).
ctggagtgcacgagacatt

SEQ ID NO: 204337 - DNA, 19 bp, Homo sapiens
  siRNA target sequence for FAH (NM_000137.1,757-775).
ggagtgcacgagacattca

SEQ ID NO: 204338 - DNA, 19 bp, Homo sapiens
  siRNA target sequence for FAH (NM_000137.1,921-939).
catgacgagccctacacat

SEQ ID NO: 204339 - DNA, 19 bp, Homo sapiens
  siRNA target sequence for FAH (NM_000137.1,942-960).
gacatcaacctctctgtta

SEQ ID NO: 204340 - DNA, 19 bp, Homo sapiens
  siRNA target sequence for FAH (NM_000137.1,980-998).
gagccaggcggctaccata

SEQ ID NO: 204341 - DNA, 19 bp, Homo sapiens
  siRNA target sequence for FAH (NM_000137.1,984-1002).
caggcggctaccatatgca

SEQ ID NO: 204342 - DNA, 19 bp, Homo sapiens
  siRNA target sequence for FAH (NM_000137.1,994-1012).
ccatatgcaagtccaattt

SEQ ID NO: 204343 - DNA, 19 bp, Homo sapiens
  siRNA target sequence for FAH (NM_000137.1,1214-1232).
cggggatgaagtcatcata

SEQ ID NO: 204344 - DNA, 19 bp, Homo sapiens
  siRNA target sequence for GPAA1 (NM_003801.2,225-243).
ctgacccagcgcacttaca

SEQ ID NO: 204345 - DNA, 19 bp, Homo sapiens
  siRNA target sequence for GPAA1 (NM_003801.2,448-466).
cccacgagcgctatatggt

SEQ ID NO: 204346 - DNA, 19 bp, Homo sapiens
  siRNA target sequence for GPAA1 (NM_003801.2,614-632).
gatttattgggccaaagat

SEQ ID NO: 204347 - DNA, 19 bp, Homo sapiens
  siRNA target sequence for GPAA1 (NM_003801.2,635-653).
cgtcttcctggtaacagaa

SEQ ID NO: 204348 - DNA, 19 bp, Homo sapiens
  siRNA target sequence for GPAA1 (NM_003801.2,688-706).
cctaccacgatgtcaatgt

SEQ ID NO: 204349 - DNA, 19 bp, Homo sapiens
  siRNA target sequence for GPAA1 (NM_003801.2,1493-1511).
gacactgctggcgatttat

SEQ ID NO: 204350 - DNA, 19 bp, Homo sapiens
  siRNA target sequence for AADAC (NM_001086.1,99-117).
cgctgtaccttctgattgt

SEQ ID NO: 204351 - DNA, 19 bp, Homo sapiens
  siRNA target sequence for AADAC (NM_001086.1,116-134).
gtggggatcctcatagcat

SEQ ID NO: 204352 - DNA, 19 bp, Homo sapiens
  siRNA target sequence for AADAC (NM_001086.1,118-136).
ggggatcctcatagcatat

SEQ ID NO: 204353 - DNA, 19 bp, Homo sapiens
  siRNA target sequence for AADAC (NM_001086.1,119-137).
gggatcctcatagcatatt

SEQ ID NO: 204354 - DNA, 19 bp, Homo sapiens
  siRNA target sequence for AADAC (NM_001086.1,121-139).
gatcctcatagcatattat

SEQ ID NO: 204355 - DNA, 19 bp, Homo sapiens
  siRNA target sequence for AADAC (NM_001086.1,147-165).
cgcctctcccagataacgt

SEQ ID NO: 204356 - DNA, 19 bp, Homo sapiens
  siRNA target sequence for AADAC (NM_001086.1,148-166).
gcctctcccagataacgtt

SEQ ID NO: 204357 - DNA, 19 bp, Homo sapiens
  siRNA target sequence for AADAC (NM_001086.1,189-207).
ggataaacgcacatctgaa

SEQ ID NO: 204358 - DNA, 19 bp, Homo sapiens
  siRNA target sequence for AADAC (NM_001086.1,190-208).
gataaacgcacatctgaaa

SEQ ID NO: 204359 - DNA, 19 bp, Homo sapiens
  siRNA target sequence for AADAC (NM_001086.1,196-214).
cgcacatctgaaaactata

SEQ ID NO: 204360 - DNA, 19 bp, Homo sapiens
  siRNA target sequence for AADAC (NM_001086.1,198-216).
cacatctgaaaactataca

SEQ ID NO: 204361 - DNA, 19 bp, Homo sapiens
  siRNA target sequence for AADAC (NM_001086.1,396-414).
gaagggggttgttttacat

SEQ ID NO: 204362 - DNA, 19 bp, Homo sapiens
  siRNA target sequence for AADAC (NM_001086.1,436-454).
gggaagtgctgctctaagt

SEQ ID NO: 204363 - DNA, 19 bp, Homo sapiens
  siRNA target sequence for AADAC (NM_001086.1,494-512).
gatgctgtcgtcgtatcaa

SEQ ID NO: 204364 - DNA, 19 bp, Homo sapiens
  siRNA target sequence for AADAC (NM_001086.1,503-521).
gtcgtatcaaccaactaca

SEQ ID NO: 204365 - DNA, 19 bp, Homo sapiens
  siRNA target sequence for AADAC (NM_001086.1,506-524).
gtatcaaccaactacagat

SEQ ID NO: 204366 - DNA, 19 bp, Homo sapiens
  siRNA target sequence for AADAC (NM_001086.1,520-538).
cagattagcacctaagtat

SEQ ID NO: 204367 - DNA, 19 bp, Homo sapiens
  siRNA target sequence for AADAC (NM_001086.1,522-540).
gattagcacctaagtatca

SEQ ID NO: 204368 - DNA, 19 bp, Homo sapiens
  siRNA target sequence for AADAC (NM_001086.1,544-562).
cccaattcaatttgaagat

SEQ ID NO: 204369 - DNA, 19 bp, Homo sapiens
  siRNA target sequence for AADAC (NM_001086.1,551-569).
caatttgaagatgtatata

SEQ ID NO: 204370 - DNA, 19 bp, Homo sapiens
  siRNA target sequence for AADAC (NM_001086.1,563-581).
gtatataatgccttaaggt

SEQ ID NO: 204371 - DNA, 19 bp, Homo sapiens
  siRNA target sequence for AADAC (NM_001086.1,579-597).
ggtggttcttacgtaaaaa

SEQ ID NO: 204372 - DNA, 19 bp, Homo sapiens
  siRNA target sequence for AADAC (NM_001086.1,583-601).
gttcttacgtaaaaaagtt

SEQ ID NO: 204373 - DNA, 19 bp, Homo sapiens
  siRNA target sequence for AADAC (NM_001086.1,586-604).
cttacgtaaaaaagttctt

SEQ ID NO: 204374 - DNA, 19 bp, Homo sapiens
  siRNA target sequence for AADAC (NM_001086.1,591-609).
gtaaaaaagttcttgcaaa

SEQ ID NO: 204375 - DNA, 19 bp, Homo sapiens
  siRNA target sequence for AADAC (NM_001086.1,623-641).
cctgagagaatcggtattt

SEQ ID NO: 204376 - DNA, 19 bp, Homo sapiens
  siRNA target sequence for AADAC (NM_001086.1,634-652).
cggtatttctggagatagt

SEQ ID NO: 204377 - DNA, 19 bp, Homo sapiens
  siRNA target sequence for AADAC (NM_001086.1,721-739).
caagatccagtctttaatt

SEQ ID NO: 204378 - DNA, 19 bp, Homo sapiens
  siRNA target sequence for AADAC (NM_001086.1,773-791).
ccgtcatatcaagaaaatt

SEQ ID NO: 204379 - DNA, 19 bp, Homo sapiens
  siRNA target sequence for AADAC (NM_001086.1,824-842).
gtcagattctggagtgaat

SEQ ID NO: 204380 - DNA, 19 bp, Homo sapiens
  siRNA target sequence for AADAC (NM_001086.1,941-959).
ctgctccctgagaggttta

SEQ ID NO: 204381 - DNA, 19 bp, Homo sapiens
  siRNA target sequence for AADAC (NM_001086.1,943-961).
gctccctgagaggtttata

SEQ ID NO: 204382 - DNA, 19 bp, Homo sapiens
  siRNA target sequence for AADAC (NM_001086.1,944-962).
ctccctgagaggtttataa

SEQ ID NO: 204383 - DNA, 19 bp, Homo sapiens
  siRNA target sequence for AADAC (NM_001086.1,1054-1072).
ggctgatgacaacaaatta

SEQ ID NO: 204384 - DNA, 19 bp, Homo sapiens
  siRNA target sequence for AADAC (NM_001086.1,1164-1182).
gggttcaggtgactcataa

SEQ ID NO: 204385 - DNA, 19 bp, Homo sapiens
  siRNA target sequence for AADAC (NM_001086.1,1240-1258).
cagacttataaatcagtat

SEQ ID NO: 204386 - DNA, 19 bp, Homo sapiens
  siRNA target sequence for AADAC (NM_001086.1,1264-1282).
gtggctaaaggaaaatcta

SEQ ID NO: 204387 - DNA, 19 bp, Homo sapiens
  siRNA target sequence for ABHD1 (NM_032604.2,330-348).
ccatcaccaccgagacttt

SEQ ID NO: 204388 - DNA, 19 bp, Homo sapiens
  siRNA target sequence for ABHD1 (NM_032604.2,354-372).
caacgctgtggtgttttga

SEQ ID NO: 204389 - DNA, 19 bp, Homo sapiens
  siRNA target sequence for ABHD1 (NM_032604.2,416-434).
cccctagtcctttatcaga

SEQ ID NO: 204390 - DNA, 19 bp, Homo sapiens
  siRNA target sequence for ABHD1 (NM_032604.2,557-575).
ggcagtagccaggatacat

SEQ ID NO: 204391 - DNA, 19 bp, Homo sapiens
  siRNA target sequence for ABHD1 (NM_032604.2,580-598).
cttgcacctagttaaccaa

SEQ ID NO: 204392 - DNA, 19 bp, Homo sapiens
  siRNA target sequence for ABHD1 (NM_032604.2,617-635).
caggctgtcgtgtttaaca

SEQ ID NO: 204393 - DNA, 19 bp, Homo sapiens
  siRNA target sequence for ABHD1 (NM_032604.2,674-692).
gctttttgtgccagcaata

SEQ ID NO: 204394 - DNA, 19 bp, Homo sapiens
  siRNA target sequence for ABHD1 (NM_032604.2,684-702).
ccagcaatactgaagatct

SEQ ID NO: 204395 - DNA, 19 bp, Homo sapiens
  siRNA target sequence for ABHD1 (NM_032604.2,712-730).
cgtgaaccacataaagcat

SEQ ID NO: 204396 - DNA, 19 bp, Homo sapiens
  siRNA target sequence for ABHD1 (NM_032604.2,718-736).
ccacataaagcatcgttat

SEQ ID NO: 204397 - DNA, 19 bp, Homo sapiens
  siRNA target sequence for ABHD1 (NM_032604.2,757-775).
cgtgggcatctcttttgga

SEQ ID NO: 204398 - DNA, 19 bp, Homo sapiens
  siRNA target sequence for ABHD1 (NM_032604.2,895-913).
caactcactgctcttcaat

SEQ ID NO: 204399 - DNA, 19 bp, Homo sapiens
  siRNA target sequence for ABHD1 (NM_032604.2,936-954).
gccaacttgtggaacgaaa

SEQ ID NO: 204400 - DNA, 19 bp, Homo sapiens
  siRNA target sequence for ABHD1 (NM_032604.2,1005-1023).
gtacaatccgccagtttga

SEQ ID NO: 204401 - DNA, 19 bp, Homo sapiens
  siRNA target sequence for ABHD1 (NM_032604.2,1008-1026).
caatccgccagtttgatga

SEQ ID NO: 204402 - DNA, 19 bp, Homo sapiens
  siRNA target sequence for ABHD1 (NM_032604.2,1035-1053).
catctgtggcctttggata

SEQ ID NO: 204403 - DNA, 19 bp, Homo sapiens
  siRNA target sequence for ABHD1 (NM_032604.2,1049-1067).
ggatatcaagactgtgtta

SEQ ID NO: 204404 - DNA, 19 bp, Homo sapiens
  siRNA target sequence for ABHD1 (NM_032604.2,1058-1076).
gactgtgttacctactaca

SEQ ID NO: 204405 - DNA, 19 bp, Homo sapiens
  siRNA target sequence for ABHD1 (NM_032604.2,1087-1105).
ccctagaaccaagatagat

SEQ ID NO: 204406 - DNA, 19 bp, Homo sapiens
  siRNA target sequence for ABHD1 (NM_032604.2,1281-1299).
gccgcctcttgcatcagta

SEQ ID NO: 204407 - DNA, 19 bp, Homo sapiens
  siRNA target sequence for ABHD1 (NM_152870.1,947-965).
gaacgcctatcctatggta

SEQ ID NO: 204408 - DNA, 19 bp, Homo sapiens
  siRNA target sequence for ABHD4 (NM_022060.1,427-445).
gggctgaggatgagtttgt

SEQ ID NO: 204409 - DNA, 19 bp, Homo sapiens
  siRNA target sequence for ABHD4 (NM_022060.1,526-544).
ccacttcttactcaatcaa

SEQ ID NO: 204410 - DNA, 19 bp, Homo sapiens
  siRNA target sequence for ABHD4 (NM_022060.1,529-547).
cttcttactcaatcaagta

SEQ ID NO: 204411 - DNA, 19 bp, Homo sapiens
  siRNA target sequence for ABHD4 (NM_022060.1,542-560).
caagtaccctgatagagtt

SEQ ID NO: 204412 - DNA, 19 bp, Homo sapiens
  siRNA target sequence for ABHD4 (NM_022060.1,663-681).
ctaggacgttccaatccat

SEQ ID NO: 204413 - DNA, 19 bp, Homo sapiens
  siRNA target sequence for ABHD4 (NM_022060.1,777-795).
gataccatatcagagtata

SEQ ID NO: 204414 - DNA, 19 bp, Homo sapiens
  siRNA target sequence for ABHD4 (NM_022060.1,877-895).
ctatgctggagcgaattca

SEQ ID NO: 204415 - DNA, 19 bp, Homo sapiens
  siRNA target sequence for ABHD4 (NM_022060.1,888-906).
cgaattcacttgattcgaa

SEQ ID NO: 204416 - DNA, 19 bp, Homo sapiens
  siRNA target sequence for ABHD4 (NM_022060.1,889-907).
gaattcacttgattcgaaa

SEQ ID NO: 204417 - DNA, 19 bp, Homo sapiens
  siRNA target sequence for ABHD4 (NM_022060.1,935-953).
gtccgacacctggatagat

SEQ ID NO: 204418 - DNA, 19 bp, Homo sapiens
  siRNA target sequence for ABHD4 (NM_022060.1,951-969).
gataccagtacgggaaaaa

SEQ ID NO: 204419 - DNA, 19 bp, Homo sapiens
  siRNA target sequence for ABHD4 (NM_022060.1,955-973).
ccagtacgggaaaaaaggt

SEQ ID NO: 204420 - DNA, 19 bp, Homo sapiens
  siRNA target sequence for ABHD4 (NM_022060.1,999-1017).
gtccgagacatggagatta

SEQ ID NO: 204421 - DNA, 19 bp, Homo sapiens
  siRNA target sequence for ABHD4 (NM_022060.1,1044-1062).
gaccagccacacatcttca

SEQ ID NO: 204422 - DNA, 19 bp, Homo sapiens
  siRNA target sequence for ABHD4 (NM_022060.1,1046-1064).
ccagccacacatcttcaat

SEQ ID NO: 204423 - DNA, 19 bp, Homo sapiens
  siRNA target sequence for ACATE2 (NM_012332.1,158-176).
caccctgcgttcgagataa

SEQ ID NO: 204424 - DNA, 19 bp, Homo sapiens
  siRNA target sequence for ACATE2 (NM_012332.1,330-348).
gggcagtgagcctgaatta

SEQ ID NO: 204425 - DNA, 19 bp, Homo sapiens
  siRNA target sequence for ACATE2 (NM_012332.1,333-351).
cagtgagcctgaattacga

SEQ ID NO: 204426 - DNA, 19 bp, Homo sapiens
  siRNA target sequence for ACATE2 (NM_012332.1,343-361).
gaattacgagagaaatatt

SEQ ID NO: 204427 - DNA, 19 bp, Homo sapiens
  siRNA target sequence for ACATE2 (NM_012332.1,354-372).
gaaatatttgactgttcaa

SEQ ID NO: 204428 - DNA, 19 bp, Homo sapiens
  siRNA target sequence for ACATE2 (NM_012332.1,409-427).
gacagcttgggagttctta

SEQ ID NO: 204429 - DNA, 19 bp, Homo sapiens
  siRNA target sequence for ACATE2 (NM_012332.1,431-449).
gttacatgcacaacaaaat

SEQ ID NO: 204430 - DNA, 19 bp, Homo sapiens
  siRNA target sequence for ACATE2 (NM_012332.1,456-474).
cgccaagatgtctccttta

SEQ ID NO: 204431 - DNA, 19 bp, Homo sapiens
  siRNA target sequence for ACATE2 (NM_012332.1,462-480).
gatgtctcctttatcgata

SEQ ID NO: 204432 - DNA, 19 bp, Homo sapiens
  siRNA target sequence for ACATE2 (NM_012332.1,465-483).
gtctcctttatcgatagtt

SEQ ID NO: 204433 - DNA, 19 bp, Homo sapiens
  siRNA target sequence for ACATE2 (NM_012332.1,485-503).
cagccctggtggataagat

SEQ ID NO: 204434 - DNA, 19 bp, Homo sapiens
  siRNA target sequence for ACATE2 (NM_012332.1,488-506).
ccctggtggataagattga

SEQ ID NO: 204435 - DNA, 19 bp, Homo sapiens
  siRNA target sequence for ACATE2 (NM_012332.1,496-514).
gataagattgatatgtgta

SEQ ID NO: 204436 - DNA, 19 bp, Homo sapiens
  siRNA target sequence for ACATE2 (NM_012332.1,529-547).
ccagaacaggacattaagt

SEQ ID NO: 204437 - DNA, 19 bp, Homo sapiens
  siRNA target sequence for ACATE2 (NM_012332.1,597-615).
gcaaatgttccagttacat

SEQ ID NO: 204438 - DNA, 19 bp, Homo sapiens
  siRNA target sequence for ACATE2 (NM_012332.1,606-624).
ccagttacatggtgatgaa

SEQ ID NO: 204439 - DNA, 19 bp, Homo sapiens
  siRNA target sequence for ACATE2 (NM_012332.1,657-675).
ggtggctcgtgattctgaa

SEQ ID NO: 204440 - DNA, 19 bp, Homo sapiens
  siRNA target sequence for ACATE2 (NM_012332.1,658-676).
gtggctcgtgattctgaaa

SEQ ID NO: 204441 - DNA, 19 bp, Homo sapiens
  siRNA target sequence for ACATE2 (NM_012332.1,661-679).
gctcgtgattctgaaaata

SEQ ID NO: 204442 - DNA, 19 bp, Homo sapiens
  siRNA target sequence for ACATE2 (NM_012332.1,779-797).
gctccacgtcgttactgaa

SEQ ID NO: 204443 - DNA, 19 bp, Homo sapiens
  siRNA target sequence for ACATE2 (NM_012332.1,780-798).
ctccacgtcgttactgaaa

SEQ ID NO: 204444 - DNA, 19 bp, Homo sapiens
  siRNA target sequence for ACATE2 (NM_012332.1,816-834).
ggagaggaccaccatacat

SEQ ID NO: 204445 - DNA, 19 bp, Homo sapiens
  siRNA target sequence for ACATE2 (NM_012332.1,821-839).
ggaccaccatacatgagat

SEQ ID NO: 204446 - DNA, 19 bp, Homo sapiens
  siRNA target sequence for ACATE2 (NM_012332.1,855-873).
ggatccaaagactataagt

SEQ ID NO: 204447 - DNA, 19 bp, Homo sapiens
  siRNA target sequence for ACATE2 (NM_012332.1,856-874).
gatccaaagactataagtt

SEQ ID NO: 204448 - DNA, 19 bp, Homo sapiens
  siRNA target sequence for ACATE2 (NM_012332.1,872-890).
gttttcggagtcgagtttt

SEQ ID NO: 204449 - DNA, 19 bp, Homo sapiens
  siRNA target sequence for ACATE2 (NM_012332.1,996-1014).
gaggaaggcatatgaactt

SEQ ID NO: 204450 - DNA, 19 bp, Homo sapiens
  siRNA target sequence for ACATE2 (NM_012332.1,1020-1038).
ggctactgcttgtagcttt

SEQ ID NO: 204451 - DNA, 19 bp, Homo sapiens
  siRNA target sequence for ACATE2 (NM_012332.1,1124-1142).
cacaggtatgctttactca

SEQ ID NO: 204452 - DNA, 19 bp, Homo sapiens
  siRNA target sequence for ACATE2 (NM_012332.1,1128-1146).
ggtatgctttactcagaat

SEQ ID NO: 204453 - DNA, 19 bp, Homo sapiens
  siRNA target sequence for ACATE2 (NM_012332.1,1133-1151).
gctttactcagaataatta

SEQ ID NO: 204454 - DNA, 19 bp, Homo sapiens
  siRNA target sequence for ACATE2 (NM_012332.1,1201-1219).
catacaaccaccaatgtct

SEQ ID NO: 204455 - DNA, 19 bp, Homo sapiens
  siRNA target sequence for ACATE2 (NM_012332.1,1205-1223).
caaccaccaatgtctttca

SEQ ID NO: 204456 - DNA, 19 bp, Homo sapiens
  siRNA target sequence for ACATE2 (NM_012332.1,1227-1245).
cacgttcatgtcggaaaaa

SEQ ID NO: 204457 - DNA, 19 bp, Homo sapiens
  siRNA target sequence for ACATE2 (NM_012332.1,1229-1247).
cgttcatgtcggaaaaaga

SEQ ID NO: 204458 - DNA, 19 bp, Homo sapiens
  siRNA target sequence for ACATE2 (NM_012332.1,1230-1248).
gttcatgtcggaaaaagaa

SEQ ID NO: 204459 - DNA, 19 bp, Homo sapiens
  siRNA target sequence for ACATE2 (NM_012332.1,1276-1294).
ggagagtccatgttgtact

SEQ ID NO: 204460 - DNA, 19 bp, Homo sapiens
  siRNA target sequence for ACATE2 (NM_012332.1,1300-1318).
gggcagcggcatttcaact

SEQ ID NO: 204461 - DNA, 19 bp, Homo sapiens
  siRNA target sequence for ACATE2 (NM_012332.1,1328-1346).
gcccagcgaccttgagaaa

SEQ ID NO: 204462 - DNA, 19 bp, Homo sapiens
  siRNA target sequence for ADPRHL1 (NM_138430.3,130-148).
gatgctcttggctacagaa

SEQ ID NO: 204463 - DNA, 19 bp, Homo sapiens
  siRNA target sequence for ADPRHL1 (NM_138430.3,134-152).
ctcttggctacagaaatgt

SEQ ID NO: 204464 - DNA, 19 bp, Homo sapiens
  siRNA target sequence for ADPRHL1 (NM_138430.3,308-326).
ggtgcctggatgatctgta

SEQ ID NO: 204465 - DNA, 19 bp, Homo sapiens
  siRNA target sequence for ADPRHL1 (NM_138430.3,410-428).
ctcagctaaagcccaataa

SEQ ID NO: 204466 - DNA, 19 bp, Homo sapiens
  siRNA target sequence for ADPRHL1 (NM_138430.3,412-430).
cagctaaagcccaataact

SEQ ID NO: 204467 - DNA, 19 bp, Homo sapiens
  siRNA target sequence for ADPRHL1 (NM_138430.3,443-461).
ggcacacaccgttcaatga

SEQ ID NO: 204468 - DNA, 19 bp, Homo sapiens
  siRNA target sequence for ADPRHL1 (NM_138430.3,447-465).
cacaccgttcaatgaaaaa

SEQ ID NO: 204469 - DNA, 19 bp, Homo sapiens
  siRNA target sequence for ADPRHL1 (NM_138430.3,629-647).
cgttcgccgcacaaggaaa

SEQ ID NO: 204470 - DNA, 19 bp, Homo sapiens
  siRNA target sequence for ADPRHL1 (NM_138430.3,722-740).
ggcacacggcagaatacca

SEQ ID NO: 204471 - DNA, 19 bp, Homo sapiens
  siRNA target sequence for ADPRHL1 (NM_138430.3,760-778).
gaagctaaatggcaatttt

SEQ ID NO: 204472 - DNA, 19 bp, Homo sapiens
  siRNA target sequence for ADPRHL2 (NM_017825.1,226-244).
ggacagaagccttgtacta

SEQ ID NO: 204473 - DNA, 19 bp, Homo sapiens
  siRNA target sequence for ADPRHL2 (NM_017825.1,328-346).
gatttgctcaggagtacaa

SEQ ID NO: 204474 - DNA, 19 bp, Homo sapiens
  siRNA target sequence for ADPRHL2 (NM_017825.1,334-352).
ctcaggagtacaagaaaga

SEQ ID NO: 204475 - DNA, 19 bp, Homo sapiens
  siRNA target sequence for ADPRHL2 (NM_017825.1,409-427).
ccaaatgtcgcgatgtctt

SEQ ID NO: 204476 - DNA, 19 bp, Homo sapiens
  siRNA target sequence for ADPRHL2 (NM_017825.1,410-428).
caaatgtcgcgatgtcttt

SEQ ID NO: 204477 - DNA, 19 bp, Homo sapiens
  siRNA target sequence for ADPRHL2 (NM_017825.1,637-655).
cttccagcgagcactttct

SEQ ID NO: 204478 - DNA, 19 bp, Homo sapiens
  siRNA target sequence for ADPRHL2 (NM_017825.1,849-867).
gtacccaccgccatctact

SEQ ID NO: 204479 - DNA, 19 bp, Homo sapiens
  siRNA target sequence for ADPRHL2 (NM_017825.1,899-917).
gatcccttctgccttcaat

SEQ ID NO: 204480 - DNA, 19 bp, Homo sapiens
  siRNA target sequence for ADPRHL2 (NM_017825.1,923-941).
ccaaaggactctcatttat

SEQ ID NO: 204481 - DNA, 19 bp, Homo sapiens
  siRNA target sequence for ADPRHL2 (NM_017825.1,924-942).
caaaggactctcatttatt

SEQ ID NO: 204482 - DNA, 19 bp, Homo sapiens
  siRNA target sequence for ADPRHL2 (NM_017825.1,928-946).
ggactctcatttattccat

SEQ ID NO: 204483 - DNA, 19 bp, Homo sapiens
  siRNA target sequence for ADPRHL2 (NM_017825.1,1092-1110).
cgtgtcttccagaagagtt

SEQ ID NO: 204484 - DNA, 19 bp, Homo sapiens
  siRNA target sequence for ASAHL (NM_014435.1,470-488).
ccatggtcggaatttggat

SEQ ID NO: 204485 - DNA, 19 bp, Homo sapiens
  siRNA target sequence for ASAHL (NM_014435.1,520-538).
cagtggatgtgcaattctt

SEQ ID NO: 204486 - DNA, 19 bp, Homo sapiens
  siRNA target sequence for ASAHL (NM_014435.1,555-573).
gcattcacaggaactactt

SEQ ID NO: 204487 - DNA, 19 bp, Homo sapiens
  siRNA target sequence for ASAHL (NM_014435.1,556-574).
cattcacaggaactacttt

SEQ ID NO: 204488 - DNA, 19 bp, Homo sapiens
  siRNA target sequence for ASAHL (NM_014435.1,579-597).
ggctatgtaggattatgga

SEQ ID NO: 204489 - DNA, 19 bp, Homo sapiens
  siRNA target sequence for ASAHL (NM_014435.1,601-619).
gccagagcccacacaagtt

SEQ ID NO: 204490 - DNA, 19 bp, Homo sapiens
  siRNA target sequence for ASAHL (NM_014435.1,603-621).
cagagcccacacaagttta

SEQ ID NO: 204491 - DNA, 19 bp, Homo sapiens
  siRNA target sequence for ASAHL (NM_014435.1,605-623).
gagcccacacaagtttaca

SEQ ID NO: 204492 - DNA, 19 bp, Homo sapiens
  siRNA target sequence for ASAHL (NM_014435.1,608-626).
cccacacaagtttacagtt

SEQ ID NO: 204493 - DNA, 19 bp, Homo sapiens
  siRNA target sequence for ASAHL (NM_014435.1,609-627).
ccacacaagtttacagttt

SEQ ID NO: 204494 - DNA, 19 bp, Homo sapiens
  siRNA target sequence for ATP5C1 (NM_005174.1,181-199).
ggtagcggcagcaaaatat

SEQ ID NO: 204495 - DNA, 19 bp, Homo sapiens
  siRNA target sequence for ATP5C1 (NM_005174.1,244-262).
gggatctttagctctgtat

SEQ ID NO: 204496 - DNA, 19 bp, Homo sapiens
  siRNA target sequence for ATP5C1 (NM_005174.1,246-264).
gatctttagctctgtatga

SEQ ID NO: 204497 - DNA, 19 bp, Homo sapiens
  siRNA target sequence for ATP5C1 (NM_005174.1,298-316).
gaaacacctccttattggt

SEQ ID NO: 204498 - DNA, 19 bp, Homo sapiens
  siRNA target sequence for ATP5C1 (NM_005174.1,354-372).
cctccattgctaaacagat

SEQ ID NO: 204499 - DNA, 19 bp, Homo sapiens
  siRNA target sequence for ATP5C1 (NM_005174.1,462-480).
ctcattctgaccagtttct

SEQ ID NO: 204500 - DNA, 19 bp, Homo sapiens
  siRNA target sequence for ATP5C1 (NM_005174.1,475-493).
gtttctggtggcattcaaa

SEQ ID NO: 204501 - DNA, 19 bp, Homo sapiens
  siRNA target sequence for ATP5C1 (NM_005174.1,572-590).
gatgaaggctccatcatct

SEQ ID NO: 204502 - DNA, 19 bp, Homo sapiens
  siRNA target sequence for ATP5C1 (NM_005174.1,635-653).
cccatcttttcccttaata

SEQ ID NO: 204503 - DNA, 19 bp, Homo sapiens
  siRNA target sequence for ATP5C1 (NM_005174.1,663-681).
gtgctgacagcatgagtat

SEQ ID NO: 204504 - DNA, 19 bp, Homo sapiens
  siRNA target sequence for ATP5C1 (NM_005174.1,665-683).
gctgacagcatgagtatct

SEQ ID NO: 204505 - DNA, 19 bp, Homo sapiens
  siRNA target sequence for ATP5C1 (NM_005174.1,676-694).
gagtatctatgacgatatt

SEQ ID NO: 204506 - DNA, 19 bp, Homo sapiens
  siRNA target sequence for ATP5C1 (NM_005174.1,678-696).
gtatctatgacgatattga

SEQ ID NO: 204507 - DNA, 19 bp, Homo sapiens
  siRNA target sequence for ATP5C1 (NM_005174.1,698-716).
gctgacgtgctgcaaaatt

SEQ ID NO: 204508 - DNA, 19 bp, Homo sapiens
  siRNA target sequence for ATP5C1 (NM_005174.1,699-717).
ctgacgtgctgcaaaatta

SEQ ID NO: 204509 - DNA, 19 bp, Homo sapiens
  siRNA target sequence for ATP5C1 (NM_005174.1,703-721).
cgtgctgcaaaattaccaa

SEQ ID NO: 204510 - DNA, 19 bp, Homo sapiens
  siRNA target sequence for ATP5C1 (NM_005174.1,731-749).
ctggccaacatcatctact

SEQ ID NO: 204511 - DNA, 19 bp, Homo sapiens
  siRNA target sequence for ATP5C1 (NM_005174.1,734-752).
gccaacatcatctactact

SEQ ID NO: 204512 - DNA, 19 bp, Homo sapiens
  siRNA target sequence for ATP5C1 (NM_005174.1,872-890).
gctgtcatcacaaaagagt

SEQ ID NO: 204513 - DNA, 19 bp, Homo sapiens
  siRNA target sequence for ATP5C1 (NM_005174.1,887-905).
gagttgattgaaattatct

SEQ ID NO: 204514 - DNA, 19 bp, Homo sapiens
  siRNA target sequence for ATP5D (NM_001687.3,232-250).
ctcccacgcaggtgttctt

SEQ ID NO: 204515 - DNA, 19 bp, Homo sapiens
  siRNA target sequence for ATP5D (NM_001687.3,234-252).
cccacgcaggtgttcttca

SEQ ID NO: 204516 - DNA, 19 bp, Homo sapiens
  siRNA target sequence for ATP5D (NM_001687.3,372-390).
gacggcaccacctccaaat

SEQ ID NO: 204517 - DNA, 19 bp, Homo sapiens
  siRNA target sequence for ATP5D (NM_001687.3,379-397).
ccacctccaaatactttgt

SEQ ID NO: 204518 - DNA, 19 bp, Homo sapiens
  siRNA target sequence for ATP5D (NM_001687.3,457-475).
ccgtgacgctggacatgtt

SEQ ID NO: 204519 - DNA, 19 bp, Homo sapiens
  siRNA target sequence for ATP5O (NM_001697.1,70-88).
caggtgcgatgcttcagta

SEQ ID NO: 204520 - DNA, 19 bp, Homo sapiens
  siRNA target sequence for ATP5O (NM_001697.1,122-140).
ggcctcctgttcaggtata

SEQ ID NO: 204521 - DNA, 19 bp, Homo sapiens
  siRNA target sequence for ATP5O (NM_001697.1,155-173).
gctatgccacagctcttta

SEQ ID NO: 204522 - DNA, 19 bp, Homo sapiens
  siRNA target sequence for ATP5O (NM_001697.1,182-200).
catcaaaacagaataagct

SEQ ID NO: 204523 - DNA, 19 bp, Homo sapiens
  siRNA target sequence for ATP5O (NM_001697.1,208-226).
gtagaaaaggagttgttga

SEQ ID NO: 204524 - DNA, 19 bp, Homo sapiens
  siRNA target sequence for ATP5O (NM_001697.1,490-508).
gccacactctctgaattaa

SEQ ID NO: 204525 - DNA, 19 bp, Homo sapiens
  siRNA target sequence for ATP5O (NM_001697.1,491-509).
ccacactctctgaattaaa

SEQ ID NO: 204526 - DNA, 19 bp, Homo sapiens
  siRNA target sequence for ATP5O (NM_001697.1,492-510).
cacactctctgaattaaaa

SEQ ID NO: 204527 - DNA, 19 bp, Homo sapiens
  siRNA target sequence for ATP5O (NM_001697.1,533-551).
gtcaaggccaagtattgaa

SEQ ID NO: 204528 - DNA, 19 bp, Homo sapiens
  siRNA target sequence for ATP5O (NM_001697.1,535-553).
caaggccaagtattgaaat

SEQ ID NO: 204529 - DNA, 19 bp, Homo sapiens
  siRNA target sequence for ATP5O (NM_001697.1,549-567).
gaaattggaggctaagact

SEQ ID NO: 204530 - DNA, 19 bp, Homo sapiens
  siRNA target sequence for ATP5O (NM_001697.1,595-613).
gtgcgcattggcgagaaat

SEQ ID NO: 204531 - DNA, 19 bp, Homo sapiens
  siRNA target sequence for ATP5O (NM_001697.1,597-615).
gcgcattggcgagaaatat

SEQ ID NO: 204532 - DNA, 19 bp, Homo sapiens
  siRNA target sequence for ATP5O (NM_001697.1,599-617).
gcattggcgagaaatatgt

SEQ ID NO: 204533 - DNA, 19 bp, Homo sapiens
  siRNA target sequence for ATP5O (NM_001697.1,600-618).
cattggcgagaaatatgtt

SEQ ID NO: 204534 - DNA, 19 bp, Homo sapiens
  siRNA target sequence for ATP5O (NM_001697.1,605-623).
gcgagaaatatgttgacat

SEQ ID NO: 204535 - DNA, 19 bp, Homo sapiens
  siRNA target sequence for ATP5O (NM_001697.1,624-642).
gtctgtcaagaccaagatt

SEQ ID NO: 204536 - DNA, 19 bp, Homo sapiens
  siRNA target sequence for ATP5O (NM_001697.1,658-676).
gctatgcgggagattgtct

SEQ ID NO: 204537 - DNA, 19 bp, Homo sapiens
  siRNA target sequence for ATP6AP2 (NM_005765.2,128-146).
cgttggtggcgggtgtttt

SEQ ID NO: 204538 - DNA, 19 bp, Homo sapiens
  siRNA target sequence for ATP6AP2 (NM_005765.2,142-160).
gttttggggaacgagttta

SEQ ID NO: 204539 - DNA, 19 bp, Homo sapiens
  siRNA target sequence for ATP6AP2 (NM_005765.2,147-165).
ggggaacgagtttagtata

SEQ ID NO: 204540 - DNA, 19 bp, Homo sapiens
  siRNA target sequence for ATP6AP2 (NM_005765.2,148-166).
gggaacgagtttagtatat

SEQ ID NO: 204541 - DNA, 19 bp, Homo sapiens
  siRNA target sequence for ATP6AP2 (NM_005765.2,149-167).
ggaacgagtttagtatatt

SEQ ID NO: 204542 - DNA, 19 bp, Homo sapiens
  siRNA target sequence for ATP6AP2 (NM_005765.2,150-168).
gaacgagtttagtatatta

SEQ ID NO: 204543 - DNA, 19 bp, Homo sapiens
  siRNA target sequence for ATP6AP2 (NM_005765.2,153-171).
cgagtttagtatattaaaa

SEQ ID NO: 204544 - DNA, 19 bp, Homo sapiens
  siRNA target sequence for ATP6AP2 (NM_005765.2,184-202).
gttgttttccgaaatggaa

SEQ ID NO: 204545 - DNA, 19 bp, Homo sapiens
  siRNA target sequence for ATP6AP2 (NM_005765.2,293-311).
cagtgggtaacctgtttca

SEQ ID NO: 204546 - DNA, 19 bp, Homo sapiens
  siRNA target sequence for ATP6AP2 (NM_005765.2,370-388).
ccaggcagtgtcatttcgt

SEQ ID NO: 204547 - DNA, 19 bp, Homo sapiens
  siRNA target sequence for ATP6AP2 (NM_005765.2,371-389).
caggcagtgtcatttcgta

SEQ ID NO: 204548 - DNA, 19 bp, Homo sapiens
  siRNA target sequence for ATP6AP2 (NM_005765.2,399-417).
gaatgcagttccttttagt

SEQ ID NO: 204549 - DNA, 19 bp, Homo sapiens
  siRNA target sequence for ATP6AP2 (NM_005765.2,485-503).
ctcccagtgaggaaagagt

SEQ ID NO: 204550 - DNA, 19 bp, Homo sapiens
  siRNA target sequence for ATP6AP2 (NM_005765.2,519-537).
ggcaaactcagtgtttgaa

SEQ ID NO: 204551 - DNA, 19 bp, Homo sapiens
  siRNA target sequence for ATP6AP2 (NM_005765.2,564-582).
ccgtaatcgcctgtttcaa

SEQ ID NO: 204552 - DNA, 19 bp, Homo sapiens
  siRNA target sequence for ATP6AP2 (NM_005765.2,566-584).
gtaatcgcctgtttcaaga

SEQ ID NO: 204553 - DNA, 19 bp, Homo sapiens
  siRNA target sequence for ATP6AP2 (NM_005765.2,571-589).
cgcctgtttcaagaaaact

SEQ ID NO: 204554 - DNA, 19 bp, Homo sapiens
  siRNA target sequence for ATP6AP2 (NM_005765.2,623-641).
gtaggaacaatgaagttga

SEQ ID NO: 204555 - DNA, 19 bp, Homo sapiens
  siRNA target sequence for ATP6AP2 (NM_005765.2,661-679).
ctgcaagtgctacatgata

SEQ ID NO: 204556 - DNA, 19 bp, Homo sapiens
  siRNA target sequence for ATP6AP2 (NM_005765.2,663-681).
gcaagtgctacatgatatt

SEQ ID NO: 204557 - DNA, 19 bp, Homo sapiens
  siRNA target sequence for ATP6AP2 (NM_005765.2,667-685).
gtgctacatgatatttcaa

SEQ ID NO: 204558 - DNA, 19 bp, Homo sapiens
  siRNA target sequence for ATP6AP2 (NM_005765.2,690-708).
gctgtctcgtcataagcat

SEQ ID NO: 204559 - DNA, 19 bp, Homo sapiens
  siRNA target sequence for ATP6AP2 (NM_005765.2,706-724).
catctagccaaggatcatt

SEQ ID NO: 204560 - DNA, 19 bp, Homo sapiens
  siRNA target sequence for ATP6AP2 (NM_005765.2,721-739).
cattctcctgatttatatt

SEQ ID NO: 204561 - DNA, 19 bp, Homo sapiens
  siRNA target sequence for ATP6AP2 (NM_005765.2,809-827).
cttctaagatccttgttga

SEQ ID NO: 204562 - DNA, 19 bp, Homo sapiens
  siRNA target sequence for ATP6AP2 (NM_005765.2,974-992).
gtccctataaccttgcata

SEQ ID NO: 204563 - DNA, 19 bp, Homo sapiens
  siRNA target sequence for ATP6AP2 (NM_005765.2,976-994).
ccctataaccttgcatata

SEQ ID NO: 204564 - DNA, 19 bp, Homo sapiens
  siRNA target sequence for ATP6AP2 (NM_005765.2,977-995).
cctataaccttgcatataa

SEQ ID NO: 204565 - DNA, 19 bp, Homo sapiens
  siRNA target sequence for ATP6AP2 (NM_005765.2,984-1002).
ccttgcatataagtataat

SEQ ID NO: 204566 - DNA, 19 bp, Homo sapiens
  siRNA target sequence for ATP6AP2 (NM_005765.2,1023-1041).
caacatggtactttggata

SEQ ID NO: 204567 - DNA, 19 bp, Homo sapiens
  siRNA target sequence for ATP6AP2 (NM_005765.2,1089-1107).
gaacatggatcctggatat

SEQ ID NO: 204568 - DNA, 19 bp, Homo sapiens
  siRNA target sequence for ATP6AP2 (NM_005765.2,1092-1110).
catggatcctggatatgat

SEQ ID NO: 204569 - DNA, 19 bp, Homo sapiens
  siRNA target sequence for ATP6AP2 (NM_005765.2,1102-1120).
ggatatgatagcatcattt

SEQ ID NO: 204570 - DNA, 19 bp, Homo sapiens
  siRNA target sequence for ATP6AP2 (NM_005765.2,1103-1121).
gatatgatagcatcattta

SEQ ID NO: 204571 - DNA, 19 bp, Homo sapiens
  siRNA target sequence for ATP6AP2 (NM_005765.2,1108-1126).
gatagcatcatttatagga

SEQ ID NO: 204572 - DNA, 19 bp, Homo sapiens
  siRNA target sequence for ATP6AP2 (NM_005765.2,1135-1153).
cagaagattcgaatggatt

SEQ ID NO: 204573 - DNA, 19 bp, Homo sapiens
  siRNA target sequence for ATP6V0B (NM_004047.2,169-187).
ggagtctgctacaccattt

SEQ ID NO: 204574 - DNA, 19 bp, Homo sapiens
  siRNA target sequence for ATP6V0B (NM_004047.2,170-188).
gagtctgctacaccatttt

SEQ ID NO: 204575 - DNA, 19 bp, Homo sapiens
  siRNA target sequence for ATP6V0B (NM_004047.2,294-312).
ggcagcctggggcatctat

SEQ ID NO: 204576 - DNA, 19 bp, Homo sapiens
  siRNA target sequence for ATP6V0B (NM_004047.2,298-316).
gcctggggcatctatatta

SEQ ID NO: 204577 - DNA, 19 bp, Homo sapiens
  siRNA target sequence for ATP6V0B (NM_004047.2,671-689).
gggtcatcgtcgcaattct

SEQ ID NO: 204578 - DNA, 19 bp, Homo sapiens
  siRNA target sequence for ATP6V0B (NM_004047.2,672-690).
ggtcatcgtcgcaattctt

SEQ ID NO: 204579 - DNA, 19 bp, Homo sapiens
  siRNA target sequence for ATP6V0D1 (NM_004691.3,104-122).
cgttcttcccggagcttta

SEQ ID NO: 204580 - DNA, 19 bp, Homo sapiens
  siRNA target sequence for ATP6V0D1 (NM_004691.3,246-264).
gcagagcactgattatggt

SEQ ID NO: 204581 - DNA, 19 bp, Homo sapiens
  siRNA target sequence for ATP6V0D1 (NM_004691.3,965-983).
cgctggaggaccgattctt

SEQ ID NO: 204582 - DNA, 19 bp, Homo sapiens
  siRNA target sequence for ATP6V0D1 (NM_004691.3,966-984).
gctggaggaccgattcttt

SEQ ID NO: 204583 - DNA, 19 bp, Homo sapiens
  siRNA target sequence for ATP6V0D1 (NM_004691.3,991-1009).
gaggtaaagctgaacaagt

SEQ ID NO: 204584 - DNA, 19 bp, Homo sapiens
  siRNA target sequence for ATP6V0D1 (NM_004691.3,1086-1104).
cgtgtggatcgctgaatgt

SEQ ID NO: 204585 - DNA, 19 bp, Homo sapiens
  siRNA target sequence for ATP6V1D (NM_015994.2,181-199).
cgggcaaagaccgaattga

SEQ ID NO: 204586 - DNA, 19 bp, Homo sapiens
  siRNA target sequence for ATP6V1D (NM_015994.2,182-200).
gggcaaagaccgaattgaa

SEQ ID NO: 204587 - DNA, 19 bp, Homo sapiens
  siRNA target sequence for ATP6V1D (NM_015994.2,293-311).
cttaactcttcgatttcga

SEQ ID NO: 204588 - DNA, 19 bp, Homo sapiens
  siRNA target sequence for ATP6V1D (NM_015994.2,303-321).
cgatttcgacagatcctaa

SEQ ID NO: 204589 - DNA, 19 bp, Homo sapiens
  siRNA target sequence for ATP6V1D (NM_015994.2,413-431).
cagcactacagttatccaa

SEQ ID NO: 204590 - DNA, 19 bp, Homo sapiens
  siRNA target sequence for ATP6V1D (NM_015994.2,415-433).
gcactacagttatccaaaa

SEQ ID NO: 204591 - DNA, 19 bp, Homo sapiens
  siRNA target sequence for ATP6V1D (NM_015994.2,416-434).
cactacagttatccaaaat

SEQ ID NO: 204592 - DNA, 19 bp, Homo sapiens
  siRNA target sequence for ATP6V1D (NM_015994.2,452-470).
gaagattcgagcgaagaaa

SEQ ID NO: 204593 - DNA, 19 bp, Homo sapiens
  siRNA target sequence for ATP6V1D (NM_015994.2,455-473).
gattcgagcgaagaaagat

SEQ ID NO: 204594 - DNA, 19 bp, Homo sapiens
  siRNA target sequence for ATP6V1D (NM_015994.2,496-514).
cagtatttgaacattacca

SEQ ID NO: 204595 - DNA, 19 bp, Homo sapiens
  siRNA target sequence for ATP6V1D (NM_015994.2,629-647).
gcagacttcttttgttact

SEQ ID NO: 204596 - DNA, 19 bp, Homo sapiens
  siRNA target sequence for ATP6V1D (NM_015994.2,701-719).
catcattccccggattgaa

SEQ ID NO: 204597 - DNA, 19 bp, Homo sapiens
  siRNA target sequence for ATP6V1D (NM_015994.2,710-728).
ccggattgaacgtactctt

SEQ ID NO: 204598 - DNA, 19 bp, Homo sapiens
  siRNA target sequence for ATP6V1D (NM_015994.2,717-735).
gaacgtactcttgcttata

SEQ ID NO: 204599 - DNA, 19 bp, Homo sapiens
  siRNA target sequence for ATP6V1D (NM_015994.2,720-738).
cgtactcttgcttatatca

SEQ ID NO: 204600 - DNA, 19 bp, Homo sapiens
  siRNA target sequence for ATP6V1D (NM_015994.2,721-739).
gtactcttgcttatatcat

SEQ ID NO: 204601 - DNA, 19 bp, Homo sapiens
  siRNA target sequence for ATP6V1D (NM_015994.2,762-780).
cgagaagagttctataggt

SEQ ID NO: 204602 - DNA, 19 bp, Homo sapiens
  siRNA target sequence for ATP6V1D (NM_015994.2,763-781).
gagaagagttctataggtt

SEQ ID NO: 204603 - DNA, 19 bp, Homo sapiens
  siRNA target sequence for ATP6V1D (NM_015994.2,765-783).
gaagagttctataggttaa

SEQ ID NO: 204604 - DNA, 19 bp, Homo sapiens
  siRNA target sequence for ATP6V1D (NM_015994.2,863-881).
gttggagcctgctaatctt

SEQ ID NO: 204605 - DNA, 19 bp, Homo sapiens
  siRNA target sequence for ATP6V1D (NM_015994.2,893-911).
gaaggacgaggatcttcta

SEQ ID NO: 204606 - DNA, 19 bp, Homo sapiens
  siRNA target sequence for ATP6V1D (NM_015994.2,899-917).
cgaggatcttctatttgaa

SEQ ID NO: 204607 - DNA, 19 bp, Homo sapiens
  siRNA target sequence for ATP6V1G1 (NM_004888.2,359-377).
ggcagaacagggatgaagt

SEQ ID NO: 204608 - DNA, 19 bp, Homo sapiens
  siRNA target sequence for ATP6V1G1 (NM_004888.2,408-426).
cattcggccagaaatccat

SEQ ID NO: 204609 - DNA, 19 bp, Homo sapiens
  siRNA target sequence for ATP6V1G1 (NM_004888.2,412-430).
cggccagaaatccatgaaa

SEQ ID NO: 204610 - DNA, 19 bp, Homo sapiens
  siRNA target sequence for ATP6V1G1 (NM_004888.2,413-431).
ggccagaaatccatgaaaa

SEQ ID NO: 204611 - DNA, 19 bp, Homo sapiens
  siRNA target sequence for ATP6V1G2 (NM_130463.2,296-314).
ccagtcagtcccaaggtat

SEQ ID NO: 204612 - DNA, 19 bp, Homo sapiens
  siRNA target sequence for ATP6V1G2 (NM_130463.2,355-373).
gtggcagatgccagaaaga

SEQ ID NO: 204613 - DNA, 19 bp, Homo sapiens
  siRNA target sequence for ATP6V1G2 (NM_130463.2,437-455).
gagagcgagagcacgaatt

SEQ ID NO: 204614 - DNA, 19 bp, Homo sapiens
  siRNA target sequence for ATP6V1G2 (NM_130463.2,624-642).
ccccaactaccggatttct

SEQ ID NO: 204615 - DNA, 19 bp, Homo sapiens
  siRNA target sequence for ATP6V1G3 (NM_133262.2,233-251).
gaaattgaccagtacagaa

SEQ ID NO: 204616 - DNA, 19 bp, Homo sapiens
  siRNA target sequence for ATP6V1G3 (NM_133262.2,247-265).
cagaatgcagagagataaa

SEQ ID NO: 204617 - DNA, 19 bp, Homo sapiens
  siRNA target sequence for ATP6V1G3 (NM_133262.2,266-284).
gagtttcgactaaaacaat

SEQ ID NO: 204618 - DNA, 19 bp, Homo sapiens
  siRNA target sequence for ATP6V1G3 (NM_133262.2,272-290).
cgactaaaacaatctaaga

SEQ ID NO: 204619 - DNA, 19 bp, Homo sapiens
  siRNA target sequence for ATP6V1G3 (NM_133262.2,273-291).
gactaaaacaatctaagat

SEQ ID NO: 204620 - DNA, 19 bp, Homo sapiens
  siRNA target sequence for ATP6V1G3 (NM_133262.2,346-364).
gatacaagaacttaatgga

SEQ ID NO: 204621 - DNA, 19 bp, Homo sapiens
  siRNA target sequence for ATP6V1G3 (NM_133262.2,356-374).
cttaatggacactacaata

SEQ ID NO: 204622 - DNA, 19 bp, Homo sapiens
  siRNA target sequence for ATP6V1G3 (NM_133262.2,362-380).
ggacactacaataagtata

SEQ ID NO: 204623 - DNA, 19 bp, Homo sapiens
  siRNA target sequence for ATP6V1G3 (NM_133262.2,363-381).
gacactacaataagtatat

SEQ ID NO: 204624 - DNA, 19 bp, Homo sapiens
  siRNA target sequence for ATP6V1G3 (NM_133262.2,367-385).
ctacaataagtatatggaa

SEQ ID NO: 204625 - DNA, 19 bp, Homo sapiens
  siRNA target sequence for ATP6V1G3 (NM_133326.1,191-209).
ctgcatctacttttcctaa

SEQ ID NO: 204626 - DNA, 19 bp, Homo sapiens
  siRNA target sequence for BPHL (NM_004332.1,304-322).
gcgttcagctgcattacca

SEQ ID NO: 204627 - DNA, 19 bp, Homo sapiens
  siRNA target sequence for BPHL (NM_004332.1,353-371).
gctacttcctgggatgtta

SEQ ID NO: 204628 - DNA, 19 bp, Homo sapiens
  siRNA target sequence for BPHL (NM_004332.1,483-501).
gatttcccagcagactttt

SEQ ID NO: 204629 - DNA, 19 bp, Homo sapiens
  siRNA target sequence for BPHL (NM_004332.1,533-551).
gatgaaggcgctgaagttt

SEQ ID NO: 204630 - DNA, 19 bp, Homo sapiens
  siRNA target sequence for BPHL (NM_004332.1,584-602).
gggcataaccgcactcatt

SEQ ID NO: 204631 - DNA, 19 bp, Homo sapiens
  siRNA target sequence for BPHL (NM_004332.1,597-615).
ctcattgctgctgcaaaat

SEQ ID NO: 204632 - DNA, 19 bp, Homo sapiens
  siRNA target sequence for BPHL (NM_004332.1,610-628).
caaaatatccatcttacat

SEQ ID NO: 204633 - DNA, 19 bp, Homo sapiens
  siRNA target sequence for BPHL (NM_004332.1,671-689).
cgaagacagcatgatatat

SEQ ID NO: 204634 - DNA, 19 bp, Homo sapiens
  siRNA target sequence for BPHL (NM_004332.1,694-712).
gcatccgagatgtttccaa

SEQ ID NO: 204635 - DNA, 19 bp, Homo sapiens
  siRNA target sequence for BPHL (NM_004332.1,749-767).
ctatgggtatgactacttt

SEQ ID NO: 204636 - DNA, 19 bp, Homo sapiens
  siRNA target sequence for BPHL (NM_004332.1,792-810).
gatggcataagacagttta

SEQ ID NO: 204637 - DNA, 19 bp, Homo sapiens
  siRNA target sequence for BPHL (NM_004332.1,796-814).
gcataagacagtttaaaca

SEQ ID NO: 204638 - DNA, 19 bp, Homo sapiens
  siRNA target sequence for BPHL (NM_004332.1,907-925).
ggtttcatgccgacttcat

SEQ ID NO: 204639 - DNA, 19 bp, Homo sapiens
  siRNA target sequence for BPHL (NM_004332.1,908-926).
gtttcatgccgacttcatt

SEQ ID NO: 204640 - DNA, 19 bp, Homo sapiens
  siRNA target sequence for BPHL (NM_004332.1,912-930).
catgccgacttcattcata

SEQ ID NO: 204641 - DNA, 19 bp, Homo sapiens
  siRNA target sequence for BPHL (NM_004332.1,943-961).
gctcacggctgcatttgat

SEQ ID NO: 204642 - DNA, 19 bp, Homo sapiens
  siRNA target sequence for BPHL (NM_004332.1,997-1015).
cagatgaattcaacaagtt

SEQ ID NO: 204643 - DNA, 19 bp, Homo sapiens
  siRNA target sequence for C11orf8 (NM_001584.1,155-173).
ccataacggtggatgagta

SEQ ID NO: 204644 - DNA, 19 bp, Homo sapiens
  siRNA target sequence for C11orf8 (NM_001584.1,193-211).
gcattcacgcactacaaca

SEQ ID NO: 204645 - DNA, 19 bp, Homo sapiens
  siRNA target sequence for C11orf8 (NM_001584.1,261-279).
cccatatgacactccaaaa

SEQ ID NO: 204646 - DNA, 19 bp, Homo sapiens
  siRNA target sequence for C11orf8 (NM_001584.1,315-333).
cacacactccagaacagat

SEQ ID NO: 204647 - DNA, 19 bp, Homo sapiens
  siRNA target sequence for C11orf8 (NM_001584.1,364-382).
ctccacacaggcgatttca

SEQ ID NO: 204648 - DNA, 19 bp, Homo sapiens
  siRNA target sequence for C11orf8 (NM_001584.1,397-415).
ccctcagaggttaagaagt

SEQ ID NO: 204649 - DNA, 19 bp, Homo sapiens
  siRNA target sequence for C11orf8 (NM_001584.1,398-416).
cctcagaggttaagaagtt

SEQ ID NO: 204650 - DNA, 19 bp, Homo sapiens
  siRNA target sequence for C11orf8 (NM_001584.1,399-417).
ctcagaggttaagaagttt

SEQ ID NO: 204651 - DNA, 19 bp, Homo sapiens
  siRNA target sequence for C11orf8 (NM_001584.1,431-449).
gaaacctgccatatgaata

SEQ ID NO: 204652 - DNA, 19 bp, Homo sapiens
  siRNA target sequence for C11orf8 (NM_001584.1,482-500).
catttgataaggaattcat

SEQ ID NO: 204653 - DNA, 19 bp, Homo sapiens
  siRNA target sequence for C11orf8 (NM_001584.1,498-516).
catggcagaccttgttaaa

SEQ ID NO: 204654 - DNA, 19 bp, Homo sapiens
  siRNA target sequence for C11orf8 (NM_001584.1,582-600).
cctcctgacaaacagtatt

SEQ ID NO: 204655 - DNA, 19 bp, Homo sapiens
  siRNA target sequence for C11orf8 (NM_001584.1,583-601).
ctcctgacaaacagtattt

SEQ ID NO: 204656 - DNA, 19 bp, Homo sapiens
  siRNA target sequence for C11orf8 (NM_001584.1,625-643).
gtgaagggattcaggatat

SEQ ID NO: 204657 - DNA, 19 bp, Homo sapiens
  siRNA target sequence for C11orf8 (NM_001584.1,729-747).
ccctgagggcattgacata

SEQ ID NO: 204658 - DNA, 19 bp, Homo sapiens
  siRNA target sequence for C11orf8 (NM_001584.1,731-749).
ctgagggcattgacatact

SEQ ID NO: 204659 - DNA, 19 bp, Homo sapiens
  siRNA target sequence for C11orf8 (NM_001584.1,787-805).
gttccaaaggagcttcaaa

SEQ ID NO: 204660 - DNA, 19 bp, Homo sapiens
  siRNA target sequence for C11orf8 (NM_001584.1,883-901).
gaaggttatggcatcatga

SEQ ID NO: 204661 - DNA, 19 bp, Homo sapiens
  siRNA target sequence for C11orf8 (NM_001584.1,897-915).
catgaccgacggttacaca

SEQ ID NO: 204662 - DNA, 19 bp, Homo sapiens
  siRNA target sequence for C11orf8 (NM_001584.1,907-925).
ggttacacaacgtacatca

SEQ ID NO: 204663 - DNA, 19 bp, Homo sapiens
  siRNA target sequence for C11orf8 (NM_001584.1,908-926).
gttacacaacgtacatcaa

SEQ ID NO: 204664 - DNA, 19 bp, Homo sapiens
  siRNA target sequence for C11orf8 (NM_001584.1,955-973).
ccgaccaaccctccaatta

SEQ ID NO: 204665 - DNA, 19 bp, Homo sapiens
  siRNA target sequence for C11orf8 (NM_001584.1,956-974).
cgaccaaccctccaattat

SEQ ID NO: 204666 - DNA, 19 bp, Homo sapiens
  siRNA target sequence for C11orf8 (NM_001584.1,957-975).
gaccaaccctccaattata

SEQ ID NO: 204667 - DNA, 19 bp, Homo sapiens
  siRNA target sequence for C20orf147 (NM_152667.1,121-139).
gtgataaaactcttacaat

SEQ ID NO: 204668 - DNA, 19 bp, Homo sapiens
  siRNA target sequence for C20orf147 (NM_152667.1,123-141).
gataaaactcttacaatca

SEQ ID NO: 204669 - DNA, 19 bp, Homo sapiens
  siRNA target sequence for C20orf147 (NM_152667.1,136-154).
caatcaaaataccattata

SEQ ID NO: 204670 - DNA, 19 bp, Homo sapiens
  siRNA target sequence for C20orf147 (NM_152667.1,171-189).
catctgtgataaagttcaa

SEQ ID NO: 204671 - DNA, 19 bp, Homo sapiens
  siRNA target sequence for C20orf147 (NM_152667.1,174-192).
ctgtgataaagttcaagtt

SEQ ID NO: 204672 - DNA, 19 bp, Homo sapiens
  siRNA target sequence for C20orf147 (NM_152667.1,190-208).
gttaaactcagcaaggaat

SEQ ID NO: 204673 - DNA, 19 bp, Homo sapiens
  siRNA target sequence for C20orf147 (NM_152667.1,238-256).
gatttaaggacttcacatt

SEQ ID NO: 204674 - DNA, 19 bp, Homo sapiens
  siRNA target sequence for C20orf147 (NM_152667.1,283-301).
ggtggtgcagccaatagaa

SEQ ID NO: 204675 - DNA, 19 bp, Homo sapiens
  siRNA target sequence for C20orf147 (NM_152667.1,287-305).
gtgcagccaatagaaaatt

SEQ ID NO: 204676 - DNA, 19 bp, Homo sapiens
  siRNA target sequence for C20orf147 (NM_152667.1,335-353).
ctacacgtttacagcatat

SEQ ID NO: 204677 - DNA, 19 bp, Homo sapiens
  siRNA target sequence for C20orf147 (NM_152667.1,367-385).
gacgtcaaagccatgctta

SEQ ID NO: 204678 - DNA, 19 bp, Homo sapiens
  siRNA target sequence for C20orf147 (NM_152667.1,400-418).
gaggtccgcctacttctat

SEQ ID NO: 204679 - DNA, 19 bp, Homo sapiens
  siRNA target sequence for C20orf147 (NM_152667.1,402-420).
ggtccgcctacttctatta

SEQ ID NO: 204680 - DNA, 19 bp, Homo sapiens
  siRNA target sequence for C20orf147 (NM_152667.1,406-424).
cgcctacttctattaacga

SEQ ID NO: 204681 - DNA, 19 bp, Homo sapiens
  siRNA target sequence for C20orf147 (NM_152667.1,408-426).
cctacttctattaacgaat

SEQ ID NO: 204682 - DNA, 19 bp, Homo sapiens
  siRNA target sequence for C20orf147 (NM_152667.1,477-495).
ctattttgacgctgttgtt

SEQ ID NO: 204683 - DNA, 19 bp, Homo sapiens
  siRNA target sequence for C20orf147 (NM_152667.1,523-541).
ccagcaccgtccatatttt

SEQ ID NO: 204684 - DNA, 19 bp, Homo sapiens
  siRNA target sequence for C20orf147 (NM_152667.1,527-545).
caccgtccatattttatta

SEQ ID NO: 204685 - DNA, 19 bp, Homo sapiens
  siRNA target sequence for C20orf147 (NM_152667.1,552-570).
caatcttctcggagtacaa

SEQ ID NO: 204686 - DNA, 19 bp, Homo sapiens
  siRNA target sequence for C20orf147 (NM_152667.1,585-603).
gatggtcggtgacacatta

SEQ ID NO: 204687 - DNA, 19 bp, Homo sapiens
  siRNA target sequence for C20orf147 (NM_152667.1,623-641).
gcctcaatgcaggattgaa

SEQ ID NO: 204688 - DNA, 19 bp, Homo sapiens
  siRNA target sequence for C20orf147 (NM_152667.1,643-661).
gcaacagtctggatcaata

SEQ ID NO: 204689 - DNA, 19 bp, Homo sapiens
  siRNA target sequence for C20orf147 (NM_152667.1,644-662).
caacagtctggatcaataa

SEQ ID NO: 204690 - DNA, 19 bp, Homo sapiens
  siRNA target sequence for C20orf147 (NM_152667.1,694-712).
gttccgcattacatggttt

SEQ ID NO: 204691 - DNA, 19 bp, Homo sapiens
  siRNA target sequence for C20orf147 (NM_152667.1,697-715).
ccgcattacatggtttctt

SEQ ID NO: 204692 - DNA, 19 bp, Homo sapiens
  siRNA target sequence for C20orf147 (NM_152667.1,726-744).
gttacctgctctcttacaa

SEQ ID NO: 204693 - DNA, 19 bp, Homo sapiens
  siRNA target sequence for C20orf147 (NM_152667.1,731-749).
ctgctctcttacaaagtat

SEQ ID NO: 204694 - DNA, 19 bp, Homo sapiens
  siRNA target sequence for C22orf1 (NM_001585.2,970-988).
gggacgaccacctatgtga

SEQ ID NO: 204695 - DNA, 19 bp, Homo sapiens
  siRNA target sequence for C22orf1 (NM_001585.2,972-990).
gacgaccacctatgtgaat

SEQ ID NO: 204696 - DNA, 19 bp, Homo sapiens
  siRNA target sequence for C22orf1 (NM_001585.2,995-1013).
ccgtatgcactgtgaacta

SEQ ID NO: 204697 - DNA, 19 bp, Homo sapiens
  siRNA target sequence for CHI3L1 (NM_001276.1,130-148).
ggtgtgaaggcgtctcaaa

SEQ ID NO: 204698 - DNA, 19 bp, Homo sapiens
  siRNA target sequence for CHI3L1 (NM_001276.1,177-195).
gtgctgctctgcatacaaa

SEQ ID NO: 204699 - DNA, 19 bp, Homo sapiens
  siRNA target sequence for CHI3L1 (NM_001276.1,466-484).
cagagtcgccggactttca

SEQ ID NO: 204700 - DNA, 19 bp, Homo sapiens
  siRNA target sequence for CHI3L1 (NM_001276.1,470-488).
gtcgccggactttcatcaa

SEQ ID NO: 204701 - DNA, 19 bp, Homo sapiens
  siRNA target sequence for CHI3L1 (NM_001276.1,472-490).
cgccggactttcatcaagt

SEQ ID NO: 204702 - DNA, 19 bp, Homo sapiens
  siRNA target sequence for CHI3L1 (NM_001276.1,562-580).
gacaaacagcattttacca

SEQ ID NO: 204703 - DNA, 19 bp, Homo sapiens
  siRNA target sequence for CHI3L1 (NM_001276.1,571-589).
cattttaccaccctaatca

SEQ ID NO: 204704 - DNA, 19 bp, Homo sapiens
  siRNA target sequence for CHI3L1 (NM_001276.1,578-596).
ccaccctaatcaaggaaat

SEQ ID NO: 204705 - DNA, 19 bp, Homo sapiens
  siRNA target sequence for CHI3L1 (NM_001276.1,600-618).
ggccgaatttataaaggaa

SEQ ID NO: 204706 - DNA, 19 bp, Homo sapiens
  siRNA target sequence for CHI3L1 (NM_001276.1,732-750).
catcatgacctacgatttt

SEQ ID NO: 204707 - DNA, 19 bp, Homo sapiens
  siRNA target sequence for CHI3L1 (NM_001276.1,844-862).
gctgtggggtacatgttga

SEQ ID NO: 204708 - DNA, 19 bp, Homo sapiens
  siRNA target sequence for CHI3L1 (NM_001276.1,960-978).
ctcaggaccgggaattcca

SEQ ID NO: 204709 - DNA, 19 bp, Homo sapiens
  siRNA target sequence for CHI3L1 (NM_001276.1,1091-1109).
gcaaccagtgggtaggata

SEQ ID NO: 204710 - DNA, 19 bp, Homo sapiens
  siRNA target sequence for CHI3L1 (NM_001276.1,1114-1132).
gaccaggaaagcgtcaaaa

SEQ ID NO: 204711 - DNA, 19 bp, Homo sapiens
  siRNA target sequence for CHI3L1 (NM_001276.1,1117-1135).
caggaaagcgtcaaaagca

SEQ ID NO: 204712 - DNA, 19 bp, Homo sapiens
  siRNA target sequence for CHI3L2 (NM_004000.1,101-119).
caaactggtttgctacttt

SEQ ID NO: 204713 - DNA, 19 bp, Homo sapiens
  siRNA target sequence for CHI3L2 (NM_004000.1,138-156).
cggcaggaaccaggaaaat

SEQ ID NO: 204714 - DNA, 19 bp, Homo sapiens
  siRNA target sequence for CHI3L2 (NM_004000.1,139-157).
ggcaggaaccaggaaaatt

SEQ ID NO: 204715 - DNA, 19 bp, Homo sapiens
  siRNA target sequence for CHI3L2 (NM_004000.1,188-206).
ctctcatctcatctattca

SEQ ID NO: 204716 - DNA, 19 bp, Homo sapiens
  siRNA target sequence for CHI3L2 (NM_004000.1,205-223).
cattcgccagcatcgaaaa

SEQ ID NO: 204717 - DNA, 19 bp, Homo sapiens
  siRNA target sequence for CHI3L2 (NM_004000.1,329-347).
gtacctgtttggttccaaa

SEQ ID NO: 204718 - DNA, 19 bp, Homo sapiens
  siRNA target sequence for CHI3L2 (NM_004000.1,373-391).
ctacatcacgcttggaatt

SEQ ID NO: 204719 - DNA, 19 bp, Homo sapiens
  siRNA target sequence for CHI3L2 (NM_004000.1,376-394).
catcacgcttggaattcat

SEQ ID NO: 204720 - DNA, 19 bp, Homo sapiens
  siRNA target sequence for CHI3L2 (NM_004000.1,379-397).
cacgcttggaattcattaa

SEQ ID NO: 204721 - DNA, 19 bp, Homo sapiens
  siRNA target sequence for CHI3L2 (NM_004000.1,381-399).
cgcttggaattcattaact

SEQ ID NO: 204722 - DNA, 19 bp, Homo sapiens
  siRNA target sequence for CHI3L2 (NM_004000.1,416-434).
gaggaaccataactttgat

SEQ ID NO: 204723 - DNA, 19 bp, Homo sapiens
  siRNA target sequence for CHI3L2 (NM_004000.1,574-592).
ctgcagggaggcaaatgat

SEQ ID NO: 204724 - DNA, 19 bp, Homo sapiens
  siRNA target sequence for CHI3L2 (NM_004000.1,579-597).
gggaggcaaatgattgata

SEQ ID NO: 204725 - DNA, 19 bp, Homo sapiens
  siRNA target sequence for CHI3L2 (NM_004000.1,590-608).
gattgataacagctatcaa

SEQ ID NO: 204726 - DNA, 19 bp, Homo sapiens
  siRNA target sequence for CHI3L2 (NM_004000.1,622-640).
caaaagatctggatttcat

SEQ ID NO: 204727 - DNA, 19 bp, Homo sapiens
  siRNA target sequence for CHI3L2 (NM_004000.1,733-751).
ggccaagctcctactacaa

SEQ ID NO: 204728 - DNA, 19 bp, Homo sapiens
  siRNA target sequence for CHI3L2 (NM_004000.1,734-752).
gccaagctcctactacaat

SEQ ID NO: 204729 - DNA, 19 bp, Homo sapiens
  siRNA target sequence for CHI3L2 (NM_004000.1,916-934).
caggcttcctggcctatta

SEQ ID NO: 204730 - DNA, 19 bp, Homo sapiens
  siRNA target sequence for CHI3L2 (NM_004000.1,1049-1067).
gaccaaggttcagttctta

SEQ ID NO: 204731 - DNA, 19 bp, Homo sapiens
  siRNA target sequence for CHI3L2 (NM_004000.1,1116-1134).
gacttcactggcaaatcct

SEQ ID NO: 204732 - DNA, 19 bp, Homo sapiens
  siRNA target sequence for DBR1 (NM_016216.1,136-154).
cacggcgagctggataaga

SEQ ID NO: 204733 - DNA, 19 bp, Homo sapiens
  siRNA target sequence for DBR1 (NM_016216.1,139-157).
ggcgagctggataagatct

SEQ ID NO: 204734 - DNA, 19 bp, Homo sapiens
  siRNA target sequence for DBR1 (NM_016216.1,140-158).
gcgagctggataagatcta

SEQ ID NO: 204735 - DNA, 19 bp, Homo sapiens
  siRNA target sequence for DBR1 (NM_016216.1,141-159).
cgagctggataagatctat

SEQ ID NO: 204736 - DNA, 19 bp, Homo sapiens
  siRNA target sequence for DBR1 (NM_016216.1,286-304).
cacatgcaaaccttctaca

SEQ ID NO: 204737 - DNA, 19 bp, Homo sapiens
  siRNA target sequence for DBR1 (NM_016216.1,292-310).
caaaccttctacaggtatt

SEQ ID NO: 204738 - DNA, 19 bp, Homo sapiens
  siRNA target sequence for DBR1 (NM_016216.1,306-324).
gtattactctggagagaaa

SEQ ID NO: 204739 - DNA, 19 bp, Homo sapiens
  siRNA target sequence for DBR1 (NM_016216.1,361-379).
catgaagcctcaaatcatt

SEQ ID NO: 204740 - DNA, 19 bp, Homo sapiens
  siRNA target sequence for DBR1 (NM_016216.1,401-419).
gctgggtggcaccaaacat

SEQ ID NO: 204741 - DNA, 19 bp, Homo sapiens
  siRNA target sequence for DBR1 (NM_016216.1,404-422).
gggtggcaccaaacattta

SEQ ID NO: 204742 - DNA, 19 bp, Homo sapiens
  siRNA target sequence for DBR1 (NM_016216.1,405-423).
ggtggcaccaaacatttat

SEQ ID NO: 204743 - DNA, 19 bp, Homo sapiens
  siRNA target sequence for DBR1 (NM_016216.1,408-426).
ggcaccaaacatttattat

SEQ ID NO: 204744 - DNA, 19 bp, Homo sapiens
  siRNA target sequence for DBR1 (NM_016216.1,472-490).
ggaatctctggtatcttta

SEQ ID NO: 204745 - DNA, 19 bp, Homo sapiens
  siRNA target sequence for DBR1 (NM_016216.1,477-495).
ctctggtatctttaaatct

SEQ ID NO: 204746 - DNA, 19 bp, Homo sapiens
  siRNA target sequence for DBR1 (NM_016216.1,479-497).
ctggtatctttaaatctca

SEQ ID NO: 204747 - DNA, 19 bp, Homo sapiens
  siRNA target sequence for DBR1 (NM_016216.1,505-523).
cgaaaaggtcattttgagt

SEQ ID NO: 204748 - DNA, 19 bp, Homo sapiens
  siRNA target sequence for DBR1 (NM_016216.1,528-546).
cccttataattcatctaca

SEQ ID NO: 204749 - DNA, 19 bp, Homo sapiens
  siRNA target sequence for DBR1 (NM_016216.1,542-560).
ctacaatcaggagtatata

SEQ ID NO: 204750 - DNA, 19 bp, Homo sapiens
  siRNA target sequence for DBR1 (NM_016216.1,545-563).
caatcaggagtatatatca

SEQ ID NO: 204751 - DNA, 19 bp, Homo sapiens
  siRNA target sequence for DBR1 (NM_016216.1,607-625).
cctatagatatattcttgt

SEQ ID NO: 204752 - DNA, 19 bp, Homo sapiens
  siRNA target sequence for DBR1 (NM_016216.1,631-649).
gattggccaagaagtatat

SEQ ID NO: 204753 - DNA, 19 bp, Homo sapiens
  siRNA target sequence for DBR1 (NM_016216.1,669-687).
gcaacttcttaagactaaa

SEQ ID NO: 204754 - DNA, 19 bp, Homo sapiens
  siRNA target sequence for DBR1 (NM_016216.1,676-694).
cttaagactaaatcttttt

SEQ ID NO: 204755 - DNA, 19 bp, Homo sapiens
  siRNA target sequence for DBR1 (NM_016216.1,757-775).
ctcaaacctacttattggt

SEQ ID NO: 204756 - DNA, 19 bp, Homo sapiens
  siRNA target sequence for DBR1 (NM_016216.1,814-832).
cagcatcaggcaaaggata

SEQ ID NO: 204757 - DNA, 19 bp, Homo sapiens
  siRNA target sequence for DBR1 (NM_016216.1,878-896).
gcttaccacatagagattt

SEQ ID NO: 204758 - DNA, 19 bp, Homo sapiens
  siRNA target sequence for DBR1 (NM_016216.1,903-921).
gatattagagatagaacat

SEQ ID NO: 204759 - DNA, 19 bp, Homo sapiens
  siRNA target sequence for DBR1 (NM_016216.1,975-993).
cagggctacggatgatctt

SEQ ID NO: 204760 - DNA, 19 bp, Homo sapiens
  siRNA target sequence for DBR1 (NM_016216.1,979-997).
gctacggatgatcttatta

SEQ ID NO: 204761 - DNA, 19 bp, Homo sapiens
  siRNA target sequence for DBR1 (NM_016216.1,980-998).
ctacggatgatcttattaa

SEQ ID NO: 204762 - DNA, 19 bp, Homo sapiens
  siRNA target sequence for DBR1 (NM_016216.1,983-1001).
cggatgatcttattaatgt

SEQ ID NO: 204763 - DNA, 19 bp, Homo sapiens
  siRNA target sequence for DBR1 (NM_016216.1,1111-1129).
ctcaaggttccatgtaact

SEQ ID NO: 204764 - DNA, 19 bp, Homo sapiens
  siRNA target sequence for DBR1 (NM_016216.1,1120-1138).
ccatgtaactttagtgtaa

SEQ ID NO: 204765 - DNA, 19 bp, Homo sapiens
  siRNA target sequence for DBR1 (NM_016216.1,1174-1192).
caaatgcagctgattcata

SEQ ID NO: 204766 - DNA, 19 bp, Homo sapiens
  siRNA target sequence for DBR1 (NM_016216.1,1182-1200).
gctgattcataggatcaat

SEQ ID NO: 204767 - DNA, 19 bp, Homo sapiens
  siRNA target sequence for DBR1 (NM_016216.1,1201-1219).
cctcagacaactgaatttt

SEQ ID NO: 204768 - DNA, 19 bp, Homo sapiens
  siRNA target sequence for DBR1 (NM_016216.1,1223-1241).
cccaacttggcatcataga

SEQ ID NO: 204769 - DNA, 19 bp, Homo sapiens
  siRNA target sequence for DBR1 (NM_016216.1,1225-1243).
caacttggcatcatagaca

SEQ ID NO: 204770 - DNA, 19 bp, Homo sapiens
  siRNA target sequence for DBR1 (NM_016216.1,1263-1281).
gtccaaggaagaacatcat

SEQ ID NO: 204771 - DNA, 19 bp, Homo sapiens
  siRNA target sequence for DBR1 (NM_016216.1,1309-1327).
gatgtggagagtaatgact

SEQ ID NO: 204772 - DNA, 19 bp, Homo sapiens
  siRNA target sequence for DBR1 (NM_016216.1,1336-1354).
gaccagagtgaatataata

SEQ ID NO: 204773 - DNA, 19 bp, Homo sapiens
  siRNA target sequence for DBR1 (NM_016216.1,1376-1394).
ctattaatccagatgaaat

SEQ ID NO: 204774 - DNA, 19 bp, Homo sapiens
  siRNA target sequence for DBR1 (NM_016216.1,1435-1453).
gcacatagtggcatgaata

SEQ ID NO: 204775 - DNA, 19 bp, Homo sapiens
  siRNA target sequence for DBR1 (NM_016216.1,1518-1536).
cttgccaggctctatgatt

SEQ ID NO: 204776 - DNA, 19 bp, Homo sapiens
  siRNA target sequence for DBR1 (NM_016216.1,1707-1725).
cgctgcagtggatgatgat

SEQ ID NO: 204777 - DNA, 19 bp, Homo sapiens
  siRNA target sequence for DIO3 (NM_001362.1,323-341).
cttctcgatttcttgtgta

SEQ ID NO: 204778 - DNA, 19 bp, Homo sapiens
  siRNA target sequence for DIO3 (NM_001362.1,339-357).
gtatccgcaagcatttcct

SEQ ID NO: 204779 - DNA, 19 bp, Homo sapiens
  siRNA target sequence for DIO3 (NM_001362.1,771-789).
cggactctccctacatcat

SEQ ID NO: 204780 - DNA, 19 bp, Homo sapiens
  siRNA target sequence for DIO3 (NM_001362.1,910-928).
ctacttcgagcgtctctat

SEQ ID NO: 204781 - DNA, 19 bp, Homo sapiens
  siRNA target sequence for DKFZP564D1378 (NM_032124.3,542-560).
ggagcacctctgatagcaa

SEQ ID NO: 204782 - DNA, 19 bp, Homo sapiens
  siRNA target sequence for DKFZP564D1378 (NM_032124.3,543-561).
gagcacctctgatagcaat

SEQ ID NO: 204783 - DNA, 19 bp, Homo sapiens
  siRNA target sequence for DKFZP564D1378 (NM_032124.3,601-619).
cctggggcctggaccattt

SEQ ID NO: 204784 - DNA, 19 bp, Homo sapiens
  siRNA target sequence for DKFZP564D1378 (NM_032124.3,605-623).
gggcctggaccatttgtga

SEQ ID NO: 204785 - DNA, 19 bp, Homo sapiens
  siRNA target sequence for DKFZP564D1378 (NM_032124.3,634-652).
gtatgccacagataccaaa

SEQ ID NO: 204786 - DNA, 19 bp, Homo sapiens
  siRNA target sequence for DKFZP564D1378 (NM_032124.3,672-690).
cagagaagacgttcttttt

SEQ ID NO: 204787 - DNA, 19 bp, Homo sapiens
  siRNA target sequence for DKFZP564D1378 (NM_032124.3,783-801).
gcatgctgggcatcttagt

SEQ ID NO: 204788 - DNA, 19 bp, Homo sapiens
  siRNA target sequence for DKFZP564D1378 (NM_032124.3,784-802).
catgctgggcatcttagta

SEQ ID NO: 204789 - DNA, 19 bp, Homo sapiens
  siRNA target sequence for DKFZP564D1378 (NM_032124.3,788-806).
ctgggcatcttagtaaaga

SEQ ID NO: 204790 - DNA, 19 bp, Homo sapiens
  siRNA target sequence for DKFZP564D1378 (NM_032124.3,811-829).
gaaatatcgagcatcagat

SEQ ID NO: 204791 - DNA, 19 bp, Homo sapiens
  siRNA target sequence for DKFZP564O243 (NM_015407.3,297-315).
ggcaactcgcccatctttt

SEQ ID NO: 204792 - DNA, 19 bp, Homo sapiens
  siRNA target sequence for DKFZP564O243 (NM_015407.3,298-316).
gcaactcgcccatctttta

SEQ ID NO: 204793 - DNA, 19 bp, Homo sapiens
  siRNA target sequence for DKFZP564O243 (NM_015407.3,472-490).
ggaactcggcaccttcaaa

SEQ ID NO: 204794 - DNA, 19 bp, Homo sapiens
  siRNA target sequence for DPYSL4 (NM_006426.1,186-204).
cgagtgaccgccttctgat

SEQ ID NO: 204795 - DNA, 19 bp, Homo sapiens
  siRNA target sequence for DPYSL4 (NM_006426.1,675-693).
gcagcgacagccagatgta

SEQ ID NO: 204796 - DNA, 19 bp, Homo sapiens
  siRNA target sequence for DPYSL4 (NM_006426.1,1289-1307).
gtcgcggtgaccagtacaa

SEQ ID NO: 204797 - DNA, 19 bp, Homo sapiens
  siRNA target sequence for DPYSL4 (NM_006426.1,1291-1309).
cgcggtgaccagtacaaat

SEQ ID NO: 204798 - DNA, 19 bp, Homo sapiens
  siRNA target sequence for DPYSL4 (NM_006426.1,1294-1312).
ggtgaccagtacaaatgct

SEQ ID NO: 204799 - DNA, 19 bp, Homo sapiens
  siRNA target sequence for DPYSL4 (NM_006426.1,1310-1328).
gctgccaaaatcttcaatt

SEQ ID NO: 204800 - DNA, 19 bp, Homo sapiens
  siRNA target sequence for DPYSL4 (NM_006426.1,1313-1331).
gccaaaatcttcaattttt

SEQ ID NO: 204801 - DNA, 19 bp, Homo sapiens
  siRNA target sequence for DPYSL4 (NM_006426.1,1364-1382).
gacgctgacctggtcatat

SEQ ID NO: 204802 - DNA, 19 bp, Homo sapiens
  siRNA target sequence for DPYSL4 (NM_006426.1,1412-1430).
gccaagacccacaatctga

SEQ ID NO: 204803 - DNA, 19 bp, Homo sapiens
  siRNA target sequence for DPYSL4 (NM_006426.1,1472-1490).
gcgcctgccgtggtcataa

SEQ ID NO: 204804 - DNA, 19 bp, Homo sapiens
  siRNA target sequence for DPYSL4 (NM_006426.1,1474-1492).
gcctgccgtggtcataagt

SEQ ID NO: 204805 - DNA, 19 bp, Homo sapiens
  siRNA target sequence for DPYSL4 (NM_006426.1,1476-1494).
ctgccgtggtcataagtca

SEQ ID NO: 204806 - DNA, 19 bp, Homo sapiens
  siRNA target sequence for DPYSL4 (NM_006426.1,1514-1532).
gacgggaagatgtttgtca

SEQ ID NO: 204807 - DNA, 19 bp, Homo sapiens
  siRNA target sequence for DPYSL4 (NM_006426.1,1549-1567).
cttcgtccctcggaaaaca

SEQ ID NO: 204808 - DNA, 19 bp, Homo sapiens
  siRNA target sequence for DPYSL4 (NM_006426.1,1806-1824).
gcacagcacagaagatcat

SEQ ID NO: 204809 - DNA, 19 bp, Homo sapiens
  siRNA target sequence for DPYSL5 (NM_020134.2,182-200).
gcgtgaggatcctcatcaa

SEQ ID NO: 204810 - DNA, 19 bp, Homo sapiens
  siRNA target sequence for DPYSL5 (NM_020134.2,369-387).
ccaccagaccttcatgaat

SEQ ID NO: 204811 - DNA, 19 bp, Homo sapiens
  siRNA target sequence for DPYSL5 (NM_020134.2,392-410).
cgtgcgtggacgacttcta

SEQ ID NO: 204812 - DNA, 19 bp, Homo sapiens
  siRNA target sequence for DPYSL5 (NM_020134.2,485-503).
cccttgtggacgcttatga

SEQ ID NO: 204813 - DNA, 19 bp, Homo sapiens
  siRNA target sequence for DPYSL5 (NM_020134.2,487-505).
cttgtggacgcttatgaga

SEQ ID NO: 204814 - DNA, 19 bp, Homo sapiens
  siRNA target sequence for DPYSL5 (NM_020134.2,844-862).
gccactcatcgtgttatca

SEQ ID NO: 204815 - DNA, 19 bp, Homo sapiens
  siRNA target sequence for DPYSL5 (NM_020134.2,853-871).
cgtgttatcaccattgcaa

SEQ ID NO: 204816 - DNA, 19 bp, Homo sapiens
  siRNA target sequence for DPYSL5 (NM_020134.2,854-872).
gtgttatcaccattgcaaa

SEQ ID NO: 204817 - DNA, 19 bp, Homo sapiens
  siRNA target sequence for DPYSL5 (NM_020134.2,875-893).
ggactcactgtccaatcta

SEQ ID NO: 204818 - DNA, 19 bp, Homo sapiens
  siRNA target sequence for DPYSL5 (NM_020134.2,898-916).
gtcaacgtgtccagtatct

SEQ ID NO: 204819 - DNA, 19 bp, Homo sapiens
  siRNA target sequence for DPYSL5 (NM_020134.2,992-1010).
cgctgacaggcttacacta

SEQ ID NO: 204820 - DNA, 19 bp, Homo sapiens
  siRNA target sequence for DPYSL5 (NM_020134.2,1030-1048).
cacgcggctgcctatgtca

SEQ ID NO: 204821 - DNA, 19 bp, Homo sapiens
  siRNA target sequence for DPYSL5 (NM_020134.2,1119-1137).
gaacatcgtggcatcagat

SEQ ID NO: 204822 - DNA, 19 bp, Homo sapiens
  siRNA target sequence for DPYSL5 (NM_020134.2,1528-1546).
gagggcaccggcaagttct

SEQ ID NO: 204823 - DNA, 19 bp, Homo sapiens
  siRNA target sequence for DPYSL5 (NM_020134.2,1595-1613).
gagagaagactttaaaggt

SEQ ID NO: 204824 - DNA, 19 bp, Homo sapiens
  siRNA target sequence for DPYSL5 (NM_020134.2,1659-1677).
cgtgcaccctgggaaaaaa

SEQ ID NO: 204825 - DNA, 19 bp, Homo sapiens
  siRNA target sequence for ENPP4 (NM_014936.1,79-97).
ggacttataactggtttta

SEQ ID NO: 204826 - DNA, 19 bp, Homo sapiens
  siRNA target sequence for ENPP4 (NM_014936.1,113-131).
ctagtttgccacctaagtt

SEQ ID NO: 204827 - DNA, 19 bp, Homo sapiens
  siRNA target sequence for ENPP4 (NM_014936.1,116-134).
gtttgccacctaagttact

SEQ ID NO: 204828 - DNA, 19 bp, Homo sapiens
  siRNA target sequence for ENPP4 (NM_014936.1,124-142).
cctaagttactactagtat

SEQ ID NO: 204829 - DNA, 19 bp, Homo sapiens
  siRNA target sequence for ENPP4 (NM_014936.1,217-235).
gttttggtagagcatgtta

SEQ ID NO: 204830 - DNA, 19 bp, Homo sapiens
  siRNA target sequence for ENPP4 (NM_014936.1,308-326).
gcattgtggctaattccat

SEQ ID NO: 204831 - DNA, 19 bp, Homo sapiens
  siRNA target sequence for ENPP4 (NM_014936.1,386-404).
ggaatgaggcagtacctat

SEQ ID NO: 204832 - DNA, 19 bp, Homo sapiens
  siRNA target sequence for ENPP4 (NM_014936.1,387-405).
gaatgaggcagtacctatt

SEQ ID NO: 204833 - DNA, 19 bp, Homo sapiens
  siRNA target sequence for ENPP4 (NM_014936.1,453-471).
gtggcctggtactgatgta

SEQ ID NO: 204834 - DNA, 19 bp, Homo sapiens
  siRNA target sequence for ENPP4 (NM_014936.1,692-710).
gtgacttagtccaaagact

SEQ ID NO: 204835 - DNA, 19 bp, Homo sapiens
  siRNA target sequence for ENPP4 (NM_014936.1,717-735).
gttagggctatgggaaaat

SEQ ID NO: 204836 - DNA, 19 bp, Homo sapiens
  siRNA target sequence for ENPP4 (NM_014936.1,721-739).
gggctatgggaaaatctta

SEQ ID NO: 204837 - DNA, 19 bp, Homo sapiens
  siRNA target sequence for ENPP4 (NM_014936.1,722-740).
ggctatgggaaaatcttaa

SEQ ID NO: 204838 - DNA, 19 bp, Homo sapiens
  siRNA target sequence for ENPP4 (NM_014936.1,723-741).
gctatgggaaaatcttaat

SEQ ID NO: 204839 - DNA, 19 bp, Homo sapiens
  siRNA target sequence for ENPP4 (NM_014936.1,736-754).
cttaatgtgatcattacaa

SEQ ID NO: 204840 - DNA, 19 bp, Homo sapiens
  siRNA target sequence for ENPP4 (NM_014936.1,779-797).
ctcaggacagactgataaa

SEQ ID NO: 204841 - DNA, 19 bp, Homo sapiens
  siRNA target sequence for ENPP4 (NM_014936.1,809-827).
gcatcgatcattcatacta

SEQ ID NO: 204842 - DNA, 19 bp, Homo sapiens
  siRNA target sequence for ENPP4 (NM_014936.1,821-839).
catactacactcttataga

SEQ ID NO: 204843 - DNA, 19 bp, Homo sapiens
  siRNA target sequence for ENPP4 (NM_014936.1,843-861).
gagcccagttgctgcaata

SEQ ID NO: 204844 - DNA, 19 bp, Homo sapiens
  siRNA target sequence for ENPP4 (NM_014936.1,854-872).
ctgcaatacttcccaaaat

SEQ ID NO: 204845 - DNA, 19 bp, Homo sapiens
  siRNA target sequence for ENPP4 (NM_014936.1,856-874).
gcaatacttcccaaaataa

SEQ ID NO: 204846 - DNA, 19 bp, Homo sapiens
  siRNA target sequence for ENPP4 (NM_014936.1,908-926).
gtagccctcatatgaatgt

SEQ ID NO: 204847 - DNA, 19 bp, Homo sapiens
  siRNA target sequence for ENPP4 (NM_014936.1,911-929).
gccctcatatgaatgttta

SEQ ID NO: 204848 - DNA, 19 bp, Homo sapiens
  siRNA target sequence for ENPP4 (NM_014936.1,912-930).
ccctcatatgaatgtttat

SEQ ID NO: 204849 - DNA, 19 bp, Homo sapiens
  siRNA target sequence for ENPP4 (NM_014936.1,914-932).
ctcatatgaatgtttatct

SEQ ID NO: 204850 - DNA, 19 bp, Homo sapiens
  siRNA target sequence for ENPP4 (NM_014936.1,963-981).
ccaacataatgatcgaatt

SEQ ID NO: 204851 - DNA, 19 bp, Homo sapiens
  siRNA target sequence for ENPP4 (NM_014936.1,976-994).
cgaattcagcccattattt

SEQ ID NO: 204852 - DNA, 19 bp, Homo sapiens
  siRNA target sequence for ENPP4 (NM_014936.1,1002-1020).
cgatgaaggctggacaatt

SEQ ID NO: 204853 - DNA, 19 bp, Homo sapiens
  siRNA target sequence for ENPP4 (NM_014936.1,1010-1028).
gctggacaattgtgctaaa

SEQ ID NO: 204854 - DNA, 19 bp, Homo sapiens
  siRNA target sequence for ENPP4 (NM_014936.1,1013-1031).
ggacaattgtgctaaatga

SEQ ID NO: 204855 - DNA, 19 bp, Homo sapiens
  siRNA target sequence for ENPP4 (NM_014936.1,1048-1066).
ggtgaccatggttatgata

SEQ ID NO: 204856 - DNA, 19 bp, Homo sapiens
  siRNA target sequence for ENPP4 (NM_014936.1,1049-1067).
gtgaccatggttatgataa

SEQ ID NO: 204857 - DNA, 19 bp, Homo sapiens
  siRNA target sequence for ENPP4 (NM_014936.1,1104-1122).
cggacctgcatttcacaaa

SEQ ID NO: 204858 - DNA, 19 bp, Homo sapiens
  siRNA target sequence for ENPP4 (NM_014936.1,1117-1135).
cacaaaggctacaagcata

SEQ ID NO: 204859 - DNA, 19 bp, Homo sapiens
  siRNA target sequence for ENPP4 (NM_014936.1,1223-1241).
ctaagtgcttgttagttga

SEQ ID NO: 204860 - DNA, 19 bp, Homo sapiens
  siRNA target sequence for ENPP4 (NM_014936.1,1237-1255).
gttgaccagtggtgcatta

SEQ ID NO: 204861 - DNA, 19 bp, Homo sapiens
  siRNA target sequence for ENPP4 (NM_014936.1,1264-1282).
gaagccatcgcgattgtta

SEQ ID NO: 204862 - DNA, 19 bp, Homo sapiens
  siRNA target sequence for ENPP4 (NM_014936.1,1332-1350).
gcagaatagactttctgta

SEQ ID NO: 204863 - DNA, 19 bp, Homo sapiens
  siRNA target sequence for ENPP5 (NM_021572.4,226-244).
cttggtgtccttcatactt

SEQ ID NO: 204864 - DNA, 19 bp, Homo sapiens
  siRNA target sequence for ENPP5 (NM_021572.4,286-304).
ccagcaaaaggttctacta

SEQ ID NO: 204865 - DNA, 19 bp, Homo sapiens
  siRNA target sequence for ENPP5 (NM_021572.4,289-307).
gcaaaaggttctactagtt

SEQ ID NO: 204866 - DNA, 19 bp, Homo sapiens
  siRNA target sequence for ENPP5 (NM_021572.4,290-308).
caaaaggttctactagttt

SEQ ID NO: 204867 - DNA, 19 bp, Homo sapiens
  siRNA target sequence for ENPP5 (NM_021572.4,295-313).
ggttctactagtttctttt

SEQ ID NO: 204868 - DNA, 19 bp, Homo sapiens
  siRNA target sequence for ENPP5 (NM_021572.4,322-340).
ccgttgggattacttatat

SEQ ID NO: 204869 - DNA, 19 bp, Homo sapiens
  siRNA target sequence for ENPP5 (NM_021572.4,323-341).
cgttgggattacttatata

SEQ ID NO: 204870 - DNA, 19 bp, Homo sapiens
  siRNA target sequence for ENPP5 (NM_021572.4,383-401).
gttcacgtgaagcaagtta

SEQ ID NO: 204871 - DNA, 19 bp, Homo sapiens
  siRNA target sequence for ENPP5 (NM_021572.4,386-404).
cacgtgaagcaagttacta

SEQ ID NO: 204872 - DNA, 19 bp, Homo sapiens
  siRNA target sequence for ENPP5 (NM_021572.4,388-406).
cgtgaagcaagttactaat

SEQ ID NO: 204873 - DNA, 19 bp, Homo sapiens
  siRNA target sequence for ENPP5 (NM_021572.4,391-409).
gaagcaagttactaatgtt

SEQ ID NO: 204874 - DNA, 19 bp, Homo sapiens
  siRNA target sequence for ENPP5 (NM_021572.4,424-442).
ctaccctaaccattatact

SEQ ID NO: 204875 - DNA, 19 bp, Homo sapiens
  siRNA target sequence for ENPP5 (NM_021572.4,497-515).
gatcctattcggaacaaat

SEQ ID NO: 204876 - DNA, 19 bp, Homo sapiens
  siRNA target sequence for ENPP5 (NM_021572.4,500-518).
cctattcggaacaaatctt

SEQ ID NO: 204877 - DNA, 19 bp, Homo sapiens
  siRNA target sequence for ENPP5 (NM_021572.4,516-534).
ctttctccttggatcacat

SEQ ID NO: 204878 - DNA, 19 bp, Homo sapiens
  siRNA target sequence for ENPP5 (NM_021572.4,522-540).
ccttggatcacatgaatat

SEQ ID NO: 204879 - DNA, 19 bp, Homo sapiens
  siRNA target sequence for ENPP5 (NM_021572.4,523-541).
cttggatcacatgaatatt

SEQ ID NO: 204880 - DNA, 19 bp, Homo sapiens
  siRNA target sequence for ENPP5 (NM_021572.4,563-581).
gaagcgacaccaatatgga

SEQ ID NO: 204881 - DNA, 19 bp, Homo sapiens
  siRNA target sequence for ENPP5 (NM_021572.4,589-607).
ccagagggcaggacatact

SEQ ID NO: 204882 - DNA, 19 bp, Homo sapiens
  siRNA target sequence for ENPP5 (NM_021572.4,627-645).
ccggaacagatgtaaaaat

SEQ ID NO: 204883 - DNA, 19 bp, Homo sapiens
  siRNA target sequence for ENPP5 (NM_021572.4,628-646).
cggaacagatgtaaaaata

SEQ ID NO: 204884 - DNA, 19 bp, Homo sapiens
  siRNA target sequence for ENPP5 (NM_021572.4,663-681).
ctcattacatgccttacaa

SEQ ID NO: 204885 - DNA, 19 bp, Homo sapiens
  siRNA target sequence for ENPP5 (NM_021572.4,674-692).
ccttacaatgagtcagttt

SEQ ID NO: 204886 - DNA, 19 bp, Homo sapiens
  siRNA target sequence for ENPP5 (NM_021572.4,732-750).
cgtcaaaagagcccataaa

SEQ ID NO: 204887 - DNA, 19 bp, Homo sapiens
  siRNA target sequence for ENPP5 (NM_021572.4,733-751).
gtcaaaagagcccataaat

SEQ ID NO: 204888 - DNA, 19 bp, Homo sapiens
  siRNA target sequence for ENPP5 (NM_021572.4,815-833).
ctcatggggcctgtcattt

SEQ ID NO: 204889 - DNA, 19 bp, Homo sapiens
  siRNA target sequence for ENPP5 (NM_021572.4,850-868).
gttaggatatctcatacaa

SEQ ID NO: 204890 - DNA, 19 bp, Homo sapiens
  siRNA target sequence for ENPP5 (NM_021572.4,891-909).
ggaacactctgaacctaat

SEQ ID NO: 204891 - DNA, 19 bp, Homo sapiens
  siRNA target sequence for ENPP5 (NM_021572.4,939-957).
gctctgaggaaaggttaat

SEQ ID NO: 204892 - DNA, 19 bp, Homo sapiens
  siRNA target sequence for ENPP5 (NM_021572.4,974-992).
ctggataaagaccactata

SEQ ID NO: 204893 - DNA, 19 bp, Homo sapiens
  siRNA target sequence for ENPP5 (NM_021572.4,985-1003).
ccactataccctgattgat

SEQ ID NO: 204894 - DNA, 19 bp, Homo sapiens
  siRNA target sequence for ENPP5 (NM_021572.4,988-1006).
ctataccctgattgatcaa

SEQ ID NO: 204895 - DNA, 19 bp, Homo sapiens
  siRNA target sequence for ENPP5 (NM_021572.4,1068-1086).
ctcacgctcatcctaatct

SEQ ID NO: 204896 - DNA, 19 bp, Homo sapiens
  siRNA target sequence for ENPP5 (NM_021572.4,1070-1088).
cacgctcatcctaatctta

SEQ ID NO: 204897 - DNA, 19 bp, Homo sapiens
  siRNA target sequence for ENPP5 (NM_021572.4,1072-1090).
cgctcatcctaatcttact

SEQ ID NO: 204898 - DNA, 19 bp, Homo sapiens
  siRNA target sequence for ENPP5 (NM_021572.4,1076-1094).
catcctaatcttactgttt

SEQ ID NO: 204899 - DNA, 19 bp, Homo sapiens
  siRNA target sequence for ENPP5 (NM_021572.4,1113-1131).
cagaaaggtggcattacaa

SEQ ID NO: 204900 - DNA, 19 bp, Homo sapiens
  siRNA target sequence for ENPP5 (NM_021572.4,1115-1133).
gaaaggtggcattacaaat

SEQ ID NO: 204901 - DNA, 19 bp, Homo sapiens
  siRNA target sequence for ENPP5 (NM_021572.4,1140-1158).
gtcgaattcaaccaatcat

SEQ ID NO: 204902 - DNA, 19 bp, Homo sapiens
  siRNA target sequence for ENPP5 (NM_021572.4,1169-1187).
gatgaagggtggcacattt

SEQ ID NO: 204903 - DNA, 19 bp, Homo sapiens
  siRNA target sequence for ENPP5 (NM_021572.4,1175-1193).
gggtggcacattttacaga

SEQ ID NO: 204904 - DNA, 19 bp, Homo sapiens
  siRNA target sequence for ENPP5 (NM_021572.4,1218-1236).
gcaaccacggttacgataa

SEQ ID NO: 204905 - DNA, 19 bp, Homo sapiens
  siRNA target sequence for ENPP5 (NM_021572.4,1219-1237).
caaccacggttacgataat

SEQ ID NO: 204906 - DNA, 19 bp, Homo sapiens
  siRNA target sequence for ENPP5 (NM_021572.4,1244-1262).
gcagatatgcatccaatat

SEQ ID NO: 204907 - DNA, 19 bp, Homo sapiens
  siRNA target sequence for ENPP5 (NM_021572.4,1307-1325).
gccatgaactccacagatt

SEQ ID NO: 204908 - DNA, 19 bp, Homo sapiens
  siRNA target sequence for ENPP5 (NM_021572.4,1322-1340).
gatttgtacccactactat

SEQ ID NO: 204909 - DNA, 19 bp, Homo sapiens
  siRNA target sequence for ENPP5 (NM_021572.4,1337-1355).
ctatgccacctcctcaata

SEQ ID NO: 204910 - DNA, 19 bp, Homo sapiens
  siRNA target sequence for ENPP5 (NM_021572.4,1361-1379).
gccatgccacacaatggat

SEQ ID NO: 204911 - DNA, 19 bp, Homo sapiens
  siRNA target sequence for ENPP5 (NM_021572.4,1422-1440).
gggtggtcccttatacaca

SEQ ID NO: 204912 - DNA, 19 bp, Homo sapiens
  siRNA target sequence for ENPP5 (NM_021572.4,1430-1448).
ccttatacacagagtacta

SEQ ID NO: 204913 - DNA, 19 bp, Homo sapiens
  siRNA target sequence for ENPP5 (NM_021572.4,1431-1449).
cttatacacagagtactat

SEQ ID NO: 204914 - DNA, 19 bp, Homo sapiens
  siRNA target sequence for ENPP5 (NM_021572.4,1451-1469).
ctcctccctggtagtgtta

SEQ ID NO: 204915 - DNA, 19 bp, Homo sapiens
  siRNA target sequence for ENPP5 (NM_021572.4,1453-1471).
cctccctggtagtgttaaa

SEQ ID NO: 204916 - DNA, 19 bp, Homo sapiens
  siRNA target sequence for ENPP5 (NM_021572.4,1456-1474).
ccctggtagtgttaaacca

SEQ ID NO: 204917 - DNA, 19 bp, Homo sapiens
  siRNA target sequence for ENPP5 (NM_021572.4,1490-1508).
gaggggtcatacccttatt

SEQ ID NO: 204918 - DNA, 19 bp, Homo sapiens
  siRNA target sequence for ENPP5 (NM_021572.4,1493-1511).
gggtcatacccttatttca

SEQ ID NO: 204919 - DNA, 19 bp, Homo sapiens
  siRNA target sequence for ENPP5 (NM_021572.4,1494-1512).
ggtcatacccttatttcat

SEQ ID NO: 204920 - DNA, 19 bp, Homo sapiens
  siRNA target sequence for ENPP5 (NM_021572.4,1519-1537).
ctctcttggcagcattata

SEQ ID NO: 204921 - DNA, 19 bp, Homo sapiens
  siRNA target sequence for ENPP5 (NM_021572.4,1528-1546).
cagcattatagtgattgta

SEQ ID NO: 204922 - DNA, 19 bp, Homo sapiens
  siRNA target sequence for ENPP5 (NM_021572.4,1530-1548).
gcattatagtgattgtatt

SEQ ID NO: 204923 - DNA, 19 bp, Homo sapiens
  siRNA target sequence for ENPP5 (NM_021572.4,1611-1629).
ctgaaatagctcaaccatt

SEQ ID NO: 204924 - DNA, 19 bp, Homo sapiens
  siRNA target sequence for ENPP5 (NM_021572.4,1613-1631).
gaaatagctcaaccattat

SEQ ID NO: 204925 - DNA, 19 bp, Homo sapiens
  siRNA target sequence for ENPP6 (NM_153343.2,188-206).
gcctggtttcaaagagatt

SEQ ID NO: 204926 - DNA, 19 bp, Homo sapiens
  siRNA target sequence for ENPP6 (NM_153343.2,216-234).
ggagtaaaagtggattact

SEQ ID NO: 204927 - DNA, 19 bp, Homo sapiens
  siRNA target sequence for ENPP6 (NM_153343.2,217-235).
gagtaaaagtggattactt

SEQ ID NO: 204928 - DNA, 19 bp, Homo sapiens
  siRNA target sequence for ENPP6 (NM_153343.2,253-271).
gtctctcgtatcccaatta

SEQ ID NO: 204929 - DNA, 19 bp, Homo sapiens
  siRNA target sequence for ENPP6 (NM_153343.2,255-273).
ctctcgtatcccaattatt

SEQ ID NO: 204930 - DNA, 19 bp, Homo sapiens
  siRNA target sequence for ENPP6 (NM_153343.2,309-327).
cagatgatcgggaactaca

SEQ ID NO: 204931 - DNA, 19 bp, Homo sapiens
  siRNA target sequence for ENPP6 (NM_153343.2,436-454).
ccaaaaggaaggtctacat

SEQ ID NO: 204932 - DNA, 19 bp, Homo sapiens
  siRNA target sequence for ENPP6 (NM_153343.2,498-516).
cccacctactgcctagaat

SEQ ID NO: 204933 - DNA, 19 bp, Homo sapiens
  siRNA target sequence for ENPP6 (NM_153343.2,499-517).
ccacctactgcctagaata

SEQ ID NO: 204934 - DNA, 19 bp, Homo sapiens
  siRNA target sequence for ENPP6 (NM_153343.2,500-518).
cacctactgcctagaatat

SEQ ID NO: 204935 - DNA, 19 bp, Homo sapiens
  siRNA target sequence for ENPP6 (NM_153343.2,503-521).
ctactgcctagaatataaa

SEQ ID NO: 204936 - DNA, 19 bp, Homo sapiens
  siRNA target sequence for ENPP6 (NM_153343.2,506-524).
ctgcctagaatataaaaat

SEQ ID NO: 204937 - DNA, 19 bp, Homo sapiens
  siRNA target sequence for ENPP6 (NM_153343.2,525-543).
gtcccaacggatatcaatt

SEQ ID NO: 204938 - DNA, 19 bp, Homo sapiens
  siRNA target sequence for ENPP6 (NM_153343.2,527-545).
cccaacggatatcaatttt

SEQ ID NO: 204939 - DNA, 19 bp, Homo sapiens
  siRNA target sequence for ENPP6 (NM_153343.2,564-582).
gctcttgactccttcaaga

SEQ ID NO: 204940 - DNA, 19 bp, Homo sapiens
  siRNA target sequence for ENPP6 (NM_153343.2,687-705).
gacactgtcctgaagtaca

SEQ ID NO: 204941 - DNA, 19 bp, Homo sapiens
  siRNA target sequence for ENPP6 (NM_153343.2,738-756).
gaccgcctgaacgtcatta

SEQ ID NO: 204942 - DNA, 19 bp, Homo sapiens
  siRNA target sequence for ENPP6 (NM_153343.2,740-758).
ccgcctgaacgtcattatt

SEQ ID NO: 204943 - DNA, 19 bp, Homo sapiens
  siRNA target sequence for ENPP6 (NM_153343.2,741-759).
cgcctgaacgtcattattt

SEQ ID NO: 204944 - DNA, 19 bp, Homo sapiens
  siRNA target sequence for ENPP6 (NM_153343.2,768-786).
cacggaatgaccgacattt

SEQ ID NO: 204945 - DNA, 19 bp, Homo sapiens
  siRNA target sequence for ENPP6 (NM_153343.2,801-819).
gtgattgagctgaataagt

SEQ ID NO: 204946 - DNA, 19 bp, Homo sapiens
  siRNA target sequence for ENPP6 (NM_153343.2,889-907).
ggaaacactctgagatata

SEQ ID NO: 204947 - DNA, 19 bp, Homo sapiens
  siRNA target sequence for ENPP6 (NM_153343.2,890-908).
gaaacactctgagatatat

SEQ ID NO: 204948 - DNA, 19 bp, Homo sapiens
  siRNA target sequence for ENPP6 (NM_153343.2,956-974).
catcccaagcaggttctat

SEQ ID NO: 204949 - DNA, 19 bp, Homo sapiens
  siRNA target sequence for ENPP6 (NM_153343.2,1025-1043).
ctggttcataactgagaat

SEQ ID NO: 204950 - DNA, 19 bp, Homo sapiens
  siRNA target sequence for ENPP6 (NM_153343.2,1153-1171).
ccttcggacctgatttcaa

SEQ ID NO: 204951 - DNA, 19 bp, Homo sapiens
  siRNA target sequence for ENPP6 (NM_153343.2,1198-1216).
ggtcggtggacgtctacaa

SEQ ID NO: 204952 - DNA, 19 bp, Homo sapiens
  siRNA target sequence for ENPP6 (NM_153343.2,1199-1217).
gtcggtggacgtctacaat

SEQ ID NO: 204953 - DNA, 19 bp, Homo sapiens
  siRNA target sequence for ENPP6 (NM_153343.2,1201-1219).
cggtggacgtctacaatgt

SEQ ID NO: 204954 - DNA, 19 bp, Homo sapiens
  siRNA target sequence for EYA1 (NM_000503.3,673-691).
ccgtctgagtggtagtagt

SEQ ID NO: 204955 - DNA, 19 bp, Homo sapiens
  siRNA target sequence for EYA1 (NM_000503.3,706-724).
ccccaaactcggtaactct

SEQ ID NO: 204956 - DNA, 19 bp, Homo sapiens
  siRNA target sequence for EYA1 (NM_000503.3,713-731).
ctcggtaactctcatataa

SEQ ID NO: 204957 - DNA, 19 bp, Homo sapiens
  siRNA target sequence for EYA1 (NM_000503.3,715-733).
cggtaactctcatataaat

SEQ ID NO: 204958 - DNA, 19 bp, Homo sapiens
  siRNA target sequence for EYA1 (NM_000503.3,749-767).
cccaatggcaccgaagtta

SEQ ID NO: 204959 - DNA, 19 bp, Homo sapiens
  siRNA target sequence for EYA1 (NM_000503.3,756-774).
gcaccgaagttaaaacaga

SEQ ID NO: 204960 - DNA, 19 bp, Homo sapiens
  siRNA target sequence for EYA1 (NM_000503.3,809-827).
gccgacgggtctttaaaca

SEQ ID NO: 204961 - DNA, 19 bp, Homo sapiens
  siRNA target sequence for EYA1 (NM_000503.3,810-828).
ccgacgggtctttaaacaa

SEQ ID NO: 204962 - DNA, 19 bp, Homo sapiens
  siRNA target sequence for EYA1 (NM_000503.3,811-829).
cgacgggtctttaaacaat

SEQ ID NO: 204963 - DNA, 19 bp, Homo sapiens
  siRNA target sequence for EYA1 (NM_000503.3,812-830).
gacgggtctttaaacaatt

SEQ ID NO: 204964 - DNA, 19 bp, Homo sapiens
  siRNA target sequence for EYA1 (NM_000503.3,842-860).
gcaattgggagcagtagtt

SEQ ID NO: 204965 - DNA, 19 bp, Homo sapiens
  siRNA target sequence for EYA1 (NM_000503.3,913-931).
cagaccatacccacatatt

SEQ ID NO: 204966 - DNA, 19 bp, Homo sapiens
  siRNA target sequence for EYA1 (NM_000503.3,915-933).
gaccatacccacatattct

SEQ ID NO: 204967 - DNA, 19 bp, Homo sapiens
  siRNA target sequence for EYA1 (NM_000503.3,960-978).
ctgcatatgggcaaacaca

SEQ ID NO: 204968 - DNA, 19 bp, Homo sapiens
  siRNA target sequence for EYA1 (NM_000503.3,1034-1052).
cagccgtacggcatttcct

SEQ ID NO: 204969 - DNA, 19 bp, Homo sapiens
  siRNA target sequence for EYA1 (NM_000503.3,1039-1057).
gtacggcatttcctcatat

SEQ ID NO: 204970 - DNA, 19 bp, Homo sapiens
  siRNA target sequence for EYA1 (NM_000503.3,1081-1099).
gactgaaggtggattgtca

SEQ ID NO: 204971 - DNA, 19 bp, Homo sapiens
  siRNA target sequence for EYA1 (NM_000503.3,1248-1266).
caaattcctctggatttaa

SEQ ID NO: 204972 - DNA, 19 bp, Homo sapiens
  siRNA target sequence for EYA1 (NM_000503.3,1255-1273).
ctctggatttaatagttca

SEQ ID NO: 204973 - DNA, 19 bp, Homo sapiens
  siRNA target sequence for EYA1 (NM_000503.3,1276-1294).
gcaggactatccgtcttat

SEQ ID NO: 204974 - DNA, 19 bp, Homo sapiens
  siRNA target sequence for EYA1 (NM_000503.3,1310-1328).
ggtcagtacgcacagtatt

SEQ ID NO: 204975 - DNA, 19 bp, Homo sapiens
  siRNA target sequence for EYA1 (NM_000503.3,1311-1329).
gtcagtacgcacagtatta

SEQ ID NO: 204976 - DNA, 19 bp, Homo sapiens
  siRNA target sequence for EYA1 (NM_000503.3,1338-1356).
caccgtatccagcacatta

SEQ ID NO: 204977 - DNA, 19 bp, Homo sapiens
  siRNA target sequence for EYA1 (NM_000503.3,1340-1358).
ccgtatccagcacattata

SEQ ID NO: 204978 - DNA, 19 bp, Homo sapiens
  siRNA target sequence for EYA1 (NM_000503.3,1341-1359).
cgtatccagcacattatat

SEQ ID NO: 204979 - DNA, 19 bp, Homo sapiens
  siRNA target sequence for EYA1 (NM_000503.3,1435-1453).
caccagccaagcagttaca

SEQ ID NO: 204980 - DNA, 19 bp, Homo sapiens
  siRNA target sequence for EYA1 (NM_000503.3,1488-1506).
catcaacacccattaaaga

SEQ ID NO: 204981 - DNA, 19 bp, Homo sapiens
  siRNA target sequence for EYA1 (NM_000503.3,1581-1599).
cacctcccccagattctga

SEQ ID NO: 204982 - DNA, 19 bp, Homo sapiens
  siRNA target sequence for EYA1 (NM_000503.3,1643-1661).
gttttccactccttgctta

SEQ ID NO: 204983 - DNA, 19 bp, Homo sapiens
  siRNA target sequence for EYA1 (NM_000503.3,1664-1682).
gggtcctacgccaacagat

SEQ ID NO: 204984 - DNA, 19 bp, Homo sapiens
  siRNA target sequence for EYA1 (NM_000503.3,1665-1683).
ggtcctacgccaacagata

SEQ ID NO: 204985 - DNA, 19 bp, Homo sapiens
  siRNA target sequence for EYA1 (NM_000503.3,1666-1684).
gtcctacgccaacagatat

SEQ ID NO: 204986 - DNA, 19 bp, Homo sapiens
  siRNA target sequence for EYA1 (NM_000503.3,1744-1762).
cttggcagacacacattta

SEQ ID NO: 204987 - DNA, 19 bp, Homo sapiens
  siRNA target sequence for EYA1 (NM_000503.3,1875-1893).
cagcaaccagtgctaactt

SEQ ID NO: 204988 - DNA, 19 bp, Homo sapiens
  siRNA target sequence for EYA1 (NM_000503.3,1877-1895).
gcaaccagtgctaacttat

SEQ ID NO: 204989 - DNA, 19 bp, Homo sapiens
  siRNA target sequence for EYA1 (NM_000503.3,1956-1974).
gacgggtaaaagagatcta

SEQ ID NO: 204990 - DNA, 19 bp, Homo sapiens
  siRNA target sequence for EYA1 (NM_000503.3,1961-1979).
gtaaaagagatctacaaca

SEQ ID NO: 204991 - DNA, 19 bp, Homo sapiens
  siRNA target sequence for EYA1 (NM_000503.3,1975-1993).
caacacctacaaaaataat

SEQ ID NO: 204992 - DNA, 19 bp, Homo sapiens
  siRNA target sequence for EYA1 (NM_000503.3,2035-2053).
gcagttgagggccgaaatt

SEQ ID NO: 204993 - DNA, 19 bp, Homo sapiens
  siRNA target sequence for EYA1 (NM_000503.3,2038-2056).
gttgagggccgaaattgaa

SEQ ID NO: 204994 - DNA, 19 bp, Homo sapiens
  siRNA target sequence for EYA1 (NM_000503.3,2093-2111).
gcactctcgctcattcact

SEQ ID NO: 204995 - DNA, 19 bp, Homo sapiens
  siRNA target sequence for EYA1 (NM_000503.3,2113-2131).
ccggacaaactgtgtgaat

SEQ ID NO: 204996 - DNA, 19 bp, Homo sapiens
  siRNA target sequence for EYA1 (NM_000503.3,2177-2195).
ctgctgtatgggttaggaa

SEQ ID NO: 204997 - DNA, 19 bp, Homo sapiens
  siRNA target sequence for EYA1 (NM_000503.3,2188-2206).
gttaggaattgtatttcca

SEQ ID NO: 204998 - DNA, 19 bp, Homo sapiens
  siRNA target sequence for EYA2 (NM_005244.3,148-166).
cacccagcctcactgtaaa

SEQ ID NO: 204999 - DNA, 19 bp, Homo sapiens
  siRNA target sequence for EYA2 (NM_005244.3,167-185).
cagcgattgtctggataaa

SEQ ID NO: 205000 - DNA, 19 bp, Homo sapiens
  siRNA target sequence for EYA2 (NM_005244.3,169-187).
gcgattgtctggataaact

SEQ ID NO: 205001 - DNA, 19 bp, Homo sapiens
  siRNA target sequence for EYA2 (NM_005244.3,171-189).
gattgtctggataaactga

SEQ ID NO: 205002 - DNA, 19 bp, Homo sapiens
  siRNA target sequence for EYA2 (NM_005244.3,177-195).
ctggataaactgaagttta

SEQ ID NO: 205003 - DNA, 19 bp, Homo sapiens
  siRNA target sequence for EYA2 (NM_005244.3,365-383).
gcaggctaccccctataca

SEQ ID NO: 205004 - DNA, 19 bp, Homo sapiens
  siRNA target sequence for EYA2 (NM_005244.3,417-435).
ccttcctacagcatcaaga

SEQ ID NO: 205005 - DNA, 19 bp, Homo sapiens
  siRNA target sequence for EYA2 (NM_005244.3,544-562).
gcacaacagggttctatca

SEQ ID NO: 205006 - DNA, 19 bp, Homo sapiens
  siRNA target sequence for EYA2 (NM_005244.3,545-563).
cacaacagggttctatcaa

SEQ ID NO: 205007 - DNA, 19 bp, Homo sapiens
  siRNA target sequence for EYA2 (NM_005244.3,781-799).
cacttgctggtgaatacaa

SEQ ID NO: 205008 - DNA, 19 bp, Homo sapiens
  siRNA target sequence for EYA2 (NM_005244.3,783-801).
cttgctggtgaatacaaca

SEQ ID NO: 205009 - DNA, 19 bp, Homo sapiens
  siRNA target sequence for EYA2 (NM_005244.3,873-891).
ctccgaggccggtctaaga

SEQ ID NO: 205010 - DNA, 19 bp, Homo sapiens
  siRNA target sequence for EYA2 (NM_005244.3,911-929).
ggcaggggacaatgagatt

SEQ ID NO: 205011 - DNA, 19 bp, Homo sapiens
  siRNA target sequence for EYA2 (NM_005244.3,980-998).
cttactcacggggacattt

SEQ ID NO: 205012 - DNA, 19 bp, Homo sapiens
  siRNA target sequence for EYA2 (NM_005244.3,1042-1060).
gccttatgatggaagagat

SEQ ID NO: 205013 - DNA, 19 bp, Homo sapiens
  siRNA target sequence for EYA2 (NM_005244.3,1067-1085).
caaccttgcagatacacat

SEQ ID NO: 205014 - DNA, 19 bp, Homo sapiens
  siRNA target sequence for EYA2 (NM_005244.3,1133-1151).
cgtctcatcagatgacaat

SEQ ID NO: 205015 - DNA, 19 bp, Homo sapiens
  siRNA target sequence for EYA2 (NM_005244.3,1155-1173).
caagatttaagcacataca

SEQ ID NO: 205016 - DNA, 19 bp, Homo sapiens
  siRNA target sequence for EYA2 (NM_005244.3,1287-1305).
gtgaaggagatgtacaata

SEQ ID NO: 205017 - DNA, 19 bp, Homo sapiens
  siRNA target sequence for EYA2 (NM_005244.3,1316-1334).
caacgttggtgggttgata

SEQ ID NO: 205018 - DNA, 19 bp, Homo sapiens
  siRNA target sequence for EYA2 (NM_005244.3,1419-1437).
gcactaaacctcatcaact

SEQ ID NO: 205019 - DNA, 19 bp, Homo sapiens
  siRNA target sequence for EYA2 (NM_005244.3,1463-1481).
ggtcaccaccactcaacta

SEQ ID NO: 205020 - DNA, 19 bp, Homo sapiens
  siRNA target sequence for EYA2 (NM_005244.3,1464-1482).
gtcaccaccactcaactaa

SEQ ID NO: 205021 - DNA, 19 bp, Homo sapiens
  siRNA target sequence for EYA2 (NM_005244.3,1592-1610).
gcagagattcggcagaaaa

SEQ ID NO: 205022 - DNA, 19 bp, Homo sapiens
  siRNA target sequence for EYA2 (NM_005244.3,1724-1742).
cctggagctggagtattta

SEQ ID NO: 205023 - DNA, 19 bp, Homo sapiens
  siRNA target sequence for EYA3 (NM_001990.2,187-205).
ccagagcaaccagtgaaaa

SEQ ID NO: 205024 - DNA, 19 bp, Homo sapiens
  siRNA target sequence for EYA3 (NM_001990.2,231-249).
gcaaactataagtcaagta

SEQ ID NO: 205025 - DNA, 19 bp, Homo sapiens
  siRNA target sequence for EYA3 (NM_001990.2,232-250).
caaactataagtcaagtaa

SEQ ID NO: 205026 - DNA, 19 bp, Homo sapiens
  siRNA target sequence for EYA3 (NM_001990.2,236-254).
ctataagtcaagtaagcaa

SEQ ID NO: 205027 - DNA, 19 bp, Homo sapiens
  siRNA target sequence for EYA3 (NM_001990.2,312-330).
gtcagaggaaattatgaca

SEQ ID NO: 205028 - DNA, 19 bp, Homo sapiens
  siRNA target sequence for EYA3 (NM_001990.2,342-360).
catccctcgctcatccaat

SEQ ID NO: 205029 - DNA, 19 bp, Homo sapiens
  siRNA target sequence for EYA3 (NM_001990.2,345-363).
ccctcgctcatccaatgat

SEQ ID NO: 205030 - DNA, 19 bp, Homo sapiens
  siRNA target sequence for EYA3 (NM_001990.2,346-364).
cctcgctcatccaatgatt

SEQ ID NO: 205031 - DNA, 19 bp, Homo sapiens
  siRNA target sequence for EYA3 (NM_001990.2,349-367).
cgctcatccaatgattata

SEQ ID NO: 205032 - DNA, 19 bp, Homo sapiens
  siRNA target sequence for EYA3 (NM_001990.2,361-379).
gattatacctcacaaatgt

SEQ ID NO: 205033 - DNA, 19 bp, Homo sapiens
  siRNA target sequence for EYA3 (NM_001990.2,386-404).
caaaaccttatgcacatat

SEQ ID NO: 205034 - DNA, 19 bp, Homo sapiens
  siRNA target sequence for EYA3 (NM_001990.2,491-509).
ctcaggcaacccaaacgta

SEQ ID NO: 205035 - DNA, 19 bp, Homo sapiens
  siRNA target sequence for EYA3 (NM_001990.2,546-564).
gaaacctgaaagtggttta

SEQ ID NO: 205036 - DNA, 19 bp, Homo sapiens
  siRNA target sequence for EYA3 (NM_001990.2,553-571).
gaaagtggtttaattcaga

SEQ ID NO: 205037 - DNA, 19 bp, Homo sapiens
  siRNA target sequence for EYA3 (NM_001990.2,630-648).
gccaagcccagcacattat

SEQ ID NO: 205038 - DNA, 19 bp, Homo sapiens
  siRNA target sequence for EYA3 (NM_001990.2,679-697).
gccagcctgatatctactt

SEQ ID NO: 205039 - DNA, 19 bp, Homo sapiens
  siRNA target sequence for EYA3 (NM_001990.2,681-699).
cagcctgatatctacttct

SEQ ID NO: 205040 - DNA, 19 bp, Homo sapiens
  siRNA target sequence for EYA3 (NM_001990.2,685-703).
ctgatatctacttcttcta

SEQ ID NO: 205041 - DNA, 19 bp, Homo sapiens
  siRNA target sequence for EYA3 (NM_001990.2,698-716).
cttctacaattgccaatat

SEQ ID NO: 205042 - DNA, 19 bp, Homo sapiens
  siRNA target sequence for EYA3 (NM_001990.2,737-755).
gcatctcaaaccaggatta

SEQ ID NO: 205043 - DNA, 19 bp, Homo sapiens
  siRNA target sequence for EYA3 (NM_001990.2,822-840).
cacaggtcagactaacagt

SEQ ID NO: 205044 - DNA, 19 bp, Homo sapiens
  siRNA target sequence for EYA3 (NM_001990.2,1055-1073).
cccaagacagtgaattaga

SEQ ID NO: 205045 - DNA, 19 bp, Homo sapiens
  siRNA target sequence for EYA3 (NM_001990.2,1133-1151).
gatcctatgcccagaaata

SEQ ID NO: 205046 - DNA, 19 bp, Homo sapiens
  siRNA target sequence for EYA3 (NM_001990.2,1158-1176).
ggacccaacagtagtgatt

SEQ ID NO: 205047 - DNA, 19 bp, Homo sapiens
  siRNA target sequence for EYA3 (NM_001990.2,1171-1189).
gtgattggctcaggtttaa

SEQ ID NO: 205048 - DNA, 19 bp, Homo sapiens
  siRNA target sequence for EYA3 (NM_001990.2,1213-1231).
gtggctgatactcatctat

SEQ ID NO: 205049 - DNA, 19 bp, Homo sapiens
  siRNA target sequence for EYA3 (NM_001990.2,1297-1315).
caagacttgagcaactaca

SEQ ID NO: 205050 - DNA, 19 bp, Homo sapiens
  siRNA target sequence for EYA3 (NM_001990.2,1300-1318).
gacttgagcaactacagtt

SEQ ID NO: 205051 - DNA, 19 bp, Homo sapiens
  siRNA target sequence for EYA3 (NM_001990.2,1320-1338).
ctcaacagatggtttcagt

SEQ ID NO: 205052 - DNA, 19 bp, Homo sapiens
  siRNA target sequence for EYA3 (NM_001990.2,1541-1559).
ggttaggaactgcattaaa

SEQ ID NO: 205053 - DNA, 19 bp, Homo sapiens
  siRNA target sequence for EYA3 (NM_001990.2,1570-1588).
ctcatccagtccagaaaga

SEQ ID NO: 205054 - DNA, 19 bp, Homo sapiens
  siRNA target sequence for EYA3 (NM_001990.2,1575-1593).
ccagtccagaaagaattgt

SEQ ID NO: 205055 - DNA, 19 bp, Homo sapiens
  siRNA target sequence for EYA3 (NM_001990.2,1635-1653).
ggccaaggttctcctatat

SEQ ID NO: 205056 - DNA, 19 bp, Homo sapiens
  siRNA target sequence for EYA3 (NM_001990.2,1657-1675).
ctaggagaaatatttccta

SEQ ID NO: 205057 - DNA, 19 bp, Homo sapiens
  siRNA target sequence for EYA3 (NM_001990.2,1683-1701).
catctatagtgctaccaaa

SEQ ID NO: 205058 - DNA, 19 bp, Homo sapiens
  siRNA target sequence for EYA3 (NM_001990.2,1861-1879).
caggctttagagcttgatt

SEQ ID NO: 205059 - DNA, 19 bp, Homo sapiens
  siRNA target sequence for EYA3 (NM_001990.2,1863-1881).
ggctttagagcttgatttt

SEQ ID NO: 205060 - DNA, 19 bp, Homo sapiens
  siRNA target sequence for EYA4 (NM_004100.2,501-519).
gtttcacaatctcagaatt

SEQ ID NO: 205061 - DNA, 19 bp, Homo sapiens
  siRNA target sequence for EYA4 (NM_004100.2,515-533).
gaattccaggtctatggaa

SEQ ID NO: 205062 - DNA, 19 bp, Homo sapiens
  siRNA target sequence for EYA4 (NM_004100.2,542-560).
cctagcaagtcctcatact

SEQ ID NO: 205063 - DNA, 19 bp, Homo sapiens
  siRNA target sequence for EYA4 (NM_004100.2,597-615).
ctggaaaaatctaatctca

SEQ ID NO: 205064 - DNA, 19 bp, Homo sapiens
  siRNA target sequence for EYA4 (NM_004100.2,619-637).
gcacatcagttactacaaa

SEQ ID NO: 205065 - DNA, 19 bp, Homo sapiens
  siRNA target sequence for EYA4 (NM_004100.2,783-801).
ggagcgcttgacactttta

SEQ ID NO: 205066 - DNA, 19 bp, Homo sapiens
  siRNA target sequence for EYA4 (NM_004100.2,796-814).
cttttactgggtcagtaat

SEQ ID NO: 205067 - DNA, 19 bp, Homo sapiens
  siRNA target sequence for EYA4 (NM_004100.2,806-824).
gtcagtaattacaagtagt

SEQ ID NO: 205068 - DNA, 19 bp, Homo sapiens
  siRNA target sequence for EYA4 (NM_004100.2,875-893).
caagccctatccacacatt

SEQ ID NO: 205069 - DNA, 19 bp, Homo sapiens
  siRNA target sequence for EYA4 (NM_004100.2,901-919).
caccagcagctcaaacaat

SEQ ID NO: 205070 - DNA, 19 bp, Homo sapiens
  siRNA target sequence for EYA4 (NM_004100.2,1004-1022).
cagcttgcccacttacgat

SEQ ID NO: 205071 - DNA, 19 bp, Homo sapiens
  siRNA target sequence for EYA4 (NM_004100.2,1160-1178).
gccaggttctagttttgca

SEQ ID NO: 205072 - DNA, 19 bp, Homo sapiens
  siRNA target sequence for EYA4 (NM_004100.2,1176-1194).
gcaccatcatctactattt

SEQ ID NO: 205073 - DNA, 19 bp, Homo sapiens
  siRNA target sequence for EYA4 (NM_004100.2,1209-1227).
gtttccaattcaacgaatt

SEQ ID NO: 205074 - DNA, 19 bp, Homo sapiens
  siRNA target sequence for EYA4 (NM_004100.2,1214-1232).
caattcaacgaatttcagt

SEQ ID NO: 205075 - DNA, 19 bp, Homo sapiens
  siRNA target sequence for EYA4 (NM_004100.2,1244-1262).
ggattatccatcctataca

SEQ ID NO: 205076 - DNA, 19 bp, Homo sapiens
  siRNA target sequence for EYA4 (NM_004100.2,1303-1321).
caacgtatggagcgtatat

SEQ ID NO: 205077 - DNA, 19 bp, Homo sapiens
  siRNA target sequence for EYA4 (NM_004100.2,1307-1325).
gtatggagcgtatatgaca

SEQ ID NO: 205078 - DNA, 19 bp, Homo sapiens
  siRNA target sequence for EYA4 (NM_004100.2,1315-1333).
cgtatatgacatcgaataa

SEQ ID NO: 205079 - DNA, 19 bp, Homo sapiens
  siRNA target sequence for EYA4 (NM_004100.2,1341-1359).
gatggcacaccctcttcaa

SEQ ID NO: 205080 - DNA, 19 bp, Homo sapiens
  siRNA target sequence for EYA4 (NM_004100.2,1354-1372).
cttcaacctctacttatca

SEQ ID NO: 205081 - DNA, 19 bp, Homo sapiens
  siRNA target sequence for EYA4 (NM_004100.2,1404-1422).
caaccaggagagttcgata

SEQ ID NO: 205082 - DNA, 19 bp, Homo sapiens
  siRNA target sequence for EYA4 (NM_004100.2,1439-1457).
cacacccatcaaagatctt

SEQ ID NO: 205083 - DNA, 19 bp, Homo sapiens
  siRNA target sequence for EYA4 (NM_004100.2,1498-1516).
gaagaggccggaaaaataa

SEQ ID NO: 205084 - DNA, 19 bp, Homo sapiens
  siRNA target sequence for EYA4 (NM_004100.2,1542-1560).
ctggagcgtgtgtttgtct

SEQ ID NO: 205085 - DNA, 19 bp, Homo sapiens
  siRNA target sequence for EYA4 (NM_004100.2,1557-1575).
gtctgggatttggatgaaa

SEQ ID NO: 205086 - DNA, 19 bp, Homo sapiens
  siRNA target sequence for EYA4 (NM_004100.2,1598-1616).
gctcaccgggtcttatgca

SEQ ID NO: 205087 - DNA, 19 bp, Homo sapiens
  siRNA target sequence for EYA4 (NM_004100.2,1606-1624).
ggtcttatgcacagaagta

SEQ ID NO: 205088 - DNA, 19 bp, Homo sapiens
  siRNA target sequence for EYA4 (NM_004100.2,1607-1625).
gtcttatgcacagaagtat

SEQ ID NO: 205089 - DNA, 19 bp, Homo sapiens
  siRNA target sequence for EYA4 (NM_004100.2,1722-1740).
gagtgtgatcaagttcata

SEQ ID NO: 205090 - DNA, 19 bp, Homo sapiens
  siRNA target sequence for EYA4 (NM_004100.2,1773-1791).
gacttaagtacctacagtt

SEQ ID NO: 205091 - DNA, 19 bp, Homo sapiens
  siRNA target sequence for EYA4 (NM_004100.2,1808-1826).
ccatgcagctgcaagtagt

SEQ ID NO: 205092 - DNA, 19 bp, Homo sapiens
  siRNA target sequence for EYA4 (NM_004100.2,1822-1840).
gtagtgcaaacctttgttt

SEQ ID NO: 205093 - DNA, 19 bp, Homo sapiens
  siRNA target sequence for EYA4 (NM_004100.2,1876-1894).
ggaagttggcttttcgtta

SEQ ID NO: 205094 - DNA, 19 bp, Homo sapiens
  siRNA target sequence for EYA4 (NM_004100.2,2014-2032).
ggctaacaaatgcacttaa

SEQ ID NO: 205095 - DNA, 19 bp, Homo sapiens
  siRNA target sequence for EYA4 (NM_004100.2,2025-2043).
gcacttaagtctttatcaa

SEQ ID NO: 205096 - DNA, 19 bp, Homo sapiens
  siRNA target sequence for EYA4 (NM_004100.2,2053-2071).
ctaggagtaactgcataaa

SEQ ID NO: 205097 - DNA, 19 bp, Homo sapiens
  siRNA target sequence for EYA4 (NM_004100.2,2075-2093).
cttggtaacgacaactcaa

SEQ ID NO: 205098 - DNA, 19 bp, Homo sapiens
  siRNA target sequence for EYA4 (NM_004100.2,2104-2122).
cacttgcgaaggttctact

SEQ ID NO: 205099 - DNA, 19 bp, Homo sapiens
  siRNA target sequence for EYA4 (NM_004100.2,2109-2127).
gcgaaggttctactctata

SEQ ID NO: 205100 - DNA, 19 bp, Homo sapiens
  siRNA target sequence for EYA4 (NM_004100.2,2111-2129).
gaaggttctactctatagt

SEQ ID NO: 205101 - DNA, 19 bp, Homo sapiens
  siRNA target sequence for EYA4 (NM_004100.2,2114-2132).
ggttctactctatagttta

SEQ ID NO: 205102 - DNA, 19 bp, Homo sapiens
  siRNA target sequence for EYA4 (NM_004100.2,2140-2158).
ctttccccattgagaatat

SEQ ID NO: 205103 - DNA, 19 bp, Homo sapiens
  siRNA target sequence for EYA4 (NM_004100.2,2188-2206).
gttgctttgaacgaataat

SEQ ID NO: 205104 - DNA, 19 bp, Homo sapiens
  siRNA target sequence for EYA4 (NM_004100.2,2191-2209).
gctttgaacgaataatgca

SEQ ID NO: 205105 - DNA, 19 bp, Homo sapiens
  siRNA target sequence for EYA4 (NM_004100.2,2330-2348).
ccaccaagcactggaatta

SEQ ID NO: 205106 - DNA, 19 bp, Homo sapiens
  siRNA target sequence for EYA4 (NM_172104.1,1769-1787).
gcaggacttaggtgtaaga

SEQ ID NO: 205107 - DNA, 19 bp, Homo sapiens
  siRNA target sequence for EYA4 (NM_172105.1,2188-2206).
gctgttttgagcgtatagt

SEQ ID NO: 205108 - DNA, 19 bp, Homo sapiens
  siRNA target sequence for EYA4 (NM_172105.1,2198-2216).
gcgtatagtgtccagattt

SEQ ID NO: 205109 - DNA, 19 bp, Homo sapiens
  siRNA target sequence for EYA4 (NM_172105.1,2209-2227).
ccagatttggcactaacat

SEQ ID NO: 205110 - DNA, 19 bp, Homo sapiens
  siRNA target sequence for EYA4 (NM_172105.1,2210-2228).
cagatttggcactaacata

SEQ ID NO: 205111 - DNA, 19 bp, Homo sapiens
  siRNA target sequence for EYA4 (NM_172105.1,2225-2243).
cataacttatgttgtgatt

SEQ ID NO: 205112 - DNA, 19 bp, Homo sapiens
  siRNA target sequence for EYA4 (NM_172105.1,2269-2287).
ccgctaaccagcacaacat

SEQ ID NO: 205113 - DNA, 19 bp, Homo sapiens
  siRNA target sequence for FAM16AX (NM_012080.1,54-72).
gatactgaacggctgtatt

SEQ ID NO: 205114 - DNA, 19 bp, Homo sapiens
  siRNA target sequence for FAM16AX (NM_012080.1,58-76).
ctgaacggctgtattcagt

SEQ ID NO: 205115 - DNA, 19 bp, Homo sapiens
  siRNA target sequence for FAM16AX (NM_012080.1,75-93).
gtggtgtttcaagaaatat

SEQ ID NO: 205116 - DNA, 19 bp, Homo sapiens
  siRNA target sequence for FAM16AX (NM_012080.1,99-117).
cgctatgacaagaaataca

SEQ ID NO: 205117 - DNA, 19 bp, Homo sapiens
  siRNA target sequence for FAM16AX (NM_012080.1,161-179).
ggcggcacagattataata

SEQ ID NO: 205118 - DNA, 19 bp, Homo sapiens
  siRNA target sequence for FAM16AX (NM_012080.1,290-308).
catccacctgcggaaacat

SEQ ID NO: 205119 - DNA, 19 bp, Homo sapiens
  siRNA target sequence for FAM16AX (NM_012080.1,339-357).
gggtccgcgtcgttcgata

SEQ ID NO: 205120 - DNA, 19 bp, Homo sapiens
  siRNA target sequence for FAM16AX (NM_012080.1,340-358).
ggtccgcgtcgttcgatat

SEQ ID NO: 205121 - DNA, 19 bp, Homo sapiens
  siRNA target sequence for FAM16AX (NM_012080.1,343-361).
ccgcgtcgttcgatatgaa

SEQ ID NO: 205122 - DNA, 19 bp, Homo sapiens
  siRNA target sequence for FAM16AX (NM_012080.1,345-363).
gcgtcgttcgatatgaaga

SEQ ID NO: 205123 - DNA, 19 bp, Homo sapiens
  siRNA target sequence for FAM16AX (NM_012080.1,573-591).
gttcctgacggaaacttga

SEQ ID NO: 205124 - DNA, 19 bp, Homo sapiens
  siRNA target sequence for FLJ11151 (NM_018340.1,153-171).
cgtttcccgcagaaaagga

SEQ ID NO: 205125 - DNA, 19 bp, Homo sapiens
  siRNA target sequence for FLJ11151 (NM_018340.1,154-172).
gtttcccgcagaaaaggaa

SEQ ID NO: 205126 - DNA, 19 bp, Homo sapiens
  siRNA target sequence for FLJ11151 (NM_018340.1,466-484).
cagcggcaaccatgacatt

SEQ ID NO: 205127 - DNA, 19 bp, Homo sapiens
  siRNA target sequence for FLJ11151 (NM_018340.1,938-956).
gtggtcaccgccgagaaaa

SEQ ID NO: 205128 - DNA, 19 bp, Homo sapiens
  siRNA target sequence for FLJ11151 (NM_018340.1,940-958).
ggtcaccgccgagaaaatt

SEQ ID NO: 205129 - DNA, 19 bp, Homo sapiens
  siRNA target sequence for FLJ11151 (NM_018340.1,943-961).
caccgccgagaaaattgtt

SEQ ID NO: 205130 - DNA, 19 bp, Homo sapiens
  siRNA target sequence for FLJ11151 (NM_018340.1,945-963).
ccgccgagaaaattgttca

SEQ ID NO: 205131 - DNA, 19 bp, Homo sapiens
  siRNA target sequence for FLJ11151 (NM_018340.1,964-982).
ccgatactacagtctagat

SEQ ID NO: 205132 - DNA, 19 bp, Homo sapiens
  siRNA target sequence for FLJ11151 (NM_018340.1,1010-1028).
gatctcatggatttgatca

SEQ ID NO: 205133 - DNA, 19 bp, Homo sapiens
  siRNA target sequence for FLJ11151 (NM_018340.1,1013-1031).
ctcatggatttgatcaaga

SEQ ID NO: 205134 - DNA, 19 bp, Homo sapiens
  siRNA target sequence for FLJ11342 (NM_018394.1,142-160).
gtggctcccagcttgtaga

SEQ ID NO: 205135 - DNA, 19 bp, Homo sapiens
  siRNA target sequence for FLJ11342 (NM_018394.1,149-167).
ccagcttgtagacaaaaga

SEQ ID NO: 205136 - DNA, 19 bp, Homo sapiens
  siRNA target sequence for FLJ11342 (NM_018394.1,168-186).
cgtcactctcattccttaa

SEQ ID NO: 205137 - DNA, 19 bp, Homo sapiens
  siRNA target sequence for FLJ11342 (NM_018394.1,206-224).
ctggcttataagaagctaa

SEQ ID NO: 205138 - DNA, 19 bp, Homo sapiens
  siRNA target sequence for FLJ11342 (NM_018394.1,227-245).
ggcaaaagtccaggaatta

SEQ ID NO: 205139 - DNA, 19 bp, Homo sapiens
  siRNA target sequence for FLJ11342 (NM_018394.1,228-246).
gcaaaagtccaggaattat

SEQ ID NO: 205140 - DNA, 19 bp, Homo sapiens
  siRNA target sequence for FLJ11342 (NM_018394.1,247-265).
cttcatccctggctatctt

SEQ ID NO: 205141 - DNA, 19 bp, Homo sapiens
  siRNA target sequence for FLJ11342 (NM_018394.1,253-271).
ccctggctatctttcttat

SEQ ID NO: 205142 - DNA, 19 bp, Homo sapiens
  siRNA target sequence for FLJ11342 (NM_018394.1,254-272).
cctggctatctttcttata

SEQ ID NO: 205143 - DNA, 19 bp, Homo sapiens
  siRNA target sequence for FLJ11342 (NM_018394.1,255-273).
ctggctatctttcttatat

SEQ ID NO: 205144 - DNA, 19 bp, Homo sapiens
  siRNA target sequence for FLJ11342 (NM_018394.1,257-275).
ggctatctttcttatatga

SEQ ID NO: 205145 - DNA, 19 bp, Homo sapiens
  siRNA target sequence for FLJ11342 (NM_018394.1,258-276).
gctatctttcttatatgaa

SEQ ID NO: 205146 - DNA, 19 bp, Homo sapiens
  siRNA target sequence for FLJ11342 (NM_018394.1,263-281).
ctttcttatatgaatggta

SEQ ID NO: 205147 - DNA, 19 bp, Homo sapiens
  siRNA target sequence for FLJ11342 (NM_018394.1,267-285).
cttatatgaatggtacaaa

SEQ ID NO: 205148 - DNA, 19 bp, Homo sapiens
  siRNA target sequence for FLJ11342 (NM_018394.1,293-311).
gcgattgaggagttttgca

SEQ ID NO: 205149 - DNA, 19 bp, Homo sapiens
  siRNA target sequence for FLJ11342 (NM_018394.1,294-312).
cgattgaggagttttgcaa

SEQ ID NO: 205150 - DNA, 19 bp, Homo sapiens
  siRNA target sequence for FLJ11342 (NM_018394.1,301-319).
ggagttttgcaaatctcta

SEQ ID NO: 205151 - DNA, 19 bp, Homo sapiens
  siRNA target sequence for FLJ11342 (NM_018394.1,317-335).
ctaggtcacgcctgcataa

SEQ ID NO: 205152 - DNA, 19 bp, Homo sapiens
  siRNA target sequence for FLJ11342 (NM_018394.1,320-338).
ggtcacgcctgcataaggt

SEQ ID NO: 205153 - DNA, 19 bp, Homo sapiens
  siRNA target sequence for FLJ11342 (NM_018394.1,325-343).
cgcctgcataaggtttgat

SEQ ID NO: 205154 - DNA, 19 bp, Homo sapiens
  siRNA target sequence for FLJ11342 (NM_018394.1,331-349).
cataaggtttgattactca

SEQ ID NO: 205155 - DNA, 19 bp, Homo sapiens
  siRNA target sequence for FLJ11342 (NM_018394.1,435-453).
ctgatgggccacagattct

SEQ ID NO: 205156 - DNA, 19 bp, Homo sapiens
  siRNA target sequence for FLJ11342 (NM_018394.1,511-529).
gaaggtcgtggctcttatt

SEQ ID NO: 205157 - DNA, 19 bp, Homo sapiens
  siRNA target sequence for FLJ11342 (NM_018394.1,542-560).
gctgcagataccttagtga

SEQ ID NO: 205158 - DNA, 19 bp, Homo sapiens
  siRNA target sequence for FLJ11342 (NM_018394.1,548-566).
gataccttagtgacaaagt

SEQ ID NO: 205159 - DNA, 19 bp, Homo sapiens
  siRNA target sequence for FLJ11342 (NM_018394.1,553-571).
cttagtgacaaagtttaat

SEQ ID NO: 205160 - DNA, 19 bp, Homo sapiens
  siRNA target sequence for FLJ11342 (NM_018394.1,575-593).
cttcctgttgagctaaaaa

SEQ ID NO: 205161 - DNA, 19 bp, Homo sapiens
  siRNA target sequence for FLJ11342 (NM_018394.1,622-640).
catgccatcaaaatactct

SEQ ID NO: 205162 - DNA, 19 bp, Homo sapiens
  siRNA target sequence for FLJ11342 (NM_018394.1,648-666).
gagtttataacgttcagta

SEQ ID NO: 205163 - DNA, 19 bp, Homo sapiens
  siRNA target sequence for FLJ11342 (NM_018394.1,658-676).
cgttcagtacagtttcatt

SEQ ID NO: 205164 - DNA, 19 bp, Homo sapiens
  siRNA target sequence for FLJ11342 (NM_018394.1,689-707).
catcactgcttgttacata

SEQ ID NO: 205165 - DNA, 19 bp, Homo sapiens
  siRNA target sequence for FLJ11342 (NM_018394.1,700-718).
gttacatagcccaattcct

SEQ ID NO: 205166 - DNA, 19 bp, Homo sapiens
  siRNA target sequence for FLJ11342 (NM_018394.1,719-737).
gtgaactgccccataagat

SEQ ID NO: 205167 - DNA, 19 bp, Homo sapiens
  siRNA target sequence for FLJ11342 (NM_018394.1,764-782).
gtaccttggcatacatcaa

SEQ ID NO: 205168 - DNA, 19 bp, Homo sapiens
  siRNA target sequence for FLJ11342 (NM_018394.1,847-865).
ccgaatgagggaaaaagca

SEQ ID NO: 205169 - DNA, 19 bp, Homo sapiens
  siRNA target sequence for FLJ11342 (NM_018394.1,864-882).
cagacattcaacttcttgt

SEQ ID NO: 205170 - DNA, 19 bp, Homo sapiens
  siRNA target sequence for FLJ11342 (NM_018394.1,866-884).
gacattcaacttcttgttt

SEQ ID NO: 205171 - DNA, 19 bp, Homo sapiens
  siRNA target sequence for FLJ11342 (NM_018394.1,911-929).
ctctcaactatagttaact

SEQ ID NO: 205172 - DNA, 19 bp, Homo sapiens
  siRNA target sequence for FLJ21736 (NM_024922.3,229-247).
cacagaccgccttgtgaat

SEQ ID NO: 205173 - DNA, 19 bp, Homo sapiens
  siRNA target sequence for FLJ21736 (NM_024922.3,231-249).
cagaccgccttgtgaatgt

SEQ ID NO: 205174 - DNA, 19 bp, Homo sapiens
  siRNA target sequence for FLJ21736 (NM_024922.3,233-251).
gaccgccttgtgaatgtct

SEQ ID NO: 205175 - DNA, 19 bp, Homo sapiens
  siRNA target sequence for FLJ21736 (NM_024922.3,235-253).
ccgccttgtgaatgtcttt

SEQ ID NO: 205176 - DNA, 19 bp, Homo sapiens
  siRNA target sequence for FLJ21736 (NM_024922.3,491-509).
ggtaggccggtcatggtat

SEQ ID NO: 205177 - DNA, 19 bp, Homo sapiens
  siRNA target sequence for FLJ21736 (NM_024922.3,879-897).
ggcccctagctcagaaaat

SEQ ID NO: 205178 - DNA, 19 bp, Homo sapiens
  siRNA target sequence for FLJ21736 (NM_024922.3,1234-1252).
gatgcccaccgtcatagat

SEQ ID NO: 205179 - DNA, 19 bp, Homo sapiens
  siRNA target sequence for FLJ21736 (NM_024922.3,1237-1255).
gcccaccgtcatagatgaa

SEQ ID NO: 205180 - DNA, 19 bp, Homo sapiens
  siRNA target sequence for FLJ21736 (NM_024922.3,1238-1256).
cccaccgtcatagatgaat

SEQ ID NO: 205181 - DNA, 19 bp, Homo sapiens
  siRNA target sequence for FLJ21736 (NM_024922.3,1239-1257).
ccaccgtcatagatgaata

SEQ ID NO: 205182 - DNA, 19 bp, Homo sapiens
  siRNA target sequence for FLJ21736 (NM_024922.3,1242-1260).
ccgtcatagatgaatacct

SEQ ID NO: 205183 - DNA, 19 bp, Homo sapiens
  siRNA target sequence for FLJ21736 (NM_024922.3,1243-1261).
cgtcatagatgaataccta

SEQ ID NO: 205184 - DNA, 19 bp, Homo sapiens
  siRNA target sequence for FLJ21736 (NM_024922.3,1290-1308).
gccaggcgttccaggaatt

SEQ ID NO: 205185 - DNA, 19 bp, Homo sapiens
  siRNA target sequence for FLJ21736 (NM_024922.3,1312-1330).
gggtgacgtattcatcaat

SEQ ID NO: 205186 - DNA, 19 bp, Homo sapiens
  siRNA target sequence for FLJ21736 (NM_024922.3,1336-1354).
caccgtcagtttttcaaga

SEQ ID NO: 205187 - DNA, 19 bp, Homo sapiens
  siRNA target sequence for FLJ21736 (NM_024922.3,1338-1356).
ccgtcagtttttcaagata

SEQ ID NO: 205188 - DNA, 19 bp, Homo sapiens
  siRNA target sequence for FLJ21736 (NM_024922.3,1376-1394).
cctgtctttttctatgagt

SEQ ID NO: 205189 - DNA, 19 bp, Homo sapiens
  siRNA target sequence for FLJ21736 (NM_024922.3,1399-1417).
gcatcgacccagttctttt

SEQ ID NO: 205190 - DNA, 19 bp, Homo sapiens
  siRNA target sequence for FLJ21736 (NM_024922.3,1410-1428).
gttcttttgcgaagatcaa

SEQ ID NO: 205191 - DNA, 19 bp, Homo sapiens
  siRNA target sequence for FLJ21736 (NM_024922.3,1617-1635).
ctccttggccccaattcaa

SEQ ID NO: 205192 - DNA, 19 bp, Homo sapiens
  siRNA target sequence for FLJ21736 (NM_024922.3,1633-1651).
caaccaggcggaacaatat

SEQ ID NO: 205193 - DNA, 19 bp, Homo sapiens
  siRNA target sequence for FLJ21736 (NM_024922.3,1723-1741).
gctccccagcaagatacaa

SEQ ID NO: 205194 - DNA, 19 bp, Homo sapiens
  siRNA target sequence for FLJ31547 (NM_145024.1,251-269).
caccaggctgggatggatt

SEQ ID NO: 205195 - DNA, 19 bp, Homo sapiens
  siRNA target sequence for FLJ31547 (NM_145024.1,348-366).
ctgggatccctgcgattta

SEQ ID NO: 205196 - DNA, 19 bp, Homo sapiens
  siRNA target sequence for FLJ31547 (NM_145024.1,381-399).
gcatcgccctgggataact

SEQ ID NO: 205197 - DNA, 19 bp, Homo sapiens
  siRNA target sequence for FLJ31547 (NM_145024.1,382-400).
catcgccctgggataactt

SEQ ID NO: 205198 - DNA, 19 bp, Homo sapiens
  siRNA target sequence for FLJ31547 (NM_145024.1,408-426).
gccacctcctaccctaatt

SEQ ID NO: 205199 - DNA, 19 bp, Homo sapiens
  siRNA target sequence for FLJ31547 (NM_145024.1,409-427).
ccacctcctaccctaattt

SEQ ID NO: 205200 - DNA, 19 bp, Homo sapiens
  siRNA target sequence for FLJ31547 (NM_145024.1,446-464).
gtggctgctcttagatcaa

SEQ ID NO: 205201 - DNA, 19 bp, Homo sapiens
  siRNA target sequence for FLJ31547 (NM_145024.1,448-466).
ggctgctcttagatcaaca

SEQ ID NO: 205202 - DNA, 19 bp, Homo sapiens
  siRNA target sequence for FLJ31547 (NM_145024.1,831-849).
ggagccataagtgtttcta

SEQ ID NO: 205203 - DNA, 19 bp, Homo sapiens
  siRNA target sequence for FLJ31547 (NM_145024.1,841-859).
gtgtttctagtcttatact

SEQ ID NO: 205204 - DNA, 19 bp, Homo sapiens
  siRNA target sequence for FLJ31547 (NM_145024.1,1113-1131).
gagcctctagatctattgt

SEQ ID NO: 205205 - DNA, 19 bp, Homo sapiens
  siRNA target sequence for FLJ31547 (NM_145024.1,1248-1266).
gccctccatctgatacaaa

SEQ ID NO: 205206 - DNA, 19 bp, Homo sapiens
  siRNA target sequence for FLJ31547 (NM_145024.1,1249-1267).
ccctccatctgatacaaaa

SEQ ID NO: 205207 - DNA, 19 bp, Homo sapiens
  siRNA target sequence for FLJ31547 (NM_145024.1,1274-1292).
gcacatcccgcctcagtat

SEQ ID NO: 205208 - DNA, 19 bp, Homo sapiens
  siRNA target sequence for FLJ31547 (NM_145024.1,1295-1313).
gcaccttgtggctaatgaa

SEQ ID NO: 205209 - DNA, 19 bp, Homo sapiens
  siRNA target sequence for FLJ31547 (NM_145024.1,1485-1503).
gctcgaaccgggaatccta

SEQ ID NO: 205210 - DNA, 19 bp, Homo sapiens
  siRNA target sequence for FLJ31547 (NM_145024.1,1486-1504).
ctcgaaccgggaatcctaa

SEQ ID NO: 205211 - DNA, 19 bp, Homo sapiens
  siRNA target sequence for FLJ31547 (NM_145024.1,1519-1537).
ctctgtggccagcttataa

SEQ ID NO: 205212 - DNA, 19 bp, Homo sapiens
  siRNA target sequence for FLJ31547 (NM_145024.1,1577-1595).
cctcggacagagactcaaa

SEQ ID NO: 205213 - DNA, 19 bp, Homo sapiens
  siRNA target sequence for FLJ31547 (NM_145024.1,1661-1679).
cagtcctctttcttcctta

SEQ ID NO: 205214 - DNA, 19 bp, Homo sapiens
  siRNA target sequence for GNPDA1 (NM_005471.2,413-431).
catcctggagcactattct

SEQ ID NO: 205215 - DNA, 19 bp, Homo sapiens
  siRNA target sequence for GNPDA1 (NM_005471.2,489-507).
gggccagagaagtacttca

SEQ ID NO: 205216 - DNA, 19 bp, Homo sapiens
  siRNA target sequence for GNPDA1 (NM_005471.2,534-552).
ccacttggctgctacaaga

SEQ ID NO: 205217 - DNA, 19 bp, Homo sapiens
  siRNA target sequence for GNPDA1 (NM_005471.2,555-573).
ctgattgaatactataaga

SEQ ID NO: 205218 - DNA, 19 bp, Homo sapiens
  siRNA target sequence for GNPDA1 (NM_005471.2,557-575).
gattgaatactataagaat

SEQ ID NO: 205219 - DNA, 19 bp, Homo sapiens
  siRNA target sequence for GNPDA1 (NM_005471.2,577-595).
gggacctgtcctttaaata

SEQ ID NO: 205220 - DNA, 19 bp, Homo sapiens
  siRNA target sequence for GNPDA1 (NM_005471.2,578-596).
ggacctgtcctttaaatat

SEQ ID NO: 205221 - DNA, 19 bp, Homo sapiens
  siRNA target sequence for GNPDA1 (NM_005471.2,637-655).
gagaccacccggagagtta

SEQ ID NO: 205222 - DNA, 19 bp, Homo sapiens
  siRNA target sequence for GNPDA1 (NM_005471.2,661-679).
ccttcatgtggaacaactt

SEQ ID NO: 205223 - DNA, 19 bp, Homo sapiens
  siRNA target sequence for GNPDA1 (NM_005471.2,737-755).
cgacctacaggcagaatgt

SEQ ID NO: 205224 - DNA, 19 bp, Homo sapiens
  siRNA target sequence for GNPDA1 (NM_005471.2,784-802).
caggtgggatcgagctatt

SEQ ID NO: 205225 - DNA, 19 bp, Homo sapiens
  siRNA target sequence for GNPDA1 (NM_005471.2,787-805).
gtgggatcgagctatttgt

SEQ ID NO: 205226 - DNA, 19 bp, Homo sapiens
  siRNA target sequence for GNPDA1 (NM_005471.2,1129-1147).
ccaccttggagctgaaagt

SEQ ID NO: 205227 - DNA, 19 bp, Homo sapiens
  siRNA target sequence for GNPDA1 (NM_005471.2,1200-1218).
gaccccttgtacagtatca

SEQ ID NO: 205228 - DNA, 19 bp, Homo sapiens
  siRNA target sequence for GNPDA1 (NM_005471.2,1242-1260).
caatcttcgaagaaaccat

SEQ ID NO: 205229 - DNA, 19 bp, Homo sapiens
  siRNA target sequence for KIAA1363 (NM_020792.1,208-226).
gtgcacagcaagtgagtaa

SEQ ID NO: 205230 - DNA, 19 bp, Homo sapiens
  siRNA target sequence for KIAA1363 (NM_020792.1,261-279).
ctggcactgaattttatca

SEQ ID NO: 205231 - DNA, 19 bp, Homo sapiens
  siRNA target sequence for KIAA1363 (NM_020792.1,326-344).
ggtgaccgacacagacttt

SEQ ID NO: 205232 - DNA, 19 bp, Homo sapiens
  siRNA target sequence for KIAA1363 (NM_020792.1,398-416).
gaaacgcagcgtcgtttat

SEQ ID NO: 205233 - DNA, 19 bp, Homo sapiens
  siRNA target sequence for KIAA1363 (NM_020792.1,403-421).
gcagcgtcgtttatatcca

SEQ ID NO: 205234 - DNA, 19 bp, Homo sapiens
  siRNA target sequence for KIAA1363 (NM_020792.1,445-463).
gtgcaaaaatcaggtatta

SEQ ID NO: 205235 - DNA, 19 bp, Homo sapiens
  siRNA target sequence for KIAA1363 (NM_020792.1,478-496).
cagcaatggctgaggaatt

SEQ ID NO: 205236 - DNA, 19 bp, Homo sapiens
  siRNA target sequence for KIAA1363 (NM_020792.1,480-498).
gcaatggctgaggaattga

SEQ ID NO: 205237 - DNA, 19 bp, Homo sapiens
  siRNA target sequence for KIAA1363 (NM_020792.1,524-542).
caggctagttccaaaggtt

SEQ ID NO: 205238 - DNA, 19 bp, Homo sapiens
  siRNA target sequence for KIAA1363 (NM_020792.1,526-544).
ggctagttccaaaggttta

SEQ ID NO: 205239 - DNA, 19 bp, Homo sapiens
  siRNA target sequence for KIAA1363 (NM_020792.1,527-545).
gctagttccaaaggtttat

SEQ ID NO: 205240 - DNA, 19 bp, Homo sapiens
  siRNA target sequence for KIAA1363 (NM_020792.1,567-585).
gttgtacgggccacaaagt

SEQ ID NO: 205241 - DNA, 19 bp, Homo sapiens
  siRNA target sequence for KIAA1363 (NM_020792.1,570-588).
gtacgggccacaaagtatt

SEQ ID NO: 205242 - DNA, 19 bp, Homo sapiens
  siRNA target sequence for KIAA1363 (NM_020792.1,574-592).
gggccacaaagtatttcct

SEQ ID NO: 205243 - DNA, 19 bp, Homo sapiens
  siRNA target sequence for KIAA1363 (NM_020792.1,590-608).
cctgaagccagaagtctta

SEQ ID NO: 205244 - DNA, 19 bp, Homo sapiens
  siRNA target sequence for KIAA1363 (NM_020792.1,624-642).
gatccaggcagaatttgca

SEQ ID NO: 205245 - DNA, 19 bp, Homo sapiens
  siRNA target sequence for KIAA1363 (NM_020792.1,680-698).
ccttggacaacagtttact

SEQ ID NO: 205246 - DNA, 19 bp, Homo sapiens
  siRNA target sequence for KIAA1363 (NM_020792.1,702-720).
gatgccagcctaaaaaata

SEQ ID NO: 205247 - DNA, 19 bp, Homo sapiens
  siRNA target sequence for KIAA1363 (NM_020792.1,722-740).
gctcaaactacaagcttta

SEQ ID NO: 205248 - DNA, 19 bp, Homo sapiens
  siRNA target sequence for KIAA1363 (NM_020792.1,723-741).
ctcaaactacaagctttaa

SEQ ID NO: 205249 - DNA, 19 bp, Homo sapiens
  siRNA target sequence for KIAA1363 (NM_020792.1,750-768).
gttcttcaagctttagatt

SEQ ID NO: 205250 - DNA, 19 bp, Homo sapiens
  siRNA target sequence for KIAA1363 (NM_020792.1,781-799).
cttatcagcaaaatgtgaa

SEQ ID NO: 205251 - DNA, 19 bp, Homo sapiens
  siRNA target sequence for KIAA1363 (NM_020792.1,870-888).
gtgcaggcaatgatcgtta

SEQ ID NO: 205252 - DNA, 19 bp, Homo sapiens
  siRNA target sequence for KIAA1363 (NM_020792.1,873-891).
caggcaatgatcgttaaca

SEQ ID NO: 205253 - DNA, 19 bp, Homo sapiens
  siRNA target sequence for KIAA1363 (NM_020792.1,877-895).
caatgatcgttaacaatca

SEQ ID NO: 205254 - DNA, 19 bp, Homo sapiens
  siRNA target sequence for KIAA1363 (NM_020792.1,977-995).
gaactacaagcctgttgta

SEQ ID NO: 205255 - DNA, 19 bp, Homo sapiens
  siRNA target sequence for KIAA1363 (NM_020792.1,1135-1153).
gagacgatggcatcatgta

SEQ ID NO: 205256 - DNA, 19 bp, Homo sapiens
  siRNA target sequence for KIAA1363 (NM_020792.1,1210-1228).
gctttcacggatgtatgat

SEQ ID NO: 205257 - DNA, 19 bp, Homo sapiens
  siRNA target sequence for KIAA1363 (NM_020792.1,1211-1229).
ctttcacggatgtatgatt

SEQ ID NO: 205258 - DNA, 19 bp, Homo sapiens
  siRNA target sequence for KIAA1363 (NM_020792.1,1215-1233).
cacggatgtatgattttca

SEQ ID NO: 205259 - DNA, 19 bp, Homo sapiens
  siRNA target sequence for KIAA1363 (NM_020792.1,1217-1235).
cggatgtatgattttcact

SEQ ID NO: 205260 - DNA, 19 bp, Homo sapiens
  siRNA target sequence for KIAA1363 (NM_020792.1,1259-1277).
gggaatccggactaggaat

SEQ ID NO: 205261 - DNA, 19 bp, Homo sapiens
  siRNA target sequence for KIAA1363 (NM_020792.1,1260-1278).
ggaatccggactaggaata

SEQ ID NO: 205262 - DNA, 19 bp, Homo sapiens
  siRNA target sequence for KIAA1363 (NM_020792.1,1266-1284).
cggactaggaatagttaca

SEQ ID NO: 205263 - DNA, 19 bp, Homo sapiens
  siRNA target sequence for KIAA1363 (NM_020792.1,1267-1285).
ggactaggaatagttacat

SEQ ID NO: 205264 - DNA, 19 bp, Homo sapiens
  siRNA target sequence for KIAA1363 (NM_020792.1,1270-1288).
ctaggaatagttacatcaa

SEQ ID NO: 205265 - DNA, 19 bp, Homo sapiens
  siRNA target sequence for LHPP (NM_022126.2,330-348).
gacggagtccgctcagaat

SEQ ID NO: 205266 - DNA, 19 bp, Homo sapiens
  siRNA target sequence for LHPP (NM_022126.2,332-350).
cggagtccgctcagaattt

SEQ ID NO: 205267 - DNA, 19 bp, Homo sapiens
  siRNA target sequence for LHPP (NM_022126.2,334-352).
gagtccgctcagaatttga

SEQ ID NO: 205268 - DNA, 19 bp, Homo sapiens
  siRNA target sequence for LHPP (NM_022126.2,391-409).
cagacgcaggagaaagctt

SEQ ID NO: 205269 - DNA, 19 bp, Homo sapiens
  siRNA target sequence for LHPP (NM_022126.2,406-424).
gcttttcttatcaaaacat

SEQ ID NO: 205270 - DNA, 19 bp, Homo sapiens
  siRNA target sequence for LHPP (NM_022126.2,522-540).
gacgttggtccctacatga

SEQ ID NO: 205271 - DNA, 19 bp, Homo sapiens
  siRNA target sequence for LHPP (NM_022126.2,536-554).
catgaaggcgcttgagtat

SEQ ID NO: 205272 - DNA, 19 bp, Homo sapiens
  siRNA target sequence for LHPP (NM_022126.2,584-602).
gaagccttctcctgagttt

SEQ ID NO: 205273 - DNA, 19 bp, Homo sapiens
  siRNA target sequence for LHPP (NM_022126.2,638-656).
ccaccaggccgtcatgatt

SEQ ID NO: 205274 - DNA, 19 bp, Homo sapiens
  siRNA target sequence for LHPP (NM_022126.2,689-707).
ccagcggtgtggaatgaga

SEQ ID NO: 205275 - DNA, 19 bp, Homo sapiens
  siRNA target sequence for LOC134147 (NM_138809.2,247-265).
ggctaacgaagcttatcct

SEQ ID NO: 205276 - DNA, 19 bp, Homo sapiens
  siRNA target sequence for LOC134147 (NM_138809.2,303-321).
ggctaggccgtgaagttca

SEQ ID NO: 205277 - DNA, 19 bp, Homo sapiens
  siRNA target sequence for LOC134147 (NM_138809.2,304-322).
gctaggccgtgaagttcaa

SEQ ID NO: 205278 - DNA, 19 bp, Homo sapiens
  siRNA target sequence for LOC134147 (NM_138809.2,412-430).
gcccaataccagatatata

SEQ ID NO: 205279 - DNA, 19 bp, Homo sapiens
  siRNA target sequence for LOC134147 (NM_138809.2,415-433).
caataccagatatatagct

SEQ ID NO: 205280 - DNA, 19 bp, Homo sapiens
  siRNA target sequence for LOC134147 (NM_138809.2,526-544).
ccctgagtggctgaaaaca

SEQ ID NO: 205281 - DNA, 19 bp, Homo sapiens
  siRNA target sequence for LOC134147 (NM_138809.2,602-620).
cagtgtcatgcccagaaaa

SEQ ID NO: 205282 - DNA, 19 bp, Homo sapiens
  siRNA target sequence for LOC134147 (NM_138809.2,648-666).
gaactgctgtccatcattt

SEQ ID NO: 205283 - DNA, 19 bp, Homo sapiens
  siRNA target sequence for LOC134147 (NM_138809.2,651-669).
ctgctgtccatcatttgat

SEQ ID NO: 205284 - DNA, 19 bp, Homo sapiens
  siRNA target sequence for LOC134147 (NM_138809.2,654-672).
ctgtccatcatttgatgat

SEQ ID NO: 205285 - DNA, 19 bp, Homo sapiens
  siRNA target sequence for LOC134147 (NM_138809.2,702-720).
ccgtctatggcattgtcaa

SEQ ID NO: 205286 - DNA, 19 bp, Homo sapiens
  siRNA target sequence for LOC134147 (NM_138809.2,791-809).
ccactcaaggacgtatctt

SEQ ID NO: 205287 - DNA, 19 bp, Homo sapiens
  siRNA target sequence for LOC134147 (NM_138809.2,792-810).
cactcaaggacgtatcttt

SEQ ID NO: 205288 - DNA, 19 bp, Homo sapiens
  siRNA target sequence for LOC134147 (NM_138809.2,935-953).
gacgaggccagaaggaatt

SEQ ID NO: 205289 - DNA, 19 bp, Homo sapiens
  siRNA target sequence for LOC134147 (NM_138809.2,937-955).
cgaggccagaaggaattta

SEQ ID NO: 205290 - DNA, 19 bp, Homo sapiens
  siRNA target sequence for LOC339221 (NM_178543.2,262-280).
ccctggtcaccggcaaata

SEQ ID NO: 205291 - DNA, 19 bp, Homo sapiens
  siRNA target sequence for LOC339221 (NM_178543.2,264-282).
ctggtcaccggcaaatata

SEQ ID NO: 205292 - DNA, 19 bp, Homo sapiens
  siRNA target sequence for LOC339221 (NM_178543.2,295-313).
gggtggttcacaacatgta

SEQ ID NO: 205293 - DNA, 19 bp, Homo sapiens
  siRNA target sequence for LOC339221 (NM_178543.2,300-318).
gttcacaacatgtactaca

SEQ ID NO: 205294 - DNA, 19 bp, Homo sapiens
  siRNA target sequence for LOC339221 (NM_178543.2,790-808).
gcgacctggttgaattcca

SEQ ID NO: 205295 - DNA, 19 bp, Homo sapiens
  siRNA target sequence for LOC339221 (NM_178543.2,1034-1052).
cgtcatccatgggagaatt

SEQ ID NO: 205296 - DNA, 19 bp, Homo sapiens
  siRNA target sequence for LOC339221 (NM_178543.2,1035-1053).
gtcatccatgggagaatta

SEQ ID NO: 205297 - DNA, 19 bp, Homo sapiens
  siRNA target sequence for LOC339221 (NM_178543.2,1048-1066).
gaattaacgtccagttcaa

SEQ ID NO: 205298 - DNA, 19 bp, Homo sapiens
  siRNA target sequence for LOC339221 (NM_178543.2,1071-1089).
ggggagcacggctttgaca

SEQ ID NO: 205299 - DNA, 19 bp, Homo sapiens
  siRNA target sequence for LOC339221 (NM_178543.2,1072-1090).
gggagcacggctttgacaa

SEQ ID NO: 205300 - DNA, 19 bp, Homo sapiens
  siRNA target sequence for LOC339221 (NM_178543.2,1361-1379).
gctggggaccgtgattctt

SEQ ID NO: 205301 - DNA, 19 bp, Homo sapiens
  siRNA target sequence for MASA (NM_021204.1,253-271).
ccgtgatcctgttagatat

SEQ ID NO: 205302 - DNA, 19 bp, Homo sapiens
  siRNA target sequence for MASA (NM_021204.1,319-337).
cttacatcgaagaaaatgt

SEQ ID NO: 205303 - DNA, 19 bp, Homo sapiens
  siRNA target sequence for MASA (NM_021204.1,323-341).
catcgaagaaaatgttaaa

SEQ ID NO: 205304 - DNA, 19 bp, Homo sapiens
  siRNA target sequence for MASA (NM_021204.1,460-478).
ggaatggagtggatgatct

SEQ ID NO: 205305 - DNA, 19 bp, Homo sapiens
  siRNA target sequence for MASA (NM_021204.1,495-513).
gccgtggtagataatgtgt

SEQ ID NO: 205306 - DNA, 19 bp, Homo sapiens
  siRNA target sequence for MASA (NM_021204.1,587-605).
cacagctgggcgcatgaaa

SEQ ID NO: 205307 - DNA, 19 bp, Homo sapiens
  siRNA target sequence for MASA (NM_021204.1,599-617).
catgaaagcagagttcttt

SEQ ID NO: 205308 - DNA, 19 bp, Homo sapiens
  siRNA target sequence for MASA (NM_021204.1,655-673).
ccggaatgaaggtgtacat

SEQ ID NO: 205309 - DNA, 19 bp, Homo sapiens
  siRNA target sequence for MASA (NM_021204.1,705-723).
ctgttattcgggcattcta

SEQ ID NO: 205310 - DNA, 19 bp, Homo sapiens
  siRNA target sequence for MASA (NM_021204.1,721-739).
ctacggagggagatattct

SEQ ID NO: 205311 - DNA, 19 bp, Homo sapiens
  siRNA target sequence for MASA (NM_021204.1,724-742).
cggagggagatattcttga

SEQ ID NO: 205312 - DNA, 19 bp, Homo sapiens
  siRNA target sequence for MASA (NM_021204.1,747-765).
gttgatggtcactttgata

SEQ ID NO: 205313 - DNA, 19 bp, Homo sapiens
  siRNA target sequence for MASA (NM_021204.1,824-842).
gtgctcaaccaacaacatt

SEQ ID NO: 205314 - DNA, 19 bp, Homo sapiens
  siRNA target sequence for MASA (NM_021204.1,826-844).
gctcaaccaacaacatttt

SEQ ID NO: 205315 - DNA, 19 bp, Homo sapiens
  siRNA target sequence for MASA (NM_021204.1,918-936).
ccaggcaacgcaggattaa

SEQ ID NO: 205316 - DNA, 19 bp, Homo sapiens
  siRNA target sequence for MASA (NM_021204.1,926-944).
cgcaggattaacagatgat

SEQ ID NO: 205317 - DNA, 19 bp, Homo sapiens
  siRNA target sequence for MGC12904 (NM_031219.2,1071-1089).
ccatcgctgaacagcttta

SEQ ID NO: 205318 - DNA, 19 bp, Homo sapiens
  siRNA target sequence for MGC12904 (NM_031219.2,1075-1093).
cgctgaacagctttataaa

SEQ ID NO: 205319 - DNA, 19 bp, Homo sapiens
  siRNA target sequence for MGC12904 (NM_031219.2,1236-1254).
gtgaacacttcgactttgt

SEQ ID NO: 205320 - DNA, 19 bp, Homo sapiens
  siRNA target sequence for MGC12904 (NM_031219.2,1315-1333).
gcggcttgctcatatggaa

SEQ ID NO: 205321 - DNA, 19 bp, Homo sapiens
  siRNA target sequence for MGC12904 (NM_031219.2,1346-1364).
gcccatgttggggataatt

SEQ ID NO: 205322 - DNA, 19 bp, Homo sapiens
  siRNA target sequence for MGC12904 (NM_031219.2,1347-1365).
cccatgttggggataatta

SEQ ID NO: 205323 - DNA, 19 bp, Homo sapiens
  siRNA target sequence for MGC12904 (NM_031219.2,1441-1459).
cgtggtcagggattctgta

SEQ ID NO: 205324 - DNA, 19 bp, Homo sapiens
  siRNA target sequence for MGC12904 (NM_031219.2,1450-1468).
ggattctgtacctaaagaa

SEQ ID NO: 205325 - DNA, 19 bp, Homo sapiens
  siRNA target sequence for MGC3234 (NM_023947.2,146-164).
cactaccctgtcaaagtca

SEQ ID NO: 205326 - DNA, 19 bp, Homo sapiens
  siRNA target sequence for MGC3234 (NM_023947.2,262-280).
ctgagagtgtggttcttga

SEQ ID NO: 205327 - DNA, 19 bp, Homo sapiens
  siRNA target sequence for MGC3234 (NM_023947.2,330-348).
gatgtactgggctatgtca

SEQ ID NO: 205328 - DNA, 19 bp, Homo sapiens
  siRNA target sequence for MGC3234 (NM_023947.2,436-454).
gacgtggccgtgagatgtt

SEQ ID NO: 205329 - DNA, 19 bp, Homo sapiens
  siRNA target sequence for MGC3234 (NM_023947.2,439-457).
gtggccgtgagatgtttga

SEQ ID NO: 205330 - DNA, 19 bp, Homo sapiens
  siRNA target sequence for MGC3234 (NM_023947.2,552-570).
gactggacttacgatgatt

SEQ ID NO: 205331 - DNA, 19 bp, Homo sapiens
  siRNA target sequence for MGC3234 (NM_023947.2,634-652).
caaagaaccagcatttcga

SEQ ID NO: 205332 - DNA, 19 bp, Homo sapiens
  siRNA target sequence for MGC3234 (NM_023947.2,956-974).
gtccaagtggcgaagcaaa

SEQ ID NO: 205333 - DNA, 19 bp, Homo sapiens
  siRNA target sequence for MGC3234 (NM_023947.2,958-976).
ccaagtggcgaagcaaaat

SEQ ID NO: 205334 - DNA, 19 bp, Homo sapiens
  siRNA target sequence for MGC3234 (NM_023947.2,984-1002).
gggctcaacttctatggta

SEQ ID NO: 205335 - DNA, 19 bp, Homo sapiens
  siRNA target sequence for MGC3234 (NM_023947.2,1144-1162).
ggaggcacgtcgtcttcta

SEQ ID NO: 205336 - DNA, 19 bp, Homo sapiens
  siRNA target sequence for MPPE1 (NM_023075.2,1149-1167).
gggggatatctttgatgaa

SEQ ID NO: 205337 - DNA, 19 bp, Homo sapiens
  siRNA target sequence for MPPE1 (NM_023075.2,1201-1219).
gatgtggagcggtttcaga

SEQ ID NO: 205338 - DNA, 19 bp, Homo sapiens
  siRNA target sequence for MPPE1 (NM_023075.2,1207-1225).
gagcggtttcagaaaatgt

SEQ ID NO: 205339 - DNA, 19 bp, Homo sapiens
  siRNA target sequence for MPPE1 (NM_023075.2,1210-1228).
cggtttcagaaaatgttca

SEQ ID NO: 205340 - DNA, 19 bp, Homo sapiens
  siRNA target sequence for MPPE1 (NM_023075.2,1224-1242).
gttcagacacccaagtcat

SEQ ID NO: 205341 - DNA, 19 bp, Homo sapiens
  siRNA target sequence for MPPE1 (NM_023075.2,1227-1245).
cagacacccaagtcatgta

SEQ ID NO: 205342 - DNA, 19 bp, Homo sapiens
  siRNA target sequence for MPPE1 (NM_023075.2,1280-1298).
gcttccattatgagatgaa

SEQ ID NO: 205343 - DNA, 19 bp, Homo sapiens
  siRNA target sequence for MPPE1 (NM_023075.2,1312-1330).
gaacgctttgagaaagtgt

SEQ ID NO: 205344 - DNA, 19 bp, Homo sapiens
  siRNA target sequence for MPPE1 (NM_023075.2,1355-1373).
ggaaaggcattaactttgt

SEQ ID NO: 205345 - DNA, 19 bp, Homo sapiens
  siRNA target sequence for MPPE1 (NM_023075.2,1432-1450).
gcagagctcattgaagttt

SEQ ID NO: 205346 - DNA, 19 bp, Homo sapiens
  siRNA target sequence for MPPE1 (NM_023075.2,1529-1547).
ctgtcctcctgcagcatta

SEQ ID NO: 205347 - DNA, 19 bp, Homo sapiens
  siRNA target sequence for MPPE1 (NM_023075.2,1533-1551).
cctcctgcagcattatcct

SEQ ID NO: 205348 - DNA, 19 bp, Homo sapiens
  siRNA target sequence for MPPE1 (NM_023075.2,1617-1635).
cccatttaaggagaactat

SEQ ID NO: 205349 - DNA, 19 bp, Homo sapiens
  siRNA target sequence for MPPE1 (NM_023075.2,1619-1637).
catttaaggagaactatga

SEQ ID NO: 205350 - DNA, 19 bp, Homo sapiens
  siRNA target sequence for MPPE1 (NM_023075.2,1646-1664).
cacgggaggcatcacaaaa

SEQ ID NO: 205351 - DNA, 19 bp, Homo sapiens
  siRNA target sequence for MPPE1 (NM_023075.2,1753-1771).
ctcagcgtcccatctttca

SEQ ID NO: 205352 - DNA, 19 bp, Homo sapiens
  siRNA target sequence for MPPE1 (NM_023075.2,1755-1773).
cagcgtcccatctttcagt

SEQ ID NO: 205353 - DNA, 19 bp, Homo sapiens
  siRNA target sequence for MPPE1 (NM_023075.2,1853-1871).
cacgtgaggatgtggtttt

SEQ ID NO: 205354 - DNA, 19 bp, Homo sapiens
  siRNA target sequence for MPPE1 (NM_023075.2,1858-1876).
gaggatgtggttttgatca

SEQ ID NO: 205355 - DNA, 19 bp, Homo sapiens
  siRNA target sequence for MPPE1 (NM_023075.2,1965-1983).
gctcggaaagcgtaagaca

SEQ ID NO: 205356 - DNA, 19 bp, Homo sapiens
  siRNA target sequence for MPPE1 (NM_023075.2,1966-1984).
ctcggaaagcgtaagacaa

SEQ ID NO: 205357 - DNA, 19 bp, Homo sapiens
  siRNA target sequence for MPPE1 (NM_023075.2,1969-1987).
ggaaagcgtaagacaagat

SEQ ID NO: 205358 - DNA, 19 bp, Homo sapiens
  siRNA target sequence for OVGP1 (NM_002557.2,77-95).
gggttgggctggttcttgt

SEQ ID NO: 205359 - DNA, 19 bp, Homo sapiens
  siRNA target sequence for OVGP1 (NM_002557.2,119-137).
cccataaactcgtgtgtta

SEQ ID NO: 205360 - DNA, 19 bp, Homo sapiens
  siRNA target sequence for OVGP1 (NM_002557.2,120-138).
ccataaactcgtgtgttat

SEQ ID NO: 205361 - DNA, 19 bp, Homo sapiens
  siRNA target sequence for OVGP1 (NM_002557.2,121-139).
cataaactcgtgtgttatt

SEQ ID NO: 205362 - DNA, 19 bp, Homo sapiens
  siRNA target sequence for OVGP1 (NM_002557.2,240-258).
gaacaacaatcagattgtt

SEQ ID NO: 205363 - DNA, 19 bp, Homo sapiens
  siRNA target sequence for OVGP1 (NM_002557.2,288-306).
ctacccagagttcaacaaa

SEQ ID NO: 205364 - DNA, 19 bp, Homo sapiens
  siRNA target sequence for OVGP1 (NM_002557.2,400-418).
gccaaccgtgaaaagttta

SEQ ID NO: 205365 - DNA, 19 bp, Homo sapiens
  siRNA target sequence for OVGP1 (NM_002557.2,401-419).
ccaaccgtgaaaagtttat

SEQ ID NO: 205366 - DNA, 19 bp, Homo sapiens
  siRNA target sequence for OVGP1 (NM_002557.2,402-420).
caaccgtgaaaagtttatt

SEQ ID NO: 205367 - DNA, 19 bp, Homo sapiens
  siRNA target sequence for OVGP1 (NM_002557.2,477-495).
cttatatcctggactaaga

SEQ ID NO: 205368 - DNA, 19 bp, Homo sapiens
  siRNA target sequence for OVGP1 (NM_002557.2,507-525).
gcatgaccggtggactttt

SEQ ID NO: 205369 - DNA, 19 bp, Homo sapiens
  siRNA target sequence for OVGP1 (NM_002557.2,511-529).
gaccggtggacttttctct

SEQ ID NO: 205370 - DNA, 19 bp, Homo sapiens
  siRNA target sequence for OVGP1 (NM_002557.2,622-640).
ccacacatcgtccaaacat

SEQ ID NO: 205371 - DNA, 19 bp, Homo sapiens
  siRNA target sequence for OVGP1 (NM_002557.2,630-648).
cgtccaaacatcctatgat

SEQ ID NO: 205372 - DNA, 19 bp, Homo sapiens
  siRNA target sequence for OVGP1 (NM_002557.2,765-783).
caaatcttcggcatatgct

SEQ ID NO: 205373 - DNA, 19 bp, Homo sapiens
  siRNA target sequence for OVGP1 (NM_002557.2,773-791).
cggcatatgctatgaatta

SEQ ID NO: 205374 - DNA, 19 bp, Homo sapiens
  siRNA target sequence for OVGP1 (NM_002557.2,840-858).
cacctatggacgtaccttt

SEQ ID NO: 205375 - DNA, 19 bp, Homo sapiens
  siRNA target sequence for OVGP1 (NM_002557.2,862-880).
ctcctcaaagcctctaaga

SEQ ID NO: 205376 - DNA, 19 bp, Homo sapiens
  siRNA target sequence for OVGP1 (NM_002557.2,864-882).
cctcaaagcctctaagaat

SEQ ID NO: 205377 - DNA, 19 bp, Homo sapiens
  siRNA target sequence for OVGP1 (NM_002557.2,1058-1076).
ccatcagcttcagttacaa

SEQ ID NO: 205378 - DNA, 19 bp, Homo sapiens
  siRNA target sequence for OVGP1 (NM_002557.2,1070-1088).
gttacaaggcatggtttat

SEQ ID NO: 205379 - DNA, 19 bp, Homo sapiens
  siRNA target sequence for OVGP1 (NM_002557.2,1174-1192).
ccccttgtctacgtattga

SEQ ID NO: 205380 - DNA, 19 bp, Homo sapiens
  siRNA target sequence for OVGP1 (NM_002557.2,1175-1193).
cccttgtctacgtattgaa

SEQ ID NO: 205381 - DNA, 19 bp, Homo sapiens
  siRNA target sequence for OVGP1 (NM_002557.2,1176-1194).
ccttgtctacgtattgaat

SEQ ID NO: 205382 - DNA, 19 bp, Homo sapiens
  siRNA target sequence for OVGP1 (NM_002557.2,1180-1198).
gtctacgtattgaatgata

SEQ ID NO: 205383 - DNA, 19 bp, Homo sapiens
  siRNA target sequence for OVGP1 (NM_002557.2,1204-1222).
gtgcgggctgagttcagtt

SEQ ID NO: 205384 - DNA, 19 bp, Homo sapiens
  siRNA target sequence for OVGP1 (NM_002557.2,1207-1225).
cgggctgagttcagttcaa

SEQ ID NO: 205385 - DNA, 19 bp, Homo sapiens
  siRNA target sequence for OVGP1 (NM_002557.2,1209-1227).
ggctgagttcagttcaact

SEQ ID NO: 205386 - DNA, 19 bp, Homo sapiens
  siRNA target sequence for OVGP1 (NM_002557.2,1215-1233).
gttcagttcaacttcttta

SEQ ID NO: 205387 - DNA, 19 bp, Homo sapiens
  siRNA target sequence for OVGP1 (NM_002557.2,1223-1241).
caacttctttaccacaatt

SEQ ID NO: 205388 - DNA, 19 bp, Homo sapiens
  siRNA target sequence for OVGP1 (NM_002557.2,1303-1321).
gcatggaccactgatagta

SEQ ID NO: 205389 - DNA, 19 bp, Homo sapiens
  siRNA target sequence for OVGP1 (NM_002557.2,1304-1322).
catggaccactgatagtaa

SEQ ID NO: 205390 - DNA, 19 bp, Homo sapiens
  siRNA target sequence for OVGP1 (NM_002557.2,1307-1325).
ggaccactgatagtaagat

SEQ ID NO: 205391 - DNA, 19 bp, Homo sapiens
  siRNA target sequence for OVGP1 (NM_002557.2,1362-1380).
ccacggaaagtgtgaaaat

SEQ ID NO: 205392 - DNA, 19 bp, Homo sapiens
  siRNA target sequence for OVGP1 (NM_002557.2,1366-1384).
ggaaagtgtgaaaatatga

SEQ ID NO: 205393 - DNA, 19 bp, Homo sapiens
  siRNA target sequence for OVGP1 (NM_002557.2,1403-1421).
caactgtgacccctacaaa

SEQ ID NO: 205394 - DNA, 19 bp, Homo sapiens
  siRNA target sequence for OVGP1 (NM_002557.2,1412-1430).
cccctacaaaggaaactgt

SEQ ID NO: 205395 - DNA, 19 bp, Homo sapiens
  siRNA target sequence for OVGP1 (NM_002557.2,1694-1712).
ctatgacccctgtccattt

SEQ ID NO: 205396 - DNA, 19 bp, Homo sapiens
  siRNA target sequence for OVGP1 (NM_002557.2,1720-1738).
gagacccttagacagaata

SEQ ID NO: 205397 - DNA, 19 bp, Homo sapiens
  siRNA target sequence for OVGP1 (NM_002557.2,1722-1740).
gacccttagacagaataca

SEQ ID NO: 205398 - DNA, 19 bp, Homo sapiens
  siRNA target sequence for OVGP1 (NM_002557.2,1785-1803).
cccctccagaaacatatca

SEQ ID NO: 205399 - DNA, 19 bp, Homo sapiens
  siRNA target sequence for OVGP1 (NM_002557.2,1787-1805).
cctccagaaacatatcagt

SEQ ID NO: 205400 - DNA, 19 bp, Homo sapiens
  siRNA target sequence for OVGP1 (NM_002557.2,1816-1834).
gggcagactatgcctttaa

SEQ ID NO: 205401 - DNA, 19 bp, Homo sapiens
  siRNA target sequence for OVGP1 (NM_002557.2,1828-1846).
cctttaagaggggagaatt

SEQ ID NO: 205402 - DNA, 19 bp, Homo sapiens
  siRNA target sequence for OVGP1 (NM_002557.2,1941-1959).
ccagctcccggaacaaact

SEQ ID NO: 205403 - DNA, 19 bp, Homo sapiens
  siRNA target sequence for OVGP1 (NM_002557.2,1977-1995).
ccgctttgttcccatctat

SEQ ID NO: 205404 - DNA, 19 bp, Homo sapiens
  siRNA target sequence for PHCA (NM_018367.3,162-180).
cgccgagttctggaataca

SEQ ID NO: 205405 - DNA, 19 bp, Homo sapiens
  siRNA target sequence for PHCA (NM_018367.3,181-199).
gtgagtaacctgatcatga

SEQ ID NO: 205406 - DNA, 19 bp, Homo sapiens
  siRNA target sequence for PHCA (NM_018367.3,189-207).
cctgatcatgattatacct

SEQ ID NO: 205407 - DNA, 19 bp, Homo sapiens
  siRNA target sequence for PHCA (NM_018367.3,254-272).
ggtacattgcttcttattt

SEQ ID NO: 205408 - DNA, 19 bp, Homo sapiens
  siRNA target sequence for PHCA (NM_018367.3,255-273).
gtacattgcttcttattta

SEQ ID NO: 205409 - DNA, 19 bp, Homo sapiens
  siRNA target sequence for PHCA (NM_018367.3,275-293).
cactcacagtggtaggaat

SEQ ID NO: 205410 - DNA, 19 bp, Homo sapiens
  siRNA target sequence for PHCA (NM_018367.3,346-364).
gaactcccaatgatataca

SEQ ID NO: 205411 - DNA, 19 bp, Homo sapiens
  siRNA target sequence for PHCA (NM_018367.3,357-375).
gatatacagctgttgcata

SEQ ID NO: 205412 - DNA, 19 bp, Homo sapiens
  siRNA target sequence for PHCA (NM_018367.3,379-397).
gtgtactgcatgtttgaat

SEQ ID NO: 205413 - DNA, 19 bp, Homo sapiens
  siRNA target sequence for PHCA (NM_018367.3,381-399).
gtactgcatgtttgaatgt

SEQ ID NO: 205414 - DNA, 19 bp, Homo sapiens
  siRNA target sequence for PHCA (NM_018367.3,441-459).
cttagttctattcagttta

SEQ ID NO: 205415 - DNA, 19 bp, Homo sapiens
  siRNA target sequence for PHCA (NM_018367.3,463-481).
gtaaccacagtttacctta

SEQ ID NO: 205416 - DNA, 19 bp, Homo sapiens
  siRNA target sequence for PHCA (NM_018367.3,518-536).
gaatgttggtctttacatt

SEQ ID NO: 205417 - DNA, 19 bp, Homo sapiens
  siRNA target sequence for PHCA (NM_018367.3,522-540).
gttggtctttacattagta

SEQ ID NO: 205418 - DNA, 19 bp, Homo sapiens
  siRNA target sequence for PHCA (NM_018367.3,525-543).
ggtctttacattagtactt

SEQ ID NO: 205419 - DNA, 19 bp, Homo sapiens
  siRNA target sequence for PHCA (NM_018367.3,533-551).
cattagtacttcgatctat

SEQ ID NO: 205420 - DNA, 19 bp, Homo sapiens
  siRNA target sequence for PHCA (NM_018367.3,538-556).
gtacttcgatctatttata

SEQ ID NO: 205421 - DNA, 19 bp, Homo sapiens
  siRNA target sequence for PHCA (NM_018367.3,544-562).
cgatctatttatattgtta

SEQ ID NO: 205422 - DNA, 19 bp, Homo sapiens
  siRNA target sequence for PHCA (NM_018367.3,580-598).
cttagaggactgggttata

SEQ ID NO: 205423 - DNA, 19 bp, Homo sapiens
  siRNA target sequence for PHCA (NM_018367.3,587-605).
gactgggttatacatcatt

SEQ ID NO: 205424 - DNA, 19 bp, Homo sapiens
  siRNA target sequence for PHCA (NM_018367.3,681-699).
gaaggtaccacctatcata

SEQ ID NO: 205425 - DNA, 19 bp, Homo sapiens
  siRNA target sequence for PHCA (NM_018367.3,685-703).
gtaccacctatcataggta

SEQ ID NO: 205426 - DNA, 19 bp, Homo sapiens
  siRNA target sequence for PHCA (NM_018367.3,721-739).
gcatggtggcatattttaa

SEQ ID NO: 205427 - DNA, 19 bp, Homo sapiens
  siRNA target sequence for PHCA (NM_018367.3,743-761).
gccttggttcctatcttca

SEQ ID NO: 205428 - DNA, 19 bp, Homo sapiens
  siRNA target sequence for PHCA (NM_018367.3,785-803).
gaacactttacctgagata

SEQ ID NO: 205429 - DNA, 19 bp, Homo sapiens
  siRNA target sequence for PHCA (NM_018367.3,806-824).
ggccaaaagtgaagtttct

SEQ ID NO: 205430 - DNA, 19 bp, Homo sapiens
  siRNA target sequence for PHCA (NM_018367.3,808-826).
ccaaaagtgaagtttctct

SEQ ID NO: 205431 - DNA, 19 bp, Homo sapiens
  siRNA target sequence for PIGO (NM_032634.2,593-611).
gattttcgcgggttgtgtt

SEQ ID NO: 205432 - DNA, 19 bp, Homo sapiens
  siRNA target sequence for PIGO (NM_032634.2,622-640).
gatgctctgcgatttgact

SEQ ID NO: 205433 - DNA, 19 bp, Homo sapiens
  siRNA target sequence for PIGO (NM_032634.2,864-882).
cgccatagtggaagacaat

SEQ ID NO: 205434 - DNA, 19 bp, Homo sapiens
  siRNA target sequence for PIGO (NM_032634.2,905-923).
caggaaggcgtgtagtctt

SEQ ID NO: 205435 - DNA, 19 bp, Homo sapiens
  siRNA target sequence for PIGO (NM_032634.2,919-937).
gtcttcatgggagatgata

SEQ ID NO: 205436 - DNA, 19 bp, Homo sapiens
  siRNA target sequence for PIGO (NM_032634.2,1121-1139).
gccctcaccaccctgaaat

SEQ ID NO: 205437 - DNA, 19 bp, Homo sapiens
  siRNA target sequence for PIGO (NM_032634.2,1275-1293).
ggtctcagctgctctcttt

SEQ ID NO: 205438 - DNA, 19 bp, Homo sapiens
  siRNA target sequence for PIGO (NM_032634.2,1280-1298).
cagctgctctctttctgta

SEQ ID NO: 205439 - DNA, 19 bp, Homo sapiens
  siRNA target sequence for PIGO (NM_032634.2,1397-1415).
ccatcccatttgggaatat

SEQ ID NO: 205440 - DNA, 19 bp, Homo sapiens
  siRNA target sequence for PIGO (NM_032634.2,1425-1443).
gatggctgagctattctca

SEQ ID NO: 205441 - DNA, 19 bp, Homo sapiens
  siRNA target sequence for PIGO (NM_032634.2,1516-1534).
gtgtcccgatttcttcata

SEQ ID NO: 205442 - DNA, 19 bp, Homo sapiens
  siRNA target sequence for PIGO (NM_032634.2,1520-1538).
cccgatttcttcataccta

SEQ ID NO: 205443 - DNA, 19 bp, Homo sapiens
  siRNA target sequence for PIGO (NM_032634.2,1653-1671).
gacactgccgactgtgatt

SEQ ID NO: 205444 - DNA, 19 bp, Homo sapiens
  siRNA target sequence for PIGO (NM_032634.2,1798-1816).
gcatctcagtgggcaatat

SEQ ID NO: 205445 - DNA, 19 bp, Homo sapiens
  siRNA target sequence for PIGO (NM_032634.2,2071-2089).
gtgttcttctctgatagtt

SEQ ID NO: 205446 - DNA, 19 bp, Homo sapiens
  siRNA target sequence for PIGO (NM_032634.2,2175-2193).
gctgcttccacctaagcta

SEQ ID NO: 205447 - DNA, 19 bp, Homo sapiens
  siRNA target sequence for PIGO (NM_032634.2,2212-2230).
ggcacttcagccacaacaa

SEQ ID NO: 205448 - DNA, 19 bp, Homo sapiens
  siRNA target sequence for PIGO (NM_032634.2,2213-2231).
gcacttcagccacaacaaa

SEQ ID NO: 205449 - DNA, 19 bp, Homo sapiens
  siRNA target sequence for PIGO (NM_032634.2,2295-2313).
gctagctgggctttttcat

SEQ ID NO: 205450 - DNA, 19 bp, Homo sapiens
  siRNA target sequence for PIGO (NM_032634.2,2379-2397).
gggtggtcgagccaagaat

SEQ ID NO: 205451 - DNA, 19 bp, Homo sapiens
  siRNA target sequence for PIGO (NM_032634.2,2380-2398).
ggtggtcgagccaagaatt

SEQ ID NO: 205452 - DNA, 19 bp, Homo sapiens
  siRNA target sequence for PIGO (NM_032634.2,2383-2401).
ggtcgagccaagaatttgt

SEQ ID NO: 205453 - DNA, 19 bp, Homo sapiens
  siRNA target sequence for PIGO (NM_032634.2,2456-2474).
ggcttcgccgctatggtaa

SEQ ID NO: 205454 - DNA, 19 bp, Homo sapiens
  siRNA target sequence for PIGO (NM_032634.2,2457-2475).
gcttcgccgctatggtaat

SEQ ID NO: 205455 - DNA, 19 bp, Homo sapiens
  siRNA target sequence for PIGO (NM_032634.2,2461-2479).
cgccgctatggtaatctca

SEQ ID NO: 205456 - DNA, 19 bp, Homo sapiens
  siRNA target sequence for PIGO (NM_032634.2,2462-2480).
gccgctatggtaatctcaa

SEQ ID NO: 205457 - DNA, 19 bp, Homo sapiens
  siRNA target sequence for PIGO (NM_032634.2,2827-2845).
cggttagagaggaccaaat

SEQ ID NO: 205458 - DNA, 19 bp, Homo sapiens
  siRNA target sequence for PIGO (NM_032634.2,2829-2847).
gttagagaggaccaaatct

SEQ ID NO: 205459 - DNA, 19 bp, Homo sapiens
  siRNA target sequence for PIGO (NM_032634.2,2861-2879).
ctgtggctgcttatcagtt

SEQ ID NO: 205460 - DNA, 19 bp, Homo sapiens
  siRNA target sequence for PIGO (NM_032634.2,3091-3109).
gccacacagaccttctact

SEQ ID NO: 205461 - DNA, 19 bp, Homo sapiens
  siRNA target sequence for PIGO (NM_032634.2,3127-3145).
gtctttccagccatccatt

SEQ ID NO: 205462 - DNA, 19 bp, Homo sapiens
  siRNA target sequence for PIGO (NM_032634.2,3175-3193).
ggtcatggctcctgtactt

SEQ ID NO: 205463 - DNA, 19 bp, Homo sapiens
  siRNA target sequence for PIGO (NM_032634.2,3433-3451).
ggcctcaagtacctcttta

SEQ ID NO: 205464 - DNA, 19 bp, Homo sapiens
  siRNA target sequence for PIGO (NM_032634.2,3525-3543).
gtttgcccctaagttcata

SEQ ID NO: 205465 - DNA, 19 bp, Homo sapiens
  siRNA target sequence for PLP (NM_020315.3,202-220).
cggcaaggcggctctgttt

SEQ ID NO: 205466 - DNA, 19 bp, Homo sapiens
  siRNA target sequence for PLP (NM_020315.3,204-222).
gcaaggcggctctgtttgt

SEQ ID NO: 205467 - DNA, 19 bp, Homo sapiens
  siRNA target sequence for PLP (NM_020315.3,741-759).
ccgcacgcacgcttatggt

SEQ ID NO: 205468 - DNA, 19 bp, Homo sapiens
  siRNA target sequence for SGPP2 (NM_152386.2,215-233).
cggaggcttatgtacagaa

SEQ ID NO: 205469 - DNA, 19 bp, Homo sapiens
  siRNA target sequence for SGPP2 (NM_152386.2,231-249).
gaagtacgtcgtgaagaat

SEQ ID NO: 205470 - DNA, 19 bp, Homo sapiens
  siRNA target sequence for SGPP2 (NM_152386.2,234-252).
gtacgtcgtgaagaattat

SEQ ID NO: 205471 - DNA, 19 bp, Homo sapiens
  siRNA target sequence for SGPP2 (NM_152386.2,238-256).
gtcgtgaagaattatttct

SEQ ID NO: 205472 - DNA, 19 bp, Homo sapiens
  siRNA target sequence for SGPP2 (NM_152386.2,243-261).
gaagaattatttctactat

SEQ ID NO: 205473 - DNA, 19 bp, Homo sapiens
  siRNA target sequence for SGPP2 (NM_152386.2,255-273).
ctactattacctattccaa

SEQ ID NO: 205474 - DNA, 19 bp, Homo sapiens
  siRNA target sequence for SGPP2 (NM_152386.2,292-310).
caagaagtgttctacatca

SEQ ID NO: 205475 - DNA, 19 bp, Homo sapiens
  siRNA target sequence for SGPP2 (NM_152386.2,309-327).
cacgtttcttccattcact

SEQ ID NO: 205476 - DNA, 19 bp, Homo sapiens
  siRNA target sequence for SGPP2 (NM_152386.2,319-337).
ccattcactcactggaata

SEQ ID NO: 205477 - DNA, 19 bp, Homo sapiens
  siRNA target sequence for SGPP2 (NM_152386.2,320-338).
cattcactcactggaatat

SEQ ID NO: 205478 - DNA, 19 bp, Homo sapiens
  siRNA target sequence for SGPP2 (NM_152386.2,353-371).
ccagaagattgatcatcat

SEQ ID NO: 205479 - DNA, 19 bp, Homo sapiens
  siRNA target sequence for SGPP2 (NM_152386.2,354-372).
cagaagattgatcatcata

SEQ ID NO: 205480 - DNA, 19 bp, Homo sapiens
  siRNA target sequence for SGPP2 (NM_152386.2,462-480).
gagactgatcgctgaatat

SEQ ID NO: 205481 - DNA, 19 bp, Homo sapiens
  siRNA target sequence for SGPP2 (NM_152386.2,522-540).
cttcaccctccttatctct

SEQ ID NO: 205482 - DNA, 19 bp, Homo sapiens
  siRNA target sequence for SGPP2 (NM_152386.2,622-640).
ctctacactgggatgcata

SEQ ID NO: 205483 - DNA, 19 bp, Homo sapiens
  siRNA target sequence for SGPP2 (NM_152386.2,744-762).
cttccccgtgtgtgtcata

SEQ ID NO: 205484 - DNA, 19 bp, Homo sapiens
  siRNA target sequence for SGPP2 (NM_152386.2,747-765).
ccccgtgtgtgtcatagtt

SEQ ID NO: 205485 - DNA, 19 bp, Homo sapiens
  siRNA target sequence for SGPP2 (NM_152386.2,749-767).
ccgtgtgtgtcatagttgt

SEQ ID NO: 205486 - DNA, 19 bp, Homo sapiens
  siRNA target sequence for SGPP2 (NM_152386.2,786-804).
caattaccctgtttctgat

SEQ ID NO: 205487 - DNA, 19 bp, Homo sapiens
  siRNA target sequence for SGPP2 (NM_152386.2,793-811).
cctgtttctgattactaca

SEQ ID NO: 205488 - DNA, 19 bp, Homo sapiens
  siRNA target sequence for SGPP2 (NM_152386.2,853-871).
gctggagtgaccataggat

SEQ ID NO: 205489 - DNA, 19 bp, Homo sapiens
  siRNA target sequence for SGPP2 (NM_152386.2,854-872).
ctggagtgaccataggatt

SEQ ID NO: 205490 - DNA, 19 bp, Homo sapiens
  siRNA target sequence for SGPP2 (NM_152386.2,869-887).
gattctggatcaaccattt

SEQ ID NO: 205491 - DNA, 19 bp, Homo sapiens
  siRNA target sequence for SGPP2 (NM_152386.2,902-920).
ccaagcccgctgaatctct

SEQ ID NO: 205492 - DNA, 19 bp, Homo sapiens
  siRNA target sequence for SGPP2 (NM_152386.2,911-929).
ctgaatctctccctgttat

SEQ ID NO: 205493 - DNA, 19 bp, Homo sapiens
  siRNA target sequence for SGPP2 (NM_152386.2,1091-1109).
ggcggagactggagattga

SEQ ID NO: 205494 - DNA, 19 bp, Homo sapiens
  siRNA target sequence for SGPP2 (NM_152386.2,1092-1110).
gcggagactggagattgaa

SEQ ID NO: 205495 - DNA, 19 bp, Homo sapiens
  siRNA target sequence for SGPP2 (NM_152386.2,1094-1112).
ggagactggagattgaagt

SEQ ID NO: 205496 - DNA, 19 bp, Homo sapiens
  siRNA target sequence for SGPP2 (NM_152386.2,1146-1164).
catctgcgctacaaccttt

SEQ ID NO: 205497 - DNA, 19 bp, Homo sapiens
  siRNA target sequence for THEM2 (NM_018473.2,262-280).
gaccaaggctcgcaatttt

SEQ ID NO: 205498 - DNA, 19 bp, Homo sapiens
  siRNA target sequence for THEM2 (NM_018473.2,264-282).
ccaaggctcgcaattttga

SEQ ID NO: 205499 - DNA, 19 bp, Homo sapiens
  siRNA target sequence for THEM2 (NM_018473.2,394-412).
gacagccacgttagtagat

SEQ ID NO: 205500 - DNA, 19 bp, Homo sapiens
  siRNA target sequence for THEM2 (NM_018473.2,396-414).
cagccacgttagtagataa

SEQ ID NO: 205501 - DNA, 19 bp, Homo sapiens
  siRNA target sequence for THEM2 (NM_018473.2,398-416).
gccacgttagtagataaca

SEQ ID NO: 205502 - DNA, 19 bp, Homo sapiens
  siRNA target sequence for THEM2 (NM_018473.2,399-417).
ccacgttagtagataacat

SEQ ID NO: 205503 - DNA, 19 bp, Homo sapiens
  siRNA target sequence for THEM2 (NM_018473.2,400-418).
cacgttagtagataacata

SEQ ID NO: 205504 - DNA, 19 bp, Homo sapiens
  siRNA target sequence for THEM2 (NM_018473.2,403-421).
gttagtagataacatatca

SEQ ID NO: 205505 - DNA, 19 bp, Homo sapiens
  siRNA target sequence for THEM2 (NM_018473.2,456-474).
ccggagtcagtgtcgatat

SEQ ID NO: 205506 - DNA, 19 bp, Homo sapiens
  siRNA target sequence for THEM2 (NM_018473.2,461-479).
gtcagtgtcgatatgaaca

SEQ ID NO: 205507 - DNA, 19 bp, Homo sapiens
  siRNA target sequence for THEM2 (NM_018473.2,463-481).
cagtgtcgatatgaacata

SEQ ID NO: 205508 - DNA, 19 bp, Homo sapiens
  siRNA target sequence for THEM2 (NM_018473.2,467-485).
gtcgatatgaacataacgt

SEQ ID NO: 205509 - DNA, 19 bp, Homo sapiens
  siRNA target sequence for THEM2 (NM_018473.2,484-502).
gtacatgtcacctgcaaaa

SEQ ID NO: 205510 - DNA, 19 bp, Homo sapiens
  siRNA target sequence for THEM2 (NM_018473.2,498-516).
caaaattaggagaagatat

SEQ ID NO: 205511 - DNA, 19 bp, Homo sapiens
  siRNA target sequence for VPS29 (NM_016226.2,94-112).
ccacaccggtgcaacagtt

SEQ ID NO: 205512 - DNA, 19 bp, Homo sapiens
  siRNA target sequence for VPS29 (NM_016226.2,95-113).
cacaccggtgcaacagttt

SEQ ID NO: 205513 - DNA, 19 bp, Homo sapiens
  siRNA target sequence for VPS29 (NM_016226.2,182-200).
gcaccaaagagagttatga

SEQ ID NO: 205514 - DNA, 19 bp, Homo sapiens
  siRNA target sequence for VPS29 (NM_016226.2,242-260).
gagacttcgatgagaatct

SEQ ID NO: 205515 - DNA, 19 bp, Homo sapiens
  siRNA target sequence for VPS29 (NM_016226.2,249-267).
cgatgagaatctgaattat

SEQ ID NO: 205516 - DNA, 19 bp, Homo sapiens
  siRNA target sequence for VPS29 (NM_016226.2,285-303).
gactgttggacagttcaaa

SEQ ID NO: 205517 - DNA, 19 bp, Homo sapiens
  siRNA target sequence for VPS29 (NM_016226.2,287-305).
ctgttggacagttcaaaat

SEQ ID NO: 205518 - DNA, 19 bp, Homo sapiens
  siRNA target sequence for VPS29 (NM_016226.2,319-337).
ggacatcaagttattccat

SEQ ID NO: 205519 - DNA, 19 bp, Homo sapiens
  siRNA target sequence for VPS29 (NM_016226.2,398-416).
cgggacacacacacaaatt

SEQ ID NO: 205520 - DNA, 19 bp, Homo sapiens
  siRNA target sequence for VPS29 (NM_016226.2,461-479).
ctgccactggggcatataa

SEQ ID NO: 205521 - DNA, 19 bp, Homo sapiens
  siRNA target sequence for VPS29 (NM_016226.2,491-509).
caaacattattccatcatt

SEQ ID NO: 205522 - DNA, 19 bp, Homo sapiens
  siRNA target sequence for VPS29 (NM_016226.2,519-537).
ggatatccaggcttctaca

SEQ ID NO: 205523 - DNA, 19 bp, Homo sapiens
  siRNA target sequence for VPS29 (NM_016226.2,545-563).
cctatgtgtatcagctaat

SEQ ID NO: 205524 - DNA, 19 bp, Homo sapiens
  siRNA target sequence for VPS29 (NM_016226.2,546-564).
ctatgtgtatcagctaatt

SEQ ID NO: 205525 - DNA, 19 bp, Homo sapiens
  siRNA target sequence for VPS29 (NM_016226.2,576-594).
gaaagtagaacgaatcgaa

SEQ ID NO: 205526 - DNA, 19 bp, Homo sapiens
  siRNA target sequence for VPS29 (NM_016226.2,580-598).
gtagaacgaatcgaataca

SEQ ID NO: 205527 - DNA, 19 bp, Homo sapiens
  siRNA target sequence for COL4A3BP (NM_005713.1,504-522).
gtggacaaactacattcat

SEQ ID NO: 205528 - DNA, 19 bp, Homo sapiens
  siRNA target sequence for COL4A3BP (NM_005713.1,529-547).
caggatcgttgggtagttt

SEQ ID NO: 205529 - DNA, 19 bp, Homo sapiens
  siRNA target sequence for COL4A3BP (NM_005713.1,532-550).
gatcgttgggtagttttga

SEQ ID NO: 205530 - DNA, 19 bp, Homo sapiens
  siRNA target sequence for COL4A3BP (NM_005713.1,535-553).
cgttgggtagttttgaaaa

SEQ ID NO: 205531 - DNA, 19 bp, Homo sapiens
  siRNA target sequence for COL4A3BP (NM_005713.1,536-554).
gttgggtagttttgaaaaa

SEQ ID NO: 205532 - DNA, 19 bp, Homo sapiens
  siRNA target sequence for COL4A3BP (NM_005713.1,559-577).
gctctgagttactacaaat

SEQ ID NO: 205533 - DNA, 19 bp, Homo sapiens
  siRNA target sequence for COL4A3BP (NM_005713.1,564-582).
gagttactacaaatctgaa

SEQ ID NO: 205534 - DNA, 19 bp, Homo sapiens
  siRNA target sequence for COL4A3BP (NM_005713.1,633-651).
catcacacctcacgatttt

SEQ ID NO: 205535 - DNA, 19 bp, Homo sapiens
  siRNA target sequence for COL4A3BP (NM_005713.1,652-670).
gatgaatgtcgatttgata

SEQ ID NO: 205536 - DNA, 19 bp, Homo sapiens
  siRNA target sequence for COL4A3BP (NM_005713.1,659-677).
gtcgatttgatattagtgt

SEQ ID NO: 205537 - DNA, 19 bp, Homo sapiens
  siRNA target sequence for COL4A3BP (NM_005713.1,661-679).
cgatttgatattagtgtaa

SEQ ID NO: 205538 - DNA, 19 bp, Homo sapiens
  siRNA target sequence for COL4A3BP (NM_005713.1,731-749).
ggatagatgccattgaaca

SEQ ID NO: 205539 - DNA, 19 bp, Homo sapiens
  siRNA target sequence for COL4A3BP (NM_005713.1,845-863).
catccacctcttcattcaa

SEQ ID NO: 205540 - DNA, 19 bp, Homo sapiens
  siRNA target sequence for COL4A3BP (NM_005713.1,864-882).
gaaaggccacagtttacgt

SEQ ID NO: 205541 - DNA, 19 bp, Homo sapiens
  siRNA target sequence for COL4A3BP (NM_005713.1,934-952).
gacacgctacagaagtact

SEQ ID NO: 205542 - DNA, 19 bp, Homo sapiens
  siRNA target sequence for COL4A3BP (NM_005713.1,936-954).
cacgctacagaagtacttt

SEQ ID NO: 205543 - DNA, 19 bp, Homo sapiens
  siRNA target sequence for COL4A3BP (NM_005713.1,962-980).
gtgctgatgctgtctctaa

SEQ ID NO: 205544 - DNA, 19 bp, Homo sapiens
  siRNA target sequence for COL4A3BP (NM_005713.1,1064-1082).
gtaccaacggcaataaaga

SEQ ID NO: 205545 - DNA, 19 bp, Homo sapiens
  siRNA target sequence for COL4A3BP (NM_005713.1,1101-1119).
gacaccaaaaggaattaat

SEQ ID NO: 205546 - DNA, 19 bp, Homo sapiens
  siRNA target sequence for COL4A3BP (NM_005713.1,1106-1124).
caaaaggaattaatggtat

SEQ ID NO: 205547 - DNA, 19 bp, Homo sapiens
  siRNA target sequence for COL4A3BP (NM_005713.1,1112-1130).
gaattaatggtatagactt

SEQ ID NO: 205548 - DNA, 19 bp, Homo sapiens
  siRNA target sequence for COL4A3BP (NM_005713.1,1141-1159).
gcgataacttttaaagcaa

SEQ ID NO: 205549 - DNA, 19 bp, Homo sapiens
  siRNA target sequence for COL4A3BP (NM_005713.1,1181-1199).
cactttctcattgtattga

SEQ ID NO: 205550 - DNA, 19 bp, Homo sapiens
  siRNA target sequence for COL4A3BP (NM_005713.1,1226-1244).
ggcagaagagactggataa

SEQ ID NO: 205551 - DNA, 19 bp, Homo sapiens
  siRNA target sequence for COL4A3BP (NM_005713.1,1317-1335).
ctttggaggaccagattat

SEQ ID NO: 205552 - DNA, 19 bp, Homo sapiens
  siRNA target sequence for COL4A3BP (NM_005713.1,1344-1362).
ccctaacagtctgattaat

SEQ ID NO: 205553 - DNA, 19 bp, Homo sapiens
  siRNA target sequence for COL4A3BP (NM_005713.1,1536-1554).
ctccatgtcttccattgat

SEQ ID NO: 205554 - DNA, 19 bp, Homo sapiens
  siRNA target sequence for COL4A3BP (NM_005713.1,1617-1635).
ccacatgacttactcatta

SEQ ID NO: 205555 - DNA, 19 bp, Homo sapiens
  siRNA target sequence for COL4A3BP (NM_005713.1,1774-1792).
catgaagtctgcaattatt

SEQ ID NO: 205556 - DNA, 19 bp, Homo sapiens
  siRNA target sequence for COL4A3BP (NM_005713.1,1801-1819).
gttgacgttcgcaatgact

SEQ ID NO: 205557 - DNA, 19 bp, Homo sapiens
  siRNA target sequence for COL4A3BP (NM_005713.1,1818-1836).
ctgggaaacaactatagaa

SEQ ID NO: 205558 - DNA, 19 bp, Homo sapiens
  siRNA target sequence for COL4A3BP (NM_005713.1,1829-1847).
ctatagaaaactttcatgt

SEQ ID NO: 205559 - DNA, 19 bp, Homo sapiens
  siRNA target sequence for COL4A3BP (NM_005713.1,1856-1874).
cattagctgataatgcaat

SEQ ID NO: 205560 - DNA, 19 bp, Homo sapiens
  siRNA target sequence for COL4A3BP (NM_005713.1,1861-1879).
gctgataatgcaatcatca

SEQ ID NO: 205561 - DNA, 19 bp, Homo sapiens
  siRNA target sequence for COL4A3BP (NM_005713.1,1862-1880).
ctgataatgcaatcatcat

SEQ ID NO: 205562 - DNA, 19 bp, Homo sapiens
  siRNA target sequence for COL4A3BP (NM_005713.1,1870-1888).
gcaatcatcatttatcaaa

SEQ ID NO: 205563 - DNA, 19 bp, Homo sapiens
  siRNA target sequence for COL4A3BP (NM_005713.1,1913-1931).
ctcagcgagacgtattata

SEQ ID NO: 205564 - DNA, 19 bp, Homo sapiens
  siRNA target sequence for COL4A3BP (NM_005713.1,1955-1973).
cagccttgactgaaaatga

SEQ ID NO: 205565 - DNA, 19 bp, Homo sapiens
  siRNA target sequence for COL4A3BP (NM_005713.1,2036-2054).
gatgtgtccgtgccaaaat

SEQ ID NO: 205566 - DNA, 19 bp, Homo sapiens
  siRNA target sequence for COL4A3BP (NM_005713.1,2039-2057).
gtgtccgtgccaaaataaa

SEQ ID NO: 205567 - DNA, 19 bp, Homo sapiens
  siRNA target sequence for COL4A3BP (NM_005713.1,2043-2061).
ccgtgccaaaataaatgtt

SEQ ID NO: 205568 - DNA, 19 bp, Homo sapiens
  siRNA target sequence for COL4A3BP (NM_005713.1,2048-2066).
ccaaaataaatgttgctat

SEQ ID NO: 205569 - DNA, 19 bp, Homo sapiens
  siRNA target sequence for COL4A3BP (NM_005713.1,2059-2077).
gttgctatgatttgtcaaa

SEQ ID NO: 205570 - DNA, 19 bp, Homo sapiens
  siRNA target sequence for COL4A3BP (NM_005713.1,2063-2081).
ctatgatttgtcaaacctt

SEQ ID NO: 205571 - DNA, 19 bp, Homo sapiens
  siRNA target sequence for COL4A3BP (NM_005713.1,2136-2154).
gattacatatgtagctaat

SEQ ID NO: 205572 - DNA, 19 bp, Homo sapiens
  siRNA target sequence for COL4A3BP (NM_005713.1,2200-2218).
gcaaagcgagagtatccta

SEQ ID NO: 205573 - DNA, 19 bp, Homo sapiens
  siRNA target sequence for COL4A3BP (NM_005713.1,2201-2219).
caaagcgagagtatcctaa

SEQ ID NO: 205574 - DNA, 19 bp, Homo sapiens
  siRNA target sequence for COL4A3BP (NM_005713.1,2205-2223).
gcgagagtatcctaaattt

SEQ ID NO: 205575 - DNA, 19 bp, Homo sapiens
  siRNA target sequence for COL4A3BP (NM_005713.1,2207-2225).
gagagtatcctaaatttct

SEQ ID NO: 205576 - DNA, 19 bp, Homo sapiens
  siRNA target sequence for COL4A3BP (NM_005713.1,2215-2233).
cctaaatttctaaaacgtt

SEQ ID NO: 205577 - DNA, 19 bp, Homo sapiens
  siRNA target sequence for CSNK2B (NM_001320.5,384-402).
ggctccgtggcaatgaatt

SEQ ID NO: 205578 - DNA, 19 bp, Homo sapiens
  siRNA target sequence for CSNK2B (NM_001320.5,430-448).
ccaggacaaatttaatctt

SEQ ID NO: 205579 - DNA, 19 bp, Homo sapiens
  siRNA target sequence for CSNK2B (NM_001320.5,433-451).
ggacaaatttaatcttact

SEQ ID NO: 205580 - DNA, 19 bp, Homo sapiens
  siRNA target sequence for CSNK2B (NM_001320.5,480-498).
gacaagctctagacatgat

SEQ ID NO: 205581 - DNA, 19 bp, Homo sapiens
  siRNA target sequence for CSNK2B (NM_001320.5,482-500).
caagctctagacatgatct

SEQ ID NO: 205582 - DNA, 19 bp, Homo sapiens
  siRNA target sequence for CSNK2B (NM_001320.5,560-578).
caggcagccgagatgcttt

SEQ ID NO: 205583 - DNA, 19 bp, Homo sapiens
  siRNA target sequence for CSNK2B (NM_001320.5,562-580).
ggcagccgagatgctttat

SEQ ID NO: 205584 - DNA, 19 bp, Homo sapiens
  siRNA target sequence for CSNK2B (NM_001320.5,623-641).
gcccagatgttggaaaagt

SEQ ID NO: 205585 - DNA, 19 bp, Homo sapiens
  siRNA target sequence for CSNK2B (NM_001320.5,624-642).
cccagatgttggaaaagta

SEQ ID NO: 205586 - DNA, 19 bp, Homo sapiens
  siRNA target sequence for CSNK2B (NM_001320.5,753-771).
ccaagtgcatggatgtgta

SEQ ID NO: 205587 - DNA, 19 bp, Homo sapiens
  siRNA target sequence for CSNK2B (NM_001320.5,894-912).
ccaggctctacggtttcaa

SEQ ID NO: 205588 - DNA, 19 bp, Homo sapiens
  siRNA target sequence for CSNK2B (NM_001320.5,897-915).
ggctctacggtttcaagat

SEQ ID NO: 205589 - DNA, 19 bp, Homo sapiens
  siRNA target sequence for CSNK2B (NM_001320.5,944-962).
caagccgccagcaacttca

SEQ ID NO: 205590 - DNA, 19 bp, Homo sapiens
  siRNA target sequence for PRKDC (NM_006904.6,212-230).
cattacagacatctttagt

SEQ ID NO: 205591 - DNA, 19 bp, Homo sapiens
  siRNA target sequence for PRKDC (NM_006904.6,241-259).
gatttcggtttgcttgtat

SEQ ID NO: 205592 - DNA, 19 bp, Homo sapiens
  siRNA target sequence for PRKDC (NM_006904.6,265-283).
cggaagtcactcaacagta

SEQ ID NO: 205593 - DNA, 19 bp, Homo sapiens
  siRNA target sequence for PRKDC (NM_006904.6,270-288).
gtcactcaacagtattgaa

SEQ ID NO: 205594 - DNA, 19 bp, Homo sapiens
  siRNA target sequence for PRKDC (NM_006904.6,272-290).
cactcaacagtattgaatt

SEQ ID NO: 205595 - DNA, 19 bp, Homo sapiens
  siRNA target sequence for PRKDC (NM_006904.6,276-294).
caacagtattgaatttcgt

SEQ ID NO: 205596 - DNA, 19 bp, Homo sapiens
  siRNA target sequence for PRKDC (NM_006904.6,351-369).
gaagatcgcaccttactct

SEQ ID NO: 205597 - DNA, 19 bp, Homo sapiens
  siRNA target sequence for PRKDC (NM_006904.6,358-376).
gcaccttactctgttgaaa

SEQ ID NO: 205598 - DNA, 19 bp, Homo sapiens
  siRNA target sequence for PRKDC (NM_006904.6,359-377).
caccttactctgttgaaat

SEQ ID NO: 205599 - DNA, 19 bp, Homo sapiens
  siRNA target sequence for PRKDC (NM_006904.6,392-410).
ccagtgtttatacaaaaga

SEQ ID NO: 205600 - DNA, 19 bp, Homo sapiens
  siRNA target sequence for PRKDC (NM_006904.6,409-427).
gatagagctgctaaatgta

SEQ ID NO: 205601 - DNA, 19 bp, Homo sapiens
  siRNA target sequence for PRKDC (NM_006904.6,413-431).
gagctgctaaatgtaaaat

SEQ ID NO: 205602 - DNA, 19 bp, Homo sapiens
  siRNA target sequence for PRKDC (NM_006904.6,441-459).
ggaccttcttattaagtta

SEQ ID NO: 205603 - DNA, 19 bp, Homo sapiens
  siRNA target sequence for PRKDC (NM_006904.6,463-481).
cagacttttagaagttcta

SEQ ID NO: 205604 - DNA, 19 bp, Homo sapiens
  siRNA target sequence for PRKDC (NM_006904.6,479-497).
ctagactcatggatgaatt

SEQ ID NO: 205605 - DNA, 19 bp, Homo sapiens
  siRNA target sequence for PRKDC (NM_006904.6,484-502).
ctcatggatgaatttaaaa

SEQ ID NO: 205606 - DNA, 19 bp, Homo sapiens
  siRNA target sequence for PRKDC (NM_006904.6,593-611).
gattattgggtgaagttca

SEQ ID NO: 205607 - DNA, 19 bp, Homo sapiens
  siRNA target sequence for PRKDC (NM_006904.6,651-669).
cgcttttctgggtgaactt

SEQ ID NO: 205608 - DNA, 19 bp, Homo sapiens
  siRNA target sequence for PRKDC (NM_006904.6,748-766).
ctgtgcaacttcactaagt

SEQ ID NO: 205609 - DNA, 19 bp, Homo sapiens
  siRNA target sequence for PRKDC (NM_006904.6,819-837).
ggcaattcgtcctcagatt

SEQ ID NO: 205610 - DNA, 19 bp, Homo sapiens
  siRNA target sequence for PRKDC (NM_006904.6,821-839).
caattcgtcctcagattga

SEQ ID NO: 205611 - DNA, 19 bp, Homo sapiens
  siRNA target sequence for PRKDC (NM_006904.6,908-926).
cctgccttctggacaacta

SEQ ID NO: 205612 - DNA, 19 bp, Homo sapiens
  siRNA target sequence for PRKDC (NM_006904.6,924-942).
ctacgtgtctctatttgaa

SEQ ID NO: 205613 - DNA, 19 bp, Homo sapiens
  siRNA target sequence for PRKDC (NM_006904.6,954-972).
gtggtgtgcccacacaaat

SEQ ID NO: 205614 - DNA, 19 bp, Homo sapiens
  siRNA target sequence for PRKDC (NM_006904.6,959-977).
gtgcccacacaaatgtaga

SEQ ID NO: 205615 - DNA, 19 bp, Homo sapiens
  siRNA target sequence for PRKDC (NM_006904.6,961-979).
gcccacacaaatgtagaat

SEQ ID NO: 205616 - DNA, 19 bp, Homo sapiens
  siRNA target sequence for PRKDC (NM_006904.6,962-980).
cccacacaaatgtagaatt

SEQ ID NO: 205617 - DNA, 19 bp, Homo sapiens
  siRNA target sequence for PRKDC (NM_006904.6,964-982).
cacacaaatgtagaattga

SEQ ID NO: 205618 - DNA, 19 bp, Homo sapiens
  siRNA target sequence for PRKDC (NM_006904.6,1028-1046).
ctaatatggtggcgaaaaa

SEQ ID NO: 205619 - DNA, 19 bp, Homo sapiens
  siRNA target sequence for PRKDC (NM_006904.6,1119-1137).
gaacaacaaggagttatct

SEQ ID NO: 205620 - DNA, 19 bp, Homo sapiens
  siRNA target sequence for PRKDC (NM_006904.6,1125-1143).
caaggagttatctattgct

SEQ ID NO: 205621 - DNA, 19 bp, Homo sapiens
  siRNA target sequence for PRKDC (NM_006904.6,1146-1164).
ccgtggatatggacttttt

SEQ ID NO: 205622 - DNA, 19 bp, Homo sapiens
  siRNA target sequence for PRKDC (NM_006904.6,1166-1184).
caggaccgtgcaaggttat

SEQ ID NO: 205623 - DNA, 19 bp, Homo sapiens
  siRNA target sequence for PRKDC (NM_006904.6,1168-1186).
ggaccgtgcaaggttataa

SEQ ID NO: 205624 - DNA, 19 bp, Homo sapiens
  siRNA target sequence for PRKDC (NM_006904.6,1169-1187).
gaccgtgcaaggttataaa

SEQ ID NO: 205625 - DNA, 19 bp, Homo sapiens
  siRNA target sequence for PRKDC (NM_006904.6,1179-1197).
ggttataaacgcaaaagat

SEQ ID NO: 205626 - DNA, 19 bp, Homo sapiens
  siRNA target sequence for PRKDC (NM_006904.6,1262-1280).
ctggtgacgaccgtgttta

SEQ ID NO: 205627 - DNA, 19 bp, Homo sapiens
  siRNA target sequence for PRKDC (NM_006904.6,1471-1489).
gggccagttctcaggaatt

SEQ ID NO: 205628 - DNA, 19 bp, Homo sapiens
  siRNA target sequence for PRKDC (NM_006904.6,1474-1492).
ccagttctcaggaattgca

SEQ ID NO: 205629 - DNA, 19 bp, Homo sapiens
  siRNA target sequence for PRKDC (NM_006904.6,1480-1498).
ctcaggaattgcattagta

SEQ ID NO: 205630 - DNA, 19 bp, Homo sapiens
  siRNA target sequence for PRKDC (NM_006904.6,1501-1519).
gtggtgcatcagggtttaa

SEQ ID NO: 205631 - DNA, 19 bp, Homo sapiens
  siRNA target sequence for PRKDC (NM_006904.6,1504-1522).
gtgcatcagggtttaatca

SEQ ID NO: 205632 - DNA, 19 bp, Homo sapiens
  siRNA target sequence for PRKDC (NM_006904.6,1506-1524).
gcatcagggtttaatcaga

SEQ ID NO: 205633 - DNA, 19 bp, Homo sapiens
  siRNA target sequence for PRKDC (NM_006904.6,1507-1525).
catcagggtttaatcagaa

SEQ ID NO: 205634 - DNA, 19 bp, Homo sapiens
  siRNA target sequence for PRKDC (NM_006904.6,1512-1530).
gggtttaatcagaatatgt

SEQ ID NO: 205635 - DNA, 19 bp, Homo sapiens
  siRNA target sequence for PRKDC (NM_006904.6,1672-1690).
cagatgatggattctattt

SEQ ID NO: 205636 - DNA, 19 bp, Homo sapiens
  siRNA target sequence for PRKDC (NM_006904.6,1779-1797).
gattgttgagaaattggat

SEQ ID NO: 205637 - DNA, 19 bp, Homo sapiens
  siRNA target sequence for PRKDC (NM_006904.6,1783-1801).
gttgagaaattggatctta

SEQ ID NO: 205638 - DNA, 19 bp, Homo sapiens
  siRNA target sequence for PRKDC (NM_006904.6,1794-1812).
ggatcttacacttgaaata

SEQ ID NO: 205639 - DNA, 19 bp, Homo sapiens
  siRNA target sequence for PRKDC (NM_006904.6,1893-1911).
gcatccagctaaacctaaa

SEQ ID NO: 205640 - DNA, 19 bp, Homo sapiens
  siRNA target sequence for PRKDC (NM_006904.6,1897-1915).
ccagctaaacctaaagatt

SEQ ID NO: 205641 - DNA, 19 bp, Homo sapiens
  siRNA target sequence for PRKDC (NM_006904.6,1898-1916).
cagctaaacctaaagattt

SEQ ID NO: 205642 - DNA, 19 bp, Homo sapiens
  siRNA target sequence for PRKDC (NM_006904.6,1987-2005).
ccatgggtgtactcatttt

SEQ ID NO: 205643 - DNA, 19 bp, Homo sapiens
  siRNA target sequence for PRKDC (NM_006904.6,1991-2009).
gggtgtactcattttcata

SEQ ID NO: 205644 - DNA, 19 bp, Homo sapiens
  siRNA target sequence for PRKDC (NM_006904.6,2109-2127).
gggagttagtccaaagagt

SEQ ID NO: 205645 - DNA, 19 bp, Homo sapiens
  siRNA target sequence for PRKDC (NM_006904.6,2117-2135).
gtccaaagagtctgaaaca

SEQ ID NO: 205646 - DNA, 19 bp, Homo sapiens
  siRNA target sequence for PRKDC (NM_006904.6,2143-2161).
gaagacccagaaaagtatt

SEQ ID NO: 205647 - DNA, 19 bp, Homo sapiens
  siRNA target sequence for PRKDC (NM_006904.6,2262-2280).
cttgccacacaacatcatt

SEQ ID NO: 205648 - DNA, 19 bp, Homo sapiens
  siRNA target sequence for PRKDC (NM_006904.6,2277-2295).
cattgaactcgatgttaga

SEQ ID NO: 205649 - DNA, 19 bp, Homo sapiens
  siRNA target sequence for PRKDC (NM_006904.6,2364-2382).
cctgaatgctctagaagaa

SEQ ID NO: 205650 - DNA, 19 bp, Homo sapiens
  siRNA target sequence for PRKDC (NM_006904.6,2374-2392).
ctagaagaatggtcaattt

SEQ ID NO: 205651 - DNA, 19 bp, Homo sapiens
  siRNA target sequence for PRKDC (NM_006904.6,2404-2422).
catgtaatgcagccttatt

SEQ ID NO: 205652 - DNA, 19 bp, Homo sapiens
  siRNA target sequence for PRKDC (NM_006904.6,2446-2464).
gatggatacctgaagactt

SEQ ID NO: 205653 - DNA, 19 bp, Homo sapiens
  siRNA target sequence for PRKDC (NM_006904.6,2515-2533).
cgggctgcccagaaaggat

SEQ ID NO: 205654 - DNA, 19 bp, Homo sapiens
  siRNA target sequence for PRKDC (NM_006904.6,2521-2539).
gcccagaaaggatttaata

SEQ ID NO: 205655 - DNA, 19 bp, Homo sapiens
  siRNA target sequence for PRKDC (NM_006904.6,2790-2808).
gcctcgagtcacagaatta

SEQ ID NO: 205656 - DNA, 19 bp, Homo sapiens
  siRNA target sequence for PRKDC (NM_006904.6,2818-2836).
gccagtgacagacaaacta

SEQ ID NO: 205657 - DNA, 19 bp, Homo sapiens
  siRNA target sequence for PRKDC (NM_006904.6,2819-2837).
ccagtgacagacaaactaa

SEQ ID NO: 205658 - DNA, 19 bp, Homo sapiens
  siRNA target sequence for PRKDC (NM_006904.6,2843-2861).
cagcctgtgaacttttaca

SEQ ID NO: 205659 - DNA, 19 bp, Homo sapiens
  siRNA target sequence for PRKDC (NM_006904.6,2854-2872).
cttttacatagcatggtta

SEQ ID NO: 205660 - DNA, 19 bp, Homo sapiens
  siRNA target sequence for PRKDC (NM_006904.6,2926-2944).
cccatgtaccagctctata

SEQ ID NO: 205661 - DNA, 19 bp, Homo sapiens
  siRNA target sequence for PRKDC (NM_006904.6,2991-3009).
ggtgacaaggcaactgtat

SEQ ID NO: 205662 - DNA, 19 bp, Homo sapiens
  siRNA target sequence for PRKDC (NM_006904.6,3004-3022).
ctgtatgagccactagtta

SEQ ID NO: 205663 - DNA, 19 bp, Homo sapiens
  siRNA target sequence for PRKDC (NM_006904.6,3028-3046).
ctgattcactggttcacta

SEQ ID NO: 205664 - DNA, 19 bp, Homo sapiens
  siRNA target sequence for PRKDC (NM_006904.6,3042-3060).
cactaacaacaagaaattt

SEQ ID NO: 205665 - DNA, 19 bp, Homo sapiens
  siRNA target sequence for PRKDC (NM_006904.6,3044-3062).
ctaacaacaagaaatttga

SEQ ID NO: 205666 - DNA, 19 bp, Homo sapiens
  siRNA target sequence for PRKDC (NM_006904.6,3079-3097).
gccttactagaagctatat

SEQ ID NO: 205667 - DNA, 19 bp, Homo sapiens
  siRNA target sequence for PRKDC (NM_006904.6,3080-3098).
ccttactagaagctatatt

SEQ ID NO: 205668 - DNA, 19 bp, Homo sapiens
  siRNA target sequence for PRKDC (NM_006904.6,3092-3110).
ctatattggatggaattgt

SEQ ID NO: 205669 - DNA, 19 bp, Homo sapiens
  siRNA target sequence for PRKDC (NM_006904.6,3112-3130).
gaccctgttgacagtactt

SEQ ID NO: 205670 - DNA, 19 bp, Homo sapiens
  siRNA target sequence for PRKDC (NM_006904.6,3114-3132).
ccctgttgacagtacttta

SEQ ID NO: 205671 - DNA, 19 bp, Homo sapiens
  siRNA target sequence for PRKDC (NM_006904.6,3146-3164).
gtcggtgtattcgagaatt

SEQ ID NO: 205672 - DNA, 19 bp, Homo sapiens
  siRNA target sequence for PRKDC (NM_006904.6,3149-3167).
ggtgtattcgagaattcct

SEQ ID NO: 205673 - DNA, 19 bp, Homo sapiens
  siRNA target sequence for PRKDC (NM_006904.6,3150-3168).
gtgtattcgagaattcctt

SEQ ID NO: 205674 - DNA, 19 bp, Homo sapiens
  siRNA target sequence for PRKDC (NM_006904.6,3152-3170).
gtattcgagaattccttaa

SEQ ID NO: 205675 - DNA, 19 bp, Homo sapiens
  siRNA target sequence for PRKDC (NM_006904.6,3157-3175).
cgagaattccttaaatggt

SEQ ID NO: 205676 - DNA, 19 bp, Homo sapiens
  siRNA target sequence for PRKDC (NM_006904.6,3174-3192).
gtccattaagcaaataaca

SEQ ID NO: 205677 - DNA, 19 bp, Homo sapiens
  siRNA target sequence for PRKDC (NM_006904.6,3230-3248).
cgcttttcaagcgacttta

SEQ ID NO: 205678 - DNA, 19 bp, Homo sapiens
  siRNA target sequence for PRKDC (NM_006904.6,3232-3250).
cttttcaagcgactttata

SEQ ID NO: 205679 - DNA, 19 bp, Homo sapiens
  siRNA target sequence for PRKDC (NM_006904.6,3256-3274).
gcgcttcaccccaatgctt

SEQ ID NO: 205680 - DNA, 19 bp, Homo sapiens
  siRNA target sequence for PRKDC (NM_006904.6,3257-3275).
cgcttcaccccaatgcttt

SEQ ID NO: 205681 - DNA, 19 bp, Homo sapiens
  siRNA target sequence for PRKDC (NM_006904.6,3287-3305).
gagcatcacttgcctttaa

SEQ ID NO: 205682 - DNA, 19 bp, Homo sapiens
  siRNA target sequence for PRKDC (NM_006904.6,3338-3356).
ctctggtggaacagtttgt

SEQ ID NO: 205683 - DNA, 19 bp, Homo sapiens
  siRNA target sequence for PRKDC (NM_006904.6,3361-3379).
gaagccttggtgatataca

SEQ ID NO: 205684 - DNA, 19 bp, Homo sapiens
  siRNA target sequence for PRKDC (NM_006904.6,3406-3424).
gatgagaagtccttaggta

SEQ ID NO: 205685 - DNA, 19 bp, Homo sapiens
  siRNA target sequence for PRKDC (NM_006904.6,3416-3434).
ccttaggtacaattcaaca

SEQ ID NO: 205686 - DNA, 19 bp, Homo sapiens
  siRNA target sequence for PRKDC (NM_006904.6,3456-3474).
cctatgccgcatcattgaa

SEQ ID NO: 205687 - DNA, 19 bp, Homo sapiens
  siRNA target sequence for PRKDC (NM_006904.6,3457-3475).
ctatgccgcatcattgaaa

SEQ ID NO: 205688 - DNA, 19 bp, Homo sapiens
  siRNA target sequence for PRKDC (NM_006904.6,3461-3479).
gccgcatcattgaaaagaa

SEQ ID NO: 205689 - DNA, 19 bp, Homo sapiens
  siRNA target sequence for PRKDC (NM_006904.6,3529-3547).
ccaccttccgcatcattgt

SEQ ID NO: 205690 - DNA, 19 bp, Homo sapiens
  siRNA target sequence for PRKDC (NM_006904.6,3536-3554).
ccgcatcattgtgtttatt

SEQ ID NO: 205691 - DNA, 19 bp, Homo sapiens
  siRNA target sequence for PRKDC (NM_006904.6,3539-3557).
catcattgtgtttattgga

SEQ ID NO: 205692 - DNA, 19 bp, Homo sapiens
  siRNA target sequence for PRKDC (NM_006904.6,3561-3579).
ggtcaagtggcttttagct

SEQ ID NO: 205693 - DNA, 19 bp, Homo sapiens
  siRNA target sequence for PRKDC (NM_006904.6,3567-3585).
gtggcttttagctcattgt

SEQ ID NO: 205694 - DNA, 19 bp, Homo sapiens
  siRNA target sequence for PRKDC (NM_006904.6,3597-3615).
gacagaatgtcgacacaaa

SEQ ID NO: 205695 - DNA, 19 bp, Homo sapiens
  siRNA target sequence for PRKDC (NM_006904.6,3608-3626).
gacacaaatccattgaact

SEQ ID NO: 205696 - DNA, 19 bp, Homo sapiens
  siRNA target sequence for PRKDC (NM_006904.6,3656-3674).
gcaacagatcccctaattt

SEQ ID NO: 205697 - DNA, 19 bp, Homo sapiens
  siRNA target sequence for PRKDC (NM_006904.6,3668-3686).
ctaatttgtggctgaaaga

SEQ ID NO: 205698 - DNA, 19 bp, Homo sapiens
  siRNA target sequence for PRKDC (NM_006904.6,3696-3714).
ggaagaaggtgtctctttt

SEQ ID NO: 205699 - DNA, 19 bp, Homo sapiens
  siRNA target sequence for PRKDC (NM_006904.6,3700-3718).
gaaggtgtctcttttctca

SEQ ID NO: 205700 - DNA, 19 bp, Homo sapiens
  siRNA target sequence for PRKDC (NM_006904.6,3844-3862).
gcgttggagtgctacaaca

SEQ ID NO: 205701 - DNA, 19 bp, Homo sapiens
  siRNA target sequence for PRKDC (NM_006904.6,3852-3870).
gtgctacaacacgttcatt

SEQ ID NO: 205702 - DNA, 19 bp, Homo sapiens
  siRNA target sequence for PRKDC (NM_006904.6,3867-3885).
cattggcgagagaactgta

SEQ ID NO: 205703 - DNA, 19 bp, Homo sapiens
  siRNA target sequence for PRKDC (NM_006904.6,3914-3932).
cccagtcttcacttttgaa

SEQ ID NO: 205704 - DNA, 19 bp, Homo sapiens
  siRNA target sequence for PRKDC (NM_006904.6,3915-3933).
ccagtcttcacttttgaaa

SEQ ID NO: 205705 - DNA, 19 bp, Homo sapiens
  siRNA target sequence for PRKDC (NM_006904.6,3956-3974).
gcattgccatgcatgacat

SEQ ID NO: 205706 - DNA, 19 bp, Homo sapiens
  siRNA target sequence for PRKDC (NM_006904.6,4028-4046).
cacaagagggagaaaggta

SEQ ID NO: 205707 - DNA, 19 bp, Homo sapiens
  siRNA target sequence for PRKDC (NM_006904.6,4064-4082).
ccgttgtggtccggattat

SEQ ID NO: 205708 - DNA, 19 bp, Homo sapiens
  siRNA target sequence for PRKDC (NM_006904.6,4075-4093).
cggattatggagtttacca

SEQ ID NO: 205709 - DNA, 19 bp, Homo sapiens
  siRNA target sequence for PRKDC (NM_006904.6,4134-4152).
gaagaaggacttgtgtaat

SEQ ID NO: 205710 - DNA, 19 bp, Homo sapiens
  siRNA target sequence for PRKDC (NM_006904.6,4189-4207).
gagcccgcaagcataggtt

SEQ ID NO: 205711 - DNA, 19 bp, Homo sapiens
  siRNA target sequence for PRKDC (NM_006904.6,4195-4213).
gcaagcataggtttcaaca

SEQ ID NO: 205712 - DNA, 19 bp, Homo sapiens
  siRNA target sequence for PRKDC (NM_006904.6,4196-4214).
caagcataggtttcaacat

SEQ ID NO: 205713 - DNA, 19 bp, Homo sapiens
  siRNA target sequence for PRKDC (NM_006904.6,4348-4366).
ctttgtgccgtcaacttgt

SEQ ID NO: 205714 - DNA, 19 bp, Homo sapiens
  siRNA target sequence for PRKDC (NM_006904.6,4439-4457).
ctgggcttctgcataatat

SEQ ID NO: 205715 - DNA, 19 bp, Homo sapiens
  siRNA target sequence for PRKDC (NM_006904.6,4718-4736).
cccatggggagtatttcta

SEQ ID NO: 205716 - DNA, 19 bp, Homo sapiens
  siRNA target sequence for PRKDC (NM_006904.6,4719-4737).
ccatggggagtatttctat

SEQ ID NO: 205717 - DNA, 19 bp, Homo sapiens
  siRNA target sequence for PRKDC (NM_006904.6,4720-4738).
catggggagtatttctata

SEQ ID NO: 205718 - DNA, 19 bp, Homo sapiens
  siRNA target sequence for PRKDC (NM_006904.6,4723-4741).
ggggagtatttctatagct

SEQ ID NO: 205719 - DNA, 19 bp, Homo sapiens
  siRNA target sequence for PRKDC (NM_006904.6,4724-4742).
gggagtatttctatagctt

SEQ ID NO: 205720 - DNA, 19 bp, Homo sapiens
  siRNA target sequence for PRKDC (NM_006904.6,4739-4757).
gcttgttctcagaaacgat

SEQ ID NO: 205721 - DNA, 19 bp, Homo sapiens
  siRNA target sequence for PRKDC (NM_006904.6,4754-4772).
cgatcaacacggaattatt

SEQ ID NO: 205722 - DNA, 19 bp, Homo sapiens
  siRNA target sequence for PRKDC (NM_006904.6,4758-4776).
caacacggaattattgaaa

SEQ ID NO: 205723 - DNA, 19 bp, Homo sapiens
  siRNA target sequence for PRKDC (NM_006904.6,4763-4781).
cggaattattgaaaaatct

SEQ ID NO: 205724 - DNA, 19 bp, Homo sapiens
  siRNA target sequence for PRKDC (NM_006904.6,4811-4829).
cttcagtggataataccaa

SEQ ID NO: 205725 - DNA, 19 bp, Homo sapiens
  siRNA target sequence for PRKDC (NM_006904.6,4842-4860).
cgttttgaacggcatgtta

SEQ ID NO: 205726 - DNA, 19 bp, Homo sapiens
  siRNA target sequence for PRKDC (NM_006904.6,4903-4921).
ctgaaacttgcgactacaa

SEQ ID NO: 205727 - DNA, 19 bp, Homo sapiens
  siRNA target sequence for PRKDC (NM_006904.6,4905-4923).
gaaacttgcgactacaatt

SEQ ID NO: 205728 - DNA, 19 bp, Homo sapiens
  siRNA target sequence for PRKDC (NM_006904.6,4963-4981).
gattcccctctcgaaacta

SEQ ID NO: 205729 - DNA, 19 bp, Homo sapiens
  siRNA target sequence for PRKDC (NM_006904.6,4967-4985).
cccctctcgaaactaaaat

SEQ ID NO: 205730 - DNA, 19 bp, Homo sapiens
  siRNA target sequence for PRKDC (NM_006904.6,4993-5011).
ctggccttactggcaaaaa

SEQ ID NO: 205731 - DNA, 19 bp, Homo sapiens
  siRNA target sequence for PRKDC (NM_006904.6,4995-5013).
ggccttactggcaaaaatt

SEQ ID NO: 205732 - DNA, 19 bp, Homo sapiens
  siRNA target sequence for PRKDC (NM_006904.6,4996-5014).
gccttactggcaaaaattt

SEQ ID NO: 205733 - DNA, 19 bp, Homo sapiens
  siRNA target sequence for PRKDC (NM_006904.6,5017-5035).
cagattgattcatctgtat

SEQ ID NO: 205734 - DNA, 19 bp, Homo sapiens
  siRNA target sequence for PRKDC (NM_006904.6,5087-5105).
gtctacttgctgacacaaa

SEQ ID NO: 205735 - DNA, 19 bp, Homo sapiens
  siRNA target sequence for PRKDC (NM_006904.6,5100-5118).
cacaaagctggatctacat

SEQ ID NO: 205736 - DNA, 19 bp, Homo sapiens
  siRNA target sequence for PRKDC (NM_006904.6,5102-5120).
caaagctggatctacattt

SEQ ID NO: 205737 - DNA, 19 bp, Homo sapiens
  siRNA target sequence for PRKDC (NM_006904.6,5251-5269).
ggaactccgcggttcaata

SEQ ID NO: 205738 - DNA, 19 bp, Homo sapiens
  siRNA target sequence for PRKDC (NM_006904.6,5252-5270).
gaactccgcggttcaataa

SEQ ID NO: 205739 - DNA, 19 bp, Homo sapiens
  siRNA target sequence for PRKDC (NM_006904.6,5255-5273).
ctccgcggttcaataatta

SEQ ID NO: 205740 - DNA, 19 bp, Homo sapiens
  siRNA target sequence for PRKDC (NM_006904.6,5258-5276).
cgcggttcaataattatgt

SEQ ID NO: 205741 - DNA, 19 bp, Homo sapiens
  siRNA target sequence for PRKDC (NM_006904.6,5283-5301).
catgaaaaagtttctagat

SEQ ID NO: 205742 - DNA, 19 bp, Homo sapiens
  siRNA target sequence for PRKDC (NM_006904.6,5321-5339).
gccctatgttgttggaatt

SEQ ID NO: 205743 - DNA, 19 bp, Homo sapiens
  siRNA target sequence for PRKDC (NM_006904.6,5324-5342).
ctatgttgttggaattgat

SEQ ID NO: 205744 - DNA, 19 bp, Homo sapiens
  siRNA target sequence for PRKDC (NM_006904.6,5334-5352).
ggaattgatgacagaagtt

SEQ ID NO: 205745 - DNA, 19 bp, Homo sapiens
  siRNA target sequence for PRKDC (NM_006904.6,5370-5388).
gcatgtcatggaagaatta

SEQ ID NO: 205746 - DNA, 19 bp, Homo sapiens
  siRNA target sequence for PRKDC (NM_006904.6,5452-5470).
gaaagcgtgtatgaaatgt

SEQ ID NO: 205747 - DNA, 19 bp, Homo sapiens
  siRNA target sequence for PRKDC (NM_006904.6,5596-5614).
gccattgatgtgttgaagt

SEQ ID NO: 205748 - DNA, 19 bp, Homo sapiens
  siRNA target sequence for PRKDC (NM_006904.6,5605-5623).
gtgttgaagtccaggttta

SEQ ID NO: 205749 - DNA, 19 bp, Homo sapiens
  siRNA target sequence for PRKDC (NM_006904.6,5616-5634).
caggtttacaaagctaaat

SEQ ID NO: 205750 - DNA, 19 bp, Homo sapiens
  siRNA target sequence for PRKDC (NM_006904.6,5618-5636).
ggtttacaaagctaaatga

SEQ ID NO: 205751 - DNA, 19 bp, Homo sapiens
  siRNA target sequence for PRKDC (NM_006904.6,5628-5646).
gctaaatgaatctaccttt

SEQ ID NO: 205752 - DNA, 19 bp, Homo sapiens
  siRNA target sequence for PRKDC (NM_006904.6,5639-5657).
ctacctttgatactcaaat

SEQ ID NO: 205753 - DNA, 19 bp, Homo sapiens
  siRNA target sequence for PRKDC (NM_006904.6,5667-5685).
gatgggctactataagatt

SEQ ID NO: 205754 - DNA, 19 bp, Homo sapiens
  siRNA target sequence for PRKDC (NM_006904.6,5670-5688).
gggctactataagattcta

SEQ ID NO: 205755 - DNA, 19 bp, Homo sapiens
  siRNA target sequence for PRKDC (NM_006904.6,5672-5690).
gctactataagattctaga

SEQ ID NO: 205756 - DNA, 19 bp, Homo sapiens
  siRNA target sequence for PRKDC (NM_006904.6,5682-5700).
gattctagacgtgatgtat

SEQ ID NO: 205757 - DNA, 19 bp, Homo sapiens
  siRNA target sequence for PRKDC (NM_006904.6,5722-5740).
gttcatgctaaggaatcaa

SEQ ID NO: 205758 - DNA, 19 bp, Homo sapiens
  siRNA target sequence for PRKDC (NM_006904.6,5811-5829).
gtgctacgatgcatttaca

SEQ ID NO: 205759 - DNA, 19 bp, Homo sapiens
  siRNA target sequence for PRKDC (NM_006904.6,5813-5831).
gctacgatgcatttacaga

SEQ ID NO: 205760 - DNA, 19 bp, Homo sapiens
  siRNA target sequence for PRKDC (NM_006904.6,6037-6055).
gttgaggttcctatggaaa

SEQ ID NO: 205761 - DNA, 19 bp, Homo sapiens
  siRNA target sequence for PRKDC (NM_006904.6,6113-6131).
cagatggtccttcctatat

SEQ ID NO: 205762 - DNA, 19 bp, Homo sapiens
  siRNA target sequence for PRKDC (NM_006904.6,6115-6133).
gatggtccttcctatatgt

SEQ ID NO: 205763 - DNA, 19 bp, Homo sapiens
  siRNA target sequence for PRKDC (NM_006904.6,6158-6176).
gtaccctgagtgaggaaat

SEQ ID NO: 205764 - DNA, 19 bp, Homo sapiens
  siRNA target sequence for PRKDC (NM_006904.6,6167-6185).
gtgaggaaatgagtcaatt

SEQ ID NO: 205765 - DNA, 19 bp, Homo sapiens
  siRNA target sequence for PRKDC (NM_006904.6,6171-6189).
ggaaatgagtcaatttgat

SEQ ID NO: 205766 - DNA, 19 bp, Homo sapiens
  siRNA target sequence for PRKDC (NM_006904.6,6172-6190).
gaaatgagtcaatttgatt

SEQ ID NO: 205767 - DNA, 19 bp, Homo sapiens
  siRNA target sequence for PRKDC (NM_006904.6,6278-6296).
ccacggtgcatgatgatgt

SEQ ID NO: 205768 - DNA, 19 bp, Homo sapiens
  siRNA target sequence for PRKDC (NM_006904.6,6402-6420).
ggattcagtgccaagagat

SEQ ID NO: 205769 - DNA, 19 bp, Homo sapiens
  siRNA target sequence for PRKDC (NM_006904.6,6621-6639).
gatagtggccactattctt

SEQ ID NO: 205770 - DNA, 19 bp, Homo sapiens
  siRNA target sequence for PRKDC (NM_006904.6,6662-6680).
caacaggggtccctaaaga

SEQ ID NO: 205771 - DNA, 19 bp, Homo sapiens
  siRNA target sequence for PRKDC (NM_006904.6,6682-6700).
gaagtgttagcaaatcgat

SEQ ID NO: 205772 - DNA, 19 bp, Homo sapiens
  siRNA target sequence for PRKDC (NM_006904.6,6687-6705).
gttagcaaatcgattgctt

SEQ ID NO: 205773 - DNA, 19 bp, Homo sapiens
  siRNA target sequence for PRKDC (NM_006904.6,6691-6709).
gcaaatcgattgcttaatt

SEQ ID NO: 205774 - DNA, 19 bp, Homo sapiens
  siRNA target sequence for PRKDC (NM_006904.6,6692-6710).
caaatcgattgcttaattt

SEQ ID NO: 205775 - DNA, 19 bp, Homo sapiens
  siRNA target sequence for PRKDC (NM_006904.6,6697-6715).
cgattgcttaatttcctaa

SEQ ID NO: 205776 - DNA, 19 bp, Homo sapiens
  siRNA target sequence for PRKDC (NM_006904.6,6698-6716).
gattgcttaatttcctaat

SEQ ID NO: 205777 - DNA, 19 bp, Homo sapiens
  siRNA target sequence for PRKDC (NM_006904.6,6721-6739).
catgtctttcatccaaaaa

SEQ ID NO: 205778 - DNA, 19 bp, Homo sapiens
  siRNA target sequence for PRKDC (NM_006904.6,6784-6802).
gagtgctggaaggattgtt

SEQ ID NO: 205779 - DNA, 19 bp, Homo sapiens
  siRNA target sequence for PRKDC (NM_006904.6,6786-6804).
gtgctggaaggattgttta

SEQ ID NO: 205780 - DNA, 19 bp, Homo sapiens
  siRNA target sequence for PRKDC (NM_006904.6,6806-6824).
ccatcccttataggttaat

SEQ ID NO: 205781 - DNA, 19 bp, Homo sapiens
  siRNA target sequence for PRKDC (NM_006904.6,6807-6825).
catcccttataggttaata

SEQ ID NO: 205782 - DNA, 19 bp, Homo sapiens
  siRNA target sequence for PRKDC (NM_006904.6,6840-6858).
cggtaaagatcctaattct

SEQ ID NO: 205783 - DNA, 19 bp, Homo sapiens
  siRNA target sequence for PRKDC (NM_006904.6,6841-6859).
ggtaaagatcctaattcta

SEQ ID NO: 205784 - DNA, 19 bp, Homo sapiens
  siRNA target sequence for PRKDC (NM_006904.6,6847-6865).
gatcctaattctaaagaca

SEQ ID NO: 205785 - DNA, 19 bp, Homo sapiens
  siRNA target sequence for PRKDC (NM_006904.6,6864-6882).
caactcagtagggattcaa

SEQ ID NO: 205786 - DNA, 19 bp, Homo sapiens
  siRNA target sequence for PRKDC (NM_006904.6,7007-7025).
ccgctgcagcagaagttct

SEQ ID NO: 205787 - DNA, 19 bp, Homo sapiens
  siRNA target sequence for PRKDC (NM_006904.6,7008-7026).
cgctgcagcagaagttcta

SEQ ID NO: 205788 - DNA, 19 bp, Homo sapiens
  siRNA target sequence for PRKDC (NM_006904.6,7028-7046).
gacttatacttcgatatgt

SEQ ID NO: 205789 - DNA, 19 bp, Homo sapiens
  siRNA target sequence for PRKDC (NM_006904.6,7084-7102).
gaactggttgcgaaacaat

SEQ ID NO: 205790 - DNA, 19 bp, Homo sapiens
  siRNA target sequence for PRKDC (NM_006904.6,7087-7105).
ctggttgcgaaacaattga

SEQ ID NO: 205791 - DNA, 19 bp, Homo sapiens
  siRNA target sequence for PRKDC (NM_006904.6,7104-7122).
gaagcaacatcagaatact

SEQ ID NO: 205792 - DNA, 19 bp, Homo sapiens
  siRNA target sequence for PRKDC (NM_006904.6,7206-7224).
ctttctgctgccaaaattt

SEQ ID NO: 205793 - DNA, 19 bp, Homo sapiens
  siRNA target sequence for PRKDC (NM_006904.6,7285-7303).
gagctgtacttccagttaa

SEQ ID NO: 205794 - DNA, 19 bp, Homo sapiens
  siRNA target sequence for PRKDC (NM_006904.6,7425-7443).
ccccgttgtggaattcgtt

SEQ ID NO: 205795 - DNA, 19 bp, Homo sapiens
  siRNA target sequence for PRKDC (NM_006904.6,7426-7444).
cccgttgtggaattcgttt

SEQ ID NO: 205796 - DNA, 19 bp, Homo sapiens
  siRNA target sequence for PRKDC (NM_006904.6,7440-7458).
cgtttcccatccttctaca

SEQ ID NO: 205797 - DNA, 19 bp, Homo sapiens
  siRNA target sequence for PRKDC (NM_006904.6,7441-7459).
gtttcccatccttctacaa

SEQ ID NO: 205798 - DNA, 19 bp, Homo sapiens
  siRNA target sequence for PRKDC (NM_006904.6,7457-7475).
caacatgtagggaacaaat

SEQ ID NO: 205799 - DNA, 19 bp, Homo sapiens
  siRNA target sequence for PRKDC (NM_006904.6,7460-7478).
catgtagggaacaaatgta

SEQ ID NO: 205800 - DNA, 19 bp, Homo sapiens
  siRNA target sequence for PRKDC (NM_006904.6,7486-7504).
ctcatgtggattcatgata

SEQ ID NO: 205801 - DNA, 19 bp, Homo sapiens
  siRNA target sequence for PRKDC (NM_006904.6,7596-7614).
gaaccctggacttcaatta

SEQ ID NO: 205802 - DNA, 19 bp, Homo sapiens
  siRNA target sequence for PRKDC (NM_006904.6,7601-7619).
ctggacttcaattaattat

SEQ ID NO: 205803 - DNA, 19 bp, Homo sapiens
  siRNA target sequence for PRKDC (NM_006904.6,7632-7650).
gagccatgaaactaggtta

SEQ ID NO: 205804 - DNA, 19 bp, Homo sapiens
  siRNA target sequence for PRKDC (NM_006904.6,7646-7664).
ggttaccttcaaatacctt

SEQ ID NO: 205805 - DNA, 19 bp, Homo sapiens
  siRNA target sequence for PRKDC (NM_006904.6,7669-7687).
cggttgctggcactaaatt

SEQ ID NO: 205806 - DNA, 19 bp, Homo sapiens
  siRNA target sequence for PRKDC (NM_006904.6,7677-7695).
ggcactaaattccttatat

SEQ ID NO: 205807 - DNA, 19 bp, Homo sapiens
  siRNA target sequence for PRKDC (NM_006904.6,7688-7706).
ccttatattctcctaagat

SEQ ID NO: 205808 - DNA, 19 bp, Homo sapiens
  siRNA target sequence for PRKDC (NM_006904.6,7733-7751).
caaattttctgctcgaaat

SEQ ID NO: 205809 - DNA, 19 bp, Homo sapiens
  siRNA target sequence for PRKDC (NM_006904.6,7754-7772).
ccagcatgagcccagatta

SEQ ID NO: 205810 - DNA, 19 bp, Homo sapiens
  siRNA target sequence for PRKDC (NM_006904.6,7789-7807).
gagcatcctctgtcagaat

SEQ ID NO: 205811 - DNA, 19 bp, Homo sapiens
  siRNA target sequence for PRKDC (NM_006904.6,7818-7836).
ggaatataccattgattct

SEQ ID NO: 205812 - DNA, 19 bp, Homo sapiens
  siRNA target sequence for PRKDC (NM_006904.6,7842-7860).
gcgtttccgaagtactgtt

SEQ ID NO: 205813 - DNA, 19 bp, Homo sapiens
  siRNA target sequence for PRKDC (NM_006904.6,8011-8029).
ggaagaagctcatttgatt

SEQ ID NO: 205814 - DNA, 19 bp, Homo sapiens
  siRNA target sequence for PRKDC (NM_006904.6,8147-8165).
ggcctgattttgggaaaaa

SEQ ID NO: 205815 - DNA, 19 bp, Homo sapiens
  siRNA target sequence for PRKDC (NM_006904.6,8180-8198).
caggggacgaggtggataa

SEQ ID NO: 205816 - DNA, 19 bp, Homo sapiens
  siRNA target sequence for PRKDC (NM_006904.6,8184-8202).
ggacgaggtggataacaaa

SEQ ID NO: 205817 - DNA, 19 bp, Homo sapiens
  siRNA target sequence for PRKDC (NM_006904.6,8237-8255).
gactgcgcagacggtttat

SEQ ID NO: 205818 - DNA, 19 bp, Homo sapiens
  siRNA target sequence for PRKDC (NM_006904.6,8239-8257).
ctgcgcagacggtttatga

SEQ ID NO: 205819 - DNA, 19 bp, Homo sapiens
  siRNA target sequence for PRKDC (NM_006904.6,8298-8316).
cgttgctgagcaaaaacga

SEQ ID NO: 205820 - DNA, 19 bp, Homo sapiens
  siRNA target sequence for PRKDC (NM_006904.6,8388-8406).
cggagaccttcctgacatt

SEQ ID NO: 205821 - DNA, 19 bp, Homo sapiens
  siRNA target sequence for PRKDC (NM_006904.6,8454-8472).
gagggacccaataattgca

SEQ ID NO: 205822 - DNA, 19 bp, Homo sapiens
  siRNA target sequence for PRKDC (NM_006904.6,8456-8474).
gggacccaataattgcaaa

SEQ ID NO: 205823 - DNA, 19 bp, Homo sapiens
  siRNA target sequence for PRKDC (NM_006904.6,8457-8475).
ggacccaataattgcaaaa

SEQ ID NO: 205824 - DNA, 19 bp, Homo sapiens
  siRNA target sequence for PRKDC (NM_006904.6,8562-8580).
gttgcttcaagacttcaat

SEQ ID NO: 205825 - DNA, 19 bp, Homo sapiens
  siRNA target sequence for PRKDC (NM_006904.6,8566-8584).
cttcaagacttcaatcgtt

SEQ ID NO: 205826 - DNA, 19 bp, Homo sapiens
  siRNA target sequence for PRKDC (NM_006904.6,8572-8590).
gacttcaatcgttttctta

SEQ ID NO: 205827 - DNA, 19 bp, Homo sapiens
  siRNA target sequence for PRKDC (NM_006904.6,8611-8629).
ccaccctttgtctcttgta

SEQ ID NO: 205828 - DNA, 19 bp, Homo sapiens
  siRNA target sequence for PRKDC (NM_006904.6,8612-8630).
caccctttgtctcttgtat

SEQ ID NO: 205829 - DNA, 19 bp, Homo sapiens
  siRNA target sequence for PRKDC (NM_006904.6,8832-8850).
gcttgctaagctgtataga

SEQ ID NO: 205830 - DNA, 19 bp, Homo sapiens
  siRNA target sequence for PRKDC (NM_006904.6,8833-8851).
cttgctaagctgtatagat

SEQ ID NO: 205831 - DNA, 19 bp, Homo sapiens
  siRNA target sequence for PRKDC (NM_006904.6,8836-8854).
gctaagctgtatagatcaa

SEQ ID NO: 205832 - DNA, 19 bp, Homo sapiens
  siRNA target sequence for PRKDC (NM_006904.6,8837-8855).
ctaagctgtatagatcaat

SEQ ID NO: 205833 - DNA, 19 bp, Homo sapiens
  siRNA target sequence for PRKDC (NM_006904.6,8841-8859).
gctgtatagatcaattgga

SEQ ID NO: 205834 - DNA, 19 bp, Homo sapiens
  siRNA target sequence for PRKDC (NM_006904.6,8849-8867).
gatcaattggagaatacga

SEQ ID NO: 205835 - DNA, 19 bp, Homo sapiens
  siRNA target sequence for PRKDC (NM_006904.6,8913-8931).
cactcagagtgcattatta

SEQ ID NO: 205836 - DNA, 19 bp, Homo sapiens
  siRNA target sequence for PRKDC (NM_006904.6,9017-9035).
cagaagccgagaaggattt

SEQ ID NO: 205837 - DNA, 19 bp, Homo sapiens
  siRNA target sequence for PRKDC (NM_006904.6,9019-9037).
gaagccgagaaggattttt

SEQ ID NO: 205838 - DNA, 19 bp, Homo sapiens
  siRNA target sequence for PRKDC (NM_006904.6,9047-9065).
catcccttgactgttacaa

SEQ ID NO: 205839 - DNA, 19 bp, Homo sapiens
  siRNA target sequence for PRKDC (NM_006904.6,9069-9087).
ccttgctgagtggaaatca

SEQ ID NO: 205840 - DNA, 19 bp, Homo sapiens
  siRNA target sequence for PRKDC (NM_006904.6,9096-9114).
ctgttctacagccagtata

SEQ ID NO: 205841 - DNA, 19 bp, Homo sapiens
  siRNA target sequence for PRKDC (NM_006904.6,9098-9116).
gttctacagccagtataga

SEQ ID NO: 205842 - DNA, 19 bp, Homo sapiens
  siRNA target sequence for PRKDC (NM_006904.6,9149-9167).
ggagtgaaccattttatca

SEQ ID NO: 205843 - DNA, 19 bp, Homo sapiens
  siRNA target sequence for PRKDC (NM_006904.6,9173-9191).
catatctaccttacatgat

SEQ ID NO: 205844 - DNA, 19 bp, Homo sapiens
  siRNA target sequence for PRKDC (NM_006904.6,9273-9291).
gctccagaaggcgattcta

SEQ ID NO: 205845 - DNA, 19 bp, Homo sapiens
  siRNA target sequence for PRKDC (NM_006904.6,9284-9302).
cgattctagagcttcatta

SEQ ID NO: 205846 - DNA, 19 bp, Homo sapiens
  siRNA target sequence for PRKDC (NM_006904.6,9343-9361).
gttgacagagccaaatatt

SEQ ID NO: 205847 - DNA, 19 bp, Homo sapiens
  siRNA target sequence for PRKDC (NM_006904.6,9390-9408).
gcagaattattctagtatt

SEQ ID NO: 205848 - DNA, 19 bp, Homo sapiens
  siRNA target sequence for PRKDC (NM_006904.6,9404-9422).
gtattgatgtcctcttaca

SEQ ID NO: 205849 - DNA, 19 bp, Homo sapiens
  siRNA target sequence for PRKDC (NM_006904.6,9414-9432).
cctcttacaccaaagtaga

SEQ ID NO: 205850 - DNA, 19 bp, Homo sapiens
  siRNA target sequence for PRKDC (NM_006904.6,9424-9442).
caaagtagactcaccaaat

SEQ ID NO: 205851 - DNA, 19 bp, Homo sapiens
  siRNA target sequence for PRKDC (NM_006904.6,9445-9463).
cagtctgtacaggctttaa

SEQ ID NO: 205852 - DNA, 19 bp, Homo sapiens
  siRNA target sequence for PRKDC (NM_006904.6,9447-9465).
gtctgtacaggctttaaca

SEQ ID NO: 205853 - DNA, 19 bp, Homo sapiens
  siRNA target sequence for PRKDC (NM_006904.6,9451-9469).
gtacaggctttaacagaaa

SEQ ID NO: 205854 - DNA, 19 bp, Homo sapiens
  siRNA target sequence for PRKDC (NM_006904.6,9495-9513).
caaacaaggcaatttatca

SEQ ID NO: 205855 - DNA, 19 bp, Homo sapiens
  siRNA target sequence for PRKDC (NM_006904.6,9538-9556).
ctgaacacctggacaaaca

SEQ ID NO: 205856 - DNA, 19 bp, Homo sapiens
  siRNA target sequence for PRKDC (NM_006904.6,9655-9673).
cttccagaagataatagta

SEQ ID NO: 205857 - DNA, 19 bp, Homo sapiens
  siRNA target sequence for PRKDC (NM_006904.6,9747-9765).
gatcaggagttgcaagttt

SEQ ID NO: 205858 - DNA, 19 bp, Homo sapiens
  siRNA target sequence for PRKDC (NM_006904.6,9758-9776).
gcaagttttccatgaaaat

SEQ ID NO: 205859 - DNA, 19 bp, Homo sapiens
  siRNA target sequence for PRKDC (NM_006904.6,9794-9812).
cccggaagcagaacaattt

SEQ ID NO: 205860 - DNA, 19 bp, Homo sapiens
  siRNA target sequence for PRKDC (NM_006904.6,9815-9833).
cacttgctatgaaactact

SEQ ID NO: 205861 - DNA, 19 bp, Homo sapiens
  siRNA target sequence for PRKDC (NM_006904.6,9946-9964).
gtgctcactgtgctgaaaa

SEQ ID NO: 205862 - DNA, 19 bp, Homo sapiens
  siRNA target sequence for PRKDC (NM_006904.6,9987-10005).
caacgtgtcaagctactta

SEQ ID NO: 205863 - DNA, 19 bp, Homo sapiens
  siRNA target sequence for PRKDC (NM_006904.6,9991-10009).
gtgtcaagctacttaagca

SEQ ID NO: 205864 - DNA, 19 bp, Homo sapiens
  siRNA target sequence for PRKDC (NM_006904.6,9993-10011).
gtcaagctacttaagcaaa

SEQ ID NO: 205865 - DNA, 19 bp, Homo sapiens
  siRNA target sequence for PRKDC (NM_006904.6,9999-10017).
ctacttaagcaaaaatatt

SEQ ID NO: 205866 - DNA, 19 bp, Homo sapiens
  siRNA target sequence for PRKDC (NM_006904.6,10022-10040).
ctttccgtgaccagaacat

SEQ ID NO: 205867 - DNA, 19 bp, Homo sapiens
  siRNA target sequence for PRKDC (NM_006904.6,10038-10056).
cattctcttgggtacaact

SEQ ID NO: 205868 - DNA, 19 bp, Homo sapiens
  siRNA target sequence for PRKDC (NM_006904.6,10277-10295).
ctggggtgattgatgctta

SEQ ID NO: 205869 - DNA, 19 bp, Homo sapiens
  siRNA target sequence for PRKDC (NM_006904.6,10339-10357).
gaagagaatgcatcagtta

SEQ ID NO: 205870 - DNA, 19 bp, Homo sapiens
  siRNA target sequence for PRKDC (NM_006904.6,10344-10362).
gaatgcatcagttattgat

SEQ ID NO: 205871 - DNA, 19 bp, Homo sapiens
  siRNA target sequence for PRKDC (NM_006904.6,10430-10448).
ccaatgaagccagattgaa

SEQ ID NO: 205872 - DNA, 19 bp, Homo sapiens
  siRNA target sequence for PRKDC (NM_006904.6,10446-10464).
gaagtttcctagattactt

SEQ ID NO: 205873 - DNA, 19 bp, Homo sapiens
  siRNA target sequence for PRKDC (NM_006904.6,10629-10647).
ctacccgcaggctattgtt

SEQ ID NO: 205874 - DNA, 19 bp, Homo sapiens
  siRNA target sequence for PRKDC (NM_006904.6,10659-10677).
cataagcagcgaaagctat

SEQ ID NO: 205875 - DNA, 19 bp, Homo sapiens
  siRNA target sequence for PRKDC (NM_006904.6,10664-10682).
gcagcgaaagctattcctt

SEQ ID NO: 205876 - DNA, 19 bp, Homo sapiens
  siRNA target sequence for PRKDC (NM_006904.6,10694-10712).
ctactggtcataagaataa

SEQ ID NO: 205877 - DNA, 19 bp, Homo sapiens
  siRNA target sequence for PRKDC (NM_006904.6,10750-10768).
ggaggagtgattcaagatt

SEQ ID NO: 205878 - DNA, 19 bp, Homo sapiens
  siRNA target sequence for PRKDC (NM_006904.6,10751-10769).
gaggagtgattcaagattt

SEQ ID NO: 205879 - DNA, 19 bp, Homo sapiens
  siRNA target sequence for PRKDC (NM_006904.6,10778-10796).
ccttagatcagctctctaa

SEQ ID NO: 205880 - DNA, 19 bp, Homo sapiens
  siRNA target sequence for PRKDC (NM_006904.6,10779-10797).
cttagatcagctctctaat

SEQ ID NO: 205881 - DNA, 19 bp, Homo sapiens
  siRNA target sequence for PRKDC (NM_006904.6,10935-10953).
ggcctttagaaggaagttt

SEQ ID NO: 205882 - DNA, 19 bp, Homo sapiens
  siRNA target sequence for PRKDC (NM_006904.6,10936-10954).
gcctttagaaggaagttta

SEQ ID NO: 205883 - DNA, 19 bp, Homo sapiens
  siRNA target sequence for PRKDC (NM_006904.6,10937-10955).
cctttagaaggaagtttat

SEQ ID NO: 205884 - DNA, 19 bp, Homo sapiens
  siRNA target sequence for PRKDC (NM_006904.6,11029-11047).
gacttcaacgacattacca

SEQ ID NO: 205885 - DNA, 19 bp, Homo sapiens
  siRNA target sequence for PRKDC (NM_006904.6,11046-11064).
caacatgctacttttaaaa

SEQ ID NO: 205886 - DNA, 19 bp, Homo sapiens
  siRNA target sequence for PRKDC (NM_006904.6,11084-11102).
cccctgggaatctgaaaga

SEQ ID NO: 205887 - DNA, 19 bp, Homo sapiens
  siRNA target sequence for PRKDC (NM_006904.6,11086-11104).
cctgggaatctgaaagaat

SEQ ID NO: 205888 - DNA, 19 bp, Homo sapiens
  siRNA target sequence for PRKDC (NM_006904.6,11154-11172).
ggagattcccggtcagtat

SEQ ID NO: 205889 - DNA, 19 bp, Homo sapiens
  siRNA target sequence for PRKDC (NM_006904.6,11258-11276).
ggcccaagcgcatcatcat

SEQ ID NO: 205890 - DNA, 19 bp, Homo sapiens
  siRNA target sequence for PRKDC (NM_006904.6,11445-11463).
gacctccaggttaggatta

SEQ ID NO: 205891 - DNA, 19 bp, Homo sapiens
  siRNA target sequence for PRKDC (NM_006904.6,11447-11465).
cctccaggttaggattaat

SEQ ID NO: 205892 - DNA, 19 bp, Homo sapiens
  siRNA target sequence for PRKDC (NM_006904.6,11450-11468).
ccaggttaggattaattga

SEQ ID NO: 205893 - DNA, 19 bp, Homo sapiens
  siRNA target sequence for PRKDC (NM_006904.6,11617-11635).
gcttacatgctaatgtata

SEQ ID NO: 205894 - DNA, 19 bp, Homo sapiens
  siRNA target sequence for PRKDC (NM_006904.6,11631-11649).
gtataagggcgctaatcgt

SEQ ID NO: 205895 - DNA, 19 bp, Homo sapiens
  siRNA target sequence for PRKDC (NM_006904.6,11637-11655).
gggcgctaatcgtactgaa

SEQ ID NO: 205896 - DNA, 19 bp, Homo sapiens
  siRNA target sequence for PRKDC (NM_006904.6,11640-11658).
cgctaatcgtactgaaaca

SEQ ID NO: 205897 - DNA, 19 bp, Homo sapiens
  siRNA target sequence for PRKDC (NM_006904.6,11713-11731).
gccttcgtgaggatgagta

SEQ ID NO: 205898 - DNA, 19 bp, Homo sapiens
  siRNA target sequence for PRKDC (NM_006904.6,11941-11959).
cggctaactcgccagttta

SEQ ID NO: 205899 - DNA, 19 bp, Homo sapiens
  siRNA target sequence for PRKDC (NM_006904.6,11942-11960).
ggctaactcgccagtttat

SEQ ID NO: 205900 - DNA, 19 bp, Homo sapiens
  siRNA target sequence for PRKDC (NM_006904.6,11944-11962).
ctaactcgccagtttatca

SEQ ID NO: 205901 - DNA, 19 bp, Homo sapiens
  siRNA target sequence for PRKDC (NM_006904.6,11950-11968).
cgccagtttatcaatctga

SEQ ID NO: 205902 - DNA, 19 bp, Homo sapiens
  siRNA target sequence for PRKDC (NM_006904.6,11983-12001).
gaaacgggccttatgtaca

SEQ ID NO: 205903 - DNA, 19 bp, Homo sapiens
  siRNA target sequence for PRKDC (NM_006904.6,12053-12071).
ccaacaccatggatgtgtt

SEQ ID NO: 205904 - DNA, 19 bp, Homo sapiens
  siRNA target sequence for PRKDC (NM_006904.6,12054-12072).
caacaccatggatgtgttt

SEQ ID NO: 205905 - DNA, 19 bp, Homo sapiens
  siRNA target sequence for PRKDC (NM_006904.6,12081-12099).
gccctcctttgattggaaa

SEQ ID NO: 205906 - DNA, 19 bp, Homo sapiens
  siRNA target sequence for PRKDC (NM_006904.6,12170-12188).
ggtacccccgacagaaaat

SEQ ID NO: 205907 - DNA, 19 bp, Homo sapiens
  siRNA target sequence for PRKDC (NM_006904.6,12171-12189).
gtacccccgacagaaaata

SEQ ID NO: 205908 - DNA, 19 bp, Homo sapiens
  siRNA target sequence for PRKDC (NM_006904.6,12272-12290).
ctgccttcagagactatgt

SEQ ID NO: 205909 - DNA, 19 bp, Homo sapiens
  siRNA target sequence for PRKDC (NM_006904.6,12299-12317).
cacgaggaagcaaagatca

SEQ ID NO: 205910 - DNA, 19 bp, Homo sapiens
  siRNA target sequence for PRKAG1 (NM_002733.1,154-172).
gaccccagaatccaacaat

SEQ ID NO: 205911 - DNA, 19 bp, Homo sapiens
  siRNA target sequence for PRKAG1 (NM_002733.1,176-194).
gtgtatacttccttcatga

SEQ ID NO: 205912 - DNA, 19 bp, Homo sapiens
  siRNA target sequence for PRKAG1 (NM_002733.1,299-317).
gtacgagctgcccctttat

SEQ ID NO: 205913 - DNA, 19 bp, Homo sapiens
  siRNA target sequence for PRKAG1 (NM_002733.1,308-326).
gcccctttatgggatagta

SEQ ID NO: 205914 - DNA, 19 bp, Homo sapiens
  siRNA target sequence for PRKAG1 (NM_002733.1,309-327).
cccctttatgggatagtaa

SEQ ID NO: 205915 - DNA, 19 bp, Homo sapiens
  siRNA target sequence for PRKAG1 (NM_002733.1,376-394).
cctgcaccgctactataaa

SEQ ID NO: 205916 - DNA, 19 bp, Homo sapiens
  siRNA target sequence for PRKAG1 (NM_002733.1,379-397).
gcaccgctactataaatca

SEQ ID NO: 205917 - DNA, 19 bp, Homo sapiens
  siRNA target sequence for PRKAG1 (NM_002733.1,396-414).
cagccttggtacagatcta

SEQ ID NO: 205918 - DNA, 19 bp, Homo sapiens
  siRNA target sequence for PRKAG1 (NM_002733.1,409-427).
gatctatgagctagaagaa

SEQ ID NO: 205919 - DNA, 19 bp, Homo sapiens
  siRNA target sequence for PRKAG1 (NM_002733.1,441-459).
cttggagagaggtgtatct

SEQ ID NO: 205920 - DNA, 19 bp, Homo sapiens
  siRNA target sequence for PRKAG1 (NM_002733.1,495-513).
ctaatgccagcttgtttga

SEQ ID NO: 205921 - DNA, 19 bp, Homo sapiens
  siRNA target sequence for PRKAG1 (NM_002733.1,544-562).
ccacaggctgccagttatt

SEQ ID NO: 205922 - DNA, 19 bp, Homo sapiens
  siRNA target sequence for PRKAG1 (NM_002733.1,566-584).
ccagaatcaggcaatactt

SEQ ID NO: 205923 - DNA, 19 bp, Homo sapiens
  siRNA target sequence for PRKAG1 (NM_002733.1,644-662).
cccaagccagagttcatgt

SEQ ID NO: 205924 - DNA, 19 bp, Homo sapiens
  siRNA target sequence for PRKAG1 (NM_002733.1,691-709).
cacctatgccaatattgct

SEQ ID NO: 205925 - DNA, 19 bp, Homo sapiens
  siRNA target sequence for PRKAG1 (NM_002733.1,693-711).
cctatgccaatattgctat

SEQ ID NO: 205926 - DNA, 19 bp, Homo sapiens
  siRNA target sequence for PRKAG1 (NM_002733.1,720-738).
ctaccacccccgtctatgt

SEQ ID NO: 205927 - DNA, 19 bp, Homo sapiens
  siRNA target sequence for PRKAG1 (NM_002733.1,739-757).
ggctctggggatttttgta

SEQ ID NO: 205928 - DNA, 19 bp, Homo sapiens
  siRNA target sequence for PRKAG1 (NM_002733.1,798-816).
ggcgtgtggtggacatcta

SEQ ID NO: 205929 - DNA, 19 bp, Homo sapiens
  siRNA target sequence for PRKAG1 (NM_002733.1,800-818).
cgtgtggtggacatctact

SEQ ID NO: 205930 - DNA, 19 bp, Homo sapiens
  siRNA target sequence for PRKAG1 (NM_002733.1,814-832).
ctactccaagtttgatgtt

SEQ ID NO: 205931 - DNA, 19 bp, Homo sapiens
  siRNA target sequence for PRKAG1 (NM_002733.1,845-863).
gcagaaaagacctacaaca

SEQ ID NO: 205932 - DNA, 19 bp, Homo sapiens
  siRNA target sequence for PRKAG1 (NM_002733.1,893-911).
caacatcgatcacattact

SEQ ID NO: 205933 - DNA, 19 bp, Homo sapiens
  siRNA target sequence for PRKAG1 (NM_002733.1,1016-1034).
gtggtcaagggaattgtat

SEQ ID NO: 205934 - DNA, 19 bp, Homo sapiens
  siRNA target sequence for CKS2 (NM_001827.1,147-165).
gagtaccggcatgttatgt

SEQ ID NO: 205935 - DNA, 19 bp, Homo sapiens
  siRNA target sequence for CKS2 (NM_001827.1,149-167).
gtaccggcatgttatgtta

SEQ ID NO: 205936 - DNA, 19 bp, Homo sapiens
  siRNA target sequence for CKS2 (NM_001827.1,247-265).
gtctaggctgggttcatta

SEQ ID NO: 205937 - DNA, 19 bp, Homo sapiens
  siRNA target sequence for CKS2 (NM_001827.1,252-270).
ggctgggttcattacatga

SEQ ID NO: 205938 - DNA, 19 bp, Homo sapiens
  siRNA target sequence for CKS2 (NM_001827.1,253-271).
gctgggttcattacatgat

SEQ ID NO: 205939 - DNA, 19 bp, Homo sapiens
  siRNA target sequence for CKS2 (NM_001827.1,278-296).
gccagaaccacatattctt

SEQ ID NO: 205940 - DNA, 19 bp, Homo sapiens
  siRNA target sequence for CKS2 (NM_001827.1,304-322).
gacgacctcttccaaaaga

SEQ ID NO: 205941 - DNA, 19 bp, Homo sapiens
  siRNA target sequence for CKS2 (NM_001827.1,307-325).
gacctcttccaaaagatca

SEQ ID NO: 205942 - DNA, 19 bp, Homo sapiens
  siRNA target sequence for CKS2 (NM_001827.1,310-328).
ctcttccaaaagatcaaca

SEQ ID NO: 205943 - DNA, 19 bp, Homo sapiens
  siRNA target sequence for PRKAG3 (NM_017431.1,147-165).
gaccagcagctcagaaaga

SEQ ID NO: 205944 - DNA, 19 bp, Homo sapiens
  siRNA target sequence for PRKAG3 (NM_017431.1,620-638).
gctccaagctagtcatctt

SEQ ID NO: 205945 - DNA, 19 bp, Homo sapiens
  siRNA target sequence for PRKAG3 (NM_017431.1,766-784).
gtgctgcatcgctactaca

SEQ ID NO: 205946 - DNA, 19 bp, Homo sapiens
  siRNA target sequence for PRKAG3 (NM_017431.1,788-806).
cccccctggtccagatcta

SEQ ID NO: 205947 - DNA, 19 bp, Homo sapiens
  siRNA target sequence for PRKAG3 (NM_017431.1,795-813).
ggtccagatctatgagatt

SEQ ID NO: 205948 - DNA, 19 bp, Homo sapiens
  siRNA target sequence for PRKAG3 (NM_017431.1,798-816).
ccagatctatgagattgaa

SEQ ID NO: 205949 - DNA, 19 bp, Homo sapiens
  siRNA target sequence for PRKAG3 (NM_017431.1,804-822).
ctatgagattgaacaacat

SEQ ID NO: 205950 - DNA, 19 bp, Homo sapiens
  siRNA target sequence for PRKAG3 (NM_017431.1,808-826).
gagattgaacaacataaga

SEQ ID NO: 205951 - DNA, 19 bp, Homo sapiens
  siRNA target sequence for PRKAG3 (NM_017431.1,873-891).
ggtctccatctctcctaat

SEQ ID NO: 205952 - DNA, 19 bp, Homo sapiens
  siRNA target sequence for PRKAG3 (NM_017431.1,1005-1023).
caagttcctgcacatcttt

SEQ ID NO: 205953 - DNA, 19 bp, Homo sapiens
  siRNA target sequence for PRKAG3 (NM_017431.1,1050-1068).
cctctaccgcactatccaa

SEQ ID NO: 205954 - DNA, 19 bp, Homo sapiens
  siRNA target sequence for PRKAG3 (NM_017431.1,1192-1210).
caggtcgtgggcctctatt

SEQ ID NO: 205955 - DNA, 19 bp, Homo sapiens
  siRNA target sequence for PRKAG3 (NM_017431.1,1203-1221).
cctctattcccgctttgat

SEQ ID NO: 205956 - DNA, 19 bp, Homo sapiens
  siRNA target sequence for PRKAG3 (NM_017431.1,1211-1229).
cccgctttgatgtgattca

SEQ ID NO: 205957 - DNA, 19 bp, Homo sapiens
  siRNA target sequence for GTF2H1 (NM_005316.2,388-406).
cttccatttttccaatgaa

SEQ ID NO: 205958 - DNA, 19 bp, Homo sapiens
  siRNA target sequence for GTF2H1 (NM_005316.2,605-623).
gtgaatgcaacagatagtt

SEQ ID NO: 205959 - DNA, 19 bp, Homo sapiens
  siRNA target sequence for GTF2H1 (NM_005316.2,1064-1082).
gccatcatcaagagattta

SEQ ID NO: 205960 - DNA, 19 bp, Homo sapiens
  siRNA target sequence for GTF2H1 (NM_005316.2,1065-1083).
ccatcatcaagagatttaa

SEQ ID NO: 205961 - DNA, 19 bp, Homo sapiens
  siRNA target sequence for GTF2H1 (NM_005316.2,1343-1361).
gcaacaagtcaggacatta

SEQ ID NO: 205962 - DNA, 19 bp, Homo sapiens
  siRNA target sequence for GTF2H1 (NM_005316.2,1347-1365).
caagtcaggacattattaa

SEQ ID NO: 205963 - DNA, 19 bp, Homo sapiens
  siRNA target sequence for GTF2H1 (NM_005316.2,1464-1482).
cacctggaggggcacttat

SEQ ID NO: 205964 - DNA, 19 bp, Homo sapiens
  siRNA target sequence for GTF2H1 (NM_005316.2,1713-1731).
gcacaaatttggtaagtca

SEQ ID NO: 205965 - DNA, 19 bp, Homo sapiens
  siRNA target sequence for GTF2H1 (NM_005316.2,1782-1800).
cacggcgtctgatgaagaa

SEQ ID NO: 205966 - DNA, 19 bp, Homo sapiens
  siRNA target sequence for GTF2H1 (NM_005316.2,1784-1802).
cggcgtctgatgaagaaaa

SEQ ID NO: 205967 - DNA, 19 bp, Homo sapiens
  siRNA target sequence for GTF2H1 (NM_005316.2,1787-1805).
cgtctgatgaagaaaacgt

SEQ ID NO: 205968 - DNA, 19 bp, Homo sapiens
  siRNA target sequence for BCR (NM_004327.2,642-660).
gagcgcttccgcatgatct

SEQ ID NO: 205969 - DNA, 19 bp, Homo sapiens
  siRNA target sequence for BCR (NM_004327.2,670-688).
cgttgctggccaaggaaaa

SEQ ID NO: 205970 - DNA, 19 bp, Homo sapiens
  siRNA target sequence for BCR (NM_004327.2,2449-2467).
cgctggtcctccatgactt

SEQ ID NO: 205971 - DNA, 19 bp, Homo sapiens
  siRNA target sequence for BCR (NM_004327.2,3001-3019).
gccgcaacggcaagagtta

SEQ ID NO: 205972 - DNA, 19 bp, Homo sapiens
  siRNA target sequence for BCR (NM_004327.2,3003-3021).
cgcaacggcaagagttaca

SEQ ID NO: 205973 - DNA, 19 bp, Homo sapiens
  siRNA target sequence for BCR (NM_004327.2,3136-3154).
ccaactcgtgtgtgaaact

SEQ ID NO: 205974 - DNA, 19 bp, Homo sapiens
  siRNA target sequence for BCR (NM_004327.2,3170-3188).
cattccgctgaccatcaat

SEQ ID NO: 205975 - DNA, 19 bp, Homo sapiens
  siRNA target sequence for BCR (NM_004327.2,3252-3270).
ggatttaagcagagttcaa

SEQ ID NO: 205976 - DNA, 19 bp, Homo sapiens
  siRNA target sequence for BCR (NM_004327.2,3253-3271).
gatttaagcagagttcaaa

SEQ ID NO: 205977 - DNA, 19 bp, Homo sapiens
  siRNA target sequence for BCR (NM_004327.2,3361-3379).
ggaacgaggaatttgagat

SEQ ID NO: 205978 - DNA, 19 bp, Homo sapiens
  siRNA target sequence for BRD2 (NM_005104.2,1852-1870).
gtgcctgctttgcaactta

SEQ ID NO: 205979 - DNA, 19 bp, Homo sapiens
  siRNA target sequence for BRD2 (NM_005104.2,2027-2045).
gtctaccggattatcacaa

SEQ ID NO: 205980 - DNA, 19 bp, Homo sapiens
  siRNA target sequence for BRD2 (NM_005104.2,2084-2102).
ggagacttgaaaacaatta

SEQ ID NO: 205981 - DNA, 19 bp, Homo sapiens
  siRNA target sequence for BRD2 (NM_005104.2,2108-2126).
gggctgcttcagagtgtat

SEQ ID NO: 205982 - DNA, 19 bp, Homo sapiens
  siRNA target sequence for BRD2 (NM_005104.2,2141-2159).
ccatgttcaccaactgtta

SEQ ID NO: 205983 - DNA, 19 bp, Homo sapiens
  siRNA target sequence for BRD2 (NM_005104.2,2150-2168).
ccaactgttacatttacaa

SEQ ID NO: 205984 - DNA, 19 bp, Homo sapiens
  siRNA target sequence for BRD2 (NM_005104.2,2166-2184).
caacaagcccactgatgat

SEQ ID NO: 205985 - DNA, 19 bp, Homo sapiens
  siRNA target sequence for BRD2 (NM_005104.2,2204-2222).
cgctggaaaagatattcct

SEQ ID NO: 205986 - DNA, 19 bp, Homo sapiens
  siRNA target sequence for BRD2 (NM_005104.2,2205-2223).
gctggaaaagatattccta

SEQ ID NO: 205987 - DNA, 19 bp, Homo sapiens
  siRNA target sequence for BRD2 (NM_005104.2,2422-2440).
ccccacccatcagtcattt

SEQ ID NO: 205988 - DNA, 19 bp, Homo sapiens
  siRNA target sequence for BRD2 (NM_005104.2,2511-2529).
ccagccccttgccaagaaa

SEQ ID NO: 205989 - DNA, 19 bp, Homo sapiens
  siRNA target sequence for BRD2 (NM_005104.2,2512-2530).
cagccccttgccaagaaaa

SEQ ID NO: 205990 - DNA, 19 bp, Homo sapiens
  siRNA target sequence for BRD2 (NM_005104.2,2840-2858).
cacttggcctgcatgacta

SEQ ID NO: 205991 - DNA, 19 bp, Homo sapiens
  siRNA target sequence for BRD2 (NM_005104.2,3009-3027).
ggcaatggcacgaaagcta

SEQ ID NO: 205992 - DNA, 19 bp, Homo sapiens
  siRNA target sequence for BRD2 (NM_005104.2,3019-3037).
cgaaagctacaggatgtat

SEQ ID NO: 205993 - DNA, 19 bp, Homo sapiens
  siRNA target sequence for BRD2 (NM_005104.2,3020-3038).
gaaagctacaggatgtatt

SEQ ID NO: 205994 - DNA, 19 bp, Homo sapiens
  siRNA target sequence for BRD2 (NM_005104.2,3060-3078).
gccagatgaaccactagaa

SEQ ID NO: 205995 - DNA, 19 bp, Homo sapiens
  siRNA target sequence for BRD2 (NM_005104.2,3112-3130).
cctggcttggccaaatcgt

SEQ ID NO: 205996 - DNA, 19 bp, Homo sapiens
  siRNA target sequence for BRD2 (NM_005104.2,3314-3332).
cccagggtccaatatccaa

SEQ ID NO: 205997 - DNA, 19 bp, Homo sapiens
  siRNA target sequence for BRD2 (NM_005104.2,3442-3460).
ccacctcaacctaagaagt

SEQ ID NO: 205998 - DNA, 19 bp, Homo sapiens
  siRNA target sequence for BRD2 (NM_005104.2,3578-3596).
ccctgcctacaggttatga

SEQ ID NO: 205999 - DNA, 19 bp, Homo sapiens
  siRNA target sequence for BRD2 (NM_005104.2,3579-3597).
cctgcctacaggttatgat

SEQ ID NO: 206000 - DNA, 19 bp, Homo sapiens
  siRNA target sequence for BRD2 (NM_005104.2,3580-3598).
ctgcctacaggttatgatt

SEQ ID NO: 206001 - DNA, 19 bp, Homo sapiens
  siRNA target sequence for BRD2 (NM_005104.2,3582-3600).
gcctacaggttatgattca

SEQ ID NO: 206002 - DNA, 19 bp, Homo sapiens
  siRNA target sequence for BRD2 (NM_005104.2,3613-3631).
gagagcaggcccatgagtt

SEQ ID NO: 206003 - DNA, 19 bp, Homo sapiens
  siRNA target sequence for BRD2 (NM_005104.2,3618-3636).
caggcccatgagttacgat

SEQ ID NO: 206004 - DNA, 19 bp, Homo sapiens
  siRNA target sequence for BRD2 (NM_005104.2,3651-3669).
gagcctggacatcaacaaa

SEQ ID NO: 206005 - DNA, 19 bp, Homo sapiens
  siRNA target sequence for BRD2 (NM_005104.2,3687-3705).
gggccgagttgtgcatata

SEQ ID NO: 206006 - DNA, 19 bp, Homo sapiens
  siRNA target sequence for BRD2 (NM_005104.2,3689-3707).
gccgagttgtgcatataat

SEQ ID NO: 206007 - DNA, 19 bp, Homo sapiens
  siRNA target sequence for BRD2 (NM_005104.2,3774-3792).
caagccatccacacttaga

SEQ ID NO: 206008 - DNA, 19 bp, Homo sapiens
  siRNA target sequence for BRD2 (NM_005104.2,3836-3854).
ggaagccctacaccattaa

SEQ ID NO: 206009 - DNA, 19 bp, Homo sapiens
  siRNA target sequence for BRD2 (NM_005104.2,3928-3946).
gtcagcggacagctcaatt

SEQ ID NO: 206010 - DNA, 19 bp, Homo sapiens
  siRNA target sequence for BRD2 (NM_005104.2,3930-3948).
cagcggacagctcaattct

SEQ ID NO: 206011 - DNA, 19 bp, Homo sapiens
  siRNA target sequence for BRD2 (NM_005104.2,3933-3951).
cggacagctcaattctact

SEQ ID NO: 206012 - DNA, 19 bp, Homo sapiens
  siRNA target sequence for BRD2 (NM_005104.2,3934-3952).
ggacagctcaattctacta

SEQ ID NO: 206013 - DNA, 19 bp, Homo sapiens
  siRNA target sequence for BRD2 (NM_005104.2,3935-3953).
gacagctcaattctactaa

SEQ ID NO: 206014 - DNA, 19 bp, Homo sapiens
  siRNA target sequence for FASTK (NM_006712.3,594-612).
gtcttacttggctttccat

SEQ ID NO: 206015 - DNA, 19 bp, Homo sapiens
  siRNA target sequence for FASTK (NM_006712.3,946-964).
cctttgggcgactgaacta

SEQ ID NO: 206016 - DNA, 19 bp, Homo sapiens
  siRNA target sequence for FASTK (NM_006712.3,969-987).
cccctggaacagcagttta

SEQ ID NO: 206017 - DNA, 19 bp, Homo sapiens
  siRNA target sequence for FASTK (NM_006712.3,1038-1056).
gctacagtcaacatcttga

SEQ ID NO: 206018 - DNA, 19 bp, Homo sapiens
  siRNA target sequence for FASTK (NM_006712.3,1090-1108).
gagccctgcactttgtttt

SEQ ID NO: 206019 - DNA, 19 bp, Homo sapiens
  siRNA target sequence for FASTK (NM_006712.3,1114-1132).
ctggcttcatcaactacat

SEQ ID NO: 206020 - DNA, 19 bp, Homo sapiens
  siRNA target sequence for FASTK (NM_006712.3,1278-1296).
cgtgcccgctgcaagtaca

SEQ ID NO: 206021 - DNA, 19 bp, Homo sapiens
  siRNA target sequence for H11 (NM_014365.2,853-871).
gatggtgaagaccaaagat

SEQ ID NO: 206022 - DNA, 19 bp, Homo sapiens
  siRNA target sequence for H11 (NM_014365.2,880-898).
ggaggtgtctggcaaacat

SEQ ID NO: 206023 - DNA, 19 bp, Homo sapiens
  siRNA target sequence for H11 (NM_014365.2,920-938).
ggcattgtttctaagaact

SEQ ID NO: 206024 - DNA, 19 bp, Homo sapiens
  siRNA target sequence for H11 (NM_014365.2,968-986).
gtggatcctgtgacagtat

SEQ ID NO: 206025 - DNA, 19 bp, Homo sapiens
  siRNA target sequence for H11 (NM_014365.2,970-988).
ggatcctgtgacagtattt

SEQ ID NO: 206026 - DNA, 19 bp, Homo sapiens
  siRNA target sequence for H11 (NM_014365.2,1030-1048).
ccaggtccctccttactca

SEQ ID NO: 206027 - DNA, 19 bp, Homo sapiens
  siRNA target sequence for H11 (NM_014365.2,1036-1054).
ccctccttactcaacattt

SEQ ID NO: 206028 - DNA, 19 bp, Homo sapiens
  siRNA target sequence for EFNA3 (NM_004952.3,417-435).
cgcacagccccatcaagtt

SEQ ID NO: 206029 - DNA, 19 bp, Homo sapiens
  siRNA target sequence for EFNA3 (NM_004952.3,646-664).
caacgtgctggaagacttt

SEQ ID NO: 206030 - DNA, 19 bp, Homo sapiens
  siRNA target sequence for EFNA4 (NM_005227.2,161-179).
gcctccgccacgtagtcta

SEQ ID NO: 206031 - DNA, 19 bp, Homo sapiens
  siRNA target sequence for EFNA4 (NM_005227.2,231-249).
gggcctcaacgattaccta

SEQ ID NO: 206032 - DNA, 19 bp, Homo sapiens
  siRNA target sequence for EFNA4 (NM_005227.2,237-255).
caacgattacctagacatt

SEQ ID NO: 206033 - DNA, 19 bp, Homo sapiens
  siRNA target sequence for EFNA4 (NM_005227.2,296-314).
ccgagacgtttgctttgta

SEQ ID NO: 206034 - DNA, 19 bp, Homo sapiens
  siRNA target sequence for EFNA4 (NM_005227.2,444-462).
cctcggctttgagttctta

SEQ ID NO: 206035 - DNA, 19 bp, Homo sapiens
  siRNA target sequence for EFNA4 (NM_005227.2,464-482).
ctggagagacttactacta

SEQ ID NO: 206036 - DNA, 19 bp, Homo sapiens
  siRNA target sequence for EFNA4 (NM_005227.2,467-485).
gagagacttactactacat

SEQ ID NO: 206037 - DNA, 19 bp, Homo sapiens
  siRNA target sequence for EFNA4 (NM_005227.2,469-487).
gagacttactactacatct

SEQ ID NO: 206038 - DNA, 19 bp, Homo sapiens
  siRNA target sequence for EFNA4 (NM_005227.2,634-652).
cccctctgtctcttgctat

SEQ ID NO: 206039 - DNA, 19 bp, Homo sapiens
  siRNA target sequence for EFNA4 (NM_005227.2,673-691).
cgtcttctgcgaattctgt

SEQ ID NO: 206040 - DNA, 19 bp, Homo sapiens
  siRNA target sequence for EFNA4 (NM_182689.1,609-627).
cactgggggtgccaattca

SEQ ID NO: 206041 - DNA, 19 bp, Homo sapiens
  siRNA target sequence for EFNA4 (NM_182689.1,611-629).
ctgggggtgccaattcaga

SEQ ID NO: 206042 - DNA, 19 bp, Homo sapiens
  siRNA target sequence for EFNA4 (NM_182689.1,621-639).
caattcagaccgacaagat

SEQ ID NO: 206043 - DNA, 19 bp, Homo sapiens
  siRNA target sequence for EFNB3 (NM_001406.3,523-541).
ccaggcagagggtggttat

SEQ ID NO: 206044 - DNA, 19 bp, Homo sapiens
  siRNA target sequence for EFNB3 (NM_001406.3,618-636).
ctaattatgagttctacaa

SEQ ID NO: 206045 - DNA, 19 bp, Homo sapiens
  siRNA target sequence for EFNB3 (NM_001406.3,694-712).
cctccttctcacttgtgat

SEQ ID NO: 206046 - DNA, 19 bp, Homo sapiens
  siRNA target sequence for EFNB3 (NM_001406.3,752-770).
gagtatagccctaatctct

SEQ ID NO: 206047 - DNA, 19 bp, Homo sapiens
  siRNA target sequence for EFNB3 (NM_001406.3,785-803).
cgctcgcaccacgattact

SEQ ID NO: 206048 - DNA, 19 bp, Homo sapiens
  siRNA target sequence for EFNB3 (NM_001406.3,786-804).
gctcgcaccacgattacta

SEQ ID NO: 206049 - DNA, 19 bp, Homo sapiens
  siRNA target sequence for EFNB3 (NM_001406.3,793-811).
ccacgattactacatcatt

SEQ ID NO: 206050 - DNA, 19 bp, Homo sapiens
  siRNA target sequence for EFNB3 (NM_001406.3,919-937).
ggctgtcccccgaaaacct

SEQ ID NO: 206051 - DNA, 19 bp, Homo sapiens
  siRNA target sequence for EFNB3 (NM_001406.3,1353-1371).
ggcatcctgtgtatatcgt

SEQ ID NO: 206052 - DNA, 19 bp, Homo sapiens
  siRNA target sequence for EFNB3 (NM_001406.3,1388-1406).
cagagccctccaaacatct

SEQ ID NO: 206053 - DNA, 19 bp, Homo sapiens
  siRNA target sequence for EFNB3 (NM_001406.3,1394-1412).
cctccaaacatctactaca

SEQ ID NO: 206054 - DNA, 19 bp, Homo sapiens
  siRNA target sequence for EFNB3 (NM_001406.3,1395-1413).
ctccaaacatctactacaa

SEQ ID NO: 206055 - DNA, 19 bp, Homo sapiens
  siRNA target sequence for NRP2 (NM_003872.1,80-98).
cgtgcggaggtcgtttgaa

SEQ ID NO: 206056 - DNA, 19 bp, Homo sapiens
  siRNA target sequence for NRP2 (NM_003872.1,81-99).
gtgcggaggtcgtttgaat

SEQ ID NO: 206057 - DNA, 19 bp, Homo sapiens
  siRNA target sequence for NRP2 (NM_003872.1,159-177).
gaactgcgagtggattgtt

SEQ ID NO: 206058 - DNA, 19 bp, Homo sapiens
  siRNA target sequence for NRP2 (NM_003872.1,186-204).
cgaacccaaccagaagatt

SEQ ID NO: 206059 - DNA, 19 bp, Homo sapiens
  siRNA target sequence for NRP2 (NM_003872.1,248-266).
gcaagtatgactttatcga

SEQ ID NO: 206060 - DNA, 19 bp, Homo sapiens
  siRNA target sequence for NRP2 (NM_003872.1,271-289).
cgggatggggacagtgaat

SEQ ID NO: 206061 - DNA, 19 bp, Homo sapiens
  siRNA target sequence for NRP2 (NM_003872.1,295-313).
gacctcctgggcaaacact

SEQ ID NO: 206062 - DNA, 19 bp, Homo sapiens
  siRNA target sequence for NRP2 (NM_003872.1,347-365).
cgggctccatgctctacat

SEQ ID NO: 206063 - DNA, 19 bp, Homo sapiens
  siRNA target sequence for NRP2 (NM_003872.1,407-425).
ctctgcgctacgagatctt

SEQ ID NO: 206064 - DNA, 19 bp, Homo sapiens
  siRNA target sequence for NRP2 (NM_003872.1,412-430).
cgctacgagatcttcaaga

SEQ ID NO: 206065 - DNA, 19 bp, Homo sapiens
  siRNA target sequence for NRP2 (NM_003872.1,466-484).
cccaacgggaccatcgaat

SEQ ID NO: 206066 - DNA, 19 bp, Homo sapiens
  siRNA target sequence for NRP2 (NM_003872.1,488-506).
ctgggtttcctgagaagta

SEQ ID NO: 206067 - DNA, 19 bp, Homo sapiens
  siRNA target sequence for NRP2 (NM_003872.1,616-634).
ggggactgcaagtacgatt

SEQ ID NO: 206068 - DNA, 19 bp, Homo sapiens
  siRNA target sequence for NRP2 (NM_003872.1,776-794).
gcttctctgcgcgttacta

SEQ ID NO: 206069 - DNA, 19 bp, Homo sapiens
  siRNA target sequence for NRP2 (NM_003872.1,854-872).
ctggccggattgctaatga

SEQ ID NO: 206070 - DNA, 19 bp, Homo sapiens
  siRNA target sequence for NRP2 (NM_003872.1,857-875).
gccggattgctaatgaaca

SEQ ID NO: 206071 - DNA, 19 bp, Homo sapiens
  siRNA target sequence for NRP2 (NM_003872.1,860-878).
ggattgctaatgaacagat

SEQ ID NO: 206072 - DNA, 19 bp, Homo sapiens
  siRNA target sequence for NRP2 (NM_003872.1,874-892).
cagatcagtgcctcatcta

SEQ ID NO: 206073 - DNA, 19 bp, Homo sapiens
  siRNA target sequence for NRP2 (NM_003872.1,956-974).
cccccaacttggattccaa

SEQ ID NO: 206074 - DNA, 19 bp, Homo sapiens
  siRNA target sequence for NRP2 (NM_003872.1,994-1012).
gacctgcgctttttaacca

SEQ ID NO: 206075 - DNA, 19 bp, Homo sapiens
  siRNA target sequence for NRP2 (NM_003872.1,1040-1058).
cgatttccagggaaacaca

SEQ ID NO: 206076 - DNA, 19 bp, Homo sapiens
  siRNA target sequence for NRP2 (NM_003872.1,1086-1104).
gctggaagtcagcactaat

SEQ ID NO: 206077 - DNA, 19 bp, Homo sapiens
  siRNA target sequence for NRP2 (NM_003872.1,1169-1187).
caactgaggtggttctgaa

SEQ ID NO: 206078 - DNA, 19 bp, Homo sapiens
  siRNA target sequence for NRP2 (NM_003872.1,1206-1224).
gctgacaaggtttgttaga

SEQ ID NO: 206079 - DNA, 19 bp, Homo sapiens
  siRNA target sequence for NRP2 (NM_003872.1,1207-1225).
ctgacaaggtttgttagaa

SEQ ID NO: 206080 - DNA, 19 bp, Homo sapiens
  siRNA target sequence for NRP2 (NM_003872.1,1358-1376).
cttccacccaggaatacct

SEQ ID NO: 206081 - DNA, 19 bp, Homo sapiens
  siRNA target sequence for NRP2 (NM_003872.1,1521-1539).
cggaggagacagtatcact

SEQ ID NO: 206082 - DNA, 19 bp, Homo sapiens
  siRNA target sequence for NRP2 (NM_003872.1,1555-1573).
gcatttgtgcgcaagttca

SEQ ID NO: 206083 - DNA, 19 bp, Homo sapiens
  siRNA target sequence for NRP2 (NM_003872.1,1556-1574).
catttgtgcgcaagttcaa

SEQ ID NO: 206084 - DNA, 19 bp, Homo sapiens
  siRNA target sequence for NRP2 (NM_003872.1,1561-1579).
gtgcgcaagttcaaagtct

SEQ ID NO: 206085 - DNA, 19 bp, Homo sapiens
  siRNA target sequence for NRP2 (NM_003872.1,1671-1689).
ccctgacatccgaaggttt

SEQ ID NO: 206086 - DNA, 19 bp, Homo sapiens
  siRNA target sequence for NRP2 (NM_003872.1,1692-1710).
ccccattccggcacagtat

SEQ ID NO: 206087 - DNA, 19 bp, Homo sapiens
  siRNA target sequence for NRP2 (NM_003872.1,1917-1935).
gctcccttcgggattcaat

SEQ ID NO: 206088 - DNA, 19 bp, Homo sapiens
  siRNA target sequence for NRP2 (NM_003872.1,1918-1936).
ctcccttcgggattcaatt

SEQ ID NO: 206089 - DNA, 19 bp, Homo sapiens
  siRNA target sequence for NRP2 (NM_003872.1,1921-1939).
ccttcgggattcaattgca

SEQ ID NO: 206090 - DNA, 19 bp, Homo sapiens
  siRNA target sequence for NRP2 (NM_003872.1,1922-1940).
cttcgggattcaattgcaa

SEQ ID NO: 206091 - DNA, 19 bp, Homo sapiens
  siRNA target sequence for NRP2 (NM_003872.1,2359-2377).
gatgacattcggataagca

SEQ ID NO: 206092 - DNA, 19 bp, Homo sapiens
  siRNA target sequence for NRP2 (NM_003872.1,2532-2550).
cccctcgaccgacaaagaa

SEQ ID NO: 206093 - DNA, 19 bp, Homo sapiens
  siRNA target sequence for NRP2 (NM_003872.1,2533-2551).
ccctcgaccgacaaagaaa

SEQ ID NO: 206094 - DNA, 19 bp, Homo sapiens
  siRNA target sequence for NRP2 (NM_003872.1,2534-2552).
cctcgaccgacaaagaaaa

SEQ ID NO: 206095 - DNA, 19 bp, Homo sapiens
  siRNA target sequence for NRP2 (NM_018534.2,2417-2435).
cttttgcaggtgagaattt

SEQ ID NO: 206096 - DNA, 19 bp, Homo sapiens
  siRNA target sequence for NRP2 (NM_018534.2,2501-2519).
cagcctactggtattacgt

SEQ ID NO: 206097 - DNA, 19 bp, Homo sapiens
  siRNA target sequence for NRP2 (NM_018534.2,2503-2521).
gcctactggtattacgtaa

SEQ ID NO: 206098 - DNA, 19 bp, Homo sapiens
  siRNA target sequence for NRP2 (NM_018534.2,2504-2522).
cctactggtattacgtaat

SEQ ID NO: 206099 - DNA, 19 bp, Homo sapiens
  siRNA target sequence for NRP2 (NM_018534.2,2617-2635).
cactccatcacctacaaaa

SEQ ID NO: 206100 - DNA, 19 bp, Homo sapiens
  siRNA target sequence for NRP2 (NM_018534.2,2675-2693).
ccaccctaaccattaagct

SEQ ID NO: 206101 - DNA, 19 bp, Homo sapiens
  siRNA target sequence for NRP2 (NM_018534.2,2676-2694).
caccctaaccattaagcta

SEQ ID NO: 206102 - DNA, 19 bp, Homo sapiens
  siRNA target sequence for FGFRL1 (NM_021923.2,364-382).
cgtcgtgctggatgacatt

SEQ ID NO: 206103 - DNA, 19 bp, Homo sapiens
  siRNA target sequence for FGFRL1 (NM_021923.2,365-383).
gtcgtgctggatgacatta

SEQ ID NO: 206104 - DNA, 19 bp, Homo sapiens
  siRNA target sequence for FGFRL1 (NM_021923.2,660-678).
cggaggacagcggcaaata

SEQ ID NO: 206105 - DNA, 19 bp, Homo sapiens
  siRNA target sequence for FGFRL1 (NM_021923.2,968-986).
gacggctcctacctcaata

SEQ ID NO: 206106 - DNA, 19 bp, Homo sapiens
  siRNA target sequence for FGFRL1 (NM_021923.2,972-990).
gctcctacctcaataagct

SEQ ID NO: 206107 - DNA, 19 bp, Homo sapiens
  siRNA target sequence for FGFRL1 (NM_021923.2,1013-1031).
gacgatgcgggcatgtaca

SEQ ID NO: 206108 - DNA, 19 bp, Homo sapiens
  siRNA target sequence for FGFRL1 (NM_021923.2,1016-1034).
gatgcgggcatgtacatct

SEQ ID NO: 206109 - DNA, 19 bp, Homo sapiens
  siRNA target sequence for FGFRL1 (NM_021923.2,1415-1433).
gttgctggccctaagttgt

SEQ ID NO: 206110 - DNA, 19 bp, Homo sapiens
  siRNA target sequence for PDGFRL (NM_006207.1,101-119).
gaagcgctggaggatgtta

SEQ ID NO: 206111 - DNA, 19 bp, Homo sapiens
  siRNA target sequence for PDGFRL (NM_006207.1,164-182).
gagaatagaatcaaaccta

SEQ ID NO: 206112 - DNA, 19 bp, Homo sapiens
  siRNA target sequence for PDGFRL (NM_006207.1,194-212).
gtgaagcccaaaattccta

SEQ ID NO: 206113 - DNA, 19 bp, Homo sapiens
  siRNA target sequence for PDGFRL (NM_006207.1,243-261).
caccaaagacgcagtctat

SEQ ID NO: 206114 - DNA, 19 bp, Homo sapiens
  siRNA target sequence for PDGFRL (NM_006207.1,245-263).
ccaaagacgcagtctatca

SEQ ID NO: 206115 - DNA, 19 bp, Homo sapiens
  siRNA target sequence for PDGFRL (NM_006207.1,246-264).
caaagacgcagtctatcat

SEQ ID NO: 206116 - DNA, 19 bp, Homo sapiens
  siRNA target sequence for PDGFRL (NM_006207.1,333-351).
ctgtagagcttcgatgtaa

SEQ ID NO: 206117 - DNA, 19 bp, Homo sapiens
  siRNA target sequence for PDGFRL (NM_006207.1,344-362).
cgatgtaaagggagtagaa

SEQ ID NO: 206118 - DNA, 19 bp, Homo sapiens
  siRNA target sequence for PDGFRL (NM_006207.1,380-398).
gcgtatctggacaccttta

SEQ ID NO: 206119 - DNA, 19 bp, Homo sapiens
  siRNA target sequence for PDGFRL (NM_006207.1,386-404).
ctggacacctttaaggatt

SEQ ID NO: 206120 - DNA, 19 bp, Homo sapiens
  siRNA target sequence for PDGFRL (NM_006207.1,540-558).
cgggctccacctacatctt

SEQ ID NO: 206121 - DNA, 19 bp, Homo sapiens
  siRNA target sequence for PDGFRL (NM_006207.1,542-560).
ggctccacctacatctttt

SEQ ID NO: 206122 - DNA, 19 bp, Homo sapiens
  siRNA target sequence for PDGFRL (NM_006207.1,594-612).
ccagctacttcgatgttgt

SEQ ID NO: 206123 - DNA, 19 bp, Homo sapiens
  siRNA target sequence for PDGFRL (NM_006207.1,714-732).
ccaatggaacggacattgt

SEQ ID NO: 206124 - DNA, 19 bp, Homo sapiens
  siRNA target sequence for PDGFRL (NM_006207.1,715-733).
caatggaacggacattgtt

SEQ ID NO: 206125 - DNA, 19 bp, Homo sapiens
  siRNA target sequence for PDGFRL (NM_006207.1,720-738).
gaacggacattgtttatga

SEQ ID NO: 206126 - DNA, 19 bp, Homo sapiens
  siRNA target sequence for PDGFRL (NM_006207.1,779-797).
caccagggtgtggtttact

SEQ ID NO: 206127 - DNA, 19 bp, Homo sapiens
  siRNA target sequence for PDGFRL (NM_006207.1,822-840).
ctcagatctccgtcaagta

SEQ ID NO: 206128 - DNA, 19 bp, Homo sapiens
  siRNA target sequence for IGF2R (NM_000876.1,282-300).
ccccgagctgtgcagttat

SEQ ID NO: 206129 - DNA, 19 bp, Homo sapiens
  siRNA target sequence for IGF2R (NM_000876.1,283-301).
cccgagctgtgcagttata

SEQ ID NO: 206130 - DNA, 19 bp, Homo sapiens
  siRNA target sequence for IGF2R (NM_000876.1,351-369).
ctgtggaagtgtggatatt

SEQ ID NO: 206131 - DNA, 19 bp, Homo sapiens
  siRNA target sequence for IGF2R (NM_000876.1,353-371).
gtggaagtgtggatattgt

SEQ ID NO: 206132 - DNA, 19 bp, Homo sapiens
  siRNA target sequence for IGF2R (NM_000876.1,408-426).
cttgaagacacgcacttat

SEQ ID NO: 206133 - DNA, 19 bp, Homo sapiens
  siRNA target sequence for IGF2R (NM_000876.1,411-429).
gaagacacgcacttatcat

SEQ ID NO: 206134 - DNA, 19 bp, Homo sapiens
  siRNA target sequence for IGF2R (NM_000876.1,416-434).
cacgcacttatcattcagt

SEQ ID NO: 206135 - DNA, 19 bp, Homo sapiens
  siRNA target sequence for IGF2R (NM_000876.1,660-678).
ggtgccatgctatgtgttt

SEQ ID NO: 206136 - DNA, 19 bp, Homo sapiens
  siRNA target sequence for IGF2R (NM_000876.1,665-683).
catgctatgtgtttgatga

SEQ ID NO: 206137 - DNA, 19 bp, Homo sapiens
  siRNA target sequence for IGF2R (NM_000876.1,750-768).
cgatccggacacttctcta

SEQ ID NO: 206138 - DNA, 19 bp, Homo sapiens
  siRNA target sequence for IGF2R (NM_000876.1,751-769).
gatccggacacttctctat

SEQ ID NO: 206139 - DNA, 19 bp, Homo sapiens
  siRNA target sequence for IGF2R (NM_000876.1,754-772).
ccggacacttctctattca

SEQ ID NO: 206140 - DNA, 19 bp, Homo sapiens
  siRNA target sequence for IGF2R (NM_000876.1,755-773).
cggacacttctctattcat

SEQ ID NO: 206141 - DNA, 19 bp, Homo sapiens
  siRNA target sequence for IGF2R (NM_000876.1,757-775).
gacacttctctattcatca

SEQ ID NO: 206142 - DNA, 19 bp, Homo sapiens
  siRNA target sequence for IGF2R (NM_000876.1,981-999).
cagccctgcggtgactatt

SEQ ID NO: 206143 - DNA, 19 bp, Homo sapiens
  siRNA target sequence for IGF2R (NM_000876.1,984-1002).
ccctgcggtgactattaca

SEQ ID NO: 206144 - DNA, 19 bp, Homo sapiens
  siRNA target sequence for IGF2R (NM_000876.1,985-1003).
cctgcggtgactattacat

SEQ ID NO: 206145 - DNA, 19 bp, Homo sapiens
  siRNA target sequence for IGF2R (NM_000876.1,986-1004).
ctgcggtgactattacatt

SEQ ID NO: 206146 - DNA, 19 bp, Homo sapiens
  siRNA target sequence for IGF2R (NM_000876.1,989-1007).
cggtgactattacatttgt

SEQ ID NO: 206147 - DNA, 19 bp, Homo sapiens
  siRNA target sequence for IGF2R (NM_000876.1,990-1008).
ggtgactattacatttgtt

SEQ ID NO: 206148 - DNA, 19 bp, Homo sapiens
  siRNA target sequence for IGF2R (NM_000876.1,1058-1076).
ccaactgccgctatgaaat

SEQ ID NO: 206149 - DNA, 19 bp, Homo sapiens
  siRNA target sequence for IGF2R (NM_000876.1,1106-1124).
gagattacctggaaagtaa

SEQ ID NO: 206150 - DNA, 19 bp, Homo sapiens
  siRNA target sequence for IGF2R (NM_000876.1,1185-1203).
gagcggaggttcatcctat

SEQ ID NO: 206151 - DNA, 19 bp, Homo sapiens
  siRNA target sequence for IGF2R (NM_000876.1,1187-1205).
gcggaggttcatcctatat

SEQ ID NO: 206152 - DNA, 19 bp, Homo sapiens
  siRNA target sequence for IGF2R (NM_000876.1,1188-1206).
cggaggttcatcctatatt

SEQ ID NO: 206153 - DNA, 19 bp, Homo sapiens
  siRNA target sequence for IGF2R (NM_000876.1,1189-1207).
ggaggttcatcctatattt

SEQ ID NO: 206154 - DNA, 19 bp, Homo sapiens
  siRNA target sequence for IGF2R (NM_000876.1,1307-1325).
gcgatacctctcaagtcaa

SEQ ID NO: 206155 - DNA, 19 bp, Homo sapiens
  siRNA target sequence for IGF2R (NM_000876.1,1308-1326).
cgatacctctcaagtcaaa

SEQ ID NO: 206156 - DNA, 19 bp, Homo sapiens
  siRNA target sequence for IGF2R (NM_000876.1,1331-1349).
caggaagataccacaatca

SEQ ID NO: 206157 - DNA, 19 bp, Homo sapiens
  siRNA target sequence for IGF2R (NM_000876.1,1372-1390).
gacctcaccttgatatatt

SEQ ID NO: 206158 - DNA, 19 bp, Homo sapiens
  siRNA target sequence for IGF2R (NM_000876.1,1420-1438).
cagcggatgagcgtcataa

SEQ ID NO: 206159 - DNA, 19 bp, Homo sapiens
  siRNA target sequence for IGF2R (NM_000876.1,1423-1441).
cggatgagcgtcataaact

SEQ ID NO: 206160 - DNA, 19 bp, Homo sapiens
  siRNA target sequence for IGF2R (NM_000876.1,1424-1442).
ggatgagcgtcataaactt

SEQ ID NO: 206161 - DNA, 19 bp, Homo sapiens
  siRNA target sequence for IGF2R (NM_000876.1,1425-1443).
gatgagcgtcataaacttt

SEQ ID NO: 206162 - DNA, 19 bp, Homo sapiens
  siRNA target sequence for IGF2R (NM_000876.1,1462-1480).
ggtaacgatgggaaaggaa

SEQ ID NO: 206163 - DNA, 19 bp, Homo sapiens
  siRNA target sequence for IGF2R (NM_000876.1,1501-1519).
gttgactgcacctacttct

SEQ ID NO: 206164 - DNA, 19 bp, Homo sapiens
  siRNA target sequence for IGF2R (NM_000876.1,1532-1550).
cggaatacgcctgtgttaa

SEQ ID NO: 206165 - DNA, 19 bp, Homo sapiens
  siRNA target sequence for IGF2R (NM_000876.1,1624-1642).
gcagaaccagagcagaatt

SEQ ID NO: 206166 - DNA, 19 bp, Homo sapiens
  siRNA target sequence for IGF2R (NM_000876.1,1756-1774).
gtgtgtgcagtggataaaa

SEQ ID NO: 206167 - DNA, 19 bp, Homo sapiens
  siRNA target sequence for IGF2R (NM_000876.1,1949-1967).
gggaaggcggttgctttta

SEQ ID NO: 206168 - DNA, 19 bp, Homo sapiens
  siRNA target sequence for IGF2R (NM_000876.1,1950-1968).
ggaaggcggttgcttttat

SEQ ID NO: 206169 - DNA, 19 bp, Homo sapiens
  siRNA target sequence for IGF2R (NM_000876.1,1954-1972).
ggcggttgcttttatgagt

SEQ ID NO: 206170 - DNA, 19 bp, Homo sapiens
  siRNA target sequence for IGF2R (NM_000876.1,1956-1974).
cggttgcttttatgagttt

SEQ ID NO: 206171 - DNA, 19 bp, Homo sapiens
  siRNA target sequence for IGF2R (NM_000876.1,1958-1976).
gttgcttttatgagtttga

SEQ ID NO: 206172 - DNA, 19 bp, Homo sapiens
  siRNA target sequence for IGF2R (NM_000876.1,1991-2009).
cggcctgtgtgctgtctaa

SEQ ID NO: 206173 - DNA, 19 bp, Homo sapiens
  siRNA target sequence for IGF2R (NM_000876.1,2104-2122).
gagacaaagaagtatgact

SEQ ID NO: 206174 - DNA, 19 bp, Homo sapiens
  siRNA target sequence for IGF2R (NM_000876.1,2108-2126).
caaagaagtatgactttta

SEQ ID NO: 206175 - DNA, 19 bp, Homo sapiens
  siRNA target sequence for IGF2R (NM_000876.1,2224-2242).
ctgagtaatgcgaagcttt

SEQ ID NO: 206176 - DNA, 19 bp, Homo sapiens
  siRNA target sequence for IGF2R (NM_000876.1,2228-2246).
gtaatgcgaagctttcata

SEQ ID NO: 206177 - DNA, 19 bp, Homo sapiens
  siRNA target sequence for IGF2R (NM_000876.1,2234-2252).
cgaagctttcatattatga

SEQ ID NO: 206178 - DNA, 19 bp, Homo sapiens
  siRNA target sequence for IGF2R (NM_000876.1,2276-2294).
gaggcggcacaccctataa

SEQ ID NO: 206179 - DNA, 19 bp, Homo sapiens
  siRNA target sequence for IGF2R (NM_000876.1,2279-2297).
gcggcacaccctataacaa

SEQ ID NO: 206180 - DNA, 19 bp, Homo sapiens
  siRNA target sequence for IGF2R (NM_000876.1,2280-2298).
cggcacaccctataacaat

SEQ ID NO: 206181 - DNA, 19 bp, Homo sapiens
  siRNA target sequence for IGF2R (NM_000876.1,2282-2300).
gcacaccctataacaatga

SEQ ID NO: 206182 - DNA, 19 bp, Homo sapiens
  siRNA target sequence for IGF2R (NM_000876.1,2485-2503).
ctctccagtctggcaaaat

SEQ ID NO: 206183 - DNA, 19 bp, Homo sapiens
  siRNA target sequence for IGF2R (NM_000876.1,2489-2507).
ccagtctggcaaaatctga

SEQ ID NO: 206184 - DNA, 19 bp, Homo sapiens
  siRNA target sequence for IGF2R (NM_000876.1,2561-2579).
cgtggaggaaatactacat

SEQ ID NO: 206185 - DNA, 19 bp, Homo sapiens
  siRNA target sequence for IGF2R (NM_000876.1,2562-2580).
gtggaggaaatactacatt

SEQ ID NO: 206186 - DNA, 19 bp, Homo sapiens
  siRNA target sequence for IGF2R (NM_000876.1,2567-2585).
ggaaatactacattaacgt

SEQ ID NO: 206187 - DNA, 19 bp, Homo sapiens
  siRNA target sequence for IGF2R (NM_000876.1,2583-2601).
cgtgtgtcggcctctgaat

SEQ ID NO: 206188 - DNA, 19 bp, Homo sapiens
  siRNA target sequence for IGF2R (NM_000876.1,2610-2628).
gggctgcaaccgatatgca

SEQ ID NO: 206189 - DNA, 19 bp, Homo sapiens
  siRNA target sequence for IGF2R (NM_000876.1,2611-2629).
ggctgcaaccgatatgcat

SEQ ID NO: 206190 - DNA, 19 bp, Homo sapiens
  siRNA target sequence for IGF2R (NM_000876.1,2627-2645).
catcggcttgccagatgaa

SEQ ID NO: 206191 - DNA, 19 bp, Homo sapiens
  siRNA target sequence for IGF2R (NM_000876.1,2630-2648).
cggcttgccagatgaagta

SEQ ID NO: 206192 - DNA, 19 bp, Homo sapiens
  siRNA target sequence for IGF2R (NM_000876.1,2938-2956).
gaccaggcttgctctataa

SEQ ID NO: 206193 - DNA, 19 bp, Homo sapiens
  siRNA target sequence for IGF2R (NM_000876.1,2986-3004).
cttaatccgctaaacagtt

SEQ ID NO: 206194 - DNA, 19 bp, Homo sapiens
  siRNA target sequence for IGF2R (NM_000876.1,3002-3020).
gttcgcaaggatataacgt

SEQ ID NO: 206195 - DNA, 19 bp, Homo sapiens
  siRNA target sequence for IGF2R (NM_000876.1,3111-3129).
ggcagaaacccaaactgaa

SEQ ID NO: 206196 - DNA, 19 bp, Homo sapiens
  siRNA target sequence for IGF2R (NM_000876.1,3152-3170).
caaggccagtcggaattga

SEQ ID NO: 206197 - DNA, 19 bp, Homo sapiens
  siRNA target sequence for IGF2R (NM_000876.1,3157-3175).
ccagtcggaattgagaaaa

SEQ ID NO: 206198 - DNA, 19 bp, Homo sapiens
  siRNA target sequence for IGF2R (NM_000876.1,3223-3241).
cctctctctgccaaaggta

SEQ ID NO: 206199 - DNA, 19 bp, Homo sapiens
  siRNA target sequence for IGF2R (NM_000876.1,3238-3256).
ggtaccgctgatgctttta

SEQ ID NO: 206200 - DNA, 19 bp, Homo sapiens
  siRNA target sequence for IGF2R (NM_000876.1,3242-3260).
ccgctgatgcttttatcgt

SEQ ID NO: 206201 - DNA, 19 bp, Homo sapiens
  siRNA target sequence for IGF2R (NM_000876.1,3258-3276).
cgtccgctttgtttgcaat

SEQ ID NO: 206202 - DNA, 19 bp, Homo sapiens
  siRNA target sequence for IGF2R (NM_000876.1,3300-3318).
caaattcctgcatcaagat

SEQ ID NO: 206203 - DNA, 19 bp, Homo sapiens
  siRNA target sequence for IGF2R (NM_000876.1,3330-3348).
gcaagggatccgaaacact

SEQ ID NO: 206204 - DNA, 19 bp, Homo sapiens
  siRNA target sequence for IGF2R (NM_000876.1,3331-3349).
caagggatccgaaacactt

SEQ ID NO: 206205 - DNA, 19 bp, Homo sapiens
  siRNA target sequence for IGF2R (NM_000876.1,3334-3352).
gggatccgaaacacttact

SEQ ID NO: 206206 - DNA, 19 bp, Homo sapiens
  siRNA target sequence for IGF2R (NM_000876.1,3335-3353).
ggatccgaaacacttactt

SEQ ID NO: 206207 - DNA, 19 bp, Homo sapiens
  siRNA target sequence for IGF2R (NM_000876.1,3336-3354).
gatccgaaacacttacttt

SEQ ID NO: 206208 - DNA, 19 bp, Homo sapiens
  siRNA target sequence for IGF2R (NM_000876.1,3340-3358).
cgaaacacttactttgagt

SEQ ID NO: 206209 - DNA, 19 bp, Homo sapiens
  siRNA target sequence for IGF2R (NM_000876.1,3341-3359).
gaaacacttactttgagtt

SEQ ID NO: 206210 - DNA, 19 bp, Homo sapiens
  siRNA target sequence for IGF2R (NM_000876.1,3407-3425).
ccgacctggctggaaatga

SEQ ID NO: 206211 - DNA, 19 bp, Homo sapiens
  siRNA target sequence for IGF2R (NM_000876.1,3521-3539).
gcaatcctctcccttacat

SEQ ID NO: 206212 - DNA, 19 bp, Homo sapiens
  siRNA target sequence for IGF2R (NM_000876.1,3562-3580).
gtggggtcttgcttagtgt

SEQ ID NO: 206213 - DNA, 19 bp, Homo sapiens
  siRNA target sequence for IGF2R (NM_000876.1,3577-3595).
gtgtcagaaggcaatagct

SEQ ID NO: 206214 - DNA, 19 bp, Homo sapiens
  siRNA target sequence for IGF2R (NM_000876.1,3640-3658).
ggatctttgagcatcatgt

SEQ ID NO: 206215 - DNA, 19 bp, Homo sapiens
  siRNA target sequence for IGF2R (NM_000876.1,3641-3659).
gatctttgagcatcatgta

SEQ ID NO: 206216 - DNA, 19 bp, Homo sapiens
  siRNA target sequence for IGF2R (NM_000876.1,3708-3726).
gtttgagtgtgctcagata

SEQ ID NO: 206217 - DNA, 19 bp, Homo sapiens
  siRNA target sequence for IGF2R (NM_000876.1,3758-3776).
gttgtgagtacgtgtttat

SEQ ID NO: 206218 - DNA, 19 bp, Homo sapiens
  siRNA target sequence for IGF2R (NM_000876.1,3841-3859).
ccaaggcatggcaacttgt

SEQ ID NO: 206219 - DNA, 19 bp, Homo sapiens
  siRNA target sequence for IGF2R (NM_000876.1,3842-3860).
caaggcatggcaacttgta

SEQ ID NO: 206220 - DNA, 19 bp, Homo sapiens
  siRNA target sequence for IGF2R (NM_000876.1,3845-3863).
ggcatggcaacttgtatga

SEQ ID NO: 206221 - DNA, 19 bp, Homo sapiens
  siRNA target sequence for IGF2R (NM_000876.1,3895-3913).
gtgagcgctggcgaataca

SEQ ID NO: 206222 - DNA, 19 bp, Homo sapiens
  siRNA target sequence for IGF2R (NM_000876.1,3897-3915).
gagcgctggcgaatacact

SEQ ID NO: 206223 - DNA, 19 bp, Homo sapiens
  siRNA target sequence for IGF2R (NM_000876.1,3899-3917).
gcgctggcgaatacactta

SEQ ID NO: 206224 - DNA, 19 bp, Homo sapiens
  siRNA target sequence for IGF2R (NM_000876.1,3900-3918).
cgctggcgaatacacttat

SEQ ID NO: 206225 - DNA, 19 bp, Homo sapiens
  siRNA target sequence for IGF2R (NM_000876.1,3901-3919).
gctggcgaatacacttatt

SEQ ID NO: 206226 - DNA, 19 bp, Homo sapiens
  siRNA target sequence for IGF2R (NM_000876.1,3902-3920).
ctggcgaatacacttatta

SEQ ID NO: 206227 - DNA, 19 bp, Homo sapiens
  siRNA target sequence for IGF2R (NM_000876.1,3904-3922).
ggcgaatacacttattact

SEQ ID NO: 206228 - DNA, 19 bp, Homo sapiens
  siRNA target sequence for IGF2R (NM_000876.1,3905-3923).
gcgaatacacttattactt

SEQ ID NO: 206229 - DNA, 19 bp, Homo sapiens
  siRNA target sequence for IGF2R (NM_000876.1,4004-4022).
gggaaccgcagggatttca

SEQ ID NO: 206230 - DNA, 19 bp, Homo sapiens
  siRNA target sequence for IGF2R (NM_000876.1,4010-4028).
cgcagggatttcacaaagt

SEQ ID NO: 206231 - DNA, 19 bp, Homo sapiens
  siRNA target sequence for IGF2R (NM_000876.1,4036-4054).
ctcctgactcagaagctaa

SEQ ID NO: 206232 - DNA, 19 bp, Homo sapiens
  siRNA target sequence for IGF2R (NM_000876.1,4041-4059).
gactcagaagctaacttat

SEQ ID NO: 206233 - DNA, 19 bp, Homo sapiens
  siRNA target sequence for IGF2R (NM_000876.1,4043-4061).
ctcagaagctaacttatga

SEQ ID NO: 206234 - DNA, 19 bp, Homo sapiens
  siRNA target sequence for IGF2R (NM_000876.1,4094-4112).
gggacacttgccataaggt

SEQ ID NO: 206235 - DNA, 19 bp, Homo sapiens
  siRNA target sequence for IGF2R (NM_000876.1,4095-4113).
ggacacttgccataaggtt

SEQ ID NO: 206236 - DNA, 19 bp, Homo sapiens
  siRNA target sequence for IGF2R (NM_000876.1,4096-4114).
gacacttgccataaggttt

SEQ ID NO: 206237 - DNA, 19 bp, Homo sapiens
  siRNA target sequence for IGF2R (NM_000876.1,4154-4172).
gcacccagcggccagtatt

SEQ ID NO: 206238 - DNA, 19 bp, Homo sapiens
  siRNA target sequence for IGF2R (NM_000876.1,4155-4173).
cacccagcggccagtattt

SEQ ID NO: 206239 - DNA, 19 bp, Homo sapiens
  siRNA target sequence for IGF2R (NM_000876.1,4157-4175).
cccagcggccagtatttct

SEQ ID NO: 206240 - DNA, 19 bp, Homo sapiens
  siRNA target sequence for IGF2R (NM_000876.1,4158-4176).
ccagcggccagtatttcta

SEQ ID NO: 206241 - DNA, 19 bp, Homo sapiens
  siRNA target sequence for IGF2R (NM_000876.1,4239-4257).
cgatctgactgaatgttca

SEQ ID NO: 206242 - DNA, 19 bp, Homo sapiens
  siRNA target sequence for IGF2R (NM_000876.1,4240-4258).
gatctgactgaatgttcat

SEQ ID NO: 206243 - DNA, 19 bp, Homo sapiens
  siRNA target sequence for IGF2R (NM_000876.1,4243-4261).
ctgactgaatgttcattca

SEQ ID NO: 206244 - DNA, 19 bp, Homo sapiens
  siRNA target sequence for IGF2R (NM_000876.1,4247-4265).
ctgaatgttcattcaaaga

SEQ ID NO: 206245 - DNA, 19 bp, Homo sapiens
  siRNA target sequence for IGF2R (NM_000876.1,4346-4364).
cggagcactacctcatcaa

SEQ ID NO: 206246 - DNA, 19 bp, Homo sapiens
  siRNA target sequence for IGF2R (NM_000876.1,4512-4530).
cgttgatggcgacttatgt

SEQ ID NO: 206247 - DNA, 19 bp, Homo sapiens
  siRNA target sequence for IGF2R (NM_000876.1,4532-4550).
cagatgggattcggaaaaa

SEQ ID NO: 206248 - DNA, 19 bp, Homo sapiens
  siRNA target sequence for IGF2R (NM_000876.1,4537-4555).
gggattcggaaaaagtcaa

SEQ ID NO: 206249 - DNA, 19 bp, Homo sapiens
  siRNA target sequence for IGF2R (NM_000876.1,4713-4731).
cacaggacacctgtttgat

SEQ ID NO: 206250 - DNA, 19 bp, Homo sapiens
  siRNA target sequence for IGF2R (NM_000876.1,4715-4733).
caggacacctgtttgatct

SEQ ID NO: 206251 - DNA, 19 bp, Homo sapiens
  siRNA target sequence for IGF2R (NM_000876.1,4775-4793).
gcgagaaggggttggttta

SEQ ID NO: 206252 - DNA, 19 bp, Homo sapiens
  siRNA target sequence for IGF2R (NM_000876.1,4953-4971).
cggcctgagctataagagt

SEQ ID NO: 206253 - DNA, 19 bp, Homo sapiens
  siRNA target sequence for IGF2R (NM_000876.1,5109-5127).
gaggaatggaagctctatt

SEQ ID NO: 206254 - DNA, 19 bp, Homo sapiens
  siRNA target sequence for IGF2R (NM_000876.1,5111-5129).
ggaatggaagctctattgt

SEQ ID NO: 206255 - DNA, 19 bp, Homo sapiens
  siRNA target sequence for IGF2R (NM_000876.1,5117-5135).
gaagctctattgttgactt

SEQ ID NO: 206256 - DNA, 19 bp, Homo sapiens
  siRNA target sequence for IGF2R (NM_000876.1,5133-5151).
cttgtctccccttattcat

SEQ ID NO: 206257 - DNA, 19 bp, Homo sapiens
  siRNA target sequence for IGF2R (NM_000876.1,5198-5216).
ccgataccaaccctgattt

SEQ ID NO: 206258 - DNA, 19 bp, Homo sapiens
  siRNA target sequence for IGF2R (NM_000876.1,5200-5218).
gataccaaccctgatttct

SEQ ID NO: 206259 - DNA, 19 bp, Homo sapiens
  siRNA target sequence for IGF2R (NM_000876.1,5279-5297).
ctgtgtgcaaagttcctat

SEQ ID NO: 206260 - DNA, 19 bp, Homo sapiens
  siRNA target sequence for IGF2R (NM_000876.1,5299-5317).
gatggtccccccatagata

SEQ ID NO: 206261 - DNA, 19 bp, Homo sapiens
  siRNA target sequence for IGF2R (NM_000876.1,5325-5343).
ggtagcaggaccaccaata

SEQ ID NO: 206262 - DNA, 19 bp, Homo sapiens
  siRNA target sequence for IGF2R (NM_000876.1,5335-5353).
ccaccaatactcaatccaa

SEQ ID NO: 206263 - DNA, 19 bp, Homo sapiens
  siRNA target sequence for IGF2R (NM_000876.1,5336-5354).
caccaatactcaatccaat

SEQ ID NO: 206264 - DNA, 19 bp, Homo sapiens
  siRNA target sequence for IGF2R (NM_000876.1,5351-5369).
caatagcaaatgagattta

SEQ ID NO: 206265 - DNA, 19 bp, Homo sapiens
  siRNA target sequence for IGF2R (NM_000876.1,5396-5414).
gcttagcggacaagcattt

SEQ ID NO: 206266 - DNA, 19 bp, Homo sapiens
  siRNA target sequence for IGF2R (NM_000876.1,5401-5419).
gcggacaagcatttcaact

SEQ ID NO: 206267 - DNA, 19 bp, Homo sapiens
  siRNA target sequence for IGF2R (NM_000876.1,5402-5420).
cggacaagcatttcaacta

SEQ ID NO: 206268 - DNA, 19 bp, Homo sapiens
  siRNA target sequence for IGF2R (NM_000876.1,5433-5451).
cgcgtttcactgtaagaga

SEQ ID NO: 206269 - DNA, 19 bp, Homo sapiens
  siRNA target sequence for IGF2R (NM_000876.1,5464-5482).
ggaacgcctaagctgttaa

SEQ ID NO: 206270 - DNA, 19 bp, Homo sapiens
  siRNA target sequence for IGF2R (NM_000876.1,5486-5504).
ccagcgagtgcgactttgt

SEQ ID NO: 206271 - DNA, 19 bp, Homo sapiens
  siRNA target sequence for IGF2R (NM_000876.1,5578-5596).
ctcctctacagcttcaact

SEQ ID NO: 206272 - DNA, 19 bp, Homo sapiens
  siRNA target sequence for IGF2R (NM_000876.1,5609-5627).
ccacgagcacctttaaggt

SEQ ID NO: 206273 - DNA, 19 bp, Homo sapiens
  siRNA target sequence for IGF2R (NM_000876.1,5746-5764).
ggacggctgcaatcaatga

SEQ ID NO: 206274 - DNA, 19 bp, Homo sapiens
  siRNA target sequence for IGF2R (NM_000876.1,5747-5765).
gacggctgcaatcaatgaa

SEQ ID NO: 206275 - DNA, 19 bp, Homo sapiens
  siRNA target sequence for IGF2R (NM_000876.1,5750-5768).
ggctgcaatcaatgaaact

SEQ ID NO: 206276 - DNA, 19 bp, Homo sapiens
  siRNA target sequence for IGF2R (NM_000876.1,5784-5802).
ggatgaagcggtcgtttta

SEQ ID NO: 206277 - DNA, 19 bp, Homo sapiens
  siRNA target sequence for IGF2R (NM_000876.1,5785-5803).
gatgaagcggtcgttttaa

SEQ ID NO: 206278 - DNA, 19 bp, Homo sapiens
  siRNA target sequence for IGF2R (NM_000876.1,5788-5806).
gaagcggtcgttttaagtt

SEQ ID NO: 206279 - DNA, 19 bp, Homo sapiens
  siRNA target sequence for IGF2R (NM_000876.1,5857-5875).
gtcttccccttcatattca

SEQ ID NO: 206280 - DNA, 19 bp, Homo sapiens
  siRNA target sequence for IGF2R (NM_000876.1,5886-5904).
ctacgaggagtgcatcata

SEQ ID NO: 206281 - DNA, 19 bp, Homo sapiens
  siRNA target sequence for IGF2R (NM_000876.1,5991-6009).
ccggacatccagcatcata

SEQ ID NO: 206282 - DNA, 19 bp, Homo sapiens
  siRNA target sequence for IGF2R (NM_000876.1,5992-6010).
cggacatccagcatcatat

SEQ ID NO: 206283 - DNA, 19 bp, Homo sapiens
  siRNA target sequence for IGF2R (NM_000876.1,6204-6222).
caacggagtctcgtactat

SEQ ID NO: 206284 - DNA, 19 bp, Homo sapiens
  siRNA target sequence for IGF2R (NM_000876.1,6207-6225).
cggagtctcgtactatata

SEQ ID NO: 206285 - DNA, 19 bp, Homo sapiens
  siRNA target sequence for IGF2R (NM_000876.1,6208-6226).
ggagtctcgtactatataa

SEQ ID NO: 206286 - DNA, 19 bp, Homo sapiens
  siRNA target sequence for IGF2R (NM_000876.1,6209-6227).
gagtctcgtactatataaa

SEQ ID NO: 206287 - DNA, 19 bp, Homo sapiens
  siRNA target sequence for IGF2R (NM_000876.1,6333-6351).
gcagaagctgggtgtcata

SEQ ID NO: 206288 - DNA, 19 bp, Homo sapiens
  siRNA target sequence for IGF2R (NM_000876.1,6367-6385).
gtcacgtactccaaaggtt

SEQ ID NO: 206289 - DNA, 19 bp, Homo sapiens
  siRNA target sequence for IGF2R (NM_000876.1,6369-6387).
cacgtactccaaaggttat

SEQ ID NO: 206290 - DNA, 19 bp, Homo sapiens
  siRNA target sequence for IGF2R (NM_000876.1,6388-6406).
ccgtgtggtggaaataaga

SEQ ID NO: 206291 - DNA, 19 bp, Homo sapiens
  siRNA target sequence for IGF2R (NM_000876.1,6407-6425).
ccgcatcctccgtgataga

SEQ ID NO: 206292 - DNA, 19 bp, Homo sapiens
  siRNA target sequence for IGF2R (NM_000876.1,6424-6442).
gaattgacctgtacaaaga

SEQ ID NO: 206293 - DNA, 19 bp, Homo sapiens
  siRNA target sequence for IGF2R (NM_000876.1,6587-6605).
gcttcagcctcggagatat

SEQ ID NO: 206294 - DNA, 19 bp, Homo sapiens
  siRNA target sequence for IGF2R (NM_000876.1,6588-6606).
cttcagcctcggagatatt

SEQ ID NO: 206295 - DNA, 19 bp, Homo sapiens
  siRNA target sequence for IGF2R (NM_000876.1,6591-6609).
cagcctcggagatatttat

SEQ ID NO: 206296 - DNA, 19 bp, Homo sapiens
  siRNA target sequence for IGF2R (NM_000876.1,6776-6794).
ctgacaagaccaagtacta

SEQ ID NO: 206297 - DNA, 19 bp, Homo sapiens
  siRNA target sequence for IGF2R (NM_000876.1,6785-6803).
ccaagtactaccttcaaga

SEQ ID NO: 206298 - DNA, 19 bp, Homo sapiens
  siRNA target sequence for IGF2R (NM_000876.1,6834-6852).
ctctaagtgcggaaaggat

SEQ ID NO: 206299 - DNA, 19 bp, Homo sapiens
  siRNA target sequence for IGF2R (NM_000876.1,6836-6854).
ctaagtgcggaaaggataa

SEQ ID NO: 206300 - DNA, 19 bp, Homo sapiens
  siRNA target sequence for IGF2R (NM_000876.1,6850-6868).
gataagaccaagtctgttt

SEQ ID NO: 206301 - DNA, 19 bp, Homo sapiens
  siRNA target sequence for IGF2R (NM_000876.1,7187-7205).
ccaacgtgtcctacaaata

SEQ ID NO: 206302 - DNA, 19 bp, Homo sapiens
  siRNA target sequence for IGF2R (NM_000876.1,7191-7209).
cgtgtcctacaaatactca

SEQ ID NO: 206303 - DNA, 19 bp, Homo sapiens
  siRNA target sequence for IGF2R (NM_000876.1,7192-7210).
gtgtcctacaaatactcaa

SEQ ID NO: 206304 - DNA, 19 bp, Homo sapiens
  siRNA target sequence for IGF2R (NM_000876.1,7306-7324).
gagaacggccatattacca

SEQ ID NO: 206305 - DNA, 19 bp, Homo sapiens
  siRNA target sequence for IGF2R (NM_000876.1,7439-7457).
gctcccacccagtgagaaa

SEQ ID NO: 206306 - DNA, 19 bp, Homo sapiens
  siRNA target sequence for CRKL (NM_005207.2,537-555).
gaccgctccgcctggtata

SEQ ID NO: 206307 - DNA, 19 bp, Homo sapiens
  siRNA target sequence for CRKL (NM_005207.2,598-616).
gccagcgccacggtatgtt

SEQ ID NO: 206308 - DNA, 19 bp, Homo sapiens
  siRNA target sequence for CRKL (NM_005207.2,705-723).
ctgcccaaccgccgtttta

SEQ ID NO: 206309 - DNA, 19 bp, Homo sapiens
  siRNA target sequence for CRKL (NM_005207.2,708-726).
cccaaccgccgttttaaga

SEQ ID NO: 206310 - DNA, 19 bp, Homo sapiens
  siRNA target sequence for CRKL (NM_005207.2,709-727).
ccaaccgccgttttaagat

SEQ ID NO: 206311 - DNA, 19 bp, Homo sapiens
  siRNA target sequence for CRKL (NM_005207.2,757-775).
ccctgctggagttttacaa

SEQ ID NO: 206312 - DNA, 19 bp, Homo sapiens
  siRNA target sequence for CRKL (NM_005207.2,810-828).
cctgcgcccaggtatccaa

SEQ ID NO: 206313 - DNA, 19 bp, Homo sapiens
  siRNA target sequence for CRKL (NM_005207.2,871-889).
cagaagataacctggaata

SEQ ID NO: 206314 - DNA, 19 bp, Homo sapiens
  siRNA target sequence for CRKL (NM_005207.2,891-909).
gtacggactctgtatgatt

SEQ ID NO: 206315 - DNA, 19 bp, Homo sapiens
  siRNA target sequence for CRKL (NM_005207.2,896-914).
gactctgtatgattttcct

SEQ ID NO: 206316 - DNA, 19 bp, Homo sapiens
  siRNA target sequence for CRKL (NM_005207.2,925-943).
ccgaagacctgccctttaa

SEQ ID NO: 206317 - DNA, 19 bp, Homo sapiens
  siRNA target sequence for CRKL (NM_005207.2,948-966).
ggtgagatcctagtgataa

SEQ ID NO: 206318 - DNA, 19 bp, Homo sapiens
  siRNA target sequence for CRKL (NM_005207.2,949-967).
gtgagatcctagtgataat

SEQ ID NO: 206319 - DNA, 19 bp, Homo sapiens
  siRNA target sequence for CRKL (NM_005207.2,1068-1086).
cacggaaagcatggaaata

SEQ ID NO: 206320 - DNA, 19 bp, Homo sapiens
  siRNA target sequence for CRKL (NM_005207.2,1077-1095).
catggaaataggaattcca

SEQ ID NO: 206321 - DNA, 19 bp, Homo sapiens
  siRNA target sequence for CRKL (NM_005207.2,1111-1129).
cagaacctgctcatgcata

SEQ ID NO: 206322 - DNA, 19 bp, Homo sapiens
  siRNA target sequence for CRKL (NM_005207.2,1218-1236).
cctgtctttgcgaaagcaa

SEQ ID NO: 206323 - DNA, 19 bp, Homo sapiens
  siRNA target sequence for CRKL (NM_005207.2,1219-1237).
ctgtctttgcgaaagcaat

SEQ ID NO: 206324 - DNA, 19 bp, Homo sapiens
  siRNA target sequence for CRKL (NM_005207.2,1227-1245).
gcgaaagcaatccagaaaa

SEQ ID NO: 206325 - DNA, 19 bp, Homo sapiens
  siRNA target sequence for CRKL (NM_005207.2,1248-1266).
gtaccctgtgcttatgaca

SEQ ID NO: 206326 - DNA, 19 bp, Homo sapiens
  siRNA target sequence for CRKL (NM_005207.2,1305-1323).
gtcacaaggatgaatataa

SEQ ID NO: 206327 - DNA, 19 bp, Homo sapiens
  siRNA target sequence for CRKL (NM_005207.2,1307-1325).
cacaaggatgaatataaat

SEQ ID NO: 206328 - DNA, 19 bp, Homo sapiens
  siRNA target sequence for CRKL (NM_005207.2,1368-1386).
ccctttacgcacgtcaaaa

SEQ ID NO: 206329 - DNA, 19 bp, Homo sapiens
  siRNA target sequence for CRKL (NM_005207.2,1369-1387).
cctttacgcacgtcaaaat

SEQ ID NO: 206330 - DNA, 19 bp, Homo sapiens
  siRNA target sequence for CRKL (NM_005207.2,1375-1393).
cgcacgtcaaaatctttga

SEQ ID NO: 206331 - DNA, 19 bp, Homo sapiens
  siRNA target sequence for WIF1 (NM_007191.2,215-233).
gaggagagcctgtacctat

SEQ ID NO: 206332 - DNA, 19 bp, Homo sapiens
  siRNA target sequence for WIF1 (NM_007191.2,247-265).
ccaggcaagagtactcata

SEQ ID NO: 206333 - DNA, 19 bp, Homo sapiens
  siRNA target sequence for WIF1 (NM_007191.2,251-269).
gcaagagtactcataggat

SEQ ID NO: 206334 - DNA, 19 bp, Homo sapiens
  siRNA target sequence for WIF1 (NM_007191.2,252-270).
caagagtactcataggatt

SEQ ID NO: 206335 - DNA, 19 bp, Homo sapiens
  siRNA target sequence for WIF1 (NM_007191.2,255-273).
gagtactcataggatttga

SEQ ID NO: 206336 - DNA, 19 bp, Homo sapiens
  siRNA target sequence for WIF1 (NM_007191.2,307-325).
ggcaccttttacacatgat

SEQ ID NO: 206337 - DNA, 19 bp, Homo sapiens
  siRNA target sequence for WIF1 (NM_007191.2,311-329).
ccttttacacatgatttca

SEQ ID NO: 206338 - DNA, 19 bp, Homo sapiens
  siRNA target sequence for WIF1 (NM_007191.2,354-372).
ctattcctgtcaatatcca

SEQ ID NO: 206339 - DNA, 19 bp, Homo sapiens
  siRNA target sequence for WIF1 (NM_007191.2,371-389).
cattccatgaattttacct

SEQ ID NO: 206340 - DNA, 19 bp, Homo sapiens
  siRNA target sequence for WIF1 (NM_007191.2,402-420).
ggcaggcagaatacttcta

SEQ ID NO: 206341 - DNA, 19 bp, Homo sapiens
  siRNA target sequence for WIF1 (NM_007191.2,432-450).
ccttgcgctccctggataa

SEQ ID NO: 206342 - DNA, 19 bp, Homo sapiens
  siRNA target sequence for WIF1 (NM_007191.2,433-451).
cttgcgctccctggataaa

SEQ ID NO: 206343 - DNA, 19 bp, Homo sapiens
  siRNA target sequence for WIF1 (NM_007191.2,462-480).
cagatccaaccgtcaatgt

SEQ ID NO: 206344 - DNA, 19 bp, Homo sapiens
  siRNA target sequence for WIF1 (NM_007191.2,528-546).
gtttcccatgtcttggaaa

SEQ ID NO: 206345 - DNA, 19 bp, Homo sapiens
  siRNA target sequence for WIF1 (NM_007191.2,580-598).
gattgttatgaattctgaa

SEQ ID NO: 206346 - DNA, 19 bp, Homo sapiens
  siRNA target sequence for WIF1 (NM_007191.2,759-777).
gtaccccacgatgtatgaa

SEQ ID NO: 206347 - DNA, 19 bp, Homo sapiens
  siRNA target sequence for WIF1 (NM_007191.2,883-901).
ctgtttctaccctggaaaa

SEQ ID NO: 206348 - DNA, 19 bp, Homo sapiens
  siRNA target sequence for WIF1 (NM_007191.2,971-989).
ggaggtaaatgcattggta

SEQ ID NO: 206349 - DNA, 19 bp, Homo sapiens
  siRNA target sequence for WIF1 (NM_007191.2,972-990).
gaggtaaatgcattggtaa

SEQ ID NO: 206350 - DNA, 19 bp, Homo sapiens
  siRNA target sequence for WIF1 (NM_007191.2,974-992).
ggtaaatgcattggtaaaa

SEQ ID NO: 206351 - DNA, 19 bp, Homo sapiens
  siRNA target sequence for WIF1 (NM_007191.2,982-1000).
cattggtaaaagcaaatgt

SEQ ID NO: 206352 - DNA, 19 bp, Homo sapiens
  siRNA target sequence for WIF1 (NM_007191.2,1075-1093).
ctgccatgaacccaacaaa

SEQ ID NO: 206353 - DNA, 19 bp, Homo sapiens
  siRNA target sequence for WIF1 (NM_007191.2,1122-1140).
gacactgcaataaaaggta

SEQ ID NO: 206354 - DNA, 19 bp, Homo sapiens
  siRNA target sequence for WIF1 (NM_007191.2,1141-1159).
cgaagccagcctcatacat

SEQ ID NO: 206355 - DNA, 19 bp, Homo sapiens
  siRNA target sequence for WIF1 (NM_007191.2,1192-1210).
gcacacgccttcacttaaa

SEQ ID NO: 206356 - DNA, 19 bp, Homo sapiens
  siRNA target sequence for WIF1 (NM_007191.2,1193-1211).
cacacgccttcacttaaaa

SEQ ID NO: 206357 - DNA, 19 bp, Homo sapiens
  siRNA target sequence for WIF1 (NM_007191.2,1228-1246).
ggatccacctgaatccaat

SEQ ID NO: 206358 - DNA, 19 bp, Homo sapiens
  siRNA target sequence for C9orf39 (NM_017738.1,291-309).
cagctgaaagtatatcata

SEQ ID NO: 206359 - DNA, 19 bp, Homo sapiens
  siRNA target sequence for C9orf39 (NM_017738.1,300-318).
gtatatcatatcaaaaact

SEQ ID NO: 206360 - DNA, 19 bp, Homo sapiens
  siRNA target sequence for C9orf39 (NM_017738.1,366-384).
ctatgctccggcaaagtgt

SEQ ID NO: 206361 - DNA, 19 bp, Homo sapiens
  siRNA target sequence for C9orf39 (NM_017738.1,371-389).
ctccggcaaagtgttacta

SEQ ID NO: 206362 - DNA, 19 bp, Homo sapiens
  siRNA target sequence for C9orf39 (NM_017738.1,373-391).
ccggcaaagtgttactaat

SEQ ID NO: 206363 - DNA, 19 bp, Homo sapiens
  siRNA target sequence for C9orf39 (NM_017738.1,375-393).
ggcaaagtgttactaatct

SEQ ID NO: 206364 - DNA, 19 bp, Homo sapiens
  siRNA target sequence for C9orf39 (NM_017738.1,418-436).
gcaagaaaatgctaagtta

SEQ ID NO: 206365 - DNA, 19 bp, Homo sapiens
  siRNA target sequence for C9orf39 (NM_017738.1,515-533).
cctcatcgcccatccttat

SEQ ID NO: 206366 - DNA, 19 bp, Homo sapiens
  siRNA target sequence for C9orf39 (NM_017738.1,518-536).
catcgcccatccttatcaa

SEQ ID NO: 206367 - DNA, 19 bp, Homo sapiens
  siRNA target sequence for C9orf39 (NM_017738.1,537-555).
gcttagaaacgttaatggt

SEQ ID NO: 206368 - DNA, 19 bp, Homo sapiens
  siRNA target sequence for C9orf39 (NM_017738.1,538-556).
cttagaaacgttaatggtt

SEQ ID NO: 206369 - DNA, 19 bp, Homo sapiens
  siRNA target sequence for C9orf39 (NM_017738.1,567-585).
ctgaaattgagtatttaca

SEQ ID NO: 206370 - DNA, 19 bp, Homo sapiens
  siRNA target sequence for C9orf39 (NM_017738.1,689-707).
gaaccacctgtgaaacgtt

SEQ ID NO: 206371 - DNA, 19 bp, Homo sapiens
  siRNA target sequence for C9orf39 (NM_017738.1,721-739).
cccaaagagctctttcaca

SEQ ID NO: 206372 - DNA, 19 bp, Homo sapiens
  siRNA target sequence for C9orf39 (NM_017738.1,855-873).
gcaaggaacggctacagat

SEQ ID NO: 206373 - DNA, 19 bp, Homo sapiens
  siRNA target sequence for C9orf39 (NM_017738.1,863-881).
cggctacagatgttacaga

SEQ ID NO: 206374 - DNA, 19 bp, Homo sapiens
  siRNA target sequence for C9orf39 (NM_017738.1,882-900).
ccaactacagagcagtaaa

SEQ ID NO: 206375 - DNA, 19 bp, Homo sapiens
  siRNA target sequence for C9orf39 (NM_017738.1,883-901).
caactacagagcagtaaaa

SEQ ID NO: 206376 - DNA, 19 bp, Homo sapiens
  siRNA target sequence for C9orf39 (NM_017738.1,891-909).
gagcagtaaaagagcaatt

SEQ ID NO: 206377 - DNA, 19 bp, Homo sapiens
  siRNA target sequence for C9orf39 (NM_017738.1,927-945).
gcagtggcatgactgaaat

SEQ ID NO: 206378 - DNA, 19 bp, Homo sapiens
  siRNA target sequence for C9orf39 (NM_017738.1,960-978).
gagcagatccccaacaact

SEQ ID NO: 206379 - DNA, 19 bp, Homo sapiens
  siRNA target sequence for C9orf39 (NM_017738.1,970-988).
ccaacaacttcgacaagaa

SEQ ID NO: 206380 - DNA, 19 bp, Homo sapiens
  siRNA target sequence for C9orf39 (NM_017738.1,974-992).
caacttcgacaagaagatt

SEQ ID NO: 206381 - DNA, 19 bp, Homo sapiens
  siRNA target sequence for C9orf39 (NM_017738.1,1005-1023).
ggaatgaactggcatattt

SEQ ID NO: 206382 - DNA, 19 bp, Homo sapiens
  siRNA target sequence for C9orf39 (NM_017738.1,1029-1047).
gggaaaaccaggagctaat

SEQ ID NO: 206383 - DNA, 19 bp, Homo sapiens
  siRNA target sequence for C9orf39 (NM_017738.1,1043-1061).
ctaatgattcaaaagatga

SEQ ID NO: 206384 - DNA, 19 bp, Homo sapiens
  siRNA target sequence for C9orf39 (NM_017738.1,1112-1130).
gcagcaatacaagaattga

SEQ ID NO: 206385 - DNA, 19 bp, Homo sapiens
  siRNA target sequence for C9orf39 (NM_017738.1,1115-1133).
gcaatacaagaattgaata

SEQ ID NO: 206386 - DNA, 19 bp, Homo sapiens
  siRNA target sequence for C9orf39 (NM_017738.1,1154-1172).
gaagaacagctctttagat

SEQ ID NO: 206387 - DNA, 19 bp, Homo sapiens
  siRNA target sequence for C9orf39 (NM_017738.1,1198-1216).
gagtactccagagaagaat

SEQ ID NO: 206388 - DNA, 19 bp, Homo sapiens
  siRNA target sequence for C9orf39 (NM_017738.1,1262-1280).
gaaaatcggctgaaatctt

SEQ ID NO: 206389 - DNA, 19 bp, Homo sapiens
  siRNA target sequence for C9orf39 (NM_017738.1,1268-1286).
cggctgaaatcttttgaga

SEQ ID NO: 206390 - DNA, 19 bp, Homo sapiens
  siRNA target sequence for C9orf39 (NM_017738.1,1283-1301).
gagaaaaggtcgagaaaat

SEQ ID NO: 206391 - DNA, 19 bp, Homo sapiens
  siRNA target sequence for C9orf39 (NM_017738.1,1290-1308).
ggtcgagaaaattaaaaga

SEQ ID NO: 206392 - DNA, 19 bp, Homo sapiens
  siRNA target sequence for C9orf39 (NM_017738.1,1617-1635).
ctggacgatatgattgtaa

SEQ ID NO: 206393 - DNA, 19 bp, Homo sapiens
  siRNA target sequence for C9orf39 (NM_017738.1,1619-1637).
ggacgatatgattgtaaga

SEQ ID NO: 206394 - DNA, 19 bp, Homo sapiens
  siRNA target sequence for C9orf39 (NM_017738.1,1622-1640).
cgatatgattgtaagacaa

SEQ ID NO: 206395 - DNA, 19 bp, Homo sapiens
  siRNA target sequence for C9orf39 (NM_017738.1,1799-1817).
gcacagacctctcaaactt

SEQ ID NO: 206396 - DNA, 19 bp, Homo sapiens
  siRNA target sequence for C9orf39 (NM_017738.1,1967-1985).
gactattttcatgataaga

SEQ ID NO: 206397 - DNA, 19 bp, Homo sapiens
  siRNA target sequence for C9orf39 (NM_017738.1,2107-2125).
caatattattttattacga

SEQ ID NO: 206398 - DNA, 19 bp, Homo sapiens
  siRNA target sequence for C9orf39 (NM_017738.1,2123-2141).
cgagaacggattatatcct

SEQ ID NO: 206399 - DNA, 19 bp, Homo sapiens
  siRNA target sequence for C9orf39 (NM_017738.1,2303-2321).
gctgggcttcggaaagaaa

SEQ ID NO: 206400 - DNA, 19 bp, Homo sapiens
  siRNA target sequence for C9orf39 (NM_017738.1,2304-2322).
ctgggcttcggaaagaaaa

SEQ ID NO: 206401 - DNA, 19 bp, Homo sapiens
  siRNA target sequence for C9orf39 (NM_017738.1,2399-2417).
ccacggatacaagttacat

SEQ ID NO: 206402 - DNA, 19 bp, Homo sapiens
  siRNA target sequence for C9orf39 (NM_017738.1,2404-2422).
gatacaagttacatcactt

SEQ ID NO: 206403 - DNA, 19 bp, Homo sapiens
  siRNA target sequence for C9orf39 (NM_017738.1,2452-2470).
gaagcaattgcagtataaa

SEQ ID NO: 206404 - DNA, 19 bp, Homo sapiens
  siRNA target sequence for C9orf39 (NM_017738.1,2461-2479).
gcagtataaactaaagaat

SEQ ID NO: 206405 - DNA, 19 bp, Homo sapiens
  siRNA target sequence for C9orf39 (NM_017738.1,2588-2606).
gagagggatataactatga

SEQ ID NO: 206406 - DNA, 19 bp, Homo sapiens
  siRNA target sequence for C9orf39 (NM_017738.1,2590-2608).
gagggatataactatgaaa

SEQ ID NO: 206407 - DNA, 19 bp, Homo sapiens
  siRNA target sequence for C9orf39 (NM_017738.1,2626-2644).
cttgaaatttcgacagaaa

SEQ ID NO: 206408 - DNA, 19 bp, Homo sapiens
  siRNA target sequence for C9orf39 (NM_017738.1,2645-2663).
gtaaatttggaaagtaaca

SEQ ID NO: 206409 - DNA, 19 bp, Homo sapiens
  siRNA target sequence for C9orf39 (NM_017738.1,2658-2676).
gtaacaagagttttagtga

SEQ ID NO: 206410 - DNA, 19 bp, Homo sapiens
  siRNA target sequence for C9orf39 (NM_017738.1,2701-2719).
ggtaaagacattaactgaa

SEQ ID NO: 206411 - DNA, 19 bp, Homo sapiens
  siRNA target sequence for C9orf39 (NM_017738.1,2731-2749).
caagaaggtatcaattgat

SEQ ID NO: 206412 - DNA, 19 bp, Homo sapiens
  siRNA target sequence for C9orf39 (NM_017738.1,2737-2755).
ggtatcaattgattcacta

SEQ ID NO: 206413 - DNA, 19 bp, Homo sapiens
  siRNA target sequence for C9orf39 (NM_017738.1,2742-2760).
caattgattcactaaagca

SEQ ID NO: 206414 - DNA, 19 bp, Homo sapiens
  siRNA target sequence for C9orf39 (NM_017738.1,2790-2808).
cacagtatgaacagatgta

SEQ ID NO: 206415 - DNA, 19 bp, Homo sapiens
  siRNA target sequence for C9orf39 (NM_017738.1,2801-2819).
cagatgtatcagaaatcta

SEQ ID NO: 206416 - DNA, 19 bp, Homo sapiens
  siRNA target sequence for C9orf39 (NM_017738.1,2803-2821).
gatgtatcagaaatctaaa

SEQ ID NO: 206417 - DNA, 19 bp, Homo sapiens
  siRNA target sequence for C9orf39 (NM_017738.1,2848-2866).
gcttactctcctagtatca

SEQ ID NO: 206418 - DNA, 19 bp, Homo sapiens
  siRNA target sequence for C9orf39 (NM_017738.1,2849-2867).
cttactctcctagtatcaa

SEQ ID NO: 206419 - DNA, 19 bp, Homo sapiens
  siRNA target sequence for C9orf39 (NM_017738.1,2853-2871).
ctctcctagtatcaagaat

SEQ ID NO: 206420 - DNA, 19 bp, Homo sapiens
  siRNA target sequence for C9orf39 (NM_017738.1,2913-2931).
catctaagcagcttcaaga

SEQ ID NO: 206421 - DNA, 19 bp, Homo sapiens
  siRNA target sequence for C9orf39 (NM_017738.1,2916-2934).
ctaagcagcttcaagaatt

SEQ ID NO: 206422 - DNA, 19 bp, Homo sapiens
  siRNA target sequence for C9orf39 (NM_017738.1,2980-2998).
gctgttagccaatgaaaaa

SEQ ID NO: 206423 - DNA, 19 bp, Homo sapiens
  siRNA target sequence for C9orf39 (NM_017738.1,3031-3049).
ggccaaagagttgcaaaat

SEQ ID NO: 206424 - DNA, 19 bp, Homo sapiens
  siRNA target sequence for C9orf39 (NM_017738.1,3059-3077).
gtggtaaggcgacaaataa

SEQ ID NO: 206425 - DNA, 19 bp, Homo sapiens
  siRNA target sequence for C9orf39 (NM_017738.1,3061-3079).
ggtaaggcgacaaataaga

SEQ ID NO: 206426 - DNA, 19 bp, Homo sapiens
  siRNA target sequence for C9orf39 (NM_017738.1,3147-3165).
cagcttctatcctgaacat

SEQ ID NO: 206427 - DNA, 19 bp, Homo sapiens
  siRNA target sequence for C9orf39 (NM_017738.1,3245-3263).
gacaaggaatggatgttgt

SEQ ID NO: 206428 - DNA, 19 bp, Homo sapiens
  siRNA target sequence for C9orf39 (NM_017738.1,3250-3268).
ggaatggatgttgtacatt

SEQ ID NO: 206429 - DNA, 19 bp, Homo sapiens
  siRNA target sequence for KCNH2 (NM_000238.2,84-102).
gccagagccgtaagttcat

SEQ ID NO: 206430 - DNA, 19 bp, Homo sapiens
  siRNA target sequence for KCNH2 (NM_000238.2,86-104).
cagagccgtaagttcatca

SEQ ID NO: 206431 - DNA, 19 bp, Homo sapiens
  siRNA target sequence for KCNH2 (NM_000238.2,301-319).
cgccttctaccggaaagat

SEQ ID NO: 206432 - DNA, 19 bp, Homo sapiens
  siRNA target sequence for KCNH2 (NM_000238.2,1072-1090).
cagtgaccgtgagatcata

SEQ ID NO: 206433 - DNA, 19 bp, Homo sapiens
  siRNA target sequence for KCNH2 (NM_000238.2,1084-1102).
gatcatagcacctaagata

SEQ ID NO: 206434 - DNA, 19 bp, Homo sapiens
  siRNA target sequence for KCNH2 (NM_000238.2,1106-1124).
gagcgaacccacaatgtca

SEQ ID NO: 206435 - DNA, 19 bp, Homo sapiens
  siRNA target sequence for KCNH2 (NM_000238.2,1847-1865).
gtgacggcgctctacttca

SEQ ID NO: 206436 - DNA, 19 bp, Homo sapiens
  siRNA target sequence for KCNH2 (NM_000238.2,1951-1969).
cattggctccctcatgtat

SEQ ID NO: 206437 - DNA, 19 bp, Homo sapiens
  siRNA target sequence for KCNH2 (NM_000238.2,1955-1973).
ggctccctcatgtatgcta

SEQ ID NO: 206438 - DNA, 19 bp, Homo sapiens
  siRNA target sequence for KCNH2 (NM_000238.2,2663-2681).
caacgcaagcgcaagttgt

SEQ ID NO: 206439 - DNA, 19 bp, Homo sapiens
  siRNA target sequence for KCNH2 (NM_000238.2,2986-3004).
ctcaggagtgtccaacatt

SEQ ID NO: 206440 - DNA, 19 bp, Homo sapiens
  siRNA target sequence for KCNH2 (NM_172056.1,2469-2487).
cgagccttctgaatatgca

SEQ ID NO: 206441 - DNA, 19 bp, Homo sapiens
  siRNA target sequence for KCNH2 (NM_172056.1,2521-2539).
gggtcactgggctccttta

SEQ ID NO: 206442 - DNA, 19 bp, Homo sapiens
  siRNA target sequence for KCNH2 (NM_172056.1,2522-2540).
ggtcactgggctcctttaa

SEQ ID NO: 206443 - DNA, 19 bp, Homo sapiens
  siRNA target sequence for KCNH2 (NM_172056.1,2645-2663).
cgccacaaacagacacttt

SEQ ID NO: 206444 - DNA, 19 bp, Homo sapiens
  siRNA target sequence for KCNH3 (NM_012284.1,819-837).
ggcaagcacaagctcaata

SEQ ID NO: 206445 - DNA, 19 bp, Homo sapiens
  siRNA target sequence for KCNH3 (NM_012284.1,820-838).
gcaagcacaagctcaataa

SEQ ID NO: 206446 - DNA, 19 bp, Homo sapiens
  siRNA target sequence for KCNH3 (NM_012284.1,859-877).
caaacttgcctgagtacaa

SEQ ID NO: 206447 - DNA, 19 bp, Homo sapiens
  siRNA target sequence for KCNH3 (NM_012284.1,1070-1088).
cctcttcatccttgacatt

SEQ ID NO: 206448 - DNA, 19 bp, Homo sapiens
  siRNA target sequence for KCNH3 (NM_012284.1,1684-1702).
cggacaccgagaagatctt

SEQ ID NO: 206449 - DNA, 19 bp, Homo sapiens
  siRNA target sequence for KCNH3 (NM_012284.1,1891-1909).
ccacctgggcggtgaacaa

SEQ ID NO: 206450 - DNA, 19 bp, Homo sapiens
  siRNA target sequence for KCNH3 (NM_012284.1,2418-2436).
ggcgacaatacccttatgt

SEQ ID NO: 206451 - DNA, 19 bp, Homo sapiens
  siRNA target sequence for KCNH4 (NM_012285.1,607-625).
gagcaccgggctgaaatct

SEQ ID NO: 206452 - DNA, 19 bp, Homo sapiens
  siRNA target sequence for KCNH4 (NM_012285.1,640-658).
gatggctcagccttttggt

SEQ ID NO: 206453 - DNA, 19 bp, Homo sapiens
  siRNA target sequence for KCNH4 (NM_012285.1,669-687).
catgatgcccatcaagaat

SEQ ID NO: 206454 - DNA, 19 bp, Homo sapiens
  siRNA target sequence for KCNH4 (NM_012285.1,778-796).
gacagtaatcacgaaaact

SEQ ID NO: 206455 - DNA, 19 bp, Homo sapiens
  siRNA target sequence for KCNH4 (NM_012285.1,810-828).
gggagccacctggaaattt

SEQ ID NO: 206456 - DNA, 19 bp, Homo sapiens
  siRNA target sequence for KCNH4 (NM_012285.1,911-929).
ccaataataacgtgtttga

SEQ ID NO: 206457 - DNA, 19 bp, Homo sapiens
  siRNA target sequence for KCNH4 (NM_012285.1,1066-1084).
ccctacaatgtctgtttct

SEQ ID NO: 206458 - DNA, 19 bp, Homo sapiens
  siRNA target sequence for KCNH4 (NM_012285.1,1093-1111).
gatgacacccccatcactt

SEQ ID NO: 206459 - DNA, 19 bp, Homo sapiens
  siRNA target sequence for KCNH4 (NM_012285.1,1130-1148).
gcgacatcgccgtggaaat

SEQ ID NO: 206460 - DNA, 19 bp, Homo sapiens
  siRNA target sequence for KCNH4 (NM_012285.1,1150-1168).
ctcttcatcctagatatca

SEQ ID NO: 206461 - DNA, 19 bp, Homo sapiens
  siRNA target sequence for KCNH4 (NM_012285.1,1196-1214).
cccagtccggccaggtaat

SEQ ID NO: 206462 - DNA, 19 bp, Homo sapiens
  siRNA target sequence for KCNH4 (NM_012285.1,1198-1216).
cagtccggccaggtaatct

SEQ ID NO: 206463 - DNA, 19 bp, Homo sapiens
  siRNA target sequence for KCNH4 (NM_012285.1,1200-1218).
gtccggccaggtaatctct

SEQ ID NO: 206464 - DNA, 19 bp, Homo sapiens
  siRNA target sequence for KCNH4 (NM_012285.1,1215-1233).
ctctgctcctcgttccatt

SEQ ID NO: 206465 - DNA, 19 bp, Homo sapiens
  siRNA target sequence for KCNH4 (NM_012285.1,1256-1274).
ggttcttcatcgaccttat

SEQ ID NO: 206466 - DNA, 19 bp, Homo sapiens
  siRNA target sequence for KCNH4 (NM_012285.1,1257-1275).
gttcttcatcgaccttatt

SEQ ID NO: 206467 - DNA, 19 bp, Homo sapiens
  siRNA target sequence for KCNH4 (NM_012285.1,1557-1575).
ggaggtgccctatgtcaat

SEQ ID NO: 206468 - DNA, 19 bp, Homo sapiens
  siRNA target sequence for KCNH4 (NM_012285.1,1618-1636).
gcactgtacttcactctaa

SEQ ID NO: 206469 - DNA, 19 bp, Homo sapiens
  siRNA target sequence for KCNH4 (NM_012285.1,2033-2051).
ccctatcgctgcacatcaa

SEQ ID NO: 206470 - DNA, 19 bp, Homo sapiens
  siRNA target sequence for KCNH4 (NM_012285.1,2035-2053).
ctatcgctgcacatcaaga

SEQ ID NO: 206471 - DNA, 19 bp, Homo sapiens
  siRNA target sequence for KCNH4 (NM_012285.1,2098-2116).
gccctgcaggcacattact

SEQ ID NO: 206472 - DNA, 19 bp, Homo sapiens
  siRNA target sequence for KCNH4 (NM_012285.1,2099-2117).
ccctgcaggcacattacta

SEQ ID NO: 206473 - DNA, 19 bp, Homo sapiens
  siRNA target sequence for KCNH4 (NM_012285.1,2100-2118).
cctgcaggcacattactat

SEQ ID NO: 206474 - DNA, 19 bp, Homo sapiens
  siRNA target sequence for KCNH4 (NM_012285.1,2104-2122).
caggcacattactatgtct

SEQ ID NO: 206475 - DNA, 19 bp, Homo sapiens
  siRNA target sequence for KCNH4 (NM_012285.1,2239-2257).
ccaaacttcgtgctaaaga

SEQ ID NO: 206476 - DNA, 19 bp, Homo sapiens
  siRNA target sequence for KCNH4 (NM_012285.1,2988-3006).
ggagatctctcgtctcaat

SEQ ID NO: 206477 - DNA, 19 bp, Homo sapiens
  siRNA target sequence for KCNH4 (NM_012285.1,3250-3268).
gacttgagaccttccatat

SEQ ID NO: 206478 - DNA, 19 bp, Homo sapiens
  siRNA target sequence for KCNH8 (NM_144633.2,198-216).
gccggttatgaaaggatta

SEQ ID NO: 206479 - DNA, 19 bp, Homo sapiens
  siRNA target sequence for KCNH8 (NM_144633.2,200-218).
cggttatgaaaggattact

SEQ ID NO: 206480 - DNA, 19 bp, Homo sapiens
  siRNA target sequence for KCNH8 (NM_144633.2,265-283).
ggaacacatagcaacttca

SEQ ID NO: 206481 - DNA, 19 bp, Homo sapiens
  siRNA target sequence for KCNH8 (NM_144633.2,342-360).
ctgcgagcttgctggattt

SEQ ID NO: 206482 - DNA, 19 bp, Homo sapiens
  siRNA target sequence for KCNH8 (NM_144633.2,386-404).
gttgtagctgcaagttctt

SEQ ID NO: 206483 - DNA, 19 bp, Homo sapiens
  siRNA target sequence for KCNH8 (NM_144633.2,389-407).
gtagctgcaagttcttatt

SEQ ID NO: 206484 - DNA, 19 bp, Homo sapiens
  siRNA target sequence for KCNH8 (NM_144633.2,518-536).
ggtgcctactggatattgt

SEQ ID NO: 206485 - DNA, 19 bp, Homo sapiens
  siRNA target sequence for KCNH8 (NM_144633.2,529-547).
gatattgttcccataaaga

SEQ ID NO: 206486 - DNA, 19 bp, Homo sapiens
  siRNA target sequence for KCNH8 (NM_144633.2,557-575).
gagatgtagtactttttct

SEQ ID NO: 206487 - DNA, 19 bp, Homo sapiens
  siRNA target sequence for KCNH8 (NM_144633.2,574-592).
ctggcctcgttcaaagata

SEQ ID NO: 206488 - DNA, 19 bp, Homo sapiens
  siRNA target sequence for KCNH8 (NM_144633.2,576-594).
ggcctcgttcaaagatata

SEQ ID NO: 206489 - DNA, 19 bp, Homo sapiens
  siRNA target sequence for KCNH8 (NM_144633.2,577-595).
gcctcgttcaaagatataa

SEQ ID NO: 206490 - DNA, 19 bp, Homo sapiens
  siRNA target sequence for KCNH8 (NM_144633.2,579-597).
ctcgttcaaagatataaca

SEQ ID NO: 206491 - DNA, 19 bp, Homo sapiens
  siRNA target sequence for KCNH8 (NM_144633.2,581-599).
cgttcaaagatataacaga

SEQ ID NO: 206492 - DNA, 19 bp, Homo sapiens
  siRNA target sequence for KCNH8 (NM_144633.2,661-679).
gcagggacccactttgact

SEQ ID NO: 206493 - DNA, 19 bp, Homo sapiens
  siRNA target sequence for KCNH8 (NM_144633.2,692-710).
ggagtcgagcagtccttta

SEQ ID NO: 206494 - DNA, 19 bp, Homo sapiens
  siRNA target sequence for KCNH8 (NM_144633.2,693-711).
gagtcgagcagtcctttat

SEQ ID NO: 206495 - DNA, 19 bp, Homo sapiens
  siRNA target sequence for KCNH8 (NM_144633.2,697-715).
cgagcagtcctttatcaca

SEQ ID NO: 206496 - DNA, 19 bp, Homo sapiens
  siRNA target sequence for KCNH8 (NM_144633.2,788-806).
catttccggagtataaagt

SEQ ID NO: 206497 - DNA, 19 bp, Homo sapiens
  siRNA target sequence for KCNH8 (NM_144633.2,902-920).
ctgtgactgtaccttacaa

SEQ ID NO: 206498 - DNA, 19 bp, Homo sapiens
  siRNA target sequence for KCNH8 (NM_144633.2,913-931).
ccttacaacgtttgcttta

SEQ ID NO: 206499 - DNA, 19 bp, Homo sapiens
  siRNA target sequence for KCNH8 (NM_144633.2,914-932).
cttacaacgtttgctttat

SEQ ID NO: 206500 - DNA, 19 bp, Homo sapiens
  siRNA target sequence for KCNH8 (NM_144633.2,963-981).
cacaaccgtcagtgacatt

SEQ ID NO: 206501 - DNA, 19 bp, Homo sapiens
  siRNA target sequence for KCNH8 (NM_144633.2,983-1001).
cagtggagattctttttat

SEQ ID NO: 206502 - DNA, 19 bp, Homo sapiens
  siRNA target sequence for KCNH8 (NM_144633.2,1040-1058).
gcaagtctggccaagttat

SEQ ID NO: 206503 - DNA, 19 bp, Homo sapiens
  siRNA target sequence for KCNH8 (NM_144633.2,1046-1064).
ctggccaagttatctttga

SEQ ID NO: 206504 - DNA, 19 bp, Homo sapiens
  siRNA target sequence for KCNH8 (NM_144633.2,1063-1081).
gaagcaagatcaatttgca

SEQ ID NO: 206505 - DNA, 19 bp, Homo sapiens
  siRNA target sequence for KCNH8 (NM_144633.2,1073-1091).
caatttgcatccactatgt

SEQ ID NO: 206506 - DNA, 19 bp, Homo sapiens
  siRNA target sequence for KCNH8 (NM_144633.2,1094-1112).
caacctggttcatcattga

SEQ ID NO: 206507 - DNA, 19 bp, Homo sapiens
  siRNA target sequence for KCNH8 (NM_144633.2,1169-1187).
ctctcgtgcatcttctaaa

SEQ ID NO: 206508 - DNA, 19 bp, Homo sapiens
  siRNA target sequence for KCNH8 (NM_144633.2,1171-1189).
ctcgtgcatcttctaaaga

SEQ ID NO: 206509 - DNA, 19 bp, Homo sapiens
  siRNA target sequence for KCNH8 (NM_144633.2,1173-1191).
cgtgcatcttctaaagaca

SEQ ID NO: 206510 - DNA, 19 bp, Homo sapiens
  siRNA target sequence for KCNH8 (NM_144633.2,1212-1230).
gcgtctgctgcagaagtta

SEQ ID NO: 206511 - DNA, 19 bp, Homo sapiens
  siRNA target sequence for KCNH8 (NM_144633.2,1214-1232).
gtctgctgcagaagttaga

SEQ ID NO: 206512 - DNA, 19 bp, Homo sapiens
  siRNA target sequence for KCNH8 (NM_144633.2,1314-1332).
ctggtacgtcattggaaaa

SEQ ID NO: 206513 - DNA, 19 bp, Homo sapiens
  siRNA target sequence for KCNH8 (NM_144633.2,1316-1334).
ggtacgtcattggaaaaat

SEQ ID NO: 206514 - DNA, 19 bp, Homo sapiens
  siRNA target sequence for KCNH8 (NM_144633.2,1408-1426).
ccatactatggcaacaata

SEQ ID NO: 206515 - DNA, 19 bp, Homo sapiens
  siRNA target sequence for KCNH8 (NM_144633.2,1442-1460).
cgatccgaagtgcctatat

SEQ ID NO: 206516 - DNA, 19 bp, Homo sapiens
  siRNA target sequence for KCNH8 (NM_144633.2,1443-1461).
gatccgaagtgcctatatt

SEQ ID NO: 206517 - DNA, 19 bp, Homo sapiens
  siRNA target sequence for KCNH8 (NM_144633.2,1509-1527).
gaacgtctctgctaataca

SEQ ID NO: 206518 - DNA, 19 bp, Homo sapiens
  siRNA target sequence for KCNH8 (NM_144633.2,1512-1530).
cgtctctgctaatacagat

SEQ ID NO: 206519 - DNA, 19 bp, Homo sapiens
  siRNA target sequence for KCNH8 (NM_144633.2,1639-1657).
ctctatcacactagaacta

SEQ ID NO: 206520 - DNA, 19 bp, Homo sapiens
  siRNA target sequence for KCNH8 (NM_144633.2,1716-1734).
gctcgaatattttcaaaca

SEQ ID NO: 206521 - DNA, 19 bp, Homo sapiens
  siRNA target sequence for KCNH8 (NM_144633.2,1733-1751).
caacctggtcagtcaacaa

SEQ ID NO: 206522 - DNA, 19 bp, Homo sapiens
  siRNA target sequence for KCNH8 (NM_144633.2,1739-1757).
ggtcagtcaacaatggaat

SEQ ID NO: 206523 - DNA, 19 bp, Homo sapiens
  siRNA target sequence for KCNH8 (NM_144633.2,1744-1762).
gtcaacaatggaatagatt

SEQ ID NO: 206524 - DNA, 19 bp, Homo sapiens
  siRNA target sequence for KCNH8 (NM_144633.2,1795-1813).
ctgcgttctgacatcacta

SEQ ID NO: 206525 - DNA, 19 bp, Homo sapiens
  siRNA target sequence for KCNH8 (NM_144633.2,1837-1855).
cagttgtccctttttgaat

SEQ ID NO: 206526 - DNA, 19 bp, Homo sapiens
  siRNA target sequence for KCNH8 (NM_144633.2,1946-1964).
ctttgcaggccatctactt

SEQ ID NO: 206527 - DNA, 19 bp, Homo sapiens
  siRNA target sequence for KCNH8 (NM_144633.2,1973-1991).
cgggctccatggaagttct

SEQ ID NO: 206528 - DNA, 19 bp, Homo sapiens
  siRNA target sequence for KCNH8 (NM_144633.2,2038-2056).
ggagcaaatctatcaatta

SEQ ID NO: 206529 - DNA, 19 bp, Homo sapiens
  siRNA target sequence for KCNH8 (NM_144633.2,2039-2057).
gagcaaatctatcaattaa

SEQ ID NO: 206530 - DNA, 19 bp, Homo sapiens
  siRNA target sequence for KCNH8 (NM_144633.2,2042-2060).
caaatctatcaattaagga

SEQ ID NO: 206531 - DNA, 19 bp, Homo sapiens
  siRNA target sequence for KCNH8 (NM_144633.2,2051-2069).
caattaaggaccaagtgat

SEQ ID NO: 206532 - DNA, 19 bp, Homo sapiens
  siRNA target sequence for KCNH8 (NM_144633.2,2080-2098).
gcagatgtaaaggctttaa

SEQ ID NO: 206533 - DNA, 19 bp, Homo sapiens
  siRNA target sequence for KCNH8 (NM_144633.2,2157-2175).
cccagaatatgctcacaaa

SEQ ID NO: 206534 - DNA, 19 bp, Homo sapiens
  siRNA target sequence for KCNH8 (NM_144633.2,2191-2209).
cagcatgacctcacataca

SEQ ID NO: 206535 - DNA, 19 bp, Homo sapiens
  siRNA target sequence for KCNH8 (NM_144633.2,2224-2242).
catgagagtgatgtgatat

SEQ ID NO: 206536 - DNA, 19 bp, Homo sapiens
  siRNA target sequence for KCNH8 (NM_144633.2,2385-2403).
ctgcacaaggggatcttct

SEQ ID NO: 206537 - DNA, 19 bp, Homo sapiens
  siRNA target sequence for KCNH8 (NM_144633.2,2399-2417).
cttcttcgcgcaacaagaa

SEQ ID NO: 206538 - DNA, 19 bp, Homo sapiens
  siRNA target sequence for KCNH8 (NM_144633.2,2434-2452).
gcctacctgggcttaagct

SEQ ID NO: 206539 - DNA, 19 bp, Homo sapiens
  siRNA target sequence for KCNH8 (NM_144633.2,2435-2453).
cctacctgggcttaagctt

SEQ ID NO: 206540 - DNA, 19 bp, Homo sapiens
  siRNA target sequence for KCNH8 (NM_144633.2,2436-2454).
ctacctgggcttaagctta

SEQ ID NO: 206541 - DNA, 19 bp, Homo sapiens
  siRNA target sequence for KCNH8 (NM_144633.2,2470-2488).
ggaacggtgccctttcact

SEQ ID NO: 206542 - DNA, 19 bp, Homo sapiens
  siRNA target sequence for KCNH8 (NM_144633.2,2481-2499).
ctttcactcgcctatcaga

SEQ ID NO: 206543 - DNA, 19 bp, Homo sapiens
  siRNA target sequence for KCNH8 (NM_144633.2,2577-2595).
gaaattgcaactttcaact

SEQ ID NO: 206544 - DNA, 19 bp, Homo sapiens
  siRNA target sequence for KCNH8 (NM_144633.2,2622-2640).
cagtccaaggattgttgat

SEQ ID NO: 206545 - DNA, 19 bp, Homo sapiens
  siRNA target sequence for KCNH8 (NM_144633.2,2627-2645).
caaggattgttgatggaat

SEQ ID NO: 206546 - DNA, 19 bp, Homo sapiens
  siRNA target sequence for KCNH8 (NM_144633.2,2689-2707).
ggctctgaacgaatcagat

SEQ ID NO: 206547 - DNA, 19 bp, Homo sapiens
  siRNA target sequence for KCNH8 (NM_144633.2,2902-2920).
cagccatcacggttttgct

SEQ ID NO: 206548 - DNA, 19 bp, Homo sapiens
  siRNA target sequence for KCNH8 (NM_144633.2,2992-3010).
ccttgcctacacttgcaaa

SEQ ID NO: 206549 - DNA, 19 bp, Homo sapiens
  siRNA target sequence for KCNH8 (NM_144633.2,3037-3055).
caactttgtagcagtaata

SEQ ID NO: 206550 - DNA, 19 bp, Homo sapiens
  siRNA target sequence for KCNH8 (NM_144633.2,3137-3155).
cagacagtgaactttatca

SEQ ID NO: 206551 - DNA, 19 bp, Homo sapiens
  siRNA target sequence for KCNH8 (NM_144633.2,3225-3243).
gtgcatctctccacattca

SEQ ID NO: 206552 - DNA, 19 bp, Homo sapiens
  siRNA target sequence for KCNH8 (NM_144633.2,3227-3245).
gcatctctccacattcaga

SEQ ID NO: 206553 - DNA, 19 bp, Homo sapiens
  siRNA target sequence for KCNH8 (NM_144633.2,3228-3246).
catctctccacattcagat

SEQ ID NO: 206554 - DNA, 19 bp, Homo sapiens
  siRNA target sequence for KCNH8 (NM_144633.2,3314-3332).
catctttgcacctagttct

SEQ ID NO: 206555 - DNA, 19 bp, Homo sapiens
  siRNA target sequence for ATR (NM_001184.2,168-186).
cacaccagaggaatataat

SEQ ID NO: 206556 - DNA, 19 bp, Homo sapiens
  siRNA target sequence for ATR (NM_001184.2,225-243).
cattgaccggatacttaca

SEQ ID NO: 206557 - DNA, 19 bp, Homo sapiens
  siRNA target sequence for ATR (NM_001184.2,231-249).
ccggatacttacagatgta

SEQ ID NO: 206558 - DNA, 19 bp, Homo sapiens
  siRNA target sequence for ATR (NM_001184.2,232-250).
cggatacttacagatgtaa

SEQ ID NO: 206559 - DNA, 19 bp, Homo sapiens
  siRNA target sequence for ATR (NM_001184.2,256-274).
gttgctgtagaacttgtaa

SEQ ID NO: 206560 - DNA, 19 bp, Homo sapiens
  siRNA target sequence for ATR (NM_001184.2,301-319).
gtgatgttgcttgatttca

SEQ ID NO: 206561 - DNA, 19 bp, Homo sapiens
  siRNA target sequence for ATR (NM_001184.2,313-331).
gatttcatccagcatatca

SEQ ID NO: 206562 - DNA, 19 bp, Homo sapiens
  siRNA target sequence for ATR (NM_001184.2,341-359).
ccccacttatgtttgtaaa

SEQ ID NO: 206563 - DNA, 19 bp, Homo sapiens
  siRNA target sequence for ATR (NM_001184.2,454-472).
catttgttacacaagaaaa

SEQ ID NO: 206564 - DNA, 19 bp, Homo sapiens
  siRNA target sequence for ATR (NM_001184.2,481-499).
gtcatctgttcattattat

SEQ ID NO: 206565 - DNA, 19 bp, Homo sapiens
  siRNA target sequence for ATR (NM_001184.2,532-550).
ggggtactcacaaaagaat

SEQ ID NO: 206566 - DNA, 19 bp, Homo sapiens
  siRNA target sequence for ATR (NM_001184.2,535-553).
gtactcacaaaagaattat

SEQ ID NO: 206567 - DNA, 19 bp, Homo sapiens
  siRNA target sequence for ATR (NM_001184.2,580-598).
ctccatagaagaaatgtga

SEQ ID NO: 206568 - DNA, 19 bp, Homo sapiens
  siRNA target sequence for ATR (NM_001184.2,622-640).
gtggtcatgagccgatttt

SEQ ID NO: 206569 - DNA, 19 bp, Homo sapiens
  siRNA target sequence for ATR (NM_001184.2,627-645).
catgagccgatttttaagt

SEQ ID NO: 206570 - DNA, 19 bp, Homo sapiens
  siRNA target sequence for ATR (NM_001184.2,630-648).
gagccgatttttaagtcaa

SEQ ID NO: 206571 - DNA, 19 bp, Homo sapiens
  siRNA target sequence for ATR (NM_001184.2,644-662).
gtcaattagatgaacacat

SEQ ID NO: 206572 - DNA, 19 bp, Homo sapiens
  siRNA target sequence for ATR (NM_001184.2,677-695).
cagctcctttgcagttgat

SEQ ID NO: 206573 - DNA, 19 bp, Homo sapiens
  siRNA target sequence for ATR (NM_001184.2,682-700).
cctttgcagttgatgagta

SEQ ID NO: 206574 - DNA, 19 bp, Homo sapiens
  siRNA target sequence for ATR (NM_001184.2,690-708).
gttgatgagtatgcaaaat

SEQ ID NO: 206575 - DNA, 19 bp, Homo sapiens
  siRNA target sequence for ATR (NM_001184.2,738-756).
ggttcttactcgtattatt

SEQ ID NO: 206576 - DNA, 19 bp, Homo sapiens
  siRNA target sequence for ATR (NM_001184.2,742-760).
cttactcgtattattgcaa

SEQ ID NO: 206577 - DNA, 19 bp, Homo sapiens
  siRNA target sequence for ATR (NM_001184.2,803-821).
gttgtgttctgctagagta

SEQ ID NO: 206578 - DNA, 19 bp, Homo sapiens
  siRNA target sequence for ATR (NM_001184.2,808-826).
gttctgctagagtatggta

SEQ ID NO: 206579 - DNA, 19 bp, Homo sapiens
  siRNA target sequence for ATR (NM_001184.2,817-835).
gagtatggtagtccaaaaa

SEQ ID NO: 206580 - DNA, 19 bp, Homo sapiens
  siRNA target sequence for ATR (NM_001184.2,819-837).
gtatggtagtccaaaaatt

SEQ ID NO: 206581 - DNA, 19 bp, Homo sapiens
  siRNA target sequence for ATR (NM_001184.2,959-977).
ctgaccaattgaaactcta

SEQ ID NO: 206582 - DNA, 19 bp, Homo sapiens
  siRNA target sequence for ATR (NM_001184.2,996-1014).
gctgataaagacactattt

SEQ ID NO: 206583 - DNA, 19 bp, Homo sapiens
  siRNA target sequence for ATR (NM_001184.2,1005-1023).
gacactatttccctttgaa

SEQ ID NO: 206584 - DNA, 19 bp, Homo sapiens
  siRNA target sequence for ATR (NM_001184.2,1024-1042).
gcagaagcttatagaaata

SEQ ID NO: 206585 - DNA, 19 bp, Homo sapiens
  siRNA target sequence for ATR (NM_001184.2,1045-1063).
gaacctgtctatttaaata

SEQ ID NO: 206586 - DNA, 19 bp, Homo sapiens
  siRNA target sequence for ATR (NM_001184.2,1104-1122).
gctcatgcggcttaagtct

SEQ ID NO: 206587 - DNA, 19 bp, Homo sapiens
  siRNA target sequence for ATR (NM_001184.2,1136-1154).
cagctttgtgccatttact

SEQ ID NO: 206588 - DNA, 19 bp, Homo sapiens
  siRNA target sequence for ATR (NM_001184.2,1176-1194).
gccagctgggtatgaatct

SEQ ID NO: 206589 - DNA, 19 bp, Homo sapiens
  siRNA target sequence for ATR (NM_001184.2,1208-1226).
ggaaggtctatgtgagaaa

SEQ ID NO: 206590 - DNA, 19 bp, Homo sapiens
  siRNA target sequence for ATR (NM_001184.2,1209-1227).
gaaggtctatgtgagaaat

SEQ ID NO: 206591 - DNA, 19 bp, Homo sapiens
  siRNA target sequence for ATR (NM_001184.2,1281-1299).
gttgggcccactttatgca

SEQ ID NO: 206592 - DNA, 19 bp, Homo sapiens
  siRNA target sequence for ATR (NM_001184.2,1356-1374).
ggaaaacctcagcagtaat

SEQ ID NO: 206593 - DNA, 19 bp, Homo sapiens
  siRNA target sequence for ATR (NM_001184.2,1367-1385).
gcagtaatagtgatggaat

SEQ ID NO: 206594 - DNA, 19 bp, Homo sapiens
  siRNA target sequence for ATR (NM_001184.2,1368-1386).
cagtaatagtgatggaata

SEQ ID NO: 206595 - DNA, 19 bp, Homo sapiens
  siRNA target sequence for ATR (NM_001184.2,1402-1420).
cgtctcagctcgtctctaa

SEQ ID NO: 206596 - DNA, 19 bp, Homo sapiens
  siRNA target sequence for ATR (NM_001184.2,1403-1421).
gtctcagctcgtctctaaa

SEQ ID NO: 206597 - DNA, 19 bp, Homo sapiens
  siRNA target sequence for ATR (NM_001184.2,1477-1495).
caaaagagcatattatgga

SEQ ID NO: 206598 - DNA, 19 bp, Homo sapiens
  siRNA target sequence for ATR (NM_001184.2,1493-1511).
ggagtgcactgaaacagaa

SEQ ID NO: 206599 - DNA, 19 bp, Homo sapiens
  siRNA target sequence for ATR (NM_001184.2,1525-1543).
cagatttcccttgaataca

SEQ ID NO: 206600 - DNA, 19 bp, Homo sapiens
  siRNA target sequence for ATR (NM_001184.2,1527-1545).
gatttcccttgaatacagt

SEQ ID NO: 206601 - DNA, 19 bp, Homo sapiens
  siRNA target sequence for ATR (NM_001184.2,1547-1565).
gcctaaagaatcctgttat

SEQ ID NO: 206602 - DNA, 19 bp, Homo sapiens
  siRNA target sequence for ATR (NM_001184.2,1548-1566).
cctaaagaatcctgttatt

SEQ ID NO: 206603 - DNA, 19 bp, Homo sapiens
  siRNA target sequence for ATR (NM_001184.2,1569-1587).
gatgttagaaggaattgct

SEQ ID NO: 206604 - DNA, 19 bp, Homo sapiens
  siRNA target sequence for ATR (NM_001184.2,1602-1620).
gactgctctgtgtactgtt

SEQ ID NO: 206605 - DNA, 19 bp, Homo sapiens
  siRNA target sequence for ATR (NM_001184.2,1606-1624).
gctctgtgtactgttcatt

SEQ ID NO: 206606 - DNA, 19 bp, Homo sapiens
  siRNA target sequence for ATR (NM_001184.2,1660-1678).
gactgtcaacataaatcca

SEQ ID NO: 206607 - DNA, 19 bp, Homo sapiens
  siRNA target sequence for ATR (NM_001184.2,1666-1684).
caacataaatccaagaaga

SEQ ID NO: 206608 - DNA, 19 bp, Homo sapiens
  siRNA target sequence for ATR (NM_001184.2,1696-1714).
gtgataacttggatgtcat

SEQ ID NO: 206609 - DNA, 19 bp, Homo sapiens
  siRNA target sequence for ATR (NM_001184.2,1703-1721).
cttggatgtcattggattt

SEQ ID NO: 206610 - DNA, 19 bp, Homo sapiens
  siRNA target sequence for ATR (NM_001184.2,1776-1794).
ggacctggaggcaaccatt

SEQ ID NO: 206611 - DNA, 19 bp, Homo sapiens
  siRNA target sequence for ATR (NM_001184.2,1800-1818).
ggtggtgaaaatttatgat

SEQ ID NO: 206612 - DNA, 19 bp, Homo sapiens
  siRNA target sequence for ATR (NM_001184.2,1884-1902).
gctctcacttccatggatt

SEQ ID NO: 206613 - DNA, 19 bp, Homo sapiens
  siRNA target sequence for ATR (NM_001184.2,1945-1963).
gccgctaatcttctaacat

SEQ ID NO: 206614 - DNA, 19 bp, Homo sapiens
  siRNA target sequence for ATR (NM_001184.2,1946-1964).
ccgctaatcttctaacatt

SEQ ID NO: 206615 - DNA, 19 bp, Homo sapiens
  siRNA target sequence for ATR (NM_001184.2,1947-1965).
cgctaatcttctaacatta

SEQ ID NO: 206616 - DNA, 19 bp, Homo sapiens
  siRNA target sequence for ATR (NM_001184.2,1948-1966).
gctaatcttctaacattaa

SEQ ID NO: 206617 - DNA, 19 bp, Homo sapiens
  siRNA target sequence for ATR (NM_001184.2,1974-1992).
gatttcagatagctattca

SEQ ID NO: 206618 - DNA, 19 bp, Homo sapiens
  siRNA target sequence for ATR (NM_001184.2,2006-2024).
cacgatgtgtgtttcttct

SEQ ID NO: 206619 - DNA, 19 bp, Homo sapiens
  siRNA target sequence for ATR (NM_001184.2,2085-2103).
gcagagctcccatgaagta

SEQ ID NO: 206620 - DNA, 19 bp, Homo sapiens
  siRNA target sequence for ATR (NM_001184.2,2106-2124).
ccgggctagttgtgttagt

SEQ ID NO: 206621 - DNA, 19 bp, Homo sapiens
  siRNA target sequence for ATR (NM_001184.2,2146-2164).
cagcagaattcttgtaaca

SEQ ID NO: 206622 - DNA, 19 bp, Homo sapiens
  siRNA target sequence for ATR (NM_001184.2,2170-2188).
cccaagattcttatagata

SEQ ID NO: 206623 - DNA, 19 bp, Homo sapiens
  siRNA target sequence for ATR (NM_001184.2,2185-2203).
gataaagtcaaagatgatt

SEQ ID NO: 206624 - DNA, 19 bp, Homo sapiens
  siRNA target sequence for ATR (NM_001184.2,2231-2249).
ctatacttggtcaacttgt

SEQ ID NO: 206625 - DNA, 19 bp, Homo sapiens
  siRNA target sequence for ATR (NM_001184.2,2268-2286).
gttttatctgacaagttct

SEQ ID NO: 206626 - DNA, 19 bp, Homo sapiens
  siRNA target sequence for ATR (NM_001184.2,2314-2332).
catgtggacctcttctgta

SEQ ID NO: 206627 - DNA, 19 bp, Homo sapiens
  siRNA target sequence for ATR (NM_001184.2,2447-2465).
ctttcatagataatctaca

SEQ ID NO: 206628 - DNA, 19 bp, Homo sapiens
  siRNA target sequence for ATR (NM_001184.2,2451-2469).
catagataatctacatcat

SEQ ID NO: 206629 - DNA, 19 bp, Homo sapiens
  siRNA target sequence for ATR (NM_001184.2,2515-2533).
gcagttcttggaactttat

SEQ ID NO: 206630 - DNA, 19 bp, Homo sapiens
  siRNA target sequence for ATR (NM_001184.2,2560-2578).
gatgttagagtggctttta

SEQ ID NO: 206631 - DNA, 19 bp, Homo sapiens
  siRNA target sequence for ATR (NM_001184.2,2573-2591).
cttttagtggaaatatcaa

SEQ ID NO: 206632 - DNA, 19 bp, Homo sapiens
  siRNA target sequence for ATR (NM_001184.2,2582-2600).
gaaatatcaagcacatatt

SEQ ID NO: 206633 - DNA, 19 bp, Homo sapiens
  siRNA target sequence for ATR (NM_001184.2,2671-2689).
catgcccaaatatcaagaa

SEQ ID NO: 206634 - DNA, 19 bp, Homo sapiens
  siRNA target sequence for ATR (NM_001184.2,2703-2721).
ggataccttgattcttaca

SEQ ID NO: 206635 - DNA, 19 bp, Homo sapiens
  siRNA target sequence for ATR (NM_001184.2,2704-2722).
gataccttgattcttacaa

SEQ ID NO: 206636 - DNA, 19 bp, Homo sapiens
  siRNA target sequence for ATR (NM_001184.2,2741-2759).
ccgcaaaaggagatttggt

SEQ ID NO: 206637 - DNA, 19 bp, Homo sapiens
  siRNA target sequence for ATR (NM_001184.2,2742-2760).
cgcaaaaggagatttggta

SEQ ID NO: 206638 - DNA, 19 bp, Homo sapiens
  siRNA target sequence for ATR (NM_001184.2,2814-2832).
ctctggagcagcatacaca

SEQ ID NO: 206639 - DNA, 19 bp, Homo sapiens
  siRNA target sequence for ATR (NM_001184.2,2818-2836).
ggagcagcatacacagaaa

SEQ ID NO: 206640 - DNA, 19 bp, Homo sapiens
  siRNA target sequence for ATR (NM_001184.2,2819-2837).
gagcagcatacacagaaat

SEQ ID NO: 206641 - DNA, 19 bp, Homo sapiens
  siRNA target sequence for ATR (NM_001184.2,2847-2865).
ggttgcagctaaaagtgtt

SEQ ID NO: 206642 - DNA, 19 bp, Homo sapiens
  siRNA target sequence for ATR (NM_001184.2,2901-2919).
catctgtcagtttttggta

SEQ ID NO: 206643 - DNA, 19 bp, Homo sapiens
  siRNA target sequence for ATR (NM_001184.2,2943-2961).
gacagcacttccgaatact

SEQ ID NO: 206644 - DNA, 19 bp, Homo sapiens
  siRNA target sequence for ATR (NM_001184.2,2975-2993).
ctgacgtgcgaaaacaaga

SEQ ID NO: 206645 - DNA, 19 bp, Homo sapiens
  siRNA target sequence for ATR (NM_001184.2,2995-3013).
gtggctcaccagagagaaa

SEQ ID NO: 206646 - DNA, 19 bp, Homo sapiens
  siRNA target sequence for ATR (NM_001184.2,3032-3050).
ctgaaattgccaacgtttt

SEQ ID NO: 206647 - DNA, 19 bp, Homo sapiens
  siRNA target sequence for ATR (NM_001184.2,3051-3069).
cgactttcctgatcttaat

SEQ ID NO: 206648 - DNA, 19 bp, Homo sapiens
  siRNA target sequence for ATR (NM_001184.2,3054-3072).
ctttcctgatcttaatcgt

SEQ ID NO: 206649 - DNA, 19 bp, Homo sapiens
  siRNA target sequence for ATR (NM_001184.2,3064-3082).
cttaatcgttttcttacta

SEQ ID NO: 206650 - DNA, 19 bp, Homo sapiens
  siRNA target sequence for ATR (NM_001184.2,3080-3098).
ctaggacattacaagttct

SEQ ID NO: 206651 - DNA, 19 bp, Homo sapiens
  siRNA target sequence for ATR (NM_001184.2,3083-3101).
ggacattacaagttctact

SEQ ID NO: 206652 - DNA, 19 bp, Homo sapiens
  siRNA target sequence for ATR (NM_001184.2,3084-3102).
gacattacaagttctacta

SEQ ID NO: 206653 - DNA, 19 bp, Homo sapiens
  siRNA target sequence for ATR (NM_001184.2,3106-3124).
gatcttgctgccaaagcaa

SEQ ID NO: 206654 - DNA, 19 bp, Homo sapiens
  siRNA target sequence for ATR (NM_001184.2,3133-3151).
gcttctgctctcattcgaa

SEQ ID NO: 206655 - DNA, 19 bp, Homo sapiens
  siRNA target sequence for ATR (NM_001184.2,3144-3162).
cattcgaactttaggaaaa

SEQ ID NO: 206656 - DNA, 19 bp, Homo sapiens
  siRNA target sequence for ATR (NM_001184.2,3163-3181).
caattaaatgtcaatcgta

SEQ ID NO: 206657 - DNA, 19 bp, Homo sapiens
  siRNA target sequence for ATR (NM_001184.2,3172-3190).
gtcaatcgtagagagattt

SEQ ID NO: 206658 - DNA, 19 bp, Homo sapiens
  siRNA target sequence for ATR (NM_001184.2,3174-3192).
caatcgtagagagatttta

SEQ ID NO: 206659 - DNA, 19 bp, Homo sapiens
  siRNA target sequence for ATR (NM_001184.2,3230-3248).
gttcttgttccaaagatga

SEQ ID NO: 206660 - DNA, 19 bp, Homo sapiens
  siRNA target sequence for ATR (NM_001184.2,3256-3274).
cgtgcccttcattatctga

SEQ ID NO: 206661 - DNA, 19 bp, Homo sapiens
  siRNA target sequence for ATR (NM_001184.2,3302-3320).
gcctgttgagacaagattt

SEQ ID NO: 206662 - DNA, 19 bp, Homo sapiens
  siRNA target sequence for ATR (NM_001184.2,3306-3324).
gttgagacaagatttccaa

SEQ ID NO: 206663 - DNA, 19 bp, Homo sapiens
  siRNA target sequence for ATR (NM_001184.2,3350-3368).
gtattggagaacactatca

SEQ ID NO: 206664 - DNA, 19 bp, Homo sapiens
  siRNA target sequence for ATR (NM_001184.2,3410-3428).
ccagtgatgatccatatca

SEQ ID NO: 206665 - DNA, 19 bp, Homo sapiens
  siRNA target sequence for ATR (NM_001184.2,3432-3450).
cccgagagatatcatatca

SEQ ID NO: 206666 - DNA, 19 bp, Homo sapiens
  siRNA target sequence for ATR (NM_001184.2,3525-3543).
ctctagtgttggcattgaa

SEQ ID NO: 206667 - DNA, 19 bp, Homo sapiens
  siRNA target sequence for ATR (NM_001184.2,3527-3545).
ctagtgttggcattgaaga

SEQ ID NO: 206668 - DNA, 19 bp, Homo sapiens
  siRNA target sequence for ATR (NM_001184.2,3649-3667).
cttcgattcaaggatgatt

SEQ ID NO: 206669 - DNA, 19 bp, Homo sapiens
  siRNA target sequence for ATR (NM_001184.2,3734-3752).
cccttctcagtcatgtaat

SEQ ID NO: 206670 - DNA, 19 bp, Homo sapiens
  siRNA target sequence for ATR (NM_001184.2,3735-3753).
ccttctcagtcatgtaata

SEQ ID NO: 206671 - DNA, 19 bp, Homo sapiens
  siRNA target sequence for ATR (NM_001184.2,3758-3776).
ctttgttacctcttataca

SEQ ID NO: 206672 - DNA, 19 bp, Homo sapiens
  siRNA target sequence for ATR (NM_001184.2,3777-3795).
catccagcctaaagaaact

SEQ ID NO: 206673 - DNA, 19 bp, Homo sapiens
  siRNA target sequence for ATR (NM_001184.2,3807-3825).
ccactacctcataattgaa

SEQ ID NO: 206674 - DNA, 19 bp, Homo sapiens
  siRNA target sequence for ATR (NM_001184.2,3808-3826).
cactacctcataattgaaa

SEQ ID NO: 206675 - DNA, 19 bp, Homo sapiens
  siRNA target sequence for ATR (NM_001184.2,3901-3919).
gccgttctccaggaataca

SEQ ID NO: 206676 - DNA, 19 bp, Homo sapiens
  siRNA target sequence for ATR (NM_001184.2,3968-3986).
ctatgaaggccattcaaca

SEQ ID NO: 206677 - DNA, 19 bp, Homo sapiens
  siRNA target sequence for ATR (NM_001184.2,4003-4021).
cgtattcatgctcttacaa

SEQ ID NO: 206678 - DNA, 19 bp, Homo sapiens
  siRNA target sequence for ATR (NM_001184.2,4079-4097).
gtgaaacagtagaacctat

SEQ ID NO: 206679 - DNA, 19 bp, Homo sapiens
  siRNA target sequence for ATR (NM_001184.2,4194-4212).
gatagatccaggtcgatta

SEQ ID NO: 206680 - DNA, 19 bp, Homo sapiens
  siRNA target sequence for ATR (NM_001184.2,4198-4216).
gatccaggtcgattagatt

SEQ ID NO: 206681 - DNA, 19 bp, Homo sapiens
  siRNA target sequence for ATR (NM_001184.2,4201-4219).
ccaggtcgattagatttct

SEQ ID NO: 206682 - DNA, 19 bp, Homo sapiens
  siRNA target sequence for ATR (NM_001184.2,4204-4222).
ggtcgattagatttctcaa

SEQ ID NO: 206683 - DNA, 19 bp, Homo sapiens
  siRNA target sequence for ATR (NM_001184.2,4207-4225).
cgattagatttctcaacaa

SEQ ID NO: 206684 - DNA, 19 bp, Homo sapiens
  siRNA target sequence for ATR (NM_001184.2,4317-4335).
ccttgcgtatgctgataat

SEQ ID NO: 206685 - DNA, 19 bp, Homo sapiens
  siRNA target sequence for ATR (NM_001184.2,4318-4336).
cttgcgtatgctgataata

SEQ ID NO: 206686 - DNA, 19 bp, Homo sapiens
  siRNA target sequence for ATR (NM_001184.2,4511-4529).
ccgattggtctggagtaaa

SEQ ID NO: 206687 - DNA, 19 bp, Homo sapiens
  siRNA target sequence for ATR (NM_001184.2,4513-4531).
gattggtctggagtaaaga

SEQ ID NO: 206688 - DNA, 19 bp, Homo sapiens
  siRNA target sequence for ATR (NM_001184.2,4547-4565).
gtaaattgggtagtaactt

SEQ ID NO: 206689 - DNA, 19 bp, Homo sapiens
  siRNA target sequence for ATR (NM_001184.2,4583-4601).
cttgggcaggttatcttat

SEQ ID NO: 206690 - DNA, 19 bp, Homo sapiens
  siRNA target sequence for ATR (NM_001184.2,4587-4605).
ggcaggttatcttattaca

SEQ ID NO: 206691 - DNA, 19 bp, Homo sapiens
  siRNA target sequence for ATR (NM_001184.2,4588-4606).
gcaggttatcttattacaa

SEQ ID NO: 206692 - DNA, 19 bp, Homo sapiens
  siRNA target sequence for ATR (NM_001184.2,4589-4607).
caggttatcttattacaaa

SEQ ID NO: 206693 - DNA, 19 bp, Homo sapiens
  siRNA target sequence for ATR (NM_001184.2,4604-4622).
caaaggttcgacatgatct

SEQ ID NO: 206694 - DNA, 19 bp, Homo sapiens
  siRNA target sequence for ATR (NM_001184.2,4640-4658).
cctgctgtagcattatgat

SEQ ID NO: 206695 - DNA, 19 bp, Homo sapiens
  siRNA target sequence for ATR (NM_001184.2,4643-4661).
gctgtagcattatgatgaa

SEQ ID NO: 206696 - DNA, 19 bp, Homo sapiens
  siRNA target sequence for ATR (NM_001184.2,4713-4731).
cttactgggttgtaatcaa

SEQ ID NO: 206697 - DNA, 19 bp, Homo sapiens
  siRNA target sequence for ATR (NM_001184.2,4719-4737).
gggttgtaatcaagaagat

SEQ ID NO: 206698 - DNA, 19 bp, Homo sapiens
  siRNA target sequence for ATR (NM_001184.2,4721-4739).
gttgtaatcaagaagatca

SEQ ID NO: 206699 - DNA, 19 bp, Homo sapiens
  siRNA target sequence for ATR (NM_001184.2,4780-4798).
gacgatcagcataccataa

SEQ ID NO: 206700 - DNA, 19 bp, Homo sapiens
  siRNA target sequence for ATR (NM_001184.2,4782-4800).
cgatcagcataccataaat

SEQ ID NO: 206701 - DNA, 19 bp, Homo sapiens
  siRNA target sequence for ATR (NM_001184.2,4783-4801).
gatcagcataccataaata

SEQ ID NO: 206702 - DNA, 19 bp, Homo sapiens
  siRNA target sequence for ATR (NM_001184.2,4877-4895).
gggcaaggcacaaatttca

SEQ ID NO: 206703 - DNA, 19 bp, Homo sapiens
  siRNA target sequence for ATR (NM_001184.2,4937-4955).
gaaataaggtagactcaat

SEQ ID NO: 206704 - DNA, 19 bp, Homo sapiens
  siRNA target sequence for ATR (NM_001184.2,4986-5004).
gagtgtaacccgttttcta

SEQ ID NO: 206705 - DNA, 19 bp, Homo sapiens
  siRNA target sequence for ATR (NM_001184.2,4988-5006).
gtgtaacccgttttctaga

SEQ ID NO: 206706 - DNA, 19 bp, Homo sapiens
  siRNA target sequence for ATR (NM_001184.2,5039-5057).
cctttcgctccaaagcata

SEQ ID NO: 206707 - DNA, 19 bp, Homo sapiens
  siRNA target sequence for ATR (NM_001184.2,5054-5072).
catacacacgagctgtaat

SEQ ID NO: 206708 - DNA, 19 bp, Homo sapiens
  siRNA target sequence for ATR (NM_001184.2,5065-5083).
gctgtaatgcactttgaat

SEQ ID NO: 206709 - DNA, 19 bp, Homo sapiens
  siRNA target sequence for ATR (NM_001184.2,5172-5190).
ggccggagtcagtgcaatt

SEQ ID NO: 206710 - DNA, 19 bp, Homo sapiens
  siRNA target sequence for ATR (NM_001184.2,5173-5191).
gccggagtcagtgcaatta

SEQ ID NO: 206711 - DNA, 19 bp, Homo sapiens
  siRNA target sequence for ATR (NM_001184.2,5175-5193).
cggagtcagtgcaattaga

SEQ ID NO: 206712 - DNA, 19 bp, Homo sapiens
  siRNA target sequence for ATR (NM_001184.2,5176-5194).
ggagtcagtgcaattagaa

SEQ ID NO: 206713 - DNA, 19 bp, Homo sapiens
  siRNA target sequence for ATR (NM_001184.2,5177-5195).
gagtcagtgcaattagaaa

SEQ ID NO: 206714 - DNA, 19 bp, Homo sapiens
  siRNA target sequence for ATR (NM_001184.2,5198-5216).
cagaaccatctctaaaaga

SEQ ID NO: 206715 - DNA, 19 bp, Homo sapiens
  siRNA target sequence for ATR (NM_001184.2,5204-5222).
catctctaaaagaacagat

SEQ ID NO: 206716 - DNA, 19 bp, Homo sapiens
  siRNA target sequence for ATR (NM_001184.2,5252-5270).
gggatgccactgcttgtta

SEQ ID NO: 206717 - DNA, 19 bp, Homo sapiens
  siRNA target sequence for ATR (NM_001184.2,5253-5271).
ggatgccactgcttgttat

SEQ ID NO: 206718 - DNA, 19 bp, Homo sapiens
  siRNA target sequence for ATR (NM_001184.2,5257-5275).
gccactgcttgttatgaca

SEQ ID NO: 206719 - DNA, 19 bp, Homo sapiens
  siRNA target sequence for ATR (NM_001184.2,5267-5285).
gttatgacagggctattca

SEQ ID NO: 206720 - DNA, 19 bp, Homo sapiens
  siRNA target sequence for ATR (NM_001184.2,5298-5316).
ccagatcattcattatcat

SEQ ID NO: 206721 - DNA, 19 bp, Homo sapiens
  siRNA target sequence for ATR (NM_001184.2,5344-5362).
ggtcagctgtctactgtta

SEQ ID NO: 206722 - DNA, 19 bp, Homo sapiens
  siRNA target sequence for ATR (NM_001184.2,5349-5367).
gctgtctactgttatcact

SEQ ID NO: 206723 - DNA, 19 bp, Homo sapiens
  siRNA target sequence for ATR (NM_001184.2,5396-5414).
ccgagtggacagatgaatt

SEQ ID NO: 206724 - DNA, 19 bp, Homo sapiens
  siRNA target sequence for ATR (NM_001184.2,5397-5415).
cgagtggacagatgaatta

SEQ ID NO: 206725 - DNA, 19 bp, Homo sapiens
  siRNA target sequence for ATR (NM_001184.2,5511-5529).
cagactgggacagctatta

SEQ ID NO: 206726 - DNA, 19 bp, Homo sapiens
  siRNA target sequence for ATR (NM_001184.2,5546-5564).
gagatatcacagcttttta

SEQ ID NO: 206727 - DNA, 19 bp, Homo sapiens
  siRNA target sequence for ATR (NM_001184.2,5583-5601).
gagagcagaacaaattgta

SEQ ID NO: 206728 - DNA, 19 bp, Homo sapiens
  siRNA target sequence for ATR (NM_001184.2,5631-5649).
ctcctaccaacgaggatat

SEQ ID NO: 206729 - DNA, 19 bp, Homo sapiens
  siRNA target sequence for ATR (NM_001184.2,5633-5651).
cctaccaacgaggatatga

SEQ ID NO: 206730 - DNA, 19 bp, Homo sapiens
  siRNA target sequence for ATR (NM_001184.2,5637-5655).
ccaacgaggatatgaatat

SEQ ID NO: 206731 - DNA, 19 bp, Homo sapiens
  siRNA target sequence for ATR (NM_001184.2,5638-5656).
caacgaggatatgaatata

SEQ ID NO: 206732 - DNA, 19 bp, Homo sapiens
  siRNA target sequence for ATR (NM_001184.2,5661-5679).
gagattgcacatgttatgt

SEQ ID NO: 206733 - DNA, 19 bp, Homo sapiens
  siRNA target sequence for ATR (NM_001184.2,5682-5700).
gttggagcatagcatcaaa

SEQ ID NO: 206734 - DNA, 19 bp, Homo sapiens
  siRNA target sequence for ATR (NM_001184.2,5723-5741).
gtgacagttctcaagaaga

SEQ ID NO: 206735 - DNA, 19 bp, Homo sapiens
  siRNA target sequence for ATR (NM_001184.2,5734-5752).
caagaagattctctaaact

SEQ ID NO: 206736 - DNA, 19 bp, Homo sapiens
  siRNA target sequence for ATR (NM_001184.2,5753-5771).
gggtagctcgactagaaat

SEQ ID NO: 206737 - DNA, 19 bp, Homo sapiens
  siRNA target sequence for ATR (NM_001184.2,5810-5828).
ctctccggagggctttact

SEQ ID NO: 206738 - DNA, 19 bp, Homo sapiens
  siRNA target sequence for ATR (NM_001184.2,5822-5840).
ctttactaagcctcaacaa

SEQ ID NO: 206739 - DNA, 19 bp, Homo sapiens
  siRNA target sequence for ATR (NM_001184.2,5913-5931).
ccaccagacagcctacaat

SEQ ID NO: 206740 - DNA, 19 bp, Homo sapiens
  siRNA target sequence for ATR (NM_001184.2,5928-5946).
caatgctctccttaatgca

SEQ ID NO: 206741 - DNA, 19 bp, Homo sapiens
  siRNA target sequence for ATR (NM_001184.2,5954-5972).
cacgactcgctgaactgta

SEQ ID NO: 206742 - DNA, 19 bp, Homo sapiens
  siRNA target sequence for ATR (NM_001184.2,6015-6033).
ccaggcactaattgttctt

SEQ ID NO: 206743 - DNA, 19 bp, Homo sapiens
  siRNA target sequence for ATR (NM_001184.2,6018-6036).
ggcactaattgttcttcaa

SEQ ID NO: 206744 - DNA, 19 bp, Homo sapiens
  siRNA target sequence for ATR (NM_001184.2,6020-6038).
cactaattgttcttcaaaa

SEQ ID NO: 206745 - DNA, 19 bp, Homo sapiens
  siRNA target sequence for ATR (NM_001184.2,6073-6091).
ccacctgagggtaagaaca

SEQ ID NO: 206746 - DNA, 19 bp, Homo sapiens
  siRNA target sequence for ATR (NM_001184.2,6074-6092).
cacctgagggtaagaacat

SEQ ID NO: 206747 - DNA, 19 bp, Homo sapiens
  siRNA target sequence for ATR (NM_001184.2,6099-6117).
ccatggtcgagctatgcta

SEQ ID NO: 206748 - DNA, 19 bp, Homo sapiens
  siRNA target sequence for ATR (NM_001184.2,6104-6122).
gtcgagctatgctactagt

SEQ ID NO: 206749 - DNA, 19 bp, Homo sapiens
  siRNA target sequence for ATR (NM_001184.2,6115-6133).
ctactagtgggccgattta

SEQ ID NO: 206750 - DNA, 19 bp, Homo sapiens
  siRNA target sequence for ATR (NM_001184.2,6124-6142).
ggccgatttatggaagaaa

SEQ ID NO: 206751 - DNA, 19 bp, Homo sapiens
  siRNA target sequence for ATR (NM_001184.2,6126-6144).
ccgatttatggaagaaaca

SEQ ID NO: 206752 - DNA, 19 bp, Homo sapiens
  siRNA target sequence for ATR (NM_001184.2,6233-6251).
ccaagtactatgacaaatt

SEQ ID NO: 206753 - DNA, 19 bp, Homo sapiens
  siRNA target sequence for ATR (NM_001184.2,6257-6275).
ccatggtcacagacaacaa

SEQ ID NO: 206754 - DNA, 19 bp, Homo sapiens
  siRNA target sequence for ATR (NM_001184.2,6297-6315).
catccggtatatagttctt

SEQ ID NO: 206755 - DNA, 19 bp, Homo sapiens
  siRNA target sequence for ATR (NM_001184.2,6301-6319).
cggtatatagttcttcatt

SEQ ID NO: 206756 - DNA, 19 bp, Homo sapiens
  siRNA target sequence for ATR (NM_001184.2,6324-6342).
cagatctctacaatatgga

SEQ ID NO: 206757 - DNA, 19 bp, Homo sapiens
  siRNA target sequence for ATR (NM_001184.2,6326-6344).
gatctctacaatatggaaa

SEQ ID NO: 206758 - DNA, 19 bp, Homo sapiens
  siRNA target sequence for ATR (NM_001184.2,6360-6378).
gtcaatgccacgaatgtta

SEQ ID NO: 206759 - DNA, 19 bp, Homo sapiens
  siRNA target sequence for ATR (NM_001184.2,6366-6384).
gccacgaatgttaactcta

SEQ ID NO: 206760 - DNA, 19 bp, Homo sapiens
  siRNA target sequence for ATR (NM_001184.2,6367-6385).
ccacgaatgttaactctat

SEQ ID NO: 206761 - DNA, 19 bp, Homo sapiens
  siRNA target sequence for ATR (NM_001184.2,6397-6415).
ggtacaaaggcatatgaat

SEQ ID NO: 206762 - DNA, 19 bp, Homo sapiens
  siRNA target sequence for ATR (NM_001184.2,6429-6447).
ccgctccgatcgtgtacaa

SEQ ID NO: 206763 - DNA, 19 bp, Homo sapiens
  siRNA target sequence for ATR (NM_001184.2,6430-6448).
cgctccgatcgtgtacaaa

SEQ ID NO: 206764 - DNA, 19 bp, Homo sapiens
  siRNA target sequence for ATR (NM_001184.2,6431-6449).
gctccgatcgtgtacaaat

SEQ ID NO: 206765 - DNA, 19 bp, Homo sapiens
  siRNA target sequence for ATR (NM_001184.2,6498-6516).
ctatttagctccatatcaa

SEQ ID NO: 206766 - DNA, 19 bp, Homo sapiens
  siRNA target sequence for ATR (NM_001184.2,6505-6523).
gctccatatcaatttttga

SEQ ID NO: 206767 - DNA, 19 bp, Homo sapiens
  siRNA target sequence for ATR (NM_001184.2,6524-6542).
ctgctttttcacaattgat

SEQ ID NO: 206768 - DNA, 19 bp, Homo sapiens
  siRNA target sequence for ATR (NM_001184.2,6526-6544).
gctttttcacaattgatct

SEQ ID NO: 206769 - DNA, 19 bp, Homo sapiens
  siRNA target sequence for ATR (NM_001184.2,6535-6553).
caattgatctctcgaattt

SEQ ID NO: 206770 - DNA, 19 bp, Homo sapiens
  siRNA target sequence for ATR (NM_001184.2,6543-6561).
ctctcgaatttgtcattct

SEQ ID NO: 206771 - DNA, 19 bp, Homo sapiens
  siRNA target sequence for ATR (NM_001184.2,6554-6572).
gtcattctcacgatgaagt

SEQ ID NO: 206772 - DNA, 19 bp, Homo sapiens
  siRNA target sequence for ATR (NM_001184.2,6696-6714).
cctcaataaagctattcat

SEQ ID NO: 206773 - DNA, 19 bp, Homo sapiens
  siRNA target sequence for ATR (NM_001184.2,6706-6724).
gctattcatatgaaaaaat

SEQ ID NO: 206774 - DNA, 19 bp, Homo sapiens
  siRNA target sequence for ATR (NM_001184.2,6748-6766).
gcaactcgcctaacagata

SEQ ID NO: 206775 - DNA, 19 bp, Homo sapiens
  siRNA target sequence for ATR (NM_001184.2,6749-6767).
caactcgcctaacagataa

SEQ ID NO: 206776 - DNA, 19 bp, Homo sapiens
  siRNA target sequence for ATR (NM_001184.2,6752-6770).
ctcgcctaacagataagct

SEQ ID NO: 206777 - DNA, 19 bp, Homo sapiens
  siRNA target sequence for ATR (NM_001184.2,6790-6808).
ccggttgatggaagtagtt

SEQ ID NO: 206778 - DNA, 19 bp, Homo sapiens
  siRNA target sequence for ATR (NM_001184.2,6803-6821).
gtagttccacattaagcat

SEQ ID NO: 206779 - DNA, 19 bp, Homo sapiens
  siRNA target sequence for ATR (NM_001184.2,6818-6836).
gcatgagcactcattttaa

SEQ ID NO: 206780 - DNA, 19 bp, Homo sapiens
  siRNA target sequence for ATR (NM_001184.2,6824-6842).
gcactcattttaaaatgct

SEQ ID NO: 206781 - DNA, 19 bp, Homo sapiens
  siRNA target sequence for ATR (NM_001184.2,6887-6905).
ctctacaatcagtcatgat

SEQ ID NO: 206782 - DNA, 19 bp, Homo sapiens
  siRNA target sequence for ATR (NM_001184.2,6927-6945).
gggtacccatgctaaccat

SEQ ID NO: 206783 - DNA, 19 bp, Homo sapiens
  siRNA target sequence for ATR (NM_001184.2,6965-6983).
ctggacattgggcctatat

SEQ ID NO: 206784 - DNA, 19 bp, Homo sapiens
  siRNA target sequence for ATR (NM_001184.2,6986-7004).
cagggtttgatgatatggt

SEQ ID NO: 206785 - DNA, 19 bp, Homo sapiens
  siRNA target sequence for ATR (NM_001184.2,7060-7078).
ggaaagttctacatcatga

SEQ ID NO: 206786 - DNA, 19 bp, Homo sapiens
  siRNA target sequence for ATR (NM_001184.2,7061-7079).
gaaagttctacatcatgat

SEQ ID NO: 206787 - DNA, 19 bp, Homo sapiens
  siRNA target sequence for ATR (NM_001184.2,7077-7095).
gatgtgtaagccaaaagat

SEQ ID NO: 206788 - DNA, 19 bp, Homo sapiens
  siRNA target sequence for ATR (NM_001184.2,7103-7121).
gaaaggattgtagactaat

SEQ ID NO: 206789 - DNA, 19 bp, Homo sapiens
  siRNA target sequence for ATR (NM_001184.2,7108-7126).
gattgtagactaatggaat

SEQ ID NO: 206790 - DNA, 19 bp, Homo sapiens
  siRNA target sequence for ATR (NM_001184.2,7167-7185).
gtctcgtagaagagaactt

SEQ ID NO: 206791 - DNA, 19 bp, Homo sapiens
  siRNA target sequence for ATR (NM_001184.2,7171-7189).
cgtagaagagaacttcata

SEQ ID NO: 206792 - DNA, 19 bp, Homo sapiens
  siRNA target sequence for ATR (NM_001184.2,7291-7309).
gaaaagggagtgtatatga

SEQ ID NO: 206793 - DNA, 19 bp, Homo sapiens
  siRNA target sequence for ATR (NM_001184.2,7325-7343).
gccagtgtatgctaccaaa

SEQ ID NO: 206794 - DNA, 19 bp, Homo sapiens
  siRNA target sequence for ATR (NM_001184.2,7339-7357).
ccaaagtcagcagctttat

SEQ ID NO: 206795 - DNA, 19 bp, Homo sapiens
  siRNA target sequence for ATR (NM_001184.2,7346-7364).
cagcagctttatctgaaaa

SEQ ID NO: 206796 - DNA, 19 bp, Homo sapiens
  siRNA target sequence for ATR (NM_001184.2,7368-7386).
caaagtattccgagaattt

SEQ ID NO: 206797 - DNA, 19 bp, Homo sapiens
  siRNA target sequence for ATR (NM_001184.2,7444-7462).
cctacatcatggtacagta

SEQ ID NO: 206798 - DNA, 19 bp, Homo sapiens
  siRNA target sequence for ATR (NM_001184.2,7478-7496).
gccgttccactgcagtaat

SEQ ID NO: 206799 - DNA, 19 bp, Homo sapiens
  siRNA target sequence for ATR (NM_001184.2,7480-7498).
cgttccactgcagtaatgt

SEQ ID NO: 206800 - DNA, 19 bp, Homo sapiens
  siRNA target sequence for ATR (NM_001184.2,7484-7502).
ccactgcagtaatgtcaat

SEQ ID NO: 206801 - DNA, 19 bp, Homo sapiens
  siRNA target sequence for ATR (NM_001184.2,7528-7546).
gaccgtcatggtgaaaata

SEQ ID NO: 206802 - DNA, 19 bp, Homo sapiens
  siRNA target sequence for ATR (NM_001184.2,7530-7548).
ccgtcatggtgaaaatatt

SEQ ID NO: 206803 - DNA, 19 bp, Homo sapiens
  siRNA target sequence for ATR (NM_001184.2,7565-7583).
ctggtgaatgcgtacatgt

SEQ ID NO: 206804 - DNA, 19 bp, Homo sapiens
  siRNA target sequence for ATR (NM_001184.2,7574-7592).
gcgtacatgtagatttcaa

SEQ ID NO: 206805 - DNA, 19 bp, Homo sapiens
  siRNA target sequence for ATR (NM_001184.2,7575-7593).
cgtacatgtagatttcaat

SEQ ID NO: 206806 - DNA, 19 bp, Homo sapiens
  siRNA target sequence for ATR (NM_001184.2,7639-7657).
ccatttcgcctgactcata

SEQ ID NO: 206807 - DNA, 19 bp, Homo sapiens
  siRNA target sequence for ATR (NM_001184.2,7646-7664).
gcctgactcataatatggt

SEQ ID NO: 206808 - DNA, 19 bp, Homo sapiens
  siRNA target sequence for ATR (NM_001184.2,7647-7665).
cctgactcataatatggtt

SEQ ID NO: 206809 - DNA, 19 bp, Homo sapiens
  siRNA target sequence for ATR (NM_001184.2,7648-7666).
ctgactcataatatggtta

SEQ ID NO: 206810 - DNA, 19 bp, Homo sapiens
  siRNA target sequence for ATR (NM_001184.2,7650-7668).
gactcataatatggttaat

SEQ ID NO: 206811 - DNA, 19 bp, Homo sapiens
  siRNA target sequence for ATR (NM_001184.2,7706-7724).
gagcatgtgaagttacaat

SEQ ID NO: 206812 - DNA, 19 bp, Homo sapiens
  siRNA target sequence for ATR (NM_001184.2,7708-7726).
gcatgtgaagttacaatga

SEQ ID NO: 206813 - DNA, 19 bp, Homo sapiens
  siRNA target sequence for ATR (NM_001184.2,7738-7756).
gatcagcgagagcctttaa

SEQ ID NO: 206814 - DNA, 19 bp, Homo sapiens
  siRNA target sequence for ATR (NM_001184.2,7741-7759).
cagcgagagcctttaatga

SEQ ID NO: 206815 - DNA, 19 bp, Homo sapiens
  siRNA target sequence for ATR (NM_001184.2,7743-7761).
gcgagagcctttaatgagt

SEQ ID NO: 206816 - DNA, 19 bp, Homo sapiens
  siRNA target sequence for ATR (NM_001184.2,7823-7841).
ccaaagcgccactgaatga

SEQ ID NO: 206817 - DNA, 19 bp, Homo sapiens
  siRNA target sequence for ATR (NM_001184.2,7866-7884).
ggccaagacccatgttctt

SEQ ID NO: 206818 - DNA, 19 bp, Homo sapiens
  siRNA target sequence for ATR (NM_001184.2,7897-7915).
cgactacaaggtgtaatca

SEQ ID NO: 206819 - DNA, 19 bp, Homo sapiens
  siRNA target sequence for ATR (NM_001184.2,7898-7916).
gactacaaggtgtaatcaa

SEQ ID NO: 206820 - DNA, 19 bp, Homo sapiens
  siRNA target sequence for ATR (NM_001184.2,7900-7918).
ctacaaggtgtaatcaaga

SEQ ID NO: 206821 - DNA, 19 bp, Homo sapiens
  siRNA target sequence for ATR (NM_001184.2,7937-7955).
gactgccgttatctattga

SEQ ID NO: 206822 - DNA, 19 bp, Homo sapiens
  siRNA target sequence for ATR (NM_001184.2,7957-7975).
ggacatgtgcattacctta

SEQ ID NO: 206823 - DNA, 19 bp, Homo sapiens
  siRNA target sequence for ATR (NM_001184.2,7985-8003).
ctactgatgaaaacttact

SEQ ID NO: 206824 - DNA, 19 bp, Homo sapiens
  siRNA target sequence for ATR (NM_001184.2,8017-8035).
cttggttggactccatata

SEQ ID NO: 206825 - DNA, 19 bp, Homo sapiens
  siRNA target sequence for ATR (NM_001184.2,8020-8038).
ggttggactccatatatgt

SEQ ID NO: 206826 - DNA, 19 bp, Homo sapiens
  siRNA target sequence for CDK5R1 (NM_003885.2,285-303).
gccaccgtgggccactata

SEQ ID NO: 206827 - DNA, 19 bp, Homo sapiens
  siRNA target sequence for CDK5R1 (NM_003885.2,457-475).
cgcacctcaacaatgagaa

SEQ ID NO: 206828 - DNA, 19 bp, Homo sapiens
  siRNA target sequence for CDK5R1 (NM_003885.2,840-858).
ctctgcagggatgttatct

SEQ ID NO: 206829 - DNA, 19 bp, Homo sapiens
  siRNA target sequence for CDKN1A (NM_000389.2,237-255).
gatggaacttcgactttgt

SEQ ID NO: 206830 - DNA, 19 bp, Homo sapiens
  siRNA target sequence for CDKN1A (NM_000389.2,528-546).
ccagcatgacagatttcta

SEQ ID NO: 206831 - DNA, 19 bp, Homo sapiens
  siRNA target sequence for PIK3C2A (NM_002645.1,17-35).
gcaacagcggatttaaaga

SEQ ID NO: 206832 - DNA, 19 bp, Homo sapiens
  siRNA target sequence for PIK3C2A (NM_002645.1,137-155).
gacaagtgactgacaatca

SEQ ID NO: 206833 - DNA, 19 bp, Homo sapiens
  siRNA target sequence for PIK3C2A (NM_002645.1,238-256).
gaatcagattcccaaaaaa

SEQ ID NO: 206834 - DNA, 19 bp, Homo sapiens
  siRNA target sequence for PIK3C2A (NM_002645.1,248-266).
cccaaaaaagagcattaga

SEQ ID NO: 206835 - DNA, 19 bp, Homo sapiens
  siRNA target sequence for PIK3C2A (NM_002645.1,319-337).
gacagtttcgagactaaaa

SEQ ID NO: 206836 - DNA, 19 bp, Homo sapiens
  siRNA target sequence for PIK3C2A (NM_002645.1,352-370).
ccagttactcctattctga

SEQ ID NO: 206837 - DNA, 19 bp, Homo sapiens
  siRNA target sequence for PIK3C2A (NM_002645.1,393-411).
ctattttagacctactatt

SEQ ID NO: 206838 - DNA, 19 bp, Homo sapiens
  siRNA target sequence for PIK3C2A (NM_002645.1,538-556).
ccatctacagaacctatat

SEQ ID NO: 206839 - DNA, 19 bp, Homo sapiens
  siRNA target sequence for PIK3C2A (NM_002645.1,539-557).
catctacagaacctatata

SEQ ID NO: 206840 - DNA, 19 bp, Homo sapiens
  siRNA target sequence for PIK3C2A (NM_002645.1,569-587).
cgggacaatctccatattt

SEQ ID NO: 206841 - DNA, 19 bp, Homo sapiens
  siRNA target sequence for PIK3C2A (NM_002645.1,580-598).
ccatatttctcatatcctt

SEQ ID NO: 206842 - DNA, 19 bp, Homo sapiens
  siRNA target sequence for PIK3C2A (NM_002645.1,622-640).
ccacaaggaagcttaccta

SEQ ID NO: 206843 - DNA, 19 bp, Homo sapiens
  siRNA target sequence for PIK3C2A (NM_002645.1,623-641).
cacaaggaagcttacctat

SEQ ID NO: 206844 - DNA, 19 bp, Homo sapiens
  siRNA target sequence for PIK3C2A (NM_002645.1,659-677).
gtactgacatggcaaaact

SEQ ID NO: 206845 - DNA, 19 bp, Homo sapiens
  siRNA target sequence for PIK3C2A (NM_002645.1,662-680).
ctgacatggcaaaactatt

SEQ ID NO: 206846 - DNA, 19 bp, Homo sapiens
  siRNA target sequence for PIK3C2A (NM_002645.1,676-694).
ctatttgacaaaatagcta

SEQ ID NO: 206847 - DNA, 19 bp, Homo sapiens
  siRNA target sequence for PIK3C2A (NM_002645.1,684-702).
caaaatagctagtacatca

SEQ ID NO: 206848 - DNA, 19 bp, Homo sapiens
  siRNA target sequence for PIK3C2A (NM_002645.1,776-794).
ctccaaagtctgaggatat

SEQ ID NO: 206849 - DNA, 19 bp, Homo sapiens
  siRNA target sequence for PIK3C2A (NM_002645.1,778-796).
ccaaagtctgaggatatca

SEQ ID NO: 206850 - DNA, 19 bp, Homo sapiens
  siRNA target sequence for PIK3C2A (NM_002645.1,783-801).
gtctgaggatatcagtaaa

SEQ ID NO: 206851 - DNA, 19 bp, Homo sapiens
  siRNA target sequence for PIK3C2A (NM_002645.1,790-808).
gatatcagtaaatttgact

SEQ ID NO: 206852 - DNA, 19 bp, Homo sapiens
  siRNA target sequence for PIK3C2A (NM_002645.1,814-832).
gacttggatcctctaagta

SEQ ID NO: 206853 - DNA, 19 bp, Homo sapiens
  siRNA target sequence for PIK3C2A (NM_002645.1,830-848).
gtaagcctaaggtggataa

SEQ ID NO: 206854 - DNA, 19 bp, Homo sapiens
  siRNA target sequence for PIK3C2A (NM_002645.1,843-861).
ggataatgtggaggtatta

SEQ ID NO: 206855 - DNA, 19 bp, Homo sapiens
  siRNA target sequence for PIK3C2A (NM_002645.1,931-949).
gagagatcgacagcaaatt

SEQ ID NO: 206856 - DNA, 19 bp, Homo sapiens
  siRNA target sequence for PIK3C2A (NM_002645.1,933-951).
gagatcgacagcaaattgt

SEQ ID NO: 206857 - DNA, 19 bp, Homo sapiens
  siRNA target sequence for PIK3C2A (NM_002645.1,941-959).
cagcaaattgtcatcttga

SEQ ID NO: 206858 - DNA, 19 bp, Homo sapiens
  siRNA target sequence for PIK3C2A (NM_002645.1,1046-1064).
cccagggccatatatctca

SEQ ID NO: 206859 - DNA, 19 bp, Homo sapiens
  siRNA target sequence for PIK3C2A (NM_002645.1,1072-1090).
ccaaatgggaccagtagtt

SEQ ID NO: 206860 - DNA, 19 bp, Homo sapiens
  siRNA target sequence for PIK3C2A (NM_002645.1,1147-1165).
gctttttgtcgatccatta

SEQ ID NO: 206861 - DNA, 19 bp, Homo sapiens
  siRNA target sequence for PIK3C2A (NM_002645.1,1154-1172).
gtcgatccattacaaaatt

SEQ ID NO: 206862 - DNA, 19 bp, Homo sapiens
  siRNA target sequence for PIK3C2A (NM_002645.1,1173-1191).
gaagaccaaatttccatat

SEQ ID NO: 206863 - DNA, 19 bp, Homo sapiens
  siRNA target sequence for PIK3C2A (NM_002645.1,1202-1220).
gcacaaacccaggctattt

SEQ ID NO: 206864 - DNA, 19 bp, Homo sapiens
  siRNA target sequence for PIK3C2A (NM_002645.1,1209-1227).
cccaggctatttgttaagt

SEQ ID NO: 206865 - DNA, 19 bp, Homo sapiens
  siRNA target sequence for PIK3C2A (NM_002645.1,1331-1349).
gttctactgtagaaatcat

SEQ ID NO: 206866 - DNA, 19 bp, Homo sapiens
  siRNA target sequence for PIK3C2A (NM_002645.1,1334-1352).
ctactgtagaaatcattat

SEQ ID NO: 206867 - DNA, 19 bp, Homo sapiens
  siRNA target sequence for PIK3C2A (NM_002645.1,1362-1380).
cctttgctgggtacatgat

SEQ ID NO: 206868 - DNA, 19 bp, Homo sapiens
  siRNA target sequence for PIK3C2A (NM_002645.1,1367-1385).
gctgggtacatgatgactt

SEQ ID NO: 206869 - DNA, 19 bp, Homo sapiens
  siRNA target sequence for PIK3C2A (NM_002645.1,1370-1388).
gggtacatgatgacttgaa

SEQ ID NO: 206870 - DNA, 19 bp, Homo sapiens
  siRNA target sequence for PIK3C2A (NM_002645.1,1399-1417).
gttggcagctatgttctaa

SEQ ID NO: 206871 - DNA, 19 bp, Homo sapiens
  siRNA target sequence for PIK3C2A (NM_002645.1,1463-1481).
gaagtcatgagcatattca

SEQ ID NO: 206872 - DNA, 19 bp, Homo sapiens
  siRNA target sequence for PIK3C2A (NM_002645.1,1496-1514).
gggacacagaaattagact

SEQ ID NO: 206873 - DNA, 19 bp, Homo sapiens
  siRNA target sequence for PIK3C2A (NM_002645.1,1580-1598).
ccgtggatttaaacaaaca

SEQ ID NO: 206874 - DNA, 19 bp, Homo sapiens
  siRNA target sequence for PIK3C2A (NM_002645.1,1597-1615).
cacctgtatcaaatagaaa

SEQ ID NO: 206875 - DNA, 19 bp, Homo sapiens
  siRNA target sequence for PIK3C2A (NM_002645.1,1602-1620).
gtatcaaatagaaaaacct

SEQ ID NO: 206876 - DNA, 19 bp, Homo sapiens
  siRNA target sequence for PIK3C2A (NM_002645.1,1635-1653).
gacgagacaccctgttgaa

SEQ ID NO: 206877 - DNA, 19 bp, Homo sapiens
  siRNA target sequence for PIK3C2A (NM_002645.1,1667-1685).
cttatcacaaccaagtaga

SEQ ID NO: 206878 - DNA, 19 bp, Homo sapiens
  siRNA target sequence for PIK3C2A (NM_002645.1,1713-1731).
ccgagcagtagatcaagta

SEQ ID NO: 206879 - DNA, 19 bp, Homo sapiens
  siRNA target sequence for PIK3C2A (NM_002645.1,1714-1732).
cgagcagtagatcaagtaa

SEQ ID NO: 206880 - DNA, 19 bp, Homo sapiens
  siRNA target sequence for PIK3C2A (NM_002645.1,1715-1733).
gagcagtagatcaagtaat

SEQ ID NO: 206881 - DNA, 19 bp, Homo sapiens
  siRNA target sequence for PIK3C2A (NM_002645.1,1717-1735).
gcagtagatcaagtaatta

SEQ ID NO: 206882 - DNA, 19 bp, Homo sapiens
  siRNA target sequence for PIK3C2A (NM_002645.1,1773-1791).
cgagactcttgccattaca

SEQ ID NO: 206883 - DNA, 19 bp, Homo sapiens
  siRNA target sequence for PIK3C2A (NM_002645.1,1776-1794).
gactcttgccattacagaa

SEQ ID NO: 206884 - DNA, 19 bp, Homo sapiens
  siRNA target sequence for PIK3C2A (NM_002645.1,1783-1801).
gccattacagaatcagtaa

SEQ ID NO: 206885 - DNA, 19 bp, Homo sapiens
  siRNA target sequence for PIK3C2A (NM_002645.1,1784-1802).
ccattacagaatcagtaaa

SEQ ID NO: 206886 - DNA, 19 bp, Homo sapiens
  siRNA target sequence for PIK3C2A (NM_002645.1,1873-1891).
gacactagcaggagttcaa

SEQ ID NO: 206887 - DNA, 19 bp, Homo sapiens
  siRNA target sequence for PIK3C2A (NM_002645.1,1875-1893).
cactagcaggagttcaact

SEQ ID NO: 206888 - DNA, 19 bp, Homo sapiens
  siRNA target sequence for PIK3C2A (NM_002645.1,1889-1907).
caactaggggctcacttaa

SEQ ID NO: 206889 - DNA, 19 bp, Homo sapiens
  siRNA target sequence for PIK3C2A (NM_002645.1,1927-1945).
gtaagcataaaccaattaa

SEQ ID NO: 206890 - DNA, 19 bp, Homo sapiens
  siRNA target sequence for PIK3C2A (NM_002645.1,1966-1984).
ctcagactccatgcaaatt

SEQ ID NO: 206891 - DNA, 19 bp, Homo sapiens
  siRNA target sequence for PIK3C2A (NM_002645.1,2031-2049).
ggaagcatggactacaaca

SEQ ID NO: 206892 - DNA, 19 bp, Homo sapiens
  siRNA target sequence for PIK3C2A (NM_002645.1,2050-2068).
gagcagctccagtttacta

SEQ ID NO: 206893 - DNA, 19 bp, Homo sapiens
  siRNA target sequence for PIK3C2A (NM_002645.1,2052-2070).
gcagctccagtttactatt

SEQ ID NO: 206894 - DNA, 19 bp, Homo sapiens
  siRNA target sequence for PIK3C2A (NM_002645.1,2053-2071).
cagctccagtttactattt

SEQ ID NO: 206895 - DNA, 19 bp, Homo sapiens
  siRNA target sequence for PIK3C2A (NM_002645.1,2090-2108).
caagtaattgggtatcaaa

SEQ ID NO: 206896 - DNA, 19 bp, Homo sapiens
  siRNA target sequence for PIK3C2A (NM_002645.1,2093-2111).
gtaattgggtatcaaatta

SEQ ID NO: 206897 - DNA, 19 bp, Homo sapiens
  siRNA target sequence for PIK3C2A (NM_002645.1,2139-2157).
gtctcacaatggaaaggat

SEQ ID NO: 206898 - DNA, 19 bp, Homo sapiens
  siRNA target sequence for PIK3C2A (NM_002645.1,2184-2202).
ggttggcacttacaagaat

SEQ ID NO: 206899 - DNA, 19 bp, Homo sapiens
  siRNA target sequence for PIK3C2A (NM_002645.1,2185-2203).
gttggcacttacaagaatt

SEQ ID NO: 206900 - DNA, 19 bp, Homo sapiens
  siRNA target sequence for PIK3C2A (NM_002645.1,2188-2206).
ggcacttacaagaatttct

SEQ ID NO: 206901 - DNA, 19 bp, Homo sapiens
  siRNA target sequence for PIK3C2A (NM_002645.1,2189-2207).
gcacttacaagaatttctt

SEQ ID NO: 206902 - DNA, 19 bp, Homo sapiens
  siRNA target sequence for PIK3C2A (NM_002645.1,2222-2240).
gggatgaactaatcatttt

SEQ ID NO: 206903 - DNA, 19 bp, Homo sapiens
  siRNA target sequence for PIK3C2A (NM_002645.1,2223-2241).
ggatgaactaatcattttt

SEQ ID NO: 206904 - DNA, 19 bp, Homo sapiens
  siRNA target sequence for PIK3C2A (NM_002645.1,2243-2261).
ctatccagatatcacaatt

SEQ ID NO: 206905 - DNA, 19 bp, Homo sapiens
  siRNA target sequence for PIK3C2A (NM_002645.1,2264-2282).
cattagaatcagttcttca

SEQ ID NO: 206906 - DNA, 19 bp, Homo sapiens
  siRNA target sequence for PIK3C2A (NM_002645.1,2273-2291).
cagttcttcaccttactct

SEQ ID NO: 206907 - DNA, 19 bp, Homo sapiens
  siRNA target sequence for PIK3C2A (NM_002645.1,2414-2432).
gaactaaacttctatatct

SEQ ID NO: 206908 - DNA, 19 bp, Homo sapiens
  siRNA target sequence for PIK3C2A (NM_002645.1,2441-2459).
catcacatacaaattctgt

SEQ ID NO: 206909 - DNA, 19 bp, Homo sapiens
  siRNA target sequence for PIK3C2A (NM_002645.1,2482-2500).
ggatatgtcatggaaagaa

SEQ ID NO: 206910 - DNA, 19 bp, Homo sapiens
  siRNA target sequence for PIK3C2A (NM_002645.1,2483-2501).
gatatgtcatggaaagaat

SEQ ID NO: 206911 - DNA, 19 bp, Homo sapiens
  siRNA target sequence for PIK3C2A (NM_002645.1,2578-2596).
cagcaacataacttagaaa

SEQ ID NO: 206912 - DNA, 19 bp, Homo sapiens
  siRNA target sequence for PIK3C2A (NM_002645.1,2629-2647).
gatattcttcataaagact

SEQ ID NO: 206913 - DNA, 19 bp, Homo sapiens
  siRNA target sequence for PIK3C2A (NM_002645.1,2775-2793).
caaaacttactcattgctt

SEQ ID NO: 206914 - DNA, 19 bp, Homo sapiens
  siRNA target sequence for PIK3C2A (NM_002645.1,2814-2832).
cccactaattgcattggaa

SEQ ID NO: 206915 - DNA, 19 bp, Homo sapiens
  siRNA target sequence for PIK3C2A (NM_002645.1,2824-2842).
gcattggaacttcttgatt

SEQ ID NO: 206916 - DNA, 19 bp, Homo sapiens
  siRNA target sequence for PIK3C2A (NM_002645.1,2830-2848).
gaacttcttgattcaaaat

SEQ ID NO: 206917 - DNA, 19 bp, Homo sapiens
  siRNA target sequence for PIK3C2A (NM_002645.1,2885-2903).
ggattgaggccattagtga

SEQ ID NO: 206918 - DNA, 19 bp, Homo sapiens
  siRNA target sequence for PIK3C2A (NM_002645.1,2886-2904).
gattgaggccattagtgat

SEQ ID NO: 206919 - DNA, 19 bp, Homo sapiens
  siRNA target sequence for PIK3C2A (NM_002645.1,3013-3031).
cagatagcacacaatttat

SEQ ID NO: 206920 - DNA, 19 bp, Homo sapiens
  siRNA target sequence for PIK3C2A (NM_002645.1,3050-3068).
ccctgcatgatgtacagtt

SEQ ID NO: 206921 - DNA, 19 bp, Homo sapiens
  siRNA target sequence for PIK3C2A (NM_002645.1,3066-3084).
gtttagtacccgatacgaa

SEQ ID NO: 206922 - DNA, 19 bp, Homo sapiens
  siRNA target sequence for PIK3C2A (NM_002645.1,3071-3089).
gtacccgatacgaacatgt

SEQ ID NO: 206923 - DNA, 19 bp, Homo sapiens
  siRNA target sequence for PIK3C2A (NM_002645.1,3074-3092).
cccgatacgaacatgtttt

SEQ ID NO: 206924 - DNA, 19 bp, Homo sapiens
  siRNA target sequence for PIK3C2A (NM_002645.1,3105-3123).
gtcagtaggaggaaaacga

SEQ ID NO: 206925 - DNA, 19 bp, Homo sapiens
  siRNA target sequence for PIK3C2A (NM_002645.1,3113-3131).
gaggaaaacgacttagaga

SEQ ID NO: 206926 - DNA, 19 bp, Homo sapiens
  siRNA target sequence for PIK3C2A (NM_002645.1,3216-3234).
ggttgttctccaaagaagt

SEQ ID NO: 206927 - DNA, 19 bp, Homo sapiens
  siRNA target sequence for PIK3C2A (NM_002645.1,3217-3235).
gttgttctccaaagaagta

SEQ ID NO: 206928 - DNA, 19 bp, Homo sapiens
  siRNA target sequence for PIK3C2A (NM_002645.1,3242-3260).
gagtacagtccttttttca

SEQ ID NO: 206929 - DNA, 19 bp, Homo sapiens
  siRNA target sequence for PIK3C2A (NM_002645.1,3279-3297).
ccctctcaagccaagtcta

SEQ ID NO: 206930 - DNA, 19 bp, Homo sapiens
  siRNA target sequence for PIK3C2A (NM_002645.1,3293-3311).
gtctagtggcaaaagaatt

SEQ ID NO: 206931 - DNA, 19 bp, Homo sapiens
  siRNA target sequence for PIK3C2A (NM_002645.1,3295-3313).
ctagtggcaaaagaattaa

SEQ ID NO: 206932 - DNA, 19 bp, Homo sapiens
  siRNA target sequence for PIK3C2A (NM_002645.1,3346-3364).
gctgtccccctaaaagtca

SEQ ID NO: 206933 - DNA, 19 bp, Homo sapiens
  siRNA target sequence for PIK3C2A (NM_002645.1,3424-3442).
gatcttcggcaagatatgt

SEQ ID NO: 206934 - DNA, 19 bp, Homo sapiens
  siRNA target sequence for PIK3C2A (NM_002645.1,3432-3450).
gcaagatatgttagcttta

SEQ ID NO: 206935 - DNA, 19 bp, Homo sapiens
  siRNA target sequence for PIK3C2A (NM_002645.1,3436-3454).
gatatgttagctttacaga

SEQ ID NO: 206936 - DNA, 19 bp, Homo sapiens
  siRNA target sequence for PIK3C2A (NM_002645.1,3480-3498).
gcttaaagaaggactagat

SEQ ID NO: 206937 - DNA, 19 bp, Homo sapiens
  siRNA target sequence for PIK3C2A (NM_002645.1,3493-3511).
ctagatctgaggatggtaa

SEQ ID NO: 206938 - DNA, 19 bp, Homo sapiens
  siRNA target sequence for PIK3C2A (NM_002645.1,3569-3587).
ccgataccctcaggaaaat

SEQ ID NO: 206939 - DNA, 19 bp, Homo sapiens
  siRNA target sequence for PIK3C2A (NM_002645.1,3601-3619).
ggtgtgacaggatccttta

SEQ ID NO: 206940 - DNA, 19 bp, Homo sapiens
  siRNA target sequence for PIK3C2A (NM_002645.1,3639-3657).
gtggctaaggaaatacaat

SEQ ID NO: 206941 - DNA, 19 bp, Homo sapiens
  siRNA target sequence for PIK3C2A (NM_002645.1,3717-3735).
ctgtgtagccacctatgtt

SEQ ID NO: 206942 - DNA, 19 bp, Homo sapiens
  siRNA target sequence for PIK3C2A (NM_002645.1,3719-3737).
gtgtagccacctatgtttt

SEQ ID NO: 206943 - DNA, 19 bp, Homo sapiens
  siRNA target sequence for PIK3C2A (NM_002645.1,3756-3774).
caatgacaatataatgctt

SEQ ID NO: 206944 - DNA, 19 bp, Homo sapiens
  siRNA target sequence for PIK3C2A (NM_002645.1,3779-3797).
gcacgggacacatgtttca

SEQ ID NO: 206945 - DNA, 19 bp, Homo sapiens
  siRNA target sequence for PIK3C2A (NM_002645.1,3950-3968).
gtcaggcctacaacttgat

SEQ ID NO: 206946 - DNA, 19 bp, Homo sapiens
  siRNA target sequence for PIK3C2A (NM_002645.1,3954-3972).
ggcctacaacttgataaga

SEQ ID NO: 206947 - DNA, 19 bp, Homo sapiens
  siRNA target sequence for PIK3C2A (NM_002645.1,4023-4041).
gttaccagaacttacaagt

SEQ ID NO: 206948 - DNA, 19 bp, Homo sapiens
  siRNA target sequence for PIK3C2A (NM_002645.1,4059-4077).
cgttagagatgcacttcaa

SEQ ID NO: 206949 - DNA, 19 bp, Homo sapiens
  siRNA target sequence for PIK3C2A (NM_002645.1,4093-4111).
gcagaagctacaattttct

SEQ ID NO: 206950 - DNA, 19 bp, Homo sapiens
  siRNA target sequence for PIK3C2A (NM_002645.1,4096-4114).
gaagctacaattttcttta

SEQ ID NO: 206951 - DNA, 19 bp, Homo sapiens
  siRNA target sequence for PIK3C2A (NM_002645.1,4110-4128).
ctttactaggcttattgaa

SEQ ID NO: 206952 - DNA, 19 bp, Homo sapiens
  siRNA target sequence for PIK3C2A (NM_002645.1,4142-4160).
gcattgccacaaagtttaa

SEQ ID NO: 206953 - DNA, 19 bp, Homo sapiens
  siRNA target sequence for PIK3C2A (NM_002645.1,4177-4195).
cttgctcagcttcgttttt

SEQ ID NO: 206954 - DNA, 19 bp, Homo sapiens
  siRNA target sequence for PIK3C2A (NM_002645.1,4196-4214).
ctggtcttccttctaatga

SEQ ID NO: 206955 - DNA, 19 bp, Homo sapiens
  siRNA target sequence for PIK3C2A (NM_002645.1,4256-4274).
gacaagatggtcgaatcaa

SEQ ID NO: 206956 - DNA, 19 bp, Homo sapiens
  siRNA target sequence for PIK3C2A (NM_002645.1,4302-4320).
gaaatacaacccagataaa

SEQ ID NO: 206957 - DNA, 19 bp, Homo sapiens
  siRNA target sequence for PIK3C2A (NM_002645.1,4308-4326).
caacccagataaacattat

SEQ ID NO: 206958 - DNA, 19 bp, Homo sapiens
  siRNA target sequence for PIK3C2A (NM_002645.1,4370-4388).
catttgtcttccgaacatt

SEQ ID NO: 206959 - DNA, 19 bp, Homo sapiens
  siRNA target sequence for PIK3C2A (NM_002645.1,4408-4426).
cacaataagctcagtatta

SEQ ID NO: 206960 - DNA, 19 bp, Homo sapiens
  siRNA target sequence for PIK3C2A (NM_002645.1,4471-4489).
ctaggaagaacacacataa

SEQ ID NO: 206961 - DNA, 19 bp, Homo sapiens
  siRNA target sequence for PIK3C2A (NM_002645.1,4708-4726).
cgaaatggtactcttttca

SEQ ID NO: 206962 - DNA, 19 bp, Homo sapiens
  siRNA target sequence for PIK3C2A (NM_002645.1,4734-4752).
gatgcatatcaaagatctt

SEQ ID NO: 206963 - DNA, 19 bp, Homo sapiens
  siRNA target sequence for PIK3C2A (NM_002645.1,4737-4755).
gcatatcaaagatcttgtt

SEQ ID NO: 206964 - DNA, 19 bp, Homo sapiens
  siRNA target sequence for PIK3C2A (NM_002645.1,4765-4783).
ggagctgacccaaatccat

SEQ ID NO: 206965 - DNA, 19 bp, Homo sapiens
  siRNA target sequence for PIK3C2A (NM_002645.1,4766-4784).
gagctgacccaaatccata

SEQ ID NO: 206966 - DNA, 19 bp, Homo sapiens
  siRNA target sequence for PIK3C2A (NM_002645.1,4769-4787).
ctgacccaaatccatatgt

SEQ ID NO: 206967 - DNA, 19 bp, Homo sapiens
  siRNA target sequence for PIK3C2A (NM_002645.1,4813-4831).
cacaaaacatccaaacgta

SEQ ID NO: 206968 - DNA, 19 bp, Homo sapiens
  siRNA target sequence for PIK3C2A (NM_002645.1,4815-4833).
caaaacatccaaacgtaaa

SEQ ID NO: 206969 - DNA, 19 bp, Homo sapiens
  siRNA target sequence for PIK3C2A (NM_002645.1,4853-4871).
cgaggaatccgacattcaa

SEQ ID NO: 206970 - DNA, 19 bp, Homo sapiens
  siRNA target sequence for PIK3C2A (NM_002645.1,4854-4872).
gaggaatccgacattcaat

SEQ ID NO: 206971 - DNA, 19 bp, Homo sapiens
  siRNA target sequence for PIK3C2A (NM_002645.1,4856-4874).
ggaatccgacattcaatga

SEQ ID NO: 206972 - DNA, 19 bp, Homo sapiens
  siRNA target sequence for PIK3C2A (NM_002645.1,4857-4875).
gaatccgacattcaatgaa

SEQ ID NO: 206973 - DNA, 19 bp, Homo sapiens
  siRNA target sequence for PIK3C2A (NM_002645.1,4862-4880).
cgacattcaatgaaatgct

SEQ ID NO: 206974 - DNA, 19 bp, Homo sapiens
  siRNA target sequence for PIK3C2A (NM_002645.1,4879-4897).
cttgtatacagtggatata

SEQ ID NO: 206975 - DNA, 19 bp, Homo sapiens
  siRNA target sequence for PIK3C2A (NM_002645.1,4898-4916).
gcaaagaaaccctaagaca

SEQ ID NO: 206976 - DNA, 19 bp, Homo sapiens
  siRNA target sequence for PIK3C2A (NM_002645.1,4908-4926).
cctaagacagcgagaactt

SEQ ID NO: 206977 - DNA, 19 bp, Homo sapiens
  siRNA target sequence for PIK3C2A (NM_002645.1,4913-4931).
gacagcgagaacttcaact

SEQ ID NO: 206978 - DNA, 19 bp, Homo sapiens
  siRNA target sequence for PIK3C2A (NM_002645.1,4915-4933).
cagcgagaacttcaactaa

SEQ ID NO: 206979 - DNA, 19 bp, Homo sapiens
  siRNA target sequence for PIK3C2A (NM_002645.1,4917-4935).
gcgagaacttcaactaagt

SEQ ID NO: 206980 - DNA, 19 bp, Homo sapiens
  siRNA target sequence for PIK3C2A (NM_002645.1,4979-4997).
gagtaaccctgcctttgaa

SEQ ID NO: 206981 - DNA, 19 bp, Homo sapiens
  siRNA target sequence for PIK3C2B (NM_002646.2,592-610).
cccggctccggcatgacaa

SEQ ID NO: 206982 - DNA, 19 bp, Homo sapiens
  siRNA target sequence for PIK3C2B (NM_002646.2,739-757).
ctgatcctacccttaacta

SEQ ID NO: 206983 - DNA, 19 bp, Homo sapiens
  siRNA target sequence for PIK3C2B (NM_002646.2,741-759).
gatcctacccttaactaca

SEQ ID NO: 206984 - DNA, 19 bp, Homo sapiens
  siRNA target sequence for PIK3C2B (NM_002646.2,744-762).
cctacccttaactacaact

SEQ ID NO: 206985 - DNA, 19 bp, Homo sapiens
  siRNA target sequence for PIK3C2B (NM_002646.2,844-862).
ccctgtctggagactatct

SEQ ID NO: 206986 - DNA, 19 bp, Homo sapiens
  siRNA target sequence for PIK3C2B (NM_002646.2,846-864).
ctgtctggagactatctct

SEQ ID NO: 206987 - DNA, 19 bp, Homo sapiens
  siRNA target sequence for PIK3C2B (NM_002646.2,852-870).
ggagactatctctacattt

SEQ ID NO: 206988 - DNA, 19 bp, Homo sapiens
  siRNA target sequence for PIK3C2B (NM_002646.2,853-871).
gagactatctctacatttt

SEQ ID NO: 206989 - DNA, 19 bp, Homo sapiens
  siRNA target sequence for PIK3C2B (NM_002646.2,924-942).
ggctcttgcaagaaactat

SEQ ID NO: 206990 - DNA, 19 bp, Homo sapiens
  siRNA target sequence for PIK3C2B (NM_002646.2,1035-1053).
cccagtgacatcaacactt

SEQ ID NO: 206991 - DNA, 19 bp, Homo sapiens
  siRNA target sequence for PIK3C2B (NM_002646.2,1041-1059).
gacatcaacactttctctt

SEQ ID NO: 206992 - DNA, 19 bp, Homo sapiens
  siRNA target sequence for PIK3C2B (NM_002646.2,1148-1166).
ggggtctgtggactatgat

SEQ ID NO: 206993 - DNA, 19 bp, Homo sapiens
  siRNA target sequence for PIK3C2B (NM_002646.2,1153-1171).
ctgtggactatgatggtat

SEQ ID NO: 206994 - DNA, 19 bp, Homo sapiens
  siRNA target sequence for PIK3C2B (NM_002646.2,1196-1214).
cttgaaatcgacctatgat

SEQ ID NO: 206995 - DNA, 19 bp, Homo sapiens
  siRNA target sequence for PIK3C2B (NM_002646.2,1207-1225).
cctatgatgcggagatgtt

SEQ ID NO: 206996 - DNA, 19 bp, Homo sapiens
  siRNA target sequence for PIK3C2B (NM_002646.2,1355-1373).
ctatggcaaccgaaagaat

SEQ ID NO: 206997 - DNA, 19 bp, Homo sapiens
  siRNA target sequence for PIK3C2B (NM_002646.2,1528-1546).
ctgacatccaagactactt

SEQ ID NO: 206998 - DNA, 19 bp, Homo sapiens
  siRNA target sequence for PIK3C2B (NM_002646.2,1641-1659).
caagaggcactcactttca

SEQ ID NO: 206999 - DNA, 19 bp, Homo sapiens
  siRNA target sequence for PIK3C2B (NM_002646.2,1678-1696).
ctgtagacttgcttatcta

SEQ ID NO: 207000 - DNA, 19 bp, Homo sapiens
  siRNA target sequence for PIK3C2B (NM_002646.2,1809-1827).
catgagtacatccaatact

SEQ ID NO: 207001 - DNA, 19 bp, Homo sapiens
  siRNA target sequence for PIK3C2B (NM_002646.2,1820-1838).
ccaatactgccgcaagttt

SEQ ID NO: 207002 - DNA, 19 bp, Homo sapiens
  siRNA target sequence for PIK3C2B (NM_002646.2,1918-1936).
gcccctccaccttgaacta

SEQ ID NO: 207003 - DNA, 19 bp, Homo sapiens
  siRNA target sequence for PIK3C2B (NM_002646.2,1993-2011).
gtcttctgttcgacactta

SEQ ID NO: 207004 - DNA, 19 bp, Homo sapiens
  siRNA target sequence for PIK3C2B (NM_002646.2,2168-2186).
ccgcatgcagcctaaaatt

SEQ ID NO: 207005 - DNA, 19 bp, Homo sapiens
  siRNA target sequence for PIK3C2B (NM_002646.2,2274-2292).
ctgtactgcaacacattca

SEQ ID NO: 207006 - DNA, 19 bp, Homo sapiens
  siRNA target sequence for PIK3C2B (NM_002646.2,2415-2433).
gctaccagctatgaagatt

SEQ ID NO: 207007 - DNA, 19 bp, Homo sapiens
  siRNA target sequence for PIK3C2B (NM_002646.2,2638-2656).
cctcagaggccaataagca

SEQ ID NO: 207008 - DNA, 19 bp, Homo sapiens
  siRNA target sequence for PIK3C2B (NM_002646.2,2689-2707).
ctaccccactcttcaactt

SEQ ID NO: 207009 - DNA, 19 bp, Homo sapiens
  siRNA target sequence for PIK3C2B (NM_002646.2,2749-2767).
ggccagcaacacaggaaaa

SEQ ID NO: 207010 - DNA, 19 bp, Homo sapiens
  siRNA target sequence for PIK3C2B (NM_002646.2,2777-2795).
ccgttggagtgcacctaat

SEQ ID NO: 207011 - DNA, 19 bp, Homo sapiens
  siRNA target sequence for PIK3C2B (NM_002646.2,2778-2796).
cgttggagtgcacctaatt

SEQ ID NO: 207012 - DNA, 19 bp, Homo sapiens
  siRNA target sequence for PIK3C2B (NM_002646.2,2779-2797).
gttggagtgcacctaattt

SEQ ID NO: 207013 - DNA, 19 bp, Homo sapiens
  siRNA target sequence for PIK3C2B (NM_002646.2,2782-2800).
ggagtgcacctaatttcca

SEQ ID NO: 207014 - DNA, 19 bp, Homo sapiens
  siRNA target sequence for PIK3C2B (NM_002646.2,2836-2854).
ccacctcggcctttgacat

SEQ ID NO: 207015 - DNA, 19 bp, Homo sapiens
  siRNA target sequence for PIK3C2B (NM_002646.2,2839-2857).
cctcggcctttgacatcaa

SEQ ID NO: 207016 - DNA, 19 bp, Homo sapiens
  siRNA target sequence for PIK3C2B (NM_002646.2,2844-2862).
gcctttgacatcaagttca

SEQ ID NO: 207017 - DNA, 19 bp, Homo sapiens
  siRNA target sequence for PIK3C2B (NM_002646.2,2919-2937).
gaagaccagcgcaagctta

SEQ ID NO: 207018 - DNA, 19 bp, Homo sapiens
  siRNA target sequence for PIK3C2B (NM_002646.2,2925-2943).
cagcgcaagcttaaagaca

SEQ ID NO: 207019 - DNA, 19 bp, Homo sapiens
  siRNA target sequence for PIK3C2B (NM_002646.2,2929-2947).
gcaagcttaaagacatcat

SEQ ID NO: 207020 - DNA, 19 bp, Homo sapiens
  siRNA target sequence for PIK3C2B (NM_002646.2,2994-3012).
ctgtgggagaagcgatatt

SEQ ID NO: 207021 - DNA, 19 bp, Homo sapiens
  siRNA target sequence for PIK3C2B (NM_002646.2,3079-3097).
gcctgcctgacatctatgt

SEQ ID NO: 207022 - DNA, 19 bp, Homo sapiens
  siRNA target sequence for PIK3C2B (NM_002646.2,3080-3098).
cctgcctgacatctatgtt

SEQ ID NO: 207023 - DNA, 19 bp, Homo sapiens
  siRNA target sequence for PIK3C2B (NM_002646.2,3327-3345).
gtgactcactacttcttct

SEQ ID NO: 207024 - DNA, 19 bp, Homo sapiens
  siRNA target sequence for PIK3C2B (NM_002646.2,3433-3451).
ggctgagagaagagtttaa

SEQ ID NO: 207025 - DNA, 19 bp, Homo sapiens
  siRNA target sequence for PIK3C2B (NM_002646.2,3454-3472).
gccagtgctggcttgtcaa

SEQ ID NO: 207026 - DNA, 19 bp, Homo sapiens
  siRNA target sequence for PIK3C2B (NM_002646.2,3634-3652).
gggactgttcctacttcaa

SEQ ID NO: 207027 - DNA, 19 bp, Homo sapiens
  siRNA target sequence for PIK3C2B (NM_002646.2,3660-3678).
gctgtccccctcaaactct

SEQ ID NO: 207028 - DNA, 19 bp, Homo sapiens
  siRNA target sequence for PIK3C2B (NM_002646.2,3741-3759).
cttcgccaggacatgctaa

SEQ ID NO: 207029 - DNA, 19 bp, Homo sapiens
  siRNA target sequence for PIK3C2B (NM_002646.2,3755-3773).
gctaacgctgcagatgatt

SEQ ID NO: 207030 - DNA, 19 bp, Homo sapiens
  siRNA target sequence for PIK3C2B (NM_002646.2,3765-3783).
cagatgattcgcatcatga

SEQ ID NO: 207031 - DNA, 19 bp, Homo sapiens
  siRNA target sequence for PIK3C2B (NM_002646.2,3774-3792).
cgcatcatgagcaagatct

SEQ ID NO: 207032 - DNA, 19 bp, Homo sapiens
  siRNA target sequence for PIK3C2B (NM_002646.2,3883-3901).
ctgagaccctgcgtaagat

SEQ ID NO: 207033 - DNA, 19 bp, Homo sapiens
  siRNA target sequence for PIK3C2B (NM_002646.2,4231-4249).
ccagccgcttccatgattt

SEQ ID NO: 207034 - DNA, 19 bp, Homo sapiens
  siRNA target sequence for PIK3C2B (NM_002646.2,4413-4431).
gccactacctacttcacta

SEQ ID NO: 207035 - DNA, 19 bp, Homo sapiens
  siRNA target sequence for PIK3C2B (NM_002646.2,4565-4583).
gagctctggccgaatcagt

SEQ ID NO: 207036 - DNA, 19 bp, Homo sapiens
  siRNA target sequence for PIK3C2B (NM_002646.2,4572-4590).
ggccgaatcagtgatgttt

SEQ ID NO: 207037 - DNA, 19 bp, Homo sapiens
  siRNA target sequence for PIK3C2B (NM_002646.2,4573-4591).
gccgaatcagtgatgtttt

SEQ ID NO: 207038 - DNA, 19 bp, Homo sapiens
  siRNA target sequence for PIK3C2B (NM_002646.2,4621-4639).
ccaacaaaggctatatata

SEQ ID NO: 207039 - DNA, 19 bp, Homo sapiens
  siRNA target sequence for PIK3C2B (NM_002646.2,4630-4648).
gctatatatatgtggtaaa

SEQ ID NO: 207040 - DNA, 19 bp, Homo sapiens
  siRNA target sequence for PIK3C2B (NM_002646.2,4707-4725).
caggaattacacaataagt

SEQ ID NO: 207041 - DNA, 19 bp, Homo sapiens
  siRNA target sequence for PIK3C2B (NM_002646.2,4824-4842).
gagctaaacggttacatct

SEQ ID NO: 207042 - DNA, 19 bp, Homo sapiens
  siRNA target sequence for PIK3C2B (NM_002646.2,4834-4852).
gttacatctggcacttgat

SEQ ID NO: 207043 - DNA, 19 bp, Homo sapiens
  siRNA target sequence for PIK3C2B (NM_002646.2,4866-4884).
gaggtggccgagtgtgatt

SEQ ID NO: 207044 - DNA, 19 bp, Homo sapiens
  siRNA target sequence for PIK3C2B (NM_002646.2,5017-5035).
cctacaaaaacaataaact

SEQ ID NO: 207045 - DNA, 19 bp, Homo sapiens
  siRNA target sequence for PIK3C2B (NM_002646.2,5121-5139).
cctgaccctcagaaaacca

SEQ ID NO: 207046 - DNA, 19 bp, Homo sapiens
  siRNA target sequence for PIK3C2B (NM_002646.2,5137-5155).
ccactaagaggaaaaccaa

SEQ ID NO: 207047 - DNA, 19 bp, Homo sapiens
  siRNA target sequence for PIK3C2B (NM_002646.2,5354-5372).
cctgggatctcgaagtcat

SEQ ID NO: 207048 - DNA, 19 bp, Homo sapiens
  siRNA target sequence for PIK3C2G (NM_004570.2,131-149).
gcaaacggatccaaatcct

SEQ ID NO: 207049 - DNA, 19 bp, Homo sapiens
  siRNA target sequence for PIK3C2G (NM_004570.2,132-150).
caaacggatccaaatccta

SEQ ID NO: 207050 - DNA, 19 bp, Homo sapiens
  siRNA target sequence for PIK3C2G (NM_004570.2,137-155).
ggatccaaatcctaatgaa

SEQ ID NO: 207051 - DNA, 19 bp, Homo sapiens
  siRNA target sequence for PIK3C2G (NM_004570.2,138-156).
gatccaaatcctaatgaat

SEQ ID NO: 207052 - DNA, 19 bp, Homo sapiens
  siRNA target sequence for PIK3C2G (NM_004570.2,148-166).
ctaatgaatcacacgaaaa

SEQ ID NO: 207053 - DNA, 19 bp, Homo sapiens
  siRNA target sequence for PIK3C2G (NM_004570.2,157-175).
cacacgaaaagcagtatga

SEQ ID NO: 207054 - DNA, 19 bp, Homo sapiens
  siRNA target sequence for PIK3C2G (NM_004570.2,168-186).
cagtatgaacaccaagaat

SEQ ID NO: 207055 - DNA, 19 bp, Homo sapiens
  siRNA target sequence for PIK3C2G (NM_004570.2,226-244).
gtctgggttttgatcagat

SEQ ID NO: 207056 - DNA, 19 bp, Homo sapiens
  siRNA target sequence for PIK3C2G (NM_004570.2,230-248).
gggttttgatcagatagta

SEQ ID NO: 207057 - DNA, 19 bp, Homo sapiens
  siRNA target sequence for PIK3C2G (NM_004570.2,232-250).
gttttgatcagatagtaga

SEQ ID NO: 207058 - DNA, 19 bp, Homo sapiens
  siRNA target sequence for PIK3C2G (NM_004570.2,275-293).
ctacgagagtgaaattgat

SEQ ID NO: 207059 - DNA, 19 bp, Homo sapiens
  siRNA target sequence for PIK3C2G (NM_004570.2,407-425).
ctggcatcaagttagcaaa

SEQ ID NO: 207060 - DNA, 19 bp, Homo sapiens
  siRNA target sequence for PIK3C2G (NM_004570.2,426-444).
gcaccagcaattggtttta

SEQ ID NO: 207061 - DNA, 19 bp, Homo sapiens
  siRNA target sequence for PIK3C2G (NM_004570.2,459-477).
ccaaaacctcaaaatacga

SEQ ID NO: 207062 - DNA, 19 bp, Homo sapiens
  siRNA target sequence for PIK3C2G (NM_004570.2,460-478).
caaaacctcaaaatacgaa

SEQ ID NO: 207063 - DNA, 19 bp, Homo sapiens
  siRNA target sequence for PIK3C2G (NM_004570.2,466-484).
ctcaaaatacgaataaaga

SEQ ID NO: 207064 - DNA, 19 bp, Homo sapiens
  siRNA target sequence for PIK3C2G (NM_004570.2,494-512).
gggaagccccataggaaaa

SEQ ID NO: 207065 - DNA, 19 bp, Homo sapiens
  siRNA target sequence for PIK3C2G (NM_004570.2,499-517).
gccccataggaaaacatca

SEQ ID NO: 207066 - DNA, 19 bp, Homo sapiens
  siRNA target sequence for PIK3C2G (NM_004570.2,500-518).
ccccataggaaaacatcat

SEQ ID NO: 207067 - DNA, 19 bp, Homo sapiens
  siRNA target sequence for PIK3C2G (NM_004570.2,533-551).
cagattcagtattttagct

SEQ ID NO: 207068 - DNA, 19 bp, Homo sapiens
  siRNA target sequence for PIK3C2G (NM_004570.2,560-578).
cacaagtttggataaaatt

SEQ ID NO: 207069 - DNA, 19 bp, Homo sapiens
  siRNA target sequence for PIK3C2G (NM_004570.2,562-580).
caagtttggataaaattaa

SEQ ID NO: 207070 - DNA, 19 bp, Homo sapiens
  siRNA target sequence for PIK3C2G (NM_004570.2,634-652).
gtagcattcctccaacaaa

SEQ ID NO: 207071 - DNA, 19 bp, Homo sapiens
  siRNA target sequence for PIK3C2G (NM_004570.2,698-716).
gagtggacatgtgaacatt

SEQ ID NO: 207072 - DNA, 19 bp, Homo sapiens
  siRNA target sequence for PIK3C2G (NM_004570.2,758-776).
cggaatgtgggaaagtaca

SEQ ID NO: 207073 - DNA, 19 bp, Homo sapiens
  siRNA target sequence for PIK3C2G (NM_004570.2,828-846).
cctcaaagcagcaatacga

SEQ ID NO: 207074 - DNA, 19 bp, Homo sapiens
  siRNA target sequence for PIK3C2G (NM_004570.2,900-918).
gctgatgttaatttcaatt

SEQ ID NO: 207075 - DNA, 19 bp, Homo sapiens
  siRNA target sequence for PIK3C2G (NM_004570.2,951-969).
ccgtatcagctcttttcta

SEQ ID NO: 207076 - DNA, 19 bp, Homo sapiens
  siRNA target sequence for PIK3C2G (NM_004570.2,952-970).
cgtatcagctcttttctaa

SEQ ID NO: 207077 - DNA, 19 bp, Homo sapiens
  siRNA target sequence for PIK3C2G (NM_004570.2,1004-1022).
ctcaacacaacctcttcat

SEQ ID NO: 207078 - DNA, 19 bp, Homo sapiens
  siRNA target sequence for PIK3C2G (NM_004570.2,1033-1051).
gtgctaattatcttgtcaa

SEQ ID NO: 207079 - DNA, 19 bp, Homo sapiens
  siRNA target sequence for PIK3C2G (NM_004570.2,1270-1288).
gtcagttttatctgaatca

SEQ ID NO: 207080 - DNA, 19 bp, Homo sapiens
  siRNA target sequence for PIK3C2G (NM_004570.2,1296-1314).
gaatttatgcatatttgga

SEQ ID NO: 207081 - DNA, 19 bp, Homo sapiens
  siRNA target sequence for PIK3C2G (NM_004570.2,1313-1331).
gaaagtatccagacaatgt

SEQ ID NO: 207082 - DNA, 19 bp, Homo sapiens
  siRNA target sequence for PIK3C2G (NM_004570.2,1324-1342).
gacaatgtctcttaacact

SEQ ID NO: 207083 - DNA, 19 bp, Homo sapiens
  siRNA target sequence for PIK3C2G (NM_004570.2,1364-1382).
cctgaaatacctattgaaa

SEQ ID NO: 207084 - DNA, 19 bp, Homo sapiens
  siRNA target sequence for PIK3C2G (NM_004570.2,1394-1412).
cgtgtataatattattgaa

SEQ ID NO: 207085 - DNA, 19 bp, Homo sapiens
  siRNA target sequence for PIK3C2G (NM_004570.2,1467-1485).
gatgcagtaaatgaactaa

SEQ ID NO: 207086 - DNA, 19 bp, Homo sapiens
  siRNA target sequence for PIK3C2G (NM_004570.2,1579-1597).
catccatctaccagctaat

SEQ ID NO: 207087 - DNA, 19 bp, Homo sapiens
  siRNA target sequence for PIK3C2G (NM_004570.2,1604-1622).
ctactgtaacagcttttat

SEQ ID NO: 207088 - DNA, 19 bp, Homo sapiens
  siRNA target sequence for PIK3C2G (NM_004570.2,1607-1625).
ctgtaacagcttttatgca

SEQ ID NO: 207089 - DNA, 19 bp, Homo sapiens
  siRNA target sequence for PIK3C2G (NM_004570.2,1733-1751).
ggtgcacaggatcaatttt

SEQ ID NO: 207090 - DNA, 19 bp, Homo sapiens
  siRNA target sequence for PIK3C2G (NM_004570.2,1779-1797).
gaatccatgctcactgtaa

SEQ ID NO: 207091 - DNA, 19 bp, Homo sapiens
  siRNA target sequence for PIK3C2G (NM_004570.2,1822-1840).
ccaacaatgcaaatttact

SEQ ID NO: 207092 - DNA, 19 bp, Homo sapiens
  siRNA target sequence for PIK3C2G (NM_004570.2,1918-1936).
gtgagcctcccgtagaaat

SEQ ID NO: 207093 - DNA, 19 bp, Homo sapiens
  siRNA target sequence for PIK3C2G (NM_004570.2,1920-1938).
gagcctcccgtagaaatga

SEQ ID NO: 207094 - DNA, 19 bp, Homo sapiens
  siRNA target sequence for PIK3C2G (NM_004570.2,1922-1940).
gcctcccgtagaaatgata

SEQ ID NO: 207095 - DNA, 19 bp, Homo sapiens
  siRNA target sequence for PIK3C2G (NM_004570.2,1923-1941).
cctcccgtagaaatgataa

SEQ ID NO: 207096 - DNA, 19 bp, Homo sapiens
  siRNA target sequence for PIK3C2G (NM_004570.2,1944-1962).
ccaggagtgtgggatgtaa

SEQ ID NO: 207097 - DNA, 19 bp, Homo sapiens
  siRNA target sequence for PIK3C2G (NM_004570.2,1948-1966).
gagtgtgggatgtaagtca

SEQ ID NO: 207098 - DNA, 19 bp, Homo sapiens
  siRNA target sequence for PIK3C2G (NM_004570.2,1977-1995).
gtgaccctgcagattgatt

SEQ ID NO: 207099 - DNA, 19 bp, Homo sapiens
  siRNA target sequence for PIK3C2G (NM_004570.2,2001-2019).
gctactgggtgggagtata

SEQ ID NO: 207100 - DNA, 19 bp, Homo sapiens
  siRNA target sequence for PIK3C2G (NM_004570.2,2002-2020).
ctactgggtgggagtatat

SEQ ID NO: 207101 - DNA, 19 bp, Homo sapiens
  siRNA target sequence for PIK3C2G (NM_004570.2,2015-2033).
gtatatgaaacctgattct

SEQ ID NO: 207102 - DNA, 19 bp, Homo sapiens
  siRNA target sequence for PIK3C2G (NM_004570.2,2060-2078).
gccactaaaggagtgtata

SEQ ID NO: 207103 - DNA, 19 bp, Homo sapiens
  siRNA target sequence for PIK3C2G (NM_004570.2,2061-2079).
ccactaaaggagtgtataa

SEQ ID NO: 207104 - DNA, 19 bp, Homo sapiens
  siRNA target sequence for PIK3C2G (NM_004570.2,2062-2080).
cactaaaggagtgtataaa

SEQ ID NO: 207105 - DNA, 19 bp, Homo sapiens
  siRNA target sequence for PIK3C2G (NM_004570.2,2158-2176).
gcttctactgcaataatga

SEQ ID NO: 207106 - DNA, 19 bp, Homo sapiens
  siRNA target sequence for PIK3C2G (NM_004570.2,2285-2303).
ggctcttgggcttttgact

SEQ ID NO: 207107 - DNA, 19 bp, Homo sapiens
  siRNA target sequence for PIK3C2G (NM_004570.2,2313-2331).
ccagatcaagaaattcgta

SEQ ID NO: 207108 - DNA, 19 bp, Homo sapiens
  siRNA target sequence for PIK3C2G (NM_004570.2,2314-2332).
cagatcaagaaattcgtaa

SEQ ID NO: 207109 - DNA, 19 bp, Homo sapiens
  siRNA target sequence for PIK3C2G (NM_004570.2,2337-2355).
gcagttcaacaattagaca

SEQ ID NO: 207110 - DNA, 19 bp, Homo sapiens
  siRNA target sequence for PIK3C2G (NM_004570.2,2338-2356).
cagttcaacaattagacaa

SEQ ID NO: 207111 - DNA, 19 bp, Homo sapiens
  siRNA target sequence for PIK3C2G (NM_004570.2,2400-2418).
caggctgtcaagtttgaat

SEQ ID NO: 207112 - DNA, 19 bp, Homo sapiens
  siRNA target sequence for PIK3C2G (NM_004570.2,2431-2449).
gtcctttagtgcaacttct

SEQ ID NO: 207113 - DNA, 19 bp, Homo sapiens
  siRNA target sequence for PIK3C2G (NM_004570.2,2434-2452).
ctttagtgcaacttctact

SEQ ID NO: 207114 - DNA, 19 bp, Homo sapiens
  siRNA target sequence for PIK3C2G (NM_004570.2,2564-2582).
ccaattctgtgcaggtaaa

SEQ ID NO: 207115 - DNA, 19 bp, Homo sapiens
  siRNA target sequence for PIK3C2G (NM_004570.2,2609-2627).
gcagaaacttatcaaaatt

SEQ ID NO: 207116 - DNA, 19 bp, Homo sapiens
  siRNA target sequence for PIK3C2G (NM_004570.2,2701-2719).
gcagactagaagagttctt

SEQ ID NO: 207117 - DNA, 19 bp, Homo sapiens
  siRNA target sequence for PIK3C2G (NM_004570.2,2748-2766).
ctgaaccctgccctatgta

SEQ ID NO: 207118 - DNA, 19 bp, Homo sapiens
  siRNA target sequence for PIK3C2G (NM_004570.2,2750-2768).
gaaccctgccctatgtata

SEQ ID NO: 207119 - DNA, 19 bp, Homo sapiens
  siRNA target sequence for PIK3C2G (NM_004570.2,2781-2799).
cacgatgcatgttcatatt

SEQ ID NO: 207120 - DNA, 19 bp, Homo sapiens
  siRNA target sequence for PIK3C2G (NM_004570.2,2783-2801).
cgatgcatgttcatatttt

SEQ ID NO: 207121 - DNA, 19 bp, Homo sapiens
  siRNA target sequence for PIK3C2G (NM_004570.2,2806-2824).
ctaatgctttgccattgaa

SEQ ID NO: 207122 - DNA, 19 bp, Homo sapiens
  siRNA target sequence for PIK3C2G (NM_004570.2,2811-2829).
gctttgccattgaagatta

SEQ ID NO: 207123 - DNA, 19 bp, Homo sapiens
  siRNA target sequence for PIK3C2G (NM_004570.2,2817-2835).
ccattgaagattactttca

SEQ ID NO: 207124 - DNA, 19 bp, Homo sapiens
  siRNA target sequence for PIK3C2G (NM_004570.2,2818-2836).
cattgaagattactttcat

SEQ ID NO: 207125 - DNA, 19 bp, Homo sapiens
  siRNA target sequence for PIK3C2G (NM_004570.2,2853-2871).
ggcaaaaacatcagcatta

SEQ ID NO: 207126 - DNA, 19 bp, Homo sapiens
  siRNA target sequence for PIK3C2G (NM_004570.2,2896-2914).
gtcaggatatgcttgttct

SEQ ID NO: 207127 - DNA, 19 bp, Homo sapiens
  siRNA target sequence for PIK3C2G (NM_004570.2,2951-2969).
ggaaggcttggatatgcaa

SEQ ID NO: 207128 - DNA, 19 bp, Homo sapiens
  siRNA target sequence for PIK3C2G (NM_004570.2,3038-3056).
gaccctagcaaagattcat

SEQ ID NO: 207129 - DNA, 19 bp, Homo sapiens
  siRNA target sequence for PIK3C2G (NM_004570.2,3067-3085).
gactgataggaccattgaa

SEQ ID NO: 207130 - DNA, 19 bp, Homo sapiens
  siRNA target sequence for PIK3C2G (NM_004570.2,3211-3229).
gtgaccgtcacaatgataa

SEQ ID NO: 207131 - DNA, 19 bp, Homo sapiens
  siRNA target sequence for PIK3C2G (NM_004570.2,3213-3231).
gaccgtcacaatgataata

SEQ ID NO: 207132 - DNA, 19 bp, Homo sapiens
  siRNA target sequence for PIK3C2G (NM_004570.2,3216-3234).
cgtcacaatgataatatca

SEQ ID NO: 207133 - DNA, 19 bp, Homo sapiens
  siRNA target sequence for PIK3C2G (NM_004570.2,3241-3259).
caaagtcgggccacatgtt

SEQ ID NO: 207134 - DNA, 19 bp, Homo sapiens
  siRNA target sequence for PIK3C2G (NM_004570.2,3245-3263).
gtcgggccacatgtttcat

SEQ ID NO: 207135 - DNA, 19 bp, Homo sapiens
  siRNA target sequence for PIK3C2G (NM_004570.2,3281-3299).
cttaggtcatgcacaaaca

SEQ ID NO: 207136 - DNA, 19 bp, Homo sapiens
  siRNA target sequence for PIK3C2G (NM_004570.2,3317-3335).
ggaccgagctcctttcatt

SEQ ID NO: 207137 - DNA, 19 bp, Homo sapiens
  siRNA target sequence for PIK3C2G (NM_004570.2,3408-3426).
ctttgctgtcgtgcttata

SEQ ID NO: 207138 - DNA, 19 bp, Homo sapiens
  siRNA target sequence for PIK3C2G (NM_004570.2,3415-3433).
gtcgtgcttataatattat

SEQ ID NO: 207139 - DNA, 19 bp, Homo sapiens
  siRNA target sequence for PIK3C2G (NM_004570.2,3417-3435).
cgtgcttataatattatca

SEQ ID NO: 207140 - DNA, 19 bp, Homo sapiens
  siRNA target sequence for PIK3C2G (NM_004570.2,3505-3523).
gaattcaagacctgaaata

SEQ ID NO: 207141 - DNA, 19 bp, Homo sapiens
  siRNA target sequence for PIK3C2G (NM_004570.2,3510-3528).
caagacctgaaatatgtgt

SEQ ID NO: 207142 - DNA, 19 bp, Homo sapiens
  siRNA target sequence for PIK3C2G (NM_004570.2,3513-3531).
gacctgaaatatgtgtata

SEQ ID NO: 207143 - DNA, 19 bp, Homo sapiens
  siRNA target sequence for PIK3C2G (NM_004570.2,3564-3582).
gcaacaagtcattttacca

SEQ ID NO: 207144 - DNA, 19 bp, Homo sapiens
  siRNA target sequence for PIK3C2G (NM_004570.2,3602-3620).
ggagtgtttccctgttaaa

SEQ ID NO: 207145 - DNA, 19 bp, Homo sapiens
  siRNA target sequence for PIK3C2G (NM_004570.2,3603-3621).
gagtgtttccctgttaaat

SEQ ID NO: 207146 - DNA, 19 bp, Homo sapiens
  siRNA target sequence for PIK3C2G (NM_004570.2,3704-3722).
ctgtttgctgagtacaact

SEQ ID NO: 207147 - DNA, 19 bp, Homo sapiens
  siRNA target sequence for PIK3C2G (NM_004570.2,3747-3765).
gggttcagcaagaaatcca

SEQ ID NO: 207148 - DNA, 19 bp, Homo sapiens
  siRNA target sequence for PIK3C2G (NM_004570.2,3804-3822).
gaaacaagcctgacagaaa

SEQ ID NO: 207149 - DNA, 19 bp, Homo sapiens
  siRNA target sequence for PIK3C2G (NM_004570.2,3907-3925).
ggcacctaccttttacaaa

SEQ ID NO: 207150 - DNA, 19 bp, Homo sapiens
  siRNA target sequence for PIK3C2G (NM_004570.2,3908-3926).
gcacctaccttttacaaat

SEQ ID NO: 207151 - DNA, 19 bp, Homo sapiens
  siRNA target sequence for PIK3C2G (NM_004570.2,3909-3927).
cacctaccttttacaaatt

SEQ ID NO: 207152 - DNA, 19 bp, Homo sapiens
  siRNA target sequence for PIK3C2G (NM_004570.2,3911-3929).
cctaccttttacaaattca

SEQ ID NO: 207153 - DNA, 19 bp, Homo sapiens
  siRNA target sequence for PIK3C2G (NM_004570.2,3935-3953).
cagaagattcagagatcta

SEQ ID NO: 207154 - DNA, 19 bp, Homo sapiens
  siRNA target sequence for PIK3C2G (NM_004570.2,3946-3964).
gagatctaaatcattacat

SEQ ID NO: 207155 - DNA, 19 bp, Homo sapiens
  siRNA target sequence for PIK3C2G (NM_004570.2,3965-3983).
ggaacagatattaaatgta

SEQ ID NO: 207156 - DNA, 19 bp, Homo sapiens
  siRNA target sequence for PIK3C2G (NM_004570.2,4003-4021).
gtgattgtgtacttagctt

SEQ ID NO: 207157 - DNA, 19 bp, Homo sapiens
  siRNA target sequence for PIK3C2G (NM_004570.2,4101-4119).
cctaaggtgcagttagtca

SEQ ID NO: 207158 - DNA, 19 bp, Homo sapiens
  siRNA target sequence for PIK3C2G (NM_004570.2,4107-4125).
gtgcagttagtcatatcct

SEQ ID NO: 207159 - DNA, 19 bp, Homo sapiens
  siRNA target sequence for PIK3C2G (NM_004570.2,4139-4157).
gctgaccatactagtgaaa

SEQ ID NO: 207160 - DNA, 19 bp, Homo sapiens
  siRNA target sequence for PIK3C2G (NM_004570.2,4144-4162).
ccatactagtgaaacacat

SEQ ID NO: 207161 - DNA, 19 bp, Homo sapiens
  siRNA target sequence for PIK3C2G (NM_004570.2,4192-4210).
cgcccagtgcacatgttga

SEQ ID NO: 207162 - DNA, 19 bp, Homo sapiens
  siRNA target sequence for PIK3C2G (NM_004570.2,4193-4211).
gcccagtgcacatgttgaa

SEQ ID NO: 207163 - DNA, 19 bp, Homo sapiens
  siRNA target sequence for PIK3C2G (NM_004570.2,4194-4212).
cccagtgcacatgttgaat

SEQ ID NO: 207164 - DNA, 19 bp, Homo sapiens
  siRNA target sequence for PIK3C2G (NM_004570.2,4196-4214).
cagtgcacatgttgaattt

SEQ ID NO: 207165 - DNA, 19 bp, Homo sapiens
  siRNA target sequence for PIK3C2G (NM_004570.2,4273-4291).
gtacggaccccacttacaa

SEQ ID NO: 207166 - DNA, 19 bp, Homo sapiens
  siRNA target sequence for PIK3C2G (NM_004570.2,4276-4294).
cggaccccacttacaatga

SEQ ID NO: 207167 - DNA, 19 bp, Homo sapiens
  siRNA target sequence for PIK3C2G (NM_004570.2,4322-4340).
gctccaaggacatgtctta

SEQ ID NO: 207168 - DNA, 19 bp, Homo sapiens
  siRNA target sequence for PIK3C2G (NM_004570.2,4329-4347).
ggacatgtcttaatgctta

SEQ ID NO: 207169 - DNA, 19 bp, Homo sapiens
  siRNA target sequence for PIK3C2G (NM_004570.2,4330-4348).
gacatgtcttaatgcttat

SEQ ID NO: 207170 - DNA, 19 bp, Homo sapiens
  siRNA target sequence for PIK3C2G (NM_004570.2,4352-4370).
gaagagtaaaactgtattt

SEQ ID NO: 207171 - DNA, 19 bp, Homo sapiens
  siRNA target sequence for PIK3C2G (NM_004570.2,4396-4414).
gtagtgtcccactcgataa

SEQ ID NO: 207172 - DNA, 19 bp, Homo sapiens
  siRNA target sequence for PIK3C2G (NM_004570.2,4399-4417).
gtgtcccactcgataaaga

SEQ ID NO: 207173 - DNA, 19 bp, Homo sapiens
  siRNA target sequence for PIK3C2G (NM_004570.2,4401-4419).
gtcccactcgataaagaaa

SEQ ID NO: 207174 - DNA, 19 bp, Homo sapiens
  siRNA target sequence for PIK3C2G (NM_004570.2,4403-4421).
cccactcgataaagaaaaa

SEQ ID NO: 207175 - DNA, 19 bp, Homo sapiens
  siRNA target sequence for PIK3C2G (NM_004570.2,4404-4422).
ccactcgataaagaaaaat

SEQ ID NO: 207176 - DNA, 19 bp, Homo sapiens
  siRNA target sequence for PIK3C2G (NM_004570.2,4409-4427).
cgataaagaaaaatggtat

SEQ ID NO: 207177 - DNA, 19 bp, Homo sapiens
  siRNA target sequence for PIK3C3 (NM_002647.2,71-89).
gagaagtttcactacatct

SEQ ID NO: 207178 - DNA, 19 bp, Homo sapiens
  siRNA target sequence for PIK3C3 (NM_002647.2,73-91).
gaagtttcactacatctat

SEQ ID NO: 207179 - DNA, 19 bp, Homo sapiens
  siRNA target sequence for PIK3C3 (NM_002647.2,76-94).
gtttcactacatctatagt

SEQ ID NO: 207180 - DNA, 19 bp, Homo sapiens
  siRNA target sequence for PIK3C3 (NM_002647.2,113-131).
gtccagcttaagataggaa

SEQ ID NO: 207181 - DNA, 19 bp, Homo sapiens
  siRNA target sequence for PIK3C3 (NM_002647.2,176-194).
gaagacccaatgttgaagt

SEQ ID NO: 207182 - DNA, 19 bp, Homo sapiens
  siRNA target sequence for PIK3C3 (NM_002647.2,216-234).
catgctctgatctttatgt

SEQ ID NO: 207183 - DNA, 19 bp, Homo sapiens
  siRNA target sequence for PIK3C3 (NM_002647.2,269-287).
gccttgccagtgagaacat

SEQ ID NO: 207184 - DNA, 19 bp, Homo sapiens
  siRNA target sequence for PIK3C3 (NM_002647.2,327-345).
ggctgaaactaccagtaaa

SEQ ID NO: 207185 - DNA, 19 bp, Homo sapiens
  siRNA target sequence for PIK3C3 (NM_002647.2,328-346).
gctgaaactaccagtaaaa

SEQ ID NO: 207186 - DNA, 19 bp, Homo sapiens
  siRNA target sequence for PIK3C3 (NM_002647.2,382-400).
caccatatgggatgtgtat

SEQ ID NO: 207187 - DNA, 19 bp, Homo sapiens
  siRNA target sequence for PIK3C3 (NM_002647.2,552-570).
gcactctctcagaagatca

SEQ ID NO: 207188 - DNA, 19 bp, Homo sapiens
  siRNA target sequence for PIK3C3 (NM_002647.2,629-647).
gattggctggatagattga

SEQ ID NO: 207189 - DNA, 19 bp, Homo sapiens
  siRNA target sequence for PIK3C3 (NM_002647.2,633-651).
ggctggatagattgacatt

SEQ ID NO: 207190 - DNA, 19 bp, Homo sapiens
  siRNA target sequence for PIK3C3 (NM_002647.2,642-660).
gattgacatttagagaaat

SEQ ID NO: 207191 - DNA, 19 bp, Homo sapiens
  siRNA target sequence for PIK3C3 (NM_002647.2,676-694).
gagtgaaaaacgaagttct

SEQ ID NO: 207192 - DNA, 19 bp, Homo sapiens
  siRNA target sequence for PIK3C3 (NM_002647.2,678-696).
gtgaaaaacgaagttctaa

SEQ ID NO: 207193 - DNA, 19 bp, Homo sapiens
  siRNA target sequence for PIK3C3 (NM_002647.2,706-724).
cctgatggttgaatttcga

SEQ ID NO: 207194 - DNA, 19 bp, Homo sapiens
  siRNA target sequence for PIK3C3 (NM_002647.2,726-744).
gtgtcaagtgtgatgataa

SEQ ID NO: 207195 - DNA, 19 bp, Homo sapiens
  siRNA target sequence for PIK3C3 (NM_002647.2,730-748).
caagtgtgatgataaggaa

SEQ ID NO: 207196 - DNA, 19 bp, Homo sapiens
  siRNA target sequence for PIK3C3 (NM_002647.2,767-785).
gaaaaggacggtgatgaat

SEQ ID NO: 207197 - DNA, 19 bp, Homo sapiens
  siRNA target sequence for PIK3C3 (NM_002647.2,772-790).
ggacggtgatgaatcatct

SEQ ID NO: 207198 - DNA, 19 bp, Homo sapiens
  siRNA target sequence for PIK3C3 (NM_002647.2,801-819).
caagttttgaattagtgaa

SEQ ID NO: 207199 - DNA, 19 bp, Homo sapiens
  siRNA target sequence for PIK3C3 (NM_002647.2,824-842).
cctgacccccagatgtcta

SEQ ID NO: 207200 - DNA, 19 bp, Homo sapiens
  siRNA target sequence for PIK3C3 (NM_002647.2,825-843).
ctgacccccagatgtctat

SEQ ID NO: 207201 - DNA, 19 bp, Homo sapiens
  siRNA target sequence for PIK3C3 (NM_002647.2,840-858).
ctatggagaatttagttga

SEQ ID NO: 207202 - DNA, 19 bp, Homo sapiens
  siRNA target sequence for PIK3C3 (NM_002647.2,875-893).
cttgcccggagtttaagaa

SEQ ID NO: 207203 - DNA, 19 bp, Homo sapiens
  siRNA target sequence for PIK3C3 (NM_002647.2,930-948).
ccacgagagatcagttaaa

SEQ ID NO: 207204 - DNA, 19 bp, Homo sapiens
  siRNA target sequence for PIK3C3 (NM_002647.2,931-949).
cacgagagatcagttaaat

SEQ ID NO: 207205 - DNA, 19 bp, Homo sapiens
  siRNA target sequence for PIK3C3 (NM_002647.2,933-951).
cgagagatcagttaaatat

SEQ ID NO: 207206 - DNA, 19 bp, Homo sapiens
  siRNA target sequence for PIK3C3 (NM_002647.2,965-983).
ccaccaaccaagcaactta

SEQ ID NO: 207207 - DNA, 19 bp, Homo sapiens
  siRNA target sequence for PIK3C3 (NM_002647.2,972-990).
ccaagcaacttacatatga

SEQ ID NO: 207208 - DNA, 19 bp, Homo sapiens
  siRNA target sequence for PIK3C3 (NM_002647.2,1043-1061).
gccttgacaaaattcttga

SEQ ID NO: 207209 - DNA, 19 bp, Homo sapiens
  siRNA target sequence for PIK3C3 (NM_002647.2,1122-1140).
ggaagccgatggatgtaga

SEQ ID NO: 207210 - DNA, 19 bp, Homo sapiens
  siRNA target sequence for PIK3C3 (NM_002647.2,1154-1172).
ctgttatcctctcattaca

SEQ ID NO: 207211 - DNA, 19 bp, Homo sapiens
  siRNA target sequence for PIK3C3 (NM_002647.2,1217-1235).
gccgatgatgaggatttgt

SEQ ID NO: 207212 - DNA, 19 bp, Homo sapiens
  siRNA target sequence for PIK3C3 (NM_002647.2,1218-1236).
ccgatgatgaggatttgtt

SEQ ID NO: 207213 - DNA, 19 bp, Homo sapiens
  siRNA target sequence for PIK3C3 (NM_002647.2,1220-1238).
gatgatgaggatttgttga

SEQ ID NO: 207214 - DNA, 19 bp, Homo sapiens
  siRNA target sequence for PIK3C3 (NM_002647.2,1234-1252).
gttgatgtacctattacaa

SEQ ID NO: 207215 - DNA, 19 bp, Homo sapiens
  siRNA target sequence for PIK3C3 (NM_002647.2,1255-1273).
ggtccaggctctcaaatat

SEQ ID NO: 207216 - DNA, 19 bp, Homo sapiens
  siRNA target sequence for PIK3C3 (NM_002647.2,1258-1276).
ccaggctctcaaatatgaa

SEQ ID NO: 207217 - DNA, 19 bp, Homo sapiens
  siRNA target sequence for PIK3C3 (NM_002647.2,1304-1322).
gaacctaccaagaaggata

SEQ ID NO: 207218 - DNA, 19 bp, Homo sapiens
  siRNA target sequence for PIK3C3 (NM_002647.2,1308-1326).
ctaccaagaaggatagtca

SEQ ID NO: 207219 - DNA, 19 bp, Homo sapiens
  siRNA target sequence for PIK3C3 (NM_002647.2,1461-1479).
gcgaaaatctggaacaaga

SEQ ID NO: 207220 - DNA, 19 bp, Homo sapiens
  siRNA target sequence for PIK3C3 (NM_002647.2,1462-1480).
cgaaaatctggaacaagat

SEQ ID NO: 207221 - DNA, 19 bp, Homo sapiens
  siRNA target sequence for PIK3C3 (NM_002647.2,1478-1496).
gatctctgtaccttcttga

SEQ ID NO: 207222 - DNA, 19 bp, Homo sapiens
  siRNA target sequence for PIK3C3 (NM_002647.2,1521-1539).
cactggctaattatttata

SEQ ID NO: 207223 - DNA, 19 bp, Homo sapiens
  siRNA target sequence for PIK3C3 (NM_002647.2,1549-1567).
gatagtggaatgtgaagat

SEQ ID NO: 207224 - DNA, 19 bp, Homo sapiens
  siRNA target sequence for PIK3C3 (NM_002647.2,1590-1608).
caaagacccatgagatgta

SEQ ID NO: 207225 - DNA, 19 bp, Homo sapiens
  siRNA target sequence for PIK3C3 (NM_002647.2,1596-1614).
cccatgagatgtacttgaa

SEQ ID NO: 207226 - DNA, 19 bp, Homo sapiens
  siRNA target sequence for PIK3C3 (NM_002647.2,1601-1619).
gagatgtacttgaacgtaa

SEQ ID NO: 207227 - DNA, 19 bp, Homo sapiens
  siRNA target sequence for PIK3C3 (NM_002647.2,1606-1624).
gtacttgaacgtaatgaga

SEQ ID NO: 207228 - DNA, 19 bp, Homo sapiens
  siRNA target sequence for PIK3C3 (NM_002647.2,1626-1644).
gattcagccaagcattgtt

SEQ ID NO: 207229 - DNA, 19 bp, Homo sapiens
  siRNA target sequence for PIK3C3 (NM_002647.2,1642-1660).
gttgaagggtgataagtct

SEQ ID NO: 207230 - DNA, 19 bp, Homo sapiens
  siRNA target sequence for PIK3C3 (NM_002647.2,1652-1670).
gataagtctgtcagagtta

SEQ ID NO: 207231 - DNA, 19 bp, Homo sapiens
  siRNA target sequence for PIK3C3 (NM_002647.2,1686-1704).
ctgcacaacagacatttgt

SEQ ID NO: 207232 - DNA, 19 bp, Homo sapiens
  siRNA target sequence for PIK3C3 (NM_002647.2,1689-1707).
cacaacagacatttgtaga

SEQ ID NO: 207233 - DNA, 19 bp, Homo sapiens
  siRNA target sequence for PIK3C3 (NM_002647.2,1706-1724).
gatcggttggtgcatctaa

SEQ ID NO: 207234 - DNA, 19 bp, Homo sapiens
  siRNA target sequence for PIK3C3 (NM_002647.2,1709-1727).
cggttggtgcatctaatga

SEQ ID NO: 207235 - DNA, 19 bp, Homo sapiens
  siRNA target sequence for PIK3C3 (NM_002647.2,1710-1728).
ggttggtgcatctaatgaa

SEQ ID NO: 207236 - DNA, 19 bp, Homo sapiens
  siRNA target sequence for PIK3C3 (NM_002647.2,1739-1757).
cgcgaaagtggaaatcgta

SEQ ID NO: 207237 - DNA, 19 bp, Homo sapiens
  siRNA target sequence for PIK3C3 (NM_002647.2,1740-1758).
gcgaaagtggaaatcgtaa

SEQ ID NO: 207238 - DNA, 19 bp, Homo sapiens
  siRNA target sequence for PIK3C3 (NM_002647.2,1782-1800).
cattgcttggagataatga

SEQ ID NO: 207239 - DNA, 19 bp, Homo sapiens
  siRNA target sequence for PIK3C3 (NM_002647.2,1839-1857).
ctttagaaccccaagtgaa

SEQ ID NO: 207240 - DNA, 19 bp, Homo sapiens
  siRNA target sequence for PIK3C3 (NM_002647.2,1876-1894).
ggaaacagctacactgttt

SEQ ID NO: 207241 - DNA, 19 bp, Homo sapiens
  siRNA target sequence for PIK3C3 (NM_002647.2,1877-1895).
gaaacagctacactgttta

SEQ ID NO: 207242 - DNA, 19 bp, Homo sapiens
  siRNA target sequence for PIK3C3 (NM_002647.2,1909-1927).
gcctgcacagttgtttttt

SEQ ID NO: 207243 - DNA, 19 bp, Homo sapiens
  siRNA target sequence for PIK3C3 (NM_002647.2,1910-1928).
cctgcacagttgtttttta

SEQ ID NO: 207244 - DNA, 19 bp, Homo sapiens
  siRNA target sequence for PIK3C3 (NM_002647.2,1945-1963).
caaatatccagttatattt

SEQ ID NO: 207245 - DNA, 19 bp, Homo sapiens
  siRNA target sequence for PIK3C3 (NM_002647.2,1966-1984).
gcatggagatgatttacgt

SEQ ID NO: 207246 - DNA, 19 bp, Homo sapiens
  siRNA target sequence for PIK3C3 (NM_002647.2,2023-2041).
caagctgttacggaaagaa

SEQ ID NO: 207247 - DNA, 19 bp, Homo sapiens
  siRNA target sequence for PIK3C3 (NM_002647.2,2050-2068).
cttgaaattgacaccttat

SEQ ID NO: 207248 - DNA, 19 bp, Homo sapiens
  siRNA target sequence for PIK3C3 (NM_002647.2,2074-2092).
gttagccaccagtacaaaa

SEQ ID NO: 207249 - DNA, 19 bp, Homo sapiens
  siRNA target sequence for PIK3C3 (NM_002647.2,2219-2237).
gtcatggacacttacgtta

SEQ ID NO: 207250 - DNA, 19 bp, Homo sapiens
  siRNA target sequence for PIK3C3 (NM_002647.2,2221-2239).
catggacacttacgttaaa

SEQ ID NO: 207251 - DNA, 19 bp, Homo sapiens
  siRNA target sequence for PIK3C3 (NM_002647.2,2225-2243).
gacacttacgttaaaagct

SEQ ID NO: 207252 - DNA, 19 bp, Homo sapiens
  siRNA target sequence for PIK3C3 (NM_002647.2,2256-2274).
gcgtgatcacctatatact

SEQ ID NO: 207253 - DNA, 19 bp, Homo sapiens
  siRNA target sequence for PIK3C3 (NM_002647.2,2257-2275).
cgtgatcacctatatactt

SEQ ID NO: 207254 - DNA, 19 bp, Homo sapiens
  siRNA target sequence for PIK3C3 (NM_002647.2,2287-2305).
caggcacctggataacctt

SEQ ID NO: 207255 - DNA, 19 bp, Homo sapiens
  siRNA target sequence for PIK3C3 (NM_002647.2,2289-2307).
ggcacctggataacctttt

SEQ ID NO: 207256 - DNA, 19 bp, Homo sapiens
  siRNA target sequence for PIK3C3 (NM_002647.2,2297-2315).
gataaccttttgctaacaa

SEQ ID NO: 207257 - DNA, 19 bp, Homo sapiens
  siRNA target sequence for PIK3C3 (NM_002647.2,2381-2399).
ccaccaatgaagctgaata

SEQ ID NO: 207258 - DNA, 19 bp, Homo sapiens
  siRNA target sequence for PIK3C3 (NM_002647.2,2476-2494).
cctccacctgcgaaggtat

SEQ ID NO: 207259 - DNA, 19 bp, Homo sapiens
  siRNA target sequence for PIK3C3 (NM_002647.2,2477-2495).
ctccacctgcgaaggtatt

SEQ ID NO: 207260 - DNA, 19 bp, Homo sapiens
  siRNA target sequence for PIK3C3 (NM_002647.2,2480-2498).
cacctgcgaaggtattcta

SEQ ID NO: 207261 - DNA, 19 bp, Homo sapiens
  siRNA target sequence for PIK3C3 (NM_002647.2,2486-2504).
cgaaggtattctaatctga

SEQ ID NO: 207262 - DNA, 19 bp, Homo sapiens
  siRNA target sequence for PIK3C3 (NM_002647.2,2487-2505).
gaaggtattctaatctgat

SEQ ID NO: 207263 - DNA, 19 bp, Homo sapiens
  siRNA target sequence for PIK3CA (NM_006218.1,83-101).
gtttactaccaaatggaat

SEQ ID NO: 207264 - DNA, 19 bp, Homo sapiens
  siRNA target sequence for PIK3CA (NM_006218.1,91-109).
ccaaatggaatgatagtga

SEQ ID NO: 207265 - DNA, 19 bp, Homo sapiens
  siRNA target sequence for PIK3CA (NM_006218.1,119-137).
gcctccgtgaggctacatt

SEQ ID NO: 207266 - DNA, 19 bp, Homo sapiens
  siRNA target sequence for PIK3CA (NM_006218.1,120-138).
cctccgtgaggctacatta

SEQ ID NO: 207267 - DNA, 19 bp, Homo sapiens
  siRNA target sequence for PIK3CA (NM_006218.1,202-220).
gatgaatcttcttacattt

SEQ ID NO: 207268 - DNA, 19 bp, Homo sapiens
  siRNA target sequence for PIK3CA (NM_006218.1,325-343).
gtaggcaaccgtgaagaaa

SEQ ID NO: 207269 - DNA, 19 bp, Homo sapiens
  siRNA target sequence for PIK3CA (NM_006218.1,329-347).
gcaaccgtgaagaaaagat

SEQ ID NO: 207270 - DNA, 19 bp, Homo sapiens
  siRNA target sequence for PIK3CA (NM_006218.1,345-363).
gatcctcaatcgagaaatt

SEQ ID NO: 207271 - DNA, 19 bp, Homo sapiens
  siRNA target sequence for PIK3CA (NM_006218.1,421-439).
caggacttccgaagaaata

SEQ ID NO: 207272 - DNA, 19 bp, Homo sapiens
  siRNA target sequence for PIK3CA (NM_006218.1,423-441).
ggacttccgaagaaatatt

SEQ ID NO: 207273 - DNA, 19 bp, Homo sapiens
  siRNA target sequence for PIK3CA (NM_006218.1,494-512).
gtagagcaatgtatgtcta

SEQ ID NO: 207274 - DNA, 19 bp, Homo sapiens
  siRNA target sequence for PIK3CA (NM_006218.1,776-794).
gtggatgtgatgaatactt

SEQ ID NO: 207275 - DNA, 19 bp, Homo sapiens
  siRNA target sequence for PIK3CA (NM_006218.1,808-826).
cctctgagtcagtataagt

SEQ ID NO: 207276 - DNA, 19 bp, Homo sapiens
  siRNA target sequence for PIK3CA (NM_006218.1,809-827).
ctctgagtcagtataagta

SEQ ID NO: 207277 - DNA, 19 bp, Homo sapiens
  siRNA target sequence for PIK3CA (NM_006218.1,811-829).
ctgagtcagtataagtata

SEQ ID NO: 207278 - DNA, 19 bp, Homo sapiens
  siRNA target sequence for PIK3CA (NM_006218.1,813-831).
gagtcagtataagtatata

SEQ ID NO: 207279 - DNA, 19 bp, Homo sapiens
  siRNA target sequence for PIK3CA (NM_006218.1,850-868).
gggaggatgcccaatttga

SEQ ID NO: 207280 - DNA, 19 bp, Homo sapiens
  siRNA target sequence for PIK3CA (NM_006218.1,877-895).
gctaaagaaagcctttatt

SEQ ID NO: 207281 - DNA, 19 bp, Homo sapiens
  siRNA target sequence for PIK3CA (NM_006218.1,1108-1126).
cccttatgtgacaatgtga

SEQ ID NO: 207282 - DNA, 19 bp, Homo sapiens
  siRNA target sequence for PIK3CA (NM_006218.1,1109-1127).
ccttatgtgacaatgtgaa

SEQ ID NO: 207283 - DNA, 19 bp, Homo sapiens
  siRNA target sequence for PIK3CA (NM_006218.1,1119-1137).
caatgtgaacactcaaaga

SEQ ID NO: 207284 - DNA, 19 bp, Homo sapiens
  siRNA target sequence for PIK3CA (NM_006218.1,1161-1179).
gaatgaatggctgaattat

SEQ ID NO: 207285 - DNA, 19 bp, Homo sapiens
  siRNA target sequence for PIK3CA (NM_006218.1,1213-1231).
cgactttgcctttccattt

SEQ ID NO: 207286 - DNA, 19 bp, Homo sapiens
  siRNA target sequence for PIK3CA (NM_006218.1,1349-1367).
ggccagtacctcatggatt

SEQ ID NO: 207287 - DNA, 19 bp, Homo sapiens
  siRNA target sequence for PIK3CA (NM_006218.1,1393-1411).
gttactggatcaaatccaa

SEQ ID NO: 207288 - DNA, 19 bp, Homo sapiens
  siRNA target sequence for PIK3CA (NM_006218.1,1427-1445).
gcttagagttggagtttga

SEQ ID NO: 207289 - DNA, 19 bp, Homo sapiens
  siRNA target sequence for PIK3CA (NM_006218.1,1489-1507).
gaagagcatgccaattggt

SEQ ID NO: 207290 - DNA, 19 bp, Homo sapiens
  siRNA target sequence for PIK3CA (NM_006218.1,1495-1513).
catgccaattggtctgtat

SEQ ID NO: 207291 - DNA, 19 bp, Homo sapiens
  siRNA target sequence for PIK3CA (NM_006218.1,1516-1534).
cgagaagcaggatttagct

SEQ ID NO: 207292 - DNA, 19 bp, Homo sapiens
  siRNA target sequence for PIK3CA (NM_006218.1,1517-1535).
gagaagcaggatttagcta

SEQ ID NO: 207293 - DNA, 19 bp, Homo sapiens
  siRNA target sequence for PIK3CA (NM_006218.1,1540-1558).
cacgcaggactgagtaaca

SEQ ID NO: 207294 - DNA, 19 bp, Homo sapiens
  siRNA target sequence for PIK3CA (NM_006218.1,1542-1560).
cgcaggactgagtaacaga

SEQ ID NO: 207295 - DNA, 19 bp, Homo sapiens
  siRNA target sequence for PIK3CA (NM_006218.1,1557-1575).
cagactagctagagacaat

SEQ ID NO: 207296 - DNA, 19 bp, Homo sapiens
  siRNA target sequence for PIK3CA (NM_006218.1,1559-1577).
gactagctagagacaatga

SEQ ID NO: 207297 - DNA, 19 bp, Homo sapiens
  siRNA target sequence for PIK3CA (NM_006218.1,1564-1582).
gctagagacaatgaattaa

SEQ ID NO: 207298 - DNA, 19 bp, Homo sapiens
  siRNA target sequence for PIK3CA (NM_006218.1,1668-1686).
gagtcacagacactattgt

SEQ ID NO: 207299 - DNA, 19 bp, Homo sapiens
  siRNA target sequence for PIK3CA (NM_006218.1,1670-1688).
gtcacagacactattgtgt

SEQ ID NO: 207300 - DNA, 19 bp, Homo sapiens
  siRNA target sequence for PIK3CA (NM_006218.1,1672-1690).
cacagacactattgtgtaa

SEQ ID NO: 207301 - DNA, 19 bp, Homo sapiens
  siRNA target sequence for PIK3CA (NM_006218.1,1674-1692).
cagacactattgtgtaact

SEQ ID NO: 207302 - DNA, 19 bp, Homo sapiens
  siRNA target sequence for PIK3CA (NM_006218.1,1676-1694).
gacactattgtgtaactat

SEQ ID NO: 207303 - DNA, 19 bp, Homo sapiens
  siRNA target sequence for PIK3CA (NM_006218.1,1697-1715).
ccgaaattctacccaaatt

SEQ ID NO: 207304 - DNA, 19 bp, Homo sapiens
  siRNA target sequence for PIK3CA (NM_006218.1,1722-1740).
gtctgttaaatggaattct

SEQ ID NO: 207305 - DNA, 19 bp, Homo sapiens
  siRNA target sequence for PIK3CA (NM_006218.1,1733-1751).
ggaattctagagatgaagt

SEQ ID NO: 207306 - DNA, 19 bp, Homo sapiens
  siRNA target sequence for PIK3CA (NM_006218.1,1747-1765).
gaagtagcccagatgtatt

SEQ ID NO: 207307 - DNA, 19 bp, Homo sapiens
  siRNA target sequence for PIK3CA (NM_006218.1,1750-1768).
gtagcccagatgtattgct

SEQ ID NO: 207308 - DNA, 19 bp, Homo sapiens
  siRNA target sequence for PIK3CA (NM_006218.1,1810-1828).
gaacttctggactgtaatt

SEQ ID NO: 207309 - DNA, 19 bp, Homo sapiens
  siRNA target sequence for PIK3CA (NM_006218.1,1823-1841).
gtaattacccagatcctat

SEQ ID NO: 207310 - DNA, 19 bp, Homo sapiens
  siRNA target sequence for PIK3CA (NM_006218.1,1855-1873).
gctgttcggtgcttggaaa

SEQ ID NO: 207311 - DNA, 19 bp, Homo sapiens
  siRNA target sequence for PIK3CA (NM_006218.1,1858-1876).
gttcggtgcttggaaaaat

SEQ ID NO: 207312 - DNA, 19 bp, Homo sapiens
  siRNA target sequence for PIK3CA (NM_006218.1,1862-1880).
ggtgcttggaaaaatattt

SEQ ID NO: 207313 - DNA, 19 bp, Homo sapiens
  siRNA target sequence for PIK3CA (NM_006218.1,1914-1932).
gctagtacaggtcctaaaa

SEQ ID NO: 207314 - DNA, 19 bp, Homo sapiens
  siRNA target sequence for PIK3CA (NM_006218.1,1974-1992).
gaagaaagcattgactaat

SEQ ID NO: 207315 - DNA, 19 bp, Homo sapiens
  siRNA target sequence for PIK3CA (NM_006218.1,1982-2000).
cattgactaatcaaaggat

SEQ ID NO: 207316 - DNA, 19 bp, Homo sapiens
  siRNA target sequence for PIK3CA (NM_006218.1,1993-2011).
caaaggattgggcactttt

SEQ ID NO: 207317 - DNA, 19 bp, Homo sapiens
  siRNA target sequence for PIK3CA (NM_006218.1,2070-2088).
gcttttggagtcctattgt

SEQ ID NO: 207318 - DNA, 19 bp, Homo sapiens
  siRNA target sequence for PIK3CA (NM_006218.1,2089-2107).
cgtgcatgtgggatgtatt

SEQ ID NO: 207319 - DNA, 19 bp, Homo sapiens
  siRNA target sequence for PIK3CA (NM_006218.1,2140-2158).
gaaaagctcattaacttaa

SEQ ID NO: 207320 - DNA, 19 bp, Homo sapiens
  siRNA target sequence for PIK3CA (NM_006218.1,2385-2403).
gttactgtttcagaacaat

SEQ ID NO: 207321 - DNA, 19 bp, Homo sapiens
  siRNA target sequence for PIK3CA (NM_006218.1,2435-2453).
ggcaagatatgctaacact

SEQ ID NO: 207322 - DNA, 19 bp, Homo sapiens
  siRNA target sequence for PIK3CA (NM_006218.1,2445-2463).
gctaacacttcaaattatt

SEQ ID NO: 207323 - DNA, 19 bp, Homo sapiens
  siRNA target sequence for PIK3CA (NM_006218.1,2450-2468).
cacttcaaattattcgtat

SEQ ID NO: 207324 - DNA, 19 bp, Homo sapiens
  siRNA target sequence for PIK3CA (NM_006218.1,2452-2470).
cttcaaattattcgtatta

SEQ ID NO: 207325 - DNA, 19 bp, Homo sapiens
  siRNA target sequence for PIK3CA (NM_006218.1,2464-2482).
cgtattatggaaaatatct

SEQ ID NO: 207326 - DNA, 19 bp, Homo sapiens
  siRNA target sequence for PIK3CA (NM_006218.1,2495-2513).
gtcttgatcttcgaatgtt

SEQ ID NO: 207327 - DNA, 19 bp, Homo sapiens
  siRNA target sequence for PIK3CA (NM_006218.1,2506-2524).
cgaatgttaccttatggtt

SEQ ID NO: 207328 - DNA, 19 bp, Homo sapiens
  siRNA target sequence for PIK3CA (NM_006218.1,2537-2555).
gtgactgtgtgggacttat

SEQ ID NO: 207329 - DNA, 19 bp, Homo sapiens
  siRNA target sequence for PIK3CA (NM_006218.1,2565-2583).
gcgaaattctcacactatt

SEQ ID NO: 207330 - DNA, 19 bp, Homo sapiens
  siRNA target sequence for PIK3CA (NM_006218.1,2566-2584).
cgaaattctcacactatta

SEQ ID NO: 207331 - DNA, 19 bp, Homo sapiens
  siRNA target sequence for PIK3CA (NM_006218.1,2573-2591).
ctcacactattatgcaaat

SEQ ID NO: 207332 - DNA, 19 bp, Homo sapiens
  siRNA target sequence for PIK3CA (NM_006218.1,2595-2613).
gtgcaaaggcggcttgaaa

SEQ ID NO: 207333 - DNA, 19 bp, Homo sapiens
  siRNA target sequence for PIK3CA (NM_006218.1,2686-2704).
gcagccattgacctgttta

SEQ ID NO: 207334 - DNA, 19 bp, Homo sapiens
  siRNA target sequence for PIK3CA (NM_006218.1,2752-2770).
ggagatcgtcacaatagta

SEQ ID NO: 207335 - DNA, 19 bp, Homo sapiens
  siRNA target sequence for PIK3CA (NM_006218.1,2753-2771).
gagatcgtcacaatagtaa

SEQ ID NO: 207336 - DNA, 19 bp, Homo sapiens
  siRNA target sequence for PIK3CA (NM_006218.1,2755-2773).
gatcgtcacaatagtaaca

SEQ ID NO: 207337 - DNA, 19 bp, Homo sapiens
  siRNA target sequence for PIK3CA (NM_006218.1,2758-2776).
cgtcacaatagtaacatca

SEQ ID NO: 207338 - DNA, 19 bp, Homo sapiens
  siRNA target sequence for PIK3CA (NM_006218.1,2787-2805).
cgatggacaactgtttcat

SEQ ID NO: 207339 - DNA, 19 bp, Homo sapiens
  siRNA target sequence for PIK3CA (NM_006218.1,2788-2806).
gatggacaactgtttcata

SEQ ID NO: 207340 - DNA, 19 bp, Homo sapiens
  siRNA target sequence for PIK3CA (NM_006218.1,2816-2834).
gacactttttggatcacaa

SEQ ID NO: 207341 - DNA, 19 bp, Homo sapiens
  siRNA target sequence for PIK3CA (NM_006218.1,2858-2876).
gagaacgtgtgccatttgt

SEQ ID NO: 207342 - DNA, 19 bp, Homo sapiens
  siRNA target sequence for PIK3CA (NM_006218.1,2970-2988).
ggcttatctagctattcga

SEQ ID NO: 207343 - DNA, 19 bp, Homo sapiens
  siRNA target sequence for PIK3CA (NM_006218.1,3042-3060).
gccagaactacaatctttt

SEQ ID NO: 207344 - DNA, 19 bp, Homo sapiens
  siRNA target sequence for PIK3CA (NM_006218.1,3084-3102).
gaccctagccttagataaa

SEQ ID NO: 207345 - DNA, 19 bp, Homo sapiens
  siRNA target sequence for PIK3CA (NM_006218.1,3112-3130).
gaggctttggagtatttca

SEQ ID NO: 207346 - DNA, 19 bp, Homo sapiens
  siRNA target sequence for PIK3CA (NM_006218.1,3154-3172).
catggtggctggacaacaa

SEQ ID NO: 207347 - DNA, 19 bp, Homo sapiens
  siRNA target sequence for PIK3CA (NM_006218.1,3157-3175).
ggtggctggacaacaaaaa

SEQ ID NO: 207348 - DNA, 19 bp, Homo sapiens
  siRNA target sequence for PIK3CA (NM_006218.1,3182-3200).
ggatcttccacacaattaa

SEQ ID NO: 207349 - DNA, 19 bp, Homo sapiens
  siRNA target sequence for PIK3CB (NM_006219.1,145-163).
gaagctaccatttcttata

SEQ ID NO: 207350 - DNA, 19 bp, Homo sapiens
  siRNA target sequence for PIK3CB (NM_006219.1,148-166).
gctaccatttcttatatta

SEQ ID NO: 207351 - DNA, 19 bp, Homo sapiens
  siRNA target sequence for PIK3CB (NM_006219.1,158-176).
cttatattaagcagatgtt

SEQ ID NO: 207352 - DNA, 19 bp, Homo sapiens
  siRNA target sequence for PIK3CB (NM_006219.1,190-208).
cacaattacccaatgttca

SEQ ID NO: 207353 - DNA, 19 bp, Homo sapiens
  siRNA target sequence for PIK3CB (NM_006219.1,200-218).
caatgttcaacctccttat

SEQ ID NO: 207354 - DNA, 19 bp, Homo sapiens
  siRNA target sequence for PIK3CB (NM_006219.1,207-225).
caacctccttatggatatt

SEQ ID NO: 207355 - DNA, 19 bp, Homo sapiens
  siRNA target sequence for PIK3CB (NM_006219.1,211-229).
ctccttatggatattgact

SEQ ID NO: 207356 - DNA, 19 bp, Homo sapiens
  siRNA target sequence for PIK3CB (NM_006219.1,226-244).
gactcctatatgtttgcat

SEQ ID NO: 207357 - DNA, 19 bp, Homo sapiens
  siRNA target sequence for PIK3CB (NM_006219.1,347-365).
gtgacccaggggaaaaatt

SEQ ID NO: 207358 - DNA, 19 bp, Homo sapiens
  siRNA target sequence for PIK3CB (NM_006219.1,483-501).
gtcacttgtgggattgtct

SEQ ID NO: 207359 - DNA, 19 bp, Homo sapiens
  siRNA target sequence for PIK3CB (NM_006219.1,503-521).
ggatggactggctaaaaca

SEQ ID NO: 207360 - DNA, 19 bp, Homo sapiens
  siRNA target sequence for PIK3CB (NM_006219.1,545-563).
catccatccctgaaaactt

SEQ ID NO: 207361 - DNA, 19 bp, Homo sapiens
  siRNA target sequence for PIK3CB (NM_006219.1,589-607).
ctcatcgtagctgttcatt

SEQ ID NO: 207362 - DNA, 19 bp, Homo sapiens
  siRNA target sequence for PIK3CB (NM_006219.1,594-612).
cgtagctgttcattttgaa

SEQ ID NO: 207363 - DNA, 19 bp, Homo sapiens
  siRNA target sequence for PIK3CB (NM_006219.1,659-677).
ctatcaaagtaaatgaatt

SEQ ID NO: 207364 - DNA, 19 bp, Homo sapiens
  siRNA target sequence for PIK3CB (NM_006219.1,684-702).
ccaaaaacgtttgactatt

SEQ ID NO: 207365 - DNA, 19 bp, Homo sapiens
  siRNA target sequence for PIK3CB (NM_006219.1,718-736).
gaagttagcccctatgatt

SEQ ID NO: 207366 - DNA, 19 bp, Homo sapiens
  siRNA target sequence for PIK3CB (NM_006219.1,725-743).
gcccctatgattatgtgtt

SEQ ID NO: 207367 - DNA, 19 bp, Homo sapiens
  siRNA target sequence for PIK3CB (NM_006219.1,750-768).
cagcgggagagtagaatat

SEQ ID NO: 207368 - DNA, 19 bp, Homo sapiens
  siRNA target sequence for PIK3CB (NM_006219.1,753-771).
cgggagagtagaatatgtt

SEQ ID NO: 207369 - DNA, 19 bp, Homo sapiens
  siRNA target sequence for PIK3CB (NM_006219.1,754-772).
gggagagtagaatatgttt

SEQ ID NO: 207370 - DNA, 19 bp, Homo sapiens
  siRNA target sequence for PIK3CB (NM_006219.1,756-774).
gagagtagaatatgttttt

SEQ ID NO: 207371 - DNA, 19 bp, Homo sapiens
  siRNA target sequence for PIK3CB (NM_006219.1,776-794).
gtgatcatccactaattca

SEQ ID NO: 207372 - DNA, 19 bp, Homo sapiens
  siRNA target sequence for PIK3CB (NM_006219.1,778-796).
gatcatccactaattcagt

SEQ ID NO: 207373 - DNA, 19 bp, Homo sapiens
  siRNA target sequence for PIK3CB (NM_006219.1,954-972).
gaaaacacgaattatttct

SEQ ID NO: 207374 - DNA, 19 bp, Homo sapiens
  siRNA target sequence for PIK3CB (NM_006219.1,1006-1024).
gtcttggttaagggaaata

SEQ ID NO: 207375 - DNA, 19 bp, Homo sapiens
  siRNA target sequence for PIK3CB (NM_006219.1,1084-1102).
gagctcctgtgtaaaacca

SEQ ID NO: 207376 - DNA, 19 bp, Homo sapiens
  siRNA target sequence for PIK3CB (NM_006219.1,1090-1108).
ctgtgtaaaaccatcgtaa

SEQ ID NO: 207377 - DNA, 19 bp, Homo sapiens
  siRNA target sequence for PIK3CB (NM_006219.1,1183-1201).
ccaagaatggctcgattat

SEQ ID NO: 207378 - DNA, 19 bp, Homo sapiens
  siRNA target sequence for PIK3CB (NM_006219.1,1187-1205).
gaatggctcgattatgttt

SEQ ID NO: 207379 - DNA, 19 bp, Homo sapiens
  siRNA target sequence for PIK3CB (NM_006219.1,1210-1228).
gtttatgcagttttggata

SEQ ID NO: 207380 - DNA, 19 bp, Homo sapiens
  siRNA target sequence for PIK3CB (NM_006219.1,1256-1274).
ctattaatccctctaaata

SEQ ID NO: 207381 - DNA, 19 bp, Homo sapiens
  siRNA target sequence for PIK3CB (NM_006219.1,1309-1327).
cctgtagcgtgggtaaata

SEQ ID NO: 207382 - DNA, 19 bp, Homo sapiens
  siRNA target sequence for PIK3CB (NM_006219.1,1312-1330).
gtagcgtgggtaaatacga

SEQ ID NO: 207383 - DNA, 19 bp, Homo sapiens
  siRNA target sequence for PIK3CB (NM_006219.1,1319-1337).
gggtaaatacgatggtttt

SEQ ID NO: 207384 - DNA, 19 bp, Homo sapiens
  siRNA target sequence for PIK3CB (NM_006219.1,1361-1379).
ctggagacataatattaca

SEQ ID NO: 207385 - DNA, 19 bp, Homo sapiens
  siRNA target sequence for PIK3CB (NM_006219.1,1363-1381).
ggagacataatattacaca

SEQ ID NO: 207386 - DNA, 19 bp, Homo sapiens
  siRNA target sequence for PIK3CB (NM_006219.1,1388-1406).
cttcatttcctgatgaact

SEQ ID NO: 207387 - DNA, 19 bp, Homo sapiens
  siRNA target sequence for PIK3CB (NM_006219.1,1397-1415).
ctgatgaactcgaagaaat

SEQ ID NO: 207388 - DNA, 19 bp, Homo sapiens
  siRNA target sequence for PIK3CB (NM_006219.1,1402-1420).
gaactcgaagaaatgttga

SEQ ID NO: 207389 - DNA, 19 bp, Homo sapiens
  siRNA target sequence for PIK3CB (NM_006219.1,1447-1465).
ccatatactgaaaatgcaa

SEQ ID NO: 207390 - DNA, 19 bp, Homo sapiens
  siRNA target sequence for PIK3CB (NM_006219.1,1462-1480).
gcaacagctttgcatgtta

SEQ ID NO: 207391 - DNA, 19 bp, Homo sapiens
  siRNA target sequence for PIK3CB (NM_006219.1,1515-1533).
ccctcccttcgataagatt

SEQ ID NO: 207392 - DNA, 19 bp, Homo sapiens
  siRNA target sequence for PIK3CB (NM_006219.1,1516-1534).
cctcccttcgataagatta

SEQ ID NO: 207393 - DNA, 19 bp, Homo sapiens
  siRNA target sequence for PIK3CB (NM_006219.1,1517-1535).
ctcccttcgataagattat

SEQ ID NO: 207394 - DNA, 19 bp, Homo sapiens
  siRNA target sequence for PIK3CB (NM_006219.1,1549-1567).
gagattgcaagcagtgata

SEQ ID NO: 207395 - DNA, 19 bp, Homo sapiens
  siRNA target sequence for PIK3CB (NM_006219.1,1551-1569).
gattgcaagcagtgatagt

SEQ ID NO: 207396 - DNA, 19 bp, Homo sapiens
  siRNA target sequence for PIK3CB (NM_006219.1,1559-1577).
gcagtgatagtgctaatgt

SEQ ID NO: 207397 - DNA, 19 bp, Homo sapiens
  siRNA target sequence for PIK3CB (NM_006219.1,1583-1601).
gtcgaggtggaaaaaagtt

SEQ ID NO: 207398 - DNA, 19 bp, Homo sapiens
  siRNA target sequence for PIK3CB (NM_006219.1,1687-1705).
caagactgccgagagattt

SEQ ID NO: 207399 - DNA, 19 bp, Homo sapiens
  siRNA target sequence for PIK3CB (NM_006219.1,1708-1726).
ccacaatcactgccaaaat

SEQ ID NO: 207400 - DNA, 19 bp, Homo sapiens
  siRNA target sequence for PIK3CB (NM_006219.1,1709-1727).
cacaatcactgccaaaatt

SEQ ID NO: 207401 - DNA, 19 bp, Homo sapiens
  siRNA target sequence for PIK3CB (NM_006219.1,1732-1750).
ctgtcaatcaagtggaata

SEQ ID NO: 207402 - DNA, 19 bp, Homo sapiens
  siRNA target sequence for PIK3CB (NM_006219.1,1734-1752).
gtcaatcaagtggaataaa

SEQ ID NO: 207403 - DNA, 19 bp, Homo sapiens
  siRNA target sequence for PIK3CB (NM_006219.1,1848-1866).
ccagtacgttcgagaatat

SEQ ID NO: 207404 - DNA, 19 bp, Homo sapiens
  siRNA target sequence for PIK3CB (NM_006219.1,1851-1869).
gtacgttcgagaatatgct

SEQ ID NO: 207405 - DNA, 19 bp, Homo sapiens
  siRNA target sequence for PIK3CB (NM_006219.1,1881-1899).
gcgacagatgagtgatgaa

SEQ ID NO: 207406 - DNA, 19 bp, Homo sapiens
  siRNA target sequence for PIK3CB (NM_006219.1,1921-1939).
caactggtgcaagtgttaa

SEQ ID NO: 207407 - DNA, 19 bp, Homo sapiens
  siRNA target sequence for PIK3CB (NM_006219.1,1957-1975).
gattgtgccctctctagat

SEQ ID NO: 207408 - DNA, 19 bp, Homo sapiens
  siRNA target sequence for PIK3CB (NM_006219.1,1963-1981).
gccctctctagattcctat

SEQ ID NO: 207409 - DNA, 19 bp, Homo sapiens
  siRNA target sequence for PIK3CB (NM_006219.1,2004-2022).
gaggatagggcagtttcta

SEQ ID NO: 207410 - DNA, 19 bp, Homo sapiens
  siRNA target sequence for PIK3CB (NM_006219.1,2006-2024).
ggatagggcagtttctatt

SEQ ID NO: 207411 - DNA, 19 bp, Homo sapiens
  siRNA target sequence for PIK3CB (NM_006219.1,2075-2093).
gtgtcatccttgaagcata

SEQ ID NO: 207412 - DNA, 19 bp, Homo sapiens
  siRNA target sequence for PIK3CB (NM_006219.1,2133-2151).
gcaggttgaagcactcaat

SEQ ID NO: 207413 - DNA, 19 bp, Homo sapiens
  siRNA target sequence for PIK3CB (NM_006219.1,2134-2152).
caggttgaagcactcaata

SEQ ID NO: 207414 - DNA, 19 bp, Homo sapiens
  siRNA target sequence for PIK3CB (NM_006219.1,2143-2161).
gcactcaataagttaaaaa

SEQ ID NO: 207415 - DNA, 19 bp, Homo sapiens
  siRNA target sequence for PIK3CB (NM_006219.1,2154-2172).
gttaaaaactttaaatagt

SEQ ID NO: 207416 - DNA, 19 bp, Homo sapiens
  siRNA target sequence for PIK3CB (NM_006219.1,2221-2239).
gccatgcatacctgtttaa

SEQ ID NO: 207417 - DNA, 19 bp, Homo sapiens
  siRNA target sequence for PIK3CB (NM_006219.1,2222-2240).
ccatgcatacctgtttaaa

SEQ ID NO: 207418 - DNA, 19 bp, Homo sapiens
  siRNA target sequence for PIK3CB (NM_006219.1,2308-2326).
gaactctatgttgaaaagt

SEQ ID NO: 207419 - DNA, 19 bp, Homo sapiens
  siRNA target sequence for PIK3CB (NM_006219.1,2370-2388).
caataacaaggtatttggt

SEQ ID NO: 207420 - DNA, 19 bp, Homo sapiens
  siRNA target sequence for PIK3CB (NM_006219.1,2391-2409).
ggattcagttggagtgatt

SEQ ID NO: 207421 - DNA, 19 bp, Homo sapiens
  siRNA target sequence for PIK3CB (NM_006219.1,2425-2443).
gatttacgacaggatatgt

SEQ ID NO: 207422 - DNA, 19 bp, Homo sapiens
  siRNA target sequence for PIK3CB (NM_006219.1,2457-2475).
gttgcgcttgatggattta

SEQ ID NO: 207423 - DNA, 19 bp, Homo sapiens
  siRNA target sequence for PIK3CB (NM_006219.1,2461-2479).
cgcttgatggatttactct

SEQ ID NO: 207424 - DNA, 19 bp, Homo sapiens
  siRNA target sequence for PIK3CB (NM_006219.1,2508-2526).
gttgccttatggctgttta

SEQ ID NO: 207425 - DNA, 19 bp, Homo sapiens
  siRNA target sequence for PIK3CB (NM_006219.1,2540-2558).
gctctggcctcattgaagt

SEQ ID NO: 207426 - DNA, 19 bp, Homo sapiens
  siRNA target sequence for PIK3CB (NM_006219.1,2541-2559).
ctctggcctcattgaagtt

SEQ ID NO: 207427 - DNA, 19 bp, Homo sapiens
  siRNA target sequence for PIK3CB (NM_006219.1,2560-2578).
gtgagcacctctgaaacaa

SEQ ID NO: 207428 - DNA, 19 bp, Homo sapiens
  siRNA target sequence for PIK3CB (NM_006219.1,2562-2580).
gagcacctctgaaacaatt

SEQ ID NO: 207429 - DNA, 19 bp, Homo sapiens
  siRNA target sequence for PIK3CB (NM_006219.1,2685-2703).
ccgagccattgaggaattt

SEQ ID NO: 207430 - DNA, 19 bp, Homo sapiens
  siRNA target sequence for PIK3CB (NM_006219.1,2720-2738).
gctactgtgtagcttctta

SEQ ID NO: 207431 - DNA, 19 bp, Homo sapiens
  siRNA target sequence for PIK3CB (NM_006219.1,2748-2766).
gattggtgacagacatagt

SEQ ID NO: 207432 - DNA, 19 bp, Homo sapiens
  siRNA target sequence for PIK3CB (NM_006219.1,2858-2876).
gggagcgagtgccttttat

SEQ ID NO: 207433 - DNA, 19 bp, Homo sapiens
  siRNA target sequence for PIK3CB (NM_006219.1,2859-2877).
ggagcgagtgccttttatt

SEQ ID NO: 207434 - DNA, 19 bp, Homo sapiens
  siRNA target sequence for PIK3CB (NM_006219.1,2892-2910).
catccatgtcattcaacaa

SEQ ID NO: 207435 - DNA, 19 bp, Homo sapiens
  siRNA target sequence for PIK3CB (NM_006219.1,2954-2972).
gttgtgaggatgcatatct

SEQ ID NO: 207436 - DNA, 19 bp, Homo sapiens
  siRNA target sequence for PIK3CB (NM_006219.1,2957-2975).
gtgaggatgcatatctgat

SEQ ID NO: 207437 - DNA, 19 bp, Homo sapiens
  siRNA target sequence for PIK3CB (NM_006219.1,2980-2998).
cgacggcatgggaatctct

SEQ ID NO: 207438 - DNA, 19 bp, Homo sapiens
  siRNA target sequence for PIK3CB (NM_006219.1,2981-2999).
gacggcatgggaatctctt

SEQ ID NO: 207439 - DNA, 19 bp, Homo sapiens
  siRNA target sequence for PIK3CB (NM_006219.1,3005-3023).
ctctctttgcgctgatgtt

SEQ ID NO: 207440 - DNA, 19 bp, Homo sapiens
  siRNA target sequence for PIK3CB (NM_006219.1,3007-3025).
ctctttgcgctgatgttga

SEQ ID NO: 207441 - DNA, 19 bp, Homo sapiens
  siRNA target sequence for PIK3CB (NM_006219.1,3043-3061).
ctcacatcagtcaaagata

SEQ ID NO: 207442 - DNA, 19 bp, Homo sapiens
  siRNA target sequence for PIK3CB (NM_006219.1,3050-3068).
cagtcaaagatatacagta

SEQ ID NO: 207443 - DNA, 19 bp, Homo sapiens
  siRNA target sequence for PIK3CB (NM_006219.1,3150-3168).
ggaaagctggactactaaa

SEQ ID NO: 207444 - DNA, 19 bp, Homo sapiens
  siRNA target sequence for PIK3CB (NM_006219.1,3155-3173).
gctggactactaaagtgaa

SEQ ID NO: 207445 - DNA, 19 bp, Homo sapiens
  siRNA target sequence for PIK3CB (NM_006219.1,3184-3202).
cacacagttcggaaagact

SEQ ID NO: 207446 - DNA, 19 bp, Homo sapiens
  siRNA target sequence for PIK3CB (NM_006219.1,3190-3208).
gttcggaaagactacagat

SEQ ID NO: 207447 - DNA, 19 bp, Homo sapiens
  siRNA target sequence for PIK3CB (NM_006219.1,3193-3211).
cggaaagactacagatctt

SEQ ID NO: 207448 - DNA, 19 bp, Homo sapiens
  siRNA target sequence for PIK3CD (NM_005026.2,208-226).
gtggactgccccatggaat

SEQ ID NO: 207449 - DNA, 19 bp, Homo sapiens
  siRNA target sequence for PIK3CD (NM_005026.2,278-296).
caggggtctacctgaactt

SEQ ID NO: 207450 - DNA, 19 bp, Homo sapiens
  siRNA target sequence for PIK3CD (NM_005026.2,565-583).
ggcctccacgagtttgact

SEQ ID NO: 207451 - DNA, 19 bp, Homo sapiens
  siRNA target sequence for PIK3CD (NM_005026.2,607-625).
gactttcgcgccaagatgt

SEQ ID NO: 207452 - DNA, 19 bp, Homo sapiens
  siRNA target sequence for PIK3CD (NM_005026.2,616-634).
gccaagatgtgccaattct

SEQ ID NO: 207453 - DNA, 19 bp, Homo sapiens
  siRNA target sequence for PIK3CD (NM_005026.2,676-694).
gcctggctgcagtacagtt

SEQ ID NO: 207454 - DNA, 19 bp, Homo sapiens
  siRNA target sequence for PIK3CD (NM_005026.2,760-778).
gcccttctggtcaacgtta

SEQ ID NO: 207455 - DNA, 19 bp, Homo sapiens
  siRNA target sequence for PIK3CD (NM_005026.2,761-779).
cccttctggtcaacgttaa

SEQ ID NO: 207456 - DNA, 19 bp, Homo sapiens
  siRNA target sequence for PIK3CD (NM_005026.2,763-781).
cttctggtcaacgttaagt

SEQ ID NO: 207457 - DNA, 19 bp, Homo sapiens
  siRNA target sequence for PIK3CD (NM_005026.2,1316-1334).
ggctggagttcgacatcaa

SEQ ID NO: 207458 - DNA, 19 bp, Homo sapiens
  siRNA target sequence for PIK3CD (NM_005026.2,1523-1541).
cctccgtcccagatgagaa

SEQ ID NO: 207459 - DNA, 19 bp, Homo sapiens
  siRNA target sequence for PIK3CD (NM_005026.2,2071-2089).
gactgcgagctgaccaaat

SEQ ID NO: 207460 - DNA, 19 bp, Homo sapiens
  siRNA target sequence for PIK3CD (NM_005026.2,2075-2093).
gcgagctgaccaaattcct

SEQ ID NO: 207461 - DNA, 19 bp, Homo sapiens
  siRNA target sequence for PIK3CD (NM_005026.2,2838-2856).
ctattgtgtggccacatat

SEQ ID NO: 207462 - DNA, 19 bp, Homo sapiens
  siRNA target sequence for PIK3CD (NM_005026.2,2875-2893).
cggcacagcgacaacatca

SEQ ID NO: 207463 - DNA, 19 bp, Homo sapiens
  siRNA target sequence for PIK3CD (NM_005026.2,2975-2993).
gcgagcgtgtcccattcat

SEQ ID NO: 207464 - DNA, 19 bp, Homo sapiens
  siRNA target sequence for PIK3CD (NM_005026.2,3022-3040).
cagcaggggaagactaata

SEQ ID NO: 207465 - DNA, 19 bp, Homo sapiens
  siRNA target sequence for PIK3CD (NM_005026.2,3027-3045).
ggggaagactaataatagt

SEQ ID NO: 207466 - DNA, 19 bp, Homo sapiens
  siRNA target sequence for PIK3CD (NM_005026.2,3033-3051).
gactaataatagtgagaaa

SEQ ID NO: 207467 - DNA, 19 bp, Homo sapiens
  siRNA target sequence for PIK3CD (NM_005026.2,3234-3252).
gcacttccgagtgaagttt

SEQ ID NO: 207468 - DNA, 19 bp, Homo sapiens
  siRNA target sequence for PIK3CD (NM_005026.2,3235-3253).
cacttccgagtgaagttta

SEQ ID NO: 207469 - DNA, 19 bp, Homo sapiens
  siRNA target sequence for PIK3CG (NM_002649.2,579-597).
ggctgggaccgcatcactt

SEQ ID NO: 207470 - DNA, 19 bp, Homo sapiens
  siRNA target sequence for PIK3CG (NM_002649.2,621-639).
ggcagtggtacgagatcta

SEQ ID NO: 207471 - DNA, 19 bp, Homo sapiens
  siRNA target sequence for PIK3CG (NM_002649.2,957-975).
ccaacaactgcatcttcat

SEQ ID NO: 207472 - DNA, 19 bp, Homo sapiens
  siRNA target sequence for PIK3CG (NM_002649.2,1156-1174).
gggcgaaacgcccatcaaa

SEQ ID NO: 207473 - DNA, 19 bp, Homo sapiens
  siRNA target sequence for PIK3CG (NM_002649.2,1157-1175).
ggcgaaacgcccatcaaaa

SEQ ID NO: 207474 - DNA, 19 bp, Homo sapiens
  siRNA target sequence for PIK3CG (NM_002649.2,1158-1176).
gcgaaacgcccatcaaaaa

SEQ ID NO: 207475 - DNA, 19 bp, Homo sapiens
  siRNA target sequence for PIK3CG (NM_002649.2,1160-1178).
gaaacgcccatcaaaaact

SEQ ID NO: 207476 - DNA, 19 bp, Homo sapiens
  siRNA target sequence for PIK3CG (NM_002649.2,1438-1456).
caccgacctcacagttttt

SEQ ID NO: 207477 - DNA, 19 bp, Homo sapiens
  siRNA target sequence for PIK3CG (NM_002649.2,1441-1459).
cgacctcacagtttttgta

SEQ ID NO: 207478 - DNA, 19 bp, Homo sapiens
  siRNA target sequence for PIK3CG (NM_002649.2,1529-1547).
gaggtgctgtggaatgtgt

SEQ ID NO: 207479 - DNA, 19 bp, Homo sapiens
  siRNA target sequence for PIK3CG (NM_002649.2,1539-1557).
ggaatgtgtggcttgagtt

SEQ ID NO: 207480 - DNA, 19 bp, Homo sapiens
  siRNA target sequence for PIK3CG (NM_002649.2,1969-1987).
gcaattggaggcgatcata

SEQ ID NO: 207481 - DNA, 19 bp, Homo sapiens
  siRNA target sequence for PIK3CG (NM_002649.2,2035-2053).
ctggcattttagatacgaa

SEQ ID NO: 207482 - DNA, 19 bp, Homo sapiens
  siRNA target sequence for PIK3CG (NM_002649.2,2046-2064).
gatacgaaagccttaagca

SEQ ID NO: 207483 - DNA, 19 bp, Homo sapiens
  siRNA target sequence for PIK3CG (NM_002649.2,2062-2080).
gcacccaaaagcatatcct

SEQ ID NO: 207484 - DNA, 19 bp, Homo sapiens
  siRNA target sequence for PIK3CG (NM_002649.2,2063-2081).
cacccaaaagcatatccta

SEQ ID NO: 207485 - DNA, 19 bp, Homo sapiens
  siRNA target sequence for PIK3CG (NM_002649.2,2072-2090).
gcatatcctaagctattta

SEQ ID NO: 207486 - DNA, 19 bp, Homo sapiens
  siRNA target sequence for PIK3CG (NM_002649.2,2084-2102).
ctatttagttcagtgaaat

SEQ ID NO: 207487 - DNA, 19 bp, Homo sapiens
  siRNA target sequence for PIK3CG (NM_002649.2,2120-2138).
gtggccaaaacataccaat

SEQ ID NO: 207488 - DNA, 19 bp, Homo sapiens
  siRNA target sequence for PIK3CG (NM_002649.2,2235-2253).
ccattgcagttcagaaact

SEQ ID NO: 207489 - DNA, 19 bp, Homo sapiens
  siRNA target sequence for PIK3CG (NM_002649.2,2334-2352).
gcgcccttgccagatttct

SEQ ID NO: 207490 - DNA, 19 bp, Homo sapiens
  siRNA target sequence for PIK3CG (NM_002649.2,2379-2397).
gaattggtcactttttgtt

SEQ ID NO: 207491 - DNA, 19 bp, Homo sapiens
  siRNA target sequence for PIK3CG (NM_002649.2,2440-2458).
gcagaggttcgctgtgatt

SEQ ID NO: 207492 - DNA, 19 bp, Homo sapiens
  siRNA target sequence for PIK3CG (NM_002649.2,2489-2507).
gccatgctgcacgacttta

SEQ ID NO: 207493 - DNA, 19 bp, Homo sapiens
  siRNA target sequence for PIK3CG (NM_002649.2,2518-2536).
ccaagtaatcgagatgtta

SEQ ID NO: 207494 - DNA, 19 bp, Homo sapiens
  siRNA target sequence for PIK3CG (NM_002649.2,2582-2600).
gacgtcagttcccaagtta

SEQ ID NO: 207495 - DNA, 19 bp, Homo sapiens
  siRNA target sequence for PIK3CG (NM_002649.2,2584-2602).
cgtcagttcccaagttatt

SEQ ID NO: 207496 - DNA, 19 bp, Homo sapiens
  siRNA target sequence for PIK3CG (NM_002649.2,2585-2603).
gtcagttcccaagttattt

SEQ ID NO: 207497 - DNA, 19 bp, Homo sapiens
  siRNA target sequence for PIK3CG (NM_002649.2,2640-2658).
ctcaactccccgaaagctt

SEQ ID NO: 207498 - DNA, 19 bp, Homo sapiens
  siRNA target sequence for PIK3CG (NM_002649.2,2655-2673).
gctttagagttccatatga

SEQ ID NO: 207499 - DNA, 19 bp, Homo sapiens
  siRNA target sequence for PIK3CG (NM_002649.2,2688-2706).
caggagcgctggcaattga

SEQ ID NO: 207500 - DNA, 19 bp, Homo sapiens
  siRNA target sequence for PIK3CG (NM_002649.2,2690-2708).
ggagcgctggcaattgaaa

SEQ ID NO: 207501 - DNA, 19 bp, Homo sapiens
  siRNA target sequence for PIK3CG (NM_002649.2,2691-2709).
gagcgctggcaattgaaaa

SEQ ID NO: 207502 - DNA, 19 bp, Homo sapiens
  siRNA target sequence for PIK3CG (NM_002649.2,2693-2711).
gcgctggcaattgaaaaat

SEQ ID NO: 207503 - DNA, 19 bp, Homo sapiens
  siRNA target sequence for PIK3CG (NM_002649.2,2738-2756).
ccactatggcttgagttta

SEQ ID NO: 207504 - DNA, 19 bp, Homo sapiens
  siRNA target sequence for PIK3CG (NM_002649.2,2739-2757).
cactatggcttgagtttaa

SEQ ID NO: 207505 - DNA, 19 bp, Homo sapiens
  siRNA target sequence for PIK3CG (NM_002649.2,2822-2840).
ctgcgccaagacatgctta

SEQ ID NO: 207506 - DNA, 19 bp, Homo sapiens
  siRNA target sequence for PIK3CG (NM_002649.2,2824-2842).
gcgccaagacatgcttatt

SEQ ID NO: 207507 - DNA, 19 bp, Homo sapiens
  siRNA target sequence for PIK3CG (NM_002649.2,2836-2854).
gcttattttacagattcta

SEQ ID NO: 207508 - DNA, 19 bp, Homo sapiens
  siRNA target sequence for PIK3CG (NM_002649.2,2855-2873).
cgaatcatggagtctattt

SEQ ID NO: 207509 - DNA, 19 bp, Homo sapiens
  siRNA target sequence for PIK3CG (NM_002649.2,2902-2920).
cctgccatatggttgcatt

SEQ ID NO: 207510 - DNA, 19 bp, Homo sapiens
  siRNA target sequence for PIK3CG (NM_002649.2,2905-2923).
gccatatggttgcatttca

SEQ ID NO: 207511 - DNA, 19 bp, Homo sapiens
  siRNA target sequence for PIK3CG (NM_002649.2,2956-2974).
gaaagacgccacgacaatt

SEQ ID NO: 207512 - DNA, 19 bp, Homo sapiens
  siRNA target sequence for PIK3CG (NM_002649.2,3004-3022).
cacgggagcatttaaagat

SEQ ID NO: 207513 - DNA, 19 bp, Homo sapiens
  siRNA target sequence for PIK3CG (NM_002649.2,3054-3072).
cccctactgaagaaaagtt

SEQ ID NO: 207514 - DNA, 19 bp, Homo sapiens
  siRNA target sequence for PIK3CG (NM_002649.2,3086-3104).
gagagatttgtttattcct

SEQ ID NO: 207515 - DNA, 19 bp, Homo sapiens
  siRNA target sequence for PIK3CG (NM_002649.2,3117-3135).
gtgtggcaacctttgttct

SEQ ID NO: 207516 - DNA, 19 bp, Homo sapiens
  siRNA target sequence for PIK3CG (NM_002649.2,3143-3161).
ggcgacagacacaatgaca

SEQ ID NO: 207517 - DNA, 19 bp, Homo sapiens
  siRNA target sequence for PIK3CG (NM_002649.2,3144-3162).
gcgacagacacaatgacaa

SEQ ID NO: 207518 - DNA, 19 bp, Homo sapiens
  siRNA target sequence for PIK3CG (NM_002649.2,3178-3196).
gacaggaaacctatttcat

SEQ ID NO: 207519 - DNA, 19 bp, Homo sapiens
  siRNA target sequence for PIK3CG (NM_002649.2,3180-3198).
caggaaacctatttcatat

SEQ ID NO: 207520 - DNA, 19 bp, Homo sapiens
  siRNA target sequence for PIK3CG (NM_002649.2,3183-3201).
gaaacctatttcatattga

SEQ ID NO: 207521 - DNA, 19 bp, Homo sapiens
  siRNA target sequence for PIK3CG (NM_002649.2,3207-3225).
ggcacattcttgggaatta

SEQ ID NO: 207522 - DNA, 19 bp, Homo sapiens
  siRNA target sequence for PIK3CG (NM_002649.2,3215-3233).
cttgggaattacaaaagtt

SEQ ID NO: 207523 - DNA, 19 bp, Homo sapiens
  siRNA target sequence for PIK3CG (NM_002649.2,3318-3336).
gcccacacttccagaaatt

SEQ ID NO: 207524 - DNA, 19 bp, Homo sapiens
  siRNA target sequence for PIK3CG (NM_002649.2,3422-3440).
ggaatgccccagttaacaa

SEQ ID NO: 207525 - DNA, 19 bp, Homo sapiens
  siRNA target sequence for PIK3CG (NM_002649.2,3515-3533).
cttgatcagatcgaagttt

SEQ ID NO: 207526 - DNA, 19 bp, Homo sapiens
  siRNA target sequence for PIK3CG (NM_002649.2,3530-3548).
gtttgcagagacaaaggat

SEQ ID NO: 207527 - DNA, 19 bp, Homo sapiens
  siRNA target sequence for PIK3CG (NM_002649.2,3545-3563).
ggatggactgtgcagttta

SEQ ID NO: 207528 - DNA, 19 bp, Homo sapiens
  siRNA target sequence for PIK3CG (NM_002649.2,3559-3577).
gtttaattggtttctacat

SEQ ID NO: 207529 - DNA, 19 bp, Homo sapiens
  siRNA target sequence for PIK3CG (NM_002649.2,3567-3585).
ggtttctacatcttgttct

SEQ ID NO: 207530 - DNA, 19 bp, Homo sapiens
  siRNA target sequence for PIK3R2 (NM_005027.1,747-765).
ccctggctgacggcattaa

SEQ ID NO: 207531 - DNA, 19 bp, Homo sapiens
  siRNA target sequence for PIK3R2 (NM_005027.1,1348-1366).
caggaaaggcgggaacaat

SEQ ID NO: 207532 - DNA, 19 bp, Homo sapiens
  siRNA target sequence for PIK3R2 (NM_005027.1,1350-1368).
ggaaaggcgggaacaataa

SEQ ID NO: 207533 - DNA, 19 bp, Homo sapiens
  siRNA target sequence for PIK3R2 (NM_005027.1,1465-1483).
gtctctggcccagtacaat

SEQ ID NO: 207534 - DNA, 19 bp, Homo sapiens
  siRNA target sequence for PIK3R2 (NM_005027.1,1505-1523).
ctctaccctgtgtccaaat

SEQ ID NO: 207535 - DNA, 19 bp, Homo sapiens
  siRNA target sequence for PIK3R2 (NM_005027.1,1614-1632).
gcgagtatgaccagcttta

SEQ ID NO: 207536 - DNA, 19 bp, Homo sapiens
  siRNA target sequence for PIK3R2 (NM_005027.1,1666-1684).
gatgaagcgtactgcaatt

SEQ ID NO: 207537 - DNA, 19 bp, Homo sapiens
  siRNA target sequence for PIK3R2 (NM_005027.1,1680-1698).
caattgaggccttcaatga

SEQ ID NO: 207538 - DNA, 19 bp, Homo sapiens
  siRNA target sequence for PIK3R2 (NM_005027.1,1688-1706).
gccttcaatgagactatca

SEQ ID NO: 207539 - DNA, 19 bp, Homo sapiens
  siRNA target sequence for PIK3R2 (NM_005027.1,1699-1717).
gactatcaagatctttgaa

SEQ ID NO: 207540 - DNA, 19 bp, Homo sapiens
  siRNA target sequence for PIK3R2 (NM_005027.1,1701-1719).
ctatcaagatctttgaaga

SEQ ID NO: 207541 - DNA, 19 bp, Homo sapiens
  siRNA target sequence for PIK3R2 (NM_005027.1,1724-1742).
ggccagactcaagagaaat

SEQ ID NO: 207542 - DNA, 19 bp, Homo sapiens
  siRNA target sequence for PIK3R2 (NM_005027.1,1727-1745).
cagactcaagagaaatgca

SEQ ID NO: 207543 - DNA, 19 bp, Homo sapiens
  siRNA target sequence for PIK3R2 (NM_005027.1,2106-2124).
ggtacgtgggcaagatcaa

SEQ ID NO: 207544 - DNA, 19 bp, Homo sapiens
  siRNA target sequence for MGC26597 (NM_152700.2,1372-1390).
ggctgtcaatccacaatat

SEQ ID NO: 207545 - DNA, 19 bp, Homo sapiens
  siRNA target sequence for MGC26597 (NM_152700.2,1434-1452).
gtgtcaatcgacactcaaa

SEQ ID NO: 207546 - DNA, 19 bp, Homo sapiens
  siRNA target sequence for MGC26597 (NM_152700.2,1436-1454).
gtcaatcgacactcaaaga

SEQ ID NO: 207547 - DNA, 19 bp, Homo sapiens
  siRNA target sequence for MGC26597 (NM_152700.2,1438-1456).
caatcgacactcaaagact

SEQ ID NO: 207548 - DNA, 19 bp, Homo sapiens
  siRNA target sequence for MGC46424 (NM_173492.1,245-263).
ccgagaggtatgacatcaa

SEQ ID NO: 207549 - DNA, 19 bp, Homo sapiens
  siRNA target sequence for MGC46424 (NM_173492.1,246-264).
cgagaggtatgacatcaaa

SEQ ID NO: 207550 - DNA, 19 bp, Homo sapiens
  siRNA target sequence for MGC46424 (NM_173492.1,324-342).
gctgaaggacctcaacttt

SEQ ID NO: 207551 - DNA, 19 bp, Homo sapiens
  siRNA target sequence for PIP5K1A (NM_003557.1,427-445).
gtcttcggtcggtttttca

SEQ ID NO: 207552 - DNA, 19 bp, Homo sapiens
  siRNA target sequence for PIP5K1A (NM_003557.1,547-565).
gaaaataggccatagaagt

SEQ ID NO: 207553 - DNA, 19 bp, Homo sapiens
  siRNA target sequence for PIP5K1A (NM_003557.1,1325-1343).
gattacagcctcttgatgt

SEQ ID NO: 207554 - DNA, 19 bp, Homo sapiens
  siRNA target sequence for PIP5K1A (NM_003557.1,1334-1352).
ctcttgatgtcaatccata

SEQ ID NO: 207555 - DNA, 19 bp, Homo sapiens
  siRNA target sequence for PIP5K1A (NM_003557.1,1375-1393).
gcccttaagcagtgaaaca

SEQ ID NO: 207556 - DNA, 19 bp, Homo sapiens
  siRNA target sequence for PIP5K1B (NM_003558.1,490-508).
ctgcatcatctgctattaa

SEQ ID NO: 207557 - DNA, 19 bp, Homo sapiens
  siRNA target sequence for PIP5K1B (NM_003558.1,557-575).
caagccagaacgagatgtt

SEQ ID NO: 207558 - DNA, 19 bp, Homo sapiens
  siRNA target sequence for PIP5K1B (NM_003558.1,573-591).
gttcttatgcaagactttt

SEQ ID NO: 207559 - DNA, 19 bp, Homo sapiens
  siRNA target sequence for PIP5K1B (NM_003558.1,671-689).
gacatacgctccattagca

SEQ ID NO: 207560 - DNA, 19 bp, Homo sapiens
  siRNA target sequence for PIP5K1B (NM_003558.1,714-732).
ggtatcaagcctgatgatt

SEQ ID NO: 207561 - DNA, 19 bp, Homo sapiens
  siRNA target sequence for PIP5K1B (NM_003558.1,787-805).
gtggatccttgttttttgt

SEQ ID NO: 207562 - DNA, 19 bp, Homo sapiens
  siRNA target sequence for PIP5K1B (NM_003558.1,842-860).
gcacaaagaagctgagttt

SEQ ID NO: 207563 - DNA, 19 bp, Homo sapiens
  siRNA target sequence for PIP5K1B (NM_003558.1,875-893).
gccaggctattacatgaat

SEQ ID NO: 207564 - DNA, 19 bp, Homo sapiens
  siRNA target sequence for PIP5K1B (NM_003558.1,876-894).
ccaggctattacatgaatt

SEQ ID NO: 207565 - DNA, 19 bp, Homo sapiens
  siRNA target sequence for PIP5K1B (NM_003558.1,879-897).
ggctattacatgaatttaa

SEQ ID NO: 207566 - DNA, 19 bp, Homo sapiens
  siRNA target sequence for PIP5K1B (NM_003558.1,910-928).
ggactcttttgccaaaatt

SEQ ID NO: 207567 - DNA, 19 bp, Homo sapiens
  siRNA target sequence for PIP5K1B (NM_003558.1,932-950).
cggactgtattgtatgcaa

SEQ ID NO: 207568 - DNA, 19 bp, Homo sapiens
  siRNA target sequence for PIP5K1B (NM_003558.1,933-951).
ggactgtattgtatgcaat

SEQ ID NO: 207569 - DNA, 19 bp, Homo sapiens
  siRNA target sequence for PIP5K1B (NM_003558.1,1028-1046).
cttgaaaggctcaacgtat

SEQ ID NO: 207570 - DNA, 19 bp, Homo sapiens
  siRNA target sequence for PIP5K1B (NM_003558.1,1051-1069).
gaagagcatcccgtaaaga

SEQ ID NO: 207571 - DNA, 19 bp, Homo sapiens
  siRNA target sequence for PIP5K1B (NM_003558.1,1081-1099).
ccaaccccacatttaagga

SEQ ID NO: 207572 - DNA, 19 bp, Homo sapiens
  siRNA target sequence for PIP5K1B (NM_003558.1,1118-1136).
catgcacgaagggttgtat

SEQ ID NO: 207573 - DNA, 19 bp, Homo sapiens
  siRNA target sequence for PIP5K1B (NM_003558.1,1121-1139).
gcacgaagggttgtatttt

SEQ ID NO: 207574 - DNA, 19 bp, Homo sapiens
  siRNA target sequence for PIP5K1B (NM_003558.1,1124-1142).
cgaagggttgtattttgat

SEQ ID NO: 207575 - DNA, 19 bp, Homo sapiens
  siRNA target sequence for PIP5K1B (NM_003558.1,1125-1143).
gaagggttgtattttgata

SEQ ID NO: 207576 - DNA, 19 bp, Homo sapiens
  siRNA target sequence for PIP5K1B (NM_003558.1,1150-1168).
catacaacgcgcttatgaa

SEQ ID NO: 207577 - DNA, 19 bp, Homo sapiens
  siRNA target sequence for PIP5K1B (NM_003558.1,1154-1172).
caacgcgcttatgaaaaca

SEQ ID NO: 207578 - DNA, 19 bp, Homo sapiens
  siRNA target sequence for PIP5K1B (NM_003558.1,1157-1175).
cgcgcttatgaaaacactt

SEQ ID NO: 207579 - DNA, 19 bp, Homo sapiens
  siRNA target sequence for PIP5K1B (NM_003558.1,1186-1204).
gccgggtgctagaaagctt

SEQ ID NO: 207580 - DNA, 19 bp, Homo sapiens
  siRNA target sequence for PIP5K1B (NM_003558.1,1222-1240).
gccttctgttgggaattca

SEQ ID NO: 207581 - DNA, 19 bp, Homo sapiens
  siRNA target sequence for PIP5K1B (NM_003558.1,1223-1241).
ccttctgttgggaattcat

SEQ ID NO: 207582 - DNA, 19 bp, Homo sapiens
  siRNA target sequence for PIP5K1B (NM_003558.1,1406-1424).
gggaggcattccagctaaa

SEQ ID NO: 207583 - DNA, 19 bp, Homo sapiens
  siRNA target sequence for PIP5K1B (NM_003558.1,1467-1485).
gacattctgcaatcatata

SEQ ID NO: 207584 - DNA, 19 bp, Homo sapiens
  siRNA target sequence for PIP5K1B (NM_003558.1,1511-1529).
ctggaaagctcttgtttat

SEQ ID NO: 207585 - DNA, 19 bp, Homo sapiens
  siRNA target sequence for PIP5K1B (NM_003558.1,1548-1566).
gttcatagaccaagctttt

SEQ ID NO: 207586 - DNA, 19 bp, Homo sapiens
  siRNA target sequence for PIP5K1B (NM_003558.1,1562-1580).
cttttatgcagacagattt

SEQ ID NO: 207587 - DNA, 19 bp, Homo sapiens
  siRNA target sequence for PIP5K1B (NM_003558.1,1581-1599).
cttaagttcatgaattcca

SEQ ID NO: 207588 - DNA, 19 bp, Homo sapiens
  siRNA target sequence for PIP5K1B (NM_003558.1,1628-1646).
ggcttcaccgtctaagaaa

SEQ ID NO: 207589 - DNA, 19 bp, Homo sapiens
  siRNA target sequence for PIP5K1B (NM_003558.1,1685-1703).
ggagattgtgtcctcaatt

SEQ ID NO: 207590 - DNA, 19 bp, Homo sapiens
  siRNA target sequence for PIP5K1B (NM_003558.1,1736-1754).
gctgactgaaggacaaagt

SEQ ID NO: 207591 - DNA, 19 bp, Homo sapiens
  siRNA target sequence for PIP5K1B (NM_003558.1,1864-1882).
cttccttatacgtcaatga

SEQ ID NO: 207592 - DNA, 19 bp, Homo sapiens
  siRNA target sequence for PIP5K1B (NM_003558.1,1895-1913).
cgacaggcctacactctat

SEQ ID NO: 207593 - DNA, 19 bp, Homo sapiens
  siRNA target sequence for PIP5K1B (NM_003558.1,1896-1914).
gacaggcctacactctatt

SEQ ID NO: 207594 - DNA, 19 bp, Homo sapiens
  siRNA target sequence for PIP5K1B (NM_003558.1,1898-1916).
caggcctacactctattca

SEQ ID NO: 207595 - DNA, 19 bp, Homo sapiens
  siRNA target sequence for PIP5K1B (NM_003558.1,1900-1918).
ggcctacactctattcaaa

SEQ ID NO: 207596 - DNA, 19 bp, Homo sapiens
  siRNA target sequence for PIP5K1B (NM_003558.1,1902-1920).
cctacactctattcaaaca

SEQ ID NO: 207597 - DNA, 19 bp, Homo sapiens
  siRNA target sequence for PIP5K1B (NM_003558.1,1936-1954).
ccagttcaacatttacctt

SEQ ID NO: 207598 - DNA, 19 bp, Homo sapiens
  siRNA target sequence for PIP5K1B (NM_003558.1,1959-1977).
gaggggaccatctacttga

SEQ ID NO: 207599 - DNA, 19 bp, Homo sapiens
  siRNA target sequence for PIP5K1B (NM_003558.1,2022-2040).
gtgcttgacgtctatttat

SEQ ID NO: 207600 - DNA, 19 bp, Homo sapiens
  siRNA target sequence for PIP5K1C (NM_012398.1,149-167).
caggtttggctcagaagaa

SEQ ID NO: 207601 - DNA, 19 bp, Homo sapiens
  siRNA target sequence for PIP5K1C (NM_012398.1,256-274).
ggcgaaaccacctacaaga

SEQ ID NO: 207602 - DNA, 19 bp, Homo sapiens
  siRNA target sequence for PIP5K1C (NM_012398.1,257-275).
gcgaaaccacctacaagaa

SEQ ID NO: 207603 - DNA, 19 bp, Homo sapiens
  siRNA target sequence for PIP5K1C (NM_012398.1,658-676).
ctgctccctggctactaca

SEQ ID NO: 207604 - DNA, 19 bp, Homo sapiens
  siRNA target sequence for PIP5K1C (NM_012398.1,701-719).
cgctgctgcccaagttcta

SEQ ID NO: 207605 - DNA, 19 bp, Homo sapiens
  siRNA target sequence for PIP5K1C (NM_012398.1,757-775).
cgcgtcgtggtcatgaaca

SEQ ID NO: 207606 - DNA, 19 bp, Homo sapiens
  siRNA target sequence for PIP5K1C (NM_012398.1,1351-1369).
gccgagcgctttttcaagt

SEQ ID NO: 207607 - DNA, 19 bp, Homo sapiens
  siRNA target sequence for PIP5K1C (NM_012398.1,1352-1370).
ccgagcgctttttcaagtt

SEQ ID NO: 207608 - DNA, 19 bp, Homo sapiens
  siRNA target sequence for PIP5K1C (NM_012398.1,1357-1375).
cgctttttcaagttcatga

SEQ ID NO: 207609 - DNA, 19 bp, Homo sapiens
  siRNA target sequence for PIP5K1C (NM_012398.1,1590-1608).
cacgccaccttctttcgaa

SEQ ID NO: 207610 - DNA, 19 bp, Homo sapiens
  siRNA target sequence for PIP5K1C (NM_012398.1,1802-1820).
cgtgcagcgtggagattgt

SEQ ID NO: 207611 - DNA, 19 bp, Homo sapiens
  siRNA target sequence for PIP5K1C (NM_012398.1,1959-1977).
cgccaccgacatctacttt

SEQ ID NO: 207612 - DNA, 19 bp, Homo sapiens
  siRNA target sequence for PIP5K2A (NM_005028.3,380-398).
gaactgagccatgttcaaa

SEQ ID NO: 207613 - DNA, 19 bp, Homo sapiens
  siRNA target sequence for PIP5K2A (NM_005028.3,422-440).
gacttcaaagcctattcaa

SEQ ID NO: 207614 - DNA, 19 bp, Homo sapiens
  siRNA target sequence for PIP5K2A (NM_005028.3,448-466).
ggtggacaatcaccttttt

SEQ ID NO: 207615 - DNA, 19 bp, Homo sapiens
  siRNA target sequence for PIP5K2A (NM_005028.3,449-467).
gtggacaatcaccttttta

SEQ ID NO: 207616 - DNA, 19 bp, Homo sapiens
  siRNA target sequence for PIP5K2A (NM_005028.3,452-470).
gacaatcacctttttaaca

SEQ ID NO: 207617 - DNA, 19 bp, Homo sapiens
  siRNA target sequence for PIP5K2A (NM_005028.3,613-631).
ccgcagtggagctcgtttt

SEQ ID NO: 207618 - DNA, 19 bp, Homo sapiens
  siRNA target sequence for PIP5K2A (NM_005028.3,615-633).
gcagtggagctcgttttca

SEQ ID NO: 207619 - DNA, 19 bp, Homo sapiens
  siRNA target sequence for PIP5K2A (NM_005028.3,634-652).
cacttcctacgacaaaaga

SEQ ID NO: 207620 - DNA, 19 bp, Homo sapiens
  siRNA target sequence for PIP5K2A (NM_005028.3,636-654).
cttcctacgacaaaagata

SEQ ID NO: 207621 - DNA, 19 bp, Homo sapiens
  siRNA target sequence for PIP5K2A (NM_005028.3,639-657).
cctacgacaaaagatacat

SEQ ID NO: 207622 - DNA, 19 bp, Homo sapiens
  siRNA target sequence for PIP5K2A (NM_005028.3,721-739).
gtacatagtggaatgtcat

SEQ ID NO: 207623 - DNA, 19 bp, Homo sapiens
  siRNA target sequence for PIP5K2A (NM_005028.3,766-784).
gggcatgtaccggcttaat

SEQ ID NO: 207624 - DNA, 19 bp, Homo sapiens
  siRNA target sequence for PIP5K2A (NM_005028.3,768-786).
gcatgtaccggcttaatgt

SEQ ID NO: 207625 - DNA, 19 bp, Homo sapiens
  siRNA target sequence for PIP5K2A (NM_005028.3,769-787).
catgtaccggcttaatgtt

SEQ ID NO: 207626 - DNA, 19 bp, Homo sapiens
  siRNA target sequence for PIP5K2A (NM_005028.3,772-790).
gtaccggcttaatgttgat

SEQ ID NO: 207627 - DNA, 19 bp, Homo sapiens
  siRNA target sequence for PIP5K2A (NM_005028.3,797-815).
gaaatatatgtgatagtta

SEQ ID NO: 207628 - DNA, 19 bp, Homo sapiens
  siRNA target sequence for PIP5K2A (NM_005028.3,832-850).
ccaccgtttgtctgtgtat

SEQ ID NO: 207629 - DNA, 19 bp, Homo sapiens
  siRNA target sequence for PIP5K2A (NM_005028.3,836-854).
cgtttgtctgtgtatagga

SEQ ID NO: 207630 - DNA, 19 bp, Homo sapiens
  siRNA target sequence for PIP5K2A (NM_005028.3,837-855).
gtttgtctgtgtataggaa

SEQ ID NO: 207631 - DNA, 19 bp, Homo sapiens
  siRNA target sequence for PIP5K2A (NM_005028.3,843-861).
ctgtgtataggaaatacga

SEQ ID NO: 207632 - DNA, 19 bp, Homo sapiens
  siRNA target sequence for PIP5K2A (NM_005028.3,917-935).
ctgccaactctgaaagata

SEQ ID NO: 207633 - DNA, 19 bp, Homo sapiens
  siRNA target sequence for PIP5K2A (NM_005028.3,950-968).
gagggccaaaagatttata

SEQ ID NO: 207634 - DNA, 19 bp, Homo sapiens
  siRNA target sequence for PIP5K2A (NM_005028.3,988-1006).
ggtcttcctggaaaaacta

SEQ ID NO: 207635 - DNA, 19 bp, Homo sapiens
  siRNA target sequence for PIP5K2A (NM_005028.3,1057-1075).
gctggtgggaattcatgat

SEQ ID NO: 207636 - DNA, 19 bp, Homo sapiens
  siRNA target sequence for PIP5K2A (NM_005028.3,1234-1252).
catcgacgtctatggaatt

SEQ ID NO: 207637 - DNA, 19 bp, Homo sapiens
  siRNA target sequence for PIP5K2A (NM_005028.3,1283-1301).
gtgtacttcatggcaatta

SEQ ID NO: 207638 - DNA, 19 bp, Homo sapiens
  siRNA target sequence for PIP5K2A (NM_005028.3,1285-1303).
gtacttcatggcaattatt

SEQ ID NO: 207639 - DNA, 19 bp, Homo sapiens
  siRNA target sequence for PIP5K2A (NM_005028.3,1295-1313).
gcaattattgacatcctta

SEQ ID NO: 207640 - DNA, 19 bp, Homo sapiens
  siRNA target sequence for PIP5K2A (NM_005028.3,1306-1324).
catccttactcattatgat

SEQ ID NO: 207641 - DNA, 19 bp, Homo sapiens
  siRNA target sequence for PIP5K2A (NM_005028.3,1389-1407).
ccgtgaacccagaacagta

SEQ ID NO: 207642 - DNA, 19 bp, Homo sapiens
  siRNA target sequence for PIP5K2A (NM_005028.3,1414-1432).
gcgctttttggactttatt

SEQ ID NO: 207643 - DNA, 19 bp, Homo sapiens
  siRNA target sequence for PIP5K2B (NM_003559.3,570-588).
gccagaaagtgaagctatt

SEQ ID NO: 207644 - DNA, 19 bp, Homo sapiens
  siRNA target sequence for PIP5K2B (NM_003559.3,709-727).
gatcaaggtggacaatcat

SEQ ID NO: 207645 - DNA, 19 bp, Homo sapiens
  siRNA target sequence for PIP5K2B (NM_003559.3,746-764).
ctgcccagccgctttaagt

SEQ ID NO: 207646 - DNA, 19 bp, Homo sapiens
  siRNA target sequence for PIP5K2B (NM_003559.3,781-799).
catggtgttccgaaacctt

SEQ ID NO: 207647 - DNA, 19 bp, Homo sapiens
  siRNA target sequence for PIP5K2B (NM_003559.3,953-971).
gcggagatgcacaacatct

SEQ ID NO: 207648 - DNA, 19 bp, Homo sapiens
  siRNA target sequence for PIP5K2B (NM_003559.3,955-973).
ggagatgcacaacatctta

SEQ ID NO: 207649 - DNA, 19 bp, Homo sapiens
  siRNA target sequence for PIP5K2B (NM_003559.3,956-974).
gagatgcacaacatcttaa

SEQ ID NO: 207650 - DNA, 19 bp, Homo sapiens
  siRNA target sequence for PIP5K2B (NM_003559.3,1108-1126).
cactgtgcatcgcaagtat

SEQ ID NO: 207651 - DNA, 19 bp, Homo sapiens
  siRNA target sequence for PIP5K2B (NM_003559.3,1110-1128).
ctgtgcatcgcaagtatga

SEQ ID NO: 207652 - DNA, 19 bp, Homo sapiens
  siRNA target sequence for PIP5K2B (NM_003559.3,1474-1492).
cagctttcctcggttcttt

SEQ ID NO: 207653 - DNA, 19 bp, Homo sapiens
  siRNA target sequence for PIP5K2B (NM_003559.3,1520-1538).
gacgtctatgccatgaaaa

SEQ ID NO: 207654 - DNA, 19 bp, Homo sapiens
  siRNA target sequence for PIP5K2B (NM_003559.3,1553-1571).
cccaagaaggaggtgtatt

SEQ ID NO: 207655 - DNA, 19 bp, Homo sapiens
  siRNA target sequence for PIP5K2B (NM_003559.3,1554-1572).
ccaagaaggaggtgtattt

SEQ ID NO: 207656 - DNA, 19 bp, Homo sapiens
  siRNA target sequence for PIP5K2B (NM_003559.3,1592-1610).
ctcacgccatacgatacaa

SEQ ID NO: 207657 - DNA, 19 bp, Homo sapiens
  siRNA target sequence for PIP5K2B (NM_003559.3,1598-1616).
ccatacgatacaaagaaga

SEQ ID NO: 207658 - DNA, 19 bp, Homo sapiens
  siRNA target sequence for PIP5K2B (NM_003559.3,1599-1617).
catacgatacaaagaagaa

SEQ ID NO: 207659 - DNA, 19 bp, Homo sapiens
  siRNA target sequence for PIP5K2B (NM_003559.3,1629-1647).
ctgccaaaacggtgaaaca

SEQ ID NO: 207660 - DNA, 19 bp, Homo sapiens
  siRNA target sequence for PIP5K2C (NM_024779.3,178-196).
cgtagcccactcgatcaat

SEQ ID NO: 207661 - DNA, 19 bp, Homo sapiens
  siRNA target sequence for PIP5K2C (NM_024779.3,299-317).
cccagtcatttcaagttca

SEQ ID NO: 207662 - DNA, 19 bp, Homo sapiens
  siRNA target sequence for PIP5K2C (NM_024779.3,300-318).
ccagtcatttcaagttcaa

SEQ ID NO: 207663 - DNA, 19 bp, Homo sapiens
  siRNA target sequence for PIP5K2C (NM_024779.3,342-360).
ggaacctccgtgatcgatt

SEQ ID NO: 207664 - DNA, 19 bp, Homo sapiens
  siRNA target sequence for PIP5K2C (NM_024779.3,343-361).
gaacctccgtgatcgattt

SEQ ID NO: 207665 - DNA, 19 bp, Homo sapiens
  siRNA target sequence for PIP5K2C (NM_024779.3,426-444).
gtgatggtcgcttccttat

SEQ ID NO: 207666 - DNA, 19 bp, Homo sapiens
  siRNA target sequence for PIP5K2C (NM_024779.3,428-446).
gatggtcgcttccttatct

SEQ ID NO: 207667 - DNA, 19 bp, Homo sapiens
  siRNA target sequence for PIP5K2C (NM_024779.3,456-474).
ggactctggtcatcaaaga

SEQ ID NO: 207668 - DNA, 19 bp, Homo sapiens
  siRNA target sequence for PIP5K2C (NM_024779.3,461-479).
ctggtcatcaaagaagtat

SEQ ID NO: 207669 - DNA, 19 bp, Homo sapiens
  siRNA target sequence for PIP5K2C (NM_024779.3,507-525).
gcaacctctccaactatca

SEQ ID NO: 207670 - DNA, 19 bp, Homo sapiens
  siRNA target sequence for PIP5K2C (NM_024779.3,516-534).
ccaactatcaccagtacat

SEQ ID NO: 207671 - DNA, 19 bp, Homo sapiens
  siRNA target sequence for PIP5K2C (NM_024779.3,620-638).
gtgatgcgcaatatgttta

SEQ ID NO: 207672 - DNA, 19 bp, Homo sapiens
  siRNA target sequence for PIP5K2C (NM_024779.3,693-711).
gggaagccagcgataagga

SEQ ID NO: 207673 - DNA, 19 bp, Homo sapiens
  siRNA target sequence for PIP5K2C (NM_024779.3,699-717).
ccagcgataaggaaaaggt

SEQ ID NO: 207674 - DNA, 19 bp, Homo sapiens
  siRNA target sequence for PIP5K2C (NM_024779.3,703-721).
cgataaggaaaaggttaaa

SEQ ID NO: 207675 - DNA, 19 bp, Homo sapiens
  siRNA target sequence for PIP5K2C (NM_024779.3,1126-1144).
gggcctcattgatatcctt

SEQ ID NO: 207676 - DNA, 19 bp, Homo sapiens
  siRNA target sequence for PIP5K2C (NM_024779.3,1226-1244).
catccggagcagtatgcta

SEQ ID NO: 207677 - DNA, 19 bp, Homo sapiens
  siRNA target sequence for PIP5K2C (NM_024779.3,1246-1264).
gcgattcctggattttatt

SEQ ID NO: 207678 - DNA, 19 bp, Homo sapiens
  siRNA target sequence for PIP5K2C (NM_024779.3,1247-1265).
cgattcctggattttatta

SEQ ID NO: 207679 - DNA, 19 bp, Homo sapiens
  siRNA target sequence for IHPK1 (NM_153273.1,143-161).
ggggcagtatggcaagaat

SEQ ID NO: 207680 - DNA, 19 bp, Homo sapiens
  siRNA target sequence for IHPK1 (NM_153273.1,274-292).
cccgggaacagcgctttta

SEQ ID NO: 207681 - DNA, 19 bp, Homo sapiens
  siRNA target sequence for IHPK1 (NM_153273.1,277-295).
gggaacagcgcttttacga

SEQ ID NO: 207682 - DNA, 19 bp, Homo sapiens
  siRNA target sequence for IHPK1 (NM_153273.1,320-338).
gttcacccctgaatacaaa

SEQ ID NO: 207683 - DNA, 19 bp, Homo sapiens
  siRNA target sequence for IHPK1 (NM_153273.1,340-358).
gcgtggtatctgtctgttt

SEQ ID NO: 207684 - DNA, 19 bp, Homo sapiens
  siRNA target sequence for IHPK1 (NM_153273.1,370-388).
gtgatggttacatcaactt

SEQ ID NO: 207685 - DNA, 19 bp, Homo sapiens
  siRNA target sequence for IHPK1 (NM_153273.1,450-468).
caacctcggcgcaaacact

SEQ ID NO: 207686 - DNA, 19 bp, Homo sapiens
  siRNA target sequence for IHPK1 (NM_153273.1,621-639).
ggcaacagtggcttgagtt

SEQ ID NO: 207687 - DNA, 19 bp, Homo sapiens
  siRNA target sequence for IHPK1 (NM_153273.1,717-735).
gaccgaaagctctacaagt

SEQ ID NO: 207688 - DNA, 19 bp, Homo sapiens
  siRNA target sequence for IHPK1 (NM_153273.1,778-796).
gcgtgttggacctgaagat

SEQ ID NO: 207689 - DNA, 19 bp, Homo sapiens
  siRNA target sequence for IHPK1 (NM_153273.1,938-956).
ctgcaggaacaagtactat

SEQ ID NO: 207690 - DNA, 19 bp, Homo sapiens
  siRNA target sequence for IHPK1 (NM_153273.1,983-1001).
ccgcaatgccctctatcaa

SEQ ID NO: 207691 - DNA, 19 bp, Homo sapiens
  siRNA target sequence for IHPK1 (NM_153273.1,984-1002).
cgcaatgccctctatcaat

SEQ ID NO: 207692 - DNA, 19 bp, Homo sapiens
  siRNA target sequence for IHPK1 (NM_153273.1,985-1003).
gcaatgccctctatcaata

SEQ ID NO: 207693 - DNA, 19 bp, Homo sapiens
  siRNA target sequence for IHPK2 (NM_016291.1,238-256).
gcgtgctccgcttcaatga

SEQ ID NO: 207694 - DNA, 19 bp, Homo sapiens
  siRNA target sequence for IHPK2 (NM_016291.1,313-331).
ctgctgagatgcgcaaatt

SEQ ID NO: 207695 - DNA, 19 bp, Homo sapiens
  siRNA target sequence for IHPK2 (NM_016291.1,315-333).
gctgagatgcgcaaattca

SEQ ID NO: 207696 - DNA, 19 bp, Homo sapiens
  siRNA target sequence for IHPK2 (NM_016291.1,353-371).
ggtatctgtgcgctttgaa

SEQ ID NO: 207697 - DNA, 19 bp, Homo sapiens
  siRNA target sequence for IHPK2 (NM_016291.1,381-399).
gacaggaacttgtgtctaa

SEQ ID NO: 207698 - DNA, 19 bp, Homo sapiens
  siRNA target sequence for IHPK2 (NM_016291.1,383-401).
caggaacttgtgtctaata

SEQ ID NO: 207699 - DNA, 19 bp, Homo sapiens
  siRNA target sequence for IHPK2 (NM_016291.1,386-404).
gaacttgtgtctaatagca

SEQ ID NO: 207700 - DNA, 19 bp, Homo sapiens
  siRNA target sequence for IHPK2 (NM_016291.1,389-407).
cttgtgtctaatagcatat

SEQ ID NO: 207701 - DNA, 19 bp, Homo sapiens
  siRNA target sequence for IHPK2 (NM_016291.1,394-412).
gtctaatagcatatccatt

SEQ ID NO: 207702 - DNA, 19 bp, Homo sapiens
  siRNA target sequence for IHPK2 (NM_016291.1,474-492).
ctcctaaggtggacaacaa

SEQ ID NO: 207703 - DNA, 19 bp, Homo sapiens
  siRNA target sequence for IHPK2 (NM_016291.1,490-508).
caaacaaaaaacatcatgt

SEQ ID NO: 207704 - DNA, 19 bp, Homo sapiens
  siRNA target sequence for IHPK2 (NM_016291.1,549-567).
caccgtaaagaggagaaaa

SEQ ID NO: 207705 - DNA, 19 bp, Homo sapiens
  siRNA target sequence for IHPK2 (NM_016291.1,655-673).
gttcccagcttaaacacta

SEQ ID NO: 207706 - DNA, 19 bp, Homo sapiens
  siRNA target sequence for IHPK2 (NM_016291.1,734-752).
gcatcggaaccagtacaaa

SEQ ID NO: 207707 - DNA, 19 bp, Homo sapiens
  siRNA target sequence for IHPK2 (NM_016291.1,735-753).
catcggaaccagtacaaat

SEQ ID NO: 207708 - DNA, 19 bp, Homo sapiens
  siRNA target sequence for IHPK2 (NM_016291.1,738-756).
cggaaccagtacaaattta

SEQ ID NO: 207709 - DNA, 19 bp, Homo sapiens
  siRNA target sequence for IHPK2 (NM_016291.1,739-757).
ggaaccagtacaaatttat

SEQ ID NO: 207710 - DNA, 19 bp, Homo sapiens
  siRNA target sequence for IHPK2 (NM_016291.1,743-761).
ccagtacaaatttatctta

SEQ ID NO: 207711 - DNA, 19 bp, Homo sapiens
  siRNA target sequence for IHPK2 (NM_016291.1,812-830).
gatgggcacacgacaacat

SEQ ID NO: 207712 - DNA, 19 bp, Homo sapiens
  siRNA target sequence for IHPK2 (NM_016291.1,1110-1128).
gagtcctaccgcttctact

SEQ ID NO: 207713 - DNA, 19 bp, Homo sapiens
  siRNA target sequence for IHPK2 (NM_016291.1,1391-1409).
cattgtcacagagataagt

SEQ ID NO: 207714 - DNA, 19 bp, Homo sapiens
  siRNA target sequence for IHPK3 (NM_054111.1,1081-1099).
cggcatgcaggtttatcaa

SEQ ID NO: 207715 - DNA, 19 bp, Homo sapiens
  siRNA target sequence for IHPK3 (NM_054111.1,1082-1100).
ggcatgcaggtttatcaaa

SEQ ID NO: 207716 - DNA, 19 bp, Homo sapiens
  siRNA target sequence for IHPK3 (NM_054111.1,1088-1106).
caggtttatcaaacagata

SEQ ID NO: 207717 - DNA, 19 bp, Homo sapiens
  siRNA target sequence for IHPK3 (NM_054111.1,1101-1119).
cagataagaagtactttct

SEQ ID NO: 207718 - DNA, 19 bp, Homo sapiens
  siRNA target sequence for IHPK3 (NM_054111.1,1167-1185).
gacaagccctctatcagtt

SEQ ID NO: 207719 - DNA, 19 bp, Homo sapiens
  siRNA target sequence for IHPK3 (NM_054111.1,1175-1193).
ctctatcagttcctacata

SEQ ID NO: 207720 - DNA, 19 bp, Homo sapiens
  siRNA target sequence for IHPK3 (NM_054111.1,1273-1291).
gagttcataccgcttctat

SEQ ID NO: 207721 - DNA, 19 bp, Homo sapiens
  siRNA target sequence for IHPK3 (NM_054111.1,1411-1429).
ggttgacatccgcatgatt

SEQ ID NO: 207722 - DNA, 19 bp, Homo sapiens
  siRNA target sequence for IHPK3 (NM_054111.1,1527-1545).
ggatcctgcaggatatcca

SEQ ID NO: 207723 - DNA, 19 bp, Homo sapiens
  siRNA target sequence for IHPK3 (NM_054111.1,1528-1546).
gatcctgcaggatatccaa

SEQ ID NO: 207724 - DNA, 19 bp, Homo sapiens
  siRNA target sequence for IPMK (NM_152230.1,211-229).
ggcacagttttgaaacagt

SEQ ID NO: 207725 - DNA, 19 bp, Homo sapiens
  siRNA target sequence for IPMK (NM_152230.1,248-266).
gcccaagagagctggaatt

SEQ ID NO: 207726 - DNA, 19 bp, Homo sapiens
  siRNA target sequence for IPMK (NM_152230.1,254-272).
gagagctggaattctataa

SEQ ID NO: 207727 - DNA, 19 bp, Homo sapiens
  siRNA target sequence for IPMK (NM_152230.1,307-325).
cttctagagctacgaaaat

SEQ ID NO: 207728 - DNA, 19 bp, Homo sapiens
  siRNA target sequence for IPMK (NM_152230.1,358-376).
cccactgcaccaaacgatt

SEQ ID NO: 207729 - DNA, 19 bp, Homo sapiens
  siRNA target sequence for IPMK (NM_152230.1,362-380).
ctgcaccaaacgatttata

SEQ ID NO: 207730 - DNA, 19 bp, Homo sapiens
  siRNA target sequence for IPMK (NM_152230.1,365-383).
caccaaacgatttatacct

SEQ ID NO: 207731 - DNA, 19 bp, Homo sapiens
  siRNA target sequence for IPMK (NM_152230.1,368-386).
caaacgatttatacctaaa

SEQ ID NO: 207732 - DNA, 19 bp, Homo sapiens
  siRNA target sequence for IPMK (NM_152230.1,397-415).
gtgacccataaatttaata

SEQ ID NO: 207733 - DNA, 19 bp, Homo sapiens
  siRNA target sequence for IPMK (NM_152230.1,418-436).
ccctgtataatggatgtaa

SEQ ID NO: 207734 - DNA, 19 bp, Homo sapiens
  siRNA target sequence for IPMK (NM_152230.1,419-437).
cctgtataatggatgtaaa

SEQ ID NO: 207735 - DNA, 19 bp, Homo sapiens
  siRNA target sequence for IPMK (NM_152230.1,438-456).
gatagggcaaaaaagctat

SEQ ID NO: 207736 - DNA, 19 bp, Homo sapiens
  siRNA target sequence for IPMK (NM_152230.1,467-485).
cctcatctgagaagattca

SEQ ID NO: 207737 - DNA, 19 bp, Homo sapiens
  siRNA target sequence for IPMK (NM_152230.1,493-511).
gtcagcaagtacccattaa

SEQ ID NO: 207738 - DNA, 19 bp, Homo sapiens
  siRNA target sequence for IPMK (NM_152230.1,497-515).
gcaagtacccattaatgga

SEQ ID NO: 207739 - DNA, 19 bp, Homo sapiens
  siRNA target sequence for IPMK (NM_152230.1,498-516).
caagtacccattaatggaa

SEQ ID NO: 207740 - DNA, 19 bp, Homo sapiens
  siRNA target sequence for IPMK (NM_152230.1,534-552).
gcttggcatgagggtttat

SEQ ID NO: 207741 - DNA, 19 bp, Homo sapiens
  siRNA target sequence for IPMK (NM_152230.1,559-577).
cattccgatagctatgaga

SEQ ID NO: 207742 - DNA, 19 bp, Homo sapiens
  siRNA target sequence for IPMK (NM_152230.1,588-606).
gcattacggaagaagctta

SEQ ID NO: 207743 - DNA, 19 bp, Homo sapiens
  siRNA target sequence for IPMK (NM_152230.1,589-607).
cattacggaagaagcttaa

SEQ ID NO: 207744 - DNA, 19 bp, Homo sapiens
  siRNA target sequence for IPMK (NM_152230.1,624-642).
ggatggagtctccagattt

SEQ ID NO: 207745 - DNA, 19 bp, Homo sapiens
  siRNA target sequence for IPMK (NM_152230.1,629-647).
gagtctccagattttttca

SEQ ID NO: 207746 - DNA, 19 bp, Homo sapiens
  siRNA target sequence for IPMK (NM_152230.1,646-664).
cataatgggtactgcttaa

SEQ ID NO: 207747 - DNA, 19 bp, Homo sapiens
  siRNA target sequence for IPMK (NM_152230.1,654-672).
gtactgcttaagaaaagat

SEQ ID NO: 207748 - DNA, 19 bp, Homo sapiens
  siRNA target sequence for IPMK (NM_152230.1,747-765).
cgcaagttcattactcttt

SEQ ID NO: 207749 - DNA, 19 bp, Homo sapiens
  siRNA target sequence for IPMK (NM_152230.1,782-800).
ctcagccaaccactacaaa

SEQ ID NO: 207750 - DNA, 19 bp, Homo sapiens
  siRNA target sequence for IPMK (NM_152230.1,791-809).
ccactacaaaattgaatga

SEQ ID NO: 207751 - DNA, 19 bp, Homo sapiens
  siRNA target sequence for IPMK (NM_152230.1,851-869).
cagacacagaagtactaga

SEQ ID NO: 207752 - DNA, 19 bp, Homo sapiens
  siRNA target sequence for IPMK (NM_152230.1,857-875).
cagaagtactagagtacaa

SEQ ID NO: 207753 - DNA, 19 bp, Homo sapiens
  siRNA target sequence for IPMK (NM_152230.1,865-883).
ctagagtacaataataact

SEQ ID NO: 207754 - DNA, 19 bp, Homo sapiens
  siRNA target sequence for IPMK (NM_152230.1,891-909).
gttaagttccacagctaat

SEQ ID NO: 207755 - DNA, 19 bp, Homo sapiens
  siRNA target sequence for IPMK (NM_152230.1,955-973).
gcgcgtcacaggaaaatat

SEQ ID NO: 207756 - DNA, 19 bp, Homo sapiens
  siRNA target sequence for IPMK (NM_152230.1,956-974).
cgcgtcacaggaaaatata

SEQ ID NO: 207757 - DNA, 19 bp, Homo sapiens
  siRNA target sequence for IPMK (NM_152230.1,992-1010).
gtcagacttcattgaaagt

SEQ ID NO: 207758 - DNA, 19 bp, Homo sapiens
  siRNA target sequence for IPMK (NM_152230.1,1044-1062).
catgtcacaggaacattta

SEQ ID NO: 207759 - DNA, 19 bp, Homo sapiens
  siRNA target sequence for IPMK (NM_152230.1,1143-1161).
gcgaatgatagattttgct

SEQ ID NO: 207760 - DNA, 19 bp, Homo sapiens
  siRNA target sequence for IPMK (NM_152230.1,1165-1183).
gtgttccctagcaacacaa

SEQ ID NO: 207761 - DNA, 19 bp, Homo sapiens
  siRNA target sequence for IPMK (NM_152230.1,1167-1185).
gttccctagcaacacaata

SEQ ID NO: 207762 - DNA, 19 bp, Homo sapiens
  siRNA target sequence for IPMK (NM_152230.1,1170-1188).
ccctagcaacacaatagat

SEQ ID NO: 207763 - DNA, 19 bp, Homo sapiens
  siRNA target sequence for IPMK (NM_152230.1,1181-1199).
caatagatgagggatatgt

SEQ ID NO: 207764 - DNA, 19 bp, Homo sapiens
  siRNA target sequence for IPMK (NM_152230.1,1228-1246).
cttcgaagtattttagaca

SEQ ID NO: 207765 - DNA, 19 bp, Homo sapiens
  siRNA target sequence for IPMK (NM_152230.1,1231-1249).
cgaagtattttagacaatt

SEQ ID NO: 207766 - DNA, 19 bp, Homo sapiens
  siRNA target sequence for PIK4CB (NM_002651.1,182-200).
gggggtccctgctaagtgt

SEQ ID NO: 207767 - DNA, 19 bp, Homo sapiens
  siRNA target sequence for PIK4CB (NM_002651.1,208-226).
gagggggtcggggaactat

SEQ ID NO: 207768 - DNA, 19 bp, Homo sapiens
  siRNA target sequence for PIK4CB (NM_002651.1,210-228).
gggggtcggggaactatca

SEQ ID NO: 207769 - DNA, 19 bp, Homo sapiens
  siRNA target sequence for PIK4CB (NM_002651.1,212-230).
gggtcggggaactatcagt

SEQ ID NO: 207770 - DNA, 19 bp, Homo sapiens
  siRNA target sequence for PIK4CB (NM_002651.1,216-234).
cggggaactatcagtgatt

SEQ ID NO: 207771 - DNA, 19 bp, Homo sapiens
  siRNA target sequence for PIK4CB (NM_002651.1,218-236).
gggaactatcagtgattga

SEQ ID NO: 207772 - DNA, 19 bp, Homo sapiens
  siRNA target sequence for PIK4CB (NM_002651.1,363-381).
gatccgttgcctagatgat

SEQ ID NO: 207773 - DNA, 19 bp, Homo sapiens
  siRNA target sequence for PIK4CB (NM_002651.1,500-518).
ggctgtttgagtcaaaact

SEQ ID NO: 207774 - DNA, 19 bp, Homo sapiens
  siRNA target sequence for PIK4CB (NM_002651.1,508-526).
gagtcaaaactgtttgaca

SEQ ID NO: 207775 - DNA, 19 bp, Homo sapiens
  siRNA target sequence for PIK4CB (NM_002651.1,535-553).
gccatttcatacctgtata

SEQ ID NO: 207776 - DNA, 19 bp, Homo sapiens
  siRNA target sequence for PIK4CB (NM_002651.1,634-652).
ccccagttgcttaacatgt

SEQ ID NO: 207777 - DNA, 19 bp, Homo sapiens
  siRNA target sequence for PIK4CB (NM_002651.1,635-653).
cccagttgcttaacatgta

SEQ ID NO: 207778 - DNA, 19 bp, Homo sapiens
  siRNA target sequence for PIK4CB (NM_002651.1,706-724).
cgttgccgccagagcatta

SEQ ID NO: 207779 - DNA, 19 bp, Homo sapiens
  siRNA target sequence for PIK4CB (NM_002651.1,707-725).
gttgccgccagagcattaa

SEQ ID NO: 207780 - DNA, 19 bp, Homo sapiens
  siRNA target sequence for PIK4CB (NM_002651.1,710-728).
gccgccagagcattaactt

SEQ ID NO: 207781 - DNA, 19 bp, Homo sapiens
  siRNA target sequence for PIK4CB (NM_002651.1,711-729).
ccgccagagcattaacttt

SEQ ID NO: 207782 - DNA, 19 bp, Homo sapiens
  siRNA target sequence for PIK4CB (NM_002651.1,712-730).
cgccagagcattaactttt

SEQ ID NO: 207783 - DNA, 19 bp, Homo sapiens
  siRNA target sequence for PIK4CB (NM_002651.1,937-955).
gatgccactgccagcataa

SEQ ID NO: 207784 - DNA, 19 bp, Homo sapiens
  siRNA target sequence for PIK4CB (NM_002651.1,1022-1040).
cctccagcaccgagagtat

SEQ ID NO: 207785 - DNA, 19 bp, Homo sapiens
  siRNA target sequence for PIK4CB (NM_002651.1,1023-1041).
ctccagcaccgagagtatt

SEQ ID NO: 207786 - DNA, 19 bp, Homo sapiens
  siRNA target sequence for PIK4CB (NM_002651.1,1025-1043).
ccagcaccgagagtattga

SEQ ID NO: 207787 - DNA, 19 bp, Homo sapiens
  siRNA target sequence for PIK4CB (NM_002651.1,1026-1044).
cagcaccgagagtattgat

SEQ ID NO: 207788 - DNA, 19 bp, Homo sapiens
  siRNA target sequence for PIK4CB (NM_002651.1,1029-1047).
caccgagagtattgataat

SEQ ID NO: 207789 - DNA, 19 bp, Homo sapiens
  siRNA target sequence for PIK4CB (NM_002651.1,1032-1050).
cgagagtattgataattca

SEQ ID NO: 207790 - DNA, 19 bp, Homo sapiens
  siRNA target sequence for PIK4CB (NM_002651.1,1033-1051).
gagagtattgataattcat

SEQ ID NO: 207791 - DNA, 19 bp, Homo sapiens
  siRNA target sequence for PIK4CB (NM_002651.1,1078-1096).
gagagagaattcatcaagt

SEQ ID NO: 207792 - DNA, 19 bp, Homo sapiens
  siRNA target sequence for PIK4CB (NM_002651.1,1289-1307).
ctccctacctgatttatgt

SEQ ID NO: 207793 - DNA, 19 bp, Homo sapiens
  siRNA target sequence for PIK4CB (NM_002651.1,1379-1397).
gtacgaggtccgtagaaaa

SEQ ID NO: 207794 - DNA, 19 bp, Homo sapiens
  siRNA target sequence for PIK4CB (NM_002651.1,1382-1400).
cgaggtccgtagaaaactt

SEQ ID NO: 207795 - DNA, 19 bp, Homo sapiens
  siRNA target sequence for PIK4CB (NM_002651.1,1479-1497).
ctggtcggtggatgacata

SEQ ID NO: 207796 - DNA, 19 bp, Homo sapiens
  siRNA target sequence for PIK4CB (NM_002651.1,1917-1935).
ggctgatagtggcatgatt

SEQ ID NO: 207797 - DNA, 19 bp, Homo sapiens
  siRNA target sequence for PIK4CB (NM_002651.1,1958-1976).
ccatccatcaggtgaagaa

SEQ ID NO: 207798 - DNA, 19 bp, Homo sapiens
  siRNA target sequence for PIK4CB (NM_002651.1,1987-2005).
ctctccttgctcgattact

SEQ ID NO: 207799 - DNA, 19 bp, Homo sapiens
  siRNA target sequence for PIK4CB (NM_002651.1,2011-2029).
caggagcacggcagttaca

SEQ ID NO: 207800 - DNA, 19 bp, Homo sapiens
  siRNA target sequence for PIK4CB (NM_002651.1,2046-2064).
cagtgcacagcgcaatttt

SEQ ID NO: 207801 - DNA, 19 bp, Homo sapiens
  siRNA target sequence for PIK4CB (NM_002651.1,2056-2074).
cgcaattttgtgcaaagtt

SEQ ID NO: 207802 - DNA, 19 bp, Homo sapiens
  siRNA target sequence for PIK4CB (NM_002651.1,2189-2207).
ccagctcaccccgaaatct

SEQ ID NO: 207803 - DNA, 19 bp, Homo sapiens
  siRNA target sequence for PIK4CB (NM_002651.1,2264-2282).
gcctggatggcgacatgtt

SEQ ID NO: 207804 - DNA, 19 bp, Homo sapiens
  siRNA target sequence for PIK4CB (NM_002651.1,2269-2287).
gatggcgacatgttcaact

SEQ ID NO: 207805 - DNA, 19 bp, Homo sapiens
  siRNA target sequence for PIK4CB (NM_002651.1,2273-2291).
gcgacatgttcaactacta

SEQ ID NO: 207806 - DNA, 19 bp, Homo sapiens
  siRNA target sequence for PIK4CB (NM_002651.1,2274-2292).
cgacatgttcaactactat

SEQ ID NO: 207807 - DNA, 19 bp, Homo sapiens
  siRNA target sequence for PIK4CB (NM_002651.1,2398-2416).
ggctccagcaccattcgaa

SEQ ID NO: 207808 - DNA, 19 bp, Homo sapiens
  siRNA target sequence for PIK4CB (NM_002651.1,2399-2417).
gctccagcaccattcgaaa

SEQ ID NO: 207809 - DNA, 19 bp, Homo sapiens
  siRNA target sequence for PIK4CB (NM_002651.1,2488-2506).
ggcagtatgcggtctatca

SEQ ID NO: 207810 - DNA, 19 bp, Homo sapiens
  siRNA target sequence for FRAP1 (NM_004958.2,206-224).
gagctccagcactatgtca

SEQ ID NO: 207811 - DNA, 19 bp, Homo sapiens
  siRNA target sequence for FRAP1 (NM_004958.2,253-271).
ggagtctactcgcttctat

SEQ ID NO: 207812 - DNA, 19 bp, Homo sapiens
  siRNA target sequence for FRAP1 (NM_004958.2,264-282).
gcttctatgaccaactgaa

SEQ ID NO: 207813 - DNA, 19 bp, Homo sapiens
  siRNA target sequence for FRAP1 (NM_004958.2,280-298).
gaaccatcacatttttgaa

SEQ ID NO: 207814 - DNA, 19 bp, Homo sapiens
  siRNA target sequence for FRAP1 (NM_004958.2,382-400).
cacccgaattggcagattt

SEQ ID NO: 207815 - DNA, 19 bp, Homo sapiens
  siRNA target sequence for FRAP1 (NM_004958.2,394-412).
cagatttgccaactatctt

SEQ ID NO: 207816 - DNA, 19 bp, Homo sapiens
  siRNA target sequence for FRAP1 (NM_004958.2,501-519).
ccgctgagtacgtggaatt

SEQ ID NO: 207817 - DNA, 19 bp, Homo sapiens
  siRNA target sequence for FRAP1 (NM_004958.2,502-520).
cgctgagtacgtggaattt

SEQ ID NO: 207818 - DNA, 19 bp, Homo sapiens
  siRNA target sequence for FRAP1 (NM_004958.2,777-795).
ggtacaggcacacatttga

SEQ ID NO: 207819 - DNA, 19 bp, Homo sapiens
  siRNA target sequence for FRAP1 (NM_004958.2,801-819).
cagagaagggatttgatga

SEQ ID NO: 207820 - DNA, 19 bp, Homo sapiens
  siRNA target sequence for FRAP1 (NM_004958.2,866-884).
ggagccttgttgatcctta

SEQ ID NO: 207821 - DNA, 19 bp, Homo sapiens
  siRNA target sequence for FRAP1 (NM_004958.2,867-885).
gagccttgttgatccttaa

SEQ ID NO: 207822 - DNA, 19 bp, Homo sapiens
  siRNA target sequence for FRAP1 (NM_004958.2,870-888).
ccttgttgatccttaacga

SEQ ID NO: 207823 - DNA, 19 bp, Homo sapiens
  siRNA target sequence for FRAP1 (NM_004958.2,917-935).
gagcgtctgagagaagaaa

SEQ ID NO: 207824 - DNA, 19 bp, Homo sapiens
  siRNA target sequence for FRAP1 (NM_004958.2,991-1009).
gggcttcggaacaaaacct

SEQ ID NO: 207825 - DNA, 19 bp, Homo sapiens
  siRNA target sequence for FRAP1 (NM_004958.2,1234-1252).
ctcgctgatccaaatgaca

SEQ ID NO: 207826 - DNA, 19 bp, Homo sapiens
  siRNA target sequence for FRAP1 (NM_004958.2,1236-1254).
cgctgatccaaatgacaat

SEQ ID NO: 207827 - DNA, 19 bp, Homo sapiens
  siRNA target sequence for FRAP1 (NM_004958.2,1566-1584).
gcatccagcaggatatcaa

SEQ ID NO: 207828 - DNA, 19 bp, Homo sapiens
  siRNA target sequence for FRAP1 (NM_004958.2,1645-1663).
cgacctgagccgtcagatt

SEQ ID NO: 207829 - DNA, 19 bp, Homo sapiens
  siRNA target sequence for FRAP1 (NM_004958.2,1685-1703).
caagatgggctactgaaaa

SEQ ID NO: 207830 - DNA, 19 bp, Homo sapiens
  siRNA target sequence for FRAP1 (NM_004958.2,1842-1860).
cgcttggcagctttgaatt

SEQ ID NO: 207831 - DNA, 19 bp, Homo sapiens
  siRNA target sequence for FRAP1 (NM_004958.2,1843-1861).
gcttggcagctttgaattt

SEQ ID NO: 207832 - DNA, 19 bp, Homo sapiens
  siRNA target sequence for FRAP1 (NM_004958.2,1889-1907).
cgccactgtgcggatcatt

SEQ ID NO: 207833 - DNA, 19 bp, Homo sapiens
  siRNA target sequence for FRAP1 (NM_004958.2,1890-1908).
gccactgtgcggatcattt

SEQ ID NO: 207834 - DNA, 19 bp, Homo sapiens
  siRNA target sequence for FRAP1 (NM_004958.2,2056-2074).
gctcgtagttgggataaca

SEQ ID NO: 207835 - DNA, 19 bp, Homo sapiens
  siRNA target sequence for FRAP1 (NM_004958.2,2164-2182).
cttgtttgtggctctgaat

SEQ ID NO: 207836 - DNA, 19 bp, Homo sapiens
  siRNA target sequence for FRAP1 (NM_004958.2,2310-2328).
gtgggattggaagaatcaa

SEQ ID NO: 207837 - DNA, 19 bp, Homo sapiens
  siRNA target sequence for FRAP1 (NM_004958.2,2388-2406).
cctacatggagcctattct

SEQ ID NO: 207838 - DNA, 19 bp, Homo sapiens
  siRNA target sequence for FRAP1 (NM_004958.2,2452-2470).
cccaggtgtgatcaataat

SEQ ID NO: 207839 - DNA, 19 bp, Homo sapiens
  siRNA target sequence for FRAP1 (NM_004958.2,2526-2544).
gggttgatgaactttttat

SEQ ID NO: 207840 - DNA, 19 bp, Homo sapiens
  siRNA target sequence for FRAP1 (NM_004958.2,2623-2641).
ggccagcactggctatgta

SEQ ID NO: 207841 - DNA, 19 bp, Homo sapiens
  siRNA target sequence for FRAP1 (NM_004958.2,2625-2643).
ccagcactggctatgtagt

SEQ ID NO: 207842 - DNA, 19 bp, Homo sapiens
  siRNA target sequence for FRAP1 (NM_004958.2,2628-2646).
gcactggctatgtagtaga

SEQ ID NO: 207843 - DNA, 19 bp, Homo sapiens
  siRNA target sequence for FRAP1 (NM_004958.2,2671-2689).
gcttgaggtgctactgaat

SEQ ID NO: 207844 - DNA, 19 bp, Homo sapiens
  siRNA target sequence for FRAP1 (NM_004958.2,2734-2752).
ccgtgtgttagggctttta

SEQ ID NO: 207845 - DNA, 19 bp, Homo sapiens
  siRNA target sequence for FRAP1 (NM_004958.2,2746-2764).
gcttttaggggctttggat

SEQ ID NO: 207846 - DNA, 19 bp, Homo sapiens
  siRNA target sequence for FRAP1 (NM_004958.2,2754-2772).
gggctttggatccttacaa

SEQ ID NO: 207847 - DNA, 19 bp, Homo sapiens
  siRNA target sequence for FRAP1 (NM_004958.2,2766-2784).
cttacaagcacaaagtgaa

SEQ ID NO: 207848 - DNA, 19 bp, Homo sapiens
  siRNA target sequence for FRAP1 (NM_004958.2,2852-2870).
gattcctctgactatagca

SEQ ID NO: 207849 - DNA, 19 bp, Homo sapiens
  siRNA target sequence for FRAP1 (NM_004958.2,2861-2879).
gactatagcactagtgaaa

SEQ ID NO: 207850 - DNA, 19 bp, Homo sapiens
  siRNA target sequence for FRAP1 (NM_004958.2,3056-3074).
gtcatgcccacgttcctta

SEQ ID NO: 207851 - DNA, 19 bp, Homo sapiens
  siRNA target sequence for FRAP1 (NM_004958.2,3095-3113).
ggggccatccgggaatttt

SEQ ID NO: 207852 - DNA, 19 bp, Homo sapiens
  siRNA target sequence for FRAP1 (NM_004958.2,3099-3117).
ccatccgggaatttttgtt

SEQ ID NO: 207853 - DNA, 19 bp, Homo sapiens
  siRNA target sequence for FRAP1 (NM_004958.2,3151-3169).
gagccacatcagaccttat

SEQ ID NO: 207854 - DNA, 19 bp, Homo sapiens
  siRNA target sequence for FRAP1 (NM_004958.2,3153-3171).
gccacatcagaccttatat

SEQ ID NO: 207855 - DNA, 19 bp, Homo sapiens
  siRNA target sequence for FRAP1 (NM_004958.2,3157-3175).
catcagaccttatatggat

SEQ ID NO: 207856 - DNA, 19 bp, Homo sapiens
  siRNA target sequence for FRAP1 (NM_004958.2,3205-3223).
ggtcatgaacacctcaatt

SEQ ID NO: 207857 - DNA, 19 bp, Homo sapiens
  siRNA target sequence for FRAP1 (NM_004958.2,3228-3246).
gcacgatcattcttctcat

SEQ ID NO: 207858 - DNA, 19 bp, Homo sapiens
  siRNA target sequence for FRAP1 (NM_004958.2,3263-3281).
gctcttgggggtgaattta

SEQ ID NO: 207859 - DNA, 19 bp, Homo sapiens
  siRNA target sequence for FRAP1 (NM_004958.2,3318-3336).
gtgtcttcatgcatgacaa

SEQ ID NO: 207860 - DNA, 19 bp, Homo sapiens
  siRNA target sequence for FRAP1 (NM_004958.2,3344-3362).
ggccgcattgtctctatca

SEQ ID NO: 207861 - DNA, 19 bp, Homo sapiens
  siRNA target sequence for FRAP1 (NM_004958.2,3345-3363).
gccgcattgtctctatcaa

SEQ ID NO: 207862 - DNA, 19 bp, Homo sapiens
  siRNA target sequence for FRAP1 (NM_004958.2,3347-3365).
cgcattgtctctatcaagt

SEQ ID NO: 207863 - DNA, 19 bp, Homo sapiens
  siRNA target sequence for FRAP1 (NM_004958.2,3349-3367).
cattgtctctatcaagtta

SEQ ID NO: 207864 - DNA, 19 bp, Homo sapiens
  siRNA target sequence for FRAP1 (NM_004958.2,3390-3408).
gcgccaacctggatgacta

SEQ ID NO: 207865 - DNA, 19 bp, Homo sapiens
  siRNA target sequence for FRAP1 (NM_004958.2,3400-3418).
ggatgactacctgcattta

SEQ ID NO: 207866 - DNA, 19 bp, Homo sapiens
  siRNA target sequence for FRAP1 (NM_004958.2,3422-3440).
ctgcctcctattgttaagt

SEQ ID NO: 207867 - DNA, 19 bp, Homo sapiens
  siRNA target sequence for FRAP1 (NM_004958.2,3604-3622).
cacgctgtcttcacttgtt

SEQ ID NO: 207868 - DNA, 19 bp, Homo sapiens
  siRNA target sequence for FRAP1 (NM_004958.2,3676-3694).
ggtgcgacaccgaatcaat

SEQ ID NO: 207869 - DNA, 19 bp, Homo sapiens
  siRNA target sequence for FRAP1 (NM_004958.2,3679-3697).
gcgacaccgaatcaatcat

SEQ ID NO: 207870 - DNA, 19 bp, Homo sapiens
  siRNA target sequence for FRAP1 (NM_004958.2,3681-3699).
gacaccgaatcaatcatca

SEQ ID NO: 207871 - DNA, 19 bp, Homo sapiens
  siRNA target sequence for FRAP1 (NM_004958.2,3834-3852).
caggacccatgaagaaact

SEQ ID NO: 207872 - DNA, 19 bp, Homo sapiens
  siRNA target sequence for FRAP1 (NM_004958.2,3897-3915).
ggagggtctccaaagatga

SEQ ID NO: 207873 - DNA, 19 bp, Homo sapiens
  siRNA target sequence for FRAP1 (NM_004958.2,4014-4032).
cgatggccagggatctctt

SEQ ID NO: 207874 - DNA, 19 bp, Homo sapiens
  siRNA target sequence for FRAP1 (NM_004958.2,4051-4069).
ctgctggtctgaactgaat

SEQ ID NO: 207875 - DNA, 19 bp, Homo sapiens
  siRNA target sequence for FRAP1 (NM_004958.2,4053-4071).
gctggtctgaactgaatga

SEQ ID NO: 207876 - DNA, 19 bp, Homo sapiens
  siRNA target sequence for FRAP1 (NM_004958.2,4110-4128).
ccctcacctcacaagacat

SEQ ID NO: 207877 - DNA, 19 bp, Homo sapiens
  siRNA target sequence for FRAP1 (NM_004958.2,4136-4154).
gtcacacagaccctcttaa

SEQ ID NO: 207878 - DNA, 19 bp, Homo sapiens
  siRNA target sequence for FRAP1 (NM_004958.2,4140-4158).
cacagaccctcttaaactt

SEQ ID NO: 207879 - DNA, 19 bp, Homo sapiens
  siRNA target sequence for FRAP1 (NM_004958.2,4260-4278).
ccaaagcactacactacaa

SEQ ID NO: 207880 - DNA, 19 bp, Homo sapiens
  siRNA target sequence for FRAP1 (NM_004958.2,4261-4279).
caaagcactacactacaaa

SEQ ID NO: 207881 - DNA, 19 bp, Homo sapiens
  siRNA target sequence for FRAP1 (NM_004958.2,4302-4320).
ccacccctgccattctaga

SEQ ID NO: 207882 - DNA, 19 bp, Homo sapiens
  siRNA target sequence for FRAP1 (NM_004958.2,4323-4341).
ctctcatcagcattaataa

SEQ ID NO: 207883 - DNA, 19 bp, Homo sapiens
  siRNA target sequence for FRAP1 (NM_004958.2,4325-4343).
ctcatcagcattaataata

SEQ ID NO: 207884 - DNA, 19 bp, Homo sapiens
  siRNA target sequence for FRAP1 (NM_004958.2,4415-4433).
caggctacctggtatgaga

SEQ ID NO: 207885 - DNA, 19 bp, Homo sapiens
  siRNA target sequence for FRAP1 (NM_004958.2,4579-4597).
gtggaccctggttaatgat

SEQ ID NO: 207886 - DNA, 19 bp, Homo sapiens
  siRNA target sequence for FRAP1 (NM_004958.2,4699-4717).
ccatgatggggcattttat

SEQ ID NO: 207887 - DNA, 19 bp, Homo sapiens
  siRNA target sequence for FRAP1 (NM_004958.2,4700-4718).
catgatggggcattttata

SEQ ID NO: 207888 - DNA, 19 bp, Homo sapiens
  siRNA target sequence for FRAP1 (NM_004958.2,4787-4805).
ctgctggatgctgaattaa

SEQ ID NO: 207889 - DNA, 19 bp, Homo sapiens
  siRNA target sequence for FRAP1 (NM_004958.2,4789-4807).
gctggatgctgaattaact

SEQ ID NO: 207890 - DNA, 19 bp, Homo sapiens
  siRNA target sequence for FRAP1 (NM_004958.2,4809-4827).
cgatggcaggagagagtta

SEQ ID NO: 207891 - DNA, 19 bp, Homo sapiens
  siRNA target sequence for FRAP1 (NM_004958.2,4879-4897).
ggaggttatccagtacaaa

SEQ ID NO: 207892 - DNA, 19 bp, Homo sapiens
  siRNA target sequence for FRAP1 (NM_004958.2,4882-4900).
ggttatccagtacaaactt

SEQ ID NO: 207893 - DNA, 19 bp, Homo sapiens
  siRNA target sequence for FRAP1 (NM_004958.2,4905-4923).
ccgagcgacgagagatcat

SEQ ID NO: 207894 - DNA, 19 bp, Homo sapiens
  siRNA target sequence for FRAP1 (NM_004958.2,4951-4969).
gggctgccagcgtatcgta

SEQ ID NO: 207895 - DNA, 19 bp, Homo sapiens
  siRNA target sequence for FRAP1 (NM_004958.2,4972-4990).
ggactggcagaaaatcctt

SEQ ID NO: 207896 - DNA, 19 bp, Homo sapiens
  siRNA target sequence for FRAP1 (NM_004958.2,4973-4991).
gactggcagaaaatcctta

SEQ ID NO: 207897 - DNA, 19 bp, Homo sapiens
  siRNA target sequence for FRAP1 (NM_004958.2,5077-5095).
ggctcttgctcataaaact

SEQ ID NO: 207898 - DNA, 19 bp, Homo sapiens
  siRNA target sequence for FRAP1 (NM_004958.2,5078-5096).
gctcttgctcataaaactt

SEQ ID NO: 207899 - DNA, 19 bp, Homo sapiens
  siRNA target sequence for FRAP1 (NM_004958.2,5322-5340).
cccgatgcttcctgaaact

SEQ ID NO: 207900 - DNA, 19 bp, Homo sapiens
  siRNA target sequence for FRAP1 (NM_004958.2,5343-5361).
gagagtggcagctgaatct

SEQ ID NO: 207901 - DNA, 19 bp, Homo sapiens
  siRNA target sequence for FRAP1 (NM_004958.2,5793-5811).
gagttctcaccttatggtt

SEQ ID NO: 207902 - DNA, 19 bp, Homo sapiens
  siRNA target sequence for FRAP1 (NM_004958.2,5798-5816).
ctcaccttatggtttgatt

SEQ ID NO: 207903 - DNA, 19 bp, Homo sapiens
  siRNA target sequence for FRAP1 (NM_004958.2,5800-5818).
caccttatggtttgattat

SEQ ID NO: 207904 - DNA, 19 bp, Homo sapiens
  siRNA target sequence for FRAP1 (NM_004958.2,5881-5899).
ctggctacaggttatacct

SEQ ID NO: 207905 - DNA, 19 bp, Homo sapiens
  siRNA target sequence for FRAP1 (NM_004958.2,5902-5920).
gctcattgcaagaattgat

SEQ ID NO: 207906 - DNA, 19 bp, Homo sapiens
  siRNA target sequence for FRAP1 (NM_004958.2,5903-5921).
ctcattgcaagaattgata

SEQ ID NO: 207907 - DNA, 19 bp, Homo sapiens
  siRNA target sequence for FRAP1 (NM_004958.2,5932-5950).
cttggtgggacgtctcatt

SEQ ID NO: 207908 - DNA, 19 bp, Homo sapiens
  siRNA target sequence for FRAP1 (NM_004958.2,6003-6021).
cactgacagtggcttctaa

SEQ ID NO: 207909 - DNA, 19 bp, Homo sapiens
  siRNA target sequence for FRAP1 (NM_004958.2,6005-6023).
ctgacagtggcttctaagt

SEQ ID NO: 207910 - DNA, 19 bp, Homo sapiens
  siRNA target sequence for FRAP1 (NM_004958.2,6178-6196).
ggcatctcgtttgtacttt

SEQ ID NO: 207911 - DNA, 19 bp, Homo sapiens
  siRNA target sequence for FRAP1 (NM_004958.2,6295-6313).
ggcctatggtcgagattta

SEQ ID NO: 207912 - DNA, 19 bp, Homo sapiens
  siRNA target sequence for FRAP1 (NM_004958.2,6296-6314).
gcctatggtcgagatttaa

SEQ ID NO: 207913 - DNA, 19 bp, Homo sapiens
  siRNA target sequence for FRAP1 (NM_004958.2,6297-6315).
cctatggtcgagatttaat

SEQ ID NO: 207914 - DNA, 19 bp, Homo sapiens
  siRNA target sequence for FRAP1 (NM_004958.2,6330-6348).
ggtgcaggaagtacatgaa

SEQ ID NO: 207915 - DNA, 19 bp, Homo sapiens
  siRNA target sequence for FRAP1 (NM_004958.2,6331-6349).
gtgcaggaagtacatgaaa

SEQ ID NO: 207916 - DNA, 19 bp, Homo sapiens
  siRNA target sequence for FRAP1 (NM_004958.2,6398-6416).
gtgttccgacgaatctcaa

SEQ ID NO: 207917 - DNA, 19 bp, Homo sapiens
  siRNA target sequence for FRAP1 (NM_004958.2,6424-6442).
gcctcagctcacatcctta

SEQ ID NO: 207918 - DNA, 19 bp, Homo sapiens
  siRNA target sequence for FRAP1 (NM_004958.2,6438-6456).
ccttagagctgcaatatgt

SEQ ID NO: 207919 - DNA, 19 bp, Homo sapiens
  siRNA target sequence for FRAP1 (NM_004958.2,6524-6542).
ccaatcattcgcattcagt

SEQ ID NO: 207920 - DNA, 19 bp, Homo sapiens
  siRNA target sequence for FRAP1 (NM_004958.2,6544-6562).
catagcaccgtctttgcaa

SEQ ID NO: 207921 - DNA, 19 bp, Homo sapiens
  siRNA target sequence for FRAP1 (NM_004958.2,6549-6567).
caccgtctttgcaagtcat

SEQ ID NO: 207922 - DNA, 19 bp, Homo sapiens
  siRNA target sequence for FRAP1 (NM_004958.2,6606-6624).
gcagcaacggacatgagtt

SEQ ID NO: 207923 - DNA, 19 bp, Homo sapiens
  siRNA target sequence for FRAP1 (NM_004958.2,6607-6625).
cagcaacggacatgagttt

SEQ ID NO: 207924 - DNA, 19 bp, Homo sapiens
  siRNA target sequence for FRAP1 (NM_004958.2,6680-6698).
ctcttcggcctggttaaca

SEQ ID NO: 207925 - DNA, 19 bp, Homo sapiens
  siRNA target sequence for FRAP1 (NM_004958.2,6717-6735).
caacatctcttcggaaaaa

SEQ ID NO: 207926 - DNA, 19 bp, Homo sapiens
  siRNA target sequence for FRAP1 (NM_004958.2,6720-6738).
catctcttcggaaaaacct

SEQ ID NO: 207927 - DNA, 19 bp, Homo sapiens
  siRNA target sequence for FRAP1 (NM_004958.2,6888-6906).
ggatggctccggactatga

SEQ ID NO: 207928 - DNA, 19 bp, Homo sapiens
  siRNA target sequence for FRAP1 (NM_004958.2,6941-6959).
gagcatgccgtcaataata

SEQ ID NO: 207929 - DNA, 19 bp, Homo sapiens
  siRNA target sequence for FRAP1 (NM_004958.2,6943-6961).
gcatgccgtcaataataca

SEQ ID NO: 207930 - DNA, 19 bp, Homo sapiens
  siRNA target sequence for FRAP1 (NM_004958.2,7022-7040).
gaccgaagaaccaattata

SEQ ID NO: 207931 - DNA, 19 bp, Homo sapiens
  siRNA target sequence for FRAP1 (NM_004958.2,7032-7050).
ccaattatacccgttcttt

SEQ ID NO: 207932 - DNA, 19 bp, Homo sapiens
  siRNA target sequence for FRAP1 (NM_004958.2,7033-7051).
caattatacccgttcttta

SEQ ID NO: 207933 - DNA, 19 bp, Homo sapiens
  siRNA target sequence for FRAP1 (NM_004958.2,7047-7065).
ctttagcggtcatgtcaat

SEQ ID NO: 207934 - DNA, 19 bp, Homo sapiens
  siRNA target sequence for FRAP1 (NM_004958.2,7198-7216).
gaagattccatttagacta

SEQ ID NO: 207935 - DNA, 19 bp, Homo sapiens
  siRNA target sequence for FRAP1 (NM_004958.2,7201-7219).
gattccatttagactaaca

SEQ ID NO: 207936 - DNA, 19 bp, Homo sapiens
  siRNA target sequence for FRAP1 (NM_004958.2,7221-7239).
gaatgttgaccaatgctat

SEQ ID NO: 207937 - DNA, 19 bp, Homo sapiens
  siRNA target sequence for FRAP1 (NM_004958.2,7370-7388).
ctgatggacacaaatacca

SEQ ID NO: 207938 - DNA, 19 bp, Homo sapiens
  siRNA target sequence for FRAP1 (NM_004958.2,7407-7425).
gaacgaggacggattccta

SEQ ID NO: 207939 - DNA, 19 bp, Homo sapiens
  siRNA target sequence for FRAP1 (NM_004958.2,7434-7452).
gccagtcagtcgaaatttt

SEQ ID NO: 207940 - DNA, 19 bp, Homo sapiens
  siRNA target sequence for FRAP1 (NM_004958.2,7504-7522).
gccagaatctattcattct

SEQ ID NO: 207941 - DNA, 19 bp, Homo sapiens
  siRNA target sequence for FRAP1 (NM_004958.2,7548-7566).
cagaggccctaaataagaa

SEQ ID NO: 207942 - DNA, 19 bp, Homo sapiens
  siRNA target sequence for FRAP1 (NM_004958.2,7553-7571).
gccctaaataagaaagcta

SEQ ID NO: 207943 - DNA, 19 bp, Homo sapiens
  siRNA target sequence for FRAP1 (NM_004958.2,7670-7688).
caagcgacatcccatgaaa

SEQ ID NO: 207944 - DNA, 19 bp, Homo sapiens
  siRNA target sequence for FRAP1 (NM_004958.2,7674-7692).
cgacatcccatgaaaacct

SEQ ID NO: 207945 - DNA, 19 bp, Homo sapiens
  siRNA target sequence for FRDA (NM_000144.3,964-982).
ggcctattccggaaaagat

SEQ ID NO: 207946 - DNA, 19 bp, Homo sapiens
  siRNA target sequence for PI4K2B (NM_018323.2,372-390).
ggtttcagtaactattggt

SEQ ID NO: 207947 - DNA, 19 bp, Homo sapiens
  siRNA target sequence for PI4K2B (NM_018323.2,446-464).
gagcagagcaagcaataga

SEQ ID NO: 207948 - DNA, 19 bp, Homo sapiens
  siRNA target sequence for PI4K2B (NM_018323.2,496-514).
ggttcaagtggaagttact

SEQ ID NO: 207949 - DNA, 19 bp, Homo sapiens
  siRNA target sequence for PI4K2B (NM_018323.2,549-567).
gtttaaacccaaatcagaa

SEQ ID NO: 207950 - DNA, 19 bp, Homo sapiens
  siRNA target sequence for PI4K2B (NM_018323.2,570-588).
gccttatggtcaactcaat

SEQ ID NO: 207951 - DNA, 19 bp, Homo sapiens
  siRNA target sequence for PI4K2B (NM_018323.2,590-608).
caaaatggaccaaatatgt

SEQ ID NO: 207952 - DNA, 19 bp, Homo sapiens
  siRNA target sequence for PI4K2B (NM_018323.2,596-614).
ggaccaaatatgtccataa

SEQ ID NO: 207953 - DNA, 19 bp, Homo sapiens
  siRNA target sequence for PI4K2B (NM_018323.2,599-617).
ccaaatatgtccataaggt

SEQ ID NO: 207954 - DNA, 19 bp, Homo sapiens
  siRNA target sequence for PI4K2B (NM_018323.2,640-658).
cgaggctgcctgattccta

SEQ ID NO: 207955 - DNA, 19 bp, Homo sapiens
  siRNA target sequence for PI4K2B (NM_018323.2,655-673).
cctaatcaggggtaccttt

SEQ ID NO: 207956 - DNA, 19 bp, Homo sapiens
  siRNA target sequence for PI4K2B (NM_018323.2,675-693).
cgaagcgggtgcctatctt

SEQ ID NO: 207957 - DNA, 19 bp, Homo sapiens
  siRNA target sequence for PI4K2B (NM_018323.2,686-704).
cctatcttgtggacaacaa

SEQ ID NO: 207958 - DNA, 19 bp, Homo sapiens
  siRNA target sequence for PI4K2B (NM_018323.2,712-730).
ctgagcattgtacctaaaa

SEQ ID NO: 207959 - DNA, 19 bp, Homo sapiens
  siRNA target sequence for PI4K2B (NM_018323.2,743-761).
ggcttgtcagtgagacatt

SEQ ID NO: 207960 - DNA, 19 bp, Homo sapiens
  siRNA target sequence for PI4K2B (NM_018323.2,748-766).
gtcagtgagacatttaact

SEQ ID NO: 207961 - DNA, 19 bp, Homo sapiens
  siRNA target sequence for PI4K2B (NM_018323.2,772-790).
gcgattgaccgtgcaaaat

SEQ ID NO: 207962 - DNA, 19 bp, Homo sapiens
  siRNA target sequence for PI4K2B (NM_018323.2,774-792).
gattgaccgtgcaaaatca

SEQ ID NO: 207963 - DNA, 19 bp, Homo sapiens
  siRNA target sequence for PI4K2B (NM_018323.2,824-842).
caaaagtgggtagaaagtt

SEQ ID NO: 207964 - DNA, 19 bp, Homo sapiens
  siRNA target sequence for PI4K2B (NM_018323.2,829-847).
gtgggtagaaagtttcata

SEQ ID NO: 207965 - DNA, 19 bp, Homo sapiens
  siRNA target sequence for PI4K2B (NM_018323.2,856-874).
ctccctcctaagattggtt

SEQ ID NO: 207966 - DNA, 19 bp, Homo sapiens
  siRNA target sequence for PI4K2B (NM_018323.2,896-914).
gttacaaggaggctgaata

SEQ ID NO: 207967 - DNA, 19 bp, Homo sapiens
  siRNA target sequence for PI4K2B (NM_018323.2,937-955).
gaccctttgcctgagaata

SEQ ID NO: 207968 - DNA, 19 bp, Homo sapiens
  siRNA target sequence for PI4K2B (NM_018323.2,991-1009).
gttattttggattacatca

SEQ ID NO: 207969 - DNA, 19 bp, Homo sapiens
  siRNA target sequence for PI4K2B (NM_018323.2,1040-1058).
ggttagtcagatacgaaaa

SEQ ID NO: 207970 - DNA, 19 bp, Homo sapiens
  siRNA target sequence for PI4K2B (NM_018323.2,1108-1126).
gatgaagaattccttatta

SEQ ID NO: 207971 - DNA, 19 bp, Homo sapiens
  siRNA target sequence for PI4K2B (NM_018323.2,1177-1195).
gaatggagagcatatccat

SEQ ID NO: 207972 - DNA, 19 bp, Homo sapiens
  siRNA target sequence for PI4K2B (NM_018323.2,1181-1199).
ggagagcatatccatttca

SEQ ID NO: 207973 - DNA, 19 bp, Homo sapiens
  siRNA target sequence for PI4K2B (NM_018323.2,1378-1396).
ggtcagatcttaaacctta

SEQ ID NO: 207974 - DNA, 19 bp, Homo sapiens
  siRNA target sequence for PI4K2B (NM_018323.2,1424-1442).
ctttccagctagtacagat

SEQ ID NO: 207975 - DNA, 19 bp, Homo sapiens
  siRNA target sequence for PI4K2B (NM_018323.2,1429-1447).
cagctagtacagatacctt

SEQ ID NO: 207976 - DNA, 19 bp, Homo sapiens
  siRNA target sequence for PI4K2B (NM_018323.2,1495-1513).
cacctgagcaattccttta

SEQ ID NO: 207977 - DNA, 19 bp, Homo sapiens
  siRNA target sequence for PI4K2B (NM_018323.2,1509-1527).
ctttacccagactgtcaat

SEQ ID NO: 207978 - DNA, 19 bp, Homo sapiens
  siRNA target sequence for PI4KII (NM_018425.2,526-544).
gagccctatgggcatctta

SEQ ID NO: 207979 - DNA, 19 bp, Homo sapiens
  siRNA target sequence for PI4KII (NM_018425.2,647-665).
gcctggtggaccaaaaact

SEQ ID NO: 207980 - DNA, 19 bp, Homo sapiens
  siRNA target sequence for PI4KII (NM_018425.2,682-700).
ccccgtacaaaggtagtat

SEQ ID NO: 207981 - DNA, 19 bp, Homo sapiens
  siRNA target sequence for PI4KII (NM_018425.2,683-701).
cccgtacaaaggtagtata

SEQ ID NO: 207982 - DNA, 19 bp, Homo sapiens
  siRNA target sequence for PI4KII (NM_018425.2,686-704).
gtacaaaggtagtatacct

SEQ ID NO: 207983 - DNA, 19 bp, Homo sapiens
  siRNA target sequence for PI4KII (NM_018425.2,810-828).
cgggctaccaccaaaggtt

SEQ ID NO: 207984 - DNA, 19 bp, Homo sapiens
  siRNA target sequence for PI4KII (NM_018425.2,855-873).
ctacaaagatgcagactat

SEQ ID NO: 207985 - DNA, 19 bp, Homo sapiens
  siRNA target sequence for PI4KII (NM_018425.2,899-917).
ctcttcctgagaacactaa

SEQ ID NO: 207986 - DNA, 19 bp, Homo sapiens
  siRNA target sequence for PI4KII (NM_018425.2,1080-1098).
ggtggctgccatagacaat

SEQ ID NO: 207987 - DNA, 19 bp, Homo sapiens
  siRNA target sequence for PI4KII (NM_018425.2,1130-1148).
cctggagggcatatccttt

SEQ ID NO: 207988 - DNA, 19 bp, Homo sapiens
  siRNA target sequence for PI4KII (NM_018425.2,1131-1149).
ctggagggcatatcctttt

SEQ ID NO: 207989 - DNA, 19 bp, Homo sapiens
  siRNA target sequence for PI4KII (NM_018425.2,1133-1151).
ggagggcatatccttttta

SEQ ID NO: 207990 - DNA, 19 bp, Homo sapiens
  siRNA target sequence for PI4KII (NM_018425.2,1168-1186).
caggcgaaagtcccatttt

SEQ ID NO: 207991 - DNA, 19 bp, Homo sapiens
  siRNA target sequence for PI4KII (NM_018425.2,1245-1263).
cttggaagaggacctatat

SEQ ID NO: 207992 - DNA, 19 bp, Homo sapiens
  siRNA target sequence for PI4KII (NM_018425.2,1291-1309).
gacaggggccagttccata

SEQ ID NO: 207993 - DNA, 19 bp, Homo sapiens
  siRNA target sequence for PI4KII (NM_018425.2,1295-1313).
ggggccagttccataagca

SEQ ID NO: 207994 - DNA, 19 bp, Homo sapiens
  siRNA target sequence for SMG1 (NM_014006.2,265-283).
catgatcactttatctcta

SEQ ID NO: 207995 - DNA, 19 bp, Homo sapiens
  siRNA target sequence for SMG1 (NM_014006.2,312-330).
gtttgatggagctgtgatt

SEQ ID NO: 207996 - DNA, 19 bp, Homo sapiens
  siRNA target sequence for SMG1 (NM_014006.2,335-353).
ctgtaactacggctacaaa

SEQ ID NO: 207997 - DNA, 19 bp, Homo sapiens
  siRNA target sequence for SMG1 (NM_014006.2,337-355).
gtaactacggctacaaaga

SEQ ID NO: 207998 - DNA, 19 bp, Homo sapiens
  siRNA target sequence for SMG1 (NM_014006.2,341-359).
ctacggctacaaagaaaca

SEQ ID NO: 207999 - DNA, 19 bp, Homo sapiens
  siRNA target sequence for SMG1 (NM_014006.2,478-496).
gaaacatacgcacctttat

SEQ ID NO: 208000 - DNA, 19 bp, Homo sapiens
  siRNA target sequence for SMG1 (NM_014006.2,502-520).
cttccgtctttccataaat

SEQ ID NO: 208001 - DNA, 19 bp, Homo sapiens
  siRNA target sequence for SMG1 (NM_014006.2,505-523).
ccgtctttccataaatttt

SEQ ID NO: 208002 - DNA, 19 bp, Homo sapiens
  siRNA target sequence for SMG1 (NM_014006.2,540-558).
caacactctcgttgaagat

SEQ ID NO: 208003 - DNA, 19 bp, Homo sapiens
  siRNA target sequence for SMG1 (NM_014006.2,2081-2099).
cggatccgagggaacttca

SEQ ID NO: 208004 - DNA, 19 bp, Homo sapiens
  siRNA target sequence for SMG1 (NM_014006.2,2610-2628).
caccactgcacaggattta

SEQ ID NO: 208005 - DNA, 19 bp, Homo sapiens
  siRNA target sequence for SMG1 (NM_014006.2,2612-2630).
ccactgcacaggatttagt

SEQ ID NO: 208006 - DNA, 19 bp, Homo sapiens
  siRNA target sequence for SMG1 (NM_014006.2,2620-2638).
caggatttagtccaacatt

SEQ ID NO: 208007 - DNA, 19 bp, Homo sapiens
  siRNA target sequence for SMG1 (NM_014006.2,2622-2640).
ggatttagtccaacatttt

SEQ ID NO: 208008 - DNA, 19 bp, Homo sapiens
  siRNA target sequence for SMG1 (NM_014006.2,2683-2701).
cccgaacttgatattgaaa

SEQ ID NO: 208009 - DNA, 19 bp, Homo sapiens
  siRNA target sequence for SMG1 (NM_014006.2,2726-2744).
gccagtcaacacatgcaat

SEQ ID NO: 208010 - DNA, 19 bp, Homo sapiens
  siRNA target sequence for SMG1 (NM_014006.2,2730-2748).
gtcaacacatgcaatggaa

SEQ ID NO: 208011 - DNA, 19 bp, Homo sapiens
  siRNA target sequence for SMG1 (NM_014006.2,2745-2763).
ggaaatgttgagttcttgt

SEQ ID NO: 208012 - DNA, 19 bp, Homo sapiens
  siRNA target sequence for SMG1 (NM_014006.2,2754-2772).
gagttcttgtgccatatct

SEQ ID NO: 208013 - DNA, 19 bp, Homo sapiens
  siRNA target sequence for SMG1 (NM_014006.2,2756-2774).
gttcttgtgccatatcttt

SEQ ID NO: 208014 - DNA, 19 bp, Homo sapiens
  siRNA target sequence for SMG1 (NM_014006.2,2792-2810).
ctgaatatgcagttgctaa

SEQ ID NO: 208015 - DNA, 19 bp, Homo sapiens
  siRNA target sequence for SMG1 (NM_014006.2,2801-2819).
cagttgctaaatcaattct

SEQ ID NO: 208016 - DNA, 19 bp, Homo sapiens
  siRNA target sequence for SMG1 (NM_014006.2,2803-2821).
gttgctaaatcaattctga

SEQ ID NO: 208017 - DNA, 19 bp, Homo sapiens
  siRNA target sequence for SMG1 (NM_014006.2,2842-2860).
gcagaatggaaagagattt

SEQ ID NO: 208018 - DNA, 19 bp, Homo sapiens
  siRNA target sequence for SMG1 (NM_014006.2,2864-2882).
gacagctgaaacaggttta

SEQ ID NO: 208019 - DNA, 19 bp, Homo sapiens
  siRNA target sequence for SMG1 (NM_014006.2,2868-2886).
gctgaaacaggtttacaga

SEQ ID NO: 208020 - DNA, 19 bp, Homo sapiens
  siRNA target sequence for SMG1 (NM_014006.2,2934-2952).
catactcactctaatagaa

SEQ ID NO: 208021 - DNA, 19 bp, Homo sapiens
  siRNA target sequence for SMG1 (NM_014006.2,2986-3004).
cctcggatcgagagtgaat

SEQ ID NO: 208022 - DNA, 19 bp, Homo sapiens
  siRNA target sequence for SMG1 (NM_014006.2,2989-3007).
cggatcgagagtgaatcta

SEQ ID NO: 208023 - DNA, 19 bp, Homo sapiens
  siRNA target sequence for SMG1 (NM_014006.2,2999-3017).
gtgaatctacagtgcatat

SEQ ID NO: 208024 - DNA, 19 bp, Homo sapiens
  siRNA target sequence for SMG1 (NM_014006.2,3025-3043).
ggagaacctgacttcattt

SEQ ID NO: 208025 - DNA, 19 bp, Homo sapiens
  siRNA target sequence for SMG1 (NM_014006.2,3079-3097).
cctgaagtagccaaatctt

SEQ ID NO: 208026 - DNA, 19 bp, Homo sapiens
  siRNA target sequence for SMG1 (NM_014006.2,3109-3127).
gccagctgggcttataggt

SEQ ID NO: 208027 - DNA, 19 bp, Homo sapiens
  siRNA target sequence for SMG1 (NM_014006.2,3208-3226).
ctacttccagacactataa

SEQ ID NO: 208028 - DNA, 19 bp, Homo sapiens
  siRNA target sequence for SMG1 (NM_014006.2,3288-3306).
gattcaggatgaagatata

SEQ ID NO: 208029 - DNA, 19 bp, Homo sapiens
  siRNA target sequence for SMG1 (NM_014006.2,3343-3361).
gatgacatggttgatgtta

SEQ ID NO: 208030 - DNA, 19 bp, Homo sapiens
  siRNA target sequence for SMG1 (NM_014006.2,3346-3364).
gacatggttgatgttatct

SEQ ID NO: 208031 - DNA, 19 bp, Homo sapiens
  siRNA target sequence for SMG1 (NM_014006.2,3363-3381).
ctggcgtcagttgatatca

SEQ ID NO: 208032 - DNA, 19 bp, Homo sapiens
  siRNA target sequence for SMG1 (NM_014006.2,3383-3401).
gctgcccatggctttcaga

SEQ ID NO: 208033 - DNA, 19 bp, Homo sapiens
  siRNA target sequence for SMG1 (NM_014006.2,3389-3407).
catggctttcagaacttga

SEQ ID NO: 208034 - DNA, 19 bp, Homo sapiens
  siRNA target sequence for SMG1 (NM_014006.2,3421-3439).
gaaggagttattaaagtgt

SEQ ID NO: 208035 - DNA, 19 bp, Homo sapiens
  siRNA target sequence for SMG1 (NM_014006.2,3444-3462).
gaaagttgtagatagaata

SEQ ID NO: 208036 - DNA, 19 bp, Homo sapiens
  siRNA target sequence for SMG1 (NM_014006.2,3458-3476).
gaatattcagcctgtacaa

SEQ ID NO: 208037 - DNA, 19 bp, Homo sapiens
  siRNA target sequence for SMG1 (NM_014006.2,3480-3498).
ctcttgcagtgcatacttt

SEQ ID NO: 208038 - DNA, 19 bp, Homo sapiens
  siRNA target sequence for SMG1 (NM_014006.2,3513-3531).
caacgctggtcaaattcct

SEQ ID NO: 208039 - DNA, 19 bp, Homo sapiens
  siRNA target sequence for SMG1 (NM_014006.2,3516-3534).
cgctggtcaaattccttta

SEQ ID NO: 208040 - DNA, 19 bp, Homo sapiens
  siRNA target sequence for SMG1 (NM_014006.2,3544-3562).
gaccctaggctgcatttaa

SEQ ID NO: 208041 - DNA, 19 bp, Homo sapiens
  siRNA target sequence for SMG1 (NM_014006.2,3546-3564).
ccctaggctgcatttaagt

SEQ ID NO: 208042 - DNA, 19 bp, Homo sapiens
  siRNA target sequence for SMG1 (NM_014006.2,3691-3709).
gcaccatggagaggaatta

SEQ ID NO: 208043 - DNA, 19 bp, Homo sapiens
  siRNA target sequence for SMG1 (NM_014006.2,3692-3710).
caccatggagaggaattat

SEQ ID NO: 208044 - DNA, 19 bp, Homo sapiens
  siRNA target sequence for SMG1 (NM_014006.2,3703-3721).
ggaattattccgcaacttt

SEQ ID NO: 208045 - DNA, 19 bp, Homo sapiens
  siRNA target sequence for SMG1 (NM_014006.2,3704-3722).
gaattattccgcaactttt

SEQ ID NO: 208046 - DNA, 19 bp, Homo sapiens
  siRNA target sequence for SMG1 (NM_014006.2,3745-3763).
gtgtatgtgcgccaaagta

SEQ ID NO: 208047 - DNA, 19 bp, Homo sapiens
  siRNA target sequence for SMG1 (NM_014006.2,3747-3765).
gtatgtgcgccaaagtatt

SEQ ID NO: 208048 - DNA, 19 bp, Homo sapiens
  siRNA target sequence for SMG1 (NM_014006.2,3751-3769).
gtgcgccaaagtatttgta

SEQ ID NO: 208049 - DNA, 19 bp, Homo sapiens
  siRNA target sequence for SMG1 (NM_014006.2,3777-3795).
ctgccgtgtggctcaagat

SEQ ID NO: 208050 - DNA, 19 bp, Homo sapiens
  siRNA target sequence for SMG1 (NM_014006.2,3793-3811).
gattccccacatctcatat

SEQ ID NO: 208051 - DNA, 19 bp, Homo sapiens
  siRNA target sequence for SMG1 (NM_014006.2,3820-3838).
gcaatagtgggtaccatat

SEQ ID NO: 208052 - DNA, 19 bp, Homo sapiens
  siRNA target sequence for SMG1 (NM_014006.2,3829-3847).
ggtaccatatcgcttagta

SEQ ID NO: 208053 - DNA, 19 bp, Homo sapiens
  siRNA target sequence for SMG1 (NM_014006.2,3834-3852).
catatcgcttagtagtgaa

SEQ ID NO: 208054 - DNA, 19 bp, Homo sapiens
  siRNA target sequence for SMG1 (NM_014006.2,3854-3872).
cccaggcttcaggaaataa

SEQ ID NO: 208055 - DNA, 19 bp, Homo sapiens
  siRNA target sequence for SMG1 (NM_014006.2,3878-3896).
ccactgcaattccaacttt

SEQ ID NO: 208056 - DNA, 19 bp, Homo sapiens
  siRNA target sequence for SMG1 (NM_014006.2,3958-3976).
gcatctcaggatagcaata

SEQ ID NO: 208057 - DNA, 19 bp, Homo sapiens
  siRNA target sequence for SMG1 (NM_014006.2,3959-3977).
catctcaggatagcaataa

SEQ ID NO: 208058 - DNA, 19 bp, Homo sapiens
  siRNA target sequence for SMG1 (NM_014006.2,3962-3980).
ctcaggatagcaataagga

SEQ ID NO: 208059 - DNA, 19 bp, Homo sapiens
  siRNA target sequence for SMG1 (NM_014006.2,3971-3989).
gcaataaggatgaacctaa

SEQ ID NO: 208060 - DNA, 19 bp, Homo sapiens
  siRNA target sequence for SMG1 (NM_014006.2,3982-4000).
gaacctaaaagtggattaa

SEQ ID NO: 208061 - DNA, 19 bp, Homo sapiens
  siRNA target sequence for SMG1 (NM_014006.2,4012-4030).
gccatgatgcaggattgtt

SEQ ID NO: 208062 - DNA, 19 bp, Homo sapiens
  siRNA target sequence for SMG1 (NM_014006.2,4013-4031).
ccatgatgcaggattgtta

SEQ ID NO: 208063 - DNA, 19 bp, Homo sapiens
  siRNA target sequence for SMG1 (NM_014006.2,4028-4046).
gttacagcaaaattgtaga

SEQ ID NO: 208064 - DNA, 19 bp, Homo sapiens
  siRNA target sequence for SMG1 (NM_014006.2,4060-4078).
gcaaaccccaccatggtat

SEQ ID NO: 208065 - DNA, 19 bp, Homo sapiens
  siRNA target sequence for SMG1 (NM_014006.2,4152-4170).
gctgcaacaacacatgtat

SEQ ID NO: 208066 - DNA, 19 bp, Homo sapiens
  siRNA target sequence for SMG1 (NM_014006.2,4167-4185).
gtatgtcctgagacgaatt

SEQ ID NO: 208067 - DNA, 19 bp, Homo sapiens
  siRNA target sequence for SMG1 (NM_014006.2,4224-4242).
caacaccttacgcaaagaa

SEQ ID NO: 208068 - DNA, 19 bp, Homo sapiens
  siRNA target sequence for SMG1 (NM_014006.2,4229-4247).
ccttacgcaaagaagagaa

SEQ ID NO: 208069 - DNA, 19 bp, Homo sapiens
  siRNA target sequence for SMG1 (NM_014006.2,4284-4302).
gaagcccatcgtatttgct

SEQ ID NO: 208070 - DNA, 19 bp, Homo sapiens
  siRNA target sequence for SMG1 (NM_014006.2,4343-4361).
cacctcatgaaaaatggtt

SEQ ID NO: 208071 - DNA, 19 bp, Homo sapiens
  siRNA target sequence for SMG1 (NM_014006.2,4487-4505).
cacagaaacgtgcaagtta

SEQ ID NO: 208072 - DNA, 19 bp, Homo sapiens
  siRNA target sequence for SMG1 (NM_014006.2,4489-4507).
cagaaacgtgcaagttaca

SEQ ID NO: 208073 - DNA, 19 bp, Homo sapiens
  siRNA target sequence for SMG1 (NM_014006.2,4535-4553).
ggttggctgccatgactaa

SEQ ID NO: 208074 - DNA, 19 bp, Homo sapiens
  siRNA target sequence for SMG1 (NM_014006.2,4539-4557).
ggctgccatgactaacact

SEQ ID NO: 208075 - DNA, 19 bp, Homo sapiens
  siRNA target sequence for SMG1 (NM_014006.2,4543-4561).
gccatgactaacactgaaa

SEQ ID NO: 208076 - DNA, 19 bp, Homo sapiens
  siRNA target sequence for SMG1 (NM_014006.2,4591-4609).
gacactgtcacaatccata

SEQ ID NO: 208077 - DNA, 19 bp, Homo sapiens
  siRNA target sequence for SMG1 (NM_014006.2,4612-4630).
gtgggcggaaccatcacaa

SEQ ID NO: 208078 - DNA, 19 bp, Homo sapiens
  siRNA target sequence for SMG1 (NM_014006.2,4615-4633).
ggcggaaccatcacaatct

SEQ ID NO: 208079 - DNA, 19 bp, Homo sapiens
  siRNA target sequence for SMG1 (NM_014006.2,4616-4634).
gcggaaccatcacaatctt

SEQ ID NO: 208080 - DNA, 19 bp, Homo sapiens
  siRNA target sequence for SMG1 (NM_014006.2,4617-4635).
cggaaccatcacaatctta

SEQ ID NO: 208081 - DNA, 19 bp, Homo sapiens
  siRNA target sequence for SMG1 (NM_014006.2,4626-4644).
cacaatcttaccgactaaa

SEQ ID NO: 208082 - DNA, 19 bp, Homo sapiens
  siRNA target sequence for SMG1 (NM_014006.2,4678-4696).
gatgggaagagctatcctt

SEQ ID NO: 208083 - DNA, 19 bp, Homo sapiens
  siRNA target sequence for SMG1 (NM_014006.2,4682-4700).
ggaagagctatccttatct

SEQ ID NO: 208084 - DNA, 19 bp, Homo sapiens
  siRNA target sequence for SMG1 (NM_014006.2,4683-4701).
gaagagctatccttatctt

SEQ ID NO: 208085 - DNA, 19 bp, Homo sapiens
  siRNA target sequence for SMG1 (NM_014006.2,4709-4727).
gactggaggatttacatct

SEQ ID NO: 208086 - DNA, 19 bp, Homo sapiens
  siRNA target sequence for SMG1 (NM_014006.2,4744-4762).
cagttcctatctattgtga

SEQ ID NO: 208087 - DNA, 19 bp, Homo sapiens
  siRNA target sequence for SMG1 (NM_014006.2,4746-4764).
gttcctatctattgtgaat

SEQ ID NO: 208088 - DNA, 19 bp, Homo sapiens
  siRNA target sequence for SMG1 (NM_014006.2,4759-4777).
gtgaataccatgtttgcta

SEQ ID NO: 208089 - DNA, 19 bp, Homo sapiens
  siRNA target sequence for SMG1 (NM_014006.2,4803-4821).
gttccatgctcgacactat

SEQ ID NO: 208090 - DNA, 19 bp, Homo sapiens
  siRNA target sequence for SMG1 (NM_014006.2,4806-4824).
ccatgctcgacactattct

SEQ ID NO: 208091 - DNA, 19 bp, Homo sapiens
  siRNA target sequence for SMG1 (NM_014006.2,4810-4828).
gctcgacactattctgtaa

SEQ ID NO: 208092 - DNA, 19 bp, Homo sapiens
  siRNA target sequence for SMG1 (NM_014006.2,4939-4957).
gcccaagattcctaccaaa

SEQ ID NO: 208093 - DNA, 19 bp, Homo sapiens
  siRNA target sequence for SMG1 (NM_014006.2,4982-5000).
cccgtcctagtgaacttta

SEQ ID NO: 208094 - DNA, 19 bp, Homo sapiens
  siRNA target sequence for SMG1 (NM_014006.2,4983-5001).
ccgtcctagtgaactttat

SEQ ID NO: 208095 - DNA, 19 bp, Homo sapiens
  siRNA target sequence for SMG1 (NM_014006.2,4984-5002).
cgtcctagtgaactttatt

SEQ ID NO: 208096 - DNA, 19 bp, Homo sapiens
  siRNA target sequence for SMG1 (NM_014006.2,4985-5003).
gtcctagtgaactttatta

SEQ ID NO: 208097 - DNA, 19 bp, Homo sapiens
  siRNA target sequence for SMG1 (NM_014006.2,4987-5005).
cctagtgaactttattaca

SEQ ID NO: 208098 - DNA, 19 bp, Homo sapiens
  siRNA target sequence for SMG1 (NM_014006.2,4991-5009).
gtgaactttattacagtaa

SEQ ID NO: 208099 - DNA, 19 bp, Homo sapiens
  siRNA target sequence for SMG1 (NM_014006.2,5062-5080).
gattggcctcttcatgtaa

SEQ ID NO: 208100 - DNA, 19 bp, Homo sapiens
  siRNA target sequence for SMG1 (NM_014006.2,5164-5182).
gatgaatggtggagagtta

SEQ ID NO: 208101 - DNA, 19 bp, Homo sapiens
  siRNA target sequence for SMG1 (NM_014006.2,5174-5192).
ggagagttacgcagtctta

SEQ ID NO: 208102 - DNA, 19 bp, Homo sapiens
  siRNA target sequence for SMG1 (NM_014006.2,5175-5193).
gagagttacgcagtcttat

SEQ ID NO: 208103 - DNA, 19 bp, Homo sapiens
  siRNA target sequence for SMG1 (NM_014006.2,5179-5197).
gttacgcagtcttatgcaa

SEQ ID NO: 208104 - DNA, 19 bp, Homo sapiens
  siRNA target sequence for SMG1 (NM_014006.2,5185-5203).
cagtcttatgcaagatcta

SEQ ID NO: 208105 - DNA, 19 bp, Homo sapiens
  siRNA target sequence for SMG1 (NM_014006.2,5187-5205).
gtcttatgcaagatctact

SEQ ID NO: 208106 - DNA, 19 bp, Homo sapiens
  siRNA target sequence for SMG1 (NM_014006.2,5214-5232).
gtctatggttggatacata

SEQ ID NO: 208107 - DNA, 19 bp, Homo sapiens
  siRNA target sequence for SMG1 (NM_014006.2,5216-5234).
ctatggttggatacataat

SEQ ID NO: 208108 - DNA, 19 bp, Homo sapiens
  siRNA target sequence for SMG1 (NM_014006.2,5247-5265).
cagacatctggataatgtt

SEQ ID NO: 208109 - DNA, 19 bp, Homo sapiens
  siRNA target sequence for SMG1 (NM_014006.2,5257-5275).
gataatgttcttatagata

SEQ ID NO: 208110 - DNA, 19 bp, Homo sapiens
  siRNA target sequence for SMG1 (NM_014006.2,5277-5295).
gacgactggagaagttgtt

SEQ ID NO: 208111 - DNA, 19 bp, Homo sapiens
  siRNA target sequence for SMG1 (NM_014006.2,5279-5297).
cgactggagaagttgttca

SEQ ID NO: 208112 - DNA, 19 bp, Homo sapiens
  siRNA target sequence for SMG1 (NM_014006.2,5287-5305).
gaagttgttcacatagatt

SEQ ID NO: 208113 - DNA, 19 bp, Homo sapiens
  siRNA target sequence for SMG1 (NM_014006.2,5290-5308).
gttgttcacatagattaca

SEQ ID NO: 208114 - DNA, 19 bp, Homo sapiens
  siRNA target sequence for SMG1 (NM_014006.2,5347-5365).
gagaaagtaccttttcgaa

SEQ ID NO: 208115 - DNA, 19 bp, Homo sapiens
  siRNA target sequence for SMG1 (NM_014006.2,5363-5381).
gaatgacacaaaacattga

SEQ ID NO: 208116 - DNA, 19 bp, Homo sapiens
  siRNA target sequence for SMG1 (NM_014006.2,5410-5428).
ggtgtatttaggctttcat

SEQ ID NO: 208117 - DNA, 19 bp, Homo sapiens
  siRNA target sequence for SMG1 (NM_014006.2,5429-5447).
gtgagcaggttttacacat

SEQ ID NO: 208118 - DNA, 19 bp, Homo sapiens
  siRNA target sequence for SMG1 (NM_014006.2,5655-5673).
ggtgaactggtttaagaat

SEQ ID NO: 208119 - DNA, 19 bp, Homo sapiens
  siRNA target sequence for SMG1 (NM_014006.2,5711-5729).
gtagcttagatgaatacct

SEQ ID NO: 208120 - DNA, 19 bp, Homo sapiens
  siRNA target sequence for SMG1 (NM_014006.2,5815-5833).
gtggatcatccttctcata

SEQ ID NO: 208121 - DNA, 19 bp, Homo sapiens
  siRNA target sequence for SMG1 (NM_014006.2,5817-5835).
ggatcatccttctcatact

SEQ ID NO: 208122 - DNA, 19 bp, Homo sapiens
  siRNA target sequence for SMG1 (NM_014006.2,5901-5919).
ccaggtgaagctgaatgaa

SEQ ID NO: 208123 - DNA, 19 bp, Homo sapiens
  siRNA target sequence for SMG1 (NM_014006.2,5902-5920).
caggtgaagctgaatgaat

SEQ ID NO: 208124 - DNA, 19 bp, Homo sapiens
  siRNA target sequence for SMG1 (NM_014006.2,5907-5925).
gaagctgaatgaatttgaa

SEQ ID NO: 208125 - DNA, 19 bp, Homo sapiens
  siRNA target sequence for SMG1 (NM_014006.2,5948-5966).
ctgcattcaataatttaga

SEQ ID NO: 208126 - DNA, 19 bp, Homo sapiens
  siRNA target sequence for SMG1 (NM_014006.2,6064-6082).
ggtcaggcccacttgatta

SEQ ID NO: 208127 - DNA, 19 bp, Homo sapiens
  siRNA target sequence for SMG1 (NM_014006.2,6156-6174).
ggagcaactgcatcactat

SEQ ID NO: 208128 - DNA, 19 bp, Homo sapiens
  siRNA target sequence for SMG1 (NM_014006.2,6160-6178).
caactgcatcactatgcaa

SEQ ID NO: 208129 - DNA, 19 bp, Homo sapiens
  siRNA target sequence for SMG1 (NM_014006.2,6196-6214).
ccgaaggccatatttcaga

SEQ ID NO: 208130 - DNA, 19 bp, Homo sapiens
  siRNA target sequence for SMG1 (NM_014006.2,6197-6215).
cgaaggccatatttcagaa

SEQ ID NO: 208131 - DNA, 19 bp, Homo sapiens
  siRNA target sequence for SMG1 (NM_014006.2,6247-6265).
gaagagctcatctgtaaca

SEQ ID NO: 208132 - DNA, 19 bp, Homo sapiens
  siRNA target sequence for SMG1 (NM_014006.2,6267-6285).
cacagtagagcgttgtcaa

SEQ ID NO: 208133 - DNA, 19 bp, Homo sapiens
  siRNA target sequence for SMG1 (NM_014006.2,6277-6295).
cgttgtcaagagctctata

SEQ ID NO: 208134 - DNA, 19 bp, Homo sapiens
  siRNA target sequence for SMG1 (NM_014006.2,6281-6299).
gtcaagagctctataggaa

SEQ ID NO: 208135 - DNA, 19 bp, Homo sapiens
  siRNA target sequence for SMG1 (NM_014006.2,6377-6395).
gatacgcagcagacatcaa

SEQ ID NO: 208136 - DNA, 19 bp, Homo sapiens
  siRNA target sequence for SMG1 (NM_014006.2,6393-6411).
caacagcagacttattaga

SEQ ID NO: 208137 - DNA, 19 bp, Homo sapiens
  siRNA target sequence for SMG1 (NM_014006.2,6441-6459).
cactgtgccagtttgtgaa

SEQ ID NO: 208138 - DNA, 19 bp, Homo sapiens
  siRNA target sequence for SMG1 (NM_014006.2,6528-6546).
gagtctagcaagtgttatt

SEQ ID NO: 208139 - DNA, 19 bp, Homo sapiens
  siRNA target sequence for SMG1 (NM_014006.2,6530-6548).
gtctagcaagtgttattat

SEQ ID NO: 208140 - DNA, 19 bp, Homo sapiens
  siRNA target sequence for SMG1 (NM_014006.2,6569-6587).
caaggcgtaacctgatgat

SEQ ID NO: 208141 - DNA, 19 bp, Homo sapiens
  siRNA target sequence for SMG1 (NM_014006.2,6723-6741).
ggtgccacaggacttagat

SEQ ID NO: 208142 - DNA, 19 bp, Homo sapiens
  siRNA target sequence for SMG1 (NM_014006.2,6724-6742).
gtgccacaggacttagata

SEQ ID NO: 208143 - DNA, 19 bp, Homo sapiens
  siRNA target sequence for SMG1 (NM_014006.2,6761-6779).
cgtctgagacagttcactt

SEQ ID NO: 208144 - DNA, 19 bp, Homo sapiens
  siRNA target sequence for SMG1 (NM_014006.2,6762-6780).
gtctgagacagttcactta

SEQ ID NO: 208145 - DNA, 19 bp, Homo sapiens
  siRNA target sequence for SMG1 (NM_014006.2,6781-6799).
gccaatggagtgtatacct

SEQ ID NO: 208146 - DNA, 19 bp, Homo sapiens
  siRNA target sequence for SMG1 (NM_014006.2,6798-6816).
ctcacttcaggaattgaat

SEQ ID NO: 208147 - DNA, 19 bp, Homo sapiens
  siRNA target sequence for SMG1 (NM_014006.2,6802-6820).
cttcaggaattgaattcga

SEQ ID NO: 208148 - DNA, 19 bp, Homo sapiens
  siRNA target sequence for SMG1 (NM_014006.2,6818-6836).
cgaatttccggcaaatcat

SEQ ID NO: 208149 - DNA, 19 bp, Homo sapiens
  siRNA target sequence for SMG1 (NM_014006.2,6819-6837).
gaatttccggcaaatcata

SEQ ID NO: 208150 - DNA, 19 bp, Homo sapiens
  siRNA target sequence for SMG1 (NM_014006.2,6825-6843).
ccggcaaatcatatttcca

SEQ ID NO: 208151 - DNA, 19 bp, Homo sapiens
  siRNA target sequence for SMG1 (NM_014006.2,6847-6865).
gcacttcgatgtttaatga

SEQ ID NO: 208152 - DNA, 19 bp, Homo sapiens
  siRNA target sequence for SMG1 (NM_014006.2,6848-6866).
cacttcgatgtttaatgaa

SEQ ID NO: 208153 - DNA, 19 bp, Homo sapiens
  siRNA target sequence for SMG1 (NM_014006.2,6868-6886).
ggggaatacacgttagaaa

SEQ ID NO: 208154 - DNA, 19 bp, Homo sapiens
  siRNA target sequence for SMG1 (NM_014006.2,6945-6963).
gactctagtggaatctctt

SEQ ID NO: 208155 - DNA, 19 bp, Homo sapiens
  siRNA target sequence for SMG1 (NM_014006.2,6961-6979).
cttcaggcctacttaagaa

SEQ ID NO: 208156 - DNA, 19 bp, Homo sapiens
  siRNA target sequence for SMG1 (NM_014006.2,7023-7041).
cgatgttgccagactacta

SEQ ID NO: 208157 - DNA, 19 bp, Homo sapiens
  siRNA target sequence for SMG1 (NM_014006.2,7045-7063).
gctcagtacggtgaattaa

SEQ ID NO: 208158 - DNA, 19 bp, Homo sapiens
  siRNA target sequence for SMG1 (NM_014006.2,7050-7068).
gtacggtgaattaatccaa

SEQ ID NO: 208159 - DNA, 19 bp, Homo sapiens
  siRNA target sequence for SMG1 (NM_014006.2,7071-7089).
gagaaatggttcagttgat

SEQ ID NO: 208160 - DNA, 19 bp, Homo sapiens
  siRNA target sequence for SMG1 (NM_014006.2,7169-7187).
gcttattagttgaaaagtt

SEQ ID NO: 208161 - DNA, 19 bp, Homo sapiens
  siRNA target sequence for SMG1 (NM_014006.2,7177-7195).
gttgaaaagttgaacaaga

SEQ ID NO: 208162 - DNA, 19 bp, Homo sapiens
  siRNA target sequence for SMG1 (NM_014006.2,7205-7223).
ccatagcttggcgaaagat

SEQ ID NO: 208163 - DNA, 19 bp, Homo sapiens
  siRNA target sequence for SMG1 (NM_014006.2,7206-7224).
catagcttggcgaaagatt

SEQ ID NO: 208164 - DNA, 19 bp, Homo sapiens
  siRNA target sequence for SMG1 (NM_014006.2,7210-7228).
gcttggcgaaagattgaca

SEQ ID NO: 208165 - DNA, 19 bp, Homo sapiens
  siRNA target sequence for SMG1 (NM_014006.2,7211-7229).
cttggcgaaagattgacat

SEQ ID NO: 208166 - DNA, 19 bp, Homo sapiens
  siRNA target sequence for SMG1 (NM_014006.2,7214-7232).
ggcgaaagattgacatcat

SEQ ID NO: 208167 - DNA, 19 bp, Homo sapiens
  siRNA target sequence for SMG1 (NM_014006.2,7215-7233).
gcgaaagattgacatcata

SEQ ID NO: 208168 - DNA, 19 bp, Homo sapiens
  siRNA target sequence for SMG1 (NM_014006.2,7216-7234).
cgaaagattgacatcataa

SEQ ID NO: 208169 - DNA, 19 bp, Homo sapiens
  siRNA target sequence for SMG1 (NM_014006.2,7240-7258).
gccaggagtactcaagtta

SEQ ID NO: 208170 - DNA, 19 bp, Homo sapiens
  siRNA target sequence for SMG1 (NM_014006.2,7290-7308).
gctagaagagattttcttt

SEQ ID NO: 208171 - DNA, 19 bp, Homo sapiens
  siRNA target sequence for SMG1 (NM_014006.2,7411-7429).
gggcctgtacagattgtca

SEQ ID NO: 208172 - DNA, 19 bp, Homo sapiens
  siRNA target sequence for SMG1 (NM_014006.2,7412-7430).
ggcctgtacagattgtcaa

SEQ ID NO: 208173 - DNA, 19 bp, Homo sapiens
  siRNA target sequence for SMG1 (NM_014006.2,7417-7435).
gtacagattgtcaatgtga

SEQ ID NO: 208174 - DNA, 19 bp, Homo sapiens
  siRNA target sequence for SMG1 (NM_014006.2,7552-7570).
ctcacactgtgcagtttta

SEQ ID NO: 208175 - DNA, 19 bp, Homo sapiens
  siRNA target sequence for SMG1 (NM_014006.2,7574-7592).
gtgctctgggtgtagacat

SEQ ID NO: 208176 - DNA, 19 bp, Homo sapiens
  siRNA target sequence for SMG1 (NM_014006.2,7577-7595).
ctctgggtgtagacatcat

SEQ ID NO: 208177 - DNA, 19 bp, Homo sapiens
  siRNA target sequence for SMG1 (NM_014006.2,7621-7639).
ggtgccgaaagcaaagttt

SEQ ID NO: 208178 - DNA, 19 bp, Homo sapiens
  siRNA target sequence for SMG1 (NM_014006.2,7625-7643).
ccgaaagcaaagtttctgt

SEQ ID NO: 208179 - DNA, 19 bp, Homo sapiens
  siRNA target sequence for SMG1 (NM_014006.2,7626-7644).
cgaaagcaaagtttctgtt

SEQ ID NO: 208180 - DNA, 19 bp, Homo sapiens
  siRNA target sequence for SMG1 (NM_014006.2,7710-7728).
gaacagggcaactgtgtta

SEQ ID NO: 208181 - DNA, 19 bp, Homo sapiens
  siRNA target sequence for SMG1 (NM_014006.2,7815-7833).
gcgggttcagctgcatatt

SEQ ID NO: 208182 - DNA, 19 bp, Homo sapiens
  siRNA target sequence for SMG1 (NM_014006.2,7828-7846).
catattgccatgtttcagt

SEQ ID NO: 208183 - DNA, 19 bp, Homo sapiens
  siRNA target sequence for SMG1 (NM_014006.2,7845-7863).
gtggcaacatgaagatcta

SEQ ID NO: 208184 - DNA, 19 bp, Homo sapiens
  siRNA target sequence for SMG1 (NM_014006.2,7902-7920).
cccacggtctgctatccta

SEQ ID NO: 208185 - DNA, 19 bp, Homo sapiens
  siRNA target sequence for SMG1 (NM_014006.2,7903-7921).
ccacggtctgctatcctaa

SEQ ID NO: 208186 - DNA, 19 bp, Homo sapiens
  siRNA target sequence for SMG1 (NM_014006.2,7948-7966).
ctgagccagattgaaactt

SEQ ID NO: 208187 - DNA, 19 bp, Homo sapiens
  siRNA target sequence for SMG1 (NM_014006.2,7950-7968).
gagccagattgaaacttct

SEQ ID NO: 208188 - DNA, 19 bp, Homo sapiens
  siRNA target sequence for SMG1 (NM_014006.2,7952-7970).
gccagattgaaacttctat

SEQ ID NO: 208189 - DNA, 19 bp, Homo sapiens
  siRNA target sequence for SMG1 (NM_014006.2,7953-7971).
ccagattgaaacttctatt

SEQ ID NO: 208190 - DNA, 19 bp, Homo sapiens
  siRNA target sequence for SMG1 (NM_014006.2,7986-8004).
gaagctagctgcacttgaa

SEQ ID NO: 208191 - DNA, 19 bp, Homo sapiens
  siRNA target sequence for SMG1 (NM_014006.2,7989-8007).
gctagctgcacttgaatca

SEQ ID NO: 208192 - DNA, 19 bp, Homo sapiens
  siRNA target sequence for SMG1 (NM_014006.2,7990-8008).
ctagctgcacttgaatcaa

SEQ ID NO: 208193 - DNA, 19 bp, Homo sapiens
  siRNA target sequence for SMG1 (NM_014006.2,7993-8011).
gctgcacttgaatcaagta

SEQ ID NO: 208194 - DNA, 19 bp, Homo sapiens
  siRNA target sequence for SMG1 (NM_014006.2,7994-8012).
ctgcacttgaatcaagtat

SEQ ID NO: 208195 - DNA, 19 bp, Homo sapiens
  siRNA target sequence for SMG1 (NM_014006.2,7997-8015).
cacttgaatcaagtattga

SEQ ID NO: 208196 - DNA, 19 bp, Homo sapiens
  siRNA target sequence for SMG1 (NM_014006.2,8055-8073).
ggcccctgtactacaagat

SEQ ID NO: 208197 - DNA, 19 bp, Homo sapiens
  siRNA target sequence for SMG1 (NM_014006.2,8056-8074).
gcccctgtactacaagatt

SEQ ID NO: 208198 - DNA, 19 bp, Homo sapiens
  siRNA target sequence for SMG1 (NM_014006.2,8057-8075).
cccctgtactacaagattt

SEQ ID NO: 208199 - DNA, 19 bp, Homo sapiens
  siRNA target sequence for SMG1 (NM_014006.2,8058-8076).
ccctgtactacaagatttt

SEQ ID NO: 208200 - DNA, 19 bp, Homo sapiens
  siRNA target sequence for SMG1 (NM_014006.2,8060-8078).
ctgtactacaagattttga

SEQ ID NO: 208201 - DNA, 19 bp, Homo sapiens
  siRNA target sequence for SMG1 (NM_014006.2,8084-8102).
cgatagctgaaagaagaaa

SEQ ID NO: 208202 - DNA, 19 bp, Homo sapiens
  siRNA target sequence for SMG1 (NM_014006.2,8099-8117).
gaaatcttgtccttaaaga

SEQ ID NO: 208203 - DNA, 19 bp, Homo sapiens
  siRNA target sequence for SMG1 (NM_014006.2,8170-8188).
gaaagtttacgaacaagaa

SEQ ID NO: 208204 - DNA, 19 bp, Homo sapiens
  siRNA target sequence for SMG1 (NM_014006.2,8189-8207).
ctgcagaagccttaaacct

SEQ ID NO: 208205 - DNA, 19 bp, Homo sapiens
  siRNA target sequence for SMG1 (NM_014006.2,8205-8223).
cctggatgcggcgttattt

SEQ ID NO: 208206 - DNA, 19 bp, Homo sapiens
  siRNA target sequence for SMG1 (NM_014006.2,8208-8226).
ggatgcggcgttatttgaa

SEQ ID NO: 208207 - DNA, 19 bp, Homo sapiens
  siRNA target sequence for SMG1 (NM_014006.2,8212-8230).
gcggcgttatttgaactaa

SEQ ID NO: 208208 - DNA, 19 bp, Homo sapiens
  siRNA target sequence for SMG1 (NM_014006.2,8213-8231).
cggcgttatttgaactaat

SEQ ID NO: 208209 - DNA, 19 bp, Homo sapiens
  siRNA target sequence for SMG1 (NM_014006.2,8215-8233).
gcgttatttgaactaatca

SEQ ID NO: 208210 - DNA, 19 bp, Homo sapiens
  siRNA target sequence for SMG1 (NM_014006.2,8260-8278).
gcatcacagtttaacagtt

SEQ ID NO: 208211 - DNA, 19 bp, Homo sapiens
  siRNA target sequence for SMG1 (NM_014006.2,8276-8294).
gttcagtgtctgagttaga

SEQ ID NO: 208212 - DNA, 19 bp, Homo sapiens
  siRNA target sequence for SMG1 (NM_014006.2,8287-8305).
gagttagagcttcgtttat

SEQ ID NO: 208213 - DNA, 19 bp, Homo sapiens
  siRNA target sequence for SMG1 (NM_014006.2,8289-8307).
gttagagcttcgtttatta

SEQ ID NO: 208214 - DNA, 19 bp, Homo sapiens
  siRNA target sequence for SMG1 (NM_014006.2,8321-8339).
ctggtcttgaacatcctat

SEQ ID NO: 208215 - DNA, 19 bp, Homo sapiens
  siRNA target sequence for SMG1 (NM_014006.2,8393-8411).
ctactcagagggcaattca

SEQ ID NO: 208216 - DNA, 19 bp, Homo sapiens
  siRNA target sequence for SMG1 (NM_014006.2,8455-8473).
cagaatctggttgataata

SEQ ID NO: 208217 - DNA, 19 bp, Homo sapiens
  siRNA target sequence for SMG1 (NM_014006.2,8461-8479).
ctggttgataatataaaga

SEQ ID NO: 208218 - DNA, 19 bp, Homo sapiens
  siRNA target sequence for SMG1 (NM_014006.2,8463-8481).
ggttgataatataaagact

SEQ ID NO: 208219 - DNA, 19 bp, Homo sapiens
  siRNA target sequence for SMG1 (NM_014006.2,8480-8498).
ctgtgctcactggtcataa

SEQ ID NO: 208220 - DNA, 19 bp, Homo sapiens
  siRNA target sequence for SMG1 (NM_014006.2,8501-8519).
gacagcttggagatgtcaa

SEQ ID NO: 208221 - DNA, 19 bp, Homo sapiens
  siRNA target sequence for SMG1 (NM_014006.2,8529-8547).
gaaagctatggctaaggat

SEQ ID NO: 208222 - DNA, 19 bp, Homo sapiens
  siRNA target sequence for SMG1 (NM_014006.2,8581-8599).
ccctatgagaacagtgtta

SEQ ID NO: 208223 - DNA, 19 bp, Homo sapiens
  siRNA target sequence for SMG1 (NM_014006.2,8641-8659).
caaacagttctatttacat

SEQ ID NO: 208224 - DNA, 19 bp, Homo sapiens
  siRNA target sequence for SMG1 (NM_014006.2,8645-8663).
cagttctatttacattagt

SEQ ID NO: 208225 - DNA, 19 bp, Homo sapiens
  siRNA target sequence for SMG1 (NM_014006.2,8673-8691).
gggtcaggttcgaagtcaa

SEQ ID NO: 208226 - DNA, 19 bp, Homo sapiens
  siRNA target sequence for SMG1 (NM_014006.2,8718-8736).
cactcccaccttgaaagaa

SEQ ID NO: 208227 - DNA, 19 bp, Homo sapiens
  siRNA target sequence for SMG1 (NM_014006.2,8744-8762).
cacaaagtcagagtatcta

SEQ ID NO: 208228 - DNA, 19 bp, Homo sapiens
  siRNA target sequence for SMG1 (NM_014006.2,8750-8768).
gtcagagtatctataataa

SEQ ID NO: 208229 - DNA, 19 bp, Homo sapiens
  siRNA target sequence for SMG1 (NM_014006.2,8988-9006).
caagagtgttgcttgtagt

SEQ ID NO: 208230 - DNA, 19 bp, Homo sapiens
  siRNA target sequence for SMG1 (NM_014006.2,9099-9117).
gttagagggccgagatgtt

SEQ ID NO: 208231 - DNA, 19 bp, Homo sapiens
  siRNA target sequence for SMG1 (NM_014006.2,9112-9130).
gatgttgatccgaatagga

SEQ ID NO: 208232 - DNA, 19 bp, Homo sapiens
  siRNA target sequence for SMG1 (NM_014006.2,9145-9163).
gaacaggttgactatgtca

SEQ ID NO: 208233 - DNA, 19 bp, Homo sapiens
  siRNA target sequence for SMG1 (NM_014006.2,9148-9166).
caggttgactatgtcatta

SEQ ID NO: 208234 - DNA, 19 bp, Homo sapiens
  siRNA target sequence for DGKH (NM_152910.3,204-222).
ccggaccaagaccagtatt

SEQ ID NO: 208235 - DNA, 19 bp, Homo sapiens
  siRNA target sequence for DGKH (NM_152910.3,205-223).
cggaccaagaccagtatta

SEQ ID NO: 208236 - DNA, 19 bp, Homo sapiens
  siRNA target sequence for DGKH (NM_152910.3,206-224).
ggaccaagaccagtattaa

SEQ ID NO: 208237 - DNA, 19 bp, Homo sapiens
  siRNA target sequence for DGKH (NM_152910.3,207-225).
gaccaagaccagtattaaa

SEQ ID NO: 208238 - DNA, 19 bp, Homo sapiens
  siRNA target sequence for DGKH (NM_152910.3,263-281).
ggtggaaaaagcgatactt

SEQ ID NO: 208239 - DNA, 19 bp, Homo sapiens
  siRNA target sequence for DGKH (NM_152910.3,267-285).
gaaaaagcgatacttcaaa

SEQ ID NO: 208240 - DNA, 19 bp, Homo sapiens
  siRNA target sequence for DGKH (NM_152910.3,289-307).
cgaggccgcaccctttact

SEQ ID NO: 208241 - DNA, 19 bp, Homo sapiens
  siRNA target sequence for DGKH (NM_152910.3,290-308).
gaggccgcaccctttacta

SEQ ID NO: 208242 - DNA, 19 bp, Homo sapiens
  siRNA target sequence for DGKH (NM_152910.3,295-313).
cgcaccctttactatgcaa

SEQ ID NO: 208243 - DNA, 19 bp, Homo sapiens
  siRNA target sequence for DGKH (NM_152910.3,296-314).
gcaccctttactatgcaaa

SEQ ID NO: 208244 - DNA, 19 bp, Homo sapiens
  siRNA target sequence for DGKH (NM_152910.3,373-391).
gcaagcacgaaaaatgcta

SEQ ID NO: 208245 - DNA, 19 bp, Homo sapiens
  siRNA target sequence for DGKH (NM_152910.3,374-392).
caagcacgaaaaatgctaa

SEQ ID NO: 208246 - DNA, 19 bp, Homo sapiens
  siRNA target sequence for DGKH (NM_152910.3,377-395).
gcacgaaaaatgctaacaa

SEQ ID NO: 208247 - DNA, 19 bp, Homo sapiens
  siRNA target sequence for DGKH (NM_152910.3,405-423).
gatcatcactccattcaga

SEQ ID NO: 208248 - DNA, 19 bp, Homo sapiens
  siRNA target sequence for DGKH (NM_152910.3,592-610).
gtgtgcagagagagtcttt

SEQ ID NO: 208249 - DNA, 19 bp, Homo sapiens
  siRNA target sequence for DGKH (NM_152910.3,638-656).
gcgaagtgtgtaaattcaa

SEQ ID NO: 208250 - DNA, 19 bp, Homo sapiens
  siRNA target sequence for DGKH (NM_152910.3,671-689).
gtgcagtgagagcaacaaa

SEQ ID NO: 208251 - DNA, 19 bp, Homo sapiens
  siRNA target sequence for DGKH (NM_152910.3,680-698).
gagcaacaaataactgtaa

SEQ ID NO: 208252 - DNA, 19 bp, Homo sapiens
  siRNA target sequence for DGKH (NM_152910.3,717-735).
catcgggaaggacattata

SEQ ID NO: 208253 - DNA, 19 bp, Homo sapiens
  siRNA target sequence for DGKH (NM_152910.3,805-823).
gctgtctgcgacaaaacat

SEQ ID NO: 208254 - DNA, 19 bp, Homo sapiens
  siRNA target sequence for DGKH (NM_152910.3,888-906).
ctgcaaagatttataccat

SEQ ID NO: 208255 - DNA, 19 bp, Homo sapiens
  siRNA target sequence for DGKH (NM_152910.3,917-935).
cacttggtcaatgtaaagt

SEQ ID NO: 208256 - DNA, 19 bp, Homo sapiens
  siRNA target sequence for DGKH (NM_152910.3,919-937).
cttggtcaatgtaaagtat

SEQ ID NO: 208257 - DNA, 19 bp, Homo sapiens
  siRNA target sequence for DGKH (NM_152910.3,923-941).
gtcaatgtaaagtatctat

SEQ ID NO: 208258 - DNA, 19 bp, Homo sapiens
  siRNA target sequence for DGKH (NM_152910.3,925-943).
caatgtaaagtatctatca

SEQ ID NO: 208259 - DNA, 19 bp, Homo sapiens
  siRNA target sequence for DGKH (NM_152910.3,965-983).
gcaccgattccgatggttt

SEQ ID NO: 208260 - DNA, 19 bp, Homo sapiens
  siRNA target sequence for DGKH (NM_152910.3,969-987).
cgattccgatggtttctgt

SEQ ID NO: 208261 - DNA, 19 bp, Homo sapiens
  siRNA target sequence for DGKH (NM_152910.3,970-988).
gattccgatggtttctgta

SEQ ID NO: 208262 - DNA, 19 bp, Homo sapiens
  siRNA target sequence for DGKH (NM_152910.3,1007-1025).
gtgttagtcctctattggt

SEQ ID NO: 208263 - DNA, 19 bp, Homo sapiens
  siRNA target sequence for DGKH (NM_152910.3,1009-1027).
gttagtcctctattggttt

SEQ ID NO: 208264 - DNA, 19 bp, Homo sapiens
  siRNA target sequence for DGKH (NM_152910.3,1015-1033).
cctctattggtttttgtca

SEQ ID NO: 208265 - DNA, 19 bp, Homo sapiens
  siRNA target sequence for DGKH (NM_152910.3,1048-1066).
gataatcagggagtaaagt

SEQ ID NO: 208266 - DNA, 19 bp, Homo sapiens
  siRNA target sequence for DGKH (NM_152910.3,1065-1083).
gttcctccgtcgctttaaa

SEQ ID NO: 208267 - DNA, 19 bp, Homo sapiens
  siRNA target sequence for DGKH (NM_152910.3,1069-1087).
ctccgtcgctttaaacagt

SEQ ID NO: 208268 - DNA, 19 bp, Homo sapiens
  siRNA target sequence for DGKH (NM_152910.3,1075-1093).
cgctttaaacagttgctaa

SEQ ID NO: 208269 - DNA, 19 bp, Homo sapiens
  siRNA target sequence for DGKH (NM_152910.3,1096-1114).
ccggctcaggtgtttgatt

SEQ ID NO: 208270 - DNA, 19 bp, Homo sapiens
  siRNA target sequence for DGKH (NM_152910.3,1097-1115).
cggctcaggtgtttgattt

SEQ ID NO: 208271 - DNA, 19 bp, Homo sapiens
  siRNA target sequence for DGKH (NM_152910.3,1098-1116).
ggctcaggtgtttgattta

SEQ ID NO: 208272 - DNA, 19 bp, Homo sapiens
  siRNA target sequence for DGKH (NM_152910.3,1100-1118).
ctcaggtgtttgatttaat

SEQ ID NO: 208273 - DNA, 19 bp, Homo sapiens
  siRNA target sequence for DGKH (NM_152910.3,1102-1120).
caggtgtttgatttaatga

SEQ ID NO: 208274 - DNA, 19 bp, Homo sapiens
  siRNA target sequence for DGKH (NM_152910.3,1104-1122).
ggtgtttgatttaatgaat

SEQ ID NO: 208275 - DNA, 19 bp, Homo sapiens
  siRNA target sequence for DGKH (NM_152910.3,1123-1141).
ggaggtcctcatttaggtt

SEQ ID NO: 208276 - DNA, 19 bp, Homo sapiens
  siRNA target sequence for DGKH (NM_152910.3,1126-1144).
ggtcctcatttaggtttaa

SEQ ID NO: 208277 - DNA, 19 bp, Homo sapiens
  siRNA target sequence for DGKH (NM_152910.3,1164-1182).
caatttccggattcttgtt

SEQ ID NO: 208278 - DNA, 19 bp, Homo sapiens
  siRNA target sequence for DGKH (NM_152910.3,1204-1222).
ggttgggttttgtcagaaa

SEQ ID NO: 208279 - DNA, 19 bp, Homo sapiens
  siRNA target sequence for DGKH (NM_152910.3,1209-1227).
ggttttgtcagaaatcgat

SEQ ID NO: 208280 - DNA, 19 bp, Homo sapiens
  siRNA target sequence for DGKH (NM_152910.3,1224-1242).
cgataagctcaacttgaat

SEQ ID NO: 208281 - DNA, 19 bp, Homo sapiens
  siRNA target sequence for DGKH (NM_152910.3,1225-1243).
gataagctcaacttgaata

SEQ ID NO: 208282 - DNA, 19 bp, Homo sapiens
  siRNA target sequence for DGKH (NM_152910.3,1359-1377).
ggaacgagccagtaccaaa

SEQ ID NO: 208283 - DNA, 19 bp, Homo sapiens
  siRNA target sequence for DGKH (NM_152910.3,1360-1378).
gaacgagccagtaccaaaa

SEQ ID NO: 208284 - DNA, 19 bp, Homo sapiens
  siRNA target sequence for DGKH (NM_152910.3,1384-1402).
gacaggtggagtataatga

SEQ ID NO: 208285 - DNA, 19 bp, Homo sapiens
  siRNA target sequence for DGKH (NM_152910.3,1386-1404).
caggtggagtataatgaca

SEQ ID NO: 208286 - DNA, 19 bp, Homo sapiens
  siRNA target sequence for DGKH (NM_152910.3,1391-1409).
ggagtataatgacatatga

SEQ ID NO: 208287 - DNA, 19 bp, Homo sapiens
  siRNA target sequence for DGKH (NM_152910.3,1465-1483).
gaattttatatgacgattt

SEQ ID NO: 208288 - DNA, 19 bp, Homo sapiens
  siRNA target sequence for DGKH (NM_152910.3,1495-1513).
gttgcaacgcatcttacaa

SEQ ID NO: 208289 - DNA, 19 bp, Homo sapiens
  siRNA target sequence for DGKH (NM_152910.3,1498-1516).
gcaacgcatcttacaaaaa

SEQ ID NO: 208290 - DNA, 19 bp, Homo sapiens
  siRNA target sequence for DGKH (NM_152910.3,1499-1517).
caacgcatcttacaaaaat

SEQ ID NO: 208291 - DNA, 19 bp, Homo sapiens
  siRNA target sequence for DGKH (NM_152910.3,1502-1520).
cgcatcttacaaaaatcct

SEQ ID NO: 208292 - DNA, 19 bp, Homo sapiens
  siRNA target sequence for DGKH (NM_152910.3,1555-1573).
gccaagacgctatgtgaaa

SEQ ID NO: 208293 - DNA, 19 bp, Homo sapiens
  siRNA target sequence for DGKH (NM_152910.3,1557-1575).
caagacgctatgtgaaact

SEQ ID NO: 208294 - DNA, 19 bp, Homo sapiens
  siRNA target sequence for DGKH (NM_152910.3,1562-1580).
cgctatgtgaaactgtaaa

SEQ ID NO: 208295 - DNA, 19 bp, Homo sapiens
  siRNA target sequence for DGKH (NM_152910.3,1597-1615).
gtagaaaagacgtatgaca

SEQ ID NO: 208296 - DNA, 19 bp, Homo sapiens
  siRNA target sequence for DGKH (NM_152910.3,1655-1673).
gtaaatgttcagtcctaaa

SEQ ID NO: 208297 - DNA, 19 bp, Homo sapiens
  siRNA target sequence for DGKH (NM_152910.3,1791-1809).
gtccctgggtgaaagcaaa

SEQ ID NO: 208298 - DNA, 19 bp, Homo sapiens
  siRNA target sequence for DGKH (NM_152910.3,1816-1834).
cttggggatgacgttacaa

SEQ ID NO: 208299 - DNA, 19 bp, Homo sapiens
  siRNA target sequence for DGKH (NM_152910.3,1822-1840).
gatgacgttacaaaacctt

SEQ ID NO: 208300 - DNA, 19 bp, Homo sapiens
  siRNA target sequence for DGKH (NM_152910.3,1846-1864).
cagaaagccgtcaaaccaa

SEQ ID NO: 208301 - DNA, 19 bp, Homo sapiens
  siRNA target sequence for DGKH (NM_152910.3,1872-1890).
catgttgcgggcaaatagt

SEQ ID NO: 208302 - DNA, 19 bp, Homo sapiens
  siRNA target sequence for DGKH (NM_152910.3,1875-1893).
gttgcgggcaaatagttta

SEQ ID NO: 208303 - DNA, 19 bp, Homo sapiens
  siRNA target sequence for DGKH (NM_152910.3,1879-1897).
cgggcaaatagtttaaaga

SEQ ID NO: 208304 - DNA, 19 bp, Homo sapiens
  siRNA target sequence for DGKH (NM_152910.3,1880-1898).
gggcaaatagtttaaagaa

SEQ ID NO: 208305 - DNA, 19 bp, Homo sapiens
  siRNA target sequence for DGKH (NM_152910.3,1969-1987).
gctaatcagtcctctgatt

SEQ ID NO: 208306 - DNA, 19 bp, Homo sapiens
  siRNA target sequence for DGKH (NM_152910.3,1970-1988).
ctaatcagtcctctgatta

SEQ ID NO: 208307 - DNA, 19 bp, Homo sapiens
  siRNA target sequence for DGKH (NM_152910.3,1975-1993).
cagtcctctgattatgaca

SEQ ID NO: 208308 - DNA, 19 bp, Homo sapiens
  siRNA target sequence for DGKH (NM_152910.3,2032-2050).
gatggtgccaaagaatcaa

SEQ ID NO: 208309 - DNA, 19 bp, Homo sapiens
  siRNA target sequence for DGKH (NM_152910.3,2035-2053).
ggtgccaaagaatcaataa

SEQ ID NO: 208310 - DNA, 19 bp, Homo sapiens
  siRNA target sequence for DGKH (NM_152910.3,2098-2116).
ggccattcccaaactgatt

SEQ ID NO: 208311 - DNA, 19 bp, Homo sapiens
  siRNA target sequence for DGKH (NM_152910.3,2218-2236).
gctgggagttcgattatca

SEQ ID NO: 208312 - DNA, 19 bp, Homo sapiens
  siRNA target sequence for DGKH (NM_152910.3,2219-2237).
ctgggagttcgattatcaa

SEQ ID NO: 208313 - DNA, 19 bp, Homo sapiens
  siRNA target sequence for DGKH (NM_152910.3,2221-2239).
gggagttcgattatcaaca

SEQ ID NO: 208314 - DNA, 19 bp, Homo sapiens
  siRNA target sequence for DGKH (NM_152910.3,2222-2240).
ggagttcgattatcaacaa

SEQ ID NO: 208315 - DNA, 19 bp, Homo sapiens
  siRNA target sequence for DGKH (NM_152910.3,2223-2241).
gagttcgattatcaacaaa

SEQ ID NO: 208316 - DNA, 19 bp, Homo sapiens
  siRNA target sequence for DGKH (NM_152910.3,2225-2243).
gttcgattatcaacaaaat

SEQ ID NO: 208317 - DNA, 19 bp, Homo sapiens
  siRNA target sequence for DGKH (NM_152910.3,2270-2288).
gtgccacgccgtttattga

SEQ ID NO: 208318 - DNA, 19 bp, Homo sapiens
  siRNA target sequence for DGKH (NM_152910.3,2299-2317).
gattccgtagatggatatt

SEQ ID NO: 208319 - DNA, 19 bp, Homo sapiens
  siRNA target sequence for DGKH (NM_152910.3,2303-2321).
ccgtagatggatattcaga

SEQ ID NO: 208320 - DNA, 19 bp, Homo sapiens
  siRNA target sequence for DGKH (NM_152910.3,2304-2322).
cgtagatggatattcagaa

SEQ ID NO: 208321 - DNA, 19 bp, Homo sapiens
  siRNA target sequence for DGKH (NM_152910.3,2348-2366).
ggattggattagatgcaaa

SEQ ID NO: 208322 - DNA, 19 bp, Homo sapiens
  siRNA target sequence for DGKH (NM_152910.3,2349-2367).
gattggattagatgcaaaa

SEQ ID NO: 208323 - DNA, 19 bp, Homo sapiens
  siRNA target sequence for DGKH (NM_152910.3,2398-2416).
gagcaccctgaaaaatgca

SEQ ID NO: 208324 - DNA, 19 bp, Homo sapiens
  siRNA target sequence for DGKH (NM_152910.3,2417-2435).
ggagccgaactaaaaactt

SEQ ID NO: 208325 - DNA, 19 bp, Homo sapiens
  siRNA target sequence for DGKH (NM_152910.3,2420-2438).
gccgaactaaaaacttgat

SEQ ID NO: 208326 - DNA, 19 bp, Homo sapiens
  siRNA target sequence for DGKH (NM_152910.3,2422-2440).
cgaactaaaaacttgatgt

SEQ ID NO: 208327 - DNA, 19 bp, Homo sapiens
  siRNA target sequence for DGKH (NM_152910.3,2452-2470).
cttggaacccgggagttat

SEQ ID NO: 208328 - DNA, 19 bp, Homo sapiens
  siRNA target sequence for DGKH (NM_152910.3,2456-2474).
gaacccgggagttattaca

SEQ ID NO: 208329 - DNA, 19 bp, Homo sapiens
  siRNA target sequence for DGKH (NM_152910.3,2480-2498).
cgtacaagaatttagaaca

SEQ ID NO: 208330 - DNA, 19 bp, Homo sapiens
  siRNA target sequence for DGKH (NM_152910.3,2595-2613).
cttttggggtggaactaaa

SEQ ID NO: 208331 - DNA, 19 bp, Homo sapiens
  siRNA target sequence for DGKH (NM_152910.3,2609-2627).
ctaaagaggatgatatatt

SEQ ID NO: 208332 - DNA, 19 bp, Homo sapiens
  siRNA target sequence for DGKH (NM_152910.3,2655-2673).
cctggaagttgtagcaata

SEQ ID NO: 208333 - DNA, 19 bp, Homo sapiens
  siRNA target sequence for DGKH (NM_152910.3,2656-2674).
ctggaagttgtagcaatat

SEQ ID NO: 208334 - DNA, 19 bp, Homo sapiens
  siRNA target sequence for DGKH (NM_152910.3,2739-2757).
ccgtacagtgaaaatcact

SEQ ID NO: 208335 - DNA, 19 bp, Homo sapiens
  siRNA target sequence for DGKH (NM_152910.3,2744-2762).
cagtgaaaatcactatatt

SEQ ID NO: 208336 - DNA, 19 bp, Homo sapiens
  siRNA target sequence for DGKH (NM_152910.3,2748-2766).
gaaaatcactatatttggt

SEQ ID NO: 208337 - DNA, 19 bp, Homo sapiens
  siRNA target sequence for DGKH (NM_152910.3,2811-2829).
gcctccagggattatcaaa

SEQ ID NO: 208338 - DNA, 19 bp, Homo sapiens
  siRNA target sequence for DGKH (NM_152910.3,2816-2834).
cagggattatcaaaattgt

SEQ ID NO: 208339 - DNA, 19 bp, Homo sapiens
  siRNA target sequence for DGKH (NM_152910.3,2878-2896).
gagagcactctgaaatctt

SEQ ID NO: 208340 - DNA, 19 bp, Homo sapiens
  siRNA target sequence for DGKH (NM_152910.3,2887-2905).
ctgaaatcttgggaagata

SEQ ID NO: 208341 - DNA, 19 bp, Homo sapiens
  siRNA target sequence for DGKH (NM_152910.3,2910-2928).
gaagtgtgattctggtaaa

SEQ ID NO: 208342 - DNA, 19 bp, Homo sapiens
  siRNA target sequence for DGKH (NM_152910.3,2935-2953).
ctccgaacccatttgtaca

SEQ ID NO: 208343 - DNA, 19 bp, Homo sapiens
  siRNA target sequence for DGKH (NM_152910.3,3021-3039).
ggagctcattactaggata

SEQ ID NO: 208344 - DNA, 19 bp, Homo sapiens
  siRNA target sequence for DGKH (NM_152910.3,3022-3040).
gagctcattactaggatat

SEQ ID NO: 208345 - DNA, 19 bp, Homo sapiens
  siRNA target sequence for DGKH (NM_152910.3,3024-3042).
gctcattactaggatatgt

SEQ ID NO: 208346 - DNA, 19 bp, Homo sapiens
  siRNA target sequence for DGKH (NM_152910.3,3053-3071).
caattcactgtcttttgga

SEQ ID NO: 208347 - DNA, 19 bp, Homo sapiens
  siRNA target sequence for DGKH (NM_152910.3,3101-3119).
gctcccatgccctgaataa

SEQ ID NO: 208348 - DNA, 19 bp, Homo sapiens
  siRNA target sequence for DGKH (NM_152910.3,3132-3150).
gtgcccggagagtcttaca

SEQ ID NO: 208349 - DNA, 19 bp, Homo sapiens
  siRNA target sequence for DGKH (NM_152910.3,3135-3153).
cccggagagtcttacaaga

SEQ ID NO: 208350 - DNA, 19 bp, Homo sapiens
  siRNA target sequence for DGKH (NM_152910.3,3152-3170).
gagacactgccactgaaat

SEQ ID NO: 208351 - DNA, 19 bp, Homo sapiens
  siRNA target sequence for DGKH (NM_152910.3,3166-3184).
gaaatagccatcaatgtga

SEQ ID NO: 208352 - DNA, 19 bp, Homo sapiens
  siRNA target sequence for DGKH (NM_152910.3,3186-3204).
ggcgctgtataatgaaaca

SEQ ID NO: 208353 - DNA, 19 bp, Homo sapiens
  siRNA target sequence for DGKH (NM_152910.3,3237-3255).
gctggaatcgccacatgaa

SEQ ID NO: 208354 - DNA, 19 bp, Homo sapiens
  siRNA target sequence for DGKH (NM_152910.3,3320-3338).
ggctttattatatcttaca

SEQ ID NO: 208355 - DNA, 19 bp, Homo sapiens
  siRNA target sequence for DGKH (NM_152910.3,3361-3379).
cctatggattgcaccaaaa

SEQ ID NO: 208356 - DNA, 19 bp, Homo sapiens
  siRNA target sequence for DGKH (NM_152910.3,3387-3405).
cagaagcaccgtatttcga

SEQ ID NO: 208357 - DNA, 19 bp, Homo sapiens
  siRNA target sequence for DGKH (NM_152910.3,3389-3407).
gaagcaccgtatttcgaat

SEQ ID NO: 208358 - DNA, 19 bp, Homo sapiens
  siRNA target sequence for DGKH (NM_152910.3,3392-3410).
gcaccgtatttcgaatagt

SEQ ID NO: 208359 - DNA, 19 bp, Homo sapiens
  siRNA target sequence for DGKH (NM_152910.3,3403-3421).
cgaatagtgccaaagttta

SEQ ID NO: 208360 - DNA, 19 bp, Homo sapiens
  siRNA target sequence for DGKH (NM_152910.3,3404-3422).
gaatagtgccaaagtttaa

SEQ ID NO: 208361 - DNA, 19 bp, Homo sapiens
  siRNA target sequence for DGKH (NM_152910.3,3486-3504).
gtcatgtgaagcgaattct

SEQ ID NO: 208362 - DNA, 19 bp, Homo sapiens
  siRNA target sequence for DGKH (NM_178009.2,3510-3528).
caatttgggagagtacaaa

SEQ ID NO: 208363 - DNA, 19 bp, Homo sapiens
  siRNA target sequence for DGKH (NM_178009.2,3517-3535).
ggagagtacaaagatatct

SEQ ID NO: 208364 - DNA, 19 bp, Homo sapiens
  siRNA target sequence for DGKH (NM_178009.2,3518-3536).
gagagtacaaagatatctt

SEQ ID NO: 208365 - DNA, 19 bp, Homo sapiens
  siRNA target sequence for DGKH (NM_178009.2,3574-3592).
ctggaaaggcgagatctta

SEQ ID NO: 208366 - DNA, 19 bp, Homo sapiens
  siRNA target sequence for DGKI (NM_004717.2,591-609).
gccaagtcagatttgcaaa

SEQ ID NO: 208367 - DNA, 19 bp, Homo sapiens
  siRNA target sequence for DGKI (NM_004717.2,670-688).
gcagctagaaaagattaat

SEQ ID NO: 208368 - DNA, 19 bp, Homo sapiens
  siRNA target sequence for DGKI (NM_004717.2,801-819).
gtaagggcttccagcaaaa

SEQ ID NO: 208369 - DNA, 19 bp, Homo sapiens
  siRNA target sequence for DGKI (NM_004717.2,820-838).
gttctccttccacagtaaa

SEQ ID NO: 208370 - DNA, 19 bp, Homo sapiens
  siRNA target sequence for DGKI (NM_004717.2,904-922).
gctgcatcacattgaagaa

SEQ ID NO: 208371 - DNA, 19 bp, Homo sapiens
  siRNA target sequence for DGKI (NM_004717.2,937-955).
ggctcatgctgctgttatt

SEQ ID NO: 208372 - DNA, 19 bp, Homo sapiens
  siRNA target sequence for DGKI (NM_004717.2,963-981).
ccacttggatcattaaggt

SEQ ID NO: 208373 - DNA, 19 bp, Homo sapiens
  siRNA target sequence for DGKI (NM_004717.2,1082-1100).
ggtcgtccttttgtgataa

SEQ ID NO: 208374 - DNA, 19 bp, Homo sapiens
  siRNA target sequence for DGKI (NM_004717.2,1127-1145).
cccttgcttgtatttgtga

SEQ ID NO: 208375 - DNA, 19 bp, Homo sapiens
  siRNA target sequence for DGKI (NM_004717.2,1129-1147).
cttgcttgtatttgtgaat

SEQ ID NO: 208376 - DNA, 19 bp, Homo sapiens
  siRNA target sequence for DGKI (NM_004717.2,1204-1222).
gaatccacggcaagtcttt

SEQ ID NO: 208377 - DNA, 19 bp, Homo sapiens
  siRNA target sequence for DGKI (NM_004717.2,1209-1227).
cacggcaagtctttgatct

SEQ ID NO: 208378 - DNA, 19 bp, Homo sapiens
  siRNA target sequence for DGKI (NM_004717.2,1241-1259).
ccaaaagatgcgcttgaat

SEQ ID NO: 208379 - DNA, 19 bp, Homo sapiens
  siRNA target sequence for DGKI (NM_004717.2,1242-1260).
caaaagatgcgcttgaatt

SEQ ID NO: 208380 - DNA, 19 bp, Homo sapiens
  siRNA target sequence for DGKI (NM_004717.2,1247-1265).
gatgcgcttgaattgtata

SEQ ID NO: 208381 - DNA, 19 bp, Homo sapiens
  siRNA target sequence for DGKI (NM_004717.2,1250-1268).
gcgcttgaattgtatagga

SEQ ID NO: 208382 - DNA, 19 bp, Homo sapiens
  siRNA target sequence for DGKI (NM_004717.2,1251-1269).
cgcttgaattgtataggaa

SEQ ID NO: 208383 - DNA, 19 bp, Homo sapiens
  siRNA target sequence for DGKI (NM_004717.2,1252-1270).
gcttgaattgtataggaaa

SEQ ID NO: 208384 - DNA, 19 bp, Homo sapiens
  siRNA target sequence for DGKI (NM_004717.2,1261-1279).
gtataggaaagtaccaaat

SEQ ID NO: 208385 - DNA, 19 bp, Homo sapiens
  siRNA target sequence for DGKI (NM_004717.2,1560-1578).
gtaagctccctctgaatgt

SEQ ID NO: 208386 - DNA, 19 bp, Homo sapiens
  siRNA target sequence for DGKI (NM_004717.2,1670-1688).
cgttttcgaaataaaatgt

SEQ ID NO: 208387 - DNA, 19 bp, Homo sapiens
  siRNA target sequence for DGKI (NM_004717.2,1690-1708).
ctatgcaggggcagctttt

SEQ ID NO: 208388 - DNA, 19 bp, Homo sapiens
  siRNA target sequence for DGKI (NM_004717.2,1712-1730).
gacttcctacagagaagtt

SEQ ID NO: 208389 - DNA, 19 bp, Homo sapiens
  siRNA target sequence for DGKI (NM_004717.2,1728-1746).
gttctagagatctatccaa

SEQ ID NO: 208390 - DNA, 19 bp, Homo sapiens
  siRNA target sequence for DGKI (NM_004717.2,1804-1822).
gttccagtgtatagtattt

SEQ ID NO: 208391 - DNA, 19 bp, Homo sapiens
  siRNA target sequence for DGKI (NM_004717.2,1872-1890).
gtgatcaccatgatttcga

SEQ ID NO: 208392 - DNA, 19 bp, Homo sapiens
  siRNA target sequence for DGKI (NM_004717.2,1919-1937).
gaagtcattggatttacca

SEQ ID NO: 208393 - DNA, 19 bp, Homo sapiens
  siRNA target sequence for DGKI (NM_004717.2,1994-2012).
cgagaagtcatgcttctaa

SEQ ID NO: 208394 - DNA, 19 bp, Homo sapiens
  siRNA target sequence for DGKI (NM_004717.2,1997-2015).
gaagtcatgcttctaactt

SEQ ID NO: 208395 - DNA, 19 bp, Homo sapiens
  siRNA target sequence for DGKI (NM_004717.2,2002-2020).
catgcttctaacttacaaa

SEQ ID NO: 208396 - DNA, 19 bp, Homo sapiens
  siRNA target sequence for DGKI (NM_004717.2,2055-2073).
ggttggccccagctatgat

SEQ ID NO: 208397 - DNA, 19 bp, Homo sapiens
  siRNA target sequence for DGKI (NM_004717.2,2124-2142).
gaacatccatgcctttact

SEQ ID NO: 208398 - DNA, 19 bp, Homo sapiens
  siRNA target sequence for DGKI (NM_004717.2,2131-2149).
catgcctttactcaatgat

SEQ ID NO: 208399 - DNA, 19 bp, Homo sapiens
  siRNA target sequence for DGKI (NM_004717.2,2173-2191).
gaggatccgggtgaacaaa

SEQ ID NO: 208400 - DNA, 19 bp, Homo sapiens
  siRNA target sequence for DGKI (NM_004717.2,2175-2193).
ggatccgggtgaacaaaat

SEQ ID NO: 208401 - DNA, 19 bp, Homo sapiens
  siRNA target sequence for DGKI (NM_004717.2,2179-2197).
ccgggtgaacaaaatcagt

SEQ ID NO: 208402 - DNA, 19 bp, Homo sapiens
  siRNA target sequence for DGKI (NM_004717.2,2180-2198).
cgggtgaacaaaatcagtt

SEQ ID NO: 208403 - DNA, 19 bp, Homo sapiens
  siRNA target sequence for DGKI (NM_004717.2,2182-2200).
ggtgaacaaaatcagttta

SEQ ID NO: 208404 - DNA, 19 bp, Homo sapiens
  siRNA target sequence for DGKI (NM_004717.2,2237-2255).
ctccgagaagcttctattt

SEQ ID NO: 208405 - DNA, 19 bp, Homo sapiens
  siRNA target sequence for DGKI (NM_004717.2,2304-2322).
cgatacctctgggtattct

SEQ ID NO: 208406 - DNA, 19 bp, Homo sapiens
  siRNA target sequence for DGKI (NM_004717.2,2305-2323).
gatacctctgggtattcta

SEQ ID NO: 208407 - DNA, 19 bp, Homo sapiens
  siRNA target sequence for DGKI (NM_004717.2,2327-2345).
gtgcgtggagactgtgatt

SEQ ID NO: 208408 - DNA, 19 bp, Homo sapiens
  siRNA target sequence for DGKI (NM_004717.2,2348-2366).
gagacttgccgtatgtaca

SEQ ID NO: 208409 - DNA, 19 bp, Homo sapiens
  siRNA target sequence for DGKI (NM_004717.2,2350-2368).
gacttgccgtatgtacata

SEQ ID NO: 208410 - DNA, 19 bp, Homo sapiens
  siRNA target sequence for DGKI (NM_004717.2,2352-2370).
cttgccgtatgtacataga

SEQ ID NO: 208411 - DNA, 19 bp, Homo sapiens
  siRNA target sequence for DGKI (NM_004717.2,2381-2399).
gaggacctacagtcagttt

SEQ ID NO: 208412 - DNA, 19 bp, Homo sapiens
  siRNA target sequence for DGKI (NM_004717.2,2406-2424).
gctcccagagagttcatta

SEQ ID NO: 208413 - DNA, 19 bp, Homo sapiens
  siRNA target sequence for DGKI (NM_004717.2,2409-2427).
cccagagagttcattacca

SEQ ID NO: 208414 - DNA, 19 bp, Homo sapiens
  siRNA target sequence for DGKI (NM_004717.2,2686-2704).
cagtgggctggggatgata

SEQ ID NO: 208415 - DNA, 19 bp, Homo sapiens
  siRNA target sequence for DGKI (NM_004717.2,2697-2715).
ggatgatagctccctatta

SEQ ID NO: 208416 - DNA, 19 bp, Homo sapiens
  siRNA target sequence for DGKI (NM_004717.2,2698-2716).
gatgatagctccctattat

SEQ ID NO: 208417 - DNA, 19 bp, Homo sapiens
  siRNA target sequence for DGKI (NM_004717.2,2787-2805).
caattttgcaggcagtaat

SEQ ID NO: 208418 - DNA, 19 bp, Homo sapiens
  siRNA target sequence for DGKI (NM_004717.2,2801-2819).
gtaatagctggtgatctta

SEQ ID NO: 208419 - DNA, 19 bp, Homo sapiens
  siRNA target sequence for DGKI (NM_004717.2,2810-2828).
ggtgatcttatgaagctaa

SEQ ID NO: 208420 - DNA, 19 bp, Homo sapiens
  siRNA target sequence for DGKI (NM_004717.2,2811-2829).
gtgatcttatgaagctaat

SEQ ID NO: 208421 - DNA, 19 bp, Homo sapiens
  siRNA target sequence for DGKI (NM_004717.2,2824-2842).
gctaatagaaagctataaa

SEQ ID NO: 208422 - DNA, 19 bp, Homo sapiens
  siRNA target sequence for DGKI (NM_004717.2,2847-2865).
gaggcagtctgctaattca

SEQ ID NO: 208423 - DNA, 19 bp, Homo sapiens
  siRNA target sequence for DGKI (NM_004717.2,2887-2905).
ccttcactacgcagctaaa

SEQ ID NO: 208424 - DNA, 19 bp, Homo sapiens
  siRNA target sequence for DGKI (NM_004717.2,2907-2925).
ccggcaacggggagattgt

SEQ ID NO: 208425 - DNA, 19 bp, Homo sapiens
  siRNA target sequence for DGKI (NM_004717.2,2909-2927).
ggcaacggggagattgtga

SEQ ID NO: 208426 - DNA, 19 bp, Homo sapiens
  siRNA target sequence for DGKI (NM_004717.2,2910-2928).
gcaacggggagattgtgaa

SEQ ID NO: 208427 - DNA, 19 bp, Homo sapiens
  siRNA target sequence for DGKI (NM_004717.2,2911-2929).
caacggggagattgtgaaa

SEQ ID NO: 208428 - DNA, 19 bp, Homo sapiens
  siRNA target sequence for DGKI (NM_004717.2,2914-2932).
cggggagattgtgaaatat

SEQ ID NO: 208429 - DNA, 19 bp, Homo sapiens
  siRNA target sequence for DGKI (NM_004717.2,2942-2960).
cacggaccttccgagttat

SEQ ID NO: 208430 - DNA, 19 bp, Homo sapiens
  siRNA target sequence for DGKI (NM_004717.2,2946-2964).
gaccttccgagttattgga

SEQ ID NO: 208431 - DNA, 19 bp, Homo sapiens
  siRNA target sequence for DGKI (NM_004717.2,2948-2966).
ccttccgagttattggata

SEQ ID NO: 208432 - DNA, 19 bp, Homo sapiens
  siRNA target sequence for DGKI (NM_004717.2,2949-2967).
cttccgagttattggatat

SEQ ID NO: 208433 - DNA, 19 bp, Homo sapiens
  siRNA target sequence for DGKI (NM_004717.2,3082-3100).
gggtaagacacctcaagaa

SEQ ID NO: 208434 - DNA, 19 bp, Homo sapiens
  siRNA target sequence for DGKI (NM_004717.2,3143-3161).
gaaagccgtcagaactata

SEQ ID NO: 208435 - DNA, 19 bp, Homo sapiens
  siRNA target sequence for DGKI (NM_004717.2,3147-3165).
gccgtcagaactataaggt

SEQ ID NO: 208436 - DNA, 19 bp, Homo sapiens
  siRNA target sequence for FLJ10842 (NM_018238.2,117-135).
gaaaacactgtgataacct

SEQ ID NO: 208437 - DNA, 19 bp, Homo sapiens
  siRNA target sequence for FLJ10842 (NM_018238.2,203-221).
gtgaagaaggccactgttt

SEQ ID NO: 208438 - DNA, 19 bp, Homo sapiens
  siRNA target sequence for FLJ10842 (NM_018238.2,415-433).
ggttgttactggtgttctt

SEQ ID NO: 208439 - DNA, 19 bp, Homo sapiens
  siRNA target sequence for FLJ10842 (NM_018238.2,443-461).
gatgaggctaccttcagta

SEQ ID NO: 208440 - DNA, 19 bp, Homo sapiens
  siRNA target sequence for FLJ10842 (NM_018238.2,488-506).
ggagagaccagtagtttga

SEQ ID NO: 208441 - DNA, 19 bp, Homo sapiens
  siRNA target sequence for FLJ10842 (NM_018238.2,557-575).
gccacacttgccattgtga

SEQ ID NO: 208442 - DNA, 19 bp, Homo sapiens
  siRNA target sequence for FLJ10842 (NM_018238.2,648-666).
gccttcgatggggatcttt

SEQ ID NO: 208443 - DNA, 19 bp, Homo sapiens
  siRNA target sequence for FLJ10842 (NM_018238.2,650-668).
cttcgatggggatctttca

SEQ ID NO: 208444 - DNA, 19 bp, Homo sapiens
  siRNA target sequence for FLJ10842 (NM_018238.2,680-698).
gtcaaagttagcaagtact

SEQ ID NO: 208445 - DNA, 19 bp, Homo sapiens
  siRNA target sequence for FLJ10842 (NM_018238.2,700-718).
gtatcttgggcctctaaaa

SEQ ID NO: 208446 - DNA, 19 bp, Homo sapiens
  siRNA target sequence for FLJ10842 (NM_018238.2,833-851).
gtacaaaggccttctttgt

SEQ ID NO: 208447 - DNA, 19 bp, Homo sapiens
  siRNA target sequence for FLJ10842 (NM_018238.2,836-854).
caaaggccttctttgtaca

SEQ ID NO: 208448 - DNA, 19 bp, Homo sapiens
  siRNA target sequence for FLJ10842 (NM_018238.2,922-940).
cccggaggtctggaaagat

SEQ ID NO: 208449 - DNA, 19 bp, Homo sapiens
  siRNA target sequence for FLJ10842 (NM_018238.2,988-1006).
gcttgacccgacaagcaaa

SEQ ID NO: 208450 - DNA, 19 bp, Homo sapiens
  siRNA target sequence for FLJ10842 (NM_018238.2,995-1013).
ccgacaagcaaagaagatt

SEQ ID NO: 208451 - DNA, 19 bp, Homo sapiens
  siRNA target sequence for FLJ10842 (NM_018238.2,1048-1066).
caaaggagactttataact

SEQ ID NO: 208452 - DNA, 19 bp, Homo sapiens
  siRNA target sequence for FLJ10842 (NM_018238.2,1157-1175).
ggagcagggggctctttta

SEQ ID NO: 208453 - DNA, 19 bp, Homo sapiens
  siRNA target sequence for FLJ10842 (NM_018238.2,1161-1179).
cagggggctcttttagcat

SEQ ID NO: 208454 - DNA, 19 bp, Homo sapiens
  siRNA target sequence for CHK (NM_001277.1,461-479).
ggctgtatggagcgatttt

SEQ ID NO: 208455 - DNA, 19 bp, Homo sapiens
  siRNA target sequence for CHK (NM_001277.1,556-574).
gttctggagagcgttatgt

SEQ ID NO: 208456 - DNA, 19 bp, Homo sapiens
  siRNA target sequence for CHK (NM_001277.1,596-614).
cacttgggccaaaactcta

SEQ ID NO: 208457 - DNA, 19 bp, Homo sapiens
  siRNA target sequence for CHK (NM_001277.1,660-678).
gcgattagatactgaagaa

SEQ ID NO: 208458 - DNA, 19 bp, Homo sapiens
  siRNA target sequence for CHK (NM_001277.1,661-679).
cgattagatactgaagaat

SEQ ID NO: 208459 - DNA, 19 bp, Homo sapiens
  siRNA target sequence for CHK (NM_001277.1,700-718).
gcagaaatcgccgagaaaa

SEQ ID NO: 208460 - DNA, 19 bp, Homo sapiens
  siRNA target sequence for CHK (NM_001277.1,701-719).
cagaaatcgccgagaaaat

SEQ ID NO: 208461 - DNA, 19 bp, Homo sapiens
  siRNA target sequence for CHK (NM_001277.1,722-740).
ctacatttcatggtatgaa

SEQ ID NO: 208462 - DNA, 19 bp, Homo sapiens
  siRNA target sequence for CHK (NM_001277.1,734-752).
gtatgaaaatgccattcaa

SEQ ID NO: 208463 - DNA, 19 bp, Homo sapiens
  siRNA target sequence for CHK (NM_001277.1,756-774).
ggaaccaaaatggcttttt

SEQ ID NO: 208464 - DNA, 19 bp, Homo sapiens
  siRNA target sequence for CHK (NM_001277.1,889-907).
ctgagatcattgcttgaat

SEQ ID NO: 208465 - DNA, 19 bp, Homo sapiens
  siRNA target sequence for CHK (NM_001277.1,913-931).
ccatctccagttgtatttt

SEQ ID NO: 208466 - DNA, 19 bp, Homo sapiens
  siRNA target sequence for CHK (NM_001277.1,925-943).
gtattttgtcataatgact

SEQ ID NO: 208467 - DNA, 19 bp, Homo sapiens
  siRNA target sequence for CHK (NM_001277.1,940-958).
gactgtcaagaaggtaata

SEQ ID NO: 208468 - DNA, 19 bp, Homo sapiens
  siRNA target sequence for CHK (NM_001277.1,946-964).
caagaaggtaatatcttgt

SEQ ID NO: 208469 - DNA, 19 bp, Homo sapiens
  siRNA target sequence for CHK (NM_001277.1,966-984).
gctggaaggccgagagaat

SEQ ID NO: 208470 - DNA, 19 bp, Homo sapiens
  siRNA target sequence for CHK (NM_001277.1,1006-1024).
ctcattgatttcgaataca

SEQ ID NO: 208471 - DNA, 19 bp, Homo sapiens
  siRNA target sequence for CHK (NM_001277.1,1040-1058).
ggggattcgacattggaaa

SEQ ID NO: 208472 - DNA, 19 bp, Homo sapiens
  siRNA target sequence for CHK (NM_001277.1,1062-1080).
cttctgtgagtggatgtat

SEQ ID NO: 208473 - DNA, 19 bp, Homo sapiens
  siRNA target sequence for CHK (NM_001277.1,1077-1095).
gtatgattatagctatgaa

SEQ ID NO: 208474 - DNA, 19 bp, Homo sapiens
  siRNA target sequence for CHK (NM_001277.1,1153-1171).
cattttatttccagttact

SEQ ID NO: 208475 - DNA, 19 bp, Homo sapiens
  siRNA target sequence for CHK (NM_001277.1,1286-1304).
gactgtggtccattgtaca

SEQ ID NO: 208476 - DNA, 19 bp, Homo sapiens
  siRNA target sequence for CHK (NM_001277.1,1296-1314).
cattgtacaagccaagatt

SEQ ID NO: 208477 - DNA, 19 bp, Homo sapiens
  siRNA target sequence for CHK (NM_001277.1,1300-1318).
gtacaagccaagatttcat

SEQ ID NO: 208478 - DNA, 19 bp, Homo sapiens
  siRNA target sequence for CHK (NM_001277.1,1341-1359).
ctacgcccaagcaaggttt

SEQ ID NO: 208479 - DNA, 19 bp, Homo sapiens
  siRNA target sequence for CHK (NM_001277.1,1344-1362).
cgcccaagcaaggtttgat

SEQ ID NO: 208480 - DNA, 19 bp, Homo sapiens
  siRNA target sequence for FLJ10761 (NM_018208.1,558-576).
caggttaatcgccttagaa

SEQ ID NO: 208481 - DNA, 19 bp, Homo sapiens
  siRNA target sequence for FLJ10761 (NM_018208.1,560-578).
ggttaatcgccttagaaat

SEQ ID NO: 208482 - DNA, 19 bp, Homo sapiens
  siRNA target sequence for FLJ10761 (NM_018208.1,633-651).
gcacaagatgcacaattat

SEQ ID NO: 208483 - DNA, 19 bp, Homo sapiens
  siRNA target sequence for FLJ10761 (NM_018208.1,793-811).
ctctgcaagaatatcatct

SEQ ID NO: 208484 - DNA, 19 bp, Homo sapiens
  siRNA target sequence for FLJ10761 (NM_018208.1,797-815).
gcaagaatatcatctatga

SEQ ID NO: 208485 - DNA, 19 bp, Homo sapiens
  siRNA target sequence for FLJ10761 (NM_018208.1,827-845).
gtcacgtgcggttcattga

SEQ ID NO: 208486 - DNA, 19 bp, Homo sapiens
  siRNA target sequence for FLJ10761 (NM_018208.1,829-847).
cacgtgcggttcattgact

SEQ ID NO: 208487 - DNA, 19 bp, Homo sapiens
  siRNA target sequence for FLJ10761 (NM_018208.1,831-849).
cgtgcggttcattgactat

SEQ ID NO: 208488 - DNA, 19 bp, Homo sapiens
  siRNA target sequence for FLJ10761 (NM_018208.1,834-852).
gcggttcattgactatgaa

SEQ ID NO: 208489 - DNA, 19 bp, Homo sapiens
  siRNA target sequence for FLJ10761 (NM_018208.1,887-905).
gcaaccatttcaatgagtt

SEQ ID NO: 208490 - DNA, 19 bp, Homo sapiens
  siRNA target sequence for FLJ10761 (NM_018208.1,911-929).
gcgtgaatgaggtggatta

SEQ ID NO: 208491 - DNA, 19 bp, Homo sapiens
  siRNA target sequence for FLJ10761 (NM_018208.1,913-931).
gtgaatgaggtggattact

SEQ ID NO: 208492 - DNA, 19 bp, Homo sapiens
  siRNA target sequence for FLJ10761 (NM_018208.1,1032-1050).
cgtgcaagtcaacaagttt

SEQ ID NO: 208493 - DNA, 19 bp, Homo sapiens
  siRNA target sequence for XYLB (NM_005108.2,167-185).
gcacgcagcaggtaaaggt

SEQ ID NO: 208494 - DNA, 19 bp, Homo sapiens
  siRNA target sequence for XYLB (NM_005108.2,200-218).
cagagttgaatgtcttcta

SEQ ID NO: 208495 - DNA, 19 bp, Homo sapiens
  siRNA target sequence for XYLB (NM_005108.2,300-318).
ggtcacttctccagtacta

SEQ ID NO: 208496 - DNA, 19 bp, Homo sapiens
  siRNA target sequence for XYLB (NM_005108.2,301-319).
gtcacttctccagtactaa

SEQ ID NO: 208497 - DNA, 19 bp, Homo sapiens
  siRNA target sequence for XYLB (NM_005108.2,407-425).
gccagcaacacggaagtat

SEQ ID NO: 208498 - DNA, 19 bp, Homo sapiens
  siRNA target sequence for XYLB (NM_005108.2,408-426).
ccagcaacacggaagtata

SEQ ID NO: 208499 - DNA, 19 bp, Homo sapiens
  siRNA target sequence for XYLB (NM_005108.2,409-427).
cagcaacacggaagtatat

SEQ ID NO: 208500 - DNA, 19 bp, Homo sapiens
  siRNA target sequence for XYLB (NM_005108.2,447-465).
gcaggcactgacaagctta

SEQ ID NO: 208501 - DNA, 19 bp, Homo sapiens
  siRNA target sequence for XYLB (NM_005108.2,448-466).
caggcactgacaagcttat

SEQ ID NO: 208502 - DNA, 19 bp, Homo sapiens
  siRNA target sequence for XYLB (NM_005108.2,635-653).
cagggaaccaaattgcaaa

SEQ ID NO: 208503 - DNA, 19 bp, Homo sapiens
  siRNA target sequence for XYLB (NM_005108.2,670-688).
cccgaggcctactcacata

SEQ ID NO: 208504 - DNA, 19 bp, Homo sapiens
  siRNA target sequence for XYLB (NM_005108.2,672-690).
cgaggcctactcacataca

SEQ ID NO: 208505 - DNA, 19 bp, Homo sapiens
  siRNA target sequence for XYLB (NM_005108.2,737-755).
gctcttactcccctattga

SEQ ID NO: 208506 - DNA, 19 bp, Homo sapiens
  siRNA target sequence for XYLB (NM_005108.2,766-784).
ggttctggaatgaatttgt

SEQ ID NO: 208507 - DNA, 19 bp, Homo sapiens
  siRNA target sequence for XYLB (NM_005108.2,838-856).
catttagaggagaagctta

SEQ ID NO: 208508 - DNA, 19 bp, Homo sapiens
  siRNA target sequence for XYLB (NM_005108.2,909-927).
ccagcgctacggatttcct

SEQ ID NO: 208509 - DNA, 19 bp, Homo sapiens
  siRNA target sequence for XYLB (NM_005108.2,1113-1131).
ggcactcctgtgctttaaa

SEQ ID NO: 208510 - DNA, 19 bp, Homo sapiens
  siRNA target sequence for XYLB (NM_005108.2,1177-1195).
cgttcctggagcgatttct

SEQ ID NO: 208511 - DNA, 19 bp, Homo sapiens
  siRNA target sequence for XYLB (NM_005108.2,1181-1199).
cctggagcgatttctctaa

SEQ ID NO: 208512 - DNA, 19 bp, Homo sapiens
  siRNA target sequence for XYLB (NM_005108.2,1282-1300).
ggacgtcataggtttaaca

SEQ ID NO: 208513 - DNA, 19 bp, Homo sapiens
  siRNA target sequence for XYLB (NM_005108.2,1338-1356).
ggaggttcgagcactaatt

SEQ ID NO: 208514 - DNA, 19 bp, Homo sapiens
  siRNA target sequence for XYLB (NM_005108.2,1341-1359).
ggttcgagcactaattgaa

SEQ ID NO: 208515 - DNA, 19 bp, Homo sapiens
  siRNA target sequence for XYLB (NM_005108.2,1351-1369).
ctaattgaaggacaattca

SEQ ID NO: 208516 - DNA, 19 bp, Homo sapiens
  siRNA target sequence for XYLB (NM_005108.2,1405-1423).
cgagtcatgtccaagacaa

SEQ ID NO: 208517 - DNA, 19 bp, Homo sapiens
  siRNA target sequence for XYLB (NM_005108.2,1438-1456).
ggaggagcatctcacaata

SEQ ID NO: 208518 - DNA, 19 bp, Homo sapiens
  siRNA target sequence for XYLB (NM_005108.2,1442-1460).
gagcatctcacaatagaga

SEQ ID NO: 208519 - DNA, 19 bp, Homo sapiens
  siRNA target sequence for XYLB (NM_005108.2,1495-1513).
ccggtgtatgttatagaca

SEQ ID NO: 208520 - DNA, 19 bp, Homo sapiens
  siRNA target sequence for XYLB (NM_005108.2,1538-1556).
ctgcataccgagcttttca

SEQ ID NO: 208521 - DNA, 19 bp, Homo sapiens
  siRNA target sequence for XYLB (NM_005108.2,1583-1601).
ccttttcagaggttgtgaa

SEQ ID NO: 208522 - DNA, 19 bp, Homo sapiens
  siRNA target sequence for XYLB (NM_005108.2,1687-1705).
ctcgagcagagaatcttgt

SEQ ID NO: 208523 - DNA, 19 bp, Homo sapiens
  siRNA target sequence for RBSK (NM_022128.1,89-107).
cgacctggtcagtcttact

SEQ ID NO: 208524 - DNA, 19 bp, Homo sapiens
  siRNA target sequence for RBSK (NM_022128.1,90-108).
gacctggtcagtcttactt

SEQ ID NO: 208525 - DNA, 19 bp, Homo sapiens
  siRNA target sequence for RBSK (NM_022128.1,92-110).
cctggtcagtcttacttct

SEQ ID NO: 208526 - DNA, 19 bp, Homo sapiens
  siRNA target sequence for RBSK (NM_022128.1,134-152).
catccatggacataagttt

SEQ ID NO: 208527 - DNA, 19 bp, Homo sapiens
  siRNA target sequence for RBSK (NM_022128.1,218-236).
gtccatggtgtgtaaggtt

SEQ ID NO: 208528 - DNA, 19 bp, Homo sapiens
  siRNA target sequence for RBSK (NM_022128.1,227-245).
gtgtaaggttggcaaagat

SEQ ID NO: 208529 - DNA, 19 bp, Homo sapiens
  siRNA target sequence for RBSK (NM_022128.1,325-343).
ctacaggaactgcttctat

SEQ ID NO: 208530 - DNA, 19 bp, Homo sapiens
  siRNA target sequence for RBSK (NM_022128.1,340-358).
ctataattgtcaataatga

SEQ ID NO: 208531 - DNA, 19 bp, Homo sapiens
  siRNA target sequence for RBSK (NM_022128.1,360-378).
ggccagaatatcattgtca

SEQ ID NO: 208532 - DNA, 19 bp, Homo sapiens
  siRNA target sequence for RBSK (NM_022128.1,361-379).
gccagaatatcattgtcat

SEQ ID NO: 208533 - DNA, 19 bp, Homo sapiens
  siRNA target sequence for RBSK (NM_022128.1,377-395).
catagtggctggagcaaat

SEQ ID NO: 208534 - DNA, 19 bp, Homo sapiens
  siRNA target sequence for RBSK (NM_022128.1,383-401).
ggctggagcaaatttactt

SEQ ID NO: 208535 - DNA, 19 bp, Homo sapiens
  siRNA target sequence for RBSK (NM_022128.1,384-402).
gctggagcaaatttacttt

SEQ ID NO: 208536 - DNA, 19 bp, Homo sapiens
  siRNA target sequence for RBSK (NM_022128.1,423-441).
gcagcagccaatgtcatta

SEQ ID NO: 208537 - DNA, 19 bp, Homo sapiens
  siRNA target sequence for RBSK (NM_022128.1,426-444).
gcagccaatgtcattagca

SEQ ID NO: 208538 - DNA, 19 bp, Homo sapiens
  siRNA target sequence for RBSK (NM_022128.1,458-476).
ggtctgccagctcgaaata

SEQ ID NO: 208539 - DNA, 19 bp, Homo sapiens
  siRNA target sequence for RBSK (NM_022128.1,459-477).
gtctgccagctcgaaataa

SEQ ID NO: 208540 - DNA, 19 bp, Homo sapiens
  siRNA target sequence for RBSK (NM_022128.1,461-479).
ctgccagctcgaaataact

SEQ ID NO: 208541 - DNA, 19 bp, Homo sapiens
  siRNA target sequence for RBSK (NM_022128.1,512-530).
ccgcaggagtggagtgaaa

SEQ ID NO: 208542 - DNA, 19 bp, Homo sapiens
  siRNA target sequence for RBSK (NM_022128.1,670-688).
ctgcattagtgctcttgaa

SEQ ID NO: 208543 - DNA, 19 bp, Homo sapiens
  siRNA target sequence for RBSK (NM_022128.1,691-709).
ggggctgccaggtggtaat

SEQ ID NO: 208544 - DNA, 19 bp, Homo sapiens
  siRNA target sequence for RBSK (NM_022128.1,693-711).
ggctgccaggtggtaatca

SEQ ID NO: 208545 - DNA, 19 bp, Homo sapiens
  siRNA target sequence for RBSK (NM_022128.1,694-712).
gctgccaggtggtaatcat

SEQ ID NO: 208546 - DNA, 19 bp, Homo sapiens
  siRNA target sequence for RBSK (NM_022128.1,699-717).
caggtggtaatcattacct

SEQ ID NO: 208547 - DNA, 19 bp, Homo sapiens
  siRNA target sequence for RBSK (NM_022128.1,701-719).
ggtggtaatcattacctta

SEQ ID NO: 208548 - DNA, 19 bp, Homo sapiens
  siRNA target sequence for RBSK (NM_022128.1,838-856).
ccttctacctggcttacta

SEQ ID NO: 208549 - DNA, 19 bp, Homo sapiens
  siRNA target sequence for RBSK (NM_022128.1,925-943).
caggaacacagtcatctta

SEQ ID NO: 208550 - DNA, 19 bp, Homo sapiens
  siRNA target sequence for FLJ13052 (NM_023018.2,290-308).
gatgagacctggagttaca

SEQ ID NO: 208551 - DNA, 19 bp, Homo sapiens
  siRNA target sequence for FLJ13052 (NM_023018.2,385-403).
gaggacacgctctcttcat

SEQ ID NO: 208552 - DNA, 19 bp, Homo sapiens
  siRNA target sequence for FLJ13052 (NM_023018.2,412-430).
cccggtgaccacttttgga

SEQ ID NO: 208553 - DNA, 19 bp, Homo sapiens
  siRNA target sequence for FLJ13052 (NM_023018.2,806-824).
cggctgacgtggaacaagt

SEQ ID NO: 208554 - DNA, 19 bp, Homo sapiens
  siRNA target sequence for FLJ13052 (NM_023018.2,1011-1029).
gcaggttggcactttgctt

SEQ ID NO: 208555 - DNA, 19 bp, Homo sapiens
  siRNA target sequence for FLJ13052 (NM_023018.2,1079-1097).
gccatcgccagcgatgaaa

SEQ ID NO: 208556 - DNA, 19 bp, Homo sapiens
  siRNA target sequence for FLJ13052 (NM_023018.2,1084-1102).
cgccagcgatgaaagcttt

SEQ ID NO: 208557 - DNA, 19 bp, Homo sapiens
  siRNA target sequence for FLJ13052 (NM_023018.2,1125-1143).
gtacctttcgagaagatta

SEQ ID NO: 208558 - DNA, 19 bp, Homo sapiens
  siRNA target sequence for FLJ13052 (NM_023018.2,1128-1146).
cctttcgagaagattatga

SEQ ID NO: 208559 - DNA, 19 bp, Homo sapiens
  siRNA target sequence for FLJ13052 (NM_023018.2,1129-1147).
ctttcgagaagattatgat

SEQ ID NO: 208560 - DNA, 19 bp, Homo sapiens
  siRNA target sequence for FLJ13052 (NM_023018.2,1155-1173).
ccaatcagatagacttcat

SEQ ID NO: 208561 - DNA, 19 bp, Homo sapiens
  siRNA target sequence for FLJ13052 (NM_023018.2,1327-1345).
ggggaacgcagctgttgtt

SEQ ID NO: 208562 - DNA, 19 bp, Homo sapiens
  siRNA target sequence for KHK (NM_000221.1,84-102).
gaggactcggagataaggt

SEQ ID NO: 208563 - DNA, 19 bp, Homo sapiens
  siRNA target sequence for KHK (NM_000221.1,254-272).
cctacgctacacagtcttt

SEQ ID NO: 208564 - DNA, 19 bp, Homo sapiens
  siRNA target sequence for KHK (NM_000221.1,258-276).
cgctacacagtctttcaga

SEQ ID NO: 208565 - DNA, 19 bp, Homo sapiens
  siRNA target sequence for KHK (NM_000221.1,324-342).
ggtagccgcaccatcctat

SEQ ID NO: 208566 - DNA, 19 bp, Homo sapiens
  siRNA target sequence for KHK (NM_000221.1,325-343).
gtagccgcaccatcctata

SEQ ID NO: 208567 - DNA, 19 bp, Homo sapiens
  siRNA target sequence for KHK (NM_000221.1,328-346).
gccgcaccatcctatacta

SEQ ID NO: 208568 - DNA, 19 bp, Homo sapiens
  siRNA target sequence for KHK (NM_000221.1,329-347).
ccgcaccatcctatactat

SEQ ID NO: 208569 - DNA, 19 bp, Homo sapiens
  siRNA target sequence for KHK (NM_000221.1,331-349).
gcaccatcctatactatga

SEQ ID NO: 208570 - DNA, 19 bp, Homo sapiens
  siRNA target sequence for KHK (NM_000221.1,564-582).
ggagacgtggtgtttgtca

SEQ ID NO: 208571 - DNA, 19 bp, Homo sapiens
  siRNA target sequence for DKFZP586B1621 (NM_015533.2,353-371).
cagtggggacgctccttat

SEQ ID NO: 208572 - DNA, 19 bp, Homo sapiens
  siRNA target sequence for DKFZP586B1621 (NM_015533.2,362-380).
cgctccttatcgtgaagaa

SEQ ID NO: 208573 - DNA, 19 bp, Homo sapiens
  siRNA target sequence for DKFZP586B1621 (NM_015533.2,364-382).
ctccttatcgtgaagaact

SEQ ID NO: 208574 - DNA, 19 bp, Homo sapiens
  siRNA target sequence for DKFZP586B1621 (NM_015533.2,367-385).
cttatcgtgaagaactaca

SEQ ID NO: 208575 - DNA, 19 bp, Homo sapiens
  siRNA target sequence for DKFZP586B1621 (NM_015533.2,386-404).
ctggggatcggctcaactt

SEQ ID NO: 208576 - DNA, 19 bp, Homo sapiens
  siRNA target sequence for DKFZP586B1621 (NM_015533.2,513-531).
gtgcggcacggtgcttata

SEQ ID NO: 208577 - DNA, 19 bp, Homo sapiens
  siRNA target sequence for DKFZP586B1621 (NM_015533.2,515-533).
gcggcacggtgcttataca

SEQ ID NO: 208578 - DNA, 19 bp, Homo sapiens
  siRNA target sequence for DKFZP586B1621 (NM_015533.2,518-536).
gcacggtgcttatacacaa

SEQ ID NO: 208579 - DNA, 19 bp, Homo sapiens
  siRNA target sequence for DKFZP586B1621 (NM_015533.2,744-762).
ggcaaccgccgatgagatt

SEQ ID NO: 208580 - DNA, 19 bp, Homo sapiens
  siRNA target sequence for DKFZP586B1621 (NM_015533.2,746-764).
caaccgccgatgagattgt

SEQ ID NO: 208581 - DNA, 19 bp, Homo sapiens
  siRNA target sequence for DKFZP586B1621 (NM_015533.2,749-767).
ccgccgatgagattgtgaa

SEQ ID NO: 208582 - DNA, 19 bp, Homo sapiens
  siRNA target sequence for DKFZP586B1621 (NM_015533.2,827-845).
gctcctcagttgtgatgat

SEQ ID NO: 208583 - DNA, 19 bp, Homo sapiens
  siRNA target sequence for DKFZP586B1621 (NM_015533.2,1012-1030).
gagcctctcctgaaactga

SEQ ID NO: 208584 - DNA, 19 bp, Homo sapiens
  siRNA target sequence for DKFZP586B1621 (NM_015533.2,1068-1086).
ggctgcagtctccattact

SEQ ID NO: 208585 - DNA, 19 bp, Homo sapiens
  siRNA target sequence for DKFZP586B1621 (NM_015533.2,1339-1357).
cagctgctctccaagttgt

SEQ ID NO: 208586 - DNA, 19 bp, Homo sapiens
  siRNA target sequence for DKFZP586B1621 (NM_015533.2,1586-1604).
caggagctgatctgttaca

SEQ ID NO: 208587 - DNA, 19 bp, Homo sapiens
  siRNA target sequence for DKFZP586B1621 (NM_015533.2,1589-1607).
gagctgatctgttacaagt

SEQ ID NO: 208588 - DNA, 19 bp, Homo sapiens
  siRNA target sequence for DKFZP586B1621 (NM_015533.2,1672-1690).
gccggaagagccagttata

SEQ ID NO: 208589 - DNA, 19 bp, Homo sapiens
  siRNA target sequence for DKFZP586B1621 (NM_015533.2,1673-1691).
ccggaagagccagttatat

SEQ ID NO: 208590 - DNA, 19 bp, Homo sapiens
  siRNA target sequence for EKI1 (NM_018638.3,115-133).
gctccgacaacaggaattt

SEQ ID NO: 208591 - DNA, 19 bp, Homo sapiens
  siRNA target sequence for EKI1 (NM_018638.3,116-134).
ctccgacaacaggaatttt

SEQ ID NO: 208592 - DNA, 19 bp, Homo sapiens
  siRNA target sequence for EKI1 (NM_018638.3,118-136).
ccgacaacaggaattttct

SEQ ID NO: 208593 - DNA, 19 bp, Homo sapiens
  siRNA target sequence for EKI1 (NM_018638.3,597-615).
ggcaataagactgagttat

SEQ ID NO: 208594 - DNA, 19 bp, Homo sapiens
  siRNA target sequence for EKI1 (NM_018638.3,598-616).
gcaataagactgagttatt

SEQ ID NO: 208595 - DNA, 19 bp, Homo sapiens
  siRNA target sequence for EKI1 (NM_018638.3,599-617).
caataagactgagttatta

SEQ ID NO: 208596 - DNA, 19 bp, Homo sapiens
  siRNA target sequence for EKI1 (NM_018638.3,672-690).
gcaccacaactctactgta

SEQ ID NO: 208597 - DNA, 19 bp, Homo sapiens
  siRNA target sequence for EKI1 (NM_018638.3,695-713).
caataatggactatgctat

SEQ ID NO: 208598 - DNA, 19 bp, Homo sapiens
  siRNA target sequence for EKI1 (NM_018638.3,847-865).
ggctaaagatgggaaagta

SEQ ID NO: 208599 - DNA, 19 bp, Homo sapiens
  siRNA target sequence for EKI1 (NM_018638.3,848-866).
gctaaagatgggaaagtat

SEQ ID NO: 208600 - DNA, 19 bp, Homo sapiens
  siRNA target sequence for EKI1 (NM_018638.3,881-899).
cacaggatttgcagatgaa

SEQ ID NO: 208601 - DNA, 19 bp, Homo sapiens
  siRNA target sequence for EKI1 (NM_018638.3,1027-1045).
gtaagaatataatctacaa

SEQ ID NO: 208602 - DNA, 19 bp, Homo sapiens
  siRNA target sequence for EKI1 (NM_018638.3,1094-1112).
caactacctggcatatgat

SEQ ID NO: 208603 - DNA, 19 bp, Homo sapiens
  siRNA target sequence for EKI1 (NM_018638.3,1097-1115).
ctacctggcatatgatatt

SEQ ID NO: 208604 - DNA, 19 bp, Homo sapiens
  siRNA target sequence for EKI1 (NM_018638.3,1100-1118).
cctggcatatgatattgga

SEQ ID NO: 208605 - DNA, 19 bp, Homo sapiens
  siRNA target sequence for EKI1 (NM_018638.3,1101-1119).
ctggcatatgatattggaa

SEQ ID NO: 208606 - DNA, 19 bp, Homo sapiens
  siRNA target sequence for EKI1 (NM_018638.3,1103-1121).
ggcatatgatattggaaat

SEQ ID NO: 208607 - DNA, 19 bp, Homo sapiens
  siRNA target sequence for EKI1 (NM_018638.3,1141-1159).
gtgtgagtgatgtagacta

SEQ ID NO: 208608 - DNA, 19 bp, Homo sapiens
  siRNA target sequence for EKI1 (NM_018638.3,1145-1163).
gagtgatgtagactatagt

SEQ ID NO: 208609 - DNA, 19 bp, Homo sapiens
  siRNA target sequence for EKI1 (NM_018638.3,1147-1165).
gtgatgtagactatagtct

SEQ ID NO: 208610 - DNA, 19 bp, Homo sapiens
  siRNA target sequence for EKI1 (NM_018638.3,1166-1184).
gtatccagatagagaacta

SEQ ID NO: 208611 - DNA, 19 bp, Homo sapiens
  siRNA target sequence for EKI1 (NM_018638.3,1233-1251).
ggctttgggactgaagtta

SEQ ID NO: 208612 - DNA, 19 bp, Homo sapiens
  siRNA target sequence for EKI1 (NM_018638.3,1235-1253).
ctttgggactgaagttact

SEQ ID NO: 208613 - DNA, 19 bp, Homo sapiens
  siRNA target sequence for EKI1 (NM_018638.3,1277-1295).
cattcaagtcaatcagttt

SEQ ID NO: 208614 - DNA, 19 bp, Homo sapiens
  siRNA target sequence for EKI1 (NM_018638.3,1318-1336).
ggggattgtgggctttgat

SEQ ID NO: 208615 - DNA, 19 bp, Homo sapiens
  siRNA target sequence for EKI1 (NM_018638.3,1319-1337).
gggattgtgggctttgatt

SEQ ID NO: 208616 - DNA, 19 bp, Homo sapiens
  siRNA target sequence for EKI1 (NM_018638.3,1342-1360).
ccaaatactccactattga

SEQ ID NO: 208617 - DNA, 19 bp, Homo sapiens
  siRNA target sequence for EKI1 (NM_018638.3,1349-1367).
ctccactattgagtttgat

SEQ ID NO: 208618 - DNA, 19 bp, Homo sapiens
  siRNA target sequence for EKI1 (NM_018638.3,1351-1369).
ccactattgagtttgattt

SEQ ID NO: 208619 - DNA, 19 bp, Homo sapiens
  siRNA target sequence for EKI1 (NM_018638.3,1370-1388).
ccttgggtatgcaattgtt

SEQ ID NO: 208620 - DNA, 19 bp, Homo sapiens
  siRNA target sequence for EKI1 (NM_018638.3,1375-1393).
ggtatgcaattgttcgttt

SEQ ID NO: 208621 - DNA, 19 bp, Homo sapiens
  siRNA target sequence for FLJ11149 (NM_018339.3,329-347).
ccccgagcggactgcatta

SEQ ID NO: 208622 - DNA, 19 bp, Homo sapiens
  siRNA target sequence for FLJ11149 (NM_018339.3,330-348).
cccgagcggactgcattat

SEQ ID NO: 208623 - DNA, 19 bp, Homo sapiens
  siRNA target sequence for FLJ11149 (NM_018339.3,332-350).
cgagcggactgcattatga

SEQ ID NO: 208624 - DNA, 19 bp, Homo sapiens
  siRNA target sequence for FLJ11149 (NM_018339.3,415-433).
gggcatccccacagctaat

SEQ ID NO: 208625 - DNA, 19 bp, Homo sapiens
  siRNA target sequence for FLJ11149 (NM_018339.3,416-434).
ggcatccccacagctaatt

SEQ ID NO: 208626 - DNA, 19 bp, Homo sapiens
  siRNA target sequence for FLJ11149 (NM_018339.3,442-460).
gcaagtggtagataatctt

SEQ ID NO: 208627 - DNA, 19 bp, Homo sapiens
  siRNA target sequence for FLJ11149 (NM_018339.3,546-564).
ggaacccatattacaagaa

SEQ ID NO: 208628 - DNA, 19 bp, Homo sapiens
  siRNA target sequence for FLJ11149 (NM_018339.3,551-569).
ccatattacaagaatacga

SEQ ID NO: 208629 - DNA, 19 bp, Homo sapiens
  siRNA target sequence for FLJ11149 (NM_018339.3,600-618).
ccttcaaagaggacttcta

SEQ ID NO: 208630 - DNA, 19 bp, Homo sapiens
  siRNA target sequence for FLJ11149 (NM_018339.3,601-619).
cttcaaagaggacttctat

SEQ ID NO: 208631 - DNA, 19 bp, Homo sapiens
  siRNA target sequence for FLJ11149 (NM_018339.3,648-666).
gctacctgagaccagaaaa

SEQ ID NO: 208632 - DNA, 19 bp, Homo sapiens
  siRNA target sequence for FLJ11149 (NM_018339.3,687-705).
cacttatttcagcaattca

SEQ ID NO: 208633 - DNA, 19 bp, Homo sapiens
  siRNA target sequence for FLJ11149 (NM_018339.3,696-714).
cagcaattcaaggtgatat

SEQ ID NO: 208634 - DNA, 19 bp, Homo sapiens
  siRNA target sequence for FLJ11149 (NM_018339.3,723-741).
ctaagaaacgactagagtt

SEQ ID NO: 208635 - DNA, 19 bp, Homo sapiens
  siRNA target sequence for FLJ11149 (NM_018339.3,737-755).
gagttaccagaacatttga

SEQ ID NO: 208636 - DNA, 19 bp, Homo sapiens
  siRNA target sequence for PDXK (NM_003681.2,257-275).
cgttcccgctgcaggtttt

SEQ ID NO: 208637 - DNA, 19 bp, Homo sapiens
  siRNA target sequence for PDXK (NM_003681.2,342-360).
gggccaagtgctgaattca

SEQ ID NO: 208638 - DNA, 19 bp, Homo sapiens
  siRNA target sequence for PDXK (NM_003681.2,392-410).
ggctgaacaacatgaataa

SEQ ID NO: 208639 - DNA, 19 bp, Homo sapiens
  siRNA target sequence for PDXK (NM_003681.2,393-411).
gctgaacaacatgaataaa

SEQ ID NO: 208640 - DNA, 19 bp, Homo sapiens
  siRNA target sequence for PDXK (NM_003681.2,417-435).
ctacgtgctcacaggttat

SEQ ID NO: 208641 - DNA, 19 bp, Homo sapiens
  siRNA target sequence for PDXK (NM_003681.2,576-594).
cctccttcccgtctacaaa

SEQ ID NO: 208642 - DNA, 19 bp, Homo sapiens
  siRNA target sequence for PDXK (NM_003681.2,579-597).
ccttcccgtctacaaagaa

SEQ ID NO: 208643 - DNA, 19 bp, Homo sapiens
  siRNA target sequence for PDXK (NM_003681.2,580-598).
cttcccgtctacaaagaaa

SEQ ID NO: 208644 - DNA, 19 bp, Homo sapiens
  siRNA target sequence for PDXK (NM_003681.2,603-621).
ggtgccgcttgcagacatt

SEQ ID NO: 208645 - DNA, 19 bp, Homo sapiens
  siRNA target sequence for PDXK (NM_003681.2,604-622).
gtgccgcttgcagacatta

SEQ ID NO: 208646 - DNA, 19 bp, Homo sapiens
  siRNA target sequence for PDXK (NM_003681.2,1057-1075).
cggatggtgcagagcaaaa

SEQ ID NO: 208647 - DNA, 19 bp, Homo sapiens
  siRNA target sequence for PRIM1 (NM_000946.1,53-71).
cccgagctgcttaaacttt

SEQ ID NO: 208648 - DNA, 19 bp, Homo sapiens
  siRNA target sequence for PRIM1 (NM_000946.1,54-72).
ccgagctgcttaaacttta

SEQ ID NO: 208649 - DNA, 19 bp, Homo sapiens
  siRNA target sequence for PRIM1 (NM_000946.1,55-73).
cgagctgcttaaactttat

SEQ ID NO: 208650 - DNA, 19 bp, Homo sapiens
  siRNA target sequence for PRIM1 (NM_000946.1,56-74).
gagctgcttaaactttatt

SEQ ID NO: 208651 - DNA, 19 bp, Homo sapiens
  siRNA target sequence for PRIM1 (NM_000946.1,115-133).
caactacggtggagtgata

SEQ ID NO: 208652 - DNA, 19 bp, Homo sapiens
  siRNA target sequence for PRIM1 (NM_000946.1,121-139).
cggtggagtgataaagaat

SEQ ID NO: 208653 - DNA, 19 bp, Homo sapiens
  siRNA target sequence for PRIM1 (NM_000946.1,151-169).
ccgtgaattttcattcaca

SEQ ID NO: 208654 - DNA, 19 bp, Homo sapiens
  siRNA target sequence for PRIM1 (NM_000946.1,191-209).
cgctaccaatccttcaaca

SEQ ID NO: 208655 - DNA, 19 bp, Homo sapiens
  siRNA target sequence for PRIM1 (NM_000946.1,192-210).
gctaccaatccttcaacaa

SEQ ID NO: 208656 - DNA, 19 bp, Homo sapiens
  siRNA target sequence for PRIM1 (NM_000946.1,260-278).
gatataggcgcagtatatt

SEQ ID NO: 208657 - DNA, 19 bp, Homo sapiens
  siRNA target sequence for PRIM1 (NM_000946.1,283-301).
cagacccaatcaacacaat

SEQ ID NO: 208658 - DNA, 19 bp, Homo sapiens
  siRNA target sequence for PRIM1 (NM_000946.1,371-389).
gacgatgtgaggagatgtt

SEQ ID NO: 208659 - DNA, 19 bp, Homo sapiens
  siRNA target sequence for PRIM1 (NM_000946.1,374-392).
gatgtgaggagatgttgta

SEQ ID NO: 208660 - DNA, 19 bp, Homo sapiens
  siRNA target sequence for PRIM1 (NM_000946.1,437-455).
gccatacgcatcattgaca

SEQ ID NO: 208661 - DNA, 19 bp, Homo sapiens
  siRNA target sequence for PRIM1 (NM_000946.1,484-502).
gcatcgtctctgggtatat

SEQ ID NO: 208662 - DNA, 19 bp, Homo sapiens
  siRNA target sequence for PRIM1 (NM_000946.1,485-503).
catcgtctctgggtatatt

SEQ ID NO: 208663 - DNA, 19 bp, Homo sapiens
  siRNA target sequence for PRIM1 (NM_000946.1,528-546).
gggtctgtgatgaatcagt

SEQ ID NO: 208664 - DNA, 19 bp, Homo sapiens
  siRNA target sequence for PRIM1 (NM_000946.1,530-548).
gtctgtgatgaatcagtta

SEQ ID NO: 208665 - DNA, 19 bp, Homo sapiens
  siRNA target sequence for PRIM1 (NM_000946.1,539-557).
gaatcagttagaaaactgt

SEQ ID NO: 208666 - DNA, 19 bp, Homo sapiens
  siRNA target sequence for PRIM1 (NM_000946.1,570-588).
gttctgggatagttgagta

SEQ ID NO: 208667 - DNA, 19 bp, Homo sapiens
  siRNA target sequence for PRIM1 (NM_000946.1,573-591).
ctgggatagttgagtattt

SEQ ID NO: 208668 - DNA, 19 bp, Homo sapiens
  siRNA target sequence for PRIM1 (NM_000946.1,575-593).
gggatagttgagtatttga

SEQ ID NO: 208669 - DNA, 19 bp, Homo sapiens
  siRNA target sequence for PRIM1 (NM_000946.1,604-622).
gggtggtcaagacgttaaa

SEQ ID NO: 208670 - DNA, 19 bp, Homo sapiens
  siRNA target sequence for PRIM1 (NM_000946.1,608-626).
ggtcaagacgttaaaaaga

SEQ ID NO: 208671 - DNA, 19 bp, Homo sapiens
  siRNA target sequence for PRIM1 (NM_000946.1,609-627).
gtcaagacgttaaaaagaa

SEQ ID NO: 208672 - DNA, 19 bp, Homo sapiens
  siRNA target sequence for PRIM1 (NM_000946.1,650-668).
cacccttttatcagaaaat

SEQ ID NO: 208673 - DNA, 19 bp, Homo sapiens
  siRNA target sequence for PRIM1 (NM_000946.1,652-670).
cccttttatcagaaaatct

SEQ ID NO: 208674 - DNA, 19 bp, Homo sapiens
  siRNA target sequence for PRIM1 (NM_000946.1,827-845).
cgttgggagcacttgaaga

SEQ ID NO: 208675 - DNA, 19 bp, Homo sapiens
  siRNA target sequence for PRIM1 (NM_000946.1,831-849).
gggagcacttgaagaaagt

SEQ ID NO: 208676 - DNA, 19 bp, Homo sapiens
  siRNA target sequence for PRIM1 (NM_000946.1,844-862).
gaaagtagccagcagatat

SEQ ID NO: 208677 - DNA, 19 bp, Homo sapiens
  siRNA target sequence for PRIM1 (NM_000946.1,848-866).
gtagccagcagatatcaga

SEQ ID NO: 208678 - DNA, 19 bp, Homo sapiens
  siRNA target sequence for PRIM1 (NM_000946.1,852-870).
ccagcagatatcagaataa

SEQ ID NO: 208679 - DNA, 19 bp, Homo sapiens
  siRNA target sequence for PRIM1 (NM_000946.1,858-876).
gatatcagaataacatcaa

SEQ ID NO: 208680 - DNA, 19 bp, Homo sapiens
  siRNA target sequence for PRIM1 (NM_000946.1,933-951).
cacggctggatatcaatgt

SEQ ID NO: 208681 - DNA, 19 bp, Homo sapiens
  siRNA target sequence for PRIM1 (NM_000946.1,935-953).
cggctggatatcaatgtca

SEQ ID NO: 208682 - DNA, 19 bp, Homo sapiens
  siRNA target sequence for PRIM1 (NM_000946.1,955-973).
caaaggaatcaatcatcta

SEQ ID NO: 208683 - DNA, 19 bp, Homo sapiens
  siRNA target sequence for PRIM1 (NM_000946.1,984-1002).
cttttagtgttcatcctaa

SEQ ID NO: 208684 - DNA, 19 bp, Homo sapiens
  siRNA target sequence for PRIM1 (NM_000946.1,1042-1060).
ggaccagtttgatccattt

SEQ ID NO: 208685 - DNA, 19 bp, Homo sapiens
  siRNA target sequence for PRIM1 (NM_000946.1,1048-1066).
gtttgatccatttactgtt

SEQ ID NO: 208686 - DNA, 19 bp, Homo sapiens
  siRNA target sequence for PRIM1 (NM_000946.1,1062-1080).
ctgttccgaccataagctt

SEQ ID NO: 208687 - DNA, 19 bp, Homo sapiens
  siRNA target sequence for PRIM1 (NM_000946.1,1067-1085).
ccgaccataagcttcatct

SEQ ID NO: 208688 - DNA, 19 bp, Homo sapiens
  siRNA target sequence for PRIM1 (NM_000946.1,1077-1095).
gcttcatctgccgtgaatt

SEQ ID NO: 208689 - DNA, 19 bp, Homo sapiens
  siRNA target sequence for PRIM1 (NM_000946.1,1180-1198).
gaccagtctagcaccttat

SEQ ID NO: 208690 - DNA, 19 bp, Homo sapiens
  siRNA target sequence for PRIM1 (NM_000946.1,1182-1200).
ccagtctagcaccttatgt

SEQ ID NO: 208691 - DNA, 19 bp, Homo sapiens
  siRNA target sequence for PRIM1 (NM_000946.1,1190-1208).
gcaccttatgtgaaagttt

SEQ ID NO: 208692 - DNA, 19 bp, Homo sapiens
  siRNA target sequence for PRIM1 (NM_000946.1,1191-1209).
caccttatgtgaaagtttt

SEQ ID NO: 208693 - DNA, 19 bp, Homo sapiens
  siRNA target sequence for PRIM1 (NM_000946.1,1241-1259).
cgaaaaggagaacttctta

SEQ ID NO: 208694 - DNA, 19 bp, Homo sapiens
  siRNA target sequence for PRIM1 (NM_000946.1,1247-1265).
ggagaacttcttaagaaga

SEQ ID NO: 208695 - DNA, 19 bp, Homo sapiens
  siRNA target sequence for POLR2D (NM_004805.2,78-96).
cgcctcacagctcatcttt

SEQ ID NO: 208696 - DNA, 19 bp, Homo sapiens
  siRNA target sequence for POLR2D (NM_004805.2,127-145).
ctaaattcagaagttcata

SEQ ID NO: 208697 - DNA, 19 bp, Homo sapiens
  siRNA target sequence for POLR2D (NM_004805.2,243-261).
cagtcgtttcaaaaacaga

SEQ ID NO: 208698 - DNA, 19 bp, Homo sapiens
  siRNA target sequence for POLR2D (NM_004805.2,295-313).
cagaaaaagcttcataagt

SEQ ID NO: 208699 - DNA, 19 bp, Homo sapiens
  siRNA target sequence for POLR2D (NM_004805.2,412-430).
cagcagattcttgatgata

SEQ ID NO: 208700 - DNA, 19 bp, Homo sapiens
  siRNA target sequence for POLR2L (NM_021128.2,31-49).
cctgtacgctgcttcactt

SEQ ID NO: 208701 - DNA, 19 bp, Homo sapiens
  siRNA target sequence for POLR2L (NM_021128.2,189-207).
cgagaagctgctcaattat

SEQ ID NO: 208702 - DNA, 19 bp, Homo sapiens
  siRNA target sequence for POLR2L (NM_021128.2,192-210).
gaagctgctcaattatgca

SEQ ID NO: 208703 - DNA, 19 bp, Homo sapiens
  siRNA target sequence for POLR3D (NM_001722.1,549-567).
gaggaacgacactcgaaat

SEQ ID NO: 208704 - DNA, 19 bp, Homo sapiens
  siRNA target sequence for POLR3D (NM_001722.1,551-569).
ggaacgacactcgaaatat

SEQ ID NO: 208705 - DNA, 19 bp, Homo sapiens
  siRNA target sequence for POLR3D (NM_001722.1,624-642).
cgaaccagatgttaaacct

SEQ ID NO: 208706 - DNA, 19 bp, Homo sapiens
  siRNA target sequence for POLR3D (NM_001722.1,772-790).
ggcctcccgaaggatgtat

SEQ ID NO: 208707 - DNA, 19 bp, Homo sapiens
  siRNA target sequence for POLR3D (NM_001722.1,774-792).
cctcccgaaggatgtatct

SEQ ID NO: 208708 - DNA, 19 bp, Homo sapiens
  siRNA target sequence for POLR3D (NM_001722.1,889-907).
gacatcaagcctatcaaga

SEQ ID NO: 208709 - DNA, 19 bp, Homo sapiens
  siRNA target sequence for POLR3D (NM_001722.1,929-947).
gacaggtggtgctcatcaa

SEQ ID NO: 208710 - DNA, 19 bp, Homo sapiens
  siRNA target sequence for POLR3D (NM_001722.1,1176-1194).
cgtgaagcacaaacttgta

SEQ ID NO: 208711 - DNA, 19 bp, Homo sapiens
  siRNA target sequence for POLR3D (NM_001722.1,1177-1195).
gtgaagcacaaacttgtat

SEQ ID NO: 208712 - DNA, 19 bp, Homo sapiens
  siRNA target sequence for POLR3F (NM_006466.2,154-172).
cgcggatccggtcgaaata

SEQ ID NO: 208713 - DNA, 19 bp, Homo sapiens
  siRNA target sequence for POLR3F (NM_006466.2,156-174).
cggatccggtcgaaataga

SEQ ID NO: 208714 - DNA, 19 bp, Homo sapiens
  siRNA target sequence for POLR3F (NM_006466.2,157-175).
ggatccggtcgaaatagaa

SEQ ID NO: 208715 - DNA, 19 bp, Homo sapiens
  siRNA target sequence for POLR3F (NM_006466.2,158-176).
gatccggtcgaaatagaaa

SEQ ID NO: 208716 - DNA, 19 bp, Homo sapiens
  siRNA target sequence for POLR3F (NM_006466.2,161-179).
ccggtcgaaatagaaaaca

SEQ ID NO: 208717 - DNA, 19 bp, Homo sapiens
  siRNA target sequence for POLR3F (NM_006466.2,265-283).
gcgggcagtagccatcaat

SEQ ID NO: 208718 - DNA, 19 bp, Homo sapiens
  siRNA target sequence for POLR3F (NM_006466.2,266-284).
cgggcagtagccatcaata

SEQ ID NO: 208719 - DNA, 19 bp, Homo sapiens
  siRNA target sequence for POLR3F (NM_006466.2,269-287).
gcagtagccatcaataggt

SEQ ID NO: 208720 - DNA, 19 bp, Homo sapiens
  siRNA target sequence for POLR3F (NM_006466.2,270-288).
cagtagccatcaataggtt

SEQ ID NO: 208721 - DNA, 19 bp, Homo sapiens
  siRNA target sequence for POLR3F (NM_006466.2,275-293).
gccatcaataggttgttgt

SEQ ID NO: 208722 - DNA, 19 bp, Homo sapiens
  siRNA target sequence for POLR3F (NM_006466.2,298-316).
gggtcagttggatctctta

SEQ ID NO: 208723 - DNA, 19 bp, Homo sapiens
  siRNA target sequence for POLR3F (NM_006466.2,299-317).
ggtcagttggatctcttaa

SEQ ID NO: 208724 - DNA, 19 bp, Homo sapiens
  siRNA target sequence for POLR3F (NM_006466.2,321-339).
gcaatacgggccttttata

SEQ ID NO: 208725 - DNA, 19 bp, Homo sapiens
  siRNA target sequence for POLR3F (NM_006466.2,322-340).
caatacgggccttttatat

SEQ ID NO: 208726 - DNA, 19 bp, Homo sapiens
  siRNA target sequence for POLR3F (NM_006466.2,327-345).
cgggccttttatatagaat

SEQ ID NO: 208727 - DNA, 19 bp, Homo sapiens
  siRNA target sequence for POLR3F (NM_006466.2,328-346).
gggccttttatatagaata

SEQ ID NO: 208728 - DNA, 19 bp, Homo sapiens
  siRNA target sequence for POLR3F (NM_006466.2,329-347).
ggccttttatatagaataa

SEQ ID NO: 208729 - DNA, 19 bp, Homo sapiens
  siRNA target sequence for POLR3F (NM_006466.2,373-391).
gaagggatccgataaccaa

SEQ ID NO: 208730 - DNA, 19 bp, Homo sapiens
  siRNA target sequence for POLR3F (NM_006466.2,377-395).
ggatccgataaccaagaaa

SEQ ID NO: 208731 - DNA, 19 bp, Homo sapiens
  siRNA target sequence for POLR3F (NM_006466.2,378-396).
gatccgataaccaagaaaa

SEQ ID NO: 208732 - DNA, 19 bp, Homo sapiens
  siRNA target sequence for POLR3F (NM_006466.2,388-406).
ccaagaaaaactagtatat

SEQ ID NO: 208733 - DNA, 19 bp, Homo sapiens
  siRNA target sequence for POLR3F (NM_006466.2,444-462).
gcagagatatccgctataa

SEQ ID NO: 208734 - DNA, 19 bp, Homo sapiens
  siRNA target sequence for POLR3F (NM_006466.2,449-467).
gatatccgctataaaagta

SEQ ID NO: 208735 - DNA, 19 bp, Homo sapiens
  siRNA target sequence for POLR3F (NM_006466.2,473-491).
ccattaacagaaatcaaca

SEQ ID NO: 208736 - DNA, 19 bp, Homo sapiens
  siRNA target sequence for POLR3F (NM_006466.2,506-524).
ctggaaagtaaaaagctta

SEQ ID NO: 208737 - DNA, 19 bp, Homo sapiens
  siRNA target sequence for POLR3F (NM_006466.2,538-556).
gtctgtagcagcctcaaaa

SEQ ID NO: 208738 - DNA, 19 bp, Homo sapiens
  siRNA target sequence for POLR3F (NM_006466.2,655-673).
gcttaaccaacagtgtttt

SEQ ID NO: 208739 - DNA, 19 bp, Homo sapiens
  siRNA target sequence for POLR3F (NM_006466.2,756-774).
cacatgaagtgtggaaata

SEQ ID NO: 208740 - DNA, 19 bp, Homo sapiens
  siRNA target sequence for POLR3F (NM_006466.2,780-798).
gcgaattgggaatcagtaa

SEQ ID NO: 208741 - DNA, 19 bp, Homo sapiens
  siRNA target sequence for POLR3F (NM_006466.2,789-807).
gaatcagtaaggtagagtt

SEQ ID NO: 208742 - DNA, 19 bp, Homo sapiens
  siRNA target sequence for POLR3F (NM_006466.2,862-880).
ggagatgacgattattgct

SEQ ID NO: 208743 - DNA, 19 bp, Homo sapiens
  siRNA target sequence for POLR3F (NM_006466.2,1007-1025).
cacgaaggtggtgagattt

SEQ ID NO: 208744 - DNA, 19 bp, Homo sapiens
  siRNA target sequence for POLR3F (NM_006466.2,1021-1039).
gatttcaccatctaactgt

SEQ ID NO: 208745 - DNA, 19 bp, Homo sapiens
  siRNA target sequence for RPC5 (NM_018119.2,220-238).
gcggaaaagctgtatctat

SEQ ID NO: 208746 - DNA, 19 bp, Homo sapiens
  siRNA target sequence for RPC5 (NM_018119.2,221-239).
cggaaaagctgtatctatt

SEQ ID NO: 208747 - DNA, 19 bp, Homo sapiens
  siRNA target sequence for RPC5 (NM_018119.2,263-281).
cgatgacctacgatgacat

SEQ ID NO: 208748 - DNA, 19 bp, Homo sapiens
  siRNA target sequence for RPC5 (NM_018119.2,415-433).
gacgagaccagcacgtatt

SEQ ID NO: 208749 - DNA, 19 bp, Homo sapiens
  siRNA target sequence for RPC5 (NM_018119.2,649-667).
gaggcggaagacgatgtta

SEQ ID NO: 208750 - DNA, 19 bp, Homo sapiens
  siRNA target sequence for RPC5 (NM_018119.2,653-671).
cggaagacgatgttaagca

SEQ ID NO: 208751 - DNA, 19 bp, Homo sapiens
  siRNA target sequence for RPC5 (NM_018119.2,721-739).
cgtgtgcagtcctatgagt

SEQ ID NO: 208752 - DNA, 19 bp, Homo sapiens
  siRNA target sequence for RPC5 (NM_018119.2,722-740).
gtgtgcagtcctatgagtt

SEQ ID NO: 208753 - DNA, 19 bp, Homo sapiens
  siRNA target sequence for RPC5 (NM_018119.2,767-785).
cctgggtccacctgcatta

SEQ ID NO: 208754 - DNA, 19 bp, Homo sapiens
  siRNA target sequence for RPC5 (NM_018119.2,770-788).
gggtccacctgcattacta

SEQ ID NO: 208755 - DNA, 19 bp, Homo sapiens
  siRNA target sequence for RPC5 (NM_018119.2,771-789).
ggtccacctgcattactat

SEQ ID NO: 208756 - DNA, 19 bp, Homo sapiens
  siRNA target sequence for RPC5 (NM_018119.2,881-899).
ccagtgagtacctgatgat

SEQ ID NO: 208757 - DNA, 19 bp, Homo sapiens
  siRNA target sequence for RPC5 (NM_018119.2,988-1006).
ctggccgatcagatcaaga

SEQ ID NO: 208758 - DNA, 19 bp, Homo sapiens
  siRNA target sequence for RPC5 (NM_018119.2,1033-1051).
ccttttgccaacttgatga

SEQ ID NO: 208759 - DNA, 19 bp, Homo sapiens
  siRNA target sequence for RPC5 (NM_018119.2,1245-1263).
ccgctgggtggttaggaaa

SEQ ID NO: 208760 - DNA, 19 bp, Homo sapiens
  siRNA target sequence for RPC5 (NM_018119.2,1270-1288).
gcaaccgtgaccaaactct

SEQ ID NO: 208761 - DNA, 19 bp, Homo sapiens
  siRNA target sequence for RPC5 (NM_018119.2,1326-1344).
cgtggtgaggatcaacaaa

SEQ ID NO: 208762 - DNA, 19 bp, Homo sapiens
  siRNA target sequence for RPC5 (NM_018119.2,1862-1880).
cctttcagagacagtttgt

SEQ ID NO: 208763 - DNA, 19 bp, Homo sapiens
  siRNA target sequence for RPC5 (NM_018119.2,2100-2118).
gcatcgacaggttttgctt

SEQ ID NO: 208764 - DNA, 19 bp, Homo sapiens
  siRNA target sequence for RPC5 (NM_018119.2,2140-2158).
cgggtacgccgaaacatga

SEQ ID NO: 208765 - DNA, 19 bp, Homo sapiens
  siRNA target sequence for RPC5 (NM_018119.2,2141-2159).
gggtacgccgaaacatgat

SEQ ID NO: 208766 - DNA, 19 bp, Homo sapiens
  siRNA target sequence for RPC5 (NM_018119.2,2183-2201).
gtggagaagatctcagtaa

SEQ ID NO: 208767 - DNA, 19 bp, Homo sapiens
  siRNA target sequence for RPC5 (NM_018119.2,2205-2223).
ggaggtggataaagtacta

SEQ ID NO: 208768 - DNA, 19 bp, Homo sapiens
  siRNA target sequence for RPC5 (NM_018119.2,2206-2224).
gaggtggataaagtactaa

SEQ ID NO: 208769 - DNA, 19 bp, Homo sapiens
  siRNA target sequence for RPC5 (NM_018119.2,2221-2239).
ctaaaggactgctgtgtaa

SEQ ID NO: 208770 - DNA, 19 bp, Homo sapiens
  siRNA target sequence for RPC5 (NM_018119.2,2226-2244).
ggactgctgtgtaagctat

SEQ ID NO: 208771 - DNA, 19 bp, Homo sapiens
  siRNA target sequence for RPC5 (NM_018119.2,2245-2263).
ggtggcatgtggtacctta

SEQ ID NO: 208772 - DNA, 19 bp, Homo sapiens
  siRNA target sequence for USP49 (NM_004275.2,197-215).
gactgtgagacttaccata

SEQ ID NO: 208773 - DNA, 19 bp, Homo sapiens
  siRNA target sequence for USP49 (NM_004275.2,247-265).
gaccgggaagctgatgtat

SEQ ID NO: 208774 - DNA, 19 bp, Homo sapiens
  siRNA target sequence for USP49 (NM_004275.2,249-267).
ccgggaagctgatgtatgt

SEQ ID NO: 208775 - DNA, 19 bp, Homo sapiens
  siRNA target sequence for USP49 (NM_004275.2,547-565).
cgagttcctacagagtttt

SEQ ID NO: 208776 - DNA, 19 bp, Homo sapiens
  siRNA target sequence for USP49 (NM_004275.2,692-710).
ccggtggctgggattcgtt

SEQ ID NO: 208777 - DNA, 19 bp, Homo sapiens
  siRNA target sequence for POLD2 (NM_006230.1,199-217).
ctaggagagcgcagcttta

SEQ ID NO: 208778 - DNA, 19 bp, Homo sapiens
  siRNA target sequence for POLD2 (NM_006230.1,221-239).
ggcagtatgcccacattta

SEQ ID NO: 208779 - DNA, 19 bp, Homo sapiens
  siRNA target sequence for POLD2 (NM_006230.1,222-240).
gcagtatgcccacatttat

SEQ ID NO: 208780 - DNA, 19 bp, Homo sapiens
  siRNA target sequence for POLD2 (NM_006230.1,242-260).
ccacccgcctcatccaaat

SEQ ID NO: 208781 - DNA, 19 bp, Homo sapiens
  siRNA target sequence for POLD2 (NM_006230.1,246-264).
ccgcctcatccaaatgaga

SEQ ID NO: 208782 - DNA, 19 bp, Homo sapiens
  siRNA target sequence for POLD2 (NM_006230.1,439-457).
cctcctcggagtaaataca

SEQ ID NO: 208783 - DNA, 19 bp, Homo sapiens
  siRNA target sequence for POLD2 (NM_006230.1,440-458).
ctcctcggagtaaatacat

SEQ ID NO: 208784 - DNA, 19 bp, Homo sapiens
  siRNA target sequence for POLD2 (NM_006230.1,493-511).
ctgcagcgtatcaaactaa

SEQ ID NO: 208785 - DNA, 19 bp, Homo sapiens
  siRNA target sequence for POLD2 (NM_006230.1,495-513).
gcagcgtatcaaactaaaa

SEQ ID NO: 208786 - DNA, 19 bp, Homo sapiens
  siRNA target sequence for POLD2 (NM_006230.1,515-533).
gcaccattgacgtgtcaaa

SEQ ID NO: 208787 - DNA, 19 bp, Homo sapiens
  siRNA target sequence for POLD2 (NM_006230.1,573-591).
gagagacgacgggaagttt

SEQ ID NO: 208788 - DNA, 19 bp, Homo sapiens
  siRNA target sequence for POLD2 (NM_006230.1,575-593).
gagacgacgggaagtttct

SEQ ID NO: 208789 - DNA, 19 bp, Homo sapiens
  siRNA target sequence for POLD2 (NM_006230.1,592-610).
ctggtggaggactattgct

SEQ ID NO: 208790 - DNA, 19 bp, Homo sapiens
  siRNA target sequence for POLD2 (NM_006230.1,839-857).
gcagggattctatcaataa

SEQ ID NO: 208791 - DNA, 19 bp, Homo sapiens
  siRNA target sequence for POLD2 (NM_006230.1,890-908).
ccagcgtggaggctgttaa

SEQ ID NO: 208792 - DNA, 19 bp, Homo sapiens
  siRNA target sequence for POLD2 (NM_006230.1,960-978).
gatgccaggcgagtttgat

SEQ ID NO: 208793 - DNA, 19 bp, Homo sapiens
  siRNA target sequence for POLD2 (NM_006230.1,970-988).
gagtttgatcccaccaatt

SEQ ID NO: 208794 - DNA, 19 bp, Homo sapiens
  siRNA target sequence for POLD2 (NM_006230.1,1071-1089).
ctaccaggccaccattgat

SEQ ID NO: 208795 - DNA, 19 bp, Homo sapiens
  siRNA target sequence for POLD2 (NM_006230.1,1082-1100).
ccattgatggagtcagatt

SEQ ID NO: 208796 - DNA, 19 bp, Homo sapiens
  siRNA target sequence for POLD2 (NM_006230.1,1117-1135).
cagaacgtgagtgacattt

SEQ ID NO: 208797 - DNA, 19 bp, Homo sapiens
  siRNA target sequence for POLD2 (NM_006230.1,1145-1163).
gcagcatggaggatcactt

SEQ ID NO: 208798 - DNA, 19 bp, Homo sapiens
  siRNA target sequence for POLD2 (NM_006230.1,1265-1283).
cagagtgcccgcatgtcta

SEQ ID NO: 208799 - DNA, 19 bp, Homo sapiens
  siRNA target sequence for POLD2 (NM_006230.1,1269-1287).
gtgcccgcatgtctacttt

SEQ ID NO: 208800 - DNA, 19 bp, Homo sapiens
  siRNA target sequence for POLD2 (NM_006230.1,1304-1322).
gctttggctccaaaatcat

SEQ ID NO: 208801 - DNA, 19 bp, Homo sapiens
  siRNA target sequence for POLD4 (NM_021173.1,88-106).
ggctcatcactgattccta

SEQ ID NO: 208802 - DNA, 19 bp, Homo sapiens
  siRNA target sequence for POLI (NM_007195.1,94-112).
cagctcgcagggagttcat

SEQ ID NO: 208803 - DNA, 19 bp, Homo sapiens
  siRNA target sequence for POLI (NM_007195.1,97-115).
ctcgcagggagttcatgat

SEQ ID NO: 208804 - DNA, 19 bp, Homo sapiens
  siRNA target sequence for POLI (NM_007195.1,100-118).
gcagggagttcatgatcaa

SEQ ID NO: 208805 - DNA, 19 bp, Homo sapiens
  siRNA target sequence for POLI (NM_007195.1,105-123).
gagttcatgatcaagtgtt

SEQ ID NO: 208806 - DNA, 19 bp, Homo sapiens
  siRNA target sequence for POLI (NM_007195.1,121-139).
gttgcccacaccaaatgct

SEQ ID NO: 208807 - DNA, 19 bp, Homo sapiens
  siRNA target sequence for POLI (NM_007195.1,141-159).
catccagagtcatagtaca

SEQ ID NO: 208808 - DNA, 19 bp, Homo sapiens
  siRNA target sequence for POLI (NM_007195.1,144-162).
ccagagtcatagtacatgt

SEQ ID NO: 208809 - DNA, 19 bp, Homo sapiens
  siRNA target sequence for POLI (NM_007195.1,174-192).
gcttttatgcacaagtaga

SEQ ID NO: 208810 - DNA, 19 bp, Homo sapiens
  siRNA target sequence for POLI (NM_007195.1,199-217).
ctcaaatccagagctaaaa

SEQ ID NO: 208811 - DNA, 19 bp, Homo sapiens
  siRNA target sequence for POLI (NM_007195.1,209-227).
gagctaaaagacaaacctt

SEQ ID NO: 208812 - DNA, 19 bp, Homo sapiens
  siRNA target sequence for POLI (NM_007195.1,225-243).
ctttaggggttcaacagaa

SEQ ID NO: 208813 - DNA, 19 bp, Homo sapiens
  siRNA target sequence for POLI (NM_007195.1,265-283).
ctatgaagctaggaaactt

SEQ ID NO: 208814 - DNA, 19 bp, Homo sapiens
  siRNA target sequence for POLI (NM_007195.1,327-345).
gtccacagttggtattagt

SEQ ID NO: 208815 - DNA, 19 bp, Homo sapiens
  siRNA target sequence for POLI (NM_007195.1,364-382).
ccgctacagagaaatgtct

SEQ ID NO: 208816 - DNA, 19 bp, Homo sapiens
  siRNA target sequence for POLI (NM_007195.1,517-535).
gactgtgtcgggtcatgta

SEQ ID NO: 208817 - DNA, 19 bp, Homo sapiens
  siRNA target sequence for POLI (NM_007195.1,521-539).
gtgtcgggtcatgtataca

SEQ ID NO: 208818 - DNA, 19 bp, Homo sapiens
  siRNA target sequence for POLI (NM_007195.1,523-541).
gtcgggtcatgtatacaat

SEQ ID NO: 208819 - DNA, 19 bp, Homo sapiens
  siRNA target sequence for POLI (NM_007195.1,525-543).
cgggtcatgtatacaataa

SEQ ID NO: 208820 - DNA, 19 bp, Homo sapiens
  siRNA target sequence for POLI (NM_007195.1,526-544).
gggtcatgtatacaataat

SEQ ID NO: 208821 - DNA, 19 bp, Homo sapiens
  siRNA target sequence for POLI (NM_007195.1,528-546).
gtcatgtatacaataatca

SEQ ID NO: 208822 - DNA, 19 bp, Homo sapiens
  siRNA target sequence for POLI (NM_007195.1,571-589).
gcacatcagactacttgtt

SEQ ID NO: 208823 - DNA, 19 bp, Homo sapiens
  siRNA target sequence for POLI (NM_007195.1,610-628).
gatgcgggaagccatgtat

SEQ ID NO: 208824 - DNA, 19 bp, Homo sapiens
  siRNA target sequence for POLI (NM_007195.1,613-631).
gcgggaagccatgtataat

SEQ ID NO: 208825 - DNA, 19 bp, Homo sapiens
  siRNA target sequence for POLI (NM_007195.1,615-633).
gggaagccatgtataatca

SEQ ID NO: 208826 - DNA, 19 bp, Homo sapiens
  siRNA target sequence for POLI (NM_007195.1,617-635).
gaagccatgtataatcagt

SEQ ID NO: 208827 - DNA, 19 bp, Homo sapiens
  siRNA target sequence for POLI (NM_007195.1,696-714).
gtgtctttaaaccaaatca

SEQ ID NO: 208828 - DNA, 19 bp, Homo sapiens
  siRNA target sequence for POLI (NM_007195.1,724-742).
cttattacctgaaagttgt

SEQ ID NO: 208829 - DNA, 19 bp, Homo sapiens
  siRNA target sequence for POLI (NM_007195.1,732-750).
ctgaaagttgtcaacatct

SEQ ID NO: 208830 - DNA, 19 bp, Homo sapiens
  siRNA target sequence for POLI (NM_007195.1,734-752).
gaaagttgtcaacatctta

SEQ ID NO: 208831 - DNA, 19 bp, Homo sapiens
  siRNA target sequence for POLI (NM_007195.1,738-756).
gttgtcaacatcttattca

SEQ ID NO: 208832 - DNA, 19 bp, Homo sapiens
  siRNA target sequence for POLI (NM_007195.1,743-761).
caacatcttattcatagtt

SEQ ID NO: 208833 - DNA, 19 bp, Homo sapiens
  siRNA target sequence for POLI (NM_007195.1,746-764).
catcttattcatagtttga

SEQ ID NO: 208834 - DNA, 19 bp, Homo sapiens
  siRNA target sequence for POLI (NM_007195.1,755-773).
catagtttgaatcacataa

SEQ ID NO: 208835 - DNA, 19 bp, Homo sapiens
  siRNA target sequence for POLI (NM_007195.1,782-800).
cctggtattggctataaaa

SEQ ID NO: 208836 - DNA, 19 bp, Homo sapiens
  siRNA target sequence for POLI (NM_007195.1,819-837).
cactgggtatcaatagtgt

SEQ ID NO: 208837 - DNA, 19 bp, Homo sapiens
  siRNA target sequence for POLI (NM_007195.1,893-911).
gttgctcagcgtatccaaa

SEQ ID NO: 208838 - DNA, 19 bp, Homo sapiens
  siRNA target sequence for POLI (NM_007195.1,928-946).
ggataactcccctgtgata

SEQ ID NO: 208839 - DNA, 19 bp, Homo sapiens
  siRNA target sequence for POLI (NM_007195.1,953-971).
ggaccacctcagtccttta

SEQ ID NO: 208840 - DNA, 19 bp, Homo sapiens
  siRNA target sequence for POLI (NM_007195.1,1031-1049).
gaactacttgctagtcttt

SEQ ID NO: 208841 - DNA, 19 bp, Homo sapiens
  siRNA target sequence for POLI (NM_007195.1,1034-1052).
ctacttgctagtcttttaa

SEQ ID NO: 208842 - DNA, 19 bp, Homo sapiens
  siRNA target sequence for POLI (NM_007195.1,1071-1089).
gaaggaagcctcatacagt

SEQ ID NO: 208843 - DNA, 19 bp, Homo sapiens
  siRNA target sequence for POLI (NM_007195.1,1142-1160).
cgtcagtgccctattcctt

SEQ ID NO: 208844 - DNA, 19 bp, Homo sapiens
  siRNA target sequence for POLI (NM_007195.1,1147-1165).
gtgccctattccttcacat

SEQ ID NO: 208845 - DNA, 19 bp, Homo sapiens
  siRNA target sequence for POLI (NM_007195.1,1204-1222).
gaccccaatggttgatata

SEQ ID NO: 208846 - DNA, 19 bp, Homo sapiens
  siRNA target sequence for POLI (NM_007195.1,1208-1226).
ccaatggttgatatactta

SEQ ID NO: 208847 - DNA, 19 bp, Homo sapiens
  siRNA target sequence for POLI (NM_007195.1,1209-1227).
caatggttgatatacttat

SEQ ID NO: 208848 - DNA, 19 bp, Homo sapiens
  siRNA target sequence for POLI (NM_007195.1,1238-1256).
cgaaatatggtgaatgtga

SEQ ID NO: 208849 - DNA, 19 bp, Homo sapiens
  siRNA target sequence for POLI (NM_007195.1,1288-1306).
gtgcttctgcaaccttaaa

SEQ ID NO: 208850 - DNA, 19 bp, Homo sapiens
  siRNA target sequence for POLI (NM_007195.1,1291-1309).
cttctgcaaccttaaagca

SEQ ID NO: 208851 - DNA, 19 bp, Homo sapiens
  siRNA target sequence for POLI (NM_007195.1,1300-1318).
ccttaaagcactaaatact

SEQ ID NO: 208852 - DNA, 19 bp, Homo sapiens
  siRNA target sequence for POLI (NM_007195.1,1320-1338).
ctaagaaagggcttattga

SEQ ID NO: 208853 - DNA, 19 bp, Homo sapiens
  siRNA target sequence for POLI (NM_007195.1,1328-1346).
gggcttattgattattatt

SEQ ID NO: 208854 - DNA, 19 bp, Homo sapiens
  siRNA target sequence for POLI (NM_007195.1,1351-1369).
gccatcattatcaactact

SEQ ID NO: 208855 - DNA, 19 bp, Homo sapiens
  siRNA target sequence for POLI (NM_007195.1,1374-1392).
gctctggcaagcacagttt

SEQ ID NO: 208856 - DNA, 19 bp, Homo sapiens
  siRNA target sequence for POLI (NM_007195.1,1375-1393).
ctctggcaagcacagtttt

SEQ ID NO: 208857 - DNA, 19 bp, Homo sapiens
  siRNA target sequence for POLI (NM_007195.1,1403-1421).
gacactcatatggaagatt

SEQ ID NO: 208858 - DNA, 19 bp, Homo sapiens
  siRNA target sequence for POLI (NM_007195.1,1496-1514).
ccactagataccacaaatt

SEQ ID NO: 208859 - DNA, 19 bp, Homo sapiens
  siRNA target sequence for POLI (NM_007195.1,1497-1515).
cactagataccacaaattt

SEQ ID NO: 208860 - DNA, 19 bp, Homo sapiens
  siRNA target sequence for POLI (NM_007195.1,1502-1520).
gataccacaaatttttcta

SEQ ID NO: 208861 - DNA, 19 bp, Homo sapiens
  siRNA target sequence for POLI (NM_007195.1,1679-1697).
gcctctagaggagtattat

SEQ ID NO: 208862 - DNA, 19 bp, Homo sapiens
  siRNA target sequence for POLI (NM_007195.1,1681-1699).
ctctagaggagtattatct

SEQ ID NO: 208863 - DNA, 19 bp, Homo sapiens
  siRNA target sequence for POLI (NM_007195.1,1732-1750).
cataaatcctagagatcat

SEQ ID NO: 208864 - DNA, 19 bp, Homo sapiens
  siRNA target sequence for POLI (NM_007195.1,1794-1812).
cgggaacatcaggctttaa

SEQ ID NO: 208865 - DNA, 19 bp, Homo sapiens
  siRNA target sequence for POLI (NM_007195.1,1796-1814).
ggaacatcaggctttaata

SEQ ID NO: 208866 - DNA, 19 bp, Homo sapiens
  siRNA target sequence for POLI (NM_007195.1,1815-1833).
gcagtagttcttcttacat

SEQ ID NO: 208867 - DNA, 19 bp, Homo sapiens
  siRNA target sequence for POLI (NM_007195.1,1831-1849).
catgtctagccaaaaggat

SEQ ID NO: 208868 - DNA, 19 bp, Homo sapiens
  siRNA target sequence for POLI (NM_007195.1,1834-1852).
gtctagccaaaaggattat

SEQ ID NO: 208869 - DNA, 19 bp, Homo sapiens
  siRNA target sequence for POLI (NM_007195.1,1902-1920).
ctaaagaacctcaaggatt

SEQ ID NO: 208870 - DNA, 19 bp, Homo sapiens
  siRNA target sequence for POLI (NM_007195.1,1916-1934).
ggattccactttacaaatt

SEQ ID NO: 208871 - DNA, 19 bp, Homo sapiens
  siRNA target sequence for POLI (NM_007195.1,2007-2025).
ctacagatagccataagca

SEQ ID NO: 208872 - DNA, 19 bp, Homo sapiens
  siRNA target sequence for POLI (NM_007195.1,2073-2091).
cagattctgttgatgagaa

SEQ ID NO: 208873 - DNA, 19 bp, Homo sapiens
  siRNA target sequence for CDS2 (NM_003818.2,484-502).
ctttggccatgattgcatt

SEQ ID NO: 208874 - DNA, 19 bp, Homo sapiens
  siRNA target sequence for CDS2 (NM_003818.2,522-540).
ctgggaccaatggttttga

SEQ ID NO: 208875 - DNA, 19 bp, Homo sapiens
  siRNA target sequence for CDS2 (NM_003818.2,548-566).
cgtgatgtgcgttcagatt

SEQ ID NO: 208876 - DNA, 19 bp, Homo sapiens
  siRNA target sequence for CDS2 (NM_003818.2,549-567).
gtgatgtgcgttcagatta

SEQ ID NO: 208877 - DNA, 19 bp, Homo sapiens
  siRNA target sequence for CDS2 (NM_003818.2,554-572).
gtgcgttcagattaagtgt

SEQ ID NO: 208878 - DNA, 19 bp, Homo sapiens
  siRNA target sequence for CDS2 (NM_003818.2,556-574).
gcgttcagattaagtgttt

SEQ ID NO: 208879 - DNA, 19 bp, Homo sapiens
  siRNA target sequence for CDS2 (NM_003818.2,575-593).
ccatgagataatcactatt

SEQ ID NO: 208880 - DNA, 19 bp, Homo sapiens
  siRNA target sequence for CDS2 (NM_003818.2,599-617).
caacgtctaccactcatat

SEQ ID NO: 208881 - DNA, 19 bp, Homo sapiens
  siRNA target sequence for CDS2 (NM_003818.2,602-620).
cgtctaccactcatatgat

SEQ ID NO: 208882 - DNA, 19 bp, Homo sapiens
  siRNA target sequence for CDS2 (NM_003818.2,635-653).
gacgctcagctggtacttt

SEQ ID NO: 208883 - DNA, 19 bp, Homo sapiens
  siRNA target sequence for CDS2 (NM_003818.2,637-655).
cgctcagctggtactttct

SEQ ID NO: 208884 - DNA, 19 bp, Homo sapiens
  siRNA target sequence for CDS2 (NM_003818.2,654-672).
ctcctgtgtgtaaactatt

SEQ ID NO: 208885 - DNA, 19 bp, Homo sapiens
  siRNA target sequence for CDS2 (NM_003818.2,684-702).
gagacagtgacggattact

SEQ ID NO: 208886 - DNA, 19 bp, Homo sapiens
  siRNA target sequence for CDS2 (NM_003818.2,688-706).
cagtgacggattacttctt

SEQ ID NO: 208887 - DNA, 19 bp, Homo sapiens
  siRNA target sequence for CDS2 (NM_003818.2,690-708).
gtgacggattacttcttca

SEQ ID NO: 208888 - DNA, 19 bp, Homo sapiens
  siRNA target sequence for CDS2 (NM_003818.2,726-744).
gagcctttgcggattctca

SEQ ID NO: 208889 - DNA, 19 bp, Homo sapiens
  siRNA target sequence for CDS2 (NM_003818.2,730-748).
ctttgcggattctcagtaa

SEQ ID NO: 208890 - DNA, 19 bp, Homo sapiens
  siRNA target sequence for CDS2 (NM_003818.2,752-770).
ccaccggttcatttccttt

SEQ ID NO: 208891 - DNA, 19 bp, Homo sapiens
  siRNA target sequence for CDS2 (NM_003818.2,753-771).
caccggttcatttccttta

SEQ ID NO: 208892 - DNA, 19 bp, Homo sapiens
  siRNA target sequence for CDS2 (NM_003818.2,755-773).
ccggttcatttcctttact

SEQ ID NO: 208893 - DNA, 19 bp, Homo sapiens
  siRNA target sequence for CDS2 (NM_003818.2,766-784).
cctttactctctatctaat

SEQ ID NO: 208894 - DNA, 19 bp, Homo sapiens
  siRNA target sequence for CDS2 (NM_003818.2,767-785).
ctttactctctatctaata

SEQ ID NO: 208895 - DNA, 19 bp, Homo sapiens
  siRNA target sequence for CDS2 (NM_003818.2,772-790).
ctctctatctaataggatt

SEQ ID NO: 208896 - DNA, 19 bp, Homo sapiens
  siRNA target sequence for CDS2 (NM_003818.2,812-830).
ggtcaagaagcattatcga

SEQ ID NO: 208897 - DNA, 19 bp, Homo sapiens
  siRNA target sequence for CDS2 (NM_003818.2,828-846).
cgactgcagttctacatgt

SEQ ID NO: 208898 - DNA, 19 bp, Homo sapiens
  siRNA target sequence for CDS2 (NM_003818.2,850-868).
gctggacccatgtgacatt

SEQ ID NO: 208899 - DNA, 19 bp, Homo sapiens
  siRNA target sequence for CDS2 (NM_003818.2,894-912).
cttgttatccacaacctat

SEQ ID NO: 208900 - DNA, 19 bp, Homo sapiens
  siRNA target sequence for CDS2 (NM_003818.2,919-937).
gaatgatctggttcattgt

SEQ ID NO: 208901 - DNA, 19 bp, Homo sapiens
  siRNA target sequence for CDS2 (NM_003818.2,963-981).
gacatcatggcctatatgt

SEQ ID NO: 208902 - DNA, 19 bp, Homo sapiens
  siRNA target sequence for CDS2 (NM_003818.2,965-983).
catcatggcctatatgttt

SEQ ID NO: 208903 - DNA, 19 bp, Homo sapiens
  siRNA target sequence for CDS2 (NM_003818.2,1095-1113).
gtgatgtccgggtacagat

SEQ ID NO: 208904 - DNA, 19 bp, Homo sapiens
  siRNA target sequence for CDS2 (NM_003818.2,1100-1118).
gtccgggtacagatgcttt

SEQ ID NO: 208905 - DNA, 19 bp, Homo sapiens
  siRNA target sequence for CDS2 (NM_003818.2,1104-1122).
gggtacagatgctttgtct

SEQ ID NO: 208906 - DNA, 19 bp, Homo sapiens
  siRNA target sequence for CDS2 (NM_003818.2,1214-1232).
ggtgatccagtcagtcatt

SEQ ID NO: 208907 - DNA, 19 bp, Homo sapiens
  siRNA target sequence for CDS2 (NM_003818.2,1537-1555).
cgctgcggtctcatctgat

SEQ ID NO: 208908 - DNA, 19 bp, Homo sapiens
  siRNA target sequence for GALT (NM_000155.2,144-162).
caaacgaccatcagcatat

SEQ ID NO: 208909 - DNA, 19 bp, Homo sapiens
  siRNA target sequence for GALT (NM_000155.2,320-338).
gtgaatccccagtacgata

SEQ ID NO: 208910 - DNA, 19 bp, Homo sapiens
  siRNA target sequence for GALT (NM_000155.2,429-447).
ctgctcgaggagtctgtaa

SEQ ID NO: 208911 - DNA, 19 bp, Homo sapiens
  siRNA target sequence for GALT (NM_000155.2,461-479).
cacccctggtcggatgtaa

SEQ ID NO: 208912 - DNA, 19 bp, Homo sapiens
  siRNA target sequence for GALT (NM_000155.2,505-523).
gatccgggctgttgttgat

SEQ ID NO: 208913 - DNA, 19 bp, Homo sapiens
  siRNA target sequence for GALT (NM_000155.2,564-582).
cttgggtgcagatctttga

SEQ ID NO: 208914 - DNA, 19 bp, Homo sapiens
  siRNA target sequence for GALT (NM_000155.2,772-790).
cagtgagcactggttagta

SEQ ID NO: 208915 - DNA, 19 bp, Homo sapiens
  siRNA target sequence for GALT (NM_000155.2,774-792).
gtgagcactggttagtact

SEQ ID NO: 208916 - DNA, 19 bp, Homo sapiens
  siRNA target sequence for GALT (NM_000155.2,887-905).
gatctagcctccatcatga

SEQ ID NO: 208917 - DNA, 19 bp, Homo sapiens
  siRNA target sequence for GALT (NM_000155.2,1053-1071).
ctgccactgtccggaaatt

SEQ ID NO: 208918 - DNA, 19 bp, Homo sapiens
  siRNA target sequence for GALT (NM_000155.2,1055-1073).
gccactgtccggaaattca

SEQ ID NO: 208919 - DNA, 19 bp, Homo sapiens
  siRNA target sequence for GALT (NM_000155.2,1056-1074).
ccactgtccggaaattcat

SEQ ID NO: 208920 - DNA, 19 bp, Homo sapiens
  siRNA target sequence for GALT (NM_000155.2,1075-1093).
ggttggctacgaaatgctt

SEQ ID NO: 208921 - DNA, 19 bp, Homo sapiens
  siRNA target sequence for GALT (NM_000155.2,1145-1163).
gcacttcctgaggttcatt

SEQ ID NO: 208922 - DNA, 19 bp, Homo sapiens
  siRNA target sequence for GALT (NM_147132.1,306-324).
gagccaacggagagatctt

SEQ ID NO: 208923 - DNA, 19 bp, Homo sapiens
  siRNA target sequence for GALT (NM_147132.1,309-327).
ccaacggagagatctttga

SEQ ID NO: 208924 - DNA, 19 bp, Homo sapiens
  siRNA target sequence for GALT (NM_147132.1,310-328).
caacggagagatctttgaa

SEQ ID NO: 208925 - DNA, 19 bp, Homo sapiens
  siRNA target sequence for TXNDC2 (NM_032243.3,1227-1245).
cacccaaggagattgacat

SEQ ID NO: 208926 - DNA, 19 bp, Homo sapiens
  siRNA target sequence for TXNDC2 (NM_032243.3,1598-1616).
gtcccaacctttcagtttt

SEQ ID NO: 208927 - DNA, 19 bp, Homo sapiens
  siRNA target sequence for PCYT1A (NM_005017.2,297-315).
cggcaaccagctccttttt

SEQ ID NO: 208928 - DNA, 19 bp, Homo sapiens
  siRNA target sequence for PCYT1A (NM_005017.2,345-363).
ccctatgtcagggtaacta

SEQ ID NO: 208929 - DNA, 19 bp, Homo sapiens
  siRNA target sequence for PCYT1A (NM_005017.2,346-364).
cctatgtcagggtaactat

SEQ ID NO: 208930 - DNA, 19 bp, Homo sapiens
  siRNA target sequence for PCYT1A (NM_005017.2,393-411).
gagcgacctgtgagagttt

SEQ ID NO: 208931 - DNA, 19 bp, Homo sapiens
  siRNA target sequence for PCYT1A (NM_005017.2,395-413).
gcgacctgtgagagtttat

SEQ ID NO: 208932 - DNA, 19 bp, Homo sapiens
  siRNA target sequence for PCYT1A (NM_005017.2,484-502).
ctaatacgtacctcattgt

SEQ ID NO: 208933 - DNA, 19 bp, Homo sapiens
  siRNA target sequence for PCYT1A (NM_005017.2,647-665).
ggccgaacaccggattgat

SEQ ID NO: 208934 - DNA, 19 bp, Homo sapiens
  siRNA target sequence for PCYT1A (NM_005017.2,648-666).
gccgaacaccggattgatt

SEQ ID NO: 208935 - DNA, 19 bp, Homo sapiens
  siRNA target sequence for PCYT1A (NM_005017.2,649-667).
ccgaacaccggattgattt

SEQ ID NO: 208936 - DNA, 19 bp, Homo sapiens
  siRNA target sequence for PCYT1A (NM_005017.2,650-668).
cgaacaccggattgatttt

SEQ ID NO: 208937 - DNA, 19 bp, Homo sapiens
  siRNA target sequence for PCYT1A (NM_005017.2,673-691).
cccatgatgatattcctta

SEQ ID NO: 208938 - DNA, 19 bp, Homo sapiens
  siRNA target sequence for PCYT1A (NM_005017.2,794-812).
ccgaattgtgcgggattat

SEQ ID NO: 208939 - DNA, 19 bp, Homo sapiens
  siRNA target sequence for PCYT1A (NM_005017.2,796-814).
gaattgtgcgggattatga

SEQ ID NO: 208940 - DNA, 19 bp, Homo sapiens
  siRNA target sequence for PCYT1A (NM_005017.2,903-921).
gagagggttgacaaagtaa

SEQ ID NO: 208941 - DNA, 19 bp, Homo sapiens
  siRNA target sequence for PCYT1A (NM_005017.2,971-989).
ggtggaggaaaaaagcatt

SEQ ID NO: 208942 - DNA, 19 bp, Homo sapiens
  siRNA target sequence for PCYT1A (NM_005017.2,1011-1029).
gagaagtcccgagaattca

SEQ ID NO: 208943 - DNA, 19 bp, Homo sapiens
  siRNA target sequence for PCYT1A (NM_005017.2,1013-1031).
gaagtcccgagaattcatt

SEQ ID NO: 208944 - DNA, 19 bp, Homo sapiens
  siRNA target sequence for PCYT1A (NM_005017.2,1059-1077).
gaaggagcactgaaacata

SEQ ID NO: 208945 - DNA, 19 bp, Homo sapiens
  siRNA target sequence for PCYT1A (NM_005017.2,1063-1081).
gagcactgaaacatatgct

SEQ ID NO: 208946 - DNA, 19 bp, Homo sapiens
  siRNA target sequence for PCYT1A (NM_005017.2,1207-1225).
cttgctccccagcaaatct

SEQ ID NO: 208947 - DNA, 19 bp, Homo sapiens
  siRNA target sequence for PCYT1A (NM_005017.2,1239-1257).
gctgcagcctatgatatca

SEQ ID NO: 208948 - DNA, 19 bp, Homo sapiens
  siRNA target sequence for PCYT1B (NM_004845.2,137-155).
gccccatttgctgatgaaa

SEQ ID NO: 208949 - DNA, 19 bp, Homo sapiens
  siRNA target sequence for PCYT1B (NM_004845.2,168-186).
gtcaagcaccccatgaaaa

SEQ ID NO: 208950 - DNA, 19 bp, Homo sapiens
  siRNA target sequence for PCYT1B (NM_004845.2,224-242).
gacaggcctgtcagagtat

SEQ ID NO: 208951 - DNA, 19 bp, Homo sapiens
  siRNA target sequence for PCYT1B (NM_004845.2,357-375).
cccacaaattcaaaggttt

SEQ ID NO: 208952 - DNA, 19 bp, Homo sapiens
  siRNA target sequence for PCYT1B (NM_004845.2,372-390).
gtttcaccgtgatgaatga

SEQ ID NO: 208953 - DNA, 19 bp, Homo sapiens
  siRNA target sequence for PCYT1B (NM_004845.2,422-440).
cgctacgtagacgaagtta

SEQ ID NO: 208954 - DNA, 19 bp, Homo sapiens
  siRNA target sequence for PCYT1B (NM_004845.2,423-441).
gctacgtagacgaagttat

SEQ ID NO: 208955 - DNA, 19 bp, Homo sapiens
  siRNA target sequence for PCYT1B (NM_004845.2,427-445).
cgtagacgaagttatcaga

SEQ ID NO: 208956 - DNA, 19 bp, Homo sapiens
  siRNA target sequence for PCYT1B (NM_004845.2,457-475).
gacactcacgccagagttt

SEQ ID NO: 208957 - DNA, 19 bp, Homo sapiens
  siRNA target sequence for PCYT1B (NM_004845.2,509-527).
gatgacattccgtattcct

SEQ ID NO: 208958 - DNA, 19 bp, Homo sapiens
  siRNA target sequence for PCYT1B (NM_004845.2,625-643).
cagaattgttcgtgactat

SEQ ID NO: 208959 - DNA, 19 bp, Homo sapiens
  siRNA target sequence for PCYT1B (NM_004845.2,627-645).
gaattgttcgtgactatga

SEQ ID NO: 208960 - DNA, 19 bp, Homo sapiens
  siRNA target sequence for PCYT1B (NM_004845.2,632-650).
gttcgtgactatgatgttt

SEQ ID NO: 208961 - DNA, 19 bp, Homo sapiens
  siRNA target sequence for PCYT1B (NM_004845.2,681-699).
cagccaaggaactgaatgt

SEQ ID NO: 208962 - DNA, 19 bp, Homo sapiens
  siRNA target sequence for PCYT1B (NM_004845.2,780-798).
gatcaaaggaatttgtgaa

SEQ ID NO: 208963 - DNA, 19 bp, Homo sapiens
  siRNA target sequence for PCYT1B (NM_004845.2,814-832).
gagccatgatctaattcaa

SEQ ID NO: 208964 - DNA, 19 bp, Homo sapiens
  siRNA target sequence for CMAS (NM_018686.3,351-369).
cgacagaccatgatgaaat

SEQ ID NO: 208965 - DNA, 19 bp, Homo sapiens
  siRNA target sequence for CMAS (NM_018686.3,352-370).
gacagaccatgatgaaatt

SEQ ID NO: 208966 - DNA, 19 bp, Homo sapiens
  siRNA target sequence for CMAS (NM_018686.3,398-416).
caagttcatcgaagaagtt

SEQ ID NO: 208967 - DNA, 19 bp, Homo sapiens
  siRNA target sequence for CMAS (NM_018686.3,414-432).
gttctgaagtttcaaaaga

SEQ ID NO: 208968 - DNA, 19 bp, Homo sapiens
  siRNA target sequence for CMAS (NM_018686.3,433-451).
cagctctacctcactagat

SEQ ID NO: 208969 - DNA, 19 bp, Homo sapiens
  siRNA target sequence for CMAS (NM_018686.3,442-460).
ctcactagatgccatcata

SEQ ID NO: 208970 - DNA, 19 bp, Homo sapiens
  siRNA target sequence for CMAS (NM_018686.3,484-502).
ggttgacattgtaggaaat

SEQ ID NO: 208971 - DNA, 19 bp, Homo sapiens
  siRNA target sequence for CMAS (NM_018686.3,490-508).
cattgtaggaaatattcaa

SEQ ID NO: 208972 - DNA, 19 bp, Homo sapiens
  siRNA target sequence for CMAS (NM_018686.3,608-626).
cagtttcgatggagtgaaa

SEQ ID NO: 208973 - DNA, 19 bp, Homo sapiens
  siRNA target sequence for CMAS (NM_018686.3,610-628).
gtttcgatggagtgaaatt

SEQ ID NO: 208974 - DNA, 19 bp, Homo sapiens
  siRNA target sequence for CMAS (NM_018686.3,649-667).
gaccgaacctctgaattta

SEQ ID NO: 208975 - DNA, 19 bp, Homo sapiens
  siRNA target sequence for CMAS (NM_018686.3,651-669).
ccgaacctctgaatttaaa

SEQ ID NO: 208976 - DNA, 19 bp, Homo sapiens
  siRNA target sequence for CMAS (NM_018686.3,661-679).
gaatttaaatccagctaaa

SEQ ID NO: 208977 - DNA, 19 bp, Homo sapiens
  siRNA target sequence for CMAS (NM_018686.3,774-792).
gtggaaaaatggcatacta

SEQ ID NO: 208978 - DNA, 19 bp, Homo sapiens
  siRNA target sequence for CMAS (NM_018686.3,793-811).
cgaaatgcgagctgaacat

SEQ ID NO: 208979 - DNA, 19 bp, Homo sapiens
  siRNA target sequence for CMAS (NM_018686.3,794-812).
gaaatgcgagctgaacata

SEQ ID NO: 208980 - DNA, 19 bp, Homo sapiens
  siRNA target sequence for CMAS (NM_018686.3,804-822).
ctgaacatagtgtggatat

SEQ ID NO: 208981 - DNA, 19 bp, Homo sapiens
  siRNA target sequence for CMAS (NM_018686.3,853-871).
gcaaagagtattaagatat

SEQ ID NO: 208982 - DNA, 19 bp, Homo sapiens
  siRNA target sequence for CMAS (NM_018686.3,898-916).
ggaaataaaacttttggtt

SEQ ID NO: 208983 - DNA, 19 bp, Homo sapiens
  siRNA target sequence for CMAS (NM_018686.3,937-955).
caccaatggccacatttat

SEQ ID NO: 208984 - DNA, 19 bp, Homo sapiens
  siRNA target sequence for CMAS (NM_018686.3,998-1016).
gatgctattgggataagtt

SEQ ID NO: 208985 - DNA, 19 bp, Homo sapiens
  siRNA target sequence for CMAS (NM_018686.3,1001-1019).
gctattgggataagtttat

SEQ ID NO: 208986 - DNA, 19 bp, Homo sapiens
  siRNA target sequence for CMAS (NM_018686.3,1007-1025).
gggataagtttattaaaga

SEQ ID NO: 208987 - DNA, 19 bp, Homo sapiens
  siRNA target sequence for CMAS (NM_018686.3,1008-1026).
ggataagtttattaaagaa

SEQ ID NO: 208988 - DNA, 19 bp, Homo sapiens
  siRNA target sequence for CMAS (NM_018686.3,1009-1027).
gataagtttattaaagaaa

SEQ ID NO: 208989 - DNA, 19 bp, Homo sapiens
  siRNA target sequence for CMAS (NM_018686.3,1072-1090).
gcagacgctgtcttcttta

SEQ ID NO: 208990 - DNA, 19 bp, Homo sapiens
  siRNA target sequence for CMAS (NM_018686.3,1073-1091).
cagacgctgtcttctttaa

SEQ ID NO: 208991 - DNA, 19 bp, Homo sapiens
  siRNA target sequence for CMAS (NM_018686.3,1077-1095).
cgctgtcttctttaaaact

SEQ ID NO: 208992 - DNA, 19 bp, Homo sapiens
  siRNA target sequence for CMAS (NM_018686.3,1126-1144).
caagctagcagttgtagat

SEQ ID NO: 208993 - DNA, 19 bp, Homo sapiens
  siRNA target sequence for CMAS (NM_018686.3,1129-1147).
gctagcagttgtagatgaa

SEQ ID NO: 208994 - DNA, 19 bp, Homo sapiens
  siRNA target sequence for CMAS (NM_018686.3,1173-1191).
ggaaagaagtggcatatct

SEQ ID NO: 208995 - DNA, 19 bp, Homo sapiens
  siRNA target sequence for CMAS (NM_018686.3,1183-1201).
ggcatatcttggaaatgaa

SEQ ID NO: 208996 - DNA, 19 bp, Homo sapiens
  siRNA target sequence for CMAS (NM_018686.3,1185-1203).
catatcttggaaatgaagt

SEQ ID NO: 208997 - DNA, 19 bp, Homo sapiens
  siRNA target sequence for CMAS (NM_018686.3,1325-1343).
gaatttgcagagcacattt

SEQ ID NO: 208998 - DNA, 19 bp, Homo sapiens
  siRNA target sequence for NANS (NM_018946.2,210-228).
gggctgattgtgctaagtt

SEQ ID NO: 208999 - DNA, 19 bp, Homo sapiens
  siRNA target sequence for NANS (NM_018946.2,241-259).
gctagaattcaagtttaat

SEQ ID NO: 209000 - DNA, 19 bp, Homo sapiens
  siRNA target sequence for NANS (NM_018946.2,278-296).
ccatacacctcgaagcatt

SEQ ID NO: 209001 - DNA, 19 bp, Homo sapiens
  siRNA target sequence for NANS (NM_018946.2,402-420).
cctctggcatggatgagat

SEQ ID NO: 209002 - DNA, 19 bp, Homo sapiens
  siRNA target sequence for NANS (NM_018946.2,413-431).
gatgagatggcagttgaat

SEQ ID NO: 209003 - DNA, 19 bp, Homo sapiens
  siRNA target sequence for NANS (NM_018946.2,433-451).
cctgcatgaactgaatgtt

SEQ ID NO: 209004 - DNA, 19 bp, Homo sapiens
  siRNA target sequence for NANS (NM_018946.2,661-679).
gcgggtcatctcggaatat

SEQ ID NO: 209005 - DNA, 19 bp, Homo sapiens
  siRNA target sequence for NANS (NM_018946.2,663-681).
gggtcatctcggaatatca

SEQ ID NO: 209006 - DNA, 19 bp, Homo sapiens
  siRNA target sequence for NANS (NM_018946.2,665-683).
gtcatctcggaatatcaga

SEQ ID NO: 209007 - DNA, 19 bp, Homo sapiens
  siRNA target sequence for NANS (NM_018946.2,697-715).
cattcccatagggtattct

SEQ ID NO: 209008 - DNA, 19 bp, Homo sapiens
  siRNA target sequence for NANS (NM_018946.2,769-787).
ggtgttggaacgtcacata

SEQ ID NO: 209009 - DNA, 19 bp, Homo sapiens
  siRNA target sequence for NANS (NM_018946.2,974-992).
ccggaaggcaccattctaa

SEQ ID NO: 209010 - DNA, 19 bp, Homo sapiens
  siRNA target sequence for NANS (NM_018946.2,976-994).
ggaaggcaccattctaaca

SEQ ID NO: 209011 - DNA, 19 bp, Homo sapiens
  siRNA target sequence for NANS (NM_018946.2,1032-1050).
gctatcctcctgaagacat

SEQ ID NO: 209012 - DNA, 19 bp, Homo sapiens
  siRNA target sequence for NANS (NM_018946.2,1101-1119).
ccatcatggaagaattggt

SEQ ID NO: 209013 - DNA, 19 bp, Homo sapiens
  siRNA target sequence for NMNAT2 (NM_015039.2,349-367).
ccaagacccacgttatctt

SEQ ID NO: 209014 - DNA, 19 bp, Homo sapiens
  siRNA target sequence for NMNAT2 (NM_015039.2,371-389).
cgcctgcggcagcttcaat

SEQ ID NO: 209015 - DNA, 19 bp, Homo sapiens
  siRNA target sequence for NMNAT2 (NM_015039.2,431-449).
ggattatctgcacaaaact

SEQ ID NO: 209016 - DNA, 19 bp, Homo sapiens
  siRNA target sequence for NMNAT2 (NM_015039.2,486-504).
gtccacgactcctatggaa

SEQ ID NO: 209017 - DNA, 19 bp, Homo sapiens
  siRNA target sequence for NMNAT2 (NM_015039.2,523-541).
gccggcaccgtctcatcat

SEQ ID NO: 209018 - DNA, 19 bp, Homo sapiens
  siRNA target sequence for NMNAT2 (NM_015039.2,525-543).
cggcaccgtctcatcatgt

SEQ ID NO: 209019 - DNA, 19 bp, Homo sapiens
  siRNA target sequence for NMNAT2 (NM_015039.2,546-564).
cagctggccgtccagaatt

SEQ ID NO: 209020 - DNA, 19 bp, Homo sapiens
  siRNA target sequence for NMNAT2 (NM_015039.2,548-566).
gctggccgtccagaattct

SEQ ID NO: 209021 - DNA, 19 bp, Homo sapiens
  siRNA target sequence for NMNAT2 (NM_015039.2,551-569).
ggccgtccagaattctgat

SEQ ID NO: 209022 - DNA, 19 bp, Homo sapiens
  siRNA target sequence for NMNAT2 (NM_015039.2,639-657).
caccgggacctcatgaaga

SEQ ID NO: 209023 - DNA, 19 bp, Homo sapiens
  siRNA target sequence for NMNAT2 (NM_015039.2,848-866).
gcgtttcacctttgtagat

SEQ ID NO: 209024 - DNA, 19 bp, Homo sapiens
  siRNA target sequence for NMNAT2 (NM_015039.2,886-904).
cggtgatgcggtatgaaga

SEQ ID NO: 209025 - DNA, 19 bp, Homo sapiens
  siRNA target sequence for NMNAT2 (NM_015039.2,890-908).
gatgcggtatgaagagatt

SEQ ID NO: 209026 - DNA, 19 bp, Homo sapiens
  siRNA target sequence for NMNAT2 (NM_015039.2,992-1010).
ggtgattgttggtgacttt

SEQ ID NO: 209027 - DNA, 19 bp, Homo sapiens
  siRNA target sequence for NMNAT2 (NM_015039.2,1039-1057).
ccgacacagaccgaatcat

SEQ ID NO: 209028 - DNA, 19 bp, Homo sapiens
  siRNA target sequence for NMNAT2 (NM_015039.2,1047-1065).
gaccgaatcatgaatcact

SEQ ID NO: 209029 - DNA, 19 bp, Homo sapiens
  siRNA target sequence for NMNAT2 (NM_015039.2,1066-1084).
cctcaatactccgcaaata

SEQ ID NO: 209030 - DNA, 19 bp, Homo sapiens
  siRNA target sequence for NMNAT2 (NM_015039.2,1069-1087).
caatactccgcaaatacaa

SEQ ID NO: 209031 - DNA, 19 bp, Homo sapiens
  siRNA target sequence for NMNAT2 (NM_015039.2,1074-1092).
ctccgcaaatacaaaaaca

SEQ ID NO: 209032 - DNA, 19 bp, Homo sapiens
  siRNA target sequence for NMNAT2 (NM_015039.2,1180-1198).
gccatgttgtggattacct

SEQ ID NO: 209033 - DNA, 19 bp, Homo sapiens
  siRNA target sequence for NMNAT2 (NM_170706.2,144-162).
ccaggaactagaggaaatt

SEQ ID NO: 209034 - DNA, 19 bp, Homo sapiens
  siRNA target sequence for UGP2 (NM_006759.2,87-105).
gtcgagatttgtacaagat

SEQ ID NO: 209035 - DNA, 19 bp, Homo sapiens
  siRNA target sequence for UGP2 (NM_006759.2,157-175).
cggcaagagctagaattat

SEQ ID NO: 209036 - DNA, 19 bp, Homo sapiens
  siRNA target sequence for UGP2 (NM_006759.2,159-177).
gcaagagctagaattatct

SEQ ID NO: 209037 - DNA, 19 bp, Homo sapiens
  siRNA target sequence for UGP2 (NM_006759.2,207-225).
cacagcatcatcacatgaa

SEQ ID NO: 209038 - DNA, 19 bp, Homo sapiens
  siRNA target sequence for UGP2 (NM_006759.2,250-268).
gatggatttcggaagctat

SEQ ID NO: 209039 - DNA, 19 bp, Homo sapiens
  siRNA target sequence for UGP2 (NM_006759.2,323-341).
gaccccctgaagattcgat

SEQ ID NO: 209040 - DNA, 19 bp, Homo sapiens
  siRNA target sequence for UGP2 (NM_006759.2,392-410).
ccgtgttgaacaaactagt

SEQ ID NO: 209041 - DNA, 19 bp, Homo sapiens
  siRNA target sequence for UGP2 (NM_006759.2,475-493).
ggtgtgaggaatgagaata

SEQ ID NO: 209042 - DNA, 19 bp, Homo sapiens
  siRNA target sequence for UGP2 (NM_006759.2,622-640).
cattgtcgtgtgaaaatct

SEQ ID NO: 209043 - DNA, 19 bp, Homo sapiens
  siRNA target sequence for UGP2 (NM_006759.2,628-646).
cgtgtgaaaatctacactt

SEQ ID NO: 209044 - DNA, 19 bp, Homo sapiens
  siRNA target sequence for UGP2 (NM_006759.2,656-674).
gcaggtacccgaggattaa

SEQ ID NO: 209045 - DNA, 19 bp, Homo sapiens
  siRNA target sequence for UGP2 (NM_006759.2,657-675).
caggtacccgaggattaat

SEQ ID NO: 209046 - DNA, 19 bp, Homo sapiens
  siRNA target sequence for UGP2 (NM_006759.2,659-677).
ggtacccgaggattaataa

SEQ ID NO: 209047 - DNA, 19 bp, Homo sapiens
  siRNA target sequence for UGP2 (NM_006759.2,660-678).
gtacccgaggattaataaa

SEQ ID NO: 209048 - DNA, 19 bp, Homo sapiens
  siRNA target sequence for UGP2 (NM_006759.2,664-682).
ccgaggattaataaagaat

SEQ ID NO: 209049 - DNA, 19 bp, Homo sapiens
  siRNA target sequence for UGP2 (NM_006759.2,708-726).
gtcttactcaggggaaaat

SEQ ID NO: 209050 - DNA, 19 bp, Homo sapiens
  siRNA target sequence for UGP2 (NM_006759.2,757-775).
gatatttacgccagtttct

SEQ ID NO: 209051 - DNA, 19 bp, Homo sapiens
  siRNA target sequence for UGP2 (NM_006759.2,774-792).
ctacaactctggattgctt

SEQ ID NO: 209052 - DNA, 19 bp, Homo sapiens
  siRNA target sequence for UGP2 (NM_006759.2,782-800).
ctggattgcttgatacctt

SEQ ID NO: 209053 - DNA, 19 bp, Homo sapiens
  siRNA target sequence for UGP2 (NM_006759.2,784-802).
ggattgcttgataccttta

SEQ ID NO: 209054 - DNA, 19 bp, Homo sapiens
  siRNA target sequence for UGP2 (NM_006759.2,789-807).
gcttgatacctttatagga

SEQ ID NO: 209055 - DNA, 19 bp, Homo sapiens
  siRNA target sequence for UGP2 (NM_006759.2,851-869).
gtgccacagtggatctgta

SEQ ID NO: 209056 - DNA, 19 bp, Homo sapiens
  siRNA target sequence for UGP2 (NM_006759.2,853-871).
gccacagtggatctgtata

SEQ ID NO: 209057 - DNA, 19 bp, Homo sapiens
  siRNA target sequence for UGP2 (NM_006759.2,854-872).
ccacagtggatctgtatat

SEQ ID NO: 209058 - DNA, 19 bp, Homo sapiens
  siRNA target sequence for UGP2 (NM_006759.2,855-873).
cacagtggatctgtatatt

SEQ ID NO: 209059 - DNA, 19 bp, Homo sapiens
  siRNA target sequence for UGP2 (NM_006759.2,857-875).
cagtggatctgtatattct

SEQ ID NO: 209060 - DNA, 19 bp, Homo sapiens
  siRNA target sequence for UGP2 (NM_006759.2,859-877).
gtggatctgtatattctta

SEQ ID NO: 209061 - DNA, 19 bp, Homo sapiens
  siRNA target sequence for UGP2 (NM_006759.2,861-879).
ggatctgtatattcttaat

SEQ ID NO: 209062 - DNA, 19 bp, Homo sapiens
  siRNA target sequence for UGP2 (NM_006759.2,921-939).
catggaagtcacaaataaa

SEQ ID NO: 209063 - DNA, 19 bp, Homo sapiens
  siRNA target sequence for UGP2 (NM_006759.2,960-978).
cgggacactcactcaatat

SEQ ID NO: 209064 - DNA, 19 bp, Homo sapiens
  siRNA target sequence for UGP2 (NM_006759.2,962-980).
ggacactcactcaatatga

SEQ ID NO: 209065 - DNA, 19 bp, Homo sapiens
  siRNA target sequence for UGP2 (NM_006759.2,1043-1061).
ctgtatcaaagttcaaaat

SEQ ID NO: 209066 - DNA, 19 bp, Homo sapiens
  siRNA target sequence for UGP2 (NM_006759.2,1198-1216).
gtaggggctgccatcaaaa

SEQ ID NO: 209067 - DNA, 19 bp, Homo sapiens
  siRNA target sequence for UGP2 (NM_006759.2,1222-1240).
gagaattctctaggtatta

SEQ ID NO: 209068 - DNA, 19 bp, Homo sapiens
  siRNA target sequence for UGP2 (NM_006759.2,1296-1314).
gatgtcaaacctctatagt

SEQ ID NO: 209069 - DNA, 19 bp, Homo sapiens
  siRNA target sequence for UGP2 (NM_006759.2,1299-1317).
gtcaaacctctatagtctt

SEQ ID NO: 209070 - DNA, 19 bp, Homo sapiens
  siRNA target sequence for UGP2 (NM_006759.2,1301-1319).
caaacctctatagtcttaa

SEQ ID NO: 209071 - DNA, 19 bp, Homo sapiens
  siRNA target sequence for UGP2 (NM_006759.2,1305-1323).
cctctatagtcttaatgca

SEQ ID NO: 209072 - DNA, 19 bp, Homo sapiens
  siRNA target sequence for UGP2 (NM_006759.2,1321-1339).
gcaggatctctgacaatga

SEQ ID NO: 209073 - DNA, 19 bp, Homo sapiens
  siRNA target sequence for UGP2 (NM_006759.2,1338-1356).
gagtgaaaagcgggaattt

SEQ ID NO: 209074 - DNA, 19 bp, Homo sapiens
  siRNA target sequence for UGP2 (NM_006759.2,1342-1360).
gaaaagcgggaatttccta

SEQ ID NO: 209075 - DNA, 19 bp, Homo sapiens
  siRNA target sequence for UGP2 (NM_006759.2,1358-1376).
ctacagtgcccttggttaa

SEQ ID NO: 209076 - DNA, 19 bp, Homo sapiens
  siRNA target sequence for UGP2 (NM_006759.2,1388-1406).
cttttacgaaggttcaaga

SEQ ID NO: 209077 - DNA, 19 bp, Homo sapiens
  siRNA target sequence for UGP2 (NM_006759.2,1398-1416).
ggttcaagattatctaaga

SEQ ID NO: 209078 - DNA, 19 bp, Homo sapiens
  siRNA target sequence for UGP2 (NM_006759.2,1449-1467).
ggatcacctcacagtttca

SEQ ID NO: 209079 - DNA, 19 bp, Homo sapiens
  siRNA target sequence for UGP2 (NM_006759.2,1558-1576).
gcagtattagagaacaaga

SEQ ID NO: 209080 - DNA, 19 bp, Homo sapiens
  siRNA target sequence for UGP2 (NM_006759.2,1559-1577).
cagtattagagaacaagat

SEQ ID NO: 209081 - DNA, 19 bp, Homo sapiens
  siRNA target sequence for UAP1 (NM_003115.3,538-556).
gtgctacaagggatcaaga

SEQ ID NO: 209082 - DNA, 19 bp, Homo sapiens
  siRNA target sequence for UAP1 (NM_003115.3,593-611).
gatttctcagaataaagta

SEQ ID NO: 209083 - DNA, 19 bp, Homo sapiens
  siRNA target sequence for UAP1 (NM_003115.3,643-661).
caagactcggcgttgcata

SEQ ID NO: 209084 - DNA, 19 bp, Homo sapiens
  siRNA target sequence for UAP1 (NM_003115.3,648-666).
ctcggcgttgcatatccta

SEQ ID NO: 209085 - DNA, 19 bp, Homo sapiens
  siRNA target sequence for UAP1 (NM_003115.3,670-688).
ggatgtatgatgttggttt

SEQ ID NO: 209086 - DNA, 19 bp, Homo sapiens
  siRNA target sequence for UAP1 (NM_003115.3,691-709).
catcccgtaagacactttt

SEQ ID NO: 209087 - DNA, 19 bp, Homo sapiens
  siRNA target sequence for UAP1 (NM_003115.3,694-712).
cccgtaagacactttttca

SEQ ID NO: 209088 - DNA, 19 bp, Homo sapiens
  siRNA target sequence for UAP1 (NM_003115.3,696-714).
cgtaagacactttttcaga

SEQ ID NO: 209089 - DNA, 19 bp, Homo sapiens
  siRNA target sequence for UAP1 (NM_003115.3,697-715).
gtaagacactttttcagat

SEQ ID NO: 209090 - DNA, 19 bp, Homo sapiens
  siRNA target sequence for UAP1 (NM_003115.3,836-854).
caccaagcacaagtacttt

SEQ ID NO: 209091 - DNA, 19 bp, Homo sapiens
  siRNA target sequence for UAP1 (NM_003115.3,842-860).
gcacaagtactttggttta

SEQ ID NO: 209092 - DNA, 19 bp, Homo sapiens
  siRNA target sequence for UAP1 (NM_003115.3,843-861).
cacaagtactttggtttaa

SEQ ID NO: 209093 - DNA, 19 bp, Homo sapiens
  siRNA target sequence for UAP1 (NM_003115.3,1054-1072).
gtgttgacaacatattagt

SEQ ID NO: 209094 - DNA, 19 bp, Homo sapiens
  siRNA target sequence for UAP1 (NM_003115.3,1079-1097).
ggcagacccacggttcatt

SEQ ID NO: 209095 - DNA, 19 bp, Homo sapiens
  siRNA target sequence for UAP1 (NM_003115.3,1085-1103).
cccacggttcattggattt

SEQ ID NO: 209096 - DNA, 19 bp, Homo sapiens
  siRNA target sequence for UAP1 (NM_003115.3,1086-1104).
ccacggttcattggatttt

SEQ ID NO: 209097 - DNA, 19 bp, Homo sapiens
  siRNA target sequence for UAP1 (NM_003115.3,1145-1163).
gaaaacgaaccctacagaa

SEQ ID NO: 209098 - DNA, 19 bp, Homo sapiens
  siRNA target sequence for UAP1 (NM_003115.3,1199-1217).
ccaggtggtagaatatagt

SEQ ID NO: 209099 - DNA, 19 bp, Homo sapiens
  siRNA target sequence for UAP1 (NM_003115.3,1205-1223).
ggtagaatatagtgagatt

SEQ ID NO: 209100 - DNA, 19 bp, Homo sapiens
  siRNA target sequence for UAP1 (NM_003115.3,1225-1243).
ccctggcaacagctcaaaa

SEQ ID NO: 209101 - DNA, 19 bp, Homo sapiens
  siRNA target sequence for UAP1 (NM_003115.3,1229-1247).
ggcaacagctcaaaaacga

SEQ ID NO: 209102 - DNA, 19 bp, Homo sapiens
  siRNA target sequence for UAP1 (NM_003115.3,1230-1248).
gcaacagctcaaaaacgaa

SEQ ID NO: 209103 - DNA, 19 bp, Homo sapiens
  siRNA target sequence for UAP1 (NM_003115.3,1256-1274).
cggacgactgctgttcaat

SEQ ID NO: 209104 - DNA, 19 bp, Homo sapiens
  siRNA target sequence for UAP1 (NM_003115.3,1268-1286).
gttcaatgcggggaacatt

SEQ ID NO: 209105 - DNA, 19 bp, Homo sapiens
  siRNA target sequence for UAP1 (NM_003115.3,1278-1296).
gggaacattgccaaccatt

SEQ ID NO: 209106 - DNA, 19 bp, Homo sapiens
  siRNA target sequence for UAP1 (NM_003115.3,1309-1327).
catttctgagagatgttgt

SEQ ID NO: 209107 - DNA, 19 bp, Homo sapiens
  siRNA target sequence for UAP1 (NM_003115.3,1362-1380).
gctcaaaagaagattcctt

SEQ ID NO: 209108 - DNA, 19 bp, Homo sapiens
  siRNA target sequence for UAP1 (NM_003115.3,1385-1403).
ggatacccaaggacagtta

SEQ ID NO: 209109 - DNA, 19 bp, Homo sapiens
  siRNA target sequence for UAP1 (NM_003115.3,1386-1404).
gatacccaaggacagttaa

SEQ ID NO: 209110 - DNA, 19 bp, Homo sapiens
  siRNA target sequence for UAP1 (NM_003115.3,1390-1408).
cccaaggacagttaattaa

SEQ ID NO: 209111 - DNA, 19 bp, Homo sapiens
  siRNA target sequence for UAP1 (NM_003115.3,1413-1431).
gacaaacccaatggaataa

SEQ ID NO: 209112 - DNA, 19 bp, Homo sapiens
  siRNA target sequence for UAP1 (NM_003115.3,1523-1541).
gaatgctgatagtcagaat

SEQ ID NO: 209113 - DNA, 19 bp, Homo sapiens
  siRNA target sequence for UAP1 (NM_003115.3,1544-1562).
gaaagacaaccctactact

SEQ ID NO: 209114 - DNA, 19 bp, Homo sapiens
  siRNA target sequence for UAP1 (NM_003115.3,1563-1581).
gcaaggcatgctttgatgt

SEQ ID NO: 209115 - DNA, 19 bp, Homo sapiens
  siRNA target sequence for UAP1 (NM_003115.3,1573-1591).
ctttgatgtcccttcatca

SEQ ID NO: 209116 - DNA, 19 bp, Homo sapiens
  siRNA target sequence for UAP1 (NM_003115.3,1673-1691).
caatgatgtaccaatccaa

SEQ ID NO: 209117 - DNA, 19 bp, Homo sapiens
  siRNA target sequence for UAP1 (NM_003115.3,1680-1698).
gtaccaatccaatgtgaaa

SEQ ID NO: 209118 - DNA, 19 bp, Homo sapiens
  siRNA target sequence for UAP1 (NM_003115.3,1683-1701).
ccaatccaatgtgaaatct

SEQ ID NO: 209119 - DNA, 19 bp, Homo sapiens
  siRNA target sequence for UAP1 (NM_003115.3,1693-1711).
gtgaaatctctcctcttat

SEQ ID NO: 209120 - DNA, 19 bp, Homo sapiens
  siRNA target sequence for UAP1 (NM_003115.3,1714-1732).
cctatgctggagaaggatt

SEQ ID NO: 209121 - DNA, 19 bp, Homo sapiens
  siRNA target sequence for UAP1 (NM_003115.3,1738-1756).
gttatgtggcagataaaga

SEQ ID NO: 209122 - DNA, 19 bp, Homo sapiens
  siRNA target sequence for UAP1 (NM_003115.3,1791-1809).
gttcatgagctggtgaaaa

SEQ ID NO: 209123 - DNA, 19 bp, Homo sapiens
  siRNA target sequence for PCYT2 (NM_002861.1,281-299).
ctcaggaggagagatacaa

SEQ ID NO: 209124 - DNA, 19 bp, Homo sapiens
  siRNA target sequence for PCYT2 (NM_002861.1,300-318).
gatggtgcaggccatcaaa

SEQ ID NO: 209125 - DNA, 19 bp, Homo sapiens
  siRNA target sequence for PCYT2 (NM_002861.1,395-413).
gtgttcacggcaatgacat

SEQ ID NO: 209126 - DNA, 19 bp, Homo sapiens
  siRNA target sequence for PCYT2 (NM_002861.1,460-478).
gctgggaggtacagagaat

SEQ ID NO: 209127 - DNA, 19 bp, Homo sapiens
  siRNA target sequence for PCYT2 (NM_002861.1,698-716).
caggggagacagtcatcta

SEQ ID NO: 209128 - DNA, 19 bp, Homo sapiens
  siRNA target sequence for PCYT2 (NM_002861.1,701-719).
gggagacagtcatctatgt

SEQ ID NO: 209129 - DNA, 19 bp, Homo sapiens
  siRNA target sequence for PCYT2 (NM_002861.1,820-838).
gaccaggaggtcaatcact

SEQ ID NO: 209130 - DNA, 19 bp, Homo sapiens
  siRNA target sequence for PCYT2 (NM_002861.1,983-1001).
gtcacggcaagacagaaat

SEQ ID NO: 209131 - DNA, 19 bp, Homo sapiens
  siRNA target sequence for PCYT2 (NM_002861.1,1050-1068).
gggcatcttccgtcagatt

SEQ ID NO: 209132 - DNA, 19 bp, Homo sapiens
  siRNA target sequence for PCYT2 (NM_002861.1,1052-1070).
gcatcttccgtcagattga

SEQ ID NO: 209133 - DNA, 19 bp, Homo sapiens
  siRNA target sequence for PCYT2 (NM_002861.1,1118-1136).
ccaacaggttggagtatga

SEQ ID NO: 209134 - DNA, 19 bp, Homo sapiens
  siRNA target sequence for FPGT (NM_003838.1,109-127).
cgagctaagaggcaaactt

SEQ ID NO: 209135 - DNA, 19 bp, Homo sapiens
  siRNA target sequence for FPGT (NM_003838.1,112-130).
gctaagaggcaaacttgta

SEQ ID NO: 209136 - DNA, 19 bp, Homo sapiens
  siRNA target sequence for FPGT (NM_003838.1,128-146).
gtagcacgtggagaattct

SEQ ID NO: 209137 - DNA, 19 bp, Homo sapiens
  siRNA target sequence for FPGT (NM_003838.1,138-156).
gagaattctgggacatagt

SEQ ID NO: 209138 - DNA, 19 bp, Homo sapiens
  siRNA target sequence for FPGT (NM_003838.1,148-166).
ggacatagttgcaataaca

SEQ ID NO: 209139 - DNA, 19 bp, Homo sapiens
  siRNA target sequence for FPGT (NM_003838.1,232-250).
gttaccccttggagttcaa

SEQ ID NO: 209140 - DNA, 19 bp, Homo sapiens
  siRNA target sequence for FPGT (NM_003838.1,311-329).
gcccttcaatgtttggaaa

SEQ ID NO: 209141 - DNA, 19 bp, Homo sapiens
  siRNA target sequence for FPGT (NM_003838.1,332-350).
ctatatggagataaatgga

SEQ ID NO: 209142 - DNA, 19 bp, Homo sapiens
  siRNA target sequence for FPGT (NM_003838.1,338-356).
ggagataaatggaattctt

SEQ ID NO: 209143 - DNA, 19 bp, Homo sapiens
  siRNA target sequence for FPGT (NM_003838.1,388-406).
cagtcaacgacttccaaat

SEQ ID NO: 209144 - DNA, 19 bp, Homo sapiens
  siRNA target sequence for FPGT (NM_003838.1,432-450).
ctgctttacctcttggtaa

SEQ ID NO: 209145 - DNA, 19 bp, Homo sapiens
  siRNA target sequence for FPGT (NM_003838.1,479-497).
ctagccatgtacattgatt

SEQ ID NO: 209146 - DNA, 19 bp, Homo sapiens
  siRNA target sequence for FPGT (NM_003838.1,494-512).
gatttccccttaaatatga

SEQ ID NO: 209147 - DNA, 19 bp, Homo sapiens
  siRNA target sequence for FPGT (NM_003838.1,536-554).
gcagatgatattgaacttt

SEQ ID NO: 209148 - DNA, 19 bp, Homo sapiens
  siRNA target sequence for FPGT (NM_003838.1,572-590).
gagtttattaggtttgaca

SEQ ID NO: 209149 - DNA, 19 bp, Homo sapiens
  siRNA target sequence for FPGT (NM_003838.1,611-629).
gctcatccttctagtttga

SEQ ID NO: 209150 - DNA, 19 bp, Homo sapiens
  siRNA target sequence for FPGT (NM_003838.1,658-676).
cttagatccttttgatgat

SEQ ID NO: 209151 - DNA, 19 bp, Homo sapiens
  siRNA target sequence for FPGT (NM_003838.1,666-684).
cttttgatgatttaaaaca

SEQ ID NO: 209152 - DNA, 19 bp, Homo sapiens
  siRNA target sequence for FPGT (NM_003838.1,703-721).
gtcttgccatcgtttcctt

SEQ ID NO: 209153 - DNA, 19 bp, Homo sapiens
  siRNA target sequence for FPGT (NM_003838.1,708-726).
gccatcgtttccttcataa

SEQ ID NO: 209154 - DNA, 19 bp, Homo sapiens
  siRNA target sequence for FPGT (NM_003838.1,742-760).
gatgtatcagtttaatgct

SEQ ID NO: 209155 - DNA, 19 bp, Homo sapiens
  siRNA target sequence for FPGT (NM_003838.1,763-781).
gtgtagacctggaaatttt

SEQ ID NO: 209156 - DNA, 19 bp, Homo sapiens
  siRNA target sequence for FPGT (NM_003838.1,803-821).
ggtgacattgccgatctta

SEQ ID NO: 209157 - DNA, 19 bp, Homo sapiens
  siRNA target sequence for FPGT (NM_003838.1,804-822).
gtgacattgccgatcttaa

SEQ ID NO: 209158 - DNA, 19 bp, Homo sapiens
  siRNA target sequence for FPGT (NM_003838.1,806-824).
gacattgccgatcttaaat

SEQ ID NO: 209159 - DNA, 19 bp, Homo sapiens
  siRNA target sequence for FPGT (NM_003838.1,808-826).
cattgccgatcttaaatta

SEQ ID NO: 209160 - DNA, 19 bp, Homo sapiens
  siRNA target sequence for FPGT (NM_003838.1,812-830).
gccgatcttaaattagact

SEQ ID NO: 209161 - DNA, 19 bp, Homo sapiens
  siRNA target sequence for FPGT (NM_003838.1,841-859).
ctacacagatagcctattt

SEQ ID NO: 209162 - DNA, 19 bp, Homo sapiens
  siRNA target sequence for FPGT (NM_003838.1,854-872).
ctattttatatggatcata

SEQ ID NO: 209163 - DNA, 19 bp, Homo sapiens
  siRNA target sequence for FPGT (NM_003838.1,866-884).
gatcataaatcagcaaaaa

SEQ ID NO: 209164 - DNA, 19 bp, Homo sapiens
  siRNA target sequence for FPGT (NM_003838.1,1042-1060).
gagaatatttcatcttctt

SEQ ID NO: 209165 - DNA, 19 bp, Homo sapiens
  siRNA target sequence for FPGT (NM_003838.1,1071-1089).
cactaaatgttgttgttct

SEQ ID NO: 209166 - DNA, 19 bp, Homo sapiens
  siRNA target sequence for FPGT (NM_003838.1,1119-1137).
caaccgaagaatatttgtt

SEQ ID NO: 209167 - DNA, 19 bp, Homo sapiens
  siRNA target sequence for FPGT (NM_003838.1,1122-1140).
ccgaagaatatttgtttta

SEQ ID NO: 209168 - DNA, 19 bp, Homo sapiens
  siRNA target sequence for FPGT (NM_003838.1,1172-1190).
ctcggcttacagtccataa

SEQ ID NO: 209169 - DNA, 19 bp, Homo sapiens
  siRNA target sequence for FPGT (NM_003838.1,1174-1192).
cggcttacagtccataact

SEQ ID NO: 209170 - DNA, 19 bp, Homo sapiens
  siRNA target sequence for FPGT (NM_003838.1,1175-1193).
ggcttacagtccataactt

SEQ ID NO: 209171 - DNA, 19 bp, Homo sapiens
  siRNA target sequence for FPGT (NM_003838.1,1176-1194).
gcttacagtccataacttt

SEQ ID NO: 209172 - DNA, 19 bp, Homo sapiens
  siRNA target sequence for FPGT (NM_003838.1,1181-1199).
cagtccataacttttagta

SEQ ID NO: 209173 - DNA, 19 bp, Homo sapiens
  siRNA target sequence for FPGT (NM_003838.1,1185-1203).
ccataacttttagtatctt

SEQ ID NO: 209174 - DNA, 19 bp, Homo sapiens
  siRNA target sequence for FPGT (NM_003838.1,1217-1235).
gaatgctctggcaaaacat

SEQ ID NO: 209175 - DNA, 19 bp, Homo sapiens
  siRNA target sequence for FPGT (NM_003838.1,1236-1254).
cctgtatcattcaaagcat

SEQ ID NO: 209176 - DNA, 19 bp, Homo sapiens
  siRNA target sequence for FPGT (NM_003838.1,1283-1301).
ggctcagttgtggagtatt

SEQ ID NO: 209177 - DNA, 19 bp, Homo sapiens
  siRNA target sequence for FPGT (NM_003838.1,1309-1327).
ggggcctgatgtttcagtt

SEQ ID NO: 209178 - DNA, 19 bp, Homo sapiens
  siRNA target sequence for FPGT (NM_003838.1,1349-1367).
ggttcttacatcctaacaa

SEQ ID NO: 209179 - DNA, 19 bp, Homo sapiens
  siRNA target sequence for FPGT (NM_003838.1,1373-1391).
gccctccccgcacattctt

SEQ ID NO: 209180 - DNA, 19 bp, Homo sapiens
  siRNA target sequence for FPGT (NM_003838.1,1451-1469).
ggagtgcaagacaacttga

SEQ ID NO: 209181 - DNA, 19 bp, Homo sapiens
  siRNA target sequence for FPGT (NM_003838.1,1452-1470).
gagtgcaagacaacttgaa

SEQ ID NO: 209182 - DNA, 19 bp, Homo sapiens
  siRNA target sequence for FPGT (NM_003838.1,1485-1503).
cattgtcagatataaagtt

SEQ ID NO: 209183 - DNA, 19 bp, Homo sapiens
  siRNA target sequence for FPGT (NM_003838.1,1548-1566).
ggaatcttaaagttacaga

SEQ ID NO: 209184 - DNA, 19 bp, Homo sapiens
  siRNA target sequence for FPGT (NM_003838.1,1613-1631).
cgcattttcccagtttgtt

SEQ ID NO: 209185 - DNA, 19 bp, Homo sapiens
  siRNA target sequence for FPGT (NM_003838.1,1639-1657).
gagtgactcagttataaca

SEQ ID NO: 209186 - DNA, 19 bp, Homo sapiens
  siRNA target sequence for FPGT (NM_003838.1,1649-1667).
gttataacatccctaaaga

SEQ ID NO: 209187 - DNA, 19 bp, Homo sapiens
  siRNA target sequence for FPGT (NM_003838.1,1701-1719).
gcctgaatagctataagtt

SEQ ID NO: 209188 - DNA, 19 bp, Homo sapiens
  siRNA target sequence for FPGT (NM_003838.1,1717-1735).
gttgctgtccattgaagaa

SEQ ID NO: 209189 - DNA, 19 bp, Homo sapiens
  siRNA target sequence for FPGT (NM_003838.1,1723-1741).
gtccattgaagaaatgctt

SEQ ID NO: 209190 - DNA, 19 bp, Homo sapiens
  siRNA target sequence for FPGT (NM_003838.1,1738-1756).
gcttatctacaaagatgta

SEQ ID NO: 209191 - DNA, 19 bp, Homo sapiens
  siRNA target sequence for FPGT (NM_003838.1,1754-1772).
gtagaagatatgataactt

SEQ ID NO: 209192 - DNA, 19 bp, Homo sapiens
  siRNA target sequence for GMPPA (NM_013335.2,172-190).
ctatgatccaacaccatat

SEQ ID NO: 209193 - DNA, 19 bp, Homo sapiens
  siRNA target sequence for GMPPA (NM_013335.2,340-358).
cagggggtggtctttacca

SEQ ID NO: 209194 - DNA, 19 bp, Homo sapiens
  siRNA target sequence for GMPPA (NM_013335.2,342-360).
gggggtggtctttaccatt

SEQ ID NO: 209195 - DNA, 19 bp, Homo sapiens
  siRNA target sequence for GMPPA (NM_013335.2,343-361).
ggggtggtctttaccattt

SEQ ID NO: 209196 - DNA, 19 bp, Homo sapiens
  siRNA target sequence for GMPPA (NM_013335.2,463-481).
gccagcgtcaccctttctt

SEQ ID NO: 209197 - DNA, 19 bp, Homo sapiens
  siRNA target sequence for GMPPA (NM_013335.2,505-523).
ggacgcaatccctcaacta

SEQ ID NO: 209198 - DNA, 19 bp, Homo sapiens
  siRNA target sequence for GMPPA (NM_013335.2,524-542).
cggctgcatcgttgagaat

SEQ ID NO: 209199 - DNA, 19 bp, Homo sapiens
  siRNA target sequence for GMPPA (NM_013335.2,544-562).
cacagacacacgaggtatt

SEQ ID NO: 209200 - DNA, 19 bp, Homo sapiens
  siRNA target sequence for GMPPA (NM_013335.2,611-629).
cggcatctacctcttttct

SEQ ID NO: 209201 - DNA, 19 bp, Homo sapiens
  siRNA target sequence for GMPPA (NM_013335.2,730-748).
gcctagagcaggatgtgtt

SEQ ID NO: 209202 - DNA, 19 bp, Homo sapiens
  siRNA target sequence for GMPPA (NM_013335.2,731-749).
cctagagcaggatgtgttt

SEQ ID NO: 209203 - DNA, 19 bp, Homo sapiens
  siRNA target sequence for GMPPA (NM_013335.2,763-781).
ggcagggccagatatacgt

SEQ ID NO: 209204 - DNA, 19 bp, Homo sapiens
  siRNA target sequence for GMPPA (NM_013335.2,1069-1087).
cgtgtgttctgcatagcat

SEQ ID NO: 209205 - DNA, 19 bp, Homo sapiens
  siRNA target sequence for GMPPA (NM_013335.2,1262-1280).
catcctgaactcgattgtt

SEQ ID NO: 209206 - DNA, 19 bp, Homo sapiens
  siRNA target sequence for GMPPB (NM_013334.2,376-394).
ctggccgtgagctacatgt

SEQ ID NO: 209207 - DNA, 19 bp, Homo sapiens
  siRNA target sequence for GMPPB (NM_013334.2,790-808).
cagcctacgtccattgaga

SEQ ID NO: 209208 - DNA, 19 bp, Homo sapiens
  siRNA target sequence for GMPPB (NM_013334.2,830-848).
ccaaggaggggcagctata

SEQ ID NO: 209209 - DNA, 19 bp, Homo sapiens
  siRNA target sequence for GMPPB (NM_013334.2,831-849).
caaggaggggcagctatat

SEQ ID NO: 209210 - DNA, 19 bp, Homo sapiens
  siRNA target sequence for GMPPB (NM_013334.2,1284-1302).
gggtgaggacgtcatagtt

SEQ ID NO: 209211 - DNA, 19 bp, Homo sapiens
  siRNA target sequence for GMPPB (NM_013334.2,1285-1303).
ggtgaggacgtcatagtta

SEQ ID NO: 209212 - DNA, 19 bp, Homo sapiens
  siRNA target sequence for GMPPB (NM_013334.2,1286-1304).
gtgaggacgtcatagttaa

SEQ ID NO: 209213 - DNA, 19 bp, Homo sapiens
  siRNA target sequence for GMPPB (NM_013334.2,1290-1308).
ggacgtcatagttaatgat

SEQ ID NO: 209214 - DNA, 19 bp, Homo sapiens
  siRNA target sequence for GMPPB (NM_013334.2,1335-1353).
gctgccccacaagtctatt

SEQ ID NO: 209215 - DNA, 19 bp, Homo sapiens
  siRNA target sequence for GMPPB (NM_013334.2,1366-1384).
ccagagcctcgtatcatca

SEQ ID NO: 209216 - DNA, 19 bp, Homo sapiens
  siRNA target sequence for GMPPB (NM_013334.2,1367-1385).
cagagcctcgtatcatcat

SEQ ID NO: 209217 - DNA, 19 bp, Homo sapiens
  siRNA target sequence for GMPPB (NM_013334.2,1369-1387).
gagcctcgtatcatcatgt

SEQ ID NO: 209218 - DNA, 19 bp, Homo sapiens
  siRNA target sequence for NMNAT3 (NM_178177.2,435-453).
cgacacctatgggaagaaa

SEQ ID NO: 209219 - DNA, 19 bp, Homo sapiens
  siRNA target sequence for NMNAT3 (NM_178177.2,790-808).
ggtcacgacccaaaaggtt

SEQ ID NO: 209220 - DNA, 19 bp, Homo sapiens
  siRNA target sequence for NMNAT3 (NM_178177.2,791-809).
gtcacgacccaaaaggtta

SEQ ID NO: 209221 - DNA, 19 bp, Homo sapiens
  siRNA target sequence for NMNAT3 (NM_178177.2,880-898).
gagatcagtgccacataca

SEQ ID NO: 209222 - DNA, 19 bp, Homo sapiens
  siRNA target sequence for DLG2 (NM_001364.1,279-297).
gttctttgcatgttactgt

SEQ ID NO: 209223 - DNA, 19 bp, Homo sapiens
  siRNA target sequence for DLG2 (NM_001364.1,304-322).
cggactaacgtgaagaagt

SEQ ID NO: 209224 - DNA, 19 bp, Homo sapiens
  siRNA target sequence for DLG2 (NM_001364.1,312-330).
cgtgaagaagtatcgatat

SEQ ID NO: 209225 - DNA, 19 bp, Homo sapiens
  siRNA target sequence for DLG2 (NM_001364.1,315-333).
gaagaagtatcgatatcaa

SEQ ID NO: 209226 - DNA, 19 bp, Homo sapiens
  siRNA target sequence for DLG2 (NM_001364.1,483-501).
cagtcctgctcctataatt

SEQ ID NO: 209227 - DNA, 19 bp, Homo sapiens
  siRNA target sequence for DLG2 (NM_001364.1,515-533).
ctttggacacaattcctta

SEQ ID NO: 209228 - DNA, 19 bp, Homo sapiens
  siRNA target sequence for DLG2 (NM_001364.1,520-538).
gacacaattccttatgtca

SEQ ID NO: 209229 - DNA, 19 bp, Homo sapiens
  siRNA target sequence for DLG2 (NM_001364.1,722-740).
gtatcttgcgggtgaatga

SEQ ID NO: 209230 - DNA, 19 bp, Homo sapiens
  siRNA target sequence for DLG2 (NM_001364.1,810-828).
gctgtatgtgcgtagaaga

SEQ ID NO: 209231 - DNA, 19 bp, Homo sapiens
  siRNA target sequence for DLG2 (NM_001364.1,819-837).
gcgtagaagacgacctatt

SEQ ID NO: 209232 - DNA, 19 bp, Homo sapiens
  siRNA target sequence for DLG2 (NM_001364.1,820-838).
cgtagaagacgacctattt

SEQ ID NO: 209233 - DNA, 19 bp, Homo sapiens
  siRNA target sequence for DLG2 (NM_001364.1,821-839).
gtagaagacgacctatttt

SEQ ID NO: 209234 - DNA, 19 bp, Homo sapiens
  siRNA target sequence for DLG2 (NM_001364.1,843-861).
gaccgttgtggaaatcaaa

SEQ ID NO: 209235 - DNA, 19 bp, Homo sapiens
  siRNA target sequence for DLG2 (NM_001364.1,852-870).
ggaaatcaaactgttcaaa

SEQ ID NO: 209236 - DNA, 19 bp, Homo sapiens
  siRNA target sequence for DLG2 (NM_001364.1,931-949).
gacaacagcatttatgtaa

SEQ ID NO: 209237 - DNA, 19 bp, Homo sapiens
  siRNA target sequence for DLG2 (NM_001364.1,1007-1025).
gactactaatggtaaacaa

SEQ ID NO: 209238 - DNA, 19 bp, Homo sapiens
  siRNA target sequence for DLG2 (NM_001364.1,1009-1027).
ctactaatggtaaacaact

SEQ ID NO: 209239 - DNA, 19 bp, Homo sapiens
  siRNA target sequence for DLG2 (NM_001364.1,1017-1035).
ggtaaacaactacagttta

SEQ ID NO: 209240 - DNA, 19 bp, Homo sapiens
  siRNA target sequence for DLG2 (NM_001364.1,1023-1041).
caactacagtttagaagaa

SEQ ID NO: 209241 - DNA, 19 bp, Homo sapiens
  siRNA target sequence for DLG2 (NM_001364.1,1051-1069).
gaagaggcagtagcaatat

SEQ ID NO: 209242 - DNA, 19 bp, Homo sapiens
  siRNA target sequence for DLG2 (NM_001364.1,1077-1095).
cacatcagaggtagtttat

SEQ ID NO: 209243 - DNA, 19 bp, Homo sapiens
  siRNA target sequence for DLG2 (NM_001364.1,1113-1131).
cactaccatttatatgact

SEQ ID NO: 209244 - DNA, 19 bp, Homo sapiens
  siRNA target sequence for DLG2 (NM_001364.1,1142-1160).
gtccacctgatattactca

SEQ ID NO: 209245 - DNA, 19 bp, Homo sapiens
  siRNA target sequence for DLG2 (NM_001364.1,1199-1217).
gcaacaatggcactttaga

SEQ ID NO: 209246 - DNA, 19 bp, Homo sapiens
  siRNA target sequence for DLG2 (NM_001364.1,1253-1271).
ggtactcaccaattccaaa

SEQ ID NO: 209247 - DNA, 19 bp, Homo sapiens
  siRNA target sequence for DLG2 (NM_001364.1,1323-1341).
cactgtgaacaaactatgt

SEQ ID NO: 209248 - DNA, 19 bp, Homo sapiens
  siRNA target sequence for DLG2 (NM_001364.1,1327-1345).
gtgaacaaactatgtgata

SEQ ID NO: 209249 - DNA, 19 bp, Homo sapiens
  siRNA target sequence for DLG2 (NM_001364.1,1478-1496).
caactcgtcagccttcaat

SEQ ID NO: 209250 - DNA, 19 bp, Homo sapiens
  siRNA target sequence for DLG2 (NM_001364.1,1747-1765).
ggacagacagtgacgatta

SEQ ID NO: 209251 - DNA, 19 bp, Homo sapiens
  siRNA target sequence for DLG2 (NM_001364.1,1752-1770).
gacagtgacgattatagca

SEQ ID NO: 209252 - DNA, 19 bp, Homo sapiens
  siRNA target sequence for DLG2 (NM_001364.1,1758-1776).
gacgattatagcacaatat

SEQ ID NO: 209253 - DNA, 19 bp, Homo sapiens
  siRNA target sequence for DLG2 (NM_001364.1,1793-1811).
ctcgatttgaggccaaaat

SEQ ID NO: 209254 - DNA, 19 bp, Homo sapiens
  siRNA target sequence for DLG2 (NM_001364.1,1860-1878).
cggatccctgcgaaccaat

SEQ ID NO: 209255 - DNA, 19 bp, Homo sapiens
  siRNA target sequence for DLG2 (NM_001364.1,1865-1883).
ccctgcgaaccaatcagaa

SEQ ID NO: 209256 - DNA, 19 bp, Homo sapiens
  siRNA target sequence for DLG2 (NM_001364.1,1866-1884).
cctgcgaaccaatcagaaa

SEQ ID NO: 209257 - DNA, 19 bp, Homo sapiens
  siRNA target sequence for DLG2 (NM_001364.1,1942-1960).
ccaagtcaaggacttagtt

SEQ ID NO: 209258 - DNA, 19 bp, Homo sapiens
  siRNA target sequence for DLG2 (NM_001364.1,1972-1990).
gatattctccacgttatca

SEQ ID NO: 209259 - DNA, 19 bp, Homo sapiens
  siRNA target sequence for DLG2 (NM_001364.1,2059-2077).
gtcatccccagcaaaagga

SEQ ID NO: 209260 - DNA, 19 bp, Homo sapiens
  siRNA target sequence for DLG2 (NM_001364.1,2127-2145).
caaacctggagtgattgat

SEQ ID NO: 209261 - DNA, 19 bp, Homo sapiens
  siRNA target sequence for DLG2 (NM_001364.1,2132-2150).
ctggagtgattgattcgaa

SEQ ID NO: 209262 - DNA, 19 bp, Homo sapiens
  siRNA target sequence for DLG2 (NM_001364.1,2143-2161).
gattcgaaagggtcattca

SEQ ID NO: 209263 - DNA, 19 bp, Homo sapiens
  siRNA target sequence for DLG2 (NM_001364.1,2147-2165).
cgaaagggtcattcaatga

SEQ ID NO: 209264 - DNA, 19 bp, Homo sapiens
  siRNA target sequence for DLG2 (NM_001364.1,2170-2188).
cgtaaaaagagcttcatct

SEQ ID NO: 209265 - DNA, 19 bp, Homo sapiens
  siRNA target sequence for DLG2 (NM_001364.1,2340-2358).
catgaaggatcggatcaat

SEQ ID NO: 209266 - DNA, 19 bp, Homo sapiens
  siRNA target sequence for DLG2 (NM_001364.1,2352-2370).
gatcaatgacgacttgata

SEQ ID NO: 209267 - DNA, 19 bp, Homo sapiens
  siRNA target sequence for DLG2 (NM_001364.1,2359-2377).
gacgacttgatatctgaat

SEQ ID NO: 209268 - DNA, 19 bp, Homo sapiens
  siRNA target sequence for DLG2 (NM_001364.1,2444-2462).
gcagagactatcactttgt

SEQ ID NO: 209269 - DNA, 19 bp, Homo sapiens
  siRNA target sequence for DLG2 (NM_001364.1,2493-2511).
ccaagagcacaagtttata

SEQ ID NO: 209270 - DNA, 19 bp, Homo sapiens
  siRNA target sequence for DLG2 (NM_001364.1,2518-2536).
ggccagtacaatgacaatt

SEQ ID NO: 209271 - DNA, 19 bp, Homo sapiens
  siRNA target sequence for DLG2 (NM_001364.1,2520-2538).
ccagtacaatgacaattta

SEQ ID NO: 209272 - DNA, 19 bp, Homo sapiens
  siRNA target sequence for DLG2 (NM_001364.1,2521-2539).
cagtacaatgacaatttat

SEQ ID NO: 209273 - DNA, 19 bp, Homo sapiens
  siRNA target sequence for DLG2 (NM_001364.1,2562-2580).
gagatttgtagcagaaaga

SEQ ID NO: 209274 - DNA, 19 bp, Homo sapiens
  siRNA target sequence for DLG2 (NM_001364.1,2615-2633).
ctatcaagcggttacaagt

SEQ ID NO: 209275 - DNA, 19 bp, Homo sapiens
  siRNA target sequence for DLG2 (NM_001364.1,2732-2750).
cctatgatcgagcaattaa

SEQ ID NO: 209276 - DNA, 19 bp, Homo sapiens
  siRNA target sequence for DLG2 (NM_001364.1,2751-2769).
gctagaacaagaatttgga

SEQ ID NO: 209277 - DNA, 19 bp, Homo sapiens
  siRNA target sequence for DLG2 (NM_001364.1,2794-2812).
ggagatactttagaagata

SEQ ID NO: 209278 - DNA, 19 bp, Homo sapiens
  siRNA target sequence for DLG2 (NM_001364.1,2806-2824).
gaagatatatataaccaat

SEQ ID NO: 209279 - DNA, 19 bp, Homo sapiens
  siRNA target sequence for DLG2 (NM_001364.1,2820-2838).
ccaatgcaagcttgttatt

SEQ ID NO: 209280 - DNA, 19 bp, Homo sapiens
  siRNA target sequence for DLG3 (NM_021120.1,778-796).
gtgtgctgcgggtgaatga

SEQ ID NO: 209281 - DNA, 19 bp, Homo sapiens
  siRNA target sequence for DLG3 (NM_021120.1,985-1003).
gagacaacagcatctacat

SEQ ID NO: 209282 - DNA, 19 bp, Homo sapiens
  siRNA target sequence for DLG3 (NM_021120.1,1037-1055).
ggatggacgcctacagatt

SEQ ID NO: 209283 - DNA, 19 bp, Homo sapiens
  siRNA target sequence for DLG3 (NM_021120.1,1119-1137).
gcctcactgaagaacacat

SEQ ID NO: 209284 - DNA, 19 bp, Homo sapiens
  siRNA target sequence for DLG3 (NM_021120.1,1138-1156).
ctgatatggtgtatttgaa

SEQ ID NO: 209285 - DNA, 19 bp, Homo sapiens
  siRNA target sequence for DLG3 (NM_021120.1,1206-1224).
gactacgccagcactttta

SEQ ID NO: 209286 - DNA, 19 bp, Homo sapiens
  siRNA target sequence for DLG3 (NM_021120.1,1208-1226).
ctacgccagcacttttact

SEQ ID NO: 209287 - DNA, 19 bp, Homo sapiens
  siRNA target sequence for DLG3 (NM_021120.1,1242-1260).
cacataagccataattcca

SEQ ID NO: 209288 - DNA, 19 bp, Homo sapiens
  siRNA target sequence for DLG3 (NM_021120.1,1325-1343).
cacccgctactctcctatt

SEQ ID NO: 209289 - DNA, 19 bp, Homo sapiens
  siRNA target sequence for DLG3 (NM_021120.1,1514-1532).
caggggagaccggatctta

SEQ ID NO: 209290 - DNA, 19 bp, Homo sapiens
  siRNA target sequence for DLG3 (NM_021120.1,1665-1683).
catgacttacgagaacaaa

SEQ ID NO: 209291 - DNA, 19 bp, Homo sapiens
  siRNA target sequence for DLG3 (NM_021120.1,1826-1844).
cattctgcatgtcattaat

SEQ ID NO: 209292 - DNA, 19 bp, Homo sapiens
  siRNA target sequence for DLG3 (NM_021120.1,1909-1927).
gtgtgatccccagtaagaa

SEQ ID NO: 209293 - DNA, 19 bp, Homo sapiens
  siRNA target sequence for DLG3 (NM_021120.1,1948-1966).
gagctcgattgaaaactgt

SEQ ID NO: 209294 - DNA, 19 bp, Homo sapiens
  siRNA target sequence for DLG3 (NM_021120.1,1984-2002).
cggggatgattgagtctaa

SEQ ID NO: 209295 - DNA, 19 bp, Homo sapiens
  siRNA target sequence for DLG3 (NM_021120.1,1986-2004).
gggatgattgagtctaaca

SEQ ID NO: 209296 - DNA, 19 bp, Homo sapiens
  siRNA target sequence for DLG3 (NM_021120.1,2015-2033).
ggggttaagtgacgattat

SEQ ID NO: 209297 - DNA, 19 bp, Homo sapiens
  siRNA target sequence for DLG3 (NM_021120.1,2016-2034).
gggttaagtgacgattatt

SEQ ID NO: 209298 - DNA, 19 bp, Homo sapiens
  siRNA target sequence for DLG3 (NM_021120.1,2018-2036).
gttaagtgacgattattat

SEQ ID NO: 209299 - DNA, 19 bp, Homo sapiens
  siRNA target sequence for DLG3 (NM_021120.1,2058-2076).
caagaggatgctattttgt

SEQ ID NO: 209300 - DNA, 19 bp, Homo sapiens
  siRNA target sequence for DLG3 (NM_021120.1,2085-2103).
ccagtgacacggcaagaaa

SEQ ID NO: 209301 - DNA, 19 bp, Homo sapiens
  siRNA target sequence for DLG3 (NM_021120.1,2086-2104).
cagtgacacggcaagaaat

SEQ ID NO: 209302 - DNA, 19 bp, Homo sapiens
  siRNA target sequence for DLG3 (NM_021120.1,2092-2110).
cacggcaagaaattcacta

SEQ ID NO: 209303 - DNA, 19 bp, Homo sapiens
  siRNA target sequence for DLG3 (NM_021120.1,2168-2186).
ctccgaatttccacataaa

SEQ ID NO: 209304 - DNA, 19 bp, Homo sapiens
  siRNA target sequence for DLG3 (NM_021120.1,2170-2188).
ccgaatttccacataaatt

SEQ ID NO: 209305 - DNA, 19 bp, Homo sapiens
  siRNA target sequence for DLG3 (NM_021120.1,2215-2233).
ggcctcgacgtgataatga

SEQ ID NO: 209306 - DNA, 19 bp, Homo sapiens
  siRNA target sequence for DLG3 (NM_021120.1,2242-2260).
gacaagactaccactttgt

SEQ ID NO: 209307 - DNA, 19 bp, Homo sapiens
  siRNA target sequence for DLG3 (NM_021120.1,2259-2277).
gtggtgtcccgagaacaaa

SEQ ID NO: 209308 - DNA, 19 bp, Homo sapiens
  siRNA target sequence for DLG3 (NM_021120.1,2317-2335).
gccaatttaatgataacct

SEQ ID NO: 209309 - DNA, 19 bp, Homo sapiens
  siRNA target sequence for DLG3 (NM_021120.1,2385-2403).
cactgcatcttagatgttt

SEQ ID NO: 209310 - DNA, 19 bp, Homo sapiens
  siRNA target sequence for DLG3 (NM_021120.1,2397-2415).
gatgtttccggcaatgcta

SEQ ID NO: 209311 - DNA, 19 bp, Homo sapiens
  siRNA target sequence for DLG3 (NM_021120.1,2462-2480).
caagcccaagtccattgaa

SEQ ID NO: 209312 - DNA, 19 bp, Homo sapiens
  siRNA target sequence for DLG3 (NM_021120.1,2495-2513).
gaaccgaaggcagacatat

SEQ ID NO: 209313 - DNA, 19 bp, Homo sapiens
  siRNA target sequence for DLG3 (NM_021120.1,2498-2516).
ccgaaggcagacatatgaa

SEQ ID NO: 209314 - DNA, 19 bp, Homo sapiens
  siRNA target sequence for DLG3 (NM_021120.1,2514-2532).
gaacaagcaaataagatct

SEQ ID NO: 209315 - DNA, 19 bp, Homo sapiens
  siRNA target sequence for DLG3 (NM_021120.1,2520-2538).
gcaaataagatctatgaca

SEQ ID NO: 209316 - DNA, 19 bp, Homo sapiens
  siRNA target sequence for DLG3 (NM_021120.1,2521-2539).
caaataagatctatgacaa

SEQ ID NO: 209317 - DNA, 19 bp, Homo sapiens
  siRNA target sequence for DLG3 (NM_021120.1,2570-2588).
gtactttacagccattgta

SEQ ID NO: 209318 - DNA, 19 bp, Homo sapiens
  siRNA target sequence for DLG3 (NM_021120.1,2593-2611).
gtgactcactggaagagat

SEQ ID NO: 209319 - DNA, 19 bp, Homo sapiens
  siRNA target sequence for DLG3 (NM_021120.1,2663-2681).
ggtcccatcccctgaaaaa

SEQ ID NO: 209320 - DNA, 19 bp, Homo sapiens
  siRNA target sequence for MAGI-3 (NM_020965.2,580-598).
ccgtctcaagactgtgaaa

SEQ ID NO: 209321 - DNA, 19 bp, Homo sapiens
  siRNA target sequence for MAGI-3 (NM_020965.2,620-638).
gatttgcggcattacctaa

SEQ ID NO: 209322 - DNA, 19 bp, Homo sapiens
  siRNA target sequence for MAGI-3 (NM_020965.2,625-643).
gcggcattacctaagtctt

SEQ ID NO: 209323 - DNA, 19 bp, Homo sapiens
  siRNA target sequence for MAGI-3 (NM_020965.2,646-664).
gtttcaaaaaggatcaatt

SEQ ID NO: 209324 - DNA, 19 bp, Homo sapiens
  siRNA target sequence for MAGI-3 (NM_020965.2,657-675).
gatcaattgaccacaaact

SEQ ID NO: 209325 - DNA, 19 bp, Homo sapiens
  siRNA target sequence for MAGI-3 (NM_020965.2,828-846).
ggacatatgatggaaactt

SEQ ID NO: 209326 - DNA, 19 bp, Homo sapiens
  siRNA target sequence for MAGI-3 (NM_020965.2,889-907).
gccagatccagttgatcaa

SEQ ID NO: 209327 - DNA, 19 bp, Homo sapiens
  siRNA target sequence for MAGI-3 (NM_020965.2,908-926).
gtcctctttgataatgagt

SEQ ID NO: 209328 - DNA, 19 bp, Homo sapiens
  siRNA target sequence for MAGI-3 (NM_020965.2,1163-1181).
gaaccactgcccaaaaact

SEQ ID NO: 209329 - DNA, 19 bp, Homo sapiens
  siRNA target sequence for MAGI-3 (NM_020965.2,1197-1215).
ctgacacagggatgatcta

SEQ ID NO: 209330 - DNA, 19 bp, Homo sapiens
  siRNA target sequence for MAGI-3 (NM_020965.2,1199-1217).
gacacagggatgatctact

SEQ ID NO: 209331 - DNA, 19 bp, Homo sapiens
  siRNA target sequence for MAGI-3 (NM_020965.2,1206-1224).
ggatgatctacttcattga

SEQ ID NO: 209332 - DNA, 19 bp, Homo sapiens
  siRNA target sequence for MAGI-3 (NM_020965.2,1253-1271).
gatcctcgtctttgtaaga

SEQ ID NO: 209333 - DNA, 19 bp, Homo sapiens
  siRNA target sequence for MAGI-3 (NM_020965.2,1337-1355).
cctcagtatgggacatact

SEQ ID NO: 209334 - DNA, 19 bp, Homo sapiens
  siRNA target sequence for MAGI-3 (NM_020965.2,1338-1356).
ctcagtatgggacatacta

SEQ ID NO: 209335 - DNA, 19 bp, Homo sapiens
  siRNA target sequence for MAGI-3 (NM_020965.2,1431-1449).
ggttcaatcaccttaacca

SEQ ID NO: 209336 - DNA, 19 bp, Homo sapiens
  siRNA target sequence for MAGI-3 (NM_020965.2,1447-1465).
ccagaaaacccagtttgaa

SEQ ID NO: 209337 - DNA, 19 bp, Homo sapiens
  siRNA target sequence for MAGI-3 (NM_020965.2,1496-1514).
cagttaggacaggttgaaa

SEQ ID NO: 209338 - DNA, 19 bp, Homo sapiens
  siRNA target sequence for MAGI-3 (NM_020965.2,1586-1604).
gttcgagcatcactgaaaa

SEQ ID NO: 209339 - DNA, 19 bp, Homo sapiens
  siRNA target sequence for MAGI-3 (NM_020965.2,1616-1634).
ggatttggttttactatta

SEQ ID NO: 209340 - DNA, 19 bp, Homo sapiens
  siRNA target sequence for MAGI-3 (NM_020965.2,1657-1675).
gttcctacaagtgaaaaat

SEQ ID NO: 209341 - DNA, 19 bp, Homo sapiens
  siRNA target sequence for MAGI-3 (NM_020965.2,1716-1734).
caccaggcgatgttattgt

SEQ ID NO: 209342 - DNA, 19 bp, Homo sapiens
  siRNA target sequence for MAGI-3 (NM_020965.2,1719-1737).
caggcgatgttattgtaga

SEQ ID NO: 209343 - DNA, 19 bp, Homo sapiens
  siRNA target sequence for MAGI-3 (NM_020965.2,1825-1843).
cactttatgtcgtggttat

SEQ ID NO: 209344 - DNA, 19 bp, Homo sapiens
  siRNA target sequence for MAGI-3 (NM_020965.2,1924-1942).
gggagagacttgcatgaat

SEQ ID NO: 209345 - DNA, 19 bp, Homo sapiens
  siRNA target sequence for MAGI-3 (NM_020965.2,1970-1988).
gttctggagcagaatggaa

SEQ ID NO: 209346 - DNA, 19 bp, Homo sapiens
  siRNA target sequence for MAGI-3 (NM_020965.2,2005-2023).
gactggtgatggtctcaat

SEQ ID NO: 209347 - DNA, 19 bp, Homo sapiens
  siRNA target sequence for MAGI-3 (NM_020965.2,2040-2058).
gtgagcagagagtatccat

SEQ ID NO: 209348 - DNA, 19 bp, Homo sapiens
  siRNA target sequence for MAGI-3 (NM_020965.2,2090-2108).
gtgactatccctttgatta

SEQ ID NO: 209349 - DNA, 19 bp, Homo sapiens
  siRNA target sequence for MAGI-3 (NM_020965.2,2340-2358).
caaccaaaactgccaaaat

SEQ ID NO: 209350 - DNA, 19 bp, Homo sapiens
  siRNA target sequence for MAGI-3 (NM_020965.2,2398-2416).
cataaatgagcctattcct

SEQ ID NO: 209351 - DNA, 19 bp, Homo sapiens
  siRNA target sequence for MAGI-3 (NM_020965.2,2427-2445).
cttttccaccgagcattat

SEQ ID NO: 209352 - DNA, 19 bp, Homo sapiens
  siRNA target sequence for MAGI-3 (NM_020965.2,2485-2503).
cctgaaatctaagacttta

SEQ ID NO: 209353 - DNA, 19 bp, Homo sapiens
  siRNA target sequence for MAGI-3 (NM_020965.2,2526-2544).
ccaaagatttggatgtttt

SEQ ID NO: 209354 - DNA, 19 bp, Homo sapiens
  siRNA target sequence for MAGI-3 (NM_020965.2,2594-2612).
ggacctgaccagtctatat

SEQ ID NO: 209355 - DNA, 19 bp, Homo sapiens
  siRNA target sequence for MAGI-3 (NM_020965.2,2595-2613).
gacctgaccagtctatata

SEQ ID NO: 209356 - DNA, 19 bp, Homo sapiens
  siRNA target sequence for MAGI-3 (NM_020965.2,2597-2615).
cctgaccagtctatatata

SEQ ID NO: 209357 - DNA, 19 bp, Homo sapiens
  siRNA target sequence for MAGI-3 (NM_020965.2,2598-2616).
ctgaccagtctatatatat

SEQ ID NO: 209358 - DNA, 19 bp, Homo sapiens
  siRNA target sequence for MAGI-3 (NM_020965.2,2663-2681).
cgcgcagctgatgaactaa

SEQ ID NO: 209359 - DNA, 19 bp, Homo sapiens
  siRNA target sequence for MAGI-3 (NM_020965.2,2664-2682).
gcgcagctgatgaactaat

SEQ ID NO: 209360 - DNA, 19 bp, Homo sapiens
  siRNA target sequence for MAGI-3 (NM_020965.2,2760-2778).
gccatgtgttactaactgt

SEQ ID NO: 209361 - DNA, 19 bp, Homo sapiens
  siRNA target sequence for MAGI-3 (NM_020965.2,2775-2793).
ctgtcagacggaagatctt

SEQ ID NO: 209362 - DNA, 19 bp, Homo sapiens
  siRNA target sequence for MAGI-3 (NM_020965.2,2777-2795).
gtcagacggaagatcttct

SEQ ID NO: 209363 - DNA, 19 bp, Homo sapiens
  siRNA target sequence for MAGI-3 (NM_020965.2,2918-2936).
gtcttgcaacgaaaagaaa

SEQ ID NO: 209364 - DNA, 19 bp, Homo sapiens
  siRNA target sequence for MAGI-3 (NM_020965.2,2985-3003).
caggagttattcctcataa

SEQ ID NO: 209365 - DNA, 19 bp, Homo sapiens
  siRNA target sequence for MAGI-3 (NM_020965.2,3079-3097).
gaatgggcagtccattgtt

SEQ ID NO: 209366 - DNA, 19 bp, Homo sapiens
  siRNA target sequence for MAGI-3 (NM_020965.2,3140-3158).
ggtgtcaccgtcacactaa

SEQ ID NO: 209367 - DNA, 19 bp, Homo sapiens
  siRNA target sequence for MAGI-3 (NM_020965.2,3286-3304).
cctagaaggtgaaattgga

SEQ ID NO: 209368 - DNA, 19 bp, Homo sapiens
  siRNA target sequence for MAGI-3 (NM_020965.2,3389-3407).
ggcagtcggcacaatcaga

SEQ ID NO: 209369 - DNA, 19 bp, Homo sapiens
  siRNA target sequence for MAGI-3 (NM_020965.2,3471-3489).
gggggaaggagtacaacat

SEQ ID NO: 209370 - DNA, 19 bp, Homo sapiens
  siRNA target sequence for MAGI-3 (NM_020965.2,3574-3592).
caatggggaacctacacaa

SEQ ID NO: 209371 - DNA, 19 bp, Homo sapiens
  siRNA target sequence for MAGI-3 (NM_020965.2,3609-3627).
gagcaattgagctcattca

SEQ ID NO: 209372 - DNA, 19 bp, Homo sapiens
  siRNA target sequence for MAGI-3 (NM_020965.2,3661-3679).
gccaggaactggcttgata

SEQ ID NO: 209373 - DNA, 19 bp, Homo sapiens
  siRNA target sequence for MAGI-3 (NM_020965.2,3719-3737).
gtgaaacccgagcaacatt

SEQ ID NO: 209374 - DNA, 19 bp, Homo sapiens
  siRNA target sequence for MPP1 (NM_002436.2,219-237).
ctgtatcgcatccattgaa

SEQ ID NO: 209375 - DNA, 19 bp, Homo sapiens
  siRNA target sequence for MPP1 (NM_002436.2,221-239).
gtatcgcatccattgaata

SEQ ID NO: 209376 - DNA, 19 bp, Homo sapiens
  siRNA target sequence for MPP1 (NM_002436.2,225-243).
cgcatccattgaatactgt

SEQ ID NO: 209377 - DNA, 19 bp, Homo sapiens
  siRNA target sequence for MPP1 (NM_002436.2,240-258).
ctgtgaccgaggacatgta

SEQ ID NO: 209378 - DNA, 19 bp, Homo sapiens
  siRNA target sequence for MPP1 (NM_002436.2,313-331).
gcggaaagtgcgactcata

SEQ ID NO: 209379 - DNA, 19 bp, Homo sapiens
  siRNA target sequence for MPP1 (NM_002436.2,315-333).
ggaaagtgcgactcataca

SEQ ID NO: 209380 - DNA, 19 bp, Homo sapiens
  siRNA target sequence for MPP1 (NM_002436.2,455-473).
ggggatgagatcctagaaa

SEQ ID NO: 209381 - DNA, 19 bp, Homo sapiens
  siRNA target sequence for MPP1 (NM_002436.2,456-474).
gggatgagatcctagaaat

SEQ ID NO: 209382 - DNA, 19 bp, Homo sapiens
  siRNA target sequence for MPP1 (NM_002436.2,458-476).
gatgagatcctagaaatca

SEQ ID NO: 209383 - DNA, 19 bp, Homo sapiens
  siRNA target sequence for MPP1 (NM_002436.2,481-499).
cacaaatgtgacaaatcat

SEQ ID NO: 209384 - DNA, 19 bp, Homo sapiens
  siRNA target sequence for MPP1 (NM_002436.2,579-597).
gtcttcctgcactacagat

SEQ ID NO: 209385 - DNA, 19 bp, Homo sapiens
  siRNA target sequence for MPP1 (NM_002436.2,585-603).
ctgcactacagatgttcat

SEQ ID NO: 209386 - DNA, 19 bp, Homo sapiens
  siRNA target sequence for MPP1 (NM_002436.2,587-605).
gcactacagatgttcatga

SEQ ID NO: 209387 - DNA, 19 bp, Homo sapiens
  siRNA target sequence for MPP1 (NM_002436.2,604-622).
gagagcgcagtttgactat

SEQ ID NO: 209388 - DNA, 19 bp, Homo sapiens
  siRNA target sequence for MPP1 (NM_002436.2,606-624).
gagcgcagtttgactatga

SEQ ID NO: 209389 - DNA, 19 bp, Homo sapiens
  siRNA target sequence for MPP1 (NM_002436.2,659-677).
gcgggactgaagtttgcta

SEQ ID NO: 209390 - DNA, 19 bp, Homo sapiens
  siRNA target sequence for MPP1 (NM_002436.2,885-903).
ccaagcacagctcgatttt

SEQ ID NO: 209391 - DNA, 19 bp, Homo sapiens
  siRNA target sequence for MPP1 (NM_002436.2,886-904).
caagcacagctcgattttt

SEQ ID NO: 209392 - DNA, 19 bp, Homo sapiens
  siRNA target sequence for MPP1 (NM_002436.2,889-907).
gcacagctcgatttttgat

SEQ ID NO: 209393 - DNA, 19 bp, Homo sapiens
  siRNA target sequence for MPP1 (NM_002436.2,894-912).
gctcgatttttgatcagtt

SEQ ID NO: 209394 - DNA, 19 bp, Homo sapiens
  siRNA target sequence for MPP1 (NM_002436.2,905-923).
gatcagttggatgttgttt

SEQ ID NO: 209395 - DNA, 19 bp, Homo sapiens
  siRNA target sequence for MPP1 (NM_002436.2,941-959).
cggctccctgcattcaaga

SEQ ID NO: 209396 - DNA, 19 bp, Homo sapiens
  siRNA target sequence for MPP1 (NM_002436.2,992-1010).
gtgggtcgcagccacatta

SEQ ID NO: 209397 - DNA, 19 bp, Homo sapiens
  siRNA target sequence for MPP1 (NM_002436.2,1026-1044).
gccagaatccggagaagtt

SEQ ID NO: 209398 - DNA, 19 bp, Homo sapiens
  siRNA target sequence for MPP1 (NM_002436.2,1027-1045).
ccagaatccggagaagttt

SEQ ID NO: 209399 - DNA, 19 bp, Homo sapiens
  siRNA target sequence for MPP1 (NM_002436.2,1046-1064).
gtgtaccctgtcccatata

SEQ ID NO: 209400 - DNA, 19 bp, Homo sapiens
  siRNA target sequence for MPP1 (NM_002436.2,1048-1066).
gtaccctgtcccatataca

SEQ ID NO: 209401 - DNA, 19 bp, Homo sapiens
  siRNA target sequence for MPP1 (NM_002436.2,1098-1116).
ggaaggagtaccactttat

SEQ ID NO: 209402 - DNA, 19 bp, Homo sapiens
  siRNA target sequence for MPP1 (NM_002436.2,1102-1120).
ggagtaccactttatctca

SEQ ID NO: 209403 - DNA, 19 bp, Homo sapiens
  siRNA target sequence for MPP1 (NM_002436.2,1103-1121).
gagtaccactttatctcaa

SEQ ID NO: 209404 - DNA, 19 bp, Homo sapiens
  siRNA target sequence for MPP1 (NM_002436.2,1174-1192).
ctaccaaggcaacatgttt

SEQ ID NO: 209405 - DNA, 19 bp, Homo sapiens
  siRNA target sequence for MPP1 (NM_002436.2,1189-1207).
gtttggcaccaaatttgaa

SEQ ID NO: 209406 - DNA, 19 bp, Homo sapiens
  siRNA target sequence for MPP1 (NM_002436.2,1277-1295).
gttcggacagcagaacttt

SEQ ID NO: 209407 - DNA, 19 bp, Homo sapiens
  siRNA target sequence for MPP1 (NM_002436.2,1287-1305).
cagaactttcgcctttcat

SEQ ID NO: 209408 - DNA, 19 bp, Homo sapiens
  siRNA target sequence for MPP1 (NM_002436.2,1386-1404).
gccagtacgctcactactt

SEQ ID NO: 209409 - DNA, 19 bp, Homo sapiens
  siRNA target sequence for MPP1 (NM_002436.2,1408-1426).
cctctcactggtcaataat

SEQ ID NO: 209410 - DNA, 19 bp, Homo sapiens
  siRNA target sequence for MPP1 (NM_002436.2,1417-1435).
ggtcaataatggtgttgat

SEQ ID NO: 209411 - DNA, 19 bp, Homo sapiens
  siRNA target sequence for MPP1 (NM_002436.2,1433-1451).
gatgaaacccttaagaaat

SEQ ID NO: 209412 - DNA, 19 bp, Homo sapiens
  siRNA target sequence for MPP3 (NM_001932.2,463-481).
ctcagttacttaatgaaga

SEQ ID NO: 209413 - DNA, 19 bp, Homo sapiens
  siRNA target sequence for MPP3 (NM_001932.2,465-483).
cagttacttaatgaagatt

SEQ ID NO: 209414 - DNA, 19 bp, Homo sapiens
  siRNA target sequence for MPP3 (NM_001932.2,489-507).
gaagcttcgctattatgaa

SEQ ID NO: 209415 - DNA, 19 bp, Homo sapiens
  siRNA target sequence for MPP3 (NM_001932.2,662-680).
cggttgcccagaagaattt

SEQ ID NO: 209416 - DNA, 19 bp, Homo sapiens
  siRNA target sequence for MPP3 (NM_001932.2,695-713).
cgcctctgcctgacaatat

SEQ ID NO: 209417 - DNA, 19 bp, Homo sapiens
  siRNA target sequence for MPP3 (NM_001932.2,708-726).
caatatcgatgaggatttt

SEQ ID NO: 209418 - DNA, 19 bp, Homo sapiens
  siRNA target sequence for MPP3 (NM_001932.2,957-975).
gggatccatcaccctaaaa

SEQ ID NO: 209419 - DNA, 19 bp, Homo sapiens
  siRNA target sequence for MPP3 (NM_001932.2,958-976).
ggatccatcaccctaaaaa

SEQ ID NO: 209420 - DNA, 19 bp, Homo sapiens
  siRNA target sequence for MPP3 (NM_001932.2,959-977).
gatccatcaccctaaaaat

SEQ ID NO: 209421 - DNA, 19 bp, Homo sapiens
  siRNA target sequence for MPP3 (NM_001932.2,1430-1448).
ctccggagctgctgactta

SEQ ID NO: 209422 - DNA, 19 bp, Homo sapiens
  siRNA target sequence for MPP3 (NM_001932.2,1604-1622).
cccgaaagagccatgagaa

SEQ ID NO: 209423 - DNA, 19 bp, Homo sapiens
  siRNA target sequence for MPP3 (NM_001932.2,1658-1676).
catttgaggccgacttaca

SEQ ID NO: 209424 - DNA, 19 bp, Homo sapiens
  siRNA target sequence for MPP3 (NM_001932.2,1667-1685).
ccgacttacatcacaacaa

SEQ ID NO: 209425 - DNA, 19 bp, Homo sapiens
  siRNA target sequence for MPP3 (NM_001932.2,1747-1765).
gctgttatggccaaaaaca

SEQ ID NO: 209426 - DNA, 19 bp, Homo sapiens
  siRNA target sequence for MPP3 (NM_001932.2,1748-1766).
ctgttatggccaaaaacaa

SEQ ID NO: 209427 - DNA, 19 bp, Homo sapiens
  siRNA target sequence for MPP3 (NM_001932.2,1804-1822).
caactgaggacctcagaat

SEQ ID NO: 209428 - DNA, 19 bp, Homo sapiens
  siRNA target sequence for MPP3 (NM_001932.2,1941-1959).
cgcttctgccgccttcata

SEQ ID NO: 209429 - DNA, 19 bp, Homo sapiens
  siRNA target sequence for MPP3 (NM_001932.2,1943-1961).
cttctgccgccttcataga

SEQ ID NO: 209430 - DNA, 19 bp, Homo sapiens
  siRNA target sequence for MPP3 (NM_001932.2,2065-2083).
cactgggtacctgttagtt

SEQ ID NO: 209431 - DNA, 19 bp, Homo sapiens
  siRNA target sequence for PMVK (NM_006556.2,756-774).
cgatgctgagtcagaatgt

SEQ ID NO: 209432 - DNA, 19 bp, Homo sapiens
  siRNA target sequence for PMVK (NM_006556.2,850-868).
gagaacctgatagaattta

SEQ ID NO: 209433 - DNA, 19 bp, Homo sapiens
  siRNA target sequence for CKB (NM_001823.3,273-291).
ggccacccgtacatcatga

SEQ ID NO: 209434 - DNA, 19 bp, Homo sapiens
  siRNA target sequence for CKB (NM_001823.3,877-895).
ctaaggactatgagttcat

SEQ ID NO: 209435 - DNA, 19 bp, Homo sapiens
  siRNA target sequence for CKM (NM_001824.2,136-154).
ccgacctcagcaaacataa

SEQ ID NO: 209436 - DNA, 19 bp, Homo sapiens
  siRNA target sequence for CKM (NM_001824.2,565-583).
gcctgacgggcgagttcaa

SEQ ID NO: 209437 - DNA, 19 bp, Homo sapiens
  siRNA target sequence for CKM (NM_001824.2,566-584).
cctgacgggcgagttcaaa

SEQ ID NO: 209438 - DNA, 19 bp, Homo sapiens
  siRNA target sequence for CKM (NM_001824.2,836-854).
cgtagggctgcagaagatt

SEQ ID NO: 209439 - DNA, 19 bp, Homo sapiens
  siRNA target sequence for CKM (NM_001824.2,1060-1078).
ccgtgggctcagtatttga

SEQ ID NO: 209440 - DNA, 19 bp, Homo sapiens
  siRNA target sequence for CKMT1 (NM_020990.2,408-426).
ctggttggacgctagatca

SEQ ID NO: 209441 - DNA, 19 bp, Homo sapiens
  siRNA target sequence for CKMT1 (NM_020990.2,414-432).
ggacgctagatcagtgtat

SEQ ID NO: 209442 - DNA, 19 bp, Homo sapiens
  siRNA target sequence for CKMT1 (NM_020990.2,538-556).
gatccaagagcgacacaat

SEQ ID NO: 209443 - DNA, 19 bp, Homo sapiens
  siRNA target sequence for CKMT1 (NM_020990.2,626-644).
gatgagaggtatgtattgt

SEQ ID NO: 209444 - DNA, 19 bp, Homo sapiens
  siRNA target sequence for CKMT1 (NM_020990.2,767-785).
ctggctggacgttactata

SEQ ID NO: 209445 - DNA, 19 bp, Homo sapiens
  siRNA target sequence for CKMT1 (NM_020990.2,896-914).
ccagatgctcgtggaattt

SEQ ID NO: 209446 - DNA, 19 bp, Homo sapiens
  siRNA target sequence for CKMT1 (NM_020990.2,949-967).
gaatgaggaggatcataca

SEQ ID NO: 209447 - DNA, 19 bp, Homo sapiens
  siRNA target sequence for CKMT1 (NM_020990.2,1085-1103).
gagcgtttgggatacatct

SEQ ID NO: 209448 - DNA, 19 bp, Homo sapiens
  siRNA target sequence for CKMT1 (NM_020990.2,1088-1106).
cgtttgggatacatcttga

SEQ ID NO: 209449 - DNA, 19 bp, Homo sapiens
  siRNA target sequence for CKMT1 (NM_020990.2,1140-1158).
caggagtgcacatcaaact

SEQ ID NO: 209450 - DNA, 19 bp, Homo sapiens
  siRNA target sequence for CKMT2 (NM_001825.1,292-310).
ctgaaccggcagaaagtgt

SEQ ID NO: 209451 - DNA, 19 bp, Homo sapiens
  siRNA target sequence for CKMT2 (NM_001825.1,568-586).
gaccccgtcatcaaactaa

SEQ ID NO: 209452 - DNA, 19 bp, Homo sapiens
  siRNA target sequence for CKMT2 (NM_001825.1,626-644).
cggatctggatgcatcaaa

SEQ ID NO: 209453 - DNA, 19 bp, Homo sapiens
  siRNA target sequence for CKMT2 (NM_001825.1,631-649).
ctggatgcatcaaagatca

SEQ ID NO: 209454 - DNA, 19 bp, Homo sapiens
  siRNA target sequence for CKMT2 (NM_001825.1,656-674).
ggcagttcgacgagcatta

SEQ ID NO: 209455 - DNA, 19 bp, Homo sapiens
  siRNA target sequence for CKMT2 (NM_001825.1,805-823).
ctggctggccgctactaca

SEQ ID NO: 209456 - DNA, 19 bp, Homo sapiens
  siRNA target sequence for CKMT2 (NM_001825.1,892-910).
gtgtcccctttattaacat

SEQ ID NO: 209457 - DNA, 19 bp, Homo sapiens
  siRNA target sequence for CKMT2 (NM_001825.1,894-912).
gtcccctttattaacatgt

SEQ ID NO: 209458 - DNA, 19 bp, Homo sapiens
  siRNA target sequence for CKMT2 (NM_001825.1,955-973).
cataattatgataagacat

SEQ ID NO: 209459 - DNA, 19 bp, Homo sapiens
  siRNA target sequence for CKMT2 (NM_001825.1,1000-1018).
cacaccagggtaatctcaa

SEQ ID NO: 209460 - DNA, 19 bp, Homo sapiens
  siRNA target sequence for CKMT2 (NM_001825.1,1008-1026).
ggtaatctcaatggaaaaa

SEQ ID NO: 209461 - DNA, 19 bp, Homo sapiens
  siRNA target sequence for CKMT2 (NM_001825.1,1059-1077).
ctgtcgtggactaaaagaa

SEQ ID NO: 209462 - DNA, 19 bp, Homo sapiens
  siRNA target sequence for CKMT2 (NM_001825.1,1061-1079).
gtcgtggactaaaagaagt

SEQ ID NO: 209463 - DNA, 19 bp, Homo sapiens
  siRNA target sequence for CKMT2 (NM_001825.1,1064-1082).
gtggactaaaagaagtaga

SEQ ID NO: 209464 - DNA, 19 bp, Homo sapiens
  siRNA target sequence for CKMT2 (NM_001825.1,1118-1136).
ggaatgagcgcctaggata

SEQ ID NO: 209465 - DNA, 19 bp, Homo sapiens
  siRNA target sequence for CKMT2 (NM_001825.1,1123-1141).
gagcgcctaggatacattt

SEQ ID NO: 209466 - DNA, 19 bp, Homo sapiens
  siRNA target sequence for CKMT2 (NM_001825.1,1126-1144).
cgcctaggatacattttga

SEQ ID NO: 209467 - DNA, 19 bp, Homo sapiens
  siRNA target sequence for CKMT2 (NM_001825.1,1178-1196).
ctggtgtccacgttaggat

SEQ ID NO: 209468 - DNA, 19 bp, Homo sapiens
  siRNA target sequence for CKMT2 (NM_001825.1,1291-1309).
gcagatgtgtacgacattt

SEQ ID NO: 209469 - DNA, 19 bp, Homo sapiens
  siRNA target sequence for CKMT2 (NM_001825.1,1294-1312).
gatgtgtacgacatttcca

SEQ ID NO: 209470 - DNA, 19 bp, Homo sapiens
  siRNA target sequence for CKMT2 (NM_001825.1,1311-1329).
caacatagatagaattggt

SEQ ID NO: 209471 - DNA, 19 bp, Homo sapiens
  siRNA target sequence for CKMT2 (NM_001825.1,1338-1356).
ggttgagcttgttcagata

SEQ ID NO: 209472 - DNA, 19 bp, Homo sapiens
  siRNA target sequence for CKMT2 (NM_001825.1,1378-1396).
ctggtggattgtgaaaaga

SEQ ID NO: 209473 - DNA, 19 bp, Homo sapiens
  siRNA target sequence for CKMT2 (NM_001825.1,1406-1424).
gaggccaagatattaaggt

SEQ ID NO: 209474 - DNA, 19 bp, Homo sapiens
  siRNA target sequence for CEPT1 (NM_006090.2,182-200).
ggcttcgggcatatgagta

SEQ ID NO: 209475 - DNA, 19 bp, Homo sapiens
  siRNA target sequence for CEPT1 (NM_006090.2,196-214).
gagtactacaggatgtgta

SEQ ID NO: 209476 - DNA, 19 bp, Homo sapiens
  siRNA target sequence for CEPT1 (NM_006090.2,198-216).
gtactacaggatgtgtatt

SEQ ID NO: 209477 - DNA, 19 bp, Homo sapiens
  siRNA target sequence for CEPT1 (NM_006090.2,201-219).
ctacaggatgtgtattaaa

SEQ ID NO: 209478 - DNA, 19 bp, Homo sapiens
  siRNA target sequence for CEPT1 (NM_006090.2,306-324).
ccctgcttgagcccttaat

SEQ ID NO: 209479 - DNA, 19 bp, Homo sapiens
  siRNA target sequence for CEPT1 (NM_006090.2,337-355).
ggaatggctcgttagaaga

SEQ ID NO: 209480 - DNA, 19 bp, Homo sapiens
  siRNA target sequence for CEPT1 (NM_006090.2,387-405).
ccatcattggactgtcaat

SEQ ID NO: 209481 - DNA, 19 bp, Homo sapiens
  siRNA target sequence for CEPT1 (NM_006090.2,388-406).
catcattggactgtcaata

SEQ ID NO: 209482 - DNA, 19 bp, Homo sapiens
  siRNA target sequence for CEPT1 (NM_006090.2,538-556).
ggcaagaagaaccaatagt

SEQ ID NO: 209483 - DNA, 19 bp, Homo sapiens
  siRNA target sequence for CEPT1 (NM_006090.2,539-557).
gcaagaagaaccaatagta

SEQ ID NO: 209484 - DNA, 19 bp, Homo sapiens
  siRNA target sequence for CEPT1 (NM_006090.2,568-586).
gggagaactttttgatcat

SEQ ID NO: 209485 - DNA, 19 bp, Homo sapiens
  siRNA target sequence for CEPT1 (NM_006090.2,589-607).
ctgtgattcactatcaaca

SEQ ID NO: 209486 - DNA, 19 bp, Homo sapiens
  siRNA target sequence for CEPT1 (NM_006090.2,593-611).
gattcactatcaacagttt

SEQ ID NO: 209487 - DNA, 19 bp, Homo sapiens
  siRNA target sequence for CEPT1 (NM_006090.2,678-696).
gttttgcggggacatttat

SEQ ID NO: 209488 - DNA, 19 bp, Homo sapiens
  siRNA target sequence for CEPT1 (NM_006090.2,683-701).
gcggggacatttatgttct

SEQ ID NO: 209489 - DNA, 19 bp, Homo sapiens
  siRNA target sequence for CEPT1 (NM_006090.2,705-723).
gtgcgcactggcaaacgta

SEQ ID NO: 209490 - DNA, 19 bp, Homo sapiens
  siRNA target sequence for CEPT1 (NM_006090.2,709-727).
gcactggcaaacgtatgtt

SEQ ID NO: 209491 - DNA, 19 bp, Homo sapiens
  siRNA target sequence for CEPT1 (NM_006090.2,710-728).
cactggcaaacgtatgttt

SEQ ID NO: 209492 - DNA, 19 bp, Homo sapiens
  siRNA target sequence for CEPT1 (NM_006090.2,712-730).
ctggcaaacgtatgtttct

SEQ ID NO: 209493 - DNA, 19 bp, Homo sapiens
  siRNA target sequence for CEPT1 (NM_006090.2,720-738).
cgtatgtttctggaacatt

SEQ ID NO: 209494 - DNA, 19 bp, Homo sapiens
  siRNA target sequence for CEPT1 (NM_006090.2,735-753).
cattgcgatttggaataat

SEQ ID NO: 209495 - DNA, 19 bp, Homo sapiens
  siRNA target sequence for CEPT1 (NM_006090.2,805-823).
gattggaggaccacctttt

SEQ ID NO: 209496 - DNA, 19 bp, Homo sapiens
  siRNA target sequence for CEPT1 (NM_006090.2,815-833).
ccacctttttggcaatcta

SEQ ID NO: 209497 - DNA, 19 bp, Homo sapiens
  siRNA target sequence for CEPT1 (NM_006090.2,816-834).
cacctttttggcaatctat

SEQ ID NO: 209498 - DNA, 19 bp, Homo sapiens
  siRNA target sequence for CEPT1 (NM_006090.2,839-857).
ccagtgctgaatattcaaa

SEQ ID NO: 209499 - DNA, 19 bp, Homo sapiens
  siRNA target sequence for CEPT1 (NM_006090.2,882-900).
ctgtagcagggaccatatt

SEQ ID NO: 209500 - DNA, 19 bp, Homo sapiens
  siRNA target sequence for CEPT1 (NM_006090.2,884-902).
gtagcagggaccatatttt

SEQ ID NO: 209501 - DNA, 19 bp, Homo sapiens
  siRNA target sequence for CEPT1 (NM_006090.2,887-905).
gcagggaccatattttcct

SEQ ID NO: 209502 - DNA, 19 bp, Homo sapiens
  siRNA target sequence for CEPT1 (NM_006090.2,894-912).
ccatattttcctgtacaaa

SEQ ID NO: 209503 - DNA, 19 bp, Homo sapiens
  siRNA target sequence for CEPT1 (NM_006090.2,909-927).
caaattacttccgtgtaat

SEQ ID NO: 209504 - DNA, 19 bp, Homo sapiens
  siRNA target sequence for CEPT1 (NM_006090.2,995-1013).
catattggatcagtgatta

SEQ ID NO: 209505 - DNA, 19 bp, Homo sapiens
  siRNA target sequence for CEPT1 (NM_006090.2,1019-1037).
gctgcaatgatctacaaga

SEQ ID NO: 209506 - DNA, 19 bp, Homo sapiens
  siRNA target sequence for CEPT1 (NM_006090.2,1022-1040).
gcaatgatctacaagaaat

SEQ ID NO: 209507 - DNA, 19 bp, Homo sapiens
  siRNA target sequence for CEPT1 (NM_006090.2,1041-1059).
ctgcagttcagctttttga

SEQ ID NO: 209508 - DNA, 19 bp, Homo sapiens
  siRNA target sequence for CEPT1 (NM_006090.2,1099-1117).
gtctgctaaaatcactaat

SEQ ID NO: 209509 - DNA, 19 bp, Homo sapiens
  siRNA target sequence for CEPT1 (NM_006090.2,1101-1119).
ctgctaaaatcactaataa

SEQ ID NO: 209510 - DNA, 19 bp, Homo sapiens
  siRNA target sequence for CEPT1 (NM_006090.2,1104-1122).
ctaaaatcactaataagct

SEQ ID NO: 209511 - DNA, 19 bp, Homo sapiens
  siRNA target sequence for CEPT1 (NM_006090.2,1127-1145).
gttgcacacatgacgaaaa

SEQ ID NO: 209512 - DNA, 19 bp, Homo sapiens
  siRNA target sequence for CEPT1 (NM_006090.2,1159-1177).
gcatgacacagcattcata

SEQ ID NO: 209513 - DNA, 19 bp, Homo sapiens
  siRNA target sequence for CEPT1 (NM_006090.2,1179-1197).
gtccggcacttttgtttct

SEQ ID NO: 209514 - DNA, 19 bp, Homo sapiens
  siRNA target sequence for CEPT1 (NM_006090.2,1343-1361).
gtctctacagctcattcta

SEQ ID NO: 209515 - DNA, 19 bp, Homo sapiens
  siRNA target sequence for CEPT1 (NM_006090.2,1352-1370).
gctcattctaatcatcatt

SEQ ID NO: 209516 - DNA, 19 bp, Homo sapiens
  siRNA target sequence for PIGF (NM_002643.2,181-199).
ctaagtgtcttcattccat

SEQ ID NO: 209517 - DNA, 19 bp, Homo sapiens
  siRNA target sequence for PIGF (NM_002643.2,272-290).
ctgctgtcaatctagtact

SEQ ID NO: 209518 - DNA, 19 bp, Homo sapiens
  siRNA target sequence for PIGF (NM_002643.2,274-292).
gctgtcaatctagtactat

SEQ ID NO: 209519 - DNA, 19 bp, Homo sapiens
  siRNA target sequence for PIGF (NM_002643.2,277-295).
gtcaatctagtactatatt

SEQ ID NO: 209520 - DNA, 19 bp, Homo sapiens
  siRNA target sequence for PIGF (NM_002643.2,298-316).
gtagtgaaaccaaatacat

SEQ ID NO: 209521 - DNA, 19 bp, Homo sapiens
  siRNA target sequence for PIGF (NM_002643.2,317-335).
cctctaaaagaagttcatt

SEQ ID NO: 209522 - DNA, 19 bp, Homo sapiens
  siRNA target sequence for PIGF (NM_002643.2,422-440).
gagcaccactgatagagtt

SEQ ID NO: 209523 - DNA, 19 bp, Homo sapiens
  siRNA target sequence for PIGF (NM_002643.2,438-456).
gttggcattggaaacattt

SEQ ID NO: 209524 - DNA, 19 bp, Homo sapiens
  siRNA target sequence for PIGF (NM_002643.2,511-529).
ggaccaaacctcaaagcat

SEQ ID NO: 209525 - DNA, 19 bp, Homo sapiens
  siRNA target sequence for PIGF (NM_002643.2,588-606).
cactacaatttctagcttt

SEQ ID NO: 209526 - DNA, 19 bp, Homo sapiens
  siRNA target sequence for PIGF (NM_173074.1,660-678).
gcagatgacagtagaaaga

SEQ ID NO: 209527 - DNA, 19 bp, Homo sapiens
  siRNA target sequence for PIGF (NM_173074.1,718-736).
gggcttggtactgtgaaat

SEQ ID NO: 209528 - DNA, 19 bp, Homo sapiens
  siRNA target sequence for CHPT1 (NM_020244.1,619-637).
ccgctcgcttaggaactta

SEQ ID NO: 209529 - DNA, 19 bp, Homo sapiens
  siRNA target sequence for CHPT1 (NM_020244.1,620-638).
cgctcgcttaggaacttat

SEQ ID NO: 209530 - DNA, 19 bp, Homo sapiens
  siRNA target sequence for CHPT1 (NM_020244.1,688-706).
gcgctcattggcagactta

SEQ ID NO: 209531 - DNA, 19 bp, Homo sapiens
  siRNA target sequence for CHPT1 (NM_020244.1,689-707).
cgctcattggcagacttat

SEQ ID NO: 209532 - DNA, 19 bp, Homo sapiens
  siRNA target sequence for CHPT1 (NM_020244.1,691-709).
ctcattggcagacttatgt

SEQ ID NO: 209533 - DNA, 19 bp, Homo sapiens
  siRNA target sequence for CHPT1 (NM_020244.1,802-820).
caatgtgggactatacgat

SEQ ID NO: 209534 - DNA, 19 bp, Homo sapiens
  siRNA target sequence for CHPT1 (NM_020244.1,812-830).
ctatacgattcctattcta

SEQ ID NO: 209535 - DNA, 19 bp, Homo sapiens
  siRNA target sequence for CHPT1 (NM_020244.1,817-835).
cgattcctattctagaaat

SEQ ID NO: 209536 - DNA, 19 bp, Homo sapiens
  siRNA target sequence for CHPT1 (NM_020244.1,973-991).
gactccacataggactaat

SEQ ID NO: 209537 - DNA, 19 bp, Homo sapiens
  siRNA target sequence for CHPT1 (NM_020244.1,975-993).
ctccacataggactaatta

SEQ ID NO: 209538 - DNA, 19 bp, Homo sapiens
  siRNA target sequence for CHPT1 (NM_020244.1,977-995).
ccacataggactaattatt

SEQ ID NO: 209539 - DNA, 19 bp, Homo sapiens
  siRNA target sequence for CHPT1 (NM_020244.1,978-996).
cacataggactaattatta

SEQ ID NO: 209540 - DNA, 19 bp, Homo sapiens
  siRNA target sequence for CHPT1 (NM_020244.1,980-998).
cataggactaattattata

SEQ ID NO: 209541 - DNA, 19 bp, Homo sapiens
  siRNA target sequence for CHPT1 (NM_020244.1,999-1017).
ctggcaataatgatctata

SEQ ID NO: 209542 - DNA, 19 bp, Homo sapiens
  siRNA target sequence for CHPT1 (NM_020244.1,1054-1072).
gtctttatatcctaatgtt

SEQ ID NO: 209543 - DNA, 19 bp, Homo sapiens
  siRNA target sequence for CHPT1 (NM_020244.1,1075-1093).
gatgtgtctttgctaaagt

SEQ ID NO: 209544 - DNA, 19 bp, Homo sapiens
  siRNA target sequence for CHPT1 (NM_020244.1,1086-1104).
gctaaagtctcacaaaaat

SEQ ID NO: 209545 - DNA, 19 bp, Homo sapiens
  siRNA target sequence for CHPT1 (NM_020244.1,1124-1142).
caaaagtgaactatatctt

SEQ ID NO: 209546 - DNA, 19 bp, Homo sapiens
  siRNA target sequence for CHPT1 (NM_020244.1,1206-1224).
gacgaatatgttgttctat

SEQ ID NO: 209547 - DNA, 19 bp, Homo sapiens
  siRNA target sequence for CHPT1 (NM_020244.1,1229-1247).
ggcaatggtgatttcttca

SEQ ID NO: 209548 - DNA, 19 bp, Homo sapiens
  siRNA target sequence for CHPT1 (NM_020244.1,1277-1295).
gtgcctgcaaatttcaaga

SEQ ID NO: 209549 - DNA, 19 bp, Homo sapiens
  siRNA target sequence for CHPT1 (NM_020244.1,1302-1320).
catctaaatatattcaaga

SEQ ID NO: 209550 - DNA, 19 bp, Homo sapiens
  siRNA target sequence for CHPT1 (NM_020244.1,1316-1334).
caagactgcatgtcatcaa

SEQ ID NO: 209551 - DNA, 19 bp, Homo sapiens
  siRNA target sequence for CHPT1 (NM_020244.1,1336-1354).
cacctgaacaggttcaagt

SEQ ID NO: 209552 - DNA, 19 bp, Homo sapiens
  siRNA target sequence for CHPT1 (NM_020244.1,1341-1359).
gaacaggttcaagttcttt

SEQ ID NO: 209553 - DNA, 19 bp, Homo sapiens
  siRNA target sequence for DPAGT1 (NM_001382.1,15-33).
ccgctgctgatcaatttga

SEQ ID NO: 209554 - DNA, 19 bp, Homo sapiens
  siRNA target sequence for DPAGT1 (NM_001382.1,16-34).
cgctgctgatcaatttgat

SEQ ID NO: 209555 - DNA, 19 bp, Homo sapiens
  siRNA target sequence for DPAGT1 (NM_001382.1,114-132).
ggtcaggacctcaacaaaa

SEQ ID NO: 209556 - DNA, 19 bp, Homo sapiens
  siRNA target sequence for DPAGT1 (NM_001382.1,175-193).
gtgctgttttccttatcat

SEQ ID NO: 209557 - DNA, 19 bp, Homo sapiens
  siRNA target sequence for DPAGT1 (NM_001382.1,252-270).
gcattcccccaccatgaat

SEQ ID NO: 209558 - DNA, 19 bp, Homo sapiens
  siRNA target sequence for DPAGT1 (NM_001382.1,253-271).
cattcccccaccatgaatt

SEQ ID NO: 209559 - DNA, 19 bp, Homo sapiens
  siRNA target sequence for DPAGT1 (NM_001382.1,297-315).
gccatctgctgcatgatct

SEQ ID NO: 209560 - DNA, 19 bp, Homo sapiens
  siRNA target sequence for DPAGT1 (NM_001382.1,320-338).
gggctttgcggatgatgta

SEQ ID NO: 209561 - DNA, 19 bp, Homo sapiens
  siRNA target sequence for DPAGT1 (NM_001382.1,328-346).
cggatgatgtactgaatct

SEQ ID NO: 209562 - DNA, 19 bp, Homo sapiens
  siRNA target sequence for DPAGT1 (NM_001382.1,393-411).
ctcctcatggtctatttca

SEQ ID NO: 209563 - DNA, 19 bp, Homo sapiens
  siRNA target sequence for DPAGT1 (NM_001382.1,484-502).
gaatcctgtactatgtcta

SEQ ID NO: 209564 - DNA, 19 bp, Homo sapiens
  siRNA target sequence for DPAGT1 (NM_001382.1,526-544).
gtaccaatgccatcaatat

SEQ ID NO: 209565 - DNA, 19 bp, Homo sapiens
  siRNA target sequence for DPAGT1 (NM_001382.1,530-548).
caatgccatcaatatccta

SEQ ID NO: 209566 - DNA, 19 bp, Homo sapiens
  siRNA target sequence for DPAGT1 (NM_001382.1,575-593).
ccagtcactagtcatttct

SEQ ID NO: 209567 - DNA, 19 bp, Homo sapiens
  siRNA target sequence for DPAGT1 (NM_001382.1,637-655).
gtcgggatgatcatgtctt

SEQ ID NO: 209568 - DNA, 19 bp, Homo sapiens
  siRNA target sequence for DPAGT1 (NM_001382.1,639-657).
cgggatgatcatgtctttt

SEQ ID NO: 209569 - DNA, 19 bp, Homo sapiens
  siRNA target sequence for DPAGT1 (NM_001382.1,651-669).
gtcttttccctctacttca

SEQ ID NO: 209570 - DNA, 19 bp, Homo sapiens
  siRNA target sequence for DPAGT1 (NM_001382.1,735-753).
gtgggagataccttctgtt

SEQ ID NO: 209571 - DNA, 19 bp, Homo sapiens
  siRNA target sequence for DPAGT1 (NM_001382.1,802-820).
gcaagaccatgctactatt

SEQ ID NO: 209572 - DNA, 19 bp, Homo sapiens
  siRNA target sequence for DPAGT1 (NM_001382.1,893-911).
ccgcatacccagactcaat

SEQ ID NO: 209573 - DNA, 19 bp, Homo sapiens
  siRNA target sequence for DPAGT1 (NM_001382.1,894-912).
cgcatacccagactcaata

SEQ ID NO: 209574 - DNA, 19 bp, Homo sapiens
  siRNA target sequence for DPAGT1 (NM_001382.1,895-913).
gcatacccagactcaatat

SEQ ID NO: 209575 - DNA, 19 bp, Homo sapiens
  siRNA target sequence for DPAGT1 (NM_001382.1,900-918).
cccagactcaatatcaaga

SEQ ID NO: 209576 - DNA, 19 bp, Homo sapiens
  siRNA target sequence for DPAGT1 (NM_001382.1,1025-1043).
ccagagtgagactgaagat

SEQ ID NO: 209577 - DNA, 19 bp, Homo sapiens
  siRNA target sequence for DPAGT1 (NM_001382.1,1074-1092).
ctcatcaacttgctactta

SEQ ID NO: 209578 - DNA, 19 bp, Homo sapiens
  siRNA target sequence for DPAGT1 (NM_001382.1,1187-1205).
gctcgttcgactcttctat

SEQ ID NO: 209579 - DNA, 19 bp, Homo sapiens
  siRNA target sequence for DPAGT1 (NM_001382.1,1190-1208).
cgttcgactcttctatgat

SEQ ID NO: 209580 - DNA, 19 bp, Homo sapiens
  siRNA target sequence for PRPSAP1 (NM_002766.1,153-171).
ggaagtctgttgtatatca

SEQ ID NO: 209581 - DNA, 19 bp, Homo sapiens
  siRNA target sequence for PRPSAP1 (NM_002766.1,212-230).
gttcgtggccaagatattt

SEQ ID NO: 209582 - DNA, 19 bp, Homo sapiens
  siRNA target sequence for PRPSAP1 (NM_002766.1,218-236).
ggccaagatattttcatta

SEQ ID NO: 209583 - DNA, 19 bp, Homo sapiens
  siRNA target sequence for PRPSAP1 (NM_002766.1,370-388).
gaggaagaggggttccatt

SEQ ID NO: 209584 - DNA, 19 bp, Homo sapiens
  siRNA target sequence for PRPSAP1 (NM_002766.1,412-430).
gctggcgaaagcaggttta

SEQ ID NO: 209585 - DNA, 19 bp, Homo sapiens
  siRNA target sequence for PRPSAP1 (NM_002766.1,413-431).
ctggcgaaagcaggtttaa

SEQ ID NO: 209586 - DNA, 19 bp, Homo sapiens
  siRNA target sequence for PRPSAP1 (NM_002766.1,415-433).
ggcgaaagcaggtttaact

SEQ ID NO: 209587 - DNA, 19 bp, Homo sapiens
  siRNA target sequence for PRPSAP1 (NM_002766.1,417-435).
cgaaagcaggtttaactca

SEQ ID NO: 209588 - DNA, 19 bp, Homo sapiens
  siRNA target sequence for PRPSAP1 (NM_002766.1,422-440).
gcaggtttaactcacatta

SEQ ID NO: 209589 - DNA, 19 bp, Homo sapiens
  siRNA target sequence for PRPSAP1 (NM_002766.1,423-441).
caggtttaactcacattat

SEQ ID NO: 209590 - DNA, 19 bp, Homo sapiens
  siRNA target sequence for PRPSAP1 (NM_002766.1,425-443).
ggtttaactcacattatca

SEQ ID NO: 209591 - DNA, 19 bp, Homo sapiens
  siRNA target sequence for PRPSAP1 (NM_002766.1,442-460).
cactatggatcttcatcaa

SEQ ID NO: 209592 - DNA, 19 bp, Homo sapiens
  siRNA target sequence for PRPSAP1 (NM_002766.1,729-747).
gcctggagttgccattgat

SEQ ID NO: 209593 - DNA, 19 bp, Homo sapiens
  siRNA target sequence for PRPSAP1 (NM_002766.1,760-778).
gaagccaccgataactgta

SEQ ID NO: 209594 - DNA, 19 bp, Homo sapiens
  siRNA target sequence for PRPSAP1 (NM_002766.1,763-781).
gccaccgataactgtagtt

SEQ ID NO: 209595 - DNA, 19 bp, Homo sapiens
  siRNA target sequence for PRPSAP1 (NM_002766.1,869-887).
gagagaggcgcctataaga

SEQ ID NO: 209596 - DNA, 19 bp, Homo sapiens
  siRNA target sequence for PRPSAP1 (NM_002766.1,873-891).
gaggcgcctataagatcta

SEQ ID NO: 209597 - DNA, 19 bp, Homo sapiens
  siRNA target sequence for PRPSAP1 (NM_002766.1,876-894).
gcgcctataagatctatgt

SEQ ID NO: 209598 - DNA, 19 bp, Homo sapiens
  siRNA target sequence for PRPSAP1 (NM_002766.1,877-895).
cgcctataagatctatgtt

SEQ ID NO: 209599 - DNA, 19 bp, Homo sapiens
  siRNA target sequence for PRPSAP1 (NM_002766.1,878-896).
gcctataagatctatgtta

SEQ ID NO: 209600 - DNA, 19 bp, Homo sapiens
  siRNA target sequence for PRPSAP1 (NM_002766.1,961-979).
ggtggtggtgacgaatact

SEQ ID NO: 209601 - DNA, 19 bp, Homo sapiens
  siRNA target sequence for PRPSAP1 (NM_002766.1,1000-1018).
gctgcaatgtcccaagata

SEQ ID NO: 209602 - DNA, 19 bp, Homo sapiens
  siRNA target sequence for PRPSAP1 (NM_002766.1,1001-1019).
ctgcaatgtcccaagataa

SEQ ID NO: 209603 - DNA, 19 bp, Homo sapiens
  siRNA target sequence for PRPSAP1 (NM_002766.1,1027-1045).
ggatatcagtttgattctt

SEQ ID NO: 209604 - DNA, 19 bp, Homo sapiens
  siRNA target sequence for PRPSAP2 (NM_002767.2,219-237).
gtgtgacgccacctgaatt

SEQ ID NO: 209605 - DNA, 19 bp, Homo sapiens
  siRNA target sequence for PRPSAP2 (NM_002767.2,284-302).
gcaaactcgaattcatcat

SEQ ID NO: 209606 - DNA, 19 bp, Homo sapiens
  siRNA target sequence for PRPSAP2 (NM_002767.2,303-321).
gtatggagctatcaaagaa

SEQ ID NO: 209607 - DNA, 19 bp, Homo sapiens
  siRNA target sequence for PRPSAP2 (NM_002767.2,408-426).
ctgtgaggggaaaagatgt

SEQ ID NO: 209608 - DNA, 19 bp, Homo sapiens
  siRNA target sequence for PRPSAP2 (NM_002767.2,479-497).
ctgatcatggtgtatgcat

SEQ ID NO: 209609 - DNA, 19 bp, Homo sapiens
  siRNA target sequence for PRPSAP2 (NM_002767.2,530-548).
gtgataccctactttcctt

SEQ ID NO: 209610 - DNA, 19 bp, Homo sapiens
  siRNA target sequence for PRPSAP2 (NM_002767.2,579-597).
gctccattgtctctaaatt

SEQ ID NO: 209611 - DNA, 19 bp, Homo sapiens
  siRNA target sequence for PRPSAP2 (NM_002767.2,615-633).
gcaaagctggtctaactca

SEQ ID NO: 209612 - DNA, 19 bp, Homo sapiens
  siRNA target sequence for PRPSAP2 (NM_002767.2,623-641).
ggtctaactcatcttatta

SEQ ID NO: 209613 - DNA, 19 bp, Homo sapiens
  siRNA target sequence for PRPSAP2 (NM_002767.2,626-644).
ctaactcatcttattacta

SEQ ID NO: 209614 - DNA, 19 bp, Homo sapiens
  siRNA target sequence for PRPSAP2 (NM_002767.2,702-720).
gagcatctcccttcttatt

SEQ ID NO: 209615 - DNA, 19 bp, Homo sapiens
  siRNA target sequence for PRPSAP2 (NM_002767.2,943-961).
catgctgattcctaaagaa

SEQ ID NO: 209616 - DNA, 19 bp, Homo sapiens
  siRNA target sequence for PRPSAP2 (NM_002767.2,1074-1092).
gaggtgcatataagatctt

SEQ ID NO: 209617 - DNA, 19 bp, Homo sapiens
  siRNA target sequence for PRPSAP2 (NM_002767.2,1077-1095).
gtgcatataagatctttgt

SEQ ID NO: 209618 - DNA, 19 bp, Homo sapiens
  siRNA target sequence for PRPSAP2 (NM_002767.2,1079-1097).
gcatataagatctttgtga

SEQ ID NO: 209619 - DNA, 19 bp, Homo sapiens
  siRNA target sequence for PRPSAP2 (NM_002767.2,1090-1108).
ctttgtgatggcaactcat

SEQ ID NO: 209620 - DNA, 19 bp, Homo sapiens
  siRNA target sequence for PRPSAP2 (NM_002767.2,1100-1118).
gcaactcatggcttgttgt

SEQ ID NO: 209621 - DNA, 19 bp, Homo sapiens
  siRNA target sequence for PRPSAP2 (NM_002767.2,1162-1180).
ggtggtggtcaccaataca

SEQ ID NO: 209622 - DNA, 19 bp, Homo sapiens
  siRNA target sequence for PRPSAP2 (NM_002767.2,1168-1186).
ggtcaccaatacaattcca

SEQ ID NO: 209623 - DNA, 19 bp, Homo sapiens
  siRNA target sequence for PRPSAP2 (NM_002767.2,1204-1222).
ccagtgccccaagattaaa

SEQ ID NO: 209624 - DNA, 19 bp, Homo sapiens
  siRNA target sequence for PRPSAP2 (NM_002767.2,1209-1227).
gccccaagattaaaactgt

SEQ ID NO: 209625 - DNA, 19 bp, Homo sapiens
  siRNA target sequence for PRPSAP2 (NM_002767.2,1229-1247).
gatatcagcatgatccttt

SEQ ID NO: 209626 - DNA, 19 bp, Homo sapiens
  siRNA target sequence for TPK1 (NM_022445.2,230-248).
gaggtgccaaccgcttata

SEQ ID NO: 209627 - DNA, 19 bp, Homo sapiens
  siRNA target sequence for TPK1 (NM_022445.2,233-251).
gtgccaaccgcttatatga

SEQ ID NO: 209628 - DNA, 19 bp, Homo sapiens
  siRNA target sequence for TPK1 (NM_022445.2,235-253).
gccaaccgcttatatgata

SEQ ID NO: 209629 - DNA, 19 bp, Homo sapiens
  siRNA target sequence for TPK1 (NM_022445.2,236-254).
ccaaccgcttatatgatat

SEQ ID NO: 209630 - DNA, 19 bp, Homo sapiens
  siRNA target sequence for TPK1 (NM_022445.2,291-309).
catcaatggagactttgat

SEQ ID NO: 209631 - DNA, 19 bp, Homo sapiens
  siRNA target sequence for TPK1 (NM_022445.2,317-335).
ggcctgaagtcagagaata

SEQ ID NO: 209632 - DNA, 19 bp, Homo sapiens
  siRNA target sequence for TPK1 (NM_022445.2,325-343).
gtcagagaatactatgcta

SEQ ID NO: 209633 - DNA, 19 bp, Homo sapiens
  siRNA target sequence for TPK1 (NM_022445.2,329-347).
gagaatactatgctactaa

SEQ ID NO: 209634 - DNA, 19 bp, Homo sapiens
  siRNA target sequence for TPK1 (NM_022445.2,348-366).
gggatgtgagctcatttca

SEQ ID NO: 209635 - DNA, 19 bp, Homo sapiens
  siRNA target sequence for TPK1 (NM_022445.2,360-378).
catttcaactcctgatcaa

SEQ ID NO: 209636 - DNA, 19 bp, Homo sapiens
  siRNA target sequence for TPK1 (NM_022445.2,382-400).
cacactgactttactaagt

SEQ ID NO: 209637 - DNA, 19 bp, Homo sapiens
  siRNA target sequence for TPK1 (NM_022445.2,395-413).
ctaagtgccttaaaatgct

SEQ ID NO: 209638 - DNA, 19 bp, Homo sapiens
  siRNA target sequence for TPK1 (NM_022445.2,470-488).
gccttgctgggcgttttga

SEQ ID NO: 209639 - DNA, 19 bp, Homo sapiens
  siRNA target sequence for TPK1 (NM_022445.2,525-543).
gactcacatcactcctttt

SEQ ID NO: 209640 - DNA, 19 bp, Homo sapiens
  siRNA target sequence for TPK1 (NM_022445.2,529-547).
cacatcactccttttccaa

SEQ ID NO: 209641 - DNA, 19 bp, Homo sapiens
  siRNA target sequence for TPK1 (NM_022445.2,531-549).
catcactccttttccaatt

SEQ ID NO: 209642 - DNA, 19 bp, Homo sapiens
  siRNA target sequence for TPK1 (NM_022445.2,661-679).
ccttgtatgcaggttacaa

SEQ ID NO: 209643 - DNA, 19 bp, Homo sapiens
  siRNA target sequence for TPK1 (NM_022445.2,733-751).
gtcagtacttccaatacct

SEQ ID NO: 209644 - DNA, 19 bp, Homo sapiens
  siRNA target sequence for TPK1 (NM_022445.2,798-816).
ctggaccatggccatcaaa

SEQ ID NO: 209645 - DNA, 19 bp, Homo sapiens
  siRNA target sequence for PGK1 (NM_000291.2,96-114).
ggacaagctggacgttaaa

SEQ ID NO: 209646 - DNA, 19 bp, Homo sapiens
  siRNA target sequence for PGK1 (NM_000291.2,115-133).
gggaagcgggtcgttatga

SEQ ID NO: 209647 - DNA, 19 bp, Homo sapiens
  siRNA target sequence for PGK1 (NM_000291.2,117-135).
gaagcgggtcgttatgaga

SEQ ID NO: 209648 - DNA, 19 bp, Homo sapiens
  siRNA target sequence for PGK1 (NM_000291.2,196-214).
gctgtcccaagcatcaaat

SEQ ID NO: 209649 - DNA, 19 bp, Homo sapiens
  siRNA target sequence for PGK1 (NM_000291.2,233-251).
ccaagtcggtagtccttat

SEQ ID NO: 209650 - DNA, 19 bp, Homo sapiens
  siRNA target sequence for PGK1 (NM_000291.2,494-512).
ccgagccagccaaaataga

SEQ ID NO: 209651 - DNA, 19 bp, Homo sapiens
  siRNA target sequence for PGK1 (NM_000291.2,591-609).
ctccatggtaggagtcaat

SEQ ID NO: 209652 - DNA, 19 bp, Homo sapiens
  siRNA target sequence for PGK1 (NM_000291.2,642-660).
gaaggagctgaactacttt

SEQ ID NO: 209653 - DNA, 19 bp, Homo sapiens
  siRNA target sequence for PGK1 (NM_000291.2,699-717).
catcctgggcggagctaaa

SEQ ID NO: 209654 - DNA, 19 bp, Homo sapiens
  siRNA target sequence for PGK1 (NM_000291.2,702-720).
cctgggcggagctaaagtt

SEQ ID NO: 209655 - DNA, 19 bp, Homo sapiens
  siRNA target sequence for PGK1 (NM_000291.2,729-747).
gatccagctcatcaataat

SEQ ID NO: 209656 - DNA, 19 bp, Homo sapiens
  siRNA target sequence for PGK1 (NM_000291.2,930-948).
cactgctgacaagtttgat

SEQ ID NO: 209657 - DNA, 19 bp, Homo sapiens
  siRNA target sequence for PGK1 (NM_000291.2,1022-1040).
ctgaaagcagcaagaagta

SEQ ID NO: 209658 - DNA, 19 bp, Homo sapiens
  siRNA target sequence for PGK1 (NM_000291.2,1055-1073).
ctcgggctaagcagattgt

SEQ ID NO: 209659 - DNA, 19 bp, Homo sapiens
  siRNA target sequence for PGK1 (NM_000291.2,1057-1075).
cgggctaagcagattgtgt

SEQ ID NO: 209660 - DNA, 19 bp, Homo sapiens
  siRNA target sequence for PGK1 (NM_000291.2,1084-1102).
cctgtgggggtatttgaat

SEQ ID NO: 209661 - DNA, 19 bp, Homo sapiens
  siRNA target sequence for PGK1 (NM_000291.2,1300-1318).
gtggatgctctcagcaata

SEQ ID NO: 209662 - DNA, 19 bp, Homo sapiens
  siRNA target sequence for PGK1 (NM_000291.2,1303-1321).
gatgctctcagcaatattt

SEQ ID NO: 209663 - DNA, 19 bp, Homo sapiens
  siRNA target sequence for PGK2 (NM_138733.2,125-143).
gaagttgactttagacaaa

SEQ ID NO: 209664 - DNA, 19 bp, Homo sapiens
  siRNA target sequence for PGK2 (NM_138733.2,154-172).
gagggaagcgagtcatcat

SEQ ID NO: 209665 - DNA, 19 bp, Homo sapiens
  siRNA target sequence for PGK2 (NM_138733.2,156-174).
gggaagcgagtcatcatga

SEQ ID NO: 209666 - DNA, 19 bp, Homo sapiens
  siRNA target sequence for PGK2 (NM_138733.2,273-291).
gccaaggcagtagttctta

SEQ ID NO: 209667 - DNA, 19 bp, Homo sapiens
  siRNA target sequence for PGK2 (NM_138733.2,615-633).
gcacaccgcgctcatagtt

SEQ ID NO: 209668 - DNA, 19 bp, Homo sapiens
  siRNA target sequence for PGK2 (NM_138733.2,664-682).
catccggattcttgatgaa

SEQ ID NO: 209669 - DNA, 19 bp, Homo sapiens
  siRNA target sequence for PGK2 (NM_138733.2,683-701).
gaaggaactagattacttt

SEQ ID NO: 209670 - DNA, 19 bp, Homo sapiens
  siRNA target sequence for PGK2 (NM_138733.2,687-705).
gaactagattactttgcta

SEQ ID NO: 209671 - DNA, 19 bp, Homo sapiens
  siRNA target sequence for PGK2 (NM_138733.2,727-745).
gaccctttctggctatact

SEQ ID NO: 209672 - DNA, 19 bp, Homo sapiens
  siRNA target sequence for PGK2 (NM_138733.2,767-785).
caagatccaacttatcaaa

SEQ ID NO: 209673 - DNA, 19 bp, Homo sapiens
  siRNA target sequence for PGK2 (NM_138733.2,898-916).
ccaagatcgttaaagatat

SEQ ID NO: 209674 - DNA, 19 bp, Homo sapiens
  siRNA target sequence for PGK2 (NM_138733.2,920-938).
ggccaaagcacaaaagaat

SEQ ID NO: 209675 - DNA, 19 bp, Homo sapiens
  siRNA target sequence for PGK2 (NM_138733.2,935-953).
gaatggtgtaaggattact

SEQ ID NO: 209676 - DNA, 19 bp, Homo sapiens
  siRNA target sequence for PGK2 (NM_138733.2,992-1010).
gaacgctcaggttggaaaa

SEQ ID NO: 209677 - DNA, 19 bp, Homo sapiens
  siRNA target sequence for PGK2 (NM_138733.2,1073-1091).
caagaatcatgctcaagtt

SEQ ID NO: 209678 - DNA, 19 bp, Homo sapiens
  siRNA target sequence for PGK2 (NM_138733.2,1094-1112).
ggctcaagcaaggctaatt

SEQ ID NO: 209679 - DNA, 19 bp, Homo sapiens
  siRNA target sequence for PGK2 (NM_138733.2,1096-1114).
ctcaagcaaggctaattgt

SEQ ID NO: 209680 - DNA, 19 bp, Homo sapiens
  siRNA target sequence for PGK2 (NM_138733.2,1123-1141).
ggccgttaggagtatttga

SEQ ID NO: 209681 - DNA, 19 bp, Homo sapiens
  siRNA target sequence for PGK2 (NM_138733.2,1124-1142).
gccgttaggagtatttgaa

SEQ ID NO: 209682 - DNA, 19 bp, Homo sapiens
  siRNA target sequence for PGK2 (NM_138733.2,1171-1189).
ccctcatggatgaaattgt

SEQ ID NO: 209683 - DNA, 19 bp, Homo sapiens
  siRNA target sequence for PGK2 (NM_138733.2,1344-1362).
gaggccctcagcaacatgt

SEQ ID NO: 209684 - DNA, 19 bp, Homo sapiens
  siRNA target sequence for PYCS (NM_002860.2,90-108).
gcccttcaaccaacatctt

SEQ ID NO: 209685 - DNA, 19 bp, Homo sapiens
  siRNA target sequence for PYCS (NM_002860.2,185-203).
ggagcaacatcccgtttat

SEQ ID NO: 209686 - DNA, 19 bp, Homo sapiens
  siRNA target sequence for PYCS (NM_002860.2,301-319).
gtgacccgaggggatgaat

SEQ ID NO: 209687 - DNA, 19 bp, Homo sapiens
  siRNA target sequence for PYCS (NM_002860.2,303-321).
gacccgaggggatgaatgt

SEQ ID NO: 209688 - DNA, 19 bp, Homo sapiens
  siRNA target sequence for PYCS (NM_002860.2,338-356).
gcttggcatctattgttga

SEQ ID NO: 209689 - DNA, 19 bp, Homo sapiens
  siRNA target sequence for PYCS (NM_002860.2,414-432).
cgtagcctttggcaaacaa

SEQ ID NO: 209690 - DNA, 19 bp, Homo sapiens
  siRNA target sequence for PYCS (NM_002860.2,560-578).
ggctgatggccttgtatga

SEQ ID NO: 209691 - DNA, 19 bp, Homo sapiens
  siRNA target sequence for PYCS (NM_002860.2,570-588).
cttgtatgaggctatgttt

SEQ ID NO: 209692 - DNA, 19 bp, Homo sapiens
  siRNA target sequence for PYCS (NM_002860.2,679-697).
catgaactccttagaatga

SEQ ID NO: 209693 - DNA, 19 bp, Homo sapiens
  siRNA target sequence for PYCS (NM_002860.2,682-700).
gaactccttagaatgaaca

SEQ ID NO: 209694 - DNA, 19 bp, Homo sapiens
  siRNA target sequence for PYCS (NM_002860.2,707-725).
ccattgtcaacacaaatga

SEQ ID NO: 209695 - DNA, 19 bp, Homo sapiens
  siRNA target sequence for PYCS (NM_002860.2,759-777).
cctgcagggggtaaatgtt

SEQ ID NO: 209696 - DNA, 19 bp, Homo sapiens
  siRNA target sequence for PYCS (NM_002860.2,760-778).
ctgcagggggtaaatgtta

SEQ ID NO: 209697 - DNA, 19 bp, Homo sapiens
  siRNA target sequence for PYCS (NM_002860.2,762-780).
gcagggggtaaatgttatt

SEQ ID NO: 209698 - DNA, 19 bp, Homo sapiens
  siRNA target sequence for PYCS (NM_002860.2,763-781).
cagggggtaaatgttatta

SEQ ID NO: 209699 - DNA, 19 bp, Homo sapiens
  siRNA target sequence for PYCS (NM_002860.2,767-785).
gggtaaatgttattagtgt

SEQ ID NO: 209700 - DNA, 19 bp, Homo sapiens
  siRNA target sequence for PYCS (NM_002860.2,775-793).
gttattagtgttaaagata

SEQ ID NO: 209701 - DNA, 19 bp, Homo sapiens
  siRNA target sequence for PYCS (NM_002860.2,835-853).
gatctcttgattgttcttt

SEQ ID NO: 209702 - DNA, 19 bp, Homo sapiens
  siRNA target sequence for PYCS (NM_002860.2,859-877).
gtagaaggcctttttgaca

SEQ ID NO: 209703 - DNA, 19 bp, Homo sapiens
  siRNA target sequence for PYCS (NM_002860.2,890-908).
cagatgatgcaaagcttat

SEQ ID NO: 209704 - DNA, 19 bp, Homo sapiens
  siRNA target sequence for PYCS (NM_002860.2,895-913).
gatgcaaagcttattgata

SEQ ID NO: 209705 - DNA, 19 bp, Homo sapiens
  siRNA target sequence for PYCS (NM_002860.2,1098-1116).
gaaagttggtaccttcttt

SEQ ID NO: 209706 - DNA, 19 bp, Homo sapiens
  siRNA target sequence for PYCS (NM_002860.2,1128-1146).
gcctgcaggccctactgtt

SEQ ID NO: 209707 - DNA, 19 bp, Homo sapiens
  siRNA target sequence for PYCS (NM_002860.2,1247-1265).
cggaccagcgtgatgagat

SEQ ID NO: 209708 - DNA, 19 bp, Homo sapiens
  siRNA target sequence for PYCS (NM_002860.2,1315-1333).
gctcctctgctgaaacgtt

SEQ ID NO: 209709 - DNA, 19 bp, Homo sapiens
  siRNA target sequence for PYCS (NM_002860.2,1318-1336).
cctctgctgaaacgtttaa

SEQ ID NO: 209710 - DNA, 19 bp, Homo sapiens
  siRNA target sequence for PYCS (NM_002860.2,1427-1445).
gcacccgaatcgccaaaaa

SEQ ID NO: 209711 - DNA, 19 bp, Homo sapiens
  siRNA target sequence for PYCS (NM_002860.2,1430-1448).
cccgaatcgccaaaaactt

SEQ ID NO: 209712 - DNA, 19 bp, Homo sapiens
  siRNA target sequence for PYCS (NM_002860.2,1478-1496).
gagttctgctggtgatctt

SEQ ID NO: 209713 - DNA, 19 bp, Homo sapiens
  siRNA target sequence for PYCS (NM_002860.2,1547-1565).
gtggcaatggcttgttact

SEQ ID NO: 209714 - DNA, 19 bp, Homo sapiens
  siRNA target sequence for PYCS (NM_002860.2,1550-1568).
gcaatggcttgttactcaa

SEQ ID NO: 209715 - DNA, 19 bp, Homo sapiens
  siRNA target sequence for PYCS (NM_002860.2,1551-1569).
caatggcttgttactcaaa

SEQ ID NO: 209716 - DNA, 19 bp, Homo sapiens
  siRNA target sequence for PYCS (NM_002860.2,1616-1634).
cccaggaggctctctcaat

SEQ ID NO: 209717 - DNA, 19 bp, Homo sapiens
  siRNA target sequence for PYCS (NM_002860.2,1620-1638).
ggaggctctctcaatccat

SEQ ID NO: 209718 - DNA, 19 bp, Homo sapiens
  siRNA target sequence for PYCS (NM_002860.2,1690-1708).
ctttgccgcctagacaaaa

SEQ ID NO: 209719 - DNA, 19 bp, Homo sapiens
  siRNA target sequence for PYCS (NM_002860.2,1694-1712).
gccgcctagacaaaatgat

SEQ ID NO: 209720 - DNA, 19 bp, Homo sapiens
  siRNA target sequence for PYCS (NM_002860.2,1695-1713).
ccgcctagacaaaatgata

SEQ ID NO: 209721 - DNA, 19 bp, Homo sapiens
  siRNA target sequence for PYCS (NM_002860.2,1826-1844).
ccgaggccagtgttgataa

SEQ ID NO: 209722 - DNA, 19 bp, Homo sapiens
  siRNA target sequence for PYCS (NM_002860.2,1853-1871).
ggctagtcagagactctaa

SEQ ID NO: 209723 - DNA, 19 bp, Homo sapiens
  siRNA target sequence for PYCS (NM_002860.2,1854-1872).
gctagtcagagactctaaa

SEQ ID NO: 209724 - DNA, 19 bp, Homo sapiens
  siRNA target sequence for PYCS (NM_002860.2,1855-1873).
ctagtcagagactctaaat

SEQ ID NO: 209725 - DNA, 19 bp, Homo sapiens
  siRNA target sequence for PYCS (NM_002860.2,1882-1900).
ccagctgcctgtaatgctt

SEQ ID NO: 209726 - DNA, 19 bp, Homo sapiens
  siRNA target sequence for PYCS (NM_002860.2,1927-1945).
ctgctcaggacaccattat

SEQ ID NO: 209727 - DNA, 19 bp, Homo sapiens
  siRNA target sequence for PYCS (NM_002860.2,1970-1988).
gagtggaacaggtaaaaat

SEQ ID NO: 209728 - DNA, 19 bp, Homo sapiens
  siRNA target sequence for PYCS (NM_002860.2,1974-1992).
ggaacaggtaaaaattcat

SEQ ID NO: 209729 - DNA, 19 bp, Homo sapiens
  siRNA target sequence for PYCS (NM_002860.2,2043-2061).
gtcactccgaactgagtat

SEQ ID NO: 209730 - DNA, 19 bp, Homo sapiens
  siRNA target sequence for PYCS (NM_002860.2,2062-2080).
ggggacctggaattatgca

SEQ ID NO: 209731 - DNA, 19 bp, Homo sapiens
  siRNA target sequence for PYCS (NM_002860.2,2064-2082).
ggacctggaattatgcatt

SEQ ID NO: 209732 - DNA, 19 bp, Homo sapiens
  siRNA target sequence for PYCS (NM_002860.2,2067-2085).
cctggaattatgcattgaa

SEQ ID NO: 209733 - DNA, 19 bp, Homo sapiens
  siRNA target sequence for PYCS (NM_002860.2,2135-2153).
gctcccacacggatgtcat

SEQ ID NO: 209734 - DNA, 19 bp, Homo sapiens
  siRNA target sequence for PYCS (NM_002860.2,2269-2287).
gaagtgggaatcagtacat

SEQ ID NO: 209735 - DNA, 19 bp, Homo sapiens
  siRNA target sequence for PYCS (NM_002860.2,2323-2341).
ggactgcttactactaagt

SEQ ID NO: 209736 - DNA, 19 bp, Homo sapiens
  siRNA target sequence for PYCS (NM_002860.2,2362-2380).
cacgtggtctcagatttct

SEQ ID NO: 209737 - DNA, 19 bp, Homo sapiens
  siRNA target sequence for PYCS (NM_002860.2,2379-2397).
ctcagagcatggaagttta

SEQ ID NO: 209738 - DNA, 19 bp, Homo sapiens
  siRNA target sequence for PYCS (NM_002860.2,2419-2437).
cctattcctcagagaaaca

SEQ ID NO: 209739 - DNA, 19 bp, Homo sapiens
  siRNA target sequence for MGC11134 (NM_031472.2,255-273).
cgcgtggtggacaccaata

SEQ ID NO: 209740 - DNA, 19 bp, Homo sapiens
  siRNA target sequence for MGC11134 (NM_031472.2,346-364).
ccctgcaggtacctaagtt

SEQ ID NO: 209741 - DNA, 19 bp, Homo sapiens
  siRNA target sequence for MGC11134 (NM_031472.2,408-426).
ctagtccatggtacattct

SEQ ID NO: 209742 - DNA, 19 bp, Homo sapiens
  siRNA target sequence for MGC11134 (NM_031472.2,436-454).
ggccatccatcctactcaa

SEQ ID NO: 209743 - DNA, 19 bp, Homo sapiens
  siRNA target sequence for MGC11134 (NM_031472.2,437-455).
gccatccatcctactcaaa

SEQ ID NO: 209744 - DNA, 19 bp, Homo sapiens
  siRNA target sequence for MGC11134 (NM_031472.2,507-525).
ggagaccccggtatcatca

SEQ ID NO: 209745 - DNA, 19 bp, Homo sapiens
  siRNA target sequence for MGC11134 (NM_031472.2,529-547).
gcatgcggtcccattgtga

SEQ ID NO: 209746 - DNA, 19 bp, Homo sapiens
  siRNA target sequence for MGC11134 (NM_031472.2,530-548).
catgcggtcccattgtgaa

SEQ ID NO: 209747 - DNA, 19 bp, Homo sapiens
  siRNA target sequence for MGC11134 (NM_031472.2,533-551).
gcggtcccattgtgaaata

SEQ ID NO: 209748 - DNA, 19 bp, Homo sapiens
  siRNA target sequence for MGC11134 (NM_031472.2,536-554).
gtcccattgtgaaatagct

SEQ ID NO: 209749 - DNA, 19 bp, Homo sapiens
  siRNA target sequence for MGC11134 (NM_031472.2,607-625).
ctgccaatggggtgattct

SEQ ID NO: 209750 - DNA, 19 bp, Homo sapiens
  siRNA target sequence for B3GALT1 (NM_020981.2,359-377).
caaaggtctcctgtttgta

SEQ ID NO: 209751 - DNA, 19 bp, Homo sapiens
  siRNA target sequence for B3GALT1 (NM_020981.2,363-381).
ggtctcctgtttgtatgtt

SEQ ID NO: 209752 - DNA, 19 bp, Homo sapiens
  siRNA target sequence for B3GALT1 (NM_020981.2,406-424).
gctctctggtacttgagta

SEQ ID NO: 209753 - DNA, 19 bp, Homo sapiens
  siRNA target sequence for B3GALT1 (NM_020981.2,409-427).
ctctggtacttgagtataa

SEQ ID NO: 209754 - DNA, 19 bp, Homo sapiens
  siRNA target sequence for B3GALT1 (NM_020981.2,411-429).
ctggtacttgagtataact

SEQ ID NO: 209755 - DNA, 19 bp, Homo sapiens
  siRNA target sequence for B3GALT1 (NM_020981.2,428-446).
ctcgccctacttcttctta

SEQ ID NO: 209756 - DNA, 19 bp, Homo sapiens
  siRNA target sequence for B3GALT1 (NM_020981.2,430-448).
cgccctacttcttcttaca

SEQ ID NO: 209757 - DNA, 19 bp, Homo sapiens
  siRNA target sequence for B3GALT1 (NM_020981.2,461-479).
cattcagccacctaacagt

SEQ ID NO: 209758 - DNA, 19 bp, Homo sapiens
  siRNA target sequence for B3GALT1 (NM_020981.2,476-494).
cagttgccaggaaaaactt

SEQ ID NO: 209759 - DNA, 19 bp, Homo sapiens
  siRNA target sequence for B3GALT1 (NM_020981.2,521-539).
ctatcaacccacattcttt

SEQ ID NO: 209760 - DNA, 19 bp, Homo sapiens
  siRNA target sequence for B3GALT1 (NM_020981.2,552-570).
caacgagcccaataaatgt

SEQ ID NO: 209761 - DNA, 19 bp, Homo sapiens
  siRNA target sequence for B3GALT1 (NM_020981.2,605-623).
gcaccactcacaaggaatt

SEQ ID NO: 209762 - DNA, 19 bp, Homo sapiens
  siRNA target sequence for B3GALT1 (NM_020981.2,650-668).
cgtggggggatgagaacaa

SEQ ID NO: 209763 - DNA, 19 bp, Homo sapiens
  siRNA target sequence for B3GALT1 (NM_020981.2,653-671).
ggggggatgagaacaactt

SEQ ID NO: 209764 - DNA, 19 bp, Homo sapiens
  siRNA target sequence for B3GALT1 (NM_020981.2,654-672).
gggggatgagaacaacttt

SEQ ID NO: 209765 - DNA, 19 bp, Homo sapiens
  siRNA target sequence for B3GALT1 (NM_020981.2,656-674).
gggatgagaacaactttaa

SEQ ID NO: 209766 - DNA, 19 bp, Homo sapiens
  siRNA target sequence for B3GALT1 (NM_020981.2,669-687).
ctttaaggggatcaagata

SEQ ID NO: 209767 - DNA, 19 bp, Homo sapiens
  siRNA target sequence for B3GALT1 (NM_020981.2,696-714).
gttcctcctgggcaagaat

SEQ ID NO: 209768 - DNA, 19 bp, Homo sapiens
  siRNA target sequence for B3GALT1 (NM_020981.2,754-772).
caaatcttccatgatatca

SEQ ID NO: 209769 - DNA, 19 bp, Homo sapiens
  siRNA target sequence for B3GALT1 (NM_020981.2,790-808).
gactcctaccataacctta

SEQ ID NO: 209770 - DNA, 19 bp, Homo sapiens
  siRNA target sequence for B3GALT1 (NM_020981.2,799-817).
cataaccttaccctcaaaa

SEQ ID NO: 209771 - DNA, 19 bp, Homo sapiens
  siRNA target sequence for B3GALT1 (NM_020981.2,851-869).
gttcaaaagccaagtatgt

SEQ ID NO: 209772 - DNA, 19 bp, Homo sapiens
  siRNA target sequence for B3GALT1 (NM_020981.2,878-896).
cagacagcgacatttttgt

SEQ ID NO: 209773 - DNA, 19 bp, Homo sapiens
  siRNA target sequence for B3GALT1 (NM_020981.2,895-913).
gtaaacatggacaatctta

SEQ ID NO: 209774 - DNA, 19 bp, Homo sapiens
  siRNA target sequence for B3GALT1 (NM_020981.2,942-960).
gccacgaagaaggtatttt

SEQ ID NO: 209775 - DNA, 19 bp, Homo sapiens
  siRNA target sequence for B3GALT1 (NM_020981.2,943-961).
ccacgaagaaggtatttta

SEQ ID NO: 209776 - DNA, 19 bp, Homo sapiens
  siRNA target sequence for B3GALT1 (NM_020981.2,1062-1080).
ggggactggctacatcttt

SEQ ID NO: 209777 - DNA, 19 bp, Homo sapiens
  siRNA target sequence for B3GALT1 (NM_020981.2,1085-1103).
ccgatgtagctgaactcat

SEQ ID NO: 209778 - DNA, 19 bp, Homo sapiens
  siRNA target sequence for B3GALT1 (NM_020981.2,1086-1104).
cgatgtagctgaactcatt

SEQ ID NO: 209779 - DNA, 19 bp, Homo sapiens
  siRNA target sequence for B3GALT1 (NM_020981.2,1127-1145).
ggctgcttcaccttgaaga

SEQ ID NO: 209780 - DNA, 19 bp, Homo sapiens
  siRNA target sequence for B3GALT1 (NM_020981.2,1235-1253).
gtaggtatcgccgagttat

SEQ ID NO: 209781 - DNA, 19 bp, Homo sapiens
  siRNA target sequence for B3GALT1 (NM_020981.2,1239-1257).
gtatcgccgagttatcact

SEQ ID NO: 209782 - DNA, 19 bp, Homo sapiens
  siRNA target sequence for B3GALT1 (NM_020981.2,1285-1303).
cacagaatctggaatgaca

SEQ ID NO: 209783 - DNA, 19 bp, Homo sapiens
  siRNA target sequence for B3GALT2 (NM_003783.2,764-782).
ccgcactcatcttattgga

SEQ ID NO: 209784 - DNA, 19 bp, Homo sapiens
  siRNA target sequence for B3GALT2 (NM_003783.2,771-789).
catcttattggagtacttt

SEQ ID NO: 209785 - DNA, 19 bp, Homo sapiens
  siRNA target sequence for B3GALT2 (NM_003783.2,888-906).
cgaggatttcggtcaacaa

SEQ ID NO: 209786 - DNA, 19 bp, Homo sapiens
  siRNA target sequence for B3GALT2 (NM_003783.2,891-909).
ggatttcggtcaacaaaaa

SEQ ID NO: 209787 - DNA, 19 bp, Homo sapiens
  siRNA target sequence for B3GALT2 (NM_003783.2,929-947).
ccttcggaacatttggaaa

SEQ ID NO: 209788 - DNA, 19 bp, Homo sapiens
  siRNA target sequence for B3GALT2 (NM_003783.2,972-990).
cctcaaacagcaactaact

SEQ ID NO: 209789 - DNA, 19 bp, Homo sapiens
  siRNA target sequence for B3GALT2 (NM_003783.2,1045-1063).
gtgccaatggaagtattta

SEQ ID NO: 209790 - DNA, 19 bp, Homo sapiens
  siRNA target sequence for B3GALT2 (NM_003783.2,1049-1067).
caatggaagtatttacaat

SEQ ID NO: 209791 - DNA, 19 bp, Homo sapiens
  siRNA target sequence for B3GALT2 (NM_003783.2,1074-1092).
ggtactggacatccaaatt

SEQ ID NO: 209792 - DNA, 19 bp, Homo sapiens
  siRNA target sequence for B3GALT2 (NM_003783.2,1083-1101).
catccaaattcttaccatt

SEQ ID NO: 209793 - DNA, 19 bp, Homo sapiens
  siRNA target sequence for B3GALT2 (NM_003783.2,1133-1151).
ccaagagaaaagtcctttt

SEQ ID NO: 209794 - DNA, 19 bp, Homo sapiens
  siRNA target sequence for B3GALT2 (NM_003783.2,1146-1164).
ccttttttaatactactaa

SEQ ID NO: 209795 - DNA, 19 bp, Homo sapiens
  siRNA target sequence for B3GALT2 (NM_003783.2,1208-1226).
gcaaacttggggcaatgaa

SEQ ID NO: 209796 - DNA, 19 bp, Homo sapiens
  siRNA target sequence for B3GALT2 (NM_003783.2,1209-1227).
caaacttggggcaatgaaa

SEQ ID NO: 209797 - DNA, 19 bp, Homo sapiens
  siRNA target sequence for B3GALT2 (NM_003783.2,1228-1246).
gtctagcacctggtattca

SEQ ID NO: 209798 - DNA, 19 bp, Homo sapiens
  siRNA target sequence for B3GALT2 (NM_003783.2,1233-1251).
gcacctggtattcaaatca

SEQ ID NO: 209799 - DNA, 19 bp, Homo sapiens
  siRNA target sequence for B3GALT2 (NM_003783.2,1240-1258).
gtattcaaatcacaagaat

SEQ ID NO: 209800 - DNA, 19 bp, Homo sapiens
  siRNA target sequence for B3GALT2 (NM_003783.2,1268-1286).
gggcttaagtattaagcta

SEQ ID NO: 209801 - DNA, 19 bp, Homo sapiens
  siRNA target sequence for B3GALT2 (NM_003783.2,1269-1287).
ggcttaagtattaagctaa

SEQ ID NO: 209802 - DNA, 19 bp, Homo sapiens
  siRNA target sequence for B3GALT2 (NM_003783.2,1355-1373).
cttagatacgtactataat

SEQ ID NO: 209803 - DNA, 19 bp, Homo sapiens
  siRNA target sequence for B3GALT2 (NM_003783.2,1403-1421).
ctgggttgcaacatactgt

SEQ ID NO: 209804 - DNA, 19 bp, Homo sapiens
  siRNA target sequence for B3GALT2 (NM_003783.2,1425-1443).
catattccatatgttatga

SEQ ID NO: 209805 - DNA, 19 bp, Homo sapiens
  siRNA target sequence for B3GALT2 (NM_003783.2,1503-1521).
gatctgcctcccagacata

SEQ ID NO: 209806 - DNA, 19 bp, Homo sapiens
  siRNA target sequence for B3GALT2 (NM_003783.2,1509-1527).
cctcccagacataactatt

SEQ ID NO: 209807 - DNA, 19 bp, Homo sapiens
  siRNA target sequence for B3GALT2 (NM_003783.2,1523-1541).
ctatttcactggttaccta

SEQ ID NO: 209808 - DNA, 19 bp, Homo sapiens
  siRNA target sequence for B3GALT2 (NM_003783.2,1538-1556).
cctaatgcgaggatatgca

SEQ ID NO: 209809 - DNA, 19 bp, Homo sapiens
  siRNA target sequence for B3GALT2 (NM_003783.2,1548-1566).
ggatatgcacccaatcgaa

SEQ ID NO: 209810 - DNA, 19 bp, Homo sapiens
  siRNA target sequence for B3GALT2 (NM_003783.2,1549-1567).
gatatgcacccaatcgaaa

SEQ ID NO: 209811 - DNA, 19 bp, Homo sapiens
  siRNA target sequence for B3GALT2 (NM_003783.2,1555-1573).
cacccaatcgaaacaaaga

SEQ ID NO: 209812 - DNA, 19 bp, Homo sapiens
  siRNA target sequence for B3GALT2 (NM_003783.2,1557-1575).
cccaatcgaaacaaagata

SEQ ID NO: 209813 - DNA, 19 bp, Homo sapiens
  siRNA target sequence for B3GALT2 (NM_003783.2,1604-1622).
cccaagtgagcgttatcct

SEQ ID NO: 209814 - DNA, 19 bp, Homo sapiens
  siRNA target sequence for B3GALT2 (NM_003783.2,1614-1632).
cgttatcctgtcttctgtt

SEQ ID NO: 209815 - DNA, 19 bp, Homo sapiens
  siRNA target sequence for B3GALT2 (NM_003783.2,1630-1648).
gttctggaactggttatgt

SEQ ID NO: 209816 - DNA, 19 bp, Homo sapiens
  siRNA target sequence for B3GALT2 (NM_003783.2,1635-1653).
ggaactggttatgtttttt

SEQ ID NO: 209817 - DNA, 19 bp, Homo sapiens
  siRNA target sequence for B3GALT2 (NM_003783.2,1702-1720).
gtttgcacttggaagatgt

SEQ ID NO: 209818 - DNA, 19 bp, Homo sapiens
  siRNA target sequence for B3GALT2 (NM_003783.2,1735-1753).
gtcttgccaagttgagaat

SEQ ID NO: 209819 - DNA, 19 bp, Homo sapiens
  siRNA target sequence for B3GALT2 (NM_003783.2,1761-1779).
gtaccccctcccaatgagt

SEQ ID NO: 209820 - DNA, 19 bp, Homo sapiens
  siRNA target sequence for B3GALT2 (NM_003783.2,1791-1809).
cactggcgagtctcttatt

SEQ ID NO: 209821 - DNA, 19 bp, Homo sapiens
  siRNA target sequence for B3GALT2 (NM_003783.2,1816-1834).
gtaaatacagccacctaat

SEQ ID NO: 209822 - DNA, 19 bp, Homo sapiens
  siRNA target sequence for B3GALT2 (NM_003783.2,1850-1868).
ccagcctagtgaactgata

SEQ ID NO: 209823 - DNA, 19 bp, Homo sapiens
  siRNA target sequence for B3GALT2 (NM_003783.2,1851-1869).
cagcctagtgaactgataa

SEQ ID NO: 209824 - DNA, 19 bp, Homo sapiens
  siRNA target sequence for B3GALT2 (NM_003783.2,1853-1871).
gcctagtgaactgataaaa

SEQ ID NO: 209825 - DNA, 19 bp, Homo sapiens
  siRNA target sequence for B3GALT2 (NM_003783.2,1854-1872).
cctagtgaactgataaaat

SEQ ID NO: 209826 - DNA, 19 bp, Homo sapiens
  siRNA target sequence for B3GALT2 (NM_003783.2,1907-1925).
ctgtgccaacgcagcaaaa

SEQ ID NO: 209827 - DNA, 19 bp, Homo sapiens
  siRNA target sequence for B3GALT2 (NM_003783.2,1909-1927).
gtgccaacgcagcaaaaga

SEQ ID NO: 209828 - DNA, 19 bp, Homo sapiens
  siRNA target sequence for B3GALT2 (NM_003783.2,1911-1929).
gccaacgcagcaaaagaaa

SEQ ID NO: 209829 - DNA, 19 bp, Homo sapiens
  siRNA target sequence for B3GALT2 (NM_003783.2,1940-1958).
gtatcgccaccgtaaacta

SEQ ID NO: 209830 - DNA, 19 bp, Homo sapiens
  siRNA target sequence for B3GALT2 (NM_003783.2,1944-1962).
cgccaccgtaaactacatt

SEQ ID NO: 209831 - DNA, 19 bp, Homo sapiens
  siRNA target sequence for B3GALT4 (NM_003782.2,562-580).
gggtacagacgctattctt

SEQ ID NO: 209832 - DNA, 19 bp, Homo sapiens
  siRNA target sequence for B3GALT4 (NM_003782.2,772-790).
cggacgatgatgtgtatgt

SEQ ID NO: 209833 - DNA, 19 bp, Homo sapiens
  siRNA target sequence for B3GALT4 (NM_003782.2,774-792).
gacgatgatgtgtatgtca

SEQ ID NO: 209834 - DNA, 19 bp, Homo sapiens
  siRNA target sequence for B3GALT4 (NM_003782.2,976-994).
gcaggcaccgcgtatcaga

SEQ ID NO: 209835 - DNA, 19 bp, Homo sapiens
  siRNA target sequence for B3GALT4 (NM_003782.2,1112-1130).
cccattagaggatgtcttt

SEQ ID NO: 209836 - DNA, 19 bp, Homo sapiens
  siRNA target sequence for B3GALT4 (NM_003782.2,1352-1370).
cctgcggtgtcgagcaata

SEQ ID NO: 209837 - DNA, 19 bp, Homo sapiens
  siRNA target sequence for B3GALT5 (NM_006057.1,444-462).
cgaagatgagattgatgta

SEQ ID NO: 209838 - DNA, 19 bp, Homo sapiens
  siRNA target sequence for B3GALT5 (NM_006057.1,481-499).
gggggctctttgtttgtat

SEQ ID NO: 209839 - DNA, 19 bp, Homo sapiens
  siRNA target sequence for B3GALT5 (NM_006057.1,505-523).
catgtacagtctaaatcct

SEQ ID NO: 209840 - DNA, 19 bp, Homo sapiens
  siRNA target sequence for B3GALT5 (NM_006057.1,513-531).
gtctaaatcctttcaaaga

SEQ ID NO: 209841 - DNA, 19 bp, Homo sapiens
  siRNA target sequence for B3GALT5 (NM_006057.1,565-583).
ccttaagctcccagataca

SEQ ID NO: 209842 - DNA, 19 bp, Homo sapiens
  siRNA target sequence for B3GALT5 (NM_006057.1,624-642).
cctcatcccacaaacagtt

SEQ ID NO: 209843 - DNA, 19 bp, Homo sapiens
  siRNA target sequence for B3GALT5 (NM_006057.1,735-753).
gcagtgcagcggaaacgaa

SEQ ID NO: 209844 - DNA, 19 bp, Homo sapiens
  siRNA target sequence for B3GALT5 (NM_006057.1,736-754).
cagtgcagcggaaacgaaa

SEQ ID NO: 209845 - DNA, 19 bp, Homo sapiens
  siRNA target sequence for B3GALT5 (NM_006057.1,773-791).
cagcgacacggggacatta

SEQ ID NO: 209846 - DNA, 19 bp, Homo sapiens
  siRNA target sequence for B3GALT5 (NM_006057.1,777-795).
gacacggggacattatcca

SEQ ID NO: 209847 - DNA, 19 bp, Homo sapiens
  siRNA target sequence for B3GALT5 (NM_006057.1,785-803).
gacattatccagaaggatt

SEQ ID NO: 209848 - DNA, 19 bp, Homo sapiens
  siRNA target sequence for B3GALT5 (NM_006057.1,835-853).
gaccatgatgggcatagaa

SEQ ID NO: 209849 - DNA, 19 bp, Homo sapiens
  siRNA target sequence for B3GALT5 (NM_006057.1,978-996).
gcttcttgaaactcaatga

SEQ ID NO: 209850 - DNA, 19 bp, Homo sapiens
  siRNA target sequence for B3GALT5 (NM_006057.1,1020-1038).
gcaagtggtttgtcagtaa

SEQ ID NO: 209851 - DNA, 19 bp, Homo sapiens
  siRNA target sequence for B3GALT5 (NM_006057.1,1021-1039).
caagtggtttgtcagtaaa

SEQ ID NO: 209852 - DNA, 19 bp, Homo sapiens
  siRNA target sequence for B3GALT5 (NM_006057.1,1079-1097).
ggcaccggctacgtgtttt

SEQ ID NO: 209853 - DNA, 19 bp, Homo sapiens
  siRNA target sequence for B3GALT5 (NM_006057.1,1108-1126).
ggcgagtcaggtgtacaat

SEQ ID NO: 209854 - DNA, 19 bp, Homo sapiens
  siRNA target sequence for B3GALT5 (NM_006057.1,1110-1128).
cgagtcaggtgtacaatgt

SEQ ID NO: 209855 - DNA, 19 bp, Homo sapiens
  siRNA target sequence for B3GALT5 (NM_006057.1,1132-1150).
caagagcgtcccatacatt

SEQ ID NO: 209856 - DNA, 19 bp, Homo sapiens
  siRNA target sequence for B3GALT5 (NM_006057.1,1135-1153).
gagcgtcccatacattaaa

SEQ ID NO: 209857 - DNA, 19 bp, Homo sapiens
  siRNA target sequence for B3GALT5 (NM_006057.1,1137-1155).
gcgtcccatacattaaact

SEQ ID NO: 209858 - DNA, 19 bp, Homo sapiens
  siRNA target sequence for B3GALT5 (NM_006057.1,1179-1197).
gcctcgaaaggctgaacat

SEQ ID NO: 209859 - DNA, 19 bp, Homo sapiens
  siRNA target sequence for B3GALT5 (NM_006057.1,1181-1199).
ctcgaaaggctgaacatca

SEQ ID NO: 209860 - DNA, 19 bp, Homo sapiens
  siRNA target sequence for B3GALT5 (NM_006057.1,1184-1202).
gaaaggctgaacatcagat

SEQ ID NO: 209861 - DNA, 19 bp, Homo sapiens
  siRNA target sequence for B3GALT5 (NM_006057.1,1214-1232).
cactcccagccgacctttt

SEQ ID NO: 209862 - DNA, 19 bp, Homo sapiens
  siRNA target sequence for B3GNT1 (NM_006577.3,238-256).
gtgttggacgtcgaagaat

SEQ ID NO: 209863 - DNA, 19 bp, Homo sapiens
  siRNA target sequence for B3GNT1 (NM_006577.3,240-258).
gttggacgtcgaagaataa

SEQ ID NO: 209864 - DNA, 19 bp, Homo sapiens
  siRNA target sequence for B3GNT1 (NM_006577.3,243-261).
ggacgtcgaagaataaagt

SEQ ID NO: 209865 - DNA, 19 bp, Homo sapiens
  siRNA target sequence for B3GNT1 (NM_006577.3,244-262).
gacgtcgaagaataaagtt

SEQ ID NO: 209866 - DNA, 19 bp, Homo sapiens
  siRNA target sequence for B3GNT1 (NM_006577.3,246-264).
cgtcgaagaataaagttgt

SEQ ID NO: 209867 - DNA, 19 bp, Homo sapiens
  siRNA target sequence for B3GNT1 (NM_006577.3,247-265).
gtcgaagaataaagttgtt

SEQ ID NO: 209868 - DNA, 19 bp, Homo sapiens
  siRNA target sequence for B3GNT1 (NM_006577.3,485-503).
gggcaggctctccaatata

SEQ ID NO: 209869 - DNA, 19 bp, Homo sapiens
  siRNA target sequence for B3GNT1 (NM_006577.3,486-504).
ggcaggctctccaatataa

SEQ ID NO: 209870 - DNA, 19 bp, Homo sapiens
  siRNA target sequence for B3GNT1 (NM_006577.3,496-514).
ccaatataagccatctgaa

SEQ ID NO: 209871 - DNA, 19 bp, Homo sapiens
  siRNA target sequence for B3GNT1 (NM_006577.3,544-562).
cggtggttacgggttttaa

SEQ ID NO: 209872 - DNA, 19 bp, Homo sapiens
  siRNA target sequence for B3GNT1 (NM_006577.3,546-564).
gtggttacgggttttaaca

SEQ ID NO: 209873 - DNA, 19 bp, Homo sapiens
  siRNA target sequence for B3GNT1 (NM_006577.3,549-567).
gttacgggttttaacaact

SEQ ID NO: 209874 - DNA, 19 bp, Homo sapiens
  siRNA target sequence for B3GNT1 (NM_006577.3,563-581).
caacttgccggacagattt

SEQ ID NO: 209875 - DNA, 19 bp, Homo sapiens
  siRNA target sequence for B3GNT1 (NM_006577.3,637-655).
cggataagtgtgcaaagaa

SEQ ID NO: 209876 - DNA, 19 bp, Homo sapiens
  siRNA target sequence for B3GNT1 (NM_006577.3,680-698).
gtccctcactccacatttt

SEQ ID NO: 209877 - DNA, 19 bp, Homo sapiens
  siRNA target sequence for B3GNT1 (NM_006577.3,804-822).
caccccgacctttcagata

SEQ ID NO: 209878 - DNA, 19 bp, Homo sapiens
  siRNA target sequence for B3GNT1 (NM_006577.3,808-826).
ccgacctttcagatatgct

SEQ ID NO: 209879 - DNA, 19 bp, Homo sapiens
  siRNA target sequence for B3GNT1 (NM_006577.3,874-892).
gagacactttcttcaactt

SEQ ID NO: 209880 - DNA, 19 bp, Homo sapiens
  siRNA target sequence for B3GNT1 (NM_006577.3,937-955).
gcccagacactgagtttgt

SEQ ID NO: 209881 - DNA, 19 bp, Homo sapiens
  siRNA target sequence for B3GNT1 (NM_006577.3,939-957).
ccagacactgagtttgttt

SEQ ID NO: 209882 - DNA, 19 bp, Homo sapiens
  siRNA target sequence for B3GNT1 (NM_006577.3,988-1006).
cccatcacatcctgaatta

SEQ ID NO: 209883 - DNA, 19 bp, Homo sapiens
  siRNA target sequence for B3GNT1 (NM_006577.3,998-1016).
cctgaattacttgaatagt

SEQ ID NO: 209884 - DNA, 19 bp, Homo sapiens
  siRNA target sequence for B3GNT1 (NM_006577.3,999-1017).
ctgaattacttgaatagtt

SEQ ID NO: 209885 - DNA, 19 bp, Homo sapiens
  siRNA target sequence for B3GNT1 (NM_006577.3,1071-1089).
ggacctcatcgggataaga

SEQ ID NO: 209886 - DNA, 19 bp, Homo sapiens
  siRNA target sequence for B3GNT1 (NM_006577.3,1072-1090).
gacctcatcgggataagaa

SEQ ID NO: 209887 - DNA, 19 bp, Homo sapiens
  siRNA target sequence for B3GNT1 (NM_006577.3,1081-1099).
gggataagaagctgaagta

SEQ ID NO: 209888 - DNA, 19 bp, Homo sapiens
  siRNA target sequence for B3GNT1 (NM_006577.3,1097-1115).
gtactacatcccagaagtt

SEQ ID NO: 209889 - DNA, 19 bp, Homo sapiens
  siRNA target sequence for B3GNT1 (NM_006577.3,1100-1118).
ctacatcccagaagttgtt

SEQ ID NO: 209890 - DNA, 19 bp, Homo sapiens
  siRNA target sequence for B3GNT1 (NM_006577.3,1184-1202).
gaggctgtaccatatcact

SEQ ID NO: 209891 - DNA, 19 bp, Homo sapiens
  siRNA target sequence for B3GNT1 (NM_006577.3,1220-1238).
ccccattgatgacgtttat

SEQ ID NO: 209892 - DNA, 19 bp, Homo sapiens
  siRNA target sequence for B3GNT1 (NM_006577.3,1221-1239).
cccattgatgacgtttata

SEQ ID NO: 209893 - DNA, 19 bp, Homo sapiens
  siRNA target sequence for B3GNT1 (NM_006577.3,1223-1241).
cattgatgacgtttatact

SEQ ID NO: 209894 - DNA, 19 bp, Homo sapiens
  siRNA target sequence for B3GNT1 (NM_006577.3,1262-1280).
cggcctcgttccagagaaa

SEQ ID NO: 209895 - DNA, 19 bp, Homo sapiens
  siRNA target sequence for B3GNT1 (NM_006577.3,1264-1282).
gcctcgttccagagaaaca

SEQ ID NO: 209896 - DNA, 19 bp, Homo sapiens
  siRNA target sequence for B3GNT1 (NM_006577.3,1283-1301).
caaaggcttcaggacattt

SEQ ID NO: 209897 - DNA, 19 bp, Homo sapiens
  siRNA target sequence for B3GNT1 (NM_006577.3,1287-1305).
ggcttcaggacatttgata

SEQ ID NO: 209898 - DNA, 19 bp, Homo sapiens
  siRNA target sequence for B3GNT1 (NM_006577.3,1288-1306).
gcttcaggacatttgatat

SEQ ID NO: 209899 - DNA, 19 bp, Homo sapiens
  siRNA target sequence for B3GNT1 (NM_006577.3,1333-1351).
gctcctatgtagatctgat

SEQ ID NO: 209900 - DNA, 19 bp, Homo sapiens
  siRNA target sequence for B3GNT1 (NM_006577.3,1337-1355).
ctatgtagatctgatgtta

SEQ ID NO: 209901 - DNA, 19 bp, Homo sapiens
  siRNA target sequence for B3GNT1 (NM_006577.3,1344-1362).
gatctgatgttagtacata

SEQ ID NO: 209902 - DNA, 19 bp, Homo sapiens
  siRNA target sequence for B3GNT1 (NM_006577.3,1352-1370).
gttagtacatagtagaaaa

SEQ ID NO: 209903 - DNA, 19 bp, Homo sapiens
  siRNA target sequence for B3GNT1 (NM_006577.3,1377-1395).
gagatgattgatatttggt

SEQ ID NO: 209904 - DNA, 19 bp, Homo sapiens
  siRNA target sequence for B4GALT1 (NM_001497.2,175-193).
ggcgtcaccctcgtttact

SEQ ID NO: 209905 - DNA, 19 bp, Homo sapiens
  siRNA target sequence for B4GALT1 (NM_001497.2,176-194).
gcgtcaccctcgtttacta

SEQ ID NO: 209906 - DNA, 19 bp, Homo sapiens
  siRNA target sequence for B4GALT1 (NM_001497.2,490-508).
cccatgctgattgagttta

SEQ ID NO: 209907 - DNA, 19 bp, Homo sapiens
  siRNA target sequence for B4GALT1 (NM_001497.2,491-509).
ccatgctgattgagtttaa

SEQ ID NO: 209908 - DNA, 19 bp, Homo sapiens
  siRNA target sequence for B4GALT1 (NM_001497.2,604-622).
gtggccatcatcattccat

SEQ ID NO: 209909 - DNA, 19 bp, Homo sapiens
  siRNA target sequence for B4GALT1 (NM_001497.2,693-711).
ggactatggcatctatgtt

SEQ ID NO: 209910 - DNA, 19 bp, Homo sapiens
  siRNA target sequence for B4GALT1 (NM_001497.2,717-735).
ccaggcgggagacactata

SEQ ID NO: 209911 - DNA, 19 bp, Homo sapiens
  siRNA target sequence for B4GALT1 (NM_001497.2,718-736).
caggcgggagacactatat

SEQ ID NO: 209912 - DNA, 19 bp, Homo sapiens
  siRNA target sequence for B4GALT1 (NM_001497.2,721-739).
gcgggagacactatattca

SEQ ID NO: 209913 - DNA, 19 bp, Homo sapiens
  siRNA target sequence for B4GALT1 (NM_001497.2,722-740).
cgggagacactatattcaa

SEQ ID NO: 209914 - DNA, 19 bp, Homo sapiens
  siRNA target sequence for B4GALT1 (NM_001497.2,743-761).
gtgctaagctcctcaatgt

SEQ ID NO: 209915 - DNA, 19 bp, Homo sapiens
  siRNA target sequence for B4GALT1 (NM_001497.2,753-771).
cctcaatgttggctttcaa

SEQ ID NO: 209916 - DNA, 19 bp, Homo sapiens
  siRNA target sequence for B4GALT1 (NM_001497.2,775-793).
gccttgaaggactatgact

SEQ ID NO: 209917 - DNA, 19 bp, Homo sapiens
  siRNA target sequence for B4GALT1 (NM_001497.2,790-808).
gactacacctgctttgtgt

SEQ ID NO: 209918 - DNA, 19 bp, Homo sapiens
  siRNA target sequence for B4GALT1 (NM_001497.2,814-832).
gacgtggacctcattccaa

SEQ ID NO: 209919 - DNA, 19 bp, Homo sapiens
  siRNA target sequence for B4GALT1 (NM_001497.2,848-866).
cgtacaggtgtttttcaca

SEQ ID NO: 209920 - DNA, 19 bp, Homo sapiens
  siRNA target sequence for B4GALT1 (NM_001497.2,872-890).
ggcacatttccgttgcaat

SEQ ID NO: 209921 - DNA, 19 bp, Homo sapiens
  siRNA target sequence for B4GALT1 (NM_001497.2,881-899).
ccgttgcaatggataagtt

SEQ ID NO: 209922 - DNA, 19 bp, Homo sapiens
  siRNA target sequence for B4GALT1 (NM_001497.2,882-900).
cgttgcaatggataagttt

SEQ ID NO: 209923 - DNA, 19 bp, Homo sapiens
  siRNA target sequence for B4GALT1 (NM_001497.2,886-904).
gcaatggataagtttggat

SEQ ID NO: 209924 - DNA, 19 bp, Homo sapiens
  siRNA target sequence for B4GALT1 (NM_001497.2,902-920).
gattcagcctaccttatgt

SEQ ID NO: 209925 - DNA, 19 bp, Homo sapiens
  siRNA target sequence for B4GALT1 (NM_001497.2,908-926).
gcctaccttatgttcagta

SEQ ID NO: 209926 - DNA, 19 bp, Homo sapiens
  siRNA target sequence for B4GALT1 (NM_001497.2,909-927).
cctaccttatgttcagtat

SEQ ID NO: 209927 - DNA, 19 bp, Homo sapiens
  siRNA target sequence for B4GALT1 (NM_001497.2,934-952).
ggtgtctctgctctaagta

SEQ ID NO: 209928 - DNA, 19 bp, Homo sapiens
  siRNA target sequence for B4GALT1 (NM_001497.2,935-953).
gtgtctctgctctaagtaa

SEQ ID NO: 209929 - DNA, 19 bp, Homo sapiens
  siRNA target sequence for B4GALT1 (NM_001497.2,1036-1054).
gtttttagaggcatgtcta

SEQ ID NO: 209930 - DNA, 19 bp, Homo sapiens
  siRNA target sequence for B4GALT1 (NM_001497.2,1097-1115).
gccactcaagagacaagaa

SEQ ID NO: 209931 - DNA, 19 bp, Homo sapiens
  siRNA target sequence for B4GALT1 (NM_001497.2,1166-1184).
caatgctctctgatggttt

SEQ ID NO: 209932 - DNA, 19 bp, Homo sapiens
  siRNA target sequence for B4GALT1 (NM_001497.2,1216-1234).
cagagatacccattgtata

SEQ ID NO: 209933 - DNA, 19 bp, Homo sapiens
  siRNA target sequence for B4GALT1 (NM_001497.2,1225-1243).
ccattgtatacccaaatca

SEQ ID NO: 209934 - DNA, 19 bp, Homo sapiens
  siRNA target sequence for B4GALT2 (NM_003780.2,130-148).
ggccgtcatcctctacttt

SEQ ID NO: 209935 - DNA, 19 bp, Homo sapiens
  siRNA target sequence for B4GALT2 (NM_003780.2,529-547).
ctactggctccactatcta

SEQ ID NO: 209936 - DNA, 19 bp, Homo sapiens
  siRNA target sequence for B4GALT2 (NM_003780.2,576-594).
gctacggcgtctatgtcat

SEQ ID NO: 209937 - DNA, 19 bp, Homo sapiens
  siRNA target sequence for B4GALT2 (NM_003780.2,819-837).
gtgtgtcaggcctgagtaa

SEQ ID NO: 209938 - DNA, 19 bp, Homo sapiens
  siRNA target sequence for B4GALT2 (NM_003780.2,983-1001).
cacgaccgcgacaagcata

SEQ ID NO: 209939 - DNA, 19 bp, Homo sapiens
  siRNA target sequence for B4GALT2 (NM_003780.2,988-1006).
ccgcgacaagcataacgaa

SEQ ID NO: 209940 - DNA, 19 bp, Homo sapiens
  siRNA target sequence for B4GALT2 (NM_003780.2,1007-1025).
cctaaccctcagaggttta

SEQ ID NO: 209941 - DNA, 19 bp, Homo sapiens
  siRNA target sequence for B4GALT2 (NM_003780.2,1106-1124).
caaccactcttcaccaata

SEQ ID NO: 209942 - DNA, 19 bp, Homo sapiens
  siRNA target sequence for B4GALT3 (NM_003779.2,393-411).
cgacatttgactattctca

SEQ ID NO: 209943 - DNA, 19 bp, Homo sapiens
  siRNA target sequence for B4GALT3 (NM_003779.2,408-426).
ctcaccctcgtgatgtcta

SEQ ID NO: 209944 - DNA, 19 bp, Homo sapiens
  siRNA target sequence for B4GALT3 (NM_003779.2,414-432).
ctcgtgatgtctacagtaa

SEQ ID NO: 209945 - DNA, 19 bp, Homo sapiens
  siRNA target sequence for B4GALT3 (NM_003779.2,628-646).
ctcccgaacagccatcatt

SEQ ID NO: 209946 - DNA, 19 bp, Homo sapiens
  siRNA target sequence for B4GALT3 (NM_003779.2,630-648).
cccgaacagccatcattgt

SEQ ID NO: 209947 - DNA, 19 bp, Homo sapiens
  siRNA target sequence for B4GALT3 (NM_003779.2,712-730).
gcgccagcagcttgcttat

SEQ ID NO: 209948 - DNA, 19 bp, Homo sapiens
  siRNA target sequence for B4GALT3 (NM_003779.2,721-739).
gcttgcttatggcatctat

SEQ ID NO: 209949 - DNA, 19 bp, Homo sapiens
  siRNA target sequence for B4GALT3 (NM_003779.2,742-760).
catccaccaggctggaaat

SEQ ID NO: 209950 - DNA, 19 bp, Homo sapiens
  siRNA target sequence for B4GALT3 (NM_003779.2,745-763).
ccaccaggctggaaatgga

SEQ ID NO: 209951 - DNA, 19 bp, Homo sapiens
  siRNA target sequence for B4GALT3 (NM_003779.2,746-764).
caccaggctggaaatggaa

SEQ ID NO: 209952 - DNA, 19 bp, Homo sapiens
  siRNA target sequence for B4GALT3 (NM_003779.2,765-783).
catttaacagggcaaaact

SEQ ID NO: 209953 - DNA, 19 bp, Homo sapiens
  siRNA target sequence for B4GALT3 (NM_003779.2,911-929).
gttgccgttgctatgaaca

SEQ ID NO: 209954 - DNA, 19 bp, Homo sapiens
  siRNA target sequence for B4GALT3 (NM_003779.2,914-932).
gccgttgctatgaacaagt

SEQ ID NO: 209955 - DNA, 19 bp, Homo sapiens
  siRNA target sequence for B4GALT3 (NM_003779.2,915-933).
ccgttgctatgaacaagtt

SEQ ID NO: 209956 - DNA, 19 bp, Homo sapiens
  siRNA target sequence for B4GALT3 (NM_003779.2,916-934).
cgttgctatgaacaagttt

SEQ ID NO: 209957 - DNA, 19 bp, Homo sapiens
  siRNA target sequence for B4GALT3 (NM_003779.2,920-938).
gctatgaacaagtttggat

SEQ ID NO: 209958 - DNA, 19 bp, Homo sapiens
  siRNA target sequence for B4GALT3 (NM_003779.2,1181-1199).
ctggtccgtacccagaatt

SEQ ID NO: 209959 - DNA, 19 bp, Homo sapiens
  siRNA target sequence for B4GALT3 (NM_003779.2,1184-1202).
gtccgtacccagaattcct

SEQ ID NO: 209960 - DNA, 19 bp, Homo sapiens
  siRNA target sequence for B4GALT3 (NM_003779.2,1215-1233).
ggatgaactcactgacata

SEQ ID NO: 209961 - DNA, 19 bp, Homo sapiens
  siRNA target sequence for B4GALT4 (NM_003778.2,339-357).
cctacaaattccgattact

SEQ ID NO: 209962 - DNA, 19 bp, Homo sapiens
  siRNA target sequence for B4GALT4 (NM_003778.2,389-407).
gggtgggccaccagtaact

SEQ ID NO: 209963 - DNA, 19 bp, Homo sapiens
  siRNA target sequence for B4GALT4 (NM_003778.2,409-427).
cttcgtgggtgccattcaa

SEQ ID NO: 209964 - DNA, 19 bp, Homo sapiens
  siRNA target sequence for B4GALT4 (NM_003778.2,415-433).
gggtgccattcaagagatt

SEQ ID NO: 209965 - DNA, 19 bp, Homo sapiens
  siRNA target sequence for B4GALT4 (NM_003778.2,420-438).
ccattcaagagattcctaa

SEQ ID NO: 209966 - DNA, 19 bp, Homo sapiens
  siRNA target sequence for B4GALT4 (NM_003778.2,435-453).
ctaaagcaaaggagttcat

SEQ ID NO: 209967 - DNA, 19 bp, Homo sapiens
  siRNA target sequence for B4GALT4 (NM_003778.2,448-466).
gttcatggctaatttccat

SEQ ID NO: 209968 - DNA, 19 bp, Homo sapiens
  siRNA target sequence for B4GALT4 (NM_003778.2,487-505).
gggaaaaactctgactaat

SEQ ID NO: 209969 - DNA, 19 bp, Homo sapiens
  siRNA target sequence for B4GALT4 (NM_003778.2,567-585).
gccagagcaagctcatttt

SEQ ID NO: 209970 - DNA, 19 bp, Homo sapiens
  siRNA target sequence for B4GALT4 (NM_003778.2,791-809).
caccaggctgaaggtaaaa

SEQ ID NO: 209971 - DNA, 19 bp, Homo sapiens
  siRNA target sequence for B4GALT4 (NM_003778.2,796-814).
ggctgaaggtaaaaagttt

SEQ ID NO: 209972 - DNA, 19 bp, Homo sapiens
  siRNA target sequence for B4GALT4 (NM_003778.2,819-837).
gagccaaactcttgaatgt

SEQ ID NO: 209973 - DNA, 19 bp, Homo sapiens
  siRNA target sequence for B4GALT4 (NM_003778.2,899-917).
ctggtacccgagaatgact

SEQ ID NO: 209974 - DNA, 19 bp, Homo sapiens
  siRNA target sequence for B4GALT4 (NM_003778.2,901-919).
ggtacccgagaatgacttt

SEQ ID NO: 209975 - DNA, 19 bp, Homo sapiens
  siRNA target sequence for B4GALT4 (NM_003778.2,902-920).
gtacccgagaatgacttta

SEQ ID NO: 209976 - DNA, 19 bp, Homo sapiens
  siRNA target sequence for B4GALT4 (NM_003778.2,906-924).
ccgagaatgactttaacct

SEQ ID NO: 209977 - DNA, 19 bp, Homo sapiens
  siRNA target sequence for B4GALT4 (NM_003778.2,907-925).
cgagaatgactttaacctt

SEQ ID NO: 209978 - DNA, 19 bp, Homo sapiens
  siRNA target sequence for B4GALT4 (NM_003778.2,914-932).
gactttaacctttacaagt

SEQ ID NO: 209979 - DNA, 19 bp, Homo sapiens
  siRNA target sequence for B4GALT4 (NM_003778.2,975-993).
ctgggtacaggttacgtta

SEQ ID NO: 209980 - DNA, 19 bp, Homo sapiens
  siRNA target sequence for B4GALT4 (NM_003778.2,979-997).
gtacaggttacgttacagt

SEQ ID NO: 209981 - DNA, 19 bp, Homo sapiens
  siRNA target sequence for B4GALT4 (NM_003778.2,985-1003).
gttacgttacagtggatat

SEQ ID NO: 209982 - DNA, 19 bp, Homo sapiens
  siRNA target sequence for B4GALT4 (NM_003778.2,1022-1040).
ctaagcagagagcagtttt

SEQ ID NO: 209983 - DNA, 19 bp, Homo sapiens
  siRNA target sequence for B4GALT4 (NM_003778.2,1046-1064).
gtgaatggattctctaaca

SEQ ID NO: 209984 - DNA, 19 bp, Homo sapiens
  siRNA target sequence for B4GALT4 (NM_003778.2,1107-1125).
gggttgagctccaaagaat

SEQ ID NO: 209985 - DNA, 19 bp, Homo sapiens
  siRNA target sequence for B4GALT4 (NM_003778.2,1145-1163).
cctgaagtgggtaaatata

SEQ ID NO: 209986 - DNA, 19 bp, Homo sapiens
  siRNA target sequence for B4GALT4 (NM_003778.2,1253-1271).
gatgggttgagtagttgtt

SEQ ID NO: 209987 - DNA, 19 bp, Homo sapiens
  siRNA target sequence for B4GALT4 (NM_003778.2,1257-1275).
ggttgagtagttgttctta

SEQ ID NO: 209988 - DNA, 19 bp, Homo sapiens
  siRNA target sequence for ABO (NM_020469.1,18-36).
gacgctggccggaaaacca

SEQ ID NO: 209989 - DNA, 19 bp, Homo sapiens
  siRNA target sequence for ABO (NM_020469.1,20-38).
cgctggccggaaaaccaaa

SEQ ID NO: 209990 - DNA, 19 bp, Homo sapiens
  siRNA target sequence for ABO (NM_020469.1,49-67).
cttcgacctatgatccttt

SEQ ID NO: 209991 - DNA, 19 bp, Homo sapiens
  siRNA target sequence for ABO (NM_020469.1,53-71).
gacctatgatccttttcct

SEQ ID NO: 209992 - DNA, 19 bp, Homo sapiens
  siRNA target sequence for ABO (NM_020469.1,109-127).
ctaagccccagaagtctaa

SEQ ID NO: 209993 - DNA, 19 bp, Homo sapiens
  siRNA target sequence for ABO (NM_020469.1,287-305).
gggagggcacattcaacat

SEQ ID NO: 209994 - DNA, 19 bp, Homo sapiens
  siRNA target sequence for ABO (NM_020469.1,341-359).
ccaccattgggttaactgt

SEQ ID NO: 209995 - DNA, 19 bp, Homo sapiens
  siRNA target sequence for ABO (NM_020469.1,345-363).
cattgggttaactgtgttt

SEQ ID NO: 209996 - DNA, 19 bp, Homo sapiens
  siRNA target sequence for ABO (NM_020469.1,431-449).
gccaccgtgtccactacta

SEQ ID NO: 209997 - DNA, 19 bp, Homo sapiens
  siRNA target sequence for B4GALT7 (NM_007255.1,499-517).
caacagcacggactacatt

SEQ ID NO: 209998 - DNA, 19 bp, Homo sapiens
  siRNA target sequence for B4GALT7 (NM_007255.1,717-735).
gcgaggacgacgagttcta

SEQ ID NO: 209999 - DNA, 19 bp, Homo sapiens
  siRNA target sequence for B4GALT7 (NM_007255.1,786-804).
caactgggtacaagacatt

SEQ ID NO: 210000 - DNA, 19 bp, Homo sapiens
  siRNA target sequence for B4GALT7 (NM_007255.1,847-865).
gcgcatcgcagctcaaaaa

SEQ ID NO: 210001 - DNA, 19 bp, Homo sapiens
  siRNA target sequence for C1GALT1 (NM_020156.1,103-121).
gtggatcagcaataggatt

SEQ ID NO: 210002 - DNA, 19 bp, Homo sapiens
  siRNA target sequence for C1GALT1 (NM_020156.1,106-124).
gatcagcaataggatttct

SEQ ID NO: 210003 - DNA, 19 bp, Homo sapiens
  siRNA target sequence for C1GALT1 (NM_020156.1,174-192).
cagcctaatgttcttcata

SEQ ID NO: 210004 - DNA, 19 bp, Homo sapiens
  siRNA target sequence for C1GALT1 (NM_020156.1,199-217).
ctcatgcaaggcattcaga

SEQ ID NO: 210005 - DNA, 19 bp, Homo sapiens
  siRNA target sequence for C1GALT1 (NM_020156.1,204-222).
gcaaggcattcagatgata

SEQ ID NO: 210006 - DNA, 19 bp, Homo sapiens
  siRNA target sequence for C1GALT1 (NM_020156.1,234-252).
catctagaaggacaaatga

SEQ ID NO: 210007 - DNA, 19 bp, Homo sapiens
  siRNA target sequence for C1GALT1 (NM_020156.1,350-368).
ccctcaaaacctagagaaa

SEQ ID NO: 210008 - DNA, 19 bp, Homo sapiens
  siRNA target sequence for C1GALT1 (NM_020156.1,372-390).
gccaaacacgtcaaagcta

SEQ ID NO: 210009 - DNA, 19 bp, Homo sapiens
  siRNA target sequence for C1GALT1 (NM_020156.1,391-409).
cttgggcccagcgttgtaa

SEQ ID NO: 210010 - DNA, 19 bp, Homo sapiens
  siRNA target sequence for C1GALT1 (NM_020156.1,394-412).
gggcccagcgttgtaacaa

SEQ ID NO: 210011 - DNA, 19 bp, Homo sapiens
  siRNA target sequence for C1GALT1 (NM_020156.1,395-413).
ggcccagcgttgtaacaaa

SEQ ID NO: 210012 - DNA, 19 bp, Homo sapiens
  siRNA target sequence for C1GALT1 (NM_020156.1,397-415).
cccagcgttgtaacaaagt

SEQ ID NO: 210013 - DNA, 19 bp, Homo sapiens
  siRNA target sequence for C1GALT1 (NM_020156.1,399-417).
cagcgttgtaacaaagtgt

SEQ ID NO: 210014 - DNA, 19 bp, Homo sapiens
  siRNA target sequence for C1GALT1 (NM_020156.1,403-421).
gttgtaacaaagtgttgtt

SEQ ID NO: 210015 - DNA, 19 bp, Homo sapiens
  siRNA target sequence for C1GALT1 (NM_020156.1,406-424).
gtaacaaagtgttgtttat

SEQ ID NO: 210016 - DNA, 19 bp, Homo sapiens
  siRNA target sequence for C1GALT1 (NM_020156.1,410-428).
caaagtgttgtttatgagt

SEQ ID NO: 210017 - DNA, 19 bp, Homo sapiens
  siRNA target sequence for C1GALT1 (NM_020156.1,416-434).
gttgtttatgagttcagaa

SEQ ID NO: 210018 - DNA, 19 bp, Homo sapiens
  siRNA target sequence for C1GALT1 (NM_020156.1,449-467).
ccctgctgtgggactgaaa

SEQ ID NO: 210019 - DNA, 19 bp, Homo sapiens
  siRNA target sequence for C1GALT1 (NM_020156.1,450-468).
cctgctgtgggactgaaaa

SEQ ID NO: 210020 - DNA, 19 bp, Homo sapiens
  siRNA target sequence for C1GALT1 (NM_020156.1,870-888).
gtgccagaacaccatttaa

SEQ ID NO: 210021 - DNA, 19 bp, Homo sapiens
  siRNA target sequence for C1GALT1 (NM_020156.1,872-890).
gccagaacaccatttaatt

SEQ ID NO: 210022 - DNA, 19 bp, Homo sapiens
  siRNA target sequence for C1GALT1 (NM_020156.1,873-891).
ccagaacaccatttaatta

SEQ ID NO: 210023 - DNA, 19 bp, Homo sapiens
  siRNA target sequence for C1GALT1 (NM_020156.1,1038-1056).
cttcgtccatatggttatt

SEQ ID NO: 210024 - DNA, 19 bp, Homo sapiens
  siRNA target sequence for C1GALT1 (NM_020156.1,1041-1059).
cgtccatatggttatttat

SEQ ID NO: 210025 - DNA, 19 bp, Homo sapiens
  siRNA target sequence for C1GALT1 (NM_020156.1,1042-1060).
gtccatatggttatttata

SEQ ID NO: 210026 - DNA, 19 bp, Homo sapiens
  siRNA target sequence for C1GALT1 (NM_020156.1,1044-1062).
ccatatggttatttataca

SEQ ID NO: 210027 - DNA, 19 bp, Homo sapiens
  siRNA target sequence for C1GALT1 (NM_020156.1,1076-1094).
cttacctgaacgtatacta

SEQ ID NO: 210028 - DNA, 19 bp, Homo sapiens
  siRNA target sequence for C1GALT1 (NM_020156.1,1081-1099).
ctgaacgtatactaaagga

SEQ ID NO: 210029 - DNA, 19 bp, Homo sapiens
  siRNA target sequence for C1GALT1 (NM_020156.1,1086-1104).
cgtatactaaaggaaatta

SEQ ID NO: 210030 - DNA, 19 bp, Homo sapiens
  siRNA target sequence for A4GALT (NM_017436.3,278-296).
gtctgcaccctgttcatca

SEQ ID NO: 210031 - DNA, 19 bp, Homo sapiens
  siRNA target sequence for A4GALT (NM_017436.3,299-317).
ggcttcaagttcacgtttt

SEQ ID NO: 210032 - DNA, 19 bp, Homo sapiens
  siRNA target sequence for A4GALT (NM_017436.3,300-318).
gcttcaagttcacgttttt

SEQ ID NO: 210033 - DNA, 19 bp, Homo sapiens
  siRNA target sequence for A4GALT (NM_017436.3,362-380).
gagaaagggcagctctata

SEQ ID NO: 210034 - DNA, 19 bp, Homo sapiens
  siRNA target sequence for A4GALT (NM_017436.3,547-565).
cgtgctggtcctgatgaaa

SEQ ID NO: 210035 - DNA, 19 bp, Homo sapiens
  siRNA target sequence for A4GALT (NM_017436.3,793-811).
ggacacggacttcattgtt

SEQ ID NO: 210036 - DNA, 19 bp, Homo sapiens
  siRNA target sequence for A4GALT (NM_017436.3,1160-1178).
gtccacgtgtggaacaaga

SEQ ID NO: 210037 - DNA, 19 bp, Homo sapiens
  siRNA target sequence for A4GALT (NM_017436.3,1163-1181).
cacgtgtggaacaagaaga

SEQ ID NO: 210038 - DNA, 19 bp, Homo sapiens
  siRNA target sequence for A4GALT (NM_017436.3,1252-1270).
gacgcacgaggccatgaaa

SEQ ID NO: 210039 - DNA, 19 bp, Homo sapiens
  siRNA target sequence for A4GALT (NM_017436.3,1254-1272).
cgcacgaggccatgaaaat

SEQ ID NO: 210040 - DNA, 19 bp, Homo sapiens
  siRNA target sequence for A4GALT (NM_017436.3,1256-1274).
cacgaggccatgaaaatgt

SEQ ID NO: 210041 - DNA, 19 bp, Homo sapiens
  siRNA target sequence for B3GALT6 (NM_080605.2,387-405).
ctgcgcgacgcctacgaaa

SEQ ID NO: 210042 - DNA, 19 bp, Homo sapiens
  siRNA target sequence for B3GALT6 (NM_080605.2,391-409).
gcgacgcctacgaaaacct

SEQ ID NO: 210043 - DNA, 19 bp, Homo sapiens
  siRNA target sequence for B3GALT6 (NM_080605.2,622-640).
ggcaactctgcgactacta

SEQ ID NO: 210044 - DNA, 19 bp, Homo sapiens
  siRNA target sequence for B3GNT3 (NM_014256.2,347-365).
cgcagcacgttcagaactt

SEQ ID NO: 210045 - DNA, 19 bp, Homo sapiens
  siRNA target sequence for B3GNT3 (NM_014256.2,682-700).
caggtcctgttcttacagt

SEQ ID NO: 210046 - DNA, 19 bp, Homo sapiens
  siRNA target sequence for B3GNT3 (NM_014256.2,820-838).
gtggggcaactgatccaaa

SEQ ID NO: 210047 - DNA, 19 bp, Homo sapiens
  siRNA target sequence for B3GNT3 (NM_014256.2,824-842).
ggcaactgatccaaaacgt

SEQ ID NO: 210048 - DNA, 19 bp, Homo sapiens
  siRNA target sequence for B3GNT3 (NM_014256.2,847-865).
cccatccgggctttttgga

SEQ ID NO: 210049 - DNA, 19 bp, Homo sapiens
  siRNA target sequence for B3GNT3 (NM_014256.2,903-921).
gcggtacccaccctattgt

SEQ ID NO: 210050 - DNA, 19 bp, Homo sapiens
  siRNA target sequence for B3GNT3 (NM_014256.2,968-986).
gccgtgctgcccatgtctt

SEQ ID NO: 210051 - DNA, 19 bp, Homo sapiens
  siRNA target sequence for B3GNT3 (NM_014256.2,1146-1164).
gcaccgcttcctaccttat

SEQ ID NO: 210052 - DNA, 19 bp, Homo sapiens
  siRNA target sequence for B3GNT3 (NM_014256.2,1150-1168).
cgcttcctaccttatgaga

SEQ ID NO: 210053 - DNA, 19 bp, Homo sapiens
  siRNA target sequence for B3GNT3 (NM_014256.2,1204-1222).
ctcacctgcggcaatcaga

SEQ ID NO: 210054 - DNA, 19 bp, Homo sapiens
  siRNA target sequence for B3GNT3 (NM_014256.2,1214-1232).
gcaatcagacacagatcta

SEQ ID NO: 210055 - DNA, 19 bp, Homo sapiens
  siRNA target sequence for B3GNT4 (NM_030765.1,130-148).
cggtaggagtggcctttta

SEQ ID NO: 210056 - DNA, 19 bp, Homo sapiens
  siRNA target sequence for B3GNT4 (NM_030765.1,362-380).
cgtcaccgtctcttcttga

SEQ ID NO: 210057 - DNA, 19 bp, Homo sapiens
  siRNA target sequence for B3GNT4 (NM_030765.1,386-404).
cgtcactgccgaaatttct

SEQ ID NO: 210058 - DNA, 19 bp, Homo sapiens
  siRNA target sequence for B3GNT4 (NM_030765.1,426-444).
gctgttccaaggatacctt

SEQ ID NO: 210059 - DNA, 19 bp, Homo sapiens
  siRNA target sequence for B3GNT4 (NM_030765.1,761-779).
gtccccaacgtgttagagt

SEQ ID NO: 210060 - DNA, 19 bp, Homo sapiens
  siRNA target sequence for B3GNT4 (NM_030765.1,849-867).
ggaacactaaggtcaaata

SEQ ID NO: 210061 - DNA, 19 bp, Homo sapiens
  siRNA target sequence for B3GNT4 (NM_030765.1,855-873).
ctaaggtcaaatacttcat

SEQ ID NO: 210062 - DNA, 19 bp, Homo sapiens
  siRNA target sequence for B3GNT4 (NM_030765.1,918-936).
gtgggggaggatatgtcat

SEQ ID NO: 210063 - DNA, 19 bp, Homo sapiens
  siRNA target sequence for B3GNT4 (NM_030765.1,1049-1067).
caccatgctggcttcaaga

SEQ ID NO: 210064 - DNA, 19 bp, Homo sapiens
  siRNA target sequence for B3GNT4 (NM_030765.1,1058-1076).
ggcttcaagacatttggaa

SEQ ID NO: 210065 - DNA, 19 bp, Homo sapiens
  siRNA target sequence for B3GNT4 (NM_030765.1,1059-1077).
gcttcaagacatttggaat

SEQ ID NO: 210066 - DNA, 19 bp, Homo sapiens
  siRNA target sequence for B3GNT5 (NM_032047.2,477-495).
gtggcagaagagtcaaaaa

SEQ ID NO: 210067 - DNA, 19 bp, Homo sapiens
  siRNA target sequence for B3GNT5 (NM_032047.2,555-573).
gggaaccaatcgataatca

SEQ ID NO: 210068 - DNA, 19 bp, Homo sapiens
  siRNA target sequence for B3GNT5 (NM_032047.2,557-575).
gaaccaatcgataatcaca

SEQ ID NO: 210069 - DNA, 19 bp, Homo sapiens
  siRNA target sequence for B3GNT5 (NM_032047.2,572-590).
cacattgtgagccatatga

SEQ ID NO: 210070 - DNA, 19 bp, Homo sapiens
  siRNA target sequence for B3GNT5 (NM_032047.2,578-596).
gtgagccatatgaagtcat

SEQ ID NO: 210071 - DNA, 19 bp, Homo sapiens
  siRNA target sequence for B3GNT5 (NM_032047.2,583-601).
ccatatgaagtcatattct

SEQ ID NO: 210072 - DNA, 19 bp, Homo sapiens
  siRNA target sequence for B3GNT5 (NM_032047.2,584-602).
catatgaagtcatattctt

SEQ ID NO: 210073 - DNA, 19 bp, Homo sapiens
  siRNA target sequence for B3GNT5 (NM_032047.2,589-607).
gaagtcatattcttacaga

SEQ ID NO: 210074 - DNA, 19 bp, Homo sapiens
  siRNA target sequence for B3GNT5 (NM_032047.2,600-618).
cttacagatacctcataaa

SEQ ID NO: 210075 - DNA, 19 bp, Homo sapiens
  siRNA target sequence for B3GNT5 (NM_032047.2,606-624).
gatacctcataaatagcta

SEQ ID NO: 210076 - DNA, 19 bp, Homo sapiens
  siRNA target sequence for B3GNT5 (NM_032047.2,669-687).
ggcctcgctaccaatactt

SEQ ID NO: 210077 - DNA, 19 bp, Homo sapiens
  siRNA target sequence for B3GNT5 (NM_032047.2,671-689).
cctcgctaccaatacttga

SEQ ID NO: 210078 - DNA, 19 bp, Homo sapiens
  siRNA target sequence for B3GNT5 (NM_032047.2,672-690).
ctcgctaccaatacttgat

SEQ ID NO: 210079 - DNA, 19 bp, Homo sapiens
  siRNA target sequence for B3GNT5 (NM_032047.2,674-692).
cgctaccaatacttgatta

SEQ ID NO: 210080 - DNA, 19 bp, Homo sapiens
  siRNA target sequence for B3GNT5 (NM_032047.2,675-693).
gctaccaatacttgattaa

SEQ ID NO: 210081 - DNA, 19 bp, Homo sapiens
  siRNA target sequence for B3GNT5 (NM_032047.2,719-737).
gacgtcctccttttactgt

SEQ ID NO: 210082 - DNA, 19 bp, Homo sapiens
  siRNA target sequence for B3GNT5 (NM_032047.2,721-739).
cgtcctccttttactgttt

SEQ ID NO: 210083 - DNA, 19 bp, Homo sapiens
  siRNA target sequence for B3GNT5 (NM_032047.2,764-782).
gatcgacgttccggaatta

SEQ ID NO: 210084 - DNA, 19 bp, Homo sapiens
  siRNA target sequence for B3GNT5 (NM_032047.2,767-785).
cgacgttccggaattagaa

SEQ ID NO: 210085 - DNA, 19 bp, Homo sapiens
  siRNA target sequence for B3GNT5 (NM_032047.2,786-804).
ggacgtggggcaatgaaaa

SEQ ID NO: 210086 - DNA, 19 bp, Homo sapiens
  siRNA target sequence for B3GNT5 (NM_032047.2,787-805).
gacgtggggcaatgaaaat

SEQ ID NO: 210087 - DNA, 19 bp, Homo sapiens
  siRNA target sequence for B3GNT5 (NM_032047.2,789-807).
cgtggggcaatgaaaatta

SEQ ID NO: 210088 - DNA, 19 bp, Homo sapiens
  siRNA target sequence for B3GNT5 (NM_032047.2,790-808).
gtggggcaatgaaaattat

SEQ ID NO: 210089 - DNA, 19 bp, Homo sapiens
  siRNA target sequence for B3GNT5 (NM_032047.2,904-922).
ggaagatcaaaggtacaat

SEQ ID NO: 210090 - DNA, 19 bp, Homo sapiens
  siRNA target sequence for B3GNT5 (NM_032047.2,934-952).
gcaagactttgttgattct

SEQ ID NO: 210091 - DNA, 19 bp, Homo sapiens
  siRNA target sequence for B3GNT5 (NM_032047.2,951-969).
ctttctacaatcttactct

SEQ ID NO: 210092 - DNA, 19 bp, Homo sapiens
  siRNA target sequence for B3GNT5 (NM_032047.2,1008-1026).
gtccacatgccaaatttct

SEQ ID NO: 210093 - DNA, 19 bp, Homo sapiens
  siRNA target sequence for B3GNT5 (NM_032047.2,1100-1118).
ggtgttcaagacttttgga

SEQ ID NO: 210094 - DNA, 19 bp, Homo sapiens
  siRNA target sequence for B3GNT5 (NM_032047.2,1101-1119).
gtgttcaagacttttggat

SEQ ID NO: 210095 - DNA, 19 bp, Homo sapiens
  siRNA target sequence for B3GNT5 (NM_032047.2,1139-1157).
gcccctcccattagagata

SEQ ID NO: 210096 - DNA, 19 bp, Homo sapiens
  siRNA target sequence for B3GNT5 (NM_032047.2,1140-1158).
cccctcccattagagataa

SEQ ID NO: 210097 - DNA, 19 bp, Homo sapiens
  siRNA target sequence for B3GNT5 (NM_032047.2,1141-1159).
ccctcccattagagataaa

SEQ ID NO: 210098 - DNA, 19 bp, Homo sapiens
  siRNA target sequence for B3GNT5 (NM_032047.2,1221-1239).
ccggagctgcctatgtaat

SEQ ID NO: 210099 - DNA, 19 bp, Homo sapiens
  siRNA target sequence for B3GNT5 (NM_032047.2,1223-1241).
ggagctgcctatgtaatct

SEQ ID NO: 210100 - DNA, 19 bp, Homo sapiens
  siRNA target sequence for B3GNT5 (NM_032047.2,1320-1338).
gcctctgtgccaataaaat

SEQ ID NO: 210101 - DNA, 19 bp, Homo sapiens
  siRNA target sequence for B3GNT5 (NM_032047.2,1349-1367).
ccgcaggaccatgtgtttt

SEQ ID NO: 210102 - DNA, 19 bp, Homo sapiens
  siRNA target sequence for B3GNT5 (NM_032047.2,1350-1368).
cgcaggaccatgtgttttt

SEQ ID NO: 210103 - DNA, 19 bp, Homo sapiens
  siRNA target sequence for B3GNT5 (NM_032047.2,1351-1369).
gcaggaccatgtgtttttt

SEQ ID NO: 210104 - DNA, 19 bp, Homo sapiens
  siRNA target sequence for B3GNT5 (NM_032047.2,1352-1370).
caggaccatgtgttttttt

SEQ ID NO: 210105 - DNA, 19 bp, Homo sapiens
  siRNA target sequence for B3GNT5 (NM_032047.2,1378-1396).
gggtaaaactccttatcat

SEQ ID NO: 210106 - DNA, 19 bp, Homo sapiens
  siRNA target sequence for B3GNT5 (NM_032047.2,1401-1419).
gcatctatgaaaaaatgat

SEQ ID NO: 210107 - DNA, 19 bp, Homo sapiens
  siRNA target sequence for B3GNT5 (NM_032047.2,1420-1438).
gacatctcatggacactta

SEQ ID NO: 210108 - DNA, 19 bp, Homo sapiens
  siRNA target sequence for B3GNT5 (NM_032047.2,1422-1440).
catctcatggacacttaga

SEQ ID NO: 210109 - DNA, 19 bp, Homo sapiens
  siRNA target sequence for B3GNT5 (NM_032047.2,1466-1484).
gctacagatcctaaagtaa

SEQ ID NO: 210110 - DNA, 19 bp, Homo sapiens
  siRNA target sequence for B3GNT5 (NM_032047.2,1524-1542).
gattaatgaagataattct

SEQ ID NO: 210111 - DNA, 19 bp, Homo sapiens
  siRNA target sequence for B3GNT5 (NM_032047.2,1575-1593).
cttgtagggctgcgtttat

SEQ ID NO: 210112 - DNA, 19 bp, Homo sapiens
  siRNA target sequence for B3GNT7 (NM_145236.1,427-445).
gacgtgaccaccactaact

SEQ ID NO: 210113 - DNA, 19 bp, Homo sapiens
  siRNA target sequence for B3GNT7 (NM_145236.1,440-458).
ctaactgctcagccaatat

SEQ ID NO: 210114 - DNA, 19 bp, Homo sapiens
  siRNA target sequence for B3GNT7 (NM_145236.1,497-515).
cgcagttccggcagtttct

SEQ ID NO: 210115 - DNA, 19 bp, Homo sapiens
  siRNA target sequence for B3GNT7 (NM_145236.1,921-939).
caccaacctgctagaattt

SEQ ID NO: 210116 - DNA, 19 bp, Homo sapiens
  siRNA target sequence for B3GNT7 (NM_145236.1,923-941).
ccaacctgctagaatttct

SEQ ID NO: 210117 - DNA, 19 bp, Homo sapiens
  siRNA target sequence for B3GNT7 (NM_145236.1,1246-1264).
cgcaacagccgcatgaaca

SEQ ID NO: 210118 - DNA, 19 bp, Homo sapiens
  siRNA target sequence for B3GNT7 (NM_145236.1,1339-1357).
ctggtgcacagcaatctca

SEQ ID NO: 210119 - DNA, 19 bp, Homo sapiens
  siRNA target sequence for B4GALT5 (NM_004776.2,186-204).
cgtcctcgctgctgtactt

SEQ ID NO: 210120 - DNA, 19 bp, Homo sapiens
  siRNA target sequence for B4GALT5 (NM_004776.2,272-290).
cgggacaacgtgagaacaa

SEQ ID NO: 210121 - DNA, 19 bp, Homo sapiens
  siRNA target sequence for B4GALT5 (NM_004776.2,273-291).
gggacaacgtgagaacaat

SEQ ID NO: 210122 - DNA, 19 bp, Homo sapiens
  siRNA target sequence for B4GALT5 (NM_004776.2,288-306).
caatcggtgctcaggttta

SEQ ID NO: 210123 - DNA, 19 bp, Homo sapiens
  siRNA target sequence for B4GALT5 (NM_004776.2,313-331).
ggtgcttcggagtgcttat

SEQ ID NO: 210124 - DNA, 19 bp, Homo sapiens
  siRNA target sequence for B4GALT5 (NM_004776.2,348-366).
gtgtaaatgactcagatta

SEQ ID NO: 210125 - DNA, 19 bp, Homo sapiens
  siRNA target sequence for B4GALT5 (NM_004776.2,360-378).
cagattatcctcttgactt

SEQ ID NO: 210126 - DNA, 19 bp, Homo sapiens
  siRNA target sequence for B4GALT5 (NM_004776.2,389-407).
gaaaccttcctgcaaacta

SEQ ID NO: 210127 - DNA, 19 bp, Homo sapiens
  siRNA target sequence for B4GALT5 (NM_004776.2,425-443).
gacttcacctactttgcaa

SEQ ID NO: 210128 - DNA, 19 bp, Homo sapiens
  siRNA target sequence for B4GALT5 (NM_004776.2,475-493).
gaagggcccaatagacata

SEQ ID NO: 210129 - DNA, 19 bp, Homo sapiens
  siRNA target sequence for B4GALT5 (NM_004776.2,510-528).
gaatggattacattcatga

SEQ ID NO: 210130 - DNA, 19 bp, Homo sapiens
  siRNA target sequence for B4GALT5 (NM_004776.2,570-588).
ggaagccttctgattgcat

SEQ ID NO: 210131 - DNA, 19 bp, Homo sapiens
  siRNA target sequence for B4GALT5 (NM_004776.2,683-701).
cagcgcttgcagtttgcat

SEQ ID NO: 210132 - DNA, 19 bp, Homo sapiens
  siRNA target sequence for B4GALT5 (NM_004776.2,685-703).
gcgcttgcagtttgcattt

SEQ ID NO: 210133 - DNA, 19 bp, Homo sapiens
  siRNA target sequence for B4GALT5 (NM_004776.2,686-704).
cgcttgcagtttgcatttt

SEQ ID NO: 210134 - DNA, 19 bp, Homo sapiens
  siRNA target sequence for B4GALT5 (NM_004776.2,787-805).
ggattgggactgtttgatt

SEQ ID NO: 210135 - DNA, 19 bp, Homo sapiens
  siRNA target sequence for B4GALT5 (NM_004776.2,792-810).
gggactgtttgatttttca

SEQ ID NO: 210136 - DNA, 19 bp, Homo sapiens
  siRNA target sequence for B4GALT5 (NM_004776.2,829-847).
ggaaagtgatcgcaactat

SEQ ID NO: 210137 - DNA, 19 bp, Homo sapiens
  siRNA target sequence for B4GALT5 (NM_004776.2,830-848).
gaaagtgatcgcaactatt

SEQ ID NO: 210138 - DNA, 19 bp, Homo sapiens
  siRNA target sequence for B4GALT5 (NM_004776.2,836-854).
gatcgcaactattatggat

SEQ ID NO: 210139 - DNA, 19 bp, Homo sapiens
  siRNA target sequence for B4GALT5 (NM_004776.2,879-897).
caaccaaattggataagta

SEQ ID NO: 210140 - DNA, 19 bp, Homo sapiens
  siRNA target sequence for B4GALT5 (NM_004776.2,882-900).
ccaaattggataagtatat

SEQ ID NO: 210141 - DNA, 19 bp, Homo sapiens
  siRNA target sequence for B4GALT5 (NM_004776.2,943-961).
cttaacagtggaacaattt

SEQ ID NO: 210142 - DNA, 19 bp, Homo sapiens
  siRNA target sequence for B4GALT5 (NM_004776.2,1207-1225).
cacatacgacgccttgtat

SEQ ID NO: 210143 - DNA, 19 bp, Homo sapiens
  siRNA target sequence for B4GALT5 (NM_004776.2,1209-1227).
catacgacgccttgtataa

SEQ ID NO: 210144 - DNA, 19 bp, Homo sapiens
  siRNA target sequence for IMAGE:4907098 (NM_138706.1,775-793).
gacagctggagcaagtact

SEQ ID NO: 210145 - DNA, 19 bp, Homo sapiens
  siRNA target sequence for MGC39558 (NM_152490.1,339-357).
cagatcagttggccttatt

SEQ ID NO: 210146 - DNA, 19 bp, Homo sapiens
  siRNA target sequence for MGC39558 (NM_152490.1,364-382).
gtggaaatctactcactat

SEQ ID NO: 210147 - DNA, 19 bp, Homo sapiens
  siRNA target sequence for MGC39558 (NM_152490.1,403-421).
gtcagctcgcaataaccat

SEQ ID NO: 210148 - DNA, 19 bp, Homo sapiens
  siRNA target sequence for MGC39558 (NM_152490.1,422-440).
gaacttcgaaacgtgataa

SEQ ID NO: 210149 - DNA, 19 bp, Homo sapiens
  siRNA target sequence for MGC39558 (NM_152490.1,425-443).
cttcgaaacgtgataagaa

SEQ ID NO: 210150 - DNA, 19 bp, Homo sapiens
  siRNA target sequence for MGC39558 (NM_152490.1,448-466).
ctggatgagacatttgcta

SEQ ID NO: 210151 - DNA, 19 bp, Homo sapiens
  siRNA target sequence for MGC39558 (NM_152490.1,469-487).
gcatcccacattaagtcaa

SEQ ID NO: 210152 - DNA, 19 bp, Homo sapiens
  siRNA target sequence for MGC39558 (NM_152490.1,483-501).
gtcaacgtgtgcttgtgaa

SEQ ID NO: 210153 - DNA, 19 bp, Homo sapiens
  siRNA target sequence for MGC39558 (NM_152490.1,491-509).
gtgcttgtgaagttcataa

SEQ ID NO: 210154 - DNA, 19 bp, Homo sapiens
  siRNA target sequence for MGC39558 (NM_152490.1,542-560).
gacagggaagatccttatt

SEQ ID NO: 210155 - DNA, 19 bp, Homo sapiens
  siRNA target sequence for MGC39558 (NM_152490.1,555-573).
cttattcctgtaaactact

SEQ ID NO: 210156 - DNA, 19 bp, Homo sapiens
  siRNA target sequence for MGC39558 (NM_152490.1,620-638).
ctgtccgaagacacttcat

SEQ ID NO: 210157 - DNA, 19 bp, Homo sapiens
  siRNA target sequence for MGC39558 (NM_152490.1,680-698).
gttctctaccccatcgtta

SEQ ID NO: 210158 - DNA, 19 bp, Homo sapiens
  siRNA target sequence for MGC39558 (NM_152490.1,683-701).
ctctaccccatcgttatta

SEQ ID NO: 210159 - DNA, 19 bp, Homo sapiens
  siRNA target sequence for MGC39558 (NM_152490.1,715-733).
gttctacgatgccaatgat

SEQ ID NO: 210160 - DNA, 19 bp, Homo sapiens
  siRNA target sequence for MGC39558 (NM_152490.1,922-940).
cggccttgtgtcaagaaat

SEQ ID NO: 210161 - DNA, 19 bp, Homo sapiens
  siRNA target sequence for MGC39558 (NM_152490.1,970-988).
gggagttctcagagtcatt

SEQ ID NO: 210162 - DNA, 19 bp, Homo sapiens
  siRNA target sequence for MGC39558 (NM_152490.1,1000-1018).
gggtgcattgcctcatgaa

SEQ ID NO: 210163 - DNA, 19 bp, Homo sapiens
  siRNA target sequence for MGC39558 (NM_152490.1,1001-1019).
ggtgcattgcctcatgaat

SEQ ID NO: 210164 - DNA, 19 bp, Homo sapiens
  siRNA target sequence for MGC39558 (NM_152490.1,1002-1020).
gtgcattgcctcatgaatt

SEQ ID NO: 210165 - DNA, 19 bp, Homo sapiens
  siRNA target sequence for MGC39558 (NM_152490.1,1004-1022).
gcattgcctcatgaattct

SEQ ID NO: 210166 - DNA, 19 bp, Homo sapiens
  siRNA target sequence for MGC39558 (NM_152490.1,1040-1058).
gttgcaggtggttttatat

SEQ ID NO: 210167 - DNA, 19 bp, Homo sapiens
  siRNA target sequence for MGC39558 (NM_152490.1,1082-1100).
ctcttacacaaccttcatt

SEQ ID NO: 210168 - DNA, 19 bp, Homo sapiens
  siRNA target sequence for MGC39558 (NM_152490.1,1105-1123).
ccctcaaagacttattgat

SEQ ID NO: 210169 - DNA, 19 bp, Homo sapiens
  siRNA target sequence for MGC39558 (NM_152490.1,1202-1220).
gttgtcgacacttatcgta

SEQ ID NO: 210170 - DNA, 19 bp, Homo sapiens
  siRNA target sequence for MGC39558 (NM_152490.1,1207-1225).
cgacacttatcgtaatgtt

SEQ ID NO: 210171 - DNA, 19 bp, Homo sapiens
  siRNA target sequence for MGC39558 (NM_152490.1,1223-1241).
gttcctgcaaaattattga

SEQ ID NO: 210172 - DNA, 19 bp, Homo sapiens
  siRNA target sequence for MGC39558 (NM_152490.1,1227-1245).
ctgcaaaattattgaactt

SEQ ID NO: 210173 - DNA, 19 bp, Homo sapiens
  siRNA target sequence for MGC39558 (NM_152490.1,1261-1279).
ggaaacaacgagcttcaat

SEQ ID NO: 210174 - DNA, 19 bp, Homo sapiens
  siRNA target sequence for MGC39558 (NM_152490.1,1262-1280).
gaaacaacgagcttcaatt

SEQ ID NO: 210175 - DNA, 19 bp, Homo sapiens
  siRNA target sequence for MGC39558 (NM_152490.1,1266-1284).
caacgagcttcaatttgtt

SEQ ID NO: 210176 - DNA, 19 bp, Homo sapiens
  siRNA target sequence for MGC39558 (NM_152490.1,1313-1331).
gacctcgaagctgtattta

SEQ ID NO: 210177 - DNA, 19 bp, Homo sapiens
  siRNA target sequence for MGC39558 (NM_152490.1,1315-1333).
cctcgaagctgtatttaat

SEQ ID NO: 210178 - DNA, 19 bp, Homo sapiens
  siRNA target sequence for MGC39558 (NM_152490.1,1316-1334).
ctcgaagctgtatttaata

SEQ ID NO: 210179 - DNA, 19 bp, Homo sapiens
  siRNA target sequence for MGC39558 (NM_152490.1,1319-1337).
gaagctgtatttaatagga

SEQ ID NO: 210180 - DNA, 19 bp, Homo sapiens
  siRNA target sequence for MGC39558 (NM_152490.1,1355-1373).
gatgggcctaatttttggt

SEQ ID NO: 210181 - DNA, 19 bp, Homo sapiens
  siRNA target sequence for MGC39558 (NM_152490.1,1375-1393).
gggaaatttcagactgaat

SEQ ID NO: 210182 - DNA, 19 bp, Homo sapiens
  siRNA target sequence for MGC39558 (NM_152490.1,1461-1479).
catgtgggtcaggatatgt

SEQ ID NO: 210183 - DNA, 19 bp, Homo sapiens
  siRNA target sequence for MGC39558 (NM_152490.1,1464-1482).
gtgggtcaggatatgtgat

SEQ ID NO: 210184 - DNA, 19 bp, Homo sapiens
  siRNA target sequence for MGC39558 (NM_152490.1,1512-1530).
gcaactcggggaggttaaa

SEQ ID NO: 210185 - DNA, 19 bp, Homo sapiens
  siRNA target sequence for MGC39558 (NM_152490.1,1570-1588).
ggctgccataggacctaaa

SEQ ID NO: 210186 - DNA, 19 bp, Homo sapiens
  siRNA target sequence for MGC39558 (NM_152490.1,1574-1592).
gccataggacctaaaagat

SEQ ID NO: 210187 - DNA, 19 bp, Homo sapiens
  siRNA target sequence for MGC39558 (NM_152490.1,1575-1593).
ccataggacctaaaagata

SEQ ID NO: 210188 - DNA, 19 bp, Homo sapiens
  siRNA target sequence for MGC39558 (NM_152490.1,1674-1692).
cggaactgtggaaactgaa

SEQ ID NO: 210189 - DNA, 19 bp, Homo sapiens
  siRNA target sequence for MGC4655 (NM_033309.1,897-915).
gccttcgacgacacctttt

SEQ ID NO: 210190 - DNA, 19 bp, Homo sapiens
  siRNA target sequence for MGC4655 (NM_033309.1,898-916).
ccttcgacgacaccttttt

SEQ ID NO: 210191 - DNA, 19 bp, Homo sapiens
  siRNA target sequence for MGC4655 (NM_033309.1,899-917).
cttcgacgacacctttttt

SEQ ID NO: 210192 - DNA, 19 bp, Homo sapiens
  siRNA target sequence for MGC4655 (NM_033309.1,969-987).
cccgacgtgcgcttcgttt

SEQ ID NO: 210193 - DNA, 19 bp, Homo sapiens
  siRNA target sequence for MGC4655 (NM_033309.1,970-988).
ccgacgtgcgcttcgtttt

SEQ ID NO: 210194 - DNA, 19 bp, Homo sapiens
  siRNA target sequence for MGC4655 (NM_033309.1,971-989).
cgacgtgcgcttcgttttt

SEQ ID NO: 210195 - DNA, 19 bp, Homo sapiens
  siRNA target sequence for MGC4655 (NM_033309.1,1067-1085).
gcttgctggtgacgtaatt

SEQ ID NO: 210196 - DNA, 19 bp, Homo sapiens
  siRNA target sequence for MGC4655 (NM_033309.1,1111-1129).
gggctagcaagtactacat

SEQ ID NO: 210197 - DNA, 19 bp, Homo sapiens
  siRNA target sequence for MGC4655 (NM_033309.1,1491-1509).
gctgcaggccccttccaat

SEQ ID NO: 210198 - DNA, 19 bp, Homo sapiens
  siRNA target sequence for DSCR5 (NM_016430.2,353-371).
cctcgtgtgggcctttatt

SEQ ID NO: 210199 - DNA, 19 bp, Homo sapiens
  siRNA target sequence for DSCR5 (NM_016430.2,356-374).
cgtgtgggcctttattcct

SEQ ID NO: 210200 - DNA, 19 bp, Homo sapiens
  siRNA target sequence for DSCR5 (NM_016430.2,383-401).
gctaaactctttaggttta

SEQ ID NO: 210201 - DNA, 19 bp, Homo sapiens
  siRNA target sequence for DSCR5 (NM_016430.2,389-407).
ctctttaggtttaacctat

SEQ ID NO: 210202 - DNA, 19 bp, Homo sapiens
  siRNA target sequence for DSCR5 (NM_016430.2,443-461).
ctacctccttattgctata

SEQ ID NO: 210203 - DNA, 19 bp, Homo sapiens
  siRNA target sequence for DSCR5 (NM_016430.2,510-528).
ccactcgactccatccata

SEQ ID NO: 210204 - DNA, 19 bp, Homo sapiens
  siRNA target sequence for DSCR5 (NM_016430.2,533-551).
cacagataactatgcaaaa

SEQ ID NO: 210205 - DNA, 19 bp, Homo sapiens
  siRNA target sequence for DSCR5 (NM_016430.2,607-625).
ctattagtgaagtaaacca

SEQ ID NO: 210206 - DNA, 19 bp, Homo sapiens
  siRNA target sequence for DSCR5 (NM_016430.2,613-631).
gtgaagtaaaccaaatgtt

SEQ ID NO: 210207 - DNA, 19 bp, Homo sapiens
  siRNA target sequence for DSCR5 (NM_016430.2,639-657).
gcagccaaagaactttaca

SEQ ID NO: 210208 - DNA, 19 bp, Homo sapiens
  siRNA target sequence for DSCR5 (NM_153681.1,158-176).
gtcgccattgccagaaaga

SEQ ID NO: 210209 - DNA, 19 bp, Homo sapiens
  siRNA target sequence for DSCR5 (NM_153681.1,167-185).
gccagaaagagcgatttat

SEQ ID NO: 210210 - DNA, 19 bp, Homo sapiens
  siRNA target sequence for DSCR5 (NM_153681.1,178-196).
cgatttatggctttgttct

SEQ ID NO: 210211 - DNA, 19 bp, Homo sapiens
  siRNA target sequence for PIGA (NM_002641.1,142-160).
ggttagccctggaagtctt

SEQ ID NO: 210212 - DNA, 19 bp, Homo sapiens
  siRNA target sequence for PIGA (NM_002641.1,143-161).
gttagccctggaagtcttt

SEQ ID NO: 210213 - DNA, 19 bp, Homo sapiens
  siRNA target sequence for PIGA (NM_002641.1,176-194).
cgtacccataatatatgca

SEQ ID NO: 210214 - DNA, 19 bp, Homo sapiens
  siRNA target sequence for PIGA (NM_002641.1,182-200).
cataatatatgcatggtat

SEQ ID NO: 210215 - DNA, 19 bp, Homo sapiens
  siRNA target sequence for PIGA (NM_002641.1,228-246).
gcgtggaaagccacattta

SEQ ID NO: 210216 - DNA, 19 bp, Homo sapiens
  siRNA target sequence for PIGA (NM_002641.1,273-291).
gagggcataaggttataat

SEQ ID NO: 210217 - DNA, 19 bp, Homo sapiens
  siRNA target sequence for PIGA (NM_002641.1,278-296).
cataaggttataattgtca

SEQ ID NO: 210218 - DNA, 19 bp, Homo sapiens
  siRNA target sequence for PIGA (NM_002641.1,339-357).
gtggcctcaaagtctatta

SEQ ID NO: 210219 - DNA, 19 bp, Homo sapiens
  siRNA target sequence for PIGA (NM_002641.1,390-408).
cagccacgaccctctttca

SEQ ID NO: 210220 - DNA, 19 bp, Homo sapiens
  siRNA target sequence for PIGA (NM_002641.1,392-410).
gccacgaccctctttcaca

SEQ ID NO: 210221 - DNA, 19 bp, Homo sapiens
  siRNA target sequence for PIGA (NM_002641.1,415-433).
gccattgctcaggtacata

SEQ ID NO: 210222 - DNA, 19 bp, Homo sapiens
  siRNA target sequence for PIGA (NM_002641.1,416-434).
ccattgctcaggtacatat

SEQ ID NO: 210223 - DNA, 19 bp, Homo sapiens
  siRNA target sequence for PIGA (NM_002641.1,440-458).
cgggagagagtcacgataa

SEQ ID NO: 210224 - DNA, 19 bp, Homo sapiens
  siRNA target sequence for PIGA (NM_002641.1,441-459).
gggagagagtcacgataat

SEQ ID NO: 210225 - DNA, 19 bp, Homo sapiens
  siRNA target sequence for PIGA (NM_002641.1,445-463).
gagagtcacgataatccat

SEQ ID NO: 210226 - DNA, 19 bp, Homo sapiens
  siRNA target sequence for PIGA (NM_002641.1,451-469).
cacgataatccattcacat

SEQ ID NO: 210227 - DNA, 19 bp, Homo sapiens
  siRNA target sequence for PIGA (NM_002641.1,500-518).
ctcttccacgccaagacaa

SEQ ID NO: 210228 - DNA, 19 bp, Homo sapiens
  siRNA target sequence for PIGA (NM_002641.1,538-556).
cacggaccattcccttttt

SEQ ID NO: 210229 - DNA, 19 bp, Homo sapiens
  siRNA target sequence for PIGA (NM_002641.1,541-559).
ggaccattccctttttgga

SEQ ID NO: 210230 - DNA, 19 bp, Homo sapiens
  siRNA target sequence for PIGA (NM_002641.1,542-560).
gaccattccctttttggat

SEQ ID NO: 210231 - DNA, 19 bp, Homo sapiens
  siRNA target sequence for PIGA (NM_002641.1,593-611).
cttctaaccgtgtctcttt

SEQ ID NO: 210232 - DNA, 19 bp, Homo sapiens
  siRNA target sequence for PIGA (NM_002641.1,601-619).
cgtgtctctttgtgataca

SEQ ID NO: 210233 - DNA, 19 bp, Homo sapiens
  siRNA target sequence for PIGA (NM_002641.1,602-620).
gtgtctctttgtgatacaa

SEQ ID NO: 210234 - DNA, 19 bp, Homo sapiens
  siRNA target sequence for PIGA (NM_002641.1,633-651).
gtgtgtcttatactagtaa

SEQ ID NO: 210235 - DNA, 19 bp, Homo sapiens
  siRNA target sequence for PIGA (NM_002641.1,637-655).
gtcttatactagtaaggaa

SEQ ID NO: 210236 - DNA, 19 bp, Homo sapiens
  siRNA target sequence for PIGA (NM_002641.1,694-712).
gtccgtcattcctaatgct

SEQ ID NO: 210237 - DNA, 19 bp, Homo sapiens
  siRNA target sequence for PIGA (NM_002641.1,750-768).
ggcatgatagtataactat

SEQ ID NO: 210238 - DNA, 19 bp, Homo sapiens
  siRNA target sequence for PIGA (NM_002641.1,751-769).
gcatgatagtataactatt

SEQ ID NO: 210239 - DNA, 19 bp, Homo sapiens
  siRNA target sequence for PIGA (NM_002641.1,795-813).
gaaaagggatcgatttgct

SEQ ID NO: 210240 - DNA, 19 bp, Homo sapiens
  siRNA target sequence for PIGA (NM_002641.1,805-823).
cgatttgcttagtggtata

SEQ ID NO: 210241 - DNA, 19 bp, Homo sapiens
  siRNA target sequence for PIGA (NM_002641.1,806-824).
gatttgcttagtggtataa

SEQ ID NO: 210242 - DNA, 19 bp, Homo sapiens
  siRNA target sequence for PIGA (NM_002641.1,811-829).
gcttagtggtataatacct

SEQ ID NO: 210243 - DNA, 19 bp, Homo sapiens
  siRNA target sequence for PIGA (NM_002641.1,937-955).
gcgtcttttgggagcttta

SEQ ID NO: 210244 - DNA, 19 bp, Homo sapiens
  siRNA target sequence for PIGA (NM_002641.1,939-957).
gtcttttgggagctttaga

SEQ ID NO: 210245 - DNA, 19 bp, Homo sapiens
  siRNA target sequence for PIGA (NM_002641.1,1058-1076).
ggtttacaggttgtaagta

SEQ ID NO: 210246 - DNA, 19 bp, Homo sapiens
  siRNA target sequence for PIGA (NM_002641.1,1157-1175).
ggattggaaaaggctattt

SEQ ID NO: 210247 - DNA, 19 bp, Homo sapiens
  siRNA target sequence for PIGA (NM_002641.1,1319-1337).
cgactggacagacttattt

SEQ ID NO: 210248 - DNA, 19 bp, Homo sapiens
  siRNA target sequence for PIGA (NM_002641.1,1349-1367).
ccagtaacaggctacatct

SEQ ID NO: 210249 - DNA, 19 bp, Homo sapiens
  siRNA target sequence for PIGA (NM_002641.1,1350-1368).
cagtaacaggctacatctt

SEQ ID NO: 210250 - DNA, 19 bp, Homo sapiens
  siRNA target sequence for PIGA (NM_002641.1,1466-1484).
cggggtgcctggactaata

SEQ ID NO: 210251 - DNA, 19 bp, Homo sapiens
  siRNA target sequence for PIGA (NM_002641.1,1467-1485).
ggggtgcctggactaataa

SEQ ID NO: 210252 - DNA, 19 bp, Homo sapiens
  siRNA target sequence for PIGA (NM_002641.1,1476-1494).
ggactaataactattctca

SEQ ID NO: 210253 - DNA, 19 bp, Homo sapiens
  siRNA target sequence for PIGA (NM_002641.1,1505-1523).
gggggtgagaataatgaga

SEQ ID NO: 210254 - DNA, 19 bp, Homo sapiens
  siRNA target sequence for PIGA (NM_002641.1,1506-1524).
ggggtgagaataatgagat

SEQ ID NO: 210255 - DNA, 19 bp, Homo sapiens
  siRNA target sequence for PIGA (NM_002641.1,1507-1525).
gggtgagaataatgagata

SEQ ID NO: 210256 - DNA, 19 bp, Homo sapiens
  siRNA target sequence for PIGA (NM_020473.1,134-152).
ctctctcggggatcgattt

SEQ ID NO: 210257 - DNA, 19 bp, Homo sapiens
  siRNA target sequence for PIGC (NM_153747.1,318-336).
gctcaacctgtgactaaca

SEQ ID NO: 210258 - DNA, 19 bp, Homo sapiens
  siRNA target sequence for PIGC (NM_153747.1,350-368).
gtggcagaaggtcttgtat

SEQ ID NO: 210259 - DNA, 19 bp, Homo sapiens
  siRNA target sequence for PIGC (NM_153747.1,375-393).
cagccctttcctgataact

SEQ ID NO: 210260 - DNA, 19 bp, Homo sapiens
  siRNA target sequence for PIGC (NM_153747.1,434-452).
ccatgctcggaaataccaa

SEQ ID NO: 210261 - DNA, 19 bp, Homo sapiens
  siRNA target sequence for PIGC (NM_153747.1,438-456).
gctcggaaataccaatatt

SEQ ID NO: 210262 - DNA, 19 bp, Homo sapiens
  siRNA target sequence for PIGC (NM_153747.1,516-534).
gtggttatctggtggtata

SEQ ID NO: 210263 - DNA, 19 bp, Homo sapiens
  siRNA target sequence for PIGC (NM_153747.1,589-607).
cactgattgggtatgtttt

SEQ ID NO: 210264 - DNA, 19 bp, Homo sapiens
  siRNA target sequence for PIGC (NM_153747.1,591-609).
ctgattgggtatgttttgt

SEQ ID NO: 210265 - DNA, 19 bp, Homo sapiens
  siRNA target sequence for PIGC (NM_153747.1,678-696).
gccctagtcttcattactt

SEQ ID NO: 210266 - DNA, 19 bp, Homo sapiens
  siRNA target sequence for PIGC (NM_153747.1,782-800).
gttaggccatctcatcttt

SEQ ID NO: 210267 - DNA, 19 bp, Homo sapiens
  siRNA target sequence for PIGC (NM_153747.1,813-831).
gccaatgctgccattgtat

SEQ ID NO: 210268 - DNA, 19 bp, Homo sapiens
  siRNA target sequence for PIGC (NM_153747.1,835-853).
gcacactatccttgaacat

SEQ ID NO: 210269 - DNA, 19 bp, Homo sapiens
  siRNA target sequence for PIGC (NM_153747.1,854-872).
ggccatctttgcttctgta

SEQ ID NO: 210270 - DNA, 19 bp, Homo sapiens
  siRNA target sequence for PIGC (NM_153747.1,855-873).
gccatctttgcttctgtat

SEQ ID NO: 210271 - DNA, 19 bp, Homo sapiens
  siRNA target sequence for PIGC (NM_153747.1,920-938).
gacatttgccattcagatt

SEQ ID NO: 210272 - DNA, 19 bp, Homo sapiens
  siRNA target sequence for PIGC (NM_153747.1,1032-1050).
ggaggcctactgtccatta

SEQ ID NO: 210273 - DNA, 19 bp, Homo sapiens
  siRNA target sequence for PIGC (NM_153747.1,1054-1072).
ctgtgggagccgtactctt

SEQ ID NO: 210274 - DNA, 19 bp, Homo sapiens
  siRNA target sequence for PIGC (NM_153747.1,1075-1093).
cccttctgctgatgtctat

SEQ ID NO: 210275 - DNA, 19 bp, Homo sapiens
  siRNA target sequence for PIGC (NM_153747.1,1077-1095).
cttctgctgatgtctatct

SEQ ID NO: 210276 - DNA, 19 bp, Homo sapiens
  siRNA target sequence for PIGC (NM_153747.1,1096-1114).
catgtctgtgtccattcta

SEQ ID NO: 210277 - DNA, 19 bp, Homo sapiens
  siRNA target sequence for PIGC (NM_153747.1,1118-1136).
cattcgcttgcagcttttt

SEQ ID NO: 210278 - DNA, 19 bp, Homo sapiens
  siRNA target sequence for PIGQ (NM_004204.2,477-495).
ggtcatgctcatcttctat

SEQ ID NO: 210279 - DNA, 19 bp, Homo sapiens
  siRNA target sequence for PIGQ (NM_004204.2,865-883).
gagcacctcacgctaatct

SEQ ID NO: 210280 - DNA, 19 bp, Homo sapiens
  siRNA target sequence for PIGQ (NM_004204.2,868-886).
cacctcacgctaatcttca

SEQ ID NO: 210281 - DNA, 19 bp, Homo sapiens
  siRNA target sequence for PIGQ (NM_004204.2,871-889).
ctcacgctaatcttcagta

SEQ ID NO: 210282 - DNA, 19 bp, Homo sapiens
  siRNA target sequence for PIGQ (NM_004204.2,1259-1277).
ccctcctctcggacattat

SEQ ID NO: 210283 - DNA, 19 bp, Homo sapiens
  siRNA target sequence for PIGQ (NM_004204.2,1325-1343).
ggctgtactgcctgaagat

SEQ ID NO: 210284 - DNA, 19 bp, Homo sapiens
  siRNA target sequence for PIGQ (NM_004204.2,1407-1425).
cgtggactcctgttcctat

SEQ ID NO: 210285 - DNA, 19 bp, Homo sapiens
  siRNA target sequence for PIGQ (NM_148920.1,1620-1638).
ctacaggctggcggataaa

SEQ ID NO: 210286 - DNA, 19 bp, Homo sapiens
  siRNA target sequence for PIGQ (NM_148920.1,2335-2353).
gaaccacacggggtttatt

SEQ ID NO: 210287 - DNA, 19 bp, Homo sapiens
  siRNA target sequence for C2GNT3 (NM_016591.1,864-882).
gaagatattcaaatgttat

SEQ ID NO: 210288 - DNA, 19 bp, Homo sapiens
  siRNA target sequence for C2GNT3 (NM_016591.1,976-994).
ccgcaaaaagacatttact

SEQ ID NO: 210289 - DNA, 19 bp, Homo sapiens
  siRNA target sequence for C2GNT3 (NM_016591.1,977-995).
cgcaaaaagacatttactt

SEQ ID NO: 210290 - DNA, 19 bp, Homo sapiens
  siRNA target sequence for C2GNT3 (NM_016591.1,1037-1055).
gatacactcatgttaagga

SEQ ID NO: 210291 - DNA, 19 bp, Homo sapiens
  siRNA target sequence for C2GNT3 (NM_016591.1,1060-1078).
gtcaggtatgaagttaact

SEQ ID NO: 210292 - DNA, 19 bp, Homo sapiens
  siRNA target sequence for C2GNT3 (NM_016591.1,1062-1080).
caggtatgaagttaactgt

SEQ ID NO: 210293 - DNA, 19 bp, Homo sapiens
  siRNA target sequence for C2GNT3 (NM_016591.1,1077-1095).
ctgttcgggtatctatgaa

SEQ ID NO: 210294 - DNA, 19 bp, Homo sapiens
  siRNA target sequence for C2GNT3 (NM_016591.1,1079-1097).
gttcgggtatctatgaaca

SEQ ID NO: 210295 - DNA, 19 bp, Homo sapiens
  siRNA target sequence for C2GNT3 (NM_016591.1,1194-1212).
catttatcagactctaaga

SEQ ID NO: 210296 - DNA, 19 bp, Homo sapiens
  siRNA target sequence for C2GNT3 (NM_016591.1,1211-1229).
gaggttatgctcaaaagct

SEQ ID NO: 210297 - DNA, 19 bp, Homo sapiens
  siRNA target sequence for C2GNT3 (NM_016591.1,1276-1294).
gtccacaaagatgcaatta

SEQ ID NO: 210298 - DNA, 19 bp, Homo sapiens
  siRNA target sequence for C2GNT3 (NM_016591.1,1281-1299).
caaagatgcaattatggtt

SEQ ID NO: 210299 - DNA, 19 bp, Homo sapiens
  siRNA target sequence for C2GNT3 (NM_016591.1,1343-1361).
gcatccattatgatcgtaa

SEQ ID NO: 210300 - DNA, 19 bp, Homo sapiens
  siRNA target sequence for C2GNT3 (NM_016591.1,1358-1376).
gtaaggcacctgatacctt

SEQ ID NO: 210301 - DNA, 19 bp, Homo sapiens
  siRNA target sequence for C2GNT3 (NM_016591.1,1362-1380).
ggcacctgataccttcaaa

SEQ ID NO: 210302 - DNA, 19 bp, Homo sapiens
  siRNA target sequence for C2GNT3 (NM_016591.1,1364-1382).
cacctgataccttcaaagt

SEQ ID NO: 210303 - DNA, 19 bp, Homo sapiens
  siRNA target sequence for C2GNT3 (NM_016591.1,1384-1402).
gccatgaacaatttagcta

SEQ ID NO: 210304 - DNA, 19 bp, Homo sapiens
  siRNA target sequence for C2GNT3 (NM_016591.1,1385-1403).
ccatgaacaatttagctaa

SEQ ID NO: 210305 - DNA, 19 bp, Homo sapiens
  siRNA target sequence for C2GNT3 (NM_016591.1,1487-1505).
gcttgtcggaccttctgaa

SEQ ID NO: 210306 - DNA, 19 bp, Homo sapiens
  siRNA target sequence for C2GNT3 (NM_016591.1,1556-1574).
ccctgaagtcaaattttga

SEQ ID NO: 210307 - DNA, 19 bp, Homo sapiens
  siRNA target sequence for C2GNT3 (NM_016591.1,1631-1649).
ccccaaacagtaaattgga

SEQ ID NO: 210308 - DNA, 19 bp, Homo sapiens
  siRNA target sequence for C2GNT3 (NM_016591.1,1656-1674).
cacttaccatcatgaactt

SEQ ID NO: 210309 - DNA, 19 bp, Homo sapiens
  siRNA target sequence for C2GNT3 (NM_016591.1,1676-1694).
gacgggtgccttatgaata

SEQ ID NO: 210310 - DNA, 19 bp, Homo sapiens
  siRNA target sequence for C2GNT3 (NM_016591.1,1696-1714).
gtgaagctaccaataagga

SEQ ID NO: 210311 - DNA, 19 bp, Homo sapiens
  siRNA target sequence for C2GNT3 (NM_016591.1,1738-1756).
ccccataacattcagatat

SEQ ID NO: 210312 - DNA, 19 bp, Homo sapiens
  siRNA target sequence for C2GNT3 (NM_016591.1,1815-1833).
ctccatcgttcaagacttt

SEQ ID NO: 210313 - DNA, 19 bp, Homo sapiens
  siRNA target sequence for C2GNT3 (NM_016591.1,1817-1835).
ccatcgttcaagacttttt

SEQ ID NO: 210314 - DNA, 19 bp, Homo sapiens
  siRNA target sequence for C2GNT3 (NM_016591.1,1838-1856).
cctggtctaaagacacata

SEQ ID NO: 210315 - DNA, 19 bp, Homo sapiens
  siRNA target sequence for C2GNT3 (NM_016591.1,1842-1860).
gtctaaagacacatactct

SEQ ID NO: 210316 - DNA, 19 bp, Homo sapiens
  siRNA target sequence for C2GNT3 (NM_016591.1,1872-1890).
cttttgggctaccttgatt

SEQ ID NO: 210317 - DNA, 19 bp, Homo sapiens
  siRNA target sequence for C2GNT3 (NM_016591.1,1900-1918).
ggaatacctggggagattt

SEQ ID NO: 210318 - DNA, 19 bp, Homo sapiens
  siRNA target sequence for C2GNT3 (NM_016591.1,1952-1970).
gtaagactcgccttgtcaa

SEQ ID NO: 210319 - DNA, 19 bp, Homo sapiens
  siRNA target sequence for C2GNT3 (NM_016591.1,1960-1978).
cgccttgtcaagtggaatt

SEQ ID NO: 210320 - DNA, 19 bp, Homo sapiens
  siRNA target sequence for C2GNT3 (NM_016591.1,1961-1979).
gccttgtcaagtggaatta

SEQ ID NO: 210321 - DNA, 19 bp, Homo sapiens
  siRNA target sequence for C2GNT3 (NM_016591.1,1968-1986).
caagtggaattactatgaa

SEQ ID NO: 210322 - DNA, 19 bp, Homo sapiens
  siRNA target sequence for C2GNT3 (NM_016591.1,2019-2037).
ccttcgaagcgtgtgtatt

SEQ ID NO: 210323 - DNA, 19 bp, Homo sapiens
  siRNA target sequence for C2GNT3 (NM_016591.1,2041-2059).
ggagctgcagaattaaggt

SEQ ID NO: 210324 - DNA, 19 bp, Homo sapiens
  siRNA target sequence for C2GNT3 (NM_016591.1,2075-2093).
gacattggtttgctaataa

SEQ ID NO: 210325 - DNA, 19 bp, Homo sapiens
  siRNA target sequence for C2GNT3 (NM_016591.1,2102-2120).
ctaaggtggaccctatctt

SEQ ID NO: 210326 - DNA, 19 bp, Homo sapiens
  siRNA target sequence for C2GNT3 (NM_016591.1,2106-2124).
ggtggaccctatcttgatt

SEQ ID NO: 210327 - DNA, 19 bp, Homo sapiens
  siRNA target sequence for C2GNT3 (NM_016591.1,2107-2125).
gtggaccctatcttgatta

SEQ ID NO: 210328 - DNA, 19 bp, Homo sapiens
  siRNA target sequence for C2GNT3 (NM_016591.1,2109-2127).
ggaccctatcttgattaaa

SEQ ID NO: 210329 - DNA, 19 bp, Homo sapiens
  siRNA target sequence for C2GNT3 (NM_016591.1,2110-2128).
gaccctatcttgattaaat

SEQ ID NO: 210330 - DNA, 19 bp, Homo sapiens
  siRNA target sequence for C2GNT3 (NM_016591.1,2114-2132).
ctatcttgattaaatgctt

SEQ ID NO: 210331 - DNA, 19 bp, Homo sapiens
  siRNA target sequence for C2GNT3 (NM_016591.1,2180-2198).
cagaaaagttatttatgga

SEQ ID NO: 210332 - DNA, 19 bp, Homo sapiens
  siRNA target sequence for GCNT2 (NM_001491.2,719-737).
caatgcgttacctcttcat

SEQ ID NO: 210333 - DNA, 19 bp, Homo sapiens
  siRNA target sequence for GCNT2 (NM_001491.2,723-741).
gcgttacctcttcataatt

SEQ ID NO: 210334 - DNA, 19 bp, Homo sapiens
  siRNA target sequence for GCNT2 (NM_001491.2,745-763).
gtctctagtgtaattattt

SEQ ID NO: 210335 - DNA, 19 bp, Homo sapiens
  siRNA target sequence for GCNT2 (NM_001491.2,807-825).
ccaaaggctaaatatctca

SEQ ID NO: 210336 - DNA, 19 bp, Homo sapiens
  siRNA target sequence for GCNT2 (NM_001491.2,951-969).
catcacagcccctttatct

SEQ ID NO: 210337 - DNA, 19 bp, Homo sapiens
  siRNA target sequence for GCNT2 (NM_001491.2,984-1002).
ctttcccttggcatatata

SEQ ID NO: 210338 - DNA, 19 bp, Homo sapiens
  siRNA target sequence for GCNT2 (NM_001491.2,989-1007).
ccttggcatatataatggt

SEQ ID NO: 210339 - DNA, 19 bp, Homo sapiens
  siRNA target sequence for GCNT2 (NM_001491.2,1005-1023).
ggtcatccatcatcacttt

SEQ ID NO: 210340 - DNA, 19 bp, Homo sapiens
  siRNA target sequence for GCNT2 (NM_001491.2,1114-1132).
gatgcggtagagcaactat

SEQ ID NO: 210341 - DNA, 19 bp, Homo sapiens
  siRNA target sequence for GCNT2 (NM_001491.2,1117-1135).
gcggtagagcaactattaa

SEQ ID NO: 210342 - DNA, 19 bp, Homo sapiens
  siRNA target sequence for GCNT2 (NM_001491.2,1120-1138).
gtagagcaactattaagct

SEQ ID NO: 210343 - DNA, 19 bp, Homo sapiens
  siRNA target sequence for GCNT2 (NM_001491.2,1167-1185).
gatggaacccgttgtctat

SEQ ID NO: 210344 - DNA, 19 bp, Homo sapiens
  siRNA target sequence for GCNT2 (NM_001491.2,1246-1264).
gtctcatggaagtacgtta

SEQ ID NO: 210345 - DNA, 19 bp, Homo sapiens
  siRNA target sequence for GCNT2 (NM_001491.2,1365-1383).
cccagctcatgcaattgga

SEQ ID NO: 210346 - DNA, 19 bp, Homo sapiens
  siRNA target sequence for GCNT2 (NM_001491.2,1422-1440).
gctttcctatgtgataaga

SEQ ID NO: 210347 - DNA, 19 bp, Homo sapiens
  siRNA target sequence for GCNT2 (NM_001491.2,1466-1484).
cccataatctcacaattta

SEQ ID NO: 210348 - DNA, 19 bp, Homo sapiens
  siRNA target sequence for GCNT2 (NM_001491.2,1495-1513).
gcctatgtggctctatcaa

SEQ ID NO: 210349 - DNA, 19 bp, Homo sapiens
  siRNA target sequence for GCNT2 (NM_001491.2,1540-1558).
gacccacgggctgttgatt

SEQ ID NO: 210350 - DNA, 19 bp, Homo sapiens
  siRNA target sequence for GCNT2 (NM_001491.2,1569-1587).
gtccaaggacactttcagt

SEQ ID NO: 210351 - DNA, 19 bp, Homo sapiens
  siRNA target sequence for GCNT2 (NM_001491.2,1636-1654).
ggctctatgccaaatgcat

SEQ ID NO: 210352 - DNA, 19 bp, Homo sapiens
  siRNA target sequence for GCNT2 (NM_001491.2,1721-1739).
gccactatgtacatggtat

SEQ ID NO: 210353 - DNA, 19 bp, Homo sapiens
  siRNA target sequence for GCNT2 (NM_001491.2,1746-1764).
ctatggaaacggagactta

SEQ ID NO: 210354 - DNA, 19 bp, Homo sapiens
  siRNA target sequence for GCNT2 (NM_001491.2,1761-1779).
cttaaagtggctggttaat

SEQ ID NO: 210355 - DNA, 19 bp, Homo sapiens
  siRNA target sequence for GCNT2 (NM_145649.2,581-599).
ctttttagcgcgtctctta

SEQ ID NO: 210356 - DNA, 19 bp, Homo sapiens
  siRNA target sequence for GCNT2 (NM_145649.2,665-683).
gcagctctgtccaatgctt

SEQ ID NO: 210357 - DNA, 19 bp, Homo sapiens
  siRNA target sequence for GCNT2 (NM_145649.2,673-691).
gtccaatgcttcactgtta

SEQ ID NO: 210358 - DNA, 19 bp, Homo sapiens
  siRNA target sequence for GCNT2 (NM_145649.2,699-717).
cctgtcatcagatttttga

SEQ ID NO: 210359 - DNA, 19 bp, Homo sapiens
  siRNA target sequence for GCNT2 (NM_145649.2,751-769).
gaaaactacccttgatgaa

SEQ ID NO: 210360 - DNA, 19 bp, Homo sapiens
  siRNA target sequence for GCNT2 (NM_145649.2,767-785).
gaagctacctgctatgagt

SEQ ID NO: 210361 - DNA, 19 bp, Homo sapiens
  siRNA target sequence for GCNT2 (NM_145649.2,832-850).
ggctgggttccctttagct

SEQ ID NO: 210362 - DNA, 19 bp, Homo sapiens
  siRNA target sequence for GCNT2 (NM_145649.2,868-886).
caaagacttcggcactttt

SEQ ID NO: 210363 - DNA, 19 bp, Homo sapiens
  siRNA target sequence for GCNT2 (NM_145649.2,949-967).
ggcgacggatgcctttaaa

SEQ ID NO: 210364 - DNA, 19 bp, Homo sapiens
  siRNA target sequence for GCNT2 (NM_145649.2,952-970).
gacggatgcctttaaaggt

SEQ ID NO: 210365 - DNA, 19 bp, Homo sapiens
  siRNA target sequence for GCNT2 (NM_145649.2,1021-1039).
gaaggagtcggttgtctat

SEQ ID NO: 210366 - DNA, 19 bp, Homo sapiens
  siRNA target sequence for GCNT2 (NM_145649.2,1228-1246).
cgctgttggacggactaaa

SEQ ID NO: 210367 - DNA, 19 bp, Homo sapiens
  siRNA target sequence for GCNT2 (NM_145649.2,1249-1267).
cgtccaccaagaactgtta

SEQ ID NO: 210368 - DNA, 19 bp, Homo sapiens
  siRNA target sequence for GCNT2 (NM_145649.2,1320-1338).
ctcatgacatggtgattta

SEQ ID NO: 210369 - DNA, 19 bp, Homo sapiens
  siRNA target sequence for GCNT2 (NM_145649.2,1361-1379).
ctcacaagggactttgcta

SEQ ID NO: 210370 - DNA, 19 bp, Homo sapiens
  siRNA target sequence for GCNT2 (NM_145649.2,1365-1383).
caagggactttgctaactt

SEQ ID NO: 210371 - DNA, 19 bp, Homo sapiens
  siRNA target sequence for GCNT2 (NM_145649.2,1396-1414).
ccagctcgcacttgactta

SEQ ID NO: 210372 - DNA, 19 bp, Homo sapiens
  siRNA target sequence for GCNT2 (NM_145649.2,1400-1418).
ctcgcacttgacttactct

SEQ ID NO: 210373 - DNA, 19 bp, Homo sapiens
  siRNA target sequence for GCNT2 (NM_145655.2,341-359).
gttccagtgaaaggtattt

SEQ ID NO: 210374 - DNA, 19 bp, Homo sapiens
  siRNA target sequence for GCNT2 (NM_145655.2,347-365).
gtgaaaggtattttaggaa

SEQ ID NO: 210375 - DNA, 19 bp, Homo sapiens
  siRNA target sequence for GCNT2 (NM_145655.2,374-392).
gtaatcacgccttagagaa

SEQ ID NO: 210376 - DNA, 19 bp, Homo sapiens
  siRNA target sequence for GCNT2 (NM_145655.2,440-458).
gtgtcccttgcaaggatta

SEQ ID NO: 210377 - DNA, 19 bp, Homo sapiens
  siRNA target sequence for GCNT2 (NM_145655.2,466-484).
cagaatcactacatcacaa

SEQ ID NO: 210378 - DNA, 19 bp, Homo sapiens
  siRNA target sequence for GCNT2 (NM_145655.2,485-503).
gtcccctgtcggaagaaga

SEQ ID NO: 210379 - DNA, 19 bp, Homo sapiens
  siRNA target sequence for GCNT2 (NM_145655.2,564-582).
gctctttagggctatctat

SEQ ID NO: 210380 - DNA, 19 bp, Homo sapiens
  siRNA target sequence for GCNT2 (NM_145655.2,565-583).
ctctttagggctatctata

SEQ ID NO: 210381 - DNA, 19 bp, Homo sapiens
  siRNA target sequence for GCNT2 (NM_145655.2,629-647).
ctgagtataaggaatctgt

SEQ ID NO: 210382 - DNA, 19 bp, Homo sapiens
  siRNA target sequence for GCNT2 (NM_145655.2,888-906).
gcctcctgaccatgcaatt

SEQ ID NO: 210383 - DNA, 19 bp, Homo sapiens
  siRNA target sequence for GCNT2 (NM_145655.2,889-907).
cctcctgaccatgcaatta

SEQ ID NO: 210384 - DNA, 19 bp, Homo sapiens
  siRNA target sequence for GCNT2 (NM_145655.2,890-908).
ctcctgaccatgcaattaa

SEQ ID NO: 210385 - DNA, 19 bp, Homo sapiens
  siRNA target sequence for GCNT2 (NM_145655.2,901-919).
gcaattaagcgaactaaat

SEQ ID NO: 210386 - DNA, 19 bp, Homo sapiens
  siRNA target sequence for GCNT2 (NM_145655.2,946-964).
ggtggcttttttgtgaaaa

SEQ ID NO: 210387 - DNA, 19 bp, Homo sapiens
  siRNA target sequence for GCNT2 (NM_145655.2,1068-1086).
ccaaagggccattgatcta

SEQ ID NO: 210388 - DNA, 19 bp, Homo sapiens
  siRNA target sequence for GCNT2 (NM_145655.2,1073-1091).
gggccattgatctactaca

SEQ ID NO: 210389 - DNA, 19 bp, Homo sapiens
  siRNA target sequence for GCNT2 (NM_145655.2,1074-1092).
ggccattgatctactacaa

SEQ ID NO: 210390 - DNA, 19 bp, Homo sapiens
  siRNA target sequence for GCNT3 (NM_004751.1,394-412).
gggctctgggctgctatat

SEQ ID NO: 210391 - DNA, 19 bp, Homo sapiens
  siRNA target sequence for GCNT3 (NM_004751.1,397-415).
ctctgggctgctatatgct

SEQ ID NO: 210392 - DNA, 19 bp, Homo sapiens
  siRNA target sequence for GCNT3 (NM_004751.1,499-517).
gccagtactgtaggaatat

SEQ ID NO: 210393 - DNA, 19 bp, Homo sapiens
  siRNA target sequence for GCNT3 (NM_004751.1,501-519).
cagtactgtaggaatatct

SEQ ID NO: 210394 - DNA, 19 bp, Homo sapiens
  siRNA target sequence for GCNT3 (NM_004751.1,506-524).
ctgtaggaatatcttgtat

SEQ ID NO: 210395 - DNA, 19 bp, Homo sapiens
  siRNA target sequence for GCNT3 (NM_004751.1,632-650).
gaagcgagagcctttcaca

SEQ ID NO: 210396 - DNA, 19 bp, Homo sapiens
  siRNA target sequence for GCNT3 (NM_004751.1,697-715).
ctgaaaggaagttcataca

SEQ ID NO: 210397 - DNA, 19 bp, Homo sapiens
  siRNA target sequence for GCNT3 (NM_004751.1,737-755).
ggtggagttccctattgca

SEQ ID NO: 210398 - DNA, 19 bp, Homo sapiens
  siRNA target sequence for GCNT3 (NM_004751.1,738-756).
gtggagttccctattgcat

SEQ ID NO: 210399 - DNA, 19 bp, Homo sapiens
  siRNA target sequence for GCNT3 (NM_004751.1,743-761).
gttccctattgcatactct

SEQ ID NO: 210400 - DNA, 19 bp, Homo sapiens
  siRNA target sequence for GCNT3 (NM_004751.1,760-778).
ctatggtgattcatgagaa

SEQ ID NO: 210401 - DNA, 19 bp, Homo sapiens
  siRNA target sequence for GCNT3 (NM_004751.1,764-782).
ggtgattcatgagaagatt

SEQ ID NO: 210402 - DNA, 19 bp, Homo sapiens
  siRNA target sequence for GCNT3 (NM_004751.1,797-815).
gctactgcgagctgtgtat

SEQ ID NO: 210403 - DNA, 19 bp, Homo sapiens
  siRNA target sequence for GCNT3 (NM_004751.1,812-830).
gtatgcccctcagaacata

SEQ ID NO: 210404 - DNA, 19 bp, Homo sapiens
  siRNA target sequence for GCNT3 (NM_004751.1,854-872).
gtccccagaaactttcaaa

SEQ ID NO: 210405 - DNA, 19 bp, Homo sapiens
  siRNA target sequence for GCNT3 (NM_004751.1,873-891).
gaggcggtcaaagcaatta

SEQ ID NO: 210406 - DNA, 19 bp, Homo sapiens
  siRNA target sequence for GCNT3 (NM_004751.1,875-893).
ggcggtcaaagcaattatt

SEQ ID NO: 210407 - DNA, 19 bp, Homo sapiens
  siRNA target sequence for GCNT3 (NM_004751.1,876-894).
gcggtcaaagcaattattt

SEQ ID NO: 210408 - DNA, 19 bp, Homo sapiens
  siRNA target sequence for GCNT3 (NM_004751.1,926-944).
gctggttcgggtggtttat

SEQ ID NO: 210409 - DNA, 19 bp, Homo sapiens
  siRNA target sequence for GCNT3 (NM_004751.1,1033-1051).
gtgggacggactttcctat

SEQ ID NO: 210410 - DNA, 19 bp, Homo sapiens
  siRNA target sequence for GCNT3 (NM_004751.1,1036-1054).
ggacggactttcctataaa

SEQ ID NO: 210411 - DNA, 19 bp, Homo sapiens
  siRNA target sequence for GCNT3 (NM_004751.1,1141-1159).
cccgctggaaatatcactt

SEQ ID NO: 210412 - DNA, 19 bp, Homo sapiens
  siRNA target sequence for GCNT3 (NM_004751.1,1142-1160).
ccgctggaaatatcacttt

SEQ ID NO: 210413 - DNA, 19 bp, Homo sapiens
  siRNA target sequence for GCNT3 (NM_004751.1,1163-1181).
ggtagtgagagacacatta

SEQ ID NO: 210414 - DNA, 19 bp, Homo sapiens
  siRNA target sequence for GCNT3 (NM_004751.1,1202-1220).
ggatcctcccccttataat

SEQ ID NO: 210415 - DNA, 19 bp, Homo sapiens
  siRNA target sequence for GCNT3 (NM_004751.1,1210-1228).
ccccttataatttaactat

SEQ ID NO: 210416 - DNA, 19 bp, Homo sapiens
  siRNA target sequence for GCNT3 (NM_004751.1,1261-1279).
gagatttcgtccaacatgt

SEQ ID NO: 210417 - DNA, 19 bp, Homo sapiens
  siRNA target sequence for GCNT3 (NM_004751.1,1263-1281).
gatttcgtccaacatgttt

SEQ ID NO: 210418 - DNA, 19 bp, Homo sapiens
  siRNA target sequence for GCNT3 (NM_004751.1,1269-1287).
gtccaacatgttttgaaga

SEQ ID NO: 210419 - DNA, 19 bp, Homo sapiens
  siRNA target sequence for GCNT3 (NM_004751.1,1291-1309).
ctaaatcccaacaactgat

SEQ ID NO: 210420 - DNA, 19 bp, Homo sapiens
  siRNA target sequence for GCNT3 (NM_004751.1,1410-1428).
gacatctcagacatgactt

SEQ ID NO: 210421 - DNA, 19 bp, Homo sapiens
  siRNA target sequence for GCNT3 (NM_004751.1,1458-1476).
catgagggagacatcgata

SEQ ID NO: 210422 - DNA, 19 bp, Homo sapiens
  siRNA target sequence for GCNT3 (NM_004751.1,1472-1490).
cgataagggtgctccttat

SEQ ID NO: 210423 - DNA, 19 bp, Homo sapiens
  siRNA target sequence for GCNT3 (NM_004751.1,1514-1532).
gcgggctatctgcgtttat

SEQ ID NO: 210424 - DNA, 19 bp, Homo sapiens
  siRNA target sequence for GCNT3 (NM_004751.1,1533-1551).
ggggctggggacttgaatt

SEQ ID NO: 210425 - DNA, 19 bp, Homo sapiens
  siRNA target sequence for GCNT3 (NM_004751.1,1592-1610).
cccaaaggtagatgataat

SEQ ID NO: 210426 - DNA, 19 bp, Homo sapiens
  siRNA target sequence for FLJ20277 (NM_017739.1,215-233).
ggaagtataaactgacaaa

SEQ ID NO: 210427 - DNA, 19 bp, Homo sapiens
  siRNA target sequence for FLJ20277 (NM_017739.1,436-454).
ctggacgtagaggtgtatt

SEQ ID NO: 210428 - DNA, 19 bp, Homo sapiens
  siRNA target sequence for FLJ20277 (NM_017739.1,438-456).
ggacgtagaggtgtattca

SEQ ID NO: 210429 - DNA, 19 bp, Homo sapiens
  siRNA target sequence for FLJ20277 (NM_017739.1,455-473).
caagtcgcagcaaagtata

SEQ ID NO: 210430 - DNA, 19 bp, Homo sapiens
  siRNA target sequence for FLJ20277 (NM_017739.1,771-789).
ggccttcgtgggacgaaaa

SEQ ID NO: 210431 - DNA, 19 bp, Homo sapiens
  siRNA target sequence for FLJ20277 (NM_017739.1,774-792).
cttcgtgggacgaaaagga

SEQ ID NO: 210432 - DNA, 19 bp, Homo sapiens
  siRNA target sequence for FLJ20277 (NM_017739.1,799-817).
gtcttcggggagaaacatt

SEQ ID NO: 210433 - DNA, 19 bp, Homo sapiens
  siRNA target sequence for FLJ20277 (NM_017739.1,804-822).
cggggagaaacattctaaa

SEQ ID NO: 210434 - DNA, 19 bp, Homo sapiens
  siRNA target sequence for FLJ20277 (NM_017739.1,941-959).
gcttctgcagcaaagttga

SEQ ID NO: 210435 - DNA, 19 bp, Homo sapiens
  siRNA target sequence for FLJ20277 (NM_017739.1,1064-1082).
cagggaaccgacccaatta

SEQ ID NO: 210436 - DNA, 19 bp, Homo sapiens
  siRNA target sequence for FLJ20277 (NM_017739.1,1122-1140).
ggtgtctcctcagatgata

SEQ ID NO: 210437 - DNA, 19 bp, Homo sapiens
  siRNA target sequence for FLJ20277 (NM_017739.1,1123-1141).
gtgtctcctcagatgataa

SEQ ID NO: 210438 - DNA, 19 bp, Homo sapiens
  siRNA target sequence for FLJ20277 (NM_017739.1,1130-1148).
ctcagatgataacagtttt

SEQ ID NO: 210439 - DNA, 19 bp, Homo sapiens
  siRNA target sequence for FLJ20277 (NM_017739.1,1241-1259).
gcgtgtctcagcactacaa

SEQ ID NO: 210440 - DNA, 19 bp, Homo sapiens
  siRNA target sequence for FLJ20277 (NM_017739.1,1650-1668).
cgtcggcctcaacatgaat

SEQ ID NO: 210441 - DNA, 19 bp, Homo sapiens
  siRNA target sequence for FLJ20277 (NM_017739.1,1659-1677).
caacatgaatggctacttt

SEQ ID NO: 210442 - DNA, 19 bp, Homo sapiens
  siRNA target sequence for FLJ20277 (NM_017739.1,1860-1878).
cacctacgtggcctttatt

SEQ ID NO: 210443 - DNA, 19 bp, Homo sapiens
  siRNA target sequence for FLJ20277 (NM_017739.1,1863-1881).
ctacgtggcctttattcga

SEQ ID NO: 210444 - DNA, 19 bp, Homo sapiens
  siRNA target sequence for MGAT1 (NM_002406.2,896-914).
ctcttccccatcatcgtta

SEQ ID NO: 210445 - DNA, 19 bp, Homo sapiens
  siRNA target sequence for MGAT1 (NM_002406.2,1208-1226).
gtctcggcctggaatgaca

SEQ ID NO: 210446 - DNA, 19 bp, Homo sapiens
  siRNA target sequence for MGAT1 (NM_002406.2,1643-1661).
gaggtgcgggtgcagtata

SEQ ID NO: 210447 - DNA, 19 bp, Homo sapiens
  siRNA target sequence for MGAT1 (NM_002406.2,1703-1721).
gtcatggatgaccttaagt

SEQ ID NO: 210448 - DNA, 19 bp, Homo sapiens
  siRNA target sequence for MGAT1 (NM_002406.2,1737-1755).
ctggctaccggggtattgt

SEQ ID NO: 210449 - DNA, 19 bp, Homo sapiens
  siRNA target sequence for MGAT1 (NM_002406.2,1739-1757).
ggctaccggggtattgtca

SEQ ID NO: 210450 - DNA, 19 bp, Homo sapiens
  siRNA target sequence for MGAT1 (NM_002406.2,1801-1819).
gacgtgggagggctatgat

SEQ ID NO: 210451 - DNA, 19 bp, Homo sapiens
  siRNA target sequence for MGAT4A (NM_012214.1,141-159).
gctccgcaatggaactgta

SEQ ID NO: 210452 - DNA, 19 bp, Homo sapiens
  siRNA target sequence for MGAT4A (NM_012214.1,157-175).
gtagccactgctttagcat

SEQ ID NO: 210453 - DNA, 19 bp, Homo sapiens
  siRNA target sequence for MGAT4A (NM_012214.1,160-178).
gccactgctttagcattta

SEQ ID NO: 210454 - DNA, 19 bp, Homo sapiens
  siRNA target sequence for MGAT4A (NM_012214.1,189-207).
ccttactttgtcttggtat

SEQ ID NO: 210455 - DNA, 19 bp, Homo sapiens
  siRNA target sequence for MGAT4A (NM_012214.1,190-208).
cttactttgtcttggtata

SEQ ID NO: 210456 - DNA, 19 bp, Homo sapiens
  siRNA target sequence for MGAT4A (NM_012214.1,242-260).
cttatcaacgagaattcct

SEQ ID NO: 210457 - DNA, 19 bp, Homo sapiens
  siRNA target sequence for MGAT4A (NM_012214.1,304-322).
cagcgctcttctgaattaa

SEQ ID NO: 210458 - DNA, 19 bp, Homo sapiens
  siRNA target sequence for MGAT4A (NM_012214.1,326-344).
cgattgtgcaacagttcaa

SEQ ID NO: 210459 - DNA, 19 bp, Homo sapiens
  siRNA target sequence for MGAT4A (NM_012214.1,371-389).
gtaaggatgcgttgaataa

SEQ ID NO: 210460 - DNA, 19 bp, Homo sapiens
  siRNA target sequence for MGAT4A (NM_012214.1,471-489).
gcctcatttattgaaaaat

SEQ ID NO: 210461 - DNA, 19 bp, Homo sapiens
  siRNA target sequence for MGAT4A (NM_012214.1,530-548).
gaacaggagtttcaatagt

SEQ ID NO: 210462 - DNA, 19 bp, Homo sapiens
  siRNA target sequence for MGAT4A (NM_012214.1,636-654).
gaagttggactgtgttata

SEQ ID NO: 210463 - DNA, 19 bp, Homo sapiens
  siRNA target sequence for MGAT4A (NM_012214.1,647-665).
gtgttatagtagtcttcat

SEQ ID NO: 210464 - DNA, 19 bp, Homo sapiens
  siRNA target sequence for MGAT4A (NM_012214.1,663-681).
cataggagagacagatatt

SEQ ID NO: 210465 - DNA, 19 bp, Homo sapiens
  siRNA target sequence for MGAT4A (NM_012214.1,667-685).
ggagagacagatattgatt

SEQ ID NO: 210466 - DNA, 19 bp, Homo sapiens
  siRNA target sequence for MGAT4A (NM_012214.1,674-692).
cagatattgattatgtaca

SEQ ID NO: 210467 - DNA, 19 bp, Homo sapiens
  siRNA target sequence for MGAT4A (NM_012214.1,781-799).
cctgacttgacaaacctaa

SEQ ID NO: 210468 - DNA, 19 bp, Homo sapiens
  siRNA target sequence for MGAT4A (NM_012214.1,782-800).
ctgacttgacaaacctaaa

SEQ ID NO: 210469 - DNA, 19 bp, Homo sapiens
  siRNA target sequence for MGAT4A (NM_012214.1,856-874).
gattactgttttctaatga

SEQ ID NO: 210470 - DNA, 19 bp, Homo sapiens
  siRNA target sequence for MGAT4A (NM_012214.1,1043-1061).
cggatcttactctgattgt

SEQ ID NO: 210471 - DNA, 19 bp, Homo sapiens
  siRNA target sequence for MGAT4A (NM_012214.1,1044-1062).
ggatcttactctgattgta

SEQ ID NO: 210472 - DNA, 19 bp, Homo sapiens
  siRNA target sequence for MGAT4A (NM_012214.1,1048-1066).
cttactctgattgtagaat

SEQ ID NO: 210473 - DNA, 19 bp, Homo sapiens
  siRNA target sequence for MGAT4A (NM_012214.1,1060-1078).
gtagaattcatattcatgt

SEQ ID NO: 210474 - DNA, 19 bp, Homo sapiens
  siRNA target sequence for MGAT4A (NM_012214.1,1134-1152).
ctgcaaccctgaaaaagat

SEQ ID NO: 210475 - DNA, 19 bp, Homo sapiens
  siRNA target sequence for MGAT4A (NM_012214.1,1154-1172).
caaaacattgtgatagaca

SEQ ID NO: 210476 - DNA, 19 bp, Homo sapiens
  siRNA target sequence for MGAT4A (NM_012214.1,1222-1240).
ggtctgcactcatcactat

SEQ ID NO: 210477 - DNA, 19 bp, Homo sapiens
  siRNA target sequence for MGAT4A (NM_012214.1,1258-1276).
ctcacggataaagattata

SEQ ID NO: 210478 - DNA, 19 bp, Homo sapiens
  siRNA target sequence for MGAT4A (NM_012214.1,1312-1330).
cctgcggaggtatctactt

SEQ ID NO: 210479 - DNA, 19 bp, Homo sapiens
  siRNA target sequence for MGAT4A (NM_012214.1,1348-1366).
gggcatacgctggagaaaa

SEQ ID NO: 210480 - DNA, 19 bp, Homo sapiens
  siRNA target sequence for MGAT4A (NM_012214.1,1350-1368).
gcatacgctggagaaaact

SEQ ID NO: 210481 - DNA, 19 bp, Homo sapiens
  siRNA target sequence for MGAT4A (NM_012214.1,1351-1369).
catacgctggagaaaactt

SEQ ID NO: 210482 - DNA, 19 bp, Homo sapiens
  siRNA target sequence for MGAT4A (NM_012214.1,1403-1421).
cgatagctggagactacat

SEQ ID NO: 210483 - DNA, 19 bp, Homo sapiens
  siRNA target sequence for MGAT4A (NM_012214.1,1441-1459).
ccagtcaatgtagaaagtt

SEQ ID NO: 210484 - DNA, 19 bp, Homo sapiens
  siRNA target sequence for MGAT4A (NM_012214.1,1516-1534).
gtggaagttttgcctttta

SEQ ID NO: 210485 - DNA, 19 bp, Homo sapiens
  siRNA target sequence for MGAT4A (NM_012214.1,1661-1679).
cagcctttcgactttcagt

SEQ ID NO: 210486 - DNA, 19 bp, Homo sapiens
  siRNA target sequence for MGAT4A (NM_012214.1,1663-1681).
gcctttcgactttcagtta

SEQ ID NO: 210487 - DNA, 19 bp, Homo sapiens
  siRNA target sequence for MGAT4A (NM_012214.1,1664-1682).
cctttcgactttcagttat

SEQ ID NO: 210488 - DNA, 19 bp, Homo sapiens
  siRNA target sequence for MGAT4A (NM_012214.1,1694-1712).
ctgtttgggccattcttaa

SEQ ID NO: 210489 - DNA, 19 bp, Homo sapiens
  siRNA target sequence for MGAT4A (NM_012214.1,1708-1726).
cttaatgagattcatatta

SEQ ID NO: 210490 - DNA, 19 bp, Homo sapiens
  siRNA target sequence for MGAT4B (NM_014275.2,140-158).
gcgacgttgtggacgttta

SEQ ID NO: 210491 - DNA, 19 bp, Homo sapiens
  siRNA target sequence for MGAT4B (NM_014275.2,620-638).
cggcagtgacagagaacat

SEQ ID NO: 210492 - DNA, 19 bp, Homo sapiens
  siRNA target sequence for MGAT4B (NM_014275.2,770-788).
ccaaacagaacctcgatta

SEQ ID NO: 210493 - DNA, 19 bp, Homo sapiens
  siRNA target sequence for MGAT4B (NM_014275.2,972-990).
ggacctgagcctgattgta

SEQ ID NO: 210494 - DNA, 19 bp, Homo sapiens
  siRNA target sequence for MGAT4B (NM_014275.2,1110-1128).
cctgcggatccgcttcaaa

SEQ ID NO: 210495 - DNA, 19 bp, Homo sapiens
  siRNA target sequence for MGAT4B (NM_014275.2,1300-1318).
ctgcgcgaggacttcttct

SEQ ID NO: 210496 - DNA, 19 bp, Homo sapiens
  siRNA target sequence for MGAT4B (NM_014275.2,1359-1377).
cttcttccaacctctaaga

SEQ ID NO: 210497 - DNA, 19 bp, Homo sapiens
  siRNA target sequence for MGAT4B (NM_014275.2,1418-1436).
cggaggacaagctcttcaa

SEQ ID NO: 210498 - DNA, 19 bp, Homo sapiens
  siRNA target sequence for MGAT3 (NM_002409.3,251-269).
gacgctacaagctctttct

SEQ ID NO: 210499 - DNA, 19 bp, Homo sapiens
  siRNA target sequence for MGAT3 (NM_002409.3,253-271).
cgctacaagctctttctca

SEQ ID NO: 210500 - DNA, 19 bp, Homo sapiens
  siRNA target sequence for MGAT3 (NM_002409.3,254-272).
gctacaagctctttctcat

SEQ ID NO: 210501 - DNA, 19 bp, Homo sapiens
  siRNA target sequence for MGAT3 (NM_002409.3,544-562).
gaggacaccaccgagtatt

SEQ ID NO: 210502 - DNA, 19 bp, Homo sapiens
  siRNA target sequence for MGAT3 (NM_002409.3,1165-1183).
cccgacgacgtcttcatca

SEQ ID NO: 210503 - DNA, 19 bp, Homo sapiens
  siRNA target sequence for MGAT3 (NM_002409.3,1167-1185).
cgacgacgtcttcatcatt

SEQ ID NO: 210504 - DNA, 19 bp, Homo sapiens
  siRNA target sequence for MGAT3 (NM_002409.3,1208-1226).
cccgtgacggcgtcctttt

SEQ ID NO: 210505 - DNA, 19 bp, Homo sapiens
  siRNA target sequence for MGAT3 (NM_002409.3,1211-1229).
gtgacggcgtccttttcct

SEQ ID NO: 210506 - DNA, 19 bp, Homo sapiens
  siRNA target sequence for MGAT3 (NM_002409.3,1407-1425).
gcccaacttcagacagtat

SEQ ID NO: 210507 - DNA, 19 bp, Homo sapiens
  siRNA target sequence for MGAT3 (NM_002409.3,1511-1529).
cgcccgagggcatctactt

SEQ ID NO: 210508 - DNA, 19 bp, Homo sapiens
  siRNA target sequence for MGAT3 (NM_002409.3,1668-1686).
ccccagcgagcacatgtat

SEQ ID NO: 210509 - DNA, 19 bp, Homo sapiens
  siRNA target sequence for GCNT1 (NM_001490.3,498-516).
gctgcgaaggagacttttt

SEQ ID NO: 210510 - DNA, 19 bp, Homo sapiens
  siRNA target sequence for GCNT1 (NM_001490.3,499-517).
ctgcgaaggagactttttt

SEQ ID NO: 210511 - DNA, 19 bp, Homo sapiens
  siRNA target sequence for GCNT1 (NM_001490.3,518-536).
cttatcccaccaaatacta

SEQ ID NO: 210512 - DNA, 19 bp, Homo sapiens
  siRNA target sequence for GCNT1 (NM_001490.3,527-545).
ccaaatactactttatggt

SEQ ID NO: 210513 - DNA, 19 bp, Homo sapiens
  siRNA target sequence for GCNT1 (NM_001490.3,528-546).
caaatactactttatggtt

SEQ ID NO: 210514 - DNA, 19 bp, Homo sapiens
  siRNA target sequence for GCNT1 (NM_001490.3,547-565).
cttgttttatccctaatca

SEQ ID NO: 210515 - DNA, 19 bp, Homo sapiens
  siRNA target sequence for GCNT1 (NM_001490.3,567-585).
cttctccgttttaaggatt

SEQ ID NO: 210516 - DNA, 19 bp, Homo sapiens
  siRNA target sequence for GCNT1 (NM_001490.3,570-588).
ctccgttttaaggattcat

SEQ ID NO: 210517 - DNA, 19 bp, Homo sapiens
  siRNA target sequence for GCNT1 (NM_001490.3,636-654).
gaatcctagtagtgatatt

SEQ ID NO: 210518 - DNA, 19 bp, Homo sapiens
  siRNA target sequence for GCNT1 (NM_001490.3,700-718).
gtaaagcttgagatcctaa

SEQ ID NO: 210519 - DNA, 19 bp, Homo sapiens
  siRNA target sequence for GCNT1 (NM_001490.3,711-729).
gatcctaacagtgaaattt

SEQ ID NO: 210520 - DNA, 19 bp, Homo sapiens
  siRNA target sequence for GCNT1 (NM_001490.3,746-764).
ggacacctgacgactatat

SEQ ID NO: 210521 - DNA, 19 bp, Homo sapiens
  siRNA target sequence for GCNT1 (NM_001490.3,747-765).
gacacctgacgactatata

SEQ ID NO: 210522 - DNA, 19 bp, Homo sapiens
  siRNA target sequence for GCNT1 (NM_001490.3,749-767).
cacctgacgactatataaa

SEQ ID NO: 210523 - DNA, 19 bp, Homo sapiens
  siRNA target sequence for GCNT1 (NM_001490.3,751-769).
cctgacgactatataaaca

SEQ ID NO: 210524 - DNA, 19 bp, Homo sapiens
  siRNA target sequence for GCNT1 (NM_001490.3,752-770).
ctgacgactatataaacat

SEQ ID NO: 210525 - DNA, 19 bp, Homo sapiens
  siRNA target sequence for GCNT1 (NM_001490.3,754-772).
gacgactatataaacatga

SEQ ID NO: 210526 - DNA, 19 bp, Homo sapiens
  siRNA target sequence for GCNT1 (NM_001490.3,800-818).
gacgcaaatatattgtaga

SEQ ID NO: 210527 - DNA, 19 bp, Homo sapiens
  siRNA target sequence for GCNT1 (NM_001490.3,837-855).
ggcggagtttccaatagca

SEQ ID NO: 210528 - DNA, 19 bp, Homo sapiens
  siRNA target sequence for GCNT1 (NM_001490.3,838-856).
gcggagtttccaatagcat

SEQ ID NO: 210529 - DNA, 19 bp, Homo sapiens
  siRNA target sequence for GCNT1 (NM_001490.3,839-857).
cggagtttccaatagcata

SEQ ID NO: 210530 - DNA, 19 bp, Homo sapiens
  siRNA target sequence for GCNT1 (NM_001490.3,841-859).
gagtttccaatagcatatt

SEQ ID NO: 210531 - DNA, 19 bp, Homo sapiens
  siRNA target sequence for GCNT1 (NM_001490.3,843-861).
gtttccaatagcatattct

SEQ ID NO: 210532 - DNA, 19 bp, Homo sapiens
  siRNA target sequence for GCNT1 (NM_001490.3,860-878).
ctatagtggttcatcacaa

SEQ ID NO: 210533 - DNA, 19 bp, Homo sapiens
  siRNA target sequence for GCNT1 (NM_001490.3,867-885).
ggttcatcacaagattgaa

SEQ ID NO: 210534 - DNA, 19 bp, Homo sapiens
  siRNA target sequence for GCNT1 (NM_001490.3,868-886).
gttcatcacaagattgaaa

SEQ ID NO: 210535 - DNA, 19 bp, Homo sapiens
  siRNA target sequence for GCNT1 (NM_001490.3,909-927).
catctatatgcctcagaat

SEQ ID NO: 210536 - DNA, 19 bp, Homo sapiens
  siRNA target sequence for GCNT1 (NM_001490.3,936-954).
cattcatgtggacacaaaa

SEQ ID NO: 210537 - DNA, 19 bp, Homo sapiens
  siRNA target sequence for GCNT1 (NM_001490.3,950-968).
caaaatccgaggattccta

SEQ ID NO: 210538 - DNA, 19 bp, Homo sapiens
  siRNA target sequence for GCNT1 (NM_001490.3,957-975).
cgaggattcctatttagct

SEQ ID NO: 210539 - DNA, 19 bp, Homo sapiens
  siRNA target sequence for GCNT1 (NM_001490.3,985-1003).
ggcatcgcttcctgtttta

SEQ ID NO: 210540 - DNA, 19 bp, Homo sapiens
  siRNA target sequence for GCNT1 (NM_001490.3,990-1008).
cgcttcctgttttagtaat

SEQ ID NO: 210541 - DNA, 19 bp, Homo sapiens
  siRNA target sequence for GCNT1 (NM_001490.3,992-1010).
cttcctgttttagtaatgt

SEQ ID NO: 210542 - DNA, 19 bp, Homo sapiens
  siRNA target sequence for GCNT1 (NM_001490.3,996-1014).
ctgttttagtaatgtcttt

SEQ ID NO: 210543 - DNA, 19 bp, Homo sapiens
  siRNA target sequence for GCNT1 (NM_001490.3,1086-1104).
ggatctctatgcaatgagt

SEQ ID NO: 210544 - DNA, 19 bp, Homo sapiens
  siRNA target sequence for GCNT1 (NM_001490.3,1105-1123).
gcaaactggaagtacttga

SEQ ID NO: 210545 - DNA, 19 bp, Homo sapiens
  siRNA target sequence for GCNT1 (NM_001490.3,1112-1130).
ggaagtacttgataaatct

SEQ ID NO: 210546 - DNA, 19 bp, Homo sapiens
  siRNA target sequence for GCNT1 (NM_001490.3,1173-1191).
caggaagctcaagttgtta

SEQ ID NO: 210547 - DNA, 19 bp, Homo sapiens
  siRNA target sequence for GCNT1 (NM_001490.3,1175-1193).
ggaagctcaagttgttaat

SEQ ID NO: 210548 - DNA, 19 bp, Homo sapiens
  siRNA target sequence for GCNT1 (NM_001490.3,1218-1236).
gaggatgccatcccataaa

SEQ ID NO: 210549 - DNA, 19 bp, Homo sapiens
  siRNA target sequence for GCNT1 (NM_001490.3,1220-1238).
ggatgccatcccataaaga

SEQ ID NO: 210550 - DNA, 19 bp, Homo sapiens
  siRNA target sequence for GCNT1 (NM_001490.3,1221-1239).
gatgccatcccataaagaa

SEQ ID NO: 210551 - DNA, 19 bp, Homo sapiens
  siRNA target sequence for GCNT1 (NM_001490.3,1224-1242).
gccatcccataaagaagaa

SEQ ID NO: 210552 - DNA, 19 bp, Homo sapiens
  siRNA target sequence for GCNT1 (NM_001490.3,1254-1272).
gcggtatgaggtcgttaat

SEQ ID NO: 210553 - DNA, 19 bp, Homo sapiens
  siRNA target sequence for GCNT1 (NM_001490.3,1257-1275).
gtatgaggtcgttaatgga

SEQ ID NO: 210554 - DNA, 19 bp, Homo sapiens
  siRNA target sequence for GCNT1 (NM_001490.3,1365-1383).
gtatgtggggtatgtacta

SEQ ID NO: 210555 - DNA, 19 bp, Homo sapiens
  siRNA target sequence for GCNT1 (NM_001490.3,1427-1445).
catacagccctgatgagta

SEQ ID NO: 210556 - DNA, 19 bp, Homo sapiens
  siRNA target sequence for GCNT1 (NM_001490.3,1452-1470).
ggccaccatccaaaggatt

SEQ ID NO: 210557 - DNA, 19 bp, Homo sapiens
  siRNA target sequence for GCNT1 (NM_001490.3,1528-1546).
gcagttgccaggtttgtca

SEQ ID NO: 210558 - DNA, 19 bp, Homo sapiens
  siRNA target sequence for GCNT1 (NM_001490.3,1529-1547).
cagttgccaggtttgtcaa

SEQ ID NO: 210559 - DNA, 19 bp, Homo sapiens
  siRNA target sequence for GCNT1 (NM_001490.3,1554-1572).
gtactttgagggtgatgtt

SEQ ID NO: 210560 - DNA, 19 bp, Homo sapiens
  siRNA target sequence for GCNT1 (NM_001490.3,1633-1651).
ggagctggtgacttgaact

SEQ ID NO: 210561 - DNA, 19 bp, Homo sapiens
  siRNA target sequence for GCNT1 (NM_001490.3,1659-1677).
gcgcaaacaccacttgttt

SEQ ID NO: 210562 - DNA, 19 bp, Homo sapiens
  siRNA target sequence for GCNT1 (NM_001490.3,1669-1687).
cacttgtttgccaataagt

SEQ ID NO: 210563 - DNA, 19 bp, Homo sapiens
  siRNA target sequence for GCNT1 (NM_001490.3,1671-1689).
cttgtttgccaataagttt

SEQ ID NO: 210564 - DNA, 19 bp, Homo sapiens
  siRNA target sequence for B3GNT6 (NM_006876.1,208-226).
ccaatattttgagttcttt

SEQ ID NO: 210565 - DNA, 19 bp, Homo sapiens
  siRNA target sequence for B3GNT6 (NM_006876.1,677-695).
gcgctgggcaccaatgtct

SEQ ID NO: 210566 - DNA, 19 bp, Homo sapiens
  siRNA target sequence for B3GNT6 (NM_006876.1,877-895).
ccgcatgcccatgaacaaa

SEQ ID NO: 210567 - DNA, 19 bp, Homo sapiens
  siRNA target sequence for B3GNT6 (NM_006876.1,965-983).
caggcacccaccaactatt

SEQ ID NO: 210568 - DNA, 19 bp, Homo sapiens
  siRNA target sequence for B3GNT6 (NM_006876.1,1181-1199).
gaaggtttcttggttcata

SEQ ID NO: 210569 - DNA, 19 bp, Homo sapiens
  siRNA target sequence for B3GNT6 (NM_006876.1,1252-1270).
gcacaataagatcctatat

SEQ ID NO: 210570 - DNA, 19 bp, Homo sapiens
  siRNA target sequence for B3GNT6 (NM_006876.1,1264-1282).
cctatatcgccagttcaaa

SEQ ID NO: 210571 - DNA, 19 bp, Homo sapiens
  siRNA target sequence for MGAT2 (NM_002408.2,492-510).
gaggttccgcatctacaaa

SEQ ID NO: 210572 - DNA, 19 bp, Homo sapiens
  siRNA target sequence for MGAT2 (NM_002408.2,569-587).
gcaatgggcgacaaaggaa

SEQ ID NO: 210573 - DNA, 19 bp, Homo sapiens
  siRNA target sequence for MGAT2 (NM_002408.2,774-792).
gtaccagctgaactttgat

SEQ ID NO: 210574 - DNA, 19 bp, Homo sapiens
  siRNA target sequence for MGAT2 (NM_002408.2,795-813).
gaccctgaggaatgtagat

SEQ ID NO: 210575 - DNA, 19 bp, Homo sapiens
  siRNA target sequence for MGAT2 (NM_002408.2,797-815).
ccctgaggaatgtagataa

SEQ ID NO: 210576 - DNA, 19 bp, Homo sapiens
  siRNA target sequence for MGAT2 (NM_002408.2,924-942).
caacgtcctcgtcatcttt

SEQ ID NO: 210577 - DNA, 19 bp, Homo sapiens
  siRNA target sequence for MGAT2 (NM_002408.2,954-972).
ctggtcgaccgagatcaat

SEQ ID NO: 210578 - DNA, 19 bp, Homo sapiens
  siRNA target sequence for MGAT2 (NM_002408.2,956-974).
ggtcgaccgagatcaatca

SEQ ID NO: 210579 - DNA, 19 bp, Homo sapiens
  siRNA target sequence for MGAT2 (NM_002408.2,1001-1019).
cggttctgcaggtgttctt

SEQ ID NO: 210580 - DNA, 19 bp, Homo sapiens
  siRNA target sequence for MGAT2 (NM_002408.2,1057-1075).
ggtagtgaccctagagatt

SEQ ID NO: 210581 - DNA, 19 bp, Homo sapiens
  siRNA target sequence for MGAT2 (NM_002408.2,1080-1098).
cagagacctgccgaagaat

SEQ ID NO: 210582 - DNA, 19 bp, Homo sapiens
  siRNA target sequence for MGAT2 (NM_002408.2,1091-1109).
cgaagaatgccgctttgaa

SEQ ID NO: 210583 - DNA, 19 bp, Homo sapiens
  siRNA target sequence for MGAT2 (NM_002408.2,1116-1134).
gtgcatcaatgctgagtat

SEQ ID NO: 210584 - DNA, 19 bp, Homo sapiens
  siRNA target sequence for MGAT2 (NM_002408.2,1137-1155).
cgactccttcggccattat

SEQ ID NO: 210585 - DNA, 19 bp, Homo sapiens
  siRNA target sequence for MGAT2 (NM_002408.2,1138-1156).
gactccttcggccattata

SEQ ID NO: 210586 - DNA, 19 bp, Homo sapiens
  siRNA target sequence for MGAT2 (NM_002408.2,1140-1158).
ctccttcggccattataga

SEQ ID NO: 210587 - DNA, 19 bp, Homo sapiens
  siRNA target sequence for MGAT2 (NM_002408.2,1142-1160).
ccttcggccattatagaga

SEQ ID NO: 210588 - DNA, 19 bp, Homo sapiens
  siRNA target sequence for MGAT2 (NM_002408.2,1191-1209).
gtggtggaagctgcatttt

SEQ ID NO: 210589 - DNA, 19 bp, Homo sapiens
  siRNA target sequence for MGAT2 (NM_002408.2,1244-1262).
ctggccttatacttttcct

SEQ ID NO: 210590 - DNA, 19 bp, Homo sapiens
  siRNA target sequence for MGAT2 (NM_002408.2,1356-1374).
ctccctggggacctatagt

SEQ ID NO: 210591 - DNA, 19 bp, Homo sapiens
  siRNA target sequence for MGAT2 (NM_002408.2,1373-1391).
gtgccagtcgcagtttcta

SEQ ID NO: 210592 - DNA, 19 bp, Homo sapiens
  siRNA target sequence for MGAT2 (NM_002408.2,1414-1432).
gtgaaaacttggaaatcca

SEQ ID NO: 210593 - DNA, 19 bp, Homo sapiens
  siRNA target sequence for MGAT2 (NM_002408.2,1488-1506).
gtgcacagacactttctgt

SEQ ID NO: 210594 - DNA, 19 bp, Homo sapiens
  siRNA target sequence for MGAT2 (NM_002408.2,1503-1521).
ctgtacttatgatgattat

SEQ ID NO: 210595 - DNA, 19 bp, Homo sapiens
  siRNA target sequence for MGAT2 (NM_002408.2,1537-1555).
cttcaatacttgactgtat

SEQ ID NO: 210596 - DNA, 19 bp, Homo sapiens
  siRNA target sequence for MGAT2 (NM_002408.2,1582-1600).
ctggttcctcaaattccta

SEQ ID NO: 210597 - DNA, 19 bp, Homo sapiens
  siRNA target sequence for MGAT2 (NM_002408.2,1622-1640).
gtggtatgcatcacaagaa

SEQ ID NO: 210598 - DNA, 19 bp, Homo sapiens
  siRNA target sequence for MGAT2 (NM_002408.2,1656-1674).
cactcagagtgcccaaatt

SEQ ID NO: 210599 - DNA, 19 bp, Homo sapiens
  siRNA target sequence for MGAT2 (NM_002408.2,1660-1678).
cagagtgcccaaattgagt

SEQ ID NO: 210600 - DNA, 19 bp, Homo sapiens
  siRNA target sequence for MGAT2 (NM_002408.2,1797-1815).
ccatgaactctgtaaaagt

SEQ ID NO: 210601 - DNA, 19 bp, Homo sapiens
  siRNA target sequence for MGAT2 (NM_002408.2,1804-1822).
ctctgtaaaagttatagaa

SEQ ID NO: 210602 - DNA, 19 bp, Homo sapiens
  siRNA target sequence for MGAT5 (NM_002410.2,2846-2864).
gctttttcctggtgacttt

SEQ ID NO: 210603 - DNA, 19 bp, Homo sapiens
  siRNA target sequence for MGAT5 (NM_002410.2,2953-2971).
ctggacctcagcaaaaggt

SEQ ID NO: 210604 - DNA, 19 bp, Homo sapiens
  siRNA target sequence for MGAT5 (NM_002410.2,2959-2977).
ctcagcaaaaggtacatca

SEQ ID NO: 210605 - DNA, 19 bp, Homo sapiens
  siRNA target sequence for MGAT5 (NM_002410.2,3026-3044).
gagtcatgacagcttatga

SEQ ID NO: 210606 - DNA, 19 bp, Homo sapiens
  siRNA target sequence for MGAT5 (NM_002410.2,3035-3053).
cagcttatgatctgaagaa

SEQ ID NO: 210607 - DNA, 19 bp, Homo sapiens
  siRNA target sequence for MGAT5 (NM_002410.2,3057-3075).
ccttgctgtgttattagat

SEQ ID NO: 210608 - DNA, 19 bp, Homo sapiens
  siRNA target sequence for MGAT5 (NM_002410.2,3058-3076).
cttgctgtgttattagata

SEQ ID NO: 210609 - DNA, 19 bp, Homo sapiens
  siRNA target sequence for MGAT5 (NM_002410.2,3061-3079).
gctgtgttattagataaca

SEQ ID NO: 210610 - DNA, 19 bp, Homo sapiens
  siRNA target sequence for MGAT5 (NM_002410.2,3062-3080).
ctgtgttattagataacat

SEQ ID NO: 210611 - DNA, 19 bp, Homo sapiens
  siRNA target sequence for MGAT5 (NM_002410.2,3133-3151).
ggcaccggaacaaactcaa

SEQ ID NO: 210612 - DNA, 19 bp, Homo sapiens
  siRNA target sequence for MGAT5 (NM_002410.2,3176-3194).
gcttggttgcacttgagaa

SEQ ID NO: 210613 - DNA, 19 bp, Homo sapiens
  siRNA target sequence for MGAT5 (NM_002410.2,3213-3231).
cattaacggagctcaagaa

SEQ ID NO: 210614 - DNA, 19 bp, Homo sapiens
  siRNA target sequence for MGAT5 (NM_002410.2,3420-3438).
ctacgaagaagctgatcat

SEQ ID NO: 210615 - DNA, 19 bp, Homo sapiens
  siRNA target sequence for MGAT5 (NM_002410.2,3424-3442).
gaagaagctgatcataatt

SEQ ID NO: 210616 - DNA, 19 bp, Homo sapiens
  siRNA target sequence for MGAT5 (NM_002410.2,3447-3465).
ggcggaaattcgtacagat

SEQ ID NO: 210617 - DNA, 19 bp, Homo sapiens
  siRNA target sequence for MGAT5 (NM_002410.2,3448-3466).
gcggaaattcgtacagatt

SEQ ID NO: 210618 - DNA, 19 bp, Homo sapiens
  siRNA target sequence for MGAT5 (NM_002410.2,3449-3467).
cggaaattcgtacagattt

SEQ ID NO: 210619 - DNA, 19 bp, Homo sapiens
  siRNA target sequence for MGAT5 (NM_002410.2,3480-3498).
cagtatgatgaaaaagcat

SEQ ID NO: 210620 - DNA, 19 bp, Homo sapiens
  siRNA target sequence for MGAT5 (NM_002410.2,3677-3695).
gtggccctcttggtgaatt

SEQ ID NO: 210621 - DNA, 19 bp, Homo sapiens
  siRNA target sequence for MGAT5 (NM_002410.2,3729-3747).
cttactgggccatgacatt

SEQ ID NO: 210622 - DNA, 19 bp, Homo sapiens
  siRNA target sequence for MGAT5 (NM_002410.2,3733-3751).
ctgggccatgacattagga

SEQ ID NO: 210623 - DNA, 19 bp, Homo sapiens
  siRNA target sequence for MGAT5 (NM_002410.2,3735-3753).
gggccatgacattaggatt

SEQ ID NO: 210624 - DNA, 19 bp, Homo sapiens
  siRNA target sequence for MGAT5 (NM_002410.2,3736-3754).
ggccatgacattaggattt

SEQ ID NO: 210625 - DNA, 19 bp, Homo sapiens
  siRNA target sequence for MGAT5 (NM_002410.2,3738-3756).
ccatgacattaggatttca

SEQ ID NO: 210626 - DNA, 19 bp, Homo sapiens
  siRNA target sequence for MGAT5 (NM_002410.2,3766-3784).
gctgagctcaaggaaatca

SEQ ID NO: 210627 - DNA, 19 bp, Homo sapiens
  siRNA target sequence for MGAT5 (NM_002410.2,3767-3785).
ctgagctcaaggaaatcat

SEQ ID NO: 210628 - DNA, 19 bp, Homo sapiens
  siRNA target sequence for MGAT5 (NM_002410.2,3865-3883).
ggacttgctcaattcaaga

SEQ ID NO: 210629 - DNA, 19 bp, Homo sapiens
  siRNA target sequence for MGAT5 (NM_002410.2,3866-3884).
gacttgctcaattcaagaa

SEQ ID NO: 210630 - DNA, 19 bp, Homo sapiens
  siRNA target sequence for MGAT5 (NM_002410.2,3868-3886).
cttgctcaattcaagaaaa

SEQ ID NO: 210631 - DNA, 19 bp, Homo sapiens
  siRNA target sequence for MGAT5 (NM_002410.2,3921-3939).
gctccgagtccttgattca

SEQ ID NO: 210632 - DNA, 19 bp, Homo sapiens
  siRNA target sequence for MGAT5 (NM_002410.2,3922-3940).
ctccgagtccttgattcat

SEQ ID NO: 210633 - DNA, 19 bp, Homo sapiens
  siRNA target sequence for MGAT5 (NM_002410.2,3924-3942).
ccgagtccttgattcattt

SEQ ID NO: 210634 - DNA, 19 bp, Homo sapiens
  siRNA target sequence for MGAT5 (NM_002410.2,3943-3961).
ggtactgaacccgaattta

SEQ ID NO: 210635 - DNA, 19 bp, Homo sapiens
  siRNA target sequence for MGAT5 (NM_002410.2,3944-3962).
gtactgaacccgaatttaa

SEQ ID NO: 210636 - DNA, 19 bp, Homo sapiens
  siRNA target sequence for MGAT5 (NM_002410.2,3947-3965).
ctgaacccgaatttaatca

SEQ ID NO: 210637 - DNA, 19 bp, Homo sapiens
  siRNA target sequence for MGAT5 (NM_002410.2,3953-3971).
ccgaatttaatcatgcaaa

SEQ ID NO: 210638 - DNA, 19 bp, Homo sapiens
  siRNA target sequence for MGAT5 (NM_002410.2,3954-3972).
cgaatttaatcatgcaaat

SEQ ID NO: 210639 - DNA, 19 bp, Homo sapiens
  siRNA target sequence for MGAT5 (NM_002410.2,3968-3986).
caaattatgcccaatcgaa

SEQ ID NO: 210640 - DNA, 19 bp, Homo sapiens
  siRNA target sequence for MGAT5 (NM_002410.2,4024-4042).
cctcagcagttttatacca

SEQ ID NO: 210641 - DNA, 19 bp, Homo sapiens
  siRNA target sequence for MGAT5 (NM_002410.2,4106-4124).
gtgatatccaccacattaa

SEQ ID NO: 210642 - DNA, 19 bp, Homo sapiens
  siRNA target sequence for MGAT5 (NM_002410.2,4168-4186).
gatagcttctggaagaata

SEQ ID NO: 210643 - DNA, 19 bp, Homo sapiens
  siRNA target sequence for MGAT5 (NM_002410.2,4191-4209).
gatctacttggacattatt

SEQ ID NO: 210644 - DNA, 19 bp, Homo sapiens
  siRNA target sequence for MGAT5 (NM_002410.2,4221-4239).
ggaagtgcatgcaactgtt

SEQ ID NO: 210645 - DNA, 19 bp, Homo sapiens
  siRNA target sequence for MGAT5 (NM_002410.2,4222-4240).
gaagtgcatgcaactgttt

SEQ ID NO: 210646 - DNA, 19 bp, Homo sapiens
  siRNA target sequence for MGAT5 (NM_002410.2,4243-4261).
ggctccagcacaaagaata

SEQ ID NO: 210647 - DNA, 19 bp, Homo sapiens
  siRNA target sequence for MGAT5 (NM_002410.2,4265-4283).
ccagttacgtgaaaaacca

SEQ ID NO: 210648 - DNA, 19 bp, Homo sapiens
  siRNA target sequence for MGAT5 (NM_002410.2,4266-4284).
cagttacgtgaaaaaccat

SEQ ID NO: 210649 - DNA, 19 bp, Homo sapiens
  siRNA target sequence for MGAT5 (NM_002410.2,4377-4395).
ggaagctatcgcaaatgga

SEQ ID NO: 210650 - DNA, 19 bp, Homo sapiens
  siRNA target sequence for MGAT5 (NM_002410.2,4378-4396).
gaagctatcgcaaatggat

SEQ ID NO: 210651 - DNA, 19 bp, Homo sapiens
  siRNA target sequence for MGAT5 (NM_002410.2,4491-4509).
gcatccttacgctgaagtt

SEQ ID NO: 210652 - DNA, 19 bp, Homo sapiens
  siRNA target sequence for MGAT5 (NM_002410.2,4492-4510).
catccttacgctgaagttt

SEQ ID NO: 210653 - DNA, 19 bp, Homo sapiens
  siRNA target sequence for MGAT5 (NM_002410.2,4495-4513).
ccttacgctgaagttttca

SEQ ID NO: 210654 - DNA, 19 bp, Homo sapiens
  siRNA target sequence for MGAT5 (NM_002410.2,4533-4551).
gactgttgacctcaacaat

SEQ ID NO: 210655 - DNA, 19 bp, Homo sapiens
  siRNA target sequence for MGAT5 (NM_002410.2,4570-4588).
gcagtgaaagcaattttaa

SEQ ID NO: 210656 - DNA, 19 bp, Homo sapiens
  siRNA target sequence for MGAT5 (NM_002410.2,4602-4620).
gccatacatgccatatgaa

SEQ ID NO: 210657 - DNA, 19 bp, Homo sapiens
  siRNA target sequence for MGAT5 (NM_002410.2,4603-4621).
ccatacatgccatatgaat

SEQ ID NO: 210658 - DNA, 19 bp, Homo sapiens
  siRNA target sequence for MGAT5 (NM_002410.2,4634-4652).
ggatgctacagagaatcaa

SEQ ID NO: 210659 - DNA, 19 bp, Homo sapiens
  siRNA target sequence for alpha4GnT (NM_016161.1,324-342).
cagacgtggcattgtgttt

SEQ ID NO: 210660 - DNA, 19 bp, Homo sapiens
  siRNA target sequence for alpha4GnT (NM_016161.1,326-344).
gacgtggcattgtgtttct

SEQ ID NO: 210661 - DNA, 19 bp, Homo sapiens
  siRNA target sequence for alpha4GnT (NM_016161.1,435-453).
ctttatgaagggtcttact

SEQ ID NO: 210662 - DNA, 19 bp, Homo sapiens
  siRNA target sequence for alpha4GnT (NM_016161.1,482-500).
catacccagctttttcctt

SEQ ID NO: 210663 - DNA, 19 bp, Homo sapiens
  siRNA target sequence for alpha4GnT (NM_016161.1,556-574).
gaagacacaccattgtttt

SEQ ID NO: 210664 - DNA, 19 bp, Homo sapiens
  siRNA target sequence for alpha4GnT (NM_016161.1,559-577).
gacacaccattgttttcat

SEQ ID NO: 210665 - DNA, 19 bp, Homo sapiens
  siRNA target sequence for alpha4GnT (NM_016161.1,570-588).
gttttcatggtacaatcaa

SEQ ID NO: 210666 - DNA, 19 bp, Homo sapiens
  siRNA target sequence for alpha4GnT (NM_016161.1,733-751).
caggcttctcggtactcta

SEQ ID NO: 210667 - DNA, 19 bp, Homo sapiens
  siRNA target sequence for alpha4GnT (NM_016161.1,736-754).
gcttctcggtactctagta

SEQ ID NO: 210668 - DNA, 19 bp, Homo sapiens
  siRNA target sequence for alpha4GnT (NM_016161.1,737-755).
cttctcggtactctagtaa

SEQ ID NO: 210669 - DNA, 19 bp, Homo sapiens
  siRNA target sequence for alpha4GnT (NM_016161.1,742-760).
cggtactctagtaatggaa

SEQ ID NO: 210670 - DNA, 19 bp, Homo sapiens
  siRNA target sequence for alpha4GnT (NM_016161.1,744-762).
gtactctagtaatggaata

SEQ ID NO: 210671 - DNA, 19 bp, Homo sapiens
  siRNA target sequence for alpha4GnT (NM_016161.1,850-868).
ggccctgagttgatgacaa

SEQ ID NO: 210672 - DNA, 19 bp, Homo sapiens
  siRNA target sequence for alpha4GnT (NM_016161.1,876-894).
gagggtatggtgtaaactt

SEQ ID NO: 210673 - DNA, 19 bp, Homo sapiens
  siRNA target sequence for alpha4GnT (NM_016161.1,884-902).
ggtgtaaacttgaagactt

SEQ ID NO: 210674 - DNA, 19 bp, Homo sapiens
  siRNA target sequence for alpha4GnT (NM_016161.1,942-960).
cttacacccccaaagattt

SEQ ID NO: 210675 - DNA, 19 bp, Homo sapiens
  siRNA target sequence for alpha4GnT (NM_016161.1,981-999).
gtggaggcgctactatgaa

SEQ ID NO: 210676 - DNA, 19 bp, Homo sapiens
  siRNA target sequence for alpha4GnT (NM_016161.1,1123-1141).
cactgtcccaggacttaca

SEQ ID NO: 210677 - DNA, 19 bp, Homo sapiens
  siRNA target sequence for alpha4GnT (NM_016161.1,1136-1154).
cttacagggacctgattaa

SEQ ID NO: 210678 - DNA, 19 bp, Homo sapiens
  siRNA target sequence for XYLT1 (NM_022166.1,171-189).
cgctggtcgtgtggaattt

SEQ ID NO: 210679 - DNA, 19 bp, Homo sapiens
  siRNA target sequence for XYLT1 (NM_022166.1,820-838).
ctcccccgagaccaagtat

SEQ ID NO: 210680 - DNA, 19 bp, Homo sapiens
  siRNA target sequence for XYLT1 (NM_022166.1,1162-1180).
cgtggacaagcgctctaat

SEQ ID NO: 210681 - DNA, 19 bp, Homo sapiens
  siRNA target sequence for XYLT1 (NM_022166.1,1163-1181).
gtggacaagcgctctaatt

SEQ ID NO: 210682 - DNA, 19 bp, Homo sapiens
  siRNA target sequence for XYLT1 (NM_022166.1,1404-1422).
cccgataccgagatatgaa

SEQ ID NO: 210683 - DNA, 19 bp, Homo sapiens
  siRNA target sequence for XYLT1 (NM_022166.1,1405-1423).
ccgataccgagatatgaat

SEQ ID NO: 210684 - DNA, 19 bp, Homo sapiens
  siRNA target sequence for XYLT1 (NM_022166.1,1406-1424).
cgataccgagatatgaatt

SEQ ID NO: 210685 - DNA, 19 bp, Homo sapiens
  siRNA target sequence for XYLT1 (NM_022166.1,1407-1425).
gataccgagatatgaattt

SEQ ID NO: 210686 - DNA, 19 bp, Homo sapiens
  siRNA target sequence for XYLT1 (NM_022166.1,1582-1600).
ccggaggtttgtagaatat

SEQ ID NO: 210687 - DNA, 19 bp, Homo sapiens
  siRNA target sequence for XYLT1 (NM_022166.1,1625-1643).
gtgaccaagatgaaacagt

SEQ ID NO: 210688 - DNA, 19 bp, Homo sapiens
  siRNA target sequence for XYLT1 (NM_022166.1,1892-1910).
gtggtgaatcaggaaatca

SEQ ID NO: 210689 - DNA, 19 bp, Homo sapiens
  siRNA target sequence for XYLT1 (NM_022166.1,1968-1986).
gctcctactgggagaatgt

SEQ ID NO: 210690 - DNA, 19 bp, Homo sapiens
  siRNA target sequence for XYLT1 (NM_022166.1,2185-2203).
caagcatcatgctaccaat

SEQ ID NO: 210691 - DNA, 19 bp, Homo sapiens
  siRNA target sequence for XYLT1 (NM_022166.1,2335-2353).
gaggctattccgcaacttt

SEQ ID NO: 210692 - DNA, 19 bp, Homo sapiens
  siRNA target sequence for XYLT1 (NM_022166.1,2402-2420).
gggaagggacctaatgtga

SEQ ID NO: 210693 - DNA, 19 bp, Homo sapiens
  siRNA target sequence for XYLT1 (NM_022166.1,2417-2435).
gtgaccgtgaccgtcattt

SEQ ID NO: 210694 - DNA, 19 bp, Homo sapiens
  siRNA target sequence for XYLT1 (NM_022166.1,2436-2454).
gggtggatcccgtcaatgt

SEQ ID NO: 210695 - DNA, 19 bp, Homo sapiens
  siRNA target sequence for XYLT1 (NM_022166.1,2483-2501).
gagtccactgccgaattca

SEQ ID NO: 210696 - DNA, 19 bp, Homo sapiens
  siRNA target sequence for XYLT1 (NM_022166.1,2485-2503).
gtccactgccgaattcaca

SEQ ID NO: 210697 - DNA, 19 bp, Homo sapiens
  siRNA target sequence for XYLT1 (NM_022166.1,2540-2558).
ggggtctggacagtgaaaa

SEQ ID NO: 210698 - DNA, 19 bp, Homo sapiens
  siRNA target sequence for XYLT1 (NM_022166.1,2577-2595).
cagttgcagagaccaaatt

SEQ ID NO: 210699 - DNA, 19 bp, Homo sapiens
  siRNA target sequence for XYLT1 (NM_022166.1,2620-2638).
gaacaggcagcccatcaaa

SEQ ID NO: 210700 - DNA, 19 bp, Homo sapiens
  siRNA target sequence for XYLT2 (NM_022167.1,881-899).
gagcagcacttcttttaca

SEQ ID NO: 210701 - DNA, 19 bp, Homo sapiens
  siRNA target sequence for XYLT2 (NM_022167.1,947-965).
ctggcccagggctatgata

SEQ ID NO: 210702 - DNA, 19 bp, Homo sapiens
  siRNA target sequence for XYLT2 (NM_022167.1,951-969).
cccagggctatgataacgt

SEQ ID NO: 210703 - DNA, 19 bp, Homo sapiens
  siRNA target sequence for XYLT2 (NM_022167.1,1187-1205).
gacaactccaggttcatca

SEQ ID NO: 210704 - DNA, 19 bp, Homo sapiens
  siRNA target sequence for XYLT2 (NM_022167.1,1376-1394).
ctgcgccagttctacacat

SEQ ID NO: 210705 - DNA, 19 bp, Homo sapiens
  siRNA target sequence for XYLT2 (NM_022167.1,1381-1399).
ccagttctacacatacaca

SEQ ID NO: 210706 - DNA, 19 bp, Homo sapiens
  siRNA target sequence for XYLT2 (NM_022167.1,1878-1896).
ccagcgtgcacctgtattt

SEQ ID NO: 210707 - DNA, 19 bp, Homo sapiens
  siRNA target sequence for XYLT2 (NM_022167.1,1882-1900).
cgtgcacctgtatttctat

SEQ ID NO: 210708 - DNA, 19 bp, Homo sapiens
  siRNA target sequence for XYLT2 (NM_022167.1,2077-2095).
gcgtcttttccggaacttt

SEQ ID NO: 210709 - DNA, 19 bp, Homo sapiens
  siRNA target sequence for XYLT2 (NM_022167.1,2198-2216).
gtggccacatcttatgaca

SEQ ID NO: 210710 - DNA, 19 bp, Homo sapiens
  siRNA target sequence for XYLT2 (NM_022167.1,2235-2253).
ctgaggtcacgcaatacaa

SEQ ID NO: 210711 - DNA, 19 bp, Homo sapiens
  siRNA target sequence for XYLT2 (NM_022167.1,2353-2371).
gaccttcaaccgcaaacta

SEQ ID NO: 210712 - DNA, 19 bp, Homo sapiens
  siRNA target sequence for XYLT2 (NM_022167.1,2412-2430).
caccccacaacgagtacat

SEQ ID NO: 210713 - DNA, 19 bp, Homo sapiens
  siRNA target sequence for FUT1 (NM_000148.1,155-173).
gtcctctctgtaatcttct

SEQ ID NO: 210714 - DNA, 19 bp, Homo sapiens
  siRNA target sequence for FUT1 (NM_000148.1,356-374).
cccaatggccggtttggta

SEQ ID NO: 210715 - DNA, 19 bp, Homo sapiens
  siRNA target sequence for FUT1 (NM_000148.1,357-375).
ccaatggccggtttggtaa

SEQ ID NO: 210716 - DNA, 19 bp, Homo sapiens
  siRNA target sequence for FUT1 (NM_000148.1,358-376).
caatggccggtttggtaat

SEQ ID NO: 210717 - DNA, 19 bp, Homo sapiens
  siRNA target sequence for FUT1 (NM_000148.1,362-380).
ggccggtttggtaatcaga

SEQ ID NO: 210718 - DNA, 19 bp, Homo sapiens
  siRNA target sequence for FUT1 (NM_000148.1,363-381).
gccggtttggtaatcagat

SEQ ID NO: 210719 - DNA, 19 bp, Homo sapiens
  siRNA target sequence for FUT1 (NM_000148.1,768-786).
gggactatctgcaggttat

SEQ ID NO: 210720 - DNA, 19 bp, Homo sapiens
  siRNA target sequence for FUT1 (NM_000148.1,892-910).
cggcatggagtggtgtaaa

SEQ ID NO: 210721 - DNA, 19 bp, Homo sapiens
  siRNA target sequence for FUT1 (NM_000148.1,895-913).
catggagtggtgtaaagaa

SEQ ID NO: 210722 - DNA, 19 bp, Homo sapiens
  siRNA target sequence for FUT1 (NM_000148.1,965-983).
gctacaccgtggaaagact

SEQ ID NO: 210723 - DNA, 19 bp, Homo sapiens
  siRNA target sequence for FUT1 (NM_000148.1,966-984).
ctacaccgtggaaagactt

SEQ ID NO: 210724 - DNA, 19 bp, Homo sapiens
  siRNA target sequence for FUT1 (NM_000148.1,1144-1162).
cgagtgggtgggcattaat

SEQ ID NO: 210725 - DNA, 19 bp, Homo sapiens
  siRNA target sequence for FUT2 (NM_000511.1,193-211).
gacctgttcactatcaact

SEQ ID NO: 210726 - DNA, 19 bp, Homo sapiens
  siRNA target sequence for FUT2 (NM_000511.1,533-551).
gggaggaggcccagaagtt

SEQ ID NO: 210727 - DNA, 19 bp, Homo sapiens
  siRNA target sequence for FUT2 (NM_000511.1,617-635).
gggactatgtccatgtcat

SEQ ID NO: 210728 - DNA, 19 bp, Homo sapiens
  siRNA target sequence for FUT2 (NM_000511.1,628-646).
catgtcatgccaaaagtgt

SEQ ID NO: 210729 - DNA, 19 bp, Homo sapiens
  siRNA target sequence for FUT2 (NM_000511.1,750-768).
ctggtgtcgggagaacatt

SEQ ID NO: 210730 - DNA, 19 bp, Homo sapiens
  siRNA target sequence for FUT2 (NM_000511.1,752-770).
ggtgtcgggagaacattga

SEQ ID NO: 210731 - DNA, 19 bp, Homo sapiens
  siRNA target sequence for FUT2 (NM_000511.1,813-831).
gggctcacctgccaaagat

SEQ ID NO: 210732 - DNA, 19 bp, Homo sapiens
  siRNA target sequence for FUT2 (NM_000511.1,814-832).
ggctcacctgccaaagatt

SEQ ID NO: 210733 - DNA, 19 bp, Homo sapiens
  siRNA target sequence for FUT2 (NM_000511.1,816-834).
ctcacctgccaaagatttt

SEQ ID NO: 210734 - DNA, 19 bp, Homo sapiens
  siRNA target sequence for FUT2 (NM_000511.1,836-854).
ctctactcacacagtgtaa

SEQ ID NO: 210735 - DNA, 19 bp, Homo sapiens
  siRNA target sequence for FUT2 (NM_000511.1,1015-1033).
gacctgtcccccttactca

SEQ ID NO: 210736 - DNA, 19 bp, Homo sapiens
  siRNA target sequence for FUT8 (NM_004480.3,795-813).
gtctcattagtgaacaata

SEQ ID NO: 210737 - DNA, 19 bp, Homo sapiens
  siRNA target sequence for FUT8 (NM_004480.3,797-815).
ctcattagtgaacaataaa

SEQ ID NO: 210738 - DNA, 19 bp, Homo sapiens
  siRNA target sequence for FUT8 (NM_004480.3,880-898).
ctataatgacggatctata

SEQ ID NO: 210739 - DNA, 19 bp, Homo sapiens
  siRNA target sequence for FUT8 (NM_004480.3,925-943).
gtgattggcgggaaaaaga

SEQ ID NO: 210740 - DNA, 19 bp, Homo sapiens
  siRNA target sequence for FUT8 (NM_004480.3,963-981).
ctggttcagcggagaataa

SEQ ID NO: 210741 - DNA, 19 bp, Homo sapiens
  siRNA target sequence for FUT8 (NM_004480.3,965-983).
ggttcagcggagaataaca

SEQ ID NO: 210742 - DNA, 19 bp, Homo sapiens
  siRNA target sequence for FUT8 (NM_004480.3,1023-1041).
ctggtgtgtaatatcaaca

SEQ ID NO: 210743 - DNA, 19 bp, Homo sapiens
  siRNA target sequence for FUT8 (NM_004480.3,1057-1075).
gctgtcagctccatcatgt

SEQ ID NO: 210744 - DNA, 19 bp, Homo sapiens
  siRNA target sequence for FUT8 (NM_004480.3,1076-1094).
ggtctactgcttcatgatt

SEQ ID NO: 210745 - DNA, 19 bp, Homo sapiens
  siRNA target sequence for FUT8 (NM_004480.3,1110-1128).
cgaacactcatcttggaat

SEQ ID NO: 210746 - DNA, 19 bp, Homo sapiens
  siRNA target sequence for FUT8 (NM_004480.3,1114-1132).
cactcatcttggaatctca

SEQ ID NO: 210747 - DNA, 19 bp, Homo sapiens
  siRNA target sequence for FUT8 (NM_004480.3,1131-1149).
cagaattggcgctatgcta

SEQ ID NO: 210748 - DNA, 19 bp, Homo sapiens
  siRNA target sequence for FUT8 (NM_004480.3,1259-1277).
ggtcgagcttcccattgta

SEQ ID NO: 210749 - DNA, 19 bp, Homo sapiens
  siRNA target sequence for FUT8 (NM_004480.3,1287-1305).
catccccgtcctccatatt

SEQ ID NO: 210750 - DNA, 19 bp, Homo sapiens
  siRNA target sequence for FUT8 (NM_004480.3,1328-1346).
cctcgcagatcgacttgta

SEQ ID NO: 210751 - DNA, 19 bp, Homo sapiens
  siRNA target sequence for FUT8 (NM_004480.3,1370-1388).
gtggtgggtgtctcagttt

SEQ ID NO: 210752 - DNA, 19 bp, Homo sapiens
  siRNA target sequence for FUT8 (NM_004480.3,1375-1393).
gggtgtctcagtttgtcaa

SEQ ID NO: 210753 - DNA, 19 bp, Homo sapiens
  siRNA target sequence for FUT8 (NM_004480.3,1376-1394).
ggtgtctcagtttgtcaaa

SEQ ID NO: 210754 - DNA, 19 bp, Homo sapiens
  siRNA target sequence for FUT8 (NM_004480.3,1456-1474).
gcttcaaacatccagttat

SEQ ID NO: 210755 - DNA, 19 bp, Homo sapiens
  siRNA target sequence for FUT8 (NM_004480.3,1457-1475).
cttcaaacatccagttatt

SEQ ID NO: 210756 - DNA, 19 bp, Homo sapiens
  siRNA target sequence for FUT8 (NM_004480.3,1538-1556).
gtacatggtgcatgttgaa

SEQ ID NO: 210757 - DNA, 19 bp, Homo sapiens
  siRNA target sequence for FUT8 (NM_004480.3,1582-1600).
gaatgcaagtggacaaaaa

SEQ ID NO: 210758 - DNA, 19 bp, Homo sapiens
  siRNA target sequence for FUT8 (NM_004480.3,1620-1638).
gatgacccttctttattaa

SEQ ID NO: 210759 - DNA, 19 bp, Homo sapiens
  siRNA target sequence for FUT8 (NM_004480.3,1655-1673).
gtaccccaattatgaattt

SEQ ID NO: 210760 - DNA, 19 bp, Homo sapiens
  siRNA target sequence for FUT8 (NM_004480.3,1658-1676).
ccccaattatgaatttatt

SEQ ID NO: 210761 - DNA, 19 bp, Homo sapiens
  siRNA target sequence for FUT8 (NM_004480.3,1668-1686).
gaatttattagtgataact

SEQ ID NO: 210762 - DNA, 19 bp, Homo sapiens
  siRNA target sequence for FUT8 (NM_004480.3,1701-1719).
gctggactgcacaatcgat

SEQ ID NO: 210763 - DNA, 19 bp, Homo sapiens
  siRNA target sequence for FUT8 (NM_004480.3,1702-1720).
ctggactgcacaatcgata

SEQ ID NO: 210764 - DNA, 19 bp, Homo sapiens
  siRNA target sequence for FUT8 (NM_004480.3,1710-1728).
cacaatcgatacacagaaa

SEQ ID NO: 210765 - DNA, 19 bp, Homo sapiens
  siRNA target sequence for FUT8 (NM_004480.3,1717-1735).
gatacacagaaaattcact

SEQ ID NO: 210766 - DNA, 19 bp, Homo sapiens
  siRNA target sequence for FUT8 (NM_004480.3,1738-1756).
gtggagtgatcctggatat

SEQ ID NO: 210767 - DNA, 19 bp, Homo sapiens
  siRNA target sequence for FUT8 (NM_004480.3,1743-1761).
gtgatcctggatatacatt

SEQ ID NO: 210768 - DNA, 19 bp, Homo sapiens
  siRNA target sequence for FUT8 (NM_004480.3,1858-1876).
caaacttccattctttaga

SEQ ID NO: 210769 - DNA, 19 bp, Homo sapiens
  siRNA target sequence for FUT8 (NM_004480.3,1939-1957).
cccgaactgcagatgaaat

SEQ ID NO: 210770 - DNA, 19 bp, Homo sapiens
  siRNA target sequence for FUT8 (NM_004480.3,1960-1978).
ccatggaacctggagatat

SEQ ID NO: 210771 - DNA, 19 bp, Homo sapiens
  siRNA target sequence for FUT8 (NM_004480.3,1998-2016).
cattgggatggctattcta

SEQ ID NO: 210772 - DNA, 19 bp, Homo sapiens
  siRNA target sequence for FUT8 (NM_004480.3,2036-2054).
gggaaggacgggcctatat

SEQ ID NO: 210773 - DNA, 19 bp, Homo sapiens
  siRNA target sequence for FUT8 (NM_004480.3,2087-2105).
ggtcaagtaccccacatat

SEQ ID NO: 210774 - DNA, 19 bp, Homo sapiens
  siRNA target sequence for FUT8 (NM_178154.1,739-757).
ggttcctggcgttggatta

SEQ ID NO: 210775 - DNA, 19 bp, Homo sapiens
  siRNA target sequence for FUT8 (NM_178154.1,740-758).
gttcctggcgttggattat

SEQ ID NO: 210776 - DNA, 19 bp, Homo sapiens
  siRNA target sequence for FUT8 (NM_178154.1,743-761).
cctggcgttggattatgct

SEQ ID NO: 210777 - DNA, 19 bp, Homo sapiens
  siRNA target sequence for FUT8 (NM_178154.1,777-795).
ggggaccttgctgttttat

SEQ ID NO: 210778 - DNA, 19 bp, Homo sapiens
  siRNA target sequence for FUT8 (NM_178154.1,843-861).
ccgagaactgtccaagatt

SEQ ID NO: 210779 - DNA, 19 bp, Homo sapiens
  siRNA target sequence for FUT8 (NM_178154.1,870-888).
gcttgaacgcttaaaacaa

SEQ ID NO: 210780 - DNA, 19 bp, Homo sapiens
  siRNA target sequence for FUT8 (NM_178154.1,905-923).
ggcgaatggccgaatctct

SEQ ID NO: 210781 - DNA, 19 bp, Homo sapiens
  siRNA target sequence for FUT8 (NM_178154.1,932-950).
cagaaggccctattgatca

SEQ ID NO: 210782 - DNA, 19 bp, Homo sapiens
  siRNA target sequence for FUT8 (NM_178154.1,965-983).
gaagagtacgcgttttaga

SEQ ID NO: 210783 - DNA, 19 bp, Homo sapiens
  siRNA target sequence for FUT8 (NM_178154.1,968-986).
gagtacgcgttttagaaga

SEQ ID NO: 210784 - DNA, 19 bp, Homo sapiens
  siRNA target sequence for FUT8 (NM_178154.1,990-1008).
gcttgttaaggccaaagaa

SEQ ID NO: 210785 - DNA, 19 bp, Homo sapiens
  siRNA target sequence for FUT8 (NM_178154.1,1071-1089).
gaggaggattgaaaatgga

SEQ ID NO: 210786 - DNA, 19 bp, Homo sapiens
  siRNA target sequence for FUT8 (NM_178154.1,1198-1216).
catgaaaggtctataatga

SEQ ID NO: 210787 - DNA, 19 bp, Homo sapiens
  siRNA target sequence for FUT8 (NM_178157.1,61-79).
ggtcaggtaccccaattat

SEQ ID NO: 210788 - DNA, 19 bp, Homo sapiens
  siRNA target sequence for FUT10 (NM_032664.3,516-534).
gaagcacctacgcatctta

SEQ ID NO: 210789 - DNA, 19 bp, Homo sapiens
  siRNA target sequence for FUT10 (NM_032664.3,519-537).
gcacctacgcatcttaatt

SEQ ID NO: 210790 - DNA, 19 bp, Homo sapiens
  siRNA target sequence for FUT10 (NM_032664.3,522-540).
cctacgcatcttaattcat

SEQ ID NO: 210791 - DNA, 19 bp, Homo sapiens
  siRNA target sequence for FUT10 (NM_032664.3,523-541).
ctacgcatcttaattcatt

SEQ ID NO: 210792 - DNA, 19 bp, Homo sapiens
  siRNA target sequence for FUT10 (NM_032664.3,688-706).
ggacctacctccatcatca

SEQ ID NO: 210793 - DNA, 19 bp, Homo sapiens
  siRNA target sequence for FUT10 (NM_032664.3,717-735).
gcattcctcttctatggta

SEQ ID NO: 210794 - DNA, 19 bp, Homo sapiens
  siRNA target sequence for FUT10 (NM_032664.3,766-784).
ctcggaaagcccatcatga

SEQ ID NO: 210795 - DNA, 19 bp, Homo sapiens
  siRNA target sequence for FUT10 (NM_032664.3,801-819).
gaagagtccccgaaaaaca

SEQ ID NO: 210796 - DNA, 19 bp, Homo sapiens
  siRNA target sequence for FUT10 (NM_032664.3,808-826).
ccccgaaaaacaattataa

SEQ ID NO: 210797 - DNA, 19 bp, Homo sapiens
  siRNA target sequence for FUT10 (NM_032664.3,811-829).
cgaaaaacaattataagct

SEQ ID NO: 210798 - DNA, 19 bp, Homo sapiens
  siRNA target sequence for FUT10 (NM_032664.3,818-836).
caattataagctctttcat

SEQ ID NO: 210799 - DNA, 19 bp, Homo sapiens
  siRNA target sequence for FUT10 (NM_032664.3,895-913).
cactaactacccaatactt

SEQ ID NO: 210800 - DNA, 19 bp, Homo sapiens
  siRNA target sequence for FUT10 (NM_032664.3,932-950).
gaagtcactccgataccta

SEQ ID NO: 210801 - DNA, 19 bp, Homo sapiens
  siRNA target sequence for FUT10 (NM_032664.3,951-969).
gttcctttgcagtccaaaa

SEQ ID NO: 210802 - DNA, 19 bp, Homo sapiens
  siRNA target sequence for FUT10 (NM_032664.3,954-972).
cctttgcagtccaaaaaca

SEQ ID NO: 210803 - DNA, 19 bp, Homo sapiens
  siRNA target sequence for FUT10 (NM_032664.3,960-978).
cagtccaaaaacaagctta

SEQ ID NO: 210804 - DNA, 19 bp, Homo sapiens
  siRNA target sequence for FUT10 (NM_032664.3,991-1009).
ctccgctggtgtatgtaca

SEQ ID NO: 210805 - DNA, 19 bp, Homo sapiens
  siRNA target sequence for FUT10 (NM_032664.3,1047-1065).
gttcgcgagctgatgactt

SEQ ID NO: 210806 - DNA, 19 bp, Homo sapiens
  siRNA target sequence for FUT10 (NM_032664.3,1050-1068).
cgcgagctgatgacttaca

SEQ ID NO: 210807 - DNA, 19 bp, Homo sapiens
  siRNA target sequence for FUT10 (NM_032664.3,1067-1085).
catcgaggtcgattcctat

SEQ ID NO: 210808 - DNA, 19 bp, Homo sapiens
  siRNA target sequence for FUT10 (NM_032664.3,1087-1105).
gtgaatgtttacgaaacaa

SEQ ID NO: 210809 - DNA, 19 bp, Homo sapiens
  siRNA target sequence for FUT10 (NM_032664.3,1146-1164).
gccgatggcttttatagga

SEQ ID NO: 210810 - DNA, 19 bp, Homo sapiens
  siRNA target sequence for FUT10 (NM_032664.3,1147-1165).
ccgatggcttttataggat

SEQ ID NO: 210811 - DNA, 19 bp, Homo sapiens
  siRNA target sequence for FUT10 (NM_032664.3,1166-1184).
cattgcacagtataagttt

SEQ ID NO: 210812 - DNA, 19 bp, Homo sapiens
  siRNA target sequence for FUT10 (NM_032664.3,1171-1189).
cacagtataagtttatcct

SEQ ID NO: 210813 - DNA, 19 bp, Homo sapiens
  siRNA target sequence for FUT10 (NM_032664.3,1206-1224).
gtttgtgatgactacatca

SEQ ID NO: 210814 - DNA, 19 bp, Homo sapiens
  siRNA target sequence for FUT10 (NM_032664.3,1253-1271).
gggggtagtccctgtatat

SEQ ID NO: 210815 - DNA, 19 bp, Homo sapiens
  siRNA target sequence for FUT10 (NM_032664.3,1254-1272).
ggggtagtccctgtatatt

SEQ ID NO: 210816 - DNA, 19 bp, Homo sapiens
  siRNA target sequence for FUT10 (NM_032664.3,1255-1273).
gggtagtccctgtatatta

SEQ ID NO: 210817 - DNA, 19 bp, Homo sapiens
  siRNA target sequence for FUT10 (NM_032664.3,1293-1311).
gactggcttccaagtaaca

SEQ ID NO: 210818 - DNA, 19 bp, Homo sapiens
  siRNA target sequence for FUT10 (NM_032664.3,1394-1412).
gtatgaggcctatgtagaa

SEQ ID NO: 210819 - DNA, 19 bp, Homo sapiens
  siRNA target sequence for FUT10 (NM_032664.3,1485-1503).
gacgtcaaccaggacaatt

SEQ ID NO: 210820 - DNA, 19 bp, Homo sapiens
  siRNA target sequence for FUT10 (NM_032664.3,1534-1552).
ccaaggtgtgggctaatat

SEQ ID NO: 210821 - DNA, 19 bp, Homo sapiens
  siRNA target sequence for FUT10 (NM_032664.3,1569-1587).
ggcttaccacccaaaagat

SEQ ID NO: 210822 - DNA, 19 bp, Homo sapiens
  siRNA target sequence for FUT10 (NM_032664.3,1682-1700).
gtggatttccagctttgaa

SEQ ID NO: 210823 - DNA, 19 bp, Homo sapiens
  siRNA target sequence for FUT10 (NM_032664.3,1685-1703).
gatttccagctttgaacaa

SEQ ID NO: 210824 - DNA, 19 bp, Homo sapiens
  siRNA target sequence for FUT11 (NM_173540.1,523-541).
gggcatccgcctcttcaat

SEQ ID NO: 210825 - DNA, 19 bp, Homo sapiens
  siRNA target sequence for FUT11 (NM_173540.1,525-543).
gcatccgcctcttcaatct

SEQ ID NO: 210826 - DNA, 19 bp, Homo sapiens
  siRNA target sequence for FUT11 (NM_173540.1,526-544).
catccgcctcttcaatctt

SEQ ID NO: 210827 - DNA, 19 bp, Homo sapiens
  siRNA target sequence for FUT11 (NM_173540.1,901-919).
cgactacatgacagaaaaa

SEQ ID NO: 210828 - DNA, 19 bp, Homo sapiens
  siRNA target sequence for FUT11 (NM_173540.1,979-997).
ggactggatgccgaacaat

SEQ ID NO: 210829 - DNA, 19 bp, Homo sapiens
  siRNA target sequence for FUT11 (NM_173540.1,1003-1021).
cgtcatcctgattgatgat

SEQ ID NO: 210830 - DNA, 19 bp, Homo sapiens
  siRNA target sequence for FUT11 (NM_173540.1,1057-1075).
ctttctggacaagaatgat

SEQ ID NO: 210831 - DNA, 19 bp, Homo sapiens
  siRNA target sequence for FUT11 (NM_173540.1,1114-1132).
gggcatcaccaaccaattt

SEQ ID NO: 210832 - DNA, 19 bp, Homo sapiens
  siRNA target sequence for FUT11 (NM_173540.1,1116-1134).
gcatcaccaaccaatttct

SEQ ID NO: 210833 - DNA, 19 bp, Homo sapiens
  siRNA target sequence for FUT11 (NM_173540.1,1272-1290).
gggacagccccgtctttga

SEQ ID NO: 210834 - DNA, 19 bp, Homo sapiens
  siRNA target sequence for FUT11 (NM_173540.1,1437-1455).
ctgccatgatccacaacaa

SEQ ID NO: 210835 - DNA, 19 bp, Homo sapiens
  siRNA target sequence for FUT11 (NM_173540.1,1441-1459).
catgatccacaacaatgaa

SEQ ID NO: 210836 - DNA, 19 bp, Homo sapiens
  siRNA target sequence for FUT11 (NM_173540.1,1470-1488).
cgaaattttgggattacct

SEQ ID NO: 210837 - DNA, 19 bp, Homo sapiens
  siRNA target sequence for FUT11 (NM_173540.1,1471-1489).
gaaattttgggattaccta

SEQ ID NO: 210838 - DNA, 19 bp, Homo sapiens
  siRNA target sequence for FUT11 (NM_173540.1,1479-1497).
gggattacctacatgaaat

SEQ ID NO: 210839 - DNA, 19 bp, Homo sapiens
  siRNA target sequence for FUT11 (NM_173540.1,1481-1499).
gattacctacatgaaatct

SEQ ID NO: 210840 - DNA, 19 bp, Homo sapiens
  siRNA target sequence for FUT4 (NM_002033.1,1044-1062).
cgctgggtttggatgaact

SEQ ID NO: 210841 - DNA, 19 bp, Homo sapiens
  siRNA target sequence for FUT4 (NM_002033.1,1349-1367).
gcagccggtgcccgaaatt

SEQ ID NO: 210842 - DNA, 19 bp, Homo sapiens
  siRNA target sequence for FUT4 (NM_002033.1,1420-1438).
cgcagcacctggattatat

SEQ ID NO: 210843 - DNA, 19 bp, Homo sapiens
  siRNA target sequence for FUT4 (NM_002033.1,1422-1440).
cagcacctggattatatca

SEQ ID NO: 210844 - DNA, 19 bp, Homo sapiens
  siRNA target sequence for FUT7 (NM_004479.1,516-534).
cacctccgaggcatcttca

SEQ ID NO: 210845 - DNA, 19 bp, Homo sapiens
  siRNA target sequence for FUT7 (NM_004479.1,519-537).
ctccgaggcatcttcaact

SEQ ID NO: 210846 - DNA, 19 bp, Homo sapiens
  siRNA target sequence for FUT7 (NM_004479.1,556-574).
gcgactcggacatctttgt

SEQ ID NO: 210847 - DNA, 19 bp, Homo sapiens
  siRNA target sequence for FUT7 (NM_004479.1,1001-1019).
ccgataccaacgcttcttt

SEQ ID NO: 210848 - DNA, 19 bp, Homo sapiens
  siRNA target sequence for FUT7 (NM_004479.1,1054-1072).
ccgactggcgggaacgttt

SEQ ID NO: 210849 - DNA, 19 bp, Homo sapiens
  siRNA target sequence for FUT7 (NM_004479.1,1058-1076).
ctggcgggaacgtttctgt

SEQ ID NO: 210850 - DNA, 19 bp, Homo sapiens
  siRNA target sequence for FUT9 (NM_006581.2,336-354).
ggaattcttcgcccatttt

SEQ ID NO: 210851 - DNA, 19 bp, Homo sapiens
  siRNA target sequence for FUT9 (NM_006581.2,396-414).
ctcatttacatcaaaccta

SEQ ID NO: 210852 - DNA, 19 bp, Homo sapiens
  siRNA target sequence for FUT9 (NM_006581.2,425-443).
gatcttcagtccaatggaa

SEQ ID NO: 210853 - DNA, 19 bp, Homo sapiens
  siRNA target sequence for FUT9 (NM_006581.2,540-558).
cagacctttgaccttacat

SEQ ID NO: 210854 - DNA, 19 bp, Homo sapiens
  siRNA target sequence for FUT9 (NM_006581.2,559-577).
cctgccaagcaatgttcaa

SEQ ID NO: 210855 - DNA, 19 bp, Homo sapiens
  siRNA target sequence for FUT9 (NM_006581.2,601-619).
cggaccgttcactgtacaa

SEQ ID NO: 210856 - DNA, 19 bp, Homo sapiens
  siRNA target sequence for FUT9 (NM_006581.2,605-623).
ccgttcactgtacaacaaa

SEQ ID NO: 210857 - DNA, 19 bp, Homo sapiens
  siRNA target sequence for FUT9 (NM_006581.2,606-624).
cgttcactgtacaacaaat

SEQ ID NO: 210858 - DNA, 19 bp, Homo sapiens
  siRNA target sequence for FUT9 (NM_006581.2,656-674).
cagttgggatctgacaaat

SEQ ID NO: 210859 - DNA, 19 bp, Homo sapiens
  siRNA target sequence for FUT9 (NM_006581.2,658-676).
gttgggatctgacaaattt

SEQ ID NO: 210860 - DNA, 19 bp, Homo sapiens
  siRNA target sequence for FUT9 (NM_006581.2,662-680).
ggatctgacaaatttacct

SEQ ID NO: 210861 - DNA, 19 bp, Homo sapiens
  siRNA target sequence for FUT9 (NM_006581.2,754-772).
gtggcattgagcacttgtt

SEQ ID NO: 210862 - DNA, 19 bp, Homo sapiens
  siRNA target sequence for FUT9 (NM_006581.2,757-775).
gcattgagcacttgtttaa

SEQ ID NO: 210863 - DNA, 19 bp, Homo sapiens
  siRNA target sequence for FUT9 (NM_006581.2,787-805).
cttaccgccgtgattcaga

SEQ ID NO: 210864 - DNA, 19 bp, Homo sapiens
  siRNA target sequence for FUT9 (NM_006581.2,793-811).
gccgtgattcagatatcca

SEQ ID NO: 210865 - DNA, 19 bp, Homo sapiens
  siRNA target sequence for FUT9 (NM_006581.2,794-812).
ccgtgattcagatatccaa

SEQ ID NO: 210866 - DNA, 19 bp, Homo sapiens
  siRNA target sequence for FUT9 (NM_006581.2,827-845).
cttgacggtaagcacaaat

SEQ ID NO: 210867 - DNA, 19 bp, Homo sapiens
  siRNA target sequence for FUT9 (NM_006581.2,841-859).
caaatcccttcgtgtttga

SEQ ID NO: 210868 - DNA, 19 bp, Homo sapiens
  siRNA target sequence for FUT9 (NM_006581.2,914-932).
gcatgccagagtcaagtat

SEQ ID NO: 210869 - DNA, 19 bp, Homo sapiens
  siRNA target sequence for FUT9 (NM_006581.2,915-933).
catgccagagtcaagtatt

SEQ ID NO: 210870 - DNA, 19 bp, Homo sapiens
  siRNA target sequence for FUT9 (NM_006581.2,918-936).
gccagagtcaagtattaca

SEQ ID NO: 210871 - DNA, 19 bp, Homo sapiens
  siRNA target sequence for FUT9 (NM_006581.2,919-937).
ccagagtcaagtattacaa

SEQ ID NO: 210872 - DNA, 19 bp, Homo sapiens
  siRNA target sequence for FUT9 (NM_006581.2,920-938).
cagagtcaagtattacaat

SEQ ID NO: 210873 - DNA, 19 bp, Homo sapiens
  siRNA target sequence for FUT9 (NM_006581.2,952-970).
gcattgaaatccataccta

SEQ ID NO: 210874 - DNA, 19 bp, Homo sapiens
  siRNA target sequence for FUT9 (NM_006581.2,968-986).
ctacgggcaagcatttgga

SEQ ID NO: 210875 - DNA, 19 bp, Homo sapiens
  siRNA target sequence for FUT9 (NM_006581.2,978-996).
gcatttggagaatatgtca

SEQ ID NO: 210876 - DNA, 19 bp, Homo sapiens
  siRNA target sequence for FUT9 (NM_006581.2,984-1002).
ggagaatatgtcaatgata

SEQ ID NO: 210877 - DNA, 19 bp, Homo sapiens
  siRNA target sequence for FUT9 (NM_006581.2,985-1003).
gagaatatgtcaatgataa

SEQ ID NO: 210878 - DNA, 19 bp, Homo sapiens
  siRNA target sequence for FUT9 (NM_006581.2,1080-1098).
gaaaagctatacaatgctt

SEQ ID NO: 210879 - DNA, 19 bp, Homo sapiens
  siRNA target sequence for FUT9 (NM_006581.2,1129-1147).
gaccatctagggaaaacta

SEQ ID NO: 210880 - DNA, 19 bp, Homo sapiens
  siRNA target sequence for FUT9 (NM_006581.2,1132-1150).
catctagggaaaactatga

SEQ ID NO: 210881 - DNA, 19 bp, Homo sapiens
  siRNA target sequence for FUT9 (NM_006581.2,1138-1156).
gggaaaactatgagaatta

SEQ ID NO: 210882 - DNA, 19 bp, Homo sapiens
  siRNA target sequence for FUT9 (NM_006581.2,1227-1245).
gaagtcgacaaaaacaata

SEQ ID NO: 210883 - DNA, 19 bp, Homo sapiens
  siRNA target sequence for FUT9 (NM_006581.2,1230-1248).
gtcgacaaaaacaataagt

SEQ ID NO: 210884 - DNA, 19 bp, Homo sapiens
  siRNA target sequence for FUT9 (NM_006581.2,1232-1250).
cgacaaaaacaataagtta

SEQ ID NO: 210885 - DNA, 19 bp, Homo sapiens
  siRNA target sequence for FUT9 (NM_006581.2,1277-1295).
ggatttcactgtaaatctt

SEQ ID NO: 210886 - DNA, 19 bp, Homo sapiens
  siRNA target sequence for FUT9 (NM_006581.2,1287-1305).
gtaaatcttccacgatttt

SEQ ID NO: 210887 - DNA, 19 bp, Homo sapiens
  siRNA target sequence for FUT9 (NM_006581.2,1321-1339).
gtttggcttgcgatcatgt

SEQ ID NO: 210888 - DNA, 19 bp, Homo sapiens
  siRNA target sequence for FUT9 (NM_006581.2,1325-1343).
ggcttgcgatcatgtgaaa

SEQ ID NO: 210889 - DNA, 19 bp, Homo sapiens
  siRNA target sequence for FUT9 (NM_006581.2,1326-1344).
gcttgcgatcatgtgaaaa

SEQ ID NO: 210890 - DNA, 19 bp, Homo sapiens
  siRNA target sequence for FUT9 (NM_006581.2,1368-1386).
ggtaatttagagaaatggt

SEQ ID NO: 210891 - DNA, 19 bp, Homo sapiens
  siRNA target sequence for UGT1A10 (NM_019075.1,363-381).
gaaagcacaggcacaaagt

SEQ ID NO: 210892 - DNA, 19 bp, Homo sapiens
  siRNA target sequence for UGT1A10 (NM_019075.1,367-385).
gcacaggcacaaagtatat

SEQ ID NO: 210893 - DNA, 19 bp, Homo sapiens
  siRNA target sequence for UGT1A10 (NM_019075.1,728-746).
gccagtatctttttagaaa

SEQ ID NO: 210894 - DNA, 19 bp, Homo sapiens
  siRNA target sequence for UGT2A1 (NM_006798.1,84-102).
gttctcccttcagataagt

SEQ ID NO: 210895 - DNA, 19 bp, Homo sapiens
  siRNA target sequence for UGT2A1 (NM_006798.1,90-108).
ccttcagataagtctcata

SEQ ID NO: 210896 - DNA, 19 bp, Homo sapiens
  siRNA target sequence for UGT2A1 (NM_006798.1,157-175).
cattggctaaatgttaaga

SEQ ID NO: 210897 - DNA, 19 bp, Homo sapiens
  siRNA target sequence for UGT2A1 (NM_006798.1,161-179).
ggctaaatgttaagataat

SEQ ID NO: 210898 - DNA, 19 bp, Homo sapiens
  siRNA target sequence for UGT2A1 (NM_006798.1,257-275).
ctaacccatctctgacatt

SEQ ID NO: 210899 - DNA, 19 bp, Homo sapiens
  siRNA target sequence for UGT2A1 (NM_006798.1,371-389).
ccatttggagattctatca

SEQ ID NO: 210900 - DNA, 19 bp, Homo sapiens
  siRNA target sequence for UGT2A1 (NM_006798.1,438-456).
ctgtgatggcgttcttaaa

SEQ ID NO: 210901 - DNA, 19 bp, Homo sapiens
  siRNA target sequence for UGT2A1 (NM_006798.1,440-458).
gtgatggcgttcttaaaaa

SEQ ID NO: 210902 - DNA, 19 bp, Homo sapiens
  siRNA target sequence for UGT2A1 (NM_006798.1,504-522).
ggtgtctgatccagtattt

SEQ ID NO: 210903 - DNA, 19 bp, Homo sapiens
  siRNA target sequence for UGT2A1 (NM_006798.1,527-545).
gtggcgatatagtagcttt

SEQ ID NO: 210904 - DNA, 19 bp, Homo sapiens
  siRNA target sequence for UGT2A1 (NM_006798.1,529-547).
ggcgatatagtagctttaa

SEQ ID NO: 210905 - DNA, 19 bp, Homo sapiens
  siRNA target sequence for UGT2A1 (NM_006798.1,530-548).
gcgatatagtagctttaaa

SEQ ID NO: 210906 - DNA, 19 bp, Homo sapiens
  siRNA target sequence for UGT2A1 (NM_006798.1,550-568).
cttggaattccatttatgt

SEQ ID NO: 210907 - DNA, 19 bp, Homo sapiens
  siRNA target sequence for UGT2A1 (NM_006798.1,553-571).
ggaattccatttatgtact

SEQ ID NO: 210908 - DNA, 19 bp, Homo sapiens
  siRNA target sequence for UGT2A1 (NM_006798.1,567-585).
gtactccttgaggttttct

SEQ ID NO: 210909 - DNA, 19 bp, Homo sapiens
  siRNA target sequence for UGT2A1 (NM_006798.1,661-679).
ctcaccgaccaaatgtctt

SEQ ID NO: 210910 - DNA, 19 bp, Homo sapiens
  siRNA target sequence for UGT2A1 (NM_006798.1,675-693).
gtctttcactgacagaata

SEQ ID NO: 210911 - DNA, 19 bp, Homo sapiens
  siRNA target sequence for UGT2A1 (NM_006798.1,712-730).
cacctacaggactacatgt

SEQ ID NO: 210912 - DNA, 19 bp, Homo sapiens
  siRNA target sequence for UGT2A1 (NM_006798.1,720-738).
ggactacatgtttgaaact

SEQ ID NO: 210913 - DNA, 19 bp, Homo sapiens
  siRNA target sequence for UGT2A1 (NM_006798.1,723-741).
ctacatgtttgaaactctt

SEQ ID NO: 210914 - DNA, 19 bp, Homo sapiens
  siRNA target sequence for UGT2A1 (NM_006798.1,752-770).
gggattcatactatagtaa

SEQ ID NO: 210915 - DNA, 19 bp, Homo sapiens
  siRNA target sequence for UGT2A1 (NM_006798.1,758-776).
catactatagtaaagcttt

SEQ ID NO: 210916 - DNA, 19 bp, Homo sapiens
  siRNA target sequence for UGT2A1 (NM_006798.1,762-780).
ctatagtaaagctttagga

SEQ ID NO: 210917 - DNA, 19 bp, Homo sapiens
  siRNA target sequence for UGT2A1 (NM_006798.1,856-874).
cctcgtccatacttaccta

SEQ ID NO: 210918 - DNA, 19 bp, Homo sapiens
  siRNA target sequence for UGT2A1 (NM_006798.1,857-875).
ctcgtccatacttacctaa

SEQ ID NO: 210919 - DNA, 19 bp, Homo sapiens
  siRNA target sequence for UGT2A1 (NM_006798.1,859-877).
cgtccatacttacctaatt

SEQ ID NO: 210920 - DNA, 19 bp, Homo sapiens
  siRNA target sequence for UGT2A1 (NM_006798.1,945-963).
ccagagctcaggtaaaaat

SEQ ID NO: 210921 - DNA, 19 bp, Homo sapiens
  siRNA target sequence for UGT2A1 (NM_006798.1,986-1004).
gatcaatggtcaaaaacct

SEQ ID NO: 210922 - DNA, 19 bp, Homo sapiens
  siRNA target sequence for UGT2A1 (NM_006798.1,996-1014).
caaaaaccttacagaagaa

SEQ ID NO: 210923 - DNA, 19 bp, Homo sapiens
  siRNA target sequence for UGT2A1 (NM_006798.1,1090-1108).
gccacattaggaaacaata

SEQ ID NO: 210924 - DNA, 19 bp, Homo sapiens
  siRNA target sequence for UGT2A1 (NM_006798.1,1094-1112).
cattaggaaacaatactca

SEQ ID NO: 210925 - DNA, 19 bp, Homo sapiens
  siRNA target sequence for UGT2A1 (NM_006798.1,1291-1309).
gctgtggaagtgaacctaa

SEQ ID NO: 210926 - DNA, 19 bp, Homo sapiens
  siRNA target sequence for UGT2A1 (NM_006798.1,1353-1371).
cattaatgaaccttcttat

SEQ ID NO: 210927 - DNA, 19 bp, Homo sapiens
  siRNA target sequence for UGT2A1 (NM_006798.1,1558-1576).
gtgacaacggctatatttt

SEQ ID NO: 210928 - DNA, 19 bp, Homo sapiens
  siRNA target sequence for UGT2A1 (NM_006798.1,1568-1586).
ctatatttttggtcataca

SEQ ID NO: 210929 - DNA, 19 bp, Homo sapiens
  siRNA target sequence for UGT2A1 (NM_006798.1,1604-1622).
gtcaaaaatttggtaagat

SEQ ID NO: 210930 - DNA, 19 bp, Homo sapiens
  siRNA target sequence for UGT2B10 (NM_001075.2,27-45).
ctacagttctgctgataca

SEQ ID NO: 210931 - DNA, 19 bp, Homo sapiens
  siRNA target sequence for UGT2B10 (NM_001075.2,30-48).
cagttctgctgatacaact

SEQ ID NO: 210932 - DNA, 19 bp, Homo sapiens
  siRNA target sequence for UGT2B10 (NM_001075.2,281-299).
caattggttaagagattgt

SEQ ID NO: 210933 - DNA, 19 bp, Homo sapiens
  siRNA target sequence for UGT2B10 (NM_001075.2,357-375).
gggcaattaatgacataat

SEQ ID NO: 210934 - DNA, 19 bp, Homo sapiens
  siRNA target sequence for UGT2B11 (NM_001073.1,211-229).
gatgcatccactcttaaat

SEQ ID NO: 210935 - DNA, 19 bp, Homo sapiens
  siRNA target sequence for UGT2B15 (NM_001076.1,197-215).
cggcttctactcttgtcaa

SEQ ID NO: 210936 - DNA, 19 bp, Homo sapiens
  siRNA target sequence for UGT2B15 (NM_001076.1,198-216).
ggcttctactcttgtcaat

SEQ ID NO: 210937 - DNA, 19 bp, Homo sapiens
  siRNA target sequence for UGT2B15 (NM_001076.1,208-226).
cttgtcaatgccagtaaat

SEQ ID NO: 210938 - DNA, 19 bp, Homo sapiens
  siRNA target sequence for UGT2B15 (NM_001076.1,312-330).
gatatatggtgtttcaaaa

SEQ ID NO: 210939 - DNA, 19 bp, Homo sapiens
  siRNA target sequence for UGT2B15 (NM_001076.1,376-394).
gaatattatgactacagta

SEQ ID NO: 210940 - DNA, 19 bp, Homo sapiens
  siRNA target sequence for UGT2B15 (NM_001076.1,392-410).
gtaacaagctctgtaaaga

SEQ ID NO: 210941 - DNA, 19 bp, Homo sapiens
  siRNA target sequence for UGT2B15 (NM_001076.1,450-468).
gtcaaagtttgatgtcatt

SEQ ID NO: 210942 - DNA, 19 bp, Homo sapiens
  siRNA target sequence for UGT2B15 (NM_001076.1,452-470).
caaagtttgatgtcattct

SEQ ID NO: 210943 - DNA, 19 bp, Homo sapiens
  siRNA target sequence for UGT2B15 (NM_001076.1,531-549).
gtacagtcttcgattctct

SEQ ID NO: 210944 - DNA, 19 bp, Homo sapiens
  siRNA target sequence for UGT2B15 (NM_001076.1,1205-1223).
ccttgtttgcggatcaaca

SEQ ID NO: 210945 - DNA, 19 bp, Homo sapiens
  siRNA target sequence for UGT2B15 (NM_001076.1,1292-1310).
gagatttgctcaatgcatt

SEQ ID NO: 210946 - DNA, 19 bp, Homo sapiens
  siRNA target sequence for UGT2B15 (NM_001076.1,1307-1325).
cattgaagtcagtcattaa

SEQ ID NO: 210947 - DNA, 19 bp, Homo sapiens
  siRNA target sequence for UGT2B17 (NM_001077.1,1080-1098).
gaagccaaatactttaggt

SEQ ID NO: 210948 - DNA, 19 bp, Homo sapiens
  siRNA target sequence for UGT2B28 (NM_053039.1,84-102).
gtgtggaccggtgaataca

SEQ ID NO: 210949 - DNA, 19 bp, Homo sapiens
  siRNA target sequence for UGT2B4 (NM_021139.1,238-256).
cagcccatctactcttaaa

SEQ ID NO: 210950 - DNA, 19 bp, Homo sapiens
  siRNA target sequence for UGT2B4 (NM_021139.1,240-258).
gcccatctactcttaaatt

SEQ ID NO: 210951 - DNA, 19 bp, Homo sapiens
  siRNA target sequence for UGT2B4 (NM_021139.1,241-259).
cccatctactcttaaattt

SEQ ID NO: 210952 - DNA, 19 bp, Homo sapiens
  siRNA target sequence for UGT2B4 (NM_021139.1,290-308).
gagtttgaggatattatca

SEQ ID NO: 210953 - DNA, 19 bp, Homo sapiens
  siRNA target sequence for UGT2B4 (NM_021139.1,511-529).
gctgctggccgagttactt

SEQ ID NO: 210954 - DNA, 19 bp, Homo sapiens
  siRNA target sequence for UGT2B4 (NM_021139.1,512-530).
ctgctggccgagttactta

SEQ ID NO: 210955 - DNA, 19 bp, Homo sapiens
  siRNA target sequence for UGT2B4 (NM_021139.1,514-532).
gctggccgagttacttaaa

SEQ ID NO: 210956 - DNA, 19 bp, Homo sapiens
  siRNA target sequence for UGT2B4 (NM_021139.1,515-533).
ctggccgagttacttaaaa

SEQ ID NO: 210957 - DNA, 19 bp, Homo sapiens
  siRNA target sequence for UGT2B4 (NM_021139.1,517-535).
ggccgagttacttaaaata

SEQ ID NO: 210958 - DNA, 19 bp, Homo sapiens
  siRNA target sequence for UGT2B4 (NM_021139.1,527-545).
cttaaaataccctttgtct

SEQ ID NO: 210959 - DNA, 19 bp, Homo sapiens
  siRNA target sequence for UGT2B4 (NM_021139.1,568-586).
ctacgcaattgaaaagcat

SEQ ID NO: 210960 - DNA, 19 bp, Homo sapiens
  siRNA target sequence for UGT2B7 (NM_001074.1,223-241).
ccgctcttaaaattgaaat

SEQ ID NO: 210961 - DNA, 19 bp, Homo sapiens
  siRNA target sequence for UGT2B7 (NM_001074.1,224-242).
cgctcttaaaattgaaatt

SEQ ID NO: 210962 - DNA, 19 bp, Homo sapiens
  siRNA target sequence for UGT2B7 (NM_001074.1,348-366).
gtacaggaaatcatgtcaa

SEQ ID NO: 210963 - DNA, 19 bp, Homo sapiens
  siRNA target sequence for UGT2B7 (NM_001074.1,351-369).
caggaaatcatgtcaatat

SEQ ID NO: 210964 - DNA, 19 bp, Homo sapiens
  siRNA target sequence for GALNT2 (NM_004481.2,49-67).
ctgggcatcgcctactaca

SEQ ID NO: 210965 - DNA, 19 bp, Homo sapiens
  siRNA target sequence for GALNT2 (NM_004481.2,52-70).
ggcatcgcctactacatgt

SEQ ID NO: 210966 - DNA, 19 bp, Homo sapiens
  siRNA target sequence for GALNT2 (NM_004481.2,53-71).
gcatcgcctactacatgta

SEQ ID NO: 210967 - DNA, 19 bp, Homo sapiens
  siRNA target sequence for GALNT2 (NM_004481.2,318-336).
ggtggagagtgataagctt

SEQ ID NO: 210968 - DNA, 19 bp, Homo sapiens
  siRNA target sequence for GALNT2 (NM_004481.2,464-482).
ccgtggtcagcgtgcttaa

SEQ ID NO: 210969 - DNA, 19 bp, Homo sapiens
  siRNA target sequence for GALNT2 (NM_004481.2,468-486).
ggtcagcgtgcttaagaaa

SEQ ID NO: 210970 - DNA, 19 bp, Homo sapiens
  siRNA target sequence for GALNT2 (NM_004481.2,571-589).
gagaaagtgcgagttctta

SEQ ID NO: 210971 - DNA, 19 bp, Homo sapiens
  siRNA target sequence for GALNT2 (NM_004481.2,573-591).
gaaagtgcgagttcttaga

SEQ ID NO: 210972 - DNA, 19 bp, Homo sapiens
  siRNA target sequence for GALNT2 (NM_004481.2,579-597).
gcgagttcttagaaatgat

SEQ ID NO: 210973 - DNA, 19 bp, Homo sapiens
  siRNA target sequence for GALNT2 (NM_004481.2,672-690).
cagtcactgcgagtgtaat

SEQ ID NO: 210974 - DNA, 19 bp, Homo sapiens
  siRNA target sequence for GALNT2 (NM_004481.2,752-770).
ccatcatcgatgtcattaa

SEQ ID NO: 210975 - DNA, 19 bp, Homo sapiens
  siRNA target sequence for GALNT2 (NM_004481.2,753-771).
catcatcgatgtcattaat

SEQ ID NO: 210976 - DNA, 19 bp, Homo sapiens
  siRNA target sequence for GALNT2 (NM_004481.2,823-841).
gattggaacttggtattca

SEQ ID NO: 210977 - DNA, 19 bp, Homo sapiens
  siRNA target sequence for GALNT2 (NM_004481.2,835-853).
gtattcaagtgggattaca

SEQ ID NO: 210978 - DNA, 19 bp, Homo sapiens
  siRNA target sequence for GALNT2 (NM_004481.2,888-906).
cccagtcgcccctataaaa

SEQ ID NO: 210979 - DNA, 19 bp, Homo sapiens
  siRNA target sequence for GALNT2 (NM_004481.2,889-907).
ccagtcgcccctataaaaa

SEQ ID NO: 210980 - DNA, 19 bp, Homo sapiens
  siRNA target sequence for GALNT2 (NM_004481.2,920-938).
ctggtgggctgtttgtgat

SEQ ID NO: 210981 - DNA, 19 bp, Homo sapiens
  siRNA target sequence for GALNT2 (NM_004481.2,934-952).
gtgatggataagttctatt

SEQ ID NO: 210982 - DNA, 19 bp, Homo sapiens
  siRNA target sequence for GALNT2 (NM_004481.2,965-983).
ggaagtacgacatgatgat

SEQ ID NO: 210983 - DNA, 19 bp, Homo sapiens
  siRNA target sequence for GALNT2 (NM_004481.2,1246-1264).
gagcttaggaagaaactca

SEQ ID NO: 210984 - DNA, 19 bp, Homo sapiens
  siRNA target sequence for GALNT2 (NM_004481.2,1268-1286).
gcaagcctttcaaatggta

SEQ ID NO: 210985 - DNA, 19 bp, Homo sapiens
  siRNA target sequence for GALNT2 (NM_004481.2,1361-1379).
ctaactgcctcgacacttt

SEQ ID NO: 210986 - DNA, 19 bp, Homo sapiens
  siRNA target sequence for GALNT2 (NM_004481.2,1468-1486).
gtgaagcacatggatttgt

SEQ ID NO: 210987 - DNA, 19 bp, Homo sapiens
  siRNA target sequence for GALNT2 (NM_004481.2,1504-1522).
cgggcaccgggctctctta

SEQ ID NO: 210988 - DNA, 19 bp, Homo sapiens
  siRNA target sequence for GALNT2 (NM_004481.2,1505-1523).
gggcaccgggctctcttat

SEQ ID NO: 210989 - DNA, 19 bp, Homo sapiens
  siRNA target sequence for GALNT2 (NM_004481.2,1506-1524).
ggcaccgggctctcttata

SEQ ID NO: 210990 - DNA, 19 bp, Homo sapiens
  siRNA target sequence for GALNT3 (NM_004482.2,7-25).
cacctaaagcgactagtaa

SEQ ID NO: 210991 - DNA, 19 bp, Homo sapiens
  siRNA target sequence for GALNT3 (NM_004482.2,9-27).
cctaaagcgactagtaaaa

SEQ ID NO: 210992 - DNA, 19 bp, Homo sapiens
  siRNA target sequence for GALNT3 (NM_004482.2,10-28).
ctaaagcgactagtaaaat

SEQ ID NO: 210993 - DNA, 19 bp, Homo sapiens
  siRNA target sequence for GALNT3 (NM_004482.2,16-34).
cgactagtaaaattacaca

SEQ ID NO: 210994 - DNA, 19 bp, Homo sapiens
  siRNA target sequence for GALNT3 (NM_004482.2,17-35).
gactagtaaaattacacat

SEQ ID NO: 210995 - DNA, 19 bp, Homo sapiens
  siRNA target sequence for GALNT3 (NM_004482.2,19-37).
ctagtaaaattacacatta

SEQ ID NO: 210996 - DNA, 19 bp, Homo sapiens
  siRNA target sequence for GALNT3 (NM_004482.2,62-80).
ggaagcttggtgcagtaat

SEQ ID NO: 210997 - DNA, 19 bp, Homo sapiens
  siRNA target sequence for GALNT3 (NM_004482.2,63-81).
gaagcttggtgcagtaatt

SEQ ID NO: 210998 - DNA, 19 bp, Homo sapiens
  siRNA target sequence for GALNT3 (NM_004482.2,70-88).
ggtgcagtaatttttttct

SEQ ID NO: 210999 - DNA, 19 bp, Homo sapiens
  siRNA target sequence for GALNT3 (NM_004482.2,121-139).
gtaagtgttcaatattcca

SEQ ID NO: 211000 - DNA, 19 bp, Homo sapiens
  siRNA target sequence for GALNT3 (NM_004482.2,183-201).
gatgttggatttaatgcta

SEQ ID NO: 211001 - DNA, 19 bp, Homo sapiens
  siRNA target sequence for GALNT3 (NM_004482.2,198-216).
gctagaagctgtaaacaat

SEQ ID NO: 211002 - DNA, 19 bp, Homo sapiens
  siRNA target sequence for GALNT3 (NM_004482.2,199-217).
ctagaagctgtaaacaata

SEQ ID NO: 211003 - DNA, 19 bp, Homo sapiens
  siRNA target sequence for GALNT3 (NM_004482.2,206-224).
ctgtaaacaatattaagga

SEQ ID NO: 211004 - DNA, 19 bp, Homo sapiens
  siRNA target sequence for GALNT3 (NM_004482.2,227-245).
ccatgccaaaaatgcaaat

SEQ ID NO: 211005 - DNA, 19 bp, Homo sapiens
  siRNA target sequence for GALNT3 (NM_004482.2,254-272).
ctgtcaggcaaaacattga

SEQ ID NO: 211006 - DNA, 19 bp, Homo sapiens
  siRNA target sequence for GALNT3 (NM_004482.2,284-302).
gaccttgtttgcaaggata

SEQ ID NO: 211007 - DNA, 19 bp, Homo sapiens
  siRNA target sequence for GALNT3 (NM_004482.2,337-355).
cgtccacctcaggattcaa

SEQ ID NO: 211008 - DNA, 19 bp, Homo sapiens
  siRNA target sequence for GALNT3 (NM_004482.2,338-356).
gtccacctcaggattcaaa

SEQ ID NO: 211009 - DNA, 19 bp, Homo sapiens
  siRNA target sequence for GALNT3 (NM_004482.2,364-382).
ggtgcttctggtaaagcat

SEQ ID NO: 211010 - DNA, 19 bp, Homo sapiens
  siRNA target sequence for GALNT3 (NM_004482.2,368-386).
cttctggtaaagcattcaa

SEQ ID NO: 211011 - DNA, 19 bp, Homo sapiens
  siRNA target sequence for GALNT3 (NM_004482.2,379-397).
gcattcaagacaaccaatt

SEQ ID NO: 211012 - DNA, 19 bp, Homo sapiens
  siRNA target sequence for GALNT3 (NM_004482.2,384-402).
caagacaaccaatttaagt

SEQ ID NO: 211013 - DNA, 19 bp, Homo sapiens
  siRNA target sequence for GALNT3 (NM_004482.2,387-405).
gacaaccaatttaagtgtt

SEQ ID NO: 211014 - DNA, 19 bp, Homo sapiens
  siRNA target sequence for GALNT3 (NM_004482.2,427-445).
cgtggggaagctaaacact

SEQ ID NO: 211015 - DNA, 19 bp, Homo sapiens
  siRNA target sequence for GALNT3 (NM_004482.2,503-521).
ctcgacctcctgaatgtat

SEQ ID NO: 211016 - DNA, 19 bp, Homo sapiens
  siRNA target sequence for GALNT3 (NM_004482.2,511-529).
cctgaatgtattgaacaaa

SEQ ID NO: 211017 - DNA, 19 bp, Homo sapiens
  siRNA target sequence for GALNT3 (NM_004482.2,552-570).
gcccaccaccagtgtcata

SEQ ID NO: 211018 - DNA, 19 bp, Homo sapiens
  siRNA target sequence for GALNT3 (NM_004482.2,563-581).
gtgtcataatagtttttca

SEQ ID NO: 211019 - DNA, 19 bp, Homo sapiens
  siRNA target sequence for GALNT3 (NM_004482.2,589-607).
gcgtggtccacgttgctta

SEQ ID NO: 211020 - DNA, 19 bp, Homo sapiens
  siRNA target sequence for GALNT3 (NM_004482.2,594-612).
gtccacgttgcttagaact

SEQ ID NO: 211021 - DNA, 19 bp, Homo sapiens
  siRNA target sequence for GALNT3 (NM_004482.2,627-645).
ctattcttcacctgcaata

SEQ ID NO: 211022 - DNA, 19 bp, Homo sapiens
  siRNA target sequence for GALNT3 (NM_004482.2,666-684).
ggtggatgatgctagtgta

SEQ ID NO: 211023 - DNA, 19 bp, Homo sapiens
  siRNA target sequence for GALNT3 (NM_004482.2,669-687).
ggatgatgctagtgtagat

SEQ ID NO: 211024 - DNA, 19 bp, Homo sapiens
  siRNA target sequence for GALNT3 (NM_004482.2,690-708).
gtacttacatgataaacta

SEQ ID NO: 211025 - DNA, 19 bp, Homo sapiens
  siRNA target sequence for GALNT3 (NM_004482.2,693-711).
cttacatgataaactagat

SEQ ID NO: 211026 - DNA, 19 bp, Homo sapiens
  siRNA target sequence for GALNT3 (NM_004482.2,736-754).
gtaaaaatagtcagacaaa

SEQ ID NO: 211027 - DNA, 19 bp, Homo sapiens
  siRNA target sequence for GALNT3 (NM_004482.2,806-824).
cagctgaaacgctcacatt

SEQ ID NO: 211028 - DNA, 19 bp, Homo sapiens
  siRNA target sequence for GALNT3 (NM_004482.2,875-893).
ccagaatagctgagaacta

SEQ ID NO: 211029 - DNA, 19 bp, Homo sapiens
  siRNA target sequence for GALNT3 (NM_004482.2,899-917).
ctgtcgtaagtccagatat

SEQ ID NO: 211030 - DNA, 19 bp, Homo sapiens
  siRNA target sequence for GALNT3 (NM_004482.2,903-921).
cgtaagtccagatattgca

SEQ ID NO: 211031 - DNA, 19 bp, Homo sapiens
  siRNA target sequence for GALNT3 (NM_004482.2,904-922).
gtaagtccagatattgcat

SEQ ID NO: 211032 - DNA, 19 bp, Homo sapiens
  siRNA target sequence for GALNT3 (NM_004482.2,928-946).
gatctgaacacgtttgaat

SEQ ID NO: 211033 - DNA, 19 bp, Homo sapiens
  siRNA target sequence for GALNT3 (NM_004482.2,936-954).
cacgtttgaattcaacaaa

SEQ ID NO: 211034 - DNA, 19 bp, Homo sapiens
  siRNA target sequence for GALNT3 (NM_004482.2,948-966).
caacaaaccttctccttat

SEQ ID NO: 211035 - DNA, 19 bp, Homo sapiens
  siRNA target sequence for GALNT3 (NM_004482.2,956-974).
cttctccttatggaagtaa

SEQ ID NO: 211036 - DNA, 19 bp, Homo sapiens
  siRNA target sequence for GALNT3 (NM_004482.2,1046-1064).
gaaggaaagatgaaaccta

SEQ ID NO: 211037 - DNA, 19 bp, Homo sapiens
  siRNA target sequence for GALNT3 (NM_004482.2,1162-1180).
ggaggtgaaaatatagaaa

SEQ ID NO: 211038 - DNA, 19 bp, Homo sapiens
  siRNA target sequence for GALNT3 (NM_004482.2,1230-1248).
ctctgttgttggacatgtt

SEQ ID NO: 211039 - DNA, 19 bp, Homo sapiens
  siRNA target sequence for GALNT3 (NM_004482.2,1232-1250).
ctgttgttggacatgtttt

SEQ ID NO: 211040 - DNA, 19 bp, Homo sapiens
  siRNA target sequence for GALNT3 (NM_004482.2,1256-1274).
gcaaaagccctcatagctt

SEQ ID NO: 211041 - DNA, 19 bp, Homo sapiens
  siRNA target sequence for GALNT3 (NM_004482.2,1286-1304).
ctcaggtgattgctagaaa

SEQ ID NO: 211042 - DNA, 19 bp, Homo sapiens
  siRNA target sequence for GALNT3 (NM_004482.2,1457-1475).
catggtatctgaacaacat

SEQ ID NO: 211043 - DNA, 19 bp, Homo sapiens
  siRNA target sequence for GALNT3 (NM_004482.2,1460-1478).
ggtatctgaacaacattta

SEQ ID NO: 211044 - DNA, 19 bp, Homo sapiens
  siRNA target sequence for GALNT3 (NM_004482.2,1488-1506).
gtatgtgccagaccttaat

SEQ ID NO: 211045 - DNA, 19 bp, Homo sapiens
  siRNA target sequence for GALNT3 (NM_004482.2,1496-1514).
cagaccttaatcctgttat

SEQ ID NO: 211046 - DNA, 19 bp, Homo sapiens
  siRNA target sequence for GALNT3 (NM_004482.2,1498-1516).
gaccttaatcctgttatat

SEQ ID NO: 211047 - DNA, 19 bp, Homo sapiens
  siRNA target sequence for GALNT3 (NM_004482.2,1533-1551).
cgttggtcagcctctatgt

SEQ ID NO: 211048 - DNA, 19 bp, Homo sapiens
  siRNA target sequence for GALNT3 (NM_004482.2,1554-1572).
ggatgttggagaaaacaat

SEQ ID NO: 211049 - DNA, 19 bp, Homo sapiens
  siRNA target sequence for GALNT3 (NM_004482.2,1573-1591).
caaggaggcaaaccattaa

SEQ ID NO: 211050 - DNA, 19 bp, Homo sapiens
  siRNA target sequence for GALNT3 (NM_004482.2,1579-1597).
ggcaaaccattaattatgt

SEQ ID NO: 211051 - DNA, 19 bp, Homo sapiens
  siRNA target sequence for GALNT3 (NM_004482.2,1580-1598).
gcaaaccattaattatgta

SEQ ID NO: 211052 - DNA, 19 bp, Homo sapiens
  siRNA target sequence for GALNT3 (NM_004482.2,1623-1641).
ccagtactttgaatactct

SEQ ID NO: 211053 - DNA, 19 bp, Homo sapiens
  siRNA target sequence for GALNT3 (NM_004482.2,1770-1788).
gatccagaaggatcaactt

SEQ ID NO: 211054 - DNA, 19 bp, Homo sapiens
  siRNA target sequence for GALNT3 (NM_004482.2,1773-1791).
ccagaaggatcaacttcta

SEQ ID NO: 211055 - DNA, 19 bp, Homo sapiens
  siRNA target sequence for GALNT3 (NM_004482.2,1779-1797).
ggatcaacttctatacaat

SEQ ID NO: 211056 - DNA, 19 bp, Homo sapiens
  siRNA target sequence for GALNT3 (NM_004482.2,1783-1801).
caacttctatacaatccat

SEQ ID NO: 211057 - DNA, 19 bp, Homo sapiens
  siRNA target sequence for GALNT3 (NM_004482.2,1829-1847).
gagagcatccaagtttagt

SEQ ID NO: 211058 - DNA, 19 bp, Homo sapiens
  siRNA target sequence for GALNT3 (NM_004482.2,1848-1866).
gtcatgcaacccatcagat

SEQ ID NO: 211059 - DNA, 19 bp, Homo sapiens
  siRNA target sequence for GALNT3 (NM_004482.2,1859-1877).
catcagatccactccaaaa

SEQ ID NO: 211060 - DNA, 19 bp, Homo sapiens
  siRNA target sequence for GALNT3 (NM_004482.2,1880-1898).
ggatacttagccaaaatga

SEQ ID NO: 211061 - DNA, 19 bp, Homo sapiens
  siRNA target sequence for GALNT5 (NM_014568.1,258-276).
gaacaggatccgaaagttt

SEQ ID NO: 211062 - DNA, 19 bp, Homo sapiens
  siRNA target sequence for GALNT5 (NM_014568.1,292-310).
cgagtcttggcatttatct

SEQ ID NO: 211063 - DNA, 19 bp, Homo sapiens
  siRNA target sequence for GALNT5 (NM_014568.1,347-365).
cagctctccgcctctcatt

SEQ ID NO: 211064 - DNA, 19 bp, Homo sapiens
  siRNA target sequence for GALNT5 (NM_014568.1,349-367).
gctctccgcctctcattca

SEQ ID NO: 211065 - DNA, 19 bp, Homo sapiens
  siRNA target sequence for GALNT5 (NM_014568.1,407-425).
ggagggagcggataggatt

SEQ ID NO: 211066 - DNA, 19 bp, Homo sapiens
  siRNA target sequence for GALNT5 (NM_014568.1,411-429).
ggagcggataggattcaga

SEQ ID NO: 211067 - DNA, 19 bp, Homo sapiens
  siRNA target sequence for GALNT5 (NM_014568.1,795-813).
ggtagtcaaaatatcagta

SEQ ID NO: 211068 - DNA, 19 bp, Homo sapiens
  siRNA target sequence for GALNT5 (NM_014568.1,821-839).
gacgtgtcagtttaaaaca

SEQ ID NO: 211069 - DNA, 19 bp, Homo sapiens
  siRNA target sequence for GALNT5 (NM_014568.1,887-905).
cagctgaaagggacttgaa

SEQ ID NO: 211070 - DNA, 19 bp, Homo sapiens
  siRNA target sequence for GALNT5 (NM_014568.1,890-908).
ctgaaagggacttgaatgt

SEQ ID NO: 211071 - DNA, 19 bp, Homo sapiens
  siRNA target sequence for GALNT5 (NM_014568.1,912-930).
catcagtcttagtactgat

SEQ ID NO: 211072 - DNA, 19 bp, Homo sapiens
  siRNA target sequence for GALNT5 (NM_014568.1,915-933).
cagtcttagtactgataga

SEQ ID NO: 211073 - DNA, 19 bp, Homo sapiens
  siRNA target sequence for GALNT5 (NM_014568.1,944-962).
gatcacaggcagtagcaaa

SEQ ID NO: 211074 - DNA, 19 bp, Homo sapiens
  siRNA target sequence for GALNT5 (NM_014568.1,1011-1029).
catggccttaaacaaaact

SEQ ID NO: 211075 - DNA, 19 bp, Homo sapiens
  siRNA target sequence for GALNT5 (NM_014568.1,1017-1035).
cttaaacaaaactaagact

SEQ ID NO: 211076 - DNA, 19 bp, Homo sapiens
  siRNA target sequence for GALNT5 (NM_014568.1,1071-1089).
caatacgagtcttcctttt

SEQ ID NO: 211077 - DNA, 19 bp, Homo sapiens
  siRNA target sequence for GALNT5 (NM_014568.1,1090-1108).
cctaagttcactgtcaatt

SEQ ID NO: 211078 - DNA, 19 bp, Homo sapiens
  siRNA target sequence for GALNT5 (NM_014568.1,1149-1167).
gggaagtttgtcaaaggat

SEQ ID NO: 211079 - DNA, 19 bp, Homo sapiens
  siRNA target sequence for GALNT5 (NM_014568.1,1210-1228).
gaaagccatcttgtgatta

SEQ ID NO: 211080 - DNA, 19 bp, Homo sapiens
  siRNA target sequence for GALNT5 (NM_014568.1,1216-1234).
catcttgtgattataacca

SEQ ID NO: 211081 - DNA, 19 bp, Homo sapiens
  siRNA target sequence for GALNT5 (NM_014568.1,1257-1275).
ccccaaagaggtctctaat

SEQ ID NO: 211082 - DNA, 19 bp, Homo sapiens
  siRNA target sequence for GALNT5 (NM_014568.1,1258-1276).
cccaaagaggtctctaatt

SEQ ID NO: 211083 - DNA, 19 bp, Homo sapiens
  siRNA target sequence for GALNT5 (NM_014568.1,1260-1278).
caaagaggtctctaattct

SEQ ID NO: 211084 - DNA, 19 bp, Homo sapiens
  siRNA target sequence for GALNT5 (NM_014568.1,1297-1315).
cctaaagtattgggtaaaa

SEQ ID NO: 211085 - DNA, 19 bp, Homo sapiens
  siRNA target sequence for GALNT5 (NM_014568.1,1329-1347).
catttccaggaatagaagt

SEQ ID NO: 211086 - DNA, 19 bp, Homo sapiens
  siRNA target sequence for GALNT5 (NM_014568.1,1449-1467).
caaagccccctctacagaa

SEQ ID NO: 211087 - DNA, 19 bp, Homo sapiens
  siRNA target sequence for GALNT5 (NM_014568.1,1465-1483).
gaatacaaccagagtcata

SEQ ID NO: 211088 - DNA, 19 bp, Homo sapiens
  siRNA target sequence for GALNT5 (NM_014568.1,1510-1528).
ggaacgcaccaggtgttaa

SEQ ID NO: 211089 - DNA, 19 bp, Homo sapiens
  siRNA target sequence for GALNT5 (NM_014568.1,1514-1532).
cgcaccaggtgttaagaat

SEQ ID NO: 211090 - DNA, 19 bp, Homo sapiens
  siRNA target sequence for GALNT5 (NM_014568.1,1518-1536).
ccaggtgttaagaattgat

SEQ ID NO: 211091 - DNA, 19 bp, Homo sapiens
  siRNA target sequence for GALNT5 (NM_014568.1,1575-1593).
gtttgggcgtcctgtagtt

SEQ ID NO: 211092 - DNA, 19 bp, Homo sapiens
  siRNA target sequence for GALNT5 (NM_014568.1,1636-1654).
gaaggaaacttcaatgtct

SEQ ID NO: 211093 - DNA, 19 bp, Homo sapiens
  siRNA target sequence for GALNT5 (NM_014568.1,1651-1669).
gtctaccttagcgatttga

SEQ ID NO: 211094 - DNA, 19 bp, Homo sapiens
  siRNA target sequence for GALNT5 (NM_014568.1,1863-1881).
cttcagcaccaaagactat

SEQ ID NO: 211095 - DNA, 19 bp, Homo sapiens
  siRNA target sequence for GALNT5 (NM_014568.1,1866-1884).
cagcaccaaagactatcta

SEQ ID NO: 211096 - DNA, 19 bp, Homo sapiens
  siRNA target sequence for GALNT5 (NM_014568.1,1868-1886).
gcaccaaagactatctaaa

SEQ ID NO: 211097 - DNA, 19 bp, Homo sapiens
  siRNA target sequence for GALNT5 (NM_014568.1,1869-1887).
caccaaagactatctaaaa

SEQ ID NO: 211098 - DNA, 19 bp, Homo sapiens
  siRNA target sequence for GALNT5 (NM_014568.1,1928-1946).
ggattcttcgcctcaaaga

SEQ ID NO: 211099 - DNA, 19 bp, Homo sapiens
  siRNA target sequence for GALNT5 (NM_014568.1,1945-1963).
gagagacatggcttaataa

SEQ ID NO: 211100 - DNA, 19 bp, Homo sapiens
  siRNA target sequence for GALNT5 (NM_014568.1,2017-2035).
gattctcatgtggaatgta

SEQ ID NO: 211101 - DNA, 19 bp, Homo sapiens
  siRNA target sequence for GALNT5 (NM_014568.1,2091-2109).
ggcctgtccagtaatcgaa

SEQ ID NO: 211102 - DNA, 19 bp, Homo sapiens
  siRNA target sequence for GALNT5 (NM_014568.1,2096-2114).
gtccagtaatcgaagtcat

SEQ ID NO: 211103 - DNA, 19 bp, Homo sapiens
  siRNA target sequence for GALNT5 (NM_014568.1,2119-2137).
gataaggatatgagttaca

SEQ ID NO: 211104 - DNA, 19 bp, Homo sapiens
  siRNA target sequence for GALNT5 (NM_014568.1,2203-2221).
cctccagatgtcattgcaa

SEQ ID NO: 211105 - DNA, 19 bp, Homo sapiens
  siRNA target sequence for GALNT5 (NM_014568.1,2266-2284).
gctggtggattgttttcta

SEQ ID NO: 211106 - DNA, 19 bp, Homo sapiens
  siRNA target sequence for GALNT5 (NM_014568.1,2319-2337).
cgaccctggccttgatgtt

SEQ ID NO: 211107 - DNA, 19 bp, Homo sapiens
  siRNA target sequence for GALNT5 (NM_014568.1,2320-2338).
gaccctggccttgatgttt

SEQ ID NO: 211108 - DNA, 19 bp, Homo sapiens
  siRNA target sequence for GALNT5 (NM_014568.1,2375-2393).
ggatgtgtggtggtgaaat

SEQ ID NO: 211109 - DNA, 19 bp, Homo sapiens
  siRNA target sequence for GALNT5 (NM_014568.1,2409-2427).
ctcccgagtgggccatata

SEQ ID NO: 211110 - DNA, 19 bp, Homo sapiens
  siRNA target sequence for GALNT5 (NM_014568.1,2411-2429).
cccgagtgggccatatatt

SEQ ID NO: 211111 - DNA, 19 bp, Homo sapiens
  siRNA target sequence for GALNT5 (NM_014568.1,2413-2431).
cgagtgggccatatattca

SEQ ID NO: 211112 - DNA, 19 bp, Homo sapiens
  siRNA target sequence for GALNT5 (NM_014568.1,2420-2438).
gccatatattcagaaatga

SEQ ID NO: 211113 - DNA, 19 bp, Homo sapiens
  siRNA target sequence for GALNT5 (NM_014568.1,2505-2523).
ggtctggctggatgagtat

SEQ ID NO: 211114 - DNA, 19 bp, Homo sapiens
  siRNA target sequence for GALNT5 (NM_014568.1,2559-2577).
cgaccaagggctagatgtt

SEQ ID NO: 211115 - DNA, 19 bp, Homo sapiens
  siRNA target sequence for GALNT5 (NM_014568.1,2621-2639).
gcaaaagtttcaaatggta

SEQ ID NO: 211116 - DNA, 19 bp, Homo sapiens
  siRNA target sequence for GALNT5 (NM_014568.1,2646-2664).
gaatgtctttcctgactta

SEQ ID NO: 211117 - DNA, 19 bp, Homo sapiens
  siRNA target sequence for GALNT5 (NM_014568.1,2681-2699).
gagctagtggtgtgcttat

SEQ ID NO: 211118 - DNA, 19 bp, Homo sapiens
  siRNA target sequence for GALNT5 (NM_014568.1,2687-2705).
gtggtgtgcttattaatgt

SEQ ID NO: 211119 - DNA, 19 bp, Homo sapiens
  siRNA target sequence for GALNT5 (NM_014568.1,2704-2722).
gtggctttgggtaaatgca

SEQ ID NO: 211120 - DNA, 19 bp, Homo sapiens
  siRNA target sequence for GALNT5 (NM_014568.1,2712-2730).
gggtaaatgcatttccatt

SEQ ID NO: 211121 - DNA, 19 bp, Homo sapiens
  siRNA target sequence for GALNT5 (NM_014568.1,2768-2786).
gcaaagagcttcaacaatt

SEQ ID NO: 211122 - DNA, 19 bp, Homo sapiens
  siRNA target sequence for GALNT5 (NM_014568.1,2795-2813).
cctggttaagacttattaa

SEQ ID NO: 211123 - DNA, 19 bp, Homo sapiens
  siRNA target sequence for GALNT5 (NM_014568.1,2866-2884).
cacccttgtgataacagaa

SEQ ID NO: 211124 - DNA, 19 bp, Homo sapiens
  siRNA target sequence for GALNT5 (NM_014568.1,2869-2887).
ccttgtgataacagaaaca

SEQ ID NO: 211125 - DNA, 19 bp, Homo sapiens
  siRNA target sequence for GALNT5 (NM_014568.1,2891-2909).
ggctaaaatggctgcataa

SEQ ID NO: 211126 - DNA, 19 bp, Homo sapiens
  siRNA target sequence for GALNT5 (NM_014568.1,2901-2919).
gctgcataaatcaacatca

SEQ ID NO: 211127 - DNA, 19 bp, Homo sapiens
  siRNA target sequence for GALNT5 (NM_014568.1,3031-3049).
gtgaagccatatcaaaagt

SEQ ID NO: 211128 - DNA, 19 bp, Homo sapiens
  siRNA target sequence for GALNT6 (NM_007210.2,179-197).
ccatgaacaaccttagaga

SEQ ID NO: 211129 - DNA, 19 bp, Homo sapiens
  siRNA target sequence for GALNT6 (NM_007210.2,180-198).
catgaacaaccttagagat

SEQ ID NO: 211130 - DNA, 19 bp, Homo sapiens
  siRNA target sequence for GALNT6 (NM_007210.2,407-425).
gctataagaagcactgttt

SEQ ID NO: 211131 - DNA, 19 bp, Homo sapiens
  siRNA target sequence for GALNT6 (NM_007210.2,533-551).
ccaccagcgtgatcattgt

SEQ ID NO: 211132 - DNA, 19 bp, Homo sapiens
  siRNA target sequence for GALNT6 (NM_007210.2,536-554).
ccagcgtgatcattgtgtt

SEQ ID NO: 211133 - DNA, 19 bp, Homo sapiens
  siRNA target sequence for GALNT6 (NM_007210.2,656-674).
gcacagaggagcacctaaa

SEQ ID NO: 211134 - DNA, 19 bp, Homo sapiens
  siRNA target sequence for GALNT6 (NM_007210.2,894-912).
cgtcaccatcgaccttaat

SEQ ID NO: 211135 - DNA, 19 bp, Homo sapiens
  siRNA target sequence for GALNT6 (NM_007210.2,895-913).
gtcaccatcgaccttaata

SEQ ID NO: 211136 - DNA, 19 bp, Homo sapiens
  siRNA target sequence for GALNT6 (NM_007210.2,899-917).
ccatcgaccttaatacttt

SEQ ID NO: 211137 - DNA, 19 bp, Homo sapiens
  siRNA target sequence for GALNT6 (NM_007210.2,900-918).
catcgaccttaatactttt

SEQ ID NO: 211138 - DNA, 19 bp, Homo sapiens
  siRNA target sequence for GALNT6 (NM_007210.2,904-922).
gaccttaatacttttgagt

SEQ ID NO: 211139 - DNA, 19 bp, Homo sapiens
  siRNA target sequence for GALNT6 (NM_007210.2,984-1002).
cttcggctgggaaacactt

SEQ ID NO: 211140 - DNA, 19 bp, Homo sapiens
  siRNA target sequence for GALNT6 (NM_007210.2,1101-1119).
gcacatcggtacctatgat

SEQ ID NO: 211141 - DNA, 19 bp, Homo sapiens
  siRNA target sequence for GALNT6 (NM_007210.2,1102-1120).
cacatcggtacctatgata

SEQ ID NO: 211142 - DNA, 19 bp, Homo sapiens
  siRNA target sequence for GALNT6 (NM_007210.2,1104-1122).
catcggtacctatgataat

SEQ ID NO: 211143 - DNA, 19 bp, Homo sapiens
  siRNA target sequence for GALNT6 (NM_007210.2,1108-1126).
ggtacctatgataatcaga

SEQ ID NO: 211144 - DNA, 19 bp, Homo sapiens
  siRNA target sequence for GALNT6 (NM_007210.2,1208-1226).
ctgtcgtaggccatgtgtt

SEQ ID NO: 211145 - DNA, 19 bp, Homo sapiens
  siRNA target sequence for GALNT6 (NM_007210.2,1254-1272).
caagggcactagtgtcatt

SEQ ID NO: 211146 - DNA, 19 bp, Homo sapiens
  siRNA target sequence for GALNT6 (NM_007210.2,1368-1386).
gaaatccttcggtgacatt

SEQ ID NO: 211147 - DNA, 19 bp, Homo sapiens
  siRNA target sequence for GALNT6 (NM_007210.2,1433-1451).
cctggtacctgcacaatgt

SEQ ID NO: 211148 - DNA, 19 bp, Homo sapiens
  siRNA target sequence for GALNT6 (NM_007210.2,1436-1454).
ggtacctgcacaatgtcta

SEQ ID NO: 211149 - DNA, 19 bp, Homo sapiens
  siRNA target sequence for GALNT6 (NM_007210.2,1555-1573).
gggaagcccctcatcatgt

SEQ ID NO: 211150 - DNA, 19 bp, Homo sapiens
  siRNA target sequence for GALNT6 (NM_007210.2,1556-1574).
ggaagcccctcatcatgta

SEQ ID NO: 211151 - DNA, 19 bp, Homo sapiens
  siRNA target sequence for GALNT6 (NM_007210.2,1600-1618).
cagtactttgagtacacaa

SEQ ID NO: 211152 - DNA, 19 bp, Homo sapiens
  siRNA target sequence for GALNT6 (NM_007210.2,1625-1643).
gggaccttcgccacaacat

SEQ ID NO: 211153 - DNA, 19 bp, Homo sapiens
  siRNA target sequence for GALNT6 (NM_007210.2,1699-1717).
cacttcactggcaagaata

SEQ ID NO: 211154 - DNA, 19 bp, Homo sapiens
  siRNA target sequence for GALNT7 (NM_017423.1,41-59).
gaagattgggttcatctta

SEQ ID NO: 211155 - DNA, 19 bp, Homo sapiens
  siRNA target sequence for GALNT7 (NM_017423.1,214-232).
ctggggaggacagattcaa

SEQ ID NO: 211156 - DNA, 19 bp, Homo sapiens
  siRNA target sequence for GALNT7 (NM_017423.1,270-288).
gtggacttagagtctatta

SEQ ID NO: 211157 - DNA, 19 bp, Homo sapiens
  siRNA target sequence for GALNT7 (NM_017423.1,272-290).
ggacttagagtctattaga

SEQ ID NO: 211158 - DNA, 19 bp, Homo sapiens
  siRNA target sequence for GALNT7 (NM_017423.1,273-291).
gacttagagtctattagaa

SEQ ID NO: 211159 - DNA, 19 bp, Homo sapiens
  siRNA target sequence for GALNT7 (NM_017423.1,336-354).
gattcccagaaagatatca

SEQ ID NO: 211160 - DNA, 19 bp, Homo sapiens
  siRNA target sequence for GALNT7 (NM_017423.1,418-436).
cagggatcctcggtaactt

SEQ ID NO: 211161 - DNA, 19 bp, Homo sapiens
  siRNA target sequence for GALNT7 (NM_017423.1,501-519).
gttttgggaccagaattca

SEQ ID NO: 211162 - DNA, 19 bp, Homo sapiens
  siRNA target sequence for GALNT7 (NM_017423.1,525-543).
gcaattcaagccagcatta

SEQ ID NO: 211163 - DNA, 19 bp, Homo sapiens
  siRNA target sequence for GALNT7 (NM_017423.1,526-544).
caattcaagccagcattaa

SEQ ID NO: 211164 - DNA, 19 bp, Homo sapiens
  siRNA target sequence for GALNT7 (NM_017423.1,603-621).
gacttacgccaagaagaat

SEQ ID NO: 211165 - DNA, 19 bp, Homo sapiens
  siRNA target sequence for GALNT7 (NM_017423.1,653-671).
cacttcgagcgttgtcatt

SEQ ID NO: 211166 - DNA, 19 bp, Homo sapiens
  siRNA target sequence for GALNT7 (NM_017423.1,655-673).
cttcgagcgttgtcattgt

SEQ ID NO: 211167 - DNA, 19 bp, Homo sapiens
  siRNA target sequence for GALNT7 (NM_017423.1,658-676).
cgagcgttgtcattgtctt

SEQ ID NO: 211168 - DNA, 19 bp, Homo sapiens
  siRNA target sequence for GALNT7 (NM_017423.1,663-681).
gttgtcattgtcttccata

SEQ ID NO: 211169 - DNA, 19 bp, Homo sapiens
  siRNA target sequence for GALNT7 (NM_017423.1,706-724).
gaacagtccacagtgtaat

SEQ ID NO: 211170 - DNA, 19 bp, Homo sapiens
  siRNA target sequence for GALNT7 (NM_017423.1,759-777).
gtgttaattgacgatttca

SEQ ID NO: 211171 - DNA, 19 bp, Homo sapiens
  siRNA target sequence for GALNT7 (NM_017423.1,761-779).
gttaattgacgatttcagt

SEQ ID NO: 211172 - DNA, 19 bp, Homo sapiens
  siRNA target sequence for GALNT7 (NM_017423.1,776-794).
cagtaataaagaacactta

SEQ ID NO: 211173 - DNA, 19 bp, Homo sapiens
  siRNA target sequence for GALNT7 (NM_017423.1,833-851).
cctagtgaaggtatttcga

SEQ ID NO: 211174 - DNA, 19 bp, Homo sapiens
  siRNA target sequence for GALNT7 (NM_017423.1,834-852).
ctagtgaaggtatttcgaa

SEQ ID NO: 211175 - DNA, 19 bp, Homo sapiens
  siRNA target sequence for GALNT7 (NM_017423.1,892-910).
gtgctcagaaggctaaact

SEQ ID NO: 211176 - DNA, 19 bp, Homo sapiens
  siRNA target sequence for GALNT7 (NM_017423.1,909-927).
cttggacaggttttgatat

SEQ ID NO: 211177 - DNA, 19 bp, Homo sapiens
  siRNA target sequence for GALNT7 (NM_017423.1,1006-1024).
gcactgtgccgcttataga

SEQ ID NO: 211178 - DNA, 19 bp, Homo sapiens
  siRNA target sequence for GALNT7 (NM_017423.1,1009-1027).
ctgtgccgcttatagatgt

SEQ ID NO: 211179 - DNA, 19 bp, Homo sapiens
  siRNA target sequence for GALNT7 (NM_017423.1,1013-1031).
gccgcttatagatgtcata

SEQ ID NO: 211180 - DNA, 19 bp, Homo sapiens
  siRNA target sequence for GALNT7 (NM_017423.1,1026-1044).
gtcataaatggcaacacat

SEQ ID NO: 211181 - DNA, 19 bp, Homo sapiens
  siRNA target sequence for GALNT7 (NM_017423.1,1188-1206).
gccatggctgggggattat

SEQ ID NO: 211182 - DNA, 19 bp, Homo sapiens
  siRNA target sequence for GALNT7 (NM_017423.1,1210-1228).
ccattgaacgagagttctt

SEQ ID NO: 211183 - DNA, 19 bp, Homo sapiens
  siRNA target sequence for GALNT7 (NM_017423.1,1269-1287).
ggtggtgaaaactttgaga

SEQ ID NO: 211184 - DNA, 19 bp, Homo sapiens
  siRNA target sequence for GALNT7 (NM_017423.1,1270-1288).
gtggtgaaaactttgagat

SEQ ID NO: 211185 - DNA, 19 bp, Homo sapiens
  siRNA target sequence for GALNT7 (NM_017423.1,1275-1293).
gaaaactttgagatctcat

SEQ ID NO: 211186 - DNA, 19 bp, Homo sapiens
  siRNA target sequence for GALNT7 (NM_017423.1,1312-1330).
gtggcaaattattatttgt

SEQ ID NO: 211187 - DNA, 19 bp, Homo sapiens
  siRNA target sequence for GALNT7 (NM_017423.1,1336-1354).
gttctcgtgttggacatat

SEQ ID NO: 211188 - DNA, 19 bp, Homo sapiens
  siRNA target sequence for GALNT7 (NM_017423.1,1339-1357).
ctcgtgttggacatatcta

SEQ ID NO: 211189 - DNA, 19 bp, Homo sapiens
  siRNA target sequence for GALNT7 (NM_017423.1,1378-1396).
gaaatcctccgcccattta

SEQ ID NO: 211190 - DNA, 19 bp, Homo sapiens
  siRNA target sequence for GALNT7 (NM_017423.1,1418-1436).
gaagaattatgttagagtt

SEQ ID NO: 211191 - DNA, 19 bp, Homo sapiens
  siRNA target sequence for GALNT7 (NM_017423.1,1488-1506).
gaatcgcaggcattaccat

SEQ ID NO: 211192 - DNA, 19 bp, Homo sapiens
  siRNA target sequence for GALNT7 (NM_017423.1,1578-1596).
gaaatagcttatgatatca

SEQ ID NO: 211193 - DNA, 19 bp, Homo sapiens
  siRNA target sequence for GALNT7 (NM_017423.1,1626-1644).
gttgactggggagaaatca

SEQ ID NO: 211194 - DNA, 19 bp, Homo sapiens
  siRNA target sequence for GALNT7 (NM_017423.1,1773-1791).
cagtatgaccagtgtttga

SEQ ID NO: 211195 - DNA, 19 bp, Homo sapiens
  siRNA target sequence for GALNT7 (NM_017423.1,1796-1814).
gggagctgatggatcaaaa

SEQ ID NO: 211196 - DNA, 19 bp, Homo sapiens
  siRNA target sequence for GALNT7 (NM_017423.1,1800-1818).
gctgatggatcaaaagtta

SEQ ID NO: 211197 - DNA, 19 bp, Homo sapiens
  siRNA target sequence for GALNT7 (NM_017423.1,1820-1838).
gattacacactgtaatcta

SEQ ID NO: 211198 - DNA, 19 bp, Homo sapiens
  siRNA target sequence for GALNT7 (NM_017423.1,1825-1843).
cacactgtaatctaaatga

SEQ ID NO: 211199 - DNA, 19 bp, Homo sapiens
  siRNA target sequence for GALNT7 (NM_017423.1,1827-1845).
cactgtaatctaaatgaat

SEQ ID NO: 211200 - DNA, 19 bp, Homo sapiens
  siRNA target sequence for GALNT7 (NM_017423.1,1851-1869).
gaatggcagtacttcaaga

SEQ ID NO: 211201 - DNA, 19 bp, Homo sapiens
  siRNA target sequence for GALNT7 (NM_017423.1,1872-1890).
ctgcacagatttactcata

SEQ ID NO: 211202 - DNA, 19 bp, Homo sapiens
  siRNA target sequence for GALNT7 (NM_017423.1,1877-1895).
cagatttactcatattcct

SEQ ID NO: 211203 - DNA, 19 bp, Homo sapiens
  siRNA target sequence for GALNT7 (NM_017423.1,1923-1941).
gtcctgcatcaagtattca

SEQ ID NO: 211204 - DNA, 19 bp, Homo sapiens
  siRNA target sequence for GALNT7 (NM_017423.1,1946-1964).
caattgtgactccagtaaa

SEQ ID NO: 211205 - DNA, 19 bp, Homo sapiens
  siRNA target sequence for GALNT7 (NM_017423.1,1957-1975).
ccagtaaaacgactcaaaa

SEQ ID NO: 211206 - DNA, 19 bp, Homo sapiens
  siRNA target sequence for GALNT7 (NM_017423.1,1985-2003).
gaataacatccatagtgtt

SEQ ID NO: 211207 - DNA, 19 bp, Homo sapiens
  siRNA target sequence for GALNT8 (NM_017417.1,175-193).
ctagcaaggggactttaca

SEQ ID NO: 211208 - DNA, 19 bp, Homo sapiens
  siRNA target sequence for GALNT8 (NM_017417.1,215-233).
ccacagggagcttccttta

SEQ ID NO: 211209 - DNA, 19 bp, Homo sapiens
  siRNA target sequence for GALNT8 (NM_017417.1,218-236).
cagggagcttcctttacat

SEQ ID NO: 211210 - DNA, 19 bp, Homo sapiens
  siRNA target sequence for GALNT8 (NM_017417.1,293-311).
gcaggatctgaaagaaagt

SEQ ID NO: 211211 - DNA, 19 bp, Homo sapiens
  siRNA target sequence for GALNT8 (NM_017417.1,294-312).
caggatctgaaagaaagta

SEQ ID NO: 211212 - DNA, 19 bp, Homo sapiens
  siRNA target sequence for GALNT8 (NM_017417.1,359-377).
gagggcgaaagatgaagta

SEQ ID NO: 211213 - DNA, 19 bp, Homo sapiens
  siRNA target sequence for GALNT8 (NM_017417.1,372-390).
gaagtacgccctcttctaa

SEQ ID NO: 211214 - DNA, 19 bp, Homo sapiens
  siRNA target sequence for GALNT8 (NM_017417.1,471-489).
caatggggcgaggatcttt

SEQ ID NO: 211215 - DNA, 19 bp, Homo sapiens
  siRNA target sequence for GALNT8 (NM_017417.1,475-493).
ggggcgaggatctttctga

SEQ ID NO: 211216 - DNA, 19 bp, Homo sapiens
  siRNA target sequence for GALNT8 (NM_017417.1,554-572).
caaccagctgcctctcaat

SEQ ID NO: 211217 - DNA, 19 bp, Homo sapiens
  siRNA target sequence for GALNT8 (NM_017417.1,585-603).
gacacgcgagactacagat

SEQ ID NO: 211218 - DNA, 19 bp, Homo sapiens
  siRNA target sequence for GALNT8 (NM_017417.1,590-608).
gcgagactacagatgtctt

SEQ ID NO: 211219 - DNA, 19 bp, Homo sapiens
  siRNA target sequence for GALNT8 (NM_017417.1,606-624).
cttcggaagacatatcctt

SEQ ID NO: 211220 - DNA, 19 bp, Homo sapiens
  siRNA target sequence for GALNT8 (NM_017417.1,643-661).
gtgtcattctcatattcgt

SEQ ID NO: 211221 - DNA, 19 bp, Homo sapiens
  siRNA target sequence for GALNT8 (NM_017417.1,687-705).
cgggccatcaccagtatca

SEQ ID NO: 211222 - DNA, 19 bp, Homo sapiens
  siRNA target sequence for GALNT8 (NM_017417.1,688-706).
gggccatcaccagtatcat

SEQ ID NO: 211223 - DNA, 19 bp, Homo sapiens
  siRNA target sequence for GALNT8 (NM_017417.1,712-730).
ggacgccctctcgattgtt

SEQ ID NO: 211224 - DNA, 19 bp, Homo sapiens
  siRNA target sequence for GALNT8 (NM_017417.1,769-787).
gagaactaaaggtacactt

SEQ ID NO: 211225 - DNA, 19 bp, Homo sapiens
  siRNA target sequence for GALNT8 (NM_017417.1,984-1002).
gaccgcactgtgattgtgt

SEQ ID NO: 211226 - DNA, 19 bp, Homo sapiens
  siRNA target sequence for GALNT8 (NM_017417.1,1008-1026).
gtgtttgacaacattcgtt

SEQ ID NO: 211227 - DNA, 19 bp, Homo sapiens
  siRNA target sequence for GALNT8 (NM_017417.1,1010-1028).
gtttgacaacattcgtttt

SEQ ID NO: 211228 - DNA, 19 bp, Homo sapiens
  siRNA target sequence for GALNT8 (NM_017417.1,1024-1042).
gttttgacaccttcaaact

SEQ ID NO: 211229 - DNA, 19 bp, Homo sapiens
  siRNA target sequence for GALNT8 (NM_017417.1,1033-1051).
ccttcaaactggataagta

SEQ ID NO: 211230 - DNA, 19 bp, Homo sapiens
  siRNA target sequence for GALNT8 (NM_017417.1,1034-1052).
cttcaaactggataagtat

SEQ ID NO: 211231 - DNA, 19 bp, Homo sapiens
  siRNA target sequence for GALNT8 (NM_017417.1,1049-1067).
gtatgaactggcagttgat

SEQ ID NO: 211232 - DNA, 19 bp, Homo sapiens
  siRNA target sequence for GALNT8 (NM_017417.1,1059-1077).
gcagttgatgggtttaact

SEQ ID NO: 211233 - DNA, 19 bp, Homo sapiens
  siRNA target sequence for GALNT8 (NM_017417.1,1117-1135).
ggattgatctgcatgatgt

SEQ ID NO: 211234 - DNA, 19 bp, Homo sapiens
  siRNA target sequence for GALNT8 (NM_017417.1,1279-1297).
gagggaaggtcgagatttt

SEQ ID NO: 211235 - DNA, 19 bp, Homo sapiens
  siRNA target sequence for GALNT8 (NM_017417.1,1464-1482).
gattttggagacgtttctt

SEQ ID NO: 211236 - DNA, 19 bp, Homo sapiens
  siRNA target sequence for GALNT8 (NM_017417.1,1496-1514).
ccgggaaaaactgaaatgt

SEQ ID NO: 211237 - DNA, 19 bp, Homo sapiens
  siRNA target sequence for GALNT8 (NM_017417.1,1584-1602).
ggaagaatgaaaaacctat

SEQ ID NO: 211238 - DNA, 19 bp, Homo sapiens
  siRNA target sequence for GALNT8 (NM_017417.1,1643-1661).
caacacccccatcatgtat

SEQ ID NO: 211239 - DNA, 19 bp, Homo sapiens
  siRNA target sequence for GALNT8 (NM_017417.1,1678-1696).
gctcacagaatgtctacta

SEQ ID NO: 211240 - DNA, 19 bp, Homo sapiens
  siRNA target sequence for GALNT8 (NM_017417.1,1816-1834).
ctaagaatagactgcatat

SEQ ID NO: 211241 - DNA, 19 bp, Homo sapiens
  siRNA target sequence for GALNT8 (NM_017417.1,1851-1869).
ccgggaggagctgtcataa

SEQ ID NO: 211242 - DNA, 19 bp, Homo sapiens
  siRNA target sequence for GALNT8 (NM_017417.1,1852-1870).
cgggaggagctgtcataaa

SEQ ID NO: 211243 - DNA, 19 bp, Homo sapiens
  siRNA target sequence for GALNT8 (NM_017417.1,1854-1872).
ggaggagctgtcataaaca

SEQ ID NO: 211244 - DNA, 19 bp, Homo sapiens
  siRNA target sequence for GALNT9 (NM_021808.2,328-346).
cctacaacaacgacattga

SEQ ID NO: 211245 - DNA, 19 bp, Homo sapiens
  siRNA target sequence for GALNT9 (NM_021808.2,538-556).
cggagatgagggtctacaa

SEQ ID NO: 211246 - DNA, 19 bp, Homo sapiens
  siRNA target sequence for GALNT9 (NM_021808.2,540-558).
gagatgagggtctacaaca

SEQ ID NO: 211247 - DNA, 19 bp, Homo sapiens
  siRNA target sequence for GALNT9 (NM_021808.2,568-586).
cgtacggagaggtgagaaa

SEQ ID NO: 211248 - DNA, 19 bp, Homo sapiens
  siRNA target sequence for GALGT (NM_001478.2,577-595).
gcccgagctgccagatctt

SEQ ID NO: 211249 - DNA, 19 bp, Homo sapiens
  siRNA target sequence for GALGT (NM_001478.2,630-648).
ggatcaaggagcaagtagt

SEQ ID NO: 211250 - DNA, 19 bp, Homo sapiens
  siRNA target sequence for GALGT (NM_001478.2,653-671).
ctgctggcttggaacaact

SEQ ID NO: 211251 - DNA, 19 bp, Homo sapiens
  siRNA target sequence for GALGT (NM_001478.2,715-733).
gaaacaagtccgagctatt

SEQ ID NO: 211252 - DNA, 19 bp, Homo sapiens
  siRNA target sequence for GALGT (NM_001478.2,945-963).
ctggtcaggaggtatacca

SEQ ID NO: 211253 - DNA, 19 bp, Homo sapiens
  siRNA target sequence for GALGT (NM_001478.2,1091-1109).
ctacaactggtcacttaca

SEQ ID NO: 211254 - DNA, 19 bp, Homo sapiens
  siRNA target sequence for GALGT (NM_001478.2,1166-1184).
catgaggctgctttcacta

SEQ ID NO: 211255 - DNA, 19 bp, Homo sapiens
  siRNA target sequence for GALGT (NM_001478.2,1285-1303).
gaccttcctccgttatgat

SEQ ID NO: 211256 - DNA, 19 bp, Homo sapiens
  siRNA target sequence for GALGT (NM_001478.2,1398-1416).
gcccctacgtggaacacta

SEQ ID NO: 211257 - DNA, 19 bp, Homo sapiens
  siRNA target sequence for GALGT (NM_001478.2,1401-1419).
cctacgtggaacactatct

SEQ ID NO: 211258 - DNA, 19 bp, Homo sapiens
  siRNA target sequence for GALGT (NM_001478.2,1456-1474).
cctggccgtgtctcaagta

SEQ ID NO: 211259 - DNA, 19 bp, Homo sapiens
  siRNA target sequence for GALGT (NM_001478.2,1457-1475).
ctggccgtgtctcaagtaa

SEQ ID NO: 211260 - DNA, 19 bp, Homo sapiens
  siRNA target sequence for GALGT (NM_001478.2,1603-1621).
cggctttgccaccacttat

SEQ ID NO: 211261 - DNA, 19 bp, Homo sapiens
  siRNA target sequence for GALGT (NM_001478.2,1728-1746).
ccgacggcgtggttaactt

SEQ ID NO: 211262 - DNA, 19 bp, Homo sapiens
  siRNA target sequence for GALGT (NM_001478.2,1803-1821).
gcgtggctcatctggaatt

SEQ ID NO: 211263 - DNA, 19 bp, Homo sapiens
  siRNA target sequence for GALGT (NM_001478.2,1805-1823).
gtggctcatctggaattct

SEQ ID NO: 211264 - DNA, 19 bp, Homo sapiens
  siRNA target sequence for GALGT (NM_001478.2,1873-1891).
ggtggatcatgcatccaaa

SEQ ID NO: 211265 - DNA, 19 bp, Homo sapiens
  siRNA target sequence for GALGT (NM_001478.2,1877-1895).
gatcatgcatccaaactga

SEQ ID NO: 211266 - DNA, 19 bp, Homo sapiens
  siRNA target sequence for DDOST (NM_005216.3,262-280).
gctttgagctcacattcaa

SEQ ID NO: 211267 - DNA, 19 bp, Homo sapiens
  siRNA target sequence for DDOST (NM_005216.3,298-316).
gcctgtctctcataaagta

SEQ ID NO: 211268 - DNA, 19 bp, Homo sapiens
  siRNA target sequence for DDOST (NM_005216.3,319-337).
gggaattcctctatgacaa

SEQ ID NO: 211269 - DNA, 19 bp, Homo sapiens
  siRNA target sequence for DDOST (NM_005216.3,320-338).
ggaattcctctatgacaat

SEQ ID NO: 211270 - DNA, 19 bp, Homo sapiens
  siRNA target sequence for DDOST (NM_005216.3,329-347).
ctatgacaatctcatcatt

SEQ ID NO: 211271 - DNA, 19 bp, Homo sapiens
  siRNA target sequence for DDOST (NM_005216.3,350-368).
ctccccttcggtagaagat

SEQ ID NO: 211272 - DNA, 19 bp, Homo sapiens
  siRNA target sequence for DDOST (NM_005216.3,353-371).
cccttcggtagaagatttt

SEQ ID NO: 211273 - DNA, 19 bp, Homo sapiens
  siRNA target sequence for DDOST (NM_005216.3,478-496).
gtgagtgcgggattgagtt

SEQ ID NO: 211274 - DNA, 19 bp, Homo sapiens
  siRNA target sequence for DDOST (NM_005216.3,514-532).
ctgtcattgaccatcacaa

SEQ ID NO: 211275 - DNA, 19 bp, Homo sapiens
  siRNA target sequence for DDOST (NM_005216.3,522-540).
gaccatcacaactatgaca

SEQ ID NO: 211276 - DNA, 19 bp, Homo sapiens
  siRNA target sequence for DDOST (NM_005216.3,605-623).
catcgttgggaaatcatct

SEQ ID NO: 211277 - DNA, 19 bp, Homo sapiens
  siRNA target sequence for DDOST (NM_005216.3,823-841).
gcggctccctcgacttctt

SEQ ID NO: 211278 - DNA, 19 bp, Homo sapiens
  siRNA target sequence for DDOST (NM_005216.3,1035-1053).
gacctagtggagtatagca

SEQ ID NO: 211279 - DNA, 19 bp, Homo sapiens
  siRNA target sequence for DDOST (NM_005216.3,1115-1133).
ggagtttgtccgcattgat

SEQ ID NO: 211280 - DNA, 19 bp, Homo sapiens
  siRNA target sequence for DDOST (NM_005216.3,1125-1143).
cgcattgatccttttgtga

SEQ ID NO: 211281 - DNA, 19 bp, Homo sapiens
  siRNA target sequence for RPN2 (NM_002951.2,321-339).
gttggccctgacaatcata

SEQ ID NO: 211282 - DNA, 19 bp, Homo sapiens
  siRNA target sequence for RPN2 (NM_002951.2,382-400).
catgacgtggagagactaa

SEQ ID NO: 211283 - DNA, 19 bp, Homo sapiens
  siRNA target sequence for RPN2 (NM_002951.2,409-427).
ctggatcgccctttcacaa

SEQ ID NO: 211284 - DNA, 19 bp, Homo sapiens
  siRNA target sequence for RPN2 (NM_002951.2,411-429).
ggatcgccctttcacaaat

SEQ ID NO: 211285 - DNA, 19 bp, Homo sapiens
  siRNA target sequence for RPN2 (NM_002951.2,412-430).
gatcgccctttcacaaatt

SEQ ID NO: 211286 - DNA, 19 bp, Homo sapiens
  siRNA target sequence for RPN2 (NM_002951.2,499-517).
gcatgtacctacatcagat

SEQ ID NO: 211287 - DNA, 19 bp, Homo sapiens
  siRNA target sequence for RPN2 (NM_002951.2,503-521).
gtacctacatcagatctaa

SEQ ID NO: 211288 - DNA, 19 bp, Homo sapiens
  siRNA target sequence for RPN2 (NM_002951.2,507-525).
ctacatcagatctaacctt

SEQ ID NO: 211289 - DNA, 19 bp, Homo sapiens
  siRNA target sequence for RPN2 (NM_002951.2,581-599).
caggatgtgagatctctat

SEQ ID NO: 211290 - DNA, 19 bp, Homo sapiens
  siRNA target sequence for RPN2 (NM_002951.2,583-601).
ggatgtgagatctctattt

SEQ ID NO: 211291 - DNA, 19 bp, Homo sapiens
  siRNA target sequence for RPN2 (NM_002951.2,587-605).
gtgagatctctatttcaaa

SEQ ID NO: 211292 - DNA, 19 bp, Homo sapiens
  siRNA target sequence for RPN2 (NM_002951.2,602-620).
caaatgagaccaaagatct

SEQ ID NO: 211293 - DNA, 19 bp, Homo sapiens
  siRNA target sequence for RPN2 (NM_002951.2,876-894).
cgtgtatctccagtttgaa

SEQ ID NO: 211294 - DNA, 19 bp, Homo sapiens
  siRNA target sequence for RPN2 (NM_002951.2,994-1012).
ctgatgaacgcgatcttca

SEQ ID NO: 211295 - DNA, 19 bp, Homo sapiens
  siRNA target sequence for RPN2 (NM_002951.2,1008-1026).
cttcagcaagaagaacttt

SEQ ID NO: 211296 - DNA, 19 bp, Homo sapiens
  siRNA target sequence for RPN2 (NM_002951.2,1133-1151).
ctcatgaacaggctatctt

SEQ ID NO: 211297 - DNA, 19 bp, Homo sapiens
  siRNA target sequence for RPN2 (NM_002951.2,1186-1204).
ctgactcaggccactgtta

SEQ ID NO: 211298 - DNA, 19 bp, Homo sapiens
  siRNA target sequence for RPN2 (NM_002951.2,1190-1208).
ctcaggccactgttaaact

SEQ ID NO: 211299 - DNA, 19 bp, Homo sapiens
  siRNA target sequence for RPN2 (NM_002951.2,1194-1212).
ggccactgttaaactagaa

SEQ ID NO: 211300 - DNA, 19 bp, Homo sapiens
  siRNA target sequence for RPN2 (NM_002951.2,1196-1214).
ccactgttaaactagaaca

SEQ ID NO: 211301 - DNA, 19 bp, Homo sapiens
  siRNA target sequence for RPN2 (NM_002951.2,1265-1283).
cccctgtaggggatgtttt

SEQ ID NO: 211302 - DNA, 19 bp, Homo sapiens
  siRNA target sequence for RPN2 (NM_002951.2,1279-1297).
gtttttgaactaaatttca

SEQ ID NO: 211303 - DNA, 19 bp, Homo sapiens
  siRNA target sequence for RPN2 (NM_002951.2,1351-1369).
gacaaccggtatattgcaa

SEQ ID NO: 211304 - DNA, 19 bp, Homo sapiens
  siRNA target sequence for RPN2 (NM_002951.2,1410-1428).
catcacaaatgttgatctt

SEQ ID NO: 211305 - DNA, 19 bp, Homo sapiens
  siRNA target sequence for RPN2 (NM_002951.2,1449-1467).
gagcattgcacccaaaact

SEQ ID NO: 211306 - DNA, 19 bp, Homo sapiens
  siRNA target sequence for RPN2 (NM_002951.2,1511-1529).
cagacagccaccagaactt

SEQ ID NO: 211307 - DNA, 19 bp, Homo sapiens
  siRNA target sequence for RPN2 (NM_002951.2,1522-1540).
cagaacttcgccttgttct

SEQ ID NO: 211308 - DNA, 19 bp, Homo sapiens
  siRNA target sequence for RPN2 (NM_002951.2,1589-1607).
catttgtccgactccataa

SEQ ID NO: 211309 - DNA, 19 bp, Homo sapiens
  siRNA target sequence for RPN2 (NM_002951.2,1656-1674).
gaacgtgtacaagtttgaa

SEQ ID NO: 211310 - DNA, 19 bp, Homo sapiens
  siRNA target sequence for RPN2 (NM_002951.2,1719-1737).
cacctacactctctactta

SEQ ID NO: 211311 - DNA, 19 bp, Homo sapiens
  siRNA target sequence for RPN2 (NM_002951.2,1721-1739).
cctacactctctacttaat

SEQ ID NO: 211312 - DNA, 19 bp, Homo sapiens
  siRNA target sequence for RPN2 (NM_002951.2,1828-1846).
gtcttgtcccagaaccttt

SEQ ID NO: 211313 - DNA, 19 bp, Homo sapiens
  siRNA target sequence for RPN2 (NM_002951.2,1900-1918).
cccaccgtggtgtccaata

SEQ ID NO: 211314 - DNA, 19 bp, Homo sapiens
  siRNA target sequence for RPN2 (NM_002951.2,1904-1922).
ccgtggtgtccaatacatt

SEQ ID NO: 211315 - DNA, 19 bp, Homo sapiens
  siRNA target sequence for RPN2 (NM_002951.2,1906-1924).
gtggtgtccaatacattca

SEQ ID NO: 211316 - DNA, 19 bp, Homo sapiens
  siRNA target sequence for RPN2 (NM_002951.2,1972-1990).
cggattggtgccaatgtct

SEQ ID NO: 211317 - DNA, 19 bp, Homo sapiens
  siRNA target sequence for RPN2 (NM_002951.2,1989-2007).
ctccaacttcacttttgct

SEQ ID NO: 211318 - DNA, 19 bp, Homo sapiens
  siRNA target sequence for RPN2 (NM_002951.2,2005-2023).
gctcctagcacgattatat

SEQ ID NO: 211319 - DNA, 19 bp, Homo sapiens
  siRNA target sequence for RPN2 (NM_002951.2,2006-2024).
ctcctagcacgattatatt

SEQ ID NO: 211320 - DNA, 19 bp, Homo sapiens
  siRNA target sequence for RPN2 (NM_002951.2,2009-2027).
ctagcacgattatatttca

SEQ ID NO: 211321 - DNA, 19 bp, Homo sapiens
  siRNA target sequence for RPN2 (NM_002951.2,2042-2060).
ctatgctgggactcatgta

SEQ ID NO: 211322 - DNA, 19 bp, Homo sapiens
  siRNA target sequence for ALG5 (NM_013338.3,90-108).
ccgcagccctcgtactgat

SEQ ID NO: 211323 - DNA, 19 bp, Homo sapiens
  siRNA target sequence for ALG5 (NM_013338.3,91-109).
cgcagccctcgtactgatt

SEQ ID NO: 211324 - DNA, 19 bp, Homo sapiens
  siRNA target sequence for ALG5 (NM_013338.3,92-110).
gcagccctcgtactgattt

SEQ ID NO: 211325 - DNA, 19 bp, Homo sapiens
  siRNA target sequence for ALG5 (NM_013338.3,95-113).
gccctcgtactgatttcca

SEQ ID NO: 211326 - DNA, 19 bp, Homo sapiens
  siRNA target sequence for ALG5 (NM_013338.3,96-114).
ccctcgtactgatttccat

SEQ ID NO: 211327 - DNA, 19 bp, Homo sapiens
  siRNA target sequence for ALG5 (NM_013338.3,112-130).
catcgttgcatttacaact

SEQ ID NO: 211328 - DNA, 19 bp, Homo sapiens
  siRNA target sequence for ALG5 (NM_013338.3,147-165).
cactccatcgacatgaaga

SEQ ID NO: 211329 - DNA, 19 bp, Homo sapiens
  siRNA target sequence for ALG5 (NM_013338.3,220-238).
ggactcacctaccaaacaa

SEQ ID NO: 211330 - DNA, 19 bp, Homo sapiens
  siRNA target sequence for ALG5 (NM_013338.3,243-261).
ctgtcgttgtgccttcata

SEQ ID NO: 211331 - DNA, 19 bp, Homo sapiens
  siRNA target sequence for ALG5 (NM_013338.3,428-446).
gacaaagtacgtgtgataa

SEQ ID NO: 211332 - DNA, 19 bp, Homo sapiens
  siRNA target sequence for ALG5 (NM_013338.3,477-495).
cgattagaatgggtatatt

SEQ ID NO: 211333 - DNA, 19 bp, Homo sapiens
  siRNA target sequence for ALG5 (NM_013338.3,498-516).
gttctcgaggagaaaagat

SEQ ID NO: 211334 - DNA, 19 bp, Homo sapiens
  siRNA target sequence for ALG5 (NM_013338.3,531-549).
ctgatggagccacaaagtt

SEQ ID NO: 211335 - DNA, 19 bp, Homo sapiens
  siRNA target sequence for ALG5 (NM_013338.3,621-639).
gtggatctcgagctcattt

SEQ ID NO: 211336 - DNA, 19 bp, Homo sapiens
  siRNA target sequence for ALG5 (NM_013338.3,624-642).
gatctcgagctcatttaga

SEQ ID NO: 211337 - DNA, 19 bp, Homo sapiens
  siRNA target sequence for ALG5 (NM_013338.3,627-645).
ctcgagctcatttagaaaa

SEQ ID NO: 211338 - DNA, 19 bp, Homo sapiens
  siRNA target sequence for ALG5 (NM_013338.3,651-669).
caattgctcagcgttctta

SEQ ID NO: 211339 - DNA, 19 bp, Homo sapiens
  siRNA target sequence for ALG5 (NM_013338.3,739-757).
cacacagtgtgggttcaaa

SEQ ID NO: 211340 - DNA, 19 bp, Homo sapiens
  siRNA target sequence for ALG5 (NM_013338.3,741-759).
cacagtgtgggttcaaatt

SEQ ID NO: 211341 - DNA, 19 bp, Homo sapiens
  siRNA target sequence for ALG5 (NM_013338.3,743-761).
cagtgtgggttcaaattat

SEQ ID NO: 211342 - DNA, 19 bp, Homo sapiens
  siRNA target sequence for ALG5 (NM_013338.3,773-791).
gcagcttcacggacgtttt

SEQ ID NO: 211343 - DNA, 19 bp, Homo sapiens
  siRNA target sequence for ALG5 (NM_013338.3,776-794).
gcttcacggacgttttcat

SEQ ID NO: 211344 - DNA, 19 bp, Homo sapiens
  siRNA target sequence for ALG5 (NM_013338.3,810-828).
gatgggcatttgatgtaga

SEQ ID NO: 211345 - DNA, 19 bp, Homo sapiens
  siRNA target sequence for ALG5 (NM_013338.3,816-834).
catttgatgtagaactact

SEQ ID NO: 211346 - DNA, 19 bp, Homo sapiens
  siRNA target sequence for ALG5 (NM_013338.3,835-853).
gtacatagcacagttcttt

SEQ ID NO: 211347 - DNA, 19 bp, Homo sapiens
  siRNA target sequence for ALG5 (NM_013338.3,927-945).
ggctacaaatgggtaaaga

SEQ ID NO: 211348 - DNA, 19 bp, Homo sapiens
  siRNA target sequence for ALG5 (NM_013338.3,937-955).
gggtaaagacctacttttt

SEQ ID NO: 211349 - DNA, 19 bp, Homo sapiens
  siRNA target sequence for ALG6 (NM_013339.2,298-316).
ggttttaataggactaaca

SEQ ID NO: 211350 - DNA, 19 bp, Homo sapiens
  siRNA target sequence for ALG6 (NM_013339.2,327-345).
cagtgtctcttaattctta

SEQ ID NO: 211351 - DNA, 19 bp, Homo sapiens
  siRNA target sequence for ALG6 (NM_013339.2,354-372).
ctggtaaaccgcctatgtt

SEQ ID NO: 211352 - DNA, 19 bp, Homo sapiens
  siRNA target sequence for ALG6 (NM_013339.2,363-381).
cgcctatgtttggtgatta

SEQ ID NO: 211353 - DNA, 19 bp, Homo sapiens
  siRNA target sequence for ALG6 (NM_013339.2,364-382).
gcctatgtttggtgattat

SEQ ID NO: 211354 - DNA, 19 bp, Homo sapiens
  siRNA target sequence for ALG6 (NM_013339.2,422-440).
ccggtcaaacaatggtatt

SEQ ID NO: 211355 - DNA, 19 bp, Homo sapiens
  siRNA target sequence for ALG6 (NM_013339.2,423-441).
cggtcaaacaatggtattt

SEQ ID NO: 211356 - DNA, 19 bp, Homo sapiens
  siRNA target sequence for ALG6 (NM_013339.2,425-443).
gtcaaacaatggtatttta

SEQ ID NO: 211357 - DNA, 19 bp, Homo sapiens
  siRNA target sequence for ALG6 (NM_013339.2,447-465).
gcagtgataacaatttaca

SEQ ID NO: 211358 - DNA, 19 bp, Homo sapiens
  siRNA target sequence for ALG6 (NM_013339.2,478-496).
ggattacccacctcttaca

SEQ ID NO: 211359 - DNA, 19 bp, Homo sapiens
  siRNA target sequence for ALG6 (NM_013339.2,484-502).
cccacctcttacagcttat

SEQ ID NO: 211360 - DNA, 19 bp, Homo sapiens
  siRNA target sequence for ALG6 (NM_013339.2,486-504).
cacctcttacagcttatca

SEQ ID NO: 211361 - DNA, 19 bp, Homo sapiens
  siRNA target sequence for ALG6 (NM_013339.2,488-506).
cctcttacagcttatcata

SEQ ID NO: 211362 - DNA, 19 bp, Homo sapiens
  siRNA target sequence for ALG6 (NM_013339.2,550-568).
gattgctctccatacatca

SEQ ID NO: 211363 - DNA, 19 bp, Homo sapiens
  siRNA target sequence for ALG6 (NM_013339.2,559-577).
ccatacatcacgtggatat

SEQ ID NO: 211364 - DNA, 19 bp, Homo sapiens
  siRNA target sequence for ALG6 (NM_013339.2,598-616).
cttcatgcgtacaacagtt

SEQ ID NO: 211365 - DNA, 19 bp, Homo sapiens
  siRNA target sequence for ALG6 (NM_013339.2,601-619).
catgcgtacaacagtttta

SEQ ID NO: 211366 - DNA, 19 bp, Homo sapiens
  siRNA target sequence for ALG6 (NM_013339.2,604-622).
gcgtacaacagttttaatt

SEQ ID NO: 211367 - DNA, 19 bp, Homo sapiens
  siRNA target sequence for ALG6 (NM_013339.2,644-662).
cctgcagtggttttgtact

SEQ ID NO: 211368 - DNA, 19 bp, Homo sapiens
  siRNA target sequence for ALG6 (NM_013339.2,647-665).
gcagtggttttgtactgtt

SEQ ID NO: 211369 - DNA, 19 bp, Homo sapiens
  siRNA target sequence for ALG6 (NM_013339.2,663-681).
gttgttgcttaaaagaaat

SEQ ID NO: 211370 - DNA, 19 bp, Homo sapiens
  siRNA target sequence for ALG6 (NM_013339.2,691-709).
gaaaaagattgctaatgca

SEQ ID NO: 211371 - DNA, 19 bp, Homo sapiens
  siRNA target sequence for ALG6 (NM_013339.2,721-739).
gctgtatccaggccttatt

SEQ ID NO: 211372 - DNA, 19 bp, Homo sapiens
  siRNA target sequence for ALG6 (NM_013339.2,729-747).
caggccttattcttataga

SEQ ID NO: 211373 - DNA, 19 bp, Homo sapiens
  siRNA target sequence for ALG6 (NM_013339.2,731-749).
ggccttattcttatagact

SEQ ID NO: 211374 - DNA, 19 bp, Homo sapiens
  siRNA target sequence for ALG6 (NM_013339.2,746-764).
gactatggacattttcaat

SEQ ID NO: 211375 - DNA, 19 bp, Homo sapiens
  siRNA target sequence for ALG6 (NM_013339.2,748-766).
ctatggacattttcaatat

SEQ ID NO: 211376 - DNA, 19 bp, Homo sapiens
  siRNA target sequence for ALG6 (NM_013339.2,773-791).
gtgagtcttggctttgctt

SEQ ID NO: 211377 - DNA, 19 bp, Homo sapiens
  siRNA target sequence for ALG6 (NM_013339.2,796-814).
gggtgttcttggaatatct

SEQ ID NO: 211378 - DNA, 19 bp, Homo sapiens
  siRNA target sequence for ALG6 (NM_013339.2,797-815).
ggtgttcttggaatatctt

SEQ ID NO: 211379 - DNA, 19 bp, Homo sapiens
  siRNA target sequence for ALG6 (NM_013339.2,948-966).
ggtttgtgttgctagttaa

SEQ ID NO: 211380 - DNA, 19 bp, Homo sapiens
  siRNA target sequence for ALG6 (NM_013339.2,1036-1054).
cctgcaggttctaagaaga

SEQ ID NO: 211381 - DNA, 19 bp, Homo sapiens
  siRNA target sequence for ALG6 (NM_013339.2,1060-1078).
cccggttgatcgtggatta

SEQ ID NO: 211382 - DNA, 19 bp, Homo sapiens
  siRNA target sequence for ALG6 (NM_013339.2,1061-1079).
ccggttgatcgtggattat

SEQ ID NO: 211383 - DNA, 19 bp, Homo sapiens
  siRNA target sequence for ALG6 (NM_013339.2,1063-1081).
ggttgatcgtggattattt

SEQ ID NO: 211384 - DNA, 19 bp, Homo sapiens
  siRNA target sequence for ALG6 (NM_013339.2,1084-1102).
ggataaagtagccaatatt

SEQ ID NO: 211385 - DNA, 19 bp, Homo sapiens
  siRNA target sequence for ALG6 (NM_013339.2,1110-1128).
gcttcaatgtctttctgaa

SEQ ID NO: 211386 - DNA, 19 bp, Homo sapiens
  siRNA target sequence for ALG6 (NM_013339.2,1144-1162).
gccacgtcacatccaatta

SEQ ID NO: 211387 - DNA, 19 bp, Homo sapiens
  siRNA target sequence for ALG6 (NM_013339.2,1145-1163).
ccacgtcacatccaattaa

SEQ ID NO: 211388 - DNA, 19 bp, Homo sapiens
  siRNA target sequence for ALG6 (NM_013339.2,1146-1164).
cacgtcacatccaattaat

SEQ ID NO: 211389 - DNA, 19 bp, Homo sapiens
  siRNA target sequence for ALG6 (NM_013339.2,1157-1175).
caattaataatgagctttt

SEQ ID NO: 211390 - DNA, 19 bp, Homo sapiens
  siRNA target sequence for ALG6 (NM_013339.2,1199-1217).
cctgcatgcataaaattaa

SEQ ID NO: 211391 - DNA, 19 bp, Homo sapiens
  siRNA target sequence for ALG6 (NM_013339.2,1223-1241).
cagccctcttccaaaggat

SEQ ID NO: 211392 - DNA, 19 bp, Homo sapiens
  siRNA target sequence for ALG6 (NM_013339.2,1260-1278).
gctgtgcgctatcattctt

SEQ ID NO: 211393 - DNA, 19 bp, Homo sapiens
  siRNA target sequence for ALG6 (NM_013339.2,1265-1283).
gcgctatcattctttttat

SEQ ID NO: 211394 - DNA, 19 bp, Homo sapiens
  siRNA target sequence for ALG6 (NM_013339.2,1384-1402).
gtcaacatttagtatgcta

SEQ ID NO: 211395 - DNA, 19 bp, Homo sapiens
  siRNA target sequence for ALG6 (NM_013339.2,1433-1451).
ccctctgttgtgacaacaa

SEQ ID NO: 211396 - DNA, 19 bp, Homo sapiens
  siRNA target sequence for ALG6 (NM_013339.2,1514-1532).
ctgcagttgaaatcctttt

SEQ ID NO: 211397 - DNA, 19 bp, Homo sapiens
  siRNA target sequence for ALG6 (NM_013339.2,1517-1535).
cagttgaaatccttttcca

SEQ ID NO: 211398 - DNA, 19 bp, Homo sapiens
  siRNA target sequence for ALG6 (NM_013339.2,1619-1637).
gtgcttctgacgttgatga

SEQ ID NO: 211399 - DNA, 19 bp, Homo sapiens
  siRNA target sequence for ALG6 (NM_013339.2,1648-1666).
ggatcctcctcagaaacta

SEQ ID NO: 211400 - DNA, 19 bp, Homo sapiens
  siRNA target sequence for ALG6 (NM_013339.2,1660-1678).
gaaactaccggacttgttt

SEQ ID NO: 211401 - DNA, 19 bp, Homo sapiens
  siRNA target sequence for ALG6 (NM_013339.2,1715-1733).
ctgttcttcttggtatact

SEQ ID NO: 211402 - DNA, 19 bp, Homo sapiens
  siRNA target sequence for ITM1 (NM_152713.2,139-157).
cacttttgaagcttctcat

SEQ ID NO: 211403 - DNA, 19 bp, Homo sapiens
  siRNA target sequence for ITM1 (NM_152713.2,197-215).
gtttgctgtcctgagattt

SEQ ID NO: 211404 - DNA, 19 bp, Homo sapiens
  siRNA target sequence for ITM1 (NM_152713.2,201-219).
gctgtcctgagatttgaaa

SEQ ID NO: 211405 - DNA, 19 bp, Homo sapiens
  siRNA target sequence for ITM1 (NM_152713.2,206-224).
cctgagatttgaaagtgtt

SEQ ID NO: 211406 - DNA, 19 bp, Homo sapiens
  siRNA target sequence for ITM1 (NM_152713.2,231-249).
gagtttgatccgtacttta

SEQ ID NO: 211407 - DNA, 19 bp, Homo sapiens
  siRNA target sequence for ITM1 (NM_152713.2,233-251).
gtttgatccgtactttaat

SEQ ID NO: 211408 - DNA, 19 bp, Homo sapiens
  siRNA target sequence for ITM1 (NM_152713.2,272-290).
ggctgaggaggggttttat

SEQ ID NO: 211409 - DNA, 19 bp, Homo sapiens
  siRNA target sequence for ITM1 (NM_152713.2,273-291).
gctgaggaggggttttata

SEQ ID NO: 211410 - DNA, 19 bp, Homo sapiens
  siRNA target sequence for ITM1 (NM_152713.2,281-299).
ggggttttataaattccat

SEQ ID NO: 211411 - DNA, 19 bp, Homo sapiens
  siRNA target sequence for ITM1 (NM_152713.2,326-344).
ccctttgggacgaatcatt

SEQ ID NO: 211412 - DNA, 19 bp, Homo sapiens
  siRNA target sequence for ITM1 (NM_152713.2,382-400).
ctgcaatctaccatgtact

SEQ ID NO: 211413 - DNA, 19 bp, Homo sapiens
  siRNA target sequence for ITM1 (NM_152713.2,389-407).
ctaccatgtactccatttt

SEQ ID NO: 211414 - DNA, 19 bp, Homo sapiens
  siRNA target sequence for ITM1 (NM_152713.2,549-567).
gtagttcctggatatatct

SEQ ID NO: 211415 - DNA, 19 bp, Homo sapiens
  siRNA target sequence for ITM1 (NM_152713.2,576-594).
gtggctggctcctatgata

SEQ ID NO: 211416 - DNA, 19 bp, Homo sapiens
  siRNA target sequence for ITM1 (NM_152713.2,578-596).
ggctggctcctatgataat

SEQ ID NO: 211417 - DNA, 19 bp, Homo sapiens
  siRNA target sequence for ITM1 (NM_152713.2,601-619).
ggattgccatcttttgcat

SEQ ID NO: 211418 - DNA, 19 bp, Homo sapiens
  siRNA target sequence for ITM1 (NM_152713.2,641-659).
gatcaaggcagtaaagact

SEQ ID NO: 211419 - DNA, 19 bp, Homo sapiens
  siRNA target sequence for ITM1 (NM_152713.2,668-686).
ctgttgggcagctaagtgt

SEQ ID NO: 211420 - DNA, 19 bp, Homo sapiens
  siRNA target sequence for ITM1 (NM_152713.2,679-697).
ctaagtgtgcccttgctta

SEQ ID NO: 211421 - DNA, 19 bp, Homo sapiens
  siRNA target sequence for ITM1 (NM_152713.2,687-705).
gcccttgcttatttctaca

SEQ ID NO: 211422 - DNA, 19 bp, Homo sapiens
  siRNA target sequence for ITM1 (NM_152713.2,715-733).
catggggaggttatgtgtt

SEQ ID NO: 211423 - DNA, 19 bp, Homo sapiens
  siRNA target sequence for ITM1 (NM_152713.2,731-749).
gttcctgatcaacttaatt

SEQ ID NO: 211424 - DNA, 19 bp, Homo sapiens
  siRNA target sequence for ITM1 (NM_152713.2,773-791).
gctcacaggccgtttctct

SEQ ID NO: 211425 - DNA, 19 bp, Homo sapiens
  siRNA target sequence for ITM1 (NM_152713.2,824-842).
ctgcctgggcactatactt

SEQ ID NO: 211426 - DNA, 19 bp, Homo sapiens
  siRNA target sequence for ITM1 (NM_152713.2,962-980).
gaatccacaacaatttgaa

SEQ ID NO: 211427 - DNA, 19 bp, Homo sapiens
  siRNA target sequence for ITM1 (NM_152713.2,1043-1061).
catgctgacaggaaaaata

SEQ ID NO: 211428 - DNA, 19 bp, Homo sapiens
  siRNA target sequence for ITM1 (NM_152713.2,1156-1174).
caacctggtcctcatacta

SEQ ID NO: 211429 - DNA, 19 bp, Homo sapiens
  siRNA target sequence for ITM1 (NM_152713.2,1159-1177).
cctggtcctcatactattt

SEQ ID NO: 211430 - DNA, 19 bp, Homo sapiens
  siRNA target sequence for ITM1 (NM_152713.2,1206-1224).
ccagttggcctctattact

SEQ ID NO: 211431 - DNA, 19 bp, Homo sapiens
  siRNA target sequence for ITM1 (NM_152713.2,1212-1230).
ggcctctattactgcttta

SEQ ID NO: 211432 - DNA, 19 bp, Homo sapiens
  siRNA target sequence for ITM1 (NM_152713.2,1238-1256).
gtctgatgcccggattttt

SEQ ID NO: 211433 - DNA, 19 bp, Homo sapiens
  siRNA target sequence for ITM1 (NM_152713.2,1242-1260).
gatgcccggatttttatca

SEQ ID NO: 211434 - DNA, 19 bp, Homo sapiens
  siRNA target sequence for ITM1 (NM_152713.2,1245-1263).
gcccggatttttatcatca

SEQ ID NO: 211435 - DNA, 19 bp, Homo sapiens
  siRNA target sequence for ITM1 (NM_152713.2,1270-1288).
gtgtgaccagcatgtactt

SEQ ID NO: 211436 - DNA, 19 bp, Homo sapiens
  siRNA target sequence for ITM1 (NM_152713.2,1272-1290).
gtgaccagcatgtactttt

SEQ ID NO: 211437 - DNA, 19 bp, Homo sapiens
  siRNA target sequence for ITM1 (NM_152713.2,1294-1312).
ctgtaatggtgcgtctaat

SEQ ID NO: 211438 - DNA, 19 bp, Homo sapiens
  siRNA target sequence for ITM1 (NM_152713.2,1431-1449).
gattccacctaccctatta

SEQ ID NO: 211439 - DNA, 19 bp, Homo sapiens
  siRNA target sequence for ITM1 (NM_152713.2,1435-1453).
ccacctaccctattaagaa

SEQ ID NO: 211440 - DNA, 19 bp, Homo sapiens
  siRNA target sequence for ITM1 (NM_152713.2,1479-1497).
gtcatggctttctttctca

SEQ ID NO: 211441 - DNA, 19 bp, Homo sapiens
  siRNA target sequence for ITM1 (NM_152713.2,1541-1559).
ctcttctccgtccattgta

SEQ ID NO: 211442 - DNA, 19 bp, Homo sapiens
  siRNA target sequence for ITM1 (NM_152713.2,1543-1561).
cttctccgtccattgtact

SEQ ID NO: 211443 - DNA, 19 bp, Homo sapiens
  siRNA target sequence for ITM1 (NM_152713.2,1577-1595).
ggatggcagtaggatcata

SEQ ID NO: 211444 - DNA, 19 bp, Homo sapiens
  siRNA target sequence for ITM1 (NM_152713.2,1578-1596).
gatggcagtaggatcatat

SEQ ID NO: 211445 - DNA, 19 bp, Homo sapiens
  siRNA target sequence for ITM1 (NM_152713.2,1583-1601).
cagtaggatcatatttgat

SEQ ID NO: 211446 - DNA, 19 bp, Homo sapiens
  siRNA target sequence for ITM1 (NM_152713.2,1585-1603).
gtaggatcatatttgatga

SEQ ID NO: 211447 - DNA, 19 bp, Homo sapiens
  siRNA target sequence for ITM1 (NM_152713.2,1604-1622).
cttccgagaagcatattat

SEQ ID NO: 211448 - DNA, 19 bp, Homo sapiens
  siRNA target sequence for ITM1 (NM_152713.2,1693-1711).
ctatggcaaaccgaacaat

SEQ ID NO: 211449 - DNA, 19 bp, Homo sapiens
  siRNA target sequence for ITM1 (NM_152713.2,1699-1717).
caaaccgaacaattttagt

SEQ ID NO: 211450 - DNA, 19 bp, Homo sapiens
  siRNA target sequence for ITM1 (NM_152713.2,1708-1726).
caattttagtggacaataa

SEQ ID NO: 211451 - DNA, 19 bp, Homo sapiens
  siRNA target sequence for ITM1 (NM_152713.2,1769-1787).
ggcgtccacagaggaaaaa

SEQ ID NO: 211452 - DNA, 19 bp, Homo sapiens
  siRNA target sequence for ITM1 (NM_152713.2,1779-1797).
gaggaaaaagcctatgaga

SEQ ID NO: 211453 - DNA, 19 bp, Homo sapiens
  siRNA target sequence for ITM1 (NM_152713.2,1851-1869).
gggtattcctctgatgata

SEQ ID NO: 211454 - DNA, 19 bp, Homo sapiens
  siRNA target sequence for ITM1 (NM_152713.2,1923-1941).
catatcaaggagaatgact

SEQ ID NO: 211455 - DNA, 19 bp, Homo sapiens
  siRNA target sequence for ITM1 (NM_152713.2,1931-1949).
ggagaatgactattatact

SEQ ID NO: 211456 - DNA, 19 bp, Homo sapiens
  siRNA target sequence for ITM1 (NM_152713.2,2028-2046).
cgctttggacaggtttaca

SEQ ID NO: 211457 - DNA, 19 bp, Homo sapiens
  siRNA target sequence for ITM1 (NM_152713.2,2152-2170).
ggctggtcaggatatacaa

SEQ ID NO: 211458 - DNA, 19 bp, Homo sapiens
  siRNA target sequence for ITM1 (NM_152713.2,2161-2179).
ggatatacaaggtaaagga

SEQ ID NO: 211459 - DNA, 19 bp, Homo sapiens
  siRNA target sequence for ITM1 (NM_152713.2,2171-2189).
ggtaaaggacctggataat

SEQ ID NO: 211460 - DNA, 19 bp, Homo sapiens
  siRNA target sequence for SIMP (NM_178862.1,271-289).
gccgtcatccgcttcgaaa

SEQ ID NO: 211461 - DNA, 19 bp, Homo sapiens
  siRNA target sequence for SIMP (NM_178862.1,301-319).
gagttcgacccgtggttta

SEQ ID NO: 211462 - DNA, 19 bp, Homo sapiens
  siRNA target sequence for SIMP (NM_178862.1,306-324).
cgacccgtggtttaactat

SEQ ID NO: 211463 - DNA, 19 bp, Homo sapiens
  siRNA target sequence for SIMP (NM_178862.1,307-325).
gacccgtggtttaactata

SEQ ID NO: 211464 - DNA, 19 bp, Homo sapiens
  siRNA target sequence for SIMP (NM_178862.1,309-327).
cccgtggtttaactataga

SEQ ID NO: 211465 - DNA, 19 bp, Homo sapiens
  siRNA target sequence for SIMP (NM_178862.1,310-328).
ccgtggtttaactatagat

SEQ ID NO: 211466 - DNA, 19 bp, Homo sapiens
  siRNA target sequence for SIMP (NM_178862.1,321-339).
ctatagatcaacacatcat

SEQ ID NO: 211467 - DNA, 19 bp, Homo sapiens
  siRNA target sequence for SIMP (NM_178862.1,441-459).
gataaccgctggccttatt

SEQ ID NO: 211468 - DNA, 19 bp, Homo sapiens
  siRNA target sequence for SIMP (NM_178862.1,449-467).
ctggccttattcattggat

SEQ ID NO: 211469 - DNA, 19 bp, Homo sapiens
  siRNA target sequence for SIMP (NM_178862.1,451-469).
ggccttattcattggattt

SEQ ID NO: 211470 - DNA, 19 bp, Homo sapiens
  siRNA target sequence for SIMP (NM_178862.1,453-471).
ccttattcattggatttta

SEQ ID NO: 211471 - DNA, 19 bp, Homo sapiens
  siRNA target sequence for SIMP (NM_178862.1,454-472).
cttattcattggattttaa

SEQ ID NO: 211472 - DNA, 19 bp, Homo sapiens
  siRNA target sequence for SIMP (NM_178862.1,480-498).
gaacataactgttcacata

SEQ ID NO: 211473 - DNA, 19 bp, Homo sapiens
  siRNA target sequence for SIMP (NM_178862.1,513-531).
gttccttgcaccaactttt

SEQ ID NO: 211474 - DNA, 19 bp, Homo sapiens
  siRNA target sequence for SIMP (NM_178862.1,534-552).
cggccttacatctatatct

SEQ ID NO: 211475 - DNA, 19 bp, Homo sapiens
  siRNA target sequence for SIMP (NM_178862.1,535-553).
ggccttacatctatatcta

SEQ ID NO: 211476 - DNA, 19 bp, Homo sapiens
  siRNA target sequence for SIMP (NM_178862.1,537-555).
ccttacatctatatctact

SEQ ID NO: 211477 - DNA, 19 bp, Homo sapiens
  siRNA target sequence for SIMP (NM_178862.1,538-556).
cttacatctatatctactt

SEQ ID NO: 211478 - DNA, 19 bp, Homo sapiens
  siRNA target sequence for SIMP (NM_178862.1,601-619).
gctgcttgttttattgcta

SEQ ID NO: 211479 - DNA, 19 bp, Homo sapiens
  siRNA target sequence for SIMP (NM_178862.1,642-660).
gtcagtagctggatccttt

SEQ ID NO: 211480 - DNA, 19 bp, Homo sapiens
  siRNA target sequence for SIMP (NM_178862.1,646-664).
gtagctggatcctttgata

SEQ ID NO: 211481 - DNA, 19 bp, Homo sapiens
  siRNA target sequence for SIMP (NM_178862.1,677-695).
ctatttttgcacttcagtt

SEQ ID NO: 211482 - DNA, 19 bp, Homo sapiens
  siRNA target sequence for SIMP (NM_178862.1,686-704).
cacttcagttcacatacta

SEQ ID NO: 211483 - DNA, 19 bp, Homo sapiens
  siRNA target sequence for SIMP (NM_178862.1,702-720).
ctatttatgggtaaaatct

SEQ ID NO: 211484 - DNA, 19 bp, Homo sapiens
  siRNA target sequence for SIMP (NM_178862.1,721-739).
gtaaaaactgggtcagttt

SEQ ID NO: 211485 - DNA, 19 bp, Homo sapiens
  siRNA target sequence for SIMP (NM_178862.1,755-773).
gctgcttatcctatttcta

SEQ ID NO: 211486 - DNA, 19 bp, Homo sapiens
  siRNA target sequence for SIMP (NM_178862.1,799-817).
gtatttatcatcaatctta

SEQ ID NO: 211487 - DNA, 19 bp, Homo sapiens
  siRNA target sequence for SIMP (NM_178862.1,814-832).
cttattccactgcatgtat

SEQ ID NO: 211488 - DNA, 19 bp, Homo sapiens
  siRNA target sequence for SIMP (NM_178862.1,858-876).
cagcaaaagagtctacata

SEQ ID NO: 211489 - DNA, 19 bp, Homo sapiens
  siRNA target sequence for SIMP (NM_178862.1,868-886).
gtctacatagcatatagca

SEQ ID NO: 211490 - DNA, 19 bp, Homo sapiens
  siRNA target sequence for SIMP (NM_178862.1,877-895).
gcatatagcactttctaca

SEQ ID NO: 211491 - DNA, 19 bp, Homo sapiens
  siRNA target sequence for SIMP (NM_178862.1,878-896).
catatagcactttctacat

SEQ ID NO: 211492 - DNA, 19 bp, Homo sapiens
  siRNA target sequence for SIMP (NM_178862.1,1018-1036).
ctgagagaccgattaacaa

SEQ ID NO: 211493 - DNA, 19 bp, Homo sapiens
  siRNA target sequence for SIMP (NM_178862.1,1022-1040).
gagaccgattaacaaaaca

SEQ ID NO: 211494 - DNA, 19 bp, Homo sapiens
  siRNA target sequence for SIMP (NM_178862.1,1059-1077).
ctttttgggtgtatcacta

SEQ ID NO: 211495 - DNA, 19 bp, Homo sapiens
  siRNA target sequence for SIMP (NM_178862.1,1096-1114).
cttagtgtcatctatttga

SEQ ID NO: 211496 - DNA, 19 bp, Homo sapiens
  siRNA target sequence for SIMP (NM_178862.1,1100-1118).
gtgtcatctatttgactta

SEQ ID NO: 211497 - DNA, 19 bp, Homo sapiens
  siRNA target sequence for SIMP (NM_178862.1,1104-1122).
catctatttgacttataca

SEQ ID NO: 211498 - DNA, 19 bp, Homo sapiens
  siRNA target sequence for SIMP (NM_178862.1,1136-1154).
catggagtggcaggtttta

SEQ ID NO: 211499 - DNA, 19 bp, Homo sapiens
  siRNA target sequence for SIMP (NM_178862.1,1163-1181).
gggatactgggtatgcaaa

SEQ ID NO: 211500 - DNA, 19 bp, Homo sapiens
  siRNA target sequence for SIMP (NM_178862.1,1164-1182).
ggatactgggtatgcaaaa

SEQ ID NO: 211501 - DNA, 19 bp, Homo sapiens
  siRNA target sequence for SIMP (NM_178862.1,1172-1190).
ggtatgcaaaaatacacat

SEQ ID NO: 211502 - DNA, 19 bp, Homo sapiens
  siRNA target sequence for SIMP (NM_178862.1,1223-1241).
ctacgacttgggtgtcttt

SEQ ID NO: 211503 - DNA, 19 bp, Homo sapiens
  siRNA target sequence for SIMP (NM_178862.1,1226-1244).
cgacttgggtgtctttctt

SEQ ID NO: 211504 - DNA, 19 bp, Homo sapiens
  siRNA target sequence for SIMP (NM_178862.1,1245-1263).
ctttgatctacatattctt

SEQ ID NO: 211505 - DNA, 19 bp, Homo sapiens
  siRNA target sequence for SIMP (NM_178862.1,1311-1329).
cgatgaaagagtatttgtt

SEQ ID NO: 211506 - DNA, 19 bp, Homo sapiens
  siRNA target sequence for SIMP (NM_178862.1,1319-1337).
gagtatttgttgctctata

SEQ ID NO: 211507 - DNA, 19 bp, Homo sapiens
  siRNA target sequence for SIMP (NM_178862.1,1340-1358).
caatcagtgctgtctactt

SEQ ID NO: 211508 - DNA, 19 bp, Homo sapiens
  siRNA target sequence for SIMP (NM_178862.1,1413-1431).
gtctgcaattgccttttca

SEQ ID NO: 211509 - DNA, 19 bp, Homo sapiens
  siRNA target sequence for SIMP (NM_178862.1,1461-1479).
catgaaaagggaaaatcca

SEQ ID NO: 211510 - DNA, 19 bp, Homo sapiens
  siRNA target sequence for SIMP (NM_178862.1,1530-1548).
gtatgataaggcaggtaaa

SEQ ID NO: 211511 - DNA, 19 bp, Homo sapiens
  siRNA target sequence for SIMP (NM_178862.1,1585-1603).
gagggattaggccctaata

SEQ ID NO: 211512 - DNA, 19 bp, Homo sapiens
  siRNA target sequence for SIMP (NM_178862.1,1587-1605).
gggattaggccctaatata

SEQ ID NO: 211513 - DNA, 19 bp, Homo sapiens
  siRNA target sequence for SIMP (NM_178862.1,1588-1606).
ggattaggccctaatataa

SEQ ID NO: 211514 - DNA, 19 bp, Homo sapiens
  siRNA target sequence for SIMP (NM_178862.1,1589-1607).
gattaggccctaatataaa

SEQ ID NO: 211515 - DNA, 19 bp, Homo sapiens
  siRNA target sequence for SIMP (NM_178862.1,1594-1612).
ggccctaatataaaaagca

SEQ ID NO: 211516 - DNA, 19 bp, Homo sapiens
  siRNA target sequence for SIMP (NM_178862.1,1596-1614).
ccctaatataaaaagcatt

SEQ ID NO: 211517 - DNA, 19 bp, Homo sapiens
  siRNA target sequence for SIMP (NM_178862.1,1610-1628).
gcattgtcaccatgttgat

SEQ ID NO: 211518 - DNA, 19 bp, Homo sapiens
  siRNA target sequence for SIMP (NM_178862.1,1630-1648).
ctgatgctattgatgatgt

SEQ ID NO: 211519 - DNA, 19 bp, Homo sapiens
  siRNA target sequence for SIMP (NM_178862.1,1699-1717).
gtagtcctggcctcataca

SEQ ID NO: 211520 - DNA, 19 bp, Homo sapiens
  siRNA target sequence for SIMP (NM_178862.1,1720-1738).
catgatggcaccaggaata

SEQ ID NO: 211521 - DNA, 19 bp, Homo sapiens
  siRNA target sequence for SIMP (NM_178862.1,1727-1745).
gcaccaggaatatcttaga

SEQ ID NO: 211522 - DNA, 19 bp, Homo sapiens
  siRNA target sequence for SIMP (NM_178862.1,1764-1782).
cttttggctaaggcaaaat

SEQ ID NO: 211523 - DNA, 19 bp, Homo sapiens
  siRNA target sequence for SIMP (NM_178862.1,1789-1807).
gaacatgcacgagtaatgt

SEQ ID NO: 211524 - DNA, 19 bp, Homo sapiens
  siRNA target sequence for SIMP (NM_178862.1,1792-1810).
catgcacgagtaatgtctt

SEQ ID NO: 211525 - DNA, 19 bp, Homo sapiens
  siRNA target sequence for SIMP (NM_178862.1,1834-1852).
gctggaatggctaatagaa

SEQ ID NO: 211526 - DNA, 19 bp, Homo sapiens
  siRNA target sequence for SIMP (NM_178862.1,1837-1855).
ggaatggctaatagaacta

SEQ ID NO: 211527 - DNA, 19 bp, Homo sapiens
  siRNA target sequence for SIMP (NM_178862.1,1853-1871).
ctacgttggtggataataa

SEQ ID NO: 211528 - DNA, 19 bp, Homo sapiens
  siRNA target sequence for SIMP (NM_178862.1,1947-1965).
gaggactctagatgtagat

SEQ ID NO: 211529 - DNA, 19 bp, Homo sapiens
  siRNA target sequence for SIMP (NM_178862.1,1949-1967).
ggactctagatgtagatta

SEQ ID NO: 211530 - DNA, 19 bp, Homo sapiens
  siRNA target sequence for SIMP (NM_178862.1,1950-1968).
gactctagatgtagattat

SEQ ID NO: 211531 - DNA, 19 bp, Homo sapiens
  siRNA target sequence for SIMP (NM_178862.1,2067-2085).
cattcgggaaagtgactat

SEQ ID NO: 211532 - DNA, 19 bp, Homo sapiens
  siRNA target sequence for SIMP (NM_178862.1,2099-2117).
gagaattccgtgtagacaa

SEQ ID NO: 211533 - DNA, 19 bp, Homo sapiens
  siRNA target sequence for SIMP (NM_178862.1,2120-2138).
caggatcccctactttgtt

SEQ ID NO: 211534 - DNA, 19 bp, Homo sapiens
  siRNA target sequence for SIMP (NM_178862.1,2122-2140).
ggatcccctactttgttga

SEQ ID NO: 211535 - DNA, 19 bp, Homo sapiens
  siRNA target sequence for SIMP (NM_178862.1,2123-2141).
gatcccctactttgttgaa

SEQ ID NO: 211536 - DNA, 19 bp, Homo sapiens
  siRNA target sequence for SIMP (NM_178862.1,2145-2163).
ccttatgtataaaatgtca

SEQ ID NO: 211537 - DNA, 19 bp, Homo sapiens
  siRNA target sequence for SIMP (NM_178862.1,2198-2216).
gtacacccccaggttttga

SEQ ID NO: 211538 - DNA, 19 bp, Homo sapiens
  siRNA target sequence for SIMP (NM_178862.1,2247-2265).
ggacattaaattcaaacat

SEQ ID NO: 211539 - DNA, 19 bp, Homo sapiens
  siRNA target sequence for SIMP (NM_178862.1,2292-2310).
ctggcttgttaggatatat

SEQ ID NO: 211540 - DNA, 19 bp, Homo sapiens
  siRNA target sequence for SIMP (NM_178862.1,2353-2371).
cctcgagtcaccaacattt

SEQ ID NO: 211541 - DNA, 19 bp, Homo sapiens
  siRNA target sequence for SIMP (NM_178862.1,2354-2372).
ctcgagtcaccaacatttt

SEQ ID NO: 211542 - DNA, 19 bp, Homo sapiens
  siRNA target sequence for SIMP (NM_178862.1,2411-2429).
ggaagcgtggctacattaa

SEQ ID NO: 211543 - DNA, 19 bp, Homo sapiens
  siRNA target sequence for SIMP (NM_178862.1,2412-2430).
gaagcgtggctacattaaa

SEQ ID NO: 211544 - DNA, 19 bp, Homo sapiens
  siRNA target sequence for SIMP (NM_178862.1,2415-2433).
gcgtggctacattaaaaat

SEQ ID NO: 211545 - DNA, 19 bp, Homo sapiens
  siRNA target sequence for SIMP (NM_178862.1,2420-2438).
gctacattaaaaataagct

SEQ ID NO: 211546 - DNA, 19 bp, Homo sapiens
  siRNA target sequence for PYGB (NM_002862.3,348-366).
ccaagcgcatttattatct

SEQ ID NO: 211547 - DNA, 19 bp, Homo sapiens
  siRNA target sequence for PYGB (NM_002862.3,349-367).
caagcgcatttattatctt

SEQ ID NO: 211548 - DNA, 19 bp, Homo sapiens
  siRNA target sequence for PYGB (NM_002862.3,412-430).
gaacctgggccttcagaat

SEQ ID NO: 211549 - DNA, 19 bp, Homo sapiens
  siRNA target sequence for PYGB (NM_002862.3,433-451).
ctgcgatgaagccatctat

SEQ ID NO: 211550 - DNA, 19 bp, Homo sapiens
  siRNA target sequence for PYGB (NM_002862.3,534-552).
cgtgtttccttgactcaat

SEQ ID NO: 211551 - DNA, 19 bp, Homo sapiens
  siRNA target sequence for PYGB (NM_002862.3,569-587).
gcagcatacggctatggaa

SEQ ID NO: 211552 - DNA, 19 bp, Homo sapiens
  siRNA target sequence for PYGB (NM_002862.3,570-588).
cagcatacggctatggaat

SEQ ID NO: 211553 - DNA, 19 bp, Homo sapiens
  siRNA target sequence for PYGB (NM_002862.3,580-598).
ctatggaatccgctatgaa

SEQ ID NO: 211554 - DNA, 19 bp, Homo sapiens
  siRNA target sequence for PYGB (NM_002862.3,939-957).
ccagggtcctgtatccaaa

SEQ ID NO: 211555 - DNA, 19 bp, Homo sapiens
  siRNA target sequence for PYGB (NM_002862.3,940-958).
cagggtcctgtatccaaat

SEQ ID NO: 211556 - DNA, 19 bp, Homo sapiens
  siRNA target sequence for PYGB (NM_002862.3,1270-1288).
ctggcccgtgtccatgttt

SEQ ID NO: 211557 - DNA, 19 bp, Homo sapiens
  siRNA target sequence for PYGB (NM_002862.3,1272-1290).
ggcccgtgtccatgtttga

SEQ ID NO: 211558 - DNA, 19 bp, Homo sapiens
  siRNA target sequence for PYGB (NM_002862.3,1274-1292).
cccgtgtccatgtttgaga

SEQ ID NO: 211559 - DNA, 19 bp, Homo sapiens
  siRNA target sequence for PYGB (NM_002862.3,1275-1293).
ccgtgtccatgtttgagaa

SEQ ID NO: 211560 - DNA, 19 bp, Homo sapiens
  siRNA target sequence for PYGB (NM_002862.3,1304-1322).
cggcacctggagataatct

SEQ ID NO: 211561 - DNA, 19 bp, Homo sapiens
  siRNA target sequence for PYGB (NM_002862.3,1305-1323).
ggcacctggagataatcta

SEQ ID NO: 211562 - DNA, 19 bp, Homo sapiens
  siRNA target sequence for PYGB (NM_002862.3,1306-1324).
gcacctggagataatctat

SEQ ID NO: 211563 - DNA, 19 bp, Homo sapiens
  siRNA target sequence for PYGB (NM_002862.3,1499-1517).
gtgaaacagtcggtcttta

SEQ ID NO: 211564 - DNA, 19 bp, Homo sapiens
  siRNA target sequence for PYGB (NM_002862.3,1507-1525).
gtcggtctttaaggatttt

SEQ ID NO: 211565 - DNA, 19 bp, Homo sapiens
  siRNA target sequence for PYGB (NM_002862.3,1510-1528).
ggtctttaaggatttttat

SEQ ID NO: 211566 - DNA, 19 bp, Homo sapiens
  siRNA target sequence for PYGB (NM_002862.3,1909-1927).
gcccaggactgttatgatt

SEQ ID NO: 211567 - DNA, 19 bp, Homo sapiens
  siRNA target sequence for PYGB (NM_002862.3,1990-2008).
cggcgacgtcgtcaatcat

SEQ ID NO: 211568 - DNA, 19 bp, Homo sapiens
  siRNA target sequence for PYGB (NM_002862.3,1992-2010).
gcgacgtcgtcaatcatga

SEQ ID NO: 211569 - DNA, 19 bp, Homo sapiens
  siRNA target sequence for PYGB (NM_002862.3,2275-2293).
ggaccggaaagggtacaat

SEQ ID NO: 211570 - DNA, 19 bp, Homo sapiens
  siRNA target sequence for PYGB (NM_002862.3,2428-2446).
ggtgtttgcagactatgaa

SEQ ID NO: 211571 - DNA, 19 bp, Homo sapiens
  siRNA target sequence for PYGL (NM_002863.1,191-209).
ccaccacccgcgactacta

SEQ ID NO: 211572 - DNA, 19 bp, Homo sapiens
  siRNA target sequence for PYGL (NM_002863.1,194-212).
ccacccgcgactactactt

SEQ ID NO: 211573 - DNA, 19 bp, Homo sapiens
  siRNA target sequence for PYGL (NM_002863.1,285-303).
gtgccccaagagggtatat

SEQ ID NO: 211574 - DNA, 19 bp, Homo sapiens
  siRNA target sequence for PYGL (NM_002863.1,287-305).
gccccaagagggtatatta

SEQ ID NO: 211575 - DNA, 19 bp, Homo sapiens
  siRNA target sequence for PYGL (NM_002863.1,354-372).
caacctcggtctgcaaaat

SEQ ID NO: 211576 - DNA, 19 bp, Homo sapiens
  siRNA target sequence for PYGL (NM_002863.1,377-395).
gtgatgaggccatttacca

SEQ ID NO: 211577 - DNA, 19 bp, Homo sapiens
  siRNA target sequence for PYGL (NM_002863.1,393-411).
ccagcttggattggatata

SEQ ID NO: 211578 - DNA, 19 bp, Homo sapiens
  siRNA target sequence for PYGL (NM_002863.1,525-543).
cggcattcggtatgaatat

SEQ ID NO: 211579 - DNA, 19 bp, Homo sapiens
  siRNA target sequence for PYGL (NM_002863.1,649-667).
cctgtgcacttctatggaa

SEQ ID NO: 211580 - DNA, 19 bp, Homo sapiens
  siRNA target sequence for PYGL (NM_002863.1,650-668).
ctgtgcacttctatggaaa

SEQ ID NO: 211581 - DNA, 19 bp, Homo sapiens
  siRNA target sequence for PYGL (NM_002863.1,788-806).
ctgctcgggcaccaaatga

SEQ ID NO: 211582 - DNA, 19 bp, Homo sapiens
  siRNA target sequence for PYGL (NM_002863.1,790-808).
gctcgggcaccaaatgact

SEQ ID NO: 211583 - DNA, 19 bp, Homo sapiens
  siRNA target sequence for PYGL (NM_002863.1,791-809).
ctcgggcaccaaatgactt

SEQ ID NO: 211584 - DNA, 19 bp, Homo sapiens
  siRNA target sequence for PYGL (NM_002863.1,793-811).
cgggcaccaaatgacttta

SEQ ID NO: 211585 - DNA, 19 bp, Homo sapiens
  siRNA target sequence for PYGL (NM_002863.1,794-812).
gggcaccaaatgactttaa

SEQ ID NO: 211586 - DNA, 19 bp, Homo sapiens
  siRNA target sequence for PYGL (NM_002863.1,813-831).
cctcagagactttaatgtt

SEQ ID NO: 211587 - DNA, 19 bp, Homo sapiens
  siRNA target sequence for PYGL (NM_002863.1,917-935).
ggaaggagctaagattgaa

SEQ ID NO: 211588 - DNA, 19 bp, Homo sapiens
  siRNA target sequence for PYGL (NM_002863.1,929-947).
gattgaagcaggaatactt

SEQ ID NO: 211589 - DNA, 19 bp, Homo sapiens
  siRNA target sequence for PYGL (NM_002863.1,955-973).
gctgcaaccttgcaagata

SEQ ID NO: 211590 - DNA, 19 bp, Homo sapiens
  siRNA target sequence for PYGL (NM_002863.1,956-974).
ctgcaaccttgcaagatat

SEQ ID NO: 211591 - DNA, 19 bp, Homo sapiens
  siRNA target sequence for PYGL (NM_002863.1,1093-1111).
cctgagctgatgaggattt

SEQ ID NO: 211592 - DNA, 19 bp, Homo sapiens
  siRNA target sequence for PYGL (NM_002863.1,1239-1257).
gctccctcgacatttggaa

SEQ ID NO: 211593 - DNA, 19 bp, Homo sapiens
  siRNA target sequence for PYGL (NM_002863.1,1299-1317).
ggccttgtttcctaaagat

SEQ ID NO: 211594 - DNA, 19 bp, Homo sapiens
  siRNA target sequence for PYGL (NM_002863.1,1395-1413).
cggttcccatgctgtgaat

SEQ ID NO: 211595 - DNA, 19 bp, Homo sapiens
  siRNA target sequence for PYGL (NM_002863.1,1408-1426).
gtgaatggcgtggctaaaa

SEQ ID NO: 211596 - DNA, 19 bp, Homo sapiens
  siRNA target sequence for PYGL (NM_002863.1,1433-1451).
cagacatcgtgaagactaa

SEQ ID NO: 211597 - DNA, 19 bp, Homo sapiens
  siRNA target sequence for PYGL (NM_002863.1,1437-1455).
catcgtgaagactaaagta

SEQ ID NO: 211598 - DNA, 19 bp, Homo sapiens
  siRNA target sequence for PYGL (NM_002863.1,1798-1816).
catgtgatcacgatgtaca

SEQ ID NO: 211599 - DNA, 19 bp, Homo sapiens
  siRNA target sequence for PYGL (NM_002863.1,1808-1826).
cgatgtacaaccgcattaa

SEQ ID NO: 211600 - DNA, 19 bp, Homo sapiens
  siRNA target sequence for PYGL (NM_002863.1,1812-1830).
gtacaaccgcattaagaaa

SEQ ID NO: 211601 - DNA, 19 bp, Homo sapiens
  siRNA target sequence for PYGL (NM_002863.1,1827-1845).
gaaagaccctaagaagtta

SEQ ID NO: 211602 - DNA, 19 bp, Homo sapiens
  siRNA target sequence for PYGL (NM_002863.1,1889-1907).
gatatcacatggccaaaat

SEQ ID NO: 211603 - DNA, 19 bp, Homo sapiens
  siRNA target sequence for PYGL (NM_002863.1,1932-1950).
ggcagatgtggtgaacaat

SEQ ID NO: 211604 - DNA, 19 bp, Homo sapiens
  siRNA target sequence for PYGL (NM_002863.1,1944-1962).
gaacaatgaccctatggtt

SEQ ID NO: 211605 - DNA, 19 bp, Homo sapiens
  siRNA target sequence for PYGL (NM_002863.1,1989-2007).
ggagaactacagagtatct

SEQ ID NO: 211606 - DNA, 19 bp, Homo sapiens
  siRNA target sequence for PYGL (NM_002863.1,1992-2010).
gaactacagagtatctctt

SEQ ID NO: 211607 - DNA, 19 bp, Homo sapiens
  siRNA target sequence for PYGL (NM_002863.1,2000-2018).
gagtatctcttgctgaaaa

SEQ ID NO: 211608 - DNA, 19 bp, Homo sapiens
  siRNA target sequence for PYGL (NM_002863.1,2035-2053).
gatctgtcagagcagattt

SEQ ID NO: 211609 - DNA, 19 bp, Homo sapiens
  siRNA target sequence for PYGL (NM_002863.1,2038-2056).
ctgtcagagcagatttcca

SEQ ID NO: 211610 - DNA, 19 bp, Homo sapiens
  siRNA target sequence for PYGL (NM_002863.1,2072-2090).
cctcggggacaggcaatat

SEQ ID NO: 211611 - DNA, 19 bp, Homo sapiens
  siRNA target sequence for PYGL (NM_002863.1,2075-2093).
cggggacaggcaatatgaa

SEQ ID NO: 211612 - DNA, 19 bp, Homo sapiens
  siRNA target sequence for PYGL (NM_002863.1,2189-2207).
gcatgaggatagatgatgt

SEQ ID NO: 211613 - DNA, 19 bp, Homo sapiens
  siRNA target sequence for PYGL (NM_002863.1,2227-2245).
gggtacgaggcaaaagaat

SEQ ID NO: 211614 - DNA, 19 bp, Homo sapiens
  siRNA target sequence for PYGL (NM_002863.1,2228-2246).
ggtacgaggcaaaagaata

SEQ ID NO: 211615 - DNA, 19 bp, Homo sapiens
  siRNA target sequence for PYGL (NM_002863.1,2232-2250).
cgaggcaaaagaatactat

SEQ ID NO: 211616 - DNA, 19 bp, Homo sapiens
  siRNA target sequence for PYGL (NM_002863.1,2271-2289).
gctggtcattgatcaaatt

SEQ ID NO: 211617 - DNA, 19 bp, Homo sapiens
  siRNA target sequence for PYGL (NM_002863.1,2277-2295).
cattgatcaaattgacaat

SEQ ID NO: 211618 - DNA, 19 bp, Homo sapiens
  siRNA target sequence for PYGL (NM_002863.1,2415-2433).
gagtcagctgtacatgaat

SEQ ID NO: 211619 - DNA, 19 bp, Homo sapiens
  siRNA target sequence for PYGL (NM_002863.1,2419-2437).
cagctgtacatgaatccaa

SEQ ID NO: 211620 - DNA, 19 bp, Homo sapiens
  siRNA target sequence for PYGL (NM_002863.1,2435-2453).
caaaggcctggaacacaat

SEQ ID NO: 211621 - DNA, 19 bp, Homo sapiens
  siRNA target sequence for PYGL (NM_002863.1,2470-2488).
gctgcctcggggaaattct

SEQ ID NO: 211622 - DNA, 19 bp, Homo sapiens
  siRNA target sequence for PYGL (NM_002863.1,2489-2507).
ccagtgaccgaacaattaa

SEQ ID NO: 211623 - DNA, 19 bp, Homo sapiens
  siRNA target sequence for PYGL (NM_002863.1,2490-2508).
cagtgaccgaacaattaaa

SEQ ID NO: 211624 - DNA, 19 bp, Homo sapiens
  siRNA target sequence for PYGL (NM_002863.1,2492-2510).
gtgaccgaacaattaaaga

SEQ ID NO: 211625 - DNA, 19 bp, Homo sapiens
  siRNA target sequence for PYGL (NM_002863.1,2494-2512).
gaccgaacaattaaagaat

SEQ ID NO: 211626 - DNA, 19 bp, Homo sapiens
  siRNA target sequence for PYGL (NM_002863.1,2509-2527).
gaatatgcccaaaacatct

SEQ ID NO: 211627 - DNA, 19 bp, Homo sapiens
  siRNA target sequence for PYGL (NM_002863.1,2529-2547).
gaacgtggaaccttcagat

SEQ ID NO: 211628 - DNA, 19 bp, Homo sapiens
  siRNA target sequence for PYGL (NM_002863.1,2532-2550).
cgtggaaccttcagatcta

SEQ ID NO: 211629 - DNA, 19 bp, Homo sapiens
  siRNA target sequence for PYGL (NM_002863.1,2533-2551).
gtggaaccttcagatctaa

SEQ ID NO: 211630 - DNA, 19 bp, Homo sapiens
  siRNA target sequence for PYGL (NM_002863.1,2539-2557).
ccttcagatctaaagattt

SEQ ID NO: 211631 - DNA, 19 bp, Homo sapiens
  siRNA target sequence for PYGL (NM_002863.1,2560-2578).
ctatccaatgaatctaaca

SEQ ID NO: 211632 - DNA, 19 bp, Homo sapiens
  siRNA target sequence for PYGL (NM_002863.1,2564-2582).
ccaatgaatctaacaaagt

SEQ ID NO: 211633 - DNA, 19 bp, Homo sapiens
  siRNA target sequence for PYGM (NM_005609.1,829-847).
cctgtcagaccaagagaaa

SEQ ID NO: 211634 - DNA, 19 bp, Homo sapiens
  siRNA target sequence for PYGM (NM_005609.1,957-975).
ccaccccacgagactacta

SEQ ID NO: 211635 - DNA, 19 bp, Homo sapiens
  siRNA target sequence for PYGM (NM_005609.1,960-978).
ccccacgagactactactt

SEQ ID NO: 211636 - DNA, 19 bp, Homo sapiens
  siRNA target sequence for PYGM (NM_005609.1,961-979).
cccacgagactactacttt

SEQ ID NO: 211637 - DNA, 19 bp, Homo sapiens
  siRNA target sequence for PYGM (NM_005609.1,1063-1081).
gatctactacctgtcttta

SEQ ID NO: 211638 - DNA, 19 bp, Homo sapiens
  siRNA target sequence for PYGM (NM_005609.1,1073-1091).
ctgtctttagagttctata

SEQ ID NO: 211639 - DNA, 19 bp, Homo sapiens
  siRNA target sequence for PYGM (NM_005609.1,1120-1138).
gaacctggccttagagaat

SEQ ID NO: 211640 - DNA, 19 bp, Homo sapiens
  siRNA target sequence for PYGM (NM_005609.1,1512-1530).
ctggctatcgcaacaatgt

SEQ ID NO: 211641 - DNA, 19 bp, Homo sapiens
  siRNA target sequence for PYGM (NM_005609.1,1515-1533).
gctatcgcaacaatgttgt

SEQ ID NO: 211642 - DNA, 19 bp, Homo sapiens
  siRNA target sequence for PYGM (NM_005609.1,1654-1672).
cctgtaccccaatgataat

SEQ ID NO: 211643 - DNA, 19 bp, Homo sapiens
  siRNA target sequence for PYGM (NM_005609.1,2123-2141).
gcagtgaagcgcatcaaca

SEQ ID NO: 211644 - DNA, 19 bp, Homo sapiens
  siRNA target sequence for PYGM (NM_005609.1,2124-2142).
cagtgaagcgcatcaacat

SEQ ID NO: 211645 - DNA, 19 bp, Homo sapiens
  siRNA target sequence for PYGM (NM_005609.1,2414-2432).
cgggatgtggccaaagtga

SEQ ID NO: 211646 - DNA, 19 bp, Homo sapiens
  siRNA target sequence for PYGM (NM_005609.1,2524-2542).
gcggattcacgaatataaa

SEQ ID NO: 211647 - DNA, 19 bp, Homo sapiens
  siRNA target sequence for PYGM (NM_005609.1,2527-2545).
gattcacgaatataaacga

SEQ ID NO: 211648 - DNA, 19 bp, Homo sapiens
  siRNA target sequence for PYGM (NM_005609.1,2593-2611).
gagggagcccaataagttt

SEQ ID NO: 211649 - DNA, 19 bp, Homo sapiens
  siRNA target sequence for PYGM (NM_005609.1,2595-2613).
gggagcccaataagttttt

SEQ ID NO: 211650 - DNA, 19 bp, Homo sapiens
  siRNA target sequence for PYGM (NM_005609.1,2596-2614).
ggagcccaataagtttttt

SEQ ID NO: 211651 - DNA, 19 bp, Homo sapiens
  siRNA target sequence for PYGM (NM_005609.1,2924-2942).
gaggcgggagaggaaaact

SEQ ID NO: 211652 - DNA, 19 bp, Homo sapiens
  siRNA target sequence for PYGM (NM_005609.1,2927-2945).
gcgggagaggaaaacttct

SEQ ID NO: 211653 - DNA, 19 bp, Homo sapiens
  siRNA target sequence for PYGM (NM_005609.1,2928-2946).
cgggagaggaaaacttctt

SEQ ID NO: 211654 - DNA, 19 bp, Homo sapiens
  siRNA target sequence for PYGM (NM_005609.1,2961-2979).
gggtggaggatgtggataa

SEQ ID NO: 211655 - DNA, 19 bp, Homo sapiens
  siRNA target sequence for PYGM (NM_005609.1,3118-3136).
gcaccatgaccggtttaaa

SEQ ID NO: 211656 - DNA, 19 bp, Homo sapiens
  siRNA target sequence for PYGM (NM_005609.1,3217-3235).
gatggtgatccggaacata

SEQ ID NO: 211657 - DNA, 19 bp, Homo sapiens
  siRNA target sequence for MTAP (NM_002451.2,138-156).
ccaccaccgccgtgaagat

SEQ ID NO: 211658 - DNA, 19 bp, Homo sapiens
  siRNA target sequence for MTAP (NM_002451.2,139-157).
caccaccgccgtgaagatt

SEQ ID NO: 211659 - DNA, 19 bp, Homo sapiens
  siRNA target sequence for MTAP (NM_002451.2,144-162).
ccgccgtgaagattggaat

SEQ ID NO: 211660 - DNA, 19 bp, Homo sapiens
  siRNA target sequence for MTAP (NM_002451.2,145-163).
cgccgtgaagattggaata

SEQ ID NO: 211661 - DNA, 19 bp, Homo sapiens
  siRNA target sequence for MTAP (NM_002451.2,146-164).
gccgtgaagattggaataa

SEQ ID NO: 211662 - DNA, 19 bp, Homo sapiens
  siRNA target sequence for MTAP (NM_002451.2,147-165).
ccgtgaagattggaataat

SEQ ID NO: 211663 - DNA, 19 bp, Homo sapiens
  siRNA target sequence for MTAP (NM_002451.2,253-271).
cttaattttggggaagata

SEQ ID NO: 211664 - DNA, 19 bp, Homo sapiens
  siRNA target sequence for MTAP (NM_002451.2,367-385).
ggaagagggctgtacacat

SEQ ID NO: 211665 - DNA, 19 bp, Homo sapiens
  siRNA target sequence for MTAP (NM_002451.2,373-391).
gggctgtacacatgtcata

SEQ ID NO: 211666 - DNA, 19 bp, Homo sapiens
  siRNA target sequence for MTAP (NM_002451.2,375-393).
gctgtacacatgtcatagt

SEQ ID NO: 211667 - DNA, 19 bp, Homo sapiens
  siRNA target sequence for MTAP (NM_002451.2,436-454).
cgatattgtcattattgat

SEQ ID NO: 211668 - DNA, 19 bp, Homo sapiens
  siRNA target sequence for MTAP (NM_002451.2,478-496).
gagacctcagtccttctat

SEQ ID NO: 211669 - DNA, 19 bp, Homo sapiens
  siRNA target sequence for MTAP (NM_002451.2,490-508).
cttctatgatggaagtcat

SEQ ID NO: 211670 - DNA, 19 bp, Homo sapiens
  siRNA target sequence for MTAP (NM_002451.2,493-511).
ctatgatggaagtcattct

SEQ ID NO: 211671 - DNA, 19 bp, Homo sapiens
  siRNA target sequence for MTAP (NM_002451.2,521-539).
ggagtgtgccatattccaa

SEQ ID NO: 211672 - DNA, 19 bp, Homo sapiens
  siRNA target sequence for MTAP (NM_002451.2,522-540).
gagtgtgccatattccaat

SEQ ID NO: 211673 - DNA, 19 bp, Homo sapiens
  siRNA target sequence for MTAP (NM_002451.2,548-566).
ccgttttgccccaaaacga

SEQ ID NO: 211674 - DNA, 19 bp, Homo sapiens
  siRNA target sequence for MTAP (NM_002451.2,564-582).
cgagagaggttcttataga

SEQ ID NO: 211675 - DNA, 19 bp, Homo sapiens
  siRNA target sequence for MTAP (NM_002451.2,600-618).
gactccggtgccactcaaa

SEQ ID NO: 211676 - DNA, 19 bp, Homo sapiens
  siRNA target sequence for MTAP (NM_002451.2,638-656).
gagggacctcgttttagct

SEQ ID NO: 211677 - DNA, 19 bp, Homo sapiens
  siRNA target sequence for MTAP (NM_002451.2,747-765).
gaatttgttacgcaagtat

SEQ ID NO: 211678 - DNA, 19 bp, Homo sapiens
  siRNA target sequence for MTAP (NM_002451.2,766-784).
cgccatggcgacagattat

SEQ ID NO: 211679 - DNA, 19 bp, Homo sapiens
  siRNA target sequence for MTAP (NM_002451.2,768-786).
ccatggcgacagattatga

SEQ ID NO: 211680 - DNA, 19 bp, Homo sapiens
  siRNA target sequence for MTAP (NM_002451.2,816-834).
cggtggaccgggtcttaaa

SEQ ID NO: 211681 - DNA, 19 bp, Homo sapiens
  siRNA target sequence for MTAP (NM_002451.2,818-836).
gtggaccgggtcttaaaga

SEQ ID NO: 211682 - DNA, 19 bp, Homo sapiens
  siRNA target sequence for MTAP (NM_002451.2,868-886).
cttactgctcactaccata

SEQ ID NO: 211683 - DNA, 19 bp, Homo sapiens
  siRNA target sequence for MTAP (NM_002451.2,877-895).
cactaccatacctcagata

SEQ ID NO: 211684 - DNA, 19 bp, Homo sapiens
  siRNA target sequence for MTAP (NM_002451.2,912-930).
cagaaaccctccataacct

SEQ ID NO: 211685 - DNA, 19 bp, Homo sapiens
  siRNA target sequence for NP (NM_000270.1,115-133).
gaacggatacacctatgaa

SEQ ID NO: 211686 - DNA, 19 bp, Homo sapiens
  siRNA target sequence for NP (NM_000270.1,118-136).
cggatacacctatgaagat

SEQ ID NO: 211687 - DNA, 19 bp, Homo sapiens
  siRNA target sequence for NP (NM_000270.1,178-196).
ccgacctcaagttgcaata

SEQ ID NO: 211688 - DNA, 19 bp, Homo sapiens
  siRNA target sequence for NP (NM_000270.1,179-197).
cgacctcaagttgcaataa

SEQ ID NO: 211689 - DNA, 19 bp, Homo sapiens
  siRNA target sequence for NP (NM_000270.1,182-200).
cctcaagttgcaataatct

SEQ ID NO: 211690 - DNA, 19 bp, Homo sapiens
  siRNA target sequence for NP (NM_000270.1,215-233).
ggaggtctgactgataaat

SEQ ID NO: 211691 - DNA, 19 bp, Homo sapiens
  siRNA target sequence for NP (NM_000270.1,237-255).
ctcaggcccagatctttga

SEQ ID NO: 211692 - DNA, 19 bp, Homo sapiens
  siRNA target sequence for NP (NM_000270.1,357-375).
gcaggttccacatgtatga

SEQ ID NO: 211693 - DNA, 19 bp, Homo sapiens
  siRNA target sequence for NP (NM_000270.1,550-568).
cagagggcccaatgatgaa

SEQ ID NO: 211694 - DNA, 19 bp, Homo sapiens
  siRNA target sequence for NP (NM_000270.1,602-620).
gcctacgaccggactatga

SEQ ID NO: 211695 - DNA, 19 bp, Homo sapiens
  siRNA target sequence for NP (NM_000270.1,752-770).
gacgctgttggcatgagta

SEQ ID NO: 211696 - DNA, 19 bp, Homo sapiens
  siRNA target sequence for NP (NM_000270.1,842-860).
gtcatcatggattatgaaa

SEQ ID NO: 211697 - DNA, 19 bp, Homo sapiens
  siRNA target sequence for GYG (NM_004130.2,74-92).
gacactaaccacaaacgat

SEQ ID NO: 211698 - DNA, 19 bp, Homo sapiens
  siRNA target sequence for GYG (NM_004130.2,259-277).
ctgctcatctaaccttaat

SEQ ID NO: 211699 - DNA, 19 bp, Homo sapiens
  siRNA target sequence for GYG (NM_004130.2,261-279).
gctcatctaaccttaatga

SEQ ID NO: 211700 - DNA, 19 bp, Homo sapiens
  siRNA target sequence for GYG (NM_004130.2,323-341).
gtcgcttacacagtattca

SEQ ID NO: 211701 - DNA, 19 bp, Homo sapiens
  siRNA target sequence for GYG (NM_004130.2,367-385).
ctctggtcctagcaaatat

SEQ ID NO: 211702 - DNA, 19 bp, Homo sapiens
  siRNA target sequence for GYG (NM_004130.2,371-389).
ggtcctagcaaatattgat

SEQ ID NO: 211703 - DNA, 19 bp, Homo sapiens
  siRNA target sequence for GYG (NM_004130.2,434-452).
gtggcctgactgcttcaat

SEQ ID NO: 211704 - DNA, 19 bp, Homo sapiens
  siRNA target sequence for GYG (NM_004130.2,454-472).
ccggagtcttcgtttatca

SEQ ID NO: 211705 - DNA, 19 bp, Homo sapiens
  siRNA target sequence for GYG (NM_004130.2,464-482).
cgtttatcagccttcagtt

SEQ ID NO: 211706 - DNA, 19 bp, Homo sapiens
  siRNA target sequence for GYG (NM_004130.2,478-496).
cagttgaaacatacaatca

SEQ ID NO: 211707 - DNA, 19 bp, Homo sapiens
  siRNA target sequence for GYG (NM_004130.2,514-532).
ctgagcaaggtagttttga

SEQ ID NO: 211708 - DNA, 19 bp, Homo sapiens
  siRNA target sequence for GYG (NM_004130.2,538-556).
gggaccaaggcatactgaa

SEQ ID NO: 211709 - DNA, 19 bp, Homo sapiens
  siRNA target sequence for GYG (NM_004130.2,571-589).
gctgggcaacaacagatat

SEQ ID NO: 211710 - DNA, 19 bp, Homo sapiens
  siRNA target sequence for GYG (NM_004130.2,640-658).
cctacctcccggcatttaa

SEQ ID NO: 211711 - DNA, 19 bp, Homo sapiens
  siRNA target sequence for GYG (NM_004130.2,641-659).
ctacctcccggcatttaaa

SEQ ID NO: 211712 - DNA, 19 bp, Homo sapiens
  siRNA target sequence for GYG (NM_004130.2,645-663).
ctcccggcatttaaagtgt

SEQ ID NO: 211713 - DNA, 19 bp, Homo sapiens
  siRNA target sequence for GYG (NM_004130.2,647-665).
cccggcatttaaagtgttt

SEQ ID NO: 211714 - DNA, 19 bp, Homo sapiens
  siRNA target sequence for GYG (NM_004130.2,676-694).
ccaaagttgtgcatttcct

SEQ ID NO: 211715 - DNA, 19 bp, Homo sapiens
  siRNA target sequence for GYG (NM_004130.2,693-711).
ctgggacgagtcaaaccat

SEQ ID NO: 211716 - DNA, 19 bp, Homo sapiens
  siRNA target sequence for GYG (NM_004130.2,756-774).
gcccatgatcccaacatga

SEQ ID NO: 211717 - DNA, 19 bp, Homo sapiens
  siRNA target sequence for GYG (NM_004130.2,770-788).
catgactcatccagagttt

SEQ ID NO: 211718 - DNA, 19 bp, Homo sapiens
  siRNA target sequence for GYG (NM_004130.2,775-793).
ctcatccagagtttctcat

SEQ ID NO: 211719 - DNA, 19 bp, Homo sapiens
  siRNA target sequence for GYG (NM_004130.2,809-827).
ctttaccaccaacgtttta

SEQ ID NO: 211720 - DNA, 19 bp, Homo sapiens
  siRNA target sequence for GYG (NM_004130.2,854-872).
caaagacacctgctcatat

SEQ ID NO: 211721 - DNA, 19 bp, Homo sapiens
  siRNA target sequence for GYG (NM_004130.2,858-876).
gacacctgctcatatgtaa

SEQ ID NO: 211722 - DNA, 19 bp, Homo sapiens
  siRNA target sequence for GYG (NM_004130.2,896-914).
ctatacactggctttctct

SEQ ID NO: 211723 - DNA, 19 bp, Homo sapiens
  siRNA target sequence for GYG (NM_004130.2,941-959).
ctcaggagccatatcacat

SEQ ID NO: 211724 - DNA, 19 bp, Homo sapiens
  siRNA target sequence for GYG (NM_004130.2,1032-1050).
cagggccaggctgattata

SEQ ID NO: 211725 - DNA, 19 bp, Homo sapiens
  siRNA target sequence for GYG (NM_004130.2,1057-1075).
cagattcctttgacaacat

SEQ ID NO: 211726 - DNA, 19 bp, Homo sapiens
  siRNA target sequence for GYG (NM_004130.2,1070-1088).
caacatcaagaggaaactt

SEQ ID NO: 211727 - DNA, 19 bp, Homo sapiens
  siRNA target sequence for GYG2 (NM_003918.1,405-423).
cactagccaccaatgacat

SEQ ID NO: 211728 - DNA, 19 bp, Homo sapiens
  siRNA target sequence for GYG2 (NM_003918.1,537-555).
cgaaggtgttcgatgaagt

SEQ ID NO: 211729 - DNA, 19 bp, Homo sapiens
  siRNA target sequence for GYG2 (NM_003918.1,541-559).
ggtgttcgatgaagtcatt

SEQ ID NO: 211730 - DNA, 19 bp, Homo sapiens
  siRNA target sequence for GYG2 (NM_003918.1,713-731).
gtcgatgagctgtttgaca

SEQ ID NO: 211731 - DNA, 19 bp, Homo sapiens
  siRNA target sequence for GYG2 (NM_003918.1,759-777).
ccggatggccggattgctt

SEQ ID NO: 211732 - DNA, 19 bp, Homo sapiens
  siRNA target sequence for GYG2 (NM_003918.1,866-884).
gcagaccaaggcttactga

SEQ ID NO: 211733 - DNA, 19 bp, Homo sapiens
  siRNA target sequence for GYG2 (NM_003918.1,867-885).
cagaccaaggcttactgaa

SEQ ID NO: 211734 - DNA, 19 bp, Homo sapiens
  siRNA target sequence for GYG2 (NM_003918.1,872-890).
caaggcttactgaatagtt

SEQ ID NO: 211735 - DNA, 19 bp, Homo sapiens
  siRNA target sequence for GYG2 (NM_003918.1,875-893).
ggcttactgaatagtttct

SEQ ID NO: 211736 - DNA, 19 bp, Homo sapiens
  siRNA target sequence for GYG2 (NM_003918.1,876-894).
gcttactgaatagtttctt

SEQ ID NO: 211737 - DNA, 19 bp, Homo sapiens
  siRNA target sequence for GYG2 (NM_003918.1,932-950).
ccgttcatctataacttga

SEQ ID NO: 211738 - DNA, 19 bp, Homo sapiens
  siRNA target sequence for GYG2 (NM_003918.1,1004-1022).
gcaaaggtcgtccactttt

SEQ ID NO: 211739 - DNA, 19 bp, Homo sapiens
  siRNA target sequence for GYG2 (NM_003918.1,1005-1023).
caaaggtcgtccacttttt

SEQ ID NO: 211740 - DNA, 19 bp, Homo sapiens
  siRNA target sequence for GYG2 (NM_003918.1,1038-1056).
cttggaactacaagtacaa

SEQ ID NO: 211741 - DNA, 19 bp, Homo sapiens
  siRNA target sequence for GYG2 (NM_003918.1,1105-1123).
gcaccaggcggcattcctt

SEQ ID NO: 211742 - DNA, 19 bp, Homo sapiens
  siRNA target sequence for GYG2 (NM_003918.1,1134-1152).
ggacggtctaccagaacaa

SEQ ID NO: 211743 - DNA, 19 bp, Homo sapiens
  siRNA target sequence for GYG2 (NM_003918.1,1262-1280).
gttggagagccgtgtgaaa

SEQ ID NO: 211744 - DNA, 19 bp, Homo sapiens
  siRNA target sequence for GYG2 (NM_003918.1,1298-1316).
ggcgtgccgtgtgcaaatt

SEQ ID NO: 211745 - DNA, 19 bp, Homo sapiens
  siRNA target sequence for GYG2 (NM_003918.1,1300-1318).
cgtgccgtgtgcaaattca

SEQ ID NO: 211746 - DNA, 19 bp, Homo sapiens
  siRNA target sequence for GYG2 (NM_003918.1,1353-1371).
cggagccgacccagatagt

SEQ ID NO: 211747 - DNA, 19 bp, Homo sapiens
  siRNA target sequence for GYG2 (NM_003918.1,1397-1415).
ggacgccgttcagaagata

SEQ ID NO: 211748 - DNA, 19 bp, Homo sapiens
  siRNA target sequence for GYG2 (NM_003918.1,1398-1416).
gacgccgttcagaagatat

SEQ ID NO: 211749 - DNA, 19 bp, Homo sapiens
  siRNA target sequence for GYG2 (NM_003918.1,1400-1418).
cgccgttcagaagatatga

SEQ ID NO: 211750 - DNA, 19 bp, Homo sapiens
  siRNA target sequence for GYG2 (NM_003918.1,1417-1435).
gatagcttgtcctgaaact

SEQ ID NO: 211751 - DNA, 19 bp, Homo sapiens
  siRNA target sequence for GYG2 (NM_003918.1,1436-1454).
gagactcctgccgtgataa

SEQ ID NO: 211752 - DNA, 19 bp, Homo sapiens
  siRNA target sequence for GYG2 (NM_003918.1,1527-1545).
caaataaagtcgaaagtgt

SEQ ID NO: 211753 - DNA, 19 bp, Homo sapiens
  siRNA target sequence for GYG2 (NM_003918.1,1631-1649).
gacctggccgtctctgttt

SEQ ID NO: 211754 - DNA, 19 bp, Homo sapiens
  siRNA target sequence for UGCGL1 (NM_020120.1,88-106).
cggtgacaggagtttgcta

SEQ ID NO: 211755 - DNA, 19 bp, Homo sapiens
  siRNA target sequence for UGCGL1 (NM_020120.1,89-107).
ggtgacaggagtttgctat

SEQ ID NO: 211756 - DNA, 19 bp, Homo sapiens
  siRNA target sequence for UGCGL1 (NM_020120.1,142-160).
ggctgttctcctcagtaaa

SEQ ID NO: 211757 - DNA, 19 bp, Homo sapiens
  siRNA target sequence for UGCGL1 (NM_020120.1,154-172).
cagtaaaggccgactcaaa

SEQ ID NO: 211758 - DNA, 19 bp, Homo sapiens
  siRNA target sequence for UGCGL1 (NM_020120.1,164-182).
cgactcaaaagccattaca

SEQ ID NO: 211759 - DNA, 19 bp, Homo sapiens
  siRNA target sequence for UGCGL1 (NM_020120.1,174-192).
gccattacaacctctctta

SEQ ID NO: 211760 - DNA, 19 bp, Homo sapiens
  siRNA target sequence for UGCGL1 (NM_020120.1,176-194).
cattacaacctctcttaca

SEQ ID NO: 211761 - DNA, 19 bp, Homo sapiens
  siRNA target sequence for UGCGL1 (NM_020120.1,209-227).
cactccattgttgttagaa

SEQ ID NO: 211762 - DNA, 19 bp, Homo sapiens
  siRNA target sequence for UGCGL1 (NM_020120.1,221-239).
gttagaagccagtgagttt

SEQ ID NO: 211763 - DNA, 19 bp, Homo sapiens
  siRNA target sequence for UGCGL1 (NM_020120.1,282-300).
gccagtcaaaatattggat

SEQ ID NO: 211764 - DNA, 19 bp, Homo sapiens
  siRNA target sequence for UGCGL1 (NM_020120.1,309-327).
catgacggtaccgattatt

SEQ ID NO: 211765 - DNA, 19 bp, Homo sapiens
  siRNA target sequence for UGCGL1 (NM_020120.1,312-330).
gacggtaccgattattcct

SEQ ID NO: 211766 - DNA, 19 bp, Homo sapiens
  siRNA target sequence for UGCGL1 (NM_020120.1,319-337).
ccgattattcctactatca

SEQ ID NO: 211767 - DNA, 19 bp, Homo sapiens
  siRNA target sequence for UGCGL1 (NM_020120.1,320-338).
cgattattcctactatcat

SEQ ID NO: 211768 - DNA, 19 bp, Homo sapiens
  siRNA target sequence for UGCGL1 (NM_020120.1,328-346).
cctactatcatgcaatatt

SEQ ID NO: 211769 - DNA, 19 bp, Homo sapiens
  siRNA target sequence for UGCGL1 (NM_020120.1,400-418).
gtctgtcccttcgttctta

SEQ ID NO: 211770 - DNA, 19 bp, Homo sapiens
  siRNA target sequence for UGCGL1 (NM_020120.1,402-420).
ctgtcccttcgttcttact

SEQ ID NO: 211771 - DNA, 19 bp, Homo sapiens
  siRNA target sequence for UGCGL1 (NM_020120.1,404-422).
gtcccttcgttcttactca

SEQ ID NO: 211772 - DNA, 19 bp, Homo sapiens
  siRNA target sequence for UGCGL1 (NM_020120.1,412-430).
gttcttactcagctacaat

SEQ ID NO: 211773 - DNA, 19 bp, Homo sapiens
  siRNA target sequence for UGCGL1 (NM_020120.1,463-481).
ctccaccagaaggatgtaa

SEQ ID NO: 211774 - DNA, 19 bp, Homo sapiens
  siRNA target sequence for UGCGL1 (NM_020120.1,469-487).
cagaaggatgtaattcgtt

SEQ ID NO: 211775 - DNA, 19 bp, Homo sapiens
  siRNA target sequence for UGCGL1 (NM_020120.1,478-496).
gtaattcgtttttttcagt

SEQ ID NO: 211776 - DNA, 19 bp, Homo sapiens
  siRNA target sequence for UGCGL1 (NM_020120.1,495-513).
gtgcatggaaagaagactt

SEQ ID NO: 211777 - DNA, 19 bp, Homo sapiens
  siRNA target sequence for UGCGL1 (NM_020120.1,506-524).
gaagacttgtgaatctgat

SEQ ID NO: 211778 - DNA, 19 bp, Homo sapiens
  siRNA target sequence for UGCGL1 (NM_020120.1,526-544).
cccttgaggctcttctact

SEQ ID NO: 211779 - DNA, 19 bp, Homo sapiens
  siRNA target sequence for UGCGL1 (NM_020120.1,555-573).
gaaagacccaaacctttat

SEQ ID NO: 211780 - DNA, 19 bp, Homo sapiens
  siRNA target sequence for UGCGL1 (NM_020120.1,612-630).
gaaagccctgtggtgattt

SEQ ID NO: 211781 - DNA, 19 bp, Homo sapiens
  siRNA target sequence for UGCGL1 (NM_020120.1,616-634).
gccctgtggtgattttcta

SEQ ID NO: 211782 - DNA, 19 bp, Homo sapiens
  siRNA target sequence for UGCGL1 (NM_020120.1,641-659).
gattggctctgaggaattt

SEQ ID NO: 211783 - DNA, 19 bp, Homo sapiens
  siRNA target sequence for UGCGL1 (NM_020120.1,647-665).
ctctgaggaattttccaat

SEQ ID NO: 211784 - DNA, 19 bp, Homo sapiens
  siRNA target sequence for UGCGL1 (NM_020120.1,669-687).
caccgccagcttatatcaa

SEQ ID NO: 211785 - DNA, 19 bp, Homo sapiens
  siRNA target sequence for UGCGL1 (NM_020120.1,671-689).
ccgccagcttatatcaaaa

SEQ ID NO: 211786 - DNA, 19 bp, Homo sapiens
  siRNA target sequence for UGCGL1 (NM_020120.1,672-690).
cgccagcttatatcaaaaa

SEQ ID NO: 211787 - DNA, 19 bp, Homo sapiens
  siRNA target sequence for UGCGL1 (NM_020120.1,675-693).
cagcttatatcaaaaagca

SEQ ID NO: 211788 - DNA, 19 bp, Homo sapiens
  siRNA target sequence for UGCGL1 (NM_020120.1,677-695).
gcttatatcaaaaagcaat

SEQ ID NO: 211789 - DNA, 19 bp, Homo sapiens
  siRNA target sequence for UGCGL1 (NM_020120.1,691-709).
gcaatgcaggcaaaatcaa

SEQ ID NO: 211790 - DNA, 19 bp, Homo sapiens
  siRNA target sequence for UGCGL1 (NM_020120.1,772-790).
gcgtggaattggccattaa

SEQ ID NO: 211791 - DNA, 19 bp, Homo sapiens
  siRNA target sequence for UGCGL1 (NM_020120.1,774-792).
gtggaattggccattaaga

SEQ ID NO: 211792 - DNA, 19 bp, Homo sapiens
  siRNA target sequence for UGCGL1 (NM_020120.1,974-992).
caatgaaatggcaccttta

SEQ ID NO: 211793 - DNA, 19 bp, Homo sapiens
  siRNA target sequence for UGCGL1 (NM_020120.1,1068-1086).
gttgtcatgaaggatctta

SEQ ID NO: 211794 - DNA, 19 bp, Homo sapiens
  siRNA target sequence for UGCGL1 (NM_020120.1,1079-1097).
ggatcttagtcagaatttt

SEQ ID NO: 211795 - DNA, 19 bp, Homo sapiens
  siRNA target sequence for UGCGL1 (NM_020120.1,1147-1165).
gaaccgaagtggaagagaa

SEQ ID NO: 211796 - DNA, 19 bp, Homo sapiens
  siRNA target sequence for UGCGL1 (NM_020120.1,1150-1168).
ccgaagtggaagagaatca

SEQ ID NO: 211797 - DNA, 19 bp, Homo sapiens
  siRNA target sequence for UGCGL1 (NM_020120.1,1178-1196).
caagggaactttaggatta

SEQ ID NO: 211798 - DNA, 19 bp, Homo sapiens
  siRNA target sequence for UGCGL1 (NM_020120.1,1181-1199).
gggaactttaggattacaa

SEQ ID NO: 211799 - DNA, 19 bp, Homo sapiens
  siRNA target sequence for UGCGL1 (NM_020120.1,1204-1222).
gagattcagccctcttcat

SEQ ID NO: 211800 - DNA, 19 bp, Homo sapiens
  siRNA target sequence for UGCGL1 (NM_020120.1,1230-1248).
cttcacatggatttagata

SEQ ID NO: 211801 - DNA, 19 bp, Homo sapiens
  siRNA target sequence for UGCGL1 (NM_020120.1,1330-1348).
gcctttctctgcataatgt

SEQ ID NO: 211802 - DNA, 19 bp, Homo sapiens
  siRNA target sequence for UGCGL1 (NM_020120.1,1331-1349).
cctttctctgcataatgtt

SEQ ID NO: 211803 - DNA, 19 bp, Homo sapiens
  siRNA target sequence for UGCGL1 (NM_020120.1,1378-1396).
cagactatgccgtagacat

SEQ ID NO: 211804 - DNA, 19 bp, Homo sapiens
  siRNA target sequence for UGCGL1 (NM_020120.1,1394-1412).
catccggagtcctgctatt

SEQ ID NO: 211805 - DNA, 19 bp, Homo sapiens
  siRNA target sequence for UGCGL1 (NM_020120.1,1397-1415).
ccggagtcctgctatttca

SEQ ID NO: 211806 - DNA, 19 bp, Homo sapiens
  siRNA target sequence for UGCGL1 (NM_020120.1,1398-1416).
cggagtcctgctatttcat

SEQ ID NO: 211807 - DNA, 19 bp, Homo sapiens
  siRNA target sequence for UGCGL1 (NM_020120.1,1408-1426).
ctatttcatgggtcaacaa

SEQ ID NO: 211808 - DNA, 19 bp, Homo sapiens
  siRNA target sequence for UGCGL1 (NM_020120.1,1434-1452).
gttgatagcagatataatt

SEQ ID NO: 211809 - DNA, 19 bp, Homo sapiens
  siRNA target sequence for UGCGL1 (NM_020120.1,1437-1455).
gatagcagatataattcgt

SEQ ID NO: 211810 - DNA, 19 bp, Homo sapiens
  siRNA target sequence for UGCGL1 (NM_020120.1,1486-1504).
ccacctttcctggtgttat

SEQ ID NO: 211811 - DNA, 19 bp, Homo sapiens
  siRNA target sequence for UGCGL1 (NM_020120.1,1506-1524).
cggcagatcaggaaaaact

SEQ ID NO: 211812 - DNA, 19 bp, Homo sapiens
  siRNA target sequence for UGCGL1 (NM_020120.1,1508-1526).
gcagatcaggaaaaactta

SEQ ID NO: 211813 - DNA, 19 bp, Homo sapiens
  siRNA target sequence for UGCGL1 (NM_020120.1,1588-1606).
ctgagatgttccttagtaa

SEQ ID NO: 211814 - DNA, 19 bp, Homo sapiens
  siRNA target sequence for UGCGL1 (NM_020120.1,1592-1610).
gatgttccttagtaatcat

SEQ ID NO: 211815 - DNA, 19 bp, Homo sapiens
  siRNA target sequence for UGCGL1 (NM_020120.1,1598-1616).
ccttagtaatcatatacca

SEQ ID NO: 211816 - DNA, 19 bp, Homo sapiens
  siRNA target sequence for UGCGL1 (NM_020120.1,1686-1704).
gctgttcttagagcatata

SEQ ID NO: 211817 - DNA, 19 bp, Homo sapiens
  siRNA target sequence for UGCGL1 (NM_020120.1,1687-1705).
ctgttcttagagcatataa

SEQ ID NO: 211818 - DNA, 19 bp, Homo sapiens
  siRNA target sequence for UGCGL1 (NM_020120.1,1747-1765).
ctctgacacatatctataa

SEQ ID NO: 211819 - DNA, 19 bp, Homo sapiens
  siRNA target sequence for UGCGL1 (NM_020120.1,1823-1841).
gaaatatccgtatgtagaa

SEQ ID NO: 211820 - DNA, 19 bp, Homo sapiens
  siRNA target sequence for UGCGL1 (NM_020120.1,1830-1848).
ccgtatgtagaagtgaata

SEQ ID NO: 211821 - DNA, 19 bp, Homo sapiens
  siRNA target sequence for UGCGL1 (NM_020120.1,1836-1854).
gtagaagtgaatagcattt

SEQ ID NO: 211822 - DNA, 19 bp, Homo sapiens
  siRNA target sequence for UGCGL1 (NM_020120.1,1931-1949).
gcccgttgtgctgttcaat

SEQ ID NO: 211823 - DNA, 19 bp, Homo sapiens
  siRNA target sequence for UGCGL1 (NM_020120.1,1946-1964).
caatggaatgccctttgaa

SEQ ID NO: 211824 - DNA, 19 bp, Homo sapiens
  siRNA target sequence for UGCGL1 (NM_020120.1,1986-2004).
gagttagaaaccatcacaa

SEQ ID NO: 211825 - DNA, 19 bp, Homo sapiens
  siRNA target sequence for UGCGL1 (NM_020120.1,2079-2097).
gtggtagagtatatcatga

SEQ ID NO: 211826 - DNA, 19 bp, Homo sapiens
  siRNA target sequence for UGCGL1 (NM_020120.1,2081-2099).
ggtagagtatatcatgaat

SEQ ID NO: 211827 - DNA, 19 bp, Homo sapiens
  siRNA target sequence for UGCGL1 (NM_020120.1,2096-2114).
gaatcagccaaatgttgtt

SEQ ID NO: 211828 - DNA, 19 bp, Homo sapiens
  siRNA target sequence for UGCGL1 (NM_020120.1,2109-2127).
gttgttccacgaatcaatt

SEQ ID NO: 211829 - DNA, 19 bp, Homo sapiens
  siRNA target sequence for UGCGL1 (NM_020120.1,2112-2130).
gttccacgaatcaattcta

SEQ ID NO: 211830 - DNA, 19 bp, Homo sapiens
  siRNA target sequence for UGCGL1 (NM_020120.1,2159-2177).
ggatttaacagcgagtaat

SEQ ID NO: 211831 - DNA, 19 bp, Homo sapiens
  siRNA target sequence for UGCGL1 (NM_020120.1,2160-2178).
gatttaacagcgagtaata

SEQ ID NO: 211832 - DNA, 19 bp, Homo sapiens
  siRNA target sequence for UGCGL1 (NM_020120.1,2167-2185).
cagcgagtaataacttctt

SEQ ID NO: 211833 - DNA, 19 bp, Homo sapiens
  siRNA target sequence for UGCGL1 (NM_020120.1,2170-2188).
cgagtaataacttctttgt

SEQ ID NO: 211834 - DNA, 19 bp, Homo sapiens
  siRNA target sequence for UGCGL1 (NM_020120.1,2236-2254).
ctgctgtagccaatagtat

SEQ ID NO: 211835 - DNA, 19 bp, Homo sapiens
  siRNA target sequence for UGCGL1 (NM_020120.1,2239-2257).
ctgtagccaatagtatgaa

SEQ ID NO: 211836 - DNA, 19 bp, Homo sapiens
  siRNA target sequence for UGCGL1 (NM_020120.1,2245-2263).
ccaatagtatgaactatct

SEQ ID NO: 211837 - DNA, 19 bp, Homo sapiens
  siRNA target sequence for UGCGL1 (NM_020120.1,2314-2332).
ggccagtaactttttggat

SEQ ID NO: 211838 - DNA, 19 bp, Homo sapiens
  siRNA target sequence for UGCGL1 (NM_020120.1,2353-2371).
cttctggacggcagttact

SEQ ID NO: 211839 - DNA, 19 bp, Homo sapiens
  siRNA target sequence for UGCGL1 (NM_020120.1,2356-2374).
ctggacggcagttactgta

SEQ ID NO: 211840 - DNA, 19 bp, Homo sapiens
  siRNA target sequence for UGCGL1 (NM_020120.1,2359-2377).
gacggcagttactgtatga

SEQ ID NO: 211841 - DNA, 19 bp, Homo sapiens
  siRNA target sequence for UGCGL1 (NM_020120.1,2398-2416).
ccagtaacaatgttagaat

SEQ ID NO: 211842 - DNA, 19 bp, Homo sapiens
  siRNA target sequence for UGCGL1 (NM_020120.1,2409-2427).
gttagaataagcatgatca

SEQ ID NO: 211843 - DNA, 19 bp, Homo sapiens
  siRNA target sequence for UGCGL1 (NM_020120.1,2413-2431).
gaataagcatgatcaataa

SEQ ID NO: 211844 - DNA, 19 bp, Homo sapiens
  siRNA target sequence for UGCGL1 (NM_020120.1,2627-2645).
ggtctttgagtcttccaaa

SEQ ID NO: 211845 - DNA, 19 bp, Homo sapiens
  siRNA target sequence for UGCGL1 (NM_020120.1,2740-2758).
ggccactggaggatagtga

SEQ ID NO: 211846 - DNA, 19 bp, Homo sapiens
  siRNA target sequence for UGCGL1 (NM_020120.1,2748-2766).
gaggatagtgagctcttta

SEQ ID NO: 211847 - DNA, 19 bp, Homo sapiens
  siRNA target sequence for UGCGL1 (NM_020120.1,2750-2768).
ggatagtgagctctttaat

SEQ ID NO: 211848 - DNA, 19 bp, Homo sapiens
  siRNA target sequence for UGCGL1 (NM_020120.1,2755-2773).
gtgagctctttaatcaaga

SEQ ID NO: 211849 - DNA, 19 bp, Homo sapiens
  siRNA target sequence for UGCGL1 (NM_020120.1,2781-2799).
cacctcctcgaaaatatca

SEQ ID NO: 211850 - DNA, 19 bp, Homo sapiens
  siRNA target sequence for UGCGL1 (NM_020120.1,2843-2861).
gcttcgggtagaagaagat

SEQ ID NO: 211851 - DNA, 19 bp, Homo sapiens
  siRNA target sequence for UGCGL1 (NM_020120.1,2862-2880).
gtggcaagcgacttggtaa

SEQ ID NO: 211852 - DNA, 19 bp, Homo sapiens
  siRNA target sequence for UGCGL1 (NM_020120.1,2951-2969).
cagacacagtgcaatcaaa

SEQ ID NO: 211853 - DNA, 19 bp, Homo sapiens
  siRNA target sequence for UGCGL1 (NM_020120.1,2986-3004).
gggagacatactttgatgt

SEQ ID NO: 211854 - DNA, 19 bp, Homo sapiens
  siRNA target sequence for UGCGL1 (NM_020120.1,3048-3066).
gctcctttgctcttggttt

SEQ ID NO: 211855 - DNA, 19 bp, Homo sapiens
  siRNA target sequence for UGCGL1 (NM_020120.1,3109-3127).
gccaatccaaactttctga

SEQ ID NO: 211856 - DNA, 19 bp, Homo sapiens
  siRNA target sequence for UGCGL1 (NM_020120.1,3158-3176).
cttagaaccagagatttct

SEQ ID NO: 211857 - DNA, 19 bp, Homo sapiens
  siRNA target sequence for UGCGL1 (NM_020120.1,3162-3180).
gaaccagagatttctttca

SEQ ID NO: 211858 - DNA, 19 bp, Homo sapiens
  siRNA target sequence for UGCGL1 (NM_020120.1,3203-3221).
gggtccaatcgcaaaattt

SEQ ID NO: 211859 - DNA, 19 bp, Homo sapiens
  siRNA target sequence for UGCGL1 (NM_020120.1,3204-3222).
ggtccaatcgcaaaatttt

SEQ ID NO: 211860 - DNA, 19 bp, Homo sapiens
  siRNA target sequence for UGCGL1 (NM_020120.1,3205-3223).
gtccaatcgcaaaattttt

SEQ ID NO: 211861 - DNA, 19 bp, Homo sapiens
  siRNA target sequence for UGCGL1 (NM_020120.1,3272-3290).
gagctggatggtagaatct

SEQ ID NO: 211862 - DNA, 19 bp, Homo sapiens
  siRNA target sequence for UGCGL1 (NM_020120.1,3298-3316).
caccatatgatcttgataa

SEQ ID NO: 211863 - DNA, 19 bp, Homo sapiens
  siRNA target sequence for UGCGL1 (NM_020120.1,3415-3433).
ctccacggggactacagtt

SEQ ID NO: 211864 - DNA, 19 bp, Homo sapiens
  siRNA target sequence for UGCGL1 (NM_020120.1,3417-3435).
ccacggggactacagttta

SEQ ID NO: 211865 - DNA, 19 bp, Homo sapiens
  siRNA target sequence for UGCGL1 (NM_020120.1,3422-3440).
gggactacagtttacctta

SEQ ID NO: 211866 - DNA, 19 bp, Homo sapiens
  siRNA target sequence for UGCGL1 (NM_020120.1,3482-3500).
ggccaatctgggctacttt

SEQ ID NO: 211867 - DNA, 19 bp, Homo sapiens
  siRNA target sequence for UGCGL1 (NM_020120.1,3522-3540).
gcttggatcctcagactta

SEQ ID NO: 211868 - DNA, 19 bp, Homo sapiens
  siRNA target sequence for UGCGL1 (NM_020120.1,3542-3560).
gaagggacgctctgaagat

SEQ ID NO: 211869 - DNA, 19 bp, Homo sapiens
  siRNA target sequence for UGCGL1 (NM_020120.1,3545-3563).
gggacgctctgaagatatt

SEQ ID NO: 211870 - DNA, 19 bp, Homo sapiens
  siRNA target sequence for UGCGL1 (NM_020120.1,3546-3564).
ggacgctctgaagatattt

SEQ ID NO: 211871 - DNA, 19 bp, Homo sapiens
  siRNA target sequence for UGCGL1 (NM_020120.1,3607-3625).
ctgatgaggtggttatcgt

SEQ ID NO: 211872 - DNA, 19 bp, Homo sapiens
  siRNA target sequence for UGCGL1 (NM_020120.1,3618-3636).
gttatcgtcctcaacaact

SEQ ID NO: 211873 - DNA, 19 bp, Homo sapiens
  siRNA target sequence for UGCGL1 (NM_020120.1,3623-3641).
cgtcctcaacaacttcaaa

SEQ ID NO: 211874 - DNA, 19 bp, Homo sapiens
  siRNA target sequence for UGCGL1 (NM_020120.1,3708-3726).
ggaacgagtgagaatgaat

SEQ ID NO: 211875 - DNA, 19 bp, Homo sapiens
  siRNA target sequence for UGCGL1 (NM_020120.1,3785-3803).
gcaagataaagatgacata

SEQ ID NO: 211876 - DNA, 19 bp, Homo sapiens
  siRNA target sequence for UGCGL1 (NM_020120.1,3828-3846).
ggtcatctctacgaaagat

SEQ ID NO: 211877 - DNA, 19 bp, Homo sapiens
  siRNA target sequence for UGCGL1 (NM_020120.1,3829-3847).
gtcatctctacgaaagatt

SEQ ID NO: 211878 - DNA, 19 bp, Homo sapiens
  siRNA target sequence for UGCGL1 (NM_020120.1,3849-3867).
cttcgcataatgatgctat

SEQ ID NO: 211879 - DNA, 19 bp, Homo sapiens
  siRNA target sequence for UGCGL1 (NM_020120.1,3864-3882).
ctatccgtgctgaagaata

SEQ ID NO: 211880 - DNA, 19 bp, Homo sapiens
  siRNA target sequence for UGCGL1 (NM_020120.1,3904-3922).
ggttcttgaagaattactt

SEQ ID NO: 211881 - DNA, 19 bp, Homo sapiens
  siRNA target sequence for UGCGL1 (NM_020120.1,3927-3945).
cccacatttaaggagttta

SEQ ID NO: 211882 - DNA, 19 bp, Homo sapiens
  siRNA target sequence for UGCGL1 (NM_020120.1,3949-3967).
cttacatggcaaatgaata

SEQ ID NO: 211883 - DNA, 19 bp, Homo sapiens
  siRNA target sequence for UGCGL1 (NM_020120.1,3981-3999).
gagcttgttcagtacaaat

SEQ ID NO: 211884 - DNA, 19 bp, Homo sapiens
  siRNA target sequence for UGCGL1 (NM_020120.1,4005-4023).
cggtggcttcatcaacaaa

SEQ ID NO: 211885 - DNA, 19 bp, Homo sapiens
  siRNA target sequence for UGCGL1 (NM_020120.1,4024-4042).
ctgaaaaacagcgtatcat

SEQ ID NO: 211886 - DNA, 19 bp, Homo sapiens
  siRNA target sequence for UGCGL1 (NM_020120.1,4081-4099).
cactagttgttgacaagtt

SEQ ID NO: 211887 - DNA, 19 bp, Homo sapiens
  siRNA target sequence for UGCGL1 (NM_020120.1,4128-4146).
cgaacagatctgaaagagt

SEQ ID NO: 211888 - DNA, 19 bp, Homo sapiens
  siRNA target sequence for UGCGL1 (NM_020120.1,4143-4161).
gagttaagagatttcaatt

SEQ ID NO: 211889 - DNA, 19 bp, Homo sapiens
  siRNA target sequence for UGCGL1 (NM_020120.1,4368-4386).
gaccctaacagcctttcaa

SEQ ID NO: 211890 - DNA, 19 bp, Homo sapiens
  siRNA target sequence for UGCGL1 (NM_020120.1,4372-4390).
ctaacagcctttcaaatct

SEQ ID NO: 211891 - DNA, 19 bp, Homo sapiens
  siRNA target sequence for UGCGL1 (NM_020120.1,4376-4394).
cagcctttcaaatcttgat

SEQ ID NO: 211892 - DNA, 19 bp, Homo sapiens
  siRNA target sequence for UGCGL1 (NM_020120.1,4605-4623).
ctacagatccgctttcaga

SEQ ID NO: 211893 - DNA, 19 bp, Homo sapiens
  siRNA target sequence for GYS1 (NM_002103.3,829-847).
gccgtggacttctacaaca

SEQ ID NO: 211894 - DNA, 19 bp, Homo sapiens
  siRNA target sequence for GYS1 (NM_002103.3,830-848).
ccgtggacttctacaacaa

SEQ ID NO: 211895 - DNA, 19 bp, Homo sapiens
  siRNA target sequence for GYS1 (NM_002103.3,898-916).
caccgatactgcatggaaa

SEQ ID NO: 211896 - DNA, 19 bp, Homo sapiens
  siRNA target sequence for GYS1 (NM_002103.3,1013-1031).
cccccaatgggctgaatgt

SEQ ID NO: 211897 - DNA, 19 bp, Homo sapiens
  siRNA target sequence for GYS1 (NM_002103.3,1015-1033).
cccaatgggctgaatgtga

SEQ ID NO: 211898 - DNA, 19 bp, Homo sapiens
  siRNA target sequence for GYS1 (NM_002103.3,1016-1034).
ccaatgggctgaatgtgaa

SEQ ID NO: 211899 - DNA, 19 bp, Homo sapiens
  siRNA target sequence for GYS1 (NM_002103.3,1141-1159).
gacaagaccttatacttct

SEQ ID NO: 211900 - DNA, 19 bp, Homo sapiens
  siRNA target sequence for GYS1 (NM_002103.3,1214-1232).
cattggctcggctcaacta

SEQ ID NO: 211901 - DNA, 19 bp, Homo sapiens
  siRNA target sequence for GYS1 (NM_002103.3,1284-1302).
gccagcgcggaccaacaat

SEQ ID NO: 211902 - DNA, 19 bp, Homo sapiens
  siRNA target sequence for GYS1 (NM_002103.3,1285-1303).
ccagcgcggaccaacaatt

SEQ ID NO: 211903 - DNA, 19 bp, Homo sapiens
  siRNA target sequence for GYS1 (NM_002103.3,1286-1304).
cagcgcggaccaacaattt

SEQ ID NO: 211904 - DNA, 19 bp, Homo sapiens
  siRNA target sequence for GYS1 (NM_002103.3,1288-1306).
gcgcggaccaacaatttca

SEQ ID NO: 211905 - DNA, 19 bp, Homo sapiens
  siRNA target sequence for GYS1 (NM_002103.3,1357-1375).
gccaacacggtgaaggaaa

SEQ ID NO: 211906 - DNA, 19 bp, Homo sapiens
  siRNA target sequence for GYS1 (NM_002103.3,1377-1395).
gttcgggaggaagctttat

SEQ ID NO: 211907 - DNA, 19 bp, Homo sapiens
  siRNA target sequence for GYS1 (NM_002103.3,1380-1398).
cgggaggaagctttatgaa

SEQ ID NO: 211908 - DNA, 19 bp, Homo sapiens
  siRNA target sequence for GYS1 (NM_002103.3,1381-1399).
gggaggaagctttatgaat

SEQ ID NO: 211909 - DNA, 19 bp, Homo sapiens
  siRNA target sequence for GYS1 (NM_002103.3,1441-1459).
gataaggaagacttcacta

SEQ ID NO: 211910 - DNA, 19 bp, Homo sapiens
  siRNA target sequence for GYS1 (NM_002103.3,1481-1499).
caacgcagcggcagtcttt

SEQ ID NO: 211911 - DNA, 19 bp, Homo sapiens
  siRNA target sequence for GYS1 (NM_002103.3,1504-1522).
cctgtgtgcacccacaata

SEQ ID NO: 211912 - DNA, 19 bp, Homo sapiens
  siRNA target sequence for GYS1 (NM_002103.3,1562-1580).
gccgaatcggcctcttcaa

SEQ ID NO: 211913 - DNA, 19 bp, Homo sapiens
  siRNA target sequence for GYS1 (NM_002103.3,1563-1581).
ccgaatcggcctcttcaat

SEQ ID NO: 211914 - DNA, 19 bp, Homo sapiens
  siRNA target sequence for GYS1 (NM_002103.3,1564-1582).
cgaatcggcctcttcaata

SEQ ID NO: 211915 - DNA, 19 bp, Homo sapiens
  siRNA target sequence for GYS1 (NM_002103.3,1591-1609).
gacagggtgaaggtgattt

SEQ ID NO: 211916 - DNA, 19 bp, Homo sapiens
  siRNA target sequence for GYS1 (NM_002103.3,1814-1832).
cctcagcttacggtatcta

SEQ ID NO: 211917 - DNA, 19 bp, Homo sapiens
  siRNA target sequence for GYS1 (NM_002103.3,1820-1838).
cttacggtatctacattct

SEQ ID NO: 211918 - DNA, 19 bp, Homo sapiens
  siRNA target sequence for GYS1 (NM_002103.3,1883-1901).
cctccttcctctacagttt

SEQ ID NO: 211919 - DNA, 19 bp, Homo sapiens
  siRNA target sequence for GYS1 (NM_002103.3,1960-1978).
gaccttctggactggaaat

SEQ ID NO: 211920 - DNA, 19 bp, Homo sapiens
  siRNA target sequence for GYS1 (NM_002103.3,1981-1999).
ctaggccggtactatatgt

SEQ ID NO: 211921 - DNA, 19 bp, Homo sapiens
  siRNA target sequence for UGCG (NM_003358.1,366-384).
catttcatggctatcatct

SEQ ID NO: 211922 - DNA, 19 bp, Homo sapiens
  siRNA target sequence for UGCG (NM_003358.1,388-406).
cccgattacacctcaacaa

SEQ ID NO: 211923 - DNA, 19 bp, Homo sapiens
  siRNA target sequence for UGCG (NM_003358.1,417-435).
gacaaacagccttatagca

SEQ ID NO: 211924 - DNA, 19 bp, Homo sapiens
  siRNA target sequence for UGCG (NM_003358.1,474-492).
gtagatcctaacttaatca

SEQ ID NO: 211925 - DNA, 19 bp, Homo sapiens
  siRNA target sequence for UGCG (NM_003358.1,477-495).
gatcctaacttaatcaaca

SEQ ID NO: 211926 - DNA, 19 bp, Homo sapiens
  siRNA target sequence for UGCG (NM_003358.1,542-560).
cctttgtgtacaagatcat

SEQ ID NO: 211927 - DNA, 19 bp, Homo sapiens
  siRNA target sequence for UGCG (NM_003358.1,564-582).
gatccagccattgatgtat

SEQ ID NO: 211928 - DNA, 19 bp, Homo sapiens
  siRNA target sequence for UGCG (NM_003358.1,645-663).
gttggcattaatcctaaaa

SEQ ID NO: 211929 - DNA, 19 bp, Homo sapiens
  siRNA target sequence for UGCG (NM_003358.1,690-708).
gttgcaaagtatgatctta

SEQ ID NO: 211930 - DNA, 19 bp, Homo sapiens
  siRNA target sequence for UGCG (NM_003358.1,693-711).
gcaaagtatgatcttatat

SEQ ID NO: 211931 - DNA, 19 bp, Homo sapiens
  siRNA target sequence for UGCG (NM_003358.1,698-716).
gtatgatcttatatggatt

SEQ ID NO: 211932 - DNA, 19 bp, Homo sapiens
  siRNA target sequence for UGCG (NM_003358.1,835-853).
ccaccttagagcaggtata

SEQ ID NO: 211933 - DNA, 19 bp, Homo sapiens
  siRNA target sequence for UGCG (NM_003358.1,836-854).
caccttagagcaggtatat

SEQ ID NO: 211934 - DNA, 19 bp, Homo sapiens
  siRNA target sequence for UGCG (NM_003358.1,843-861).
gagcaggtatattttggaa

SEQ ID NO: 211935 - DNA, 19 bp, Homo sapiens
  siRNA target sequence for UGCG (NM_003358.1,862-880).
cttcacatccaagatacta

SEQ ID NO: 211936 - DNA, 19 bp, Homo sapiens
  siRNA target sequence for UGCG (NM_003358.1,957-975).
gcaggaggacttatagctt

SEQ ID NO: 211937 - DNA, 19 bp, Homo sapiens
  siRNA target sequence for UGCG (NM_003358.1,986-1004).
cattgccgaagattacttt

SEQ ID NO: 211938 - DNA, 19 bp, Homo sapiens
  siRNA target sequence for UGCG (NM_003358.1,1049-1067).
cactcaagttgcaatgcaa

SEQ ID NO: 211939 - DNA, 19 bp, Homo sapiens
  siRNA target sequence for UGCG (NM_003358.1,1053-1071).
caagttgcaatgcaaaact

SEQ ID NO: 211940 - DNA, 19 bp, Homo sapiens
  siRNA target sequence for UGCG (NM_003358.1,1092-1110).
cagtttcaatccagaatga

SEQ ID NO: 211941 - DNA, 19 bp, Homo sapiens
  siRNA target sequence for UGCG (NM_003358.1,1109-1127).
gatcaggtggaccaaacta

SEQ ID NO: 211942 - DNA, 19 bp, Homo sapiens
  siRNA target sequence for UGCG (NM_003358.1,1114-1132).
ggtggaccaaactacgaat

SEQ ID NO: 211943 - DNA, 19 bp, Homo sapiens
  siRNA target sequence for UGCG (NM_003358.1,1117-1135).
ggaccaaactacgaattaa

SEQ ID NO: 211944 - DNA, 19 bp, Homo sapiens
  siRNA target sequence for UGCG (NM_003358.1,1139-1157).
gcttcctgctacaataatt

SEQ ID NO: 211945 - DNA, 19 bp, Homo sapiens
  siRNA target sequence for UGCG (NM_003358.1,1140-1158).
cttcctgctacaataattt

SEQ ID NO: 211946 - DNA, 19 bp, Homo sapiens
  siRNA target sequence for UGCG (NM_003358.1,1144-1162).
ctgctacaataatttgtga

SEQ ID NO: 211947 - DNA, 19 bp, Homo sapiens
  siRNA target sequence for UGCG (NM_003358.1,1204-1222).
gggcagcccaccatgtgtt

SEQ ID NO: 211948 - DNA, 19 bp, Homo sapiens
  siRNA target sequence for UGCG (NM_003358.1,1218-1236).
gtgttcagatgggatatta

SEQ ID NO: 211949 - DNA, 19 bp, Homo sapiens
  siRNA target sequence for UGCG (NM_003358.1,1225-1243).
gatgggatattatggtatt

SEQ ID NO: 211950 - DNA, 19 bp, Homo sapiens
  siRNA target sequence for UGCG (NM_003358.1,1228-1246).
gggatattatggtattttt

SEQ ID NO: 211951 - DNA, 19 bp, Homo sapiens
  siRNA target sequence for UGCG (NM_003358.1,1263-1281).
gcatggtttatatttgact

SEQ ID NO: 211952 - DNA, 19 bp, Homo sapiens
  siRNA target sequence for UGCG (NM_003358.1,1264-1282).
catggtttatatttgacta

SEQ ID NO: 211953 - DNA, 19 bp, Homo sapiens
  siRNA target sequence for UGCG (NM_003358.1,1348-1366).
ggttcatccgcgaatccat

SEQ ID NO: 211954 - DNA, 19 bp, Homo sapiens
  siRNA target sequence for UGCG (NM_003358.1,1355-1373).
ccgcgaatccatgacaata

SEQ ID NO: 211955 - DNA, 19 bp, Homo sapiens
  siRNA target sequence for UGCG (NM_003358.1,1356-1374).
cgcgaatccatgacaatat

SEQ ID NO: 211956 - DNA, 19 bp, Homo sapiens
  siRNA target sequence for UGCG (NM_003358.1,1357-1375).
gcgaatccatgacaatata

SEQ ID NO: 211957 - DNA, 19 bp, Homo sapiens
  siRNA target sequence for UGCG (NM_003358.1,1359-1377).
gaatccatgacaatataca

SEQ ID NO: 211958 - DNA, 19 bp, Homo sapiens
  siRNA target sequence for UGCG (NM_003358.1,1390-1408).
cattatgggacccaactat

SEQ ID NO: 211959 - DNA, 19 bp, Homo sapiens
  siRNA target sequence for UGCG (NM_003358.1,1417-1435).
gaactggtcgctacagatt

SEQ ID NO: 211960 - DNA, 19 bp, Homo sapiens
  siRNA target sequence for UGCG (NM_003358.1,1447-1465).
gtacagcagaggaaatcct

SEQ ID NO: 211961 - DNA, 19 bp, Homo sapiens
  siRNA target sequence for POMT2 (NM_013382.3,478-496).
ctatatcaaccgtacattt

SEQ ID NO: 211962 - DNA, 19 bp, Homo sapiens
  siRNA target sequence for POMT2 (NM_013382.3,547-565).
ctacctgagtggatatgat

SEQ ID NO: 211963 - DNA, 19 bp, Homo sapiens
  siRNA target sequence for POMT2 (NM_013382.3,558-576).
gatatgatggtaccttttt

SEQ ID NO: 211964 - DNA, 19 bp, Homo sapiens
  siRNA target sequence for POMT2 (NM_013382.3,610-628).
cagctacatgggaatgaga

SEQ ID NO: 211965 - DNA, 19 bp, Homo sapiens
  siRNA target sequence for POMT2 (NM_013382.3,779-797).
gaccccatcctgatgttct

SEQ ID NO: 211966 - DNA, 19 bp, Homo sapiens
  siRNA target sequence for POMT2 (NM_013382.3,909-927).
ctttaggggtcaagtttgt

SEQ ID NO: 211967 - DNA, 19 bp, Homo sapiens
  siRNA target sequence for POMT2 (NM_013382.3,1124-1142).
ggtgacggtttcttcagtt

SEQ ID NO: 211968 - DNA, 19 bp, Homo sapiens
  siRNA target sequence for POMT2 (NM_013382.3,1393-1411).
cttcccagtggagtttgta

SEQ ID NO: 211969 - DNA, 19 bp, Homo sapiens
  siRNA target sequence for POMT2 (NM_013382.3,1430-1448).
cgactagaacacaaagaaa

SEQ ID NO: 211970 - DNA, 19 bp, Homo sapiens
  siRNA target sequence for POMT2 (NM_013382.3,1510-1528).
caccggctatggcataaat

SEQ ID NO: 211971 - DNA, 19 bp, Homo sapiens
  siRNA target sequence for POMT2 (NM_013382.3,1513-1531).
cggctatggcataaatgga

SEQ ID NO: 211972 - DNA, 19 bp, Homo sapiens
  siRNA target sequence for POMT2 (NM_013382.3,1514-1532).
ggctatggcataaatggaa

SEQ ID NO: 211973 - DNA, 19 bp, Homo sapiens
  siRNA target sequence for POMT2 (NM_013382.3,1533-1551).
caggggactcaaatgattt

SEQ ID NO: 211974 - DNA, 19 bp, Homo sapiens
  siRNA target sequence for POMT2 (NM_013382.3,1535-1553).
ggggactcaaatgatttct

SEQ ID NO: 211975 - DNA, 19 bp, Homo sapiens
  siRNA target sequence for POMT2 (NM_013382.3,1554-1572).
ggcggattgaggtcgtaaa

SEQ ID NO: 211976 - DNA, 19 bp, Homo sapiens
  siRNA target sequence for POMT2 (NM_013382.3,1556-1574).
cggattgaggtcgtaaaca

SEQ ID NO: 211977 - DNA, 19 bp, Homo sapiens
  siRNA target sequence for POMT2 (NM_013382.3,1562-1580).
gaggtcgtaaacaggaaat

SEQ ID NO: 211978 - DNA, 19 bp, Homo sapiens
  siRNA target sequence for POMT2 (NM_013382.3,1564-1582).
ggtcgtaaacaggaaattt

SEQ ID NO: 211979 - DNA, 19 bp, Homo sapiens
  siRNA target sequence for POMT2 (NM_013382.3,1610-1628).
cgaattcgcttcatccatt

SEQ ID NO: 211980 - DNA, 19 bp, Homo sapiens
  siRNA target sequence for POMT2 (NM_013382.3,1611-1629).
gaattcgcttcatccattt

SEQ ID NO: 211981 - DNA, 19 bp, Homo sapiens
  siRNA target sequence for POMT2 (NM_013382.3,1648-1666).
gggctcctcgggaaaggtt

SEQ ID NO: 211982 - DNA, 19 bp, Homo sapiens
  siRNA target sequence for POMT2 (NM_013382.3,1704-1722).
gcaccccatacctgaaaga

SEQ ID NO: 211983 - DNA, 19 bp, Homo sapiens
  siRNA target sequence for POMT2 (NM_013382.3,1740-1758).
ggaatgtggaggaccatat

SEQ ID NO: 211984 - DNA, 19 bp, Homo sapiens
  siRNA target sequence for POMT2 (NM_013382.3,1763-1781).
cccaagttgccaaacatca

SEQ ID NO: 211985 - DNA, 19 bp, Homo sapiens
  siRNA target sequence for POMT2 (NM_013382.3,1896-1914).
ggcactggcctatcaacta

SEQ ID NO: 211986 - DNA, 19 bp, Homo sapiens
  siRNA target sequence for POMT2 (NM_013382.3,1897-1915).
gcactggcctatcaactat

SEQ ID NO: 211987 - DNA, 19 bp, Homo sapiens
  siRNA target sequence for POMT2 (NM_013382.3,1947-1965).
cagatttccgagtctatct

SEQ ID NO: 211988 - DNA, 19 bp, Homo sapiens
  siRNA target sequence for POMT2 (NM_013382.3,2129-2147).
ggctggacactccattact

SEQ ID NO: 211989 - DNA, 19 bp, Homo sapiens
  siRNA target sequence for POMT2 (NM_013382.3,2130-2148).
gctggacactccattactt

SEQ ID NO: 211990 - DNA, 19 bp, Homo sapiens
  siRNA target sequence for POMT2 (NM_013382.3,2204-2222).
ctcttctcaagcatgttga

SEQ ID NO: 211991 - DNA, 19 bp, Homo sapiens
  siRNA target sequence for POMT2 (NM_013382.3,2281-2299).
cctggcgaggggcatacat

SEQ ID NO: 211992 - DNA, 19 bp, Homo sapiens
  siRNA target sequence for SDF2 (NM_006923.2,338-356).
gccgaaacctccatagtca

SEQ ID NO: 211993 - DNA, 19 bp, Homo sapiens
  siRNA target sequence for SDF2 (NM_006923.2,349-367).
catagtcaccacttcactt

SEQ ID NO: 211994 - DNA, 19 bp, Homo sapiens
  siRNA target sequence for DPM1 (NM_003859.1,59-77).
gcagtccacgacagaacaa

SEQ ID NO: 211995 - DNA, 19 bp, Homo sapiens
  siRNA target sequence for DPM1 (NM_003859.1,60-78).
cagtccacgacagaacaaa

SEQ ID NO: 211996 - DNA, 19 bp, Homo sapiens
  siRNA target sequence for DPM1 (NM_003859.1,62-80).
gtccacgacagaacaaata

SEQ ID NO: 211997 - DNA, 19 bp, Homo sapiens
  siRNA target sequence for DPM1 (NM_003859.1,64-82).
ccacgacagaacaaatatt

SEQ ID NO: 211998 - DNA, 19 bp, Homo sapiens
  siRNA target sequence for DPM1 (NM_003859.1,288-306).
gggactaggaactgcatat

SEQ ID NO: 211999 - DNA, 19 bp, Homo sapiens
  siRNA target sequence for DPM1 (NM_003859.1,299-317).
ctgcatatattcatggaat

SEQ ID NO: 212000 - DNA, 19 bp, Homo sapiens
  siRNA target sequence for DPM1 (NM_003859.1,326-344).
ccacaggaaactacatcat

SEQ ID NO: 212001 - DNA, 19 bp, Homo sapiens
  siRNA target sequence for DPM1 (NM_003859.1,336-354).
ctacatcattattatggat

SEQ ID NO: 212002 - DNA, 19 bp, Homo sapiens
  siRNA target sequence for DPM1 (NM_003859.1,408-426).
ggagggtaattttgatatt

SEQ ID NO: 212003 - DNA, 19 bp, Homo sapiens
  siRNA target sequence for DPM1 (NM_003859.1,434-452).
gaactcgctacaaaggaaa

SEQ ID NO: 212004 - DNA, 19 bp, Homo sapiens
  siRNA target sequence for DPM1 (NM_003859.1,492-510).
cagccgtggggccaatttt

SEQ ID NO: 212005 - DNA, 19 bp, Homo sapiens
  siRNA target sequence for DPM1 (NM_003859.1,495-513).
ccgtggggccaatttttta

SEQ ID NO: 212006 - DNA, 19 bp, Homo sapiens
  siRNA target sequence for DPM1 (NM_003859.1,496-514).
cgtggggccaattttttaa

SEQ ID NO: 212007 - DNA, 19 bp, Homo sapiens
  siRNA target sequence for DPM1 (NM_003859.1,500-518).
gggccaattttttaactca

SEQ ID NO: 212008 - DNA, 19 bp, Homo sapiens
  siRNA target sequence for DPM1 (NM_003859.1,561-579).
cagattataccgaaaagaa

SEQ ID NO: 212009 - DNA, 19 bp, Homo sapiens
  siRNA target sequence for DPM1 (NM_003859.1,563-581).
gattataccgaaaagaagt

SEQ ID NO: 212010 - DNA, 19 bp, Homo sapiens
  siRNA target sequence for DPM1 (NM_003859.1,646-664).
cgggcaagacagttgaatt

SEQ ID NO: 212011 - DNA, 19 bp, Homo sapiens
  siRNA target sequence for DPM1 (NM_003859.1,653-671).
gacagttgaattatactat

SEQ ID NO: 212012 - DNA, 19 bp, Homo sapiens
  siRNA target sequence for DPM1 (NM_003859.1,668-686).
ctattggcgaggttccaat

SEQ ID NO: 212013 - DNA, 19 bp, Homo sapiens
  siRNA target sequence for DPM1 (NM_003859.1,674-692).
gcgaggttccaatatcatt

SEQ ID NO: 212014 - DNA, 19 bp, Homo sapiens
  siRNA target sequence for DPM1 (NM_003859.1,675-693).
cgaggttccaatatcattt

SEQ ID NO: 212015 - DNA, 19 bp, Homo sapiens
  siRNA target sequence for DPM1 (NM_003859.1,762-780).
gactctttttgctactaca

SEQ ID NO: 212016 - DNA, 19 bp, Homo sapiens
  siRNA target sequence for AD-017 (NM_018446.1,123-141).
cattccgtaaagtaaacat

SEQ ID NO: 212017 - DNA, 19 bp, Homo sapiens
  siRNA target sequence for AD-017 (NM_018446.1,176-194).
ctggttttgcaccataact

SEQ ID NO: 212018 - DNA, 19 bp, Homo sapiens
  siRNA target sequence for AD-017 (NM_018446.1,248-266).
gggcctcaacctatagact

SEQ ID NO: 212019 - DNA, 19 bp, Homo sapiens
  siRNA target sequence for AD-017 (NM_018446.1,249-267).
ggcctcaacctatagactt

SEQ ID NO: 212020 - DNA, 19 bp, Homo sapiens
  siRNA target sequence for AD-017 (NM_018446.1,250-268).
gcctcaacctatagacttt

SEQ ID NO: 212021 - DNA, 19 bp, Homo sapiens
  siRNA target sequence for AD-017 (NM_018446.1,322-340).
ggtcatcgctgcatctgaa

SEQ ID NO: 212022 - DNA, 19 bp, Homo sapiens
  siRNA target sequence for AD-017 (NM_018446.1,388-406).
cactcgctccaatgtgatt

SEQ ID NO: 212023 - DNA, 19 bp, Homo sapiens
  siRNA target sequence for AD-017 (NM_018446.1,390-408).
ctcgctccaatgtgatttt

SEQ ID NO: 212024 - DNA, 19 bp, Homo sapiens
  siRNA target sequence for AD-017 (NM_018446.1,396-414).
ccaatgtgattttctacat

SEQ ID NO: 212025 - DNA, 19 bp, Homo sapiens
  siRNA target sequence for AD-017 (NM_018446.1,401-419).
gtgattttctacattgtta

SEQ ID NO: 212026 - DNA, 19 bp, Homo sapiens
  siRNA target sequence for AD-017 (NM_018446.1,551-569).
gaatccatgaaacctttaa

SEQ ID NO: 212027 - DNA, 19 bp, Homo sapiens
  siRNA target sequence for AD-017 (NM_018446.1,555-573).
ccatgaaacctttaacctt

SEQ ID NO: 212028 - DNA, 19 bp, Homo sapiens
  siRNA target sequence for AD-017 (NM_018446.1,579-597).
ggttctacttgccaattct

SEQ ID NO: 212029 - DNA, 19 bp, Homo sapiens
  siRNA target sequence for AD-017 (NM_018446.1,618-636).
ccatatacatggatgatga

SEQ ID NO: 212030 - DNA, 19 bp, Homo sapiens
  siRNA target sequence for AD-017 (NM_018446.1,619-637).
catatacatggatgatgat

SEQ ID NO: 212031 - DNA, 19 bp, Homo sapiens
  siRNA target sequence for AD-017 (NM_018446.1,717-735).
gtgattcagcctctactaa

SEQ ID NO: 212032 - DNA, 19 bp, Homo sapiens
  siRNA target sequence for AD-017 (NM_018446.1,726-744).
cctctactaaagttgtcat

SEQ ID NO: 212033 - DNA, 19 bp, Homo sapiens
  siRNA target sequence for AD-017 (NM_018446.1,752-770).
gcaggaaaccagtacaatt

SEQ ID NO: 212034 - DNA, 19 bp, Homo sapiens
  siRNA target sequence for AD-017 (NM_018446.1,756-774).
gaaaccagtacaattacat

SEQ ID NO: 212035 - DNA, 19 bp, Homo sapiens
  siRNA target sequence for AD-017 (NM_018446.1,776-794).
ggctatcttgactataaaa

SEQ ID NO: 212036 - DNA, 19 bp, Homo sapiens
  siRNA target sequence for AD-017 (NM_018446.1,782-800).
cttgactataaaaaggaaa

SEQ ID NO: 212037 - DNA, 19 bp, Homo sapiens
  siRNA target sequence for AD-017 (NM_018446.1,797-815).
gaaagaattcgtaagcttt

SEQ ID NO: 212038 - DNA, 19 bp, Homo sapiens
  siRNA target sequence for AD-017 (NM_018446.1,801-819).
gaattcgtaagctttccat

SEQ ID NO: 212039 - DNA, 19 bp, Homo sapiens
  siRNA target sequence for AD-017 (NM_018446.1,824-842).
gccagcacttgctcattta

SEQ ID NO: 212040 - DNA, 19 bp, Homo sapiens
  siRNA target sequence for AD-017 (NM_018446.1,846-864).
ctggagtttttgttgcaaa

SEQ ID NO: 212041 - DNA, 19 bp, Homo sapiens
  siRNA target sequence for AD-017 (NM_018446.1,861-879).
caaacctgacggaatggaa

SEQ ID NO: 212042 - DNA, 19 bp, Homo sapiens
  siRNA target sequence for AD-017 (NM_018446.1,877-895).
gaaacgacagaatataact

SEQ ID NO: 212043 - DNA, 19 bp, Homo sapiens
  siRNA target sequence for AD-017 (NM_018446.1,953-971).
ctggctggtagcatcacaa

SEQ ID NO: 212044 - DNA, 19 bp, Homo sapiens
  siRNA target sequence for AD-017 (NM_018446.1,969-987).
caacacctcctctgcttat

SEQ ID NO: 212045 - DNA, 19 bp, Homo sapiens
  siRNA target sequence for AD-017 (NM_018446.1,972-990).
cacctcctctgcttatcgt

SEQ ID NO: 212046 - DNA, 19 bp, Homo sapiens
  siRNA target sequence for AD-017 (NM_018446.1,974-992).
cctcctctgcttatcgtat

SEQ ID NO: 212047 - DNA, 19 bp, Homo sapiens
  siRNA target sequence for AD-017 (NM_018446.1,975-993).
ctcctctgcttatcgtatt

SEQ ID NO: 212048 - DNA, 19 bp, Homo sapiens
  siRNA target sequence for AD-017 (NM_018446.1,978-996).
ctctgcttatcgtatttta

SEQ ID NO: 212049 - DNA, 19 bp, Homo sapiens
  siRNA target sequence for AD-017 (NM_018446.1,1047-1065).
ccagtgctggaaaacgata

SEQ ID NO: 212050 - DNA, 19 bp, Homo sapiens
  siRNA target sequence for AD-017 (NM_018446.1,1048-1066).
cagtgctggaaaacgatat

SEQ ID NO: 212051 - DNA, 19 bp, Homo sapiens
  siRNA target sequence for AD-017 (NM_018446.1,1089-1107).
ccaagttactccattggaa

SEQ ID NO: 212052 - DNA, 19 bp, Homo sapiens
  siRNA target sequence for AD-017 (NM_018446.1,1090-1108).
caagttactccattggaat

SEQ ID NO: 212053 - DNA, 19 bp, Homo sapiens
  siRNA target sequence for AD-017 (NM_018446.1,1125-1143).
ggggaaggactgcttcata

SEQ ID NO: 212054 - DNA, 19 bp, Homo sapiens
  siRNA target sequence for AD-017 (NM_018446.1,1126-1144).
gggaaggactgcttcatat

SEQ ID NO: 212055 - DNA, 19 bp, Homo sapiens
  siRNA target sequence for AD-017 (NM_018446.1,1131-1149).
ggactgcttcatatactga

SEQ ID NO: 212056 - DNA, 19 bp, Homo sapiens
  siRNA target sequence for AD-017 (NM_018446.1,1136-1154).
gcttcatatactgatgttt

SEQ ID NO: 212057 - DNA, 19 bp, Homo sapiens
  siRNA target sequence for AD-017 (NM_018446.1,1151-1169).
gtttgggaaaaatggtata

SEQ ID NO: 212058 - DNA, 19 bp, Homo sapiens
  siRNA target sequence for AD-017 (NM_018446.1,1156-1174).
ggaaaaatggtatattcca

SEQ ID NO: 212059 - DNA, 19 bp, Homo sapiens
  siRNA target sequence for AD-017 (NM_018446.1,1173-1191).
cagacccaacaggcaaatt

SEQ ID NO: 212060 - DNA, 19 bp, Homo sapiens
  siRNA target sequence for AD-017 (NM_018446.1,1192-1210).
caacctaatccgaagatat

SEQ ID NO: 212061 - DNA, 19 bp, Homo sapiens
  siRNA target sequence for AD-017 (NM_018446.1,1206-1224).
gatataccgagatctcaaa

SEQ ID NO: 212062 - DNA, 19 bp, Homo sapiens
  siRNA target sequence for AD-017 (NM_018446.1,1214-1232).
gagatctcaaacataaagt

SEQ ID NO: 212063 - DNA, 19 bp, Homo sapiens
  siRNA target sequence for FLJ21934 (NM_024743.1,141-159).
caacctggcaatcagttat

SEQ ID NO: 212064 - DNA, 19 bp, Homo sapiens
  siRNA target sequence for FLJ21934 (NM_024743.1,144-162).
cctggcaatcagttataaa

SEQ ID NO: 212065 - DNA, 19 bp, Homo sapiens
  siRNA target sequence for FLJ21934 (NM_024743.1,145-163).
ctggcaatcagttataaaa

SEQ ID NO: 212066 - DNA, 19 bp, Homo sapiens
  siRNA target sequence for FLJ21934 (NM_024743.1,147-165).
ggcaatcagttataaaatt

SEQ ID NO: 212067 - DNA, 19 bp, Homo sapiens
  siRNA target sequence for FLJ21934 (NM_024743.1,148-166).
gcaatcagttataaaatta

SEQ ID NO: 212068 - DNA, 19 bp, Homo sapiens
  siRNA target sequence for FLJ21934 (NM_024743.1,191-209).
ggaactttaaaaatgatgt

SEQ ID NO: 212069 - DNA, 19 bp, Homo sapiens
  siRNA target sequence for FLJ21934 (NM_024743.1,259-277).
caactacgatgtaatgctt

SEQ ID NO: 212070 - DNA, 19 bp, Homo sapiens
  siRNA target sequence for FLJ21934 (NM_024743.1,262-280).
ctacgatgtaatgcttata

SEQ ID NO: 212071 - DNA, 19 bp, Homo sapiens
  siRNA target sequence for FLJ21934 (NM_024743.1,337-355).
gctcacacttagaatttct

SEQ ID NO: 212072 - DNA, 19 bp, Homo sapiens
  siRNA target sequence for FLJ21934 (NM_024743.1,354-372).
ctgtaggaggcaatatgga

SEQ ID NO: 212073 - DNA, 19 bp, Homo sapiens
  siRNA target sequence for FLJ21934 (NM_024743.1,418-436).
gcctatgacaggactaaca

SEQ ID NO: 212074 - DNA, 19 bp, Homo sapiens
  siRNA target sequence for FLJ21934 (NM_024743.1,420-438).
ctatgacaggactaacaga

SEQ ID NO: 212075 - DNA, 19 bp, Homo sapiens
  siRNA target sequence for FLJ21934 (NM_024743.1,525-543).
gggaagagttttatagtaa

SEQ ID NO: 212076 - DNA, 19 bp, Homo sapiens
  siRNA target sequence for FLJ21934 (NM_024743.1,636-654).
cataccaacctaactttga

SEQ ID NO: 212077 - DNA, 19 bp, Homo sapiens
  siRNA target sequence for FLJ21934 (NM_024743.1,1126-1144).
cattaccgattcctcttat

SEQ ID NO: 212078 - DNA, 19 bp, Homo sapiens
  siRNA target sequence for FLJ34658 (NM_152404.2,299-317).
gagcatggtcataatgtga

SEQ ID NO: 212079 - DNA, 19 bp, Homo sapiens
  siRNA target sequence for FLJ34658 (NM_152404.2,326-344).
catcagagtggaaagtttt

SEQ ID NO: 212080 - DNA, 19 bp, Homo sapiens
  siRNA target sequence for FLJ34658 (NM_152404.2,477-495).
ctgaagcccttgtaaagct

SEQ ID NO: 212081 - DNA, 19 bp, Homo sapiens
  siRNA target sequence for FLJ34658 (NM_152404.2,479-497).
gaagcccttgtaaagctaa

SEQ ID NO: 212082 - DNA, 19 bp, Homo sapiens
  siRNA target sequence for FLJ34658 (NM_152404.2,483-501).
cccttgtaaagctaatgga

SEQ ID NO: 212083 - DNA, 19 bp, Homo sapiens
  siRNA target sequence for FLJ34658 (NM_152404.2,509-527).
gggactcaatgtagttatt

SEQ ID NO: 212084 - DNA, 19 bp, Homo sapiens
  siRNA target sequence for FLJ34658 (NM_152404.2,510-528).
ggactcaatgtagttattt

SEQ ID NO: 212085 - DNA, 19 bp, Homo sapiens
  siRNA target sequence for FLJ34658 (NM_152404.2,515-533).
caatgtagttatttgctaa

SEQ ID NO: 212086 - DNA, 19 bp, Homo sapiens
  siRNA target sequence for FLJ34658 (NM_152404.2,1124-1142).
ctccctcaaggagtgatat

SEQ ID NO: 212087 - DNA, 19 bp, Homo sapiens
  siRNA target sequence for FLJ34658 (NM_152404.2,1144-1162).
gacatgtcagagttctcat

SEQ ID NO: 212088 - DNA, 19 bp, Homo sapiens
  siRNA target sequence for FLJ34658 (NM_152404.2,1406-1424).
gccgacacactgacactta

SEQ ID NO: 212089 - DNA, 19 bp, Homo sapiens
  siRNA target sequence for FLJ34658 (NM_152404.2,1408-1426).
cgacacactgacacttaca

SEQ ID NO: 212090 - DNA, 19 bp, Homo sapiens
  siRNA target sequence for FLJ34658 (NM_152404.2,1409-1427).
gacacactgacacttacaa

SEQ ID NO: 212091 - DNA, 19 bp, Homo sapiens
  siRNA target sequence for FLJ35155 (NM_152531.3,488-506).
cgcacgaggtgcttaacct

SEQ ID NO: 212092 - DNA, 19 bp, Homo sapiens
  siRNA target sequence for FLJ35155 (NM_152531.3,489-507).
gcacgaggtgcttaacctt

SEQ ID NO: 212093 - DNA, 19 bp, Homo sapiens
  siRNA target sequence for FLJ35155 (NM_152531.3,673-691).
ggcttgggaacctactaca

SEQ ID NO: 212094 - DNA, 19 bp, Homo sapiens
  siRNA target sequence for FLJ35155 (NM_152531.3,713-731).
cggtcgccatgcatcagat

SEQ ID NO: 212095 - DNA, 19 bp, Homo sapiens
  siRNA target sequence for FLJ35155 (NM_152531.3,788-806).
ccaacatccgggagttgtt

SEQ ID NO: 212096 - DNA, 19 bp, Homo sapiens
  siRNA target sequence for FLJ35155 (NM_152531.3,797-815).
gggagttgtttgaggaatt

SEQ ID NO: 212097 - DNA, 19 bp, Homo sapiens
  siRNA target sequence for FLJ35155 (NM_152531.3,866-884).
cagtttacaggcacacatt

SEQ ID NO: 212098 - DNA, 19 bp, Homo sapiens
  siRNA target sequence for FLJ35155 (NM_152531.3,868-886).
gtttacaggcacacattct

SEQ ID NO: 212099 - DNA, 19 bp, Homo sapiens
  siRNA target sequence for FLJ35155 (NM_152531.3,1192-1210).
gtcttcgaggcctatttca

SEQ ID NO: 212100 - DNA, 19 bp, Homo sapiens
  siRNA target sequence for FLJ35155 (NM_152531.3,1214-1232).
gtgagggccacgtcaagat

SEQ ID NO: 212101 - DNA, 19 bp, Homo sapiens
  siRNA target sequence for GYLTL1B (NM_152312.2,511-529).
gacgccgtggccagaaaca

SEQ ID NO: 212102 - DNA, 19 bp, Homo sapiens
  siRNA target sequence for GYLTL1B (NM_152312.2,566-584).
ctgtccgtgtcagctttta

SEQ ID NO: 212103 - DNA, 19 bp, Homo sapiens
  siRNA target sequence for GYLTL1B (NM_152312.2,570-588).
ccgtgtcagcttttatcat

SEQ ID NO: 212104 - DNA, 19 bp, Homo sapiens
  siRNA target sequence for GYLTL1B (NM_152312.2,640-658).
ggcctctatgggctaatga

SEQ ID NO: 212105 - DNA, 19 bp, Homo sapiens
  siRNA target sequence for GYLTL1B (NM_152312.2,641-659).
gcctctatgggctaatgaa

SEQ ID NO: 212106 - DNA, 19 bp, Homo sapiens
  siRNA target sequence for GYLTL1B (NM_152312.2,1659-1677).
cgtcttcctcagtgacatt

SEQ ID NO: 212107 - DNA, 19 bp, Homo sapiens
  siRNA target sequence for HGNT-IV-H (NM_013244.2,651-669).
cgttctacagtgtcattct

SEQ ID NO: 212108 - DNA, 19 bp, Homo sapiens
  siRNA target sequence for HGNT-IV-H (NM_013244.2,668-686).
cttgggagttcttgtcatt

SEQ ID NO: 212109 - DNA, 19 bp, Homo sapiens
  siRNA target sequence for HGNT-IV-H (NM_013244.2,760-778).
catccacacatcaactgaa

SEQ ID NO: 212110 - DNA, 19 bp, Homo sapiens
  siRNA target sequence for HGNT-IV-H (NM_013244.2,776-794).
gaattcagaacgctatgtt

SEQ ID NO: 212111 - DNA, 19 bp, Homo sapiens
  siRNA target sequence for HGNT-IV-H (NM_013244.2,786-804).
cgctatgttcatactttca

SEQ ID NO: 212112 - DNA, 19 bp, Homo sapiens
  siRNA target sequence for HGNT-IV-H (NM_013244.2,792-810).
gttcatactttcaaggatt

SEQ ID NO: 212113 - DNA, 19 bp, Homo sapiens
  siRNA target sequence for HGNT-IV-H (NM_013244.2,870-888).
caaagaaagcggtatctta

SEQ ID NO: 212114 - DNA, 19 bp, Homo sapiens
  siRNA target sequence for HGNT-IV-H (NM_013244.2,874-892).
gaaagcggtatcttacaat

SEQ ID NO: 212115 - DNA, 19 bp, Homo sapiens
  siRNA target sequence for HGNT-IV-H (NM_013244.2,878-896).
gcggtatcttacaattgga

SEQ ID NO: 212116 - DNA, 19 bp, Homo sapiens
  siRNA target sequence for HGNT-IV-H (NM_013244.2,885-903).
cttacaattggactttctt

SEQ ID NO: 212117 - DNA, 19 bp, Homo sapiens
  siRNA target sequence for HGNT-IV-H (NM_013244.2,901-919).
cttcagtaaagcgaaaaaa

SEQ ID NO: 212118 - DNA, 19 bp, Homo sapiens
  siRNA target sequence for HGNT-IV-H (NM_013244.2,999-1017).
gttcacctagcagacttta

SEQ ID NO: 212119 - DNA, 19 bp, Homo sapiens
  siRNA target sequence for HGNT-IV-H (NM_013244.2,1004-1022).
cctagcagactttaattct

SEQ ID NO: 212120 - DNA, 19 bp, Homo sapiens
  siRNA target sequence for HGNT-IV-H (NM_013244.2,1035-1053).
gccatggtccaggatatta

SEQ ID NO: 212121 - DNA, 19 bp, Homo sapiens
  siRNA target sequence for HGNT-IV-H (NM_013244.2,1037-1055).
catggtccaggatattaca

SEQ ID NO: 212122 - DNA, 19 bp, Homo sapiens
  siRNA target sequence for HGNT-IV-H (NM_013244.2,1127-1145).
cctagatggccttaaaaga

SEQ ID NO: 212123 - DNA, 19 bp, Homo sapiens
  siRNA target sequence for HGNT-IV-H (NM_013244.2,1128-1146).
ctagatggccttaaaagaa

SEQ ID NO: 212124 - DNA, 19 bp, Homo sapiens
  siRNA target sequence for HGNT-IV-H (NM_013244.2,1158-1176).
ccagaagatagagtcaaat

SEQ ID NO: 212125 - DNA, 19 bp, Homo sapiens
  siRNA target sequence for HGNT-IV-H (NM_013244.2,1164-1182).
gatagagtcaaatttcgtt

SEQ ID NO: 212126 - DNA, 19 bp, Homo sapiens
  siRNA target sequence for HGNT-IV-H (NM_013244.2,1180-1198).
gttccaagcaaaatgtaga

SEQ ID NO: 212127 - DNA, 19 bp, Homo sapiens
  siRNA target sequence for HGNT-IV-H (NM_013244.2,1224-1242).
gccaatacttcagactatt

SEQ ID NO: 212128 - DNA, 19 bp, Homo sapiens
  siRNA target sequence for HGNT-IV-H (NM_013244.2,1225-1243).
ccaatacttcagactatta

SEQ ID NO: 212129 - DNA, 19 bp, Homo sapiens
  siRNA target sequence for HGNT-IV-H (NM_013244.2,1231-1249).
cttcagactattatgtaat

SEQ ID NO: 212130 - DNA, 19 bp, Homo sapiens
  siRNA target sequence for HGNT-IV-H (NM_013244.2,1234-1252).
cagactattatgtaatgct

SEQ ID NO: 212131 - DNA, 19 bp, Homo sapiens
  siRNA target sequence for HGNT-IV-H (NM_013244.2,1357-1375).
gctacattggtaaactcta

SEQ ID NO: 212132 - DNA, 19 bp, Homo sapiens
  siRNA target sequence for HGNT-IV-H (NM_013244.2,1391-1409).
cccacgtttggcccatttt

SEQ ID NO: 212133 - DNA, 19 bp, Homo sapiens
  siRNA target sequence for HGNT-IV-H (NM_013244.2,1393-1411).
cacgtttggcccatttttt

SEQ ID NO: 212134 - DNA, 19 bp, Homo sapiens
  siRNA target sequence for HGNT-IV-H (NM_013244.2,1395-1413).
cgtttggcccattttttat

SEQ ID NO: 212135 - DNA, 19 bp, Homo sapiens
  siRNA target sequence for HGNT-IV-H (NM_013244.2,1434-1452).
ccttgtgattggctattga

SEQ ID NO: 212136 - DNA, 19 bp, Homo sapiens
  siRNA target sequence for HGNT-IV-H (NM_013244.2,1440-1458).
gattggctattgactcatt

SEQ ID NO: 212137 - DNA, 19 bp, Homo sapiens
  siRNA target sequence for HGNT-IV-H (NM_013244.2,1485-1503).
gtgatccgttttaaaccat

SEQ ID NO: 212138 - DNA, 19 bp, Homo sapiens
  siRNA target sequence for HGNT-IV-H (NM_013244.2,1512-1530).
cagcacatgggctattatt

SEQ ID NO: 212139 - DNA, 19 bp, Homo sapiens
  siRNA target sequence for HGNT-IV-H (NM_013244.2,1515-1533).
cacatgggctattattcat

SEQ ID NO: 212140 - DNA, 19 bp, Homo sapiens
  siRNA target sequence for HGNT-IV-H (NM_013244.2,1517-1535).
catgggctattattcatca

SEQ ID NO: 212141 - DNA, 19 bp, Homo sapiens
  siRNA target sequence for HGNT-IV-H (NM_013244.2,1658-1676).
caaggcttacagtagtgtt

SEQ ID NO: 212142 - DNA, 19 bp, Homo sapiens
  siRNA target sequence for HGNT-IV-H (NM_013244.2,1661-1679).
ggcttacagtagtgttgat

SEQ ID NO: 212143 - DNA, 19 bp, Homo sapiens
  siRNA target sequence for HGNT-IV-H (NM_013244.2,1701-1719).
ccttcaacaggagatgttt

SEQ ID NO: 212144 - DNA, 19 bp, Homo sapiens
  siRNA target sequence for HGNT-IV-H (NM_013244.2,1702-1720).
cttcaacaggagatgtttt

SEQ ID NO: 212145 - DNA, 19 bp, Homo sapiens
  siRNA target sequence for HGNT-IV-H (NM_013244.2,1705-1723).
caacaggagatgtttttgt

SEQ ID NO: 212146 - DNA, 19 bp, Homo sapiens
  siRNA target sequence for HGNT-IV-H (NM_013244.2,1777-1795).
cagaagatcggcaaaatga

SEQ ID NO: 212147 - DNA, 19 bp, Homo sapiens
  siRNA target sequence for HGNT-IV-H (NM_013244.2,1818-1836).
gatgttggggaaaacgtta

SEQ ID NO: 212148 - DNA, 19 bp, Homo sapiens
  siRNA target sequence for HGNT-IV-H (NM_013244.2,1832-1850).
cgttatgcctagcaaacaa

SEQ ID NO: 212149 - DNA, 19 bp, Homo sapiens
  siRNA target sequence for HGNT-IV-H (NM_013244.2,1980-1998).
gaatggctaattattagga

SEQ ID NO: 212150 - DNA, 19 bp, Homo sapiens
  siRNA target sequence for HGNT-IV-H (NM_013244.2,1985-2003).
gctaattattaggagtatt

SEQ ID NO: 212151 - DNA, 19 bp, Homo sapiens
  siRNA target sequence for LARGE (NM_004737.2,585-603).
gcagggggagacggaaatt

SEQ ID NO: 212152 - DNA, 19 bp, Homo sapiens
  siRNA target sequence for LARGE (NM_004737.2,588-606).
gggggagacggaaattctt

SEQ ID NO: 212153 - DNA, 19 bp, Homo sapiens
  siRNA target sequence for LARGE (NM_004737.2,636-654).
cagccatcacctggattta

SEQ ID NO: 212154 - DNA, 19 bp, Homo sapiens
  siRNA target sequence for LARGE (NM_004737.2,639-657).
ccatcacctggatttacct

SEQ ID NO: 212155 - DNA, 19 bp, Homo sapiens
  siRNA target sequence for LARGE (NM_004737.2,666-684).
ggagcttcgaagatggaaa

SEQ ID NO: 212156 - DNA, 19 bp, Homo sapiens
  siRNA target sequence for LARGE (NM_004737.2,956-974).
cagccggtcgtggagaaat

SEQ ID NO: 212157 - DNA, 19 bp, Homo sapiens
  siRNA target sequence for LARGE (NM_004737.2,979-997).
gacaatccacgttgctatt

SEQ ID NO: 212158 - DNA, 19 bp, Homo sapiens
  siRNA target sequence for LARGE (NM_004737.2,981-999).
caatccacgttgctattgt

SEQ ID NO: 212159 - DNA, 19 bp, Homo sapiens
  siRNA target sequence for LARGE (NM_004737.2,1149-1167).
ctgtgcgtgtggacttcta

SEQ ID NO: 212160 - DNA, 19 bp, Homo sapiens
  siRNA target sequence for LARGE (NM_004737.2,1200-1218).
ggatccccaataaacatta

SEQ ID NO: 212161 - DNA, 19 bp, Homo sapiens
  siRNA target sequence for LARGE (NM_004737.2,1335-1353).
gggctgtgttccacaagtt

SEQ ID NO: 212162 - DNA, 19 bp, Homo sapiens
  siRNA target sequence for LARGE (NM_004737.2,1464-1482).
gggtgatcctgttacttct

SEQ ID NO: 212163 - DNA, 19 bp, Homo sapiens
  siRNA target sequence for LARGE (NM_004737.2,1585-1603).
caatgccgtcatcaaacaa

SEQ ID NO: 212164 - DNA, 19 bp, Homo sapiens
  siRNA target sequence for LARGE (NM_004737.2,1681-1699).
cagagacgtgtctgatcta

SEQ ID NO: 212165 - DNA, 19 bp, Homo sapiens
  siRNA target sequence for LARGE (NM_004737.2,1683-1701).
gagacgtgtctgatctaaa

SEQ ID NO: 212166 - DNA, 19 bp, Homo sapiens
  siRNA target sequence for LARGE (NM_004737.2,1694-1712).
gatctaaaggtcattcact

SEQ ID NO: 212167 - DNA, 19 bp, Homo sapiens
  siRNA target sequence for LARGE (NM_004737.2,1786-1804).
ggagtatgacggcaatctt

SEQ ID NO: 212168 - DNA, 19 bp, Homo sapiens
  siRNA target sequence for LARGE (NM_004737.2,1889-1907).
gacgacctgtgctatgagt

SEQ ID NO: 212169 - DNA, 19 bp, Homo sapiens
  siRNA target sequence for LARGE (NM_004737.2,2160-2178).
gctaccacatcgtgtacaa

SEQ ID NO: 212170 - DNA, 19 bp, Homo sapiens
  siRNA target sequence for LARGE (NM_004737.2,2429-2447).
gggaccctcttcacattca

SEQ ID NO: 212171 - DNA, 19 bp, Homo sapiens
  siRNA target sequence for LARGE (NM_004737.2,2536-2554).
cgattttgagccgtatgtt

SEQ ID NO: 212172 - DNA, 19 bp, Homo sapiens
  siRNA target sequence for LARGE (NM_004737.2,2696-2714).
gcccccagcttcgacatta

SEQ ID NO: 212173 - DNA, 19 bp, Homo sapiens
  siRNA target sequence for LARGE (NM_004737.2,2699-2717).
cccagcttcgacattacca

SEQ ID NO: 212174 - DNA, 19 bp, Homo sapiens
  siRNA target sequence for LARGE (NM_004737.2,2700-2718).
ccagcttcgacattaccaa

SEQ ID NO: 212175 - DNA, 19 bp, Homo sapiens
  siRNA target sequence for LOC167127 (NM_174914.2,235-253).
gatcacggtcataatgtca

SEQ ID NO: 212176 - DNA, 19 bp, Homo sapiens
  siRNA target sequence for LOC167127 (NM_174914.2,255-273).
catgcttaaccacaaaaga

SEQ ID NO: 212177 - DNA, 19 bp, Homo sapiens
  siRNA target sequence for LOC167127 (NM_174914.2,450-468).
gcagtgcagtcatttttta

SEQ ID NO: 212178 - DNA, 19 bp, Homo sapiens
  siRNA target sequence for LOC167127 (NM_174914.2,507-525).
cttcgacatggtgatagtt

SEQ ID NO: 212179 - DNA, 19 bp, Homo sapiens
  siRNA target sequence for LOC167127 (NM_174914.2,510-528).
cgacatggtgatagttgaa

SEQ ID NO: 212180 - DNA, 19 bp, Homo sapiens
  siRNA target sequence for LOC167127 (NM_174914.2,511-529).
gacatggtgatagttgaaa

SEQ ID NO: 212181 - DNA, 19 bp, Homo sapiens
  siRNA target sequence for LOC167127 (NM_174914.2,513-531).
catggtgatagttgaaact

SEQ ID NO: 212182 - DNA, 19 bp, Homo sapiens
  siRNA target sequence for LOC167127 (NM_174914.2,1060-1078).
ctaccccaaggggtgatat

SEQ ID NO: 212183 - DNA, 19 bp, Homo sapiens
  siRNA target sequence for LOC167127 (NM_174914.2,1064-1082).
cccaaggggtgatatggaa

SEQ ID NO: 212184 - DNA, 19 bp, Homo sapiens
  siRNA target sequence for LOC167127 (NM_174914.2,1080-1098).
gaagtgtcagtgttctcat

SEQ ID NO: 212185 - DNA, 19 bp, Homo sapiens
  siRNA target sequence for LOC167127 (NM_174914.2,1312-1330).
ggtgtttctattcagttaa

SEQ ID NO: 212186 - DNA, 19 bp, Homo sapiens
  siRNA target sequence for LOC167127 (NM_174914.2,1313-1331).
gtgtttctattcagttaaa

SEQ ID NO: 212187 - DNA, 19 bp, Homo sapiens
  siRNA target sequence for LOC83468 (NM_031302.2,410-428).
ggctctgttacgaaaaatt

SEQ ID NO: 212188 - DNA, 19 bp, Homo sapiens
  siRNA target sequence for LOC83468 (NM_031302.2,411-429).
gctctgttacgaaaaatta

SEQ ID NO: 212189 - DNA, 19 bp, Homo sapiens
  siRNA target sequence for LOC83468 (NM_031302.2,412-430).
ctctgttacgaaaaattaa

SEQ ID NO: 212190 - DNA, 19 bp, Homo sapiens
  siRNA target sequence for LOC83468 (NM_031302.2,609-627).
gccatcaatagcatctaca

SEQ ID NO: 212191 - DNA, 19 bp, Homo sapiens
  siRNA target sequence for LOC83468 (NM_031302.2,638-656).
cgccaacatcttgttctat

SEQ ID NO: 212192 - DNA, 19 bp, Homo sapiens
  siRNA target sequence for LOC83468 (NM_031302.2,640-658).
ccaacatcttgttctatgt

SEQ ID NO: 212193 - DNA, 19 bp, Homo sapiens
  siRNA target sequence for LOC83468 (NM_031302.2,671-689).
gaatactctgactcgaata

SEQ ID NO: 212194 - DNA, 19 bp, Homo sapiens
  siRNA target sequence for LOC83468 (NM_031302.2,676-694).
ctctgactcgaatacgaaa

SEQ ID NO: 212195 - DNA, 19 bp, Homo sapiens
  siRNA target sequence for LOC83468 (NM_031302.2,678-696).
ctgactcgaatacgaaaat

SEQ ID NO: 212196 - DNA, 19 bp, Homo sapiens
  siRNA target sequence for LOC83468 (NM_031302.2,682-700).
ctcgaatacgaaaatggat

SEQ ID NO: 212197 - DNA, 19 bp, Homo sapiens
  siRNA target sequence for LOC83468 (NM_031302.2,690-708).
cgaaaatggattgaacatt

SEQ ID NO: 212198 - DNA, 19 bp, Homo sapiens
  siRNA target sequence for LOC83468 (NM_031302.2,808-826).
ctctgaactttgttcgatt

SEQ ID NO: 212199 - DNA, 19 bp, Homo sapiens
  siRNA target sequence for LOC83468 (NM_031302.2,810-828).
ctgaactttgttcgatttt

SEQ ID NO: 212200 - DNA, 19 bp, Homo sapiens
  siRNA target sequence for LOC83468 (NM_031302.2,812-830).
gaactttgttcgattttat

SEQ ID NO: 212201 - DNA, 19 bp, Homo sapiens
  siRNA target sequence for LOC83468 (NM_031302.2,852-870).
cacgagaaagtcatctatt

SEQ ID NO: 212202 - DNA, 19 bp, Homo sapiens
  siRNA target sequence for LOC83468 (NM_031302.2,866-884).
ctatttggacgatgatgta

SEQ ID NO: 212203 - DNA, 19 bp, Homo sapiens
  siRNA target sequence for LOC83468 (NM_031302.2,895-913).
gtgatatccaagaactgta

SEQ ID NO: 212204 - DNA, 19 bp, Homo sapiens
  siRNA target sequence for LOC83468 (NM_031302.2,970-988).
cctctgctcaggacataaa

SEQ ID NO: 212205 - DNA, 19 bp, Homo sapiens
  siRNA target sequence for LOC83468 (NM_031302.2,1085-1103).
caatcctggtgtgattgtt

SEQ ID NO: 212206 - DNA, 19 bp, Homo sapiens
  siRNA target sequence for LOC83468 (NM_031302.2,1128-1146).
cagcgcatcaccaagcaat

SEQ ID NO: 212207 - DNA, 19 bp, Homo sapiens
  siRNA target sequence for LOC83468 (NM_031302.2,1170-1188).
gtggaggaaaacctctata

SEQ ID NO: 212208 - DNA, 19 bp, Homo sapiens
  siRNA target sequence for LOC83468 (NM_031302.2,1216-1234).
cctccccaatgctgattgt

SEQ ID NO: 212209 - DNA, 19 bp, Homo sapiens
  siRNA target sequence for LOC83468 (NM_031302.2,1222-1240).
caatgctgattgtgtttca

SEQ ID NO: 212210 - DNA, 19 bp, Homo sapiens
  siRNA target sequence for LOC83468 (NM_031302.2,1303-1321).
ccagatattcggagcattt

SEQ ID NO: 212211 - DNA, 19 bp, Homo sapiens
  siRNA target sequence for LOC83468 (NM_031302.2,1306-1324).
gatattcggagcattttct

SEQ ID NO: 212212 - DNA, 19 bp, Homo sapiens
  siRNA target sequence for LOC83468 (NM_031302.2,1344-1362).
cactggaatggaagacata

SEQ ID NO: 212213 - DNA, 19 bp, Homo sapiens
  siRNA target sequence for LOC83468 (NM_031302.2,1419-1437).
gaccctgcagggatattta

SEQ ID NO: 212214 - DNA, 19 bp, Homo sapiens
  siRNA target sequence for UGCGL2 (NM_020121.2,284-302).
gcaagaattagcaatttat

SEQ ID NO: 212215 - DNA, 19 bp, Homo sapiens
  siRNA target sequence for UGCGL2 (NM_020121.2,285-303).
caagaattagcaatttata

SEQ ID NO: 212216 - DNA, 19 bp, Homo sapiens
  siRNA target sequence for UGCGL2 (NM_020121.2,325-343).
cttattacaacttaatcct

SEQ ID NO: 212217 - DNA, 19 bp, Homo sapiens
  siRNA target sequence for UGCGL2 (NM_020121.2,347-365).
gaaagctggacagtttcta

SEQ ID NO: 212218 - DNA, 19 bp, Homo sapiens
  siRNA target sequence for UGCGL2 (NM_020121.2,354-372).
ggacagtttctagacaatt

SEQ ID NO: 212219 - DNA, 19 bp, Homo sapiens
  siRNA target sequence for UGCGL2 (NM_020121.2,421-439).
cagctattcagatgtttca

SEQ ID NO: 212220 - DNA, 19 bp, Homo sapiens
  siRNA target sequence for UGCGL2 (NM_020121.2,460-478).
caccaccagatggttgtaa

SEQ ID NO: 212221 - DNA, 19 bp, Homo sapiens
  siRNA target sequence for UGCGL2 (NM_020121.2,465-483).
ccagatggttgtaatgcat

SEQ ID NO: 212222 - DNA, 19 bp, Homo sapiens
  siRNA target sequence for UGCGL2 (NM_020121.2,466-484).
cagatggttgtaatgcatt

SEQ ID NO: 212223 - DNA, 19 bp, Homo sapiens
  siRNA target sequence for UGCGL2 (NM_020121.2,480-498).
gcatttgtggttattcata

SEQ ID NO: 212224 - DNA, 19 bp, Homo sapiens
  siRNA target sequence for UGCGL2 (NM_020121.2,503-521).
gcacacctgtaaaattaat

SEQ ID NO: 212225 - DNA, 19 bp, Homo sapiens
  siRNA target sequence for UGCGL2 (NM_020121.2,556-574).
ggactagaccttatctatt

SEQ ID NO: 212226 - DNA, 19 bp, Homo sapiens
  siRNA target sequence for UGCGL2 (NM_020121.2,641-659).
gggtactagaacatttagt

SEQ ID NO: 212227 - DNA, 19 bp, Homo sapiens
  siRNA target sequence for UGCGL2 (NM_020121.2,649-667).
gaacatttagtgcatttca

SEQ ID NO: 212228 - DNA, 19 bp, Homo sapiens
  siRNA target sequence for UGCGL2 (NM_020121.2,707-725).
gtatgttcttcgccattat

SEQ ID NO: 212229 - DNA, 19 bp, Homo sapiens
  siRNA target sequence for UGCGL2 (NM_020121.2,714-732).
cttcgccattatattcaga

SEQ ID NO: 212230 - DNA, 19 bp, Homo sapiens
  siRNA target sequence for UGCGL2 (NM_020121.2,735-753).
ccaagctcacggaaaatgt

SEQ ID NO: 212231 - DNA, 19 bp, Homo sapiens
  siRNA target sequence for UGCGL2 (NM_020121.2,736-754).
caagctcacggaaaatgta

SEQ ID NO: 212232 - DNA, 19 bp, Homo sapiens
  siRNA target sequence for UGCGL2 (NM_020121.2,739-757).
gctcacggaaaatgtactt

SEQ ID NO: 212233 - DNA, 19 bp, Homo sapiens
  siRNA target sequence for UGCGL2 (NM_020121.2,740-758).
ctcacggaaaatgtactta

SEQ ID NO: 212234 - DNA, 19 bp, Homo sapiens
  siRNA target sequence for UGCGL2 (NM_020121.2,768-786).
ggtgtggagctagcaatta

SEQ ID NO: 212235 - DNA, 19 bp, Homo sapiens
  siRNA target sequence for UGCGL2 (NM_020121.2,774-792).
gagctagcaattaagagta

SEQ ID NO: 212236 - DNA, 19 bp, Homo sapiens
  siRNA target sequence for UGCGL2 (NM_020121.2,807-825).
ctggatgatacccaagtta

SEQ ID NO: 212237 - DNA, 19 bp, Homo sapiens
  siRNA target sequence for UGCGL2 (NM_020121.2,809-827).
ggatgatacccaagttaaa

SEQ ID NO: 212238 - DNA, 19 bp, Homo sapiens
  siRNA target sequence for UGCGL2 (NM_020121.2,903-921).
gaaatatattcagatctta

SEQ ID NO: 212239 - DNA, 19 bp, Homo sapiens
  siRNA target sequence for UGCGL2 (NM_020121.2,934-952).
cagcattccaaaaatacct

SEQ ID NO: 212240 - DNA, 19 bp, Homo sapiens
  siRNA target sequence for UGCGL2 (NM_020121.2,953-971).
gattgagagtaacaaacaa

SEQ ID NO: 212241 - DNA, 19 bp, Homo sapiens
  siRNA target sequence for UGCGL2 (NM_020121.2,957-975).
gagagtaacaaacaaatga

SEQ ID NO: 212242 - DNA, 19 bp, Homo sapiens
  siRNA target sequence for UGCGL2 (NM_020121.2,989-1007).
ctgggaactacaagatctt

SEQ ID NO: 212243 - DNA, 19 bp, Homo sapiens
  siRNA target sequence for UGCGL2 (NM_020121.2,992-1010).
ggaactacaagatcttagt

SEQ ID NO: 212244 - DNA, 19 bp, Homo sapiens
  siRNA target sequence for UGCGL2 (NM_020121.2,993-1011).
gaactacaagatcttagtt

SEQ ID NO: 212245 - DNA, 19 bp, Homo sapiens
  siRNA target sequence for UGCGL2 (NM_020121.2,1100-1118).
cagatctctaaccagaatt

SEQ ID NO: 212246 - DNA, 19 bp, Homo sapiens
  siRNA target sequence for UGCGL2 (NM_020121.2,1192-1210).
caggcgatgctcgtctatt

SEQ ID NO: 212247 - DNA, 19 bp, Homo sapiens
  siRNA target sequence for UGCGL2 (NM_020121.2,1194-1212).
ggcgatgctcgtctattta

SEQ ID NO: 212248 - DNA, 19 bp, Homo sapiens
  siRNA target sequence for UGCGL2 (NM_020121.2,1195-1213).
gcgatgctcgtctatttat

SEQ ID NO: 212249 - DNA, 19 bp, Homo sapiens
  siRNA target sequence for UGCGL2 (NM_020121.2,1196-1214).
cgatgctcgtctatttata

SEQ ID NO: 212250 - DNA, 19 bp, Homo sapiens
  siRNA target sequence for UGCGL2 (NM_020121.2,1219-1237).
gccttcgtgttgatatgga

SEQ ID NO: 212251 - DNA, 19 bp, Homo sapiens
  siRNA target sequence for UGCGL2 (NM_020121.2,1220-1238).
ccttcgtgttgatatggat

SEQ ID NO: 212252 - DNA, 19 bp, Homo sapiens
  siRNA target sequence for UGCGL2 (NM_020121.2,1224-1242).
cgtgttgatatggatgttt

SEQ ID NO: 212253 - DNA, 19 bp, Homo sapiens
  siRNA target sequence for UGCGL2 (NM_020121.2,1247-1265).
cgcttttagtattttggat

SEQ ID NO: 212254 - DNA, 19 bp, Homo sapiens
  siRNA target sequence for UGCGL2 (NM_020121.2,1292-1310).
gaatggccttcgcaatctt

SEQ ID NO: 212255 - DNA, 19 bp, Homo sapiens
  siRNA target sequence for UGCGL2 (NM_020121.2,1312-1330).
ggatcaatggggaagatat

SEQ ID NO: 212256 - DNA, 19 bp, Homo sapiens
  siRNA target sequence for UGCGL2 (NM_020121.2,1383-1401).
gatattcgacattcttcta

SEQ ID NO: 212257 - DNA, 19 bp, Homo sapiens
  siRNA target sequence for UGCGL2 (NM_020121.2,1389-1407).
cgacattcttctataatgt

SEQ ID NO: 212258 - DNA, 19 bp, Homo sapiens
  siRNA target sequence for UGCGL2 (NM_020121.2,1406-1424).
gtggattaatgacttagaa

SEQ ID NO: 212259 - DNA, 19 bp, Homo sapiens
  siRNA target sequence for UGCGL2 (NM_020121.2,1456-1474).
gttgccagaaacttctgaa

SEQ ID NO: 212260 - DNA, 19 bp, Homo sapiens
  siRNA target sequence for UGCGL2 (NM_020121.2,1498-1516).
cttccataaggcgcaattt

SEQ ID NO: 212261 - DNA, 19 bp, Homo sapiens
  siRNA target sequence for UGCGL2 (NM_020121.2,1502-1520).
cataaggcgcaattttcat

SEQ ID NO: 212262 - DNA, 19 bp, Homo sapiens
  siRNA target sequence for UGCGL2 (NM_020121.2,1596-1614).
cacgaagttcctcttagaa

SEQ ID NO: 212263 - DNA, 19 bp, Homo sapiens
  siRNA target sequence for UGCGL2 (NM_020121.2,1598-1616).
cgaagttcctcttagaatt

SEQ ID NO: 212264 - DNA, 19 bp, Homo sapiens
  siRNA target sequence for UGCGL2 (NM_020121.2,1602-1620).
gttcctcttagaattggtt

SEQ ID NO: 212265 - DNA, 19 bp, Homo sapiens
  siRNA target sequence for UGCGL2 (NM_020121.2,1678-1696).
ctctctggcgagctttcaa

SEQ ID NO: 212266 - DNA, 19 bp, Homo sapiens
  siRNA target sequence for UGCGL2 (NM_020121.2,1682-1700).
ctggcgagctttcaactat

SEQ ID NO: 212267 - DNA, 19 bp, Homo sapiens
  siRNA target sequence for UGCGL2 (NM_020121.2,1684-1702).
ggcgagctttcaactatat

SEQ ID NO: 212268 - DNA, 19 bp, Homo sapiens
  siRNA target sequence for UGCGL2 (NM_020121.2,1685-1703).
gcgagctttcaactatatt

SEQ ID NO: 212269 - DNA, 19 bp, Homo sapiens
  siRNA target sequence for UGCGL2 (NM_020121.2,1884-1902).
gctggagcaagcttttata

SEQ ID NO: 212270 - DNA, 19 bp, Homo sapiens
  siRNA target sequence for UGCGL2 (NM_020121.2,1890-1908).
gcaagcttttataagatga

SEQ ID NO: 212271 - DNA, 19 bp, Homo sapiens
  siRNA target sequence for UGCGL2 (NM_020121.2,1992-2010).
gctgttcttcaaagaatga

SEQ ID NO: 212272 - DNA, 19 bp, Homo sapiens
  siRNA target sequence for UGCGL2 (NM_020121.2,2064-2082).
cgcacgaatgcaattgatt

SEQ ID NO: 212273 - DNA, 19 bp, Homo sapiens
  siRNA target sequence for UGCGL2 (NM_020121.2,2065-2083).
gcacgaatgcaattgattt

SEQ ID NO: 212274 - DNA, 19 bp, Homo sapiens
  siRNA target sequence for UGCGL2 (NM_020121.2,2074-2092).
caattgattttctaatgga

SEQ ID NO: 212275 - DNA, 19 bp, Homo sapiens
  siRNA target sequence for UGCGL2 (NM_020121.2,2090-2108).
ggataggaataatgttgta

SEQ ID NO: 212276 - DNA, 19 bp, Homo sapiens
  siRNA target sequence for UGCGL2 (NM_020121.2,2103-2121).
gttgtaccccgtataaata

SEQ ID NO: 212277 - DNA, 19 bp, Homo sapiens
  siRNA target sequence for UGCGL2 (NM_020121.2,2106-2124).
gtaccccgtataaatactt

SEQ ID NO: 212278 - DNA, 19 bp, Homo sapiens
  siRNA target sequence for UGCGL2 (NM_020121.2,2109-2127).
ccccgtataaatactttga

SEQ ID NO: 212279 - DNA, 19 bp, Homo sapiens
  siRNA target sequence for UGCGL2 (NM_020121.2,2144-2162).
gcagtacctcaatttaata

SEQ ID NO: 212280 - DNA, 19 bp, Homo sapiens
  siRNA target sequence for UGCGL2 (NM_020121.2,2147-2165).
gtacctcaatttaatatct

SEQ ID NO: 212281 - DNA, 19 bp, Homo sapiens
  siRNA target sequence for UGCGL2 (NM_020121.2,2184-2202).
gttgaagatttctctactt

SEQ ID NO: 212282 - DNA, 19 bp, Homo sapiens
  siRNA target sequence for UGCGL2 (NM_020121.2,2213-2231).
ggattcacaagataagagt

SEQ ID NO: 212283 - DNA, 19 bp, Homo sapiens
  siRNA target sequence for UGCGL2 (NM_020121.2,2230-2248).
gtgctgtaattgcaaagaa

SEQ ID NO: 212284 - DNA, 19 bp, Homo sapiens
  siRNA target sequence for UGCGL2 (NM_020121.2,2235-2253).
gtaattgcaaagaacatgt

SEQ ID NO: 212285 - DNA, 19 bp, Homo sapiens
  siRNA target sequence for UGCGL2 (NM_020121.2,2265-2283).
caagacgatgagagtataa

SEQ ID NO: 212286 - DNA, 19 bp, Homo sapiens
  siRNA target sequence for UGCGL2 (NM_020121.2,2268-2286).
gacgatgagagtataattt

SEQ ID NO: 212287 - DNA, 19 bp, Homo sapiens
  siRNA target sequence for UGCGL2 (NM_020121.2,2270-2288).
cgatgagagtataatttct

SEQ ID NO: 212288 - DNA, 19 bp, Homo sapiens
  siRNA target sequence for UGCGL2 (NM_020121.2,2289-2307).
gcagtcactctctggatta

SEQ ID NO: 212289 - DNA, 19 bp, Homo sapiens
  siRNA target sequence for UGCGL2 (NM_020121.2,2360-2378).
gcacatgaaaacaagtgtt

SEQ ID NO: 212290 - DNA, 19 bp, Homo sapiens
  siRNA target sequence for UGCGL2 (NM_020121.2,2383-2401).
gtcggttggggattattta

SEQ ID NO: 212291 - DNA, 19 bp, Homo sapiens
  siRNA target sequence for UGCGL2 (NM_020121.2,2565-2583).
cttattgaggggatggata

SEQ ID NO: 212292 - DNA, 19 bp, Homo sapiens
  siRNA target sequence for UGCGL2 (NM_020121.2,2580-2598).
gataagaatgcttttgaga

SEQ ID NO: 212293 - DNA, 19 bp, Homo sapiens
  siRNA target sequence for UGCGL2 (NM_020121.2,2631-2649).
cgaactcaccagttgttct

SEQ ID NO: 212294 - DNA, 19 bp, Homo sapiens
  siRNA target sequence for UGCGL2 (NM_020121.2,2639-2657).
ccagttgttctgtcaagat

SEQ ID NO: 212295 - DNA, 19 bp, Homo sapiens
  siRNA target sequence for UGCGL2 (NM_020121.2,2642-2660).
gttgttctgtcaagatgta

SEQ ID NO: 212296 - DNA, 19 bp, Homo sapiens
  siRNA target sequence for UGCGL2 (NM_020121.2,2650-2668).
gtcaagatgtacttaaatt

SEQ ID NO: 212297 - DNA, 19 bp, Homo sapiens
  siRNA target sequence for UGCGL2 (NM_020121.2,2693-2711).
cagcaatgggagattctta

SEQ ID NO: 212298 - DNA, 19 bp, Homo sapiens
  siRNA target sequence for UGCGL2 (NM_020121.2,2704-2722).
gattcttaggacctttaga

SEQ ID NO: 212299 - DNA, 19 bp, Homo sapiens
  siRNA target sequence for UGCGL2 (NM_020121.2,2882-2900).
gcgtgcatctcgatatgat

SEQ ID NO: 212300 - DNA, 19 bp, Homo sapiens
  siRNA target sequence for UGCGL2 (NM_020121.2,2884-2902).
gtgcatctcgatatgatgt

SEQ ID NO: 212301 - DNA, 19 bp, Homo sapiens
  siRNA target sequence for UGCGL2 (NM_020121.2,2915-2933).
ggagaatcacagtgttata

SEQ ID NO: 212302 - DNA, 19 bp, Homo sapiens
  siRNA target sequence for UGCGL2 (NM_020121.2,2936-2954).
gacgaatcctcaagagaat

SEQ ID NO: 212303 - DNA, 19 bp, Homo sapiens
  siRNA target sequence for UGCGL2 (NM_020121.2,2943-2961).
cctcaagagaatgatatgt

SEQ ID NO: 212304 - DNA, 19 bp, Homo sapiens
  siRNA target sequence for UGCGL2 (NM_020121.2,2951-2969).
gaatgatatgttcttcaat

SEQ ID NO: 212305 - DNA, 19 bp, Homo sapiens
  siRNA target sequence for UGCGL2 (NM_020121.2,3027-3045).
gttgtacttggcaagatta

SEQ ID NO: 212306 - DNA, 19 bp, Homo sapiens
  siRNA target sequence for UGCGL2 (NM_020121.2,3030-3048).
gtacttggcaagattatca

SEQ ID NO: 212307 - DNA, 19 bp, Homo sapiens
  siRNA target sequence for UGCGL2 (NM_020121.2,3149-3167).
ggctaatgacgtttcttct

SEQ ID NO: 212308 - DNA, 19 bp, Homo sapiens
  siRNA target sequence for UGCGL2 (NM_020121.2,3171-3189).
ggaccagtggcaaaatttt

SEQ ID NO: 212309 - DNA, 19 bp, Homo sapiens
  siRNA target sequence for UGCGL2 (NM_020121.2,3172-3190).
gaccagtggcaaaattttt

SEQ ID NO: 212310 - DNA, 19 bp, Homo sapiens
  siRNA target sequence for UGCGL2 (NM_020121.2,3199-3217).
ctgaatcacccctcctaat

SEQ ID NO: 212311 - DNA, 19 bp, Homo sapiens
  siRNA target sequence for UGCGL2 (NM_020121.2,3237-3255).
gaaggctggttggttgaaa

SEQ ID NO: 212312 - DNA, 19 bp, Homo sapiens
  siRNA target sequence for UGCGL2 (NM_020121.2,3276-3294).
cttgataatattcacttaa

SEQ ID NO: 212313 - DNA, 19 bp, Homo sapiens
  siRNA target sequence for UGCGL2 (NM_020121.2,3296-3314).
ggatactgagaaaactgtt

SEQ ID NO: 212314 - DNA, 19 bp, Homo sapiens
  siRNA target sequence for UGCGL2 (NM_020121.2,3310-3328).
ctgttacagcagaatatga

SEQ ID NO: 212315 - DNA, 19 bp, Homo sapiens
  siRNA target sequence for UGCGL2 (NM_020121.2,3318-3336).
gcagaatatgaactagaat

SEQ ID NO: 212316 - DNA, 19 bp, Homo sapiens
  siRNA target sequence for UGCGL2 (NM_020121.2,3354-3372).
caatgctttgataaagtga

SEQ ID NO: 212317 - DNA, 19 bp, Homo sapiens
  siRNA target sequence for UGCGL2 (NM_020121.2,3398-3416).
gttcacactaggcacaaaa

SEQ ID NO: 212318 - DNA, 19 bp, Homo sapiens
  siRNA target sequence for UGCGL2 (NM_020121.2,3403-3421).
cactaggcacaaaaaataa

SEQ ID NO: 212319 - DNA, 19 bp, Homo sapiens
  siRNA target sequence for UGCGL2 (NM_020121.2,3424-3442).
ctgctgtggttgatacaat

SEQ ID NO: 212320 - DNA, 19 bp, Homo sapiens
  siRNA target sequence for UGCGL2 (NM_020121.2,3427-3445).
ctgtggttgatacaatagt

SEQ ID NO: 212321 - DNA, 19 bp, Homo sapiens
  siRNA target sequence for UGCGL2 (NM_020121.2,3429-3447).
gtggttgatacaatagtga

SEQ ID NO: 212322 - DNA, 19 bp, Homo sapiens
  siRNA target sequence for UGCGL2 (NM_020121.2,3451-3469).
cacatcatgggtattttca

SEQ ID NO: 212323 - DNA, 19 bp, Homo sapiens
  siRNA target sequence for UGCGL2 (NM_020121.2,3483-3501).
ccaggtgcttggatactga

SEQ ID NO: 212324 - DNA, 19 bp, Homo sapiens
  siRNA target sequence for UGCGL2 (NM_020121.2,3503-3521).
gttacaccaaggaaaatct

SEQ ID NO: 212325 - DNA, 19 bp, Homo sapiens
  siRNA target sequence for UGCGL2 (NM_020121.2,3591-3609).
gtattaaacagcttcaaaa

SEQ ID NO: 212326 - DNA, 19 bp, Homo sapiens
  siRNA target sequence for UGCGL2 (NM_020121.2,3665-3683).
ccttaccgatgaagatgaa

SEQ ID NO: 212327 - DNA, 19 bp, Homo sapiens
  siRNA target sequence for UGCGL2 (NM_020121.2,3666-3684).
cttaccgatgaagatgaaa

SEQ ID NO: 212328 - DNA, 19 bp, Homo sapiens
  siRNA target sequence for UGCGL2 (NM_020121.2,3698-3716).
gtgggattccattaaaagt

SEQ ID NO: 212329 - DNA, 19 bp, Homo sapiens
  siRNA target sequence for UGCGL2 (NM_020121.2,3721-3739).
cagtaagcttgcataaaga

SEQ ID NO: 212330 - DNA, 19 bp, Homo sapiens
  siRNA target sequence for UGCGL2 (NM_020121.2,3777-3795).
gttgcttctggtcatttat

SEQ ID NO: 212331 - DNA, 19 bp, Homo sapiens
  siRNA target sequence for UGCGL2 (NM_020121.2,3801-3819).
cgttttttaagaattatga

SEQ ID NO: 212332 - DNA, 19 bp, Homo sapiens
  siRNA target sequence for UGCGL2 (NM_020121.2,3828-3846).
gttttgcgtaacaccaaaa

SEQ ID NO: 212333 - DNA, 19 bp, Homo sapiens
  siRNA target sequence for UGCGL2 (NM_020121.2,3881-3899).
ctcaccgacatttaaagaa

SEQ ID NO: 212334 - DNA, 19 bp, Homo sapiens
  siRNA target sequence for UGCGL2 (NM_020121.2,3885-3903).
ccgacatttaaagaagtaa

SEQ ID NO: 212335 - DNA, 19 bp, Homo sapiens
  siRNA target sequence for UGCGL2 (NM_020121.2,3906-3924).
cctcacatggctaaagagt

SEQ ID NO: 212336 - DNA, 19 bp, Homo sapiens
  siRNA target sequence for UGCGL2 (NM_020121.2,3907-3925).
ctcacatggctaaagagta

SEQ ID NO: 212337 - DNA, 19 bp, Homo sapiens
  siRNA target sequence for UGCGL2 (NM_020121.2,3928-3946).
gattccgatatgaactagt

SEQ ID NO: 212338 - DNA, 19 bp, Homo sapiens
  siRNA target sequence for UGCGL2 (NM_020121.2,3932-3950).
ccgatatgaactagttcaa

SEQ ID NO: 212339 - DNA, 19 bp, Homo sapiens
  siRNA target sequence for UGCGL2 (NM_020121.2,3933-3951).
cgatatgaactagttcaat

SEQ ID NO: 212340 - DNA, 19 bp, Homo sapiens
  siRNA target sequence for UGCGL2 (NM_020121.2,3934-3952).
gatatgaactagttcaata

SEQ ID NO: 212341 - DNA, 19 bp, Homo sapiens
  siRNA target sequence for UGCGL2 (NM_020121.2,3939-3957).
gaactagttcaatataggt

SEQ ID NO: 212342 - DNA, 19 bp, Homo sapiens
  siRNA target sequence for UGCGL2 (NM_020121.2,3973-3991).
gtcaacagactgaaagaca

SEQ ID NO: 212343 - DNA, 19 bp, Homo sapiens
  siRNA target sequence for UGCGL2 (NM_020121.2,3994-4012).
ggattatttggggttacaa

SEQ ID NO: 212344 - DNA, 19 bp, Homo sapiens
  siRNA target sequence for UGCGL2 (NM_020121.2,3995-4013).
gattatttggggttacaaa

SEQ ID NO: 212345 - DNA, 19 bp, Homo sapiens
  siRNA target sequence for UGCGL2 (NM_020121.2,4039-4057).
cactagcagtggacaaaat

SEQ ID NO: 212346 - DNA, 19 bp, Homo sapiens
  siRNA target sequence for UGCGL2 (NM_020121.2,4079-4097).
gattgtgagacatgatcta

SEQ ID NO: 212347 - DNA, 19 bp, Homo sapiens
  siRNA target sequence for UGCGL2 (NM_020121.2,4138-4156).
ggtatactccattttgtga

SEQ ID NO: 212348 - DNA, 19 bp, Homo sapiens
  siRNA target sequence for UGCGL2 (NM_020121.2,4167-4185).
gaaatggatggatatcgtt

SEQ ID NO: 212349 - DNA, 19 bp, Homo sapiens
  siRNA target sequence for UGCGL2 (NM_020121.2,4176-4194).
ggatatcgtttctggaaaa

SEQ ID NO: 212350 - DNA, 19 bp, Homo sapiens
  siRNA target sequence for UGCGL2 (NM_020121.2,4202-4220).
ctgggcatcacatctttta

SEQ ID NO: 212351 - DNA, 19 bp, Homo sapiens
  siRNA target sequence for UGCGL2 (NM_020121.2,4295-4313).
gctcaggagccagtatcaa

SEQ ID NO: 212352 - DNA, 19 bp, Homo sapiens
  siRNA target sequence for UGCGL2 (NM_020121.2,4323-4341).
caagatccaaacagtcttt

SEQ ID NO: 212353 - DNA, 19 bp, Homo sapiens
  siRNA target sequence for UGCGL2 (NM_020121.2,4326-4344).
gatccaaacagtctttcaa

SEQ ID NO: 212354 - DNA, 19 bp, Homo sapiens
  siRNA target sequence for UGCGL2 (NM_020121.2,4336-4354).
gtctttcaaacctagatca

SEQ ID NO: 212355 - DNA, 19 bp, Homo sapiens
  siRNA target sequence for UGCGL2 (NM_020121.2,4359-4377).
ctccccaataatatgattt

SEQ ID NO: 212356 - DNA, 19 bp, Homo sapiens
  siRNA target sequence for UGCGL2 (NM_020121.2,4363-4381).
ccaataatatgatttacca

SEQ ID NO: 212357 - DNA, 19 bp, Homo sapiens
  siRNA target sequence for UGCGL2 (NM_020121.2,4453-4471).
gagccaaaacaattgatct

SEQ ID NO: 212358 - DNA, 19 bp, Homo sapiens
  siRNA target sequence for UGCGL2 (NM_020121.2,4472-4490).
gtgcaataatcccaaaaca

SEQ ID NO: 212359 - DNA, 19 bp, Homo sapiens
  siRNA target sequence for UGCGL2 (NM_020121.2,4474-4492).
gcaataatcccaaaacaaa

SEQ ID NO: 212360 - DNA, 19 bp, Homo sapiens
  siRNA target sequence for ADPRTL1 (NM_006437.2,132-150).
gtatcttctgtttgaaagt

SEQ ID NO: 212361 - DNA, 19 bp, Homo sapiens
  siRNA target sequence for ADPRTL1 (NM_006437.2,240-258).
gcacacatataatcttaga

SEQ ID NO: 212362 - DNA, 19 bp, Homo sapiens
  siRNA target sequence for ADPRTL1 (NM_006437.2,274-292).
gagtcagtaccaactgaat

SEQ ID NO: 212363 - DNA, 19 bp, Homo sapiens
  siRNA target sequence for ADPRTL1 (NM_006437.2,429-447).
cgagcagttctgaagtgaa

SEQ ID NO: 212364 - DNA, 19 bp, Homo sapiens
  siRNA target sequence for ADPRTL1 (NM_006437.2,497-515).
gaactcactgagtttggta

SEQ ID NO: 212365 - DNA, 19 bp, Homo sapiens
  siRNA target sequence for ADPRTL1 (NM_006437.2,513-531).
gtatgcagaatgttgaaat

SEQ ID NO: 212366 - DNA, 19 bp, Homo sapiens
  siRNA target sequence for ADPRTL1 (NM_006437.2,647-665).
gactgtcctttcctgatat

SEQ ID NO: 212367 - DNA, 19 bp, Homo sapiens
  siRNA target sequence for ADPRTL1 (NM_006437.2,694-712).
ggagactagaagacagttt

SEQ ID NO: 212368 - DNA, 19 bp, Homo sapiens
  siRNA target sequence for ADPRTL1 (NM_006437.2,820-838).
ccaattagcatctgaacaa

SEQ ID NO: 212369 - DNA, 19 bp, Homo sapiens
  siRNA target sequence for ADPRTL1 (NM_006437.2,856-874).
ggaggaagtcatgaattca

SEQ ID NO: 212370 - DNA, 19 bp, Homo sapiens
  siRNA target sequence for ADPRTL1 (NM_006437.2,897-915).
gcgatttagtagagatgat

SEQ ID NO: 212371 - DNA, 19 bp, Homo sapiens
  siRNA target sequence for ADPRTL1 (NM_006437.2,1000-1018).
ggggattctccttctagta

SEQ ID NO: 212372 - DNA, 19 bp, Homo sapiens
  siRNA target sequence for ADPRTL1 (NM_006437.2,1001-1019).
gggattctccttctagtaa

SEQ ID NO: 212373 - DNA, 19 bp, Homo sapiens
  siRNA target sequence for ADPRTL1 (NM_006437.2,1038-1056).
gagaaacagcagagcaatt

SEQ ID NO: 212374 - DNA, 19 bp, Homo sapiens
  siRNA target sequence for ADPRTL1 (NM_006437.2,1046-1064).
gcagagcaattgcaaaaga

SEQ ID NO: 212375 - DNA, 19 bp, Homo sapiens
  siRNA target sequence for ADPRTL1 (NM_006437.2,1047-1065).
cagagcaattgcaaaagat

SEQ ID NO: 212376 - DNA, 19 bp, Homo sapiens
  siRNA target sequence for ADPRTL1 (NM_006437.2,1101-1119).
gcacaatgcccaaagaagt

SEQ ID NO: 212377 - DNA, 19 bp, Homo sapiens
  siRNA target sequence for ADPRTL1 (NM_006437.2,1126-1144).
gggactattggctaagaaa

SEQ ID NO: 212378 - DNA, 19 bp, Homo sapiens
  siRNA target sequence for ADPRTL1 (NM_006437.2,1146-1164).
cagacctctgccagctaat

SEQ ID NO: 212379 - DNA, 19 bp, Homo sapiens
  siRNA target sequence for ADPRTL1 (NM_006437.2,1148-1166).
gacctctgccagctaataa

SEQ ID NO: 212380 - DNA, 19 bp, Homo sapiens
  siRNA target sequence for ADPRTL1 (NM_006437.2,1150-1168).
cctctgccagctaataaga

SEQ ID NO: 212381 - DNA, 19 bp, Homo sapiens
  siRNA target sequence for ADPRTL1 (NM_006437.2,1175-1193).
gttaatgtctgtgaaacta

SEQ ID NO: 212382 - DNA, 19 bp, Homo sapiens
  siRNA target sequence for ADPRTL1 (NM_006437.2,1232-1250).
cgagctttgaggtgcaaaa

SEQ ID NO: 212383 - DNA, 19 bp, Homo sapiens
  siRNA target sequence for ADPRTL1 (NM_006437.2,1245-1263).
gcaaaattgagcatgttga

SEQ ID NO: 212384 - DNA, 19 bp, Homo sapiens
  siRNA target sequence for ADPRTL1 (NM_006437.2,1287-1305).
gggttagaaaagaggtttt

SEQ ID NO: 212385 - DNA, 19 bp, Homo sapiens
  siRNA target sequence for ADPRTL1 (NM_006437.2,1453-1471).
gtgtcgagggttgctttta

SEQ ID NO: 212386 - DNA, 19 bp, Homo sapiens
  siRNA target sequence for ADPRTL1 (NM_006437.2,1462-1480).
gttgcttttacccaaagta

SEQ ID NO: 212387 - DNA, 19 bp, Homo sapiens
  siRNA target sequence for ADPRTL1 (NM_006437.2,1544-1562).
gattcgctcagtacaagta

SEQ ID NO: 212388 - DNA, 19 bp, Homo sapiens
  siRNA target sequence for ADPRTL1 (NM_006437.2,1548-1566).
cgctcagtacaagtatcaa

SEQ ID NO: 212389 - DNA, 19 bp, Homo sapiens
  siRNA target sequence for ADPRTL1 (NM_006437.2,1597-1615).
cagactcctgctcatttgt

SEQ ID NO: 212390 - DNA, 19 bp, Homo sapiens
  siRNA target sequence for ADPRTL1 (NM_006437.2,1599-1617).
gactcctgctcatttgtga

SEQ ID NO: 212391 - DNA, 19 bp, Homo sapiens
  siRNA target sequence for ADPRTL1 (NM_006437.2,1618-1636).
cgtagccctcggaaagtgt

SEQ ID NO: 212392 - DNA, 19 bp, Homo sapiens
  siRNA target sequence for ADPRTL1 (NM_006437.2,1619-1637).
gtagccctcggaaagtgta

SEQ ID NO: 212393 - DNA, 19 bp, Homo sapiens
  siRNA target sequence for ADPRTL1 (NM_006437.2,1635-1653).
gtatggacttacatgagaa

SEQ ID NO: 212394 - DNA, 19 bp, Homo sapiens
  siRNA target sequence for ADPRTL1 (NM_006437.2,1651-1669).
gaaggacttttccttaact

SEQ ID NO: 212395 - DNA, 19 bp, Homo sapiens
  siRNA target sequence for ADPRTL1 (NM_006437.2,1745-1763).
gaatttgttgtctataaaa

SEQ ID NO: 212396 - DNA, 19 bp, Homo sapiens
  siRNA target sequence for ADPRTL1 (NM_006437.2,1801-1819).
catgcctggagatcagata

SEQ ID NO: 212397 - DNA, 19 bp, Homo sapiens
  siRNA target sequence for ADPRTL1 (NM_006437.2,1806-1824).
ctggagatcagataaagga

SEQ ID NO: 212398 - DNA, 19 bp, Homo sapiens
  siRNA target sequence for ADPRTL1 (NM_006437.2,1832-1850).
cctagtgatcatactgaat

SEQ ID NO: 212399 - DNA, 19 bp, Homo sapiens
  siRNA target sequence for ADPRTL1 (NM_006437.2,1975-1993).
ggaggatgtccacatcaaa

SEQ ID NO: 212400 - DNA, 19 bp, Homo sapiens
  siRNA target sequence for ADPRTL1 (NM_006437.2,1987-2005).
catcaaagggagaatcata

SEQ ID NO: 212401 - DNA, 19 bp, Homo sapiens
  siRNA target sequence for ADPRTL1 (NM_006437.2,2057-2075).
gtgcccattgaggcaaaat

SEQ ID NO: 212402 - DNA, 19 bp, Homo sapiens
  siRNA target sequence for ADPRTL1 (NM_006437.2,2059-2077).
gcccattgaggcaaaatat

SEQ ID NO: 212403 - DNA, 19 bp, Homo sapiens
  siRNA target sequence for ADPRTL1 (NM_006437.2,2069-2087).
gcaaaatatatctttcctt

SEQ ID NO: 212404 - DNA, 19 bp, Homo sapiens
  siRNA target sequence for ADPRTL1 (NM_006437.2,2111-2129).
ggcttcgaagccttcatca

SEQ ID NO: 212405 - DNA, 19 bp, Homo sapiens
  siRNA target sequence for ADPRTL1 (NM_006437.2,2137-2155).
gcacatagttggagagatt

SEQ ID NO: 212406 - DNA, 19 bp, Homo sapiens
  siRNA target sequence for ADPRTL1 (NM_006437.2,2138-2156).
cacatagttggagagatta

SEQ ID NO: 212407 - DNA, 19 bp, Homo sapiens
  siRNA target sequence for ADPRTL1 (NM_006437.2,2230-2248).
ggatgctccggacgttttt

SEQ ID NO: 212408 - DNA, 19 bp, Homo sapiens
  siRNA target sequence for ADPRTL1 (NM_006437.2,2231-2249).
gatgctccggacgttttta

SEQ ID NO: 212409 - DNA, 19 bp, Homo sapiens
  siRNA target sequence for ADPRTL1 (NM_006437.2,2235-2253).
ctccggacgtttttactgt

SEQ ID NO: 212410 - DNA, 19 bp, Homo sapiens
  siRNA target sequence for ADPRTL1 (NM_006437.2,2237-2255).
ccggacgtttttactgtaa

SEQ ID NO: 212411 - DNA, 19 bp, Homo sapiens
  siRNA target sequence for ADPRTL1 (NM_006437.2,2239-2257).
ggacgtttttactgtaagt

SEQ ID NO: 212412 - DNA, 19 bp, Homo sapiens
  siRNA target sequence for ADPRTL1 (NM_006437.2,2242-2260).
cgtttttactgtaagtgtt

SEQ ID NO: 212413 - DNA, 19 bp, Homo sapiens
  siRNA target sequence for ADPRTL1 (NM_006437.2,2250-2268).
ctgtaagtgttggaaactt

SEQ ID NO: 212414 - DNA, 19 bp, Homo sapiens
  siRNA target sequence for ADPRTL1 (NM_006437.2,2274-2292).
ctaaggctaaggttcttat

SEQ ID NO: 212415 - DNA, 19 bp, Homo sapiens
  siRNA target sequence for ADPRTL1 (NM_006437.2,2279-2297).
gctaaggttcttataaaaa

SEQ ID NO: 212416 - DNA, 19 bp, Homo sapiens
  siRNA target sequence for ADPRTL1 (NM_006437.2,2280-2298).
ctaaggttcttataaaaat

SEQ ID NO: 212417 - DNA, 19 bp, Homo sapiens
  siRNA target sequence for ADPRTL1 (NM_006437.2,2327-2345).
ggcactgttggtgtctttt

SEQ ID NO: 212418 - DNA, 19 bp, Homo sapiens
  siRNA target sequence for ADPRTL1 (NM_006437.2,2328-2346).
gcactgttggtgtcttttt

SEQ ID NO: 212419 - DNA, 19 bp, Homo sapiens
  siRNA target sequence for ADPRTL1 (NM_006437.2,2378-2396).
gacaaggctttgaatgaaa

SEQ ID NO: 212420 - DNA, 19 bp, Homo sapiens
  siRNA target sequence for ADPRTL1 (NM_006437.2,2405-2423).
gatacagtagagaagattt

SEQ ID NO: 212421 - DNA, 19 bp, Homo sapiens
  siRNA target sequence for ADPRTL1 (NM_006437.2,2446-2464).
gcaaagcttctctttgact

SEQ ID NO: 212422 - DNA, 19 bp, Homo sapiens
  siRNA target sequence for ADPRTL1 (NM_006437.2,2455-2473).
ctctttgactatgtctatt

SEQ ID NO: 212423 - DNA, 19 bp, Homo sapiens
  siRNA target sequence for ADPRTL1 (NM_006437.2,2564-2582).
gaaggcagctccttagaca

SEQ ID NO: 212424 - DNA, 19 bp, Homo sapiens
  siRNA target sequence for ADPRTL1 (NM_006437.2,2728-2746).
gagcgaagtgattatttgt

SEQ ID NO: 212425 - DNA, 19 bp, Homo sapiens
  siRNA target sequence for ADPRTL1 (NM_006437.2,2731-2749).
cgaagtgattatttgtctt

SEQ ID NO: 212426 - DNA, 19 bp, Homo sapiens
  siRNA target sequence for ADPRTL1 (NM_006437.2,2763-2781).
ccatggagggtgtgacatt

SEQ ID NO: 212427 - DNA, 19 bp, Homo sapiens
  siRNA target sequence for ADPRTL1 (NM_006437.2,2869-2887).
caaggagctattttcgtat

SEQ ID NO: 212428 - DNA, 19 bp, Homo sapiens
  siRNA target sequence for ADPRTL1 (NM_006437.2,2873-2891).
gagctattttcgtatccta

SEQ ID NO: 212429 - DNA, 19 bp, Homo sapiens
  siRNA target sequence for ADPRTL1 (NM_006437.2,2884-2902).
gtatcctaagcatatcaca

SEQ ID NO: 212430 - DNA, 19 bp, Homo sapiens
  siRNA target sequence for ADPRTL1 (NM_006437.2,2973-2991).
cactccgatatcttagctt

SEQ ID NO: 212431 - DNA, 19 bp, Homo sapiens
  siRNA target sequence for ADPRTL1 (NM_006437.2,2975-2993).
ctccgatatcttagcttat

SEQ ID NO: 212432 - DNA, 19 bp, Homo sapiens
  siRNA target sequence for ADPRTL1 (NM_006437.2,2978-2996).
cgatatcttagcttattgt

SEQ ID NO: 212433 - DNA, 19 bp, Homo sapiens
  siRNA target sequence for ADPRTL1 (NM_006437.2,2979-2997).
gatatcttagcttattgta

SEQ ID NO: 212434 - DNA, 19 bp, Homo sapiens
  siRNA target sequence for ADPRTL1 (NM_006437.2,3049-3067).
ggatgagagcctgacatta

SEQ ID NO: 212435 - DNA, 19 bp, Homo sapiens
  siRNA target sequence for ADPRTL1 (NM_006437.2,3109-3127).
ctgcggtatcggttctaca

SEQ ID NO: 212436 - DNA, 19 bp, Homo sapiens
  siRNA target sequence for ADPRTL1 (NM_006437.2,3118-3136).
cggttctacagcaaatcgt

SEQ ID NO: 212437 - DNA, 19 bp, Homo sapiens
  siRNA target sequence for ADPRTL1 (NM_006437.2,3128-3146).
gcaaatcgtcacgtcttaa

SEQ ID NO: 212438 - DNA, 19 bp, Homo sapiens
  siRNA target sequence for ADPRTL1 (NM_006437.2,3134-3152).
cgtcacgtcttaaggattt

SEQ ID NO: 212439 - DNA, 19 bp, Homo sapiens
  siRNA target sequence for ADPRTL1 (NM_006437.2,3135-3153).
gtcacgtcttaaggatttt

SEQ ID NO: 212440 - DNA, 19 bp, Homo sapiens
  siRNA target sequence for ADPRTL1 (NM_006437.2,3137-3155).
cacgtcttaaggattttgt

SEQ ID NO: 212441 - DNA, 19 bp, Homo sapiens
  siRNA target sequence for ADPRTL1 (NM_006437.2,3160-3178).
gtgtggtgccggagtattt

SEQ ID NO: 212442 - DNA, 19 bp, Homo sapiens
  siRNA target sequence for ADPRTL1 (NM_006437.2,3162-3180).
gtggtgccggagtatttga

SEQ ID NO: 212443 - DNA, 19 bp, Homo sapiens
  siRNA target sequence for ADPRTL1 (NM_006437.2,3164-3182).
ggtgccggagtatttgaat

SEQ ID NO: 212444 - DNA, 19 bp, Homo sapiens
  siRNA target sequence for ADPRTL1 (NM_006437.2,3165-3183).
gtgccggagtatttgaata

SEQ ID NO: 212445 - DNA, 19 bp, Homo sapiens
  siRNA target sequence for ADPRTL1 (NM_006437.2,3167-3185).
gccggagtatttgaatatt

SEQ ID NO: 212446 - DNA, 19 bp, Homo sapiens
  siRNA target sequence for ADPRTL1 (NM_006437.2,3230-3248).
caaatgaccaggctatgtt

SEQ ID NO: 212447 - DNA, 19 bp, Homo sapiens
  siRNA target sequence for ADPRTL1 (NM_006437.2,3260-3278).
cactctgtctccgtcaaat

SEQ ID NO: 212448 - DNA, 19 bp, Homo sapiens
  siRNA target sequence for ADPRTL1 (NM_006437.2,3353-3371).
cgactccttgtctatggat

SEQ ID NO: 212449 - DNA, 19 bp, Homo sapiens
  siRNA target sequence for ADPRTL1 (NM_006437.2,3358-3376).
ccttgtctatggattcatt

SEQ ID NO: 212450 - DNA, 19 bp, Homo sapiens
  siRNA target sequence for ADPRTL1 (NM_006437.2,3402-3420).
gtgcactaattcaagagaa

SEQ ID NO: 212451 - DNA, 19 bp, Homo sapiens
  siRNA target sequence for ADPRTL1 (NM_006437.2,3494-3512).
cgagctctaatcagagatt

SEQ ID NO: 212452 - DNA, 19 bp, Homo sapiens
  siRNA target sequence for ADPRTL1 (NM_006437.2,3495-3513).
gagctctaatcagagatta

SEQ ID NO: 212453 - DNA, 19 bp, Homo sapiens
  siRNA target sequence for ADPRTL1 (NM_006437.2,3498-3516).
ctctaatcagagattatga

SEQ ID NO: 212454 - DNA, 19 bp, Homo sapiens
  siRNA target sequence for ADPRTL1 (NM_006437.2,3608-3626).
ctcataacacaatttacaa

SEQ ID NO: 212455 - DNA, 19 bp, Homo sapiens
  siRNA target sequence for ADPRTL1 (NM_006437.2,3671-3689).
cctgatattccaaaagttt

SEQ ID NO: 212456 - DNA, 19 bp, Homo sapiens
  siRNA target sequence for ADPRTL1 (NM_006437.2,3761-3779).
gtcaggaaccagtctcttt

SEQ ID NO: 212457 - DNA, 19 bp, Homo sapiens
  siRNA target sequence for ADPRTL1 (NM_006437.2,3763-3781).
caggaaccagtctctttta

SEQ ID NO: 212458 - DNA, 19 bp, Homo sapiens
  siRNA target sequence for ADPRTL1 (NM_006437.2,3791-3809).
gagtggccagaattacgtt

SEQ ID NO: 212459 - DNA, 19 bp, Homo sapiens
  siRNA target sequence for ADPRTL1 (NM_006437.2,3797-3815).
ccagaattacgtttatcca

SEQ ID NO: 212460 - DNA, 19 bp, Homo sapiens
  siRNA target sequence for ADPRTL1 (NM_006437.2,3798-3816).
cagaattacgtttatccaa

SEQ ID NO: 212461 - DNA, 19 bp, Homo sapiens
  siRNA target sequence for ADPRTL1 (NM_006437.2,3908-3926).
gtactaccagctttcacat

SEQ ID NO: 212462 - DNA, 19 bp, Homo sapiens
  siRNA target sequence for ADPRTL1 (NM_006437.2,3914-3932).
ccagctttcacatcaaatt

SEQ ID NO: 212463 - DNA, 19 bp, Homo sapiens
  siRNA target sequence for ADPRTL1 (NM_006437.2,4708-4726).
cagctgctttttacaaata

SEQ ID NO: 212464 - DNA, 19 bp, Homo sapiens
  siRNA target sequence for ADPRTL1 (NM_006437.2,4872-4890).
caccagaactgggacttat

SEQ ID NO: 212465 - DNA, 19 bp, Homo sapiens
  siRNA target sequence for ADPRTL1 (NM_006437.2,4874-4892).
ccagaactgggacttatat

SEQ ID NO: 212466 - DNA, 19 bp, Homo sapiens
  siRNA target sequence for ADPRTL1 (NM_006437.2,4875-4893).
cagaactgggacttatatt

SEQ ID NO: 212467 - DNA, 19 bp, Homo sapiens
  siRNA target sequence for ADPRTL1 (NM_006437.2,4910-4928).
ggtttgcacagctttctta

SEQ ID NO: 212468 - DNA, 19 bp, Homo sapiens
  siRNA target sequence for ADPRTL1 (NM_006437.2,4911-4929).
gtttgcacagctttcttaa

SEQ ID NO: 212469 - DNA, 19 bp, Homo sapiens
  siRNA target sequence for ADPRTL1 (NM_006437.2,4992-5010).
caatgctggtactacagtt

SEQ ID NO: 212470 - DNA, 19 bp, Homo sapiens
  siRNA target sequence for ADPRTL1 (NM_006437.2,5033-5051).
gagggaatagtgttcaaat

SEQ ID NO: 212471 - DNA, 19 bp, Homo sapiens
  siRNA target sequence for ADPRTL1 (NM_006437.2,5037-5055).
gaatagtgttcaaatcact

SEQ ID NO: 212472 - DNA, 19 bp, Homo sapiens
  siRNA target sequence for ADPRTL1 (NM_006437.2,5097-5115).
gggcttttgaggcaataaa

SEQ ID NO: 212473 - DNA, 19 bp, Homo sapiens
  siRNA target sequence for ADPRTL1 (NM_006437.2,5147-5165).
ggacagtacccatctatct

SEQ ID NO: 212474 - DNA, 19 bp, Homo sapiens
  siRNA target sequence for ADPRTL1 (NM_006437.2,5252-5270).
catagagtcctccattaca

SEQ ID NO: 212475 - DNA, 19 bp, Homo sapiens
  siRNA target sequence for ADPRTL3 (NM_005485.2,365-383).
ccgcagagaagcgcataat

SEQ ID NO: 212476 - DNA, 19 bp, Homo sapiens
  siRNA target sequence for ADPRTL3 (NM_005485.2,430-448).
gtgtatgaggactacaact

SEQ ID NO: 212477 - DNA, 19 bp, Homo sapiens
  siRNA target sequence for ADPRTL3 (NM_005485.2,560-578).
gagaggtcggccagtcaaa

SEQ ID NO: 212478 - DNA, 19 bp, Homo sapiens
  siRNA target sequence for ADPRTL3 (NM_005485.2,562-580).
gaggtcggccagtcaaaga

SEQ ID NO: 212479 - DNA, 19 bp, Homo sapiens
  siRNA target sequence for ADPRTL3 (NM_005485.2,565-583).
gtcggccagtcaaagatca

SEQ ID NO: 212480 - DNA, 19 bp, Homo sapiens
  siRNA target sequence for ADPRTL3 (NM_005485.2,659-677).
cagagcgggaccactttgt

SEQ ID NO: 212481 - DNA, 19 bp, Homo sapiens
  siRNA target sequence for ADPRTL3 (NM_005485.2,689-707).
gcaagtacacacttatcga

SEQ ID NO: 212482 - DNA, 19 bp, Homo sapiens
  siRNA target sequence for ADPRTL3 (NM_005485.2,690-708).
caagtacacacttatcgaa

SEQ ID NO: 212483 - DNA, 19 bp, Homo sapiens
  siRNA target sequence for ADPRTL3 (NM_005485.2,999-1017).
ggagctgtcctcacacttt

SEQ ID NO: 212484 - DNA, 19 bp, Homo sapiens
  siRNA target sequence for ADPRTL3 (NM_005485.2,1022-1040).
ccgtcatcccgcacaactt

SEQ ID NO: 212485 - DNA, 19 bp, Homo sapiens
  siRNA target sequence for ADPRTL3 (NM_005485.2,1238-1256).
ctggagcacctgagtacaa

SEQ ID NO: 212486 - DNA, 19 bp, Homo sapiens
  siRNA target sequence for ADPRTL3 (NM_005485.2,1249-1267).
gagtacaaggtgatacaga

SEQ ID NO: 212487 - DNA, 19 bp, Homo sapiens
  siRNA target sequence for ADPRTL3 (NM_005485.2,1257-1275).
ggtgatacagacctactta

SEQ ID NO: 212488 - DNA, 19 bp, Homo sapiens
  siRNA target sequence for ADPRTL3 (NM_005485.2,1443-1461).
ccgcatcatgccacattct

SEQ ID NO: 212489 - DNA, 19 bp, Homo sapiens
  siRNA target sequence for ADPRTL3 (NM_005485.2,1471-1489).
gttggcaagggcatctact

SEQ ID NO: 212490 - DNA, 19 bp, Homo sapiens
  siRNA target sequence for ADPRTL3 (NM_005485.2,1506-1524).
caagtcagctggatatgtt

SEQ ID NO: 212491 - DNA, 19 bp, Homo sapiens
  siRNA target sequence for ADPRTL3 (NM_005485.2,1509-1527).
gtcagctggatatgttatt

SEQ ID NO: 212492 - DNA, 19 bp, Homo sapiens
  siRNA target sequence for ADPRTL3 (NM_005485.2,1546-1564).
caccatgtcggctacatgt

SEQ ID NO: 212493 - DNA, 19 bp, Homo sapiens
  siRNA target sequence for ART1 (NM_004314.1,964-982).
ggccttgccatctggataa

SEQ ID NO: 212494 - DNA, 19 bp, Homo sapiens
  siRNA target sequence for ART1 (NM_004314.1,965-983).
gccttgccatctggataat

SEQ ID NO: 212495 - DNA, 19 bp, Homo sapiens
  siRNA target sequence for ART3 (NM_001179.2,154-172).
gctgctggcaaccatgatt

SEQ ID NO: 212496 - DNA, 19 bp, Homo sapiens
  siRNA target sequence for ART3 (NM_001179.2,205-223).
gttagacatggcagataat

SEQ ID NO: 212497 - DNA, 19 bp, Homo sapiens
  siRNA target sequence for ART3 (NM_001179.2,225-243).
catttgatgatgaatacct

SEQ ID NO: 212498 - DNA, 19 bp, Homo sapiens
  siRNA target sequence for ART3 (NM_001179.2,233-251).
gatgaatacctgaaatgta

SEQ ID NO: 212499 - DNA, 19 bp, Homo sapiens
  siRNA target sequence for ART3 (NM_001179.2,253-271).
ggacaggatggaaattaaa

SEQ ID NO: 212500 - DNA, 19 bp, Homo sapiens
  siRNA target sequence for ART3 (NM_001179.2,259-277).
gatggaaattaaatacgtt

SEQ ID NO: 212501 - DNA, 19 bp, Homo sapiens
  siRNA target sequence for ART3 (NM_001179.2,307-325).
ccaccagcaattagatact

SEQ ID NO: 212502 - DNA, 19 bp, Homo sapiens
  siRNA target sequence for ART3 (NM_001179.2,356-374).
gcccgaaagactcaaatct

SEQ ID NO: 212503 - DNA, 19 bp, Homo sapiens
  siRNA target sequence for ART3 (NM_001179.2,357-375).
cccgaaagactcaaatctt

SEQ ID NO: 212504 - DNA, 19 bp, Homo sapiens
  siRNA target sequence for ART3 (NM_001179.2,360-378).
gaaagactcaaatctttct

SEQ ID NO: 212505 - DNA, 19 bp, Homo sapiens
  siRNA target sequence for ART3 (NM_001179.2,379-397).
ccctatgaattttaaggat

SEQ ID NO: 212506 - DNA, 19 bp, Homo sapiens
  siRNA target sequence for ART3 (NM_001179.2,592-610).
caaaactgtggtatataga

SEQ ID NO: 212507 - DNA, 19 bp, Homo sapiens
  siRNA target sequence for ART3 (NM_001179.2,612-630).
caagccagggcacttcatt

SEQ ID NO: 212508 - DNA, 19 bp, Homo sapiens
  siRNA target sequence for ART3 (NM_001179.2,616-634).
ccagggcacttcatttaca

SEQ ID NO: 212509 - DNA, 19 bp, Homo sapiens
  siRNA target sequence for ART3 (NM_001179.2,633-651).
catttggagggctaaacca

SEQ ID NO: 212510 - DNA, 19 bp, Homo sapiens
  siRNA target sequence for ART3 (NM_001179.2,653-671).
gccaggtttggccatttta

SEQ ID NO: 212511 - DNA, 19 bp, Homo sapiens
  siRNA target sequence for ART3 (NM_001179.2,665-683).
cattttaccttggcatatt

SEQ ID NO: 212512 - DNA, 19 bp, Homo sapiens
  siRNA target sequence for ART3 (NM_001179.2,719-737).
gtgttatccatctacacat

SEQ ID NO: 212513 - DNA, 19 bp, Homo sapiens
  siRNA target sequence for ART3 (NM_001179.2,735-753).
catgccttggagttgacat

SEQ ID NO: 212514 - DNA, 19 bp, Homo sapiens
  siRNA target sequence for ART3 (NM_001179.2,834-852).
ctggcaataaccttatcct

SEQ ID NO: 212515 - DNA, 19 bp, Homo sapiens
  siRNA target sequence for ART3 (NM_001179.2,877-895).
ccattatgagtgtgcattt

SEQ ID NO: 212516 - DNA, 19 bp, Homo sapiens
  siRNA target sequence for ART3 (NM_001179.2,1198-1216).
gtttgggatggtcatcatt

SEQ ID NO: 212517 - DNA, 19 bp, Homo sapiens
  siRNA target sequence for ART3 (NM_001179.2,1203-1221).
ggatggtcatcattttaat

SEQ ID NO: 212518 - DNA, 19 bp, Homo sapiens
  siRNA target sequence for ART3 (NM_001179.2,1224-1242).
gtgtttctgctataaatct

SEQ ID NO: 212519 - DNA, 19 bp, Homo sapiens
  siRNA target sequence for TNKS2 (NM_025235.2,585-603).
ggcggaaagacgtagttga

SEQ ID NO: 212520 - DNA, 19 bp, Homo sapiens
  siRNA target sequence for TNKS2 (NM_025235.2,586-604).
gcggaaagacgtagttgaa

SEQ ID NO: 212521 - DNA, 19 bp, Homo sapiens
  siRNA target sequence for TNKS2 (NM_025235.2,587-605).
cggaaagacgtagttgaat

SEQ ID NO: 212522 - DNA, 19 bp, Homo sapiens
  siRNA target sequence for TNKS2 (NM_025235.2,650-668).
ggccttattcctcttcata

SEQ ID NO: 212523 - DNA, 19 bp, Homo sapiens
  siRNA target sequence for TNKS2 (NM_025235.2,684-702).
gtcatgctgaagtagtcaa

SEQ ID NO: 212524 - DNA, 19 bp, Homo sapiens
  siRNA target sequence for TNKS2 (NM_025235.2,727-745).
ccccaatgctcgagataat

SEQ ID NO: 212525 - DNA, 19 bp, Homo sapiens
  siRNA target sequence for TNKS2 (NM_025235.2,728-746).
cccaatgctcgagataatt

SEQ ID NO: 212526 - DNA, 19 bp, Homo sapiens
  siRNA target sequence for TNKS2 (NM_025235.2,734-752).
gctcgagataattggaatt

SEQ ID NO: 212527 - DNA, 19 bp, Homo sapiens
  siRNA target sequence for TNKS2 (NM_025235.2,826-844).
gccaaccatccgaaataca

SEQ ID NO: 212528 - DNA, 19 bp, Homo sapiens
  siRNA target sequence for TNKS2 (NM_025235.2,828-846).
caaccatccgaaatacaga

SEQ ID NO: 212529 - DNA, 19 bp, Homo sapiens
  siRNA target sequence for TNKS2 (NM_025235.2,848-866).
ggaaggacagcattggatt

SEQ ID NO: 212530 - DNA, 19 bp, Homo sapiens
  siRNA target sequence for TNKS2 (NM_025235.2,888-906).
cagtgcttactggtgaata

SEQ ID NO: 212531 - DNA, 19 bp, Homo sapiens
  siRNA target sequence for TNKS2 (NM_025235.2,890-908).
gtgcttactggtgaatata

SEQ ID NO: 212532 - DNA, 19 bp, Homo sapiens
  siRNA target sequence for TNKS2 (NM_025235.2,963-981).
ctctactcacaccattaaa

SEQ ID NO: 212533 - DNA, 19 bp, Homo sapiens
  siRNA target sequence for TNKS2 (NM_025235.2,985-1003).
caactgccacgcaagtgat

SEQ ID NO: 212534 - DNA, 19 bp, Homo sapiens
  siRNA target sequence for TNKS2 (NM_025235.2,1025-1043).
catttggcagcaggatata

SEQ ID NO: 212535 - DNA, 19 bp, Homo sapiens
  siRNA target sequence for TNKS2 (NM_025235.2,1179-1197).
gtgcctgtgtaaatgcaat

SEQ ID NO: 212536 - DNA, 19 bp, Homo sapiens
  siRNA target sequence for TNKS2 (NM_025235.2,1198-1216).
ggacttgtggcaattcact

SEQ ID NO: 212537 - DNA, 19 bp, Homo sapiens
  siRNA target sequence for TNKS2 (NM_025235.2,1243-1261).
cagggttgaagtatgttct

SEQ ID NO: 212538 - DNA, 19 bp, Homo sapiens
  siRNA target sequence for TNKS2 (NM_025235.2,1257-1275).
gttctcttctcttaagtta

SEQ ID NO: 212539 - DNA, 19 bp, Homo sapiens
  siRNA target sequence for TNKS2 (NM_025235.2,1283-1301).
gacccaacactgctcaatt

SEQ ID NO: 212540 - DNA, 19 bp, Homo sapiens
  siRNA target sequence for TNKS2 (NM_025235.2,1287-1305).
caacactgctcaattgtca

SEQ ID NO: 212541 - DNA, 19 bp, Homo sapiens
  siRNA target sequence for TNKS2 (NM_025235.2,1292-1310).
ctgctcaattgtcacaata

SEQ ID NO: 212542 - DNA, 19 bp, Homo sapiens
  siRNA target sequence for TNKS2 (NM_025235.2,1294-1312).
gctcaattgtcacaataaa

SEQ ID NO: 212543 - DNA, 19 bp, Homo sapiens
  siRNA target sequence for TNKS2 (NM_025235.2,1328-1346).
gctcccacaccacagttaa

SEQ ID NO: 212544 - DNA, 19 bp, Homo sapiens
  siRNA target sequence for TNKS2 (NM_025235.2,1394-1412).
gcacgagaagctgatgtta

SEQ ID NO: 212545 - DNA, 19 bp, Homo sapiens
  siRNA target sequence for TNKS2 (NM_025235.2,1404-1422).
ctgatgttactcgaatcaa

SEQ ID NO: 212546 - DNA, 19 bp, Homo sapiens
  siRNA target sequence for TNKS2 (NM_025235.2,1413-1431).
ctcgaatcaaaaaacatct

SEQ ID NO: 212547 - DNA, 19 bp, Homo sapiens
  siRNA target sequence for TNKS2 (NM_025235.2,1453-1471).
caagcatcctcaaacacat

SEQ ID NO: 212548 - DNA, 19 bp, Homo sapiens
  siRNA target sequence for TNKS2 (NM_025235.2,1547-1565).
ggagcaaacatcaatgaaa

SEQ ID NO: 212549 - DNA, 19 bp, Homo sapiens
  siRNA target sequence for TNKS2 (NM_025235.2,1654-1672).
ggttaatgctctggataat

SEQ ID NO: 212550 - DNA, 19 bp, Homo sapiens
  siRNA target sequence for TNKS2 (NM_025235.2,1740-1758).
gctatgggtgtgatcctaa

SEQ ID NO: 212551 - DNA, 19 bp, Homo sapiens
  siRNA target sequence for TNKS2 (NM_025235.2,1745-1763).
gggtgtgatcctaacatta

SEQ ID NO: 212552 - DNA, 19 bp, Homo sapiens
  siRNA target sequence for TNKS2 (NM_025235.2,1746-1764).
ggtgtgatcctaacattat

SEQ ID NO: 212553 - DNA, 19 bp, Homo sapiens
  siRNA target sequence for TNKS2 (NM_025235.2,1747-1765).
gtgtgatcctaacattata

SEQ ID NO: 212554 - DNA, 19 bp, Homo sapiens
  siRNA target sequence for TNKS2 (NM_025235.2,1822-1840).
ccaagagggtatctcatta

SEQ ID NO: 212555 - DNA, 19 bp, Homo sapiens
  siRNA target sequence for TNKS2 (NM_025235.2,1826-1844).
gagggtatctcattaggta

SEQ ID NO: 212556 - DNA, 19 bp, Homo sapiens
  siRNA target sequence for TNKS2 (NM_025235.2,1828-1846).
gggtatctcattaggtaat

SEQ ID NO: 212557 - DNA, 19 bp, Homo sapiens
  siRNA target sequence for TNKS2 (NM_025235.2,1848-1866).
cagaggcagacagacaatt

SEQ ID NO: 212558 - DNA, 19 bp, Homo sapiens
  siRNA target sequence for TNKS2 (NM_025235.2,1884-1902).
ctggagatgtcgaaactgt

SEQ ID NO: 212559 - DNA, 19 bp, Homo sapiens
  siRNA target sequence for TNKS2 (NM_025235.2,1886-1904).
ggagatgtcgaaactgtaa

SEQ ID NO: 212560 - DNA, 19 bp, Homo sapiens
  siRNA target sequence for TNKS2 (NM_025235.2,1887-1905).
gagatgtcgaaactgtaaa

SEQ ID NO: 212561 - DNA, 19 bp, Homo sapiens
  siRNA target sequence for TNKS2 (NM_025235.2,1955-1973).
cagtctacaccacttcatt

SEQ ID NO: 212562 - DNA, 19 bp, Homo sapiens
  siRNA target sequence for TNKS2 (NM_025235.2,2060-2078).
gtacctttgcacaatgcat

SEQ ID NO: 212563 - DNA, 19 bp, Homo sapiens
  siRNA target sequence for TNKS2 (NM_025235.2,2138-2156).
gtagctgatttatggaaat

SEQ ID NO: 212564 - DNA, 19 bp, Homo sapiens
  siRNA target sequence for TNKS2 (NM_025235.2,2334-2352).
ctgccaagaagggttgttt

SEQ ID NO: 212565 - DNA, 19 bp, Homo sapiens
  siRNA target sequence for TNKS2 (NM_025235.2,2404-2422).
ccaaggcagacattcaaca

SEQ ID NO: 212566 - DNA, 19 bp, Homo sapiens
  siRNA target sequence for TNKS2 (NM_025235.2,2412-2430).
gacattcaacacctttaca

SEQ ID NO: 212567 - DNA, 19 bp, Homo sapiens
  siRNA target sequence for TNKS2 (NM_025235.2,2506-2524).
caaaggaggacttattcct

SEQ ID NO: 212568 - DNA, 19 bp, Homo sapiens
  siRNA target sequence for TNKS2 (NM_025235.2,2513-2531).
ggacttattcctttacata

SEQ ID NO: 212569 - DNA, 19 bp, Homo sapiens
  siRNA target sequence for TNKS2 (NM_025235.2,2514-2532).
gacttattcctttacataa

SEQ ID NO: 212570 - DNA, 19 bp, Homo sapiens
  siRNA target sequence for TNKS2 (NM_025235.2,2541-2559).
cttacgggcatgtagatgt

SEQ ID NO: 212571 - DNA, 19 bp, Homo sapiens
  siRNA target sequence for TNKS2 (NM_025235.2,2558-2576).
gtagcagctctactaataa

SEQ ID NO: 212572 - DNA, 19 bp, Homo sapiens
  siRNA target sequence for TNKS2 (NM_025235.2,2564-2582).
gctctactaataaagtata

SEQ ID NO: 212573 - DNA, 19 bp, Homo sapiens
  siRNA target sequence for TNKS2 (NM_025235.2,2591-2609).
gtcaatgccacggacaaat

SEQ ID NO: 212574 - DNA, 19 bp, Homo sapiens
  siRNA target sequence for TNKS2 (NM_025235.2,2652-2670).
cacagctttgtgctttgtt

SEQ ID NO: 212575 - DNA, 19 bp, Homo sapiens
  siRNA target sequence for TNKS2 (NM_025235.2,2681-2699).
ggagctgacccgactctta

SEQ ID NO: 212576 - DNA, 19 bp, Homo sapiens
  siRNA target sequence for TNKS2 (NM_025235.2,2684-2702).
gctgacccgactcttaaaa

SEQ ID NO: 212577 - DNA, 19 bp, Homo sapiens
  siRNA target sequence for TNKS2 (NM_025235.2,2781-2799).
ctgctctgccctcttgtta

SEQ ID NO: 212578 - DNA, 19 bp, Homo sapiens
  siRNA target sequence for TNKS2 (NM_025235.2,2784-2802).
ctctgccctcttgttacaa

SEQ ID NO: 212579 - DNA, 19 bp, Homo sapiens
  siRNA target sequence for TNKS2 (NM_025235.2,2892-2910).
ccagcagtcttgacaactt

SEQ ID NO: 212580 - DNA, 19 bp, Homo sapiens
  siRNA target sequence for TNKS2 (NM_025235.2,2927-2945).
gaactgtcttcagtagtta

SEQ ID NO: 212581 - DNA, 19 bp, Homo sapiens
  siRNA target sequence for TNKS2 (NM_025235.2,2930-2948).
ctgtcttcagtagttagtt

SEQ ID NO: 212582 - DNA, 19 bp, Homo sapiens
  siRNA target sequence for TNKS2 (NM_025235.2,2932-2950).
gtcttcagtagttagttca

SEQ ID NO: 212583 - DNA, 19 bp, Homo sapiens
  siRNA target sequence for TNKS2 (NM_025235.2,2986-3004).
ggaggttccaggagtagat

SEQ ID NO: 212584 - DNA, 19 bp, Homo sapiens
  siRNA target sequence for TNKS2 (NM_025235.2,2990-3008).
gttccaggagtagatttta

SEQ ID NO: 212585 - DNA, 19 bp, Homo sapiens
  siRNA target sequence for TNKS2 (NM_025235.2,2993-3011).
ccaggagtagattttagca

SEQ ID NO: 212586 - DNA, 19 bp, Homo sapiens
  siRNA target sequence for TNKS2 (NM_025235.2,2996-3014).
ggagtagattttagcataa

SEQ ID NO: 212587 - DNA, 19 bp, Homo sapiens
  siRNA target sequence for TNKS2 (NM_025235.2,3002-3020).
gattttagcataactcaat

SEQ ID NO: 212588 - DNA, 19 bp, Homo sapiens
  siRNA target sequence for TNKS2 (NM_025235.2,3036-3054).
gacttgagcacctaatgga

SEQ ID NO: 212589 - DNA, 19 bp, Homo sapiens
  siRNA target sequence for TNKS2 (NM_025235.2,3038-3056).
cttgagcacctaatggata

SEQ ID NO: 212590 - DNA, 19 bp, Homo sapiens
  siRNA target sequence for TNKS2 (NM_025235.2,3041-3059).
gagcacctaatggatatat

SEQ ID NO: 212591 - DNA, 19 bp, Homo sapiens
  siRNA target sequence for TNKS2 (NM_025235.2,3119-3137).
gagattggaatcaatgctt

SEQ ID NO: 212592 - DNA, 19 bp, Homo sapiens
  siRNA target sequence for TNKS2 (NM_025235.2,3140-3158).
ggacataggcacaaactaa

SEQ ID NO: 212593 - DNA, 19 bp, Homo sapiens
  siRNA target sequence for TNKS2 (NM_025235.2,3141-3159).
gacataggcacaaactaat

SEQ ID NO: 212594 - DNA, 19 bp, Homo sapiens
  siRNA target sequence for TNKS2 (NM_025235.2,3143-3161).
cataggcacaaactaatta

SEQ ID NO: 212595 - DNA, 19 bp, Homo sapiens
  siRNA target sequence for TNKS2 (NM_025235.2,3164-3182).
ggagtcgagagacttatct

SEQ ID NO: 212596 - DNA, 19 bp, Homo sapiens
  siRNA target sequence for TNKS2 (NM_025235.2,3183-3201).
ccggacaacaaggtcttaa

SEQ ID NO: 212597 - DNA, 19 bp, Homo sapiens
  siRNA target sequence for TNKS2 (NM_025235.2,3194-3212).
ggtcttaacccatatttaa

SEQ ID NO: 212598 - DNA, 19 bp, Homo sapiens
  siRNA target sequence for TNKS2 (NM_025235.2,3227-3245).
ggtagtggaacaattctta

SEQ ID NO: 212599 - DNA, 19 bp, Homo sapiens
  siRNA target sequence for TNKS2 (NM_025235.2,3351-3369).
gatacaatattctcaagat

SEQ ID NO: 212600 - DNA, 19 bp, Homo sapiens
  siRNA target sequence for TNKS2 (NM_025235.2,3362-3380).
ctcaagattcagaaggttt

SEQ ID NO: 212601 - DNA, 19 bp, Homo sapiens
  siRNA target sequence for TNKS2 (NM_025235.2,3371-3389).
cagaaggtttgtaacaaga

SEQ ID NO: 212602 - DNA, 19 bp, Homo sapiens
  siRNA target sequence for TNKS2 (NM_025235.2,3406-3424).
cactcaccggagaaaagaa

SEQ ID NO: 212603 - DNA, 19 bp, Homo sapiens
  siRNA target sequence for TNKS2 (NM_025235.2,3408-3426).
ctcaccggagaaaagaagt

SEQ ID NO: 212604 - DNA, 19 bp, Homo sapiens
  siRNA target sequence for TNKS2 (NM_025235.2,3449-3467).
gccaatgaacgaatgctat

SEQ ID NO: 212605 - DNA, 19 bp, Homo sapiens
  siRNA target sequence for TNKS2 (NM_025235.2,3450-3468).
ccaatgaacgaatgctatt

SEQ ID NO: 212606 - DNA, 19 bp, Homo sapiens
  siRNA target sequence for TNKS2 (NM_025235.2,3451-3469).
caatgaacgaatgctattt

SEQ ID NO: 212607 - DNA, 19 bp, Homo sapiens
  siRNA target sequence for TNKS2 (NM_025235.2,3470-3488).
catgggtctccttttgtga

SEQ ID NO: 212608 - DNA, 19 bp, Homo sapiens
  siRNA target sequence for TNKS2 (NM_025235.2,3479-3497).
ccttttgtgaatgcaatta

SEQ ID NO: 212609 - DNA, 19 bp, Homo sapiens
  siRNA target sequence for TNKS2 (NM_025235.2,3756-3774).
ctggtaggcccagtgtaaa

SEQ ID NO: 212610 - DNA, 19 bp, Homo sapiens
  siRNA target sequence for TNKS2 (NM_025235.2,3768-3786).
gtgtaaatggcctagcatt

SEQ ID NO: 212611 - DNA, 19 bp, Homo sapiens
  siRNA target sequence for TNKS2 (NM_025235.2,3777-3795).
gcctagcattagctgaata

SEQ ID NO: 212612 - DNA, 19 bp, Homo sapiens
  siRNA target sequence for TNKS2 (NM_025235.2,3783-3801).
cattagctgaatatgttat

SEQ ID NO: 212613 - DNA, 19 bp, Homo sapiens
  siRNA target sequence for TNKS2 (NM_025235.2,3815-3833).
caggcttatcctgagtatt

SEQ ID NO: 212614 - DNA, 19 bp, Homo sapiens
  siRNA target sequence for TNKS2 (NM_025235.2,3817-3835).
ggcttatcctgagtattta

SEQ ID NO: 212615 - DNA, 19 bp, Homo sapiens
  siRNA target sequence for ART5 (NM_053017.2,344-362).
gcgctggcggctttgatga

SEQ ID NO: 212616 - DNA, 19 bp, Homo sapiens
  siRNA target sequence for ART5 (NM_053017.2,655-673).
cttgtactgggagttgaat

SEQ ID NO: 212617 - DNA, 19 bp, Homo sapiens
  siRNA target sequence for ART5 (NM_053017.2,885-903).
cctccagctccctggataa

SEQ ID NO: 212618 - DNA, 19 bp, Homo sapiens
  siRNA target sequence for ART5 (NM_053017.2,904-922).
ggcagtggcccacagattt

SEQ ID NO: 212619 - DNA, 19 bp, Homo sapiens
  siRNA target sequence for ART5 (NM_053017.2,908-926).
gtggcccacagatttggta

SEQ ID NO: 212620 - DNA, 19 bp, Homo sapiens
  siRNA target sequence for ART5 (NM_053017.2,910-928).
ggcccacagatttggtaat

SEQ ID NO: 212621 - DNA, 19 bp, Homo sapiens
  siRNA target sequence for ART5 (NM_053017.2,1170-1188).
gaacgggtgaccttcatat

SEQ ID NO: 212622 - DNA, 19 bp, Homo sapiens
  siRNA target sequence for DO (NM_021071.1,114-132).
caacagatgcaagaagatt

SEQ ID NO: 212623 - DNA, 19 bp, Homo sapiens
  siRNA target sequence for DO (NM_021071.1,119-137).
gatgcaagaagattcttct

SEQ ID NO: 212624 - DNA, 19 bp, Homo sapiens
  siRNA target sequence for DO (NM_021071.1,152-170).
ctcctgcaacgatgagaat

SEQ ID NO: 212625 - DNA, 19 bp, Homo sapiens
  siRNA target sequence for DO (NM_021071.1,154-172).
cctgcaacgatgagaatct

SEQ ID NO: 212626 - DNA, 19 bp, Homo sapiens
  siRNA target sequence for DO (NM_021071.1,234-252).
gggttctgaggttgcaatt

SEQ ID NO: 212627 - DNA, 19 bp, Homo sapiens
  siRNA target sequence for DO (NM_021071.1,235-253).
ggttctgaggttgcaatta

SEQ ID NO: 212628 - DNA, 19 bp, Homo sapiens
  siRNA target sequence for DO (NM_021071.1,267-285).
cttcgcaccaggttctttt

SEQ ID NO: 212629 - DNA, 19 bp, Homo sapiens
  siRNA target sequence for DO (NM_021071.1,270-288).
cgcaccaggttcttttgat

SEQ ID NO: 212630 - DNA, 19 bp, Homo sapiens
  siRNA target sequence for DO (NM_021071.1,278-296).
gttcttttgatgatcagta

SEQ ID NO: 212631 - DNA, 19 bp, Homo sapiens
  siRNA target sequence for DO (NM_021071.1,294-312).
gtaccaaggctgtagcaaa

SEQ ID NO: 212632 - DNA, 19 bp, Homo sapiens
  siRNA target sequence for DO (NM_021071.1,305-323).
gtagcaaacaggttatgga

SEQ ID NO: 212633 - DNA, 19 bp, Homo sapiens
  siRNA target sequence for DO (NM_021071.1,313-331).
caggttatggagaaactaa

SEQ ID NO: 212634 - DNA, 19 bp, Homo sapiens
  siRNA target sequence for DO (NM_021071.1,315-333).
ggttatggagaaactaact

SEQ ID NO: 212635 - DNA, 19 bp, Homo sapiens
  siRNA target sequence for DO (NM_021071.1,328-346).
ctaactcaaggggattatt

SEQ ID NO: 212636 - DNA, 19 bp, Homo sapiens
  siRNA target sequence for DO (NM_021071.1,334-352).
caaggggattatttcacaa

SEQ ID NO: 212637 - DNA, 19 bp, Homo sapiens
  siRNA target sequence for DO (NM_021071.1,338-356).
gggattatttcacaaaaga

SEQ ID NO: 212638 - DNA, 19 bp, Homo sapiens
  siRNA target sequence for DO (NM_021071.1,402-420).
cttagcctggcttaaccaa

SEQ ID NO: 212639 - DNA, 19 bp, Homo sapiens
  siRNA target sequence for DO (NM_021071.1,407-425).
cctggcttaaccaaggaaa

SEQ ID NO: 212640 - DNA, 19 bp, Homo sapiens
  siRNA target sequence for DO (NM_021071.1,408-426).
ctggcttaaccaaggaaaa

SEQ ID NO: 212641 - DNA, 19 bp, Homo sapiens
  siRNA target sequence for DO (NM_021071.1,410-428).
ggcttaaccaaggaaaagt

SEQ ID NO: 212642 - DNA, 19 bp, Homo sapiens
  siRNA target sequence for DO (NM_021071.1,427-445).
gttctaccccagaacatga

SEQ ID NO: 212643 - DNA, 19 bp, Homo sapiens
  siRNA target sequence for DO (NM_021071.1,452-470).
cacacgctgtggctatttt

SEQ ID NO: 212644 - DNA, 19 bp, Homo sapiens
  siRNA target sequence for DO (NM_021071.1,454-472).
cacgctgtggctattttgt

SEQ ID NO: 212645 - DNA, 19 bp, Homo sapiens
  siRNA target sequence for DO (NM_021071.1,553-571).
cgttcattccacttcaaat

SEQ ID NO: 212646 - DNA, 19 bp, Homo sapiens
  siRNA target sequence for DO (NM_021071.1,642-660).
gtgctatgaggtgcattat

SEQ ID NO: 212647 - DNA, 19 bp, Homo sapiens
  siRNA target sequence for DO (NM_021071.1,665-683).
cgaaggatgtccactttaa

SEQ ID NO: 212648 - DNA, 19 bp, Homo sapiens
  siRNA target sequence for DO (NM_021071.1,692-710).
caggggccaccattcgatt

SEQ ID NO: 212649 - DNA, 19 bp, Homo sapiens
  siRNA target sequence for DO (NM_021071.1,760-778).
gggaaccagacactattta

SEQ ID NO: 212650 - DNA, 19 bp, Homo sapiens
  siRNA target sequence for DO (NM_021071.1,765-783).
ccagacactatttaccata

SEQ ID NO: 212651 - DNA, 19 bp, Homo sapiens
  siRNA target sequence for DO (NM_021071.1,766-784).
cagacactatttaccatat

SEQ ID NO: 212652 - DNA, 19 bp, Homo sapiens
  siRNA target sequence for DO (NM_021071.1,845-863).
cctatgagctgtttaaagt

SEQ ID NO: 212653 - DNA, 19 bp, Homo sapiens
  siRNA target sequence for DO (NM_021071.1,846-864).
ctatgagctgtttaaagtt

SEQ ID NO: 212654 - DNA, 19 bp, Homo sapiens
  siRNA target sequence for DO (NM_021071.1,916-934).
gggaacctgagcacatata

SEQ ID NO: 212655 - DNA, 19 bp, Homo sapiens
  siRNA target sequence for DO (NM_021071.1,917-935).
ggaacctgagcacatataa

SEQ ID NO: 212656 - DNA, 19 bp, Homo sapiens
  siRNA target sequence for DO (NM_021071.1,972-990).
ccctgatcctatagctatt

SEQ ID NO: 212657 - DNA, 19 bp, Homo sapiens
  siRNA target sequence for PRTFDC1 (NM_020200.5,63-81).
gggcgaggcgtcgtgatta

SEQ ID NO: 212658 - DNA, 19 bp, Homo sapiens
  siRNA target sequence for PRTFDC1 (NM_020200.5,64-82).
ggcgaggcgtcgtgattat

SEQ ID NO: 212659 - DNA, 19 bp, Homo sapiens
  siRNA target sequence for PRTFDC1 (NM_020200.5,87-105).
gattggccagggtatgact

SEQ ID NO: 212660 - DNA, 19 bp, Homo sapiens
  siRNA target sequence for PRTFDC1 (NM_020200.5,91-109).
ggccagggtatgacttgaa

SEQ ID NO: 212661 - DNA, 19 bp, Homo sapiens
  siRNA target sequence for PRTFDC1 (NM_020200.5,92-110).
gccagggtatgacttgaat

SEQ ID NO: 212662 - DNA, 19 bp, Homo sapiens
  siRNA target sequence for PRTFDC1 (NM_020200.5,93-111).
ccagggtatgacttgaatt

SEQ ID NO: 212663 - DNA, 19 bp, Homo sapiens
  siRNA target sequence for PRTFDC1 (NM_020200.5,94-112).
cagggtatgacttgaattt

SEQ ID NO: 212664 - DNA, 19 bp, Homo sapiens
  siRNA target sequence for PRTFDC1 (NM_020200.5,96-114).
gggtatgacttgaatttat

SEQ ID NO: 212665 - DNA, 19 bp, Homo sapiens
  siRNA target sequence for PRTFDC1 (NM_020200.5,118-136).
cgtacccacagcactatta

SEQ ID NO: 212666 - DNA, 19 bp, Homo sapiens
  siRNA target sequence for PRTFDC1 (NM_020200.5,122-140).
cccacagcactattatgga

SEQ ID NO: 212667 - DNA, 19 bp, Homo sapiens
  siRNA target sequence for PRTFDC1 (NM_020200.5,169-187).
gtatcattgtggacagaat

SEQ ID NO: 212668 - DNA, 19 bp, Homo sapiens
  siRNA target sequence for PRTFDC1 (NM_020200.5,192-210).
cggctggccaaggatatta

SEQ ID NO: 212669 - DNA, 19 bp, Homo sapiens
  siRNA target sequence for PRTFDC1 (NM_020200.5,195-213).
ctggccaaggatattatga

SEQ ID NO: 212670 - DNA, 19 bp, Homo sapiens
  siRNA target sequence for PRTFDC1 (NM_020200.5,212-230).
gaaagacataggatatagt

SEQ ID NO: 212671 - DNA, 19 bp, Homo sapiens
  siRNA target sequence for PRTFDC1 (NM_020200.5,274-292).
gtgctgatctcgtagaaca

SEQ ID NO: 212672 - DNA, 19 bp, Homo sapiens
  siRNA target sequence for PRTFDC1 (NM_020200.5,282-300).
ctcgtagaacaccttaaga

SEQ ID NO: 212673 - DNA, 19 bp, Homo sapiens
  siRNA target sequence for PRTFDC1 (NM_020200.5,288-306).
gaacaccttaagaacatca

SEQ ID NO: 212674 - DNA, 19 bp, Homo sapiens
  siRNA target sequence for PRTFDC1 (NM_020200.5,299-317).
gaacatcagccgaaattca

SEQ ID NO: 212675 - DNA, 19 bp, Homo sapiens
  siRNA target sequence for PRTFDC1 (NM_020200.5,307-325).
gccgaaattcagatcgatt

SEQ ID NO: 212676 - DNA, 19 bp, Homo sapiens
  siRNA target sequence for PRTFDC1 (NM_020200.5,308-326).
ccgaaattcagatcgattt

SEQ ID NO: 212677 - DNA, 19 bp, Homo sapiens
  siRNA target sequence for PRTFDC1 (NM_020200.5,310-328).
gaaattcagatcgatttgt

SEQ ID NO: 212678 - DNA, 19 bp, Homo sapiens
  siRNA target sequence for PRTFDC1 (NM_020200.5,316-334).
cagatcgatttgtctcaat

SEQ ID NO: 212679 - DNA, 19 bp, Homo sapiens
  siRNA target sequence for PRTFDC1 (NM_020200.5,318-336).
gatcgatttgtctcaatga

SEQ ID NO: 212680 - DNA, 19 bp, Homo sapiens
  siRNA target sequence for PRTFDC1 (NM_020200.5,339-357).
gttgatttcatcagactaa

SEQ ID NO: 212681 - DNA, 19 bp, Homo sapiens
  siRNA target sequence for PRTFDC1 (NM_020200.5,342-360).
gatttcatcagactaaaaa

SEQ ID NO: 212682 - DNA, 19 bp, Homo sapiens
  siRNA target sequence for PRTFDC1 (NM_020200.5,430-448).
gaaagaatgttctcattgt

SEQ ID NO: 212683 - DNA, 19 bp, Homo sapiens
  siRNA target sequence for PRTFDC1 (NM_020200.5,566-584).
cggctttagacctgactat

SEQ ID NO: 212684 - DNA, 19 bp, Homo sapiens
  siRNA target sequence for PRTFDC1 (NM_020200.5,615-633).
gtgggatatgccttagatt

SEQ ID NO: 212685 - DNA, 19 bp, Homo sapiens
  siRNA target sequence for PRTFDC1 (NM_020200.5,618-636).
ggatatgccttagattaca

SEQ ID NO: 212686 - DNA, 19 bp, Homo sapiens
  siRNA target sequence for PRTFDC1 (NM_020200.5,619-637).
gatatgccttagattacaa

SEQ ID NO: 212687 - DNA, 19 bp, Homo sapiens
  siRNA target sequence for PRTFDC1 (NM_020200.5,624-642).
gccttagattacaatgaat

SEQ ID NO: 212688 - DNA, 19 bp, Homo sapiens
  siRNA target sequence for PRTFDC1 (NM_020200.5,625-643).
ccttagattacaatgaata

SEQ ID NO: 212689 - DNA, 19 bp, Homo sapiens
  siRNA target sequence for PRTFDC1 (NM_020200.5,678-696).
gagcacggtaaagaaaaat

SEQ ID NO: 212690 - DNA, 19 bp, Homo sapiens
  siRNA target sequence for PRTFDC1 (NM_020200.5,683-701).
cggtaaagaaaaatatcga

SEQ ID NO: 212691 - DNA, 19 bp, Homo sapiens
  siRNA target sequence for QTRT1 (NM_031209.1,277-295).
ggtctccacggcttcatga

SEQ ID NO: 212692 - DNA, 19 bp, Homo sapiens
  siRNA target sequence for QTRT1 (NM_031209.1,278-296).
gtctccacggcttcatgaa

SEQ ID NO: 212693 - DNA, 19 bp, Homo sapiens
  siRNA target sequence for QTRT1 (NM_031209.1,280-298).
ctccacggcttcatgaatt

SEQ ID NO: 212694 - DNA, 19 bp, Homo sapiens
  siRNA target sequence for QTRT1 (NM_031209.1,394-412).
ccctacgacggcaatgaga

SEQ ID NO: 212695 - DNA, 19 bp, Homo sapiens
  siRNA target sequence for QTRT1 (NM_031209.1,415-433).
ctgctgagcccggagaaat

SEQ ID NO: 212696 - DNA, 19 bp, Homo sapiens
  siRNA target sequence for QTRT1 (NM_031209.1,454-472).
ctgggctcggacatcatca

SEQ ID NO: 212697 - DNA, 19 bp, Homo sapiens
  siRNA target sequence for QTRT1 (NM_031209.1,763-781).
gacaagccccgatatctga

SEQ ID NO: 212698 - DNA, 19 bp, Homo sapiens
  siRNA target sequence for QTRTD1 (NM_024638.2,241-259).
gtcttaccaaggtagttaa

SEQ ID NO: 212699 - DNA, 19 bp, Homo sapiens
  siRNA target sequence for QTRTD1 (NM_024638.2,261-279).
ggctgtcgcctaggaaaaa

SEQ ID NO: 212700 - DNA, 19 bp, Homo sapiens
  siRNA target sequence for QTRTD1 (NM_024638.2,262-280).
gctgtcgcctaggaaaaat

SEQ ID NO: 212701 - DNA, 19 bp, Homo sapiens
  siRNA target sequence for QTRTD1 (NM_024638.2,263-281).
ctgtcgcctaggaaaaata

SEQ ID NO: 212702 - DNA, 19 bp, Homo sapiens
  siRNA target sequence for QTRTD1 (NM_024638.2,492-510).
ccagaatcactcttgtact

SEQ ID NO: 212703 - DNA, 19 bp, Homo sapiens
  siRNA target sequence for QTRTD1 (NM_024638.2,541-559).
cggctggttatgtaacaaa

SEQ ID NO: 212704 - DNA, 19 bp, Homo sapiens
  siRNA target sequence for QTRTD1 (NM_024638.2,585-603).
gcaggacgagtggaaatga

SEQ ID NO: 212705 - DNA, 19 bp, Homo sapiens
  siRNA target sequence for QTRTD1 (NM_024638.2,610-628).
ccaagttcatggcaattca

SEQ ID NO: 212706 - DNA, 19 bp, Homo sapiens
  siRNA target sequence for QTRTD1 (NM_024638.2,665-683).
cgatggagaagtatcttgt

SEQ ID NO: 212707 - DNA, 19 bp, Homo sapiens
  siRNA target sequence for QTRTD1 (NM_024638.2,716-734).
gtctgttgaccgatcactt

SEQ ID NO: 212708 - DNA, 19 bp, Homo sapiens
  siRNA target sequence for QTRTD1 (NM_024638.2,720-738).
gttgaccgatcacttcttt

SEQ ID NO: 212709 - DNA, 19 bp, Homo sapiens
  siRNA target sequence for QTRTD1 (NM_024638.2,723-741).
gaccgatcacttcttttct

SEQ ID NO: 212710 - DNA, 19 bp, Homo sapiens
  siRNA target sequence for QTRTD1 (NM_024638.2,966-984).
gacaagccaaggctcatat

SEQ ID NO: 212711 - DNA, 19 bp, Homo sapiens
  siRNA target sequence for QTRTD1 (NM_024638.2,968-986).
caagccaaggctcatatct

SEQ ID NO: 212712 - DNA, 19 bp, Homo sapiens
  siRNA target sequence for QTRTD1 (NM_024638.2,1008-1026).
gtgctcgagtgtattgaaa

SEQ ID NO: 212713 - DNA, 19 bp, Homo sapiens
  siRNA target sequence for QTRTD1 (NM_024638.2,1027-1045).
gaggagtggacttatttga

SEQ ID NO: 212714 - DNA, 19 bp, Homo sapiens
  siRNA target sequence for QTRTD1 (NM_024638.2,1035-1053).
gacttatttgagagttttt

SEQ ID NO: 212715 - DNA, 19 bp, Homo sapiens
  siRNA target sequence for QTRTD1 (NM_024638.2,1075-1093).
ggggatgtgccctgacttt

SEQ ID NO: 212716 - DNA, 19 bp, Homo sapiens
  siRNA target sequence for QTRTD1 (NM_024638.2,1086-1104).
ctgactttcagttttgatt

SEQ ID NO: 212717 - DNA, 19 bp, Homo sapiens
  siRNA target sequence for QTRTD1 (NM_024638.2,1090-1108).
ctttcagttttgattacca

SEQ ID NO: 212718 - DNA, 19 bp, Homo sapiens
  siRNA target sequence for QTRTD1 (NM_024638.2,1124-1142).
gacactactacaacaaaat

SEQ ID NO: 212719 - DNA, 19 bp, Homo sapiens
  siRNA target sequence for QTRTD1 (NM_024638.2,1288-1306).
gttactgctgtaagaatca

SEQ ID NO: 212720 - DNA, 19 bp, Homo sapiens
  siRNA target sequence for QTRTD1 (NM_024638.2,1353-1371).
gccggagtcctgcttatga

SEQ ID NO: 212721 - DNA, 19 bp, Homo sapiens
  siRNA target sequence for QTRTD1 (NM_024638.2,1409-1427).
catccgggaagcactaaaa

SEQ ID NO: 212722 - DNA, 19 bp, Homo sapiens
  siRNA target sequence for QTRTD1 (NM_024638.2,1412-1430).
ccgggaagcactaaaaagt

SEQ ID NO: 212723 - DNA, 19 bp, Homo sapiens
  siRNA target sequence for QTRTD1 (NM_024638.2,1414-1432).
gggaagcactaaaaagtga

SEQ ID NO: 212724 - DNA, 19 bp, Homo sapiens
  siRNA target sequence for UPP1 (NM_003364.2,495-513).
gaaagctgaaagtcacaat

SEQ ID NO: 212725 - DNA, 19 bp, Homo sapiens
  siRNA target sequence for UPP1 (NM_003364.2,499-517).
gctgaaagtcacaatgatt

SEQ ID NO: 212726 - DNA, 19 bp, Homo sapiens
  siRNA target sequence for UPP1 (NM_003364.2,514-532).
gattgccccgtcagacttt

SEQ ID NO: 212727 - DNA, 19 bp, Homo sapiens
  siRNA target sequence for UPP1 (NM_003364.2,518-536).
gccccgtcagacttttaaa

SEQ ID NO: 212728 - DNA, 19 bp, Homo sapiens
  siRNA target sequence for UPP1 (NM_003364.2,519-537).
ccccgtcagacttttaaat

SEQ ID NO: 212729 - DNA, 19 bp, Homo sapiens
  siRNA target sequence for UPP1 (NM_003364.2,522-540).
cgtcagacttttaaatcca

SEQ ID NO: 212730 - DNA, 19 bp, Homo sapiens
  siRNA target sequence for UPP1 (NM_003364.2,600-618).
caatttcccagccttgttt

SEQ ID NO: 212731 - DNA, 19 bp, Homo sapiens
  siRNA target sequence for UPP1 (NM_003364.2,747-765).
ccgctatgccatgtataaa

SEQ ID NO: 212732 - DNA, 19 bp, Homo sapiens
  siRNA target sequence for UPP1 (NM_003364.2,750-768).
ctatgccatgtataaagta

SEQ ID NO: 212733 - DNA, 19 bp, Homo sapiens
  siRNA target sequence for UPP1 (NM_003364.2,790-808).
catggtatgggcattcctt

SEQ ID NO: 212734 - DNA, 19 bp, Homo sapiens
  siRNA target sequence for UPP1 (NM_003364.2,794-812).
gtatgggcattccttctat

SEQ ID NO: 212735 - DNA, 19 bp, Homo sapiens
  siRNA target sequence for UPP1 (NM_003364.2,799-817).
ggcattccttctatctcaa

SEQ ID NO: 212736 - DNA, 19 bp, Homo sapiens
  siRNA target sequence for UPP1 (NM_003364.2,860-878).
gctccaacgtcactatcat

SEQ ID NO: 212737 - DNA, 19 bp, Homo sapiens
  siRNA target sequence for UPP1 (NM_003364.2,915-933).
cggcactgtggtcataaca

SEQ ID NO: 212738 - DNA, 19 bp, Homo sapiens
  siRNA target sequence for UPP1 (NM_003364.2,917-935).
gcactgtggtcataacaga

SEQ ID NO: 212739 - DNA, 19 bp, Homo sapiens
  siRNA target sequence for UPP1 (NM_003364.2,1000-1018).
cggaaaacggaccttaaca

SEQ ID NO: 212740 - DNA, 19 bp, Homo sapiens
  siRNA target sequence for UPP1 (NM_003364.2,1092-1110).
gtgcaccttggacttctat

SEQ ID NO: 212741 - DNA, 19 bp, Homo sapiens
  siRNA target sequence for UPP1 (NM_003364.2,1357-1375).
cggctggtgagctacttca

SEQ ID NO: 212742 - DNA, 19 bp, Homo sapiens
  siRNA target sequence for UPP1 (NM_003364.2,1358-1376).
ggctggtgagctacttcat

SEQ ID NO: 212743 - DNA, 19 bp, Homo sapiens
  siRNA target sequence for UMPS (NM_000373.1,258-276).
caggttgcagatattttat

SEQ ID NO: 212744 - DNA, 19 bp, Homo sapiens
  siRNA target sequence for UMPS (NM_000373.1,294-312).
gcaggcatcagttttgaca

SEQ ID NO: 212745 - DNA, 19 bp, Homo sapiens
  siRNA target sequence for UMPS (NM_000373.1,315-333).
gtgtgtggagtgccttata

SEQ ID NO: 212746 - DNA, 19 bp, Homo sapiens
  siRNA target sequence for UMPS (NM_000373.1,317-335).
gtgtggagtgccttataca

SEQ ID NO: 212747 - DNA, 19 bp, Homo sapiens
  siRNA target sequence for UMPS (NM_000373.1,415-433).
gaactaagcgtcttgtaga

SEQ ID NO: 212748 - DNA, 19 bp, Homo sapiens
  siRNA target sequence for UMPS (NM_000373.1,482-500).
caccagtggatctagtgtt

SEQ ID NO: 212749 - DNA, 19 bp, Homo sapiens
  siRNA target sequence for UMPS (NM_000373.1,508-526).
ctgttgaggttcttcagaa

SEQ ID NO: 212750 - DNA, 19 bp, Homo sapiens
  siRNA target sequence for UMPS (NM_000373.1,612-630).
ctccactcagtgtgtacat

SEQ ID NO: 212751 - DNA, 19 bp, Homo sapiens
  siRNA target sequence for UMPS (NM_000373.1,625-643).
gtacattgtccaaaatgct

SEQ ID NO: 212752 - DNA, 19 bp, Homo sapiens
  siRNA target sequence for UMPS (NM_000373.1,719-737).
ctttgtggcagcgaatcat

SEQ ID NO: 212753 - DNA, 19 bp, Homo sapiens
  siRNA target sequence for UMPS (NM_000373.1,725-743).
ggcagcgaatcataatggt

SEQ ID NO: 212754 - DNA, 19 bp, Homo sapiens
  siRNA target sequence for UMPS (NM_000373.1,745-763).
ctcccctttctataaagga

SEQ ID NO: 212755 - DNA, 19 bp, Homo sapiens
  siRNA target sequence for UMPS (NM_000373.1,830-848).
gcttctcaggcttatgcaa

SEQ ID NO: 212756 - DNA, 19 bp, Homo sapiens
  siRNA target sequence for UMPS (NM_000373.1,831-849).
cttctcaggcttatgcaaa

SEQ ID NO: 212757 - DNA, 19 bp, Homo sapiens
  siRNA target sequence for UMPS (NM_000373.1,855-873).
gagaccaatctgtgtctat

SEQ ID NO: 212758 - DNA, 19 bp, Homo sapiens
  siRNA target sequence for UMPS (NM_000373.1,866-884).
gtgtctatctgctgatgtt

SEQ ID NO: 212759 - DNA, 19 bp, Homo sapiens
  siRNA target sequence for UMPS (NM_000373.1,918-936).
gctttaggacctagtatct

SEQ ID NO: 212760 - DNA, 19 bp, Homo sapiens
  siRNA target sequence for UMPS (NM_000373.1,938-956).
catgctgaagactcatgta

SEQ ID NO: 212761 - DNA, 19 bp, Homo sapiens
  siRNA target sequence for UMPS (NM_000373.1,1043-1061).
gaagtttgcagatatagga

SEQ ID NO: 212762 - DNA, 19 bp, Homo sapiens
  siRNA target sequence for UMPS (NM_000373.1,1079-1097).
gtatgaaggaggtatcttt

SEQ ID NO: 212763 - DNA, 19 bp, Homo sapiens
  siRNA target sequence for UMPS (NM_000373.1,1105-1123).
cttcctgggcagatctagt

SEQ ID NO: 212764 - DNA, 19 bp, Homo sapiens
  siRNA target sequence for UMPS (NM_000373.1,1109-1127).
ctgggcagatctagtaaat

SEQ ID NO: 212765 - DNA, 19 bp, Homo sapiens
  siRNA target sequence for UMPS (NM_000373.1,1252-1270).
ctagagcagcggttagaat

SEQ ID NO: 212766 - DNA, 19 bp, Homo sapiens
  siRNA target sequence for UMPS (NM_000373.1,1277-1295).
ggagcactctgaatttgtt

SEQ ID NO: 212767 - DNA, 19 bp, Homo sapiens
  siRNA target sequence for UMPS (NM_000373.1,1309-1327).
ctggctcccgagtaagcat

SEQ ID NO: 212768 - DNA, 19 bp, Homo sapiens
  siRNA target sequence for UMPS (NM_000373.1,1313-1331).
ctcccgagtaagcatgaaa

SEQ ID NO: 212769 - DNA, 19 bp, Homo sapiens
  siRNA target sequence for UMPS (NM_000373.1,1397-1415).
gtacaatagcccacaagaa

SEQ ID NO: 212770 - DNA, 19 bp, Homo sapiens
  siRNA target sequence for UMPS (NM_000373.1,1400-1418).
caatagcccacaagaagtt

SEQ ID NO: 212771 - DNA, 19 bp, Homo sapiens
  siRNA target sequence for UMPS (NM_000373.1,1429-1447).
gaggttccgatatcatcat

SEQ ID NO: 212772 - DNA, 19 bp, Homo sapiens
  siRNA target sequence for UMPS (NM_000373.1,1449-1467).
gtaggtcgtggcataatct

SEQ ID NO: 212773 - DNA, 19 bp, Homo sapiens
  siRNA target sequence for UMPS (NM_000373.1,1510-1528).
ctgcttgggaagcgtattt

SEQ ID NO: 212774 - DNA, 19 bp, Homo sapiens
  siRNA target sequence for UMPS (NM_000373.1,1512-1530).
gcttgggaagcgtatttga

SEQ ID NO: 212775 - DNA, 19 bp, Homo sapiens
  siRNA target sequence for QPRT (NM_014298.2,229-247).
ccatatttacccaactcaa

SEQ ID NO: 212776 - DNA, 19 bp, Homo sapiens
  siRNA target sequence for SIAT4A (NM_003033.2,1328-1346).
gggagaagaagcccaataa

SEQ ID NO: 212777 - DNA, 19 bp, Homo sapiens
  siRNA target sequence for SIAT4A (NM_003033.2,1330-1348).
gagaagaagcccaataact

SEQ ID NO: 212778 - DNA, 19 bp, Homo sapiens
  siRNA target sequence for SIAT4A (NM_003033.2,1991-2009).
ccttggcctccatcaataa

SEQ ID NO: 212779 - DNA, 19 bp, Homo sapiens
  siRNA target sequence for SIAT4B (NM_006927.2,1384-1402).
gcctccgactggtttgaca

SEQ ID NO: 212780 - DNA, 19 bp, Homo sapiens
  siRNA target sequence for SIAT4B (NM_006927.2,1403-1421).
gccactttgacggtaacat

SEQ ID NO: 212781 - DNA, 19 bp, Homo sapiens
  siRNA target sequence for SIAT4B (NM_006927.2,1404-1422).
ccactttgacggtaacatt

SEQ ID NO: 212782 - DNA, 19 bp, Homo sapiens
  siRNA target sequence for SIAT4B (NM_006927.2,1877-1895).
ccttccttcgagtggataa

SEQ ID NO: 212783 - DNA, 19 bp, Homo sapiens
  siRNA target sequence for SIAT4B (NM_006927.2,1878-1896).
cttccttcgagtggataaa

SEQ ID NO: 212784 - DNA, 19 bp, Homo sapiens
  siRNA target sequence for SIAT4B (NM_006927.2,1922-1940).
ccttcttcaagtatatcca

SEQ ID NO: 212785 - DNA, 19 bp, Homo sapiens
  siRNA target sequence for SIAT4C (NM_006278.1,214-232).
gtcgtcatggtgtggtatt

SEQ ID NO: 212786 - DNA, 19 bp, Homo sapiens
  siRNA target sequence for SIAT4C (NM_006278.1,217-235).
gtcatggtgtggtattcca

SEQ ID NO: 212787 - DNA, 19 bp, Homo sapiens
  siRNA target sequence for SIAT4C (NM_006278.1,357-375).
cctgcggcttgaggattat

SEQ ID NO: 212788 - DNA, 19 bp, Homo sapiens
  siRNA target sequence for SIAT4C (NM_006278.1,358-376).
ctgcggcttgaggattatt

SEQ ID NO: 212789 - DNA, 19 bp, Homo sapiens
  siRNA target sequence for SIAT4C (NM_006278.1,361-379).
cggcttgaggattatttct

SEQ ID NO: 212790 - DNA, 19 bp, Homo sapiens
  siRNA target sequence for SIAT4C (NM_006278.1,550-568).
ctgggagatgccatcaaca

SEQ ID NO: 212791 - DNA, 19 bp, Homo sapiens
  siRNA target sequence for SIAT4C (NM_006278.1,553-571).
ggagatgccatcaacaagt

SEQ ID NO: 212792 - DNA, 19 bp, Homo sapiens
  siRNA target sequence for SIAT4C (NM_006278.1,579-597).
ggtcatcagattgaacaat

SEQ ID NO: 212793 - DNA, 19 bp, Homo sapiens
  siRNA target sequence for SIAT4C (NM_006278.1,638-656).
ccaccatgcgtctcttcta

SEQ ID NO: 212794 - DNA, 19 bp, Homo sapiens
  siRNA target sequence for SIAT4C (NM_006278.1,672-690).
cttcgaccccaaagtagaa

SEQ ID NO: 212795 - DNA, 19 bp, Homo sapiens
  siRNA target sequence for SIAT4C (NM_006278.1,676-694).
gaccccaaagtagaaaaca

SEQ ID NO: 212796 - DNA, 19 bp, Homo sapiens
  siRNA target sequence for SIAT4C (NM_006278.1,813-831).
ctgggatgtcaatcctaaa

SEQ ID NO: 212797 - DNA, 19 bp, Homo sapiens
  siRNA target sequence for SIAT4C (NM_006278.1,898-916).
caacagccacggaagatta

SEQ ID NO: 212798 - DNA, 19 bp, Homo sapiens
  siRNA target sequence for SIAT4C (NM_006278.1,1000-1018).
ccagacgcctacaacaaga

SEQ ID NO: 212799 - DNA, 19 bp, Homo sapiens
  siRNA target sequence for SIAT4C (NM_006278.1,1020-1038).
gcagaccattcactactat

SEQ ID NO: 212800 - DNA, 19 bp, Homo sapiens
  siRNA target sequence for SIAT4C (NM_006278.1,1066-1084).
gggtcaggccataatgtct

SEQ ID NO: 212801 - DNA, 19 bp, Homo sapiens
  siRNA target sequence for SIAT7C (NM_152996.1,214-232).
gctggttgtgcgtcttgta

SEQ ID NO: 212802 - DNA, 19 bp, Homo sapiens
  siRNA target sequence for SIAT7C (NM_152996.1,215-233).
ctggttgtgcgtcttgtaa

SEQ ID NO: 212803 - DNA, 19 bp, Homo sapiens
  siRNA target sequence for SIAT7C (NM_152996.1,217-235).
ggttgtgcgtcttgtaaat

SEQ ID NO: 212804 - DNA, 19 bp, Homo sapiens
  siRNA target sequence for SIAT7C (NM_152996.1,225-243).
gtcttgtaaatgaagtgaa

SEQ ID NO: 212805 - DNA, 19 bp, Homo sapiens
  siRNA target sequence for SIAT7C (NM_152996.1,269-287).
ggacaacctggtacaaagt

SEQ ID NO: 212806 - DNA, 19 bp, Homo sapiens
  siRNA target sequence for SIAT7C (NM_152996.1,320-338).
cttcgaactcactatggat

SEQ ID NO: 212807 - DNA, 19 bp, Homo sapiens
  siRNA target sequence for SIAT7C (NM_152996.1,324-342).
gaactcactatggatacat

SEQ ID NO: 212808 - DNA, 19 bp, Homo sapiens
  siRNA target sequence for SIAT7C (NM_152996.1,327-345).
ctcactatggatacataaa

SEQ ID NO: 212809 - DNA, 19 bp, Homo sapiens
  siRNA target sequence for SIAT7C (NM_152996.1,380-398).
gacctttgtgccatagtgt

SEQ ID NO: 212810 - DNA, 19 bp, Homo sapiens
  siRNA target sequence for SIAT7C (NM_152996.1,446-464).
cgatcctcctgcatttgga

SEQ ID NO: 212811 - DNA, 19 bp, Homo sapiens
  siRNA target sequence for SIAT7C (NM_152996.1,477-495).
cccccaccaaaggttatga

SEQ ID NO: 212812 - DNA, 19 bp, Homo sapiens
  siRNA target sequence for SIAT7C (NM_152996.1,540-558).
ccagcgttcctcttttgct

SEQ ID NO: 212813 - DNA, 19 bp, Homo sapiens
  siRNA target sequence for SIAT7C (NM_152996.1,541-559).
cagcgttcctcttttgcta

SEQ ID NO: 212814 - DNA, 19 bp, Homo sapiens
  siRNA target sequence for SIAT7C (NM_152996.1,543-561).
gcgttcctcttttgctaaa

SEQ ID NO: 212815 - DNA, 19 bp, Homo sapiens
  siRNA target sequence for SIAT7C (NM_152996.1,580-598).
caaggaagcgaatactact

SEQ ID NO: 212816 - DNA, 19 bp, Homo sapiens
  siRNA target sequence for SIAT7C (NM_152996.1,583-601).
ggaagcgaatactactatt

SEQ ID NO: 212817 - DNA, 19 bp, Homo sapiens
  siRNA target sequence for SIAT7C (NM_152996.1,584-602).
gaagcgaatactactattt

SEQ ID NO: 212818 - DNA, 19 bp, Homo sapiens
  siRNA target sequence for SIAT7C (NM_152996.1,612-630).
ggggacctttccgcaatat

SEQ ID NO: 212819 - DNA, 19 bp, Homo sapiens
  siRNA target sequence for SIAT7C (NM_152996.1,614-632).
ggacctttccgcaatatga

SEQ ID NO: 212820 - DNA, 19 bp, Homo sapiens
  siRNA target sequence for SIAT7C (NM_152996.1,622-640).
ccgcaatatgaggaaagat

SEQ ID NO: 212821 - DNA, 19 bp, Homo sapiens
  siRNA target sequence for SIAT7C (NM_152996.1,685-703).
ctatccgaatgcccaaata

SEQ ID NO: 212822 - DNA, 19 bp, Homo sapiens
  siRNA target sequence for SIAT7C (NM_152996.1,690-708).
cgaatgcccaaatatacgt

SEQ ID NO: 212823 - DNA, 19 bp, Homo sapiens
  siRNA target sequence for SIAT7C (NM_152996.1,714-732).
cagagaagcgcatgagtta

SEQ ID NO: 212824 - DNA, 19 bp, Homo sapiens
  siRNA target sequence for SIAT7C (NM_152996.1,820-838).
ggccatggacgcctgttat

SEQ ID NO: 212825 - DNA, 19 bp, Homo sapiens
  siRNA target sequence for SIAT7C (NM_152996.1,845-863).
cacgtctacgggatgataa

SEQ ID NO: 212826 - DNA, 19 bp, Homo sapiens
  siRNA target sequence for SIAT7C (NM_152996.1,880-898).
gacagaagggtatagaaaa

SEQ ID NO: 212827 - DNA, 19 bp, Homo sapiens
  siRNA target sequence for SIAT7C (NM_152996.1,894-912).
gaaaagtcccctaccatta

SEQ ID NO: 212828 - DNA, 19 bp, Homo sapiens
  siRNA target sequence for SIAT7C (NM_152996.1,901-919).
cccctaccattattatgaa

SEQ ID NO: 212829 - DNA, 19 bp, Homo sapiens
  siRNA target sequence for SIAT7C (NM_152996.1,903-921).
cctaccattattatgaaca

SEQ ID NO: 212830 - DNA, 19 bp, Homo sapiens
  siRNA target sequence for SIAT7C (NM_152996.1,966-984).
catatgggggtcataggtt

SEQ ID NO: 212831 - DNA, 19 bp, Homo sapiens
  siRNA target sequence for SIAT7C (NM_152996.1,971-989).
gggggtcataggtttatca

SEQ ID NO: 212832 - DNA, 19 bp, Homo sapiens
  siRNA target sequence for SIAT7D (NM_014403.3,286-304).
gtcggctcgtgctcatcat

SEQ ID NO: 212833 - DNA, 19 bp, Homo sapiens
  siRNA target sequence for SIAT7D (NM_014403.3,432-450).
ctgcacttcagtggatata

SEQ ID NO: 212834 - DNA, 19 bp, Homo sapiens
  siRNA target sequence for SIAT7D (NM_014403.3,435-453).
cacttcagtggatatagca

SEQ ID NO: 212835 - DNA, 19 bp, Homo sapiens
  siRNA target sequence for SIAT7D (NM_014403.3,662-680).
gctgctgctgcgcaactat

SEQ ID NO: 212836 - DNA, 19 bp, Homo sapiens
  siRNA target sequence for SIAT7D (NM_014403.3,663-681).
ctgctgctgcgcaactatt

SEQ ID NO: 212837 - DNA, 19 bp, Homo sapiens
  siRNA target sequence for SIAT7D (NM_014403.3,665-683).
gctgctgcgcaactattca

SEQ ID NO: 212838 - DNA, 19 bp, Homo sapiens
  siRNA target sequence for SIAT7D (NM_014403.3,673-691).
gcaactattcacactactt

SEQ ID NO: 212839 - DNA, 19 bp, Homo sapiens
  siRNA target sequence for SIAT7D (NM_014403.3,700-718).
cccgagacacgctctacat

SEQ ID NO: 212840 - DNA, 19 bp, Homo sapiens
  siRNA target sequence for SIAT7D (NM_014403.3,841-859).
cctactgcgaccagatctt

SEQ ID NO: 212841 - DNA, 19 bp, Homo sapiens
  siRNA target sequence for SIAT7D (NM_014403.3,1009-1027).
cagtgccttaccactactt

SEQ ID NO: 212842 - DNA, 19 bp, Homo sapiens
  siRNA target sequence for SIAT7D (NM_014403.3,1014-1032).
ccttaccactactttgaga

SEQ ID NO: 212843 - DNA, 19 bp, Homo sapiens
  siRNA target sequence for SIAT7D (NM_014403.3,1015-1033).
cttaccactactttgagaa

SEQ ID NO: 212844 - DNA, 19 bp, Homo sapiens
  siRNA target sequence for SIAT1 (NM_003032.2,346-364).
ctgcgtcctggtctttctt

SEQ ID NO: 212845 - DNA, 19 bp, Homo sapiens
  siRNA target sequence for SIAT1 (NM_003032.2,348-366).
gcgtcctggtctttcttct

SEQ ID NO: 212846 - DNA, 19 bp, Homo sapiens
  siRNA target sequence for SIAT1 (NM_003032.2,405-423).
ggagttactatgattcctt

SEQ ID NO: 212847 - DNA, 19 bp, Homo sapiens
  siRNA target sequence for SIAT1 (NM_003032.2,416-434).
gattcctttaaattgcaaa

SEQ ID NO: 212848 - DNA, 19 bp, Homo sapiens
  siRNA target sequence for SIAT1 (NM_003032.2,629-647).
cctaggctgcaaaagatct

SEQ ID NO: 212849 - DNA, 19 bp, Homo sapiens
  siRNA target sequence for SIAT1 (NM_003032.2,659-677).
ctaagcatgaacaagtaca

SEQ ID NO: 212850 - DNA, 19 bp, Homo sapiens
  siRNA target sequence for SIAT1 (NM_003032.2,698-716).
ggaccaggcatcaagttca

SEQ ID NO: 212851 - DNA, 19 bp, Homo sapiens
  siRNA target sequence for SIAT1 (NM_003032.2,742-760).
ccgggaccatgtgaatgta

SEQ ID NO: 212852 - DNA, 19 bp, Homo sapiens
  siRNA target sequence for SIAT1 (NM_003032.2,906-924).
gcagagaaatcgatgatca

SEQ ID NO: 212853 - DNA, 19 bp, Homo sapiens
  siRNA target sequence for SIAT1 (NM_003032.2,907-925).
cagagaaatcgatgatcat

SEQ ID NO: 212854 - DNA, 19 bp, Homo sapiens
  siRNA target sequence for SIAT1 (NM_003032.2,909-927).
gagaaatcgatgatcatga

SEQ ID NO: 212855 - DNA, 19 bp, Homo sapiens
  siRNA target sequence for SIAT1 (NM_003032.2,928-946).
cgcagtcctgaggtttaat

SEQ ID NO: 212856 - DNA, 19 bp, Homo sapiens
  siRNA target sequence for SIAT1 (NM_003032.2,960-978).
ccaacttccaacaagatgt

SEQ ID NO: 212857 - DNA, 19 bp, Homo sapiens
  siRNA target sequence for SIAT1 (NM_003032.2,990-1008).
ctaccattcgcctgatgaa

SEQ ID NO: 212858 - DNA, 19 bp, Homo sapiens
  siRNA target sequence for SIAT1 (NM_003032.2,1040-1058).
ctcaaagacagtttgtaca

SEQ ID NO: 212859 - DNA, 19 bp, Homo sapiens
  siRNA target sequence for SIAT1 (NM_003032.2,1054-1072).
gtacaatgaaggaatccta

SEQ ID NO: 212860 - DNA, 19 bp, Homo sapiens
  siRNA target sequence for SIAT1 (NM_003032.2,1076-1094).
gtatgggacccatctgtat

SEQ ID NO: 212861 - DNA, 19 bp, Homo sapiens
  siRNA target sequence for SIAT1 (NM_003032.2,1089-1107).
ctgtataccactcagatat

SEQ ID NO: 212862 - DNA, 19 bp, Homo sapiens
  siRNA target sequence for SIAT1 (NM_003032.2,1117-1135).
gtaccagaatccggattat

SEQ ID NO: 212863 - DNA, 19 bp, Homo sapiens
  siRNA target sequence for SIAT1 (NM_003032.2,1120-1138).
ccagaatccggattataat

SEQ ID NO: 212864 - DNA, 19 bp, Homo sapiens
  siRNA target sequence for SIAT1 (NM_003032.2,1121-1139).
cagaatccggattataatt

SEQ ID NO: 212865 - DNA, 19 bp, Homo sapiens
  siRNA target sequence for SIAT1 (NM_003032.2,1215-1233).
gggagctatgggacattct

SEQ ID NO: 212866 - DNA, 19 bp, Homo sapiens
  siRNA target sequence for SIAT1 (NM_003032.2,1216-1234).
ggagctatgggacattctt

SEQ ID NO: 212867 - DNA, 19 bp, Homo sapiens
  siRNA target sequence for SIAT1 (NM_003032.2,1278-1296).
ctgggatgcttggtatcat

SEQ ID NO: 212868 - DNA, 19 bp, Homo sapiens
  siRNA target sequence for SIAT1 (NM_003032.2,1314-1332).
gtgaccaggtggatattta

SEQ ID NO: 212869 - DNA, 19 bp, Homo sapiens
  siRNA target sequence for SIAT1 (NM_003032.2,1359-1377).
ctgacgtgtgctactacta

SEQ ID NO: 212870 - DNA, 19 bp, Homo sapiens
  siRNA target sequence for SIAT1 (NM_003032.2,1368-1386).
gctactactaccagaagtt

SEQ ID NO: 212871 - DNA, 19 bp, Homo sapiens
  siRNA target sequence for SIAT1 (NM_003032.2,1422-1440).
cgctgctctatgagaagaa

SEQ ID NO: 212872 - DNA, 19 bp, Homo sapiens
  siRNA target sequence for SIAT1 (NM_003032.2,1423-1441).
gctgctctatgagaagaat

SEQ ID NO: 212873 - DNA, 19 bp, Homo sapiens
  siRNA target sequence for SIAT1 (NM_003032.2,1508-1526).
ggcttccggaccattcact

SEQ ID NO: 212874 - DNA, 19 bp, Homo sapiens
  siRNA target sequence for SIAT8A (NM_003034.2,631-649).
ggctgcccaacgagaaaga

SEQ ID NO: 212875 - DNA, 19 bp, Homo sapiens
  siRNA target sequence for SIAT8A (NM_003034.2,707-725).
cagagcgttcaggaaacaa

SEQ ID NO: 212876 - DNA, 19 bp, Homo sapiens
  siRNA target sequence for SIAT8A (NM_003034.2,709-727).
gagcgttcaggaaacaaat

SEQ ID NO: 212877 - DNA, 19 bp, Homo sapiens
  siRNA target sequence for SIAT8A (NM_003034.2,799-817).
ggtatgacggggagttttt

SEQ ID NO: 212878 - DNA, 19 bp, Homo sapiens
  siRNA target sequence for SIAT8A (NM_003034.2,800-818).
gtatgacggggagttttta

SEQ ID NO: 212879 - DNA, 19 bp, Homo sapiens
  siRNA target sequence for SIAT8A (NM_003034.2,804-822).
gacggggagtttttatact

SEQ ID NO: 212880 - DNA, 19 bp, Homo sapiens
  siRNA target sequence for SIAT8A (NM_003034.2,827-845).
caccattgacaattcaact

SEQ ID NO: 212881 - DNA, 19 bp, Homo sapiens
  siRNA target sequence for SIAT8A (NM_003034.2,896-914).
cgcggtggtgggaaatggt

SEQ ID NO: 212882 - DNA, 19 bp, Homo sapiens
  siRNA target sequence for SIAT8A (NM_003034.2,931-949).
gtggctgtggccgtcaaat

SEQ ID NO: 212883 - DNA, 19 bp, Homo sapiens
  siRNA target sequence for SIAT8A (NM_003034.2,934-952).
gctgtggccgtcaaataga

SEQ ID NO: 212884 - DNA, 19 bp, Homo sapiens
  siRNA target sequence for SIAT8A (NM_003034.2,935-953).
ctgtggccgtcaaatagat

SEQ ID NO: 212885 - DNA, 19 bp, Homo sapiens
  siRNA target sequence for SIAT8A (NM_003034.2,1052-1070).
cataattcggcaaaggttt

SEQ ID NO: 212886 - DNA, 19 bp, Homo sapiens
  siRNA target sequence for SIAT8A (NM_003034.2,1084-1102).
ggtccagaaagacatttgt

SEQ ID NO: 212887 - DNA, 19 bp, Homo sapiens
  siRNA target sequence for SIAT8A (NM_003034.2,1164-1182).
ggaacagagccatctttga

SEQ ID NO: 212888 - DNA, 19 bp, Homo sapiens
  siRNA target sequence for SIAT8A (NM_003034.2,1241-1259).
caactttctgcgtagcatt

SEQ ID NO: 212889 - DNA, 19 bp, Homo sapiens
  siRNA target sequence for SIAT8A (NM_003034.2,1251-1269).
cgtagcattggaaagttct

SEQ ID NO: 212890 - DNA, 19 bp, Homo sapiens
  siRNA target sequence for SIAT8A (NM_003034.2,1298-1316).
cctgtccacaggacttttt

SEQ ID NO: 212891 - DNA, 19 bp, Homo sapiens
  siRNA target sequence for SIAT8A (NM_003034.2,1399-1417).
ccatcagccaccactacta

SEQ ID NO: 212892 - DNA, 19 bp, Homo sapiens
  siRNA target sequence for SIAT8A (NM_003034.2,1421-1439).
caacgtcttacccttttct

SEQ ID NO: 212893 - DNA, 19 bp, Homo sapiens
  siRNA target sequence for SIAT9 (NM_003896.2,282-300).
gaaggcccagcttgttatt

SEQ ID NO: 212894 - DNA, 19 bp, Homo sapiens
  siRNA target sequence for SIAT9 (NM_003896.2,285-303).
ggcccagcttgttattaaa

SEQ ID NO: 212895 - DNA, 19 bp, Homo sapiens
  siRNA target sequence for SIAT9 (NM_003896.2,288-306).
ccagcttgttattaaaaga

SEQ ID NO: 212896 - DNA, 19 bp, Homo sapiens
  siRNA target sequence for SIAT9 (NM_003896.2,305-323).
gacatcctcaaatgtacat

SEQ ID NO: 212897 - DNA, 19 bp, Homo sapiens
  siRNA target sequence for SIAT9 (NM_003896.2,335-353).
ggagtgtggatcctttata

SEQ ID NO: 212898 - DNA, 19 bp, Homo sapiens
  siRNA target sequence for SIAT9 (NM_003896.2,361-379).
gttaaattatactactgaa

SEQ ID NO: 212899 - DNA, 19 bp, Homo sapiens
  siRNA target sequence for SIAT9 (NM_003896.2,412-430).
ccctgaccatgtaaagaga

SEQ ID NO: 212900 - DNA, 19 bp, Homo sapiens
  siRNA target sequence for SIAT9 (NM_003896.2,463-481).
ggaatgtcgtcccaagttt

SEQ ID NO: 212901 - DNA, 19 bp, Homo sapiens
  siRNA target sequence for SIAT9 (NM_003896.2,489-507).
catcaatggcgctgttatt

SEQ ID NO: 212902 - DNA, 19 bp, Homo sapiens
  siRNA target sequence for SIAT9 (NM_003896.2,516-534).
ggtatagcgtggacttact

SEQ ID NO: 212903 - DNA, 19 bp, Homo sapiens
  siRNA target sequence for SIAT9 (NM_003896.2,603-621).
ggaagttctccagtaaagt

SEQ ID NO: 212904 - DNA, 19 bp, Homo sapiens
  siRNA target sequence for SIAT9 (NM_003896.2,684-702).
gtcggcgctgtgtggttat

SEQ ID NO: 212905 - DNA, 19 bp, Homo sapiens
  siRNA target sequence for SIAT9 (NM_003896.2,688-706).
gcgctgtgtggttattgga

SEQ ID NO: 212906 - DNA, 19 bp, Homo sapiens
  siRNA target sequence for SIAT9 (NM_003896.2,689-707).
cgctgtgtggttattggaa

SEQ ID NO: 212907 - DNA, 19 bp, Homo sapiens
  siRNA target sequence for SIAT9 (NM_003896.2,751-769).
ccagttcgatgttgtgata

SEQ ID NO: 212908 - DNA, 19 bp, Homo sapiens
  siRNA target sequence for SIAT9 (NM_003896.2,752-770).
cagttcgatgttgtgataa

SEQ ID NO: 212909 - DNA, 19 bp, Homo sapiens
  siRNA target sequence for SIAT9 (NM_003896.2,786-804).
cagttgagggatattcaga

SEQ ID NO: 212910 - DNA, 19 bp, Homo sapiens
  siRNA target sequence for SIAT9 (NM_003896.2,822-840).
ctactataaggatgactta

SEQ ID NO: 212911 - DNA, 19 bp, Homo sapiens
  siRNA target sequence for SIAT9 (NM_003896.2,928-946).
gcttcaagcaatggtaaaa

SEQ ID NO: 212912 - DNA, 19 bp, Homo sapiens
  siRNA target sequence for SIAT9 (NM_003896.2,929-947).
cttcaagcaatggtaaaaa

SEQ ID NO: 212913 - DNA, 19 bp, Homo sapiens
  siRNA target sequence for SIAT9 (NM_003896.2,968-986).
gtacgactcttcttttgga

SEQ ID NO: 212914 - DNA, 19 bp, Homo sapiens
  siRNA target sequence for SIAT9 (NM_003896.2,1123-1141).
ccccacaatcggtgtcatt

SEQ ID NO: 212915 - DNA, 19 bp, Homo sapiens
  siRNA target sequence for SIAT9 (NM_003896.2,1177-1195).
cagtttggcgggttttgga

SEQ ID NO: 212916 - DNA, 19 bp, Homo sapiens
  siRNA target sequence for SIAT9 (NM_003896.2,1179-1197).
gtttggcgggttttggata

SEQ ID NO: 212917 - DNA, 19 bp, Homo sapiens
  siRNA target sequence for SIAT9 (NM_003896.2,1215-1233).
gaacacctttgcactactt

SEQ ID NO: 212918 - DNA, 19 bp, Homo sapiens
  siRNA target sequence for SIAT9 (NM_003896.2,1226-1244).
cactacttcgacagtcaat

SEQ ID NO: 212919 - DNA, 19 bp, Homo sapiens
  siRNA target sequence for SIAT9 (NM_003896.2,1344-1362).
gaggcattgatcgtgaatt

SEQ ID NO: 212920 - DNA, 19 bp, Homo sapiens
  siRNA target sequence for SIAT7A (NM_018414.2,147-165).
cgccttgccctcttttatt

SEQ ID NO: 212921 - DNA, 19 bp, Homo sapiens
  siRNA target sequence for SIAT7A (NM_018414.2,148-166).
gccttgccctcttttatta

SEQ ID NO: 212922 - DNA, 19 bp, Homo sapiens
  siRNA target sequence for SIAT7A (NM_018414.2,294-312).
gccagtgccagagaacaat

SEQ ID NO: 212923 - DNA, 19 bp, Homo sapiens
  siRNA target sequence for SIAT7A (NM_018414.2,639-657).
gacgctcattcccaaaagt

SEQ ID NO: 212924 - DNA, 19 bp, Homo sapiens
  siRNA target sequence for SIAT7A (NM_018414.2,641-659).
cgctcattcccaaaagtca

SEQ ID NO: 212925 - DNA, 19 bp, Homo sapiens
  siRNA target sequence for SIAT7A (NM_018414.2,856-874).
gaaaaatacagcttcgaaa

SEQ ID NO: 212926 - DNA, 19 bp, Homo sapiens
  siRNA target sequence for SIAT7A (NM_018414.2,929-947).
cgctgtggctccagaaact

SEQ ID NO: 212927 - DNA, 19 bp, Homo sapiens
  siRNA target sequence for SIAT7A (NM_018414.2,1004-1022).
gggaccgcctggaacactt

SEQ ID NO: 212928 - DNA, 19 bp, Homo sapiens
  siRNA target sequence for SIAT7A (NM_018414.2,1005-1023).
ggaccgcctggaacacttt

SEQ ID NO: 212929 - DNA, 19 bp, Homo sapiens
  siRNA target sequence for SIAT7A (NM_018414.2,1336-1354).
ggcaatcggggtttcaaga

SEQ ID NO: 212930 - DNA, 19 bp, Homo sapiens
  siRNA target sequence for SIAT7A (NM_018414.2,1337-1355).
gcaatcggggtttcaagaa

SEQ ID NO: 212931 - DNA, 19 bp, Homo sapiens
  siRNA target sequence for SIAT7A (NM_018414.2,1399-1417).
ggcacccgggactatgagt

SEQ ID NO: 212932 - DNA, 19 bp, Homo sapiens
  siRNA target sequence for SIAT7A (NM_018414.2,1418-1436).
ggctggaagcactgcttat

SEQ ID NO: 212933 - DNA, 19 bp, Homo sapiens
  siRNA target sequence for SIAT7A (NM_018414.2,1422-1440).
ggaagcactgcttatgaat

SEQ ID NO: 212934 - DNA, 19 bp, Homo sapiens
  siRNA target sequence for SIAT7A (NM_018414.2,1441-1459).
cagacggtgatgtcaaaaa

SEQ ID NO: 212935 - DNA, 19 bp, Homo sapiens
  siRNA target sequence for SIAT7A (NM_018414.2,1447-1465).
gtgatgtcaaaaaaccttt

SEQ ID NO: 212936 - DNA, 19 bp, Homo sapiens
  siRNA target sequence for SIAT7A (NM_018414.2,1591-1609).
ggtgcccactggaggatat

SEQ ID NO: 212937 - DNA, 19 bp, Homo sapiens
  siRNA target sequence for SIAT7A (NM_018414.2,1592-1610).
gtgcccactggaggatata

SEQ ID NO: 212938 - DNA, 19 bp, Homo sapiens
  siRNA target sequence for SIAT7A (NM_018414.2,1692-1710).
gggccatgagcgcttttct

SEQ ID NO: 212939 - DNA, 19 bp, Homo sapiens
  siRNA target sequence for SIAT7A (NM_018414.2,1694-1712).
gccatgagcgcttttctga

SEQ ID NO: 212940 - DNA, 19 bp, Homo sapiens
  siRNA target sequence for SIAT7A (NM_018414.2,1695-1713).
ccatgagcgcttttctgat

SEQ ID NO: 212941 - DNA, 19 bp, Homo sapiens
  siRNA target sequence for SIAT7A (NM_018414.2,1733-1751).
ggaagcggctgatctttta

SEQ ID NO: 212942 - DNA, 19 bp, Homo sapiens
  siRNA target sequence for SIAT7A (NM_018414.2,1737-1755).
gcggctgatcttttacata

SEQ ID NO: 212943 - DNA, 19 bp, Homo sapiens
  siRNA target sequence for SIAT7A (NM_018414.2,1738-1756).
cggctgatcttttacataa

SEQ ID NO: 212944 - DNA, 19 bp, Homo sapiens
  siRNA target sequence for SIAT6 (NM_006279.2,229-247).
ctggtactgggatttttgt

SEQ ID NO: 212945 - DNA, 19 bp, Homo sapiens
  siRNA target sequence for SIAT6 (NM_006279.2,318-336).
ctccgctggacaaacacta

SEQ ID NO: 212946 - DNA, 19 bp, Homo sapiens
  siRNA target sequence for SIAT6 (NM_006279.2,332-350).
cactaggctcagagtatga

SEQ ID NO: 212947 - DNA, 19 bp, Homo sapiens
  siRNA target sequence for SIAT6 (NM_006279.2,560-578).
ggatcaaaggtcaagacaa

SEQ ID NO: 212948 - DNA, 19 bp, Homo sapiens
  siRNA target sequence for SIAT6 (NM_006279.2,569-587).
gtcaagacaatctgatcaa

SEQ ID NO: 212949 - DNA, 19 bp, Homo sapiens
  siRNA target sequence for SIAT6 (NM_006279.2,676-694).
ggcgttcttgccaacaagt

SEQ ID NO: 212950 - DNA, 19 bp, Homo sapiens
  siRNA target sequence for SIAT6 (NM_006279.2,693-711).
gtctctggggtcacgaatt

SEQ ID NO: 212951 - DNA, 19 bp, Homo sapiens
  siRNA target sequence for SIAT6 (NM_006279.2,695-713).
ctctggggtcacgaattga

SEQ ID NO: 212952 - DNA, 19 bp, Homo sapiens
  siRNA target sequence for SIAT6 (NM_006279.2,704-722).
cacgaattgacgactatga

SEQ ID NO: 212953 - DNA, 19 bp, Homo sapiens
  siRNA target sequence for SIAT6 (NM_006279.2,738-756).
gaattcagcaccagtgaaa

SEQ ID NO: 212954 - DNA, 19 bp, Homo sapiens
  siRNA target sequence for SIAT6 (NM_006279.2,837-855).
cgagcgcgattctctcttt

SEQ ID NO: 212955 - DNA, 19 bp, Homo sapiens
  siRNA target sequence for SIAT6 (NM_006279.2,1125-1143).
ggtggcagtcgcaggattt

SEQ ID NO: 212956 - DNA, 19 bp, Homo sapiens
  siRNA target sequence for SIAT6 (NM_006279.2,1169-1187).
cacccctgcactactatga

SEQ ID NO: 212957 - DNA, 19 bp, Homo sapiens
  siRNA target sequence for SIAT6 (NM_006279.2,1227-1245).
caatatccagcgagagaaa

SEQ ID NO: 212958 - DNA, 19 bp, Homo sapiens
  siRNA target sequence for SIAT6 (NM_006279.2,1273-1291).
cgcgtcatcactgatctaa

SEQ ID NO: 212959 - DNA, 19 bp, Homo sapiens
  siRNA target sequence for SIAT6 (NM_174963.1,443-461).
ctctctgcacggtggtttt

SEQ ID NO: 212960 - DNA, 19 bp, Homo sapiens
  siRNA target sequence for SIAT6 (NM_174963.1,464-482).
gccttgactgcatattgga

SEQ ID NO: 212961 - DNA, 19 bp, Homo sapiens
  siRNA target sequence for SIAT6 (NM_174963.1,488-506).
ctggagagcctaaaaaatt

SEQ ID NO: 212962 - DNA, 19 bp, Homo sapiens
  siRNA target sequence for SIAT6 (NM_174963.1,491-509).
gagagcctaaaaaattact

SEQ ID NO: 212963 - DNA, 19 bp, Homo sapiens
  siRNA target sequence for SIAT6 (NM_174963.1,569-587).
cattaggatttttaaagct

SEQ ID NO: 212964 - DNA, 19 bp, Homo sapiens
  siRNA target sequence for SIAT6 (NM_174969.1,285-303).
ggaggactccaagtatgat

SEQ ID NO: 212965 - DNA, 19 bp, Homo sapiens
  siRNA target sequence for SIAT10 (NM_006100.2,530-548).
catattatggggaacgaat

SEQ ID NO: 212966 - DNA, 19 bp, Homo sapiens
  siRNA target sequence for SIAT10 (NM_006100.2,590-608).
gatccagccttgtttatca

SEQ ID NO: 212967 - DNA, 19 bp, Homo sapiens
  siRNA target sequence for SIAT10 (NM_006100.2,623-641).
ctctctgctgaggtttcat

SEQ ID NO: 212968 - DNA, 19 bp, Homo sapiens
  siRNA target sequence for SIAT10 (NM_006100.2,659-677).
gtgtgcggctgattttaga

SEQ ID NO: 212969 - DNA, 19 bp, Homo sapiens
  siRNA target sequence for SIAT10 (NM_006100.2,665-683).
ggctgattttagaaagatt

SEQ ID NO: 212970 - DNA, 19 bp, Homo sapiens
  siRNA target sequence for SIAT10 (NM_006100.2,692-710).
gtatggtagcgataagttt

SEQ ID NO: 212971 - DNA, 19 bp, Homo sapiens
  siRNA target sequence for SIAT10 (NM_006100.2,696-714).
ggtagcgataagtttgatt

SEQ ID NO: 212972 - DNA, 19 bp, Homo sapiens
  siRNA target sequence for SIAT10 (NM_006100.2,697-715).
gtagcgataagtttgattt

SEQ ID NO: 212973 - DNA, 19 bp, Homo sapiens
  siRNA target sequence for SIAT10 (NM_006100.2,728-746).
gagaacatcagcggaatat

SEQ ID NO: 212974 - DNA, 19 bp, Homo sapiens
  siRNA target sequence for SIAT10 (NM_006100.2,730-748).
gaacatcagcggaatattt

SEQ ID NO: 212975 - DNA, 19 bp, Homo sapiens
  siRNA target sequence for SIAT10 (NM_006100.2,798-816).
gacaacataccctgtaaaa

SEQ ID NO: 212976 - DNA, 19 bp, Homo sapiens
  siRNA target sequence for SIAT10 (NM_006100.2,803-821).
cataccctgtaaaaagtgt

SEQ ID NO: 212977 - DNA, 19 bp, Homo sapiens
  siRNA target sequence for SIAT10 (NM_006100.2,818-836).
gtgtgtggtggttggtaat

SEQ ID NO: 212978 - DNA, 19 bp, Homo sapiens
  siRNA target sequence for SIAT10 (NM_006100.2,831-849).
ggtaatggaggagttttga

SEQ ID NO: 212979 - DNA, 19 bp, Homo sapiens
  siRNA target sequence for SIAT10 (NM_006100.2,837-855).
ggaggagttttgaagaata

SEQ ID NO: 212980 - DNA, 19 bp, Homo sapiens
  siRNA target sequence for SIAT10 (NM_006100.2,875-893).
cgactcctatgatgtaata

SEQ ID NO: 212981 - DNA, 19 bp, Homo sapiens
  siRNA target sequence for SIAT10 (NM_006100.2,946-964).
ggacaaccttccgactttt

SEQ ID NO: 212982 - DNA, 19 bp, Homo sapiens
  siRNA target sequence for SIAT10 (NM_006100.2,947-965).
gacaaccttccgacttttt

SEQ ID NO: 212983 - DNA, 19 bp, Homo sapiens
  siRNA target sequence for SIAT10 (NM_006100.2,953-971).
cttccgacttttttatcca

SEQ ID NO: 212984 - DNA, 19 bp, Homo sapiens
  siRNA target sequence for SIAT10 (NM_006100.2,976-994).
ctgttttttcagatcctat

SEQ ID NO: 212985 - DNA, 19 bp, Homo sapiens
  siRNA target sequence for SIAT10 (NM_006100.2,1017-1035).
gtgattctcactgctttta

SEQ ID NO: 212986 - DNA, 19 bp, Homo sapiens
  siRNA target sequence for SIAT10 (NM_006100.2,1246-1264).
gaattattgccatcacatt

SEQ ID NO: 212987 - DNA, 19 bp, Homo sapiens
  siRNA target sequence for SIAT10 (NM_006100.2,1287-1305).
gttcacctagctggtttta

SEQ ID NO: 212988 - DNA, 19 bp, Homo sapiens
  siRNA target sequence for SIAT10 (NM_006100.2,1293-1311).
ctagctggttttaaataca

SEQ ID NO: 212989 - DNA, 19 bp, Homo sapiens
  siRNA target sequence for SIAT10 (NM_006100.2,1409-1427).
ctttttgaaggacattata

SEQ ID NO: 212990 - DNA, 19 bp, Homo sapiens
  siRNA target sequence for SIAT7E (NM_030965.1,234-252).
ccagcttgttgctagtgta

SEQ ID NO: 212991 - DNA, 19 bp, Homo sapiens
  siRNA target sequence for SIAT7E (NM_030965.1,529-547).
gtgtgtcatccgcatgaat

SEQ ID NO: 212992 - DNA, 19 bp, Homo sapiens
  siRNA target sequence for SIAT7E (NM_030965.1,876-894).
gctggtttacaatgacaat

SEQ ID NO: 212993 - DNA, 19 bp, Homo sapiens
  siRNA target sequence for SIAT7E (NM_030965.1,880-898).
gtttacaatgacaattgca

SEQ ID NO: 212994 - DNA, 19 bp, Homo sapiens
  siRNA target sequence for SIAT7E (NM_030965.1,909-927).
gtgacaggatcaatgttta

SEQ ID NO: 212995 - DNA, 19 bp, Homo sapiens
  siRNA target sequence for SIAT7E (NM_030965.1,969-987).
cttcagtaccttatcatta

SEQ ID NO: 212996 - DNA, 19 bp, Homo sapiens
  siRNA target sequence for SIAT7E (NM_030965.1,972-990).
cagtaccttatcattatta

SEQ ID NO: 212997 - DNA, 19 bp, Homo sapiens
  siRNA target sequence for SIAT7E (NM_030965.1,995-1013).
ccttttggacctgatgaat

SEQ ID NO: 212998 - DNA, 19 bp, Homo sapiens
  siRNA target sequence for SIAT7E (NM_030965.1,1001-1019).
ggacctgatgaatgtacaa

SEQ ID NO: 212999 - DNA, 19 bp, Homo sapiens
  siRNA target sequence for SIAT7E (NM_030965.1,1002-1020).
gacctgatgaatgtacaat

SEQ ID NO: 213000 - DNA, 19 bp, Homo sapiens
  siRNA target sequence for SIAT7E (NM_030965.1,1004-1022).
cctgatgaatgtacaatgt

SEQ ID NO: 213001 - DNA, 19 bp, Homo sapiens
  siRNA target sequence for SIAT7E (NM_030965.1,1050-1068).
gcagtcatcaccgctttat

SEQ ID NO: 213002 - DNA, 19 bp, Homo sapiens
  siRNA target sequence for SIAT7E (NM_030965.1,1093-1111).
ctgggcacggacattcaat

SEQ ID NO: 213003 - DNA, 19 bp, Homo sapiens
  siRNA target sequence for SIAT7E (NM_030965.1,1095-1113).
gggcacggacattcaatat

SEQ ID NO: 213004 - DNA, 19 bp, Homo sapiens
  siRNA target sequence for SIAT7E (NM_030965.1,1096-1114).
ggcacggacattcaatatt

SEQ ID NO: 213005 - DNA, 19 bp, Homo sapiens
  siRNA target sequence for SIAT7E (NM_030965.1,1100-1118).
cggacattcaatattcact

SEQ ID NO: 213006 - DNA, 19 bp, Homo sapiens
  siRNA target sequence for SIAT8B (NM_006011.2,159-177).
gaacagcttacatagcaaa

SEQ ID NO: 213007 - DNA, 19 bp, Homo sapiens
  siRNA target sequence for SIAT8B (NM_006011.2,162-180).
cagcttacatagcaaatct

SEQ ID NO: 213008 - DNA, 19 bp, Homo sapiens
  siRNA target sequence for SIAT8B (NM_006011.2,164-182).
gcttacatagcaaatctaa

SEQ ID NO: 213009 - DNA, 19 bp, Homo sapiens
  siRNA target sequence for SIAT8B (NM_006011.2,179-197).
ctaatagagctgaagttgt

SEQ ID NO: 213010 - DNA, 19 bp, Homo sapiens
  siRNA target sequence for SIAT8B (NM_006011.2,272-290).
cgtccaaatggagacataa

SEQ ID NO: 213011 - DNA, 19 bp, Homo sapiens
  siRNA target sequence for SIAT8B (NM_006011.2,458-476).
ggacttcgccactgaagaa

SEQ ID NO: 213012 - DNA, 19 bp, Homo sapiens
  siRNA target sequence for SIAT8B (NM_006011.2,461-479).
cttcgccactgaagaataa

SEQ ID NO: 213013 - DNA, 19 bp, Homo sapiens
  siRNA target sequence for SIAT8B (NM_006011.2,464-482).
cgccactgaagaataagca

SEQ ID NO: 213014 - DNA, 19 bp, Homo sapiens
  siRNA target sequence for SIAT8B (NM_006011.2,533-551).
gctgtgggcaggagattga

SEQ ID NO: 213015 - DNA, 19 bp, Homo sapiens
  siRNA target sequence for SIAT8B (NM_006011.2,906-924).
caccggcctcttgatgtat

SEQ ID NO: 213016 - DNA, 19 bp, Homo sapiens
  siRNA target sequence for SIAT8B (NM_006011.2,933-951).
cacacgtttctgcaaacaa

SEQ ID NO: 213017 - DNA, 19 bp, Homo sapiens
  siRNA target sequence for SIAT8B (NM_006011.2,937-955).
cgtttctgcaaacaaatct

SEQ ID NO: 213018 - DNA, 19 bp, Homo sapiens
  siRNA target sequence for SIAT8B (NM_006011.2,974-992).
cctttccgctggatcagaa

SEQ ID NO: 213019 - DNA, 19 bp, Homo sapiens
  siRNA target sequence for SIAT8B (NM_006011.2,1000-1018).
ccagtcaagtaccactatt

SEQ ID NO: 213020 - DNA, 19 bp, Homo sapiens
  siRNA target sequence for SIAT8B (NM_006011.2,1085-1103).
ccctcaagagcctacatga

SEQ ID NO: 213021 - DNA, 19 bp, Homo sapiens
  siRNA target sequence for SIAT8C (NM_015879.1,2079-2097).
gcgtcgccctgctgatttt

SEQ ID NO: 213022 - DNA, 19 bp, Homo sapiens
  siRNA target sequence for SIAT8C (NM_015879.1,2080-2098).
cgtcgccctgctgatttta

SEQ ID NO: 213023 - DNA, 19 bp, Homo sapiens
  siRNA target sequence for SIAT8C (NM_015879.1,2109-2127).
gctacgtgtccctgaaaaa

SEQ ID NO: 213024 - DNA, 19 bp, Homo sapiens
  siRNA target sequence for SIAT8C (NM_015879.1,2192-2210).
gcgggattccggtcacaat

SEQ ID NO: 213025 - DNA, 19 bp, Homo sapiens
  siRNA target sequence for SIAT8C (NM_015879.1,2193-2211).
cgggattccggtcacaatt

SEQ ID NO: 213026 - DNA, 19 bp, Homo sapiens
  siRNA target sequence for SIAT8C (NM_015879.1,2194-2212).
gggattccggtcacaattt

SEQ ID NO: 213027 - DNA, 19 bp, Homo sapiens
  siRNA target sequence for SIAT8C (NM_015879.1,2205-2223).
cacaatttgcgctgaagtt

SEQ ID NO: 213028 - DNA, 19 bp, Homo sapiens
  siRNA target sequence for SIAT8C (NM_015879.1,2235-2253).
cattcgtgcccattacgaa

SEQ ID NO: 213029 - DNA, 19 bp, Homo sapiens
  siRNA target sequence for SIAT8C (NM_015879.1,2239-2257).
cgtgcccattacgaattct

SEQ ID NO: 213030 - DNA, 19 bp, Homo sapiens
  siRNA target sequence for SIAT8C (NM_015879.1,2304-2322).
ggacagcgtttttacatca

SEQ ID NO: 213031 - DNA, 19 bp, Homo sapiens
  siRNA target sequence for SIAT8C (NM_015879.1,2336-2354).
cttcagcatgtcgatgtaa

SEQ ID NO: 213032 - DNA, 19 bp, Homo sapiens
  siRNA target sequence for SIAT8C (NM_015879.1,2341-2359).
gcatgtcgatgtaataaaa

SEQ ID NO: 213033 - DNA, 19 bp, Homo sapiens
  siRNA target sequence for SIAT8C (NM_015879.1,2342-2360).
catgtcgatgtaataaaaa

SEQ ID NO: 213034 - DNA, 19 bp, Homo sapiens
  siRNA target sequence for SIAT8C (NM_015879.1,2367-2385).
ctttgaccaagaatagtgt

SEQ ID NO: 213035 - DNA, 19 bp, Homo sapiens
  siRNA target sequence for SIAT8C (NM_015879.1,2394-2412).
gacaactgatgcactatga

SEQ ID NO: 213036 - DNA, 19 bp, Homo sapiens
  siRNA target sequence for SIAT8C (NM_015879.1,2396-2414).
caactgatgcactatgatt

SEQ ID NO: 213037 - DNA, 19 bp, Homo sapiens
  siRNA target sequence for SIAT8C (NM_015879.1,2411-2429).
gattattccagccataaat

SEQ ID NO: 213038 - DNA, 19 bp, Homo sapiens
  siRNA target sequence for SIAT8C (NM_015879.1,2432-2450).
gttttctctattagcaata

SEQ ID NO: 213039 - DNA, 19 bp, Homo sapiens
  siRNA target sequence for SIAT8C (NM_015879.1,2469-2487).
cagatgtgtcacccattat

SEQ ID NO: 213040 - DNA, 19 bp, Homo sapiens
  siRNA target sequence for SIAT8C (NM_015879.1,2471-2489).
gatgtgtcacccattatga

SEQ ID NO: 213041 - DNA, 19 bp, Homo sapiens
  siRNA target sequence for SIAT8C (NM_015879.1,2474-2492).
gtgtcacccattatgaaca

SEQ ID NO: 213042 - DNA, 19 bp, Homo sapiens
  siRNA target sequence for SIAT8C (NM_015879.1,2604-2622).
cggaggctttccaaagaga

SEQ ID NO: 213043 - DNA, 19 bp, Homo sapiens
  siRNA target sequence for SIAT8C (NM_015879.1,2699-2717).
caggaccgtaacaactttt

SEQ ID NO: 213044 - DNA, 19 bp, Homo sapiens
  siRNA target sequence for SIAT8C (NM_015879.1,2710-2728).
caactttttcctcagttta

SEQ ID NO: 213045 - DNA, 19 bp, Homo sapiens
  siRNA target sequence for SIAT8C (NM_015879.1,2754-2772).
ggatccctgcatttttctt

SEQ ID NO: 213046 - DNA, 19 bp, Homo sapiens
  siRNA target sequence for SIAT8C (NM_015879.1,2793-2811).
ccaggacattagttgactt

SEQ ID NO: 213047 - DNA, 19 bp, Homo sapiens
  siRNA target sequence for SIAT8C (NM_015879.1,2794-2812).
caggacattagttgacttt

SEQ ID NO: 213048 - DNA, 19 bp, Homo sapiens
  siRNA target sequence for SIAT8C (NM_015879.1,2876-2894).
gtcaacaggtactggaaaa

SEQ ID NO: 213049 - DNA, 19 bp, Homo sapiens
  siRNA target sequence for SIAT8C (NM_015879.1,2896-2914).
caaacatttgtcacctaaa

SEQ ID NO: 213050 - DNA, 19 bp, Homo sapiens
  siRNA target sequence for SIAT8C (NM_015879.1,2916-2934).
ggctgagcacaggtattct

SEQ ID NO: 213051 - DNA, 19 bp, Homo sapiens
  siRNA target sequence for SIAT8C (NM_015879.1,2917-2935).
gctgagcacaggtattctt

SEQ ID NO: 213052 - DNA, 19 bp, Homo sapiens
  siRNA target sequence for SIAT8C (NM_015879.1,2961-2979).
gtgaagagatccacttgta

SEQ ID NO: 213053 - DNA, 19 bp, Homo sapiens
  siRNA target sequence for SIAT8C (NM_015879.1,2966-2984).
gagatccacttgtatggat

SEQ ID NO: 213054 - DNA, 19 bp, Homo sapiens
  siRNA target sequence for SIAT8C (NM_015879.1,2968-2986).
gatccacttgtatggattt

SEQ ID NO: 213055 - DNA, 19 bp, Homo sapiens
  siRNA target sequence for SIAT8C (NM_015879.1,2981-2999).
ggattttggccgtttggat

SEQ ID NO: 213056 - DNA, 19 bp, Homo sapiens
  siRNA target sequence for SIAT8C (NM_015879.1,2996-3014).
ggatttgaccccaacacaa

SEQ ID NO: 213057 - DNA, 19 bp, Homo sapiens
  siRNA target sequence for SIAT8C (NM_015879.1,3027-3045).
cataccattactatgacaa

SEQ ID NO: 213058 - DNA, 19 bp, Homo sapiens
  siRNA target sequence for SIAT8C (NM_015879.1,3031-3049).
ccattactatgacaaaaaa

SEQ ID NO: 213059 - DNA, 19 bp, Homo sapiens
  siRNA target sequence for SIAT8C (NM_015879.1,3106-3124).
gctgctgtaccgaatgcat

SEQ ID NO: 213060 - DNA, 19 bp, Homo sapiens
  siRNA target sequence for SIAT8D (NM_005668.3,335-353).
gacgatctgcacaataagt

SEQ ID NO: 213061 - DNA, 19 bp, Homo sapiens
  siRNA target sequence for SIAT8D (NM_005668.3,337-355).
cgatctgcacaataagtct

SEQ ID NO: 213062 - DNA, 19 bp, Homo sapiens
  siRNA target sequence for SIAT8D (NM_005668.3,352-370).
gtctgctcctgatctttta

SEQ ID NO: 213063 - DNA, 19 bp, Homo sapiens
  siRNA target sequence for SIAT8D (NM_005668.3,354-372).
ctgctcctgatcttttata

SEQ ID NO: 213064 - DNA, 19 bp, Homo sapiens
  siRNA target sequence for SIAT8D (NM_005668.3,423-441).
ggagatggtgaattgtctt

SEQ ID NO: 213065 - DNA, 19 bp, Homo sapiens
  siRNA target sequence for SIAT8D (NM_005668.3,424-442).
gagatggtgaattgtcttt

SEQ ID NO: 213066 - DNA, 19 bp, Homo sapiens
  siRNA target sequence for SIAT8D (NM_005668.3,426-444).
gatggtgaattgtctttga

SEQ ID NO: 213067 - DNA, 19 bp, Homo sapiens
  siRNA target sequence for SIAT8D (NM_005668.3,443-461).
gagtcggtcacttgtcaat

SEQ ID NO: 213068 - DNA, 19 bp, Homo sapiens
  siRNA target sequence for SIAT8D (NM_005668.3,447-465).
cggtcacttgtcaatagct

SEQ ID NO: 213069 - DNA, 19 bp, Homo sapiens
  siRNA target sequence for SIAT8D (NM_005668.3,453-471).
cttgtcaatagctctgata

SEQ ID NO: 213070 - DNA, 19 bp, Homo sapiens
  siRNA target sequence for SIAT8D (NM_005668.3,480-498).
cgaaaggctggctcttcaa

SEQ ID NO: 213071 - DNA, 19 bp, Homo sapiens
  siRNA target sequence for SIAT8D (NM_005668.3,481-499).
gaaaggctggctcttcaat

SEQ ID NO: 213072 - DNA, 19 bp, Homo sapiens
  siRNA target sequence for SIAT8D (NM_005668.3,496-514).
caatcttccagcacaatgt

SEQ ID NO: 213073 - DNA, 19 bp, Homo sapiens
  siRNA target sequence for SIAT8D (NM_005668.3,556-574).
ggaagaacatacttcgttt

SEQ ID NO: 213074 - DNA, 19 bp, Homo sapiens
  siRNA target sequence for SIAT8D (NM_005668.3,563-581).
catacttcgtttcttagat

SEQ ID NO: 213075 - DNA, 19 bp, Homo sapiens
  siRNA target sequence for SIAT8D (NM_005668.3,625-643).
gtgatgtcatacactatgt

SEQ ID NO: 213076 - DNA, 19 bp, Homo sapiens
  siRNA target sequence for SIAT8D (NM_005668.3,659-677).
gacactaaacatttctcat

SEQ ID NO: 213077 - DNA, 19 bp, Homo sapiens
  siRNA target sequence for SIAT8D (NM_005668.3,785-803).
ggagattgacagtcacaat

SEQ ID NO: 213078 - DNA, 19 bp, Homo sapiens
  siRNA target sequence for SIAT8D (NM_005668.3,792-810).
gacagtcacaattttgtaa

SEQ ID NO: 213079 - DNA, 19 bp, Homo sapiens
  siRNA target sequence for SIAT8D (NM_005668.3,852-870).
gtgggaactaaatcagatt

SEQ ID NO: 213080 - DNA, 19 bp, Homo sapiens
  siRNA target sequence for SIAT8D (NM_005668.3,854-872).
gggaactaaatcagatttt

SEQ ID NO: 213081 - DNA, 19 bp, Homo sapiens
  siRNA target sequence for SIAT8D (NM_005668.3,903-921).
gcatttggaggctttcgaa

SEQ ID NO: 213082 - DNA, 19 bp, Homo sapiens
  siRNA target sequence for SIAT8D (NM_005668.3,1016-1034).
gcacgtggagtgggttaat

SEQ ID NO: 213083 - DNA, 19 bp, Homo sapiens
  siRNA target sequence for SIAT8D (NM_005668.3,1019-1037).
cgtggagtgggttaatgca

SEQ ID NO: 213084 - DNA, 19 bp, Homo sapiens
  siRNA target sequence for SIAT8D (NM_005668.3,1022-1040).
ggagtgggttaatgcatta

SEQ ID NO: 213085 - DNA, 19 bp, Homo sapiens
  siRNA target sequence for SIAT8D (NM_005668.3,1078-1096).
cgtcattgagacttattca

SEQ ID NO: 213086 - DNA, 19 bp, Homo sapiens
  siRNA target sequence for SIAT8D (NM_005668.3,1079-1097).
gtcattgagacttattcat

SEQ ID NO: 213087 - DNA, 19 bp, Homo sapiens
  siRNA target sequence for SIAT8D (NM_005668.3,1191-1209).
gaaattcacctgtatggat

SEQ ID NO: 213088 - DNA, 19 bp, Homo sapiens
  siRNA target sequence for SIAT8D (NM_005668.3,1215-1233).
cccttccctaaggatttaa

SEQ ID NO: 213089 - DNA, 19 bp, Homo sapiens
  siRNA target sequence for SIAT8D (NM_005668.3,1216-1234).
ccttccctaaggatttaaa

SEQ ID NO: 213090 - DNA, 19 bp, Homo sapiens
  siRNA target sequence for SIAT8D (NM_005668.3,1237-1255).
gaaaagcggtcaaatatca

SEQ ID NO: 213091 - DNA, 19 bp, Homo sapiens
  siRNA target sequence for SIAT8D (NM_005668.3,1247-1265).
caaatatcattattatgat

SEQ ID NO: 213092 - DNA, 19 bp, Homo sapiens
  siRNA target sequence for SIAT8D (NM_005668.3,1302-1320).
cacagaatgccattagaat

SEQ ID NO: 213093 - DNA, 19 bp, Homo sapiens
  siRNA target sequence for SIAT8D (NM_005668.3,1327-1345).
cattaaatgtgctacataa

SEQ ID NO: 213094 - DNA, 19 bp, Homo sapiens
  siRNA target sequence for SIAT8E (NM_013305.2,540-558).
cggccaaccgggatttgtt

SEQ ID NO: 213095 - DNA, 19 bp, Homo sapiens
  siRNA target sequence for SIAT8E (NM_013305.2,564-582).
gccgaactttgctcttcat

SEQ ID NO: 213096 - DNA, 19 bp, Homo sapiens
  siRNA target sequence for SIAT8E (NM_013305.2,566-584).
cgaactttgctcttcatct

SEQ ID NO: 213097 - DNA, 19 bp, Homo sapiens
  siRNA target sequence for SIAT8E (NM_013305.2,567-585).
gaactttgctcttcatctt

SEQ ID NO: 213098 - DNA, 19 bp, Homo sapiens
  siRNA target sequence for SIAT8E (NM_013305.2,632-650).
ggcaggaactacattaaga

SEQ ID NO: 213099 - DNA, 19 bp, Homo sapiens
  siRNA target sequence for SIAT8E (NM_013305.2,640-658).
ctacattaagaggtacttt

SEQ ID NO: 213100 - DNA, 19 bp, Homo sapiens
  siRNA target sequence for SIAT8E (NM_013305.2,643-661).
cattaagaggtactttgaa

SEQ ID NO: 213101 - DNA, 19 bp, Homo sapiens
  siRNA target sequence for SIAT8E (NM_013305.2,680-698).
gaatataactccacaagat

SEQ ID NO: 213102 - DNA, 19 bp, Homo sapiens
  siRNA target sequence for SIAT8E (NM_013305.2,703-721).
ggagctgaggcacgaaata

SEQ ID NO: 213103 - DNA, 19 bp, Homo sapiens
  siRNA target sequence for SIAT8E (NM_013305.2,709-727).
gaggcacgaaatattggaa

SEQ ID NO: 213104 - DNA, 19 bp, Homo sapiens
  siRNA target sequence for SIAT8E (NM_013305.2,792-810).
gcaaatgggcgatgaacat

SEQ ID NO: 213105 - DNA, 19 bp, Homo sapiens
  siRNA target sequence for SIAT8E (NM_013305.2,815-833).
gaggccaaccagttcaagt

SEQ ID NO: 213106 - DNA, 19 bp, Homo sapiens
  siRNA target sequence for SIAT8E (NM_013305.2,898-916).
ggggacaaagctcaagtat

SEQ ID NO: 213107 - DNA, 19 bp, Homo sapiens
  siRNA target sequence for SIAT8E (NM_013305.2,900-918).
ggacaaagctcaagtatga

SEQ ID NO: 213108 - DNA, 19 bp, Homo sapiens
  siRNA target sequence for SIAT8E (NM_013305.2,992-1010).
cggtcccagtttaagaagt

SEQ ID NO: 213109 - DNA, 19 bp, Homo sapiens
  siRNA target sequence for SIAT8E (NM_013305.2,1050-1068).
gctgcgggagggagatcaa

SEQ ID NO: 213110 - DNA, 19 bp, Homo sapiens
  siRNA target sequence for SIAT8E (NM_013305.2,1310-1328).
gtgctggacgacttcgaat

SEQ ID NO: 213111 - DNA, 19 bp, Homo sapiens
  siRNA target sequence for SIAT8E (NM_013305.2,1329-1347).
cgccgcaagctgtctacta

SEQ ID NO: 213112 - DNA, 19 bp, Homo sapiens
  siRNA target sequence for SIAT8E (NM_013305.2,1331-1349).
ccgcaagctgtctactact

SEQ ID NO: 213113 - DNA, 19 bp, Homo sapiens
  siRNA target sequence for SIAT8E (NM_013305.2,1332-1350).
cgcaagctgtctactactt

SEQ ID NO: 213114 - DNA, 19 bp, Homo sapiens
  siRNA target sequence for SIAT8E (NM_013305.2,1566-1584).
ccatgccctctgagatctt

SEQ ID NO: 213115 - DNA, 19 bp, Homo sapiens
  siRNA target sequence for SIAT8E (NM_013305.2,1571-1589).
ccctctgagatcttcaact

SEQ ID NO: 213116 - DNA, 19 bp, Homo sapiens
  siRNA target sequence for ST6GalII (NM_032528.1,206-224).
cgaatgcttttcggaatat

SEQ ID NO: 213117 - DNA, 19 bp, Homo sapiens
  siRNA target sequence for ST6GalII (NM_032528.1,424-442).
ccacccagccggttccttt

SEQ ID NO: 213118 - DNA, 19 bp, Homo sapiens
  siRNA target sequence for ST6GalII (NM_032528.1,478-496).
gtcccaagatgggtttgaa

SEQ ID NO: 213119 - DNA, 19 bp, Homo sapiens
  siRNA target sequence for ST6GalII (NM_032528.1,480-498).
cccaagatgggtttgaaca

SEQ ID NO: 213120 - DNA, 19 bp, Homo sapiens
  siRNA target sequence for ST6GalII (NM_032528.1,552-570).
cggaggatgacgactactt

SEQ ID NO: 213121 - DNA, 19 bp, Homo sapiens
  siRNA target sequence for ST6GalII (NM_032528.1,554-572).
gaggatgacgactactttt

SEQ ID NO: 213122 - DNA, 19 bp, Homo sapiens
  siRNA target sequence for ST6GalII (NM_032528.1,802-820).
ggggaacgtctcttccaaa

SEQ ID NO: 213123 - DNA, 19 bp, Homo sapiens
  siRNA target sequence for ST6GalII (NM_032528.1,803-821).
gggaacgtctcttccaaaa

SEQ ID NO: 213124 - DNA, 19 bp, Homo sapiens
  siRNA target sequence for ST6GalII (NM_032528.1,804-822).
ggaacgtctcttccaaaat

SEQ ID NO: 213125 - DNA, 19 bp, Homo sapiens
  siRNA target sequence for ST6GalII (NM_032528.1,839-857).
cagaaggcgatgaaggatt

SEQ ID NO: 213126 - DNA, 19 bp, Homo sapiens
  siRNA target sequence for ST6GalII (NM_032528.1,1082-1100).
ggcgcaatcctcaactctt

SEQ ID NO: 213127 - DNA, 19 bp, Homo sapiens
  siRNA target sequence for ST6GalII (NM_032528.1,1101-1119).
ccttgggcgaggaaataga

SEQ ID NO: 213128 - DNA, 19 bp, Homo sapiens
  siRNA target sequence for ST6GalII (NM_032528.1,1102-1120).
cttgggcgaggaaatagat

SEQ ID NO: 213129 - DNA, 19 bp, Homo sapiens
  siRNA target sequence for ST6GalII (NM_032528.1,1111-1129).
ggaaatagattctcatgat

SEQ ID NO: 213130 - DNA, 19 bp, Homo sapiens
  siRNA target sequence for ST6GalII (NM_032528.1,1130-1148).
gcggttttgagatttaact

SEQ ID NO: 213131 - DNA, 19 bp, Homo sapiens
  siRNA target sequence for ST6GalII (NM_032528.1,1152-1170).
ctcctacacgtggttatga

SEQ ID NO: 213132 - DNA, 19 bp, Homo sapiens
  siRNA target sequence for ST6GalII (NM_032528.1,1191-1209).
ccaccatacgcatcattaa

SEQ ID NO: 213133 - DNA, 19 bp, Homo sapiens
  siRNA target sequence for ST6GalII (NM_032528.1,1192-1210).
caccatacgcatcattaat

SEQ ID NO: 213134 - DNA, 19 bp, Homo sapiens
  siRNA target sequence for ST6GalII (NM_032528.1,1256-1274).
ctgtataaagacgtcattt

SEQ ID NO: 213135 - DNA, 19 bp, Homo sapiens
  siRNA target sequence for ST6GalII (NM_032528.1,1293-1311).
ccccatattccgcaaatct

SEQ ID NO: 213136 - DNA, 19 bp, Homo sapiens
  siRNA target sequence for ST6GalII (NM_032528.1,1295-1313).
ccatattccgcaaatctta

SEQ ID NO: 213137 - DNA, 19 bp, Homo sapiens
  siRNA target sequence for ST6GalII (NM_032528.1,1296-1314).
catattccgcaaatcttaa

SEQ ID NO: 213138 - DNA, 19 bp, Homo sapiens
  siRNA target sequence for ST6GalII (NM_032528.1,1310-1328).
cttaacctgtggtacaaaa

SEQ ID NO: 213139 - DNA, 19 bp, Homo sapiens
  siRNA target sequence for ST6GalII (NM_032528.1,1339-1357).
caacctgttcactccatat

SEQ ID NO: 213140 - DNA, 19 bp, Homo sapiens
  siRNA target sequence for ST6GalII (NM_032528.1,1617-1635).
cgtaccacccactactcta

SEQ ID NO: 213141 - DNA, 19 bp, Homo sapiens
  siRNA target sequence for ST6GalII (NM_032528.1,1668-1686).
gcacgcagggggatttgca

SEQ ID NO: 213142 - DNA, 19 bp, Homo sapiens
  siRNA target sequence for ST6GalII (NM_032528.1,1669-1687).
cacgcagggggatttgcat

SEQ ID NO: 213143 - DNA, 19 bp, Homo sapiens
  siRNA target sequence for ST6GALNAC6 (NM_013443.3,210-228).
cgccggagagaaatgagta

SEQ ID NO: 213144 - DNA, 19 bp, Homo sapiens
  siRNA target sequence for ST6GALNAC6 (NM_013443.3,309-327).
gccaatgaggtcttccatt

SEQ ID NO: 213145 - DNA, 19 bp, Homo sapiens
  siRNA target sequence for ST6GALNAC6 (NM_013443.3,310-328).
ccaatgaggtcttccatta

SEQ ID NO: 213146 - DNA, 19 bp, Homo sapiens
  siRNA target sequence for ST6GALNAC6 (NM_013443.3,509-527).
gtgtacaatccgcatgaat

SEQ ID NO: 213147 - DNA, 19 bp, Homo sapiens
  siRNA target sequence for ST6GALNAC6 (NM_013443.3,511-529).
gtacaatccgcatgaatga

SEQ ID NO: 213148 - DNA, 19 bp, Homo sapiens
  siRNA target sequence for ST6GALNAC6 (NM_013443.3,619-637).
ggccccaggagtttgtcaa

SEQ ID NO: 213149 - DNA, 19 bp, Homo sapiens
  siRNA target sequence for ST6GALNAC6 (NM_013443.3,740-758).
ccccaacatggaagcatat

SEQ ID NO: 213150 - DNA, 19 bp, Homo sapiens
  siRNA target sequence for ST6GALNAC6 (NM_013443.3,819-837).
gacagggagaagtctcatt

SEQ ID NO: 213151 - DNA, 19 bp, Homo sapiens
  siRNA target sequence for ST6GALNAC6 (NM_013443.3,886-904).
gtgaccacgtgcatgtcta

SEQ ID NO: 213152 - DNA, 19 bp, Homo sapiens
  siRNA target sequence for ST6GALNAC6 (NM_013443.3,952-970).
gcatgccctaccactacta

SEQ ID NO: 213153 - DNA, 19 bp, Homo sapiens
  siRNA target sequence for STHM (NM_006456.1,165-183).
ggacaccacatcatttgaa

SEQ ID NO: 213154 - DNA, 19 bp, Homo sapiens
  siRNA target sequence for STHM (NM_006456.1,193-211).
caatccaaggcatcgaatt

SEQ ID NO: 213155 - DNA, 19 bp, Homo sapiens
  siRNA target sequence for STHM (NM_006456.1,280-298).
cgtggcctgttcaatctct

SEQ ID NO: 213156 - DNA, 19 bp, Homo sapiens
  siRNA target sequence for STHM (NM_006456.1,348-366).
ccgcctgagccaacacaaa

SEQ ID NO: 213157 - DNA, 19 bp, Homo sapiens
  siRNA target sequence for STHM (NM_006456.1,465-483).
ggacacccctccaaagtgt

SEQ ID NO: 213158 - DNA, 19 bp, Homo sapiens
  siRNA target sequence for STHM (NM_006456.1,466-484).
gacacccctccaaagtgta

SEQ ID NO: 213159 - DNA, 19 bp, Homo sapiens
  siRNA target sequence for STHM (NM_006456.1,543-561).
catcgatgcccatgactat

SEQ ID NO: 213160 - DNA, 19 bp, Homo sapiens
  siRNA target sequence for STHM (NM_006456.1,558-576).
ctatgtattcagactcaat

SEQ ID NO: 213161 - DNA, 19 bp, Homo sapiens
  siRNA target sequence for STHM (NM_006456.1,703-721).
ggacaggacctgcagtata

SEQ ID NO: 213162 - DNA, 19 bp, Homo sapiens
  siRNA target sequence for STHM (NM_006456.1,734-752).
cagacatccgcgactatgt

SEQ ID NO: 213163 - DNA, 19 bp, Homo sapiens
  siRNA target sequence for STHM (NM_006456.1,736-754).
gacatccgcgactatgtga

SEQ ID NO: 213164 - DNA, 19 bp, Homo sapiens
  siRNA target sequence for STHM (NM_006456.1,784-802).
gtccctgagggcctagata

SEQ ID NO: 213165 - DNA, 19 bp, Homo sapiens
  siRNA target sequence for STHM (NM_006456.1,786-804).
ccctgagggcctagataaa

SEQ ID NO: 213166 - DNA, 19 bp, Homo sapiens
  siRNA target sequence for STHM (NM_006456.1,810-828).
caggccgcacgcctatttt

SEQ ID NO: 213167 - DNA, 19 bp, Homo sapiens
  siRNA target sequence for STHM (NM_006456.1,813-831).
gccgcacgcctattttgga

SEQ ID NO: 213168 - DNA, 19 bp, Homo sapiens
  siRNA target sequence for STHM (NM_006456.1,839-857).
cctctgccagtaaattcaa

SEQ ID NO: 213169 - DNA, 19 bp, Homo sapiens
  siRNA target sequence for STHM (NM_006456.1,881-899).
gctacctgacagaaaggtt

SEQ ID NO: 213170 - DNA, 19 bp, Homo sapiens
  siRNA target sequence for STHM (NM_006456.1,925-943).
cattttggagacctatata

SEQ ID NO: 213171 - DNA, 19 bp, Homo sapiens
  siRNA target sequence for STHM (NM_006456.1,1044-1062).
ccactatttcgaacgaaaa

SEQ ID NO: 213172 - DNA, 19 bp, Homo sapiens
  siRNA target sequence for STHM (NM_006456.1,1045-1063).
cactatttcgaacgaaaaa

SEQ ID NO: 213173 - DNA, 19 bp, Homo sapiens
  siRNA target sequence for ALG12 (NM_024105.2,475-493).
cgtgctttcgctgttagaa

SEQ ID NO: 213174 - DNA, 19 bp, Homo sapiens
  siRNA target sequence for ALG12 (NM_024105.2,487-505).
gttagaaatgtccaagttt

SEQ ID NO: 213175 - DNA, 19 bp, Homo sapiens
  siRNA target sequence for ALG12 (NM_024105.2,508-526).
ctctcagctaatagttaga

SEQ ID NO: 213176 - DNA, 19 bp, Homo sapiens
  siRNA target sequence for ALG12 (NM_024105.2,533-551).
cttggactcggcgtgattt

SEQ ID NO: 213177 - DNA, 19 bp, Homo sapiens
  siRNA target sequence for ALG12 (NM_024105.2,554-572).
ggactctggacgttacaaa

SEQ ID NO: 213178 - DNA, 19 bp, Homo sapiens
  siRNA target sequence for ALG12 (NM_024105.2,555-573).
gactctggacgttacaaaa

SEQ ID NO: 213179 - DNA, 19 bp, Homo sapiens
  siRNA target sequence for ALG12 (NM_024105.2,820-838).
cttgggcaaccgaaaggtt

SEQ ID NO: 213180 - DNA, 19 bp, Homo sapiens
  siRNA target sequence for ALG12 (NM_024105.2,826-844).
caaccgaaaggtttctgta

SEQ ID NO: 213181 - DNA, 19 bp, Homo sapiens
  siRNA target sequence for ALG12 (NM_024105.2,897-915).
cggttgctgtggactctta

SEQ ID NO: 213182 - DNA, 19 bp, Homo sapiens
  siRNA target sequence for ALG12 (NM_024105.2,1153-1171).
gctacgcttcatcatctat

SEQ ID NO: 213183 - DNA, 19 bp, Homo sapiens
  siRNA target sequence for ALG12 (NM_024105.2,1212-1230).
cctacctgctgaataacta

SEQ ID NO: 213184 - DNA, 19 bp, Homo sapiens
  siRNA target sequence for ALG12 (NM_024105.2,1213-1231).
ctacctgctgaataactat

SEQ ID NO: 213185 - DNA, 19 bp, Homo sapiens
  siRNA target sequence for ALG12 (NM_024105.2,1434-1452).
ctcggtttctccaagtcaa

SEQ ID NO: 213186 - DNA, 19 bp, Homo sapiens
  siRNA target sequence for ALG3 (NM_005787.3,237-255).
ggtagaaggcgtcatcaat

SEQ ID NO: 213187 - DNA, 19 bp, Homo sapiens
  siRNA target sequence for ALG3 (NM_005787.3,241-259).
gaaggcgtcatcaatggta

SEQ ID NO: 213188 - DNA, 19 bp, Homo sapiens
  siRNA target sequence for ALG3 (NM_005787.3,246-264).
cgtcatcaatggtacctat

SEQ ID NO: 213189 - DNA, 19 bp, Homo sapiens
  siRNA target sequence for ALG3 (NM_005787.3,252-270).
caatggtacctatgactat

SEQ ID NO: 213190 - DNA, 19 bp, Homo sapiens
  siRNA target sequence for ALG3 (NM_005787.3,310-328).
gctggtttcgtgtacatct

SEQ ID NO: 213191 - DNA, 19 bp, Homo sapiens
  siRNA target sequence for ALG3 (NM_005787.3,313-331).
ggtttcgtgtacatcttta

SEQ ID NO: 213192 - DNA, 19 bp, Homo sapiens
  siRNA target sequence for ALG3 (NM_005787.3,327-345).
ctttatggggttgtactat

SEQ ID NO: 213193 - DNA, 19 bp, Homo sapiens
  siRNA target sequence for ALG3 (NM_005787.3,451-469).
gtacctcccttcgtctttt

SEQ ID NO: 213194 - DNA, 19 bp, Homo sapiens
  siRNA target sequence for ALG3 (NM_005787.3,650-668).
cccctgggttactgtttct

SEQ ID NO: 213195 - DNA, 19 bp, Homo sapiens
  siRNA target sequence for ALG3 (NM_005787.3,651-669).
ccctgggttactgtttctt

SEQ ID NO: 213196 - DNA, 19 bp, Homo sapiens
  siRNA target sequence for ALG3 (NM_005787.3,702-720).
ccccaagctgggaatctgt

SEQ ID NO: 213197 - DNA, 19 bp, Homo sapiens
  siRNA target sequence for ALG8 (NM_024079.2,71-89).
cgggtactggcaattggtt

SEQ ID NO: 213198 - DNA, 19 bp, Homo sapiens
  siRNA target sequence for ALG8 (NM_024079.2,72-90).
gggtactggcaattggttt

SEQ ID NO: 213199 - DNA, 19 bp, Homo sapiens
  siRNA target sequence for ALG8 (NM_024079.2,213-231).
gtattatgaggcaacttca

SEQ ID NO: 213200 - DNA, 19 bp, Homo sapiens
  siRNA target sequence for ALG8 (NM_024079.2,230-248).
cagagtggacgttggatta

SEQ ID NO: 213201 - DNA, 19 bp, Homo sapiens
  siRNA target sequence for ALG8 (NM_024079.2,318-336).
gaatgtccataatttgaat

SEQ ID NO: 213202 - DNA, 19 bp, Homo sapiens
  siRNA target sequence for ALG8 (NM_024079.2,353-371).
ccttacttttccagagatt

SEQ ID NO: 213203 - DNA, 19 bp, Homo sapiens
  siRNA target sequence for ALG8 (NM_024079.2,366-384).
gagattttccgtcatcttt

SEQ ID NO: 213204 - DNA, 19 bp, Homo sapiens
  siRNA target sequence for ALG8 (NM_024079.2,368-386).
gattttccgtcatctttat

SEQ ID NO: 213205 - DNA, 19 bp, Homo sapiens
  siRNA target sequence for ALG8 (NM_024079.2,409-427).
gtccgtgagtgctgtaaat

SEQ ID NO: 213206 - DNA, 19 bp, Homo sapiens
  siRNA target sequence for ALG8 (NM_024079.2,412-430).
cgtgagtgctgtaaatgca

SEQ ID NO: 213207 - DNA, 19 bp, Homo sapiens
  siRNA target sequence for ALG8 (NM_024079.2,498-516).
gtggaacttcgggttatta

SEQ ID NO: 213208 - DNA, 19 bp, Homo sapiens
  siRNA target sequence for ALG8 (NM_024079.2,500-518).
ggaacttcgggttattaat

SEQ ID NO: 213209 - DNA, 19 bp, Homo sapiens
  siRNA target sequence for ALG8 (NM_024079.2,501-519).
gaacttcgggttattaatt

SEQ ID NO: 213210 - DNA, 19 bp, Homo sapiens
  siRNA target sequence for ALG8 (NM_024079.2,548-566).
gctttttatttggattaat

SEQ ID NO: 213211 - DNA, 19 bp, Homo sapiens
  siRNA target sequence for ALG8 (NM_024079.2,571-589).
ctctccattgcacgattat

SEQ ID NO: 213212 - DNA, 19 bp, Homo sapiens
  siRNA target sequence for ALG8 (NM_024079.2,575-593).
ccattgcacgattatttca

SEQ ID NO: 213213 - DNA, 19 bp, Homo sapiens
  siRNA target sequence for ALG8 (NM_024079.2,600-618).
gcatatggaaggagcattt

SEQ ID NO: 213214 - DNA, 19 bp, Homo sapiens
  siRNA target sequence for ALG8 (NM_024079.2,625-643).
gctgttctcctacatttca

SEQ ID NO: 213215 - DNA, 19 bp, Homo sapiens
  siRNA target sequence for ALG8 (NM_024079.2,626-644).
ctgttctcctacatttcaa

SEQ ID NO: 213216 - DNA, 19 bp, Homo sapiens
  siRNA target sequence for ALG8 (NM_024079.2,631-649).
ctcctacatttcaagcata

SEQ ID NO: 213217 - DNA, 19 bp, Homo sapiens
  siRNA target sequence for ALG8 (NM_024079.2,665-683).
caccagcttatggtgtata

SEQ ID NO: 213218 - DNA, 19 bp, Homo sapiens
  siRNA target sequence for ALG8 (NM_024079.2,668-686).
cagcttatggtgtatatct

SEQ ID NO: 213219 - DNA, 19 bp, Homo sapiens
  siRNA target sequence for ALG8 (NM_024079.2,685-703).
ctgctgcgatcctactgtt

SEQ ID NO: 213220 - DNA, 19 bp, Homo sapiens
  siRNA target sequence for ALG8 (NM_024079.2,688-706).
ctgcgatcctactgtttca

SEQ ID NO: 213221 - DNA, 19 bp, Homo sapiens
  siRNA target sequence for ALG8 (NM_024079.2,696-714).
ctactgtttcactgcaaat

SEQ ID NO: 213222 - DNA, 19 bp, Homo sapiens
  siRNA target sequence for ALG8 (NM_024079.2,718-736).
ccagatgggtctattcgat

SEQ ID NO: 213223 - DNA, 19 bp, Homo sapiens
  siRNA target sequence for ALG8 (NM_024079.2,773-791).
gactggttgttttcttagt

SEQ ID NO: 213224 - DNA, 19 bp, Homo sapiens
  siRNA target sequence for ALG8 (NM_024079.2,848-866).
cccgactctttcctttcaa

SEQ ID NO: 213225 - DNA, 19 bp, Homo sapiens
  siRNA target sequence for ALG8 (NM_024079.2,850-868).
cgactctttcctttcaaga

SEQ ID NO: 213226 - DNA, 19 bp, Homo sapiens
  siRNA target sequence for ALG8 (NM_024079.2,905-923).
gggctttgtacaatgcttt

SEQ ID NO: 213227 - DNA, 19 bp, Homo sapiens
  siRNA target sequence for ALG8 (NM_024079.2,936-954).
gtctgtcatcggtttgaaa

SEQ ID NO: 213228 - DNA, 19 bp, Homo sapiens
  siRNA target sequence for ALG8 (NM_024079.2,940-958).
gtcatcggtttgaaattga

SEQ ID NO: 213229 - DNA, 19 bp, Homo sapiens
  siRNA target sequence for ALG8 (NM_024079.2,942-960).
catcggtttgaaattgaaa

SEQ ID NO: 213230 - DNA, 19 bp, Homo sapiens
  siRNA target sequence for ALG8 (NM_024079.2,1129-1147).
ggctttctccgatgtctaa

SEQ ID NO: 213231 - DNA, 19 bp, Homo sapiens
  siRNA target sequence for ALG8 (NM_024079.2,1131-1149).
ctttctccgatgtctaact

SEQ ID NO: 213232 - DNA, 19 bp, Homo sapiens
  siRNA target sequence for ALG8 (NM_024079.2,1137-1155).
ccgatgtctaactctttgt

SEQ ID NO: 213233 - DNA, 19 bp, Homo sapiens
  siRNA target sequence for ALG8 (NM_024079.2,1157-1175).
ccttgagctcctttatgtt

SEQ ID NO: 213234 - DNA, 19 bp, Homo sapiens
  siRNA target sequence for ALG8 (NM_024079.2,1173-1191).
gtttgggtggcatgttcat

SEQ ID NO: 213235 - DNA, 19 bp, Homo sapiens
  siRNA target sequence for ALG8 (NM_024079.2,1199-1217).
ccatacttctagcaattct

SEQ ID NO: 213236 - DNA, 19 bp, Homo sapiens
  siRNA target sequence for ALG8 (NM_024079.2,1250-1268).
gagacgcttcgatttttct

SEQ ID NO: 213237 - DNA, 19 bp, Homo sapiens
  siRNA target sequence for ALG8 (NM_024079.2,1252-1270).
gacgcttcgatttttctga

SEQ ID NO: 213238 - DNA, 19 bp, Homo sapiens
  siRNA target sequence for ALG8 (NM_024079.2,1254-1272).
cgcttcgatttttctgatt

SEQ ID NO: 213239 - DNA, 19 bp, Homo sapiens
  siRNA target sequence for ALG8 (NM_024079.2,1275-1293).
gaccacaacaggacattat

SEQ ID NO: 213240 - DNA, 19 bp, Homo sapiens
  siRNA target sequence for ALG8 (NM_024079.2,1324-1342).
gaacttcccattaaaatct

SEQ ID NO: 213241 - DNA, 19 bp, Homo sapiens
  siRNA target sequence for ALG8 (NM_024079.2,1350-1368).
gttactattcaccatatat

SEQ ID NO: 213242 - DNA, 19 bp, Homo sapiens
  siRNA target sequence for ALG8 (NM_024079.2,1376-1394).
cgtcactgaagactttatt

SEQ ID NO: 213243 - DNA, 19 bp, Homo sapiens
  siRNA target sequence for ALG8 (NM_024079.2,1524-1542).
gttactaacctcagtgtat

SEQ ID NO: 213244 - DNA, 19 bp, Homo sapiens
  siRNA target sequence for ALG8 (NM_024079.2,1557-1575).
cacatatgcttggttcaaa

SEQ ID NO: 213245 - DNA, 19 bp, Homo sapiens
  siRNA target sequence for ALG8 (NM_024079.2,1559-1577).
catatgcttggttcaaact

SEQ ID NO: 213246 - DNA, 19 bp, Homo sapiens
  siRNA target sequence for ALG8 (NM_024079.2,1582-1600).
gtttcagtattgattgact

SEQ ID NO: 213247 - DNA, 19 bp, Homo sapiens
  siRNA target sequence for ALG8 (NM_024079.2,1601-1619).
ctgctattggcaagacaaa

SEQ ID NO: 213248 - DNA, 19 bp, Homo sapiens
  siRNA target sequence for C1GALT2 (NM_152692.2,290-308).
gtgatgcttggaagcattt

SEQ ID NO: 213249 - DNA, 19 bp, Homo sapiens
  siRNA target sequence for C1GALT2 (NM_152692.2,295-313).
gcttggaagcattttctgt

SEQ ID NO: 213250 - DNA, 19 bp, Homo sapiens
  siRNA target sequence for C1GALT2 (NM_152692.2,322-340).
cactatgctaggacacatt

SEQ ID NO: 213251 - DNA, 19 bp, Homo sapiens
  siRNA target sequence for C1GALT2 (NM_152692.2,328-346).
gctaggacacattaggatt

SEQ ID NO: 213252 - DNA, 19 bp, Homo sapiens
  siRNA target sequence for C1GALT2 (NM_152692.2,392-410).
gctcctaacaaagaagata

SEQ ID NO: 213253 - DNA, 19 bp, Homo sapiens
  siRNA target sequence for C1GALT2 (NM_152692.2,395-413).
cctaacaaagaagatatct

SEQ ID NO: 213254 - DNA, 19 bp, Homo sapiens
  siRNA target sequence for C1GALT2 (NM_152692.2,434-452).
cgcatggagctcagtaaga

SEQ ID NO: 213255 - DNA, 19 bp, Homo sapiens
  siRNA target sequence for C1GALT2 (NM_152692.2,447-465).
gtaagagctttcgagtata

SEQ ID NO: 213256 - DNA, 19 bp, Homo sapiens
  siRNA target sequence for C1GALT2 (NM_152692.2,453-471).
gctttcgagtatactgtat

SEQ ID NO: 213257 - DNA, 19 bp, Homo sapiens
  siRNA target sequence for C1GALT2 (NM_152692.2,454-472).
ctttcgagtatactgtatt

SEQ ID NO: 213258 - DNA, 19 bp, Homo sapiens
  siRNA target sequence for C1GALT2 (NM_152692.2,518-536).
gagacttggaccaaacact

SEQ ID NO: 213259 - DNA, 19 bp, Homo sapiens
  siRNA target sequence for C1GALT2 (NM_152692.2,575-593).
gtgtttgagtcaattaata

SEQ ID NO: 213260 - DNA, 19 bp, Homo sapiens
  siRNA target sequence for C1GALT2 (NM_152692.2,585-603).
caattaatatggacacaaa

SEQ ID NO: 213261 - DNA, 19 bp, Homo sapiens
  siRNA target sequence for C1GALT2 (NM_152692.2,640-658).
cgcctttgataagtataga

SEQ ID NO: 213262 - DNA, 19 bp, Homo sapiens
  siRNA target sequence for C1GALT2 (NM_152692.2,686-704).
cgccccactacgtttgcta

SEQ ID NO: 213263 - DNA, 19 bp, Homo sapiens
  siRNA target sequence for C1GALT2 (NM_152692.2,687-705).
gccccactacgtttgctat

SEQ ID NO: 213264 - DNA, 19 bp, Homo sapiens
  siRNA target sequence for C1GALT2 (NM_152692.2,691-709).
cactacgtttgctatcatt

SEQ ID NO: 213265 - DNA, 19 bp, Homo sapiens
  siRNA target sequence for C1GALT2 (NM_152692.2,693-711).
ctacgtttgctatcattga

SEQ ID NO: 213266 - DNA, 19 bp, Homo sapiens
  siRNA target sequence for C1GALT2 (NM_152692.2,757-775).
ctatctaggccacactata

SEQ ID NO: 213267 - DNA, 19 bp, Homo sapiens
  siRNA target sequence for C1GALT2 (NM_152692.2,805-823).
ggaaggaggaattgtctta

SEQ ID NO: 213268 - DNA, 19 bp, Homo sapiens
  siRNA target sequence for C1GALT2 (NM_152692.2,810-828).
gaggaattgtcttaagtgt

SEQ ID NO: 213269 - DNA, 19 bp, Homo sapiens
  siRNA target sequence for C1GALT2 (NM_152692.2,845-863).
cttaacagccttctcaata

SEQ ID NO: 213270 - DNA, 19 bp, Homo sapiens
  siRNA target sequence for C1GALT2 (NM_152692.2,1094-1112).
ggactgactccaaatcaga

SEQ ID NO: 213271 - DNA, 19 bp, Homo sapiens
  siRNA target sequence for C1GALT2 (NM_152692.2,1095-1113).
gactgactccaaatcagat

SEQ ID NO: 213272 - DNA, 19 bp, Homo sapiens
  siRNA target sequence for C1GALT2 (NM_152692.2,1148-1166).
gcatttgggcatattttca

SEQ ID NO: 213273 - DNA, 19 bp, Homo sapiens
  siRNA target sequence for C1GALT2 (NM_152692.2,1149-1167).
catttgggcatattttcaa

SEQ ID NO: 213274 - DNA, 19 bp, Homo sapiens
  siRNA target sequence for DPM2 (NM_003863.2,147-165).
gcatgtcatccacaagtat

SEQ ID NO: 213275 - DNA, 19 bp, Homo sapiens
  siRNA target sequence for DPM2 (NM_152690.1,175-193).
caccgccagagcaactact

SEQ ID NO: 213276 - DNA, 19 bp, Homo sapiens
  siRNA target sequence for DPM2 (NM_152690.1,177-195).
ccgccagagcaactactat

SEQ ID NO: 213277 - DNA, 19 bp, Homo sapiens
  siRNA target sequence for DPM2 (NM_152690.1,178-196).
cgccagagcaactactata

SEQ ID NO: 213278 - DNA, 19 bp, Homo sapiens
  siRNA target sequence for DPM2 (NM_152690.1,179-197).
gccagagcaactactatat

SEQ ID NO: 213279 - DNA, 19 bp, Homo sapiens
  siRNA target sequence for DPM2 (NM_152690.1,180-198).
ccagagcaactactatata

SEQ ID NO: 213280 - DNA, 19 bp, Homo sapiens
  siRNA target sequence for DPM3 (NM_018973.3,106-124).
gtttggtccgcttttcctt

SEQ ID NO: 213281 - DNA, 19 bp, Homo sapiens
  siRNA target sequence for DPM3 (NM_018973.3,131-149).
cctcaggggagcattgctt

SEQ ID NO: 213282 - DNA, 19 bp, Homo sapiens
  siRNA target sequence for DPM3 (NM_018973.3,159-177).
gcagtgaccatgacgaaat

SEQ ID NO: 213283 - DNA, 19 bp, Homo sapiens
  siRNA target sequence for DPM3 (NM_018973.3,160-178).
cagtgaccatgacgaaatt

SEQ ID NO: 213284 - DNA, 19 bp, Homo sapiens
  siRNA target sequence for DPM3 (NM_018973.3,341-359).
ctatcgtgtggccactttt

SEQ ID NO: 213285 - DNA, 19 bp, Homo sapiens
  siRNA target sequence for DPM3 (NM_018973.3,346-364).
gtgtggccacttttcatga

SEQ ID NO: 213286 - DNA, 19 bp, Homo sapiens
  siRNA target sequence for EXT1 (NM_000127.1,816-834).
cttgtctcgcccttttgtt

SEQ ID NO: 213287 - DNA, 19 bp, Homo sapiens
  siRNA target sequence for EXT1 (NM_000127.1,819-837).
gtctcgcccttttgtttta

SEQ ID NO: 213288 - DNA, 19 bp, Homo sapiens
  siRNA target sequence for EXT1 (NM_000127.1,821-839).
ctcgcccttttgttttatt

SEQ ID NO: 213289 - DNA, 19 bp, Homo sapiens
  siRNA target sequence for EXT1 (NM_000127.1,871-889).
ccacagccggagagaagaa

SEQ ID NO: 213290 - DNA, 19 bp, Homo sapiens
  siRNA target sequence for EXT1 (NM_000127.1,917-935).
cccagtccggatcatttct

SEQ ID NO: 213291 - DNA, 19 bp, Homo sapiens
  siRNA target sequence for EXT1 (NM_000127.1,975-993).
gggatcaattggaaaacga

SEQ ID NO: 213292 - DNA, 19 bp, Homo sapiens
  siRNA target sequence for EXT1 (NM_000127.1,1073-1091).
gagtcctgcttcgatttca

SEQ ID NO: 213293 - DNA, 19 bp, Homo sapiens
  siRNA target sequence for EXT1 (NM_000127.1,1109-1127).
ggcttcaaagtctacgtat

SEQ ID NO: 213294 - DNA, 19 bp, Homo sapiens
  siRNA target sequence for EXT1 (NM_000127.1,1110-1128).
gcttcaaagtctacgtata

SEQ ID NO: 213295 - DNA, 19 bp, Homo sapiens
  siRNA target sequence for EXT1 (NM_000127.1,1123-1141).
cgtatacccacagcaaaaa

SEQ ID NO: 213296 - DNA, 19 bp, Homo sapiens
  siRNA target sequence for EXT1 (NM_000127.1,1145-1163).
gagaaaatcgccgaaagtt

SEQ ID NO: 213297 - DNA, 19 bp, Homo sapiens
  siRNA target sequence for EXT1 (NM_000127.1,1154-1172).
gccgaaagttaccaaaaca

SEQ ID NO: 213298 - DNA, 19 bp, Homo sapiens
  siRNA target sequence for EXT1 (NM_000127.1,1235-1253).
gtcctgagtctggatactt

SEQ ID NO: 213299 - DNA, 19 bp, Homo sapiens
  siRNA target sequence for EXT1 (NM_000127.1,1285-1303).
gcacaatttgagatccaaa

SEQ ID NO: 213300 - DNA, 19 bp, Homo sapiens
  siRNA target sequence for EXT1 (NM_000127.1,1321-1339).
gtggaacaatggtaggaat

SEQ ID NO: 213301 - DNA, 19 bp, Homo sapiens
  siRNA target sequence for EXT1 (NM_000127.1,1451-1469).
cgacccaactttgatgttt

SEQ ID NO: 213302 - DNA, 19 bp, Homo sapiens
  siRNA target sequence for EXT1 (NM_000127.1,1515-1533).
gggggtttttgaagttcaa

SEQ ID NO: 213303 - DNA, 19 bp, Homo sapiens
  siRNA target sequence for EXT1 (NM_000127.1,1606-1624).
caccaggaatgccttatat

SEQ ID NO: 213304 - DNA, 19 bp, Homo sapiens
  siRNA target sequence for EXT1 (NM_000127.1,1617-1635).
ccttatatcacgtccataa

SEQ ID NO: 213305 - DNA, 19 bp, Homo sapiens
  siRNA target sequence for EXT1 (NM_000127.1,1713-1731).
gagacaacaccgagtatga

SEQ ID NO: 213306 - DNA, 19 bp, Homo sapiens
  siRNA target sequence for EXT1 (NM_000127.1,1715-1733).
gacaacaccgagtatgaga

SEQ ID NO: 213307 - DNA, 19 bp, Homo sapiens
  siRNA target sequence for EXT1 (NM_000127.1,1724-1742).
gagtatgagaagtatgatt

SEQ ID NO: 213308 - DNA, 19 bp, Homo sapiens
  siRNA target sequence for EXT1 (NM_000127.1,1794-1812).
ggcttgggtccttcagatt

SEQ ID NO: 213309 - DNA, 19 bp, Homo sapiens
  siRNA target sequence for EXT1 (NM_000127.1,1871-1889).
ccattctctgaagtgatta

SEQ ID NO: 213310 - DNA, 19 bp, Homo sapiens
  siRNA target sequence for EXT1 (NM_000127.1,1872-1890).
cattctctgaagtgattaa

SEQ ID NO: 213311 - DNA, 19 bp, Homo sapiens
  siRNA target sequence for EXT1 (NM_000127.1,1915-1933).
cgatgagagattgttatta

SEQ ID NO: 213312 - DNA, 19 bp, Homo sapiens
  siRNA target sequence for EXT1 (NM_000127.1,1919-1937).
gagagattgttattacaga

SEQ ID NO: 213313 - DNA, 19 bp, Homo sapiens
  siRNA target sequence for EXT1 (NM_000127.1,1934-1952).
cagattccttctacaatca

SEQ ID NO: 213314 - DNA, 19 bp, Homo sapiens
  siRNA target sequence for EXT1 (NM_000127.1,1944-1962).
ctacaatcaggtctattca

SEQ ID NO: 213315 - DNA, 19 bp, Homo sapiens
  siRNA target sequence for EXT1 (NM_000127.1,1953-1971).
ggtctattcatcaggataa

SEQ ID NO: 213316 - DNA, 19 bp, Homo sapiens
  siRNA target sequence for EXT1 (NM_000127.1,1954-1972).
gtctattcatcaggataaa

SEQ ID NO: 213317 - DNA, 19 bp, Homo sapiens
  siRNA target sequence for EXT1 (NM_000127.1,1982-2000).
cttagacagcagacacaat

SEQ ID NO: 213318 - DNA, 19 bp, Homo sapiens
  siRNA target sequence for EXT1 (NM_000127.1,1988-2006).
cagcagacacaattcttgt

SEQ ID NO: 213319 - DNA, 19 bp, Homo sapiens
  siRNA target sequence for EXT1 (NM_000127.1,2002-2020).
cttgtgggaggcttatttt

SEQ ID NO: 213320 - DNA, 19 bp, Homo sapiens
  siRNA target sequence for EXT1 (NM_000127.1,2005-2023).
gtgggaggcttatttttct

SEQ ID NO: 213321 - DNA, 19 bp, Homo sapiens
  siRNA target sequence for EXT1 (NM_000127.1,2027-2045).
gttgagaagattgtattaa

SEQ ID NO: 213322 - DNA, 19 bp, Homo sapiens
  siRNA target sequence for EXT1 (NM_000127.1,2035-2053).
gattgtattaactacacta

SEQ ID NO: 213323 - DNA, 19 bp, Homo sapiens
  siRNA target sequence for EXT1 (NM_000127.1,2046-2064).
ctacactagagattattca

SEQ ID NO: 213324 - DNA, 19 bp, Homo sapiens
  siRNA target sequence for EXT1 (NM_000127.1,2080-2098).
gcacatatcacgtaacagt

SEQ ID NO: 213325 - DNA, 19 bp, Homo sapiens
  siRNA target sequence for EXT1 (NM_000127.1,2081-2099).
cacatatcacgtaacagtt

SEQ ID NO: 213326 - DNA, 19 bp, Homo sapiens
  siRNA target sequence for EXT1 (NM_000127.1,2083-2101).
catatcacgtaacagttta

SEQ ID NO: 213327 - DNA, 19 bp, Homo sapiens
  siRNA target sequence for EXT1 (NM_000127.1,2095-2113).
cagtttaatatggaacaaa

SEQ ID NO: 213328 - DNA, 19 bp, Homo sapiens
  siRNA target sequence for EXT1 (NM_000127.1,2132-2150).
gtactaccacagtattcat

SEQ ID NO: 213329 - DNA, 19 bp, Homo sapiens
  siRNA target sequence for EXT1 (NM_000127.1,2168-2186).
ccttactactatgctaatt

SEQ ID NO: 213330 - DNA, 19 bp, Homo sapiens
  siRNA target sequence for EXT1 (NM_000127.1,2173-2191).
ctactatgctaatttaggt

SEQ ID NO: 213331 - DNA, 19 bp, Homo sapiens
  siRNA target sequence for EXT1 (NM_000127.1,2176-2194).
ctatgctaatttaggttta

SEQ ID NO: 213332 - DNA, 19 bp, Homo sapiens
  siRNA target sequence for EXT1 (NM_000127.1,2308-2326).
gatcatagttctatggaat

SEQ ID NO: 213333 - DNA, 19 bp, Homo sapiens
  siRNA target sequence for EXT1 (NM_000127.1,2374-2392).
gcctgtcgtcgtcattgaa

SEQ ID NO: 213334 - DNA, 19 bp, Homo sapiens
  siRNA target sequence for EXT1 (NM_000127.1,2423-2441).
ctgccctacgacaacatca

SEQ ID NO: 213335 - DNA, 19 bp, Homo sapiens
  siRNA target sequence for EXT1 (NM_000127.1,2426-2444).
ccctacgacaacatcatca

SEQ ID NO: 213336 - DNA, 19 bp, Homo sapiens
  siRNA target sequence for EXT1 (NM_000127.1,2470-2488).
ggacacggtgctttcaaca

SEQ ID NO: 213337 - DNA, 19 bp, Homo sapiens
  siRNA target sequence for EXT1 (NM_000127.1,2560-2578).
ccacttctgggataactct

SEQ ID NO: 213338 - DNA, 19 bp, Homo sapiens
  siRNA target sequence for EXT1 (NM_000127.1,2561-2579).
cacttctgggataactcta

SEQ ID NO: 213339 - DNA, 19 bp, Homo sapiens
  siRNA target sequence for EXT1 (NM_000127.1,2581-2599).
ggagcggtggggatacaca

SEQ ID NO: 213340 - DNA, 19 bp, Homo sapiens
  siRNA target sequence for EXT1 (NM_000127.1,2582-2600).
gagcggtggggatacacat

SEQ ID NO: 213341 - DNA, 19 bp, Homo sapiens
  siRNA target sequence for EXT1 (NM_000127.1,2688-2706).
cagccagcctgaagaacat

SEQ ID NO: 213342 - DNA, 19 bp, Homo sapiens
  siRNA target sequence for EXT1 (NM_000127.1,2710-2728).
ggaccaattggccaattgt

SEQ ID NO: 213343 - DNA, 19 bp, Homo sapiens
  siRNA target sequence for EXT1 (NM_000127.1,2876-2894).
cagagctgcatgaatacgt

SEQ ID NO: 213344 - DNA, 19 bp, Homo sapiens
  siRNA target sequence for EXT1 (NM_000127.1,2944-2962).
cgaccccgtcctctttaaa

SEQ ID NO: 213345 - DNA, 19 bp, Homo sapiens
  siRNA target sequence for EXT1 (NM_000127.1,2983-3001).
gaagaaataccgagacatt

SEQ ID NO: 213346 - DNA, 19 bp, Homo sapiens
  siRNA target sequence for EXT2 (NM_000401.1,490-508).
gtgtgcgtcggtcaagtat

SEQ ID NO: 213347 - DNA, 19 bp, Homo sapiens
  siRNA target sequence for EXT2 (NM_000401.1,492-510).
gtgcgtcggtcaagtataa

SEQ ID NO: 213348 - DNA, 19 bp, Homo sapiens
  siRNA target sequence for EXT2 (NM_000401.1,494-512).
gcgtcggtcaagtataata

SEQ ID NO: 213349 - DNA, 19 bp, Homo sapiens
  siRNA target sequence for EXT2 (NM_000401.1,495-513).
cgtcggtcaagtataatat

SEQ ID NO: 213350 - DNA, 19 bp, Homo sapiens
  siRNA target sequence for EXT2 (NM_000401.1,524-542).
gccctcatcccaagaatga

SEQ ID NO: 213351 - DNA, 19 bp, Homo sapiens
  siRNA target sequence for EXT2 (NM_000401.1,551-569).
caccgaatctactatatca

SEQ ID NO: 213352 - DNA, 19 bp, Homo sapiens
  siRNA target sequence for EXT2 (NM_000401.1,602-620).
gccactggcatgtttcagt

SEQ ID NO: 213353 - DNA, 19 bp, Homo sapiens
  siRNA target sequence for EXT2 (NM_000401.1,645-663).
caaatgactggaatgtaga

SEQ ID NO: 213354 - DNA, 19 bp, Homo sapiens
  siRNA target sequence for EXT2 (NM_000401.1,677-695).
cgtgatgtgccggttgtta

SEQ ID NO: 213355 - DNA, 19 bp, Homo sapiens
  siRNA target sequence for EXT2 (NM_000401.1,742-760).
cagaatgcacacgtgtttt

SEQ ID NO: 213356 - DNA, 19 bp, Homo sapiens
  siRNA target sequence for EXT2 (NM_000401.1,744-762).
gaatgcacacgtgttttga

SEQ ID NO: 213357 - DNA, 19 bp, Homo sapiens
  siRNA target sequence for EXT2 (NM_000401.1,751-769).
cacgtgttttgatgtctat

SEQ ID NO: 213358 - DNA, 19 bp, Homo sapiens
  siRNA target sequence for EXT2 (NM_000401.1,861-879).
ccatctcccgggagtataa

SEQ ID NO: 213359 - DNA, 19 bp, Homo sapiens
  siRNA target sequence for EXT2 (NM_000401.1,862-880).
catctcccgggagtataat

SEQ ID NO: 213360 - DNA, 19 bp, Homo sapiens
  siRNA target sequence for EXT2 (NM_000401.1,865-883).
ctcccgggagtataatgaa

SEQ ID NO: 213361 - DNA, 19 bp, Homo sapiens
  siRNA target sequence for EXT2 (NM_000401.1,867-885).
cccgggagtataatgaact

SEQ ID NO: 213362 - DNA, 19 bp, Homo sapiens
  siRNA target sequence for EXT2 (NM_000401.1,951-969).
cctccatcgatgtgcttaa

SEQ ID NO: 213363 - DNA, 19 bp, Homo sapiens
  siRNA target sequence for EXT2 (NM_000401.1,954-972).
ccatcgatgtgcttaacca

SEQ ID NO: 213364 - DNA, 19 bp, Homo sapiens
  siRNA target sequence for EXT2 (NM_000401.1,1024-1042).
gtgggatcgaggtacgaat

SEQ ID NO: 213365 - DNA, 19 bp, Homo sapiens
  siRNA target sequence for EXT2 (NM_000401.1,1035-1053).
gtacgaatcacctgttgtt

SEQ ID NO: 213366 - DNA, 19 bp, Homo sapiens
  siRNA target sequence for EXT2 (NM_000401.1,1038-1056).
cgaatcacctgttgttcaa

SEQ ID NO: 213367 - DNA, 19 bp, Homo sapiens
  siRNA target sequence for EXT2 (NM_000401.1,1065-1083).
ctggaggtcccccagatta

SEQ ID NO: 213368 - DNA, 19 bp, Homo sapiens
  siRNA target sequence for EXT2 (NM_000401.1,1067-1085).
ggaggtcccccagattata

SEQ ID NO: 213369 - DNA, 19 bp, Homo sapiens
  siRNA target sequence for EXT2 (NM_000401.1,1068-1086).
gaggtcccccagattataa

SEQ ID NO: 213370 - DNA, 19 bp, Homo sapiens
  siRNA target sequence for EXT2 (NM_000401.1,1124-1142).
gctggtggcggcttttcta

SEQ ID NO: 213371 - DNA, 19 bp, Homo sapiens
  siRNA target sequence for EXT2 (NM_000401.1,1226-1244).
ccaggtccacggcaatact

SEQ ID NO: 213372 - DNA, 19 bp, Homo sapiens
  siRNA target sequence for EXT2 (NM_000401.1,1227-1245).
caggtccacggcaatactt

SEQ ID NO: 213373 - DNA, 19 bp, Homo sapiens
  siRNA target sequence for EXT2 (NM_000401.1,1323-1341).
cagtgttagtactcgataa

SEQ ID NO: 213374 - DNA, 19 bp, Homo sapiens
  siRNA target sequence for EXT2 (NM_000401.1,1325-1343).
gtgttagtactcgataaat

SEQ ID NO: 213375 - DNA, 19 bp, Homo sapiens
  siRNA target sequence for EXT2 (NM_000401.1,1473-1491).
cagtattgagcgatgtgtt

SEQ ID NO: 213376 - DNA, 19 bp, Homo sapiens
  siRNA target sequence for EXT2 (NM_000401.1,1500-1518).
gctgtgtcccggttgtcat

SEQ ID NO: 213377 - DNA, 19 bp, Homo sapiens
  siRNA target sequence for EXT2 (NM_000401.1,1501-1519).
ctgtgtcccggttgtcatt

SEQ ID NO: 213378 - DNA, 19 bp, Homo sapiens
  siRNA target sequence for EXT2 (NM_000401.1,1514-1532).
gtcattgcagactcctata

SEQ ID NO: 213379 - DNA, 19 bp, Homo sapiens
  siRNA target sequence for EXT2 (NM_000401.1,1516-1534).
cattgcagactcctatatt

SEQ ID NO: 213380 - DNA, 19 bp, Homo sapiens
  siRNA target sequence for EXT2 (NM_000401.1,1539-1557).
ctttctctgaagttcttga

SEQ ID NO: 213381 - DNA, 19 bp, Homo sapiens
  siRNA target sequence for EXT2 (NM_000401.1,1574-1592).
gtggttgtaccagaagaaa

SEQ ID NO: 213382 - DNA, 19 bp, Homo sapiens
  siRNA target sequence for EXT2 (NM_000401.1,1580-1598).
gtaccagaagaaaagatgt

SEQ ID NO: 213383 - DNA, 19 bp, Homo sapiens
  siRNA target sequence for EXT2 (NM_000401.1,1679-1697).
gcgtacttccagtcaatta

SEQ ID NO: 213384 - DNA, 19 bp, Homo sapiens
  siRNA target sequence for EXT2 (NM_000401.1,1680-1698).
cgtacttccagtcaattaa

SEQ ID NO: 213385 - DNA, 19 bp, Homo sapiens
  siRNA target sequence for EXT2 (NM_000401.1,1709-1727).
ctggccaccctgcagatta

SEQ ID NO: 213386 - DNA, 19 bp, Homo sapiens
  siRNA target sequence for EXT2 (NM_000401.1,1713-1731).
ccaccctgcagattatcaa

SEQ ID NO: 213387 - DNA, 19 bp, Homo sapiens
  siRNA target sequence for EXT2 (NM_000401.1,1714-1732).
caccctgcagattatcaat

SEQ ID NO: 213388 - DNA, 19 bp, Homo sapiens
  siRNA target sequence for EXT2 (NM_000401.1,1735-1753).
ccggatctatccatatgct

SEQ ID NO: 213389 - DNA, 19 bp, Homo sapiens
  siRNA target sequence for EXT2 (NM_000401.1,1759-1777).
ctcctatgaagaatggaat

SEQ ID NO: 213390 - DNA, 19 bp, Homo sapiens
  siRNA target sequence for EXT2 (NM_000401.1,2236-2254).
gtctgagtggacgaatgaa

SEQ ID NO: 213391 - DNA, 19 bp, Homo sapiens
  siRNA target sequence for EXT2 (NM_000401.1,2238-2256).
ctgagtggacgaatgaagt

SEQ ID NO: 213392 - DNA, 19 bp, Homo sapiens
  siRNA target sequence for EXT2 (NM_000401.1,2269-2287).
cactggggcagctttttat

SEQ ID NO: 213393 - DNA, 19 bp, Homo sapiens
  siRNA target sequence for EXT2 (NM_000401.1,2271-2289).
ctggggcagctttttatca

SEQ ID NO: 213394 - DNA, 19 bp, Homo sapiens
  siRNA target sequence for EXT2 (NM_000401.1,2273-2291).
ggggcagctttttatcaca

SEQ ID NO: 213395 - DNA, 19 bp, Homo sapiens
  siRNA target sequence for EXT2 (NM_000401.1,2274-2292).
gggcagctttttatcacaa

SEQ ID NO: 213396 - DNA, 19 bp, Homo sapiens
  siRNA target sequence for EXT2 (NM_000401.1,2277-2295).
cagctttttatcacaagta

SEQ ID NO: 213397 - DNA, 19 bp, Homo sapiens
  siRNA target sequence for EXT2 (NM_000401.1,2422-2440).
ggtaaccccacgaaagaaa

SEQ ID NO: 213398 - DNA, 19 bp, Homo sapiens
  siRNA target sequence for EXT2 (NM_000401.1,2427-2445).
ccccacgaaagaaattcaa

SEQ ID NO: 213399 - DNA, 19 bp, Homo sapiens
  siRNA target sequence for EXT2 (NM_000401.1,2429-2447).
ccacgaaagaaattcaagt

SEQ ID NO: 213400 - DNA, 19 bp, Homo sapiens
  siRNA target sequence for EXT2 (NM_000401.1,2463-2481).
ccatagatgggctttcact

SEQ ID NO: 213401 - DNA, 19 bp, Homo sapiens
  siRNA target sequence for EXT2 (NM_000401.1,2505-2523).
ggtcagagtgcatcaacaa

SEQ ID NO: 213402 - DNA, 19 bp, Homo sapiens
  siRNA target sequence for EXT2 (NM_000401.1,2578-2596).
ccctgtcctgtacaaagat

SEQ ID NO: 213403 - DNA, 19 bp, Homo sapiens
  siRNA target sequence for EXT2 (NM_000401.1,2580-2598).
ctgtcctgtacaaagatga

SEQ ID NO: 213404 - DNA, 19 bp, Homo sapiens
  siRNA target sequence for EXT2 (NM_000401.1,2584-2602).
cctgtacaaagatgacttt

SEQ ID NO: 213405 - DNA, 19 bp, Homo sapiens
  siRNA target sequence for EXTL1 (NM_004455.1,1106-1124).
caactgggaatcttgcttt

SEQ ID NO: 213406 - DNA, 19 bp, Homo sapiens
  siRNA target sequence for EXTL1 (NM_004455.1,1141-1159).
ggggcgatggccttaaggt

SEQ ID NO: 213407 - DNA, 19 bp, Homo sapiens
  siRNA target sequence for EXTL1 (NM_004455.1,1142-1160).
gggcgatggccttaaggta

SEQ ID NO: 213408 - DNA, 19 bp, Homo sapiens
  siRNA target sequence for EXTL1 (NM_004455.1,1143-1161).
ggcgatggccttaaggtat

SEQ ID NO: 213409 - DNA, 19 bp, Homo sapiens
  siRNA target sequence for EXTL1 (NM_004455.1,1144-1162).
gcgatggccttaaggtatt

SEQ ID NO: 213410 - DNA, 19 bp, Homo sapiens
  siRNA target sequence for EXTL1 (NM_004455.1,1899-1917).
cagcagacccagtttctat

SEQ ID NO: 213411 - DNA, 19 bp, Homo sapiens
  siRNA target sequence for EXTL1 (NM_004455.1,1957-1975).
ccactctggaggttattca

SEQ ID NO: 213412 - DNA, 19 bp, Homo sapiens
  siRNA target sequence for EXTL1 (NM_004455.1,1974-1992).
caggaccggatttttggaa

SEQ ID NO: 213413 - DNA, 19 bp, Homo sapiens
  siRNA target sequence for EXTL1 (NM_004455.1,2267-2285).
gcccttgacagtcattgat

SEQ ID NO: 213414 - DNA, 19 bp, Homo sapiens
  siRNA target sequence for EXTL1 (NM_004455.1,2283-2301).
gatgggcacaggaaggtta

SEQ ID NO: 213415 - DNA, 19 bp, Homo sapiens
  siRNA target sequence for EXTL1 (NM_004455.1,2287-2305).
ggcacaggaaggttagtga

SEQ ID NO: 213416 - DNA, 19 bp, Homo sapiens
  siRNA target sequence for EXTL1 (NM_004455.1,2288-2306).
gcacaggaaggttagtgat

SEQ ID NO: 213417 - DNA, 19 bp, Homo sapiens
  siRNA target sequence for EXTL1 (NM_004455.1,2304-2322).
gatcgcttctacccatata

SEQ ID NO: 213418 - DNA, 19 bp, Homo sapiens
  siRNA target sequence for EXTL1 (NM_004455.1,2307-2325).
cgcttctacccatatagca

SEQ ID NO: 213419 - DNA, 19 bp, Homo sapiens
  siRNA target sequence for EXTL1 (NM_004455.1,2316-2334).
ccatatagcaccatcagaa

SEQ ID NO: 213420 - DNA, 19 bp, Homo sapiens
  siRNA target sequence for EXTL1 (NM_004455.1,2355-2373).
gatgcccgcagcagtcttt

SEQ ID NO: 213421 - DNA, 19 bp, Homo sapiens
  siRNA target sequence for EXTL1 (NM_004455.1,2439-2457).
ctgacgtcgagccatttct

SEQ ID NO: 213422 - DNA, 19 bp, Homo sapiens
  siRNA target sequence for EXTL1 (NM_004455.1,2490-2508).
gctgagaggaccaacgaat

SEQ ID NO: 213423 - DNA, 19 bp, Homo sapiens
  siRNA target sequence for EXTL1 (NM_004455.1,2491-2509).
ctgagaggaccaacgaatt

SEQ ID NO: 213424 - DNA, 19 bp, Homo sapiens
  siRNA target sequence for EXTL1 (NM_004455.1,2531-2549).
cgccttctaccataggtat

SEQ ID NO: 213425 - DNA, 19 bp, Homo sapiens
  siRNA target sequence for EXTL1 (NM_004455.1,2533-2551).
ccttctaccataggtatta

SEQ ID NO: 213426 - DNA, 19 bp, Homo sapiens
  siRNA target sequence for EXTL1 (NM_004455.1,2619-2637).
gtggacgtcctgatgaatt

SEQ ID NO: 213427 - DNA, 19 bp, Homo sapiens
  siRNA target sequence for EXTL1 (NM_004455.1,2622-2640).
gacgtcctgatgaatttca

SEQ ID NO: 213428 - DNA, 19 bp, Homo sapiens
  siRNA target sequence for EXTL1 (NM_004455.1,2857-2875).
ccgtgcagcgcaagaagta

SEQ ID NO: 213429 - DNA, 19 bp, Homo sapiens
  siRNA target sequence for EXTL2 (NM_001439.1,331-349).
ggattcgagtgcttcgatt

SEQ ID NO: 213430 - DNA, 19 bp, Homo sapiens
  siRNA target sequence for EXTL2 (NM_001439.1,332-350).
gattcgagtgcttcgatta

SEQ ID NO: 213431 - DNA, 19 bp, Homo sapiens
  siRNA target sequence for EXTL2 (NM_001439.1,336-354).
cgagtgcttcgattatctt

SEQ ID NO: 213432 - DNA, 19 bp, Homo sapiens
  siRNA target sequence for EXTL2 (NM_001439.1,337-355).
gagtgcttcgattatcttt

SEQ ID NO: 213433 - DNA, 19 bp, Homo sapiens
  siRNA target sequence for EXTL2 (NM_001439.1,356-374).
ggtggtcatcctcgtatta

SEQ ID NO: 213434 - DNA, 19 bp, Homo sapiens
  siRNA target sequence for EXTL2 (NM_001439.1,357-375).
gtggtcatcctcgtattat

SEQ ID NO: 213435 - DNA, 19 bp, Homo sapiens
  siRNA target sequence for EXTL2 (NM_001439.1,359-377).
ggtcatcctcgtattatta

SEQ ID NO: 213436 - DNA, 19 bp, Homo sapiens
  siRNA target sequence for EXTL2 (NM_001439.1,380-398).
ggtagctggtgctttgact

SEQ ID NO: 213437 - DNA, 19 bp, Homo sapiens
  siRNA target sequence for EXTL2 (NM_001439.1,399-417).
gccttacttcccagtgtta

SEQ ID NO: 213438 - DNA, 19 bp, Homo sapiens
  siRNA target sequence for EXTL2 (NM_001439.1,434-452).
catgttgcgtagggaaata

SEQ ID NO: 213439 - DNA, 19 bp, Homo sapiens
  siRNA target sequence for EXTL2 (NM_001439.1,437-455).
gttgcgtagggaaataaaa

SEQ ID NO: 213440 - DNA, 19 bp, Homo sapiens
  siRNA target sequence for EXTL2 (NM_001439.1,476-494).
ggactcctttactctcata

SEQ ID NO: 213441 - DNA, 19 bp, Homo sapiens
  siRNA target sequence for EXTL2 (NM_001439.1,477-495).
gactcctttactctcataa

SEQ ID NO: 213442 - DNA, 19 bp, Homo sapiens
  siRNA target sequence for EXTL2 (NM_001439.1,506-524).
caacagaacagatctctta

SEQ ID NO: 213443 - DNA, 19 bp, Homo sapiens
  siRNA target sequence for EXTL2 (NM_001439.1,572-590).
gattgtggtatggaacaat

SEQ ID NO: 213444 - DNA, 19 bp, Homo sapiens
  siRNA target sequence for EXTL2 (NM_001439.1,578-596).
ggtatggaacaatattgga

SEQ ID NO: 213445 - DNA, 19 bp, Homo sapiens
  siRNA target sequence for EXTL2 (NM_001439.1,599-617).
gaaggcaccagatgaatta

SEQ ID NO: 213446 - DNA, 19 bp, Homo sapiens
  siRNA target sequence for EXTL2 (NM_001439.1,799-817).
ctgatcaaattgtaggatt

SEQ ID NO: 213447 - DNA, 19 bp, Homo sapiens
  siRNA target sequence for EXTL2 (NM_001439.1,830-848).
gcacgtctctacttcatca

SEQ ID NO: 213448 - DNA, 19 bp, Homo sapiens
  siRNA target sequence for EXTL2 (NM_001439.1,844-862).
catcaggtatctacagtta

SEQ ID NO: 213449 - DNA, 19 bp, Homo sapiens
  siRNA target sequence for EXTL2 (NM_001439.1,921-939).
ctgattggagcctcattct

SEQ ID NO: 213450 - DNA, 19 bp, Homo sapiens
  siRNA target sequence for EXTL2 (NM_001439.1,927-945).
ggagcctcattcttcaata

SEQ ID NO: 213451 - DNA, 19 bp, Homo sapiens
  siRNA target sequence for EXTL2 (NM_001439.1,932-950).
ctcattcttcaatagcaaa

SEQ ID NO: 213452 - DNA, 19 bp, Homo sapiens
  siRNA target sequence for EXTL2 (NM_001439.1,979-997).
cagctgtccatgctttgat

SEQ ID NO: 213453 - DNA, 19 bp, Homo sapiens
  siRNA target sequence for EXTL2 (NM_001439.1,982-1000).
ctgtccatgctttgataga

SEQ ID NO: 213454 - DNA, 19 bp, Homo sapiens
  siRNA target sequence for EXTL2 (NM_001439.1,986-1004).
ccatgctttgatagatgat

SEQ ID NO: 213455 - DNA, 19 bp, Homo sapiens
  siRNA target sequence for EXTL2 (NM_001439.1,1057-1075).
gcaagacttcagggatatt

SEQ ID NO: 213456 - DNA, 19 bp, Homo sapiens
  siRNA target sequence for EXTL2 (NM_001439.1,1154-1172).
cgctctgcagaggtcttat

SEQ ID NO: 213457 - DNA, 19 bp, Homo sapiens
  siRNA target sequence for EXTL2 (NM_001439.1,1158-1176).
ctgcagaggtcttattgta

SEQ ID NO: 213458 - DNA, 19 bp, Homo sapiens
  siRNA target sequence for EXTL2 (NM_001439.1,1174-1192).
gtataaataagcttgttaa

SEQ ID NO: 213459 - DNA, 19 bp, Homo sapiens
  siRNA target sequence for EXTL2 (NM_001439.1,1200-1218).
gatagcatgcccttaagat

SEQ ID NO: 213460 - DNA, 19 bp, Homo sapiens
  siRNA target sequence for EXTL3 (NM_001440.1,713-731).
gcttcacgctctttgtcat

SEQ ID NO: 213461 - DNA, 19 bp, Homo sapiens
  siRNA target sequence for EXTL3 (NM_001440.1,745-763).
ccgctcatcgcccactatt

SEQ ID NO: 213462 - DNA, 19 bp, Homo sapiens
  siRNA target sequence for EXTL3 (NM_001440.1,746-764).
cgctcatcgcccactatta

SEQ ID NO: 213463 - DNA, 19 bp, Homo sapiens
  siRNA target sequence for EXTL3 (NM_001440.1,792-810).
ggcaggcaagcggattttt

SEQ ID NO: 213464 - DNA, 19 bp, Homo sapiens
  siRNA target sequence for EXTL3 (NM_001440.1,1213-1231).
gacagtgaccagtttgtct

SEQ ID NO: 213465 - DNA, 19 bp, Homo sapiens
  siRNA target sequence for EXTL3 (NM_001440.1,1275-1293).
gacagcacgagctaacgtt

SEQ ID NO: 213466 - DNA, 19 bp, Homo sapiens
  siRNA target sequence for EXTL3 (NM_001440.1,1277-1295).
cagcacgagctaacgttta

SEQ ID NO: 213467 - DNA, 19 bp, Homo sapiens
  siRNA target sequence for EXTL3 (NM_001440.1,1280-1298).
cacgagctaacgtttatgt

SEQ ID NO: 213468 - DNA, 19 bp, Homo sapiens
  siRNA target sequence for EXTL3 (NM_001440.1,1282-1300).
cgagctaacgtttatgtta

SEQ ID NO: 213469 - DNA, 19 bp, Homo sapiens
  siRNA target sequence for EXTL3 (NM_001440.1,1286-1304).
ctaacgtttatgttacaga

SEQ ID NO: 213470 - DNA, 19 bp, Homo sapiens
  siRNA target sequence for EXTL3 (NM_001440.1,1319-1337).
cctgcctttacgtgatact

SEQ ID NO: 213471 - DNA, 19 bp, Homo sapiens
  siRNA target sequence for EXTL3 (NM_001440.1,1320-1338).
ctgcctttacgtgatacta

SEQ ID NO: 213472 - DNA, 19 bp, Homo sapiens
  siRNA target sequence for EXTL3 (NM_001440.1,1322-1340).
gcctttacgtgatactagt

SEQ ID NO: 213473 - DNA, 19 bp, Homo sapiens
  siRNA target sequence for EXTL3 (NM_001440.1,1447-1465).
ctgtcacgtaagtcagata

SEQ ID NO: 213474 - DNA, 19 bp, Homo sapiens
  siRNA target sequence for EXTL3 (NM_001440.1,1449-1467).
gtcacgtaagtcagataca

SEQ ID NO: 213475 - DNA, 19 bp, Homo sapiens
  siRNA target sequence for EXTL3 (NM_001440.1,1620-1638).
gccggtgaagcggaaatat

SEQ ID NO: 213476 - DNA, 19 bp, Homo sapiens
  siRNA target sequence for EXTL3 (NM_001440.1,1624-1642).
gtgaagcggaaatatctct

SEQ ID NO: 213477 - DNA, 19 bp, Homo sapiens
  siRNA target sequence for EXTL3 (NM_001440.1,1651-1669).
cagggcgagaagattgagt

SEQ ID NO: 213478 - DNA, 19 bp, Homo sapiens
  siRNA target sequence for EXTL3 (NM_001440.1,1697-1715).
gctccttcgaagaggaaat

SEQ ID NO: 213479 - DNA, 19 bp, Homo sapiens
  siRNA target sequence for EXTL3 (NM_001440.1,1737-1755).
ctacgatgaccggatcatt

SEQ ID NO: 213480 - DNA, 19 bp, Homo sapiens
  siRNA target sequence for EXTL3 (NM_001440.1,1924-1942).
ggggaccctcgcttggtta

SEQ ID NO: 213481 - DNA, 19 bp, Homo sapiens
  siRNA target sequence for EXTL3 (NM_001440.1,1925-1943).
gggaccctcgcttggttat

SEQ ID NO: 213482 - DNA, 19 bp, Homo sapiens
  siRNA target sequence for EXTL3 (NM_001440.1,1926-1944).
ggaccctcgcttggttatt

SEQ ID NO: 213483 - DNA, 19 bp, Homo sapiens
  siRNA target sequence for EXTL3 (NM_001440.1,1927-1945).
gaccctcgcttggttattt

SEQ ID NO: 213484 - DNA, 19 bp, Homo sapiens
  siRNA target sequence for EXTL3 (NM_001440.1,2080-2098).
cgtgttaccgaggttcatt

SEQ ID NO: 213485 - DNA, 19 bp, Homo sapiens
  siRNA target sequence for EXTL3 (NM_001440.1,2108-2126).
gaagcctctccgatagtga

SEQ ID NO: 213486 - DNA, 19 bp, Homo sapiens
  siRNA target sequence for EXTL3 (NM_001440.1,2143-2161).
cggcaaggccgctttctct

SEQ ID NO: 213487 - DNA, 19 bp, Homo sapiens
  siRNA target sequence for EXTL3 (NM_001440.1,2375-2393).
ccagatacctccgcaattt

SEQ ID NO: 213488 - DNA, 19 bp, Homo sapiens
  siRNA target sequence for EXTL3 (NM_001440.1,2437-2455).
ccagggcctttccatcttt

SEQ ID NO: 213489 - DNA, 19 bp, Homo sapiens
  siRNA target sequence for EXTL3 (NM_001440.1,2485-2503).
ccctcagaggccaaattct

SEQ ID NO: 213490 - DNA, 19 bp, Homo sapiens
  siRNA target sequence for EXTL3 (NM_001440.1,2606-2624).
cggtggtgatgttgactta

SEQ ID NO: 213491 - DNA, 19 bp, Homo sapiens
  siRNA target sequence for EXTL3 (NM_001440.1,2607-2625).
ggtggtgatgttgacttat

SEQ ID NO: 213492 - DNA, 19 bp, Homo sapiens
  siRNA target sequence for EXTL3 (NM_001440.1,2689-2707).
gtcgtggtggtgtggaatt

SEQ ID NO: 213493 - DNA, 19 bp, Homo sapiens
  siRNA target sequence for EXTL3 (NM_001440.1,2863-2881).
cgccatgacgaaatcatgt

SEQ ID NO: 213494 - DNA, 19 bp, Homo sapiens
  siRNA target sequence for EXTL3 (NM_001440.1,2864-2882).
gccatgacgaaatcatgtt

SEQ ID NO: 213495 - DNA, 19 bp, Homo sapiens
  siRNA target sequence for EXTL3 (NM_001440.1,2865-2883).
ccatgacgaaatcatgttt

SEQ ID NO: 213496 - DNA, 19 bp, Homo sapiens
  siRNA target sequence for EXTL3 (NM_001440.1,3088-3106).
gtggatgaatacatcaact

SEQ ID NO: 213497 - DNA, 19 bp, Homo sapiens
  siRNA target sequence for EXTL3 (NM_001440.1,3241-3259).
cggcacaagtgcatcaact

SEQ ID NO: 213498 - DNA, 19 bp, Homo sapiens
  siRNA target sequence for HAS1 (NM_001523.1,828-846).
ggggacgtgcggatcctta

SEQ ID NO: 213499 - DNA, 19 bp, Homo sapiens
  siRNA target sequence for HAS1 (NM_001523.1,829-847).
gggacgtgcggatccttaa

SEQ ID NO: 213500 - DNA, 19 bp, Homo sapiens
  siRNA target sequence for HAS1 (NM_001523.1,953-971).
cggtcctctaggcctatat

SEQ ID NO: 213501 - DNA, 19 bp, Homo sapiens
  siRNA target sequence for HAS1 (NM_001523.1,954-972).
ggtcctctaggcctatata

SEQ ID NO: 213502 - DNA, 19 bp, Homo sapiens
  siRNA target sequence for HAS1 (NM_001523.1,957-975).
cctctaggcctatatagga

SEQ ID NO: 213503 - DNA, 19 bp, Homo sapiens
  siRNA target sequence for HAS1 (NM_001523.1,958-976).
ctctaggcctatataggaa

SEQ ID NO: 213504 - DNA, 19 bp, Homo sapiens
  siRNA target sequence for HAS1 (NM_001523.1,960-978).
ctaggcctatataggaata

SEQ ID NO: 213505 - DNA, 19 bp, Homo sapiens
  siRNA target sequence for HAS1 (NM_001523.1,964-982).
gcctatataggaataacct

SEQ ID NO: 213506 - DNA, 19 bp, Homo sapiens
  siRNA target sequence for HAS1 (NM_001523.1,1003-1021).
cctggtacaaccagaagtt

SEQ ID NO: 213507 - DNA, 19 bp, Homo sapiens
  siRNA target sequence for HAS1 (NM_001523.1,1023-1041).
ctgggtacccactgtactt

SEQ ID NO: 213508 - DNA, 19 bp, Homo sapiens
  siRNA target sequence for HAS1 (NM_001523.1,1025-1043).
gggtacccactgtactttt

SEQ ID NO: 213509 - DNA, 19 bp, Homo sapiens
  siRNA target sequence for HAS1 (NM_001523.1,1074-1092).
ctcagcatgggttatgcta

SEQ ID NO: 213510 - DNA, 19 bp, Homo sapiens
  siRNA target sequence for HAS1 (NM_001523.1,1083-1101).
ggttatgctaccaagtaca

SEQ ID NO: 213511 - DNA, 19 bp, Homo sapiens
  siRNA target sequence for HAS1 (NM_001523.1,1516-1534).
ggaagctggccgctaacta

SEQ ID NO: 213512 - DNA, 19 bp, Homo sapiens
  siRNA target sequence for HAS2 (NM_005328.1,554-572).
ctatgtatcctgagaataa

SEQ ID NO: 213513 - DNA, 19 bp, Homo sapiens
  siRNA target sequence for HAS2 (NM_005328.1,646-664).
ccaaacggataattactat

SEQ ID NO: 213514 - DNA, 19 bp, Homo sapiens
  siRNA target sequence for HAS2 (NM_005328.1,652-670).
ggataattactatttctct

SEQ ID NO: 213515 - DNA, 19 bp, Homo sapiens
  siRNA target sequence for HAS2 (NM_005328.1,756-774).
ccctagaaacccccataaa

SEQ ID NO: 213516 - DNA, 19 bp, Homo sapiens
  siRNA target sequence for HAS2 (NM_005328.1,758-776).
ctagaaacccccataaagt

SEQ ID NO: 213517 - DNA, 19 bp, Homo sapiens
  siRNA target sequence for HAS2 (NM_005328.1,765-783).
cccccataaagttgaacaa

SEQ ID NO: 213518 - DNA, 19 bp, Homo sapiens
  siRNA target sequence for HAS2 (NM_005328.1,766-784).
ccccataaagttgaacaaa

SEQ ID NO: 213519 - DNA, 19 bp, Homo sapiens
  siRNA target sequence for HAS2 (NM_005328.1,798-816).
gcatcgctgcctatcaaga

SEQ ID NO: 213520 - DNA, 19 bp, Homo sapiens
  siRNA target sequence for HAS2 (NM_005328.1,802-820).
cgctgcctatcaagaagat

SEQ ID NO: 213521 - DNA, 19 bp, Homo sapiens
  siRNA target sequence for HAS2 (NM_005328.1,815-833).
gaagatccagactacttaa

SEQ ID NO: 213522 - DNA, 19 bp, Homo sapiens
  siRNA target sequence for HAS2 (NM_005328.1,818-836).
gatccagactacttaagga

SEQ ID NO: 213523 - DNA, 19 bp, Homo sapiens
  siRNA target sequence for HAS2 (NM_005328.1,821-839).
ccagactacttaaggaaat

SEQ ID NO: 213524 - DNA, 19 bp, Homo sapiens
  siRNA target sequence for HAS2 (NM_005328.1,849-867).
ctgtgaaaaggctaaccta

SEQ ID NO: 213525 - DNA, 19 bp, Homo sapiens
  siRNA target sequence for HAS2 (NM_005328.1,864-882).
cctaccctgggattaaagt

SEQ ID NO: 213526 - DNA, 19 bp, Homo sapiens
  siRNA target sequence for HAS2 (NM_005328.1,956-974).
gacaaatcagccacttata

SEQ ID NO: 213527 - DNA, 19 bp, Homo sapiens
  siRNA target sequence for HAS2 (NM_005328.1,1057-1075).
ggtcttgtccaacaaaagt

SEQ ID NO: 213528 - DNA, 19 bp, Homo sapiens
  siRNA target sequence for HAS2 (NM_005328.1,1058-1076).
gtcttgtccaacaaaagta

SEQ ID NO: 213529 - DNA, 19 bp, Homo sapiens
  siRNA target sequence for HAS2 (NM_005328.1,1140-1158).
gacgaagtgtggattatgt

SEQ ID NO: 213530 - DNA, 19 bp, Homo sapiens
  siRNA target sequence for HAS2 (NM_005328.1,1202-1220).
gtggagatggtaaaagttt

SEQ ID NO: 213531 - DNA, 19 bp, Homo sapiens
  siRNA target sequence for HAS2 (NM_005328.1,1252-1270).
gggagatgtccagatttta

SEQ ID NO: 213532 - DNA, 19 bp, Homo sapiens
  siRNA target sequence for HAS2 (NM_005328.1,1259-1277).
gtccagattttaaacaagt

SEQ ID NO: 213533 - DNA, 19 bp, Homo sapiens
  siRNA target sequence for HAS2 (NM_005328.1,1302-1320).
gcagtgtaagatattggat

SEQ ID NO: 213534 - DNA, 19 bp, Homo sapiens
  siRNA target sequence for HAS2 (NM_005328.1,1311-1329).
gatattggatggcttttaa

SEQ ID NO: 213535 - DNA, 19 bp, Homo sapiens
  siRNA target sequence for HAS2 (NM_005328.1,1318-1336).
gatggcttttaatatagaa

SEQ ID NO: 213536 - DNA, 19 bp, Homo sapiens
  siRNA target sequence for HAS2 (NM_005328.1,1358-1376).
gggtgtgttcagtgcatta

SEQ ID NO: 213537 - DNA, 19 bp, Homo sapiens
  siRNA target sequence for HAS2 (NM_005328.1,1423-1441).
ggaagattggtacaatcaa

SEQ ID NO: 213538 - DNA, 19 bp, Homo sapiens
  siRNA target sequence for HAS2 (NM_005328.1,1427-1445).
gattggtacaatcaagaat

SEQ ID NO: 213539 - DNA, 19 bp, Homo sapiens
  siRNA target sequence for HAS2 (NM_005328.1,1450-1468).
gggcaaccaatgtagcttt

SEQ ID NO: 213540 - DNA, 19 bp, Homo sapiens
  siRNA target sequence for HAS2 (NM_005328.1,1504-1522).
cctgggctatgcaacaaaa

SEQ ID NO: 213541 - DNA, 19 bp, Homo sapiens
  siRNA target sequence for HAS2 (NM_005328.1,1505-1523).
ctgggctatgcaacaaaat

SEQ ID NO: 213542 - DNA, 19 bp, Homo sapiens
  siRNA target sequence for HAS2 (NM_005328.1,1612-1630).
ccgagaatggctgtacaat

SEQ ID NO: 213543 - DNA, 19 bp, Homo sapiens
  siRNA target sequence for HAS2 (NM_005328.1,1638-1656).
ggtttcacaaacatcactt

SEQ ID NO: 213544 - DNA, 19 bp, Homo sapiens
  siRNA target sequence for HAS2 (NM_005328.1,1666-1684).
ctacgaagcgattatcact

SEQ ID NO: 213545 - DNA, 19 bp, Homo sapiens
  siRNA target sequence for HAS2 (NM_005328.1,1674-1692).
cgattatcactggattctt

SEQ ID NO: 213546 - DNA, 19 bp, Homo sapiens
  siRNA target sequence for HAS2 (NM_005328.1,1675-1693).
gattatcactggattcttt

SEQ ID NO: 213547 - DNA, 19 bp, Homo sapiens
  siRNA target sequence for HAS2 (NM_005328.1,1724-1742).
ctcttctaccggggtaaaa

SEQ ID NO: 213548 - DNA, 19 bp, Homo sapiens
  siRNA target sequence for HAS2 (NM_005328.1,1726-1744).
cttctaccggggtaaaatt

SEQ ID NO: 213549 - DNA, 19 bp, Homo sapiens
  siRNA target sequence for HAS2 (NM_005328.1,1774-1792).
ccagctagtaggtctcata

SEQ ID NO: 213550 - DNA, 19 bp, Homo sapiens
  siRNA target sequence for HAS2 (NM_005328.1,1778-1796).
ctagtaggtctcataaaat

SEQ ID NO: 213551 - DNA, 19 bp, Homo sapiens
  siRNA target sequence for HAS2 (NM_005328.1,1781-1799).
gtaggtctcataaaatcat

SEQ ID NO: 213552 - DNA, 19 bp, Homo sapiens
  siRNA target sequence for HAS2 (NM_005328.1,1784-1802).
ggtctcataaaatcatctt

SEQ ID NO: 213553 - DNA, 19 bp, Homo sapiens
  siRNA target sequence for HAS2 (NM_005328.1,1812-1830).
gccttagaggaaatatcgt

SEQ ID NO: 213554 - DNA, 19 bp, Homo sapiens
  siRNA target sequence for HAS2 (NM_005328.1,1858-1876).
gttatacatgtcgagttta

SEQ ID NO: 213555 - DNA, 19 bp, Homo sapiens
  siRNA target sequence for HAS2 (NM_005328.1,1880-1898).
cccgccaagatgtttgcaa

SEQ ID NO: 213556 - DNA, 19 bp, Homo sapiens
  siRNA target sequence for HAS2 (NM_005328.1,1881-1899).
ccgccaagatgtttgcaat

SEQ ID NO: 213557 - DNA, 19 bp, Homo sapiens
  siRNA target sequence for HAS2 (NM_005328.1,1882-1900).
cgccaagatgtttgcaatt

SEQ ID NO: 213558 - DNA, 19 bp, Homo sapiens
  siRNA target sequence for HAS2 (NM_005328.1,1924-1942).
gggcacatcaggaaggaaa

SEQ ID NO: 213559 - DNA, 19 bp, Homo sapiens
  siRNA target sequence for HAS2 (NM_005328.1,1965-1983).
gactcattccagtatcagt

SEQ ID NO: 213560 - DNA, 19 bp, Homo sapiens
  siRNA target sequence for HAS2 (NM_005328.1,1973-1991).
ccagtatcagtttggttta

SEQ ID NO: 213561 - DNA, 19 bp, Homo sapiens
  siRNA target sequence for HAS2 (NM_005328.1,1997-2015).
ctcctgggtggtgtgattt

SEQ ID NO: 213562 - DNA, 19 bp, Homo sapiens
  siRNA target sequence for HAS2 (NM_005328.1,2000-2018).
ctgggtggtgtgattttca

SEQ ID NO: 213563 - DNA, 19 bp, Homo sapiens
  siRNA target sequence for HAS2 (NM_005328.1,2032-2050).
gtctaaaaggccattttca

SEQ ID NO: 213564 - DNA, 19 bp, Homo sapiens
  siRNA target sequence for HAS2 (NM_005328.1,2040-2058).
ggccattttcagaatccaa

SEQ ID NO: 213565 - DNA, 19 bp, Homo sapiens
  siRNA target sequence for HAS2 (NM_005328.1,2041-2059).
gccattttcagaatccaaa

SEQ ID NO: 213566 - DNA, 19 bp, Homo sapiens
  siRNA target sequence for HAS2 (NM_005328.1,2055-2073).
ccaaacagacagttctaat

SEQ ID NO: 213567 - DNA, 19 bp, Homo sapiens
  siRNA target sequence for HAS2 (NM_005328.1,2056-2074).
caaacagacagttctaatt

SEQ ID NO: 213568 - DNA, 19 bp, Homo sapiens
  siRNA target sequence for HAS2 (NM_005328.1,2110-2128).
gcttttgacgctgtatgta

SEQ ID NO: 213569 - DNA, 19 bp, Homo sapiens
  siRNA target sequence for HAS2 (NM_005328.1,2118-2136).
cgctgtatgtagttctcat

SEQ ID NO: 213570 - DNA, 19 bp, Homo sapiens
  siRNA target sequence for HAS2 (NM_005328.1,2122-2140).
gtatgtagttctcatcaat

SEQ ID NO: 213571 - DNA, 19 bp, Homo sapiens
  siRNA target sequence for HAS2 (NM_005328.1,2126-2144).
gtagttctcatcaataagt

SEQ ID NO: 213572 - DNA, 19 bp, Homo sapiens
  siRNA target sequence for HAS2 (NM_005328.1,2174-2192).
gacatggtgcttgatgtat

SEQ ID NO: 213573 - DNA, 19 bp, Homo sapiens
  siRNA target sequence for HAS3 (NM_005329.2,903-921).
caagtacgactcatggatt

SEQ ID NO: 213574 - DNA, 19 bp, Homo sapiens
  siRNA target sequence for HAS3 (NM_005329.2,988-1006).
ggctgtgtgcagtgtatta

SEQ ID NO: 213575 - DNA, 19 bp, Homo sapiens
  siRNA target sequence for HAS3 (NM_005329.2,1133-1151).
gccttggctaccgaactaa

SEQ ID NO: 213576 - DNA, 19 bp, Homo sapiens
  siRNA target sequence for HAS3 (NM_005329.2,1135-1153).
cttggctaccgaactaagt

SEQ ID NO: 213577 - DNA, 19 bp, Homo sapiens
  siRNA target sequence for HAS3 (NM_005329.2,1138-1156).
ggctaccgaactaagtata

SEQ ID NO: 213578 - DNA, 19 bp, Homo sapiens
  siRNA target sequence for HAS3 (NM_005329.2,1178-1196).
cagagacccccactaagta

SEQ ID NO: 213579 - DNA, 19 bp, Homo sapiens
  siRNA target sequence for HAS3 (NM_005329.2,1243-1261).
cgggagtggctctacaact

SEQ ID NO: 213580 - DNA, 19 bp, Homo sapiens
  siRNA target sequence for HAS3 (NM_005329.2,1262-1280).
ctctgtggttccataagca

SEQ ID NO: 213581 - DNA, 19 bp, Homo sapiens
  siRNA target sequence for HAS3 (NM_005329.2,1332-1350).
cctcattgccacggttata

SEQ ID NO: 213582 - DNA, 19 bp, Homo sapiens
  siRNA target sequence for HAS3 (NM_005329.2,1340-1358).
ccacggttatacagctttt

SEQ ID NO: 213583 - DNA, 19 bp, Homo sapiens
  siRNA target sequence for HAS3 (NM_005329.2,1343-1361).
cggttatacagcttttcta

SEQ ID NO: 213584 - DNA, 19 bp, Homo sapiens
  siRNA target sequence for HAS3 (NM_005329.2,1555-1573).
ggcacctctggccgaaaaa

SEQ ID NO: 213585 - DNA, 19 bp, Homo sapiens
  siRNA target sequence for HAS3 (NM_005329.2,1560-1578).
ctctggccgaaaaaccatt

SEQ ID NO: 213586 - DNA, 19 bp, Homo sapiens
  siRNA target sequence for HAS3 (NM_005329.2,1698-1716).
ctctggggctatactgtat

SEQ ID NO: 213587 - DNA, 19 bp, Homo sapiens
  siRNA target sequence for HAS3 (NM_005329.2,1731-1749).
ggccctcctcatgctatat

SEQ ID NO: 213588 - DNA, 19 bp, Homo sapiens
  siRNA target sequence for HAS3 (NM_138612.1,877-895).
caccaacgccacgtttcta

SEQ ID NO: 213589 - DNA, 19 bp, Homo sapiens
  siRNA target sequence for HAS3 (NM_138612.1,879-897).
ccaacgccacgtttctaga

SEQ ID NO: 213590 - DNA, 19 bp, Homo sapiens
  siRNA target sequence for MFNG (NM_002405.2,871-889).
ccatgggctatatcattga

SEQ ID NO: 213591 - DNA, 19 bp, Homo sapiens
  siRNA target sequence for MFNG (NM_002405.2,1011-1029).
gggaaactcaacgtcatta

SEQ ID NO: 213592 - DNA, 19 bp, Homo sapiens
  siRNA target sequence for MFNG (NM_002405.2,1055-1073).
ggaggacccctccagattt

SEQ ID NO: 213593 - DNA, 19 bp, Homo sapiens
  siRNA target sequence for SMP3 (NM_025163.2,178-196).
gtagcagctgggacatcat

SEQ ID NO: 213594 - DNA, 19 bp, Homo sapiens
  siRNA target sequence for SMP3 (NM_025163.2,884-902).
ccacaaaccctggtttgaa

SEQ ID NO: 213595 - DNA, 19 bp, Homo sapiens
  siRNA target sequence for SMP3 (NM_025163.2,967-985).
gccacggacagctggtatt

SEQ ID NO: 213596 - DNA, 19 bp, Homo sapiens
  siRNA target sequence for SMP3 (NM_025163.2,1339-1357).
cccctggtcctgctttgta

SEQ ID NO: 213597 - DNA, 19 bp, Homo sapiens
  siRNA target sequence for BAT8 (NM_006709.2,136-154).
ggacacccctcgtagtgaa

SEQ ID NO: 213598 - DNA, 19 bp, Homo sapiens
  siRNA target sequence for BAT8 (NM_006709.2,139-157).
cacccctcgtagtgaagaa

SEQ ID NO: 213599 - DNA, 19 bp, Homo sapiens
  siRNA target sequence for BAT8 (NM_006709.2,279-297).
gggatgaatctgagaatct

SEQ ID NO: 213600 - DNA, 19 bp, Homo sapiens
  siRNA target sequence for BAT8 (NM_006709.2,335-353).
ctgggccatgccacaaagt

SEQ ID NO: 213601 - DNA, 19 bp, Homo sapiens
  siRNA target sequence for BAT8 (NM_006709.2,337-355).
gggccatgccacaaagtca

SEQ ID NO: 213602 - DNA, 19 bp, Homo sapiens
  siRNA target sequence for BAT8 (NM_006709.2,397-415).
ggccaagatgtcaatgaca

SEQ ID NO: 213603 - DNA, 19 bp, Homo sapiens
  siRNA target sequence for BAT8 (NM_006709.2,432-450).
ctccatctgtccagagttt

SEQ ID NO: 213604 - DNA, 19 bp, Homo sapiens
  siRNA target sequence for BAT8 (NM_006709.2,453-471).
ctatgaggctactgagtat

SEQ ID NO: 213605 - DNA, 19 bp, Homo sapiens
  siRNA target sequence for BAT8 (NM_006709.2,551-569).
caccgagcccgcaaaacca

SEQ ID NO: 213606 - DNA, 19 bp, Homo sapiens
  siRNA target sequence for BAT8 (NM_006709.2,716-734).
ctgtcggaggagttaggtt

SEQ ID NO: 213607 - DNA, 19 bp, Homo sapiens
  siRNA target sequence for BAT8 (NM_006709.2,822-840).
gtctctactatgattccta

SEQ ID NO: 213608 - DNA, 19 bp, Homo sapiens
  siRNA target sequence for BAT8 (NM_006709.2,865-883).
cgacagcaagtctgaagtt

SEQ ID NO: 213609 - DNA, 19 bp, Homo sapiens
  siRNA target sequence for BAT8 (NM_006709.2,868-886).
cagcaagtctgaagttgaa

SEQ ID NO: 213610 - DNA, 19 bp, Homo sapiens
  siRNA target sequence for BAT8 (NM_006709.2,1146-1164).
caggccccagtgagtacat

SEQ ID NO: 213611 - DNA, 19 bp, Homo sapiens
  siRNA target sequence for BAT8 (NM_006709.2,1223-1241).
gctggggtgtccaatgaca

SEQ ID NO: 213612 - DNA, 19 bp, Homo sapiens
  siRNA target sequence for BAT8 (NM_006709.2,2227-2245).
gcgtggtggctgtgtctat

SEQ ID NO: 213613 - DNA, 19 bp, Homo sapiens
  siRNA target sequence for BAT8 (NM_006709.2,2363-2381).
gggtggacgcccatcatct

SEQ ID NO: 213614 - DNA, 19 bp, Homo sapiens
  siRNA target sequence for BAT8 (NM_006709.2,2509-2527).
cgccgaagtccttctgaat

SEQ ID NO: 213615 - DNA, 19 bp, Homo sapiens
  siRNA target sequence for BAT8 (NM_006709.2,2600-2618).
catgactgcgtgctgttat

SEQ ID NO: 213616 - DNA, 19 bp, Homo sapiens
  siRNA target sequence for BAT8 (NM_006709.2,2759-2777).
cgcacagagaagatcatct

SEQ ID NO: 213617 - DNA, 19 bp, Homo sapiens
  siRNA target sequence for BAT8 (NM_006709.2,3009-3027).
ggcgattgctccaggaatt

SEQ ID NO: 213618 - DNA, 19 bp, Homo sapiens
  siRNA target sequence for BAT8 (NM_006709.2,3010-3028).
gcgattgctccaggaattt

SEQ ID NO: 213619 - DNA, 19 bp, Homo sapiens
  siRNA target sequence for BAT8 (NM_006709.2,3011-3029).
cgattgctccaggaattta

SEQ ID NO: 213620 - DNA, 19 bp, Homo sapiens
  siRNA target sequence for BAT8 (NM_006709.2,3045-3063).
cgctgattttcgagtgtaa

SEQ ID NO: 213621 - DNA, 19 bp, Homo sapiens
  siRNA target sequence for BAT8 (NM_006709.2,3185-3203).
ccacaggggaccttcatct

SEQ ID NO: 213622 - DNA, 19 bp, Homo sapiens
  siRNA target sequence for BAT8 (NM_006709.2,3245-3263).
gtgagagaggatgattctt

SEQ ID NO: 213623 - DNA, 19 bp, Homo sapiens
  siRNA target sequence for BAT8 (NM_006709.2,3261-3279).
cttacctcttcgacttaga

SEQ ID NO: 213624 - DNA, 19 bp, Homo sapiens
  siRNA target sequence for BAT8 (NM_006709.2,3303-3321).
gcatagatgcccgttacta

SEQ ID NO: 213625 - DNA, 19 bp, Homo sapiens
  siRNA target sequence for BAT8 (NM_006709.2,3304-3322).
catagatgcccgttactat

SEQ ID NO: 213626 - DNA, 19 bp, Homo sapiens
  siRNA target sequence for SET7 (NM_030648.1,406-424).
ggacgggggaagttcttct

SEQ ID NO: 213627 - DNA, 19 bp, Homo sapiens
  siRNA target sequence for SET7 (NM_030648.1,409-427).
cgggggaagttcttcttct

SEQ ID NO: 213628 - DNA, 19 bp, Homo sapiens
  siRNA target sequence for SET7 (NM_030648.1,410-428).
gggggaagttcttcttctt

SEQ ID NO: 213629 - DNA, 19 bp, Homo sapiens
  siRNA target sequence for SET7 (NM_030648.1,475-493).
ggccagggagtttacactt

SEQ ID NO: 213630 - DNA, 19 bp, Homo sapiens
  siRNA target sequence for SET7 (NM_030648.1,476-494).
gccagggagtttacactta

SEQ ID NO: 213631 - DNA, 19 bp, Homo sapiens
  siRNA target sequence for SET7 (NM_030648.1,480-498).
gggagtttacacttacgaa

SEQ ID NO: 213632 - DNA, 19 bp, Homo sapiens
  siRNA target sequence for SET7 (NM_030648.1,543-561).
cggtccagcccaggaatat

SEQ ID NO: 213633 - DNA, 19 bp, Homo sapiens
  siRNA target sequence for SET7 (NM_030648.1,589-607).
gggcagtataaagataaca

SEQ ID NO: 213634 - DNA, 19 bp, Homo sapiens
  siRNA target sequence for SET7 (NM_030648.1,590-608).
ggcagtataaagataacat

SEQ ID NO: 213635 - DNA, 19 bp, Homo sapiens
  siRNA target sequence for SET7 (NM_030648.1,617-635).
gagtgtgctggatatatta

SEQ ID NO: 213636 - DNA, 19 bp, Homo sapiens
  siRNA target sequence for SET7 (NM_030648.1,651-669).
ccttgtaggagaagtaaat

SEQ ID NO: 213637 - DNA, 19 bp, Homo sapiens
  siRNA target sequence for SET7 (NM_030648.1,835-853).
gtgtaccactttgataagt

SEQ ID NO: 213638 - DNA, 19 bp, Homo sapiens
  siRNA target sequence for SET7 (NM_030648.1,847-865).
gataagtcgacttcatctt

SEQ ID NO: 213639 - DNA, 19 bp, Homo sapiens
  siRNA target sequence for SET7 (NM_030648.1,892-910).
gatccttatgaatcagaaa

SEQ ID NO: 213640 - DNA, 19 bp, Homo sapiens
  siRNA target sequence for SET7 (NM_030648.1,912-930).
ggtttatgttgctgaatct

SEQ ID NO: 213641 - DNA, 19 bp, Homo sapiens
  siRNA target sequence for SET7 (NM_030648.1,967-985).
gtagctgtgggacctaata

SEQ ID NO: 213642 - DNA, 19 bp, Homo sapiens
  siRNA target sequence for SET7 (NM_030648.1,973-991).
gtgggacctaatactgtta

SEQ ID NO: 213643 - DNA, 19 bp, Homo sapiens
  siRNA target sequence for SET7 (NM_030648.1,976-994).
ggacctaatactgttatgt

SEQ ID NO: 213644 - DNA, 19 bp, Homo sapiens
  siRNA target sequence for SET7 (NM_030648.1,1038-1056).
cagggactgggcccttaat

SEQ ID NO: 213645 - DNA, 19 bp, Homo sapiens
  siRNA target sequence for SET7 (NM_030648.1,1106-1124).
cctataaccacgtatccaa

SEQ ID NO: 213646 - DNA, 19 bp, Homo sapiens
  siRNA target sequence for SET7 (NM_030648.1,1168-1186).
ccaaactgcatctacgata

SEQ ID NO: 213647 - DNA, 19 bp, Homo sapiens
  siRNA target sequence for SET7 (NM_030648.1,1169-1187).
caaactgcatctacgatat

SEQ ID NO: 213648 - DNA, 19 bp, Homo sapiens
  siRNA target sequence for SET7 (NM_030648.1,1173-1191).
ctgcatctacgatatgttt

SEQ ID NO: 213649 - DNA, 19 bp, Homo sapiens
  siRNA target sequence for SET7 (NM_030648.1,1200-1218).
ccgttttgggcccatcaaa

SEQ ID NO: 213650 - DNA, 19 bp, Homo sapiens
  siRNA target sequence for SET7 (NM_030648.1,1201-1219).
cgttttgggcccatcaaat

SEQ ID NO: 213651 - DNA, 19 bp, Homo sapiens
  siRNA target sequence for C20orf36 (NM_018257.1,211-229).
ggtagagcaggctttcaga

SEQ ID NO: 213652 - DNA, 19 bp, Homo sapiens
  siRNA target sequence for C20orf36 (NM_018257.1,220-238).
ggctttcagagctatcgat

SEQ ID NO: 213653 - DNA, 19 bp, Homo sapiens
  siRNA target sequence for C20orf36 (NM_018257.1,235-253).
cgatcgtgcagactattat

SEQ ID NO: 213654 - DNA, 19 bp, Homo sapiens
  siRNA target sequence for C20orf36 (NM_018257.1,240-258).
gtgcagactattatcttga

SEQ ID NO: 213655 - DNA, 19 bp, Homo sapiens
  siRNA target sequence for C20orf36 (NM_018257.1,245-263).
gactattatcttgaagaat

SEQ ID NO: 213656 - DNA, 19 bp, Homo sapiens
  siRNA target sequence for C20orf36 (NM_018257.1,365-383).
cctggactctcgtttctga

SEQ ID NO: 213657 - DNA, 19 bp, Homo sapiens
  siRNA target sequence for C20orf36 (NM_018257.1,366-384).
ctggactctcgtttctgaa

SEQ ID NO: 213658 - DNA, 19 bp, Homo sapiens
  siRNA target sequence for C20orf36 (NM_018257.1,467-485).
cactcagatgtgatagagt

SEQ ID NO: 213659 - DNA, 19 bp, Homo sapiens
  siRNA target sequence for C20orf36 (NM_018257.1,473-491).
gatgtgatagagtatgcaa

SEQ ID NO: 213660 - DNA, 19 bp, Homo sapiens
  siRNA target sequence for C20orf36 (NM_018257.1,522-540).
gtgatagttttgacaagtt

SEQ ID NO: 213661 - DNA, 19 bp, Homo sapiens
  siRNA target sequence for C20orf36 (NM_018257.1,569-587).
gggaattgcctggagattt

SEQ ID NO: 213662 - DNA, 19 bp, Homo sapiens
  siRNA target sequence for C20orf36 (NM_018257.1,581-599).
gagatttctccggattgtt

SEQ ID NO: 213663 - DNA, 19 bp, Homo sapiens
  siRNA target sequence for C20orf36 (NM_018257.1,583-601).
gatttctccggattgttct

SEQ ID NO: 213664 - DNA, 19 bp, Homo sapiens
  siRNA target sequence for C20orf36 (NM_018257.1,591-609).
cggattgttctcagtatga

SEQ ID NO: 213665 - DNA, 19 bp, Homo sapiens
  siRNA target sequence for C20orf36 (NM_018257.1,592-610).
ggattgttctcagtatgat

SEQ ID NO: 213666 - DNA, 19 bp, Homo sapiens
  siRNA target sequence for C20orf36 (NM_018257.1,602-620).
cagtatgatcgtgtatact

SEQ ID NO: 213667 - DNA, 19 bp, Homo sapiens
  siRNA target sequence for C20orf36 (NM_018257.1,604-622).
gtatgatcgtgtatactgt

SEQ ID NO: 213668 - DNA, 19 bp, Homo sapiens
  siRNA target sequence for C20orf36 (NM_018257.1,796-814).
ccattcagagtcaggaaaa

SEQ ID NO: 213669 - DNA, 19 bp, Homo sapiens
  siRNA target sequence for C20orf36 (NM_018257.1,929-947).
ggaaacggactaaagaaca

SEQ ID NO: 213670 - DNA, 19 bp, Homo sapiens
  siRNA target sequence for C20orf36 (NM_018257.1,943-961).
gaacacccccaggtttaaa

SEQ ID NO: 213671 - DNA, 19 bp, Homo sapiens
  siRNA target sequence for C20orf36 (NM_018257.1,946-964).
cacccccaggtttaaacga

SEQ ID NO: 213672 - DNA, 19 bp, Homo sapiens
  siRNA target sequence for C20orf36 (NM_018257.1,978-996).
gccgtcgaatggaaacgat

SEQ ID NO: 213673 - DNA, 19 bp, Homo sapiens
  siRNA target sequence for C20orf36 (NM_018257.1,979-997).
ccgtcgaatggaaacgatt

SEQ ID NO: 213674 - DNA, 19 bp, Homo sapiens
  siRNA target sequence for C20orf36 (NM_018257.1,983-1001).
cgaatggaaacgattgtct

SEQ ID NO: 213675 - DNA, 19 bp, Homo sapiens
  siRNA target sequence for C20orf36 (NM_018257.1,1172-1190).
gatcccctgaaatactact

SEQ ID NO: 213676 - DNA, 19 bp, Homo sapiens
  siRNA target sequence for C20orf36 (NM_018257.1,1186-1204).
ctacttgctttattacaga

SEQ ID NO: 213677 - DNA, 19 bp, Homo sapiens
  siRNA target sequence for LOC115294 (NM_052937.1,201-219).
cgattgatcgtggagatta

SEQ ID NO: 213678 - DNA, 19 bp, Homo sapiens
  siRNA target sequence for LOC115294 (NM_052937.1,206-224).
gatcgtggagattactatt

SEQ ID NO: 213679 - DNA, 19 bp, Homo sapiens
  siRNA target sequence for LOC115294 (NM_052937.1,230-248).
ggctacagagacaatgctt

SEQ ID NO: 213680 - DNA, 19 bp, Homo sapiens
  siRNA target sequence for LOC115294 (NM_052937.1,231-249).
gctacagagacaatgctta

SEQ ID NO: 213681 - DNA, 19 bp, Homo sapiens
  siRNA target sequence for LOC115294 (NM_052937.1,291-309).
caccttgcatttattctga

SEQ ID NO: 213682 - DNA, 19 bp, Homo sapiens
  siRNA target sequence for LOC115294 (NM_052937.1,329-347).
cttcaaccaggattgtctt

SEQ ID NO: 213683 - DNA, 19 bp, Homo sapiens
  siRNA target sequence for LOC115294 (NM_052937.1,369-387).
ccggatatttaagtacaat

SEQ ID NO: 213684 - DNA, 19 bp, Homo sapiens
  siRNA target sequence for LOC115294 (NM_052937.1,381-399).
gtacaatggtgggcttaat

SEQ ID NO: 213685 - DNA, 19 bp, Homo sapiens
  siRNA target sequence for LOC115294 (NM_052937.1,384-402).
caatggtgggcttaatttt

SEQ ID NO: 213686 - DNA, 19 bp, Homo sapiens
  siRNA target sequence for LOC115294 (NM_052937.1,388-406).
ggtgggcttaattttaggt

SEQ ID NO: 213687 - DNA, 19 bp, Homo sapiens
  siRNA target sequence for LOC115294 (NM_052937.1,426-444).
ggattgagcttcattcaga

SEQ ID NO: 213688 - DNA, 19 bp, Homo sapiens
  siRNA target sequence for LOC115294 (NM_052937.1,427-445).
gattgagcttcattcagat

SEQ ID NO: 213689 - DNA, 19 bp, Homo sapiens
  siRNA target sequence for LOC115294 (NM_052937.1,475-493).
gagcttcatcaaaaatagt

SEQ ID NO: 213690 - DNA, 19 bp, Homo sapiens
  siRNA target sequence for LOC115294 (NM_052937.1,477-495).
gcttcatcaaaaatagtga

SEQ ID NO: 213691 - DNA, 19 bp, Homo sapiens
  siRNA target sequence for LOC115294 (NM_052937.1,478-496).
cttcatcaaaaatagtgat

SEQ ID NO: 213692 - DNA, 19 bp, Homo sapiens
  siRNA target sequence for LOC115294 (NM_052937.1,567-585).
gtcatcagtatgatcgaat

SEQ ID NO: 213693 - DNA, 19 bp, Homo sapiens
  siRNA target sequence for LOC115294 (NM_052937.1,569-587).
catcagtatgatcgaattt

SEQ ID NO: 213694 - DNA, 19 bp, Homo sapiens
  siRNA target sequence for LOC115294 (NM_052937.1,644-662).
gttggaggcatattagtca

SEQ ID NO: 213695 - DNA, 19 bp, Homo sapiens
  siRNA target sequence for LOC115294 (NM_052937.1,664-682).
gcctatagaggatcagtta

SEQ ID NO: 213696 - DNA, 19 bp, Homo sapiens
  siRNA target sequence for LOC115294 (NM_052937.1,665-683).
cctatagaggatcagttaa

SEQ ID NO: 213697 - DNA, 19 bp, Homo sapiens
  siRNA target sequence for LOC115294 (NM_052937.1,673-691).
ggatcagttaacacagatt

SEQ ID NO: 213698 - DNA, 19 bp, Homo sapiens
  siRNA target sequence for LOC115294 (NM_052937.1,695-713).
cgaactggacagaacactt

SEQ ID NO: 213699 - DNA, 19 bp, Homo sapiens
  siRNA target sequence for LOC115294 (NM_052937.1,808-826).
ctgtgctgtcaggaatcta

SEQ ID NO: 213700 - DNA, 19 bp, Homo sapiens
  siRNA target sequence for LOC115294 (NM_052937.1,810-828).
gtgctgtcaggaatctaca

SEQ ID NO: 213701 - DNA, 19 bp, Homo sapiens
  siRNA target sequence for LOC115294 (NM_052937.1,827-845).
caggacttggctcgtattt

SEQ ID NO: 213702 - DNA, 19 bp, Homo sapiens
  siRNA target sequence for LOC115294 (NM_052937.1,830-848).
gacttggctcgtatttaca

SEQ ID NO: 213703 - DNA, 19 bp, Homo sapiens
  siRNA target sequence for LOC115294 (NM_052937.1,832-850).
cttggctcgtatttacatt

SEQ ID NO: 213704 - DNA, 19 bp, Homo sapiens
  siRNA target sequence for LOC115294 (NM_052937.1,847-865).
cattcgacgcacacttaga

SEQ ID NO: 213705 - DNA, 19 bp, Homo sapiens
  siRNA target sequence for LOC115294 (NM_052937.1,909-927).
gggctccacccaaaaggaa

SEQ ID NO: 213706 - DNA, 19 bp, Homo sapiens
  siRNA target sequence for LOC115294 (NM_052937.1,946-964).
gagaattaacacttacgta

SEQ ID NO: 213707 - DNA, 19 bp, Homo sapiens
  siRNA target sequence for LOC115294 (NM_052937.1,948-966).
gaattaacacttacgtatt

SEQ ID NO: 213708 - DNA, 19 bp, Homo sapiens
  siRNA target sequence for LOC115294 (NM_052937.1,970-988).
gggtaatcagcttattcct

SEQ ID NO: 213709 - DNA, 19 bp, Homo sapiens
  siRNA target sequence for LOC115294 (NM_052937.1,1082-1100).
ccacctcaaaatttactga

SEQ ID NO: 213710 - DNA, 19 bp, Homo sapiens
  siRNA target sequence for LOC115294 (NM_052937.1,1150-1168).
gacatattttagagacaaa

SEQ ID NO: 213711 - DNA, 19 bp, Homo sapiens
  siRNA target sequence for PCMT1 (NM_005389.1,105-123).
cggagctaatccacaatct

SEQ ID NO: 213712 - DNA, 19 bp, Homo sapiens
  siRNA target sequence for PCMT1 (NM_005389.1,115-133).
ccacaatctccgcaaaaat

SEQ ID NO: 213713 - DNA, 19 bp, Homo sapiens
  siRNA target sequence for PCMT1 (NM_005389.1,125-143).
cgcaaaaatggaatcatca

SEQ ID NO: 213714 - DNA, 19 bp, Homo sapiens
  siRNA target sequence for PCMT1 (NM_005389.1,179-197).
gaccgctcccactatgcaa

SEQ ID NO: 213715 - DNA, 19 bp, Homo sapiens
  siRNA target sequence for PCMT1 (NM_005389.1,181-199).
ccgctcccactatgcaaaa

SEQ ID NO: 213716 - DNA, 19 bp, Homo sapiens
  siRNA target sequence for PCMT1 (NM_005389.1,182-200).
cgctcccactatgcaaaat

SEQ ID NO: 213717 - DNA, 19 bp, Homo sapiens
  siRNA target sequence for PCMT1 (NM_005389.1,186-204).
cccactatgcaaaatgtaa

SEQ ID NO: 213718 - DNA, 19 bp, Homo sapiens
  siRNA target sequence for PCMT1 (NM_005389.1,214-232).
ggattctccacaatcaata

SEQ ID NO: 213719 - DNA, 19 bp, Homo sapiens
  siRNA target sequence for PCMT1 (NM_005389.1,270-288).
catatgcgctagaacttct

SEQ ID NO: 213720 - DNA, 19 bp, Homo sapiens
  siRNA target sequence for PCMT1 (NM_005389.1,276-294).
cgctagaacttctatttga

SEQ ID NO: 213721 - DNA, 19 bp, Homo sapiens
  siRNA target sequence for PCMT1 (NM_005389.1,277-295).
gctagaacttctatttgat

SEQ ID NO: 213722 - DNA, 19 bp, Homo sapiens
  siRNA target sequence for PCMT1 (NM_005389.1,342-360).
gaatccttactgcatgttt

SEQ ID NO: 213723 - DNA, 19 bp, Homo sapiens
  siRNA target sequence for PCMT1 (NM_005389.1,346-364).
ccttactgcatgttttgca

SEQ ID NO: 213724 - DNA, 19 bp, Homo sapiens
  siRNA target sequence for PCMT1 (NM_005389.1,416-434).
ctagtagatgactcagtaa

SEQ ID NO: 213725 - DNA, 19 bp, Homo sapiens
  siRNA target sequence for PCMT1 (NM_005389.1,445-463).
gaaggacgatccaacactt

SEQ ID NO: 213726 - DNA, 19 bp, Homo sapiens
  siRNA target sequence for PCMT1 (NM_005389.1,570-588).
cccaggcgctaatagatca

SEQ ID NO: 213727 - DNA, 19 bp, Homo sapiens
  siRNA target sequence for PCMT1 (NM_005389.1,574-592).
ggcgctaatagatcagtta

SEQ ID NO: 213728 - DNA, 19 bp, Homo sapiens
  siRNA target sequence for PCMT1 (NM_005389.1,575-593).
gcgctaatagatcagttaa

SEQ ID NO: 213729 - DNA, 19 bp, Homo sapiens
  siRNA target sequence for PCMT1 (NM_005389.1,576-594).
cgctaatagatcagttaaa

SEQ ID NO: 213730 - DNA, 19 bp, Homo sapiens
  siRNA target sequence for PCMT1 (NM_005389.1,595-613).
gcccggaggaagattgata

SEQ ID NO: 213731 - DNA, 19 bp, Homo sapiens
  siRNA target sequence for PCMT1 (NM_005389.1,596-614).
cccggaggaagattgatat

SEQ ID NO: 213732 - DNA, 19 bp, Homo sapiens
  siRNA target sequence for PCMT1 (NM_005389.1,597-615).
ccggaggaagattgatatt

SEQ ID NO: 213733 - DNA, 19 bp, Homo sapiens
  siRNA target sequence for PCMT1 (NM_005389.1,626-644).
cctgcaggcggaaaccaaa

SEQ ID NO: 213734 - DNA, 19 bp, Homo sapiens
  siRNA target sequence for PCMT1 (NM_005389.1,692-710).
cctctgatgggggtgatat

SEQ ID NO: 213735 - DNA, 19 bp, Homo sapiens
  siRNA target sequence for PCMT1 (NM_005389.1,693-711).
ctctgatgggggtgatata

SEQ ID NO: 213736 - DNA, 19 bp, Homo sapiens
  siRNA target sequence for PCMT1 (NM_005389.1,704-722).
gtgatatacgtgcctttaa

SEQ ID NO: 213737 - DNA, 19 bp, Homo sapiens
  siRNA target sequence for BHMT (NM_001713.1,31-49).
cacccgttgggggcaaaaa

SEQ ID NO: 213738 - DNA, 19 bp, Homo sapiens
  siRNA target sequence for BHMT (NM_001713.1,59-77).
gggcatcctagaacgttta

SEQ ID NO: 213739 - DNA, 19 bp, Homo sapiens
  siRNA target sequence for BHMT (NM_001713.1,60-78).
ggcatcctagaacgtttaa

SEQ ID NO: 213740 - DNA, 19 bp, Homo sapiens
  siRNA target sequence for BHMT (NM_001713.1,65-83).
cctagaacgtttaaatgct

SEQ ID NO: 213741 - DNA, 19 bp, Homo sapiens
  siRNA target sequence for BHMT (NM_001713.1,100-118).
gagatggagggtttgtctt

SEQ ID NO: 213742 - DNA, 19 bp, Homo sapiens
  siRNA target sequence for BHMT (NM_001713.1,275-293).
ggagaacaggggcaactat

SEQ ID NO: 213743 - DNA, 19 bp, Homo sapiens
  siRNA target sequence for BHMT (NM_001713.1,281-299).
caggggcaactatgtctta

SEQ ID NO: 213744 - DNA, 19 bp, Homo sapiens
  siRNA target sequence for BHMT (NM_001713.1,283-301).
ggggcaactatgtcttaga

SEQ ID NO: 213745 - DNA, 19 bp, Homo sapiens
  siRNA target sequence for BHMT (NM_001713.1,285-303).
ggcaactatgtcttagaga

SEQ ID NO: 213746 - DNA, 19 bp, Homo sapiens
  siRNA target sequence for BHMT (NM_001713.1,286-304).
gcaactatgtcttagagaa

SEQ ID NO: 213747 - DNA, 19 bp, Homo sapiens
  siRNA target sequence for BHMT (NM_001713.1,290-308).
ctatgtcttagagaagata

SEQ ID NO: 213748 - DNA, 19 bp, Homo sapiens
  siRNA target sequence for BHMT (NM_001713.1,396-414).
cagacaccttcatacctta

SEQ ID NO: 213749 - DNA, 19 bp, Homo sapiens
  siRNA target sequence for BHMT (NM_001713.1,411-429).
cttagctgcaagagtgaaa

SEQ ID NO: 213750 - DNA, 19 bp, Homo sapiens
  siRNA target sequence for BHMT (NM_001713.1,456-474).
cagttagaggtctttatga

SEQ ID NO: 213751 - DNA, 19 bp, Homo sapiens
  siRNA target sequence for BHMT (NM_001713.1,533-551).
ggcagttgaaaccttgata

SEQ ID NO: 213752 - DNA, 19 bp, Homo sapiens
  siRNA target sequence for BHMT (NM_001713.1,537-555).
gttgaaaccttgatagcat

SEQ ID NO: 213753 - DNA, 19 bp, Homo sapiens
  siRNA target sequence for BHMT (NM_001713.1,548-566).
gatagcatccggtaaacct

SEQ ID NO: 213754 - DNA, 19 bp, Homo sapiens
  siRNA target sequence for BHMT (NM_001713.1,678-696).
cactttgaccccaccatta

SEQ ID NO: 213755 - DNA, 19 bp, Homo sapiens
  siRNA target sequence for BHMT (NM_001713.1,691-709).
ccattagtttaaaaacagt

SEQ ID NO: 213756 - DNA, 19 bp, Homo sapiens
  siRNA target sequence for BHMT (NM_001713.1,1110-1128).
ccatacaacccttcaatgt

SEQ ID NO: 213757 - DNA, 19 bp, Homo sapiens
  siRNA target sequence for BHMT2 (NM_017614.3,77-95).
gagtggggaggttgtgatt

SEQ ID NO: 213758 - DNA, 19 bp, Homo sapiens
  siRNA target sequence for BHMT2 (NM_017614.3,157-175).
ctccagaggcagtgataga

SEQ ID NO: 213759 - DNA, 19 bp, Homo sapiens
  siRNA target sequence for BHMT2 (NM_017614.3,187-205).
cagttcgtcaacttcacat

SEQ ID NO: 213760 - DNA, 19 bp, Homo sapiens
  siRNA target sequence for BHMT2 (NM_017614.3,193-211).
gtcaacttcacatggaatt

SEQ ID NO: 213761 - DNA, 19 bp, Homo sapiens
  siRNA target sequence for BHMT2 (NM_017614.3,212-230).
cttgagagcaggatcaaat

SEQ ID NO: 213762 - DNA, 19 bp, Homo sapiens
  siRNA target sequence for BHMT2 (NM_017614.3,217-235).
gagcaggatcaaatgtcat

SEQ ID NO: 213763 - DNA, 19 bp, Homo sapiens
  siRNA target sequence for BHMT2 (NM_017614.3,281-299).
gtgggaagatgtaaatgct

SEQ ID NO: 213764 - DNA, 19 bp, Homo sapiens
  siRNA target sequence for BHMT2 (NM_017614.3,357-375).
gggatctgccagacatcaa

SEQ ID NO: 213765 - DNA, 19 bp, Homo sapiens
  siRNA target sequence for BHMT2 (NM_017614.3,358-376).
ggatctgccagacatcaat

SEQ ID NO: 213766 - DNA, 19 bp, Homo sapiens
  siRNA target sequence for BHMT2 (NM_017614.3,364-382).
gccagacatcaatatacaa

SEQ ID NO: 213767 - DNA, 19 bp, Homo sapiens
  siRNA target sequence for BHMT2 (NM_017614.3,532-550).
gacccgtggcagttaccat

SEQ ID NO: 213768 - DNA, 19 bp, Homo sapiens
  siRNA target sequence for BHMT2 (NM_017614.3,564-582).
gagggagacatgcatgata

SEQ ID NO: 213769 - DNA, 19 bp, Homo sapiens
  siRNA target sequence for BHMT2 (NM_017614.3,567-585).
ggagacatgcatgatataa

SEQ ID NO: 213770 - DNA, 19 bp, Homo sapiens
  siRNA target sequence for BHMT2 (NM_017614.3,657-675).
cccgacaccagcttgaaga

SEQ ID NO: 213771 - DNA, 19 bp, Homo sapiens
  siRNA target sequence for BHMT2 (NM_017614.3,1042-1060).
gggagtattgggagaatct

SEQ ID NO: 213772 - DNA, 19 bp, Homo sapiens
  siRNA target sequence for MTR (NM_000254.1,412-430).
gcgggagaagctaaacgaa

SEQ ID NO: 213773 - DNA, 19 bp, Homo sapiens
  siRNA target sequence for MTR (NM_000254.1,469-487).
gccgctgaaaggcaacaat

SEQ ID NO: 213774 - DNA, 19 bp, Homo sapiens
  siRNA target sequence for MTR (NM_000254.1,471-489).
cgctgaaaggcaacaatga

SEQ ID NO: 213775 - DNA, 19 bp, Homo sapiens
  siRNA target sequence for MTR (NM_000254.1,509-527).
cctgatgtcatttaccaaa

SEQ ID NO: 213776 - DNA, 19 bp, Homo sapiens
  siRNA target sequence for MTR (NM_000254.1,626-644).
gcctaccggatgaacatgt

SEQ ID NO: 213777 - DNA, 19 bp, Homo sapiens
  siRNA target sequence for MTR (NM_000254.1,669-687).
ctgccgaggaggtaactct

SEQ ID NO: 213778 - DNA, 19 bp, Homo sapiens
  siRNA target sequence for MTR (NM_000254.1,718-736).
ggctctgggtccgactaat

SEQ ID NO: 213779 - DNA, 19 bp, Homo sapiens
  siRNA target sequence for MTR (NM_000254.1,719-737).
gctctgggtccgactaata

SEQ ID NO: 213780 - DNA, 19 bp, Homo sapiens
  siRNA target sequence for MTR (NM_000254.1,720-738).
ctctgggtccgactaataa

SEQ ID NO: 213781 - DNA, 19 bp, Homo sapiens
  siRNA target sequence for MTR (NM_000254.1,722-740).
ctgggtccgactaataaga

SEQ ID NO: 213782 - DNA, 19 bp, Homo sapiens
  siRNA target sequence for MTR (NM_000254.1,724-742).
gggtccgactaataagaca

SEQ ID NO: 213783 - DNA, 19 bp, Homo sapiens
  siRNA target sequence for MTR (NM_000254.1,761-779).
gtggaaaggccggattata

SEQ ID NO: 213784 - DNA, 19 bp, Homo sapiens
  siRNA target sequence for MTR (NM_000254.1,764-782).
gaaaggccggattatagga

SEQ ID NO: 213785 - DNA, 19 bp, Homo sapiens
  siRNA target sequence for MTR (NM_000254.1,773-791).
gattataggaacatcacat

SEQ ID NO: 213786 - DNA, 19 bp, Homo sapiens
  siRNA target sequence for MTR (NM_000254.1,799-817).
gcttgttgaagcataccaa

SEQ ID NO: 213787 - DNA, 19 bp, Homo sapiens
  siRNA target sequence for MTR (NM_000254.1,846-864).
gggttgatatcttactcat

SEQ ID NO: 213788 - DNA, 19 bp, Homo sapiens
  siRNA target sequence for MTR (NM_000254.1,847-865).
ggttgatatcttactcatt

SEQ ID NO: 213789 - DNA, 19 bp, Homo sapiens
  siRNA target sequence for MTR (NM_000254.1,960-978).
cagggacgatcgttgataa

SEQ ID NO: 213790 - DNA, 19 bp, Homo sapiens
  siRNA target sequence for MTR (NM_000254.1,962-980).
gggacgatcgttgataaaa

SEQ ID NO: 213791 - DNA, 19 bp, Homo sapiens
  siRNA target sequence for MTR (NM_000254.1,964-982).
gacgatcgttgataaaagt

SEQ ID NO: 213792 - DNA, 19 bp, Homo sapiens
  siRNA target sequence for MTR (NM_000254.1,1072-1090).
gggtgcagctgaaatgaga

SEQ ID NO: 213793 - DNA, 19 bp, Homo sapiens
  siRNA target sequence for MTR (NM_000254.1,1178-1196).
gatgaaacgccttctatga

SEQ ID NO: 213794 - DNA, 19 bp, Homo sapiens
  siRNA target sequence for MTR (NM_000254.1,1200-1218).
ccaagcacctaaaggattt

SEQ ID NO: 213795 - DNA, 19 bp, Homo sapiens
  siRNA target sequence for MTR (NM_000254.1,1204-1222).
gcacctaaaggattttgct

SEQ ID NO: 213796 - DNA, 19 bp, Homo sapiens
  siRNA target sequence for MTR (NM_000254.1,1225-1243).
ggatggcttggtcaatata

SEQ ID NO: 213797 - DNA, 19 bp, Homo sapiens
  siRNA target sequence for MTR (NM_000254.1,1259-1277).
gggtcaacaccagatcata

SEQ ID NO: 213798 - DNA, 19 bp, Homo sapiens
  siRNA target sequence for MTR (NM_000254.1,1260-1278).
ggtcaacaccagatcatat

SEQ ID NO: 213799 - DNA, 19 bp, Homo sapiens
  siRNA target sequence for MTR (NM_000254.1,1323-1341).
cacctgccactgcttttga

SEQ ID NO: 213800 - DNA, 19 bp, Homo sapiens
  siRNA target sequence for MTR (NM_000254.1,1340-1358).
gaaggacatatgttactgt

SEQ ID NO: 213801 - DNA, 19 bp, Homo sapiens
  siRNA target sequence for MTR (NM_000254.1,1383-1401).
gaccgtacaccaactttgt

SEQ ID NO: 213802 - DNA, 19 bp, Homo sapiens
  siRNA target sequence for MTR (NM_000254.1,1385-1403).
ccgtacaccaactttgtta

SEQ ID NO: 213803 - DNA, 19 bp, Homo sapiens
  siRNA target sequence for MTR (NM_000254.1,1405-1423).
cattggagagcgctgtaat

SEQ ID NO: 213804 - DNA, 19 bp, Homo sapiens
  siRNA target sequence for MTR (NM_000254.1,1434-1452).
caaggaagtttgctaaact

SEQ ID NO: 213805 - DNA, 19 bp, Homo sapiens
  siRNA target sequence for MTR (NM_000254.1,1570-1588).
gaccagattttgcaactta

SEQ ID NO: 213806 - DNA, 19 bp, Homo sapiens
  siRNA target sequence for MTR (NM_000254.1,1600-1618).
gccagacatcgcaaaggta

SEQ ID NO: 213807 - DNA, 19 bp, Homo sapiens
  siRNA target sequence for MTR (NM_000254.1,1626-1644).
gcatcgactcctccaattt

SEQ ID NO: 213808 - DNA, 19 bp, Homo sapiens
  siRNA target sequence for MTR (NM_000254.1,1627-1645).
catcgactcctccaatttt

SEQ ID NO: 213809 - DNA, 19 bp, Homo sapiens
  siRNA target sequence for MTR (NM_000254.1,1684-1702).
gtgcattgtcaatagcatt

SEQ ID NO: 213810 - DNA, 19 bp, Homo sapiens
  siRNA target sequence for MTR (NM_000254.1,1687-1705).
cattgtcaatagcattagt

SEQ ID NO: 213811 - DNA, 19 bp, Homo sapiens
  siRNA target sequence for MTR (NM_000254.1,1741-1759).
caggaagattaaaaagtat

SEQ ID NO: 213812 - DNA, 19 bp, Homo sapiens
  siRNA target sequence for MTR (NM_000254.1,1961-1979).
catgcaacaaaagtcatta

SEQ ID NO: 213813 - DNA, 19 bp, Homo sapiens
  siRNA target sequence for MTR (NM_000254.1,2053-2071).
cattcgagaagcaatgcat

SEQ ID NO: 213814 - DNA, 19 bp, Homo sapiens
  siRNA target sequence for MTR (NM_000254.1,2064-2082).
caatgcatggggttttcct

SEQ ID NO: 213815 - DNA, 19 bp, Homo sapiens
  siRNA target sequence for MTR (NM_000254.1,2130-2148).
gaaacctccctgtgtatga

SEQ ID NO: 213816 - DNA, 19 bp, Homo sapiens
  siRNA target sequence for MTR (NM_000254.1,2134-2152).
cctccctgtgtatgatgat

SEQ ID NO: 213817 - DNA, 19 bp, Homo sapiens
  siRNA target sequence for MTR (NM_000254.1,2299-2317).
cgaagaacgccttgagtat

SEQ ID NO: 213818 - DNA, 19 bp, Homo sapiens
  siRNA target sequence for MTR (NM_000254.1,2362-2380).
ggaagccaggttaaaccaa

SEQ ID NO: 213819 - DNA, 19 bp, Homo sapiens
  siRNA target sequence for MTR (NM_000254.1,2390-2408).
ccccgacctctcaatataa

SEQ ID NO: 213820 - DNA, 19 bp, Homo sapiens
  siRNA target sequence for MTR (NM_000254.1,2391-2409).
cccgacctctcaatataat

SEQ ID NO: 213821 - DNA, 19 bp, Homo sapiens
  siRNA target sequence for MTR (NM_000254.1,2392-2410).
ccgacctctcaatataatt

SEQ ID NO: 213822 - DNA, 19 bp, Homo sapiens
  siRNA target sequence for MTR (NM_000254.1,2474-2492).
ctacctcaggttataaagt

SEQ ID NO: 213823 - DNA, 19 bp, Homo sapiens
  siRNA target sequence for MTR (NM_000254.1,2566-2584).
gcttaacggcacagtagaa

SEQ ID NO: 213824 - DNA, 19 bp, Homo sapiens
  siRNA target sequence for MTR (NM_000254.1,2639-2657).
cacgacataggcaagaaca

SEQ ID NO: 213825 - DNA, 19 bp, Homo sapiens
  siRNA target sequence for MTR (NM_000254.1,2641-2659).
cgacataggcaagaacata

SEQ ID NO: 213826 - DNA, 19 bp, Homo sapiens
  siRNA target sequence for MTR (NM_000254.1,2679-2697).
gcaataatttccgagttat

SEQ ID NO: 213827 - DNA, 19 bp, Homo sapiens
  siRNA target sequence for MTR (NM_000254.1,2708-2726).
gtcatgactccatgtgata

SEQ ID NO: 213828 - DNA, 19 bp, Homo sapiens
  siRNA target sequence for MTR (NM_000254.1,2713-2731).
gactccatgtgataagata

SEQ ID NO: 213829 - DNA, 19 bp, Homo sapiens
  siRNA target sequence for MTR (NM_000254.1,2717-2735).
ccatgtgataagatactga

SEQ ID NO: 213830 - DNA, 19 bp, Homo sapiens
  siRNA target sequence for MTR (NM_000254.1,2822-2840).
gaaatggagagattagcta

SEQ ID NO: 213831 - DNA, 19 bp, Homo sapiens
  siRNA target sequence for MTR (NM_000254.1,2838-2856).
ctataaggattccattgtt

SEQ ID NO: 213832 - DNA, 19 bp, Homo sapiens
  siRNA target sequence for MTR (NM_000254.1,2887-2905).
cacagcagttaaaatagct

SEQ ID NO: 213833 - DNA, 19 bp, Homo sapiens
  siRNA target sequence for MTR (NM_000254.1,2910-2928).
gatacagtgcacctgtaat

SEQ ID NO: 213834 - DNA, 19 bp, Homo sapiens
  siRNA target sequence for MTR (NM_000254.1,2914-2932).
cagtgcacctgtaatccat

SEQ ID NO: 213835 - DNA, 19 bp, Homo sapiens
  siRNA target sequence for MTR (NM_000254.1,2971-2989).
gctgttagatgaaaatcta

SEQ ID NO: 213836 - DNA, 19 bp, Homo sapiens
  siRNA target sequence for MTR (NM_000254.1,2972-2990).
ctgttagatgaaaatctaa

SEQ ID NO: 213837 - DNA, 19 bp, Homo sapiens
  siRNA target sequence for MTR (NM_000254.1,3067-3085).
gagatacttacccttaagt

SEQ ID NO: 213838 - DNA, 19 bp, Homo sapiens
  siRNA target sequence for MTR (NM_000254.1,3079-3097).
cttaagtcaagccagaaaa

SEQ ID NO: 213839 - DNA, 19 bp, Homo sapiens
  siRNA target sequence for MTR (NM_000254.1,3134-3152).
ccagtgaagcccacgttta

SEQ ID NO: 213840 - DNA, 19 bp, Homo sapiens
  siRNA target sequence for MTR (NM_000254.1,3159-3177).
cccaggtctttgaagacta

SEQ ID NO: 213841 - DNA, 19 bp, Homo sapiens
  siRNA target sequence for MTR (NM_000254.1,3191-3209).
ctggtggactacattgact

SEQ ID NO: 213842 - DNA, 19 bp, Homo sapiens
  siRNA target sequence for MTR (NM_000254.1,3257-3275).
cgaggctttcccaagatat

SEQ ID NO: 213843 - DNA, 19 bp, Homo sapiens
  siRNA target sequence for MTR (NM_000254.1,3337-3355).
gaacacactgattagtcaa

SEQ ID NO: 213844 - DNA, 19 bp, Homo sapiens
  siRNA target sequence for MTR (NM_000254.1,3402-3420).
gtatccaagacgacattca

SEQ ID NO: 213845 - DNA, 19 bp, Homo sapiens
  siRNA target sequence for MTR (NM_000254.1,3457-3475).
gcccatagccaccttctat

SEQ ID NO: 213846 - DNA, 19 bp, Homo sapiens
  siRNA target sequence for MTR (NM_000254.1,3507-3525).
ccagcacggagccatacta

SEQ ID NO: 213847 - DNA, 19 bp, Homo sapiens
  siRNA target sequence for MTR (NM_000254.1,3875-3893).
cagtctacaggcattaggt

SEQ ID NO: 213848 - DNA, 19 bp, Homo sapiens
  siRNA target sequence for MTR (NM_000254.1,3877-3895).
gtctacaggcattaggtta

SEQ ID NO: 213849 - DNA, 19 bp, Homo sapiens
  siRNA target sequence for MTR (NM_000254.1,3927-3945).
cagtctcaggcctctactt

SEQ ID NO: 213850 - DNA, 19 bp, Homo sapiens
  siRNA target sequence for MTR (NM_000254.1,3938-3956).
ctctacttctccaatttga

SEQ ID NO: 213851 - DNA, 19 bp, Homo sapiens
  siRNA target sequence for MTR (NM_000254.1,3948-3966).
ccaatttgaagtccaaata

SEQ ID NO: 213852 - DNA, 19 bp, Homo sapiens
  siRNA target sequence for MTR (NM_000254.1,3949-3967).
caatttgaagtccaaatat

SEQ ID NO: 213853 - DNA, 19 bp, Homo sapiens
  siRNA target sequence for MTR (NM_000254.1,3995-4013).
caggttgaggattatgcat

SEQ ID NO: 213854 - DNA, 19 bp, Homo sapiens
  siRNA target sequence for MTR (NM_000254.1,4058-4076).
cccattttgggatatgata

SEQ ID NO: 213855 - DNA, 19 bp, Homo sapiens
  siRNA target sequence for METTL1 (NM_005371.3,678-696).
ctgttcccagacacactta

SEQ ID NO: 213856 - DNA, 19 bp, Homo sapiens
  siRNA target sequence for METTL1 (NM_005371.3,811-829).
ccatgaagcaccttcctaa

SEQ ID NO: 213857 - DNA, 19 bp, Homo sapiens
  siRNA target sequence for METTL1 (NM_005371.3,822-840).
cttcctaacttcttctaca

SEQ ID NO: 213858 - DNA, 19 bp, Homo sapiens
  siRNA target sequence for METTL1 (NM_005371.3,963-981).
gggctggtgtataccataa

SEQ ID NO: 213859 - DNA, 19 bp, Homo sapiens
  siRNA target sequence for HSA9761 (NM_014473.1,149-167).
gcgctggaggactcatgtt

SEQ ID NO: 213860 - DNA, 19 bp, Homo sapiens
  siRNA target sequence for HSA9761 (NM_014473.1,225-243).
cgataaggctgccttaaga

SEQ ID NO: 213861 - DNA, 19 bp, Homo sapiens
  siRNA target sequence for HSA9761 (NM_014473.1,237-255).
cttaagaccaactgatgta

SEQ ID NO: 213862 - DNA, 19 bp, Homo sapiens
  siRNA target sequence for HSA9761 (NM_014473.1,271-289).
cctggaactggcaacatga

SEQ ID NO: 213863 - DNA, 19 bp, Homo sapiens
  siRNA target sequence for HSA9761 (NM_014473.1,281-299).
gcaacatgactgtaaagtt

SEQ ID NO: 213864 - DNA, 19 bp, Homo sapiens
  siRNA target sequence for HSA9761 (NM_014473.1,285-303).
catgactgtaaagttgtta

SEQ ID NO: 213865 - DNA, 19 bp, Homo sapiens
  siRNA target sequence for HSA9761 (NM_014473.1,318-336).
ggttgttgcttgtgaactt

SEQ ID NO: 213866 - DNA, 19 bp, Homo sapiens
  siRNA target sequence for HSA9761 (NM_014473.1,344-362).
ggctagtagctgaacttca

SEQ ID NO: 213867 - DNA, 19 bp, Homo sapiens
  siRNA target sequence for HSA9761 (NM_014473.1,445-463).
gatacttgtgtggcaaatt

SEQ ID NO: 213868 - DNA, 19 bp, Homo sapiens
  siRNA target sequence for HSA9761 (NM_014473.1,501-519).
gttgctacatcgacctttt

SEQ ID NO: 213869 - DNA, 19 bp, Homo sapiens
  siRNA target sequence for HSA9761 (NM_014473.1,527-545).
gtgctatacttatgtttca

SEQ ID NO: 213870 - DNA, 19 bp, Homo sapiens
  siRNA target sequence for HSA9761 (NM_014473.1,529-547).
gctatacttatgtttcaaa

SEQ ID NO: 213871 - DNA, 19 bp, Homo sapiens
  siRNA target sequence for HSA9761 (NM_014473.1,557-575).
ccctccgactggttgcaaa

SEQ ID NO: 213872 - DNA, 19 bp, Homo sapiens
  siRNA target sequence for HSA9761 (NM_014473.1,558-576).
cctccgactggttgcaaaa

SEQ ID NO: 213873 - DNA, 19 bp, Homo sapiens
  siRNA target sequence for HSA9761 (NM_014473.1,572-590).
caaaacctggagataagtt

SEQ ID NO: 213874 - DNA, 19 bp, Homo sapiens
  siRNA target sequence for HSA9761 (NM_014473.1,577-595).
cctggagataagttatact

SEQ ID NO: 213875 - DNA, 19 bp, Homo sapiens
  siRNA target sequence for HSA9761 (NM_014473.1,597-615).
cagactctcaattaataca

SEQ ID NO: 213876 - DNA, 19 bp, Homo sapiens
  siRNA target sequence for HSA9761 (NM_014473.1,625-643).
gcacgtgtggaccatctaa

SEQ ID NO: 213877 - DNA, 19 bp, Homo sapiens
  siRNA target sequence for HSA9761 (NM_014473.1,626-644).
cacgtgtggaccatctaat

SEQ ID NO: 213878 - DNA, 19 bp, Homo sapiens
  siRNA target sequence for HSA9761 (NM_014473.1,628-646).
cgtgtggaccatctaatga

SEQ ID NO: 213879 - DNA, 19 bp, Homo sapiens
  siRNA target sequence for HSA9761 (NM_014473.1,681-699).
ggtggaatccagtgttgta

SEQ ID NO: 213880 - DNA, 19 bp, Homo sapiens
  siRNA target sequence for HSA9761 (NM_014473.1,690-708).
cagtgttgtaaggatagaa

SEQ ID NO: 213881 - DNA, 19 bp, Homo sapiens
  siRNA target sequence for HSA9761 (NM_014473.1,747-765).
ggatggtctagtaaggata

SEQ ID NO: 213882 - DNA, 19 bp, Homo sapiens
  siRNA target sequence for HSA9761 (NM_014473.1,751-769).
ggtctagtaaggataacct

SEQ ID NO: 213883 - DNA, 19 bp, Homo sapiens
  siRNA target sequence for HSA9761 (NM_014473.1,761-779).
ggataacctttgttaggaa

SEQ ID NO: 213884 - DNA, 19 bp, Homo sapiens
  siRNA target sequence for HSA9761 (NM_014473.1,792-810).
ctctgctgcatttaaatca

SEQ ID NO: 213885 - DNA, 19 bp, Homo sapiens
  siRNA target sequence for HSA9761 (NM_014473.1,850-868).
cactgttcagtccataata

SEQ ID NO: 213886 - DNA, 19 bp, Homo sapiens
  siRNA target sequence for HSA9761 (NM_014473.1,852-870).
ctgttcagtccataatatt

SEQ ID NO: 213887 - DNA, 19 bp, Homo sapiens
  siRNA target sequence for HSA9761 (NM_014473.1,854-872).
gttcagtccataatattat

SEQ ID NO: 213888 - DNA, 19 bp, Homo sapiens
  siRNA target sequence for HSA9761 (NM_014473.1,920-938).
ccagcacaggttttagtga

SEQ ID NO: 213889 - DNA, 19 bp, Homo sapiens
  siRNA target sequence for HSA9761 (NM_014473.1,947-965).
cccgttccatggacataga

SEQ ID NO: 213890 - DNA, 19 bp, Homo sapiens
  siRNA target sequence for HSA9761 (NM_014473.1,953-971).
ccatggacatagatgactt

SEQ ID NO: 213891 - DNA, 19 bp, Homo sapiens
  siRNA target sequence for TFB1M (NM_016020.1,118-136).
cccacgattcgagaaatca

SEQ ID NO: 213892 - DNA, 19 bp, Homo sapiens
  siRNA target sequence for TFB1M (NM_016020.1,119-137).
ccacgattcgagaaatcat

SEQ ID NO: 213893 - DNA, 19 bp, Homo sapiens
  siRNA target sequence for TFB1M (NM_016020.1,120-138).
cacgattcgagaaatcatt

SEQ ID NO: 213894 - DNA, 19 bp, Homo sapiens
  siRNA target sequence for TFB1M (NM_016020.1,122-140).
cgattcgagaaatcattaa

SEQ ID NO: 213895 - DNA, 19 bp, Homo sapiens
  siRNA target sequence for TFB1M (NM_016020.1,190-208).
gacttgaggctgacagata

SEQ ID NO: 213896 - DNA, 19 bp, Homo sapiens
  siRNA target sequence for TFB1M (NM_016020.1,198-216).
gctgacagataagattgta

SEQ ID NO: 213897 - DNA, 19 bp, Homo sapiens
  siRNA target sequence for TFB1M (NM_016020.1,199-217).
ctgacagataagattgtaa

SEQ ID NO: 213898 - DNA, 19 bp, Homo sapiens
  siRNA target sequence for TFB1M (NM_016020.1,203-221).
cagataagattgtaaggaa

SEQ ID NO: 213899 - DNA, 19 bp, Homo sapiens
  siRNA target sequence for TFB1M (NM_016020.1,265-283).
gggccagggggaatcacaa

SEQ ID NO: 213900 - DNA, 19 bp, Homo sapiens
  siRNA target sequence for TFB1M (NM_016020.1,279-297).
cacaagatctattcttaat

SEQ ID NO: 213901 - DNA, 19 bp, Homo sapiens
  siRNA target sequence for TFB1M (NM_016020.1,299-317).
ccgacgtcgctgaacttct

SEQ ID NO: 213902 - DNA, 19 bp, Homo sapiens
  siRNA target sequence for TFB1M (NM_016020.1,325-343).
gaaaaggacactcgattta

SEQ ID NO: 213903 - DNA, 19 bp, Homo sapiens
  siRNA target sequence for TFB1M (NM_016020.1,330-348).
ggacactcgatttattcct

SEQ ID NO: 213904 - DNA, 19 bp, Homo sapiens
  siRNA target sequence for TFB1M (NM_016020.1,346-364).
cctggattacagatgcttt

SEQ ID NO: 213905 - DNA, 19 bp, Homo sapiens
  siRNA target sequence for TFB1M (NM_016020.1,397-415).
catggagatgtcttgacat

SEQ ID NO: 213906 - DNA, 19 bp, Homo sapiens
  siRNA target sequence for TFB1M (NM_016020.1,429-447).
ggctttttcagaaagtctt

SEQ ID NO: 213907 - DNA, 19 bp, Homo sapiens
  siRNA target sequence for TFB1M (NM_016020.1,466-484).
gatcctccaaatgtacata

SEQ ID NO: 213908 - DNA, 19 bp, Homo sapiens
  siRNA target sequence for TFB1M (NM_016020.1,469-487).
cctccaaatgtacatatta

SEQ ID NO: 213909 - DNA, 19 bp, Homo sapiens
  siRNA target sequence for TFB1M (NM_016020.1,496-514).
ctgccttttagtgtttcaa

SEQ ID NO: 213910 - DNA, 19 bp, Homo sapiens
  siRNA target sequence for TFB1M (NM_016020.1,508-526).
gtttcaactccactgatta

SEQ ID NO: 213911 - DNA, 19 bp, Homo sapiens
  siRNA target sequence for TFB1M (NM_016020.1,512-530).
caactccactgattatcaa

SEQ ID NO: 213912 - DNA, 19 bp, Homo sapiens
  siRNA target sequence for TFB1M (NM_016020.1,549-567).
ctgtagagatggacctttt

SEQ ID NO: 213913 - DNA, 19 bp, Homo sapiens
  siRNA target sequence for TFB1M (NM_016020.1,590-608).
ctttgacttttcaaaagga

SEQ ID NO: 213914 - DNA, 19 bp, Homo sapiens
  siRNA target sequence for TFB1M (NM_016020.1,618-636).
gagacttgcagccaataca

SEQ ID NO: 213915 - DNA, 19 bp, Homo sapiens
  siRNA target sequence for TFB1M (NM_016020.1,649-667).
cgtagtcgcctctctgtta

SEQ ID NO: 213916 - DNA, 19 bp, Homo sapiens
  siRNA target sequence for TFB1M (NM_016020.1,650-668).
gtagtcgcctctctgttat

SEQ ID NO: 213917 - DNA, 19 bp, Homo sapiens
  siRNA target sequence for TFB1M (NM_016020.1,683-701).
gcaatgttcgacacatctt

SEQ ID NO: 213918 - DNA, 19 bp, Homo sapiens
  siRNA target sequence for TFB1M (NM_016020.1,684-702).
caatgttcgacacatcttt

SEQ ID NO: 213919 - DNA, 19 bp, Homo sapiens
  siRNA target sequence for TFB1M (NM_016020.1,756-774).
gcacttcactcccttgata

SEQ ID NO: 213920 - DNA, 19 bp, Homo sapiens
  siRNA target sequence for TFB1M (NM_016020.1,817-835).
gttcagaatgtatttcagt

SEQ ID NO: 213921 - DNA, 19 bp, Homo sapiens
  siRNA target sequence for TFB1M (NM_016020.1,832-850).
cagttccgaaggaaatact

SEQ ID NO: 213922 - DNA, 19 bp, Homo sapiens
  siRNA target sequence for TFB1M (NM_016020.1,851-869).
gccatcgagggctcagaat

SEQ ID NO: 213923 - DNA, 19 bp, Homo sapiens
  siRNA target sequence for TFB1M (NM_016020.1,853-871).
catcgagggctcagaatgt

SEQ ID NO: 213924 - DNA, 19 bp, Homo sapiens
  siRNA target sequence for TFB1M (NM_016020.1,880-898).
gaagcgcagcgcttggaaa

SEQ ID NO: 213925 - DNA, 19 bp, Homo sapiens
  siRNA target sequence for TFB1M (NM_016020.1,912-930).
gttagagttggcagacata

SEQ ID NO: 213926 - DNA, 19 bp, Homo sapiens
  siRNA target sequence for TFB1M (NM_016020.1,1012-1030).
gacccacaactctttgcat

SEQ ID NO: 213927 - DNA, 19 bp, Homo sapiens
  siRNA target sequence for TFB1M (NM_016020.1,1014-1032).
cccacaactctttgcatat

SEQ ID NO: 213928 - DNA, 19 bp, Homo sapiens
  siRNA target sequence for FLJ10140 (NM_018006.2,139-157).
caggtgacaggggtgttta

SEQ ID NO: 213929 - DNA, 19 bp, Homo sapiens
  siRNA target sequence for FLJ10140 (NM_018006.2,142-160).
gtgacaggggtgtttatga

SEQ ID NO: 213930 - DNA, 19 bp, Homo sapiens
  siRNA target sequence for FLJ10140 (NM_018006.2,168-186).
ggactcactggatgaacat

SEQ ID NO: 213931 - DNA, 19 bp, Homo sapiens
  siRNA target sequence for FLJ10140 (NM_018006.2,225-243).
cagagtttgccagatctta

SEQ ID NO: 213932 - DNA, 19 bp, Homo sapiens
  siRNA target sequence for FLJ10140 (NM_018006.2,227-245).
gagtttgccagatcttaga

SEQ ID NO: 213933 - DNA, 19 bp, Homo sapiens
  siRNA target sequence for FLJ10140 (NM_018006.2,353-371).
gcaacaagcacatcaaatt

SEQ ID NO: 213934 - DNA, 19 bp, Homo sapiens
  siRNA target sequence for FLJ10140 (NM_018006.2,357-375).
caagcacatcaaatttagt

SEQ ID NO: 213935 - DNA, 19 bp, Homo sapiens
  siRNA target sequence for FLJ10140 (NM_018006.2,417-435).
cattgccacaggtcactat

SEQ ID NO: 213936 - DNA, 19 bp, Homo sapiens
  siRNA target sequence for FLJ10140 (NM_018006.2,427-445).
ggtcactatgcaagaactt

SEQ ID NO: 213937 - DNA, 19 bp, Homo sapiens
  siRNA target sequence for FLJ10140 (NM_018006.2,469-487).
gagcagaagcacgttaaga

SEQ ID NO: 213938 - DNA, 19 bp, Homo sapiens
  siRNA target sequence for FLJ10140 (NM_018006.2,548-566).
cagctgacagctttaaaga

SEQ ID NO: 213939 - DNA, 19 bp, Homo sapiens
  siRNA target sequence for FLJ10140 (NM_018006.2,565-583).
gaccagaccttctttctca

SEQ ID NO: 213940 - DNA, 19 bp, Homo sapiens
  siRNA target sequence for FLJ10140 (NM_018006.2,628-646).
gggggattaacgaaagagt

SEQ ID NO: 213941 - DNA, 19 bp, Homo sapiens
  siRNA target sequence for FLJ10140 (NM_018006.2,629-647).
ggggattaacgaaagagtt

SEQ ID NO: 213942 - DNA, 19 bp, Homo sapiens
  siRNA target sequence for FLJ10140 (NM_018006.2,630-648).
gggattaacgaaagagttt

SEQ ID NO: 213943 - DNA, 19 bp, Homo sapiens
  siRNA target sequence for FLJ10140 (NM_018006.2,632-650).
gattaacgaaagagtttgt

SEQ ID NO: 213944 - DNA, 19 bp, Homo sapiens
  siRNA target sequence for FLJ10140 (NM_018006.2,654-672).
gaaaatcgctgctgagaat

SEQ ID NO: 213945 - DNA, 19 bp, Homo sapiens
  siRNA target sequence for FLJ10140 (NM_018006.2,660-678).
cgctgctgagaatagactt

SEQ ID NO: 213946 - DNA, 19 bp, Homo sapiens
  siRNA target sequence for FLJ10140 (NM_018006.2,765-783).
gcctcgacctggtcacttt

SEQ ID NO: 213947 - DNA, 19 bp, Homo sapiens
  siRNA target sequence for FLJ10140 (NM_018006.2,766-784).
cctcgacctggtcacttta

SEQ ID NO: 213948 - DNA, 19 bp, Homo sapiens
  siRNA target sequence for FLJ10140 (NM_018006.2,767-785).
ctcgacctggtcactttat

SEQ ID NO: 213949 - DNA, 19 bp, Homo sapiens
  siRNA target sequence for FLJ10140 (NM_018006.2,788-806).
ccatagaagacaataaggt

SEQ ID NO: 213950 - DNA, 19 bp, Homo sapiens
  siRNA target sequence for FLJ10140 (NM_018006.2,789-807).
catagaagacaataaggtt

SEQ ID NO: 213951 - DNA, 19 bp, Homo sapiens
  siRNA target sequence for FLJ10140 (NM_018006.2,823-841).
ggttggttcctgtatacct

SEQ ID NO: 213952 - DNA, 19 bp, Homo sapiens
  siRNA target sequence for FLJ10140 (NM_018006.2,824-842).
gttggttcctgtatacctt

SEQ ID NO: 213953 - DNA, 19 bp, Homo sapiens
  siRNA target sequence for FLJ10140 (NM_018006.2,1010-1028).
cactggtccgggacaagat

SEQ ID NO: 213954 - DNA, 19 bp, Homo sapiens
  siRNA target sequence for FLJ10140 (NM_018006.2,1076-1094).
gtgtgctgaccctcaatca

SEQ ID NO: 213955 - DNA, 19 bp, Homo sapiens
  siRNA target sequence for ICMT (NM_012405.2,297-315).
gcggcacgctgctaagttt

SEQ ID NO: 213956 - DNA, 19 bp, Homo sapiens
  siRNA target sequence for ICMT (NM_012405.2,298-316).
cggcacgctgctaagtttt

SEQ ID NO: 213957 - DNA, 19 bp, Homo sapiens
  siRNA target sequence for ICMT (NM_012405.2,299-317).
ggcacgctgctaagtttta

SEQ ID NO: 213958 - DNA, 19 bp, Homo sapiens
  siRNA target sequence for ICMT (NM_012405.2,335-353).
cactttggctggtacatgt

SEQ ID NO: 213959 - DNA, 19 bp, Homo sapiens
  siRNA target sequence for ICMT (NM_012405.2,363-381).
cattgttccactattctga

SEQ ID NO: 213960 - DNA, 19 bp, Homo sapiens
  siRNA target sequence for ICMT (NM_012405.2,445-463).
cagcctggagtatacagta

SEQ ID NO: 213961 - DNA, 19 bp, Homo sapiens
  siRNA target sequence for ICMT (NM_012405.2,470-488).
ctttcttcttggttagagt

SEQ ID NO: 213962 - DNA, 19 bp, Homo sapiens
  siRNA target sequence for ICMT (NM_012405.2,490-508).
cacacttgaaaatatcttt

SEQ ID NO: 213963 - DNA, 19 bp, Homo sapiens
  siRNA target sequence for ICMT (NM_012405.2,620-638).
cacgtggtacagaatgaaa

SEQ ID NO: 213964 - DNA, 19 bp, Homo sapiens
  siRNA target sequence for ICMT (NM_012405.2,622-640).
cgtggtacagaatgaaaaa

SEQ ID NO: 213965 - DNA, 19 bp, Homo sapiens
  siRNA target sequence for ICMT (NM_012405.2,635-653).
gaaaaatcagatacacata

SEQ ID NO: 213966 - DNA, 19 bp, Homo sapiens
  siRNA target sequence for ICMT (NM_012405.2,681-699).
ggtttcggcatccttctta

SEQ ID NO: 213967 - DNA, 19 bp, Homo sapiens
  siRNA target sequence for ICMT (NM_012405.2,696-714).
cttacgtcgggtggtttta

SEQ ID NO: 213968 - DNA, 19 bp, Homo sapiens
  siRNA target sequence for ICMT (NM_012405.2,790-808).
cttccgcgatcgaacagaa

SEQ ID NO: 213969 - DNA, 19 bp, Homo sapiens
  siRNA target sequence for ICMT (NM_012405.2,795-813).
gcgatcgaacagaagaaga

SEQ ID NO: 213970 - DNA, 19 bp, Homo sapiens
  siRNA target sequence for ICMT (NM_012405.2,876-894).
cgggcctgcctttcataaa

SEQ ID NO: 213971 - DNA, 19 bp, Homo sapiens
  siRNA target sequence for PEMT (NM_007169.2,516-534).
gttcgctggaactttccta

SEQ ID NO: 213972 - DNA, 19 bp, Homo sapiens
  siRNA target sequence for PEMT (NM_007169.2,524-542).
gaactttcctaggtgatta

SEQ ID NO: 213973 - DNA, 19 bp, Homo sapiens
  siRNA target sequence for PEMT (NM_007169.2,527-545).
ctttcctaggtgattactt

SEQ ID NO: 213974 - DNA, 19 bp, Homo sapiens
  siRNA target sequence for PEMT (NM_007169.2,684-702).
ggtggccctcacctacata

SEQ ID NO: 213975 - DNA, 19 bp, Homo sapiens
  siRNA target sequence for PEMT (NM_148172.1,74-92).
cgggagccgaggtaacgaa

SEQ ID NO: 213976 - DNA, 19 bp, Homo sapiens
  siRNA target sequence for PEMT (NM_148172.1,122-140).
gaggcctcggcaatattga

SEQ ID NO: 213977 - DNA, 19 bp, Homo sapiens
  siRNA target sequence for PEMT (NM_148172.1,124-142).
ggcctcggcaatattgatt

SEQ ID NO: 213978 - DNA, 19 bp, Homo sapiens
  siRNA target sequence for PEMT (NM_148172.1,125-143).
gcctcggcaatattgattt

SEQ ID NO: 213979 - DNA, 19 bp, Homo sapiens
  siRNA target sequence for PEMT (NM_148172.1,127-145).
ctcggcaatattgatttta

SEQ ID NO: 213980 - DNA, 19 bp, Homo sapiens
  siRNA target sequence for PEMT (NM_148172.1,129-147).
cggcaatattgattttaga

SEQ ID NO: 213981 - DNA, 19 bp, Homo sapiens
  siRNA target sequence for PNMT (NM_002686.2,323-341).
cctacctccgcaacaacta

SEQ ID NO: 213982 - DNA, 19 bp, Homo sapiens
  siRNA target sequence for PNMT (NM_002686.2,488-506).
gtgcctgcagccactttga

SEQ ID NO: 213983 - DNA, 19 bp, Homo sapiens
  siRNA target sequence for PNMT (NM_002686.2,632-650).
gggaatgctggcaggataa

SEQ ID NO: 213984 - DNA, 19 bp, Homo sapiens
  siRNA target sequence for PNMT (NM_002686.2,973-991).
cgggacctccgcacctata

SEQ ID NO: 213985 - DNA, 19 bp, Homo sapiens
  siRNA target sequence for PNMT (NM_002686.2,974-992).
gggacctccgcacctatat

SEQ ID NO: 213986 - DNA, 19 bp, Homo sapiens
  siRNA target sequence for PNMT (NM_002686.2,976-994).
gacctccgcacctatatca

SEQ ID NO: 213987 - DNA, 19 bp, Homo sapiens
  siRNA target sequence for COQ3 (NM_017421.2,57-75).
ggggttggtttttaagagt

SEQ ID NO: 213988 - DNA, 19 bp, Homo sapiens
  siRNA target sequence for COQ3 (NM_017421.2,104-122).
gctgcgcgtcccttaattt

SEQ ID NO: 213989 - DNA, 19 bp, Homo sapiens
  siRNA target sequence for COQ3 (NM_017421.2,107-125).
gcgcgtcccttaatttcct

SEQ ID NO: 213990 - DNA, 19 bp, Homo sapiens
  siRNA target sequence for COQ3 (NM_017421.2,123-141).
cctcggcggtttatgtgaa

SEQ ID NO: 213991 - DNA, 19 bp, Homo sapiens
  siRNA target sequence for COQ3 (NM_017421.2,174-192).
caggggttttcaatgaata

SEQ ID NO: 213992 - DNA, 19 bp, Homo sapiens
  siRNA target sequence for COQ3 (NM_017421.2,176-194).
ggggttttcaatgaataca

SEQ ID NO: 213993 - DNA, 19 bp, Homo sapiens
  siRNA target sequence for COQ3 (NM_017421.2,184-202).
caatgaatacagaaccata

SEQ ID NO: 213994 - DNA, 19 bp, Homo sapiens
  siRNA target sequence for COQ3 (NM_017421.2,188-206).
gaatacagaaccatatggt

SEQ ID NO: 213995 - DNA, 19 bp, Homo sapiens
  siRNA target sequence for COQ3 (NM_017421.2,198-216).
ccatatggttcaaatccta

SEQ ID NO: 213996 - DNA, 19 bp, Homo sapiens
  siRNA target sequence for COQ3 (NM_017421.2,222-240).
cgatcttttcctgtttgaa

SEQ ID NO: 213997 - DNA, 19 bp, Homo sapiens
  siRNA target sequence for COQ3 (NM_017421.2,269-287).
gcgagactgtacagtactt

SEQ ID NO: 213998 - DNA, 19 bp, Homo sapiens
  siRNA target sequence for COQ3 (NM_017421.2,301-319).
cgacagcggtgaggtaaaa

SEQ ID NO: 213999 - DNA, 19 bp, Homo sapiens
  siRNA target sequence for COQ3 (NM_017421.2,306-324).
gcggtgaggtaaaaacctt

SEQ ID NO: 214000 - DNA, 19 bp, Homo sapiens
  siRNA target sequence for COQ3 (NM_017421.2,348-366).
gggatgaacaaggagtata

SEQ ID NO: 214001 - DNA, 19 bp, Homo sapiens
  siRNA target sequence for COQ3 (NM_017421.2,362-380).
gtatatgcacctcttcatt

SEQ ID NO: 214002 - DNA, 19 bp, Homo sapiens
  siRNA target sequence for COQ3 (NM_017421.2,389-407).
gacctgagggtgccattta

SEQ ID NO: 214003 - DNA, 19 bp, Homo sapiens
  siRNA target sequence for COQ3 (NM_017421.2,402-420).
catttattagggacaatct

SEQ ID NO: 214004 - DNA, 19 bp, Homo sapiens
  siRNA target sequence for COQ3 (NM_017421.2,412-430).
ggacaatcttctgaaaaca

SEQ ID NO: 214005 - DNA, 19 bp, Homo sapiens
  siRNA target sequence for COQ3 (NM_017421.2,492-510).
gtggtgggctgttaactga

SEQ ID NO: 214006 - DNA, 19 bp, Homo sapiens
  siRNA target sequence for COQ3 (NM_017421.2,521-539).
cggcttggggcttcagtta

SEQ ID NO: 214007 - DNA, 19 bp, Homo sapiens
  siRNA target sequence for COQ3 (NM_017421.2,523-541).
gcttggggcttcagttatt

SEQ ID NO: 214008 - DNA, 19 bp, Homo sapiens
  siRNA target sequence for COQ3 (NM_017421.2,576-594).
cacaatgccataaatcatt

SEQ ID NO: 214009 - DNA, 19 bp, Homo sapiens
  siRNA target sequence for COQ3 (NM_017421.2,596-614).
gatccagtcctggataaga

SEQ ID NO: 214010 - DNA, 19 bp, Homo sapiens
  siRNA target sequence for COQ3 (NM_017421.2,707-725).
gtgattgatctagaaacat

SEQ ID NO: 214011 - DNA, 19 bp, Homo sapiens
  siRNA target sequence for COQ3 (NM_017421.2,755-773).
cccggtggttctttattca

SEQ ID NO: 214012 - DNA, 19 bp, Homo sapiens
  siRNA target sequence for COQ3 (NM_017421.2,756-774).
ccggtggttctttattcat

SEQ ID NO: 214013 - DNA, 19 bp, Homo sapiens
  siRNA target sequence for COQ3 (NM_017421.2,757-775).
cggtggttctttattcatt

SEQ ID NO: 214014 - DNA, 19 bp, Homo sapiens
  siRNA target sequence for COQ3 (NM_017421.2,758-776).
ggtggttctttattcatta

SEQ ID NO: 214015 - DNA, 19 bp, Homo sapiens
  siRNA target sequence for COQ3 (NM_017421.2,801-819).
cctatgccttgggaattgt

SEQ ID NO: 214016 - DNA, 19 bp, Homo sapiens
  siRNA target sequence for COQ3 (NM_017421.2,802-820).
ctatgccttgggaattgtt

SEQ ID NO: 214017 - DNA, 19 bp, Homo sapiens
  siRNA target sequence for COQ3 (NM_017421.2,825-843).
cagagcaaattgcaagtat

SEQ ID NO: 214018 - DNA, 19 bp, Homo sapiens
  siRNA target sequence for COQ3 (NM_017421.2,845-863).
gtaccaaaaggtactcata

SEQ ID NO: 214019 - DNA, 19 bp, Homo sapiens
  siRNA target sequence for COQ3 (NM_017421.2,918-936).
gtctgtcagttcaaacagt

SEQ ID NO: 214020 - DNA, 19 bp, Homo sapiens
  siRNA target sequence for COQ3 (NM_017421.2,935-953).
gtggtaggaatgctctata

SEQ ID NO: 214021 - DNA, 19 bp, Homo sapiens
  siRNA target sequence for COQ3 (NM_017421.2,1045-1063).
ctctgctgagtttgtttta

SEQ ID NO: 214022 - DNA, 19 bp, Homo sapiens
  siRNA target sequence for COQ3 (NM_017421.2,1107-1125).
cagctgtgcatgaaaagct

SEQ ID NO: 214023 - DNA, 19 bp, Homo sapiens
  siRNA target sequence for CGI-30 (NM_015958.1,190-208).
gctgcagtcgagtgtatct

SEQ ID NO: 214024 - DNA, 19 bp, Homo sapiens
  siRNA target sequence for CGI-30 (NM_015958.1,218-236).
cacctcagtcctaactgta

SEQ ID NO: 214025 - DNA, 19 bp, Homo sapiens
  siRNA target sequence for CGI-30 (NM_015958.1,387-405).
cacagtgatcttgttctaa

SEQ ID NO: 214026 - DNA, 19 bp, Homo sapiens
  siRNA target sequence for CGI-30 (NM_015958.1,389-407).
cagtgatcttgttctaaga

SEQ ID NO: 214027 - DNA, 19 bp, Homo sapiens
  siRNA target sequence for CGI-30 (NM_015958.1,412-430).
caaagctgggaattcctta

SEQ ID NO: 214028 - DNA, 19 bp, Homo sapiens
  siRNA target sequence for CGI-30 (NM_015958.1,416-434).
gctgggaattccttataga

SEQ ID NO: 214029 - DNA, 19 bp, Homo sapiens
  siRNA target sequence for CGI-30 (NM_015958.1,420-438).
ggaattccttatagagtta

SEQ ID NO: 214030 - DNA, 19 bp, Homo sapiens
  siRNA target sequence for CGI-30 (NM_015958.1,421-439).
gaattccttatagagttat

SEQ ID NO: 214031 - DNA, 19 bp, Homo sapiens
  siRNA target sequence for CGI-30 (NM_015958.1,426-444).
ccttatagagttattcaca

SEQ ID NO: 214032 - DNA, 19 bp, Homo sapiens
  siRNA target sequence for CGI-30 (NM_015958.1,469-487).
gctgctgtggtttacagtt

SEQ ID NO: 214033 - DNA, 19 bp, Homo sapiens
  siRNA target sequence for CGI-30 (NM_015958.1,511-529).
ctattatgctgatatcagt

SEQ ID NO: 214034 - DNA, 19 bp, Homo sapiens
  siRNA target sequence for CGI-30 (NM_015958.1,574-592).
gaccagaaagcttctttga

SEQ ID NO: 214035 - DNA, 19 bp, Homo sapiens
  siRNA target sequence for CGI-30 (NM_015958.1,618-636).
ggcatgcacacattatgtt

SEQ ID NO: 214036 - DNA, 19 bp, Homo sapiens
  siRNA target sequence for CGI-30 (NM_015958.1,619-637).
gcatgcacacattatgttt

SEQ ID NO: 214037 - DNA, 19 bp, Homo sapiens
  siRNA target sequence for CGI-30 (NM_015958.1,620-638).
catgcacacattatgttta

SEQ ID NO: 214038 - DNA, 19 bp, Homo sapiens
  siRNA target sequence for CGI-30 (NM_015958.1,623-641).
gcacacattatgtttacta

SEQ ID NO: 214039 - DNA, 19 bp, Homo sapiens
  siRNA target sequence for CGI-30 (NM_015958.1,634-652).
gtttactagacatcaaagt

SEQ ID NO: 214040 - DNA, 19 bp, Homo sapiens
  siRNA target sequence for CGI-30 (NM_015958.1,699-717).
gaacctccacggtatatga

SEQ ID NO: 214041 - DNA, 19 bp, Homo sapiens
  siRNA target sequence for CGI-30 (NM_015958.1,706-724).
cacggtatatgagtgtaaa

SEQ ID NO: 214042 - DNA, 19 bp, Homo sapiens
  siRNA target sequence for CGI-30 (NM_015958.1,709-727).
ggtatatgagtgtaaacca

SEQ ID NO: 214043 - DNA, 19 bp, Homo sapiens
  siRNA target sequence for CGI-30 (NM_015958.1,741-759).
cttctggagattgttcaaa

SEQ ID NO: 214044 - DNA, 19 bp, Homo sapiens
  siRNA target sequence for CGI-30 (NM_015958.1,749-767).
gattgttcaaaatcaaaga

SEQ ID NO: 214045 - DNA, 19 bp, Homo sapiens
  siRNA target sequence for CGI-30 (NM_015958.1,789-807).
gttaccgaggagacacttt

SEQ ID NO: 214046 - DNA, 19 bp, Homo sapiens
  siRNA target sequence for CGI-30 (NM_015958.1,793-811).
ccgaggagacactttgtgt

SEQ ID NO: 214047 - DNA, 19 bp, Homo sapiens
  siRNA target sequence for CGI-30 (NM_015958.1,828-846).
ggagccgacgaccagaaaa

SEQ ID NO: 214048 - DNA, 19 bp, Homo sapiens
  siRNA target sequence for CGI-30 (NM_015958.1,829-847).
gagccgacgaccagaaaat

SEQ ID NO: 214049 - DNA, 19 bp, Homo sapiens
  siRNA target sequence for CGI-30 (NM_015958.1,833-851).
cgacgaccagaaaattgca

SEQ ID NO: 214050 - DNA, 19 bp, Homo sapiens
  siRNA target sequence for CGI-30 (NM_015958.1,919-937).
gaggcagcatacatccaat

SEQ ID NO: 214051 - DNA, 19 bp, Homo sapiens
  siRNA target sequence for INMT (NM_006774.3,119-137).
gccgagatgctgaagttta

SEQ ID NO: 214052 - DNA, 19 bp, Homo sapiens
  siRNA target sequence for INMT (NM_006774.3,120-138).
ccgagatgctgaagtttaa

SEQ ID NO: 214053 - DNA, 19 bp, Homo sapiens
  siRNA target sequence for INMT (NM_006774.3,122-140).
gagatgctgaagtttaact

SEQ ID NO: 214054 - DNA, 19 bp, Homo sapiens
  siRNA target sequence for INMT (NM_006774.3,183-201).
gggacacgctgattgacat

SEQ ID NO: 214055 - DNA, 19 bp, Homo sapiens
  siRNA target sequence for INMT (NM_006774.3,184-202).
ggacacgctgattgacatt

SEQ ID NO: 214056 - DNA, 19 bp, Homo sapiens
  siRNA target sequence for INMT (NM_006774.3,635-653).
gggaagcgtgaattttcct

SEQ ID NO: 214057 - DNA, 19 bp, Homo sapiens
  siRNA target sequence for GAMT (NM_000156.4,208-226).
gctgggagaccccctatat

SEQ ID NO: 214058 - DNA, 19 bp, Homo sapiens
  siRNA target sequence for GAMT (NM_000156.4,322-340).
ccattgatgagcattggat

SEQ ID NO: 214059 - DNA, 19 bp, Homo sapiens
  siRNA target sequence for GAMT (NM_000156.4,446-464).
cctgcctgacggtcacttt

SEQ ID NO: 214060 - DNA, 19 bp, Homo sapiens
  siRNA target sequence for GAMT (NM_000156.4,449-467).
gcctgacggtcactttgat

SEQ ID NO: 214061 - DNA, 19 bp, Homo sapiens
  siRNA target sequence for GAMT (NM_000156.4,679-697).
gcttccggagggagaacat

SEQ ID NO: 214062 - DNA, 19 bp, Homo sapiens
  siRNA target sequence for GAMT (NM_138924.1,769-787).
ggactgtgctggttcattt

SEQ ID NO: 214063 - DNA, 19 bp, Homo sapiens
  siRNA target sequence for GAMT (NM_138924.1,772-790).
ctgtgctggttcatttaga

SEQ ID NO: 214064 - DNA, 19 bp, Homo sapiens
  siRNA target sequence for GAMT (NM_138924.1,774-792).
gtgctggttcatttagaaa

SEQ ID NO: 214065 - DNA, 19 bp, Homo sapiens
  siRNA target sequence for TPMT (NM_000367.1,611-629).
gtgtgttctttcttatgat

SEQ ID NO: 214066 - DNA, 19 bp, Homo sapiens
  siRNA target sequence for TPMT (NM_000367.1,755-773).
gggaattgactgtcttttt

SEQ ID NO: 214067 - DNA, 19 bp, Homo sapiens
  siRNA target sequence for NNMT (NM_006169.1,166-184).
cctcgggattacctagaaa

SEQ ID NO: 214068 - DNA, 19 bp, Homo sapiens
  siRNA target sequence for NNMT (NM_006169.1,167-185).
ctcgggattacctagaaaa

SEQ ID NO: 214069 - DNA, 19 bp, Homo sapiens
  siRNA target sequence for NNMT (NM_006169.1,283-301).
ggagacctgctgattgaca

SEQ ID NO: 214070 - DNA, 19 bp, Homo sapiens
  siRNA target sequence for NNMT (NM_006169.1,306-324).
ctctggccccactatctat

SEQ ID NO: 214071 - DNA, 19 bp, Homo sapiens
  siRNA target sequence for NNMT (NM_006169.1,333-351).
ctctgcttgtgaatccttt

SEQ ID NO: 214072 - DNA, 19 bp, Homo sapiens
  siRNA target sequence for NNMT (NM_006169.1,335-353).
ctgcttgtgaatcctttaa

SEQ ID NO: 214073 - DNA, 19 bp, Homo sapiens
  siRNA target sequence for NNMT (NM_006169.1,450-468).
gacctatgtgtgtgatctt

SEQ ID NO: 214074 - DNA, 19 bp, Homo sapiens
  siRNA target sequence for NNMT (NM_006169.1,799-817).
gctggctacacaatcgaat

SEQ ID NO: 214075 - DNA, 19 bp, Homo sapiens
  siRNA target sequence for NNMT (NM_006169.1,803-821).
gctacacaatcgaatggtt

SEQ ID NO: 214076 - DNA, 19 bp, Homo sapiens
  siRNA target sequence for NNMT (NM_006169.1,823-841).
gaggtgatctcgcaaagtt

SEQ ID NO: 214077 - DNA, 19 bp, Homo sapiens
  siRNA target sequence for NNMT (NM_006169.1,825-843).
ggtgatctcgcaaagttat

SEQ ID NO: 214078 - DNA, 19 bp, Homo sapiens
  siRNA target sequence for NNMT (NM_006169.1,826-844).
gtgatctcgcaaagttatt

SEQ ID NO: 214079 - DNA, 19 bp, Homo sapiens
  siRNA target sequence for NNMT (NM_006169.1,828-846).
gatctcgcaaagttattct

SEQ ID NO: 214080 - DNA, 19 bp, Homo sapiens
  siRNA target sequence for NNMT (NM_006169.1,857-875).
ccaacaacgaaggactttt

SEQ ID NO: 214081 - DNA, 19 bp, Homo sapiens
  siRNA target sequence for AD-003 (NM_014064.1,399-417).
gtggatatggtcgacataa

SEQ ID NO: 214082 - DNA, 19 bp, Homo sapiens
  siRNA target sequence for AD-003 (NM_014064.1,622-640).
gcatcatcgtcatcaaaga

SEQ ID NO: 214083 - DNA, 19 bp, Homo sapiens
  siRNA target sequence for AD-003 (NM_014064.1,705-723).
gtggtccgcaggatcatct

SEQ ID NO: 214084 - DNA, 19 bp, Homo sapiens
  siRNA target sequence for AD-003 (NM_014064.1,777-795).
gagatctaccatgtctata

SEQ ID NO: 214085 - DNA, 19 bp, Homo sapiens
  siRNA target sequence for AD-003 (NM_014064.1,782-800).
ctaccatgtctatagcttt

SEQ ID NO: 214086 - DNA, 19 bp, Homo sapiens
  siRNA target sequence for C2orf8 (NM_025264.2,115-133).
ggccacgcaggttgaatat

SEQ ID NO: 214087 - DNA, 19 bp, Homo sapiens
  siRNA target sequence for C2orf8 (NM_025264.2,116-134).
gccacgcaggttgaatata

SEQ ID NO: 214088 - DNA, 19 bp, Homo sapiens
  siRNA target sequence for C2orf8 (NM_025264.2,117-135).
ccacgcaggttgaatatat

SEQ ID NO: 214089 - DNA, 19 bp, Homo sapiens
  siRNA target sequence for C2orf8 (NM_025264.2,118-136).
cacgcaggttgaatatatt

SEQ ID NO: 214090 - DNA, 19 bp, Homo sapiens
  siRNA target sequence for C2orf8 (NM_025264.2,159-177).
cctgttctgatttgaatat

SEQ ID NO: 214091 - DNA, 19 bp, Homo sapiens
  siRNA target sequence for C2orf8 (NM_025264.2,344-362).
cttgaacttgatgcaaaaa

SEQ ID NO: 214092 - DNA, 19 bp, Homo sapiens
  siRNA target sequence for C2orf8 (NM_025264.2,383-401).
gatgataaccaactaaaaa

SEQ ID NO: 214093 - DNA, 19 bp, Homo sapiens
  siRNA target sequence for C2orf8 (NM_025264.2,531-549).
ccactaaaagcgaaaagtt

SEQ ID NO: 214094 - DNA, 19 bp, Homo sapiens
  siRNA target sequence for C2orf8 (NM_025264.2,532-550).
cactaaaagcgaaaagttt

SEQ ID NO: 214095 - DNA, 19 bp, Homo sapiens
  siRNA target sequence for C2orf8 (NM_025264.2,534-552).
ctaaaagcgaaaagtttca

SEQ ID NO: 214096 - DNA, 19 bp, Homo sapiens
  siRNA target sequence for C2orf8 (NM_025264.2,540-558).
gcgaaaagtttcaagaaga

SEQ ID NO: 214097 - DNA, 19 bp, Homo sapiens
  siRNA target sequence for C2orf8 (NM_025264.2,604-622).
gaatgacttgactttcaga

SEQ ID NO: 214098 - DNA, 19 bp, Homo sapiens
  siRNA target sequence for C2orf8 (NM_025264.2,630-648).
gtcgctgcagtggaactat

SEQ ID NO: 214099 - DNA, 19 bp, Homo sapiens
  siRNA target sequence for C2orf8 (NM_025264.2,634-652).
ctgcagtggaactattgga

SEQ ID NO: 214100 - DNA, 19 bp, Homo sapiens
  siRNA target sequence for C2orf8 (NM_025264.2,636-654).
gcagtggaactattggaaa

SEQ ID NO: 214101 - DNA, 19 bp, Homo sapiens
  siRNA target sequence for C2orf8 (NM_025264.2,666-684).
cacaggaggtaggaaaagt

SEQ ID NO: 214102 - DNA, 19 bp, Homo sapiens
  siRNA target sequence for C2orf8 (NM_025264.2,732-750).
ggaatccacaattagagat

SEQ ID NO: 214103 - DNA, 19 bp, Homo sapiens
  siRNA target sequence for C2orf8 (NM_025264.2,748-766).
gatctttatacatctaaat

SEQ ID NO: 214104 - DNA, 19 bp, Homo sapiens
  siRNA target sequence for C2orf8 (NM_025264.2,868-886).
ggcatctctggctgacatt

SEQ ID NO: 214105 - DNA, 19 bp, Homo sapiens
  siRNA target sequence for C2orf8 (NM_025264.2,869-887).
gcatctctggctgacatta

SEQ ID NO: 214106 - DNA, 19 bp, Homo sapiens
  siRNA target sequence for C2orf8 (NM_025264.2,870-888).
catctctggctgacattaa

SEQ ID NO: 214107 - DNA, 19 bp, Homo sapiens
  siRNA target sequence for C2orf8 (NM_025264.2,891-909).
ctggtgcatttgttttaga

SEQ ID NO: 214108 - DNA, 19 bp, Homo sapiens
  siRNA target sequence for C2orf8 (NM_025264.2,897-915).
catttgttttagatccaat

SEQ ID NO: 214109 - DNA, 19 bp, Homo sapiens
  siRNA target sequence for C2orf8 (NM_025264.2,953-971).
gaatggccagatgtgtatt

SEQ ID NO: 214110 - DNA, 19 bp, Homo sapiens
  siRNA target sequence for C2orf8 (NM_025264.2,958-976).
gccagatgtgtattatgta

SEQ ID NO: 214111 - DNA, 19 bp, Homo sapiens
  siRNA target sequence for C2orf8 (NM_025264.2,988-1006).
cagcgactcacagttacta

SEQ ID NO: 214112 - DNA, 19 bp, Homo sapiens
  siRNA target sequence for C2orf8 (NM_025264.2,1029-1047).
ctgcaggccttgaggataa

SEQ ID NO: 214113 - DNA, 19 bp, Homo sapiens
  siRNA target sequence for C2orf8 (NM_025264.2,1031-1049).
gcaggccttgaggataaaa

SEQ ID NO: 214114 - DNA, 19 bp, Homo sapiens
  siRNA target sequence for C2orf8 (NM_025264.2,1180-1198).
ggaaagagtgcttcatgtt

SEQ ID NO: 214115 - DNA, 19 bp, Homo sapiens
  siRNA target sequence for C2orf8 (NM_025264.2,1199-1217).
ggcggaaccattgtattgt

SEQ ID NO: 214116 - DNA, 19 bp, Homo sapiens
  siRNA target sequence for C2orf8 (NM_025264.2,1200-1218).
gcggaaccattgtattgtt

SEQ ID NO: 214117 - DNA, 19 bp, Homo sapiens
  siRNA target sequence for C2orf8 (NM_025264.2,1239-1257).
ggcgccttacagattgtaa

SEQ ID NO: 214118 - DNA, 19 bp, Homo sapiens
  siRNA target sequence for C2orf8 (NM_025264.2,1242-1260).
gccttacagattgtaaaga

SEQ ID NO: 214119 - DNA, 19 bp, Homo sapiens
  siRNA target sequence for C2orf8 (NM_025264.2,1318-1336).
gtgcttgaatcctgaagaa

SEQ ID NO: 214120 - DNA, 19 bp, Homo sapiens
  siRNA target sequence for C2orf8 (NM_025264.2,1377-1395).
ccagtaaccacaaattctt

SEQ ID NO: 214121 - DNA, 19 bp, Homo sapiens
  siRNA target sequence for C2orf8 (NM_025264.2,1378-1396).
cagtaaccacaaattctta

SEQ ID NO: 214122 - DNA, 19 bp, Homo sapiens
  siRNA target sequence for C2orf8 (NM_025264.2,1461-1479).
cagatgcgttcatatgtaa

SEQ ID NO: 214123 - DNA, 19 bp, Homo sapiens
  siRNA target sequence for C2orf8 (NM_025264.2,1463-1481).
gatgcgttcatatgtaaat

SEQ ID NO: 214124 - DNA, 19 bp, Homo sapiens
  siRNA target sequence for CGI-01 (NM_015935.2,302-320).
gtttggctccgttgactat

SEQ ID NO: 214125 - DNA, 19 bp, Homo sapiens
  siRNA target sequence for CGI-01 (NM_015935.2,388-406).
gcggggtgctacataaata

SEQ ID NO: 214126 - DNA, 19 bp, Homo sapiens
  siRNA target sequence for CGI-01 (NM_015935.2,460-478).
gtgagcaactgtatgatgt

SEQ ID NO: 214127 - DNA, 19 bp, Homo sapiens
  siRNA target sequence for CGI-01 (NM_015935.2,480-498).
ggctatcgggatatagtga

SEQ ID NO: 214128 - DNA, 19 bp, Homo sapiens
  siRNA target sequence for CGI-01 (NM_015935.2,481-499).
gctatcgggatatagtgaa

SEQ ID NO: 214129 - DNA, 19 bp, Homo sapiens
  siRNA target sequence for CGI-01 (NM_015935.2,791-809).
cttcaggaggttgattaca

SEQ ID NO: 214130 - DNA, 19 bp, Homo sapiens
  siRNA target sequence for CGI-01 (NM_015935.2,980-998).
ccccttgagcggtgactat

SEQ ID NO: 214131 - DNA, 19 bp, Homo sapiens
  siRNA target sequence for CGI-01 (NM_015935.2,982-1000).
ccttgagcggtgactatgt

SEQ ID NO: 214132 - DNA, 19 bp, Homo sapiens
  siRNA target sequence for CGI-01 (NM_015935.2,988-1006).
gcggtgactatgtcattga

SEQ ID NO: 214133 - DNA, 19 bp, Homo sapiens
  siRNA target sequence for CGI-01 (NM_015935.2,1018-1036).
gggatgacaagcgatactt

SEQ ID NO: 214134 - DNA, 19 bp, Homo sapiens
  siRNA target sequence for CGI-01 (NM_015935.2,1094-1112).
gaaggatgtgtctcacaaa

SEQ ID NO: 214135 - DNA, 19 bp, Homo sapiens
  siRNA target sequence for CGI-01 (NM_015935.2,1187-1205).
gcagtccattgataagagt

SEQ ID NO: 214136 - DNA, 19 bp, Homo sapiens
  siRNA target sequence for CGI-01 (NM_015935.2,1202-1220).
gagttacctgtgttgtgaa

SEQ ID NO: 214137 - DNA, 19 bp, Homo sapiens
  siRNA target sequence for CGI-01 (NM_015935.2,1264-1282).
cagagctactcctagagat

SEQ ID NO: 214138 - DNA, 19 bp, Homo sapiens
  siRNA target sequence for CGI-01 (NM_015935.2,1335-1353).
gtccacgatcattttccaa

SEQ ID NO: 214139 - DNA, 19 bp, Homo sapiens
  siRNA target sequence for CGI-01 (NM_015935.2,1423-1441).
cccagagtgaccgaatgaa

SEQ ID NO: 214140 - DNA, 19 bp, Homo sapiens
  siRNA target sequence for CGI-01 (NM_015935.2,1452-1470).
gcagatggcctggactata

SEQ ID NO: 214141 - DNA, 19 bp, Homo sapiens
  siRNA target sequence for CGI-01 (NM_015935.2,1501-1519).
ggccttgctacgatgtcat

SEQ ID NO: 214142 - DNA, 19 bp, Homo sapiens
  siRNA target sequence for CGI-01 (NM_015935.2,1502-1520).
gccttgctacgatgtcata

SEQ ID NO: 214143 - DNA, 19 bp, Homo sapiens
  siRNA target sequence for CGI-01 (NM_015935.2,1503-1521).
ccttgctacgatgtcataa

SEQ ID NO: 214144 - DNA, 19 bp, Homo sapiens
  siRNA target sequence for CGI-01 (NM_015935.2,1504-1522).
cttgctacgatgtcataat

SEQ ID NO: 214145 - DNA, 19 bp, Homo sapiens
  siRNA target sequence for CGI-01 (NM_015935.2,1507-1525).
gctacgatgtcataatgtt

SEQ ID NO: 214146 - DNA, 19 bp, Homo sapiens
  siRNA target sequence for CGI-01 (NM_015935.2,1508-1526).
ctacgatgtcataatgttt

SEQ ID NO: 214147 - DNA, 19 bp, Homo sapiens
  siRNA target sequence for CGI-01 (NM_015935.2,1511-1529).
cgatgtcataatgtttgat

SEQ ID NO: 214148 - DNA, 19 bp, Homo sapiens
  siRNA target sequence for CGI-01 (NM_015935.2,1575-1593).
gcatttgtggagcaatctt

SEQ ID NO: 214149 - DNA, 19 bp, Homo sapiens
  siRNA target sequence for CGI-01 (NM_015935.2,1655-1673).
ccgagacttggggctaaaa

SEQ ID NO: 214150 - DNA, 19 bp, Homo sapiens
  siRNA target sequence for CGI-01 (NM_015935.2,1699-1717).
cagtgttccccctcctata

SEQ ID NO: 214151 - DNA, 19 bp, Homo sapiens
  siRNA target sequence for CGI-01 (NM_015935.2,1763-1781).
gctgcaccctgagcaaaaa

SEQ ID NO: 214152 - DNA, 19 bp, Homo sapiens
  siRNA target sequence for CGI-01 (NM_015935.2,1852-1870).
gggatgacacgtatgtctt

SEQ ID NO: 214153 - DNA, 19 bp, Homo sapiens
  siRNA target sequence for CGI-01 (NM_015935.2,1861-1879).
cgtatgtcttgtcagatat

SEQ ID NO: 214154 - DNA, 19 bp, Homo sapiens
  siRNA target sequence for CYT19 (NM_020682.2,90-108).
cgtgacgctgagatacaga

SEQ ID NO: 214155 - DNA, 19 bp, Homo sapiens
  siRNA target sequence for CYT19 (NM_020682.2,209-227).
ggaagccttgcaaaatgta

SEQ ID NO: 214156 - DNA, 19 bp, Homo sapiens
  siRNA target sequence for CYT19 (NM_020682.2,269-287).
gatccctgagcatctagaa

SEQ ID NO: 214157 - DNA, 19 bp, Homo sapiens
  siRNA target sequence for CYT19 (NM_020682.2,316-334).
gaagtggcagagattgcta

SEQ ID NO: 214158 - DNA, 19 bp, Homo sapiens
  siRNA target sequence for CYT19 (NM_020682.2,323-341).
cagagattgctatgtactt

SEQ ID NO: 214159 - DNA, 19 bp, Homo sapiens
  siRNA target sequence for CYT19 (NM_020682.2,364-382).
gacacgtgactggaataga

SEQ ID NO: 214160 - DNA, 19 bp, Homo sapiens
  siRNA target sequence for CYT19 (NM_020682.2,366-384).
cacgtgactggaatagaca

SEQ ID NO: 214161 - DNA, 19 bp, Homo sapiens
  siRNA target sequence for CYT19 (NM_020682.2,425-443).
ctatcacatggaaaaatat

SEQ ID NO: 214162 - DNA, 19 bp, Homo sapiens
  siRNA target sequence for CYT19 (NM_020682.2,518-536).
gagccatgatattgttgta

SEQ ID NO: 214163 - DNA, 19 bp, Homo sapiens
  siRNA target sequence for CYT19 (NM_020682.2,525-543).
gatattgttgtatcaaact

SEQ ID NO: 214164 - DNA, 19 bp, Homo sapiens
  siRNA target sequence for CYT19 (NM_020682.2,534-552).
gtatcaaactgtgttatta

SEQ ID NO: 214165 - DNA, 19 bp, Homo sapiens
  siRNA target sequence for CYT19 (NM_020682.2,554-572).
ccttgtgcctgataaacaa

SEQ ID NO: 214166 - DNA, 19 bp, Homo sapiens
  siRNA target sequence for CYT19 (NM_020682.2,605-623).
gcatggtggggagttatat

SEQ ID NO: 214167 - DNA, 19 bp, Homo sapiens
  siRNA target sequence for CYT19 (NM_020682.2,606-624).
catggtggggagttatatt

SEQ ID NO: 214168 - DNA, 19 bp, Homo sapiens
  siRNA target sequence for CYT19 (NM_020682.2,696-714).
ctgggtggtgctttatact

SEQ ID NO: 214169 - DNA, 19 bp, Homo sapiens
  siRNA target sequence for CYT19 (NM_020682.2,772-790).
ctgccaatctcattacaat

SEQ ID NO: 214170 - DNA, 19 bp, Homo sapiens
  siRNA target sequence for CYT19 (NM_020682.2,775-793).
ccaatctcattacaattca

SEQ ID NO: 214171 - DNA, 19 bp, Homo sapiens
  siRNA target sequence for CYT19 (NM_020682.2,780-798).
ctcattacaattcaaaaca

SEQ ID NO: 214172 - DNA, 19 bp, Homo sapiens
  siRNA target sequence for CYT19 (NM_020682.2,818-836).
cggtgactgtcgttttgtt

SEQ ID NO: 214173 - DNA, 19 bp, Homo sapiens
  siRNA target sequence for CYT19 (NM_020682.2,819-837).
ggtgactgtcgttttgttt

SEQ ID NO: 214174 - DNA, 19 bp, Homo sapiens
  siRNA target sequence for CYT19 (NM_020682.2,850-868).
gcctcttcaaacactctaa

SEQ ID NO: 214175 - DNA, 19 bp, Homo sapiens
  siRNA target sequence for CYT19 (NM_020682.2,852-870).
ctcttcaaacactctaaga

SEQ ID NO: 214176 - DNA, 19 bp, Homo sapiens
  siRNA target sequence for CYT19 (NM_020682.2,975-993).
gttgaagtggatgaagaaa

SEQ ID NO: 214177 - DNA, 19 bp, Homo sapiens
  siRNA target sequence for FLJ10640 (NM_019023.1,363-381).
gattgcaaggtcatcttat

SEQ ID NO: 214178 - DNA, 19 bp, Homo sapiens
  siRNA target sequence for FLJ10640 (NM_019023.1,371-389).
ggtcatcttatgcagatat

SEQ ID NO: 214179 - DNA, 19 bp, Homo sapiens
  siRNA target sequence for FLJ10640 (NM_019023.1,374-392).
catcttatgcagatatgct

SEQ ID NO: 214180 - DNA, 19 bp, Homo sapiens
  siRNA target sequence for FLJ10640 (NM_019023.1,496-514).
ggcacgggactcttgtcaa

SEQ ID NO: 214181 - DNA, 19 bp, Homo sapiens
  siRNA target sequence for FLJ10640 (NM_019023.1,497-515).
gcacgggactcttgtcaat

SEQ ID NO: 214182 - DNA, 19 bp, Homo sapiens
  siRNA target sequence for FLJ10640 (NM_019023.1,607-625).
ggctttagtgataagatta

SEQ ID NO: 214183 - DNA, 19 bp, Homo sapiens
  siRNA target sequence for FLJ10640 (NM_019023.1,616-634).
gataagattaaggttatca

SEQ ID NO: 214184 - DNA, 19 bp, Homo sapiens
  siRNA target sequence for FLJ10640 (NM_019023.1,767-785).
ggcatctcgtggaggaaaa

SEQ ID NO: 214185 - DNA, 19 bp, Homo sapiens
  siRNA target sequence for FLJ10640 (NM_019023.1,848-866).
ggtcgtggaacaagctatt

SEQ ID NO: 214186 - DNA, 19 bp, Homo sapiens
  siRNA target sequence for FLJ10640 (NM_019023.1,849-867).
gtcgtggaacaagctattt

SEQ ID NO: 214187 - DNA, 19 bp, Homo sapiens
  siRNA target sequence for FLJ10640 (NM_019023.1,973-991).
gtgtcaccagccgacttta

SEQ ID NO: 214188 - DNA, 19 bp, Homo sapiens
  siRNA target sequence for FLJ10640 (NM_019023.1,975-993).
gtcaccagccgactttaca

SEQ ID NO: 214189 - DNA, 19 bp, Homo sapiens
  siRNA target sequence for FLJ10640 (NM_019023.1,977-995).
caccagccgactttacagt

SEQ ID NO: 214190 - DNA, 19 bp, Homo sapiens
  siRNA target sequence for FLJ10640 (NM_019023.1,1062-1080).
ccatagcaggcggtttgaa

SEQ ID NO: 214191 - DNA, 19 bp, Homo sapiens
  siRNA target sequence for FLJ10640 (NM_019023.1,1113-1131).
ctcgtggtgggacattgaa

SEQ ID NO: 214192 - DNA, 19 bp, Homo sapiens
  siRNA target sequence for FLJ10640 (NM_019023.1,1115-1133).
cgtggtgggacattgaaat

SEQ ID NO: 214193 - DNA, 19 bp, Homo sapiens
  siRNA target sequence for FLJ10640 (NM_019023.1,1217-1235).
ggatgcagtgtgtgtactt

SEQ ID NO: 214194 - DNA, 19 bp, Homo sapiens
  siRNA target sequence for FLJ10640 (NM_019023.1,1326-1344).
gaccagccctgaaaagaat

SEQ ID NO: 214195 - DNA, 19 bp, Homo sapiens
  siRNA target sequence for FLJ10640 (NM_019023.1,1406-1424).
ctcggtttggagagatcaa

SEQ ID NO: 214196 - DNA, 19 bp, Homo sapiens
  siRNA target sequence for FLJ10640 (NM_019023.1,1573-1591).
gcagcttctcacaaactgt

SEQ ID NO: 214197 - DNA, 19 bp, Homo sapiens
  siRNA target sequence for FLJ10640 (NM_019023.1,1574-1592).
cagcttctcacaaactgtt

SEQ ID NO: 214198 - DNA, 19 bp, Homo sapiens
  siRNA target sequence for FLJ10640 (NM_019023.1,1609-1627).
gctaaccacttggaagata

SEQ ID NO: 214199 - DNA, 19 bp, Homo sapiens
  siRNA target sequence for FLJ10640 (NM_019023.1,1702-1720).
ctgggcgagccgttcttca

SEQ ID NO: 214200 - DNA, 19 bp, Homo sapiens
  siRNA target sequence for FLJ10640 (NM_019023.1,1705-1723).
ggcgagccgttcttcacta

SEQ ID NO: 214201 - DNA, 19 bp, Homo sapiens
  siRNA target sequence for FLJ20628 (NM_017910.2,67-85).
gcaggggctcggaaccaat

SEQ ID NO: 214202 - DNA, 19 bp, Homo sapiens
  siRNA target sequence for FLJ20628 (NM_017910.2,68-86).
caggggctcggaaccaatt

SEQ ID NO: 214203 - DNA, 19 bp, Homo sapiens
  siRNA target sequence for FLJ20628 (NM_017910.2,70-88).
ggggctcggaaccaattca

SEQ ID NO: 214204 - DNA, 19 bp, Homo sapiens
  siRNA target sequence for FLJ20628 (NM_017910.2,71-89).
gggctcggaaccaattcat

SEQ ID NO: 214205 - DNA, 19 bp, Homo sapiens
  siRNA target sequence for FLJ20628 (NM_017910.2,72-90).
ggctcggaaccaattcatt

SEQ ID NO: 214206 - DNA, 19 bp, Homo sapiens
  siRNA target sequence for FLJ20628 (NM_017910.2,184-202).
cgaggcggcacaaaggaaa

SEQ ID NO: 214207 - DNA, 19 bp, Homo sapiens
  siRNA target sequence for FLJ20628 (NM_017910.2,264-282).
gtctttcgtcactggaaaa

SEQ ID NO: 214208 - DNA, 19 bp, Homo sapiens
  siRNA target sequence for FLJ20628 (NM_017910.2,434-452).
cacgtctccccttcttgtt

SEQ ID NO: 214209 - DNA, 19 bp, Homo sapiens
  siRNA target sequence for FLJ20628 (NM_017910.2,436-454).
cgtctccccttcttgttca

SEQ ID NO: 214210 - DNA, 19 bp, Homo sapiens
  siRNA target sequence for FLJ20628 (NM_017910.2,439-457).
ctccccttcttgttcaact

SEQ ID NO: 214211 - DNA, 19 bp, Homo sapiens
  siRNA target sequence for FLJ20628 (NM_017910.2,544-562).
gaacaacttcggactctta

SEQ ID NO: 214212 - DNA, 19 bp, Homo sapiens
  siRNA target sequence for FLJ20628 (NM_017910.2,547-565).
caacttcggactcttaaat

SEQ ID NO: 214213 - DNA, 19 bp, Homo sapiens
  siRNA target sequence for FLJ20628 (NM_017910.2,550-568).
cttcggactcttaaatagt

SEQ ID NO: 214214 - DNA, 19 bp, Homo sapiens
  siRNA target sequence for FLJ20628 (NM_017910.2,554-572).
ggactcttaaatagtaact

SEQ ID NO: 214215 - DNA, 19 bp, Homo sapiens
  siRNA target sequence for FLJ20628 (NM_017910.2,633-651).
ccttcggtaagcagtacat

SEQ ID NO: 214216 - DNA, 19 bp, Homo sapiens
  siRNA target sequence for FLJ20628 (NM_017910.2,660-678).
ggccagccttggaagacta

SEQ ID NO: 214217 - DNA, 19 bp, Homo sapiens
  siRNA target sequence for FLJ20628 (NM_017910.2,661-679).
gccagccttggaagactat

SEQ ID NO: 214218 - DNA, 19 bp, Homo sapiens
  siRNA target sequence for FLJ20628 (NM_017910.2,667-685).
cttggaagactatgtagta

SEQ ID NO: 214219 - DNA, 19 bp, Homo sapiens
  siRNA target sequence for FLJ20628 (NM_017910.2,671-689).
gaagactatgtagtattga

SEQ ID NO: 214220 - DNA, 19 bp, Homo sapiens
  siRNA target sequence for FLJ20628 (NM_017910.2,696-714).
gagggactgccataacatt

SEQ ID NO: 214221 - DNA, 19 bp, Homo sapiens
  siRNA target sequence for FLJ20628 (NM_017910.2,711-729).
cattcccaaaggatattaa

SEQ ID NO: 214222 - DNA, 19 bp, Homo sapiens
  siRNA target sequence for FLJ20628 (NM_017910.2,717-735).
caaaggatattaatatgat

SEQ ID NO: 214223 - DNA, 19 bp, Homo sapiens
  siRNA target sequence for FLJ20628 (NM_017910.2,754-772).
caacccaggtgatactgtt

SEQ ID NO: 214224 - DNA, 19 bp, Homo sapiens
  siRNA target sequence for FLJ20628 (NM_017910.2,792-810).
ctggtggaatgagcttatt

SEQ ID NO: 214225 - DNA, 19 bp, Homo sapiens
  siRNA target sequence for FLJ20628 (NM_017910.2,833-851).
caaggacgagtcataagtt

SEQ ID NO: 214226 - DNA, 19 bp, Homo sapiens
  siRNA target sequence for FLJ20628 (NM_017910.2,861-879).
gaaaagaccaccatgatct

SEQ ID NO: 214227 - DNA, 19 bp, Homo sapiens
  siRNA target sequence for FLJ20628 (NM_017910.2,901-919).
ctggcgtgattcatggaaa

SEQ ID NO: 214228 - DNA, 19 bp, Homo sapiens
  siRNA target sequence for FLJ20628 (NM_017910.2,903-921).
ggcgtgattcatggaaatt

SEQ ID NO: 214229 - DNA, 19 bp, Homo sapiens
  siRNA target sequence for FLJ20628 (NM_017910.2,904-922).
gcgtgattcatggaaatta

SEQ ID NO: 214230 - DNA, 19 bp, Homo sapiens
  siRNA target sequence for FLJ20628 (NM_017910.2,905-923).
cgtgattcatggaaattaa

SEQ ID NO: 214231 - DNA, 19 bp, Homo sapiens
  siRNA target sequence for FLJ20628 (NM_017910.2,915-933).
ggaaattaagtcatgtaga

SEQ ID NO: 214232 - DNA, 19 bp, Homo sapiens
  siRNA target sequence for FLJ20628 (NM_017910.2,939-957).
ggccagacaatgtggattt

SEQ ID NO: 214233 - DNA, 19 bp, Homo sapiens
  siRNA target sequence for FLJ20628 (NM_017910.2,975-993).
caggagcaaccgaagacat

SEQ ID NO: 214234 - DNA, 19 bp, Homo sapiens
  siRNA target sequence for FLJ20628 (NM_017910.2,977-995).
ggagcaaccgaagacataa

SEQ ID NO: 214235 - DNA, 19 bp, Homo sapiens
  siRNA target sequence for FLJ20628 (NM_017910.2,978-996).
gagcaaccgaagacataaa

SEQ ID NO: 214236 - DNA, 19 bp, Homo sapiens
  siRNA target sequence for FLJ20628 (NM_017910.2,1005-1023).
catttgacgcagtagcttt

SEQ ID NO: 214237 - DNA, 19 bp, Homo sapiens
  siRNA target sequence for FLJ20628 (NM_017910.2,1010-1028).
gacgcagtagctttggata

SEQ ID NO: 214238 - DNA, 19 bp, Homo sapiens
  siRNA target sequence for FLJ20628 (NM_017910.2,1013-1031).
gcagtagctttggatatgt

SEQ ID NO: 214239 - DNA, 19 bp, Homo sapiens
  siRNA target sequence for FLJ20628 (NM_017910.2,1014-1032).
cagtagctttggatatgtt

SEQ ID NO: 214240 - DNA, 19 bp, Homo sapiens
  siRNA target sequence for FLJ20628 (NM_017910.2,1055-1073).
gttttttacccacatctta

SEQ ID NO: 214241 - DNA, 19 bp, Homo sapiens
  siRNA target sequence for FLJ20628 (NM_017910.2,1080-1098).
gtggtgtatgtgctgtata

SEQ ID NO: 214242 - DNA, 19 bp, Homo sapiens
  siRNA target sequence for FLJ20628 (NM_017910.2,1091-1109).
gctgtatatgtagtaaaca

SEQ ID NO: 214243 - DNA, 19 bp, Homo sapiens
  siRNA target sequence for FLJ20628 (NM_017910.2,1094-1112).
gtatatgtagtaaacatca

SEQ ID NO: 214244 - DNA, 19 bp, Homo sapiens
  siRNA target sequence for FLJ20628 (NM_017910.2,1111-1129).
cacacaggttattgaactt

SEQ ID NO: 214245 - DNA, 19 bp, Homo sapiens
  siRNA target sequence for FLJ20628 (NM_017910.2,1181-1199).
gaggtcattgtcagagatt

SEQ ID NO: 214246 - DNA, 19 bp, Homo sapiens
  siRNA target sequence for FLJ20628 (NM_017910.2,1190-1208).
gtcagagattggttggttt

SEQ ID NO: 214247 - DNA, 19 bp, Homo sapiens
  siRNA target sequence for FLJ20628 (NM_017910.2,1200-1218).
ggttggtttgccttgcaaa

SEQ ID NO: 214248 - DNA, 19 bp, Homo sapiens
  siRNA target sequence for FLJ20628 (NM_017910.2,1201-1219).
gttggtttgccttgcaaaa

SEQ ID NO: 214249 - DNA, 19 bp, Homo sapiens
  siRNA target sequence for FLJ20628 (NM_017910.2,1264-1282).
cacagatgtacaactagat

SEQ ID NO: 214250 - DNA, 19 bp, Homo sapiens
  siRNA target sequence for FLJ20628 (NM_017910.2,1334-1352).
gaagaatcgcattctgatt

SEQ ID NO: 214251 - DNA, 19 bp, Homo sapiens
  siRNA target sequence for FLJ20628 (NM_017910.2,1341-1359).
cgcattctgattttccata

SEQ ID NO: 214252 - DNA, 19 bp, Homo sapiens
  siRNA target sequence for FLJ20628 (NM_017910.2,1404-1422).
gtcatacagcttttcttgt

SEQ ID NO: 214253 - DNA, 19 bp, Homo sapiens
  siRNA target sequence for FLJ20628 (NM_017910.2,1412-1430).
gcttttcttgtcaagttga

SEQ ID NO: 214254 - DNA, 19 bp, Homo sapiens
  siRNA target sequence for FLJ23841 (NM_144589.2,319-337).
cagccgcagggggattcta

SEQ ID NO: 214255 - DNA, 19 bp, Homo sapiens
  siRNA target sequence for FLJ23841 (NM_144589.2,322-340).
ccgcagggggattctatga

SEQ ID NO: 214256 - DNA, 19 bp, Homo sapiens
  siRNA target sequence for FLJ23841 (NM_144589.2,323-341).
cgcagggggattctatgat

SEQ ID NO: 214257 - DNA, 19 bp, Homo sapiens
  siRNA target sequence for FLJ23841 (NM_144589.2,325-343).
cagggggattctatgatga

SEQ ID NO: 214258 - DNA, 19 bp, Homo sapiens
  siRNA target sequence for FLJ23841 (NM_144589.2,771-789).
cgagtgtgtgcgaaaccta

SEQ ID NO: 214259 - DNA, 19 bp, Homo sapiens
  siRNA target sequence for FLJ23841 (NM_144589.2,772-790).
gagtgtgtgcgaaacctaa

SEQ ID NO: 214260 - DNA, 19 bp, Homo sapiens
  siRNA target sequence for FLJ23841 (NM_144589.2,776-794).
gtgtgcgaaacctaaacga

SEQ ID NO: 214261 - DNA, 19 bp, Homo sapiens
  siRNA target sequence for FLJ23841 (NM_144589.2,806-824).
gggacgtcagggtctacat

SEQ ID NO: 214262 - DNA, 19 bp, Homo sapiens
  siRNA target sequence for FLJ23841 (NM_144589.2,808-826).
gacgtcagggtctacatca

SEQ ID NO: 214263 - DNA, 19 bp, Homo sapiens
  siRNA target sequence for HNMT (NM_006895.1,288-306).
cgggaaatatgttgaatct

SEQ ID NO: 214264 - DNA, 19 bp, Homo sapiens
  siRNA target sequence for HNMT (NM_006895.1,305-323).
ctttccggaggtttctcaa

SEQ ID NO: 214265 - DNA, 19 bp, Homo sapiens
  siRNA target sequence for HNMT (NM_006895.1,310-328).
cggaggtttctcaaccatt

SEQ ID NO: 214266 - DNA, 19 bp, Homo sapiens
  siRNA target sequence for HNMT (NM_006895.1,386-404).
gaaggattggagacacaaa

SEQ ID NO: 214267 - DNA, 19 bp, Homo sapiens
  siRNA target sequence for HNMT (NM_006895.1,432-450).
cggaggtgcaggtgaaatt

SEQ ID NO: 214268 - DNA, 19 bp, Homo sapiens
  siRNA target sequence for HNMT (NM_006895.1,467-485).
ccaaagttcaggctcaata

SEQ ID NO: 214269 - DNA, 19 bp, Homo sapiens
  siRNA target sequence for HNMT (NM_006895.1,481-499).
caatacccaggagtttgta

SEQ ID NO: 214270 - DNA, 19 bp, Homo sapiens
  siRNA target sequence for HNMT (NM_006895.1,487-505).
ccaggagtttgtatcaaca

SEQ ID NO: 214271 - DNA, 19 bp, Homo sapiens
  siRNA target sequence for HNMT (NM_006895.1,550-568).
gagcttgtagccaagacat

SEQ ID NO: 214272 - DNA, 19 bp, Homo sapiens
  siRNA target sequence for HNMT (NM_006895.1,569-587).
cgaacctcgagaacgtaaa

SEQ ID NO: 214273 - DNA, 19 bp, Homo sapiens
  siRNA target sequence for HNMT (NM_006895.1,573-591).
cctcgagaacgtaaagttt

SEQ ID NO: 214274 - DNA, 19 bp, Homo sapiens
  siRNA target sequence for HNMT (NM_006895.1,616-634).
gaataccaaagtagaatgt

SEQ ID NO: 214275 - DNA, 19 bp, Homo sapiens
  siRNA target sequence for HNMT (NM_006895.1,659-677).
gggactttattcatatgat

SEQ ID NO: 214276 - DNA, 19 bp, Homo sapiens
  siRNA target sequence for HNMT (NM_006895.1,706-724).
ccagctaccctgaaattct

SEQ ID NO: 214277 - DNA, 19 bp, Homo sapiens
  siRNA target sequence for HNMT (NM_006895.1,877-895).
gacaacctagggcttaagt

SEQ ID NO: 214278 - DNA, 19 bp, Homo sapiens
  siRNA target sequence for HNMT (NM_006895.1,883-901).
ctagggcttaagtatgagt

SEQ ID NO: 214279 - DNA, 19 bp, Homo sapiens
  siRNA target sequence for HNMT (NM_006895.1,915-933).
gtccaccatggatatatct

SEQ ID NO: 214280 - DNA, 19 bp, Homo sapiens
  siRNA target sequence for HNMT (NM_006895.1,917-935).
ccaccatggatatatctga

SEQ ID NO: 214281 - DNA, 19 bp, Homo sapiens
  siRNA target sequence for HNMT (NM_006895.1,936-954).
ctgctttattgatggtaat

SEQ ID NO: 214282 - DNA, 19 bp, Homo sapiens
  siRNA target sequence for HNMT (NM_006895.1,984-1002).
gactgaaacctgcaacttt

SEQ ID NO: 214283 - DNA, 19 bp, Homo sapiens
  siRNA target sequence for HNMT (NM_006895.1,1035-1053).
gcttgggaaagatctacaa

SEQ ID NO: 214284 - DNA, 19 bp, Homo sapiens
  siRNA target sequence for HNMT (NM_006895.1,1082-1100).
ggaaggttctttttaataa

SEQ ID NO: 214285 - DNA, 19 bp, Homo sapiens
  siRNA target sequence for HRMT1L1 (NM_001535.1,301-319).
gagacccagctcagttttt

SEQ ID NO: 214286 - DNA, 19 bp, Homo sapiens
  siRNA target sequence for HRMT1L1 (NM_001535.1,396-414).
gtacattccggcaaaccat

SEQ ID NO: 214287 - DNA, 19 bp, Homo sapiens
  siRNA target sequence for HRMT1L1 (NM_001535.1,452-470).
cgtggcaggatgaagagta

SEQ ID NO: 214288 - DNA, 19 bp, Homo sapiens
  siRNA target sequence for HRMT1L1 (NM_001535.1,477-495).
cagctatggaactctgaaa

SEQ ID NO: 214289 - DNA, 19 bp, Homo sapiens
  siRNA target sequence for HRMT1L1 (NM_001535.1,479-497).
gctatggaactctgaaact

SEQ ID NO: 214290 - DNA, 19 bp, Homo sapiens
  siRNA target sequence for HRMT1L1 (NM_001535.1,517-535).
gaccagccacgaacaacta

SEQ ID NO: 214291 - DNA, 19 bp, Homo sapiens
  siRNA target sequence for HRMT1L1 (NM_001535.1,519-537).
ccagccacgaacaactaaa

SEQ ID NO: 214292 - DNA, 19 bp, Homo sapiens
  siRNA target sequence for HRMT1L1 (NM_001535.1,520-538).
cagccacgaacaactaaat

SEQ ID NO: 214293 - DNA, 19 bp, Homo sapiens
  siRNA target sequence for HRMT1L1 (NM_001535.1,524-542).
cacgaacaactaaatacca

SEQ ID NO: 214294 - DNA, 19 bp, Homo sapiens
  siRNA target sequence for HRMT1L1 (NM_001535.1,1022-1040).
caaagcccaagtataacca

SEQ ID NO: 214295 - DNA, 19 bp, Homo sapiens
  siRNA target sequence for HRMT1L1 (NM_001535.1,1027-1045).
cccaagtataaccacattt

SEQ ID NO: 214296 - DNA, 19 bp, Homo sapiens
  siRNA target sequence for HRMT1L1 (NM_001535.1,1065-1083).
ctctgaaccgtgcactata

SEQ ID NO: 214297 - DNA, 19 bp, Homo sapiens
  siRNA target sequence for HRMT1L1 (NM_001535.1,1095-1113).
catgagaaccgtgcaaatt

SEQ ID NO: 214298 - DNA, 19 bp, Homo sapiens
  siRNA target sequence for HRMT1L1 (NM_001535.1,1100-1118).
gaaccgtgcaaatttctga

SEQ ID NO: 214299 - DNA, 19 bp, Homo sapiens
  siRNA target sequence for HRMT1L1 (NM_001535.1,1104-1122).
cgtgcaaatttctgatcta

SEQ ID NO: 214300 - DNA, 19 bp, Homo sapiens
  siRNA target sequence for HRMT1L1 (NM_001535.1,1177-1195).
ggcttcacggcctggttta

SEQ ID NO: 214301 - DNA, 19 bp, Homo sapiens
  siRNA target sequence for HRMT1L1 (NM_001535.1,1326-1344).
cgtggtcacgggttcagtt

SEQ ID NO: 214302 - DNA, 19 bp, Homo sapiens
  siRNA target sequence for HRMT1L2 (NM_001536.2,227-245).
cgcaactccatgtttcata

SEQ ID NO: 214303 - DNA, 19 bp, Homo sapiens
  siRNA target sequence for HRMT1L2 (NM_001536.2,228-246).
gcaactccatgtttcataa

SEQ ID NO: 214304 - DNA, 19 bp, Homo sapiens
  siRNA target sequence for HRMT1L2 (NM_001536.2,366-384).
ctgattatgcggtgaagat

SEQ ID NO: 214305 - DNA, 19 bp, Homo sapiens
  siRNA target sequence for HRMT1L2 (NM_001536.2,607-625).
cgaggaccggcagtacaaa

SEQ ID NO: 214306 - DNA, 19 bp, Homo sapiens
  siRNA target sequence for HRMT1L2 (NM_001536.2,611-629).
gaccggcagtacaaagact

SEQ ID NO: 214307 - DNA, 19 bp, Homo sapiens
  siRNA target sequence for HRMT1L2 (NM_001536.2,617-635).
cagtacaaagactacaaga

SEQ ID NO: 214308 - DNA, 19 bp, Homo sapiens
  siRNA target sequence for HRMT1L2 (NM_001536.2,807-825).
cgttctgcctgcaagtgaa

SEQ ID NO: 214309 - DNA, 19 bp, Homo sapiens
  siRNA target sequence for HRMT1L2 (NM_001536.2,818-836).
caagtgaagcggaatgact

SEQ ID NO: 214310 - DNA, 19 bp, Homo sapiens
  siRNA target sequence for HRMT1L3 (NM_019854.2,240-258).
gagatgacctcgagagatt

SEQ ID NO: 214311 - DNA, 19 bp, Homo sapiens
  siRNA target sequence for HRMT1L3 (NM_019854.2,242-260).
gatgacctcgagagattat

SEQ ID NO: 214312 - DNA, 19 bp, Homo sapiens
  siRNA target sequence for HRMT1L3 (NM_019854.2,452-470).
gatcgaatgctccagtatt

SEQ ID NO: 214313 - DNA, 19 bp, Homo sapiens
  siRNA target sequence for HRMT1L3 (NM_019854.2,499-517).
ccaaccacttggacaacat

SEQ ID NO: 214314 - DNA, 19 bp, Homo sapiens
  siRNA target sequence for HRMT1L3 (NM_019854.2,504-522).
cacttggacaacatcatca

SEQ ID NO: 214315 - DNA, 19 bp, Homo sapiens
  siRNA target sequence for HRMT1L3 (NM_019854.2,598-616).
gctactgtctgttctatga

SEQ ID NO: 214316 - DNA, 19 bp, Homo sapiens
  siRNA target sequence for HRMT1L3 (NM_019854.2,623-641).
gctcaacacggtgatcttt

SEQ ID NO: 214317 - DNA, 19 bp, Homo sapiens
  siRNA target sequence for HRMT1L3 (NM_019854.2,682-700).
cagaccgggcagctttgta

SEQ ID NO: 214318 - DNA, 19 bp, Homo sapiens
  siRNA target sequence for HRMT1L3 (NM_019854.2,698-716).
gtacgtggtagcgattgaa

SEQ ID NO: 214319 - DNA, 19 bp, Homo sapiens
  siRNA target sequence for HRMT1L3 (NM_019854.2,723-741).
cagtacaaggacttcaaaa

SEQ ID NO: 214320 - DNA, 19 bp, Homo sapiens
  siRNA target sequence for HRMT1L3 (NM_019854.2,863-881).
ggaggtggacatttacaca

SEQ ID NO: 214321 - DNA, 19 bp, Homo sapiens
  siRNA target sequence for HRMT1L3 (NM_019854.2,891-909).
gaagagctatcgttcacat

SEQ ID NO: 214322 - DNA, 19 bp, Homo sapiens
  siRNA target sequence for HRMT1L3 (NM_019854.2,950-968).
cgccctggtcacctatttt

SEQ ID NO: 214323 - DNA, 19 bp, Homo sapiens
  siRNA target sequence for HRMT1L3 (NM_019854.2,952-970).
ccctggtcacctattttaa

SEQ ID NO: 214324 - DNA, 19 bp, Homo sapiens
  siRNA target sequence for HRMT1L3 (NM_019854.2,953-971).
cctggtcacctattttaat

SEQ ID NO: 214325 - DNA, 19 bp, Homo sapiens
  siRNA target sequence for HRMT1L3 (NM_019854.2,954-972).
ctggtcacctattttaata

SEQ ID NO: 214326 - DNA, 19 bp, Homo sapiens
  siRNA target sequence for HRMT1L3 (NM_019854.2,1134-1152).
gtgcgagacctcgatttca

SEQ ID NO: 214327 - DNA, 19 bp, Homo sapiens
  siRNA target sequence for HRMT1L3 (NM_019854.2,1136-1154).
gcgagacctcgatttcaca

SEQ ID NO: 214328 - DNA, 19 bp, Homo sapiens
  siRNA target sequence for HRMT1L3 (NM_019854.2,1151-1169).
cacagtagacttggatttt

SEQ ID NO: 214329 - DNA, 19 bp, Homo sapiens
  siRNA target sequence for HRMT1L3 (NM_019854.2,1153-1171).
cagtagacttggattttaa

SEQ ID NO: 214330 - DNA, 19 bp, Homo sapiens
  siRNA target sequence for HRMT1L3 (NM_019854.2,1172-1190).
gggacagctgtgtgaaaca

SEQ ID NO: 214331 - DNA, 19 bp, Homo sapiens
  siRNA target sequence for HRMT1L3 (NM_019854.2,1178-1196).
gctgtgtgaaacatctgta

SEQ ID NO: 214332 - DNA, 19 bp, Homo sapiens
  siRNA target sequence for HRMT1L3 (NM_019854.2,1179-1197).
ctgtgtgaaacatctgtat

SEQ ID NO: 214333 - DNA, 19 bp, Homo sapiens
  siRNA target sequence for HRMT1L3 (NM_019854.2,1181-1199).
gtgtgaaacatctgtatct

SEQ ID NO: 214334 - DNA, 19 bp, Homo sapiens
  siRNA target sequence for HRMT1L3 (NM_019854.2,1192-1210).
ctgtatctaatgactacaa

SEQ ID NO: 214335 - DNA, 19 bp, Homo sapiens
  siRNA target sequence for LCMT1 (NM_016015.2,267-285).
gggtggcaaatcttttcat

SEQ ID NO: 214336 - DNA, 19 bp, Homo sapiens
  siRNA target sequence for LCMT1 (NM_016015.2,502-520).
gcttataaaggcatttcta

SEQ ID NO: 214337 - DNA, 19 bp, Homo sapiens
  siRNA target sequence for LCMT1 (NM_016015.2,554-572).
cttggggcaggcatggata

SEQ ID NO: 214338 - DNA, 19 bp, Homo sapiens
  siRNA target sequence for LCMT1 (NM_016015.2,625-643).
ggttgactttccaatgatt

SEQ ID NO: 214339 - DNA, 19 bp, Homo sapiens
  siRNA target sequence for LCMT1 (NM_016015.2,648-666).
cgagaaagctgcacagtat

SEQ ID NO: 214340 - DNA, 19 bp, Homo sapiens
  siRNA target sequence for LCMT1 (NM_016015.2,739-757).
catactggattcaaagaga

SEQ ID NO: 214341 - DNA, 19 bp, Homo sapiens
  siRNA target sequence for LCMT1 (NM_016015.2,754-772).
gagatatgccgttattgga

SEQ ID NO: 214342 - DNA, 19 bp, Homo sapiens
  siRNA target sequence for LCMT1 (NM_016015.2,857-875).
gaatgtgtgctggtttaca

SEQ ID NO: 214343 - DNA, 19 bp, Homo sapiens
  siRNA target sequence for LCMT1 (NM_016015.2,907-925).
gtgggcagccaacagtttt

SEQ ID NO: 214344 - DNA, 19 bp, Homo sapiens
  siRNA target sequence for LCMT1 (NM_016015.2,909-927).
gggcagccaacagttttga

SEQ ID NO: 214345 - DNA, 19 bp, Homo sapiens
  siRNA target sequence for LCMT1 (NM_016015.2,930-948).
gagccatgttcataaacta

SEQ ID NO: 214346 - DNA, 19 bp, Homo sapiens
  siRNA target sequence for LCMT1 (NM_016015.2,972-990).
ggtttgggcagatcatgat

SEQ ID NO: 214347 - DNA, 19 bp, Homo sapiens
  siRNA target sequence for LCMT1 (NM_016015.2,1030-1048).
ggagacctgcaagtcatta

SEQ ID NO: 214348 - DNA, 19 bp, Homo sapiens
  siRNA target sequence for LCMT1 (NM_016015.2,1044-1062).
cattagagtcacagaaaga

SEQ ID NO: 214349 - DNA, 19 bp, Homo sapiens
  siRNA target sequence for LCMT1 (NM_016015.2,1092-1110).
catcggccgtcgacatgat

SEQ ID NO: 214350 - DNA, 19 bp, Homo sapiens
  siRNA target sequence for LCMT1 (NM_016015.2,1144-1162).
gagcaggatagaatcactt

SEQ ID NO: 214351 - DNA, 19 bp, Homo sapiens
  siRNA target sequence for LCMT1 (NM_016015.2,1193-1211).
cagctcatgcggcattact

SEQ ID NO: 214352 - DNA, 19 bp, Homo sapiens
  siRNA target sequence for LCMT1 (NM_016015.2,1249-1267).
gctgaaggagataacttat

SEQ ID NO: 214353 - DNA, 19 bp, Homo sapiens
  siRNA target sequence for LCMT1 (NM_016309.1,47-65).
cagagggaatcctctatca

SEQ ID NO: 214354 - DNA, 19 bp, Homo sapiens
  siRNA target sequence for MGC17301 (NM_152637.1,355-373).
cggaaccggagccaacttt

SEQ ID NO: 214355 - DNA, 19 bp, Homo sapiens
  siRNA target sequence for MGC17301 (NM_152637.1,363-381).
gagccaactttcagttcta

SEQ ID NO: 214356 - DNA, 19 bp, Homo sapiens
  siRNA target sequence for MGC17301 (NM_152637.1,414-432).
caaatccccactttgagaa

SEQ ID NO: 214357 - DNA, 19 bp, Homo sapiens
  siRNA target sequence for MGC17301 (NM_152637.1,457-475).
gaacaggcacctccaatat

SEQ ID NO: 214358 - DNA, 19 bp, Homo sapiens
  siRNA target sequence for MGC17301 (NM_152637.1,614-632).
ccgggaggtgtgctctttt

SEQ ID NO: 214359 - DNA, 19 bp, Homo sapiens
  siRNA target sequence for MGC17301 (NM_152637.1,615-633).
cgggaggtgtgctcttttt

SEQ ID NO: 214360 - DNA, 19 bp, Homo sapiens
  siRNA target sequence for MGC17301 (NM_152637.1,692-710).
gagcccacctggaaacaca

SEQ ID NO: 214361 - DNA, 19 bp, Homo sapiens
  siRNA target sequence for MGC17301 (NM_152637.1,694-712).
gcccacctggaaacacatt

SEQ ID NO: 214362 - DNA, 19 bp, Homo sapiens
  siRNA target sequence for MGC2408 (NM_032331.2,137-155).
gattctgccccctacgatt

SEQ ID NO: 214363 - DNA, 19 bp, Homo sapiens
  siRNA target sequence for MGC2408 (NM_032331.2,141-159).
ctgccccctacgattggtt

SEQ ID NO: 214364 - DNA, 19 bp, Homo sapiens
  siRNA target sequence for MGC2408 (NM_032331.2,393-411).
ccagtgcttcttttgatgt

SEQ ID NO: 214365 - DNA, 19 bp, Homo sapiens
  siRNA target sequence for MGC2408 (NM_032331.2,533-551).
cctggaggccggtttatct

SEQ ID NO: 214366 - DNA, 19 bp, Homo sapiens
  siRNA target sequence for MGC2408 (NM_032331.2,536-554).
ggaggccggtttatctcaa

SEQ ID NO: 214367 - DNA, 19 bp, Homo sapiens
  siRNA target sequence for MGC2408 (NM_032331.2,537-555).
gaggccggtttatctcaat

SEQ ID NO: 214368 - DNA, 19 bp, Homo sapiens
  siRNA target sequence for MGC2408 (NM_032331.2,539-557).
ggccggtttatctcaatga

SEQ ID NO: 214369 - DNA, 19 bp, Homo sapiens
  siRNA target sequence for MGC2408 (NM_032331.2,541-559).
ccggtttatctcaatgact

SEQ ID NO: 214370 - DNA, 19 bp, Homo sapiens
  siRNA target sequence for MGC2408 (NM_032331.2,542-560).
cggtttatctcaatgactt

SEQ ID NO: 214371 - DNA, 19 bp, Homo sapiens
  siRNA target sequence for MGC2408 (NM_032331.2,574-592).
ctttcggaccagacactat

SEQ ID NO: 214372 - DNA, 19 bp, Homo sapiens
  siRNA target sequence for MGC2408 (NM_032331.2,589-607).
ctatgcccaagcctattat

SEQ ID NO: 214373 - DNA, 19 bp, Homo sapiens
  siRNA target sequence for MGC2408 (NM_032331.2,616-634).
cctgaggcatgctacctat

SEQ ID NO: 214374 - DNA, 19 bp, Homo sapiens
  siRNA target sequence for MGC24132 (NM_152396.1,429-447).
gaggagctaagatcatgta

SEQ ID NO: 214375 - DNA, 19 bp, Homo sapiens
  siRNA target sequence for MGC24132 (NM_152396.1,431-449).
ggagctaagatcatgtaga

SEQ ID NO: 214376 - DNA, 19 bp, Homo sapiens
  siRNA target sequence for MGC24132 (NM_152396.1,450-468).
gagtttgaagatcaaaagt

SEQ ID NO: 214377 - DNA, 19 bp, Homo sapiens
  siRNA target sequence for MGC24132 (NM_152396.1,492-510).
ggggttggaaactgtttat

SEQ ID NO: 214378 - DNA, 19 bp, Homo sapiens
  siRNA target sequence for MGC24132 (NM_152396.1,505-523).
gtttattcccacttttaga

SEQ ID NO: 214379 - DNA, 19 bp, Homo sapiens
  siRNA target sequence for MGC24132 (NM_152396.1,565-583).
caagagccattgaatatgt

SEQ ID NO: 214380 - DNA, 19 bp, Homo sapiens
  siRNA target sequence for MGC24132 (NM_152396.1,568-586).
gagccattgaatatgttaa

SEQ ID NO: 214381 - DNA, 19 bp, Homo sapiens
  siRNA target sequence for MGC24132 (NM_152396.1,629-647).
gtgtgatctgactaaagat

SEQ ID NO: 214382 - DNA, 19 bp, Homo sapiens
  siRNA target sequence for MGC24132 (NM_152396.1,631-649).
gtgatctgactaaagatga

SEQ ID NO: 214383 - DNA, 19 bp, Homo sapiens
  siRNA target sequence for MGC24132 (NM_152396.1,670-688).
cagagtctgtggatgttgt

SEQ ID NO: 214384 - DNA, 19 bp, Homo sapiens
  siRNA target sequence for MGC24132 (NM_152396.1,672-690).
gagtctgtggatgttgtta

SEQ ID NO: 214385 - DNA, 19 bp, Homo sapiens
  siRNA target sequence for MGC24132 (NM_152396.1,676-694).
ctgtggatgttgttatgtt

SEQ ID NO: 214386 - DNA, 19 bp, Homo sapiens
  siRNA target sequence for MGC24132 (NM_152396.1,709-727).
cagctgttcatcctgataa

SEQ ID NO: 214387 - DNA, 19 bp, Homo sapiens
  siRNA target sequence for MGC24132 (NM_152396.1,711-729).
gctgttcatcctgataaga

SEQ ID NO: 214388 - DNA, 19 bp, Homo sapiens
  siRNA target sequence for MGC24132 (NM_152396.1,712-730).
ctgttcatcctgataagat

SEQ ID NO: 214389 - DNA, 19 bp, Homo sapiens
  siRNA target sequence for MGC24132 (NM_152396.1,734-752).
ccttgtcttacaaaacatt

SEQ ID NO: 214390 - DNA, 19 bp, Homo sapiens
  siRNA target sequence for MGC24132 (NM_152396.1,738-756).
gtcttacaaaacatttaca

SEQ ID NO: 214391 - DNA, 19 bp, Homo sapiens
  siRNA target sequence for MGC24132 (NM_152396.1,790-808).
gtgactacggactgtatga

SEQ ID NO: 214392 - DNA, 19 bp, Homo sapiens
  siRNA target sequence for MGC24132 (NM_152396.1,794-812).
ctacggactgtatgatcat

SEQ ID NO: 214393 - DNA, 19 bp, Homo sapiens
  siRNA target sequence for MGC24132 (NM_152396.1,873-891).
gggaccagatcatattttt

SEQ ID NO: 214394 - DNA, 19 bp, Homo sapiens
  siRNA target sequence for MGC24132 (NM_152396.1,917-935).
ctttatggacacaggttat

SEQ ID NO: 214395 - DNA, 19 bp, Homo sapiens
  siRNA target sequence for MGC24132 (NM_152396.1,931-949).
gttatgaagaagtggtaaa

SEQ ID NO: 214396 - DNA, 19 bp, Homo sapiens
  siRNA target sequence for MGC24132 (NM_152396.1,942-960).
gtggtaaacgagtatgtgt

SEQ ID NO: 214397 - DNA, 19 bp, Homo sapiens
  siRNA target sequence for MGC24132 (NM_152396.1,963-981).
cgagagacggtgaataaaa

SEQ ID NO: 214398 - DNA, 19 bp, Homo sapiens
  siRNA target sequence for MGC50559 (NM_173802.2,357-375).
gcagtggtcttctcttgtt

SEQ ID NO: 214399 - DNA, 19 bp, Homo sapiens
  siRNA target sequence for MGC50559 (NM_173802.2,412-430).
ctttttggaccctgagata

SEQ ID NO: 214400 - DNA, 19 bp, Homo sapiens
  siRNA target sequence for MGC50559 (NM_173802.2,546-564).
ggccccacagtgatcctta

SEQ ID NO: 214401 - DNA, 19 bp, Homo sapiens
  siRNA target sequence for MGC50559 (NM_173802.2,560-578).
ccttactgggcaatctact

SEQ ID NO: 214402 - DNA, 19 bp, Homo sapiens
  siRNA target sequence for MGC50559 (NM_173802.2,593-611).
gccctgtctaggtatcttt

SEQ ID NO: 214403 - DNA, 19 bp, Homo sapiens
  siRNA target sequence for MGC50559 (NM_173802.2,600-618).
ctaggtatcttttggataa

SEQ ID NO: 214404 - DNA, 19 bp, Homo sapiens
  siRNA target sequence for MGC50559 (NM_173802.2,604-622).
gtatcttttggataatcct

SEQ ID NO: 214405 - DNA, 19 bp, Homo sapiens
  siRNA target sequence for MGC50559 (NM_173802.2,675-693).
cagctattgctgctaagat

SEQ ID NO: 214406 - DNA, 19 bp, Homo sapiens
  siRNA target sequence for MGC50559 (NM_173802.2,677-695).
gctattgctgctaagatga

SEQ ID NO: 214407 - DNA, 19 bp, Homo sapiens
  siRNA target sequence for MGC50559 (NM_173802.2,708-726).
ggatcttggccaatgacat

SEQ ID NO: 214408 - DNA, 19 bp, Homo sapiens
  siRNA target sequence for MGC50559 (NM_173802.2,709-727).
gatcttggccaatgacata

SEQ ID NO: 214409 - DNA, 19 bp, Homo sapiens
  siRNA target sequence for MGC50559 (NM_173802.2,740-758).
ggaatggctattacactaa

SEQ ID NO: 214410 - DNA, 19 bp, Homo sapiens
  siRNA target sequence for MGC50559 (NM_173802.2,745-763).
ggctattacactaaattgt

SEQ ID NO: 214411 - DNA, 19 bp, Homo sapiens
  siRNA target sequence for MGC50559 (NM_173802.2,755-773).
ctaaattgtgaattgaaca

SEQ ID NO: 214412 - DNA, 19 bp, Homo sapiens
  siRNA target sequence for MGC50559 (NM_173802.2,774-792).
gactgaatccttttcctat

SEQ ID NO: 214413 - DNA, 19 bp, Homo sapiens
  siRNA target sequence for MGC50559 (NM_173802.2,829-847).
gtgggaccttgttgttctt

SEQ ID NO: 214414 - DNA, 19 bp, Homo sapiens
  siRNA target sequence for MGC50559 (NM_173802.2,839-857).
gttgttcttggcgatatgt

SEQ ID NO: 214415 - DNA, 19 bp, Homo sapiens
  siRNA target sequence for MGC50559 (NM_173802.2,842-860).
gttcttggcgatatgtttt

SEQ ID NO: 214416 - DNA, 19 bp, Homo sapiens
  siRNA target sequence for MGC50559 (NM_173802.2,849-867).
gcgatatgttttatgatga

SEQ ID NO: 214417 - DNA, 19 bp, Homo sapiens
  siRNA target sequence for MGC50559 (NM_173802.2,850-868).
cgatatgttttatgatgaa

SEQ ID NO: 214418 - DNA, 19 bp, Homo sapiens
  siRNA target sequence for MGC50559 (NM_173802.2,871-889).
ccttgcagatagtcttcat

SEQ ID NO: 214419 - DNA, 19 bp, Homo sapiens
  siRNA target sequence for MGC50559 (NM_173802.2,907-925).
cttctggacctatagaact

SEQ ID NO: 214420 - DNA, 19 bp, Homo sapiens
  siRNA target sequence for NCOA6IP (NM_024831.5,497-515).
gccgcgtggcggaaatgtt

SEQ ID NO: 214421 - DNA, 19 bp, Homo sapiens
  siRNA target sequence for NCOA6IP (NM_024831.5,498-516).
ccgcgtggcggaaatgttt

SEQ ID NO: 214422 - DNA, 19 bp, Homo sapiens
  siRNA target sequence for NCOA6IP (NM_024831.5,500-518).
gcgtggcggaaatgtttct

SEQ ID NO: 214423 - DNA, 19 bp, Homo sapiens
  siRNA target sequence for NCOA6IP (NM_024831.5,502-520).
gtggcggaaatgtttctct

SEQ ID NO: 214424 - DNA, 19 bp, Homo sapiens
  siRNA target sequence for NCOA6IP (NM_024831.5,533-551).
gggaggattgtaagatact

SEQ ID NO: 214425 - DNA, 19 bp, Homo sapiens
  siRNA target sequence for NCOA6IP (NM_024831.5,574-592).
gtggaggatcgaaaattgt

SEQ ID NO: 214426 - DNA, 19 bp, Homo sapiens
  siRNA target sequence for NCOA6IP (NM_024831.5,577-595).
gaggatcgaaaattgtaca

SEQ ID NO: 214427 - DNA, 19 bp, Homo sapiens
  siRNA target sequence for NCOA6IP (NM_024831.5,579-597).
ggatcgaaaattgtacaat

SEQ ID NO: 214428 - DNA, 19 bp, Homo sapiens
  siRNA target sequence for NCOA6IP (NM_024831.5,580-598).
gatcgaaaattgtacaatt

SEQ ID NO: 214429 - DNA, 19 bp, Homo sapiens
  siRNA target sequence for NCOA6IP (NM_024831.5,681-699).
ctgtggtactgcagaatca

SEQ ID NO: 214430 - DNA, 19 bp, Homo sapiens
  siRNA target sequence for NCOA6IP (NM_024831.5,683-701).
gtggtactgcagaatcaca

SEQ ID NO: 214431 - DNA, 19 bp, Homo sapiens
  siRNA target sequence for NCOA6IP (NM_024831.5,712-730).
ggcataggcctggatgaaa

SEQ ID NO: 214432 - DNA, 19 bp, Homo sapiens
  siRNA target sequence for NCOA6IP (NM_024831.5,768-786).
gggattgccacttcaattt

SEQ ID NO: 214433 - DNA, 19 bp, Homo sapiens
  siRNA target sequence for NCOA6IP (NM_024831.5,788-806).
gtaggataactgcacataa

SEQ ID NO: 214434 - DNA, 19 bp, Homo sapiens
  siRNA target sequence for NCOA6IP (NM_024831.5,792-810).
gataactgcacataaggat

SEQ ID NO: 214435 - DNA, 19 bp, Homo sapiens
  siRNA target sequence for NCOA6IP (NM_024831.5,814-832).
gaggtatctatgaatacta

SEQ ID NO: 214436 - DNA, 19 bp, Homo sapiens
  siRNA target sequence for NCOA6IP (NM_024831.5,816-834).
ggtatctatgaatactaga

SEQ ID NO: 214437 - DNA, 19 bp, Homo sapiens
  siRNA target sequence for NCOA6IP (NM_024831.5,817-835).
gtatctatgaatactagaa

SEQ ID NO: 214438 - DNA, 19 bp, Homo sapiens
  siRNA target sequence for NCOA6IP (NM_024831.5,924-942).
cgacattttggcttcagat

SEQ ID NO: 214439 - DNA, 19 bp, Homo sapiens
  siRNA target sequence for NCOA6IP (NM_024831.5,938-956).
cagatgatccatcttcaat

SEQ ID NO: 214440 - DNA, 19 bp, Homo sapiens
  siRNA target sequence for NCOA6IP (NM_024831.5,947-965).
catcttcaattgaacagta

SEQ ID NO: 214441 - DNA, 19 bp, Homo sapiens
  siRNA target sequence for NCOA6IP (NM_024831.5,950-968).
cttcaattgaacagtatga

SEQ ID NO: 214442 - DNA, 19 bp, Homo sapiens
  siRNA target sequence for NCOA6IP (NM_024831.5,953-971).
caattgaacagtatgagaa

SEQ ID NO: 214443 - DNA, 19 bp, Homo sapiens
  siRNA target sequence for NCOA6IP (NM_024831.5,1046-1064).
caaagctagaaattacaga

SEQ ID NO: 214444 - DNA, 19 bp, Homo sapiens
  siRNA target sequence for NCOA6IP (NM_024831.5,1077-1095).
gtattggaatgaatatgga

SEQ ID NO: 214445 - DNA, 19 bp, Homo sapiens
  siRNA target sequence for NCOA6IP (NM_024831.5,1099-1117).
ggactattgtggcaaagtt

SEQ ID NO: 214446 - DNA, 19 bp, Homo sapiens
  siRNA target sequence for NCOA6IP (NM_024831.5,1132-1150).
ccgggtcaagcactatctt

SEQ ID NO: 214447 - DNA, 19 bp, Homo sapiens
  siRNA target sequence for NCOA6IP (NM_024831.5,1134-1152).
gggtcaagcactatcttct

SEQ ID NO: 214448 - DNA, 19 bp, Homo sapiens
  siRNA target sequence for NCOA6IP (NM_024831.5,1187-1205).
gggagcaacattatagtca

SEQ ID NO: 214449 - DNA, 19 bp, Homo sapiens
  siRNA target sequence for NCOA6IP (NM_024831.5,1267-1285).
gcctcgcaaagctgtgata

SEQ ID NO: 214450 - DNA, 19 bp, Homo sapiens
  siRNA target sequence for NCOA6IP (NM_024831.5,1269-1287).
ctcgcaaagctgtgataca

SEQ ID NO: 214451 - DNA, 19 bp, Homo sapiens
  siRNA target sequence for NCOA6IP (NM_024831.5,1277-1295).
gctgtgatacagatactta

SEQ ID NO: 214452 - DNA, 19 bp, Homo sapiens
  siRNA target sequence for NCOA6IP (NM_024831.5,1318-1336).
gacaagaacgatgaaaaat

SEQ ID NO: 214453 - DNA, 19 bp, Homo sapiens
  siRNA target sequence for NCOA6IP (NM_024831.5,1326-1344).
cgatgaaaaatgcatgaaa

SEQ ID NO: 214454 - DNA, 19 bp, Homo sapiens
  siRNA target sequence for NCOA6IP (NM_024831.5,1370-1388).
cacctattatggttgataa

SEQ ID NO: 214455 - DNA, 19 bp, Homo sapiens
  siRNA target sequence for NCOA6IP (NM_024831.5,1394-1412).
gctctggtacaagtgataa

SEQ ID NO: 214456 - DNA, 19 bp, Homo sapiens
  siRNA target sequence for NCOA6IP (NM_024831.5,1413-1431).
ggatcatagtgaaatactt

SEQ ID NO: 214457 - DNA, 19 bp, Homo sapiens
  siRNA target sequence for NCOA6IP (NM_024831.5,1499-1517).
gtcatgatggtcatcaaca

SEQ ID NO: 214458 - DNA, 19 bp, Homo sapiens
  siRNA target sequence for NCOA6IP (NM_024831.5,1508-1526).
gtcatcaacagctaagtga

SEQ ID NO: 214459 - DNA, 19 bp, Homo sapiens
  siRNA target sequence for NCOA6IP (NM_024831.5,1516-1534).
cagctaagtgaagttagta

SEQ ID NO: 214460 - DNA, 19 bp, Homo sapiens
  siRNA target sequence for NCOA6IP (NM_024831.5,1560-1578).
ccaaagtgaaccacgtaat

SEQ ID NO: 214461 - DNA, 19 bp, Homo sapiens
  siRNA target sequence for NCOA6IP (NM_024831.5,1808-1826).
gttcccttctaggattcaa

SEQ ID NO: 214462 - DNA, 19 bp, Homo sapiens
  siRNA target sequence for NCOA6IP (NM_024831.5,1833-1851).
ctcaggacaaaaatatggt

SEQ ID NO: 214463 - DNA, 19 bp, Homo sapiens
  siRNA target sequence for NCOA6IP (NM_024831.5,1870-1888).
catcggcaggtcaggtatt

SEQ ID NO: 214464 - DNA, 19 bp, Homo sapiens
  siRNA target sequence for NCOA6IP (NM_024831.5,1874-1892).
ggcaggtcaggtatttaga

SEQ ID NO: 214465 - DNA, 19 bp, Homo sapiens
  siRNA target sequence for NCOA6IP (NM_024831.5,1876-1894).
caggtcaggtatttagaga

SEQ ID NO: 214466 - DNA, 19 bp, Homo sapiens
  siRNA target sequence for NCOA6IP (NM_024831.5,1881-1899).
caggtatttagagaagaat

SEQ ID NO: 214467 - DNA, 19 bp, Homo sapiens
  siRNA target sequence for NCOA6IP (NM_024831.5,1900-1918).
gtgaagcttaagtctaagt

SEQ ID NO: 214468 - DNA, 19 bp, Homo sapiens
  siRNA target sequence for NCOA6IP (NM_024831.5,1921-1939).
ctagacatgcgcagacaaa

SEQ ID NO: 214469 - DNA, 19 bp, Homo sapiens
  siRNA target sequence for NCOA6IP (NM_024831.5,1924-1942).
gacatgcgcagacaaataa

SEQ ID NO: 214470 - DNA, 19 bp, Homo sapiens
  siRNA target sequence for NCOA6IP (NM_024831.5,2036-2054).
catgggttaataaaccaat

SEQ ID NO: 214471 - DNA, 19 bp, Homo sapiens
  siRNA target sequence for NCOA6IP (NM_024831.5,2078-2096).
catcttctcatgacaatgt

SEQ ID NO: 214472 - DNA, 19 bp, Homo sapiens
  siRNA target sequence for NCOA6IP (NM_024831.5,2100-2118).
cgacgcttccacaagtagt

SEQ ID NO: 214473 - DNA, 19 bp, Homo sapiens
  siRNA target sequence for NCOA6IP (NM_024831.5,2103-2121).
cgcttccacaagtagtgat

SEQ ID NO: 214474 - DNA, 19 bp, Homo sapiens
  siRNA target sequence for NCOA6IP (NM_024831.5,2104-2122).
gcttccacaagtagtgatt

SEQ ID NO: 214475 - DNA, 19 bp, Homo sapiens
  siRNA target sequence for NCOA6IP (NM_024831.5,2108-2126).
ccacaagtagtgattcaga

SEQ ID NO: 214476 - DNA, 19 bp, Homo sapiens
  siRNA target sequence for NCOA6IP (NM_024831.5,2136-2154).
catgtctgttaaaaaaggt

SEQ ID NO: 214477 - DNA, 19 bp, Homo sapiens
  siRNA target sequence for NCOA6IP (NM_024831.5,2158-2176).
gacctactggagactaata

SEQ ID NO: 214478 - DNA, 19 bp, Homo sapiens
  siRNA target sequence for NCOA6IP (NM_024831.5,2160-2178).
cctactggagactaataat

SEQ ID NO: 214479 - DNA, 19 bp, Homo sapiens
  siRNA target sequence for NCOA6IP (NM_024831.5,2247-2265).
cagcttgctagcaactgtt

SEQ ID NO: 214480 - DNA, 19 bp, Homo sapiens
  siRNA target sequence for NCOA6IP (NM_024831.5,2274-2292).
gcaggattgtgttactcaa

SEQ ID NO: 214481 - DNA, 19 bp, Homo sapiens
  siRNA target sequence for NCOA6IP (NM_024831.5,2304-2322).
ctcccgccaggcagaaact

SEQ ID NO: 214482 - DNA, 19 bp, Homo sapiens
  siRNA target sequence for NCOA6IP (NM_024831.5,2398-2416).
gttcctgagctggcaaaat

SEQ ID NO: 214483 - DNA, 19 bp, Homo sapiens
  siRNA target sequence for NCOA6IP (NM_024831.5,2401-2419).
cctgagctggcaaaatact

SEQ ID NO: 214484 - DNA, 19 bp, Homo sapiens
  siRNA target sequence for NCOA6IP (NM_024831.5,2436-2454).
gctcttctcccgttttgat

SEQ ID NO: 214485 - DNA, 19 bp, Homo sapiens
  siRNA target sequence for NCOA6IP (NM_024831.5,2439-2457).
cttctcccgttttgatgat

SEQ ID NO: 214486 - DNA, 19 bp, Homo sapiens
  siRNA target sequence for NCOA6IP (NM_024831.5,2489-2507).
cagttacacccgagaagat

SEQ ID NO: 214487 - DNA, 19 bp, Homo sapiens
  siRNA target sequence for NCOA6IP (NM_024831.5,2502-2520).
gaagattgctgaacacatt

SEQ ID NO: 214488 - DNA, 19 bp, Homo sapiens
  siRNA target sequence for NCOA6IP (NM_024831.5,2517-2535).
cattgctggccgtgttagt

SEQ ID NO: 214489 - DNA, 19 bp, Homo sapiens
  siRNA target sequence for NCOA6IP (NM_024831.5,2530-2548).
gttagtcagtccttcaagt

SEQ ID NO: 214490 - DNA, 19 bp, Homo sapiens
  siRNA target sequence for NCOA6IP (NM_024831.5,2576-2594).
gagttggaggaaataccat

SEQ ID NO: 214491 - DNA, 19 bp, Homo sapiens
  siRNA target sequence for NCOA6IP (NM_024831.5,2592-2610).
cattcagtttgccttaaca

SEQ ID NO: 214492 - DNA, 19 bp, Homo sapiens
  siRNA target sequence for NCOA6IP (NM_024831.5,2655-2673).
ccttgctcgcaataatgca

SEQ ID NO: 214493 - DNA, 19 bp, Homo sapiens
  siRNA target sequence for NCOA6IP (NM_024831.5,2662-2680).
cgcaataatgcagaagttt

SEQ ID NO: 214494 - DNA, 19 bp, Homo sapiens
  siRNA target sequence for NCOA6IP (NM_024831.5,2663-2681).
gcaataatgcagaagttta

SEQ ID NO: 214495 - DNA, 19 bp, Homo sapiens
  siRNA target sequence for NCOA6IP (NM_024831.5,2858-2876).
ctaagaagatcactaataa

SEQ ID NO: 214496 - DNA, 19 bp, Homo sapiens
  siRNA target sequence for NCOA6IP (NM_024831.5,2865-2883).
gatcactaataatattgtt

SEQ ID NO: 214497 - DNA, 19 bp, Homo sapiens
  siRNA target sequence for NCOA6IP (NM_024831.5,2961-2979).
gaacttccttaacaacaaa

SEQ ID NO: 214498 - DNA, 19 bp, Homo sapiens
  siRNA target sequence for NCOA6IP (NM_024831.5,2976-2994).
caaattgaagacaatcact

SEQ ID NO: 214499 - DNA, 19 bp, Homo sapiens
  siRNA target sequence for SRM (NM_003132.1,236-254).
ctcgtcttccgcagtaaga

SEQ ID NO: 214500 - DNA, 19 bp, Homo sapiens
  siRNA target sequence for SRM (NM_003132.1,363-381).
cgcgaaaggtgctgatcat

SEQ ID NO: 214501 - DNA, 19 bp, Homo sapiens
  siRNA target sequence for SRM (NM_003132.1,539-557).
gtgggtgacggttttgagt

SEQ ID NO: 214502 - DNA, 19 bp, Homo sapiens
  siRNA target sequence for SRM (NM_003132.1,543-561).
gtgacggttttgagttcat

SEQ ID NO: 214503 - DNA, 19 bp, Homo sapiens
  siRNA target sequence for SRM (NM_003132.1,545-563).
gacggttttgagttcatga

SEQ ID NO: 214504 - DNA, 19 bp, Homo sapiens
  siRNA target sequence for SRM (NM_003132.1,547-565).
cggttttgagttcatgaaa

SEQ ID NO: 214505 - DNA, 19 bp, Homo sapiens
  siRNA target sequence for SRM (NM_003132.1,578-596).
gccttcgacgtgatcatca

SEQ ID NO: 214506 - DNA, 19 bp, Homo sapiens
  siRNA target sequence for SRM (NM_003132.1,905-923).
cagctgaagtactacaact

SEQ ID NO: 214507 - DNA, 19 bp, Homo sapiens
  siRNA target sequence for WBSCR22 (NM_017528.2,120-138).
cagaagcccggaaatacgt

SEQ ID NO: 214508 - DNA, 19 bp, Homo sapiens
  siRNA target sequence for WBSCR22 (NM_017528.2,142-160).
caactcacggatgattgat

SEQ ID NO: 214509 - DNA, 19 bp, Homo sapiens
  siRNA target sequence for WBSCR22 (NM_017528.2,147-165).
cacggatgattgatatcca

SEQ ID NO: 214510 - DNA, 19 bp, Homo sapiens
  siRNA target sequence for WBSCR22 (NM_017528.2,252-270).
ggctgagtggaagttatct

SEQ ID NO: 214511 - DNA, 19 bp, Homo sapiens
  siRNA target sequence for WBSCR22 (NM_017528.2,328-346).
ggctgtggaccgagagata

SEQ ID NO: 214512 - DNA, 19 bp, Homo sapiens
  siRNA target sequence for WBSCR22 (NM_017528.2,440-458).
ctctgtaatgctaacaaga

SEQ ID NO: 214513 - DNA, 19 bp, Homo sapiens
  siRNA target sequence for WBSCR22 (NM_017528.2,478-496).
gcgcctgtactgctttttt

SEQ ID NO: 214514 - DNA, 19 bp, Homo sapiens
  siRNA target sequence for WBSCR22 (NM_017528.2,481-499).
cctgtactgcttttttgct

SEQ ID NO: 214515 - DNA, 19 bp, Homo sapiens
  siRNA target sequence for WBSCR22 (NM_017528.2,622-640).
ggtagactaccctaacagt

SEQ ID NO: 214516 - DNA, 19 bp, Homo sapiens
  siRNA target sequence for WBSCR22 (NM_017528.2,633-651).
ctaacagtgccaaagcaaa

SEQ ID NO: 214517 - DNA, 19 bp, Homo sapiens
  siRNA target sequence for WBSCR22 (NM_017528.2,675-693).
ctgggccttcgacctttat

SEQ ID NO: 214518 - DNA, 19 bp, Homo sapiens
  siRNA target sequence for WBSCR22 (NM_017528.2,679-697).
gccttcgacctttatacca

SEQ ID NO: 214519 - DNA, 19 bp, Homo sapiens
  siRNA target sequence for WBSCR22 (NM_017528.2,755-773).
gagaggttcccattaagga

SEQ ID NO: 214520 - DNA, 19 bp, Homo sapiens
  siRNA target sequence for GART (NM_000819.3,91-109).
gcagcccgagtacttataa

SEQ ID NO: 214521 - DNA, 19 bp, Homo sapiens
  siRNA target sequence for GART (NM_000819.3,92-110).
cagcccgagtacttataat

SEQ ID NO: 214522 - DNA, 19 bp, Homo sapiens
  siRNA target sequence for GART (NM_000819.3,152-170).
cacagtctcatcatgtcaa

SEQ ID NO: 214523 - DNA, 19 bp, Homo sapiens
  siRNA target sequence for GART (NM_000819.3,156-174).
gtctcatcatgtcaaacaa

SEQ ID NO: 214524 - DNA, 19 bp, Homo sapiens
  siRNA target sequence for GART (NM_000819.3,158-176).
ctcatcatgtcaaacaagt

SEQ ID NO: 214525 - DNA, 19 bp, Homo sapiens
  siRNA target sequence for GART (NM_000819.3,205-223).
gcctgctctgaaaagattt

SEQ ID NO: 214526 - DNA, 19 bp, Homo sapiens
  siRNA target sequence for GART (NM_000819.3,224-242).
caaataccgccatctcaat

SEQ ID NO: 214527 - DNA, 19 bp, Homo sapiens
  siRNA target sequence for GART (NM_000819.3,382-400).
gaagcggctcagttagagt

SEQ ID NO: 214528 - DNA, 19 bp, Homo sapiens
  siRNA target sequence for GART (NM_000819.3,590-608).
gcaaagctgtacaagagat

SEQ ID NO: 214529 - DNA, 19 bp, Homo sapiens
  siRNA target sequence for GART (NM_000819.3,644-662).
caattgtcattgaagaact

SEQ ID NO: 214530 - DNA, 19 bp, Homo sapiens
  siRNA target sequence for GART (NM_000819.3,780-798).
gggaatgggagcctattgt

SEQ ID NO: 214531 - DNA, 19 bp, Homo sapiens
  siRNA target sequence for GART (NM_000819.3,804-822).
ccctcaggtttctaatgat

SEQ ID NO: 214532 - DNA, 19 bp, Homo sapiens
  siRNA target sequence for GART (NM_000819.3,808-826).
caggtttctaatgatctat

SEQ ID NO: 214533 - DNA, 19 bp, Homo sapiens
  siRNA target sequence for GART (NM_000819.3,810-828).
ggtttctaatgatctatta

SEQ ID NO: 214534 - DNA, 19 bp, Homo sapiens
  siRNA target sequence for GART (NM_000819.3,876-894).
gcaagagggtactccatat

SEQ ID NO: 214535 - DNA, 19 bp, Homo sapiens
  siRNA target sequence for GART (NM_000819.3,877-895).
caagagggtactccatata

SEQ ID NO: 214536 - DNA, 19 bp, Homo sapiens
  siRNA target sequence for GART (NM_000819.3,887-905).
ctccatatacaggtattct

SEQ ID NO: 214537 - DNA, 19 bp, Homo sapiens
  siRNA target sequence for GART (NM_000819.3,930-948).
gaatggcccaaaagttcta

SEQ ID NO: 214538 - DNA, 19 bp, Homo sapiens
  siRNA target sequence for GART (NM_000819.3,936-954).
cccaaaagttctagagttt

SEQ ID NO: 214539 - DNA, 19 bp, Homo sapiens
  siRNA target sequence for GART (NM_000819.3,937-955).
ccaaaagttctagagttta

SEQ ID NO: 214540 - DNA, 19 bp, Homo sapiens
  siRNA target sequence for GART (NM_000819.3,938-956).
caaaagttctagagtttaa

SEQ ID NO: 214541 - DNA, 19 bp, Homo sapiens
  siRNA target sequence for GART (NM_000819.3,951-969).
gtttaattgccgttttggt

SEQ ID NO: 214542 - DNA, 19 bp, Homo sapiens
  siRNA target sequence for GART (NM_000819.3,970-988).
gatccagagtgccaagtaa

SEQ ID NO: 214543 - DNA, 19 bp, Homo sapiens
  siRNA target sequence for GART (NM_000819.3,974-992).
cagagtgccaagtaatcct

SEQ ID NO: 214544 - DNA, 19 bp, Homo sapiens
  siRNA target sequence for GART (NM_000819.3,985-1003).
gtaatcctcccacttctta

SEQ ID NO: 214545 - DNA, 19 bp, Homo sapiens
  siRNA target sequence for GART (NM_000819.3,1080-1098).
ccacaccgccctaactgtt

SEQ ID NO: 214546 - DNA, 19 bp, Homo sapiens
  siRNA target sequence for GART (NM_000819.3,1085-1103).
ccgccctaactgttgtcat

SEQ ID NO: 214547 - DNA, 19 bp, Homo sapiens
  siRNA target sequence for GART (NM_000819.3,1099-1117).
gtcatggcaagtaaaggtt

SEQ ID NO: 214548 - DNA, 19 bp, Homo sapiens
  siRNA target sequence for GART (NM_000819.3,1104-1122).
ggcaagtaaaggttatcct

SEQ ID NO: 214549 - DNA, 19 bp, Homo sapiens
  siRNA target sequence for GART (NM_000819.3,1131-1149).
caccaagggtgtagagata

SEQ ID NO: 214550 - DNA, 19 bp, Homo sapiens
  siRNA target sequence for GART (NM_000819.3,1195-1213).
gcaggcactgccctcaaaa

SEQ ID NO: 214551 - DNA, 19 bp, Homo sapiens
  siRNA target sequence for GART (NM_000819.3,1196-1214).
caggcactgccctcaaaaa

SEQ ID NO: 214552 - DNA, 19 bp, Homo sapiens
  siRNA target sequence for GART (NM_000819.3,1260-1278).
catccgggaaaatctcata

SEQ ID NO: 214553 - DNA, 19 bp, Homo sapiens
  siRNA target sequence for GART (NM_000819.3,1263-1281).
ccgggaaaatctcatatca

SEQ ID NO: 214554 - DNA, 19 bp, Homo sapiens
  siRNA target sequence for GART (NM_000819.3,1303-1321).
ggactagctgctataaagt

SEQ ID NO: 214555 - DNA, 19 bp, Homo sapiens
  siRNA target sequence for GART (NM_000819.3,1304-1322).
gactagctgctataaagtt

SEQ ID NO: 214556 - DNA, 19 bp, Homo sapiens
  siRNA target sequence for GART (NM_000819.3,1320-1338).
gtttgagggagcaatttat

SEQ ID NO: 214557 - DNA, 19 bp, Homo sapiens
  siRNA target sequence for GART (NM_000819.3,1324-1342).
gagggagcaatttatagga

SEQ ID NO: 214558 - DNA, 19 bp, Homo sapiens
  siRNA target sequence for GART (NM_000819.3,1326-1344).
gggagcaatttataggaaa

SEQ ID NO: 214559 - DNA, 19 bp, Homo sapiens
  siRNA target sequence for GART (NM_000819.3,1351-1369).
ggctttcgtgccatagctt

SEQ ID NO: 214560 - DNA, 19 bp, Homo sapiens
  siRNA target sequence for GART (NM_000819.3,1381-1399).
cccaggagtttgacttaca

SEQ ID NO: 214561 - DNA, 19 bp, Homo sapiens
  siRNA target sequence for GART (NM_000819.3,1507-1525).
gctggtctttttgatttaa

SEQ ID NO: 214562 - DNA, 19 bp, Homo sapiens
  siRNA target sequence for GART (NM_000819.3,1570-1588).
ggcgttggaactaaactaa

SEQ ID NO: 214563 - DNA, 19 bp, Homo sapiens
  siRNA target sequence for GART (NM_000819.3,1571-1589).
gcgttggaactaaactaaa

SEQ ID NO: 214564 - DNA, 19 bp, Homo sapiens
  siRNA target sequence for GART (NM_000819.3,1595-1613).
cccagctatgcaataaaca

SEQ ID NO: 214565 - DNA, 19 bp, Homo sapiens
  siRNA target sequence for GART (NM_000819.3,1596-1614).
ccagctatgcaataaacat

SEQ ID NO: 214566 - DNA, 19 bp, Homo sapiens
  siRNA target sequence for GART (NM_000819.3,1604-1622).
gcaataaacatgataccat

SEQ ID NO: 214567 - DNA, 19 bp, Homo sapiens
  siRNA target sequence for GART (NM_000819.3,1615-1633).
gataccattggtcaagatt

SEQ ID NO: 214568 - DNA, 19 bp, Homo sapiens
  siRNA target sequence for GART (NM_000819.3,1620-1638).
cattggtcaagatttggta

SEQ ID NO: 214569 - DNA, 19 bp, Homo sapiens
  siRNA target sequence for GART (NM_000819.3,1635-1653).
ggtagcaatgtgtgttaat

SEQ ID NO: 214570 - DNA, 19 bp, Homo sapiens
  siRNA target sequence for GART (NM_000819.3,1639-1657).
gcaatgtgtgttaatgata

SEQ ID NO: 214571 - DNA, 19 bp, Homo sapiens
  siRNA target sequence for GART (NM_000819.3,1818-1836).
gtatccccctggagagtat

SEQ ID NO: 214572 - DNA, 19 bp, Homo sapiens
  siRNA target sequence for GART (NM_000819.3,1862-1880).
ccatggagcgagatcagaa

SEQ ID NO: 214573 - DNA, 19 bp, Homo sapiens
  siRNA target sequence for GART (NM_000819.3,1863-1881).
catggagcgagatcagaaa

SEQ ID NO: 214574 - DNA, 19 bp, Homo sapiens
  siRNA target sequence for GART (NM_000819.3,1902-1920).
cactgagggtgatgttgtt

SEQ ID NO: 214575 - DNA, 19 bp, Homo sapiens
  siRNA target sequence for GART (NM_000819.3,1915-1933).
gttgttgttggaatagctt

SEQ ID NO: 214576 - DNA, 19 bp, Homo sapiens
  siRNA target sequence for GART (NM_000819.3,1942-1960).
cttcatagcaatggattta

SEQ ID NO: 214577 - DNA, 19 bp, Homo sapiens
  siRNA target sequence for GART (NM_000819.3,1971-1989).
gaaaatcgtggcaaaatct

SEQ ID NO: 214578 - DNA, 19 bp, Homo sapiens
  siRNA target sequence for GART (NM_000819.3,2036-2054).
ctttaggggacttacttct

SEQ ID NO: 214579 - DNA, 19 bp, Homo sapiens
  siRNA target sequence for GART (NM_000819.3,2070-2088).
ctacagccattcactgtta

SEQ ID NO: 214580 - DNA, 19 bp, Homo sapiens
  siRNA target sequence for GART (NM_000819.3,2135-2153).
gtggaggattactagagaa

SEQ ID NO: 214581 - DNA, 19 bp, Homo sapiens
  siRNA target sequence for GART (NM_000819.3,2138-2156).
gaggattactagagaacat

SEQ ID NO: 214582 - DNA, 19 bp, Homo sapiens
  siRNA target sequence for GART (NM_000819.3,2268-2286).
ggccagaacatttaactgt

SEQ ID NO: 214583 - DNA, 19 bp, Homo sapiens
  siRNA target sequence for GART (NM_000819.3,2296-2314).
gctgtccttgtggtatcaa

SEQ ID NO: 214584 - DNA, 19 bp, Homo sapiens
  siRNA target sequence for GART (NM_000819.3,2408-2426).
cacgtgtgaaagtcaagaa

SEQ ID NO: 214585 - DNA, 19 bp, Homo sapiens
  siRNA target sequence for GART (NM_000819.3,2411-2429).
gtgtgaaagtcaagaatct

SEQ ID NO: 214586 - DNA, 19 bp, Homo sapiens
  siRNA target sequence for GART (NM_000819.3,2470-2488).
ggctccctgacaaatcatt

SEQ ID NO: 214587 - DNA, 19 bp, Homo sapiens
  siRNA target sequence for GART (NM_000819.3,2471-2489).
gctccctgacaaatcattt

SEQ ID NO: 214588 - DNA, 19 bp, Homo sapiens
  siRNA target sequence for GART (NM_000819.3,2476-2494).
ctgacaaatcatttctctt

SEQ ID NO: 214589 - DNA, 19 bp, Homo sapiens
  siRNA target sequence for GART (NM_000819.3,2508-2526).
ggccagagtggctgtctta

SEQ ID NO: 214590 - DNA, 19 bp, Homo sapiens
  siRNA target sequence for GART (NM_000819.3,2543-2561).
cgaacctgcaagcacttat

SEQ ID NO: 214591 - DNA, 19 bp, Homo sapiens
  siRNA target sequence for GART (NM_000819.3,2544-2562).
gaacctgcaagcacttata

SEQ ID NO: 214592 - DNA, 19 bp, Homo sapiens
  siRNA target sequence for GART (NM_000819.3,2565-2583).
cagtactcgggaaccaaat

SEQ ID NO: 214593 - DNA, 19 bp, Homo sapiens
  siRNA target sequence for GART (NM_000819.3,2585-2603).
gctctgcacaaattgatat

SEQ ID NO: 214594 - DNA, 19 bp, Homo sapiens
  siRNA target sequence for GART (NM_000819.3,2590-2608).
gcacaaattgatattgtta

SEQ ID NO: 214595 - DNA, 19 bp, Homo sapiens
  siRNA target sequence for GART (NM_000819.3,2624-2642).
cagtagctgggttagataa

SEQ ID NO: 214596 - DNA, 19 bp, Homo sapiens
  siRNA target sequence for GART (NM_000819.3,2656-2674).
ggtattcccactagagtaa

SEQ ID NO: 214597 - DNA, 19 bp, Homo sapiens
  siRNA target sequence for GART (NM_000819.3,2657-2675).
gtattcccactagagtaat

SEQ ID NO: 214598 - DNA, 19 bp, Homo sapiens
  siRNA target sequence for GART (NM_000819.3,2664-2682).
cactagagtaattaatcat

SEQ ID NO: 214599 - DNA, 19 bp, Homo sapiens
  siRNA target sequence for GART (NM_000819.3,2788-2806).
ggcccctttgtccaaaagt

SEQ ID NO: 214600 - DNA, 19 bp, Homo sapiens
  siRNA target sequence for GART (NM_000819.3,2884-2902).
gaaaccggagtcacagtta

SEQ ID NO: 214601 - DNA, 19 bp, Homo sapiens
  siRNA target sequence for GART (NM_000819.3,2906-2924).
ggtgcactgtacactttgt

SEQ ID NO: 214602 - DNA, 19 bp, Homo sapiens
  siRNA target sequence for GART (NM_000819.3,2935-2953).
gtggatgctggacagatta

SEQ ID NO: 214603 - DNA, 19 bp, Homo sapiens
  siRNA target sequence for GART (NM_000819.3,2938-2956).
gatgctggacagattattt

SEQ ID NO: 214604 - DNA, 19 bp, Homo sapiens
  siRNA target sequence for GART (NM_000819.3,2973-2991).
cgtgaagaggggtgatact

SEQ ID NO: 214605 - DNA, 19 bp, Homo sapiens
  siRNA target sequence for GART (NM_000819.3,2994-3012).
cgcaactctttctgaaaga

SEQ ID NO: 214606 - DNA, 19 bp, Homo sapiens
  siRNA target sequence for MtFMT (NM_139242.2,291-309).
ggactgccagtgaagcaat

SEQ ID NO: 214607 - DNA, 19 bp, Homo sapiens
  siRNA target sequence for MtFMT (NM_139242.2,296-314).
gccagtgaagcaatatgct

SEQ ID NO: 214608 - DNA, 19 bp, Homo sapiens
  siRNA target sequence for MtFMT (NM_139242.2,322-340).
ctcagcttcccgtatatga

SEQ ID NO: 214609 - DNA, 19 bp, Homo sapiens
  siRNA target sequence for MtFMT (NM_139242.2,324-342).
cagcttcccgtatatgagt

SEQ ID NO: 214610 - DNA, 19 bp, Homo sapiens
  siRNA target sequence for MtFMT (NM_139242.2,353-371).
gggatctggagaatatgat

SEQ ID NO: 214611 - DNA, 19 bp, Homo sapiens
  siRNA target sequence for MtFMT (NM_139242.2,385-403).
cttcgtttggccgactttt

SEQ ID NO: 214612 - DNA, 19 bp, Homo sapiens
  siRNA target sequence for MtFMT (NM_139242.2,388-406).
cgtttggccgacttttgaa

SEQ ID NO: 214613 - DNA, 19 bp, Homo sapiens
  siRNA target sequence for MtFMT (NM_139242.2,389-407).
gtttggccgacttttgaat

SEQ ID NO: 214614 - DNA, 19 bp, Homo sapiens
  siRNA target sequence for MtFMT (NM_139242.2,478-496).
gcccagcccctgtaatcca

SEQ ID NO: 214615 - DNA, 19 bp, Homo sapiens
  siRNA target sequence for MtFMT (NM_139242.2,480-498).
ccagcccctgtaatccata

SEQ ID NO: 214616 - DNA, 19 bp, Homo sapiens
  siRNA target sequence for MtFMT (NM_139242.2,515-533).
cacagttactggagtaaca

SEQ ID NO: 214617 - DNA, 19 bp, Homo sapiens
  siRNA target sequence for MtFMT (NM_139242.2,517-535).
cagttactggagtaacaat

SEQ ID NO: 214618 - DNA, 19 bp, Homo sapiens
  siRNA target sequence for MtFMT (NM_139242.2,523-541).
ctggagtaacaattatgca

SEQ ID NO: 214619 - DNA, 19 bp, Homo sapiens
  siRNA target sequence for MtFMT (NM_139242.2,568-586).
gcccaattctcaaacaaga

SEQ ID NO: 214620 - DNA, 19 bp, Homo sapiens
  siRNA target sequence for MtFMT (NM_139242.2,727-745).
cgacttacgcccctaagat

SEQ ID NO: 214621 - DNA, 19 bp, Homo sapiens
  siRNA target sequence for MtFMT (NM_139242.2,728-746).
gacttacgcccctaagatt

SEQ ID NO: 214622 - DNA, 19 bp, Homo sapiens
  siRNA target sequence for MtFMT (NM_139242.2,804-822).
ctttaccgtgccattggaa

SEQ ID NO: 214623 - DNA, 19 bp, Homo sapiens
  siRNA target sequence for MtFMT (NM_139242.2,809-827).
ccgtgccattggaaatata

SEQ ID NO: 214624 - DNA, 19 bp, Homo sapiens
  siRNA target sequence for MtFMT (NM_139242.2,810-828).
cgtgccattggaaatataa

SEQ ID NO: 214625 - DNA, 19 bp, Homo sapiens
  siRNA target sequence for MtFMT (NM_139242.2,843-861).
ctctggatggcgaatacca

SEQ ID NO: 214626 - DNA, 19 bp, Homo sapiens
  siRNA target sequence for MtFMT (NM_139242.2,845-863).
ctggatggcgaataccatt

SEQ ID NO: 214627 - DNA, 19 bp, Homo sapiens
  siRNA target sequence for MtFMT (NM_139242.2,847-865).
ggatggcgaataccattaa

SEQ ID NO: 214628 - DNA, 19 bp, Homo sapiens
  siRNA target sequence for MtFMT (NM_139242.2,848-866).
gatggcgaataccattaaa

SEQ ID NO: 214629 - DNA, 19 bp, Homo sapiens
  siRNA target sequence for MtFMT (NM_139242.2,851-869).
ggcgaataccattaaactt

SEQ ID NO: 214630 - DNA, 19 bp, Homo sapiens
  siRNA target sequence for MtFMT (NM_139242.2,853-871).
cgaataccattaaacttct

SEQ ID NO: 214631 - DNA, 19 bp, Homo sapiens
  siRNA target sequence for MtFMT (NM_139242.2,897-915).
gtccttgctgatccaaaat

SEQ ID NO: 214632 - DNA, 19 bp, Homo sapiens
  siRNA target sequence for MtFMT (NM_139242.2,962-980).
gtcacaaatactattggtt

SEQ ID NO: 214633 - DNA, 19 bp, Homo sapiens
  siRNA target sequence for MtFMT (NM_139242.2,1044-1062).
gacttctacaatggatatt

SEQ ID NO: 214634 - DNA, 19 bp, Homo sapiens
  siRNA target sequence for MtFMT (NM_139242.2,1065-1083).
cacccctggtaccagaaaa

SEQ ID NO: 214635 - DNA, 19 bp, Homo sapiens
  siRNA target sequence for MtFMT (NM_139242.2,1068-1086).
ccctggtaccagaaaaatt

SEQ ID NO: 214636 - DNA, 19 bp, Homo sapiens
  siRNA target sequence for FTHFD (NM_012190.2,218-236).
ctgtttggccaggaagttt

SEQ ID NO: 214637 - DNA, 19 bp, Homo sapiens
  siRNA target sequence for FTHFD (NM_012190.2,338-356).
ggagtgccggtattcaagt

SEQ ID NO: 214638 - DNA, 19 bp, Homo sapiens
  siRNA target sequence for FTHFD (NM_012190.2,339-357).
gagtgccggtattcaagta

SEQ ID NO: 214639 - DNA, 19 bp, Homo sapiens
  siRNA target sequence for FTHFD (NM_012190.2,341-359).
gtgccggtattcaagtact

SEQ ID NO: 214640 - DNA, 19 bp, Homo sapiens
  siRNA target sequence for FTHFD (NM_012190.2,358-376).
ctcccggtggcgtgcaaaa

SEQ ID NO: 214641 - DNA, 19 bp, Homo sapiens
  siRNA target sequence for FTHFD (NM_012190.2,361-379).
ccggtggcgtgcaaaagga

SEQ ID NO: 214642 - DNA, 19 bp, Homo sapiens
  siRNA target sequence for FTHFD (NM_012190.2,390-408).
ctgatgtggtggcaaaata

SEQ ID NO: 214643 - DNA, 19 bp, Homo sapiens
  siRNA target sequence for FTHFD (NM_012190.2,485-503).
cggcatggctccatcatct

SEQ ID NO: 214644 - DNA, 19 bp, Homo sapiens
  siRNA target sequence for FTHFD (NM_012190.2,486-504).
ggcatggctccatcatcta

SEQ ID NO: 214645 - DNA, 19 bp, Homo sapiens
  siRNA target sequence for FTHFD (NM_012190.2,487-505).
gcatggctccatcatctat

SEQ ID NO: 214646 - DNA, 19 bp, Homo sapiens
  siRNA target sequence for FTHFD (NM_012190.2,533-551).
ggggcctcggccatcaact

SEQ ID NO: 214647 - DNA, 19 bp, Homo sapiens
  siRNA target sequence for FTHFD (NM_012190.2,666-684).
ccgtgagcacgctgtacaa

SEQ ID NO: 214648 - DNA, 19 bp, Homo sapiens
  siRNA target sequence for FTHFD (NM_012190.2,836-854).
ccggcagaggccattcaca

SEQ ID NO: 214649 - DNA, 19 bp, Homo sapiens
  siRNA target sequence for FTHFD (NM_012190.2,837-855).
cggcagaggccattcacaa

SEQ ID NO: 214650 - DNA, 19 bp, Homo sapiens
  siRNA target sequence for FTHFD (NM_012190.2,899-917).
gcctgtgaacagaaactga

SEQ ID NO: 214651 - DNA, 19 bp, Homo sapiens
  siRNA target sequence for FTHFD (NM_012190.2,1070-1088).
ctggaggatggcaaaatga

SEQ ID NO: 214652 - DNA, 19 bp, Homo sapiens
  siRNA target sequence for FTHFD (NM_012190.2,1214-1232).
gaagactccactgatttct

SEQ ID NO: 214653 - DNA, 19 bp, Homo sapiens
  siRNA target sequence for FTHFD (NM_012190.2,1217-1235).
gactccactgatttcttca

SEQ ID NO: 214654 - DNA, 19 bp, Homo sapiens
  siRNA target sequence for FTHFD (NM_012190.2,1299-1317).
gcctggagttagaaaatga

SEQ ID NO: 214655 - DNA, 19 bp, Homo sapiens
  siRNA target sequence for FTHFD (NM_012190.2,1394-1412).
ggcgagtgcagcattgact

SEQ ID NO: 214656 - DNA, 19 bp, Homo sapiens
  siRNA target sequence for FTHFD (NM_012190.2,1395-1413).
gcgagtgcagcattgacta

SEQ ID NO: 214657 - DNA, 19 bp, Homo sapiens
  siRNA target sequence for FTHFD (NM_012190.2,1501-1519).
gacctctgagaccatcaat

SEQ ID NO: 214658 - DNA, 19 bp, Homo sapiens
  siRNA target sequence for FTHFD (NM_012190.2,1613-1631).
ggacggtgggggaagatca

SEQ ID NO: 214659 - DNA, 19 bp, Homo sapiens
  siRNA target sequence for FTHFD (NM_012190.2,1998-2016).
cactcacagccttgaagtt

SEQ ID NO: 214660 - DNA, 19 bp, Homo sapiens
  siRNA target sequence for FTHFD (NM_012190.2,2046-2064).
ccaaaggtgtggttaacgt

SEQ ID NO: 214661 - DNA, 19 bp, Homo sapiens
  siRNA target sequence for FTHFD (NM_012190.2,2150-2168).
gtgggcaagcacatcatga

SEQ ID NO: 214662 - DNA, 19 bp, Homo sapiens
  siRNA target sequence for FTHFD (NM_012190.2,2152-2170).
gggcaagcacatcatgaaa

SEQ ID NO: 214663 - DNA, 19 bp, Homo sapiens
  siRNA target sequence for FTHFD (NM_012190.2,2167-2185).
gaaaagctgtgccataagt

SEQ ID NO: 214664 - DNA, 19 bp, Homo sapiens
  siRNA target sequence for FTHFD (NM_012190.2,2178-2196).
ccataagtaacgtgaagaa

SEQ ID NO: 214665 - DNA, 19 bp, Homo sapiens
  siRNA target sequence for FTHFD (NM_012190.2,2335-2353).
ggaggactccattcatgat

SEQ ID NO: 214666 - DNA, 19 bp, Homo sapiens
  siRNA target sequence for FTHFD (NM_012190.2,2528-2546).
cctcggccagggttcttct

SEQ ID NO: 214667 - DNA, 19 bp, Homo sapiens
  siRNA target sequence for FTHFD (NM_012190.2,2570-2588).
gtggaagaccacatgttca

SEQ ID NO: 214668 - DNA, 19 bp, Homo sapiens
  siRNA target sequence for FTHFD (NM_012190.2,2604-2622).
ccttcgggcctgtcatgat

SEQ ID NO: 214669 - DNA, 19 bp, Homo sapiens
  siRNA target sequence for FTHFD (NM_012190.2,2768-2786).
gtcaacacgtacaacaaga

SEQ ID NO: 214670 - DNA, 19 bp, Homo sapiens
  siRNA target sequence for FTHFD (NM_012190.2,2799-2817).
ctcccttcggaggattcaa

SEQ ID NO: 214671 - DNA, 19 bp, Homo sapiens
  siRNA target sequence for FTHFD (NM_012190.2,2802-2820).
ccttcggaggattcaaaca

SEQ ID NO: 214672 - DNA, 19 bp, Homo sapiens
  siRNA target sequence for SHMT1 (NM_004169.3,234-252).
ggtcctcacatgacaagat

SEQ ID NO: 214673 - DNA, 19 bp, Homo sapiens
  siRNA target sequence for SHMT1 (NM_004169.3,276-294).
gtgatgttgaggtttacaa

SEQ ID NO: 214674 - DNA, 19 bp, Homo sapiens
  siRNA target sequence for SHMT1 (NM_004169.3,278-296).
gatgttgaggtttacaaca

SEQ ID NO: 214675 - DNA, 19 bp, Homo sapiens
  siRNA target sequence for SHMT1 (NM_004169.3,338-356).
ctgattgcctcggagaatt

SEQ ID NO: 214676 - DNA, 19 bp, Homo sapiens
  siRNA target sequence for SHMT1 (NM_004169.3,360-378).
ccagccgagcagttttgga

SEQ ID NO: 214677 - DNA, 19 bp, Homo sapiens
  siRNA target sequence for SHMT1 (NM_004169.3,381-399).
ccctaggctcttgcttaaa

SEQ ID NO: 214678 - DNA, 19 bp, Homo sapiens
  siRNA target sequence for SHMT1 (NM_004169.3,382-400).
cctaggctcttgcttaaat

SEQ ID NO: 214679 - DNA, 19 bp, Homo sapiens
  siRNA target sequence for SHMT1 (NM_004169.3,383-401).
ctaggctcttgcttaaata

SEQ ID NO: 214680 - DNA, 19 bp, Homo sapiens
  siRNA target sequence for SHMT1 (NM_004169.3,386-404).
ggctcttgcttaaataaca

SEQ ID NO: 214681 - DNA, 19 bp, Homo sapiens
  siRNA target sequence for SHMT1 (NM_004169.3,489-507).
ccctgcaggcctataagct

SEQ ID NO: 214682 - DNA, 19 bp, Homo sapiens
  siRNA target sequence for SHMT1 (NM_004169.3,975-993).
gccgagctggcatgatctt

SEQ ID NO: 214683 - DNA, 19 bp, Homo sapiens
  siRNA target sequence for SHMT1 (NM_004169.3,977-995).
cgagctggcatgatcttct

SEQ ID NO: 214684 - DNA, 19 bp, Homo sapiens
  siRNA target sequence for SHMT1 (NM_004169.3,978-996).
gagctggcatgatcttcta

SEQ ID NO: 214685 - DNA, 19 bp, Homo sapiens
  siRNA target sequence for SHMT1 (NM_004169.3,1054-1072).
ggagtctcttatcaattct

SEQ ID NO: 214686 - DNA, 19 bp, Homo sapiens
  siRNA target sequence for SHMT1 (NM_004169.3,1244-1262).
ggtggttctgacaaccatt

SEQ ID NO: 214687 - DNA, 19 bp, Homo sapiens
  siRNA target sequence for SHMT1 (NM_004169.3,1245-1263).
gtggttctgacaaccattt

SEQ ID NO: 214688 - DNA, 19 bp, Homo sapiens
  siRNA target sequence for SHMT1 (NM_004169.3,1248-1266).
gttctgacaaccatttgat

SEQ ID NO: 214689 - DNA, 19 bp, Homo sapiens
  siRNA target sequence for SHMT1 (NM_004169.3,1316-1334).
gtgctagaagcctgttcta

SEQ ID NO: 214690 - DNA, 19 bp, Homo sapiens
  siRNA target sequence for SHMT1 (NM_004169.3,1318-1336).
gctagaagcctgttctatt

SEQ ID NO: 214691 - DNA, 19 bp, Homo sapiens
  siRNA target sequence for SHMT2 (NM_005412.3,284-302).
gggtcctgtctgaacaaca

SEQ ID NO: 214692 - DNA, 19 bp, Homo sapiens
  siRNA target sequence for SHMT2 (NM_005412.3,304-322).
gtactcggagggttatcct

SEQ ID NO: 214693 - DNA, 19 bp, Homo sapiens
  siRNA target sequence for SHMT2 (NM_005412.3,621-639).
ctggcctcattgactacaa

SEQ ID NO: 214694 - DNA, 19 bp, Homo sapiens
  siRNA target sequence for SHMT2 (NM_005412.3,667-685).
ccggccacggctcatcata

SEQ ID NO: 214695 - DNA, 19 bp, Homo sapiens
  siRNA target sequence for SHMT2 (NM_005412.3,699-717).
cctatgctcgcctcattga

SEQ ID NO: 214696 - DNA, 19 bp, Homo sapiens
  siRNA target sequence for SHMT2 (NM_005412.3,732-750).
gagaggtgtgtgatgaagt

SEQ ID NO: 214697 - DNA, 19 bp, Homo sapiens
  siRNA target sequence for SHMT2 (NM_005412.3,932-950).
cgggagatcccttacacat

SEQ ID NO: 214698 - DNA, 19 bp, Homo sapiens
  siRNA target sequence for SHMT2 (NM_005412.3,933-951).
gggagatcccttacacatt

SEQ ID NO: 214699 - DNA, 19 bp, Homo sapiens
  siRNA target sequence for SHMT2 (NM_005412.3,934-952).
ggagatcccttacacattt

SEQ ID NO: 214700 - DNA, 19 bp, Homo sapiens
  siRNA target sequence for SHMT2 (NM_005412.3,948-966).
catttgaggaccgaatcaa

SEQ ID NO: 214701 - DNA, 19 bp, Homo sapiens
  siRNA target sequence for SHMT2 (NM_005412.3,1211-1229).
cgggtgctagagcttgtat

SEQ ID NO: 214702 - DNA, 19 bp, Homo sapiens
  siRNA target sequence for SHMT2 (NM_005412.3,1343-1361).
cggagagttgtggacttta

SEQ ID NO: 214703 - DNA, 19 bp, Homo sapiens
  siRNA target sequence for SHMT2 (NM_005412.3,1344-1362).
ggagagttgtggactttat

SEQ ID NO: 214704 - DNA, 19 bp, Homo sapiens
  siRNA target sequence for SHMT2 (NM_005412.3,1347-1365).
gagttgtggactttataga

SEQ ID NO: 214705 - DNA, 19 bp, Homo sapiens
  siRNA target sequence for SHMT2 (NM_005412.3,1433-1451).
ctgcttaaggactcagaaa

SEQ ID NO: 214706 - DNA, 19 bp, Homo sapiens
  siRNA target sequence for SHMT2 (NM_005412.3,1435-1453).
gcttaaggactcagaaaca

SEQ ID NO: 214707 - DNA, 19 bp, Homo sapiens
  siRNA target sequence for AMT (NM_000481.1,208-226).
cttgtgtcgtccacttagt

SEQ ID NO: 214708 - DNA, 19 bp, Homo sapiens
  siRNA target sequence for AMT (NM_000481.1,249-267).
ggacaccgctctatgactt

SEQ ID NO: 214709 - DNA, 19 bp, Homo sapiens
  siRNA target sequence for AMT (NM_000481.1,377-395).
ctctttgacgtgtctcata

SEQ ID NO: 214710 - DNA, 19 bp, Homo sapiens
  siRNA target sequence for AMT (NM_000481.1,513-531).
ctggaggcatcttagatga

SEQ ID NO: 214711 - DNA, 19 bp, Homo sapiens
  siRNA target sequence for AMT (NM_000481.1,516-534).
gaggcatcttagatgactt

SEQ ID NO: 214712 - DNA, 19 bp, Homo sapiens
  siRNA target sequence for AMT (NM_000481.1,519-537).
gcatcttagatgacttgat

SEQ ID NO: 214713 - DNA, 19 bp, Homo sapiens
  siRNA target sequence for AMT (NM_000481.1,532-550).
cttgattgtaaccaatact

SEQ ID NO: 214714 - DNA, 19 bp, Homo sapiens
  siRNA target sequence for AMT (NM_000481.1,535-553).
gattgtaaccaatacttct

SEQ ID NO: 214715 - DNA, 19 bp, Homo sapiens
  siRNA target sequence for AMT (NM_000481.1,702-720).
ctgcagcccaggtactaca

SEQ ID NO: 214716 - DNA, 19 bp, Homo sapiens
  siRNA target sequence for AMT (NM_000481.1,872-890).
ctggcaacagctattctga

SEQ ID NO: 214717 - DNA, 19 bp, Homo sapiens
  siRNA target sequence for AMT (NM_000481.1,876-894).
caacagctattctgaaaaa

SEQ ID NO: 214718 - DNA, 19 bp, Homo sapiens
  siRNA target sequence for AMT (NM_000481.1,1159-1177).
catggagggtaccaagatt

SEQ ID NO: 214719 - DNA, 19 bp, Homo sapiens
  siRNA target sequence for AMT (NM_000481.1,1163-1181).
gagggtaccaagattggta

SEQ ID NO: 214720 - DNA, 19 bp, Homo sapiens
  siRNA target sequence for AMT (NM_000481.1,1328-1346).
gtgcccacaaactactata

SEQ ID NO: 214721 - DNA, 19 bp, Homo sapiens
  siRNA target sequence for DMGDH (NM_013391.2,123-141).
cttatctgcagaaacacaa

SEQ ID NO: 214722 - DNA, 19 bp, Homo sapiens
  siRNA target sequence for DMGDH (NM_013391.2,188-206).
gtgtgagtctggcttatca

SEQ ID NO: 214723 - DNA, 19 bp, Homo sapiens
  siRNA target sequence for DMGDH (NM_013391.2,234-252).
ggtcctgctggagaaatca

SEQ ID NO: 214724 - DNA, 19 bp, Homo sapiens
  siRNA target sequence for DMGDH (NM_013391.2,276-294).
gcacgcagcaggtttaaca

SEQ ID NO: 214725 - DNA, 19 bp, Homo sapiens
  siRNA target sequence for DMGDH (NM_013391.2,277-295).
cacgcagcaggtttaacaa

SEQ ID NO: 214726 - DNA, 19 bp, Homo sapiens
  siRNA target sequence for DMGDH (NM_013391.2,279-297).
cgcagcaggtttaacaact

SEQ ID NO: 214727 - DNA, 19 bp, Homo sapiens
  siRNA target sequence for DMGDH (NM_013391.2,280-298).
gcagcaggtttaacaactt

SEQ ID NO: 214728 - DNA, 19 bp, Homo sapiens
  siRNA target sequence for DMGDH (NM_013391.2,304-322).
catcctggaataaacttga

SEQ ID NO: 214729 - DNA, 19 bp, Homo sapiens
  siRNA target sequence for DMGDH (NM_013391.2,341-359).
gcatcaaactttatgagaa

SEQ ID NO: 214730 - DNA, 19 bp, Homo sapiens
  siRNA target sequence for DMGDH (NM_013391.2,394-412).
catcagccaggtagtatca

SEQ ID NO: 214731 - DNA, 19 bp, Homo sapiens
  siRNA target sequence for DMGDH (NM_013391.2,425-443).
cccctgtaagggtagatga

SEQ ID NO: 214732 - DNA, 19 bp, Homo sapiens
  siRNA target sequence for DMGDH (NM_013391.2,442-460).
gaatttaaatatcaaatga

SEQ ID NO: 214733 - DNA, 19 bp, Homo sapiens
  siRNA target sequence for DMGDH (NM_013391.2,474-492).
gcatgcaacagaacagtat

SEQ ID NO: 214734 - DNA, 19 bp, Homo sapiens
  siRNA target sequence for DMGDH (NM_013391.2,479-497).
caacagaacagtatctcat

SEQ ID NO: 214735 - DNA, 19 bp, Homo sapiens
  siRNA target sequence for DMGDH (NM_013391.2,526-544).
cctttactcaacatgaata

SEQ ID NO: 214736 - DNA, 19 bp, Homo sapiens
  siRNA target sequence for DMGDH (NM_013391.2,546-564).
ggttttagctggattgtat

SEQ ID NO: 214737 - DNA, 19 bp, Homo sapiens
  siRNA target sequence for DMGDH (NM_013391.2,582-600).
cattgatccttattctcta

SEQ ID NO: 214738 - DNA, 19 bp, Homo sapiens
  siRNA target sequence for DMGDH (NM_013391.2,688-706).
ggaacatgggacgttgaaa

SEQ ID NO: 214739 - DNA, 19 bp, Homo sapiens
  siRNA target sequence for DMGDH (NM_013391.2,717-735).
gtctatgagagcaaataga

SEQ ID NO: 214740 - DNA, 19 bp, Homo sapiens
  siRNA target sequence for DMGDH (NM_013391.2,725-743).
gagcaaatagaattgtgaa

SEQ ID NO: 214741 - DNA, 19 bp, Homo sapiens
  siRNA target sequence for DMGDH (NM_013391.2,758-776).
gggctcgtgaagtaggtaa

SEQ ID NO: 214742 - DNA, 19 bp, Homo sapiens
  siRNA target sequence for DMGDH (NM_013391.2,759-777).
ggctcgtgaagtaggtaaa

SEQ ID NO: 214743 - DNA, 19 bp, Homo sapiens
  siRNA target sequence for DMGDH (NM_013391.2,760-778).
gctcgtgaagtaggtaaaa

SEQ ID NO: 214744 - DNA, 19 bp, Homo sapiens
  siRNA target sequence for DMGDH (NM_013391.2,761-779).
ctcgtgaagtaggtaaaat

SEQ ID NO: 214745 - DNA, 19 bp, Homo sapiens
  siRNA target sequence for DMGDH (NM_013391.2,763-781).
cgtgaagtaggtaaaatga

SEQ ID NO: 214746 - DNA, 19 bp, Homo sapiens
  siRNA target sequence for DMGDH (NM_013391.2,797-815).
ctctcattccggttcaaca

SEQ ID NO: 214747 - DNA, 19 bp, Homo sapiens
  siRNA target sequence for DMGDH (NM_013391.2,801-819).
cattccggttcaacatcaa

SEQ ID NO: 214748 - DNA, 19 bp, Homo sapiens
  siRNA target sequence for DMGDH (NM_013391.2,807-825).
ggttcaacatcaatatgtt

SEQ ID NO: 214749 - DNA, 19 bp, Homo sapiens
  siRNA target sequence for DMGDH (NM_013391.2,814-832).
catcaatatgttgttacat

SEQ ID NO: 214750 - DNA, 19 bp, Homo sapiens
  siRNA target sequence for DMGDH (NM_013391.2,823-841).
gttgttacatcgactatat

SEQ ID NO: 214751 - DNA, 19 bp, Homo sapiens
  siRNA target sequence for DMGDH (NM_013391.2,833-851).
cgactatatctgaagtgaa

SEQ ID NO: 214752 - DNA, 19 bp, Homo sapiens
  siRNA target sequence for DMGDH (NM_013391.2,881-899).
gtgacctggaaggatcata

SEQ ID NO: 214753 - DNA, 19 bp, Homo sapiens
  siRNA target sequence for DMGDH (NM_013391.2,885-903).
cctggaaggatcatattat

SEQ ID NO: 214754 - DNA, 19 bp, Homo sapiens
  siRNA target sequence for DMGDH (NM_013391.2,924-942).
gcttttgtttggtccatat

SEQ ID NO: 214755 - DNA, 19 bp, Homo sapiens
  siRNA target sequence for DMGDH (NM_013391.2,1001-1019).
gttttggaaaggaactctt

SEQ ID NO: 214756 - DNA, 19 bp, Homo sapiens
  siRNA target sequence for DMGDH (NM_013391.2,1025-1043).
ctgatctagatcgaatcat

SEQ ID NO: 214757 - DNA, 19 bp, Homo sapiens
  siRNA target sequence for DMGDH (NM_013391.2,1037-1055).
gaatcatggaacacatcaa

SEQ ID NO: 214758 - DNA, 19 bp, Homo sapiens
  siRNA target sequence for DMGDH (NM_013391.2,1095-1113).
catcatcaatgttgtcaat

SEQ ID NO: 214759 - DNA, 19 bp, Homo sapiens
  siRNA target sequence for DMGDH (NM_013391.2,1122-1140).
cacgtattctcctgacatt

SEQ ID NO: 214760 - DNA, 19 bp, Homo sapiens
  siRNA target sequence for DMGDH (NM_013391.2,1124-1142).
cgtattctcctgacattct

SEQ ID NO: 214761 - DNA, 19 bp, Homo sapiens
  siRNA target sequence for DMGDH (NM_013391.2,1157-1175).
cccatcagggggtcagaaa

SEQ ID NO: 214762 - DNA, 19 bp, Homo sapiens
  siRNA target sequence for DMGDH (NM_013391.2,1162-1180).
cagggggtcagaaactact

SEQ ID NO: 214763 - DNA, 19 bp, Homo sapiens
  siRNA target sequence for DMGDH (NM_013391.2,1183-1201).
gtggctataggctttggat

SEQ ID NO: 214764 - DNA, 19 bp, Homo sapiens
  siRNA target sequence for DMGDH (NM_013391.2,1185-1203).
ggctataggctttggatat

SEQ ID NO: 214765 - DNA, 19 bp, Homo sapiens
  siRNA target sequence for DMGDH (NM_013391.2,1217-1235).
ctggtggggtagggaaata

SEQ ID NO: 214766 - DNA, 19 bp, Homo sapiens
  siRNA target sequence for DMGDH (NM_013391.2,1222-1240).
ggggtagggaaatatctca

SEQ ID NO: 214767 - DNA, 19 bp, Homo sapiens
  siRNA target sequence for DMGDH (NM_013391.2,1267-1285).
ccttttgatctgatagaat

SEQ ID NO: 214768 - DNA, 19 bp, Homo sapiens
  siRNA target sequence for DMGDH (NM_013391.2,1268-1286).
cttttgatctgatagaatt

SEQ ID NO: 214769 - DNA, 19 bp, Homo sapiens
  siRNA target sequence for DMGDH (NM_013391.2,1362-1380).
caatattgttggttatcct

SEQ ID NO: 214770 - DNA, 19 bp, Homo sapiens
  siRNA target sequence for DMGDH (NM_013391.2,1432-1450).
caaaggctggagtctaagt

SEQ ID NO: 214771 - DNA, 19 bp, Homo sapiens
  siRNA target sequence for DMGDH (NM_013391.2,1480-1498).
cagccgcactggttctaca

SEQ ID NO: 214772 - DNA, 19 bp, Homo sapiens
  siRNA target sequence for DMGDH (NM_013391.2,1482-1500).
gccgcactggttctacaaa

SEQ ID NO: 214773 - DNA, 19 bp, Homo sapiens
  siRNA target sequence for DMGDH (NM_013391.2,1555-1573).
cctgtgggctcggagtata

SEQ ID NO: 214774 - DNA, 19 bp, Homo sapiens
  siRNA target sequence for DMGDH (NM_013391.2,1565-1583).
cggagtataaacaggttat

SEQ ID NO: 214775 - DNA, 19 bp, Homo sapiens
  siRNA target sequence for DMGDH (NM_013391.2,1637-1655).
gccaagattccattagact

SEQ ID NO: 214776 - DNA, 19 bp, Homo sapiens
  siRNA target sequence for DMGDH (NM_013391.2,1652-1670).
gactactggaccatctctt

SEQ ID NO: 214777 - DNA, 19 bp, Homo sapiens
  siRNA target sequence for DMGDH (NM_013391.2,1684-1702).
ccaaaggtgggttttacaa

SEQ ID NO: 214778 - DNA, 19 bp, Homo sapiens
  siRNA target sequence for DMGDH (NM_013391.2,1685-1703).
caaaggtgggttttacaaa

SEQ ID NO: 214779 - DNA, 19 bp, Homo sapiens
  siRNA target sequence for DMGDH (NM_013391.2,1700-1718).
caaatataagtcacatgtt

SEQ ID NO: 214780 - DNA, 19 bp, Homo sapiens
  siRNA target sequence for DMGDH (NM_013391.2,1804-1822).
gaacttcatgatcttagat

SEQ ID NO: 214781 - DNA, 19 bp, Homo sapiens
  siRNA target sequence for DMGDH (NM_013391.2,1850-1868).
gatatgatgttgaaattaa

SEQ ID NO: 214782 - DNA, 19 bp, Homo sapiens
  siRNA target sequence for DMGDH (NM_013391.2,1948-1966).
gatcttagtgatgatgttt

SEQ ID NO: 214783 - DNA, 19 bp, Homo sapiens
  siRNA target sequence for DMGDH (NM_013391.2,2017-2035).
gctattaggatatcttata

SEQ ID NO: 214784 - DNA, 19 bp, Homo sapiens
  siRNA target sequence for DMGDH (NM_013391.2,2047-2065).
ggttgggagctgtatcaca

SEQ ID NO: 214785 - DNA, 19 bp, Homo sapiens
  siRNA target sequence for DMGDH (NM_013391.2,2084-2102).
cgctgtatgacgctatcat

SEQ ID NO: 214786 - DNA, 19 bp, Homo sapiens
  siRNA target sequence for DMGDH (NM_013391.2,2086-2104).
ctgtatgacgctatcatga

SEQ ID NO: 214787 - DNA, 19 bp, Homo sapiens
  siRNA target sequence for DMGDH (NM_013391.2,2088-2106).
gtatgacgctatcatgaat

SEQ ID NO: 214788 - DNA, 19 bp, Homo sapiens
  siRNA target sequence for DMGDH (NM_013391.2,2118-2136).
ggagggaatcgacaatttt

SEQ ID NO: 214789 - DNA, 19 bp, Homo sapiens
  siRNA target sequence for DMGDH (NM_013391.2,2121-2139).
gggaatcgacaattttgga

SEQ ID NO: 214790 - DNA, 19 bp, Homo sapiens
  siRNA target sequence for DMGDH (NM_013391.2,2127-2145).
cgacaattttggaacctat

SEQ ID NO: 214791 - DNA, 19 bp, Homo sapiens
  siRNA target sequence for DMGDH (NM_013391.2,2220-2238).
ggaagctggactggaatat

SEQ ID NO: 214792 - DNA, 19 bp, Homo sapiens
  siRNA target sequence for DMGDH (NM_013391.2,2257-2275).
ccagcagacttcataggaa

SEQ ID NO: 214793 - DNA, 19 bp, Homo sapiens
  siRNA target sequence for DMGDH (NM_013391.2,2258-2276).
cagcagacttcataggaaa

SEQ ID NO: 214794 - DNA, 19 bp, Homo sapiens
  siRNA target sequence for DMGDH (NM_013391.2,2278-2296).
caagcactgaaacagatta

SEQ ID NO: 214795 - DNA, 19 bp, Homo sapiens
  siRNA target sequence for DMGDH (NM_013391.2,2333-2351).
ccttggcaacggatgatgt

SEQ ID NO: 214796 - DNA, 19 bp, Homo sapiens
  siRNA target sequence for DMGDH (NM_013391.2,2337-2355).
ggcaacggatgatgttgat

SEQ ID NO: 214797 - DNA, 19 bp, Homo sapiens
  siRNA target sequence for DMGDH (NM_013391.2,2441-2459).
gtctggctttcgcatatgt

SEQ ID NO: 214798 - DNA, 19 bp, Homo sapiens
  siRNA target sequence for DMGDH (NM_013391.2,2451-2469).
cgcatatgtccctgtacaa

SEQ ID NO: 214799 - DNA, 19 bp, Homo sapiens
  siRNA target sequence for DMGDH (NM_013391.2,2487-2505).
gcaagtggaagttgaacta

SEQ ID NO: 214800 - DNA, 19 bp, Homo sapiens
  siRNA target sequence for DMGDH (NM_013391.2,2520-2538).
cccagcagtcatcatacaa

SEQ ID NO: 214801 - DNA, 19 bp, Homo sapiens
  siRNA target sequence for DMGDH (NM_013391.2,2536-2554).
caagaacctttggtattga

SEQ ID NO: 214802 - DNA, 19 bp, Homo sapiens
  siRNA target sequence for GCSH (NM_004483.2,328-346).
gttgggacaaaattgaaca

SEQ ID NO: 214803 - DNA, 19 bp, Homo sapiens
  siRNA target sequence for PDPR (NM_017990.3,1130-1148).
cctatcacctctccaaaat

SEQ ID NO: 214804 - DNA, 19 bp, Homo sapiens
  siRNA target sequence for PDPR (NM_017990.3,3007-3025).
gagtacgccctgcatgtat

SEQ ID NO: 214805 - DNA, 19 bp, Homo sapiens
  siRNA target sequence for PDPR (NM_017990.3,3012-3030).
cgccctgcatgtatacaat

SEQ ID NO: 214806 - DNA, 19 bp, Homo sapiens
  siRNA target sequence for PDPR (NM_017990.3,3014-3032).
ccctgcatgtatacaatga

SEQ ID NO: 214807 - DNA, 19 bp, Homo sapiens
  siRNA target sequence for PDPR (NM_017990.3,3015-3033).
cctgcatgtatacaatgaa

SEQ ID NO: 214808 - DNA, 19 bp, Homo sapiens
  siRNA target sequence for PDPR (NM_017990.3,3088-3106).
cgcagtctccgaattgaga

SEQ ID NO: 214809 - DNA, 19 bp, Homo sapiens
  siRNA target sequence for PDPR (NM_017990.3,3089-3107).
gcagtctccgaattgagaa

SEQ ID NO: 214810 - DNA, 19 bp, Homo sapiens
  siRNA target sequence for PDPR (NM_017990.3,3096-3114).
ccgaattgagaagtttttt

SEQ ID NO: 214811 - DNA, 19 bp, Homo sapiens
  siRNA target sequence for PDPR (NM_017990.3,3117-3135).
cttctggggtcaggatata

SEQ ID NO: 214812 - DNA, 19 bp, Homo sapiens
  siRNA target sequence for PDPR (NM_017990.3,3120-3138).
ctggggtcaggatataaat

SEQ ID NO: 214813 - DNA, 19 bp, Homo sapiens
  siRNA target sequence for PDPR (NM_017990.3,3122-3140).
ggggtcaggatataaataa

SEQ ID NO: 214814 - DNA, 19 bp, Homo sapiens
  siRNA target sequence for PDPR (NM_017990.3,3173-3191).
ctcgggtgaaattagagaa

SEQ ID NO: 214815 - DNA, 19 bp, Homo sapiens
  siRNA target sequence for PDPR (NM_017990.3,3187-3205).
gagaagggcatggatttca

SEQ ID NO: 214816 - DNA, 19 bp, Homo sapiens
  siRNA target sequence for PDPR (NM_017990.3,3270-3288).
cctggacgaccatgattca

SEQ ID NO: 214817 - DNA, 19 bp, Homo sapiens
  siRNA target sequence for PDPR (NM_017990.3,3308-3326).
ggtggggagagcccattta

SEQ ID NO: 214818 - DNA, 19 bp, Homo sapiens
  siRNA target sequence for PDPR (NM_017990.3,3327-3345).
ccggaatgggcagtatgtt

SEQ ID NO: 214819 - DNA, 19 bp, Homo sapiens
  siRNA target sequence for PDPR (NM_017990.3,3465-3483).
ccggggagagtatgagatt

SEQ ID NO: 214820 - DNA, 19 bp, Homo sapiens
  siRNA target sequence for PDPR (NM_017990.3,3546-3564).
ccagaagcgccgaaaggat

SEQ ID NO: 214821 - DNA, 19 bp, Homo sapiens
  siRNA target sequence for SARDH (NM_007101.2,938-956).
gaggagcacaggtcattga

SEQ ID NO: 214822 - DNA, 19 bp, Homo sapiens
  siRNA target sequence for SARDH (NM_007101.2,979-997).
cgtgtgtggacggatgatt

SEQ ID NO: 214823 - DNA, 19 bp, Homo sapiens
  siRNA target sequence for SARDH (NM_007101.2,980-998).
gtgtgtggacggatgattt

SEQ ID NO: 214824 - DNA, 19 bp, Homo sapiens
  siRNA target sequence for SARDH (NM_007101.2,1156-1174).
cgcatcgaggggattcaga

SEQ ID NO: 214825 - DNA, 19 bp, Homo sapiens
  siRNA target sequence for SARDH (NM_007101.2,1179-1197).
gcccaatgtccgtgatcat

SEQ ID NO: 214826 - DNA, 19 bp, Homo sapiens
  siRNA target sequence for SARDH (NM_007101.2,1181-1199).
ccaatgtccgtgatcatga

SEQ ID NO: 214827 - DNA, 19 bp, Homo sapiens
  siRNA target sequence for SARDH (NM_007101.2,1182-1200).
caatgtccgtgatcatgat

SEQ ID NO: 214828 - DNA, 19 bp, Homo sapiens
  siRNA target sequence for SARDH (NM_007101.2,1275-1293).
ggaggtgtcagacaagttt

SEQ ID NO: 214829 - DNA, 19 bp, Homo sapiens
  siRNA target sequence for SARDH (NM_007101.2,1642-1660).
gagtcctacgccaagaact

SEQ ID NO: 214830 - DNA, 19 bp, Homo sapiens
  siRNA target sequence for SARDH (NM_007101.2,1773-1791).
ggagcgaccgggatggttt

SEQ ID NO: 214831 - DNA, 19 bp, Homo sapiens
  siRNA target sequence for SARDH (NM_007101.2,1776-1794).
gcgaccgggatggtttcat

SEQ ID NO: 214832 - DNA, 19 bp, Homo sapiens
  siRNA target sequence for SARDH (NM_007101.2,1915-1933).
caccacgacacgatcaaga

SEQ ID NO: 214833 - DNA, 19 bp, Homo sapiens
  siRNA target sequence for SARDH (NM_007101.2,2288-2306).
ccgaggacctgggtatgat

SEQ ID NO: 214834 - DNA, 19 bp, Homo sapiens
  siRNA target sequence for SARDH (NM_007101.2,2293-2311).
gacctgggtatgatcagta

SEQ ID NO: 214835 - DNA, 19 bp, Homo sapiens
  siRNA target sequence for SARDH (NM_007101.2,2321-2339).
cagccagccgagccatttt

SEQ ID NO: 214836 - DNA, 19 bp, Homo sapiens
  siRNA target sequence for SARDH (NM_007101.2,2324-2342).
ccagccgagccattttgca

SEQ ID NO: 214837 - DNA, 19 bp, Homo sapiens
  siRNA target sequence for SARDH (NM_007101.2,2849-2867).
ccatcgcctacggttacat

SEQ ID NO: 214838 - DNA, 19 bp, Homo sapiens
  siRNA target sequence for SARDH (NM_007101.2,2888-2906).
cggtctcgctggactttgt

SEQ ID NO: 214839 - DNA, 19 bp, Homo sapiens
  siRNA target sequence for SARDH (NM_007101.2,2890-2908).
gtctcgctggactttgtga

SEQ ID NO: 214840 - DNA, 19 bp, Homo sapiens
  siRNA target sequence for TYMS (NM_001071.1,492-510).
ggacttgggcccagtttat

SEQ ID NO: 214841 - DNA, 19 bp, Homo sapiens
  siRNA target sequence for TYMS (NM_001071.1,536-554).
cagaatacagagatatgga

SEQ ID NO: 214842 - DNA, 19 bp, Homo sapiens
  siRNA target sequence for TYMS (NM_001071.1,586-604).
ctgcaaagagtgattgaca

SEQ ID NO: 214843 - DNA, 19 bp, Homo sapiens
  siRNA target sequence for TYMS (NM_001071.1,595-613).
gtgattgacaccatcaaaa

SEQ ID NO: 214844 - DNA, 19 bp, Homo sapiens
  siRNA target sequence for TYMS (NM_001071.1,620-638).
ctgacgacagaagaatcat

SEQ ID NO: 214845 - DNA, 19 bp, Homo sapiens
  siRNA target sequence for TYMS (NM_001071.1,622-640).
gacgacagaagaatcatca

SEQ ID NO: 214846 - DNA, 19 bp, Homo sapiens
  siRNA target sequence for TYMS (NM_001071.1,625-643).
gacagaagaatcatcatgt

SEQ ID NO: 214847 - DNA, 19 bp, Homo sapiens
  siRNA target sequence for TYMS (NM_001071.1,636-654).
catcatgtgcgcttggaat

SEQ ID NO: 214848 - DNA, 19 bp, Homo sapiens
  siRNA target sequence for TYMS (NM_001071.1,645-663).
cgcttggaatccaagagat

SEQ ID NO: 214849 - DNA, 19 bp, Homo sapiens
  siRNA target sequence for TYMS (NM_001071.1,764-782).
gcctcggtgtgcctttcaa

SEQ ID NO: 214850 - DNA, 19 bp, Homo sapiens
  siRNA target sequence for TYMS (NM_001071.1,766-784).
ctcggtgtgcctttcaaca

SEQ ID NO: 214851 - DNA, 19 bp, Homo sapiens
  siRNA target sequence for TYMS (NM_001071.1,832-850).
ctgaagccaggtgacttta

SEQ ID NO: 214852 - DNA, 19 bp, Homo sapiens
  siRNA target sequence for TYMS (NM_001071.1,834-852).
gaagccaggtgactttata

SEQ ID NO: 214853 - DNA, 19 bp, Homo sapiens
  siRNA target sequence for TYMS (NM_001071.1,869-887).
cacatatttacctgaatca

SEQ ID NO: 214854 - DNA, 19 bp, Homo sapiens
  siRNA target sequence for TYMS (NM_001071.1,871-889).
catatttacctgaatcaca

SEQ ID NO: 214855 - DNA, 19 bp, Homo sapiens
  siRNA target sequence for TYMS (NM_001071.1,886-904).
cacatcgagccactgaaaa

SEQ ID NO: 214856 - DNA, 19 bp, Homo sapiens
  siRNA target sequence for TYMS (NM_001071.1,944-962).
ggattcttcgaaaagttga

SEQ ID NO: 214857 - DNA, 19 bp, Homo sapiens
  siRNA target sequence for TYMS (NM_001071.1,1008-1026).
caatccgcatccaactatt

SEQ ID NO: 214858 - DNA, 19 bp, Homo sapiens
  siRNA target sequence for TYMS (NM_001071.1,1012-1030).
ccgcatccaactattaaaa

SEQ ID NO: 214859 - DNA, 19 bp, Homo sapiens
  siRNA target sequence for TYMS (NM_001071.1,1013-1031).
cgcatccaactattaaaat

SEQ ID NO: 214860 - DNA, 19 bp, Homo sapiens
  siRNA target sequence for FLJ20257 (NM_019606.3,1798-1816).
ggtgggcctggatatcgat

SEQ ID NO: 214861 - DNA, 19 bp, Homo sapiens
  siRNA target sequence for FLJ20257 (NM_019606.3,1799-1817).
gtgggcctggatatcgatt

SEQ ID NO: 214862 - DNA, 19 bp, Homo sapiens
  siRNA target sequence for FLJ20257 (NM_019606.3,1814-1832).
gattcccggctcatccatt

SEQ ID NO: 214863 - DNA, 19 bp, Homo sapiens
  siRNA target sequence for FLJ20257 (NM_019606.3,1926-1944).
ggaccaccaccgttcgaaa

SEQ ID NO: 214864 - DNA, 19 bp, Homo sapiens
  siRNA target sequence for FLJ20257 (NM_019606.3,2048-2066).
gtcttcgtcacgggtaatt

SEQ ID NO: 214865 - DNA, 19 bp, Homo sapiens
  siRNA target sequence for FLJ20257 (NM_019606.3,2050-2068).
cttcgtcacgggtaattat

SEQ ID NO: 214866 - DNA, 19 bp, Homo sapiens
  siRNA target sequence for FLJ20257 (NM_019606.3,2095-2113).
ggcccaaacacctgagtat

SEQ ID NO: 214867 - DNA, 19 bp, Homo sapiens
  siRNA target sequence for FLJ20257 (NM_019606.3,2098-2116).
ccaaacacctgagtatgat

SEQ ID NO: 214868 - DNA, 19 bp, Homo sapiens
  siRNA target sequence for FLJ20257 (NM_019606.3,2139-2157).
ccaagtgggtgcatctgaa

SEQ ID NO: 214869 - DNA, 19 bp, Homo sapiens
  siRNA target sequence for FLJ20257 (NM_019606.3,2250-2268).
cgtcgtatggcaagagaaa

SEQ ID NO: 214870 - DNA, 19 bp, Homo sapiens
  siRNA target sequence for FLJ20257 (NM_019606.3,2277-2295).
cagaaacgatctacaagaa

SEQ ID NO: 214871 - DNA, 19 bp, Homo sapiens
  siRNA target sequence for FLJ20257 (NM_019606.3,2279-2297).
gaaacgatctacaagaact

SEQ ID NO: 214872 - DNA, 19 bp, Homo sapiens
  siRNA target sequence for FLJ20257 (NM_019606.3,2293-2311).
gaactactaccgaatccaa

SEQ ID NO: 214873 - DNA, 19 bp, Homo sapiens
  siRNA target sequence for FTSJ1 (NM_012280.2,391-409).
ctcgcagcgccttcaaact

SEQ ID NO: 214874 - DNA, 19 bp, Homo sapiens
  siRNA target sequence for FTSJ1 (NM_012280.2,669-687).
gacggggctcctgatgtaa

SEQ ID NO: 214875 - DNA, 19 bp, Homo sapiens
  siRNA target sequence for FTSJ1 (NM_012280.2,688-706).
ccggtctccatgatgttga

SEQ ID NO: 214876 - DNA, 19 bp, Homo sapiens
  siRNA target sequence for FTSJ1 (NM_012280.2,696-714).
catgatgttgatgagtata

SEQ ID NO: 214877 - DNA, 19 bp, Homo sapiens
  siRNA target sequence for FTSJ1 (NM_012280.2,957-975).
cccctgctggaccattctt

SEQ ID NO: 214878 - DNA, 19 bp, Homo sapiens
  siRNA target sequence for FTSJ1 (NM_012280.2,958-976).
ccctgctggaccattctta

SEQ ID NO: 214879 - DNA, 19 bp, Homo sapiens
  siRNA target sequence for FTSJ1 (NM_012280.2,1003-1021).
gtcccacccgcatcattgt

SEQ ID NO: 214880 - DNA, 19 bp, Homo sapiens
  siRNA target sequence for FTSJ1 (NM_012280.2,1040-1058).
ggacctgagctcctatgat

SEQ ID NO: 214881 - DNA, 19 bp, Homo sapiens
  siRNA target sequence for FTSJ1 (NM_012280.2,1149-1167).
gaggcctgcacgttgaaga

SEQ ID NO: 214882 - DNA, 19 bp, Homo sapiens
  siRNA target sequence for FTSJ1 (NM_177434.1,699-717).
gaccattcttacgatttca

SEQ ID NO: 214883 - DNA, 19 bp, Homo sapiens
  siRNA target sequence for FTSJ2 (NM_013393.1,246-264).
ggccttcgggtgttagact

SEQ ID NO: 214884 - DNA, 19 bp, Homo sapiens
  siRNA target sequence for FTSJ2 (NM_013393.1,350-368).
cgtgcttggggtagatctt

SEQ ID NO: 214885 - DNA, 19 bp, Homo sapiens
  siRNA target sequence for FTSJ2 (NM_013393.1,353-371).
gcttggggtagatcttctt

SEQ ID NO: 214886 - DNA, 19 bp, Homo sapiens
  siRNA target sequence for FTSJ2 (NM_013393.1,360-378).
gtagatcttcttcacatat

SEQ ID NO: 214887 - DNA, 19 bp, Homo sapiens
  siRNA target sequence for FTSJ2 (NM_013393.1,427-445).
cgagaacctcacagagaat

SEQ ID NO: 214888 - DNA, 19 bp, Homo sapiens
  siRNA target sequence for FTSJ2 (NM_013393.1,588-606).
cctggggggacattccttt

SEQ ID NO: 214889 - DNA, 19 bp, Homo sapiens
  siRNA target sequence for FTSJ2 (NM_013393.1,591-609).
ggggggacattcctttgta

SEQ ID NO: 214890 - DNA, 19 bp, Homo sapiens
  siRNA target sequence for FTSJ2 (NM_013393.1,627-645).
caaagccgtcggttacaga

SEQ ID NO: 214891 - DNA, 19 bp, Homo sapiens
  siRNA target sequence for FTSJ2 (NM_013393.1,690-708).
gaagccagcaggaaagagt

SEQ ID NO: 214892 - DNA, 19 bp, Homo sapiens
  siRNA target sequence for LOC57019 (NM_020313.1,37-55).
gcagtggtctgggataagt

SEQ ID NO: 214893 - DNA, 19 bp, Homo sapiens
  siRNA target sequence for LOC57019 (NM_020313.1,557-575).
ccctctcagccaacgatat

SEQ ID NO: 214894 - DNA, 19 bp, Homo sapiens
  siRNA target sequence for LOC57019 (NM_020313.1,594-612).
catcttctgtggatgtagt

SEQ ID NO: 214895 - DNA, 19 bp, Homo sapiens
  siRNA target sequence for LOC57019 (NM_020313.1,600-618).
ctgtggatgtagtttaact

SEQ ID NO: 214896 - DNA, 19 bp, Homo sapiens
  siRNA target sequence for LOC57019 (NM_020313.1,640-658).
gtggtcaggttgaacatga

SEQ ID NO: 214897 - DNA, 19 bp, Homo sapiens
  siRNA target sequence for LOC57019 (NM_020313.1,643-661).
gtcaggttgaacatgatga

SEQ ID NO: 214898 - DNA, 19 bp, Homo sapiens
  siRNA target sequence for LOC57019 (NM_020313.1,647-665).
ggttgaacatgatgatcaa

SEQ ID NO: 214899 - DNA, 19 bp, Homo sapiens
  siRNA target sequence for LOC57019 (NM_020313.1,678-696).
cagggtggacaccttcttt

SEQ ID NO: 214900 - DNA, 19 bp, Homo sapiens
  siRNA target sequence for LOC57019 (NM_020313.1,721-739).
gaagcctgcagtcacttta

SEQ ID NO: 214901 - DNA, 19 bp, Homo sapiens
  siRNA target sequence for LOC57019 (NM_020313.1,759-777).
cacgactgtatcactcatt

SEQ ID NO: 214902 - DNA, 19 bp, Homo sapiens
  siRNA target sequence for LOC57019 (NM_020313.1,858-876).
cctgcgggctgcttcttgt

SEQ ID NO: 214903 - DNA, 19 bp, Homo sapiens
  siRNA target sequence for LOC57019 (NM_020313.1,1079-1097).
gtgatagcaatcttcatga

SEQ ID NO: 214904 - DNA, 19 bp, Homo sapiens
  siRNA target sequence for SKB1 (NM_006109.2,319-337).
ggactggaatacgctaatt

SEQ ID NO: 214905 - DNA, 19 bp, Homo sapiens
  siRNA target sequence for SKB1 (NM_006109.2,358-376).
gattcgtccagactcaaaa

SEQ ID NO: 214906 - DNA, 19 bp, Homo sapiens
  siRNA target sequence for SKB1 (NM_006109.2,464-482).
ccccttaatcaggaagata

SEQ ID NO: 214907 - DNA, 19 bp, Homo sapiens
  siRNA target sequence for SKB1 (NM_006109.2,582-600).
gagatgatataattgagaa

SEQ ID NO: 214908 - DNA, 19 bp, Homo sapiens
  siRNA target sequence for SKB1 (NM_006109.2,667-685).
ccggactttgtgtgactat

SEQ ID NO: 214909 - DNA, 19 bp, Homo sapiens
  siRNA target sequence for SKB1 (NM_006109.2,668-686).
cggactttgtgtgactata

SEQ ID NO: 214910 - DNA, 19 bp, Homo sapiens
  siRNA target sequence for SKB1 (NM_006109.2,720-738).
ctgacctcccatctaatca

SEQ ID NO: 214911 - DNA, 19 bp, Homo sapiens
  siRNA target sequence for SKB1 (NM_006109.2,729-747).
catctaatcatgtcattga

SEQ ID NO: 214912 - DNA, 19 bp, Homo sapiens
  siRNA target sequence for SKB1 (NM_006109.2,754-772).
gcttggggagcccatcaaa

SEQ ID NO: 214913 - DNA, 19 bp, Homo sapiens
  siRNA target sequence for SKB1 (NM_006109.2,778-796).
cattctccccactagcatt

SEQ ID NO: 214914 - DNA, 19 bp, Homo sapiens
  siRNA target sequence for SKB1 (NM_006109.2,969-987).
cacctaatgcctatgaact

SEQ ID NO: 214915 - DNA, 19 bp, Homo sapiens
  siRNA target sequence for SKB1 (NM_006109.2,1099-1117).
gtaccagcaggccatctat

SEQ ID NO: 214916 - DNA, 19 bp, Homo sapiens
  siRNA target sequence for SKB1 (NM_006109.2,1158-1176).
ccaatgtccaggtactgat

SEQ ID NO: 214917 - DNA, 19 bp, Homo sapiens
  siRNA target sequence for SKB1 (NM_006109.2,1281-1299).
ccgtggtgacgctagagaa

SEQ ID NO: 214918 - DNA, 19 bp, Homo sapiens
  siRNA target sequence for SKB1 (NM_006109.2,1402-1420).
gggctcatttgctgacaat

SEQ ID NO: 214919 - DNA, 19 bp, Homo sapiens
  siRNA target sequence for SKB1 (NM_006109.2,1682-1700).
gacaacaaccgctattgca

SEQ ID NO: 214920 - DNA, 19 bp, Homo sapiens
  siRNA target sequence for SKB1 (NM_006109.2,1691-1709).
cgctattgcaccttggaat

SEQ ID NO: 214921 - DNA, 19 bp, Homo sapiens
  siRNA target sequence for SKB1 (NM_006109.2,1693-1711).
ctattgcaccttggaattt

SEQ ID NO: 214922 - DNA, 19 bp, Homo sapiens
  siRNA target sequence for SKB1 (NM_006109.2,1717-1735).
ggaggtgaacacagtacta

SEQ ID NO: 214923 - DNA, 19 bp, Homo sapiens
  siRNA target sequence for SKB1 (NM_006109.2,1720-1738).
ggtgaacacagtactacat

SEQ ID NO: 214924 - DNA, 19 bp, Homo sapiens
  siRNA target sequence for SKB1 (NM_006109.2,1832-1850).
cccatcctcttccctatta

SEQ ID NO: 214925 - DNA, 19 bp, Homo sapiens
  siRNA target sequence for SKB1 (NM_006109.2,1833-1851).
ccatcctcttccctattaa

SEQ ID NO: 214926 - DNA, 19 bp, Homo sapiens
  siRNA target sequence for SKB1 (NM_006109.2,1899-1917).
ggcgatgcagcaattccaa

SEQ ID NO: 214927 - DNA, 19 bp, Homo sapiens
  siRNA target sequence for SKB1 (NM_006109.2,1973-1991).
cccacaggccgctcatata

SEQ ID NO: 214928 - DNA, 19 bp, Homo sapiens
  siRNA target sequence for SKB1 (NM_006109.2,1977-1995).
caggccgctcatataccat

SEQ ID NO: 214929 - DNA, 19 bp, Homo sapiens
  siRNA target sequence for GATM (NM_001482.1,110-128).
ccgaggcggtgcactacat

SEQ ID NO: 214930 - DNA, 19 bp, Homo sapiens
  siRNA target sequence for GATM (NM_001482.1,158-176).
gatgggtgcagcgaacttt

SEQ ID NO: 214931 - DNA, 19 bp, Homo sapiens
  siRNA target sequence for GATM (NM_001482.1,288-306).
ccccttagaggaagtgata

SEQ ID NO: 214932 - DNA, 19 bp, Homo sapiens
  siRNA target sequence for GATM (NM_001482.1,290-308).
ccttagaggaagtgatagt

SEQ ID NO: 214933 - DNA, 19 bp, Homo sapiens
  siRNA target sequence for GATM (NM_001482.1,349-367).
gaggtgaaggccaacacat

SEQ ID NO: 214934 - DNA, 19 bp, Homo sapiens
  siRNA target sequence for GATM (NM_001482.1,351-369).
ggtgaaggccaacacatat

SEQ ID NO: 214935 - DNA, 19 bp, Homo sapiens
  siRNA target sequence for GATM (NM_001482.1,359-377).
ccaacacatatgaaaagta

SEQ ID NO: 214936 - DNA, 19 bp, Homo sapiens
  siRNA target sequence for GATM (NM_001482.1,370-388).
gaaaagtactggccatttt

SEQ ID NO: 214937 - DNA, 19 bp, Homo sapiens
  siRNA target sequence for GATM (NM_001482.1,511-529).
gactggtcattgaagtata

SEQ ID NO: 214938 - DNA, 19 bp, Homo sapiens
  siRNA target sequence for GATM (NM_001482.1,513-531).
ctggtcattgaagtataaa

SEQ ID NO: 214939 - DNA, 19 bp, Homo sapiens
  siRNA target sequence for GATM (NM_001482.1,516-534).
gtcattgaagtataaaact

SEQ ID NO: 214940 - DNA, 19 bp, Homo sapiens
  siRNA target sequence for GATM (NM_001482.1,544-562).
gagtctacgggtttataca

SEQ ID NO: 214941 - DNA, 19 bp, Homo sapiens
  siRNA target sequence for GATM (NM_001482.1,546-564).
gtctacgggtttatacagt

SEQ ID NO: 214942 - DNA, 19 bp, Homo sapiens
  siRNA target sequence for GATM (NM_001482.1,572-590).
ctcgagacatcctgatagt

SEQ ID NO: 214943 - DNA, 19 bp, Homo sapiens
  siRNA target sequence for GATM (NM_001482.1,575-593).
gagacatcctgatagttgt

SEQ ID NO: 214944 - DNA, 19 bp, Homo sapiens
  siRNA target sequence for GATM (NM_001482.1,626-644).
ggcgttcacgcttctttga

SEQ ID NO: 214945 - DNA, 19 bp, Homo sapiens
  siRNA target sequence for GATM (NM_001482.1,629-647).
gttcacgcttctttgagta

SEQ ID NO: 214946 - DNA, 19 bp, Homo sapiens
  siRNA target sequence for GATM (NM_001482.1,648-666).
ccgagcgtacaggtcaatt

SEQ ID NO: 214947 - DNA, 19 bp, Homo sapiens
  siRNA target sequence for GATM (NM_001482.1,649-667).
cgagcgtacaggtcaatta

SEQ ID NO: 214948 - DNA, 19 bp, Homo sapiens
  siRNA target sequence for GATM (NM_001482.1,650-668).
gagcgtacaggtcaattat

SEQ ID NO: 214949 - DNA, 19 bp, Homo sapiens
  siRNA target sequence for GATM (NM_001482.1,652-670).
gcgtacaggtcaattatca

SEQ ID NO: 214950 - DNA, 19 bp, Homo sapiens
  siRNA target sequence for GATM (NM_001482.1,653-671).
cgtacaggtcaattatcaa

SEQ ID NO: 214951 - DNA, 19 bp, Homo sapiens
  siRNA target sequence for GATM (NM_001482.1,654-672).
gtacaggtcaattatcaaa

SEQ ID NO: 214952 - DNA, 19 bp, Homo sapiens
  siRNA target sequence for GATM (NM_001482.1,659-677).
ggtcaattatcaaagacta

SEQ ID NO: 214953 - DNA, 19 bp, Homo sapiens
  siRNA target sequence for GATM (NM_001482.1,725-743).
ctgatgagctttataacca

SEQ ID NO: 214954 - DNA, 19 bp, Homo sapiens
  siRNA target sequence for GATM (NM_001482.1,875-893).
gaagccaggttacaaacta

SEQ ID NO: 214955 - DNA, 19 bp, Homo sapiens
  siRNA target sequence for GATM (NM_001482.1,965-983).
ccaatcccatgcatattga

SEQ ID NO: 214956 - DNA, 19 bp, Homo sapiens
  siRNA target sequence for GATM (NM_001482.1,966-984).
caatcccatgcatattgat

SEQ ID NO: 214957 - DNA, 19 bp, Homo sapiens
  siRNA target sequence for GATM (NM_001482.1,996-1014).
catcattggacctggtatt

SEQ ID NO: 214958 - DNA, 19 bp, Homo sapiens
  siRNA target sequence for GATM (NM_001482.1,1007-1025).
ctggtattgtgctttccaa

SEQ ID NO: 214959 - DNA, 19 bp, Homo sapiens
  siRNA target sequence for GATM (NM_001482.1,1037-1055).
catgtcaccagattgatct

SEQ ID NO: 214960 - DNA, 19 bp, Homo sapiens
  siRNA target sequence for GATM (NM_001482.1,1085-1103).
ctcctccaacaccaatcat

SEQ ID NO: 214961 - DNA, 19 bp, Homo sapiens
  siRNA target sequence for GATM (NM_001482.1,1120-1138).
ctctggatgtcatccaaat

SEQ ID NO: 214962 - DNA, 19 bp, Homo sapiens
  siRNA target sequence for GATM (NM_001482.1,1190-1208).
ccaatgaagttccaattca

SEQ ID NO: 214963 - DNA, 19 bp, Homo sapiens
  siRNA target sequence for GATM (NM_001482.1,1198-1216).
gttccaattcaaaagatgt

SEQ ID NO: 214964 - DNA, 19 bp, Homo sapiens
  siRNA target sequence for GATM (NM_001482.1,1219-1237).
gaaaagctgggtatcacta

SEQ ID NO: 214965 - DNA, 19 bp, Homo sapiens
  siRNA target sequence for GATM (NM_001482.1,1224-1242).
gctgggtatcactaccatt

SEQ ID NO: 214966 - DNA, 19 bp, Homo sapiens
  siRNA target sequence for GATM (NM_001482.1,1225-1243).
ctgggtatcactaccatta

SEQ ID NO: 214967 - DNA, 19 bp, Homo sapiens
  siRNA target sequence for GATM (NM_001482.1,1227-1245).
gggtatcactaccattaaa

SEQ ID NO: 214968 - DNA, 19 bp, Homo sapiens
  siRNA target sequence for GATM (NM_001482.1,1229-1247).
gtatcactaccattaaagt

SEQ ID NO: 214969 - DNA, 19 bp, Homo sapiens
  siRNA target sequence for GATM (NM_001482.1,1235-1253).
ctaccattaaagttaacat

SEQ ID NO: 214970 - DNA, 19 bp, Homo sapiens
  siRNA target sequence for NAT1 (NM_000662.3,596-614).
ccgtttgacggaagagaat

SEQ ID NO: 214971 - DNA, 19 bp, Homo sapiens
  siRNA target sequence for NAT1 (NM_000662.3,623-641).
gtatctagaccaaatcaga

SEQ ID NO: 214972 - DNA, 19 bp, Homo sapiens
  siRNA target sequence for NAT1 (NM_000662.3,684-702).
ctcctagaagacagcaaat

SEQ ID NO: 214973 - DNA, 19 bp, Homo sapiens
  siRNA target sequence for NAT1 (NM_000662.3,697-715).
gcaaataccgaaaaatcta

SEQ ID NO: 214974 - DNA, 19 bp, Homo sapiens
  siRNA target sequence for NAT1 (NM_000662.3,705-723).
cgaaaaatctactccttta

SEQ ID NO: 214975 - DNA, 19 bp, Homo sapiens
  siRNA target sequence for NAT1 (NM_000662.3,724-742).
ctcttaagcctcgaacaat

SEQ ID NO: 214976 - DNA, 19 bp, Homo sapiens
  siRNA target sequence for NAT1 (NM_000662.3,861-879).
ctcacccataggagattca

SEQ ID NO: 214977 - DNA, 19 bp, Homo sapiens
  siRNA target sequence for NAT1 (NM_000662.3,865-883).
cccataggagattcaatta

SEQ ID NO: 214978 - DNA, 19 bp, Homo sapiens
  siRNA target sequence for NAT1 (NM_000662.3,866-884).
ccataggagattcaattat

SEQ ID NO: 214979 - DNA, 19 bp, Homo sapiens
  siRNA target sequence for NAT1 (NM_000662.3,871-889).
ggagattcaattataagga

SEQ ID NO: 214980 - DNA, 19 bp, Homo sapiens
  siRNA target sequence for NAT1 (NM_000662.3,895-913).
cagatctaatagagttcaa

SEQ ID NO: 214981 - DNA, 19 bp, Homo sapiens
  siRNA target sequence for NAT1 (NM_000662.3,996-1014).
ggtgatagattttttacta

SEQ ID NO: 214982 - DNA, 19 bp, Homo sapiens
  siRNA target sequence for NAT2 (NM_000015.1,266-284).
ggctatttttgatcacatt

SEQ ID NO: 214983 - DNA, 19 bp, Homo sapiens
  siRNA target sequence for NAT2 (NM_000015.1,268-286).
ctatttttgatcacattgt

SEQ ID NO: 214984 - DNA, 19 bp, Homo sapiens
  siRNA target sequence for NAT2 (NM_000015.1,604-622).
gagagcagtatattacaaa

SEQ ID NO: 214985 - DNA, 19 bp, Homo sapiens
  siRNA target sequence for NAT2 (NM_000015.1,685-703).
cgcttgaacctcgaacaat

SEQ ID NO: 214986 - DNA, 19 bp, Homo sapiens
  siRNA target sequence for NAT2 (NM_000015.1,686-704).
gcttgaacctcgaacaatt

SEQ ID NO: 214987 - DNA, 19 bp, Homo sapiens
  siRNA target sequence for NAT2 (NM_000015.1,735-753).
cagacgtctccaacatctt

SEQ ID NO: 214988 - DNA, 19 bp, Homo sapiens
  siRNA target sequence for NAT2 (NM_000015.1,822-840).
ctcacctatagaaaattca

SEQ ID NO: 214989 - DNA, 19 bp, Homo sapiens
  siRNA target sequence for NAT2 (NM_000015.1,824-842).
cacctatagaaaattcaat

SEQ ID NO: 214990 - DNA, 19 bp, Homo sapiens
  siRNA target sequence for NAT2 (NM_000015.1,827-845).
ctatagaaaattcaattat

SEQ ID NO: 214991 - DNA, 19 bp, Homo sapiens
  siRNA target sequence for NAT2 (NM_000015.1,856-874).
cagatctggtcgagtttaa

SEQ ID NO: 214992 - DNA, 19 bp, Homo sapiens
  siRNA target sequence for NAT2 (NM_000015.1,858-876).
gatctggtcgagtttaaaa

SEQ ID NO: 214993 - DNA, 19 bp, Homo sapiens
  siRNA target sequence for NAT2 (NM_000015.1,957-975).
ggtgatggatcccttacta

SEQ ID NO: 214994 - DNA, 19 bp, Homo sapiens
  siRNA target sequence for NAT2 (NM_000015.1,958-976).
gtgatggatcccttactat

SEQ ID NO: 214995 - DNA, 19 bp, Homo sapiens
  siRNA target sequence for NAT2 (NM_000015.1,960-978).
gatggatcccttactattt

SEQ ID NO: 214996 - DNA, 19 bp, Homo sapiens
  siRNA target sequence for SAT (NM_002970.1,200-218).
ccgactgcagtgacatact

SEQ ID NO: 214997 - DNA, 19 bp, Homo sapiens
  siRNA target sequence for SAT (NM_002970.1,228-246).
caaggagctggctaaatat

SEQ ID NO: 214998 - DNA, 19 bp, Homo sapiens
  siRNA target sequence for SAT (NM_002970.1,262-280).
caagtaatcttaactgaaa

SEQ ID NO: 214999 - DNA, 19 bp, Homo sapiens
  siRNA target sequence for SAT (NM_002970.1,305-323).
gagagcaccccttttacca

SEQ ID NO: 215000 - DNA, 19 bp, Homo sapiens
  siRNA target sequence for SAT (NM_002970.1,390-408).
catgtactattttacctat

SEQ ID NO: 215001 - DNA, 19 bp, Homo sapiens
  siRNA target sequence for SAT (NM_002970.1,413-431).
cgtggattggcaagttatt

SEQ ID NO: 215002 - DNA, 19 bp, Homo sapiens
  siRNA target sequence for SAT (NM_002970.1,416-434).
ggattggcaagttattgta

SEQ ID NO: 215003 - DNA, 19 bp, Homo sapiens
  siRNA target sequence for SAT (NM_002970.1,417-435).
gattggcaagttattgtat

SEQ ID NO: 215004 - DNA, 19 bp, Homo sapiens
  siRNA target sequence for SAT (NM_002970.1,447-465).
cttcgtgatgagtgattat

SEQ ID NO: 215005 - DNA, 19 bp, Homo sapiens
  siRNA target sequence for SAT (NM_002970.1,471-489).
ctttggcataggatcagaa

SEQ ID NO: 215006 - DNA, 19 bp, Homo sapiens
  siRNA target sequence for SAT (NM_002970.1,476-494).
gcataggatcagaaattct

SEQ ID NO: 215007 - DNA, 19 bp, Homo sapiens
  siRNA target sequence for SAT (NM_002970.1,565-583).
gaaccatccatcaacttct

SEQ ID NO: 215008 - DNA, 19 bp, Homo sapiens
  siRNA target sequence for SAT (NM_002970.1,568-586).
ccatccatcaacttctata

SEQ ID NO: 215009 - DNA, 19 bp, Homo sapiens
  siRNA target sequence for SAT (NM_002970.1,569-587).
catccatcaacttctataa

SEQ ID NO: 215010 - DNA, 19 bp, Homo sapiens
  siRNA target sequence for SAT (NM_002970.1,622-640).
ggttggagactgttcaaga

SEQ ID NO: 215011 - DNA, 19 bp, Homo sapiens
  siRNA target sequence for SAT (NM_002970.1,623-641).
gttggagactgttcaagat

SEQ ID NO: 215012 - DNA, 19 bp, Homo sapiens
  siRNA target sequence for SAT (NM_002970.1,643-661).
gacaaggagtacttgctaa

SEQ ID NO: 215013 - DNA, 19 bp, Homo sapiens
  siRNA target sequence for AANAT (NM_001088.1,720-738).
cgcgctggtacccttctat

SEQ ID NO: 215014 - DNA, 19 bp, Homo sapiens
  siRNA target sequence for NAGS (NM_153006.1,636-654).
cgctgctgtgccatttttt

SEQ ID NO: 215015 - DNA, 19 bp, Homo sapiens
  siRNA target sequence for NAGS (NM_153006.1,870-888).
catcttcctcaataacaca

SEQ ID NO: 215016 - DNA, 19 bp, Homo sapiens
  siRNA target sequence for NAGS (NM_153006.1,895-913).
ctgcgcgacagcagtcata

SEQ ID NO: 215017 - DNA, 19 bp, Homo sapiens
  siRNA target sequence for NAGS (NM_153006.1,899-917).
gcgacagcagtcataaggt

SEQ ID NO: 215018 - DNA, 19 bp, Homo sapiens
  siRNA target sequence for NAGS (NM_153006.1,908-926).
gtcataaggtcctgagtaa

SEQ ID NO: 215019 - DNA, 19 bp, Homo sapiens
  siRNA target sequence for NAGS (NM_153006.1,1443-1461).
caatccctggtacttcaaa

SEQ ID NO: 215020 - DNA, 19 bp, Homo sapiens
  siRNA target sequence for NAGS (NM_153006.1,1447-1465).
ccctggtacttcaaacaca

SEQ ID NO: 215021 - DNA, 19 bp, Homo sapiens
  siRNA target sequence for ARD1 (NM_003491.2,128-146).
cgaggccagaggacctaat

SEQ ID NO: 215022 - DNA, 19 bp, Homo sapiens
  siRNA target sequence for ARD1 (NM_003491.2,133-151).
ccagaggacctaatgaaca

SEQ ID NO: 215023 - DNA, 19 bp, Homo sapiens
  siRNA target sequence for ARD1 (NM_003491.2,310-328).
gtgccccatggacatatca

SEQ ID NO: 215024 - DNA, 19 bp, Homo sapiens
  siRNA target sequence for ARD1 (NM_003491.2,360-378).
cctcggtctggctcagaaa

SEQ ID NO: 215025 - DNA, 19 bp, Homo sapiens
  siRNA target sequence for ARD1 (NM_003491.2,390-408).
ggcctctcgagccatgata

SEQ ID NO: 215026 - DNA, 19 bp, Homo sapiens
  siRNA target sequence for ARD1 (NM_003491.2,395-413).
ctcgagccatgatagagaa

SEQ ID NO: 215027 - DNA, 19 bp, Homo sapiens
  siRNA target sequence for ARD1 (NM_003491.2,464-482).
ccctgcacctctattccaa

SEQ ID NO: 215028 - DNA, 19 bp, Homo sapiens
  siRNA target sequence for CML2 (NM_016347.1,277-295).
cctggacgcggtatgtaga

SEQ ID NO: 215029 - DNA, 19 bp, Homo sapiens
  siRNA target sequence for CML2 (NM_016347.1,280-298).
ggacgcggtatgtagacat

SEQ ID NO: 215030 - DNA, 19 bp, Homo sapiens
  siRNA target sequence for CML2 (NM_016347.1,285-303).
cggtatgtagacatagcat

SEQ ID NO: 215031 - DNA, 19 bp, Homo sapiens
  siRNA target sequence for CML2 (NM_016347.1,286-304).
ggtatgtagacatagcatt

SEQ ID NO: 215032 - DNA, 19 bp, Homo sapiens
  siRNA target sequence for CSRP2BP (NM_020536.2,668-686).
gacgaagccacgagaacat

SEQ ID NO: 215033 - DNA, 19 bp, Homo sapiens
  siRNA target sequence for CSRP2BP (NM_020536.2,755-773).
caggcatcagtggacttat

SEQ ID NO: 215034 - DNA, 19 bp, Homo sapiens
  siRNA target sequence for CSRP2BP (NM_020536.2,993-1011).
ggcagcaagtcgtcatgtt

SEQ ID NO: 215035 - DNA, 19 bp, Homo sapiens
  siRNA target sequence for CSRP2BP (NM_020536.2,1041-1059).
gtggacgtcaaggttattt

SEQ ID NO: 215036 - DNA, 19 bp, Homo sapiens
  siRNA target sequence for CSRP2BP (NM_020536.2,1043-1061).
ggacgtcaaggttatttca

SEQ ID NO: 215037 - DNA, 19 bp, Homo sapiens
  siRNA target sequence for CSRP2BP (NM_020536.2,1479-1497).
catcttctacccctgtaaa

SEQ ID NO: 215038 - DNA, 19 bp, Homo sapiens
  siRNA target sequence for CSRP2BP (NM_020536.2,1485-1503).
ctacccctgtaaaattcat

SEQ ID NO: 215039 - DNA, 19 bp, Homo sapiens
  siRNA target sequence for CSRP2BP (NM_020536.2,1544-1562).
gaagtgattgacttttcct

SEQ ID NO: 215040 - DNA, 19 bp, Homo sapiens
  siRNA target sequence for CSRP2BP (NM_020536.2,1634-1652).
ggtacacctgcctctcatt

SEQ ID NO: 215041 - DNA, 19 bp, Homo sapiens
  siRNA target sequence for CSRP2BP (NM_020536.2,1738-1756).
ggaaggcgatggagtcata

SEQ ID NO: 215042 - DNA, 19 bp, Homo sapiens
  siRNA target sequence for CSRP2BP (NM_020536.2,1884-1902).
ccgacaggatggatattga

SEQ ID NO: 215043 - DNA, 19 bp, Homo sapiens
  siRNA target sequence for CSRP2BP (NM_020536.2,1985-2003).
ccgaaagagcccaggtata

SEQ ID NO: 215044 - DNA, 19 bp, Homo sapiens
  siRNA target sequence for CSRP2BP (NM_020536.2,2013-2031).
gcatctacgaggaaaagct

SEQ ID NO: 215045 - DNA, 19 bp, Homo sapiens
  siRNA target sequence for CSRP2BP (NM_020536.2,2080-2098).
ggaagctcggagactgaaa

SEQ ID NO: 215046 - DNA, 19 bp, Homo sapiens
  siRNA target sequence for CSRP2BP (NM_020536.2,2133-2151).
ggggattaccactttttga

SEQ ID NO: 215047 - DNA, 19 bp, Homo sapiens
  siRNA target sequence for CSRP2BP (NM_020536.2,2135-2153).
ggattaccactttttgact

SEQ ID NO: 215048 - DNA, 19 bp, Homo sapiens
  siRNA target sequence for CSRP2BP (NM_020536.2,2136-2154).
gattaccactttttgactt

SEQ ID NO: 215049 - DNA, 19 bp, Homo sapiens
  siRNA target sequence for CSRP2BP (NM_020536.2,2150-2168).
gacttggatcaagttgtta

SEQ ID NO: 215050 - DNA, 19 bp, Homo sapiens
  siRNA target sequence for CSRP2BP (NM_020536.2,2172-2190).
ctgctcttttgttagttga

SEQ ID NO: 215051 - DNA, 19 bp, Homo sapiens
  siRNA target sequence for CSRP2BP (NM_020536.2,2182-2200).
gttagttgacgggatttat

SEQ ID NO: 215052 - DNA, 19 bp, Homo sapiens
  siRNA target sequence for CSRP2BP (NM_020536.2,2305-2323).
gtccaggaagggatttcga

SEQ ID NO: 215053 - DNA, 19 bp, Homo sapiens
  siRNA target sequence for CSRP2BP (NM_020536.2,2324-2342).
caccagaccaccaagtttt

SEQ ID NO: 215054 - DNA, 19 bp, Homo sapiens
  siRNA target sequence for CSRP2BP (NM_020536.2,2406-2424).
ctcggatcttgaaacctta

SEQ ID NO: 215055 - DNA, 19 bp, Homo sapiens
  siRNA target sequence for CSRP2BP (NM_020536.2,2408-2426).
cggatcttgaaaccttata

SEQ ID NO: 215056 - DNA, 19 bp, Homo sapiens
  siRNA target sequence for CSRP2BP (NM_020536.2,2409-2427).
ggatcttgaaaccttatat

SEQ ID NO: 215057 - DNA, 19 bp, Homo sapiens
  siRNA target sequence for CSRP2BP (NM_020536.2,2421-2439).
cttatatcaggcgtgatta

SEQ ID NO: 215058 - DNA, 19 bp, Homo sapiens
  siRNA target sequence for CSRP2BP (NM_020536.2,2430-2448).
ggcgtgattatgaaacaaa

SEQ ID NO: 215059 - DNA, 19 bp, Homo sapiens
  siRNA target sequence for CSRP2BP (NM_020536.2,2523-2541).
ccgacgcacctctcgatta

SEQ ID NO: 215060 - DNA, 19 bp, Homo sapiens
  siRNA target sequence for CSRP2BP (NM_020536.2,2525-2543).
gacgcacctctcgattact

SEQ ID NO: 215061 - DNA, 19 bp, Homo sapiens
  siRNA target sequence for CSRP2BP (NM_020536.2,2527-2545).
cgcacctctcgattactgt

SEQ ID NO: 215062 - DNA, 19 bp, Homo sapiens
  siRNA target sequence for CSRP2BP (NM_020536.2,2528-2546).
gcacctctcgattactgtt

SEQ ID NO: 215063 - DNA, 19 bp, Homo sapiens
  siRNA target sequence for CSRP2BP (NM_020536.2,2529-2547).
cacctctcgattactgtta

SEQ ID NO: 215064 - DNA, 19 bp, Homo sapiens
  siRNA target sequence for CSRP2BP (NM_020536.2,2532-2550).
ctctcgattactgttatgt

SEQ ID NO: 215065 - DNA, 19 bp, Homo sapiens
  siRNA target sequence for CSRP2BP (NM_020536.2,2544-2562).
gttatgtgcggccaaatca

SEQ ID NO: 215066 - DNA, 19 bp, Homo sapiens
  siRNA target sequence for CSRP2BP (NM_020536.2,2561-2579).
cacatcccaacgatcaact

SEQ ID NO: 215067 - DNA, 19 bp, Homo sapiens
  siRNA target sequence for CSRP2BP (NM_020536.2,2693-2711).
gttcctgatgtgaaataca

SEQ ID NO: 215068 - DNA, 19 bp, Homo sapiens
  siRNA target sequence for CSRP2BP (NM_020536.2,2769-2787).
caactttcatgatctatca

SEQ ID NO: 215069 - DNA, 19 bp, Homo sapiens
  siRNA target sequence for CSRP2BP (NM_020536.2,2772-2790).
ctttcatgatctatcatct

SEQ ID NO: 215070 - DNA, 19 bp, Homo sapiens
  siRNA target sequence for CSRP2BP (NM_020536.2,2878-2896).
gactgaagaatatgtatta

SEQ ID NO: 215071 - DNA, 19 bp, Homo sapiens
  siRNA target sequence for CSRP2BP (NM_020536.2,2923-2941).
ggagagtacagagtgtaaa

SEQ ID NO: 215072 - DNA, 19 bp, Homo sapiens
  siRNA target sequence for CSRP2BP (NM_020536.2,2935-2953).
gtgtaaacacgcattcttt

SEQ ID NO: 215073 - DNA, 19 bp, Homo sapiens
  siRNA target sequence for CSRP2BP (NM_020536.2,2937-2955).
gtaaacacgcattctttct

SEQ ID NO: 215074 - DNA, 19 bp, Homo sapiens
  siRNA target sequence for DKFZP564C103 (NM_015654.3,155-173).
gtaccacgagtggatgaaa

SEQ ID NO: 215075 - DNA, 19 bp, Homo sapiens
  siRNA target sequence for DKFZP564C103 (NM_015654.3,158-176).
ccacgagtggatgaaatca

SEQ ID NO: 215076 - DNA, 19 bp, Homo sapiens
  siRNA target sequence for DKFZP564C103 (NM_015654.3,179-197).
ggagctgcagcgtttgaca

SEQ ID NO: 215077 - DNA, 19 bp, Homo sapiens
  siRNA target sequence for DKFZP564C103 (NM_015654.3,331-349).
gcatggtgggagatgtgaa

SEQ ID NO: 215078 - DNA, 19 bp, Homo sapiens
  siRNA target sequence for DKFZP564C103 (NM_015654.3,479-497).
gctaggtctgaccaagttt

SEQ ID NO: 215079 - DNA, 19 bp, Homo sapiens
  siRNA target sequence for DKFZP564C103 (NM_015654.3,490-508).
ccaagtttgaggctaaaat

SEQ ID NO: 215080 - DNA, 19 bp, Homo sapiens
  siRNA target sequence for DKFZP564C103 (NM_015654.3,491-509).
caagtttgaggctaaaatt

SEQ ID NO: 215081 - DNA, 19 bp, Homo sapiens
  siRNA target sequence for DKFZP564C103 (NM_015654.3,564-582).
gtggctacgagcagtgttt

SEQ ID NO: 215082 - DNA, 19 bp, Homo sapiens
  siRNA target sequence for ELP3 (NM_018091.3,45-63).
gctgatgatgctgactata

SEQ ID NO: 215083 - DNA, 19 bp, Homo sapiens
  siRNA target sequence for ELP3 (NM_018091.3,48-66).
gatgatgctgactatagga

SEQ ID NO: 215084 - DNA, 19 bp, Homo sapiens
  siRNA target sequence for ELP3 (NM_018091.3,54-72).
gctgactataggagatgtt

SEQ ID NO: 215085 - DNA, 19 bp, Homo sapiens
  siRNA target sequence for ELP3 (NM_018091.3,59-77).
ctataggagatgttattaa

SEQ ID NO: 215086 - DNA, 19 bp, Homo sapiens
  siRNA target sequence for ELP3 (NM_018091.3,103-121).
gggaaagacatcgatctaa

SEQ ID NO: 215087 - DNA, 19 bp, Homo sapiens
  siRNA target sequence for ELP3 (NM_018091.3,104-122).
ggaaagacatcgatctaaa

SEQ ID NO: 215088 - DNA, 19 bp, Homo sapiens
  siRNA target sequence for ELP3 (NM_018091.3,105-123).
gaaagacatcgatctaaat

SEQ ID NO: 215089 - DNA, 19 bp, Homo sapiens
  siRNA target sequence for ELP3 (NM_018091.3,115-133).
gatctaaataaggtgaaaa

SEQ ID NO: 215090 - DNA, 19 bp, Homo sapiens
  siRNA target sequence for ELP3 (NM_018091.3,118-136).
ctaaataaggtgaaaacca

SEQ ID NO: 215091 - DNA, 19 bp, Homo sapiens
  siRNA target sequence for ELP3 (NM_018091.3,134-152).
ccaagacagctgccaaata

SEQ ID NO: 215092 - DNA, 19 bp, Homo sapiens
  siRNA target sequence for ELP3 (NM_018091.3,312-330).
cagttttacaggaaatata

SEQ ID NO: 215093 - DNA, 19 bp, Homo sapiens
  siRNA target sequence for ELP3 (NM_018091.3,347-365).
gtggacctgattctgattt

SEQ ID NO: 215094 - DNA, 19 bp, Homo sapiens
  siRNA target sequence for ELP3 (NM_018091.3,416-434).
ctatccgtgccagatatga

SEQ ID NO: 215095 - DNA, 19 bp, Homo sapiens
  siRNA target sequence for ELP3 (NM_018091.3,452-470).
gacaccgaatagaacagtt

SEQ ID NO: 215096 - DNA, 19 bp, Homo sapiens
  siRNA target sequence for ELP3 (NM_018091.3,454-472).
caccgaatagaacagttaa

SEQ ID NO: 215097 - DNA, 19 bp, Homo sapiens
  siRNA target sequence for ELP3 (NM_018091.3,551-569).
gagattattttattcgaaa

SEQ ID NO: 215098 - DNA, 19 bp, Homo sapiens
  siRNA target sequence for ELP3 (NM_018091.3,589-607).
ggacatacttccaacaata

SEQ ID NO: 215099 - DNA, 19 bp, Homo sapiens
  siRNA target sequence for ELP3 (NM_018091.3,590-608).
gacatacttccaacaatat

SEQ ID NO: 215100 - DNA, 19 bp, Homo sapiens
  siRNA target sequence for ELP3 (NM_018091.3,592-610).
catacttccaacaatattt

SEQ ID NO: 215101 - DNA, 19 bp, Homo sapiens
  siRNA target sequence for ELP3 (NM_018091.3,596-614).
cttccaacaatatttacga

SEQ ID NO: 215102 - DNA, 19 bp, Homo sapiens
  siRNA target sequence for ELP3 (NM_018091.3,635-653).
gaagcctcacaaagtgtat

SEQ ID NO: 215103 - DNA, 19 bp, Homo sapiens
  siRNA target sequence for ELP3 (NM_018091.3,684-702).
ctgcatgaagcgacattta

SEQ ID NO: 215104 - DNA, 19 bp, Homo sapiens
  siRNA target sequence for ELP3 (NM_018091.3,687-705).
catgaagcgacatttaagt

SEQ ID NO: 215105 - DNA, 19 bp, Homo sapiens
  siRNA target sequence for ELP3 (NM_018091.3,744-762).
ggtgcagagtgtttatgaa

SEQ ID NO: 215106 - DNA, 19 bp, Homo sapiens
  siRNA target sequence for ELP3 (NM_018091.3,874-892).
ccaaacgtgggactagaaa

SEQ ID NO: 215107 - DNA, 19 bp, Homo sapiens
  siRNA target sequence for ELP3 (NM_018091.3,901-919).
gaacagttcacagagtttt

SEQ ID NO: 215108 - DNA, 19 bp, Homo sapiens
  siRNA target sequence for ELP3 (NM_018091.3,938-956).
gtcccgatgggctgaaact

SEQ ID NO: 215109 - DNA, 19 bp, Homo sapiens
  siRNA target sequence for ELP3 (NM_018091.3,942-960).
cgatgggctgaaactctat

SEQ ID NO: 215110 - DNA, 19 bp, Homo sapiens
  siRNA target sequence for ELP3 (NM_018091.3,946-964).
gggctgaaactctatccta

SEQ ID NO: 215111 - DNA, 19 bp, Homo sapiens
  siRNA target sequence for ELP3 (NM_018091.3,977-995).
gtgggaccgggctttatga

SEQ ID NO: 215112 - DNA, 19 bp, Homo sapiens
  siRNA target sequence for ELP3 (NM_018091.3,1009-1027).
ggaagatataagagttact

SEQ ID NO: 215113 - DNA, 19 bp, Homo sapiens
  siRNA target sequence for ELP3 (NM_018091.3,1030-1048).
cctagtgacctggttgaat

SEQ ID NO: 215114 - DNA, 19 bp, Homo sapiens
  siRNA target sequence for ELP3 (NM_018091.3,1095-1113).
ccgagtacagagggatatt

SEQ ID NO: 215115 - DNA, 19 bp, Homo sapiens
  siRNA target sequence for ELP3 (NM_018091.3,1099-1117).
gtacagagggatattccaa

SEQ ID NO: 215116 - DNA, 19 bp, Homo sapiens
  siRNA target sequence for ELP3 (NM_018091.3,1133-1151).
caggagtagagcatggtaa

SEQ ID NO: 215117 - DNA, 19 bp, Homo sapiens
  siRNA target sequence for ELP3 (NM_018091.3,1252-1270).
cggccataccaggttgaat

SEQ ID NO: 215118 - DNA, 19 bp, Homo sapiens
  siRNA target sequence for ELP3 (NM_018091.3,1253-1271).
ggccataccaggttgaatt

SEQ ID NO: 215119 - DNA, 19 bp, Homo sapiens
  siRNA target sequence for ELP3 (NM_018091.3,1277-1295).
ggagagattatgttgcaaa

SEQ ID NO: 215120 - DNA, 19 bp, Homo sapiens
  siRNA target sequence for ELP3 (NM_018091.3,1300-1318).
ggctgggaaacattcttgt

SEQ ID NO: 215121 - DNA, 19 bp, Homo sapiens
  siRNA target sequence for ELP3 (NM_018091.3,1304-1322).
gggaaacattcttgtcata

SEQ ID NO: 215122 - DNA, 19 bp, Homo sapiens
  siRNA target sequence for ELP3 (NM_018091.3,1331-1349).
cagatcaagacattttgat

SEQ ID NO: 215123 - DNA, 19 bp, Homo sapiens
  siRNA target sequence for ELP3 (NM_018091.3,1347-1365).
gattggcctcctacgatta

SEQ ID NO: 215124 - DNA, 19 bp, Homo sapiens
  siRNA target sequence for ELP3 (NM_018091.3,1357-1375).
ctacgattacgcaagtgtt

SEQ ID NO: 215125 - DNA, 19 bp, Homo sapiens
  siRNA target sequence for ELP3 (NM_018091.3,1460-1478).
gcagccgggatcctactaa

SEQ ID NO: 215126 - DNA, 19 bp, Homo sapiens
  siRNA target sequence for ELP3 (NM_018091.3,1461-1479).
cagccgggatcctactaaa

SEQ ID NO: 215127 - DNA, 19 bp, Homo sapiens
  siRNA target sequence for ELP3 (NM_018091.3,1463-1481).
gccgggatcctactaaatt

SEQ ID NO: 215128 - DNA, 19 bp, Homo sapiens
  siRNA target sequence for ELP3 (NM_018091.3,1464-1482).
ccgggatcctactaaattt

SEQ ID NO: 215129 - DNA, 19 bp, Homo sapiens
  siRNA target sequence for ELP3 (NM_018091.3,1554-1572).
gaaaatcgctgtgatatca

SEQ ID NO: 215130 - DNA, 19 bp, Homo sapiens
  siRNA target sequence for ELP3 (NM_018091.3,1574-1592).
gggtcggcaccaggaatta

SEQ ID NO: 215131 - DNA, 19 bp, Homo sapiens
  siRNA target sequence for ELP3 (NM_018091.3,1575-1593).
ggtcggcaccaggaattat

SEQ ID NO: 215132 - DNA, 19 bp, Homo sapiens
  siRNA target sequence for ELP3 (NM_018091.3,1576-1594).
gtcggcaccaggaattatt

SEQ ID NO: 215133 - DNA, 19 bp, Homo sapiens
  siRNA target sequence for ELP3 (NM_018091.3,1578-1596).
cggcaccaggaattattat

SEQ ID NO: 215134 - DNA, 19 bp, Homo sapiens
  siRNA target sequence for ELP3 (NM_018091.3,1581-1599).
caccaggaattattataga

SEQ ID NO: 215135 - DNA, 19 bp, Homo sapiens
  siRNA target sequence for ELP3 (NM_018091.3,1598-1616).
gaaagatcggctacagatt

SEQ ID NO: 215136 - DNA, 19 bp, Homo sapiens
  siRNA target sequence for ELP3 (NM_018091.3,1602-1620).
gatcggctacagattacaa

SEQ ID NO: 215137 - DNA, 19 bp, Homo sapiens
  siRNA target sequence for FLJ13848 (NM_024771.1,222-240).
cccagtgttcaagaaatat

SEQ ID NO: 215138 - DNA, 19 bp, Homo sapiens
  siRNA target sequence for FLJ13848 (NM_024771.1,318-336).
cgacctgaccaaaacgaat

SEQ ID NO: 215139 - DNA, 19 bp, Homo sapiens
  siRNA target sequence for FLJ13848 (NM_024771.1,319-337).
gacctgaccaaaacgaata

SEQ ID NO: 215140 - DNA, 19 bp, Homo sapiens
  siRNA target sequence for FLJ13848 (NM_024771.1,421-439).
ctcatcgcgtgggaaaaca

SEQ ID NO: 215141 - DNA, 19 bp, Homo sapiens
  siRNA target sequence for FLJ13848 (NM_024771.1,606-624).
ggttatgttaacagtattt

SEQ ID NO: 215142 - DNA, 19 bp, Homo sapiens
  siRNA target sequence for FLJ13848 (NM_024771.1,607-625).
gttatgttaacagtattta

SEQ ID NO: 215143 - DNA, 19 bp, Homo sapiens
  siRNA target sequence for FLJ13848 (NM_024771.1,662-680).
cgttgcaatttgaaattga

SEQ ID NO: 215144 - DNA, 19 bp, Homo sapiens
  siRNA target sequence for FLJ13848 (NM_024771.1,715-733).
gaggattgctcctatgaga

SEQ ID NO: 215145 - DNA, 19 bp, Homo sapiens
  siRNA target sequence for FLJ14154 (NM_024845.1,161-179).
cctctgccacgatgacata

SEQ ID NO: 215146 - DNA, 19 bp, Homo sapiens
  siRNA target sequence for FLJ14154 (NM_024845.1,221-239).
gtacccagactcatggtat

SEQ ID NO: 215147 - DNA, 19 bp, Homo sapiens
  siRNA target sequence for FLJ14154 (NM_024845.1,243-261).
gatatcacatccaacaaga

SEQ ID NO: 215148 - DNA, 19 bp, Homo sapiens
  siRNA target sequence for FLJ14154 (NM_024845.1,304-322).
gaatgatagtagctgaaat

SEQ ID NO: 215149 - DNA, 19 bp, Homo sapiens
  siRNA target sequence for FLJ14154 (NM_024845.1,390-408).
caagtcgcgtacatcctaa

SEQ ID NO: 215150 - DNA, 19 bp, Homo sapiens
  siRNA target sequence for FLJ14154 (NM_024845.1,409-427).
gtctgggcgtcgtgaaaga

SEQ ID NO: 215151 - DNA, 19 bp, Homo sapiens
  siRNA target sequence for FLJ14154 (NM_024845.1,411-429).
ctgggcgtcgtgaaagagt

SEQ ID NO: 215152 - DNA, 19 bp, Homo sapiens
  siRNA target sequence for FLJ14154 (NM_024845.1,442-460).
gcataggttccctcttact

SEQ ID NO: 215153 - DNA, 19 bp, Homo sapiens
  siRNA target sequence for FLJ14154 (NM_024845.1,637-655).
cctatgtcctctacatcaa

SEQ ID NO: 215154 - DNA, 19 bp, Homo sapiens
  siRNA target sequence for FLJ14154 (NM_024845.1,673-691).
ggacgattttggactacat

SEQ ID NO: 215155 - DNA, 19 bp, Homo sapiens
  siRNA target sequence for FLJ14154 (NM_024845.1,786-804).
ccatggtcgggcatctctt

SEQ ID NO: 215156 - DNA, 19 bp, Homo sapiens
  siRNA target sequence for FLJ37478 (NM_178557.2,161-179).
cggacatcgagcagtacta

SEQ ID NO: 215157 - DNA, 19 bp, Homo sapiens
  siRNA target sequence for KLP1 (NM_020378.2,419-437).
ggcccctggcacaaatgca

SEQ ID NO: 215158 - DNA, 19 bp, Homo sapiens
  siRNA target sequence for MAK3P (NM_025146.1,362-380).
gattgaatcaggtcatctt

SEQ ID NO: 215159 - DNA, 19 bp, Homo sapiens
  siRNA target sequence for MAK3P (NM_025146.1,382-400).
ccagtcagctacaatgaca

SEQ ID NO: 215160 - DNA, 19 bp, Homo sapiens
  siRNA target sequence for MAK3P (NM_025146.1,423-441).
ggttggcgagctagcaaaa

SEQ ID NO: 215161 - DNA, 19 bp, Homo sapiens
  siRNA target sequence for MAK3P (NM_025146.1,436-454).
gcaaaacttgcctatttca

SEQ ID NO: 215162 - DNA, 19 bp, Homo sapiens
  siRNA target sequence for MAK3P (NM_025146.1,442-460).
cttgcctatttcaatgata

SEQ ID NO: 215163 - DNA, 19 bp, Homo sapiens
  siRNA target sequence for MAK3P (NM_025146.1,480-498).
ctgtagggtggatcattca

SEQ ID NO: 215164 - DNA, 19 bp, Homo sapiens
  siRNA target sequence for MAK3P (NM_025146.1,486-504).
ggtggatcattcacagaat

SEQ ID NO: 215165 - DNA, 19 bp, Homo sapiens
  siRNA target sequence for MAK3P (NM_025146.1,490-508).
gatcattcacagaatcaga

SEQ ID NO: 215166 - DNA, 19 bp, Homo sapiens
  siRNA target sequence for MAK3P (NM_025146.1,505-523).
cagaagagactttacatca

SEQ ID NO: 215167 - DNA, 19 bp, Homo sapiens
  siRNA target sequence for MAK3P (NM_025146.1,545-563).
cttaccgaaggctaggaat

SEQ ID NO: 215168 - DNA, 19 bp, Homo sapiens
  siRNA target sequence for MAK3P (NM_025146.1,549-567).
ccgaaggctaggaatagga

SEQ ID NO: 215169 - DNA, 19 bp, Homo sapiens
  siRNA target sequence for MAK3P (NM_025146.1,554-572).
ggctaggaataggaactaa

SEQ ID NO: 215170 - DNA, 19 bp, Homo sapiens
  siRNA target sequence for MAK3P (NM_025146.1,599-617).
gtgaaaaagatggtacttt

SEQ ID NO: 215171 - DNA, 19 bp, Homo sapiens
  siRNA target sequence for MAK3P (NM_025146.1,610-628).
ggtacttttgacaacattt

SEQ ID NO: 215172 - DNA, 19 bp, Homo sapiens
  siRNA target sequence for NAT5 (NM_016100.2,135-153).
gacctgttccgcttcaaca

SEQ ID NO: 215173 - DNA, 19 bp, Homo sapiens
  siRNA target sequence for NAT5 (NM_016100.2,164-182).
ggatccacttacagaaact

SEQ ID NO: 215174 - DNA, 19 bp, Homo sapiens
  siRNA target sequence for NAT5 (NM_016100.2,165-183).
gatccacttacagaaactt

SEQ ID NO: 215175 - DNA, 19 bp, Homo sapiens
  siRNA target sequence for NAT5 (NM_016100.2,181-199).
cttatgggattcctttcta

SEQ ID NO: 215176 - DNA, 19 bp, Homo sapiens
  siRNA target sequence for NAT5 (NM_016100.2,193-211).
ctttctacctacaatacct

SEQ ID NO: 215177 - DNA, 19 bp, Homo sapiens
  siRNA target sequence for NAT5 (NM_016100.2,212-230).
cgcccactggccagagtat

SEQ ID NO: 215178 - DNA, 19 bp, Homo sapiens
  siRNA target sequence for NAT5 (NM_016100.2,220-238).
ggccagagtatttcattgt

SEQ ID NO: 215179 - DNA, 19 bp, Homo sapiens
  siRNA target sequence for NAT5 (NM_016100.2,245-263).
ggcacctggtggagaatta

SEQ ID NO: 215180 - DNA, 19 bp, Homo sapiens
  siRNA target sequence for NAT5 (NM_016100.2,246-264).
gcacctggtggagaattaa

SEQ ID NO: 215181 - DNA, 19 bp, Homo sapiens
  siRNA target sequence for NAT5 (NM_016100.2,247-265).
cacctggtggagaattaat

SEQ ID NO: 215182 - DNA, 19 bp, Homo sapiens
  siRNA target sequence for NAT5 (NM_016100.2,359-377).
ccttggtttggctgctaaa

SEQ ID NO: 215183 - DNA, 19 bp, Homo sapiens
  siRNA target sequence for NAT5 (NM_016100.2,363-381).
ggtttggctgctaaactta

SEQ ID NO: 215184 - DNA, 19 bp, Homo sapiens
  siRNA target sequence for NAT5 (NM_016100.2,364-382).
gtttggctgctaaacttat

SEQ ID NO: 215185 - DNA, 19 bp, Homo sapiens
  siRNA target sequence for NAT5 (NM_016100.2,373-391).
ctaaacttatggagttact

SEQ ID NO: 215186 - DNA, 19 bp, Homo sapiens
  siRNA target sequence for NAT5 (NM_016100.2,418-436).
gattttttgtggatctctt

SEQ ID NO: 215187 - DNA, 19 bp, Homo sapiens
  siRNA target sequence for NAT5 (NM_016100.2,453-471).
caagttgcagttaacatgt

SEQ ID NO: 215188 - DNA, 19 bp, Homo sapiens
  siRNA target sequence for NAT5 (NM_016100.2,456-474).
gttgcagttaacatgtaca

SEQ ID NO: 215189 - DNA, 19 bp, Homo sapiens
  siRNA target sequence for NAT5 (NM_016100.2,479-497).
gttgggctacagtgtatat

SEQ ID NO: 215190 - DNA, 19 bp, Homo sapiens
  siRNA target sequence for NAT5 (NM_016100.2,483-501).
ggctacagtgtatatagga

SEQ ID NO: 215191 - DNA, 19 bp, Homo sapiens
  siRNA target sequence for NAT5 (NM_016100.2,499-517).
ggacggtcatagagtacta

SEQ ID NO: 215192 - DNA, 19 bp, Homo sapiens
  siRNA target sequence for NAT5 (NM_016100.2,500-518).
gacggtcatagagtactat

SEQ ID NO: 215193 - DNA, 19 bp, Homo sapiens
  siRNA target sequence for NAT5 (NM_016100.2,540-558).
gatgaggacgcttatgata

SEQ ID NO: 215194 - DNA, 19 bp, Homo sapiens
  siRNA target sequence for NAT5 (NM_016100.2,543-561).
gaggacgcttatgatatga

SEQ ID NO: 215195 - DNA, 19 bp, Homo sapiens
  siRNA target sequence for NAT5 (NM_016100.2,590-608).
gaaatccatcataccatta

SEQ ID NO: 215196 - DNA, 19 bp, Homo sapiens
  siRNA target sequence for SAT2 (NM_133491.2,276-294).
gggagctagccgaattcga

SEQ ID NO: 215197 - DNA, 19 bp, Homo sapiens
  siRNA target sequence for SAT2 (NM_133491.2,277-295).
ggagctagccgaattcgaa

SEQ ID NO: 215198 - DNA, 19 bp, Homo sapiens
  siRNA target sequence for SAT2 (NM_133491.2,278-296).
gagctagccgaattcgaaa

SEQ ID NO: 215199 - DNA, 19 bp, Homo sapiens
  siRNA target sequence for SAT2 (NM_133491.2,280-298).
gctagccgaattcgaaaaa

SEQ ID NO: 215200 - DNA, 19 bp, Homo sapiens
  siRNA target sequence for SAT2 (NM_133491.2,284-302).
gccgaattcgaaaaactct

SEQ ID NO: 215201 - DNA, 19 bp, Homo sapiens
  siRNA target sequence for SAT2 (NM_133491.2,353-371).
gacaatcctttctatcact

SEQ ID NO: 215202 - DNA, 19 bp, Homo sapiens
  siRNA target sequence for SAT2 (NM_133491.2,429-447).
gctatgggatatactattt

SEQ ID NO: 215203 - DNA, 19 bp, Homo sapiens
  siRNA target sequence for SAT2 (NM_133491.2,434-452).
gggatatactatttcatct

SEQ ID NO: 215204 - DNA, 19 bp, Homo sapiens
  siRNA target sequence for SAT2 (NM_133491.2,435-453).
ggatatactatttcatcta

SEQ ID NO: 215205 - DNA, 19 bp, Homo sapiens
  siRNA target sequence for SAT2 (NM_133491.2,462-480).
ggaagggacgcaccattta

SEQ ID NO: 215206 - DNA, 19 bp, Homo sapiens
  siRNA target sequence for SAT2 (NM_133491.2,463-481).
gaagggacgcaccatttat

SEQ ID NO: 215207 - DNA, 19 bp, Homo sapiens
  siRNA target sequence for SAT2 (NM_133491.2,493-511).
ctatgtgatgccggaatat

SEQ ID NO: 215208 - DNA, 19 bp, Homo sapiens
  siRNA target sequence for SAT2 (NM_133491.2,521-539).
gggattggttccaaaataa

SEQ ID NO: 215209 - DNA, 19 bp, Homo sapiens
  siRNA target sequence for SAT2 (NM_133491.2,522-540).
ggattggttccaaaataat

SEQ ID NO: 215210 - DNA, 19 bp, Homo sapiens
  siRNA target sequence for SAT2 (NM_133491.2,552-570).
ctgaggtggccttggataa

SEQ ID NO: 215211 - DNA, 19 bp, Homo sapiens
  siRNA target sequence for SAT2 (NM_133491.2,693-711).
gagaggcaacgagaaagtt

SEQ ID NO: 215212 - DNA, 19 bp, Homo sapiens
  siRNA target sequence for GTF3C4 (NM_012204.1,668-686).
ccacggtcagtcagacttt

SEQ ID NO: 215213 - DNA, 19 bp, Homo sapiens
  siRNA target sequence for GTF3C4 (NM_012204.1,671-689).
cggtcagtcagactttcat

SEQ ID NO: 215214 - DNA, 19 bp, Homo sapiens
  siRNA target sequence for GTF3C4 (NM_012204.1,728-746).
caccaatgagaggattcaa

SEQ ID NO: 215215 - DNA, 19 bp, Homo sapiens
  siRNA target sequence for GTF3C4 (NM_012204.1,730-748).
ccaatgagaggattcaagt

SEQ ID NO: 215216 - DNA, 19 bp, Homo sapiens
  siRNA target sequence for GTF3C4 (NM_012204.1,731-749).
caatgagaggattcaagta

SEQ ID NO: 215217 - DNA, 19 bp, Homo sapiens
  siRNA target sequence for GTF3C4 (NM_012204.1,764-782).
ccatgggttgcgatgctaa

SEQ ID NO: 215218 - DNA, 19 bp, Homo sapiens
  siRNA target sequence for GTF3C4 (NM_012204.1,765-783).
catgggttgcgatgctaat

SEQ ID NO: 215219 - DNA, 19 bp, Homo sapiens
  siRNA target sequence for GTF3C4 (NM_012204.1,898-916).
ctttatgagaccagttaca

SEQ ID NO: 215220 - DNA, 19 bp, Homo sapiens
  siRNA target sequence for GTF3C4 (NM_012204.1,908-926).
ccagttacaggctctctaa

SEQ ID NO: 215221 - DNA, 19 bp, Homo sapiens
  siRNA target sequence for GTF3C4 (NM_012204.1,911-929).
gttacaggctctctaaaaa

SEQ ID NO: 215222 - DNA, 19 bp, Homo sapiens
  siRNA target sequence for GTF3C4 (NM_012204.1,1006-1024).
gagtggtcgggcatctgta

SEQ ID NO: 215223 - DNA, 19 bp, Homo sapiens
  siRNA target sequence for GTF3C4 (NM_012204.1,1030-1048).
cagcaggtcaagcataaca

SEQ ID NO: 215224 - DNA, 19 bp, Homo sapiens
  siRNA target sequence for GTF3C4 (NM_012204.1,1119-1137).
gtttcagctgccgtttgta

SEQ ID NO: 215225 - DNA, 19 bp, Homo sapiens
  siRNA target sequence for GTF3C4 (NM_012204.1,1125-1143).
gctgccgtttgtaggaaaa

SEQ ID NO: 215226 - DNA, 19 bp, Homo sapiens
  siRNA target sequence for GTF3C4 (NM_012204.1,1185-1203).
ctctcccagtgtattgttt

SEQ ID NO: 215227 - DNA, 19 bp, Homo sapiens
  siRNA target sequence for GTF3C4 (NM_012204.1,1300-1318).
gtcaaaggctatttcactt

SEQ ID NO: 215228 - DNA, 19 bp, Homo sapiens
  siRNA target sequence for GTF3C4 (NM_012204.1,1302-1320).
caaaggctatttcacttta

SEQ ID NO: 215229 - DNA, 19 bp, Homo sapiens
  siRNA target sequence for GTF3C4 (NM_012204.1,1360-1378).
cctgtgcacagtatcaaat

SEQ ID NO: 215230 - DNA, 19 bp, Homo sapiens
  siRNA target sequence for GTF3C4 (NM_012204.1,1393-1411).
catccttaccagaagtgta

SEQ ID NO: 215231 - DNA, 19 bp, Homo sapiens
  siRNA target sequence for GTF3C4 (NM_012204.1,1396-1414).
ccttaccagaagtgtagtt

SEQ ID NO: 215232 - DNA, 19 bp, Homo sapiens
  siRNA target sequence for GTF3C4 (NM_012204.1,1407-1425).
gtgtagttgcagcttagta

SEQ ID NO: 215233 - DNA, 19 bp, Homo sapiens
  siRNA target sequence for GTF3C4 (NM_012204.1,1409-1427).
gtagttgcagcttagtagt

SEQ ID NO: 215234 - DNA, 19 bp, Homo sapiens
  siRNA target sequence for GTF3C4 (NM_012204.1,1430-1448).
ctgcaagaggctcttatgt

SEQ ID NO: 215235 - DNA, 19 bp, Homo sapiens
  siRNA target sequence for GTF3C4 (NM_012204.1,1432-1450).
gcaagaggctcttatgtat

SEQ ID NO: 215236 - DNA, 19 bp, Homo sapiens
  siRNA target sequence for GTF3C4 (NM_012204.1,1952-1970).
gcagtggagtcacctattt

SEQ ID NO: 215237 - DNA, 19 bp, Homo sapiens
  siRNA target sequence for GTF3C4 (NM_012204.1,1989-2007).
cctcctgaggattttatat

SEQ ID NO: 215238 - DNA, 19 bp, Homo sapiens
  siRNA target sequence for GTF3C4 (NM_012204.1,2048-2066).
ccacccatgaggactcaaa

SEQ ID NO: 215239 - DNA, 19 bp, Homo sapiens
  siRNA target sequence for GTF3C4 (NM_012204.1,2049-2067).
cacccatgaggactcaaaa

SEQ ID NO: 215240 - DNA, 19 bp, Homo sapiens
  siRNA target sequence for GTF3C4 (NM_012204.1,2058-2076).
ggactcaaaaatcttacta

SEQ ID NO: 215241 - DNA, 19 bp, Homo sapiens
  siRNA target sequence for GTF3C4 (NM_012204.1,2096-2114).
gcaatgctgacgatgaaca

SEQ ID NO: 215242 - DNA, 19 bp, Homo sapiens
  siRNA target sequence for GTF3C4 (NM_012204.1,2171-2189).
gcaaggaaggagatgtaga

SEQ ID NO: 215243 - DNA, 19 bp, Homo sapiens
  siRNA target sequence for GTF3C4 (NM_012204.1,2381-2399).
gcggactctgtaacttttt

SEQ ID NO: 215244 - DNA, 19 bp, Homo sapiens
  siRNA target sequence for GTF3C4 (NM_012204.1,2382-2400).
cggactctgtaacttttta

SEQ ID NO: 215245 - DNA, 19 bp, Homo sapiens
  siRNA target sequence for GTF3C4 (NM_012204.1,2435-2453).
gggtgctgattggacatat

SEQ ID NO: 215246 - DNA, 19 bp, Homo sapiens
  siRNA target sequence for GTF3C4 (NM_012204.1,2439-2457).
gctgattggacatatctca

SEQ ID NO: 215247 - DNA, 19 bp, Homo sapiens
  siRNA target sequence for GTF3C4 (NM_012204.1,2485-2503).
gagcactgtagtttgtgta

SEQ ID NO: 215248 - DNA, 19 bp, Homo sapiens
  siRNA target sequence for GTF3C4 (NM_012204.1,2592-2610).
ccagagtttgatatataga

SEQ ID NO: 215249 - DNA, 19 bp, Homo sapiens
  siRNA target sequence for GTF3C4 (NM_012204.1,2653-2671).
gaagatcccgactggatta

SEQ ID NO: 215250 - DNA, 19 bp, Homo sapiens
  siRNA target sequence for GTF3C4 (NM_012204.1,2689-2707).
ccctgccctttctgtgatt

SEQ ID NO: 215251 - DNA, 19 bp, Homo sapiens
  siRNA target sequence for ACAT1 (NM_000019.2,196-214).
ggaagtggtcatagtaagt

SEQ ID NO: 215252 - DNA, 19 bp, Homo sapiens
  siRNA target sequence for ACAT1 (NM_000019.2,222-240).
gaacacccattggatcttt

SEQ ID NO: 215253 - DNA, 19 bp, Homo sapiens
  siRNA target sequence for ACAT1 (NM_000019.2,268-286).
cactaagcttggttccatt

SEQ ID NO: 215254 - DNA, 19 bp, Homo sapiens
  siRNA target sequence for ACAT1 (NM_000019.2,274-292).
gcttggttccattgcaatt

SEQ ID NO: 215255 - DNA, 19 bp, Homo sapiens
  siRNA target sequence for ACAT1 (NM_000019.2,305-323).
gaaaaggcagggattccaa

SEQ ID NO: 215256 - DNA, 19 bp, Homo sapiens
  siRNA target sequence for ACAT1 (NM_000019.2,346-364).
catgggtaatgttctacaa

SEQ ID NO: 215257 - DNA, 19 bp, Homo sapiens
  siRNA target sequence for ACAT1 (NM_000019.2,384-402).
ctacaaggcaggcagtatt

SEQ ID NO: 215258 - DNA, 19 bp, Homo sapiens
  siRNA target sequence for ACAT1 (NM_000019.2,403-421).
gggtgcaggcttacctatt

SEQ ID NO: 215259 - DNA, 19 bp, Homo sapiens
  siRNA target sequence for ACAT1 (NM_000019.2,404-422).
ggtgcaggcttacctattt

SEQ ID NO: 215260 - DNA, 19 bp, Homo sapiens
  siRNA target sequence for ACAT1 (NM_000019.2,429-447).
catgtaccaccataaacaa

SEQ ID NO: 215261 - DNA, 19 bp, Homo sapiens
  siRNA target sequence for ACAT1 (NM_000019.2,432-450).
gtaccaccataaacaaagt

SEQ ID NO: 215262 - DNA, 19 bp, Homo sapiens
  siRNA target sequence for ACAT1 (NM_000019.2,501-519).
gtggacatcaggatgtgat

SEQ ID NO: 215263 - DNA, 19 bp, Homo sapiens
  siRNA target sequence for ACAT1 (NM_000019.2,535-553).
ggagagcatgtccaatgtt

SEQ ID NO: 215264 - DNA, 19 bp, Homo sapiens
  siRNA target sequence for ACAT1 (NM_000019.2,544-562).
gtccaatgttccatatgta

SEQ ID NO: 215265 - DNA, 19 bp, Homo sapiens
  siRNA target sequence for ACAT1 (NM_000019.2,568-586).
cagaggatcaacaccatat

SEQ ID NO: 215266 - DNA, 19 bp, Homo sapiens
  siRNA target sequence for ACAT1 (NM_000019.2,582-600).
catatggtggggtaaagct

SEQ ID NO: 215267 - DNA, 19 bp, Homo sapiens
  siRNA target sequence for ACAT1 (NM_000019.2,590-608).
ggggtaaagcttgaagatt

SEQ ID NO: 215268 - DNA, 19 bp, Homo sapiens
  siRNA target sequence for ACAT1 (NM_000019.2,656-674).
ggcagctgtgctgagaata

SEQ ID NO: 215269 - DNA, 19 bp, Homo sapiens
  siRNA target sequence for ACAT1 (NM_000019.2,704-722).
gaacaggacgcttatgcta

SEQ ID NO: 215270 - DNA, 19 bp, Homo sapiens
  siRNA target sequence for ACAT1 (NM_000019.2,707-725).
caggacgcttatgctatta

SEQ ID NO: 215271 - DNA, 19 bp, Homo sapiens
  siRNA target sequence for ACAT1 (NM_000019.2,709-727).
ggacgcttatgctattaat

SEQ ID NO: 215272 - DNA, 19 bp, Homo sapiens
  siRNA target sequence for ACAT1 (NM_000019.2,712-730).
cgcttatgctattaattct

SEQ ID NO: 215273 - DNA, 19 bp, Homo sapiens
  siRNA target sequence for ACAT1 (NM_000019.2,945-963).
cagctgctctggttctcat

SEQ ID NO: 215274 - DNA, 19 bp, Homo sapiens
  siRNA target sequence for ACAT1 (NM_000019.2,975-993).
cagcgaagaggctcaatgt

SEQ ID NO: 215275 - DNA, 19 bp, Homo sapiens
  siRNA target sequence for ACAT1 (NM_000019.2,977-995).
gcgaagaggctcaatgtta

SEQ ID NO: 215276 - DNA, 19 bp, Homo sapiens
  siRNA target sequence for ACAT1 (NM_000019.2,1027-1045).
cgctgctgtagaacctatt

SEQ ID NO: 215277 - DNA, 19 bp, Homo sapiens
  siRNA target sequence for ACAT1 (NM_000019.2,1029-1047).
ctgctgtagaacctattga

SEQ ID NO: 215278 - DNA, 19 bp, Homo sapiens
  siRNA target sequence for ACAT1 (NM_000019.2,1062-1080).
ctgtatatgctgcatctat

SEQ ID NO: 215279 - DNA, 19 bp, Homo sapiens
  siRNA target sequence for ACAT1 (NM_000019.2,1071-1089).
ctgcatctatggttcttaa

SEQ ID NO: 215280 - DNA, 19 bp, Homo sapiens
  siRNA target sequence for ACAT1 (NM_000019.2,1141-1159).
ctttagtctggttgtacta

SEQ ID NO: 215281 - DNA, 19 bp, Homo sapiens
  siRNA target sequence for ACAT1 (NM_000019.2,1150-1168).
ggttgtactagcaaacatt

SEQ ID NO: 215282 - DNA, 19 bp, Homo sapiens
  siRNA target sequence for ACAT1 (NM_000019.2,1151-1169).
gttgtactagcaaacatta

SEQ ID NO: 215283 - DNA, 19 bp, Homo sapiens
  siRNA target sequence for ACAT1 (NM_000019.2,1187-1205).
ccccaaaaagtgaatatca

SEQ ID NO: 215284 - DNA, 19 bp, Homo sapiens
  siRNA target sequence for ACAT1 (NM_000019.2,1189-1207).
ccaaaaagtgaatatcaat

SEQ ID NO: 215285 - DNA, 19 bp, Homo sapiens
  siRNA target sequence for ACAT1 (NM_000019.2,1255-1273).
gattgttggtcatttgact

SEQ ID NO: 215286 - DNA, 19 bp, Homo sapiens
  siRNA target sequence for ACAT1 (NM_000019.2,1278-1296).
ccttgaagcaaggagaata

SEQ ID NO: 215287 - DNA, 19 bp, Homo sapiens
  siRNA target sequence for ACAT1 (NM_000019.2,1298-1316).
ggtcttgccagtatttgca

SEQ ID NO: 215288 - DNA, 19 bp, Homo sapiens
  siRNA target sequence for ACAT1 (NM_000019.2,1299-1317).
gtcttgccagtatttgcaa

SEQ ID NO: 215289 - DNA, 19 bp, Homo sapiens
  siRNA target sequence for ACAT1 (NM_000019.2,1328-1346).
ggtgcttctgccatgctaa

SEQ ID NO: 215290 - DNA, 19 bp, Homo sapiens
  siRNA target sequence for ACAT1 (NM_000019.2,1329-1347).
gtgcttctgccatgctaat

SEQ ID NO: 215291 - DNA, 19 bp, Homo sapiens
  siRNA target sequence for ACAT1 (NM_000019.2,1332-1350).
cttctgccatgctaattca

SEQ ID NO: 215292 - DNA, 19 bp, Homo sapiens
  siRNA target sequence for ACAT1 (NM_000019.2,1335-1353).
ctgccatgctaattcagaa

SEQ ID NO: 215293 - DNA, 19 bp, Homo sapiens
  siRNA target sequence for HADHA (NM_000182.3,80-98).
ctccgctcccgaggttata

SEQ ID NO: 215294 - DNA, 19 bp, Homo sapiens
  siRNA target sequence for HADHA (NM_000182.3,82-100).
ccgctcccgaggttatata

SEQ ID NO: 215295 - DNA, 19 bp, Homo sapiens
  siRNA target sequence for HADHA (NM_000182.3,83-101).
cgctcccgaggttatatat

SEQ ID NO: 215296 - DNA, 19 bp, Homo sapiens
  siRNA target sequence for HADHA (NM_000182.3,93-111).
gttatatatgccgcaattt

SEQ ID NO: 215297 - DNA, 19 bp, Homo sapiens
  siRNA target sequence for HADHA (NM_000182.3,131-149).
ctgaccagaacccatatta

SEQ ID NO: 215298 - DNA, 19 bp, Homo sapiens
  siRNA target sequence for HADHA (NM_000182.3,136-154).
cagaacccatattaactat

SEQ ID NO: 215299 - DNA, 19 bp, Homo sapiens
  siRNA target sequence for HADHA (NM_000182.3,170-188).
gtggcagttgttcgaatta

SEQ ID NO: 215300 - DNA, 19 bp, Homo sapiens
  siRNA target sequence for HADHA (NM_000182.3,173-191).
gcagttgttcgaattaact

SEQ ID NO: 215301 - DNA, 19 bp, Homo sapiens
  siRNA target sequence for HADHA (NM_000182.3,194-212).
cccaattcaaaggtaaata

SEQ ID NO: 215302 - DNA, 19 bp, Homo sapiens
  siRNA target sequence for HADHA (NM_000182.3,215-233).
ctgagtaaagagctacatt

SEQ ID NO: 215303 - DNA, 19 bp, Homo sapiens
  siRNA target sequence for HADHA (NM_000182.3,219-237).
gtaaagagctacattcaga

SEQ ID NO: 215304 - DNA, 19 bp, Homo sapiens
  siRNA target sequence for HADHA (NM_000182.3,265-283).
ggctagtgatcaaatcaga

SEQ ID NO: 215305 - DNA, 19 bp, Homo sapiens
  siRNA target sequence for HADHA (NM_000182.3,287-305).
gccgtccttatctcatcaa

SEQ ID NO: 215306 - DNA, 19 bp, Homo sapiens
  siRNA target sequence for HADHA (NM_000182.3,288-306).
ccgtccttatctcatcaaa

SEQ ID NO: 215307 - DNA, 19 bp, Homo sapiens
  siRNA target sequence for HADHA (NM_000182.3,351-369).
cttgcaagacccttcaaga

SEQ ID NO: 215308 - DNA, 19 bp, Homo sapiens
  siRNA target sequence for HADHA (NM_000182.3,354-372).
gcaagacccttcaagaagt

SEQ ID NO: 215309 - DNA, 19 bp, Homo sapiens
  siRNA target sequence for HADHA (NM_000182.3,473-491).
cttgaggttgccatttcat

SEQ ID NO: 215310 - DNA, 19 bp, Homo sapiens
  siRNA target sequence for HADHA (NM_000182.3,482-500).
gccatttcatgccaataca

SEQ ID NO: 215311 - DNA, 19 bp, Homo sapiens
  siRNA target sequence for HADHA (NM_000182.3,484-502).
catttcatgccaatacaga

SEQ ID NO: 215312 - DNA, 19 bp, Homo sapiens
  siRNA target sequence for HADHA (NM_000182.3,628-646).
gctgactggtagaagcatt

SEQ ID NO: 215313 - DNA, 19 bp, Homo sapiens
  siRNA target sequence for HADHA (NM_000182.3,697-715).
cctgggaccaggactaaaa

SEQ ID NO: 215314 - DNA, 19 bp, Homo sapiens
  siRNA target sequence for HADHA (NM_000182.3,722-740).
gaggaacggacaatagaat

SEQ ID NO: 215315 - DNA, 19 bp, Homo sapiens
  siRNA target sequence for HADHA (NM_000182.3,768-786).
ccaaaggactagctgataa

SEQ ID NO: 215316 - DNA, 19 bp, Homo sapiens
  siRNA target sequence for HADHA (NM_000182.3,776-794).
ctagctgataagaagatct

SEQ ID NO: 215317 - DNA, 19 bp, Homo sapiens
  siRNA target sequence for HADHA (NM_000182.3,831-849).
cagcgtatgccatgactat

SEQ ID NO: 215318 - DNA, 19 bp, Homo sapiens
  siRNA target sequence for HADHA (NM_000182.3,835-853).
gtatgccatgactattcca

SEQ ID NO: 215319 - DNA, 19 bp, Homo sapiens
  siRNA target sequence for HADHA (NM_000182.3,840-858).
ccatgactattccatttgt

SEQ ID NO: 215320 - DNA, 19 bp, Homo sapiens
  siRNA target sequence for HADHA (NM_000182.3,901-919).
gcagactaaaggcctttat

SEQ ID NO: 215321 - DNA, 19 bp, Homo sapiens
  siRNA target sequence for HADHA (NM_000182.3,904-922).
gactaaaggcctttatcct

SEQ ID NO: 215322 - DNA, 19 bp, Homo sapiens
  siRNA target sequence for HADHA (NM_000182.3,969-987).
ggagtgatgccggttatct

SEQ ID NO: 215323 - DNA, 19 bp, Homo sapiens
  siRNA target sequence for HADHA (NM_000182.3,977-995).
gccggttatctctgtgaat

SEQ ID NO: 215324 - DNA, 19 bp, Homo sapiens
  siRNA target sequence for HADHA (NM_000182.3,1013-1031).
cttgtaatgaccaaagaat

SEQ ID NO: 215325 - DNA, 19 bp, Homo sapiens
  siRNA target sequence for HADHA (NM_000182.3,1069-1087).
gtgcaagaagaataaattt

SEQ ID NO: 215326 - DNA, 19 bp, Homo sapiens
  siRNA target sequence for HADHA (NM_000182.3,1168-1186).
ggataaggggctaaagact

SEQ ID NO: 215327 - DNA, 19 bp, Homo sapiens
  siRNA target sequence for HADHA (NM_000182.3,1169-1187).
gataaggggctaaagacta

SEQ ID NO: 215328 - DNA, 19 bp, Homo sapiens
  siRNA target sequence for HADHA (NM_000182.3,1174-1192).
ggggctaaagactatactt

SEQ ID NO: 215329 - DNA, 19 bp, Homo sapiens
  siRNA target sequence for HADHA (NM_000182.3,1175-1193).
gggctaaagactatactta

SEQ ID NO: 215330 - DNA, 19 bp, Homo sapiens
  siRNA target sequence for HADHA (NM_000182.3,1176-1194).
ggctaaagactatacttaa

SEQ ID NO: 215331 - DNA, 19 bp, Homo sapiens
  siRNA target sequence for HADHA (NM_000182.3,1229-1247).
caacaagtgttcaaaggat

SEQ ID NO: 215332 - DNA, 19 bp, Homo sapiens
  siRNA target sequence for HADHA (NM_000182.3,1267-1285).
gaaagctctaacatcattt

SEQ ID NO: 215333 - DNA, 19 bp, Homo sapiens
  siRNA target sequence for HADHA (NM_000182.3,1345-1363).
ggccgacatggtgattgaa

SEQ ID NO: 215334 - DNA, 19 bp, Homo sapiens
  siRNA target sequence for HADHA (NM_000182.3,1369-1387).
gtttgaggaccttagtctt

SEQ ID NO: 215335 - DNA, 19 bp, Homo sapiens
  siRNA target sequence for HADHA (NM_000182.3,1395-1413).
gagtgctaaaggaagtaga

SEQ ID NO: 215336 - DNA, 19 bp, Homo sapiens
  siRNA target sequence for HADHA (NM_000182.3,1564-1582).
gaccgagaaaacttccaaa

SEQ ID NO: 215337 - DNA, 19 bp, Homo sapiens
  siRNA target sequence for HADHA (NM_000182.3,1649-1667).
ggacctggcttctatacta

SEQ ID NO: 215338 - DNA, 19 bp, Homo sapiens
  siRNA target sequence for HADHA (NM_000182.3,1780-1798).
cacactggtggatgaagtt

SEQ ID NO: 215339 - DNA, 19 bp, Homo sapiens
  siRNA target sequence for HADHA (NM_000182.3,1900-1918).
gggcttcctaggtcgtaaa

SEQ ID NO: 215340 - DNA, 19 bp, Homo sapiens
  siRNA target sequence for HADHA (NM_000182.3,1901-1919).
ggcttcctaggtcgtaaat

SEQ ID NO: 215341 - DNA, 19 bp, Homo sapiens
  siRNA target sequence for HADHA (NM_000182.3,1903-1921).
cttcctaggtcgtaaatct

SEQ ID NO: 215342 - DNA, 19 bp, Homo sapiens
  siRNA target sequence for HADHA (NM_000182.3,1920-1938).
ctgggaagggcttttacat

SEQ ID NO: 215343 - DNA, 19 bp, Homo sapiens
  siRNA target sequence for HADHA (NM_000182.3,1922-1940).
gggaagggcttttacatct

SEQ ID NO: 215344 - DNA, 19 bp, Homo sapiens
  siRNA target sequence for HADHA (NM_000182.3,1923-1941).
ggaagggcttttacatcta

SEQ ID NO: 215345 - DNA, 19 bp, Homo sapiens
  siRNA target sequence for HADHA (NM_000182.3,1949-1967).
ggtgtgaagaggaaggatt

SEQ ID NO: 215346 - DNA, 19 bp, Homo sapiens
  siRNA target sequence for HADHA (NM_000182.3,1950-1968).
gtgtgaagaggaaggattt

SEQ ID NO: 215347 - DNA, 19 bp, Homo sapiens
  siRNA target sequence for HADHA (NM_000182.3,1974-1992).
ctgacatggatagtatttt

SEQ ID NO: 215348 - DNA, 19 bp, Homo sapiens
  siRNA target sequence for HADHA (NM_000182.3,2002-2020).
gaagctgcctcctaagtct

SEQ ID NO: 215349 - DNA, 19 bp, Homo sapiens
  siRNA target sequence for HADHA (NM_000182.3,2050-2068).
ccgcctggtgacaagattt

SEQ ID NO: 215350 - DNA, 19 bp, Homo sapiens
  siRNA target sequence for HADHA (NM_000182.3,2052-2070).
gcctggtgacaagatttgt

SEQ ID NO: 215351 - DNA, 19 bp, Homo sapiens
  siRNA target sequence for HADHA (NM_000182.3,2179-2197).
ccgctttgtggatctgtat

SEQ ID NO: 215352 - DNA, 19 bp, Homo sapiens
  siRNA target sequence for HADHA (NM_000182.3,2213-2231).
gtggaccggctcaagaaat

SEQ ID NO: 215353 - DNA, 19 bp, Homo sapiens
  siRNA target sequence for HADHA (NM_000182.3,2218-2236).
ccggctcaagaaatatgaa

SEQ ID NO: 215354 - DNA, 19 bp, Homo sapiens
  siRNA target sequence for HADHA (NM_000182.3,2237-2255).
gctgcctatggaaaacagt

SEQ ID NO: 215355 - DNA, 19 bp, Homo sapiens
  siRNA target sequence for HADHA (NM_000182.3,2238-2256).
ctgcctatggaaaacagtt

SEQ ID NO: 215356 - DNA, 19 bp, Homo sapiens
  siRNA target sequence for GCAT (NM_014291.2,206-224).
cgtctccggaggaatcctt

SEQ ID NO: 215357 - DNA, 19 bp, Homo sapiens
  siRNA target sequence for GCAT (NM_014291.2,207-225).
gtctccggaggaatcctta

SEQ ID NO: 215358 - DNA, 19 bp, Homo sapiens
  siRNA target sequence for GCAT (NM_014291.2,211-229).
ccggaggaatccttaactt

SEQ ID NO: 215359 - DNA, 19 bp, Homo sapiens
  siRNA target sequence for GCAT (NM_014291.2,622-640).
ctgatggggccttttccat

SEQ ID NO: 215360 - DNA, 19 bp, Homo sapiens
  siRNA target sequence for GCAT (NM_014291.2,1000-1018).
cccagaggttccgtagtaa

SEQ ID NO: 215361 - DNA, 19 bp, Homo sapiens
  siRNA target sequence for GCAT (NM_014291.2,1002-1020).
cagaggttccgtagtaaga

SEQ ID NO: 215362 - DNA, 19 bp, Homo sapiens
  siRNA target sequence for GCAT (NM_014291.2,1205-1223).
gcatagcgaggaagacatt

SEQ ID NO: 215363 - DNA, 19 bp, Homo sapiens
  siRNA target sequence for CHAT (NM_020549.2,775-793).
ctgaatgacatgtatctca

SEQ ID NO: 215364 - DNA, 19 bp, Homo sapiens
  siRNA target sequence for CHAT (NM_020549.2,980-998).
ccctttgcatgaagcaata

SEQ ID NO: 215365 - DNA, 19 bp, Homo sapiens
  siRNA target sequence for CHAT (NM_020549.2,1100-1118).
cctgctgcaatcagttctt

SEQ ID NO: 215366 - DNA, 19 bp, Homo sapiens
  siRNA target sequence for CHAT (NM_020549.2,1212-1230).
cgagcgtttgcctccaatt

SEQ ID NO: 215367 - DNA, 19 bp, Homo sapiens
  siRNA target sequence for CHAT (NM_020549.2,1274-1292).
ggacggtcctcgtgaaaga

SEQ ID NO: 215368 - DNA, 19 bp, Homo sapiens
  siRNA target sequence for CHAT (NM_020549.2,1304-1322).
gggactcgctggacatgat

SEQ ID NO: 215369 - DNA, 19 bp, Homo sapiens
  siRNA target sequence for CHAT (NM_020549.2,1305-1323).
ggactcgctggacatgatt

SEQ ID NO: 215370 - DNA, 19 bp, Homo sapiens
  siRNA target sequence for CHAT (NM_020549.2,1327-1345).
cgctgcatctgccttgtat

SEQ ID NO: 215371 - DNA, 19 bp, Homo sapiens
  siRNA target sequence for CHAT (NM_020549.2,1500-1518).
cgaacactccccattcgat

SEQ ID NO: 215372 - DNA, 19 bp, Homo sapiens
  siRNA target sequence for CHAT (NM_020549.2,1668-1686).
ctcctcggcagaaaaactt

SEQ ID NO: 215373 - DNA, 19 bp, Homo sapiens
  siRNA target sequence for CHAT (NM_020549.2,1671-1689).
ctcggcagaaaaacttcaa

SEQ ID NO: 215374 - DNA, 19 bp, Homo sapiens
  siRNA target sequence for CHAT (NM_020549.2,1676-1694).
cagaaaaacttcaacgaat

SEQ ID NO: 215375 - DNA, 19 bp, Homo sapiens
  siRNA target sequence for CHAT (NM_020549.2,1705-1723).
cttgacttcattgtctata

SEQ ID NO: 215376 - DNA, 19 bp, Homo sapiens
  siRNA target sequence for CHAT (NM_020549.2,1708-1726).
gacttcattgtctataagt

SEQ ID NO: 215377 - DNA, 19 bp, Homo sapiens
  siRNA target sequence for CHAT (NM_020549.2,1719-1737).
ctataagtttgacaactat

SEQ ID NO: 215378 - DNA, 19 bp, Homo sapiens
  siRNA target sequence for CHAT (NM_020549.2,1729-1747).
gacaactatgggaaaacat

SEQ ID NO: 215379 - DNA, 19 bp, Homo sapiens
  siRNA target sequence for CHAT (NM_020549.2,2027-2045).
cagggatggccattgacaa

SEQ ID NO: 215380 - DNA, 19 bp, Homo sapiens
  siRNA target sequence for CHAT (NM_020549.2,2089-2107).
gagctgcccgagatgttca

SEQ ID NO: 215381 - DNA, 19 bp, Homo sapiens
  siRNA target sequence for CHAT (NM_020549.2,2373-2391).
gccattggcaacaaaggaa

SEQ ID NO: 215382 - DNA, 19 bp, Homo sapiens
  siRNA target sequence for CRAT (NM_000755.2,694-712).
gggtcagctccgatttgct

SEQ ID NO: 215383 - DNA, 19 bp, Homo sapiens
  siRNA target sequence for CRAT (NM_000755.2,799-817).
gtgcatgaaccagtactat

SEQ ID NO: 215384 - DNA, 19 bp, Homo sapiens
  siRNA target sequence for CRAT (NM_000755.2,809-827).
cagtactatcagatcttgt

SEQ ID NO: 215385 - DNA, 19 bp, Homo sapiens
  siRNA target sequence for CRAT (NM_000755.2,911-929).
gtacacaactaccagtttt

SEQ ID NO: 215386 - DNA, 19 bp, Homo sapiens
  siRNA target sequence for CRAT (NM_000755.2,967-985).
cactgcggatcagatcttt

SEQ ID NO: 215387 - DNA, 19 bp, Homo sapiens
  siRNA target sequence for CRAT (NM_000755.2,969-987).
ctgcggatcagatctttgt

SEQ ID NO: 215388 - DNA, 19 bp, Homo sapiens
  siRNA target sequence for CRAT (NM_000755.2,1369-1387).
catcgagtacacgaagaaa

SEQ ID NO: 215389 - DNA, 19 bp, Homo sapiens
  siRNA target sequence for CRAT (NM_000755.2,1974-1992).
cagactgtgtcatgttctt

SEQ ID NO: 215390 - DNA, 19 bp, Homo sapiens
  siRNA target sequence for CRAT (NM_000755.2,2013-2031).
gctacggtgtctgctataa

SEQ ID NO: 215391 - DNA, 19 bp, Homo sapiens
  siRNA target sequence for CRAT (NM_000755.2,2039-2057).
gaggcccacatcaacttct

SEQ ID NO: 215392 - DNA, 19 bp, Homo sapiens
  siRNA target sequence for GNPAT (NM_014236.1,171-189).
gttcatctaactcttattt

SEQ ID NO: 215393 - DNA, 19 bp, Homo sapiens
  siRNA target sequence for GNPAT (NM_014236.1,285-303).
ggcatgtcagtgacttgaa

SEQ ID NO: 215394 - DNA, 19 bp, Homo sapiens
  siRNA target sequence for GNPAT (NM_014236.1,286-304).
gcatgtcagtgacttgaaa

SEQ ID NO: 215395 - DNA, 19 bp, Homo sapiens
  siRNA target sequence for GNPAT (NM_014236.1,294-312).
gtgacttgaaatttgcaat

SEQ ID NO: 215396 - DNA, 19 bp, Homo sapiens
  siRNA target sequence for GNPAT (NM_014236.1,318-336).
gctacacacctcttgtcta

SEQ ID NO: 215397 - DNA, 19 bp, Homo sapiens
  siRNA target sequence for GNPAT (NM_014236.1,319-337).
ctacacacctcttgtctat

SEQ ID NO: 215398 - DNA, 19 bp, Homo sapiens
  siRNA target sequence for GNPAT (NM_014236.1,351-369).
catgtaaaccaattgatat

SEQ ID NO: 215399 - DNA, 19 bp, Homo sapiens
  siRNA target sequence for GNPAT (NM_014236.1,354-372).
gtaaaccaattgatattaa

SEQ ID NO: 215400 - DNA, 19 bp, Homo sapiens
  siRNA target sequence for GNPAT (NM_014236.1,359-377).
ccaattgatattaaatgta

SEQ ID NO: 215401 - DNA, 19 bp, Homo sapiens
  siRNA target sequence for GNPAT (NM_014236.1,385-403).
caattctgaggagattcat

SEQ ID NO: 215402 - DNA, 19 bp, Homo sapiens
  siRNA target sequence for GNPAT (NM_014236.1,392-410).
gaggagattcattatgtca

SEQ ID NO: 215403 - DNA, 19 bp, Homo sapiens
  siRNA target sequence for GNPAT (NM_014236.1,395-413).
gagattcattatgtcatta

SEQ ID NO: 215404 - DNA, 19 bp, Homo sapiens
  siRNA target sequence for GNPAT (NM_014236.1,472-490).
gatcttagatgaaatgagt

SEQ ID NO: 215405 - DNA, 19 bp, Homo sapiens
  siRNA target sequence for GNPAT (NM_014236.1,526-544).
cttcaccctgagcaaagta

SEQ ID NO: 215406 - DNA, 19 bp, Homo sapiens
  siRNA target sequence for GNPAT (NM_014236.1,610-628).
ccaggagcatcctgttgtt

SEQ ID NO: 215407 - DNA, 19 bp, Homo sapiens
  siRNA target sequence for GNPAT (NM_014236.1,635-653).
cctagtcatcgaagttaca

SEQ ID NO: 215408 - DNA, 19 bp, Homo sapiens
  siRNA target sequence for GNPAT (NM_014236.1,636-654).
ctagtcatcgaagttacat

SEQ ID NO: 215409 - DNA, 19 bp, Homo sapiens
  siRNA target sequence for GNPAT (NM_014236.1,639-657).
gtcatcgaagttacattga

SEQ ID NO: 215410 - DNA, 19 bp, Homo sapiens
  siRNA target sequence for GNPAT (NM_014236.1,641-659).
catcgaagttacattgact

SEQ ID NO: 215411 - DNA, 19 bp, Homo sapiens
  siRNA target sequence for GNPAT (NM_014236.1,677-695).
cttctatacaattatgatt

SEQ ID NO: 215412 - DNA, 19 bp, Homo sapiens
  siRNA target sequence for GNPAT (NM_014236.1,697-715).
gcctgtgccagttatagca

SEQ ID NO: 215413 - DNA, 19 bp, Homo sapiens
  siRNA target sequence for GNPAT (NM_014236.1,789-807).
gtacctttggtggcaataa

SEQ ID NO: 215414 - DNA, 19 bp, Homo sapiens
  siRNA target sequence for GNPAT (NM_014236.1,816-834).
gggctgtattctctgaata

SEQ ID NO: 215415 - DNA, 19 bp, Homo sapiens
  siRNA target sequence for GNPAT (NM_014236.1,817-835).
ggctgtattctctgaatat

SEQ ID NO: 215416 - DNA, 19 bp, Homo sapiens
  siRNA target sequence for GNPAT (NM_014236.1,843-861).
ctatgttacggaatggtta

SEQ ID NO: 215417 - DNA, 19 bp, Homo sapiens
  siRNA target sequence for GNPAT (NM_014236.1,847-865).
gttacggaatggttatgct

SEQ ID NO: 215418 - DNA, 19 bp, Homo sapiens
  siRNA target sequence for GNPAT (NM_014236.1,897-915).
gccgctctgccaagacatt

SEQ ID NO: 215419 - DNA, 19 bp, Homo sapiens
  siRNA target sequence for GNPAT (NM_014236.1,986-1004).
cttgtcccaattagtatca

SEQ ID NO: 215420 - DNA, 19 bp, Homo sapiens
  siRNA target sequence for GNPAT (NM_014236.1,989-1007).
gtcccaattagtatcagtt

SEQ ID NO: 215421 - DNA, 19 bp, Homo sapiens
  siRNA target sequence for GNPAT (NM_014236.1,993-1011).
caattagtatcagttatga

SEQ ID NO: 215422 - DNA, 19 bp, Homo sapiens
  siRNA target sequence for GNPAT (NM_014236.1,1045-1063).
gcttctaggggttcctaaa

SEQ ID NO: 215423 - DNA, 19 bp, Homo sapiens
  siRNA target sequence for GNPAT (NM_014236.1,1049-1067).
ctaggggttcctaaaccaa

SEQ ID NO: 215424 - DNA, 19 bp, Homo sapiens
  siRNA target sequence for GNPAT (NM_014236.1,1053-1071).
gggttcctaaaccaaaaga

SEQ ID NO: 215425 - DNA, 19 bp, Homo sapiens
  siRNA target sequence for GNPAT (NM_014236.1,1149-1167).
ctgtgtcacttcgatcttt

SEQ ID NO: 215426 - DNA, 19 bp, Homo sapiens
  siRNA target sequence for GNPAT (NM_014236.1,1180-1198).
gatgagtcggagctcatat

SEQ ID NO: 215427 - DNA, 19 bp, Homo sapiens
  siRNA target sequence for GNPAT (NM_014236.1,1185-1203).
gtcggagctcatataactt

SEQ ID NO: 215428 - DNA, 19 bp, Homo sapiens
  siRNA target sequence for GNPAT (NM_014236.1,1201-1219).
cttggttccaagatacatt

SEQ ID NO: 215429 - DNA, 19 bp, Homo sapiens
  siRNA target sequence for GNPAT (NM_014236.1,1257-1275).
ctgaagttgcctacaaaat

SEQ ID NO: 215430 - DNA, 19 bp, Homo sapiens
  siRNA target sequence for GNPAT (NM_014236.1,1286-1304).
caaattgaaaacatggttt

SEQ ID NO: 215431 - DNA, 19 bp, Homo sapiens
  siRNA target sequence for GNPAT (NM_014236.1,1309-1327).
cccctggaccctaatagtt

SEQ ID NO: 215432 - DNA, 19 bp, Homo sapiens
  siRNA target sequence for GNPAT (NM_014236.1,1370-1388).
ctggtggaaaagactttat

SEQ ID NO: 215433 - DNA, 19 bp, Homo sapiens
  siRNA target sequence for GNPAT (NM_014236.1,1399-1417).
cttaacccaggcatttgga

SEQ ID NO: 215434 - DNA, 19 bp, Homo sapiens
  siRNA target sequence for GNPAT (NM_014236.1,1681-1699).
ggatgtctacagttgcttt

SEQ ID NO: 215435 - DNA, 19 bp, Homo sapiens
  siRNA target sequence for GNPAT (NM_014236.1,1700-1718).
cgcttcctacgtgatgttt

SEQ ID NO: 215436 - DNA, 19 bp, Homo sapiens
  siRNA target sequence for GNPAT (NM_014236.1,1701-1719).
gcttcctacgtgatgtttt

SEQ ID NO: 215437 - DNA, 19 bp, Homo sapiens
  siRNA target sequence for GNPAT (NM_014236.1,1702-1720).
cttcctacgtgatgttttt

SEQ ID NO: 215438 - DNA, 19 bp, Homo sapiens
  siRNA target sequence for GNPAT (NM_014236.1,1705-1723).
cctacgtgatgtttttgca

SEQ ID NO: 215439 - DNA, 19 bp, Homo sapiens
  siRNA target sequence for GNPAT (NM_014236.1,1801-1819).
catacaagtgactacgaaa

SEQ ID NO: 215440 - DNA, 19 bp, Homo sapiens
  siRNA target sequence for GNPAT (NM_014236.1,1865-1883).
gtaggactctttaaacctt

SEQ ID NO: 215441 - DNA, 19 bp, Homo sapiens
  siRNA target sequence for GNPAT (NM_014236.1,1893-1911).
gctatcagataatttgcaa

SEQ ID NO: 215442 - DNA, 19 bp, Homo sapiens
  siRNA target sequence for GNPAT (NM_014236.1,1912-1930).
gtaccttttgagtgaagaa

SEQ ID NO: 215443 - DNA, 19 bp, Homo sapiens
  siRNA target sequence for GNPAT (NM_014236.1,1997-2015).
caaggtacctctcaatgtt

SEQ ID NO: 215444 - DNA, 19 bp, Homo sapiens
  siRNA target sequence for GNPAT (NM_014236.1,2123-2141).
gaacctgccacaaccaaat

SEQ ID NO: 215445 - DNA, 19 bp, Homo sapiens
  siRNA target sequence for GNPAT (NM_014236.1,2160-2178).
gtaagacaccaataggaaa

SEQ ID NO: 215446 - DNA, 19 bp, Homo sapiens
  siRNA target sequence for NMT1 (NM_021079.3,669-687).
ctcaagtcggaaattggtt

SEQ ID NO: 215447 - DNA, 19 bp, Homo sapiens
  siRNA target sequence for NMT1 (NM_021079.3,791-809).
gggttgctccagttctgat

SEQ ID NO: 215448 - DNA, 19 bp, Homo sapiens
  siRNA target sequence for NMT1 (NM_021079.3,842-860).
gcatcttccaagcagttta

SEQ ID NO: 215449 - DNA, 19 bp, Homo sapiens
  siRNA target sequence for NMT1 (NM_021079.3,889-907).
gttggcacctgcaggtatt

SEQ ID NO: 215450 - DNA, 19 bp, Homo sapiens
  siRNA target sequence for NMT1 (NM_021079.3,924-942).
cccacggaagctgattgaa

SEQ ID NO: 215451 - DNA, 19 bp, Homo sapiens
  siRNA target sequence for NMT1 (NM_021079.3,926-944).
cacggaagctgattgaagt

SEQ ID NO: 215452 - DNA, 19 bp, Homo sapiens
  siRNA target sequence for NMT1 (NM_021079.3,934-952).
ctgattgaagtgaagttct

SEQ ID NO: 215453 - DNA, 19 bp, Homo sapiens
  siRNA target sequence for NMT1 (NM_021079.3,951-969).
ctcccacctgagcagaaat

SEQ ID NO: 215454 - DNA, 19 bp, Homo sapiens
  siRNA target sequence for NMT1 (NM_021079.3,1027-1045).
gggctgcgaccaatggaaa

SEQ ID NO: 215455 - DNA, 19 bp, Homo sapiens
  siRNA target sequence for NMT1 (NM_021079.3,1030-1048).
ctgcgaccaatggaaacaa

SEQ ID NO: 215456 - DNA, 19 bp, Homo sapiens
  siRNA target sequence for NMT1 (NM_021079.3,1072-1090).
ctcctcaccaggtacttga

SEQ ID NO: 215457 - DNA, 19 bp, Homo sapiens
  siRNA target sequence for NMT1 (NM_021079.3,1079-1097).
ccaggtacttgaagcaatt

SEQ ID NO: 215458 - DNA, 19 bp, Homo sapiens
  siRNA target sequence for NMT1 (NM_021079.3,1082-1100).
ggtacttgaagcaatttca

SEQ ID NO: 215459 - DNA, 19 bp, Homo sapiens
  siRNA target sequence for NMT1 (NM_021079.3,1260-1278).
gagtctcaaagctgcttat

SEQ ID NO: 215460 - DNA, 19 bp, Homo sapiens
  siRNA target sequence for NMT1 (NM_021079.3,1331-1349).
cccttgtcctcgccaaaat

SEQ ID NO: 215461 - DNA, 19 bp, Homo sapiens
  siRNA target sequence for NMT1 (NM_021079.3,1333-1351).
cttgtcctcgccaaaatga

SEQ ID NO: 215462 - DNA, 19 bp, Homo sapiens
  siRNA target sequence for NMT2 (NM_004808.1,241-259).
gtcagactcggcatctgat

SEQ ID NO: 215463 - DNA, 19 bp, Homo sapiens
  siRNA target sequence for NMT2 (NM_004808.1,417-435).
cacaaccggtaccaaaact

SEQ ID NO: 215464 - DNA, 19 bp, Homo sapiens
  siRNA target sequence for NMT2 (NM_004808.1,423-441).
cggtaccaaaactagatga

SEQ ID NO: 215465 - DNA, 19 bp, Homo sapiens
  siRNA target sequence for NMT2 (NM_004808.1,424-442).
ggtaccaaaactagatgaa

SEQ ID NO: 215466 - DNA, 19 bp, Homo sapiens
  siRNA target sequence for NMT2 (NM_004808.1,434-452).
ctagatgaagtcataacat

SEQ ID NO: 215467 - DNA, 19 bp, Homo sapiens
  siRNA target sequence for NMT2 (NM_004808.1,450-468).
catctcatggtgcaattga

SEQ ID NO: 215468 - DNA, 19 bp, Homo sapiens
  siRNA target sequence for NMT2 (NM_004808.1,488-506).
cgccaagaaccgtattctt

SEQ ID NO: 215469 - DNA, 19 bp, Homo sapiens
  siRNA target sequence for NMT2 (NM_004808.1,489-507).
gccaagaaccgtattcttt

SEQ ID NO: 215470 - DNA, 19 bp, Homo sapiens
  siRNA target sequence for NMT2 (NM_004808.1,504-522).
ctttgccacagggttttat

SEQ ID NO: 215471 - DNA, 19 bp, Homo sapiens
  siRNA target sequence for NMT2 (NM_004808.1,562-580).
ggagttatacacgttgtta

SEQ ID NO: 215472 - DNA, 19 bp, Homo sapiens
  siRNA target sequence for NMT2 (NM_004808.1,563-581).
gagttatacacgttgttaa

SEQ ID NO: 215473 - DNA, 19 bp, Homo sapiens
  siRNA target sequence for NMT2 (NM_004808.1,565-583).
gttatacacgttgttaaat

SEQ ID NO: 215474 - DNA, 19 bp, Homo sapiens
  siRNA target sequence for NMT2 (NM_004808.1,571-589).
cacgttgttaaatgagaat

SEQ ID NO: 215475 - DNA, 19 bp, Homo sapiens
  siRNA target sequence for NMT2 (NM_004808.1,573-591).
cgttgttaaatgagaatta

SEQ ID NO: 215476 - DNA, 19 bp, Homo sapiens
  siRNA target sequence for NMT2 (NM_004808.1,577-595).
gttaaatgagaattacgta

SEQ ID NO: 215477 - DNA, 19 bp, Homo sapiens
  siRNA target sequence for NMT2 (NM_004808.1,690-708).
gggtcagagtgtcttcaaa

SEQ ID NO: 215478 - DNA, 19 bp, Homo sapiens
  siRNA target sequence for NMT2 (NM_004808.1,741-759).
cagcaaacattcggattta

SEQ ID NO: 215479 - DNA, 19 bp, Homo sapiens
  siRNA target sequence for NMT2 (NM_004808.1,744-762).
caaacattcggatttatga

SEQ ID NO: 215480 - DNA, 19 bp, Homo sapiens
  siRNA target sequence for NMT2 (NM_004808.1,825-843).
gggtagccccagtgctaat

SEQ ID NO: 215481 - DNA, 19 bp, Homo sapiens
  siRNA target sequence for NMT2 (NM_004808.1,900-918).
cgggagtggttcttcctaa

SEQ ID NO: 215482 - DNA, 19 bp, Homo sapiens
  siRNA target sequence for NMT2 (NM_004808.1,951-969).
cactaaaccccagaaaatt

SEQ ID NO: 215483 - DNA, 19 bp, Homo sapiens
  siRNA target sequence for NMT2 (NM_004808.1,960-978).
ccagaaaattggtagaagt

SEQ ID NO: 215484 - DNA, 19 bp, Homo sapiens
  siRNA target sequence for NMT2 (NM_004808.1,963-981).
gaaaattggtagaagtgaa

SEQ ID NO: 215485 - DNA, 19 bp, Homo sapiens
  siRNA target sequence for NMT2 (NM_004808.1,1033-1051).
cagacttccagatgttaca

SEQ ID NO: 215486 - DNA, 19 bp, Homo sapiens
  siRNA target sequence for NMT2 (NM_004808.1,1035-1053).
gacttccagatgttacaaa

SEQ ID NO: 215487 - DNA, 19 bp, Homo sapiens
  siRNA target sequence for NMT2 (NM_004808.1,1037-1055).
cttccagatgttacaaaga

SEQ ID NO: 215488 - DNA, 19 bp, Homo sapiens
  siRNA target sequence for NMT2 (NM_004808.1,1090-1108).
caaatcagttcgagaatta

SEQ ID NO: 215489 - DNA, 19 bp, Homo sapiens
  siRNA target sequence for NMT2 (NM_004808.1,1095-1113).
cagttcgagaattaatcaa

SEQ ID NO: 215490 - DNA, 19 bp, Homo sapiens
  siRNA target sequence for NMT2 (NM_004808.1,1184-1202).
cgggagcacattattgaca

SEQ ID NO: 215491 - DNA, 19 bp, Homo sapiens
  siRNA target sequence for NMT2 (NM_004808.1,1192-1210).
cattattgacacgtttgta

SEQ ID NO: 215492 - DNA, 19 bp, Homo sapiens
  siRNA target sequence for NMT2 (NM_004808.1,1227-1245).
gtaaactgactgatttcct

SEQ ID NO: 215493 - DNA, 19 bp, Homo sapiens
  siRNA target sequence for NMT2 (NM_004808.1,1298-1316).
ctcaaagccgcctactcat

SEQ ID NO: 215494 - DNA, 19 bp, Homo sapiens
  siRNA target sequence for NMT2 (NM_004808.1,1364-1382).
gcgctcatcctggctaaat

SEQ ID NO: 215495 - DNA, 19 bp, Homo sapiens
  siRNA target sequence for NMT2 (NM_004808.1,1367-1385).
ctcatcctggctaaatcga

SEQ ID NO: 215496 - DNA, 19 bp, Homo sapiens
  siRNA target sequence for NMT2 (NM_004808.1,1375-1393).
ggctaaatcgaaaggattt

SEQ ID NO: 215497 - DNA, 19 bp, Homo sapiens
  siRNA target sequence for NMT2 (NM_004808.1,1377-1395).
ctaaatcgaaaggatttga

SEQ ID NO: 215498 - DNA, 19 bp, Homo sapiens
  siRNA target sequence for NMT2 (NM_004808.1,1383-1401).
cgaaaggatttgatgtatt

SEQ ID NO: 215499 - DNA, 19 bp, Homo sapiens
  siRNA target sequence for NMT2 (NM_004808.1,1495-1513).
gaggtgtccaggtacagat

SEQ ID NO: 215500 - DNA, 19 bp, Homo sapiens
  siRNA target sequence for NMT2 (NM_004808.1,1498-1516).
gtgtccaggtacagattct

SEQ ID NO: 215501 - DNA, 19 bp, Homo sapiens
  siRNA target sequence for NMT2 (NM_004808.1,1500-1518).
gtccaggtacagattctga

SEQ ID NO: 215502 - DNA, 19 bp, Homo sapiens
  siRNA target sequence for NMT2 (NM_004808.1,1502-1520).
ccaggtacagattctgaaa

SEQ ID NO: 215503 - DNA, 19 bp, Homo sapiens
  siRNA target sequence for NMT2 (NM_004808.1,1506-1524).
gtacagattctgaaaaggt

SEQ ID NO: 215504 - DNA, 19 bp, Homo sapiens
  siRNA target sequence for AGPAT1 (NM_006411.2,406-424).
cccagtgccaagtacttct

SEQ ID NO: 215505 - DNA, 19 bp, Homo sapiens
  siRNA target sequence for AGPAT1 (NM_006411.2,497-515).
gacgcaacgtcgagaacat

SEQ ID NO: 215506 - DNA, 19 bp, Homo sapiens
  siRNA target sequence for AGPAT1 (NM_006411.2,499-517).
cgcaacgtcgagaacatga

SEQ ID NO: 215507 - DNA, 19 bp, Homo sapiens
  siRNA target sequence for AGPAT1 (NM_006411.2,500-518).
gcaacgtcgagaacatgaa

SEQ ID NO: 215508 - DNA, 19 bp, Homo sapiens
  siRNA target sequence for AGPAT1 (NM_006411.2,599-617).
cctcgcagccctatgttgt

SEQ ID NO: 215509 - DNA, 19 bp, Homo sapiens
  siRNA target sequence for AGPAT1 (NM_006411.2,602-620).
cgcagccctatgttgttgt

SEQ ID NO: 215510 - DNA, 19 bp, Homo sapiens
  siRNA target sequence for AGPAT1 (NM_006411.2,737-755).
ggctggcaggagtcatctt

SEQ ID NO: 215511 - DNA, 19 bp, Homo sapiens
  siRNA target sequence for AGPAT1 (NM_006411.2,929-947).
ccattgtccccatagtcat

SEQ ID NO: 215512 - DNA, 19 bp, Homo sapiens
  siRNA target sequence for AGPAT1 (NM_006411.2,950-968).
cctcctaccaagacttcta

SEQ ID NO: 215513 - DNA, 19 bp, Homo sapiens
  siRNA target sequence for AGPAT1 (NM_006411.2,987-1005).
cttcacctcgggacaatgt

SEQ ID NO: 215514 - DNA, 19 bp, Homo sapiens
  siRNA target sequence for AGPAT4 (NM_020133.1,224-242).
gcctcagggctaatcatca

SEQ ID NO: 215515 - DNA, 19 bp, Homo sapiens
  siRNA target sequence for AGPAT4 (NM_020133.1,225-243).
cctcagggctaatcatcaa

SEQ ID NO: 215516 - DNA, 19 bp, Homo sapiens
  siRNA target sequence for AGPAT4 (NM_020133.1,266-284).
ctcctctggcccattaaca

SEQ ID NO: 215517 - DNA, 19 bp, Homo sapiens
  siRNA target sequence for AGPAT4 (NM_020133.1,290-308).
ctcttccggaagatcaact

SEQ ID NO: 215518 - DNA, 19 bp, Homo sapiens
  siRNA target sequence for AGPAT4 (NM_020133.1,309-327).
gcagactgtcctattgcat

SEQ ID NO: 215519 - DNA, 19 bp, Homo sapiens
  siRNA target sequence for AGPAT4 (NM_020133.1,437-455).
ctcaaccacaagtttgaaa

SEQ ID NO: 215520 - DNA, 19 bp, Homo sapiens
  siRNA target sequence for AGPAT4 (NM_020133.1,439-457).
caaccacaagtttgaaatt

SEQ ID NO: 215521 - DNA, 19 bp, Homo sapiens
  siRNA target sequence for AGPAT4 (NM_020133.1,533-551).
ctggcctatgtcccaatta

SEQ ID NO: 215522 - DNA, 19 bp, Homo sapiens
  siRNA target sequence for AGPAT4 (NM_020133.1,645-663).
gggactaccccgagaagta

SEQ ID NO: 215523 - DNA, 19 bp, Homo sapiens
  siRNA target sequence for AGPAT4 (NM_020133.1,646-664).
ggactaccccgagaagtat

SEQ ID NO: 215524 - DNA, 19 bp, Homo sapiens
  siRNA target sequence for AGPAT4 (NM_020133.1,647-665).
gactaccccgagaagtatt

SEQ ID NO: 215525 - DNA, 19 bp, Homo sapiens
  siRNA target sequence for AGPAT4 (NM_020133.1,649-667).
ctaccccgagaagtatttt

SEQ ID NO: 215526 - DNA, 19 bp, Homo sapiens
  siRNA target sequence for AGPAT4 (NM_020133.1,690-708).
cacggttcacggagaagaa

SEQ ID NO: 215527 - DNA, 19 bp, Homo sapiens
  siRNA target sequence for AGPAT4 (NM_020133.1,821-839).
gtttcagctgtatatgact

SEQ ID NO: 215528 - DNA, 19 bp, Homo sapiens
  siRNA target sequence for AGPAT4 (NM_020133.1,1079-1097).
ctcgtgaactggctgtttt

SEQ ID NO: 215529 - DNA, 19 bp, Homo sapiens
  siRNA target sequence for AGPAT4 (NM_020133.1,1207-1225).
gggagttcgatggatgatt

SEQ ID NO: 215530 - DNA, 19 bp, Homo sapiens
  siRNA target sequence for AGPAT4 (NM_020133.1,1222-1240).
gattggtgtgacggaaatt

SEQ ID NO: 215531 - DNA, 19 bp, Homo sapiens
  siRNA target sequence for LPAAT-e (NM_018361.1,185-203).
ccggggtccagatattgct

SEQ ID NO: 215532 - DNA, 19 bp, Homo sapiens
  siRNA target sequence for LPAAT-e (NM_018361.1,186-204).
cggggtccagatattgcta

SEQ ID NO: 215533 - DNA, 19 bp, Homo sapiens
  siRNA target sequence for LPAAT-e (NM_018361.1,189-207).
ggtccagatattgctatat

SEQ ID NO: 215534 - DNA, 19 bp, Homo sapiens
  siRNA target sequence for LPAAT-e (NM_018361.1,192-210).
ccagatattgctatatgga

SEQ ID NO: 215535 - DNA, 19 bp, Homo sapiens
  siRNA target sequence for LPAAT-e (NM_018361.1,321-339).
gcgctacgtgctgaaagaa

SEQ ID NO: 215536 - DNA, 19 bp, Homo sapiens
  siRNA target sequence for LPAAT-e (NM_018361.1,459-477).
cgcaggaactccaatgtat

SEQ ID NO: 215537 - DNA, 19 bp, Homo sapiens
  siRNA target sequence for LPAAT-e (NM_018361.1,464-482).
gaactccaatgtatcttgt

SEQ ID NO: 215538 - DNA, 19 bp, Homo sapiens
  siRNA target sequence for LPAAT-e (NM_018361.1,467-485).
ctccaatgtatcttgtgat

SEQ ID NO: 215539 - DNA, 19 bp, Homo sapiens
  siRNA target sequence for LPAAT-e (NM_018361.1,559-577).
cgtggccttgcagtattaa

SEQ ID NO: 215540 - DNA, 19 bp, Homo sapiens
  siRNA target sequence for LPAAT-e (NM_018361.1,560-578).
gtggccttgcagtattaaa

SEQ ID NO: 215541 - DNA, 19 bp, Homo sapiens
  siRNA target sequence for LPAAT-e (NM_018361.1,603-621).
ggcaactcacgttgctttt

SEQ ID NO: 215542 - DNA, 19 bp, Homo sapiens
  siRNA target sequence for LPAAT-e (NM_018361.1,605-623).
caactcacgttgcttttga

SEQ ID NO: 215543 - DNA, 19 bp, Homo sapiens
  siRNA target sequence for LPAAT-e (NM_018361.1,616-634).
gcttttgattgcatgaaga

SEQ ID NO: 215544 - DNA, 19 bp, Homo sapiens
  siRNA target sequence for LPAAT-e (NM_018361.1,643-661).
gatgcaatttatgatgtta

SEQ ID NO: 215545 - DNA, 19 bp, Homo sapiens
  siRNA target sequence for LPAAT-e (NM_018361.1,710-728).
cgaccatgacggaatttct

SEQ ID NO: 215546 - DNA, 19 bp, Homo sapiens
  siRNA target sequence for LPAAT-e (NM_018361.1,740-758).
gtccaaaaattcatattca

SEQ ID NO: 215547 - DNA, 19 bp, Homo sapiens
  siRNA target sequence for LPAAT-e (NM_018361.1,767-785).
gtatcgacaaaaaagatgt

SEQ ID NO: 215548 - DNA, 19 bp, Homo sapiens
  siRNA target sequence for LPAAT-e (NM_018361.1,812-830).
gatggctgcatgaacgttt

SEQ ID NO: 215549 - DNA, 19 bp, Homo sapiens
  siRNA target sequence for LPAAT-e (NM_018361.1,816-834).
gctgcatgaacgtttcgaa

SEQ ID NO: 215550 - DNA, 19 bp, Homo sapiens
  siRNA target sequence for LPAAT-e (NM_018361.1,817-835).
ctgcatgaacgtttcgaaa

SEQ ID NO: 215551 - DNA, 19 bp, Homo sapiens
  siRNA target sequence for LPAAT-e (NM_018361.1,820-838).
catgaacgtttcgaaatca

SEQ ID NO: 215552 - DNA, 19 bp, Homo sapiens
  siRNA target sequence for LPAAT-e (NM_018361.1,826-844).
cgtttcgaaatcaaagata

SEQ ID NO: 215553 - DNA, 19 bp, Homo sapiens
  siRNA target sequence for LPAAT-e (NM_018361.1,827-845).
gtttcgaaatcaaagataa

SEQ ID NO: 215554 - DNA, 19 bp, Homo sapiens
  siRNA target sequence for LPAAT-e (NM_018361.1,841-859).
gataagatgcttatagaat

SEQ ID NO: 215555 - DNA, 19 bp, Homo sapiens
  siRNA target sequence for LPAAT-e (NM_018361.1,898-916).
cctgggaaaagtgttaatt

SEQ ID NO: 215556 - DNA, 19 bp, Homo sapiens
  siRNA target sequence for LPAAT-e (NM_018361.1,1046-1064).
gcctgtgggttactattaa

SEQ ID NO: 215557 - DNA, 19 bp, Homo sapiens
  siRNA target sequence for LPAAT-e (NM_018361.1,1047-1065).
cctgtgggttactattaaa

SEQ ID NO: 215558 - DNA, 19 bp, Homo sapiens
  siRNA target sequence for CPT1A (NM_001876.1,156-174).
ctcttagacaaatctatct

SEQ ID NO: 215559 - DNA, 19 bp, Homo sapiens
  siRNA target sequence for CPT1A (NM_001876.1,307-325).
cgacccctcgttaggaata

SEQ ID NO: 215560 - DNA, 19 bp, Homo sapiens
  siRNA target sequence for CPT1A (NM_001876.1,308-326).
gacccctcgttaggaataa

SEQ ID NO: 215561 - DNA, 19 bp, Homo sapiens
  siRNA target sequence for CPT1A (NM_001876.1,310-328).
cccctcgttaggaataatt

SEQ ID NO: 215562 - DNA, 19 bp, Homo sapiens
  siRNA target sequence for CPT1A (NM_001876.1,313-331).
ctcgttaggaataattgca

SEQ ID NO: 215563 - DNA, 19 bp, Homo sapiens
  siRNA target sequence for CPT1A (NM_001876.1,315-333).
cgttaggaataattgcaaa

SEQ ID NO: 215564 - DNA, 19 bp, Homo sapiens
  siRNA target sequence for CPT1A (NM_001876.1,316-334).
gttaggaataattgcaaaa

SEQ ID NO: 215565 - DNA, 19 bp, Homo sapiens
  siRNA target sequence for CPT1A (NM_001876.1,529-547).
gggtatggtcaagatcttt

SEQ ID NO: 215566 - DNA, 19 bp, Homo sapiens
  siRNA target sequence for CPT1A (NM_001876.1,530-548).
ggtatggtcaagatctttt

SEQ ID NO: 215567 - DNA, 19 bp, Homo sapiens
  siRNA target sequence for CPT1A (NM_001876.1,551-569).
ggccgaaaacccatgttgt

SEQ ID NO: 215568 - DNA, 19 bp, Homo sapiens
  siRNA target sequence for CPT1A (NM_001876.1,598-616).
gccggtcccggctgtcaaa

SEQ ID NO: 215569 - DNA, 19 bp, Homo sapiens
  siRNA target sequence for CPT1A (NM_001876.1,600-618).
cggtcccggctgtcaaaga

SEQ ID NO: 215570 - DNA, 19 bp, Homo sapiens
  siRNA target sequence for CPT1A (NM_001876.1,602-620).
gtcccggctgtcaaagaca

SEQ ID NO: 215571 - DNA, 19 bp, Homo sapiens
  siRNA target sequence for CPT1A (NM_001876.1,709-727).
cggtcttggaccaagatta

SEQ ID NO: 215572 - DNA, 19 bp, Homo sapiens
  siRNA target sequence for CPT1A (NM_001876.1,723-741).
gattacagtggtatttgaa

SEQ ID NO: 215573 - DNA, 19 bp, Homo sapiens
  siRNA target sequence for CPT1A (NM_001876.1,753-771).
ggtgggctacaaattacgt

SEQ ID NO: 215574 - DNA, 19 bp, Homo sapiens
  siRNA target sequence for CPT1A (NM_001876.1,934-952).
ggaccgggaggaaatcaaa

SEQ ID NO: 215575 - DNA, 19 bp, Homo sapiens
  siRNA target sequence for CPT1A (NM_001876.1,938-956).
cgggaggaaatcaaaccaa

SEQ ID NO: 215576 - DNA, 19 bp, Homo sapiens
  siRNA target sequence for CPT1A (NM_001876.1,995-1013).
cagtgggagcggatgttta

SEQ ID NO: 215577 - DNA, 19 bp, Homo sapiens
  siRNA target sequence for CPT1A (NM_001876.1,997-1015).
gtgggagcggatgtttaat

SEQ ID NO: 215578 - DNA, 19 bp, Homo sapiens
  siRNA target sequence for CPT1A (NM_001876.1,1000-1018).
ggagcggatgtttaatact

SEQ ID NO: 215579 - DNA, 19 bp, Homo sapiens
  siRNA target sequence for CPT1A (NM_001876.1,1001-1019).
gagcggatgtttaatactt

SEQ ID NO: 215580 - DNA, 19 bp, Homo sapiens
  siRNA target sequence for CPT1A (NM_001876.1,1088-1106).
catcgaggacgctacttca

SEQ ID NO: 215581 - DNA, 19 bp, Homo sapiens
  siRNA target sequence for CPT1A (NM_001876.1,1254-1272).
ggtgtcgtcaggcctattt

SEQ ID NO: 215582 - DNA, 19 bp, Homo sapiens
  siRNA target sequence for CPT1A (NM_001876.1,1255-1273).
gtgtcgtcaggcctatttt

SEQ ID NO: 215583 - DNA, 19 bp, Homo sapiens
  siRNA target sequence for CPT1A (NM_001876.1,1275-1293).
gacgtgggaaaaataagca

SEQ ID NO: 215584 - DNA, 19 bp, Homo sapiens
  siRNA target sequence for CPT1A (NM_001876.1,1330-1348).
gacgttagatgaaactgaa

SEQ ID NO: 215585 - DNA, 19 bp, Homo sapiens
  siRNA target sequence for CPT1A (NM_001876.1,1384-1402).
ggacagctacgccaaatct

SEQ ID NO: 215586 - DNA, 19 bp, Homo sapiens
  siRNA target sequence for CPT1A (NM_001876.1,1387-1405).
cagctacgccaaatctcta

SEQ ID NO: 215587 - DNA, 19 bp, Homo sapiens
  siRNA target sequence for CPT1A (NM_001876.1,1390-1408).
ctacgccaaatctctacta

SEQ ID NO: 215588 - DNA, 19 bp, Homo sapiens
  siRNA target sequence for CPT1A (NM_001876.1,1443-1461).
cgttcacgtttgttgtctt

SEQ ID NO: 215589 - DNA, 19 bp, Homo sapiens
  siRNA target sequence for CPT1A (NM_001876.1,1585-1603).
ctgcaaaggcgacatcaat

SEQ ID NO: 215590 - DNA, 19 bp, Homo sapiens
  siRNA target sequence for CPT1A (NM_001876.1,1594-1612).
cgacatcaatccgaacatt

SEQ ID NO: 215591 - DNA, 19 bp, Homo sapiens
  siRNA target sequence for CPT1A (NM_001876.1,1647-1665).
gggaatgtcaagaggttat

SEQ ID NO: 215592 - DNA, 19 bp, Homo sapiens
  siRNA target sequence for CPT1A (NM_001876.1,1714-1732).
ccattccttcccattcgta

SEQ ID NO: 215593 - DNA, 19 bp, Homo sapiens
  siRNA target sequence for CPT1A (NM_001876.1,1724-1742).
ccattcgtagcctttggta

SEQ ID NO: 215594 - DNA, 19 bp, Homo sapiens
  siRNA target sequence for CPT1A (NM_001876.1,1725-1743).
cattcgtagcctttggtaa

SEQ ID NO: 215595 - DNA, 19 bp, Homo sapiens
  siRNA target sequence for CPT1A (NM_001876.1,1729-1747).
cgtagcctttggtaaagga

SEQ ID NO: 215596 - DNA, 19 bp, Homo sapiens
  siRNA target sequence for CPT1A (NM_001876.1,1734-1752).
cctttggtaaaggaatcat

SEQ ID NO: 215597 - DNA, 19 bp, Homo sapiens
  siRNA target sequence for CPT1A (NM_001876.1,1824-1842).
gcaagttttgcctcacata

SEQ ID NO: 215598 - DNA, 19 bp, Homo sapiens
  siRNA target sequence for CPT1A (NM_001876.1,2052-2070).
gcctttacgtggtgtctaa

SEQ ID NO: 215599 - DNA, 19 bp, Homo sapiens
  siRNA target sequence for CPT1A (NM_001876.1,2053-2071).
cctttacgtggtgtctaaa

SEQ ID NO: 215600 - DNA, 19 bp, Homo sapiens
  siRNA target sequence for CPT1A (NM_001876.1,2054-2072).
ctttacgtggtgtctaaat

SEQ ID NO: 215601 - DNA, 19 bp, Homo sapiens
  siRNA target sequence for CPT1A (NM_001876.1,2081-2099).
gtggagtcccctttcctta

SEQ ID NO: 215602 - DNA, 19 bp, Homo sapiens
  siRNA target sequence for CPT1A (NM_001876.1,2086-2104).
gtcccctttccttaaggaa

SEQ ID NO: 215603 - DNA, 19 bp, Homo sapiens
  siRNA target sequence for CPT1A (NM_001876.1,2095-2113).
ccttaaggaagttttatct

SEQ ID NO: 215604 - DNA, 19 bp, Homo sapiens
  siRNA target sequence for CPT1A (NM_001876.1,2301-2319).
gccctgagacggattctca

SEQ ID NO: 215605 - DNA, 19 bp, Homo sapiens
  siRNA target sequence for CPT1A (NM_001876.1,2302-2320).
ccctgagacggattctcat

SEQ ID NO: 215606 - DNA, 19 bp, Homo sapiens
  siRNA target sequence for CPT1A (NM_001876.1,2312-2330).
gattctcatcgctttggaa

SEQ ID NO: 215607 - DNA, 19 bp, Homo sapiens
  siRNA target sequence for CPT1A (NM_001876.1,2345-2363).
gcaatgactgacatcatca

SEQ ID NO: 215608 - DNA, 19 bp, Homo sapiens
  siRNA target sequence for CPT1A (NM_001876.1,2368-2386).
gtttggtctcagttctaat

SEQ ID NO: 215609 - DNA, 19 bp, Homo sapiens
  siRNA target sequence for CPT1A (NM_001876.1,2375-2393).
ctcagttctaattccaaaa

SEQ ID NO: 215610 - DNA, 19 bp, Homo sapiens
  siRNA target sequence for CPT1B (NM_004377.2,154-172).
gtcgggaggccctgaaaca

SEQ ID NO: 215611 - DNA, 19 bp, Homo sapiens
  siRNA target sequence for CPT1B (NM_004377.2,265-283).
gctggctggtcgtcatcat

SEQ ID NO: 215612 - DNA, 19 bp, Homo sapiens
  siRNA target sequence for CPT1B (NM_004377.2,433-451).
gggtgacgggcatcttctt

SEQ ID NO: 215613 - DNA, 19 bp, Homo sapiens
  siRNA target sequence for CPT1B (NM_004377.2,486-504).
catgggtggatgtttgaga

SEQ ID NO: 215614 - DNA, 19 bp, Homo sapiens
  siRNA target sequence for CPT1B (NM_004377.2,763-781).
catggtgggcaagtaacta

SEQ ID NO: 215615 - DNA, 19 bp, Homo sapiens
  siRNA target sequence for CPT1B (NM_004377.2,917-935).
ccacgccatgatcatgtat

SEQ ID NO: 215616 - DNA, 19 bp, Homo sapiens
  siRNA target sequence for CPT1B (NM_004377.2,1098-1116).
cacaagggacgcttcttca

SEQ ID NO: 215617 - DNA, 19 bp, Homo sapiens
  siRNA target sequence for CPT1B (NM_004377.2,1265-1283).
ggcacgccaggccttcttt

SEQ ID NO: 215618 - DNA, 19 bp, Homo sapiens
  siRNA target sequence for CPT1B (NM_004377.2,1266-1284).
gcacgccaggccttcttta

SEQ ID NO: 215619 - DNA, 19 bp, Homo sapiens
  siRNA target sequence for CPT1B (NM_004377.2,1445-1463).
caaatccttcactctcatt

SEQ ID NO: 215620 - DNA, 19 bp, Homo sapiens
  siRNA target sequence for CPT1B (NM_004377.2,1705-1723).
cagacgacgtggagttgta

SEQ ID NO: 215621 - DNA, 19 bp, Homo sapiens
  siRNA target sequence for CPT1B (NM_004377.2,1707-1725).
gacgacgtggagttgtact

SEQ ID NO: 215622 - DNA, 19 bp, Homo sapiens
  siRNA target sequence for CPT1B (NM_004377.2,1855-1873).
cctcaatgaccagaatgtt

SEQ ID NO: 215623 - DNA, 19 bp, Homo sapiens
  siRNA target sequence for CPT1B (NM_004377.2,1943-1961).
ggaggggtcccacacaaaa

SEQ ID NO: 215624 - DNA, 19 bp, Homo sapiens
  siRNA target sequence for CPT1B (NM_004377.2,1946-1964).
ggggtcccacacaaaagca

SEQ ID NO: 215625 - DNA, 19 bp, Homo sapiens
  siRNA target sequence for CPT1B (NM_004377.2,2265-2283).
ggcgagaacacgatcttct

SEQ ID NO: 215626 - DNA, 19 bp, Homo sapiens
  siRNA target sequence for CPT1B (NM_004377.2,2266-2284).
gcgagaacacgatcttctt

SEQ ID NO: 215627 - DNA, 19 bp, Homo sapiens
  siRNA target sequence for CPT1B (NM_004377.2,2357-2375).
gctggacattgctgatctt

SEQ ID NO: 215628 - DNA, 19 bp, Homo sapiens
  siRNA target sequence for CPT1B (NM_004377.2,2358-2376).
ctggacattgctgatcttt

SEQ ID NO: 215629 - DNA, 19 bp, Homo sapiens
  siRNA target sequence for CPT2 (NM_000098.1,716-734).
cacagaagcctctcttgaa

SEQ ID NO: 215630 - DNA, 19 bp, Homo sapiens
  siRNA target sequence for CPT2 (NM_000098.1,736-754).
gatggccagttcaggaaaa

SEQ ID NO: 215631 - DNA, 19 bp, Homo sapiens
  siRNA target sequence for CPT2 (NM_000098.1,854-872).
cgggaccctggtttgatat

SEQ ID NO: 215632 - DNA, 19 bp, Homo sapiens
  siRNA target sequence for CPT2 (NM_000098.1,887-905).
gagactccgttgttctgaa

SEQ ID NO: 215633 - DNA, 19 bp, Homo sapiens
  siRNA target sequence for CPT2 (NM_000098.1,898-916).
gttctgaactttaatccat

SEQ ID NO: 215634 - DNA, 19 bp, Homo sapiens
  siRNA target sequence for CPT2 (NM_000098.1,1045-1063).
cacttgaaccctgcaaaaa

SEQ ID NO: 215635 - DNA, 19 bp, Homo sapiens
  siRNA target sequence for CPT2 (NM_000098.1,1047-1065).
cttgaaccctgcaaaaagt

SEQ ID NO: 215636 - DNA, 19 bp, Homo sapiens
  siRNA target sequence for CPT2 (NM_000098.1,1055-1073).
ctgcaaaaagtgacactat

SEQ ID NO: 215637 - DNA, 19 bp, Homo sapiens
  siRNA target sequence for CPT2 (NM_000098.1,1057-1075).
gcaaaaagtgacactatca

SEQ ID NO: 215638 - DNA, 19 bp, Homo sapiens
  siRNA target sequence for CPT2 (NM_000098.1,1202-1220).
ccagtcgggatgaactctt

SEQ ID NO: 215639 - DNA, 19 bp, Homo sapiens
  siRNA target sequence for CPT2 (NM_000098.1,1248-1266).
ggtcctaaggaaaggaaat

SEQ ID NO: 215640 - DNA, 19 bp, Homo sapiens
  siRNA target sequence for CPT2 (NM_000098.1,1324-1342).
caggcacatctgaagtaca

SEQ ID NO: 215641 - DNA, 19 bp, Homo sapiens
  siRNA target sequence for CPT2 (NM_000098.1,1326-1344).
ggcacatctgaagtacatt

SEQ ID NO: 215642 - DNA, 19 bp, Homo sapiens
  siRNA target sequence for CPT2 (NM_000098.1,1522-1540).
gtccacttgtcccacaata

SEQ ID NO: 215643 - DNA, 19 bp, Homo sapiens
  siRNA target sequence for CPT2 (NM_000098.1,1557-1575).
cacaaaccgctggtttgat

SEQ ID NO: 215644 - DNA, 19 bp, Homo sapiens
  siRNA target sequence for CPT2 (NM_000098.1,1559-1577).
caaaccgctggtttgataa

SEQ ID NO: 215645 - DNA, 19 bp, Homo sapiens
  siRNA target sequence for CPT2 (NM_000098.1,1610-1628).
ctactgccgtccactttga

SEQ ID NO: 215646 - DNA, 19 bp, Homo sapiens
  siRNA target sequence for CPT2 (NM_000098.1,1650-1668).
ggcagtgctcagatttttt

SEQ ID NO: 215647 - DNA, 19 bp, Homo sapiens
  siRNA target sequence for CPT2 (NM_000098.1,1742-1760).
ctgtcacggtgcagaaact

SEQ ID NO: 215648 - DNA, 19 bp, Homo sapiens
  siRNA target sequence for CPT2 (NM_000098.1,1744-1762).
gtcacggtgcagaaactca

SEQ ID NO: 215649 - DNA, 19 bp, Homo sapiens
  siRNA target sequence for CPT2 (NM_000098.1,1748-1766).
cggtgcagaaactcaactt

SEQ ID NO: 215650 - DNA, 19 bp, Homo sapiens
  siRNA target sequence for CPT2 (NM_000098.1,1846-1864).
gactgcgtccagtttcaga

SEQ ID NO: 215651 - DNA, 19 bp, Homo sapiens
  siRNA target sequence for CPT2 (NM_000098.1,1982-2000).
gtagcactgccgcattcaa

SEQ ID NO: 215652 - DNA, 19 bp, Homo sapiens
  siRNA target sequence for CPT2 (NM_000098.1,2029-2047).
gcctccgtctatacaaaga

SEQ ID NO: 215653 - DNA, 19 bp, Homo sapiens
  siRNA target sequence for CPT2 (NM_000098.1,2168-2186).
gctttgaccgacacttgtt

SEQ ID NO: 215654 - DNA, 19 bp, Homo sapiens
  siRNA target sequence for CPT2 (NM_000098.1,2249-2267).
catacgggcagataaacca

SEQ ID NO: 215655 - DNA, 19 bp, Homo sapiens
  siRNA target sequence for CPT2 (NM_000098.1,2255-2273).
ggcagataaaccacaatgt

SEQ ID NO: 215656 - DNA, 19 bp, Homo sapiens
  siRNA target sequence for CPT2 (NM_000098.1,2354-2372).
ggtatgctgttcatgacaa

SEQ ID NO: 215657 - DNA, 19 bp, Homo sapiens
  siRNA target sequence for CPT2 (NM_000098.1,2442-2460).
ggccttagaagacatgttt

SEQ ID NO: 215658 - DNA, 19 bp, Homo sapiens
  siRNA target sequence for CPT2 (NM_000098.1,2465-2483).
ccttagaaggcaaatccat

SEQ ID NO: 215659 - DNA, 19 bp, Homo sapiens
  siRNA target sequence for CROT (NM_021151.2,208-226).
caactgaagaacgaacatt

SEQ ID NO: 215660 - DNA, 19 bp, Homo sapiens
  siRNA target sequence for CROT (NM_021151.2,256-274).
ctgttccttcacttgaaga

SEQ ID NO: 215661 - DNA, 19 bp, Homo sapiens
  siRNA target sequence for CROT (NM_021151.2,291-309).
cttgaatcagtgaaaccat

SEQ ID NO: 215662 - DNA, 19 bp, Homo sapiens
  siRNA target sequence for CROT (NM_021151.2,451-469).
cctatctggatgttcgtat

SEQ ID NO: 215663 - DNA, 19 bp, Homo sapiens
  siRNA target sequence for CROT (NM_021151.2,452-470).
ctatctggatgttcgtata

SEQ ID NO: 215664 - DNA, 19 bp, Homo sapiens
  siRNA target sequence for CROT (NM_021151.2,456-474).
ctggatgttcgtataccat

SEQ ID NO: 215665 - DNA, 19 bp, Homo sapiens
  siRNA target sequence for CROT (NM_021151.2,462-480).
gttcgtataccatcacaat

SEQ ID NO: 215666 - DNA, 19 bp, Homo sapiens
  siRNA target sequence for CROT (NM_021151.2,465-483).
cgtataccatcacaattga

SEQ ID NO: 215667 - DNA, 19 bp, Homo sapiens
  siRNA target sequence for CROT (NM_021151.2,466-484).
gtataccatcacaattgaa

SEQ ID NO: 215668 - DNA, 19 bp, Homo sapiens
  siRNA target sequence for CROT (NM_021151.2,471-489).
ccatcacaattgaatgtca

SEQ ID NO: 215669 - DNA, 19 bp, Homo sapiens
  siRNA target sequence for CROT (NM_021151.2,472-490).
catcacaattgaatgtcaa

SEQ ID NO: 215670 - DNA, 19 bp, Homo sapiens
  siRNA target sequence for CROT (NM_021151.2,502-520).
ctgcagctcattttgaaca

SEQ ID NO: 215671 - DNA, 19 bp, Homo sapiens
  siRNA target sequence for CROT (NM_021151.2,536-554).
ggaagggactcaattagaa

SEQ ID NO: 215672 - DNA, 19 bp, Homo sapiens
  siRNA target sequence for CROT (NM_021151.2,570-588).
ctttggcataacttgaact

SEQ ID NO: 215673 - DNA, 19 bp, Homo sapiens
  siRNA target sequence for CROT (NM_021151.2,584-602).
gaactactggcagctatta

SEQ ID NO: 215674 - DNA, 19 bp, Homo sapiens
  siRNA target sequence for CROT (NM_021151.2,587-605).
ctactggcagctattaaga

SEQ ID NO: 215675 - DNA, 19 bp, Homo sapiens
  siRNA target sequence for CROT (NM_021151.2,592-610).
ggcagctattaagaaaaga

SEQ ID NO: 215676 - DNA, 19 bp, Homo sapiens
  siRNA target sequence for CROT (NM_021151.2,593-611).
gcagctattaagaaaagaa

SEQ ID NO: 215677 - DNA, 19 bp, Homo sapiens
  siRNA target sequence for CROT (NM_021151.2,609-627).
gaaaaagtgcctgttcata

SEQ ID NO: 215678 - DNA, 19 bp, Homo sapiens
  siRNA target sequence for CROT (NM_021151.2,633-651).
ggaaatactcctctagata

SEQ ID NO: 215679 - DNA, 19 bp, Homo sapiens
  siRNA target sequence for CROT (NM_021151.2,634-652).
gaaatactcctctagatat

SEQ ID NO: 215680 - DNA, 19 bp, Homo sapiens
  siRNA target sequence for CROT (NM_021151.2,640-658).
ctcctctagatatgaatca

SEQ ID NO: 215681 - DNA, 19 bp, Homo sapiens
  siRNA target sequence for CROT (NM_021151.2,642-660).
cctctagatatgaatcaat

SEQ ID NO: 215682 - DNA, 19 bp, Homo sapiens
  siRNA target sequence for CROT (NM_021151.2,643-661).
ctctagatatgaatcaatt

SEQ ID NO: 215683 - DNA, 19 bp, Homo sapiens
  siRNA target sequence for CROT (NM_021151.2,653-671).
gaatcaattccgaatgcta

SEQ ID NO: 215684 - DNA, 19 bp, Homo sapiens
  siRNA target sequence for CROT (NM_021151.2,703-721).
gagactccattatgaatta

SEQ ID NO: 215685 - DNA, 19 bp, Homo sapiens
  siRNA target sequence for CROT (NM_021151.2,705-723).
gactccattatgaattatt

SEQ ID NO: 215686 - DNA, 19 bp, Homo sapiens
  siRNA target sequence for CROT (NM_021151.2,748-766).
ccccaaaccacattgtagt

SEQ ID NO: 215687 - DNA, 19 bp, Homo sapiens
  siRNA target sequence for CROT (NM_021151.2,770-788).
gtgtcgaggccgagctttt

SEQ ID NO: 215688 - DNA, 19 bp, Homo sapiens
  siRNA target sequence for CROT (NM_021151.2,772-790).
gtcgaggccgagcttttgt

SEQ ID NO: 215689 - DNA, 19 bp, Homo sapiens
  siRNA target sequence for CROT (NM_021151.2,774-792).
cgaggccgagcttttgtct

SEQ ID NO: 215690 - DNA, 19 bp, Homo sapiens
  siRNA target sequence for CROT (NM_021151.2,775-793).
gaggccgagcttttgtctt

SEQ ID NO: 215691 - DNA, 19 bp, Homo sapiens
  siRNA target sequence for CROT (NM_021151.2,778-796).
gccgagcttttgtctttga

SEQ ID NO: 215692 - DNA, 19 bp, Homo sapiens
  siRNA target sequence for CROT (NM_021151.2,841-859).
gacaactgacatatatcca

SEQ ID NO: 215693 - DNA, 19 bp, Homo sapiens
  siRNA target sequence for CROT (NM_021151.2,860-878).
caagaagtgccatagtgaa

SEQ ID NO: 215694 - DNA, 19 bp, Homo sapiens
  siRNA target sequence for CROT (NM_021151.2,888-906).
cctgggattgcagcattaa

SEQ ID NO: 215695 - DNA, 19 bp, Homo sapiens
  siRNA target sequence for CROT (NM_021151.2,891-909).
gggattgcagcattaacta

SEQ ID NO: 215696 - DNA, 19 bp, Homo sapiens
  siRNA target sequence for CROT (NM_021151.2,893-911).
gattgcagcattaactagt

SEQ ID NO: 215697 - DNA, 19 bp, Homo sapiens
  siRNA target sequence for CROT (NM_021151.2,935-953).
ggcacgagaatatctgatt

SEQ ID NO: 215698 - DNA, 19 bp, Homo sapiens
  siRNA target sequence for CROT (NM_021151.2,955-973).
gtcttgatccagagaactt

SEQ ID NO: 215699 - DNA, 19 bp, Homo sapiens
  siRNA target sequence for CROT (NM_021151.2,964-982).
cagagaacttggctttgtt

SEQ ID NO: 215700 - DNA, 19 bp, Homo sapiens
  siRNA target sequence for CROT (NM_021151.2,968-986).
gaacttggctttgttagaa

SEQ ID NO: 215701 - DNA, 19 bp, Homo sapiens
  siRNA target sequence for CROT (NM_021151.2,1023-1041).
gatagcagtccacatgtaa

SEQ ID NO: 215702 - DNA, 19 bp, Homo sapiens
  siRNA target sequence for CROT (NM_021151.2,1038-1056).
gtaacaccagaggattatt

SEQ ID NO: 215703 - DNA, 19 bp, Homo sapiens
  siRNA target sequence for CROT (NM_021151.2,1095-1113).
gtacgctggggtgacaaat

SEQ ID NO: 215704 - DNA, 19 bp, Homo sapiens
  siRNA target sequence for CROT (NM_021151.2,1099-1117).
gctggggtgacaaatccta

SEQ ID NO: 215705 - DNA, 19 bp, Homo sapiens
  siRNA target sequence for CROT (NM_021151.2,1102-1120).
ggggtgacaaatcctataa

SEQ ID NO: 215706 - DNA, 19 bp, Homo sapiens
  siRNA target sequence for CROT (NM_021151.2,1107-1125).
gacaaatcctataacttga

SEQ ID NO: 215707 - DNA, 19 bp, Homo sapiens
  siRNA target sequence for CROT (NM_021151.2,1140-1158).
ggagtatttggctgtaatt

SEQ ID NO: 215708 - DNA, 19 bp, Homo sapiens
  siRNA target sequence for CROT (NM_021151.2,1171-1189).
cttttgatgcaatgattat

SEQ ID NO: 215709 - DNA, 19 bp, Homo sapiens
  siRNA target sequence for CROT (NM_021151.2,1252-1270).
cagagaaggtacgagatat

SEQ ID NO: 215710 - DNA, 19 bp, Homo sapiens
  siRNA target sequence for CROT (NM_021151.2,1256-1274).
gaaggtacgagatatacca

SEQ ID NO: 215711 - DNA, 19 bp, Homo sapiens
  siRNA target sequence for CROT (NM_021151.2,1278-1296).
ccagaagagctcattttca

SEQ ID NO: 215712 - DNA, 19 bp, Homo sapiens
  siRNA target sequence for CROT (NM_021151.2,1279-1297).
cagaagagctcattttcat

SEQ ID NO: 215713 - DNA, 19 bp, Homo sapiens
  siRNA target sequence for CROT (NM_021151.2,1351-1369).
gggaggcatctgatctaca

SEQ ID NO: 215714 - DNA, 19 bp, Homo sapiens
  siRNA target sequence for CROT (NM_021151.2,1355-1373).
ggcatctgatctacagatt

SEQ ID NO: 215715 - DNA, 19 bp, Homo sapiens
  siRNA target sequence for CROT (NM_021151.2,1374-1392).
gcggcttatgcctttacat

SEQ ID NO: 215716 - DNA, 19 bp, Homo sapiens
  siRNA target sequence for CROT (NM_021151.2,1376-1394).
ggcttatgcctttacatct

SEQ ID NO: 215717 - DNA, 19 bp, Homo sapiens
  siRNA target sequence for CROT (NM_021151.2,1390-1408).
catcttttggcaaaaagct

SEQ ID NO: 215718 - DNA, 19 bp, Homo sapiens
  siRNA target sequence for CROT (NM_021151.2,1425-1443).
cttcacccggatacgttta

SEQ ID NO: 215719 - DNA, 19 bp, Homo sapiens
  siRNA target sequence for CROT (NM_021151.2,1455-1473).
cttcagctggcctattaca

SEQ ID NO: 215720 - DNA, 19 bp, Homo sapiens
  siRNA target sequence for CROT (NM_021151.2,1509-1527).
gctatgacaagacattttt

SEQ ID NO: 215721 - DNA, 19 bp, Homo sapiens
  siRNA target sequence for CROT (NM_021151.2,1550-1568).
gcgatcatgcacagttgaa

SEQ ID NO: 215722 - DNA, 19 bp, Homo sapiens
  siRNA target sequence for CROT (NM_021151.2,1614-1632).
cgtgagcggcagcaaaaga

SEQ ID NO: 215723 - DNA, 19 bp, Homo sapiens
  siRNA target sequence for CROT (NM_021151.2,1617-1635).
gagcggcagcaaaagatgt

SEQ ID NO: 215724 - DNA, 19 bp, Homo sapiens
  siRNA target sequence for CROT (NM_021151.2,1619-1637).
gcggcagcaaaagatgtta

SEQ ID NO: 215725 - DNA, 19 bp, Homo sapiens
  siRNA target sequence for CROT (NM_021151.2,1675-1693).
gttcagctggaaaaggatt

SEQ ID NO: 215726 - DNA, 19 bp, Homo sapiens
  siRNA target sequence for CROT (NM_021151.2,1813-1831).
caagtctggttggctattt

SEQ ID NO: 215727 - DNA, 19 bp, Homo sapiens
  siRNA target sequence for CROT (NM_021151.2,1854-1872).
cccatggtacacaatggtt

SEQ ID NO: 215728 - DNA, 19 bp, Homo sapiens
  siRNA target sequence for CROT (NM_021151.2,1856-1874).
catggtacacaatggttat

SEQ ID NO: 215729 - DNA, 19 bp, Homo sapiens
  siRNA target sequence for CROT (NM_021151.2,1943-1961).
gactgatgcggaaaagcta

SEQ ID NO: 215730 - DNA, 19 bp, Homo sapiens
  siRNA target sequence for CROT (NM_021151.2,1958-1976).
gctagttcagctgactttt

SEQ ID NO: 215731 - DNA, 19 bp, Homo sapiens
  siRNA target sequence for CROT (NM_021151.2,1959-1977).
ctagttcagctgacttttt

SEQ ID NO: 215732 - DNA, 19 bp, Homo sapiens
  siRNA target sequence for CROT (NM_021151.2,2000-2018).
gctgatgaactctactcat

SEQ ID NO: 215733 - DNA, 19 bp, Homo sapiens
  siRNA target sequence for SOAT1 (NM_003101.3,1494-1512).
ccctagagacacctagtaa

SEQ ID NO: 215734 - DNA, 19 bp, Homo sapiens
  siRNA target sequence for SOAT1 (NM_003101.3,1495-1513).
cctagagacacctagtaat

SEQ ID NO: 215735 - DNA, 19 bp, Homo sapiens
  siRNA target sequence for SOAT1 (NM_003101.3,1509-1527).
gtaatggtcgaattgacat

SEQ ID NO: 215736 - DNA, 19 bp, Homo sapiens
  siRNA target sequence for SOAT1 (NM_003101.3,1515-1533).
gtcgaattgacataaaaca

SEQ ID NO: 215737 - DNA, 19 bp, Homo sapiens
  siRNA target sequence for SOAT1 (NM_003101.3,1517-1535).
cgaattgacataaaacagt

SEQ ID NO: 215738 - DNA, 19 bp, Homo sapiens
  siRNA target sequence for SOAT1 (NM_003101.3,1518-1536).
gaattgacataaaacagtt

SEQ ID NO: 215739 - DNA, 19 bp, Homo sapiens
  siRNA target sequence for SOAT1 (NM_003101.3,1532-1550).
cagttgatagcaaagaaga

SEQ ID NO: 215740 - DNA, 19 bp, Homo sapiens
  siRNA target sequence for SOAT1 (NM_003101.3,1604-1622).
ggcagtcactttgatgatt

SEQ ID NO: 215741 - DNA, 19 bp, Homo sapiens
  siRNA target sequence for SOAT1 (NM_003101.3,1672-1690).
cgctctcacaaccttttct

SEQ ID NO: 215742 - DNA, 19 bp, Homo sapiens
  siRNA target sequence for SOAT1 (NM_003101.3,1740-1758).
ctccagaacaaggaaagat

SEQ ID NO: 215743 - DNA, 19 bp, Homo sapiens
  siRNA target sequence for SOAT1 (NM_003101.3,1771-1789).
gcgctctctcttagatgaa

SEQ ID NO: 215744 - DNA, 19 bp, Homo sapiens
  siRNA target sequence for SOAT1 (NM_003101.3,1796-1814).
gaagtggaccacatcagaa

SEQ ID NO: 215745 - DNA, 19 bp, Homo sapiens
  siRNA target sequence for SOAT1 (NM_003101.3,1804-1822).
ccacatcagaacaatatat

SEQ ID NO: 215746 - DNA, 19 bp, Homo sapiens
  siRNA target sequence for SOAT1 (NM_003101.3,1858-1876).
cagcacacttgtagtagat

SEQ ID NO: 215747 - DNA, 19 bp, Homo sapiens
  siRNA target sequence for SOAT1 (NM_003101.3,1860-1878).
gcacacttgtagtagatta

SEQ ID NO: 215748 - DNA, 19 bp, Homo sapiens
  siRNA target sequence for SOAT1 (NM_003101.3,1863-1881).
cacttgtagtagattacat

SEQ ID NO: 215749 - DNA, 19 bp, Homo sapiens
  siRNA target sequence for SOAT1 (NM_003101.3,1911-1929).
gcctcctgtcttatgcttt

SEQ ID NO: 215750 - DNA, 19 bp, Homo sapiens
  siRNA target sequence for SOAT1 (NM_003101.3,1953-1971).
ggacctggtggatcatgtt

SEQ ID NO: 215751 - DNA, 19 bp, Homo sapiens
  siRNA target sequence for SOAT1 (NM_003101.3,2023-2041).
ctatagcaagagttctcat

SEQ ID NO: 215752 - DNA, 19 bp, Homo sapiens
  siRNA target sequence for SOAT1 (NM_003101.3,2115-2133).
catatgttgtgttagcata

SEQ ID NO: 215753 - DNA, 19 bp, Homo sapiens
  siRNA target sequence for SOAT1 (NM_003101.3,2148-2166).
cttcccggttcatcattat

SEQ ID NO: 215754 - DNA, 19 bp, Homo sapiens
  siRNA target sequence for SOAT1 (NM_003101.3,2151-2169).
cccggttcatcattatatt

SEQ ID NO: 215755 - DNA, 19 bp, Homo sapiens
  siRNA target sequence for SOAT1 (NM_003101.3,2154-2172).
ggttcatcattatattcga

SEQ ID NO: 215756 - DNA, 19 bp, Homo sapiens
  siRNA target sequence for SOAT1 (NM_003101.3,2170-2188).
cgagcagattcgttttgta

SEQ ID NO: 215757 - DNA, 19 bp, Homo sapiens
  siRNA target sequence for SOAT1 (NM_003101.3,2171-2189).
gagcagattcgttttgtaa

SEQ ID NO: 215758 - DNA, 19 bp, Homo sapiens
  siRNA target sequence for SOAT1 (NM_003101.3,2174-2192).
cagattcgttttgtaatga

SEQ ID NO: 215759 - DNA, 19 bp, Homo sapiens
  siRNA target sequence for SOAT1 (NM_003101.3,2218-2236).
cgtgcctcgggtactaaat

SEQ ID NO: 215760 - DNA, 19 bp, Homo sapiens
  siRNA target sequence for SOAT1 (NM_003101.3,2219-2237).
gtgcctcgggtactaaatt

SEQ ID NO: 215761 - DNA, 19 bp, Homo sapiens
  siRNA target sequence for SOAT1 (NM_003101.3,2221-2239).
gcctcgggtactaaattca

SEQ ID NO: 215762 - DNA, 19 bp, Homo sapiens
  siRNA target sequence for SOAT1 (NM_003101.3,2276-2294).
gtcaaccagtatttgtact

SEQ ID NO: 215763 - DNA, 19 bp, Homo sapiens
  siRNA target sequence for SOAT1 (NM_003101.3,2335-2353).
caggaatcccactgtaaga

SEQ ID NO: 215764 - DNA, 19 bp, Homo sapiens
  siRNA target sequence for SOAT1 (NM_003101.3,2355-2373).
ggggttatgtcgctatgaa

SEQ ID NO: 215765 - DNA, 19 bp, Homo sapiens
  siRNA target sequence for SOAT1 (NM_003101.3,2357-2375).
ggttatgtcgctatgaagt

SEQ ID NO: 215766 - DNA, 19 bp, Homo sapiens
  siRNA target sequence for SOAT1 (NM_003101.3,2358-2376).
gttatgtcgctatgaagtt

SEQ ID NO: 215767 - DNA, 19 bp, Homo sapiens
  siRNA target sequence for SOAT1 (NM_003101.3,2390-2408).
ggttgctttttctatgtgt

SEQ ID NO: 215768 - DNA, 19 bp, Homo sapiens
  siRNA target sequence for SOAT1 (NM_003101.3,2401-2419).
ctatgtgtactacatcttt

SEQ ID NO: 215769 - DNA, 19 bp, Homo sapiens
  siRNA target sequence for SOAT1 (NM_003101.3,2425-2443).
gctttgtgcccccttgttt

SEQ ID NO: 215770 - DNA, 19 bp, Homo sapiens
  siRNA target sequence for SOAT1 (NM_003101.3,2433-2451).
cccccttgtttcggaatat

SEQ ID NO: 215771 - DNA, 19 bp, Homo sapiens
  siRNA target sequence for SOAT1 (NM_003101.3,2477-2495).
gttctggtcctatgtgtat

SEQ ID NO: 215772 - DNA, 19 bp, Homo sapiens
  siRNA target sequence for SOAT1 (NM_003101.3,2483-2501).
gtcctatgtgtatttaact

SEQ ID NO: 215773 - DNA, 19 bp, Homo sapiens
  siRNA target sequence for SOAT1 (NM_003101.3,2511-2529).
caggtgtgctgattctctt

SEQ ID NO: 215774 - DNA, 19 bp, Homo sapiens
  siRNA target sequence for SOAT1 (NM_003101.3,2626-2644).
cacgtcatactccaactat

SEQ ID NO: 215775 - DNA, 19 bp, Homo sapiens
  siRNA target sequence for SOAT1 (NM_003101.3,2628-2646).
cgtcatactccaactatta

SEQ ID NO: 215776 - DNA, 19 bp, Homo sapiens
  siRNA target sequence for SOAT1 (NM_003101.3,2629-2647).
gtcatactccaactattat

SEQ ID NO: 215777 - DNA, 19 bp, Homo sapiens
  siRNA target sequence for SOAT1 (NM_003101.3,2666-2684).
gtccatgactggctatatt

SEQ ID NO: 215778 - DNA, 19 bp, Homo sapiens
  siRNA target sequence for SOAT1 (NM_003101.3,2669-2687).
catgactggctatattact

SEQ ID NO: 215779 - DNA, 19 bp, Homo sapiens
  siRNA target sequence for SOAT1 (NM_003101.3,2676-2694).
ggctatattactatgctta

SEQ ID NO: 215780 - DNA, 19 bp, Homo sapiens
  siRNA target sequence for SOAT1 (NM_003101.3,2690-2708).
gcttacaaggactttctct

SEQ ID NO: 215781 - DNA, 19 bp, Homo sapiens
  siRNA target sequence for SOAT1 (NM_003101.3,2763-2781).
ctgctgtagtacacgaata

SEQ ID NO: 215782 - DNA, 19 bp, Homo sapiens
  siRNA target sequence for SOAT1 (NM_003101.3,2844-2862).
gaatggctttcaacttcat

SEQ ID NO: 215783 - DNA, 19 bp, Homo sapiens
  siRNA target sequence for SOAT1 (NM_003101.3,2877-2895).
ggaaaaagccgatttggaa

SEQ ID NO: 215784 - DNA, 19 bp, Homo sapiens
  siRNA target sequence for SOAT1 (NM_003101.3,2878-2896).
gaaaaagccgatttggaat

SEQ ID NO: 215785 - DNA, 19 bp, Homo sapiens
  siRNA target sequence for SOAT1 (NM_003101.3,2931-2949).
gagtcttactctgctttta

SEQ ID NO: 215786 - DNA, 19 bp, Homo sapiens
  siRNA target sequence for SOAT1 (NM_003101.3,2972-2990).
cggcactgtcctctgaaaa

SEQ ID NO: 215787 - DNA, 19 bp, Homo sapiens
  siRNA target sequence for SOAT2 (NM_003578.2,251-269).
ccatgcgggaggctataca

SEQ ID NO: 215788 - DNA, 19 bp, Homo sapiens
  siRNA target sequence for SOAT2 (NM_003578.2,252-270).
catgcgggaggctatacaa

SEQ ID NO: 215789 - DNA, 19 bp, Homo sapiens
  siRNA target sequence for SOAT2 (NM_003578.2,257-275).
gggaggctatacaatccta

SEQ ID NO: 215790 - DNA, 19 bp, Homo sapiens
  siRNA target sequence for SOAT2 (NM_003578.2,910-928).
cctaggacgccctatgtca

SEQ ID NO: 215791 - DNA, 19 bp, Homo sapiens
  siRNA target sequence for SOAT2 (NM_003578.2,920-938).
cctatgtcaggtggaatta

SEQ ID NO: 215792 - DNA, 19 bp, Homo sapiens
  siRNA target sequence for SOAT2 (NM_003578.2,921-939).
ctatgtcaggtggaattat

SEQ ID NO: 215793 - DNA, 19 bp, Homo sapiens
  siRNA target sequence for SOAT2 (NM_003578.2,1082-1100).
cgttgccaggcatcttcat

SEQ ID NO: 215794 - DNA, 19 bp, Homo sapiens
  siRNA target sequence for SOAT2 (NM_003578.2,1152-1170).
cgagatgctacgatttgga

SEQ ID NO: 215795 - DNA, 19 bp, Homo sapiens
  siRNA target sequence for SOAT2 (NM_003578.2,1205-1223).
cgtccttctccaactacta

SEQ ID NO: 215796 - DNA, 19 bp, Homo sapiens
  siRNA target sequence for SOAT2 (NM_003578.2,1340-1358).
ccgcagtggcccatgagta

SEQ ID NO: 215797 - DNA, 19 bp, Homo sapiens
  siRNA target sequence for SOAT2 (NM_003578.2,1348-1366).
gcccatgagtatatcttct

SEQ ID NO: 215798 - DNA, 19 bp, Homo sapiens
  siRNA target sequence for SOAT2 (NM_003578.2,1371-1389).
cgtcctggggttcttctat

SEQ ID NO: 215799 - DNA, 19 bp, Homo sapiens
  siRNA target sequence for SOAT2 (NM_003578.2,1390-1408).
cccgtcatgctgatactct

SEQ ID NO: 215800 - DNA, 19 bp, Homo sapiens
  siRNA target sequence for SOAT2 (NM_003578.2,1391-1409).
ccgtcatgctgatactctt

SEQ ID NO: 215801 - DNA, 19 bp, Homo sapiens
  siRNA target sequence for SOAT2 (NM_003578.2,1401-1419).
gatactcttccttgtcatt

SEQ ID NO: 215802 - DNA, 19 bp, Homo sapiens
  siRNA target sequence for SOAT2 (NM_003578.2,1423-1441).
ggaatgttgaacttcatga

SEQ ID NO: 215803 - DNA, 19 bp, Homo sapiens
  siRNA target sequence for LCAT (NM_000229.1,238-256).
gcaagacagaggacttctt

SEQ ID NO: 215804 - DNA, 19 bp, Homo sapiens
  siRNA target sequence for LCAT (NM_000229.1,297-315).
gtagactgctggatcgata

SEQ ID NO: 215805 - DNA, 19 bp, Homo sapiens
  siRNA target sequence for LCAT (NM_000229.1,300-318).
gactgctggatcgataaca

SEQ ID NO: 215806 - DNA, 19 bp, Homo sapiens
  siRNA target sequence for LCAT (NM_000229.1,458-476).
gcagaacctggtcaacaat

SEQ ID NO: 215807 - DNA, 19 bp, Homo sapiens
  siRNA target sequence for LCAT (NM_000229.1,625-643).
gcctcggctgtctacactt

SEQ ID NO: 215808 - DNA, 19 bp, Homo sapiens
  siRNA target sequence for LCAT (NM_000229.1,673-691).
cctggaaggaccgctttat

SEQ ID NO: 215809 - DNA, 19 bp, Homo sapiens
  siRNA target sequence for LCAT (NM_000229.1,676-694).
ggaaggaccgctttattga

SEQ ID NO: 215810 - DNA, 19 bp, Homo sapiens
  siRNA target sequence for LCAT (NM_000229.1,677-695).
gaaggaccgctttattgat

SEQ ID NO: 215811 - DNA, 19 bp, Homo sapiens
  siRNA target sequence for LCAT (NM_000229.1,867-885).
gaccacgtgttcatttcca

SEQ ID NO: 215812 - DNA, 19 bp, Homo sapiens
  siRNA target sequence for LCAT (NM_000229.1,1000-1018).
cacctggtgtggaagtata

SEQ ID NO: 215813 - DNA, 19 bp, Homo sapiens
  siRNA target sequence for LCAT (NM_000229.1,1002-1020).
cctggtgtggaagtatact

SEQ ID NO: 215814 - DNA, 19 bp, Homo sapiens
  siRNA target sequence for LCAT (NM_000229.1,1008-1026).
gtggaagtatactgtcttt

SEQ ID NO: 215815 - DNA, 19 bp, Homo sapiens
  siRNA target sequence for LCAT (NM_000229.1,1204-1222).
ggatacagcatctcaacat

SEQ ID NO: 215816 - DNA, 19 bp, Homo sapiens
  siRNA target sequence for KIAA1560 (NM_020918.2,216-234).
cccttggtacaatagatgt

SEQ ID NO: 215817 - DNA, 19 bp, Homo sapiens
  siRNA target sequence for KIAA1560 (NM_020918.2,217-235).
ccttggtacaatagatgtt

SEQ ID NO: 215818 - DNA, 19 bp, Homo sapiens
  siRNA target sequence for KIAA1560 (NM_020918.2,218-236).
cttggtacaatagatgttt

SEQ ID NO: 215819 - DNA, 19 bp, Homo sapiens
  siRNA target sequence for KIAA1560 (NM_020918.2,221-239).
ggtacaatagatgtttctt

SEQ ID NO: 215820 - DNA, 19 bp, Homo sapiens
  siRNA target sequence for KIAA1560 (NM_020918.2,222-240).
gtacaatagatgtttctta

SEQ ID NO: 215821 - DNA, 19 bp, Homo sapiens
  siRNA target sequence for KIAA1560 (NM_020918.2,242-260).
ctgccacattcatcagaat

SEQ ID NO: 215822 - DNA, 19 bp, Homo sapiens
  siRNA target sequence for KIAA1560 (NM_020918.2,454-472).
gggtttgcggaatgttatt

SEQ ID NO: 215823 - DNA, 19 bp, Homo sapiens
  siRNA target sequence for KIAA1560 (NM_020918.2,456-474).
gtttgcggaatgttattta

SEQ ID NO: 215824 - DNA, 19 bp, Homo sapiens
  siRNA target sequence for KIAA1560 (NM_020918.2,509-527).
cttgcaagacgcctttctt

SEQ ID NO: 215825 - DNA, 19 bp, Homo sapiens
  siRNA target sequence for KIAA1560 (NM_020918.2,595-613).
gctgaacagcagtagagta

SEQ ID NO: 215826 - DNA, 19 bp, Homo sapiens
  siRNA target sequence for KIAA1560 (NM_020918.2,660-678).
ctgcccagcagcaatcaaa

SEQ ID NO: 215827 - DNA, 19 bp, Homo sapiens
  siRNA target sequence for KIAA1560 (NM_020918.2,671-689).
caatcaaaagccgttaaca

SEQ ID NO: 215828 - DNA, 19 bp, Homo sapiens
  siRNA target sequence for KIAA1560 (NM_020918.2,675-693).
caaaagccgttaacaaagt

SEQ ID NO: 215829 - DNA, 19 bp, Homo sapiens
  siRNA target sequence for KIAA1560 (NM_020918.2,735-753).
ctgtctcaccggcaatgat

SEQ ID NO: 215830 - DNA, 19 bp, Homo sapiens
  siRNA target sequence for KIAA1560 (NM_020918.2,737-755).
gtctcaccggcaatgatca

SEQ ID NO: 215831 - DNA, 19 bp, Homo sapiens
  siRNA target sequence for KIAA1560 (NM_020918.2,768-786).
gggtgctgctaaaactgtt

SEQ ID NO: 215832 - DNA, 19 bp, Homo sapiens
  siRNA target sequence for KIAA1560 (NM_020918.2,821-839).
ggtcaacttgagatggtta

SEQ ID NO: 215833 - DNA, 19 bp, Homo sapiens
  siRNA target sequence for KIAA1560 (NM_020918.2,842-860).
gctgcaactgagacgaatt

SEQ ID NO: 215834 - DNA, 19 bp, Homo sapiens
  siRNA target sequence for KIAA1560 (NM_020918.2,843-861).
ctgcaactgagacgaattt

SEQ ID NO: 215835 - DNA, 19 bp, Homo sapiens
  siRNA target sequence for KIAA1560 (NM_020918.2,855-873).
cgaatttgccgcttctgtt

SEQ ID NO: 215836 - DNA, 19 bp, Homo sapiens
  siRNA target sequence for KIAA1560 (NM_020918.2,856-874).
gaatttgccgcttctgttt

SEQ ID NO: 215837 - DNA, 19 bp, Homo sapiens
  siRNA target sequence for KIAA1560 (NM_020918.2,869-887).
ctgtttctaccagttcata

SEQ ID NO: 215838 - DNA, 19 bp, Homo sapiens
  siRNA target sequence for KIAA1560 (NM_020918.2,884-902).
catagatcccatattgact

SEQ ID NO: 215839 - DNA, 19 bp, Homo sapiens
  siRNA target sequence for KIAA1560 (NM_020918.2,957-975).
cttcaggcaataatctcaa

SEQ ID NO: 215840 - DNA, 19 bp, Homo sapiens
  siRNA target sequence for KIAA1560 (NM_020918.2,971-989).
ctcaacatcccaatcttca

SEQ ID NO: 215841 - DNA, 19 bp, Homo sapiens
  siRNA target sequence for KIAA1560 (NM_020918.2,990-1008).
gtaccttgatccataagct

SEQ ID NO: 215842 - DNA, 19 bp, Homo sapiens
  siRNA target sequence for KIAA1560 (NM_020918.2,1025-1043).
cgacgaaggctcgatgaaa

SEQ ID NO: 215843 - DNA, 19 bp, Homo sapiens
  siRNA target sequence for KIAA1560 (NM_020918.2,1053-1071).
gacggaaagatgttctcta

SEQ ID NO: 215844 - DNA, 19 bp, Homo sapiens
  siRNA target sequence for KIAA1560 (NM_020918.2,1055-1073).
cggaaagatgttctctata

SEQ ID NO: 215845 - DNA, 19 bp, Homo sapiens
  siRNA target sequence for KIAA1560 (NM_020918.2,1081-1099).
gctccatgggcatatagtt

SEQ ID NO: 215846 - DNA, 19 bp, Homo sapiens
  siRNA target sequence for KIAA1560 (NM_020918.2,1084-1102).
ccatgggcatatagttgaa

SEQ ID NO: 215847 - DNA, 19 bp, Homo sapiens
  siRNA target sequence for KIAA1560 (NM_020918.2,1085-1103).
catgggcatatagttgaat

SEQ ID NO: 215848 - DNA, 19 bp, Homo sapiens
  siRNA target sequence for KIAA1560 (NM_020918.2,1148-1166).
cgttctaggagtggaaaaa

SEQ ID NO: 215849 - DNA, 19 bp, Homo sapiens
  siRNA target sequence for KIAA1560 (NM_020918.2,1173-1191).
gtgctcgggcaggactttt

SEQ ID NO: 215850 - DNA, 19 bp, Homo sapiens
  siRNA target sequence for KIAA1560 (NM_020918.2,1175-1193).
gctcgggcaggacttttgt

SEQ ID NO: 215851 - DNA, 19 bp, Homo sapiens
  siRNA target sequence for KIAA1560 (NM_020918.2,1295-1313).
gaacaactgggcaaaccta

SEQ ID NO: 215852 - DNA, 19 bp, Homo sapiens
  siRNA target sequence for KIAA1560 (NM_020918.2,1335-1353).
gtgtagcaagaggtgttat

SEQ ID NO: 215853 - DNA, 19 bp, Homo sapiens
  siRNA target sequence for KIAA1560 (NM_020918.2,1337-1355).
gtagcaagaggtgttatta

SEQ ID NO: 215854 - DNA, 19 bp, Homo sapiens
  siRNA target sequence for KIAA1560 (NM_020918.2,1340-1358).
gcaagaggtgttattagaa

SEQ ID NO: 215855 - DNA, 19 bp, Homo sapiens
  siRNA target sequence for KIAA1560 (NM_020918.2,1341-1359).
caagaggtgttattagaat

SEQ ID NO: 215856 - DNA, 19 bp, Homo sapiens
  siRNA target sequence for KIAA1560 (NM_020918.2,1344-1362).
gaggtgttattagaatgtt

SEQ ID NO: 215857 - DNA, 19 bp, Homo sapiens
  siRNA target sequence for KIAA1560 (NM_020918.2,1349-1367).
gttattagaatgttacgaa

SEQ ID NO: 215858 - DNA, 19 bp, Homo sapiens
  siRNA target sequence for KIAA1560 (NM_020918.2,1377-1395).
gttgtgtccgagtggattt

SEQ ID NO: 215859 - DNA, 19 bp, Homo sapiens
  siRNA target sequence for KIAA1560 (NM_020918.2,1397-1415).
gcacagccattttccttaa

SEQ ID NO: 215860 - DNA, 19 bp, Homo sapiens
  siRNA target sequence for KIAA1560 (NM_020918.2,1465-1483).
cctggagcaagcgttgtta

SEQ ID NO: 215861 - DNA, 19 bp, Homo sapiens
  siRNA target sequence for KIAA1560 (NM_020918.2,1476-1494).
cgttgttaccagctatact

SEQ ID NO: 215862 - DNA, 19 bp, Homo sapiens
  siRNA target sequence for KIAA1560 (NM_020918.2,1526-1544).
ggtagagacacgtccatta

SEQ ID NO: 215863 - DNA, 19 bp, Homo sapiens
  siRNA target sequence for KIAA1560 (NM_020918.2,1527-1545).
gtagagacacgtccattaa

SEQ ID NO: 215864 - DNA, 19 bp, Homo sapiens
  siRNA target sequence for KIAA1560 (NM_020918.2,1530-1548).
gagacacgtccattaatga

SEQ ID NO: 215865 - DNA, 19 bp, Homo sapiens
  siRNA target sequence for KIAA1560 (NM_020918.2,1532-1550).
gacacgtccattaatgagt

SEQ ID NO: 215866 - DNA, 19 bp, Homo sapiens
  siRNA target sequence for KIAA1560 (NM_020918.2,1549-1567).
gtccagaaatgcaacagat

SEQ ID NO: 215867 - DNA, 19 bp, Homo sapiens
  siRNA target sequence for KIAA1560 (NM_020918.2,1573-1591).
cctacgaaggaggttgatt

SEQ ID NO: 215868 - DNA, 19 bp, Homo sapiens
  siRNA target sequence for KIAA1560 (NM_020918.2,1577-1595).
cgaaggaggttgattgcaa

SEQ ID NO: 215869 - DNA, 19 bp, Homo sapiens
  siRNA target sequence for KIAA1560 (NM_020918.2,1581-1599).
ggaggttgattgcaaatct

SEQ ID NO: 215870 - DNA, 19 bp, Homo sapiens
  siRNA target sequence for KIAA1560 (NM_020918.2,1601-1619).
gctgagcatattctattca

SEQ ID NO: 215871 - DNA, 19 bp, Homo sapiens
  siRNA target sequence for KIAA1560 (NM_020918.2,1707-1725).
cattggtcgaagacttctt

SEQ ID NO: 215872 - DNA, 19 bp, Homo sapiens
  siRNA target sequence for KIAA1560 (NM_020918.2,1817-1835).
ggaaattgtgtcacaatca

SEQ ID NO: 215873 - DNA, 19 bp, Homo sapiens
  siRNA target sequence for KIAA1560 (NM_020918.2,1842-1860).
ctagcaggaacgatgagtt

SEQ ID NO: 215874 - DNA, 19 bp, Homo sapiens
  siRNA target sequence for KIAA1560 (NM_020918.2,1845-1863).
gcaggaacgatgagttttt

SEQ ID NO: 215875 - DNA, 19 bp, Homo sapiens
  siRNA target sequence for KIAA1560 (NM_020918.2,1892-1910).
gtcttcgaactcaacttct

SEQ ID NO: 215876 - DNA, 19 bp, Homo sapiens
  siRNA target sequence for KIAA1560 (NM_020918.2,1914-1932).
gcaatggggtacttcatgt

SEQ ID NO: 215877 - DNA, 19 bp, Homo sapiens
  siRNA target sequence for KIAA1560 (NM_020918.2,1919-1937).
ggggtacttcatgtcttta

SEQ ID NO: 215878 - DNA, 19 bp, Homo sapiens
  siRNA target sequence for KIAA1560 (NM_020918.2,1951-1969).
catagcttgcagcctttat

SEQ ID NO: 215879 - DNA, 19 bp, Homo sapiens
  siRNA target sequence for KIAA1560 (NM_020918.2,2096-2114).
ctgccttgccagacatttt

SEQ ID NO: 215880 - DNA, 19 bp, Homo sapiens
  siRNA target sequence for KIAA1560 (NM_020918.2,2116-2134).
ccaagtctgccatgaaaca

SEQ ID NO: 215881 - DNA, 19 bp, Homo sapiens
  siRNA target sequence for KIAA1560 (NM_020918.2,2129-2147).
gaaacagtaggaaagttta

SEQ ID NO: 215882 - DNA, 19 bp, Homo sapiens
  siRNA target sequence for KIAA1560 (NM_020918.2,2133-2151).
cagtaggaaagtttatcca

SEQ ID NO: 215883 - DNA, 19 bp, Homo sapiens
  siRNA target sequence for KIAA1560 (NM_020918.2,2180-2198).
gatgaccaggaagatatca

SEQ ID NO: 215884 - DNA, 19 bp, Homo sapiens
  siRNA target sequence for KIAA1560 (NM_020918.2,2341-2359).
gcagtttatcaccttctta

SEQ ID NO: 215885 - DNA, 19 bp, Homo sapiens
  siRNA target sequence for KIAA1560 (NM_020918.2,2450-2468).
ctgcaaaagttgcacaaat

SEQ ID NO: 215886 - DNA, 19 bp, Homo sapiens
  siRNA target sequence for KIAA1560 (NM_020918.2,2470-2488).
cctaataaccagaacagaa

SEQ ID NO: 215887 - DNA, 19 bp, Homo sapiens
  siRNA target sequence for KIAA1560 (NM_020918.2,2507-2525).
gctgagagtgccacatatt

SEQ ID NO: 215888 - DNA, 19 bp, Homo sapiens
  siRNA target sequence for KIAA1560 (NM_020918.2,2517-2535).
ccacatattgtcttgtgaa

SEQ ID NO: 215889 - DNA, 19 bp, Homo sapiens
  siRNA target sequence for KIAA1560 (NM_020918.2,2592-2610).
gagtgtctgttttagaact

SEQ ID NO: 215890 - DNA, 19 bp, Homo sapiens
  siRNA target sequence for KIAA1560 (NM_020918.2,2628-2646).
ctcaatgcaaccgacaaaa

SEQ ID NO: 215891 - DNA, 19 bp, Homo sapiens
  siRNA target sequence for KIAA1560 (NM_020918.2,2638-2656).
ccgacaaaaacttctagaa

SEQ ID NO: 215892 - DNA, 19 bp, Homo sapiens
  siRNA target sequence for KIAA1560 (NM_020918.2,2639-2657).
cgacaaaaacttctagaat

SEQ ID NO: 215893 - DNA, 19 bp, Homo sapiens
  siRNA target sequence for ACAA1 (NM_001607.2,391-409).
cccgaatcgcccagtttct

SEQ ID NO: 215894 - DNA, 19 bp, Homo sapiens
  siRNA target sequence for ACAA1 (NM_001607.2,393-411).
cgaatcgcccagtttctga

SEQ ID NO: 215895 - DNA, 19 bp, Homo sapiens
  siRNA target sequence for ACAA1 (NM_001607.2,431-449).
gcctttgtccactgtcaat

SEQ ID NO: 215896 - DNA, 19 bp, Homo sapiens
  siRNA target sequence for ACAA1 (NM_001607.2,432-450).
cctttgtccactgtcaata

SEQ ID NO: 215897 - DNA, 19 bp, Homo sapiens
  siRNA target sequence for ACAA1 (NM_001607.2,497-515).
catcagaaatgggtcttat

SEQ ID NO: 215898 - DNA, 19 bp, Homo sapiens
  siRNA target sequence for ACAA1 (NM_001607.2,562-580).
gagggaaccctggaaatat

SEQ ID NO: 215899 - DNA, 19 bp, Homo sapiens
  siRNA target sequence for ACAA1 (NM_001607.2,632-650).
ggggataacctctgagaat

SEQ ID NO: 215900 - DNA, 19 bp, Homo sapiens
  siRNA target sequence for ACAA1 (NM_001607.2,769-787).
ccaccacggtccatgatga

SEQ ID NO: 215901 - DNA, 19 bp, Homo sapiens
  siRNA target sequence for ACAA1 (NM_001607.2,995-1013).
ggtcctgaggtcttatgca

SEQ ID NO: 215902 - DNA, 19 bp, Homo sapiens
  siRNA target sequence for ACAA1 (NM_001607.2,1021-1039).
gggtcccacctgacatcat

SEQ ID NO: 215903 - DNA, 19 bp, Homo sapiens
  siRNA target sequence for ACAA1 (NM_001607.2,1106-1124).
ggacatcttcgagatcaat

SEQ ID NO: 215904 - DNA, 19 bp, Homo sapiens
  siRNA target sequence for ACAA1 (NM_001607.2,1330-1348).
gagccgctgccgtctttga

SEQ ID NO: 215905 - DNA, 19 bp, Homo sapiens
  siRNA target sequence for ACAA1 (NM_001607.2,1332-1350).
gccgctgccgtctttgaat

SEQ ID NO: 215906 - DNA, 19 bp, Homo sapiens
  siRNA target sequence for ACAA1 (NM_001607.2,1333-1351).
ccgctgccgtctttgaata

SEQ ID NO: 215907 - DNA, 19 bp, Homo sapiens
  siRNA target sequence for ACAA2 (NM_006111.1,57-75).
gctccgaggtgtgtttgta

SEQ ID NO: 215908 - DNA, 19 bp, Homo sapiens
  siRNA target sequence for ACAA2 (NM_006111.1,104-122).
cttacggaggccttctgaa

SEQ ID NO: 215909 - DNA, 19 bp, Homo sapiens
  siRNA target sequence for ACAA2 (NM_006111.1,197-215).
cagttgacagtgtgattat

SEQ ID NO: 215910 - DNA, 19 bp, Homo sapiens
  siRNA target sequence for ACAA2 (NM_006111.1,484-502).
gattctttatgggtatcat

SEQ ID NO: 215911 - DNA, 19 bp, Homo sapiens
  siRNA target sequence for ACAA2 (NM_006111.1,1111-1129).
ggaggatctggatcaagaa

SEQ ID NO: 215912 - DNA, 19 bp, Homo sapiens
  siRNA target sequence for ACAA2 (NM_006111.1,1112-1130).
gaggatctggatcaagaat

SEQ ID NO: 215913 - DNA, 19 bp, Homo sapiens
  siRNA target sequence for ACAA2 (NM_006111.1,1138-1156).
cacctggttcacgaattaa

SEQ ID NO: 215914 - DNA, 19 bp, Homo sapiens
  siRNA target sequence for HADHB (NM_000183.1,180-198).
cgttagccaaacccaatat

SEQ ID NO: 215915 - DNA, 19 bp, Homo sapiens
  siRNA target sequence for HADHB (NM_000183.1,181-199).
gttagccaaacccaatata

SEQ ID NO: 215916 - DNA, 19 bp, Homo sapiens
  siRNA target sequence for HADHB (NM_000183.1,185-203).
gccaaacccaatataagga

SEQ ID NO: 215917 - DNA, 19 bp, Homo sapiens
  siRNA target sequence for HADHB (NM_000183.1,187-205).
caaacccaatataaggaat

SEQ ID NO: 215918 - DNA, 19 bp, Homo sapiens
  siRNA target sequence for HADHB (NM_000183.1,221-239).
ggtgttcgcactccatttt

SEQ ID NO: 215919 - DNA, 19 bp, Homo sapiens
  siRNA target sequence for HADHB (NM_000183.1,222-240).
gtgttcgcactccattttt

SEQ ID NO: 215920 - DNA, 19 bp, Homo sapiens
  siRNA target sequence for HADHB (NM_000183.1,446-464).
gtcaccatggcttgtatct

SEQ ID NO: 215921 - DNA, 19 bp, Homo sapiens
  siRNA target sequence for HADHB (NM_000183.1,566-584).
cgtcactcaaggaaaatga

SEQ ID NO: 215922 - DNA, 19 bp, Homo sapiens
  siRNA target sequence for HADHB (NM_000183.1,590-608).
ctgatgcttgatctcaata

SEQ ID NO: 215923 - DNA, 19 bp, Homo sapiens
  siRNA target sequence for HADHB (NM_000183.1,624-642).
gccagcgactgtctttaat

SEQ ID NO: 215924 - DNA, 19 bp, Homo sapiens
  siRNA target sequence for HADHB (NM_000183.1,626-644).
cagcgactgtctttaatct

SEQ ID NO: 215925 - DNA, 19 bp, Homo sapiens
  siRNA target sequence for HADHB (NM_000183.1,628-646).
gcgactgtctttaatctct

SEQ ID NO: 215926 - DNA, 19 bp, Homo sapiens
  siRNA target sequence for HADHB (NM_000183.1,629-647).
cgactgtctttaatctcta

SEQ ID NO: 215927 - DNA, 19 bp, Homo sapiens
  siRNA target sequence for HADHB (NM_000183.1,854-872).
ccaggaaaagatacagtta

SEQ ID NO: 215928 - DNA, 19 bp, Homo sapiens
  siRNA target sequence for HADHB (NM_000183.1,920-938).
ctaaaacctgcattcatca

SEQ ID NO: 215929 - DNA, 19 bp, Homo sapiens
  siRNA target sequence for HADHB (NM_000183.1,986-1004).
ggtgcatctgcaatgttaa

SEQ ID NO: 215930 - DNA, 19 bp, Homo sapiens
  siRNA target sequence for HADHB (NM_000183.1,987-1005).
gtgcatctgcaatgttaat

SEQ ID NO: 215931 - DNA, 19 bp, Homo sapiens
  siRNA target sequence for HADHB (NM_000183.1,990-1008).
catctgcaatgttaatcat

SEQ ID NO: 215932 - DNA, 19 bp, Homo sapiens
  siRNA target sequence for HADHB (NM_000183.1,1075-1093).
gtctcaggatccaaaagat

SEQ ID NO: 215933 - DNA, 19 bp, Homo sapiens
  siRNA target sequence for HADHB (NM_000183.1,1081-1099).
ggatccaaaagatcaacta

SEQ ID NO: 215934 - DNA, 19 bp, Homo sapiens
  siRNA target sequence for HADHB (NM_000183.1,1082-1100).
gatccaaaagatcaactat

SEQ ID NO: 215935 - DNA, 19 bp, Homo sapiens
  siRNA target sequence for HADHB (NM_000183.1,1086-1104).
caaaagatcaactattact

SEQ ID NO: 215936 - DNA, 19 bp, Homo sapiens
  siRNA target sequence for HADHB (NM_000183.1,1103-1121).
cttggaccaacatatgcta

SEQ ID NO: 215937 - DNA, 19 bp, Homo sapiens
  siRNA target sequence for HADHB (NM_000183.1,1145-1163).
ggattgaccatgaatgata

SEQ ID NO: 215938 - DNA, 19 bp, Homo sapiens
  siRNA target sequence for HADHB (NM_000183.1,1150-1168).
gaccatgaatgatattgat

SEQ ID NO: 215939 - DNA, 19 bp, Homo sapiens
  siRNA target sequence for HADHB (NM_000183.1,1156-1174).
gaatgatattgatgctttt

SEQ ID NO: 215940 - DNA, 19 bp, Homo sapiens
  siRNA target sequence for HADHB (NM_000183.1,1230-1248).
ctgattggtttgcagaaaa

SEQ ID NO: 215941 - DNA, 19 bp, Homo sapiens
  siRNA target sequence for HADHB (NM_000183.1,1447-1465).
gatagtggaagcttatcca

SEQ ID NO: 215942 - DNA, 19 bp, Homo sapiens
  siRNA target sequence for SPTLC1 (NM_006415.2,483-501).
gaagaccgcctggcaaaat

SEQ ID NO: 215943 - DNA, 19 bp, Homo sapiens
  siRNA target sequence for SPTLC1 (NM_006415.2,513-531).
gaagaagccattatatact

SEQ ID NO: 215944 - DNA, 19 bp, Homo sapiens
  siRNA target sequence for SPTLC1 (NM_006415.2,521-539).
cattatatactcatatgga

SEQ ID NO: 215945 - DNA, 19 bp, Homo sapiens
  siRNA target sequence for SPTLC1 (NM_006415.2,545-563).
caccatagccagtgctatt

SEQ ID NO: 215946 - DNA, 19 bp, Homo sapiens
  siRNA target sequence for SPTLC1 (NM_006415.2,559-577).
ctattcctgcttactctaa

SEQ ID NO: 215947 - DNA, 19 bp, Homo sapiens
  siRNA target sequence for SPTLC1 (NM_006415.2,609-627).
gcctgctttgctattcaga

SEQ ID NO: 215948 - DNA, 19 bp, Homo sapiens
  siRNA target sequence for SPTLC1 (NM_006415.2,611-629).
ctgctttgctattcagaaa

SEQ ID NO: 215949 - DNA, 19 bp, Homo sapiens
  siRNA target sequence for SPTLC1 (NM_006415.2,619-637).
ctattcagaaaggattaca

SEQ ID NO: 215950 - DNA, 19 bp, Homo sapiens
  siRNA target sequence for SPTLC1 (NM_006415.2,638-656).
ggcatcccgtagtgacatt

SEQ ID NO: 215951 - DNA, 19 bp, Homo sapiens
  siRNA target sequence for SPTLC1 (NM_006415.2,639-657).
gcatcccgtagtgacatta

SEQ ID NO: 215952 - DNA, 19 bp, Homo sapiens
  siRNA target sequence for SPTLC1 (NM_006415.2,640-658).
catcccgtagtgacattaa

SEQ ID NO: 215953 - DNA, 19 bp, Homo sapiens
  siRNA target sequence for SPTLC1 (NM_006415.2,643-661).
cccgtagtgacattaagtt

SEQ ID NO: 215954 - DNA, 19 bp, Homo sapiens
  siRNA target sequence for SPTLC1 (NM_006415.2,644-662).
ccgtagtgacattaagtta

SEQ ID NO: 215955 - DNA, 19 bp, Homo sapiens
  siRNA target sequence for SPTLC1 (NM_006415.2,645-663).
cgtagtgacattaagttat

SEQ ID NO: 215956 - DNA, 19 bp, Homo sapiens
  siRNA target sequence for SPTLC1 (NM_006415.2,686-704).
cctcgagcgactactaaaa

SEQ ID NO: 215957 - DNA, 19 bp, Homo sapiens
  siRNA target sequence for SPTLC1 (NM_006415.2,692-710).
gcgactactaaaagaacaa

SEQ ID NO: 215958 - DNA, 19 bp, Homo sapiens
  siRNA target sequence for SPTLC1 (NM_006415.2,745-763).
gtgtaactcggcgtttcat

SEQ ID NO: 215959 - DNA, 19 bp, Homo sapiens
  siRNA target sequence for SPTLC1 (NM_006415.2,751-769).
ctcggcgtttcattgtagt

SEQ ID NO: 215960 - DNA, 19 bp, Homo sapiens
  siRNA target sequence for SPTLC1 (NM_006415.2,754-772).
ggcgtttcattgtagtaga

SEQ ID NO: 215961 - DNA, 19 bp, Homo sapiens
  siRNA target sequence for SPTLC1 (NM_006415.2,802-820).
gtcctcttccagaattggt

SEQ ID NO: 215962 - DNA, 19 bp, Homo sapiens
  siRNA target sequence for SPTLC1 (NM_006415.2,810-828).
ccagaattggttaagttaa

SEQ ID NO: 215963 - DNA, 19 bp, Homo sapiens
  siRNA target sequence for SPTLC1 (NM_006415.2,857-875).
ggaggaaagcctttcattt

SEQ ID NO: 215964 - DNA, 19 bp, Homo sapiens
  siRNA target sequence for SPTLC1 (NM_006415.2,930-948).
gatgatattgatcttatca

SEQ ID NO: 215965 - DNA, 19 bp, Homo sapiens
  siRNA target sequence for SPTLC1 (NM_006415.2,992-1010).
ctgtggcaggtcttttgta

SEQ ID NO: 215966 - DNA, 19 bp, Homo sapiens
  siRNA target sequence for SPTLC1 (NM_006415.2,994-1012).
gtggcaggtcttttgtaat

SEQ ID NO: 215967 - DNA, 19 bp, Homo sapiens
  siRNA target sequence for SPTLC1 (NM_006415.2,1032-1050).
ggccagggatactgctttt

SEQ ID NO: 215968 - DNA, 19 bp, Homo sapiens
  siRNA target sequence for SPTLC1 (NM_006415.2,1112-1130).
gaatccaggtatttttgca

SEQ ID NO: 215969 - DNA, 19 bp, Homo sapiens
  siRNA target sequence for SPTLC1 (NM_006415.2,1139-1157).
ggaaaagtgcggacaaatt

SEQ ID NO: 215970 - DNA, 19 bp, Homo sapiens
  siRNA target sequence for SPTLC1 (NM_006415.2,1145-1163).
gtgcggacaaattcataaa

SEQ ID NO: 215971 - DNA, 19 bp, Homo sapiens
  siRNA target sequence for SPTLC1 (NM_006415.2,1148-1166).
cggacaaattcataaagct

SEQ ID NO: 215972 - DNA, 19 bp, Homo sapiens
  siRNA target sequence for SPTLC1 (NM_006415.2,1213-1231).
cagcctttcacctacaact

SEQ ID NO: 215973 - DNA, 19 bp, Homo sapiens
  siRNA target sequence for SPTLC1 (NM_006415.2,1246-1264).
ggtctcgcgagcaagatgt

SEQ ID NO: 215974 - DNA, 19 bp, Homo sapiens
  siRNA target sequence for SPTLC1 (NM_006415.2,1275-1293).
caggaaattgtagatcaat

SEQ ID NO: 215975 - DNA, 19 bp, Homo sapiens
  siRNA target sequence for SPTLC1 (NM_006415.2,1284-1302).
gtagatcaatgcatgaaca

SEQ ID NO: 215976 - DNA, 19 bp, Homo sapiens
  siRNA target sequence for SPTLC1 (NM_006415.2,1295-1313).
catgaacagaagtattgca

SEQ ID NO: 215977 - DNA, 19 bp, Homo sapiens
  siRNA target sequence for SPTLC1 (NM_006415.2,1301-1319).
cagaagtattgcattaact

SEQ ID NO: 215978 - DNA, 19 bp, Homo sapiens
  siRNA target sequence for SPTLC1 (NM_006415.2,1303-1321).
gaagtattgcattaactca

SEQ ID NO: 215979 - DNA, 19 bp, Homo sapiens
  siRNA target sequence for SPTLC1 (NM_006415.2,1377-1395).
gtggtcacggtggaacaaa

SEQ ID NO: 215980 - DNA, 19 bp, Homo sapiens
  siRNA target sequence for SPTLC1 (NM_006415.2,1379-1397).
ggtcacggtggaacaaaca

SEQ ID NO: 215981 - DNA, 19 bp, Homo sapiens
  siRNA target sequence for SPTLC2 (NM_004863.2,315-333).
ggccagatccatcatgtta

SEQ ID NO: 215982 - DNA, 19 bp, Homo sapiens
  siRNA target sequence for SPTLC2 (NM_004863.2,358-376).
gaccgtttaatgaagcttt

SEQ ID NO: 215983 - DNA, 19 bp, Homo sapiens
  siRNA target sequence for SPTLC2 (NM_004863.2,431-449).
caccctctttggatatctt

SEQ ID NO: 215984 - DNA, 19 bp, Homo sapiens
  siRNA target sequence for SPTLC2 (NM_004863.2,450-468).
cgagatttcttgaggtatt

SEQ ID NO: 215985 - DNA, 19 bp, Homo sapiens
  siRNA target sequence for SPTLC2 (NM_004863.2,453-471).
gatttcttgaggtattgga

SEQ ID NO: 215986 - DNA, 19 bp, Homo sapiens
  siRNA target sequence for SPTLC2 (NM_004863.2,461-479).
gaggtattggagaattgaa

SEQ ID NO: 215987 - DNA, 19 bp, Homo sapiens
  siRNA target sequence for SPTLC2 (NM_004863.2,482-500).
gtgtcaccatgcaacagaa

SEQ ID NO: 215988 - DNA, 19 bp, Homo sapiens
  siRNA target sequence for SPTLC2 (NM_004863.2,515-533).
ggactttgtgtcattgtat

SEQ ID NO: 215989 - DNA, 19 bp, Homo sapiens
  siRNA target sequence for SPTLC2 (NM_004863.2,616-634).
gagccagggtggacatcat

SEQ ID NO: 215990 - DNA, 19 bp, Homo sapiens
  siRNA target sequence for SPTLC2 (NM_004863.2,671-689).
gtatacagggaatataata

SEQ ID NO: 215991 - DNA, 19 bp, Homo sapiens
  siRNA target sequence for SPTLC2 (NM_004863.2,704-722).
catgggttcctacaactat

SEQ ID NO: 215992 - DNA, 19 bp, Homo sapiens
  siRNA target sequence for SPTLC2 (NM_004863.2,707-725).
gggttcctacaactatctt

SEQ ID NO: 215993 - DNA, 19 bp, Homo sapiens
  siRNA target sequence for SPTLC2 (NM_004863.2,712-730).
cctacaactatcttggatt

SEQ ID NO: 215994 - DNA, 19 bp, Homo sapiens
  siRNA target sequence for SPTLC2 (NM_004863.2,716-734).
caactatcttggatttgca

SEQ ID NO: 215995 - DNA, 19 bp, Homo sapiens
  siRNA target sequence for SPTLC2 (NM_004863.2,737-755).
gaatactggatcatgtcaa

SEQ ID NO: 215996 - DNA, 19 bp, Homo sapiens
  siRNA target sequence for SPTLC2 (NM_004863.2,799-817).
gcagtactcggcaggaaat

SEQ ID NO: 215997 - DNA, 19 bp, Homo sapiens
  siRNA target sequence for SPTLC2 (NM_004863.2,805-823).
ctcggcaggaaattggaaa

SEQ ID NO: 215998 - DNA, 19 bp, Homo sapiens
  siRNA target sequence for SPTLC2 (NM_004863.2,896-914).
catgggatttgcaacgaat

SEQ ID NO: 215999 - DNA, 19 bp, Homo sapiens
  siRNA target sequence for SPTLC2 (NM_004863.2,899-917).
gggatttgcaacgaattca

SEQ ID NO: 216000 - DNA, 19 bp, Homo sapiens
  siRNA target sequence for SPTLC2 (NM_004863.2,900-918).
ggatttgcaacgaattcaa

SEQ ID NO: 216001 - DNA, 19 bp, Homo sapiens
  siRNA target sequence for SPTLC2 (NM_004863.2,901-919).
gatttgcaacgaattcaat

SEQ ID NO: 216002 - DNA, 19 bp, Homo sapiens
  siRNA target sequence for SPTLC2 (NM_004863.2,906-924).
gcaacgaattcaatgaaca

SEQ ID NO: 216003 - DNA, 19 bp, Homo sapiens
  siRNA target sequence for SPTLC2 (NM_004863.2,907-925).
caacgaattcaatgaacat

SEQ ID NO: 216004 - DNA, 19 bp, Homo sapiens
  siRNA target sequence for SPTLC2 (NM_004863.2,1009-1027).
gagcaaccattagaatctt

SEQ ID NO: 216005 - DNA, 19 bp, Homo sapiens
  siRNA target sequence for SPTLC2 (NM_004863.2,1011-1029).
gcaaccattagaatcttca

SEQ ID NO: 216006 - DNA, 19 bp, Homo sapiens
  siRNA target sequence for SPTLC2 (NM_004863.2,1012-1030).
caaccattagaatcttcaa

SEQ ID NO: 216007 - DNA, 19 bp, Homo sapiens
  siRNA target sequence for SPTLC2 (NM_004863.2,1064-1082).
gaaagatgccattgtttat

SEQ ID NO: 216008 - DNA, 19 bp, Homo sapiens
  siRNA target sequence for SPTLC2 (NM_004863.2,1124-1142).
ccttgtggaaggaatatat

SEQ ID NO: 216009 - DNA, 19 bp, Homo sapiens
  siRNA target sequence for SPTLC2 (NM_004863.2,1288-1306).
ccgaggatgtggatgttat

SEQ ID NO: 216010 - DNA, 19 bp, Homo sapiens
  siRNA target sequence for SPTLC2 (NM_004863.2,1312-1330).
gaacgttcacaaagagttt

SEQ ID NO: 216011 - DNA, 19 bp, Homo sapiens
  siRNA target sequence for SPTLC2 (NM_004863.2,1316-1334).
gttcacaaagagttttggt

SEQ ID NO: 216012 - DNA, 19 bp, Homo sapiens
  siRNA target sequence for SPTLC2 (NM_004863.2,1332-1350).
ggtgcttctggaggatata

SEQ ID NO: 216013 - DNA, 19 bp, Homo sapiens
  siRNA target sequence for SPTLC2 (NM_004863.2,1374-1392).
gactacctgcgaacacatt

SEQ ID NO: 216014 - DNA, 19 bp, Homo sapiens
  siRNA target sequence for SPTLC2 (NM_004863.2,1376-1394).
ctacctgcgaacacattct

SEQ ID NO: 216015 - DNA, 19 bp, Homo sapiens
  siRNA target sequence for SPTLC2 (NM_004863.2,1379-1397).
cctgcgaacacattctcat

SEQ ID NO: 216016 - DNA, 19 bp, Homo sapiens
  siRNA target sequence for SPTLC2 (NM_004863.2,1380-1398).
ctgcgaacacattctcata

SEQ ID NO: 216017 - DNA, 19 bp, Homo sapiens
  siRNA target sequence for SPTLC2 (NM_004863.2,1382-1400).
gcgaacacattctcatagt

SEQ ID NO: 216018 - DNA, 19 bp, Homo sapiens
  siRNA target sequence for SPTLC2 (NM_004863.2,1404-1422).
gtgtatgccacgtcattgt

SEQ ID NO: 216019 - DNA, 19 bp, Homo sapiens
  siRNA target sequence for SPTLC2 (NM_004863.2,1406-1424).
gtatgccacgtcattgtca

SEQ ID NO: 216020 - DNA, 19 bp, Homo sapiens
  siRNA target sequence for SPTLC2 (NM_004863.2,1480-1498).
gcaccagccttggtaaaga

SEQ ID NO: 216021 - DNA, 19 bp, Homo sapiens
  siRNA target sequence for SPTLC2 (NM_004863.2,1492-1510).
gtaaagagtgtgtacaaca

SEQ ID NO: 216022 - DNA, 19 bp, Homo sapiens
  siRNA target sequence for SPTLC2 (NM_004863.2,1515-1533).
gctgaaaacaccaggtatt

SEQ ID NO: 216023 - DNA, 19 bp, Homo sapiens
  siRNA target sequence for SPTLC2 (NM_004863.2,1684-1702).
ctgccaccccaattattga

SEQ ID NO: 216024 - DNA, 19 bp, Homo sapiens
  siRNA target sequence for SPTLC2 (NM_004863.2,1686-1704).
gccaccccaattattgagt

SEQ ID NO: 216025 - DNA, 19 bp, Homo sapiens
  siRNA target sequence for SPTLC2 (NM_004863.2,1728-1746).
gcagctcataccaaagaaa

SEQ ID NO: 216026 - DNA, 19 bp, Homo sapiens
  siRNA target sequence for SPTLC2 (NM_004863.2,1759-1777).
ctttaaaggagatagatga

SEQ ID NO: 216027 - DNA, 19 bp, Homo sapiens
  siRNA target sequence for SPTLC2 (NM_004863.2,1847-1865).
cgagacgacgtatgaagaa

SEQ ID NO: 216028 - DNA, 19 bp, Homo sapiens
  siRNA target sequence for SPTLC2 (NM_004863.2,1850-1868).
gacgacgtatgaagaaaca

SEQ ID NO: 216029 - DNA, 19 bp, Homo sapiens
  siRNA target sequence for SPTLC2 (NM_004863.2,1852-1870).
cgacgtatgaagaaacaga

SEQ ID NO: 216030 - DNA, 19 bp, Homo sapiens
  siRNA target sequence for DLST (NM_001933.3,772-790).
gtgcaatgctgacaacttt

SEQ ID NO: 216031 - DNA, 19 bp, Homo sapiens
  siRNA target sequence for DLST (NM_001933.3,941-959).
gattgacgacacaaccaaa

SEQ ID NO: 216032 - DNA, 19 bp, Homo sapiens
  siRNA target sequence for ALAS1 (NM_000688.4,353-371).
cgccgctgcccattcttat

SEQ ID NO: 216033 - DNA, 19 bp, Homo sapiens
  siRNA target sequence for ALAS1 (NM_000688.4,402-420).
caggcaaatctctgttgtt

SEQ ID NO: 216034 - DNA, 19 bp, Homo sapiens
  siRNA target sequence for ALAS1 (NM_000688.4,404-422).
ggcaaatctctgttgttct

SEQ ID NO: 216035 - DNA, 19 bp, Homo sapiens
  siRNA target sequence for ALAS1 (NM_000688.4,405-423).
gcaaatctctgttgttcta

SEQ ID NO: 216036 - DNA, 19 bp, Homo sapiens
  siRNA target sequence for ALAS1 (NM_000688.4,492-510).
cagtacactaccaacagat

SEQ ID NO: 216037 - DNA, 19 bp, Homo sapiens
  siRNA target sequence for ALAS1 (NM_000688.4,641-659).
cagggcactgcaagcaaat

SEQ ID NO: 216038 - DNA, 19 bp, Homo sapiens
  siRNA target sequence for ALAS1 (NM_000688.4,790-808).
cagtgtggttagtgtgaaa

SEQ ID NO: 216039 - DNA, 19 bp, Homo sapiens
  siRNA target sequence for ALAS1 (NM_000688.4,879-897).
gagtgtctcatcttcttca

SEQ ID NO: 216040 - DNA, 19 bp, Homo sapiens
  siRNA target sequence for ALAS1 (NM_000688.4,887-905).
catcttcttcaagataact

SEQ ID NO: 216041 - DNA, 19 bp, Homo sapiens
  siRNA target sequence for ALAS1 (NM_000688.4,976-994).
ccacacctatcgagttttt

SEQ ID NO: 216042 - DNA, 19 bp, Homo sapiens
  siRNA target sequence for ALAS1 (NM_000688.4,977-995).
cacacctatcgagttttta

SEQ ID NO: 216043 - DNA, 19 bp, Homo sapiens
  siRNA target sequence for ALAS1 (NM_000688.4,979-997).
cacctatcgagtttttaaa

SEQ ID NO: 216044 - DNA, 19 bp, Homo sapiens
  siRNA target sequence for ALAS1 (NM_000688.4,1024-1042).
ccccatggcagatgactat

SEQ ID NO: 216045 - DNA, 19 bp, Homo sapiens
  siRNA target sequence for ALAS1 (NM_000688.4,1027-1045).
catggcagatgactattca

SEQ ID NO: 216046 - DNA, 19 bp, Homo sapiens
  siRNA target sequence for ALAS1 (NM_000688.4,1046-1064).
gactccctcatcaccaaaa

SEQ ID NO: 216047 - DNA, 19 bp, Homo sapiens
  siRNA target sequence for ALAS1 (NM_000688.4,1086-1104).
gtaatgactacctaggaat

SEQ ID NO: 216048 - DNA, 19 bp, Homo sapiens
  siRNA target sequence for ALAS1 (NM_000688.4,1128-1146).
gggcagttatggacacttt

SEQ ID NO: 216049 - DNA, 19 bp, Homo sapiens
  siRNA target sequence for ALAS1 (NM_000688.4,1163-1181).
ggggcaggtggtactagaa

SEQ ID NO: 216050 - DNA, 19 bp, Homo sapiens
  siRNA target sequence for ALAS1 (NM_000688.4,1167-1185).
caggtggtactagaaatat

SEQ ID NO: 216051 - DNA, 19 bp, Homo sapiens
  siRNA target sequence for ALAS1 (NM_000688.4,1169-1187).
ggtggtactagaaatattt

SEQ ID NO: 216052 - DNA, 19 bp, Homo sapiens
  siRNA target sequence for ALAS1 (NM_000688.4,1188-1206).
ctggaactagtaaattcca

SEQ ID NO: 216053 - DNA, 19 bp, Homo sapiens
  siRNA target sequence for ALAS1 (NM_000688.4,1315-1333).
gatgccaggctgtgagatt

SEQ ID NO: 216054 - DNA, 19 bp, Homo sapiens
  siRNA target sequence for ALAS1 (NM_000688.4,1383-1401).
gccgagtgccaaagtacat

SEQ ID NO: 216055 - DNA, 19 bp, Homo sapiens
  siRNA target sequence for ALAS1 (NM_000688.4,1530-1548).
gtgatgtggcccatgagtt

SEQ ID NO: 216056 - DNA, 19 bp, Homo sapiens
  siRNA target sequence for ALAS1 (NM_000688.4,1576-1594).
ccacgcagtggggctttat

SEQ ID NO: 216057 - DNA, 19 bp, Homo sapiens
  siRNA target sequence for ALAS2 (NM_000032.1,142-160).
gttcctgtttggtattgga

SEQ ID NO: 216058 - DNA, 19 bp, Homo sapiens
  siRNA target sequence for ALAS2 (NM_000032.1,186-204).
gaccaaactgttctcaaat

SEQ ID NO: 216059 - DNA, 19 bp, Homo sapiens
  siRNA target sequence for ALAS2 (NM_000032.1,441-459).
cacacctgattcagaacaa

SEQ ID NO: 216060 - DNA, 19 bp, Homo sapiens
  siRNA target sequence for ALAS2 (NM_000032.1,443-461).
cacctgattcagaacaata

SEQ ID NO: 216061 - DNA, 19 bp, Homo sapiens
  siRNA target sequence for ALAS2 (NM_000032.1,457-475).
caatatgcctggaaactat

SEQ ID NO: 216062 - DNA, 19 bp, Homo sapiens
  siRNA target sequence for ALAS2 (NM_000032.1,468-486).
gaaactatgtcttcagtta

SEQ ID NO: 216063 - DNA, 19 bp, Homo sapiens
  siRNA target sequence for ALAS2 (NM_000032.1,628-646).
cgtctggtgtagtaatgat

SEQ ID NO: 216064 - DNA, 19 bp, Homo sapiens
  siRNA target sequence for ALAS2 (NM_000032.1,744-762).
gcaccagtaagtttcatgt

SEQ ID NO: 216065 - DNA, 19 bp, Homo sapiens
  siRNA target sequence for ALAS2 (NM_000032.1,919-937).
ccaaggtatccgtaacagt

SEQ ID NO: 216066 - DNA, 19 bp, Homo sapiens
  siRNA target sequence for ALAS2 (NM_000032.1,934-952).
cagtggagcagccaagttt

SEQ ID NO: 216067 - DNA, 19 bp, Homo sapiens
  siRNA target sequence for ALAS2 (NM_000032.1,1008-1026).
ctaagatacccaaaattgt

SEQ ID NO: 216068 - DNA, 19 bp, Homo sapiens
  siRNA target sequence for ALAS2 (NM_000032.1,1170-1188).
gggagcgtgatggaattat

SEQ ID NO: 216069 - DNA, 19 bp, Homo sapiens
  siRNA target sequence for ALAS2 (NM_000032.1,1174-1192).
gcgtgatggaattatgcat

SEQ ID NO: 216070 - DNA, 19 bp, Homo sapiens
  siRNA target sequence for ALAS2 (NM_000032.1,1182-1200).
gaattatgcataagattga

SEQ ID NO: 216071 - DNA, 19 bp, Homo sapiens
  siRNA target sequence for ALAS2 (NM_000032.1,1334-1352).
ctctctggagctctagaat

SEQ ID NO: 216072 - DNA, 19 bp, Homo sapiens
  siRNA target sequence for ALAS2 (NM_000032.1,1338-1356).
ctggagctctagaatctgt

SEQ ID NO: 216073 - DNA, 19 bp, Homo sapiens
  siRNA target sequence for ALAS2 (NM_000032.1,1534-1552).
ctccaagcatggcatctat

SEQ ID NO: 216074 - DNA, 19 bp, Homo sapiens
  siRNA target sequence for ALAS2 (NM_000032.1,1629-1647).
ctcagatgatggaagattt

SEQ ID NO: 216075 - DNA, 19 bp, Homo sapiens
  siRNA target sequence for ALAS2 (NM_000032.1,1706-1724).
gtggctgcctgcaatttct

SEQ ID NO: 216076 - DNA, 19 bp, Homo sapiens
  siRNA target sequence for ALAS2 (NM_000032.1,1725-1743).
gtcgccgtcctgtacactt

SEQ ID NO: 216077 - DNA, 19 bp, Homo sapiens
  siRNA target sequence for ALAS2 (NM_000032.1,1728-1746).
gccgtcctgtacactttga

SEQ ID NO: 216078 - DNA, 19 bp, Homo sapiens
  siRNA target sequence for ATE1 (NM_007041.1,210-228).
catgacagtacaggattat

SEQ ID NO: 216079 - DNA, 19 bp, Homo sapiens
  siRNA target sequence for ATE1 (NM_007041.1,243-261).
ccgaggatggcgaagaagt

SEQ ID NO: 216080 - DNA, 19 bp, Homo sapiens
  siRNA target sequence for ATE1 (NM_007041.1,273-291).
gtacaaacctgtcatgaat

SEQ ID NO: 216081 - DNA, 19 bp, Homo sapiens
  siRNA target sequence for ATE1 (NM_007041.1,280-298).
cctgtcatgaatcaaacat

SEQ ID NO: 216082 - DNA, 19 bp, Homo sapiens
  siRNA target sequence for ATE1 (NM_007041.1,304-322).
cctcagtacacaataaggt

SEQ ID NO: 216083 - DNA, 19 bp, Homo sapiens
  siRNA target sequence for ATE1 (NM_007041.1,320-338).
ggtgccgacctttacaatt

SEQ ID NO: 216084 - DNA, 19 bp, Homo sapiens
  siRNA target sequence for ATE1 (NM_007041.1,321-339).
gtgccgacctttacaattt

SEQ ID NO: 216085 - DNA, 19 bp, Homo sapiens
  siRNA target sequence for ATE1 (NM_007041.1,323-341).
gccgacctttacaatttca

SEQ ID NO: 216086 - DNA, 19 bp, Homo sapiens
  siRNA target sequence for ATE1 (NM_007041.1,353-371).
ctcacaagaaggttttgaa

SEQ ID NO: 216087 - DNA, 19 bp, Homo sapiens
  siRNA target sequence for ATE1 (NM_007041.1,421-439).
gaggatgagcccatggatt

SEQ ID NO: 216088 - DNA, 19 bp, Homo sapiens
  siRNA target sequence for ATE1 (NM_007041.1,432-450).
catggattccacaatggat

SEQ ID NO: 216089 - DNA, 19 bp, Homo sapiens
  siRNA target sequence for ATE1 (NM_007041.1,457-475).
gttgcgggtgactttgcat

SEQ ID NO: 216090 - DNA, 19 bp, Homo sapiens
  siRNA target sequence for ATE1 (NM_007041.1,461-479).
cgggtgactttgcattgat

SEQ ID NO: 216091 - DNA, 19 bp, Homo sapiens
  siRNA target sequence for ATE1 (NM_007041.1,462-480).
gggtgactttgcattgata

SEQ ID NO: 216092 - DNA, 19 bp, Homo sapiens
  siRNA target sequence for ATE1 (NM_007041.1,463-481).
ggtgactttgcattgataa

SEQ ID NO: 216093 - DNA, 19 bp, Homo sapiens
  siRNA target sequence for ATE1 (NM_007041.1,490-508).
gatatacagtgtgatctta

SEQ ID NO: 216094 - DNA, 19 bp, Homo sapiens
  siRNA target sequence for ATE1 (NM_007041.1,512-530).
cactcagtgatgacatcaa

SEQ ID NO: 216095 - DNA, 19 bp, Homo sapiens
  siRNA target sequence for ATE1 (NM_007041.1,693-711).
gcctccatgtcgaaaagca

SEQ ID NO: 216096 - DNA, 19 bp, Homo sapiens
  siRNA target sequence for ATE1 (NM_007041.1,830-848).
ccaaccagccaaaatcact

SEQ ID NO: 216097 - DNA, 19 bp, Homo sapiens
  siRNA target sequence for ATE1 (NM_007041.1,838-856).
ccaaaatcactcgaagatt

SEQ ID NO: 216098 - DNA, 19 bp, Homo sapiens
  siRNA target sequence for ATE1 (NM_007041.1,839-857).
caaaatcactcgaagattt

SEQ ID NO: 216099 - DNA, 19 bp, Homo sapiens
  siRNA target sequence for ATE1 (NM_007041.1,925-943).
gaggacccagagttcaagt

SEQ ID NO: 216100 - DNA, 19 bp, Homo sapiens
  siRNA target sequence for ATE1 (NM_007041.1,997-1015).
caggatccacccgatgaat

SEQ ID NO: 216101 - DNA, 19 bp, Homo sapiens
  siRNA target sequence for ATE1 (NM_007041.1,999-1017).
ggatccacccgatgaatgt

SEQ ID NO: 216102 - DNA, 19 bp, Homo sapiens
  siRNA target sequence for ATE1 (NM_007041.1,1122-1140).
gcttgacggaaagatcatt

SEQ ID NO: 216103 - DNA, 19 bp, Homo sapiens
  siRNA target sequence for ATE1 (NM_007041.1,1142-1160).
ctgtgggggtgattgacat

SEQ ID NO: 216104 - DNA, 19 bp, Homo sapiens
  siRNA target sequence for ATE1 (NM_007041.1,1161-1179).
cctcccaaactgtgtatca

SEQ ID NO: 216105 - DNA, 19 bp, Homo sapiens
  siRNA target sequence for ATE1 (NM_007041.1,1174-1192).
gtatcatctgtgtatttgt

SEQ ID NO: 216106 - DNA, 19 bp, Homo sapiens
  siRNA target sequence for ATE1 (NM_007041.1,1197-1215).
cgatcctgattattcgttt

SEQ ID NO: 216107 - DNA, 19 bp, Homo sapiens
  siRNA target sequence for ATE1 (NM_007041.1,1237-1255).
gcactacgagaaattgctt

SEQ ID NO: 216108 - DNA, 19 bp, Homo sapiens
  siRNA target sequence for ATE1 (NM_007041.1,1238-1256).
cactacgagaaattgcttt

SEQ ID NO: 216109 - DNA, 19 bp, Homo sapiens
  siRNA target sequence for ATE1 (NM_007041.1,1264-1282).
cagcttcatgagaaaactt

SEQ ID NO: 216110 - DNA, 19 bp, Homo sapiens
  siRNA target sequence for ATE1 (NM_007041.1,1368-1386).
gctgtgccctgagacatat

SEQ ID NO: 216111 - DNA, 19 bp, Homo sapiens
  siRNA target sequence for ATE1 (NM_007041.1,1495-1513).
cgattgcaggtgtttcaca

SEQ ID NO: 216112 - DNA, 19 bp, Homo sapiens
  siRNA target sequence for ATE1 (NM_007041.1,1496-1514).
gattgcaggtgtttcacaa

SEQ ID NO: 216113 - DNA, 19 bp, Homo sapiens
  siRNA target sequence for ATE1 (NM_007041.1,1524-1542).
catgccttacggtgtttat

SEQ ID NO: 216114 - DNA, 19 bp, Homo sapiens
  siRNA target sequence for ATE1 (NM_007041.1,1528-1546).
ccttacggtgtttataaga

SEQ ID NO: 216115 - DNA, 19 bp, Homo sapiens
  siRNA target sequence for ATE1 (NM_007041.1,1529-1547).
cttacggtgtttataagaa

SEQ ID NO: 216116 - DNA, 19 bp, Homo sapiens
  siRNA target sequence for AUP1 (NM_012103.2,156-174).
ccggagcggctctttgact

SEQ ID NO: 216117 - DNA, 19 bp, Homo sapiens
  siRNA target sequence for AUP1 (NM_012103.2,308-326).
cgtccttcgcagattcgta

SEQ ID NO: 216118 - DNA, 19 bp, Homo sapiens
  siRNA target sequence for AUP1 (NM_012103.2,424-442).
cacctttcgaccacaacat

SEQ ID NO: 216119 - DNA, 19 bp, Homo sapiens
  siRNA target sequence for AUP1 (NM_012103.2,427-445).
ctttcgaccacaacatagt

SEQ ID NO: 216120 - DNA, 19 bp, Homo sapiens
  siRNA target sequence for AUP1 (NM_012103.2,431-449).
cgaccacaacatagtcaat

SEQ ID NO: 216121 - DNA, 19 bp, Homo sapiens
  siRNA target sequence for AUP1 (NM_012103.2,432-450).
gaccacaacatagtcaatt

SEQ ID NO: 216122 - DNA, 19 bp, Homo sapiens
  siRNA target sequence for AUP1 (NM_012103.2,437-455).
caacatagtcaatttgctt

SEQ ID NO: 216123 - DNA, 19 bp, Homo sapiens
  siRNA target sequence for AUP1 (NM_012103.2,587-605).
gatcctctacccaacatgt

SEQ ID NO: 216124 - DNA, 19 bp, Homo sapiens
  siRNA target sequence for AUP1 (NM_012103.2,593-611).
ctacccaacatgtcagttt

SEQ ID NO: 216125 - DNA, 19 bp, Homo sapiens
  siRNA target sequence for AUP1 (NM_012103.2,596-614).
cccaacatgtcagtttttt

SEQ ID NO: 216126 - DNA, 19 bp, Homo sapiens
  siRNA target sequence for AUP1 (NM_012103.2,749-767).
gtcactcaagagattctgt

SEQ ID NO: 216127 - DNA, 19 bp, Homo sapiens
  siRNA target sequence for AUP1 (NM_012103.2,837-855).
gggctcctgcgcttcagtt

SEQ ID NO: 216128 - DNA, 19 bp, Homo sapiens
  siRNA target sequence for AUP1 (NM_012103.2,979-997).
ctttcacggtgtatcaagt

SEQ ID NO: 216129 - DNA, 19 bp, Homo sapiens
  siRNA target sequence for AUP1 (NM_012103.2,1046-1064).
gtttgcactccgtgtacaa

SEQ ID NO: 216130 - DNA, 19 bp, Homo sapiens
  siRNA target sequence for AUP1 (NM_012103.2,1127-1145).
gcacatgaagcgacaaaga

SEQ ID NO: 216131 - DNA, 19 bp, Homo sapiens
  siRNA target sequence for AUP1 (NM_012103.2,1305-1323).
gtagacttgactatcacta

SEQ ID NO: 216132 - DNA, 19 bp, Homo sapiens
  siRNA target sequence for AUP1 (NM_012103.2,1345-1363).
ctttcatgcctgaagacat

SEQ ID NO: 216133 - DNA, 19 bp, Homo sapiens
  siRNA target sequence for AUP1 (NM_012103.2,1446-1464).
ctaacatttgccaagtctt

SEQ ID NO: 216134 - DNA, 19 bp, Homo sapiens
  siRNA target sequence for AUP1 (NM_012103.2,1493-1511).
gcgcaagcaagcactatat

SEQ ID NO: 216135 - DNA, 19 bp, Homo sapiens
  siRNA target sequence for AUP1 (NM_012103.2,1495-1513).
gcaagcaagcactatatga

SEQ ID NO: 216136 - DNA, 19 bp, Homo sapiens
  siRNA target sequence for AUP1 (NM_181575.2,463-481).
gtagcacccctctactcaa

SEQ ID NO: 216137 - DNA, 19 bp, Homo sapiens
  siRNA target sequence for AUP1 (NM_181575.2,467-485).
cacccctctactcaatagt

SEQ ID NO: 216138 - DNA, 19 bp, Homo sapiens
  siRNA target sequence for AUP1 (NM_181576.1,1208-1226).
ggcattcgatgcgtgttta

SEQ ID NO: 216139 - DNA, 19 bp, Homo sapiens
  siRNA target sequence for AUP1 (NM_181576.1,1215-1233).
gatgcgtgtttaatgatga

SEQ ID NO: 216140 - DNA, 19 bp, Homo sapiens
  siRNA target sequence for BAAT (NM_001701.1,207-225).
ctgtgagtgcacttgttga

SEQ ID NO: 216141 - DNA, 19 bp, Homo sapiens
  siRNA target sequence for BAAT (NM_001701.1,252-270).
gcctgattccctttcagat

SEQ ID NO: 216142 - DNA, 19 bp, Homo sapiens
  siRNA target sequence for BAAT (NM_001701.1,328-346).
ccactatagggccaatgaa

SEQ ID NO: 216143 - DNA, 19 bp, Homo sapiens
  siRNA target sequence for BAAT (NM_001701.1,329-347).
cactatagggccaatgaat

SEQ ID NO: 216144 - DNA, 19 bp, Homo sapiens
  siRNA target sequence for BAAT (NM_001701.1,351-369).
gtgaggtggacctgaatca

SEQ ID NO: 216145 - DNA, 19 bp, Homo sapiens
  siRNA target sequence for BAAT (NM_001701.1,378-396).
cacttggaggggattatat

SEQ ID NO: 216146 - DNA, 19 bp, Homo sapiens
  siRNA target sequence for BAAT (NM_001701.1,428-446).
ctgaaacctgaaaagctat

SEQ ID NO: 216147 - DNA, 19 bp, Homo sapiens
  siRNA target sequence for BAAT (NM_001701.1,482-500).
cctttccaggtccaagtaa

SEQ ID NO: 216148 - DNA, 19 bp, Homo sapiens
  siRNA target sequence for BAAT (NM_001701.1,483-501).
ctttccaggtccaagtaaa

SEQ ID NO: 216149 - DNA, 19 bp, Homo sapiens
  siRNA target sequence for BAAT (NM_001701.1,488-506).
caggtccaagtaaaacttt

SEQ ID NO: 216150 - DNA, 19 bp, Homo sapiens
  siRNA target sequence for BAAT (NM_001701.1,515-533).
gagttaatagtgaacaata

SEQ ID NO: 216151 - DNA, 19 bp, Homo sapiens
  siRNA target sequence for BAAT (NM_001701.1,587-605).
cctggtgtcacacgaatta

SEQ ID NO: 216152 - DNA, 19 bp, Homo sapiens
  siRNA target sequence for BAAT (NM_001701.1,588-606).
ctggtgtcacacgaattaa

SEQ ID NO: 216153 - DNA, 19 bp, Homo sapiens
  siRNA target sequence for BAAT (NM_001701.1,591-609).
gtgtcacacgaattaaggt

SEQ ID NO: 216154 - DNA, 19 bp, Homo sapiens
  siRNA target sequence for BAAT (NM_001701.1,622-640).
ccttcgaggagctctcttt

SEQ ID NO: 216155 - DNA, 19 bp, Homo sapiens
  siRNA target sequence for BAAT (NM_001701.1,661-679).
cttcccaggggtaattgat

SEQ ID NO: 216156 - DNA, 19 bp, Homo sapiens
  siRNA target sequence for BAAT (NM_001701.1,665-683).
ccaggggtaattgatttgt

SEQ ID NO: 216157 - DNA, 19 bp, Homo sapiens
  siRNA target sequence for BAAT (NM_001701.1,666-684).
caggggtaattgatttgtt

SEQ ID NO: 216158 - DNA, 19 bp, Homo sapiens
  siRNA target sequence for BAAT (NM_001701.1,748-766).
cttggccttggcttaccat

SEQ ID NO: 216159 - DNA, 19 bp, Homo sapiens
  siRNA target sequence for BAAT (NM_001701.1,752-770).
gccttggcttaccataact

SEQ ID NO: 216160 - DNA, 19 bp, Homo sapiens
  siRNA target sequence for BAAT (NM_001701.1,753-771).
ccttggcttaccataacta

SEQ ID NO: 216161 - DNA, 19 bp, Homo sapiens
  siRNA target sequence for BAAT (NM_001701.1,754-772).
cttggcttaccataactat

SEQ ID NO: 216162 - DNA, 19 bp, Homo sapiens
  siRNA target sequence for BAAT (NM_001701.1,784-802).
ccgcaaaccagaagtaaca

SEQ ID NO: 216163 - DNA, 19 bp, Homo sapiens
  siRNA target sequence for BAAT (NM_001701.1,869-887).
gttggggtagtctctgtat

SEQ ID NO: 216164 - DNA, 19 bp, Homo sapiens
  siRNA target sequence for BAAT (NM_001701.1,874-892).
ggtagtctctgtatgtcaa

SEQ ID NO: 216165 - DNA, 19 bp, Homo sapiens
  siRNA target sequence for BAAT (NM_001701.1,905-923).
ggactatctatggctattt

SEQ ID NO: 216166 - DNA, 19 bp, Homo sapiens
  siRNA target sequence for BAAT (NM_001701.1,912-930).
ctatggctatttacctaaa

SEQ ID NO: 216167 - DNA, 19 bp, Homo sapiens
  siRNA target sequence for BAAT (NM_001701.1,978-996).
gcattccacaggtatatca

SEQ ID NO: 216168 - DNA, 19 bp, Homo sapiens
  siRNA target sequence for BAAT (NM_001701.1,979-997).
cattccacaggtatatcat

SEQ ID NO: 216169 - DNA, 19 bp, Homo sapiens
  siRNA target sequence for BAAT (NM_001701.1,1019-1037).
ccccattctgcacaattaa

SEQ ID NO: 216170 - DNA, 19 bp, Homo sapiens
  siRNA target sequence for BAAT (NM_001701.1,1020-1038).
cccattctgcacaattaat

SEQ ID NO: 216171 - DNA, 19 bp, Homo sapiens
  siRNA target sequence for BAAT (NM_001701.1,1021-1039).
ccattctgcacaattaata

SEQ ID NO: 216172 - DNA, 19 bp, Homo sapiens
  siRNA target sequence for BAAT (NM_001701.1,1045-1063).
caatgccttggggttacta

SEQ ID NO: 216173 - DNA, 19 bp, Homo sapiens
  siRNA target sequence for BAAT (NM_001701.1,1075-1093).
cacttttgagacaactcaa

SEQ ID NO: 216174 - DNA, 19 bp, Homo sapiens
  siRNA target sequence for BAAT (NM_001701.1,1091-1109).
caagttggggccagtcaat

SEQ ID NO: 216175 - DNA, 19 bp, Homo sapiens
  siRNA target sequence for BAAT (NM_001701.1,1094-1112).
gttggggccagtcaatatt

SEQ ID NO: 216176 - DNA, 19 bp, Homo sapiens
  siRNA target sequence for BAAT (NM_001701.1,1160-1178).
gaaggtgataagactatca

SEQ ID NO: 216177 - DNA, 19 bp, Homo sapiens
  siRNA target sequence for BAAT (NM_001701.1,1273-1291).
gatagaacctccctattct

SEQ ID NO: 216178 - DNA, 19 bp, Homo sapiens
  siRNA target sequence for BAAT (NM_001701.1,1305-1323).
cctcaacgacccacgattt

SEQ ID NO: 216179 - DNA, 19 bp, Homo sapiens
  siRNA target sequence for BAAT (NM_001701.1,1316-1334).
cacgatttgaggttacact

SEQ ID NO: 216180 - DNA, 19 bp, Homo sapiens
  siRNA target sequence for CPT1C (NM_152359.1,352-370).
ctttctcaccggtgtgttt

SEQ ID NO: 216181 - DNA, 19 bp, Homo sapiens
  siRNA target sequence for CPT1C (NM_152359.1,430-448).
ccagctggatccttcctta

SEQ ID NO: 216182 - DNA, 19 bp, Homo sapiens
  siRNA target sequence for CPT1C (NM_152359.1,659-677).
gccctggtccgcatcttct

SEQ ID NO: 216183 - DNA, 19 bp, Homo sapiens
  siRNA target sequence for CPT1C (NM_152359.1,686-704).
cacccgatgctgttcagtt

SEQ ID NO: 216184 - DNA, 19 bp, Homo sapiens
  siRNA target sequence for CPT1C (NM_152359.1,813-831).
cggtcctggcgcaggaatt

SEQ ID NO: 216185 - DNA, 19 bp, Homo sapiens
  siRNA target sequence for CPT1C (NM_152359.1,879-897).
cctggtgggcgtccaatta

SEQ ID NO: 216186 - DNA, 19 bp, Homo sapiens
  siRNA target sequence for CPT1C (NM_152359.1,880-898).
ctggtgggcgtccaattat

SEQ ID NO: 216187 - DNA, 19 bp, Homo sapiens
  siRNA target sequence for CPT1C (NM_152359.1,1155-1173).
caggggtccaaaaagacta

SEQ ID NO: 216188 - DNA, 19 bp, Homo sapiens
  siRNA target sequence for CPT1C (NM_152359.1,1158-1176).
gggtccaaaaagactacat

SEQ ID NO: 216189 - DNA, 19 bp, Homo sapiens
  siRNA target sequence for CPT1C (NM_152359.1,1541-1559).
catgatcgctggtttgaca

SEQ ID NO: 216190 - DNA, 19 bp, Homo sapiens
  siRNA target sequence for CPT1C (NM_152359.1,1544-1562).
gatcgctggtttgacaaat

SEQ ID NO: 216191 - DNA, 19 bp, Homo sapiens
  siRNA target sequence for CPT1C (NM_152359.1,1569-1587).
ccctaatcgtcttctctaa

SEQ ID NO: 216192 - DNA, 19 bp, Homo sapiens
  siRNA target sequence for CPT1C (NM_152359.1,1659-1677).
ctctggctacagaatgctt

SEQ ID NO: 216193 - DNA, 19 bp, Homo sapiens
  siRNA target sequence for CPT1C (NM_152359.1,1840-1858).
cgttccattctccctattt

SEQ ID NO: 216194 - DNA, 19 bp, Homo sapiens
  siRNA target sequence for CPT1C (NM_152359.1,1944-1962).
gtcaattctgcctgactta

SEQ ID NO: 216195 - DNA, 19 bp, Homo sapiens
  siRNA target sequence for CPT1C (NM_152359.1,1968-1986).
cggccatgactcgcttatt

SEQ ID NO: 216196 - DNA, 19 bp, Homo sapiens
  siRNA target sequence for CPT1C (NM_152359.1,1971-1989).
ccatgactcgcttattcct

SEQ ID NO: 216197 - DNA, 19 bp, Homo sapiens
  siRNA target sequence for CPT1C (NM_152359.1,2025-2043).
gggaggcctgcaactttgt

SEQ ID NO: 216198 - DNA, 19 bp, Homo sapiens
  siRNA target sequence for CPT1C (NM_152359.1,2263-2281).
ccctgttcagcaaatgcat

SEQ ID NO: 216199 - DNA, 19 bp, Homo sapiens
  siRNA target sequence for CPT1C (NM_152359.1,2296-2314).
caattacccggactatgtt

SEQ ID NO: 216200 - DNA, 19 bp, Homo sapiens
  siRNA target sequence for CPT1C (NM_152359.1,2337-2355).
ctgctgatgaccatggtta

SEQ ID NO: 216201 - DNA, 19 bp, Homo sapiens
  siRNA target sequence for CPT1C (NM_152359.1,2549-2567).
cacaggtgtggatttctct

SEQ ID NO: 216202 - DNA, 19 bp, Homo sapiens
  siRNA target sequence for CPT1C (NM_152359.1,2582-2600).
gcctccaaggcctcaatga

SEQ ID NO: 216203 - DNA, 19 bp, Homo sapiens
  siRNA target sequence for DGAT2 (NM_032564.2,396-414).
gtcacctggctcaataggt

SEQ ID NO: 216204 - DNA, 19 bp, Homo sapiens
  siRNA target sequence for DGAT2 (NM_032564.2,495-513).
gccatcctcatgtacatat

SEQ ID NO: 216205 - DNA, 19 bp, Homo sapiens
  siRNA target sequence for DGAT2 (NM_032564.2,496-514).
ccatcctcatgtacatatt

SEQ ID NO: 216206 - DNA, 19 bp, Homo sapiens
  siRNA target sequence for DGAT2 (NM_032564.2,620-638).
ggctgtgtggcgctacttt

SEQ ID NO: 216207 - DNA, 19 bp, Homo sapiens
  siRNA target sequence for DGAT2 (NM_032564.2,631-649).
gctactttcgagactactt

SEQ ID NO: 216208 - DNA, 19 bp, Homo sapiens
  siRNA target sequence for DGAT2 (NM_032564.2,632-650).
ctactttcgagactacttt

SEQ ID NO: 216209 - DNA, 19 bp, Homo sapiens
  siRNA target sequence for DGAT2 (NM_032564.2,685-703).
ccaccaggaactatatctt

SEQ ID NO: 216210 - DNA, 19 bp, Homo sapiens
  siRNA target sequence for DGAT2 (NM_032564.2,706-724).
gataccacccccatggtat

SEQ ID NO: 216211 - DNA, 19 bp, Homo sapiens
  siRNA target sequence for DGAT2 (NM_032564.2,880-898).
gccgggacaccatagacta

SEQ ID NO: 216212 - DNA, 19 bp, Homo sapiens
  siRNA target sequence for DGAT2 (NM_032564.2,881-899).
ccgggacaccatagactat

SEQ ID NO: 216213 - DNA, 19 bp, Homo sapiens
  siRNA target sequence for DGAT2 (NM_032564.2,882-900).
cgggacaccatagactatt

SEQ ID NO: 216214 - DNA, 19 bp, Homo sapiens
  siRNA target sequence for DGAT2 (NM_032564.2,916-934).
ggagtggcaatgctatcat

SEQ ID NO: 216215 - DNA, 19 bp, Homo sapiens
  siRNA target sequence for DGAT2 (NM_032564.2,1044-1062).
gacctggttcccatctact

SEQ ID NO: 216216 - DNA, 19 bp, Homo sapiens
  siRNA target sequence for DGAT2 (NM_032564.2,1119-1137).
cgatgggtccagaagaagt

SEQ ID NO: 216217 - DNA, 19 bp, Homo sapiens
  siRNA target sequence for DGAT2L1 (NM_058165.1,114-132).
gcagtgggtcctttctttt

SEQ ID NO: 216218 - DNA, 19 bp, Homo sapiens
  siRNA target sequence for DGAT2L1 (NM_058165.1,139-157).
gggccgatgtccattggaa

SEQ ID NO: 216219 - DNA, 19 bp, Homo sapiens
  siRNA target sequence for DGAT2L1 (NM_058165.1,140-158).
ggccgatgtccattggaat

SEQ ID NO: 216220 - DNA, 19 bp, Homo sapiens
  siRNA target sequence for DGAT2L1 (NM_058165.1,159-177).
cactgtgatgctgatcata

SEQ ID NO: 216221 - DNA, 19 bp, Homo sapiens
  siRNA target sequence for DGAT2L1 (NM_058165.1,168-186).
gctgatcatacacaactat

SEQ ID NO: 216222 - DNA, 19 bp, Homo sapiens
  siRNA target sequence for DGAT2L1 (NM_058165.1,169-187).
ctgatcatacacaactatt

SEQ ID NO: 216223 - DNA, 19 bp, Homo sapiens
  siRNA target sequence for DGAT2L1 (NM_058165.1,193-211).
ctttacatcccttatttga

SEQ ID NO: 216224 - DNA, 19 bp, Homo sapiens
  siRNA target sequence for DGAT2L1 (NM_058165.1,255-273).
gagatccagctggatcaaa

SEQ ID NO: 216225 - DNA, 19 bp, Homo sapiens
  siRNA target sequence for DGAT2L1 (NM_058165.1,340-358).
gatccaagtcacaactata

SEQ ID NO: 216226 - DNA, 19 bp, Homo sapiens
  siRNA target sequence for DGAT2L1 (NM_058165.1,491-509).
gtcctgtctttcgagaata

SEQ ID NO: 216227 - DNA, 19 bp, Homo sapiens
  siRNA target sequence for DGAT2L1 (NM_058165.1,494-512).
ctgtctttcgagaatatgt

SEQ ID NO: 216228 - DNA, 19 bp, Homo sapiens
  siRNA target sequence for DGAT2L1 (NM_058165.1,496-514).
gtctttcgagaatatgtga

SEQ ID NO: 216229 - DNA, 19 bp, Homo sapiens
  siRNA target sequence for DGAT2L1 (NM_058165.1,520-538).
gttgggctggtttcagttt

SEQ ID NO: 216230 - DNA, 19 bp, Homo sapiens
  siRNA target sequence for DGAT2L1 (NM_058165.1,605-623).
ggggtgcaaaagaatcact

SEQ ID NO: 216231 - DNA, 19 bp, Homo sapiens
  siRNA target sequence for DGAT2L1 (NM_058165.1,657-675).
ccgccagcggaaaggattt

SEQ ID NO: 216232 - DNA, 19 bp, Homo sapiens
  siRNA target sequence for DGAT2L1 (NM_058165.1,663-681).
gcggaaaggatttgttaaa

SEQ ID NO: 216233 - DNA, 19 bp, Homo sapiens
  siRNA target sequence for DGAT2L1 (NM_058165.1,664-682).
cggaaaggatttgttaaaa

SEQ ID NO: 216234 - DNA, 19 bp, Homo sapiens
  siRNA target sequence for DGAT2L1 (NM_058165.1,763-781).
gaaggatcatggattagaa

SEQ ID NO: 216235 - DNA, 19 bp, Homo sapiens
  siRNA target sequence for DGAT2L1 (NM_058165.1,835-853).
gccaggggagtttttcagt

SEQ ID NO: 216236 - DNA, 19 bp, Homo sapiens
  siRNA target sequence for DGAT2L1 (NM_058165.1,836-854).
ccaggggagtttttcagta

SEQ ID NO: 216237 - DNA, 19 bp, Homo sapiens
  siRNA target sequence for DGAT2L1 (NM_058165.1,839-857).
ggggagtttttcagtacaa

SEQ ID NO: 216238 - DNA, 19 bp, Homo sapiens
  siRNA target sequence for DGAT2L1 (NM_058165.1,935-953).
cgacccaggagcagattga

SEQ ID NO: 216239 - DNA, 19 bp, Homo sapiens
  siRNA target sequence for DGAT2L1 (NM_058165.1,955-973).
gagttacatcagacctata

SEQ ID NO: 216240 - DNA, 19 bp, Homo sapiens
  siRNA target sequence for DGAT2L1 (NM_058165.1,1027-1045).
gagcacgagactcttgttt

SEQ ID NO: 216241 - DNA, 19 bp, Homo sapiens
  siRNA target sequence for DGAT2L1 (NM_058165.1,1029-1047).
gcacgagactcttgtttta

SEQ ID NO: 216242 - DNA, 19 bp, Homo sapiens
  siRNA target sequence for DGAT2L1 (NM_058165.1,1030-1048).
cacgagactcttgttttaa

SEQ ID NO: 216243 - DNA, 19 bp, Homo sapiens
  siRNA target sequence for DKFZp586M1819 (NM_178819.2,934-952).
ctgttgctgccttttgata

SEQ ID NO: 216244 - DNA, 19 bp, Homo sapiens
  siRNA target sequence for DKFZp586M1819 (NM_178819.2,944-962).
cttttgatagcctgattgt

SEQ ID NO: 216245 - DNA, 19 bp, Homo sapiens
  siRNA target sequence for DKFZp586M1819 (NM_178819.2,1053-1071).
ccgcaaactctacatgaaa

SEQ ID NO: 216246 - DNA, 19 bp, Homo sapiens
  siRNA target sequence for DKFZp586M1819 (NM_178819.2,1054-1072).
cgcaaactctacatgaaaa

SEQ ID NO: 216247 - DNA, 19 bp, Homo sapiens
  siRNA target sequence for DKFZp586M1819 (NM_178819.2,1091-1109).
cgtgggctaccttgagaat

SEQ ID NO: 216248 - DNA, 19 bp, Homo sapiens
  siRNA target sequence for DKFZp586M1819 (NM_178819.2,1151-1169).
cctacaccaacggaatcat

SEQ ID NO: 216249 - DNA, 19 bp, Homo sapiens
  siRNA target sequence for DKFZp586M1819 (NM_178819.2,1152-1170).
ctacaccaacggaatcatt

SEQ ID NO: 216250 - DNA, 19 bp, Homo sapiens
  siRNA target sequence for DKFZp586M1819 (NM_178819.2,1157-1175).
ccaacggaatcattgcaaa

SEQ ID NO: 216251 - DNA, 19 bp, Homo sapiens
  siRNA target sequence for DKFZp586M1819 (NM_178819.2,1161-1179).
cggaatcattgcaaaggat

SEQ ID NO: 216252 - DNA, 19 bp, Homo sapiens
  siRNA target sequence for DKFZp586M1819 (NM_178819.2,1213-1231).
cgtcgaagtggtagtagta

SEQ ID NO: 216253 - DNA, 19 bp, Homo sapiens
  siRNA target sequence for DKFZp586M1819 (NM_178819.2,1214-1232).
gtcgaagtggtagtagtaa

SEQ ID NO: 216254 - DNA, 19 bp, Homo sapiens
  siRNA target sequence for DKFZp586M1819 (NM_178819.2,1292-1310).
gaatggagaccattatgga

SEQ ID NO: 216255 - DNA, 19 bp, Homo sapiens
  siRNA target sequence for DKFZp586M1819 (NM_178819.2,1312-1330).
gatgaggtgacaaagagat

SEQ ID NO: 216256 - DNA, 19 bp, Homo sapiens
  siRNA target sequence for DKFZp586M1819 (NM_178819.2,1317-1335).
ggtgacaaagagattctca

SEQ ID NO: 216257 - DNA, 19 bp, Homo sapiens
  siRNA target sequence for DKFZp586M1819 (NM_178819.2,1464-1482).
gatagcactggctttcaca

SEQ ID NO: 216258 - DNA, 19 bp, Homo sapiens
  siRNA target sequence for DKFZp586M1819 (NM_178819.2,1545-1563).
ggagttcatgagtaaacat

SEQ ID NO: 216259 - DNA, 19 bp, Homo sapiens
  siRNA target sequence for DKFZp586M1819 (NM_178819.2,1548-1566).
gttcatgagtaaacatgtt

SEQ ID NO: 216260 - DNA, 19 bp, Homo sapiens
  siRNA target sequence for DKFZp586M1819 (NM_178819.2,1561-1579).
catgttcacttaatgtgtt

SEQ ID NO: 216261 - DNA, 19 bp, Homo sapiens
  siRNA target sequence for DKFZp586M1819 (NM_178819.2,1597-1615).
gcgctgacagccatcatca

SEQ ID NO: 216262 - DNA, 19 bp, Homo sapiens
  siRNA target sequence for DKFZp586M1819 (NM_178819.2,1673-1691).
cctcaccgatcgatgtgat

SEQ ID NO: 216263 - DNA, 19 bp, Homo sapiens
  siRNA target sequence for DKFZp586M1819 (NM_178819.2,1676-1694).
caccgatcgatgtgatcat

SEQ ID NO: 216264 - DNA, 19 bp, Homo sapiens
  siRNA target sequence for DKFZp586M1819 (NM_178819.2,1678-1696).
ccgatcgatgtgatcatct

SEQ ID NO: 216265 - DNA, 19 bp, Homo sapiens
  siRNA target sequence for DKFZp586M1819 (NM_178819.2,1679-1697).
cgatcgatgtgatcatctt

SEQ ID NO: 216266 - DNA, 19 bp, Homo sapiens
  siRNA target sequence for DKFZp586M1819 (NM_178819.2,1698-1716).
ggccagcgatggctattat

SEQ ID NO: 216267 - DNA, 19 bp, Homo sapiens
  siRNA target sequence for DKFZp586M1819 (NM_178819.2,1740-1758).
gggactcatgggtgtgatt

SEQ ID NO: 216268 - DNA, 19 bp, Homo sapiens
  siRNA target sequence for DKFZp586M1819 (NM_178819.2,1742-1760).
gactcatgggtgtgattca

SEQ ID NO: 216269 - DNA, 19 bp, Homo sapiens
  siRNA target sequence for DKFZp586M1819 (NM_178819.2,1744-1762).
ctcatgggtgtgattcaga

SEQ ID NO: 216270 - DNA, 19 bp, Homo sapiens
  siRNA target sequence for DKFZp586M1819 (NM_178819.2,1965-1983).
ccctgttgctatcaagtat

SEQ ID NO: 216271 - DNA, 19 bp, Homo sapiens
  siRNA target sequence for DKFZp586M1819 (NM_178819.2,1967-1985).
ctgttgctatcaagtatga

SEQ ID NO: 216272 - DNA, 19 bp, Homo sapiens
  siRNA target sequence for DKFZp586M1819 (NM_178819.2,2036-2054).
cgtacctgctgcgaatgat

SEQ ID NO: 216273 - DNA, 19 bp, Homo sapiens
  siRNA target sequence for FLJ32370 (NM_152417.1,198-216).
gtgtaggacaggattctgt

SEQ ID NO: 216274 - DNA, 19 bp, Homo sapiens
  siRNA target sequence for FLJ32370 (NM_152417.1,298-316).
ctatctcttgtgggttttt

SEQ ID NO: 216275 - DNA, 19 bp, Homo sapiens
  siRNA target sequence for FLJ32370 (NM_152417.1,310-328).
ggtttttacaccactaata

SEQ ID NO: 216276 - DNA, 19 bp, Homo sapiens
  siRNA target sequence for FLJ32370 (NM_152417.1,318-336).
caccactaatacttttaat

SEQ ID NO: 216277 - DNA, 19 bp, Homo sapiens
  siRNA target sequence for FLJ32370 (NM_152417.1,367-385).
ccttactattattttctta

SEQ ID NO: 216278 - DNA, 19 bp, Homo sapiens
  siRNA target sequence for FLJ32370 (NM_152417.1,416-434).
gaagcctactctcataatt

SEQ ID NO: 216279 - DNA, 19 bp, Homo sapiens
  siRNA target sequence for FLJ32370 (NM_152417.1,483-501).
cagccgtttggcatggtta

SEQ ID NO: 216280 - DNA, 19 bp, Homo sapiens
  siRNA target sequence for FLJ32370 (NM_152417.1,536-554).
ggaccagcacttataattt

SEQ ID NO: 216281 - DNA, 19 bp, Homo sapiens
  siRNA target sequence for FLJ32370 (NM_152417.1,537-555).
gaccagcacttataatttt

SEQ ID NO: 216282 - DNA, 19 bp, Homo sapiens
  siRNA target sequence for FLJ32370 (NM_152417.1,619-637).
cagaacttgccgagtagta

SEQ ID NO: 216283 - DNA, 19 bp, Homo sapiens
  siRNA target sequence for FLJ32370 (NM_152417.1,630-648).
gagtagtagctgatcactt

SEQ ID NO: 216284 - DNA, 19 bp, Homo sapiens
  siRNA target sequence for FLJ32370 (NM_152417.1,635-653).
gtagctgatcactttgtct

SEQ ID NO: 216285 - DNA, 19 bp, Homo sapiens
  siRNA target sequence for FLJ32370 (NM_152417.1,672-690).
gtttattactggatgtgtt

SEQ ID NO: 216286 - DNA, 19 bp, Homo sapiens
  siRNA target sequence for FLJ32370 (NM_152417.1,742-760).
ccacttgttagctatctca

SEQ ID NO: 216287 - DNA, 19 bp, Homo sapiens
  siRNA target sequence for FLJ32370 (NM_152417.1,774-792).
gagaagccctaattagtga

SEQ ID NO: 216288 - DNA, 19 bp, Homo sapiens
  siRNA target sequence for FLJ32370 (NM_152417.1,781-799).
cctaattagtgatgaaact

SEQ ID NO: 216289 - DNA, 19 bp, Homo sapiens
  siRNA target sequence for FLJ32370 (NM_152417.1,829-847).
ctttgctcaggttgcaatt

SEQ ID NO: 216290 - DNA, 19 bp, Homo sapiens
  siRNA target sequence for FLJ32370 (NM_152417.1,859-877).
gacgaagaatgctgttcaa

SEQ ID NO: 216291 - DNA, 19 bp, Homo sapiens
  siRNA target sequence for FLJ32370 (NM_152417.1,921-939).
gtgctttgttagaacgttt

SEQ ID NO: 216292 - DNA, 19 bp, Homo sapiens
  siRNA target sequence for FLJ32370 (NM_152417.1,924-942).
ctttgttagaacgttttca

SEQ ID NO: 216293 - DNA, 19 bp, Homo sapiens
  siRNA target sequence for FLJ37965 (NM_182551.1,239-257).
ctgaacccatggtcaatta

SEQ ID NO: 216294 - DNA, 19 bp, Homo sapiens
  siRNA target sequence for FLJ37965 (NM_182551.1,273-291).
gctactgcacgtacttcat

SEQ ID NO: 216295 - DNA, 19 bp, Homo sapiens
  siRNA target sequence for FLJ37965 (NM_182551.1,274-292).
ctactgcacgtacttcata

SEQ ID NO: 216296 - DNA, 19 bp, Homo sapiens
  siRNA target sequence for FLJ37965 (NM_182551.1,327-345).
catggaaagggatttactt

SEQ ID NO: 216297 - DNA, 19 bp, Homo sapiens
  siRNA target sequence for FLJ37965 (NM_182551.1,335-353).
gggatttactttatactga

SEQ ID NO: 216298 - DNA, 19 bp, Homo sapiens
  siRNA target sequence for FLJ37965 (NM_182551.1,388-406).
catgctgagtcccttttta

SEQ ID NO: 216299 - DNA, 19 bp, Homo sapiens
  siRNA target sequence for FLJ37965 (NM_182551.1,432-450).
ggtatcgctggatcaacaa

SEQ ID NO: 216300 - DNA, 19 bp, Homo sapiens
  siRNA target sequence for FLJ37965 (NM_182551.1,548-566).
gaaagaagtgtcattatca

SEQ ID NO: 216301 - DNA, 19 bp, Homo sapiens
  siRNA target sequence for FLJ37965 (NM_182551.1,609-627).
gcctgatgcgatatagcta

SEQ ID NO: 216302 - DNA, 19 bp, Homo sapiens
  siRNA target sequence for FLJ37965 (NM_182551.1,668-686).
ggtgttcctggatttggtt

SEQ ID NO: 216303 - DNA, 19 bp, Homo sapiens
  siRNA target sequence for FLJ37965 (NM_182551.1,698-716).
gctgctgcctatatcttca

SEQ ID NO: 216304 - DNA, 19 bp, Homo sapiens
  siRNA target sequence for FLJ37965 (NM_182551.1,704-722).
gcctatatcttcattcata

SEQ ID NO: 216305 - DNA, 19 bp, Homo sapiens
  siRNA target sequence for FLJ37965 (NM_182551.1,745-763).
ccatttcgaagacatgatt

SEQ ID NO: 216306 - DNA, 19 bp, Homo sapiens
  siRNA target sequence for FLJ37965 (NM_182551.1,789-807).
cacttcaactcctcatatt

SEQ ID NO: 216307 - DNA, 19 bp, Homo sapiens
  siRNA target sequence for FLJ37965 (NM_182551.1,816-834).
ggactgatctcacagaaaa

SEQ ID NO: 216308 - DNA, 19 bp, Homo sapiens
  siRNA target sequence for FLJ37965 (NM_182551.1,835-853).
cagcaagtctcgaagtaat

SEQ ID NO: 216309 - DNA, 19 bp, Homo sapiens
  siRNA target sequence for FLJ37965 (NM_182551.1,838-856).
caagtctcgaagtaatgca

SEQ ID NO: 216310 - DNA, 19 bp, Homo sapiens
  siRNA target sequence for FLJ37965 (NM_182551.1,928-946).
ggtagaccgtctaagagaa

SEQ ID NO: 216311 - DNA, 19 bp, Homo sapiens
  siRNA target sequence for GGTLA1 (NM_004121.1,1206-1224).
ggtgccattctcagcttta

SEQ ID NO: 216312 - DNA, 19 bp, Homo sapiens
  siRNA target sequence for GGTLA1 (NM_004121.1,1210-1228).
ccattctcagctttatcct

SEQ ID NO: 216313 - DNA, 19 bp, Homo sapiens
  siRNA target sequence for GGTLA1 (NM_004121.1,1233-1251).
gtgctaagagggttcaact

SEQ ID NO: 216314 - DNA, 19 bp, Homo sapiens
  siRNA target sequence for GLYAT (NM_005838.1,144-162).
gagcctcccagcatcctta

SEQ ID NO: 216315 - DNA, 19 bp, Homo sapiens
  siRNA target sequence for GLYAT (NM_005838.1,173-191).
gaactgtctttcacataaa

SEQ ID NO: 216316 - DNA, 19 bp, Homo sapiens
  siRNA target sequence for GLYAT (NM_005838.1,186-204).
cataaaccatggaaatcca

SEQ ID NO: 216317 - DNA, 19 bp, Homo sapiens
  siRNA target sequence for GLYAT (NM_005838.1,196-214).
ggaaatccattcaatctga

SEQ ID NO: 216318 - DNA, 19 bp, Homo sapiens
  siRNA target sequence for GLYAT (NM_005838.1,226-244).
gacaagtggcctgatttta

SEQ ID NO: 216319 - DNA, 19 bp, Homo sapiens
  siRNA target sequence for GLYAT (NM_005838.1,286-304).
gaccttgatcactatacca

SEQ ID NO: 216320 - DNA, 19 bp, Homo sapiens
  siRNA target sequence for GLYAT (NM_005838.1,289-307).
cttgatcactataccaata

SEQ ID NO: 216321 - DNA, 19 bp, Homo sapiens
  siRNA target sequence for GLYAT (NM_005838.1,297-315).
ctataccaatacttaccaa

SEQ ID NO: 216322 - DNA, 19 bp, Homo sapiens
  siRNA target sequence for GLYAT (NM_005838.1,332-350).
cccaaaactgtcaggaatt

SEQ ID NO: 216323 - DNA, 19 bp, Homo sapiens
  siRNA target sequence for GLYAT (NM_005838.1,356-374).
gatcaccagaactcatcaa

SEQ ID NO: 216324 - DNA, 19 bp, Homo sapiens
  siRNA target sequence for GLYAT (NM_005838.1,378-396).
gaaacagcatttacagatt

SEQ ID NO: 216325 - DNA, 19 bp, Homo sapiens
  siRNA target sequence for GLYAT (NM_005838.1,404-422).
cacagcctagcctgaatga

SEQ ID NO: 216326 - DNA, 19 bp, Homo sapiens
  siRNA target sequence for GLYAT (NM_005838.1,413-431).
gcctgaatgaggctataca

SEQ ID NO: 216327 - DNA, 19 bp, Homo sapiens
  siRNA target sequence for GLYAT (NM_005838.1,414-432).
cctgaatgaggctatacaa

SEQ ID NO: 216328 - DNA, 19 bp, Homo sapiens
  siRNA target sequence for GLYAT (NM_005838.1,415-433).
ctgaatgaggctatacaaa

SEQ ID NO: 216329 - DNA, 19 bp, Homo sapiens
  siRNA target sequence for GLYAT (NM_005838.1,466-484).
caaacacaacgcattctct

SEQ ID NO: 216330 - DNA, 19 bp, Homo sapiens
  siRNA target sequence for GLYAT (NM_005838.1,470-488).
cacaacgcattctctatat

SEQ ID NO: 216331 - DNA, 19 bp, Homo sapiens
  siRNA target sequence for GLYAT (NM_005838.1,483-501).
ctatatggcagctgaaaca

SEQ ID NO: 216332 - DNA, 19 bp, Homo sapiens
  siRNA target sequence for GLYAT (NM_005838.1,517-535).
cctttcctgctgaaatcaa

SEQ ID NO: 216333 - DNA, 19 bp, Homo sapiens
  siRNA target sequence for KIAA0205 (NM_014873.1,311-329).
caacctggttgctattcca

SEQ ID NO: 216334 - DNA, 19 bp, Homo sapiens
  siRNA target sequence for KIAA0205 (NM_014873.1,321-339).
gctattccatcctacatct

SEQ ID NO: 216335 - DNA, 19 bp, Homo sapiens
  siRNA target sequence for KIAA0205 (NM_014873.1,379-397).
gtaagcggttctggtatat

SEQ ID NO: 216336 - DNA, 19 bp, Homo sapiens
  siRNA target sequence for KIAA0205 (NM_014873.1,383-401).
gcggttctggtatatcgaa

SEQ ID NO: 216337 - DNA, 19 bp, Homo sapiens
  siRNA target sequence for KIAA0205 (NM_014873.1,391-409).
ggtatatcgaaggaatcat

SEQ ID NO: 216338 - DNA, 19 bp, Homo sapiens
  siRNA target sequence for KIAA0205 (NM_014873.1,399-417).
gaaggaatcatgtataaat

SEQ ID NO: 216339 - DNA, 19 bp, Homo sapiens
  siRNA target sequence for KIAA0205 (NM_014873.1,443-461).
gggatggtatgctggatat

SEQ ID NO: 216340 - DNA, 19 bp, Homo sapiens
  siRNA target sequence for KIAA0205 (NM_014873.1,448-466).
ggtatgctggatatacagt

SEQ ID NO: 216341 - DNA, 19 bp, Homo sapiens
  siRNA target sequence for KIAA0205 (NM_014873.1,511-529).
cagtgatgttggtgaatca

SEQ ID NO: 216342 - DNA, 19 bp, Homo sapiens
  siRNA target sequence for KIAA0205 (NM_014873.1,604-622).
ggttgatggatcatatttt

SEQ ID NO: 216343 - DNA, 19 bp, Homo sapiens
  siRNA target sequence for KIAA0205 (NM_014873.1,661-679).
gagacttctttataagaca

SEQ ID NO: 216344 - DNA, 19 bp, Homo sapiens
  siRNA target sequence for KIAA0205 (NM_014873.1,740-758).
caggagcagagatcgaaaa

SEQ ID NO: 216345 - DNA, 19 bp, Homo sapiens
  siRNA target sequence for KIAA0205 (NM_014873.1,745-763).
gcagagatcgaaaatggat

SEQ ID NO: 216346 - DNA, 19 bp, Homo sapiens
  siRNA target sequence for KIAA0205 (NM_014873.1,750-768).
gatcgaaaatggattgttt

SEQ ID NO: 216347 - DNA, 19 bp, Homo sapiens
  siRNA target sequence for KIAA0205 (NM_014873.1,868-886).
ggtctggggcaacaaaaat

SEQ ID NO: 216348 - DNA, 19 bp, Homo sapiens
  siRNA target sequence for KIAA0205 (NM_014873.1,939-957).
gatgctaaagaattagaca

SEQ ID NO: 216349 - DNA, 19 bp, Homo sapiens
  siRNA target sequence for KIAA0205 (NM_014873.1,948-966).
gaattagacagcaaatcaa

SEQ ID NO: 216350 - DNA, 19 bp, Homo sapiens
  siRNA target sequence for KIAA0205 (NM_014873.1,972-990).
ctccagtggataatagata

SEQ ID NO: 216351 - DNA, 19 bp, Homo sapiens
  siRNA target sequence for KIAA0205 (NM_014873.1,974-992).
ccagtggataatagataca

SEQ ID NO: 216352 - DNA, 19 bp, Homo sapiens
  siRNA target sequence for KIAA0205 (NM_014873.1,975-993).
cagtggataatagatacaa

SEQ ID NO: 216353 - DNA, 19 bp, Homo sapiens
  siRNA target sequence for KIAA0205 (NM_014873.1,980-998).
gataatagatacaacgata

SEQ ID NO: 216354 - DNA, 19 bp, Homo sapiens
  siRNA target sequence for KIAA0205 (NM_014873.1,1006-1024).
ccaaagctgaacctataga

SEQ ID NO: 216355 - DNA, 19 bp, Homo sapiens
  siRNA target sequence for KIAA0205 (NM_014873.1,1012-1030).
ctgaacctatagatattca

SEQ ID NO: 216356 - DNA, 19 bp, Homo sapiens
  siRNA target sequence for KIAA0205 (NM_014873.1,1057-1075).
caacagtcacacatgtaca

SEQ ID NO: 216357 - DNA, 19 bp, Homo sapiens
  siRNA target sequence for KIAA0205 (NM_014873.1,1152-1170).
gaaaaagaagacctcttat

SEQ ID NO: 216358 - DNA, 19 bp, Homo sapiens
  siRNA target sequence for KIAA0205 (NM_014873.1,1158-1176).
gaagacctcttatcacatt

SEQ ID NO: 216359 - DNA, 19 bp, Homo sapiens
  siRNA target sequence for KIAA0205 (NM_014873.1,1201-1219).
cttccaagggccataagga

SEQ ID NO: 216360 - DNA, 19 bp, Homo sapiens
  siRNA target sequence for KIAA0205 (NM_014873.1,1246-1264).
gcaacttgtggatatttct

SEQ ID NO: 216361 - DNA, 19 bp, Homo sapiens
  siRNA target sequence for KIAA0205 (NM_014873.1,1290-1308).
ggctatatgtggtacaaca

SEQ ID NO: 216362 - DNA, 19 bp, Homo sapiens
  siRNA target sequence for KIAA0205 (NM_014873.1,1291-1309).
gctatatgtggtacaacat

SEQ ID NO: 216363 - DNA, 19 bp, Homo sapiens
  siRNA target sequence for KIAA0205 (NM_014873.1,1300-1318).
ggtacaacatcattcagta

SEQ ID NO: 216364 - DNA, 19 bp, Homo sapiens
  siRNA target sequence for KIAA0205 (NM_014873.1,1301-1319).
gtacaacatcattcagtat

SEQ ID NO: 216365 - DNA, 19 bp, Homo sapiens
  siRNA target sequence for LRAT (NM_004744.1,110-128).
ggaggtggtgtctttacta

SEQ ID NO: 216366 - DNA, 19 bp, Homo sapiens
  siRNA target sequence for LRAT (NM_004744.1,152-170).
caacttcacgctctttagt

SEQ ID NO: 216367 - DNA, 19 bp, Homo sapiens
  siRNA target sequence for LRAT (NM_004744.1,197-215).
gaggaacagtttttatgaa

SEQ ID NO: 216368 - DNA, 19 bp, Homo sapiens
  siRNA target sequence for LRAT (NM_004744.1,386-404).
cctgggcgttattgtcaaa

SEQ ID NO: 216369 - DNA, 19 bp, Homo sapiens
  siRNA target sequence for LRAT (NM_004744.1,584-602).
cgtgacctactgcagatat

SEQ ID NO: 216370 - DNA, 19 bp, Homo sapiens
  siRNA target sequence for LRAT (NM_004744.1,620-638).
ccagtccgacaagttttgt

SEQ ID NO: 216371 - DNA, 19 bp, Homo sapiens
  siRNA target sequence for LRAT (NM_004744.1,637-655).
gtgagactgtgaagataat

SEQ ID NO: 216372 - DNA, 19 bp, Homo sapiens
  siRNA target sequence for LRAT (NM_004744.1,696-714).
ggattggcgtctatagtct

SEQ ID NO: 216373 - DNA, 19 bp, Homo sapiens
  siRNA target sequence for LRAT (NM_004744.1,711-729).
gtctgtacgggcttggtat

SEQ ID NO: 216374 - DNA, 19 bp, Homo sapiens
  siRNA target sequence for LRAT (NM_004744.1,715-733).
gtacgggcttggtatcata

SEQ ID NO: 216375 - DNA, 19 bp, Homo sapiens
  siRNA target sequence for LRAT (NM_004744.1,744-762).
cctgcaatttttattccat

SEQ ID NO: 216376 - DNA, 19 bp, Homo sapiens
  siRNA target sequence for MGAT2 (NM_025098.2,114-132).
catagccctcctgtttaca

SEQ ID NO: 216377 - DNA, 19 bp, Homo sapiens
  siRNA target sequence for MGAT2 (NM_025098.2,118-136).
gccctcctgtttacaagat

SEQ ID NO: 216378 - DNA, 19 bp, Homo sapiens
  siRNA target sequence for MGAT2 (NM_025098.2,219-237).
catcaggtgctggactata

SEQ ID NO: 216379 - DNA, 19 bp, Homo sapiens
  siRNA target sequence for MGAT2 (NM_025098.2,294-312).
cccctctcggaactacatt

SEQ ID NO: 216380 - DNA, 19 bp, Homo sapiens
  siRNA target sequence for MGAT2 (NM_025098.2,446-464).
ccttcttcagagattacat

SEQ ID NO: 216381 - DNA, 19 bp, Homo sapiens
  siRNA target sequence for MGAT2 (NM_025098.2,590-608).
gatccttcacgctgttact

SEQ ID NO: 216382 - DNA, 19 bp, Homo sapiens
  siRNA target sequence for MGAT2 (NM_025098.2,653-671).
cacccctggtgccaatctt

SEQ ID NO: 216383 - DNA, 19 bp, Homo sapiens
  siRNA target sequence for MGAT2 (NM_025098.2,655-673).
cccctggtgccaatcttct

SEQ ID NO: 216384 - DNA, 19 bp, Homo sapiens
  siRNA target sequence for MGAT2 (NM_025098.2,678-696).
cggggagaatgacctattt

SEQ ID NO: 216385 - DNA, 19 bp, Homo sapiens
  siRNA target sequence for MGAT2 (NM_025098.2,680-698).
gggagaatgacctatttga

SEQ ID NO: 216386 - DNA, 19 bp, Homo sapiens
  siRNA target sequence for MGAT2 (NM_025098.2,697-715).
gaccagattcccaactctt

SEQ ID NO: 216387 - DNA, 19 bp, Homo sapiens
  siRNA target sequence for MGAT2 (NM_025098.2,719-737).
gctcctggttacgctatat

SEQ ID NO: 216388 - DNA, 19 bp, Homo sapiens
  siRNA target sequence for MGAT2 (NM_025098.2,722-740).
cctggttacgctatatcca

SEQ ID NO: 216389 - DNA, 19 bp, Homo sapiens
  siRNA target sequence for MGAT2 (NM_025098.2,801-819).
ccagtacagctttggttta

SEQ ID NO: 216390 - DNA, 19 bp, Homo sapiens
  siRNA target sequence for MGAT2 (NM_025098.2,910-928).
ctgcaccagcgttatatca

SEQ ID NO: 216391 - DNA, 19 bp, Homo sapiens
  siRNA target sequence for MGAT2 (NM_025098.2,912-930).
gcaccagcgttatatcaaa

SEQ ID NO: 216392 - DNA, 19 bp, Homo sapiens
  siRNA target sequence for MGAT2 (NM_025098.2,949-967).
gaggcccacaaacttaagt

SEQ ID NO: 216393 - DNA, 19 bp, Homo sapiens
  siRNA target sequence for MGAT2 (NM_025098.2,953-971).
cccacaaacttaagttcaa

SEQ ID NO: 216394 - DNA, 19 bp, Homo sapiens
  siRNA target sequence for MGAT3 (NM_178176.2,191-209).
gcccccaaccacttccaaa

SEQ ID NO: 216395 - DNA, 19 bp, Homo sapiens
  siRNA target sequence for MGAT3 (NM_178176.2,393-411).
cgttcggagtggataagga

SEQ ID NO: 216396 - DNA, 19 bp, Homo sapiens
  siRNA target sequence for MGAT3 (NM_178176.2,394-412).
gttcggagtggataaggaa

SEQ ID NO: 216397 - DNA, 19 bp, Homo sapiens
  siRNA target sequence for MGAT3 (NM_178176.2,425-443).
gagacaactaagggattat

SEQ ID NO: 216398 - DNA, 19 bp, Homo sapiens
  siRNA target sequence for MGAT3 (NM_178176.2,427-445).
gacaactaagggattatta

SEQ ID NO: 216399 - DNA, 19 bp, Homo sapiens
  siRNA target sequence for MGAT3 (NM_178176.2,510-528).
cctcatgggatcatgtgta

SEQ ID NO: 216400 - DNA, 19 bp, Homo sapiens
  siRNA target sequence for MGAT3 (NM_178176.2,526-544).
gtacaggcttcctctgtaa

SEQ ID NO: 216401 - DNA, 19 bp, Homo sapiens
  siRNA target sequence for MGAT3 (NM_178176.2,531-549).
ggcttcctctgtaatttct

SEQ ID NO: 216402 - DNA, 19 bp, Homo sapiens
  siRNA target sequence for MGAT3 (NM_178176.2,631-649).
cggtctatcgcgactacat

SEQ ID NO: 216403 - DNA, 19 bp, Homo sapiens
  siRNA target sequence for MGAT3 (NM_178176.2,633-651).
gtctatcgcgactacatca

SEQ ID NO: 216404 - DNA, 19 bp, Homo sapiens
  siRNA target sequence for MGAT3 (NM_178176.2,747-765).
gcgcacgaggccctgtatt

SEQ ID NO: 216405 - DNA, 19 bp, Homo sapiens
  siRNA target sequence for MGAT3 (NM_178176.2,1076-1094).
caccgaggaggaagtcaat

SEQ ID NO: 216406 - DNA, 19 bp, Homo sapiens
  siRNA target sequence for MGAT3 (NM_178176.2,1078-1096).
ccgaggaggaagtcaatca

SEQ ID NO: 216407 - DNA, 19 bp, Homo sapiens
  siRNA target sequence for MGAT3 (NM_178176.2,1082-1100).
ggaggaagtcaatcactat

SEQ ID NO: 216408 - DNA, 19 bp, Homo sapiens
  siRNA target sequence for MGC11324 (NM_032717.3,175-193).
gttctcggcttcatccttt

SEQ ID NO: 216409 - DNA, 19 bp, Homo sapiens
  siRNA target sequence for MGC11324 (NM_032717.3,221-239).
gcatctccgagatctacat

SEQ ID NO: 216410 - DNA, 19 bp, Homo sapiens
  siRNA target sequence for MGC11324 (NM_032717.3,240-258).
gaagatcctagtgaaaact

SEQ ID NO: 216411 - DNA, 19 bp, Homo sapiens
  siRNA target sequence for MGC11324 (NM_032717.3,262-280).
gagtgggccacaatacgaa

SEQ ID NO: 216412 - DNA, 19 bp, Homo sapiens
  siRNA target sequence for MGC11324 (NM_032717.3,264-282).
gtgggccacaatacgaatt

SEQ ID NO: 216413 - DNA, 19 bp, Homo sapiens
  siRNA target sequence for MGC11324 (NM_032717.3,266-284).
gggccacaatacgaattga

SEQ ID NO: 216414 - DNA, 19 bp, Homo sapiens
  siRNA target sequence for MGC11324 (NM_032717.3,267-285).
ggccacaatacgaattgaa

SEQ ID NO: 216415 - DNA, 19 bp, Homo sapiens
  siRNA target sequence for MGC11324 (NM_032717.3,268-286).
gccacaatacgaattgaaa

SEQ ID NO: 216416 - DNA, 19 bp, Homo sapiens
  siRNA target sequence for MGC11324 (NM_032717.3,295-313).
ccaaaggagtcgattctta

SEQ ID NO: 216417 - DNA, 19 bp, Homo sapiens
  siRNA target sequence for MGC11324 (NM_032717.3,301-319).
gagtcgattcttaaaaact

SEQ ID NO: 216418 - DNA, 19 bp, Homo sapiens
  siRNA target sequence for MGC11324 (NM_032717.3,318-336).
ctctgcttctgttggtatt

SEQ ID NO: 216419 - DNA, 19 bp, Homo sapiens
  siRNA target sequence for MGC11324 (NM_032717.3,323-341).
cttctgttggtattatcca

SEQ ID NO: 216420 - DNA, 19 bp, Homo sapiens
  siRNA target sequence for MGC11324 (NM_032717.3,480-498).
ggagctagtgtcatggaat

SEQ ID NO: 216421 - DNA, 19 bp, Homo sapiens
  siRNA target sequence for MGC11324 (NM_032717.3,501-519).
cctcacaagaaccaatgta

SEQ ID NO: 216422 - DNA, 19 bp, Homo sapiens
  siRNA target sequence for MGC11324 (NM_032717.3,567-585).
cgtcatagtgcgctattgt

SEQ ID NO: 216423 - DNA, 19 bp, Homo sapiens
  siRNA target sequence for MGC11324 (NM_032717.3,623-641).
ggatcagtttgctggttat

SEQ ID NO: 216424 - DNA, 19 bp, Homo sapiens
  siRNA target sequence for MGC11324 (NM_032717.3,624-642).
gatcagtttgctggttata

SEQ ID NO: 216425 - DNA, 19 bp, Homo sapiens
  siRNA target sequence for MGC11324 (NM_032717.3,633-651).
gctggttataggaactaca

SEQ ID NO: 216426 - DNA, 19 bp, Homo sapiens
  siRNA target sequence for MGC11324 (NM_032717.3,667-685).
ccagacagcagcctcaaaa

SEQ ID NO: 216427 - DNA, 19 bp, Homo sapiens
  siRNA target sequence for MGC11324 (NM_032717.3,741-759).
ctctggtaccattcattat

SEQ ID NO: 216428 - DNA, 19 bp, Homo sapiens
  siRNA target sequence for MGC11324 (NM_032717.3,743-761).
ctggtaccattcattatca

SEQ ID NO: 216429 - DNA, 19 bp, Homo sapiens
  siRNA target sequence for MGC11324 (NM_032717.3,837-855).
gacaacggatggatgttat

SEQ ID NO: 216430 - DNA, 19 bp, Homo sapiens
  siRNA target sequence for MGC11324 (NM_032717.3,842-860).
cggatggatgttatgctat

SEQ ID NO: 216431 - DNA, 19 bp, Homo sapiens
  siRNA target sequence for MGC11324 (NM_032717.3,878-896).
gcggcttgatgggaattat

SEQ ID NO: 216432 - DNA, 19 bp, Homo sapiens
  siRNA target sequence for MGC11324 (NM_032717.3,932-950).
ggtttgaacgctcagaaat

SEQ ID NO: 216433 - DNA, 19 bp, Homo sapiens
  siRNA target sequence for MGC11324 (NM_032717.3,955-973).
gatcgacacctggttacta

SEQ ID NO: 216434 - DNA, 19 bp, Homo sapiens
  siRNA target sequence for MGC11324 (NM_032717.3,958-976).
cgacacctggttactaaga

SEQ ID NO: 216435 - DNA, 19 bp, Homo sapiens
  siRNA target sequence for MGC11324 (NM_032717.3,964-982).
ctggttactaagagactaa

SEQ ID NO: 216436 - DNA, 19 bp, Homo sapiens
  siRNA target sequence for MGC11324 (NM_032717.3,966-984).
ggttactaagagactaaaa

SEQ ID NO: 216437 - DNA, 19 bp, Homo sapiens
  siRNA target sequence for MGC11324 (NM_032717.3,1005-1023).
gaaactacccatactaatt

SEQ ID NO: 216438 - DNA, 19 bp, Homo sapiens
  siRNA target sequence for MGC11324 (NM_032717.3,1105-1123).
ccagttgcaattaagtata

SEQ ID NO: 216439 - DNA, 19 bp, Homo sapiens
  siRNA target sequence for MGC11324 (NM_032717.3,1127-1145).
ctcagttcggtgatgcatt

SEQ ID NO: 216440 - DNA, 19 bp, Homo sapiens
  siRNA target sequence for MGC11324 (NM_032717.3,1129-1147).
cagttcggtgatgcatttt

SEQ ID NO: 216441 - DNA, 19 bp, Homo sapiens
  siRNA target sequence for MGC11324 (NM_032717.3,1141-1159).
gcattttggaacagtagta

SEQ ID NO: 216442 - DNA, 19 bp, Homo sapiens
  siRNA target sequence for MGC11324 (NM_032717.3,1175-1193).
gctacctgcttcgaatgat

SEQ ID NO: 216443 - DNA, 19 bp, Homo sapiens
  siRNA target sequence for MGC11324 (NM_032717.3,1278-1296).
cagggttaagtctgctatt

SEQ ID NO: 216444 - DNA, 19 bp, Homo sapiens
  siRNA target sequence for QPCT (NM_012413.2,143-161).
gccagccattttgaattca

SEQ ID NO: 216445 - DNA, 19 bp, Homo sapiens
  siRNA target sequence for QPCT (NM_012413.2,164-182).
ggctcttcggcaaattgca

SEQ ID NO: 216446 - DNA, 19 bp, Homo sapiens
  siRNA target sequence for QPCT (NM_012413.2,180-198).
gcagaaggcaccagtatct

SEQ ID NO: 216447 - DNA, 19 bp, Homo sapiens
  siRNA target sequence for QPCT (NM_012413.2,268-286).
ctgctcgtcagcacatcat

SEQ ID NO: 216448 - DNA, 19 bp, Homo sapiens
  siRNA target sequence for QPCT (NM_012413.2,310-328).
ctgactgggtcttggaaat

SEQ ID NO: 216449 - DNA, 19 bp, Homo sapiens
  siRNA target sequence for QPCT (NM_012413.2,358-376).
ggtaccggtctttctcaaa

SEQ ID NO: 216450 - DNA, 19 bp, Homo sapiens
  siRNA target sequence for QPCT (NM_012413.2,359-377).
gtaccggtctttctcaaat

SEQ ID NO: 216451 - DNA, 19 bp, Homo sapiens
  siRNA target sequence for QPCT (NM_012413.2,363-381).
cggtctttctcaaatatca

SEQ ID NO: 216452 - DNA, 19 bp, Homo sapiens
  siRNA target sequence for QPCT (NM_012413.2,364-382).
ggtctttctcaaatatcat

SEQ ID NO: 216453 - DNA, 19 bp, Homo sapiens
  siRNA target sequence for QPCT (NM_012413.2,392-410).
caatcccactgctaaacga

SEQ ID NO: 216454 - DNA, 19 bp, Homo sapiens
  siRNA target sequence for QPCT (NM_012413.2,397-415).
ccactgctaaacgacattt

SEQ ID NO: 216455 - DNA, 19 bp, Homo sapiens
  siRNA target sequence for QPCT (NM_012413.2,495-513).
gtgccatgtgcaatgatgt

SEQ ID NO: 216456 - DNA, 19 bp, Homo sapiens
  siRNA target sequence for QPCT (NM_012413.2,523-541).
ctcgtgccttagacaagaa

SEQ ID NO: 216457 - DNA, 19 bp, Homo sapiens
  siRNA target sequence for QPCT (NM_012413.2,567-585).
gactccaagccagatttgt

SEQ ID NO: 216458 - DNA, 19 bp, Homo sapiens
  siRNA target sequence for QPCT (NM_012413.2,569-587).
ctccaagccagatttgtca

SEQ ID NO: 216459 - DNA, 19 bp, Homo sapiens
  siRNA target sequence for QPCT (NM_012413.2,650-668).
ctatgggtctcgacactta

SEQ ID NO: 216460 - DNA, 19 bp, Homo sapiens
  siRNA target sequence for QPCT (NM_012413.2,661-679).
gacacttagctgcaaagat

SEQ ID NO: 216461 - DNA, 19 bp, Homo sapiens
  siRNA target sequence for QPCT (NM_012413.2,775-793).
caacgtttcccaatttttt

SEQ ID NO: 216462 - DNA, 19 bp, Homo sapiens
  siRNA target sequence for QPCT (NM_012413.2,805-823).
ccaggtggttcgaaagact

SEQ ID NO: 216463 - DNA, 19 bp, Homo sapiens
  siRNA target sequence for QPCT (NM_012413.2,806-824).
caggtggttcgaaagactt

SEQ ID NO: 216464 - DNA, 19 bp, Homo sapiens
  siRNA target sequence for QPCT (NM_012413.2,809-827).
gtggttcgaaagacttcaa

SEQ ID NO: 216465 - DNA, 19 bp, Homo sapiens
  siRNA target sequence for QPCT (NM_012413.2,815-833).
cgaaagacttcaagcaatt

SEQ ID NO: 216466 - DNA, 19 bp, Homo sapiens
  siRNA target sequence for QPCT (NM_012413.2,885-903).
cggtatttccagaattaca

SEQ ID NO: 216467 - DNA, 19 bp, Homo sapiens
  siRNA target sequence for QPCT (NM_012413.2,921-939).
caggatgaccatattccat

SEQ ID NO: 216468 - DNA, 19 bp, Homo sapiens
  siRNA target sequence for QPCT (NM_012413.2,997-1015).
ggcacaccatggatgacaa

SEQ ID NO: 216469 - DNA, 19 bp, Homo sapiens
  siRNA target sequence for QPCT (NM_012413.2,998-1016).
gcacaccatggatgacaat

SEQ ID NO: 216470 - DNA, 19 bp, Homo sapiens
  siRNA target sequence for QPCT (NM_012413.2,1003-1021).
ccatggatgacaatgaaga

SEQ ID NO: 216471 - DNA, 19 bp, Homo sapiens
  siRNA target sequence for QPCT (NM_012413.2,1029-1047).
gatgaatcaaccattgaca

SEQ ID NO: 216472 - DNA, 19 bp, Homo sapiens
  siRNA target sequence for QPCT (NM_012413.2,1055-1073).
caaaatcctacaagtcttt

SEQ ID NO: 216473 - DNA, 19 bp, Homo sapiens
  siRNA target sequence for TAZ (NM_000116.2,817-835).
ggggactgggtgcatatct

SEQ ID NO: 216474 - DNA, 19 bp, Homo sapiens
  siRNA target sequence for TAZ (NM_000116.2,844-862).
gggaaagtgaacatgagtt

SEQ ID NO: 216475 - DNA, 19 bp, Homo sapiens
  siRNA target sequence for TAZ (NM_000116.2,863-881).
ccgaattcctgcgtttcaa

SEQ ID NO: 216476 - DNA, 19 bp, Homo sapiens
  siRNA target sequence for TAZ (NM_000116.2,939-957).
gtggcatgtcggaatgaat

SEQ ID NO: 216477 - DNA, 19 bp, Homo sapiens
  siRNA target sequence for TAZ (NM_000116.2,941-959).
ggcatgtcggaatgaatga

SEQ ID NO: 216478 - DNA, 19 bp, Homo sapiens
  siRNA target sequence for TAZ (NM_000116.2,991-1009).
cgctttggacagaaaatca

SEQ ID NO: 216479 - DNA, 19 bp, Homo sapiens
  siRNA target sequence for FLJ90165 (NM_153338.1,155-173).
cagaggcgctggttctaaa

SEQ ID NO: 216480 - DNA, 19 bp, Homo sapiens
  siRNA target sequence for GGTL3 (NM_052830.3,410-428).
cgctggtcatgcagatcta

SEQ ID NO: 216481 - DNA, 19 bp, Homo sapiens
  siRNA target sequence for GGTL3 (NM_052830.3,497-515).
gcatcgaggtgctcagtaa

SEQ ID NO: 216482 - DNA, 19 bp, Homo sapiens
  siRNA target sequence for GGTL3 (NM_052830.3,510-528).
cagtaaacagggatcttct

SEQ ID NO: 216483 - DNA, 19 bp, Homo sapiens
  siRNA target sequence for GGTL3 (NM_052830.3,602-620).
gcgtgatgctggtacatga

SEQ ID NO: 216484 - DNA, 19 bp, Homo sapiens
  siRNA target sequence for GGTL3 (NM_052830.3,619-637).
gacatccgacgaaatgaga

SEQ ID NO: 216485 - DNA, 19 bp, Homo sapiens
  siRNA target sequence for GGTL3 (NM_052830.3,634-652).
gagagccacctaattgatt

SEQ ID NO: 216486 - DNA, 19 bp, Homo sapiens
  siRNA target sequence for GGTL3 (NM_052830.3,682-700).
gaagagaccctgcaaagat

SEQ ID NO: 216487 - DNA, 19 bp, Homo sapiens
  siRNA target sequence for GGTL3 (NM_052830.3,834-852).
cttcaacgtgactcatgat

SEQ ID NO: 216488 - DNA, 19 bp, Homo sapiens
  siRNA target sequence for GGTL3 (NM_052830.3,837-855).
caacgtgactcatgatcta

SEQ ID NO: 216489 - DNA, 19 bp, Homo sapiens
  siRNA target sequence for GGTL3 (NM_052830.3,1059-1077).
gcacgcagggggtgtcata

SEQ ID NO: 216490 - DNA, 19 bp, Homo sapiens
  siRNA target sequence for GGTL3 (NM_052830.3,1060-1078).
cacgcagggggtgtcataa

SEQ ID NO: 216491 - DNA, 19 bp, Homo sapiens
  siRNA target sequence for GGTL3 (NM_052830.3,1084-1102).
gaggacttcagcaattaca

SEQ ID NO: 216492 - DNA, 19 bp, Homo sapiens
  siRNA target sequence for GGTL3 (NM_052830.3,1305-1323).
gggagatcccgtctatgat

SEQ ID NO: 216493 - DNA, 19 bp, Homo sapiens
  siRNA target sequence for GGTL3 (NM_052830.3,1309-1327).
gatcccgtctatgattcta

SEQ ID NO: 216494 - DNA, 19 bp, Homo sapiens
  siRNA target sequence for GGTL3 (NM_052830.3,1646-1664).
ggaagcggccactctcttt

SEQ ID NO: 216495 - DNA, 19 bp, Homo sapiens
  siRNA target sequence for GGTL3 (NM_052830.3,1760-1778).
cacaggttctgctgaatgt

SEQ ID NO: 216496 - DNA, 19 bp, Homo sapiens
  siRNA target sequence for GGTL3 (NM_052830.3,1952-1970).
gccgaaggaccaacaactt

SEQ ID NO: 216497 - DNA, 19 bp, Homo sapiens
  siRNA target sequence for GGTL3 (NM_178025.1,769-787).
ctgctaacccaagcattaa

SEQ ID NO: 216498 - DNA, 19 bp, Homo sapiens
  siRNA target sequence for GGTL3 (NM_178026.1,1788-1806).
ctttagggtgggatttgaa

SEQ ID NO: 216499 - DNA, 19 bp, Homo sapiens
  siRNA target sequence for HMGCS1 (NM_002130.3,180-198).
gttgcccttgagatctatt

SEQ ID NO: 216500 - DNA, 19 bp, Homo sapiens
  siRNA target sequence for HMGCS1 (NM_002130.3,290-308).
gggcttctgcacagataga

SEQ ID NO: 216501 - DNA, 19 bp, Homo sapiens
  siRNA target sequence for HMGCS1 (NM_002130.3,334-352).
ctgtggttcagaatcttat

SEQ ID NO: 216502 - DNA, 19 bp, Homo sapiens
  siRNA target sequence for HMGCS1 (NM_002130.3,409-427).
caatcatcgacaaatcaaa

SEQ ID NO: 216503 - DNA, 19 bp, Homo sapiens
  siRNA target sequence for HMGCS1 (NM_002130.3,413-431).
catcgacaaatcaaagtct

SEQ ID NO: 216504 - DNA, 19 bp, Homo sapiens
  siRNA target sequence for HMGCS1 (NM_002130.3,483-501).
gaaggaatcgacacaacta

SEQ ID NO: 216505 - DNA, 19 bp, Homo sapiens
  siRNA target sequence for HMGCS1 (NM_002130.3,494-512).
cacaactaatgcatgctat

SEQ ID NO: 216506 - DNA, 19 bp, Homo sapiens
  siRNA target sequence for HMGCS1 (NM_002130.3,517-535).
gcacagctgctgtcttcaa

SEQ ID NO: 216507 - DNA, 19 bp, Homo sapiens
  siRNA target sequence for HMGCS1 (NM_002130.3,526-544).
ctgtcttcaatgctgttaa

SEQ ID NO: 216508 - DNA, 19 bp, Homo sapiens
  siRNA target sequence for HMGCS1 (NM_002130.3,528-546).
gtcttcaatgctgttaact

SEQ ID NO: 216509 - DNA, 19 bp, Homo sapiens
  siRNA target sequence for HMGCS1 (NM_002130.3,584-602).
ggtagttgcaggagatatt

SEQ ID NO: 216510 - DNA, 19 bp, Homo sapiens
  siRNA target sequence for HMGCS1 (NM_002130.3,646-664).
gagcagtagctctgctaat

SEQ ID NO: 216511 - DNA, 19 bp, Homo sapiens
  siRNA target sequence for HMGCS1 (NM_002130.3,659-677).
gctaattgggccaaatgct

SEQ ID NO: 216512 - DNA, 19 bp, Homo sapiens
  siRNA target sequence for HMGCS1 (NM_002130.3,666-684).
gggccaaatgctcctttaa

SEQ ID NO: 216513 - DNA, 19 bp, Homo sapiens
  siRNA target sequence for HMGCS1 (NM_002130.3,667-685).
ggccaaatgctcctttaat

SEQ ID NO: 216514 - DNA, 19 bp, Homo sapiens
  siRNA target sequence for HMGCS1 (NM_002130.3,668-686).
gccaaatgctcctttaatt

SEQ ID NO: 216515 - DNA, 19 bp, Homo sapiens
  siRNA target sequence for HMGCS1 (NM_002130.3,697-715).
ggcttcgtgggacacatat

SEQ ID NO: 216516 - DNA, 19 bp, Homo sapiens
  siRNA target sequence for HMGCS1 (NM_002130.3,717-735).
caacatgcctatgattttt

SEQ ID NO: 216517 - DNA, 19 bp, Homo sapiens
  siRNA target sequence for HMGCS1 (NM_002130.3,754-772).
ctgaatatcctatagtaga

SEQ ID NO: 216518 - DNA, 19 bp, Homo sapiens
  siRNA target sequence for HMGCS1 (NM_002130.3,791-809).
gtgctacctcagtgcatta

SEQ ID NO: 216519 - DNA, 19 bp, Homo sapiens
  siRNA target sequence for HMGCS1 (NM_002130.3,793-811).
gctacctcagtgcattaga

SEQ ID NO: 216520 - DNA, 19 bp, Homo sapiens
  siRNA target sequence for HMGCS1 (NM_002130.3,804-822).
gcattagaccgctgctatt

SEQ ID NO: 216521 - DNA, 19 bp, Homo sapiens
  siRNA target sequence for HMGCS1 (NM_002130.3,823-841).
ctgtctactgcaaaaagat

SEQ ID NO: 216522 - DNA, 19 bp, Homo sapiens
  siRNA target sequence for HMGCS1 (NM_002130.3,897-915).
ggcttcatgatctttcact

SEQ ID NO: 216523 - DNA, 19 bp, Homo sapiens
  siRNA target sequence for HMGCS1 (NM_002130.3,905-923).
gatctttcactcaccatat

SEQ ID NO: 216524 - DNA, 19 bp, Homo sapiens
  siRNA target sequence for HMGCS1 (NM_002130.3,951-969).
cggatgttgctgaatgact

SEQ ID NO: 216525 - DNA, 19 bp, Homo sapiens
  siRNA target sequence for HMGCS1 (NM_002130.3,1046-1064).
cacctactttgatagagat

SEQ ID NO: 216526 - DNA, 19 bp, Homo sapiens
  siRNA target sequence for HMGCS1 (NM_002130.3,1302-1320).
ccggggtctgctcttgata

SEQ ID NO: 216527 - DNA, 19 bp, Homo sapiens
  siRNA target sequence for HMGCS1 (NM_002130.3,1303-1321).
cggggtctgctcttgataa

SEQ ID NO: 216528 - DNA, 19 bp, Homo sapiens
  siRNA target sequence for HMGCS1 (NM_002130.3,1330-1348).
caagtttatgtgatcttaa

SEQ ID NO: 216529 - DNA, 19 bp, Homo sapiens
  siRNA target sequence for HMGCS1 (NM_002130.3,1386-1404).
gtcttcgctgaaaacatga

SEQ ID NO: 216530 - DNA, 19 bp, Homo sapiens
  siRNA target sequence for HMGCS1 (NM_002130.3,1420-1438).
cccatcatttggtcaacta

SEQ ID NO: 216531 - DNA, 19 bp, Homo sapiens
  siRNA target sequence for HMGCS1 (NM_002130.3,1421-1439).
ccatcatttggtcaactat

SEQ ID NO: 216532 - DNA, 19 bp, Homo sapiens
  siRNA target sequence for HMGCS1 (NM_002130.3,1422-1440).
catcatttggtcaactata

SEQ ID NO: 216533 - DNA, 19 bp, Homo sapiens
  siRNA target sequence for HMGCS1 (NM_002130.3,1453-1471).
caatagattcactctttga

SEQ ID NO: 216534 - DNA, 19 bp, Homo sapiens
  siRNA target sequence for HMGCS1 (NM_002130.3,1473-1491).
ggaacgtggtacttagtta

SEQ ID NO: 216535 - DNA, 19 bp, Homo sapiens
  siRNA target sequence for HMGCS1 (NM_002130.3,1525-1543).
ggcgtcccactccaaatga

SEQ ID NO: 216536 - DNA, 19 bp, Homo sapiens
  siRNA target sequence for HMGCS1 (NM_002130.3,1528-1546).
gtcccactccaaatgatga

SEQ ID NO: 216537 - DNA, 19 bp, Homo sapiens
  siRNA target sequence for HMGCS1 (NM_002130.3,1563-1581).
gtaggacttgtgcattcaa

SEQ ID NO: 216538 - DNA, 19 bp, Homo sapiens
  siRNA target sequence for HMGCS1 (NM_002130.3,1566-1584).
ggacttgtgcattcaaaca

SEQ ID NO: 216539 - DNA, 19 bp, Homo sapiens
  siRNA target sequence for HMGCS1 (NM_002130.3,1567-1585).
gacttgtgcattcaaacat

SEQ ID NO: 216540 - DNA, 19 bp, Homo sapiens
  siRNA target sequence for HMGCS1 (NM_002130.3,1572-1590).
gtgcattcaaacatagcaa

SEQ ID NO: 216541 - DNA, 19 bp, Homo sapiens
  siRNA target sequence for HMGCS1 (NM_002130.3,1583-1601).
catagcaactgagcatatt

SEQ ID NO: 216542 - DNA, 19 bp, Homo sapiens
  siRNA target sequence for HMGCS1 (NM_002130.3,1587-1605).
gcaactgagcatattccaa

SEQ ID NO: 216543 - DNA, 19 bp, Homo sapiens
  siRNA target sequence for HMGCS2 (NM_005518.1,140-158).
cagtagcccaccaaaggtt

SEQ ID NO: 216544 - DNA, 19 bp, Homo sapiens
  siRNA target sequence for HMGCS2 (NM_005518.1,142-160).
gtagcccaccaaaggtttt

SEQ ID NO: 216545 - DNA, 19 bp, Homo sapiens
  siRNA target sequence for HMGCS2 (NM_005518.1,145-163).
gcccaccaaaggttttcta

SEQ ID NO: 216546 - DNA, 19 bp, Homo sapiens
  siRNA target sequence for HMGCS2 (NM_005518.1,147-165).
ccaccaaaggttttctaca

SEQ ID NO: 216547 - DNA, 19 bp, Homo sapiens
  siRNA target sequence for HMGCS2 (NM_005518.1,178-196).
cccctggccaaaacagata

SEQ ID NO: 216548 - DNA, 19 bp, Homo sapiens
  siRNA target sequence for HMGCS2 (NM_005518.1,180-198).
cctggccaaaacagatact

SEQ ID NO: 216549 - DNA, 19 bp, Homo sapiens
  siRNA target sequence for HMGCS2 (NM_005518.1,234-252).
ctacttcccagcccaatat

SEQ ID NO: 216550 - DNA, 19 bp, Homo sapiens
  siRNA target sequence for HMGCS2 (NM_005518.1,343-361).
gtccaagaggacatcaact

SEQ ID NO: 216551 - DNA, 19 bp, Homo sapiens
  siRNA target sequence for HMGCS2 (NM_005518.1,459-477).
caagtccaaagctgtcaaa

SEQ ID NO: 216552 - DNA, 19 bp, Homo sapiens
  siRNA target sequence for HMGCS2 (NM_005518.1,501-519).
ggattcaggcaatactgat

SEQ ID NO: 216553 - DNA, 19 bp, Homo sapiens
  siRNA target sequence for HMGCS2 (NM_005518.1,502-520).
gattcaggcaatactgata

SEQ ID NO: 216554 - DNA, 19 bp, Homo sapiens
  siRNA target sequence for HMGCS2 (NM_005518.1,506-524).
caggcaatactgatattga

SEQ ID NO: 216555 - DNA, 19 bp, Homo sapiens
  siRNA target sequence for HMGCS2 (NM_005518.1,557-575).
gtactgcctccctcttcaa

SEQ ID NO: 216556 - DNA, 19 bp, Homo sapiens
  siRNA target sequence for HMGCS2 (NM_005518.1,645-663).
cgtctatcccagtggtaat

SEQ ID NO: 216557 - DNA, 19 bp, Homo sapiens
  siRNA target sequence for HMGCS2 (NM_005518.1,648-666).
ctatcccagtggtaatgct

SEQ ID NO: 216558 - DNA, 19 bp, Homo sapiens
  siRNA target sequence for HMGCS2 (NM_005518.1,769-787).
gacttctacaaaccaaatt

SEQ ID NO: 216559 - DNA, 19 bp, Homo sapiens
  siRNA target sequence for HMGCS2 (NM_005518.1,791-809).
cctcggagtacccaatagt

SEQ ID NO: 216560 - DNA, 19 bp, Homo sapiens
  siRNA target sequence for HMGCS2 (NM_005518.1,844-862).
gccttggatcgatgttaca

SEQ ID NO: 216561 - DNA, 19 bp, Homo sapiens
  siRNA target sequence for HMGCS2 (NM_005518.1,846-864).
cttggatcgatgttacaca

SEQ ID NO: 216562 - DNA, 19 bp, Homo sapiens
  siRNA target sequence for HMGCS2 (NM_005518.1,861-879).
cacatcataccgtaaaaaa

SEQ ID NO: 216563 - DNA, 19 bp, Homo sapiens
  siRNA target sequence for HMGCS2 (NM_005518.1,863-881).
catcataccgtaaaaaaat

SEQ ID NO: 216564 - DNA, 19 bp, Homo sapiens
  siRNA target sequence for HMGCS2 (NM_005518.1,917-935).
ccttcacccttgacgattt

SEQ ID NO: 216565 - DNA, 19 bp, Homo sapiens
  siRNA target sequence for HMGCS2 (NM_005518.1,918-936).
cttcacccttgacgattta

SEQ ID NO: 216566 - DNA, 19 bp, Homo sapiens
  siRNA target sequence for HMGCS2 (NM_005518.1,923-941).
cccttgacgatttacagta

SEQ ID NO: 216567 - DNA, 19 bp, Homo sapiens
  siRNA target sequence for HMGCS2 (NM_005518.1,987-1005).
ggctcgcctgatgttcaat

SEQ ID NO: 216568 - DNA, 19 bp, Homo sapiens
  siRNA target sequence for HMGCS2 (NM_005518.1,989-1007).
ctcgcctgatgttcaatga

SEQ ID NO: 216569 - DNA, 19 bp, Homo sapiens
  siRNA target sequence for HMGCS2 (NM_005518.1,991-1009).
cgcctgatgttcaatgact

SEQ ID NO: 216570 - DNA, 19 bp, Homo sapiens
  siRNA target sequence for HMGCS2 (NM_005518.1,1104-1122).
cctggataaagcacttcta

SEQ ID NO: 216571 - DNA, 19 bp, Homo sapiens
  siRNA target sequence for HMGCS2 (NM_005518.1,1134-1152).
ggacatgttcgacaagaaa

SEQ ID NO: 216572 - DNA, 19 bp, Homo sapiens
  siRNA target sequence for HMGCS2 (NM_005518.1,1135-1153).
gacatgttcgacaagaaaa

SEQ ID NO: 216573 - DNA, 19 bp, Homo sapiens
  siRNA target sequence for HMGCS2 (NM_005518.1,1178-1196).
ctcacaatgggaacatgta

SEQ ID NO: 216574 - DNA, 19 bp, Homo sapiens
  siRNA target sequence for HMGCS2 (NM_005518.1,1281-1299).
ctcttatggctctggttta

SEQ ID NO: 216575 - DNA, 19 bp, Homo sapiens
  siRNA target sequence for HMGCS2 (NM_005518.1,1294-1312).
ggtttagcagcaagtttct

SEQ ID NO: 216576 - DNA, 19 bp, Homo sapiens
  siRNA target sequence for HMGCS2 (NM_005518.1,1346-1364).
gctctcccctggacaagtt

SEQ ID NO: 216577 - DNA, 19 bp, Homo sapiens
  siRNA target sequence for HMGCS2 (NM_005518.1,1451-1469).
gagagcaattctaccataa

SEQ ID NO: 216578 - DNA, 19 bp, Homo sapiens
  siRNA target sequence for HMGCS2 (NM_005518.1,1542-1560).
gcagcatcgccgaaagtat

SEQ ID NO: 216579 - DNA, 19 bp, Homo sapiens
  siRNA target sequence for CS (NM_004077.2,711-729).
ccctcaacagtgaaagtaa

SEQ ID NO: 216580 - DNA, 19 bp, Homo sapiens
  siRNA target sequence for CS (NM_004077.2,769-787).
gtactgggagttgatttat

SEQ ID NO: 216581 - DNA, 19 bp, Homo sapiens
  siRNA target sequence for CS (NM_004077.2,799-817).
ggatctaatcgcaaagcta

SEQ ID NO: 216582 - DNA, 19 bp, Homo sapiens
  siRNA target sequence for CS (NM_004077.2,808-826).
cgcaaagctaccttgtgtt

SEQ ID NO: 216583 - DNA, 19 bp, Homo sapiens
  siRNA target sequence for CS (NM_004077.2,822-840).
gtgttgcagcaaagatcta

SEQ ID NO: 216584 - DNA, 19 bp, Homo sapiens
  siRNA target sequence for CS (NM_004077.2,866-884).
ggtattggggccattgact

SEQ ID NO: 216585 - DNA, 19 bp, Homo sapiens
  siRNA target sequence for CS (NM_004077.2,893-911).
gactggtctcacaatttca

SEQ ID NO: 216586 - DNA, 19 bp, Homo sapiens
  siRNA target sequence for CS (NM_004077.2,913-931).
caacatgttaggctatact

SEQ ID NO: 216587 - DNA, 19 bp, Homo sapiens
  siRNA target sequence for CS (NM_004077.2,916-934).
catgttaggctatactgat

SEQ ID NO: 216588 - DNA, 19 bp, Homo sapiens
  siRNA target sequence for CS (NM_004077.2,924-942).
gctatactgatcatcagtt

SEQ ID NO: 216589 - DNA, 19 bp, Homo sapiens
  siRNA target sequence for CS (NM_004077.2,983-1001).
catgagggtggcaatgtaa

SEQ ID NO: 216590 - DNA, 19 bp, Homo sapiens
  siRNA target sequence for CLYBL (NM_138280.2,96-114).
ccccagacttggatatagt

SEQ ID NO: 216591 - DNA, 19 bp, Homo sapiens
  siRNA target sequence for CLYBL (NM_138280.2,97-115).
cccagacttggatatagtt

SEQ ID NO: 216592 - DNA, 19 bp, Homo sapiens
  siRNA target sequence for CLYBL (NM_138280.2,113-131).
gttcctcatcccatcacaa

SEQ ID NO: 216593 - DNA, 19 bp, Homo sapiens
  siRNA target sequence for CLYBL (NM_138280.2,116-134).
cctcatcccatcacaagta

SEQ ID NO: 216594 - DNA, 19 bp, Homo sapiens
  siRNA target sequence for CLYBL (NM_138280.2,119-137).
catcccatcacaagtacat

SEQ ID NO: 216595 - DNA, 19 bp, Homo sapiens
  siRNA target sequence for CLYBL (NM_138280.2,141-159).
ccggagggcagtgctttat

SEQ ID NO: 216596 - DNA, 19 bp, Homo sapiens
  siRNA target sequence for CLYBL (NM_138280.2,192-210).
gattccatccctgaatgta

SEQ ID NO: 216597 - DNA, 19 bp, Homo sapiens
  siRNA target sequence for CLYBL (NM_138280.2,266-284).
ctcgactgagaattgtaaa

SEQ ID NO: 216598 - DNA, 19 bp, Homo sapiens
  siRNA target sequence for CLYBL (NM_138280.2,306-324).
gggccctactgaaaaatgt

SEQ ID NO: 216599 - DNA, 19 bp, Homo sapiens
  siRNA target sequence for CLYBL (NM_138280.2,325-343).
gtgagagtcaactcagttt

SEQ ID NO: 216600 - DNA, 19 bp, Homo sapiens
  siRNA target sequence for CLYBL (NM_138280.2,347-365).
gtggtctggcggaagaaga

SEQ ID NO: 216601 - DNA, 19 bp, Homo sapiens
  siRNA target sequence for CLYBL (NM_138280.2,487-505).
cttgaacaaccaatgaatt

SEQ ID NO: 216602 - DNA, 19 bp, Homo sapiens
  siRNA target sequence for CLYBL (NM_138280.2,526-544).
gcaatgggtttgctcaatt

SEQ ID NO: 216603 - DNA, 19 bp, Homo sapiens
  siRNA target sequence for CLYBL (NM_138280.2,570-588).
gaaggtcgggcctcaagta

SEQ ID NO: 216604 - DNA, 19 bp, Homo sapiens
  siRNA target sequence for CLYBL (NM_138280.2,636-654).
cagcataggtgcaacaagt

SEQ ID NO: 216605 - DNA, 19 bp, Homo sapiens
  siRNA target sequence for CLYBL (NM_138280.2,644-662).
gtgcaacaagtagtaaaga

SEQ ID NO: 216606 - DNA, 19 bp, Homo sapiens
  siRNA target sequence for CLYBL (NM_138280.2,686-704).
ggcaaaagattgttgtcat

SEQ ID NO: 216607 - DNA, 19 bp, Homo sapiens
  siRNA target sequence for CLYBL (NM_138280.2,733-751).
gatctggtgtacattgact

SEQ ID NO: 216608 - DNA, 19 bp, Homo sapiens
  siRNA target sequence for CLYBL (NM_138280.2,761-779).
gagctgggctgcttagaca

SEQ ID NO: 216609 - DNA, 19 bp, Homo sapiens
  siRNA target sequence for CLYBL (NM_138280.2,820-838).
gtgattcaccctaaccaaa

SEQ ID NO: 216610 - DNA, 19 bp, Homo sapiens
  siRNA target sequence for CLYBL (NM_138280.2,822-840).
gattcaccctaaccaaatt

SEQ ID NO: 216611 - DNA, 19 bp, Homo sapiens
  siRNA target sequence for GSTA3 (NM_000847.3,483-501).
ccttcgaaaaagtgttaca

SEQ ID NO: 216612 - DNA, 19 bp, Homo sapiens
  siRNA target sequence for GSTA3 (NM_000847.3,698-716).
cccgcagatgcaaaagctt

SEQ ID NO: 216613 - DNA, 19 bp, Homo sapiens
  siRNA target sequence for GSTA3 (NM_000847.3,699-717).
ccgcagatgcaaaagcttt

SEQ ID NO: 216614 - DNA, 19 bp, Homo sapiens
  siRNA target sequence for GSTA3 (NM_000847.3,700-718).
cgcagatgcaaaagcttta

SEQ ID NO: 216615 - DNA, 19 bp, Homo sapiens
  siRNA target sequence for GSTA4 (NM_001512.2,163-181).
gtccgtgagatgggtttta

SEQ ID NO: 216616 - DNA, 19 bp, Homo sapiens
  siRNA target sequence for GSTA4 (NM_001512.2,166-184).
cgtgagatgggttttagct

SEQ ID NO: 216617 - DNA, 19 bp, Homo sapiens
  siRNA target sequence for GSTA4 (NM_001512.2,189-207).
ccggagtcgagtttgatga

SEQ ID NO: 216618 - DNA, 19 bp, Homo sapiens
  siRNA target sequence for GSTA4 (NM_001512.2,190-208).
cggagtcgagtttgatgaa

SEQ ID NO: 216619 - DNA, 19 bp, Homo sapiens
  siRNA target sequence for GSTA4 (NM_001512.2,600-618).
ccattttagctctagaaga

SEQ ID NO: 216620 - DNA, 19 bp, Homo sapiens
  siRNA target sequence for GSTA4 (NM_001512.2,666-684).
cagtgaaactaagtaatat

SEQ ID NO: 216621 - DNA, 19 bp, Homo sapiens
  siRNA target sequence for GSTA4 (NM_001512.2,678-696).
gtaatatccctacaattaa

SEQ ID NO: 216622 - DNA, 19 bp, Homo sapiens
  siRNA target sequence for GSTA4 (NM_001512.2,724-742).
gaagcctccccctgatgaa

SEQ ID NO: 216623 - DNA, 19 bp, Homo sapiens
  siRNA target sequence for GSTA4 (NM_001512.2,734-752).
cctgatgaaatttatgtga

SEQ ID NO: 216624 - DNA, 19 bp, Homo sapiens
  siRNA target sequence for GSTA4 (NM_001512.2,749-767).
gtgagaaccgtctacaaca

SEQ ID NO: 216625 - DNA, 19 bp, Homo sapiens
  siRNA target sequence for GSTM1 (NM_000561.2,365-383).
ccatggacaaccatatgca

SEQ ID NO: 216626 - DNA, 19 bp, Homo sapiens
  siRNA target sequence for GSTM1 (NM_000561.2,387-405).
gggcatgatctgctacaat

SEQ ID NO: 216627 - DNA, 19 bp, Homo sapiens
  siRNA target sequence for GSTM1 (NM_000561.2,396-414).
ctgctacaatccagaattt

SEQ ID NO: 216628 - DNA, 19 bp, Homo sapiens
  siRNA target sequence for GSTM1 (NM_000561.2,671-689).
gacctgtgttctcaaagat

SEQ ID NO: 216629 - DNA, 19 bp, Homo sapiens
  siRNA target sequence for GSTM2 (NM_000848.2,515-533).
ggatttcatcgcttatgat

SEQ ID NO: 216630 - DNA, 19 bp, Homo sapiens
  siRNA target sequence for GSTM2 (NM_000848.2,537-555).
cttgagagaaaccaagtat

SEQ ID NO: 216631 - DNA, 19 bp, Homo sapiens
  siRNA target sequence for GSTM3 (NM_000849.3,158-176).
cgggtactgggatattcgt

SEQ ID NO: 216632 - DNA, 19 bp, Homo sapiens
  siRNA target sequence for GSTM3 (NM_000849.3,209-227).
gttcacggatacctcttat

SEQ ID NO: 216633 - DNA, 19 bp, Homo sapiens
  siRNA target sequence for GSTM3 (NM_000849.3,401-419).
gtgtggtgagactgaagaa

SEQ ID NO: 216634 - DNA, 19 bp, Homo sapiens
  siRNA target sequence for GSTM3 (NM_000849.3,429-447).
cgagtggacatcatagaga

SEQ ID NO: 216635 - DNA, 19 bp, Homo sapiens
  siRNA target sequence for GSTM3 (NM_000849.3,430-448).
gagtggacatcatagagaa

SEQ ID NO: 216636 - DNA, 19 bp, Homo sapiens
  siRNA target sequence for GSTM3 (NM_000849.3,496-514).
ctgaccacgaaaaactgaa

SEQ ID NO: 216637 - DNA, 19 bp, Homo sapiens
  siRNA target sequence for GSTM3 (NM_000849.3,533-551).
gctacctggacaactgaaa

SEQ ID NO: 216638 - DNA, 19 bp, Homo sapiens
  siRNA target sequence for GSTM3 (NM_000849.3,548-566).
gaaacaattctccatgttt

SEQ ID NO: 216639 - DNA, 19 bp, Homo sapiens
  siRNA target sequence for GSTM3 (NM_000849.3,569-587).
ggggaaattctcatggttt

SEQ ID NO: 216640 - DNA, 19 bp, Homo sapiens
  siRNA target sequence for GSTM3 (NM_000849.3,611-629).
ggattttctcacctatgat

SEQ ID NO: 216641 - DNA, 19 bp, Homo sapiens
  siRNA target sequence for GSTM3 (NM_000849.3,635-653).
ggatcagaaccgtatattt

SEQ ID NO: 216642 - DNA, 19 bp, Homo sapiens
  siRNA target sequence for GSTM4 (NM_000850.3,694-712).
gaggaacttcctacaatga

SEQ ID NO: 216643 - DNA, 19 bp, Homo sapiens
  siRNA target sequence for GSTM4 (NM_000850.3,738-756).
gaagaggccatggtttgtt

SEQ ID NO: 216644 - DNA, 19 bp, Homo sapiens
  siRNA target sequence for GSTM5 (NM_000851.2,683-701).
cgaggtcttttgtttggaa

SEQ ID NO: 216645 - DNA, 19 bp, Homo sapiens
  siRNA target sequence for GSTO1 (NM_004832.1,73-91).
ggctcgatccgcatctaca

SEQ ID NO: 216646 - DNA, 19 bp, Homo sapiens
  siRNA target sequence for GSTO1 (NM_004832.1,146-164).
gaatcaggcatgaagtcat

SEQ ID NO: 216647 - DNA, 19 bp, Homo sapiens
  siRNA target sequence for GSTO1 (NM_004832.1,154-172).
catgaagtcatcaatatca

SEQ ID NO: 216648 - DNA, 19 bp, Homo sapiens
  siRNA target sequence for GSTO1 (NM_004832.1,242-260).
gtcagggtcagctgatcta

SEQ ID NO: 216649 - DNA, 19 bp, Homo sapiens
  siRNA target sequence for GSTO1 (NM_004832.1,325-343).
gacccctatgagaaagctt

SEQ ID NO: 216650 - DNA, 19 bp, Homo sapiens
  siRNA target sequence for GSTO1 (NM_004832.1,427-445).
gctggcctaaaagaagaat

SEQ ID NO: 216651 - DNA, 19 bp, Homo sapiens
  siRNA target sequence for GSTO1 (NM_004832.1,428-446).
ctggcctaaaagaagaatt

SEQ ID NO: 216652 - DNA, 19 bp, Homo sapiens
  siRNA target sequence for GSTO1 (NM_004832.1,472-490).
gaggttctgactaataaga

SEQ ID NO: 216653 - DNA, 19 bp, Homo sapiens
  siRNA target sequence for GSTO1 (NM_004832.1,505-523).
ggtggcaattctatctcta

SEQ ID NO: 216654 - DNA, 19 bp, Homo sapiens
  siRNA target sequence for GSTO1 (NM_004832.1,565-583).
gcaatgaagttaaatgagt

SEQ ID NO: 216655 - DNA, 19 bp, Homo sapiens
  siRNA target sequence for GSTO1 (NM_004832.1,589-607).
gaccacactccaaaactga

SEQ ID NO: 216656 - DNA, 19 bp, Homo sapiens
  siRNA target sequence for GSTO1 (NM_004832.1,591-609).
ccacactccaaaactgaaa

SEQ ID NO: 216657 - DNA, 19 bp, Homo sapiens
  siRNA target sequence for GSTO1 (NM_004832.1,680-698).
gtttcctagagctctactt

SEQ ID NO: 216658 - DNA, 19 bp, Homo sapiens
  siRNA target sequence for GSTO2 (NM_183239.1,692-710).
gggctgatccgcatctaca

SEQ ID NO: 216659 - DNA, 19 bp, Homo sapiens
  siRNA target sequence for GSTO2 (NM_183239.1,771-789).
gacatgaagtggtcaacat

SEQ ID NO: 216660 - DNA, 19 bp, Homo sapiens
  siRNA target sequence for GSTO2 (NM_183239.1,773-791).
catgaagtggtcaacatta

SEQ ID NO: 216661 - DNA, 19 bp, Homo sapiens
  siRNA target sequence for GSTO2 (NM_183239.1,798-816).
gaaacaagcctgaatggta

SEQ ID NO: 216662 - DNA, 19 bp, Homo sapiens
  siRNA target sequence for GSTO2 (NM_183239.1,858-876).
ccagccaatgtcaactgat

SEQ ID NO: 216663 - DNA, 19 bp, Homo sapiens
  siRNA target sequence for GSTO2 (NM_183239.1,862-880).
ccaatgtcaactgatctat

SEQ ID NO: 216664 - DNA, 19 bp, Homo sapiens
  siRNA target sequence for GSTO2 (NM_183239.1,953-971).
gaacgagctcgccaaaaga

SEQ ID NO: 216665 - DNA, 19 bp, Homo sapiens
  siRNA target sequence for GSTO2 (NM_183239.1,956-974).
cgagctcgccaaaagatgt

SEQ ID NO: 216666 - DNA, 19 bp, Homo sapiens
  siRNA target sequence for GSTO2 (NM_183239.1,957-975).
gagctcgccaaaagatgtt

SEQ ID NO: 216667 - DNA, 19 bp, Homo sapiens
  siRNA target sequence for GSTO2 (NM_183239.1,959-977).
gctcgccaaaagatgttat

SEQ ID NO: 216668 - DNA, 19 bp, Homo sapiens
  siRNA target sequence for GSTO2 (NM_183239.1,973-991).
gttattggagctattttgt

SEQ ID NO: 216669 - DNA, 19 bp, Homo sapiens
  siRNA target sequence for GSTO2 (NM_183239.1,1062-1080).
cagccctgcgtcaggaatt

SEQ ID NO: 216670 - DNA, 19 bp, Homo sapiens
  siRNA target sequence for GSTO2 (NM_183239.1,1064-1082).
gccctgcgtcaggaattca

SEQ ID NO: 216671 - DNA, 19 bp, Homo sapiens
  siRNA target sequence for GSTO2 (NM_183239.1,1123-1141).
ctttggtggaacctgtata

SEQ ID NO: 216672 - DNA, 19 bp, Homo sapiens
  siRNA target sequence for GSTO2 (NM_183239.1,1134-1152).
cctgtatatccatgattga

SEQ ID NO: 216673 - DNA, 19 bp, Homo sapiens
  siRNA target sequence for GSTO2 (NM_183239.1,1135-1153).
ctgtatatccatgattgat

SEQ ID NO: 216674 - DNA, 19 bp, Homo sapiens
  siRNA target sequence for GSTO2 (NM_183239.1,1137-1155).
gtatatccatgattgatta

SEQ ID NO: 216675 - DNA, 19 bp, Homo sapiens
  siRNA target sequence for GSTO2 (NM_183239.1,1271-1289).
gctcttctcatggataaga

SEQ ID NO: 216676 - DNA, 19 bp, Homo sapiens
  siRNA target sequence for GSTO2 (NM_183239.1,1277-1295).
ctcatggataagagcattt

SEQ ID NO: 216677 - DNA, 19 bp, Homo sapiens
  siRNA target sequence for GSTO2 (NM_183239.1,1300-1318).
gggcttcttgaatctctat

SEQ ID NO: 216678 - DNA, 19 bp, Homo sapiens
  siRNA target sequence for GSTO2 (NM_183239.1,1301-1319).
ggcttcttgaatctctatt

SEQ ID NO: 216679 - DNA, 19 bp, Homo sapiens
  siRNA target sequence for GSTP1 (NM_000852.2,37-55).
cctacaccgtggtctattt

SEQ ID NO: 216680 - DNA, 19 bp, Homo sapiens
  siRNA target sequence for GSTP1 (NM_000852.2,146-164).
gcaggagggctcactcaaa

SEQ ID NO: 216681 - DNA, 19 bp, Homo sapiens
  siRNA target sequence for GSTP1 (NM_000852.2,327-345).
ctccgctgcaaatacatct

SEQ ID NO: 216682 - DNA, 19 bp, Homo sapiens
  siRNA target sequence for GSTP1 (NM_000852.2,553-571).
ccctgctctcagcatatgt

SEQ ID NO: 216683 - DNA, 19 bp, Homo sapiens
  siRNA target sequence for GSTP1 (NM_000852.2,626-644).
cgtgaacctccccatcaat

SEQ ID NO: 216684 - DNA, 19 bp, Homo sapiens
  siRNA target sequence for GSTT1 (NM_000853.1,90-108).
gcgcatcgtggatctgatt

SEQ ID NO: 216685 - DNA, 19 bp, Homo sapiens
  siRNA target sequence for GSTT1 (NM_000853.1,91-109).
cgcatcgtggatctgatta

SEQ ID NO: 216686 - DNA, 19 bp, Homo sapiens
  siRNA target sequence for GSTT1 (NM_000853.1,92-110).
gcatcgtggatctgattaa

SEQ ID NO: 216687 - DNA, 19 bp, Homo sapiens
  siRNA target sequence for GSTT1 (NM_000853.1,93-111).
catcgtggatctgattaaa

SEQ ID NO: 216688 - DNA, 19 bp, Homo sapiens
  siRNA target sequence for GSTT1 (NM_000853.1,216-234).
ctacctgacgcgcaaatat

SEQ ID NO: 216689 - DNA, 19 bp, Homo sapiens
  siRNA target sequence for GSTT1 (NM_000853.1,628-646).
gcccatgaggtcattctga

SEQ ID NO: 216690 - DNA, 19 bp, Homo sapiens
  siRNA target sequence for GSTT2 (NM_000854.2,67-85).
gggcctagagctgtttctt

SEQ ID NO: 216691 - DNA, 19 bp, Homo sapiens
  siRNA target sequence for GSTT2 (NM_000854.2,231-249).
cgctcaaggatggtgattt

SEQ ID NO: 216692 - DNA, 19 bp, Homo sapiens
  siRNA target sequence for GSTT2 (NM_000854.2,264-282).
gctcggccatcctgattta

SEQ ID NO: 216693 - DNA, 19 bp, Homo sapiens
  siRNA target sequence for GSTT2 (NM_000854.2,267-285).
cggccatcctgatttacct

SEQ ID NO: 216694 - DNA, 19 bp, Homo sapiens
  siRNA target sequence for GSTT2 (NM_000854.2,336-354).
ctcgtgcccgtgttcatga

SEQ ID NO: 216695 - DNA, 19 bp, Homo sapiens
  siRNA target sequence for GSTT2 (NM_000854.2,382-400).
ccgtggcacctttggtata

SEQ ID NO: 216696 - DNA, 19 bp, Homo sapiens
  siRNA target sequence for GSTT2 (NM_000854.2,415-433).
ggtgttggggccactcatt

SEQ ID NO: 216697 - DNA, 19 bp, Homo sapiens
  siRNA target sequence for GSTZ1 (NM_001513.2,554-572).
ccctgaagattgatggaat

SEQ ID NO: 216698 - DNA, 19 bp, Homo sapiens
  siRNA target sequence for GSTZ1 (NM_001513.2,660-678).
ggccagcgtgcgtatgatt

SEQ ID NO: 216699 - DNA, 19 bp, Homo sapiens
  siRNA target sequence for GSTZ1 (NM_001513.2,661-679).
gccagcgtgcgtatgattt

SEQ ID NO: 216700 - DNA, 19 bp, Homo sapiens
  siRNA target sequence for GSTZ1 (NM_001513.2,663-681).
cagcgtgcgtatgatttct

SEQ ID NO: 216701 - DNA, 19 bp, Homo sapiens
  siRNA target sequence for GSTZ1 (NM_001513.2,665-683).
gcgtgcgtatgatttctga

SEQ ID NO: 216702 - DNA, 19 bp, Homo sapiens
  siRNA target sequence for GSTZ1 (NM_001513.2,763-781).
gcccagaacgccatcactt

SEQ ID NO: 216703 - DNA, 19 bp, Homo sapiens
  siRNA target sequence for GSTZ1 (NM_001513.2,816-834).
cacagcgggcatatactgt

SEQ ID NO: 216704 - DNA, 19 bp, Homo sapiens
  siRNA target sequence for GSTZ1 (NM_001513.2,984-1002).
ctgccggcagccagataca

SEQ ID NO: 216705 - DNA, 19 bp, Homo sapiens
  siRNA target sequence for GSTZ1 (NM_145870.1,205-223).
gctcatggagagttcgaat

SEQ ID NO: 216706 - DNA, 19 bp, Homo sapiens
  siRNA target sequence for GSTZ1 (NM_145870.1,251-269).
cgagacggtgcccatcaat

SEQ ID NO: 216707 - DNA, 19 bp, Homo sapiens
  siRNA target sequence for GSTZ1 (NM_145870.1,256-274).
cggtgcccatcaatctcat

SEQ ID NO: 216708 - DNA, 19 bp, Homo sapiens
  siRNA target sequence for GSTZ1 (NM_145870.1,258-276).
gtgcccatcaatctcataa

SEQ ID NO: 216709 - DNA, 19 bp, Homo sapiens
  siRNA target sequence for LOC51064 (NM_015917.1,60-78).
gcaccgtggagctcttcta

SEQ ID NO: 216710 - DNA, 19 bp, Homo sapiens
  siRNA target sequence for LOC51064 (NM_015917.1,61-79).
caccgtggagctcttctat

SEQ ID NO: 216711 - DNA, 19 bp, Homo sapiens
  siRNA target sequence for LOC51064 (NM_015917.1,222-240).
cccgcaaaggactatacat

SEQ ID NO: 216712 - DNA, 19 bp, Homo sapiens
  siRNA target sequence for LOC51064 (NM_015917.1,412-430).
gcgcgtctggtcaaggaat

SEQ ID NO: 216713 - DNA, 19 bp, Homo sapiens
  siRNA target sequence for LOC51064 (NM_015917.1,415-433).
cgtctggtcaaggaatgaa

SEQ ID NO: 216714 - DNA, 19 bp, Homo sapiens
  siRNA target sequence for LOC51064 (NM_015917.1,618-636).
gccaaacccacatgttatt

SEQ ID NO: 216715 - DNA, 19 bp, Homo sapiens
  siRNA target sequence for LOC51064 (NM_015917.1,682-700).
gtggatgggccctatacct

SEQ ID NO: 216716 - DNA, 19 bp, Homo sapiens
  siRNA target sequence for LOC51064 (NM_015917.1,704-722).
gccgtgaatgccagacttt

SEQ ID NO: 216717 - DNA, 19 bp, Homo sapiens
  siRNA target sequence for MGST1 (NM_020300.3,107-125).
gtaatggatgatgaagtat

SEQ ID NO: 216718 - DNA, 19 bp, Homo sapiens
  siRNA target sequence for MGST1 (NM_020300.3,137-155).
gcatcctatgcaacaatta

SEQ ID NO: 216719 - DNA, 19 bp, Homo sapiens
  siRNA target sequence for MGST1 (NM_020300.3,180-198).
gtactgcaactgcattcta

SEQ ID NO: 216720 - DNA, 19 bp, Homo sapiens
  siRNA target sequence for MGST1 (NM_020300.3,185-203).
gcaactgcattctatagat

SEQ ID NO: 216721 - DNA, 19 bp, Homo sapiens
  siRNA target sequence for MGST1 (NM_020300.3,191-209).
gcattctatagattgacaa

SEQ ID NO: 216722 - DNA, 19 bp, Homo sapiens
  siRNA target sequence for MGST1 (NM_020300.3,201-219).
gattgacaagaaaggtttt

SEQ ID NO: 216723 - DNA, 19 bp, Homo sapiens
  siRNA target sequence for MGST1 (NM_020300.3,326-344).
cttgaaaatattattccat

SEQ ID NO: 216724 - DNA, 19 bp, Homo sapiens
  siRNA target sequence for MGST1 (NM_020300.3,350-368).
ggaattggcctcctgtatt

SEQ ID NO: 216725 - DNA, 19 bp, Homo sapiens
  siRNA target sequence for MGST1 (NM_020300.3,400-418).
cctgcacttcagactattt

SEQ ID NO: 216726 - DNA, 19 bp, Homo sapiens
  siRNA target sequence for MGST1 (NM_020300.3,437-455).
cacaccattgcatatttga

SEQ ID NO: 216727 - DNA, 19 bp, Homo sapiens
  siRNA target sequence for MGST1 (NM_020300.3,439-457).
caccattgcatatttgaca

SEQ ID NO: 216728 - DNA, 19 bp, Homo sapiens
  siRNA target sequence for MGST1 (NM_020300.3,469-487).
gccaaatagagctttgagt

SEQ ID NO: 216729 - DNA, 19 bp, Homo sapiens
  siRNA target sequence for MGST2 (NM_002413.3,273-291).
gctggctgctgtctctatt

SEQ ID NO: 216730 - DNA, 19 bp, Homo sapiens
  siRNA target sequence for MGST2 (NM_002413.3,296-314).
cggcctgtcagcaaagtta

SEQ ID NO: 216731 - DNA, 19 bp, Homo sapiens
  siRNA target sequence for MGST2 (NM_002413.3,376-394).
gggtcaccagagtttgaga

SEQ ID NO: 216732 - DNA, 19 bp, Homo sapiens
  siRNA target sequence for MGST2 (NM_002413.3,397-415).
gtatttcgggcacaacaaa

SEQ ID NO: 216733 - DNA, 19 bp, Homo sapiens
  siRNA target sequence for MGST2 (NM_002413.3,419-437).
gtgtggagttttatcctat

SEQ ID NO: 216734 - DNA, 19 bp, Homo sapiens
  siRNA target sequence for MGST2 (NM_002413.3,424-442).
gagttttatcctatattca

SEQ ID NO: 216735 - DNA, 19 bp, Homo sapiens
  siRNA target sequence for MGST2 (NM_002413.3,433-451).
cctatattcataattacat

SEQ ID NO: 216736 - DNA, 19 bp, Homo sapiens
  siRNA target sequence for MGST2 (NM_002413.3,434-452).
ctatattcataattacatt

SEQ ID NO: 216737 - DNA, 19 bp, Homo sapiens
  siRNA target sequence for MGST2 (NM_002413.3,477-495).
ccaagtttttgctacttgt

SEQ ID NO: 216738 - DNA, 19 bp, Homo sapiens
  siRNA target sequence for MGST2 (NM_002413.3,496-514).
ctgggtctggtgtacatat

SEQ ID NO: 216739 - DNA, 19 bp, Homo sapiens
  siRNA target sequence for MGST2 (NM_002413.3,517-535).
ggccgtcacctatacttct

SEQ ID NO: 216740 - DNA, 19 bp, Homo sapiens
  siRNA target sequence for MGST2 (NM_002413.3,526-544).
ctatacttctggggatatt

SEQ ID NO: 216741 - DNA, 19 bp, Homo sapiens
  siRNA target sequence for MGST2 (NM_002413.3,638-656).
gctttctggatgaatatct

SEQ ID NO: 216742 - DNA, 19 bp, Homo sapiens
  siRNA target sequence for MGST3 (NM_004528.2,91-109).
ggctgtcctctctaaggaa

SEQ ID NO: 216743 - DNA, 19 bp, Homo sapiens
  siRNA target sequence for MGST3 (NM_004528.2,97-115).
cctctctaaggaatatggt

SEQ ID NO: 216744 - DNA, 19 bp, Homo sapiens
  siRNA target sequence for MGST3 (NM_004528.2,98-116).
ctctctaaggaatatggtt

SEQ ID NO: 216745 - DNA, 19 bp, Homo sapiens
  siRNA target sequence for MGST3 (NM_004528.2,131-149).
ggtgctgccagctttataa

SEQ ID NO: 216746 - DNA, 19 bp, Homo sapiens
  siRNA target sequence for MGST3 (NM_004528.2,135-153).
ctgccagctttataatggt

SEQ ID NO: 216747 - DNA, 19 bp, Homo sapiens
  siRNA target sequence for MGST3 (NM_004528.2,154-172).
ggcccacctagccatcaat

SEQ ID NO: 216748 - DNA, 19 bp, Homo sapiens
  siRNA target sequence for MGST3 (NM_004528.2,157-175).
ccacctagccatcaatgtt

SEQ ID NO: 216749 - DNA, 19 bp, Homo sapiens
  siRNA target sequence for MGST3 (NM_004528.2,158-176).
cacctagccatcaatgttt

SEQ ID NO: 216750 - DNA, 19 bp, Homo sapiens
  siRNA target sequence for MGST3 (NM_004528.2,200-218).
gtggagtatcctatcatgt

SEQ ID NO: 216751 - DNA, 19 bp, Homo sapiens
  siRNA target sequence for MGST3 (NM_004528.2,231-249).
ctgaaaatgggcacatctt

SEQ ID NO: 216752 - DNA, 19 bp, Homo sapiens
  siRNA target sequence for MGST3 (NM_004528.2,274-292).
gaacacgttggaagtgtat

SEQ ID NO: 216753 - DNA, 19 bp, Homo sapiens
  siRNA target sequence for MGST3 (NM_004528.2,287-305).
gtgtatcctcccttcttat

SEQ ID NO: 216754 - DNA, 19 bp, Homo sapiens
  siRNA target sequence for MGST3 (NM_004528.2,289-307).
gtatcctcccttcttattt

SEQ ID NO: 216755 - DNA, 19 bp, Homo sapiens
  siRNA target sequence for MGST3 (NM_004528.2,367-385).
gattgttggacgagttctt

SEQ ID NO: 216756 - DNA, 19 bp, Homo sapiens
  siRNA target sequence for MGST3 (NM_004528.2,374-392).
ggacgagttctttatgctt

SEQ ID NO: 216757 - DNA, 19 bp, Homo sapiens
  siRNA target sequence for CHM (NM_000390.1,47-65).
cttcggagtttgatgtgat

SEQ ID NO: 216758 - DNA, 19 bp, Homo sapiens
  siRNA target sequence for CHM (NM_000390.1,52-70).
gagtttgatgtgatcgtaa

SEQ ID NO: 216759 - DNA, 19 bp, Homo sapiens
  siRNA target sequence for CHM (NM_000390.1,54-72).
gtttgatgtgatcgtaata

SEQ ID NO: 216760 - DNA, 19 bp, Homo sapiens
  siRNA target sequence for CHM (NM_000390.1,125-143).
ggagagttctgcatgttga

SEQ ID NO: 216761 - DNA, 19 bp, Homo sapiens
  siRNA target sequence for CHM (NM_000390.1,200-218).
cctggctaaaggaatacca

SEQ ID NO: 216762 - DNA, 19 bp, Homo sapiens
  siRNA target sequence for CHM (NM_000390.1,220-238).
gaaaacagtgacattgtaa

SEQ ID NO: 216763 - DNA, 19 bp, Homo sapiens
  siRNA target sequence for CHM (NM_000390.1,335-353).
gttatgccagtcaggattt

SEQ ID NO: 216764 - DNA, 19 bp, Homo sapiens
  siRNA target sequence for CHM (NM_000390.1,454-472).
gaggatgagtcattaagca

SEQ ID NO: 216765 - DNA, 19 bp, Homo sapiens
  siRNA target sequence for CHM (NM_000390.1,460-478).
gagtcattaagcactatga

SEQ ID NO: 216766 - DNA, 19 bp, Homo sapiens
  siRNA target sequence for CHM (NM_000390.1,473-491).
ctatgagctgtgaaatgct

SEQ ID NO: 216767 - DNA, 19 bp, Homo sapiens
  siRNA target sequence for CHM (NM_000390.1,520-538).
gagaatgcgctagaagtaa

SEQ ID NO: 216768 - DNA, 19 bp, Homo sapiens
  siRNA target sequence for CHM (NM_000390.1,785-803).
gtcgatatgcagagtttaa

SEQ ID NO: 216769 - DNA, 19 bp, Homo sapiens
  siRNA target sequence for CHM (NM_000390.1,882-900).
caaacaacttactatggta

SEQ ID NO: 216770 - DNA, 19 bp, Homo sapiens
  siRNA target sequence for CHM (NM_000390.1,970-988).
ggatatgaagagatcacat

SEQ ID NO: 216771 - DNA, 19 bp, Homo sapiens
  siRNA target sequence for CHM (NM_000390.1,1022-1040).
ccaacctccaatatattgt

SEQ ID NO: 216772 - DNA, 19 bp, Homo sapiens
  siRNA target sequence for CHM (NM_000390.1,1039-1057).
gtcatgcattcaattgcaa

SEQ ID NO: 216773 - DNA, 19 bp, Homo sapiens
  siRNA target sequence for CHM (NM_000390.1,1131-1149).
gtatggcaacactccattt

SEQ ID NO: 216774 - DNA, 19 bp, Homo sapiens
  siRNA target sequence for CHM (NM_000390.1,1174-1192).
gaactcccccagtgtttct

SEQ ID NO: 216775 - DNA, 19 bp, Homo sapiens
  siRNA target sequence for CHM (NM_000390.1,1238-1256).
cagtacagtgccttgtagt

SEQ ID NO: 216776 - DNA, 19 bp, Homo sapiens
  siRNA target sequence for CHM (NM_000390.1,1307-1325).
gaataatctctgagcattt

SEQ ID NO: 216777 - DNA, 19 bp, Homo sapiens
  siRNA target sequence for CHM (NM_000390.1,1327-1345).
ctcgtggaggacagttact

SEQ ID NO: 216778 - DNA, 19 bp, Homo sapiens
  siRNA target sequence for CHM (NM_000390.1,1329-1347).
cgtggaggacagttacttt

SEQ ID NO: 216779 - DNA, 19 bp, Homo sapiens
  siRNA target sequence for CHM (NM_000390.1,1389-1407).
cagggcagtgctgattaca

SEQ ID NO: 216780 - DNA, 19 bp, Homo sapiens
  siRNA target sequence for CHM (NM_000390.1,1393-1411).
gcagtgctgattacagata

SEQ ID NO: 216781 - DNA, 19 bp, Homo sapiens
  siRNA target sequence for CHM (NM_000390.1,1398-1416).
gctgattacagatagatct

SEQ ID NO: 216782 - DNA, 19 bp, Homo sapiens
  siRNA target sequence for CHM (NM_000390.1,1429-1447).
gattcagatcaacagattt

SEQ ID NO: 216783 - DNA, 19 bp, Homo sapiens
  siRNA target sequence for CHM (NM_000390.1,1470-1488).
ggaaccaggaacttttgct

SEQ ID NO: 216784 - DNA, 19 bp, Homo sapiens
  siRNA target sequence for CHM (NM_000390.1,1486-1504).
gctgttcgggtcattgagt

SEQ ID NO: 216785 - DNA, 19 bp, Homo sapiens
  siRNA target sequence for CHM (NM_000390.1,1487-1505).
ctgttcgggtcattgagtt

SEQ ID NO: 216786 - DNA, 19 bp, Homo sapiens
  siRNA target sequence for CHM (NM_000390.1,1489-1507).
gttcgggtcattgagttat

SEQ ID NO: 216787 - DNA, 19 bp, Homo sapiens
  siRNA target sequence for CHM (NM_000390.1,1492-1510).
cgggtcattgagttatgtt

SEQ ID NO: 216788 - DNA, 19 bp, Homo sapiens
  siRNA target sequence for CHM (NM_000390.1,1495-1513).
gtcattgagttatgttctt

SEQ ID NO: 216789 - DNA, 19 bp, Homo sapiens
  siRNA target sequence for CHM (NM_000390.1,1526-1544).
gcatgaaaggcacctattt

SEQ ID NO: 216790 - DNA, 19 bp, Homo sapiens
  siRNA target sequence for CHM (NM_000390.1,1534-1552).
ggcacctatttggttcatt

SEQ ID NO: 216791 - DNA, 19 bp, Homo sapiens
  siRNA target sequence for CHM (NM_000390.1,1535-1553).
gcacctatttggttcattt

SEQ ID NO: 216792 - DNA, 19 bp, Homo sapiens
  siRNA target sequence for CHM (NM_000390.1,1707-1725).
catcagcaggagctgttat

SEQ ID NO: 216793 - DNA, 19 bp, Homo sapiens
  siRNA target sequence for CHM (NM_000390.1,1729-1747).
gatttaccatccaacgttt

SEQ ID NO: 216794 - DNA, 19 bp, Homo sapiens
  siRNA target sequence for CHM (NM_000390.1,1761-1779).
cccagattgtggtttagga

SEQ ID NO: 216795 - DNA, 19 bp, Homo sapiens
  siRNA target sequence for CHM (NM_000390.1,1827-1845).
ccccaatgaagatttctgt

SEQ ID NO: 216796 - DNA, 19 bp, Homo sapiens
  siRNA target sequence for CHM (NM_000390.1,1930-1948).
gctaactcggagactttca

SEQ ID NO: 216797 - DNA, 19 bp, Homo sapiens
  siRNA target sequence for CHM (NM_000390.1,1972-1990).
ctagaggagtcctctgaat

SEQ ID NO: 216798 - DNA, 19 bp, Homo sapiens
  siRNA target sequence for RABGGTA (NM_004581.2,1306-1324).
gctgctcatggttgatgat

SEQ ID NO: 216799 - DNA, 19 bp, Homo sapiens
  siRNA target sequence for RABGGTA (NM_004581.2,1307-1325).
ctgctcatggttgatgatt

SEQ ID NO: 216800 - DNA, 19 bp, Homo sapiens
  siRNA target sequence for RABGGTA (NM_004581.2,1415-1433).
gaccagttgccccaacata

SEQ ID NO: 216801 - DNA, 19 bp, Homo sapiens
  siRNA target sequence for RABGGTA (NM_004581.2,1418-1436).
cagttgccccaacatacat

SEQ ID NO: 216802 - DNA, 19 bp, Homo sapiens
  siRNA target sequence for RABGGTA (NM_004581.2,1420-1438).
gttgccccaacatacattt

SEQ ID NO: 216803 - DNA, 19 bp, Homo sapiens
  siRNA target sequence for RABGGTA (NM_004581.2,1430-1448).
catacatttcgcgtcattt

SEQ ID NO: 216804 - DNA, 19 bp, Homo sapiens
  siRNA target sequence for RABGGTA (NM_004581.2,1521-1539).
cgacagacgagcagctatt

SEQ ID NO: 216805 - DNA, 19 bp, Homo sapiens
  siRNA target sequence for RABGGTA (NM_004581.2,1616-1634).
gagcctgagaataaatggt

SEQ ID NO: 216806 - DNA, 19 bp, Homo sapiens
  siRNA target sequence for RABGGTA (NM_004581.2,1729-1747).
ccccatgcgggcaacgtat

SEQ ID NO: 216807 - DNA, 19 bp, Homo sapiens
  siRNA target sequence for RABGGTA (NM_004581.2,1954-1972).
gctgcaggccagtgataat

SEQ ID NO: 216808 - DNA, 19 bp, Homo sapiens
  siRNA target sequence for RABGGTA (NM_182836.1,333-351).
gggagccaaccctgatttt

SEQ ID NO: 216809 - DNA, 19 bp, Homo sapiens
  siRNA target sequence for RABGGTA (NM_182836.1,466-484).
cgggtgaaccccaagtctt

SEQ ID NO: 216810 - DNA, 19 bp, Homo sapiens
  siRNA target sequence for RABGGTA (NM_182836.1,467-485).
gggtgaaccccaagtctta

SEQ ID NO: 216811 - DNA, 19 bp, Homo sapiens
  siRNA target sequence for RABGGTA (NM_182836.1,468-486).
ggtgaaccccaagtcttat

SEQ ID NO: 216812 - DNA, 19 bp, Homo sapiens
  siRNA target sequence for RABGGTA (NM_182836.1,471-489).
gaaccccaagtcttatggt

SEQ ID NO: 216813 - DNA, 19 bp, Homo sapiens
  siRNA target sequence for RABGGTA (NM_182836.1,682-700).
cgaaacttctccaactact

SEQ ID NO: 216814 - DNA, 19 bp, Homo sapiens
  siRNA target sequence for RABGGTA (NM_182836.1,968-986).
gctccaggatggagatctt

SEQ ID NO: 216815 - DNA, 19 bp, Homo sapiens
  siRNA target sequence for PGGT1B (NM_005023.2,46-64).
gagagcggctggatttctt

SEQ ID NO: 216816 - DNA, 19 bp, Homo sapiens
  siRNA target sequence for PGGT1B (NM_005023.2,69-87).
gatcggcacgtgcgatttt

SEQ ID NO: 216817 - DNA, 19 bp, Homo sapiens
  siRNA target sequence for PGGT1B (NM_005023.2,73-91).
ggcacgtgcgatttttcca

SEQ ID NO: 216818 - DNA, 19 bp, Homo sapiens
  siRNA target sequence for PGGT1B (NM_005023.2,110-128).
gccggagcgctattcttca

SEQ ID NO: 216819 - DNA, 19 bp, Homo sapiens
  siRNA target sequence for PGGT1B (NM_005023.2,134-152).
gacaagcaggttgacaatt

SEQ ID NO: 216820 - DNA, 19 bp, Homo sapiens
  siRNA target sequence for PGGT1B (NM_005023.2,139-157).
gcaggttgacaattgcatt

SEQ ID NO: 216821 - DNA, 19 bp, Homo sapiens
  siRNA target sequence for PGGT1B (NM_005023.2,140-158).
caggttgacaattgcattt

SEQ ID NO: 216822 - DNA, 19 bp, Homo sapiens
  siRNA target sequence for PGGT1B (NM_005023.2,163-181).
cactctccgggctggatat

SEQ ID NO: 216823 - DNA, 19 bp, Homo sapiens
  siRNA target sequence for PGGT1B (NM_005023.2,165-183).
ctctccgggctggatatgt

SEQ ID NO: 216824 - DNA, 19 bp, Homo sapiens
  siRNA target sequence for PGGT1B (NM_005023.2,249-267).
cccacagaagacagatcaa

SEQ ID NO: 216825 - DNA, 19 bp, Homo sapiens
  siRNA target sequence for PGGT1B (NM_005023.2,253-271).
cagaagacagatcaaatct

SEQ ID NO: 216826 - DNA, 19 bp, Homo sapiens
  siRNA target sequence for PGGT1B (NM_005023.2,283-301).
gtttccgaggctcttcata

SEQ ID NO: 216827 - DNA, 19 bp, Homo sapiens
  siRNA target sequence for PGGT1B (NM_005023.2,302-320).
cctgggtattccgttcaat

SEQ ID NO: 216828 - DNA, 19 bp, Homo sapiens
  siRNA target sequence for PGGT1B (NM_005023.2,306-324).
ggtattccgttcaatccat

SEQ ID NO: 216829 - DNA, 19 bp, Homo sapiens
  siRNA target sequence for PGGT1B (NM_005023.2,337-355).
gaacagctcatccttatga

SEQ ID NO: 216830 - DNA, 19 bp, Homo sapiens
  siRNA target sequence for PGGT1B (NM_005023.2,385-403).
gcctctcatgcttagttat

SEQ ID NO: 216831 - DNA, 19 bp, Homo sapiens
  siRNA target sequence for PGGT1B (NM_005023.2,413-431).
cgacttaagccgagtaaat

SEQ ID NO: 216832 - DNA, 19 bp, Homo sapiens
  siRNA target sequence for PGGT1B (NM_005023.2,414-432).
gacttaagccgagtaaata

SEQ ID NO: 216833 - DNA, 19 bp, Homo sapiens
  siRNA target sequence for PGGT1B (NM_005023.2,416-434).
cttaagccgagtaaataaa

SEQ ID NO: 216834 - DNA, 19 bp, Homo sapiens
  siRNA target sequence for PGGT1B (NM_005023.2,467-485).
gctggaagatgggagtttt

SEQ ID NO: 216835 - DNA, 19 bp, Homo sapiens
  siRNA target sequence for PGGT1B (NM_005023.2,532-550).
gtgcttcctgtatttgcta

SEQ ID NO: 216836 - DNA, 19 bp, Homo sapiens
  siRNA target sequence for PGGT1B (NM_005023.2,538-556).
cctgtatttgctatatgct

SEQ ID NO: 216837 - DNA, 19 bp, Homo sapiens
  siRNA target sequence for PGGT1B (NM_005023.2,608-626).
gagtatgtcctatgacaat

SEQ ID NO: 216838 - DNA, 19 bp, Homo sapiens
  siRNA target sequence for PGGT1B (NM_005023.2,655-673).
ctcatggaggatcaacttt

SEQ ID NO: 216839 - DNA, 19 bp, Homo sapiens
  siRNA target sequence for PGGT1B (NM_005023.2,679-697).
gcattgcctcactatgtct

SEQ ID NO: 216840 - DNA, 19 bp, Homo sapiens
  siRNA target sequence for PGGT1B (NM_005023.2,732-750).
gaattgaacaggataaaga

SEQ ID NO: 216841 - DNA, 19 bp, Homo sapiens
  siRNA target sequence for PGGT1B (NM_005023.2,757-775).
gtataatgaggcaacaaaa

SEQ ID NO: 216842 - DNA, 19 bp, Homo sapiens
  siRNA target sequence for PGGT1B (NM_005023.2,764-782).
gaggcaacaaaatggttat

SEQ ID NO: 216843 - DNA, 19 bp, Homo sapiens
  siRNA target sequence for PGGT1B (NM_005023.2,801-819).
cctgtagacacctgttatt

SEQ ID NO: 216844 - DNA, 19 bp, Homo sapiens
  siRNA target sequence for PGGT1B (NM_005023.2,804-822).
gtagacacctgttattctt

SEQ ID NO: 216845 - DNA, 19 bp, Homo sapiens
  siRNA target sequence for PGGT1B (NM_005023.2,834-852).
gcaactctgaagcttctaa

SEQ ID NO: 216846 - DNA, 19 bp, Homo sapiens
  siRNA target sequence for PGGT1B (NM_005023.2,835-853).
caactctgaagcttctaaa

SEQ ID NO: 216847 - DNA, 19 bp, Homo sapiens
  siRNA target sequence for PGGT1B (NM_005023.2,861-879).
caatacactaactttgaga

SEQ ID NO: 216848 - DNA, 19 bp, Homo sapiens
  siRNA target sequence for PGGT1B (NM_005023.2,1051-1069).
cttctgaacgccttctaga

SEQ ID NO: 216849 - DNA, 19 bp, Homo sapiens
  siRNA target sequence for PGGT1B (NM_005023.2,1054-1072).
ctgaacgccttctagatct

SEQ ID NO: 216850 - DNA, 19 bp, Homo sapiens
  siRNA target sequence for PGGT1B (NM_005023.2,1062-1080).
cttctagatctccatcaaa

SEQ ID NO: 216851 - DNA, 19 bp, Homo sapiens
  siRNA target sequence for FNTA (NM_002027.1,212-230).
gagcagaatgggctgatat

SEQ ID NO: 216852 - DNA, 19 bp, Homo sapiens
  siRNA target sequence for FNTA (NM_002027.1,215-233).
cagaatgggctgatataga

SEQ ID NO: 216853 - DNA, 19 bp, Homo sapiens
  siRNA target sequence for FNTA (NM_002027.1,262-280).
cccgtggtccagatcattt

SEQ ID NO: 216854 - DNA, 19 bp, Homo sapiens
  siRNA target sequence for FNTA (NM_002027.1,263-281).
ccgtggtccagatcattta

SEQ ID NO: 216855 - DNA, 19 bp, Homo sapiens
  siRNA target sequence for FNTA (NM_002027.1,264-282).
cgtggtccagatcatttat

SEQ ID NO: 216856 - DNA, 19 bp, Homo sapiens
  siRNA target sequence for FNTA (NM_002027.1,265-283).
gtggtccagatcatttata

SEQ ID NO: 216857 - DNA, 19 bp, Homo sapiens
  siRNA target sequence for FNTA (NM_002027.1,267-285).
ggtccagatcatttatagt

SEQ ID NO: 216858 - DNA, 19 bp, Homo sapiens
  siRNA target sequence for FNTA (NM_002027.1,324-342).
cctgcagcgtgatgaaaga

SEQ ID NO: 216859 - DNA, 19 bp, Homo sapiens
  siRNA target sequence for FNTA (NM_002027.1,346-364).
gaacgagcttttaagctaa

SEQ ID NO: 216860 - DNA, 19 bp, Homo sapiens
  siRNA target sequence for FNTA (NM_002027.1,360-378).
gctaacccgggatgctatt

SEQ ID NO: 216861 - DNA, 19 bp, Homo sapiens
  siRNA target sequence for FNTA (NM_002027.1,367-385).
cgggatgctattgagttaa

SEQ ID NO: 216862 - DNA, 19 bp, Homo sapiens
  siRNA target sequence for FNTA (NM_002027.1,368-386).
gggatgctattgagttaaa

SEQ ID NO: 216863 - DNA, 19 bp, Homo sapiens
  siRNA target sequence for FNTA (NM_002027.1,369-387).
ggatgctattgagttaaat

SEQ ID NO: 216864 - DNA, 19 bp, Homo sapiens
  siRNA target sequence for FNTA (NM_002027.1,381-399).
gttaaatgcagccaattat

SEQ ID NO: 216865 - DNA, 19 bp, Homo sapiens
  siRNA target sequence for FNTA (NM_002027.1,512-530).
ggcatcataggcgagtatt

SEQ ID NO: 216866 - DNA, 19 bp, Homo sapiens
  siRNA target sequence for FNTA (NM_002027.1,513-531).
gcatcataggcgagtatta

SEQ ID NO: 216867 - DNA, 19 bp, Homo sapiens
  siRNA target sequence for FNTA (NM_002027.1,725-743).
gatacttcgttatttctaa

SEQ ID NO: 216868 - DNA, 19 bp, Homo sapiens
  siRNA target sequence for FNTB (NM_002028.2,140-158).
cagtcacgtccatagaaca

SEQ ID NO: 216869 - DNA, 19 bp, Homo sapiens
  siRNA target sequence for FNTB (NM_002028.2,149-167).
ccatagaacaggcaaaagt

SEQ ID NO: 216870 - DNA, 19 bp, Homo sapiens
  siRNA target sequence for FNTB (NM_002028.2,214-232).
cttgtaccaaggcttgttt

SEQ ID NO: 216871 - DNA, 19 bp, Homo sapiens
  siRNA target sequence for FNTB (NM_002028.2,471-489).
cacatatgcagcagtcaat

SEQ ID NO: 216872 - DNA, 19 bp, Homo sapiens
  siRNA target sequence for FNTB (NM_002028.2,517-535).
gcctatgacatcattaaca

SEQ ID NO: 216873 - DNA, 19 bp, Homo sapiens
  siRNA target sequence for FNTB (NM_002028.2,754-772).
gcccatggtggctatacct

SEQ ID NO: 216874 - DNA, 19 bp, Homo sapiens
  siRNA target sequence for FNTB (NM_002028.2,811-829).
cgttccttgaacttgaaga

SEQ ID NO: 216875 - DNA, 19 bp, Homo sapiens
  siRNA target sequence for FNTB (NM_002028.2,851-869).
gccggcagatgcgatttga

SEQ ID NO: 216876 - DNA, 19 bp, Homo sapiens
  siRNA target sequence for FNTB (NM_002028.2,852-870).
ccggcagatgcgatttgaa

SEQ ID NO: 216877 - DNA, 19 bp, Homo sapiens
  siRNA target sequence for FNTB (NM_002028.2,861-879).
gcgatttgaaggaggattt

SEQ ID NO: 216878 - DNA, 19 bp, Homo sapiens
  siRNA target sequence for FNTB (NM_002028.2,1076-1094).
ctggcaagtcgcgtgattt

SEQ ID NO: 216879 - DNA, 19 bp, Homo sapiens
  siRNA target sequence for FNTB (NM_002028.2,1079-1097).
gcaagtcgcgtgatttcta

SEQ ID NO: 216880 - DNA, 19 bp, Homo sapiens
  siRNA target sequence for NS3TP1 (NM_019048.1,450-468).
gagcatttcagtcaagatt

SEQ ID NO: 216881 - DNA, 19 bp, Homo sapiens
  siRNA target sequence for NS3TP1 (NM_019048.1,501-519).
cggggacccaatagtagta

SEQ ID NO: 216882 - DNA, 19 bp, Homo sapiens
  siRNA target sequence for NS3TP1 (NM_019048.1,502-520).
ggggacccaatagtagtaa

SEQ ID NO: 216883 - DNA, 19 bp, Homo sapiens
  siRNA target sequence for NS3TP1 (NM_019048.1,503-521).
gggacccaatagtagtaaa

SEQ ID NO: 216884 - DNA, 19 bp, Homo sapiens
  siRNA target sequence for NS3TP1 (NM_019048.1,505-523).
gacccaatagtagtaaaca

SEQ ID NO: 216885 - DNA, 19 bp, Homo sapiens
  siRNA target sequence for NS3TP1 (NM_019048.1,514-532).
gtagtaaacaattgttaaa

SEQ ID NO: 216886 - DNA, 19 bp, Homo sapiens
  siRNA target sequence for NS3TP1 (NM_019048.1,540-558).
gttaactaccagtgtttat

SEQ ID NO: 216887 - DNA, 19 bp, Homo sapiens
  siRNA target sequence for NS3TP1 (NM_019048.1,562-580).
ctgctcacgtcctacactt

SEQ ID NO: 216888 - DNA, 19 bp, Homo sapiens
  siRNA target sequence for NS3TP1 (NM_019048.1,684-702).
gacactcaaattttgttta

SEQ ID NO: 216889 - DNA, 19 bp, Homo sapiens
  siRNA target sequence for NS3TP1 (NM_019048.1,713-731).
ctcctgtaagaatgaatct

SEQ ID NO: 216890 - DNA, 19 bp, Homo sapiens
  siRNA target sequence for NS3TP1 (NM_019048.1,759-777).
caaggtccctggtcattta

SEQ ID NO: 216891 - DNA, 19 bp, Homo sapiens
  siRNA target sequence for NS3TP1 (NM_019048.1,901-919).
catctggattggcaaatca

SEQ ID NO: 216892 - DNA, 19 bp, Homo sapiens
  siRNA target sequence for NS3TP1 (NM_019048.1,937-955).
catctggacttttcagaat

SEQ ID NO: 216893 - DNA, 19 bp, Homo sapiens
  siRNA target sequence for NS3TP1 (NM_019048.1,950-968).
cagaattgatcttaagtct

SEQ ID NO: 216894 - DNA, 19 bp, Homo sapiens
  siRNA target sequence for NS3TP1 (NM_019048.1,960-978).
cttaagtctactgtcattt

SEQ ID NO: 216895 - DNA, 19 bp, Homo sapiens
  siRNA target sequence for NS3TP1 (NM_019048.1,996-1014).
caactgtatccttggaaat

SEQ ID NO: 216896 - DNA, 19 bp, Homo sapiens
  siRNA target sequence for NS3TP1 (NM_019048.1,1021-1039).
ctagggagaatattattga

SEQ ID NO: 216897 - DNA, 19 bp, Homo sapiens
  siRNA target sequence for NS3TP1 (NM_019048.1,1047-1065).
gttaatagcctgagtcaaa

SEQ ID NO: 216898 - DNA, 19 bp, Homo sapiens
  siRNA target sequence for NS3TP1 (NM_019048.1,1110-1128).
gccaaactgtatcttgaaa

SEQ ID NO: 216899 - DNA, 19 bp, Homo sapiens
  siRNA target sequence for NS3TP1 (NM_019048.1,1164-1182).
gctgcattggagactcatt

SEQ ID NO: 216900 - DNA, 19 bp, Homo sapiens
  siRNA target sequence for NS3TP1 (NM_019048.1,1179-1197).
cattgcagtaatatttcca

SEQ ID NO: 216901 - DNA, 19 bp, Homo sapiens
  siRNA target sequence for NS3TP1 (NM_019048.1,1202-1220).
gccacctacaagagagata

SEQ ID NO: 216902 - DNA, 19 bp, Homo sapiens
  siRNA target sequence for NS3TP1 (NM_019048.1,1210-1228).
caagagagatacttcaagt

SEQ ID NO: 216903 - DNA, 19 bp, Homo sapiens
  siRNA target sequence for NS3TP1 (NM_019048.1,1302-1320).
cgtgtcttgtgtttaccta

SEQ ID NO: 216904 - DNA, 19 bp, Homo sapiens
  siRNA target sequence for NS3TP1 (NM_019048.1,1312-1330).
gtttacctagggatgaaaa

SEQ ID NO: 216905 - DNA, 19 bp, Homo sapiens
  siRNA target sequence for NS3TP1 (NM_019048.1,1347-1365).
gttttgaaaacgtgtgata

SEQ ID NO: 216906 - DNA, 19 bp, Homo sapiens
  siRNA target sequence for NS3TP1 (NM_019048.1,1352-1370).
gaaaacgtgtgataggaaa

SEQ ID NO: 216907 - DNA, 19 bp, Homo sapiens
  siRNA target sequence for NS3TP1 (NM_019048.1,1388-1406).
gttttctgggggcattgat

SEQ ID NO: 216908 - DNA, 19 bp, Homo sapiens
  siRNA target sequence for NS3TP1 (NM_019048.1,1398-1416).
ggcattgattccatggtta

SEQ ID NO: 216909 - DNA, 19 bp, Homo sapiens
  siRNA target sequence for NS3TP1 (NM_019048.1,1399-1417).
gcattgattccatggttat

SEQ ID NO: 216910 - DNA, 19 bp, Homo sapiens
  siRNA target sequence for NS3TP1 (NM_019048.1,1404-1422).
gattccatggttattgcaa

SEQ ID NO: 216911 - DNA, 19 bp, Homo sapiens
  siRNA target sequence for NS3TP1 (NM_019048.1,1423-1441).
cccttgctgaccgtcatat

SEQ ID NO: 216912 - DNA, 19 bp, Homo sapiens
  siRNA target sequence for NS3TP1 (NM_019048.1,1424-1442).
ccttgctgaccgtcatatt

SEQ ID NO: 216913 - DNA, 19 bp, Homo sapiens
  siRNA target sequence for NS3TP1 (NM_019048.1,1428-1446).
gctgaccgtcatattcctt

SEQ ID NO: 216914 - DNA, 19 bp, Homo sapiens
  siRNA target sequence for NS3TP1 (NM_019048.1,1429-1447).
ctgaccgtcatattccttt

SEQ ID NO: 216915 - DNA, 19 bp, Homo sapiens
  siRNA target sequence for NS3TP1 (NM_019048.1,1433-1451).
ccgtcatattcctttagat

SEQ ID NO: 216916 - DNA, 19 bp, Homo sapiens
  siRNA target sequence for NS3TP1 (NM_019048.1,1452-1470).
gaaccaattgatcttctta

SEQ ID NO: 216917 - DNA, 19 bp, Homo sapiens
  siRNA target sequence for NS3TP1 (NM_019048.1,1476-1494).
gctttcatagctgaagaaa

SEQ ID NO: 216918 - DNA, 19 bp, Homo sapiens
  siRNA target sequence for NS3TP1 (NM_019048.1,1502-1520).
gccaactacctttaacaga

SEQ ID NO: 216919 - DNA, 19 bp, Homo sapiens
  siRNA target sequence for NS3TP1 (NM_019048.1,1645-1663).
cgggactaaaggaactaca

SEQ ID NO: 216920 - DNA, 19 bp, Homo sapiens
  siRNA target sequence for NS3TP1 (NM_019048.1,1646-1664).
gggactaaaggaactacaa

SEQ ID NO: 216921 - DNA, 19 bp, Homo sapiens
  siRNA target sequence for NS3TP1 (NM_019048.1,1668-1686).
gttagcccttcccgaattt

SEQ ID NO: 216922 - DNA, 19 bp, Homo sapiens
  siRNA target sequence for NS3TP1 (NM_019048.1,1673-1691).
cccttcccgaatttggaat

SEQ ID NO: 216923 - DNA, 19 bp, Homo sapiens
  siRNA target sequence for NS3TP1 (NM_019048.1,1674-1692).
ccttcccgaatttggaatt

SEQ ID NO: 216924 - DNA, 19 bp, Homo sapiens
  siRNA target sequence for NS3TP1 (NM_019048.1,1675-1693).
cttcccgaatttggaattt

SEQ ID NO: 216925 - DNA, 19 bp, Homo sapiens
  siRNA target sequence for NS3TP1 (NM_019048.1,1678-1696).
cccgaatttggaattttgt

SEQ ID NO: 216926 - DNA, 19 bp, Homo sapiens
  siRNA target sequence for NS3TP1 (NM_019048.1,1679-1697).
ccgaatttggaattttgtt

SEQ ID NO: 216927 - DNA, 19 bp, Homo sapiens
  siRNA target sequence for NS3TP1 (NM_019048.1,1741-1759).
ctcgaatatgtcacttaat

SEQ ID NO: 216928 - DNA, 19 bp, Homo sapiens
  siRNA target sequence for NS3TP1 (NM_019048.1,1754-1772).
cttaattcggccattggat

SEQ ID NO: 216929 - DNA, 19 bp, Homo sapiens
  siRNA target sequence for NS3TP1 (NM_019048.1,1761-1779).
cggccattggatacagttt

SEQ ID NO: 216930 - DNA, 19 bp, Homo sapiens
  siRNA target sequence for NS3TP1 (NM_019048.1,1858-1876).
cctatcagagcaatgcaaa

SEQ ID NO: 216931 - DNA, 19 bp, Homo sapiens
  siRNA target sequence for NS3TP1 (NM_019048.1,1867-1885).
gcaatgcaaaggtagttct

SEQ ID NO: 216932 - DNA, 19 bp, Homo sapiens
  siRNA target sequence for NS3TP1 (NM_019048.1,1982-2000).
gatggaactgggtcgaatt

SEQ ID NO: 216933 - DNA, 19 bp, Homo sapiens
  siRNA target sequence for NS3TP1 (NM_019048.1,1985-2003).
ggaactgggtcgaatttct

SEQ ID NO: 216934 - DNA, 19 bp, Homo sapiens
  siRNA target sequence for NS3TP1 (NM_019048.1,1986-2004).
gaactgggtcgaatttctt

SEQ ID NO: 216935 - DNA, 19 bp, Homo sapiens
  siRNA target sequence for NS3TP1 (NM_019048.1,1989-2007).
ctgggtcgaatttcttcta

SEQ ID NO: 216936 - DNA, 19 bp, Homo sapiens
  siRNA target sequence for NS3TP1 (NM_019048.1,1991-2009).
gggtcgaatttcttctaga

SEQ ID NO: 216937 - DNA, 19 bp, Homo sapiens
  siRNA target sequence for NS3TP1 (NM_019048.1,2016-2034).
ggtcgtgatgacagagtta

SEQ ID NO: 216938 - DNA, 19 bp, Homo sapiens
  siRNA target sequence for NS3TP1 (NM_019048.1,2017-2035).
gtcgtgatgacagagttat

SEQ ID NO: 216939 - DNA, 19 bp, Homo sapiens
  siRNA target sequence for NS3TP1 (NM_019048.1,2027-2045).
cagagttattggtgatcat

SEQ ID NO: 216940 - DNA, 19 bp, Homo sapiens
  siRNA target sequence for NS3TP1 (NM_019048.1,2105-2123).
gccgatttgggaaaaagca

SEQ ID NO: 216941 - DNA, 19 bp, Homo sapiens
  siRNA target sequence for NS3TP1 (NM_019048.1,2106-2124).
ccgatttgggaaaaagcaa

SEQ ID NO: 216942 - DNA, 19 bp, Homo sapiens
  siRNA target sequence for NS3TP1 (NM_019048.1,2129-2147).
gactttaccccgaggaatt

SEQ ID NO: 216943 - DNA, 19 bp, Homo sapiens
  siRNA target sequence for NS3TP1 (NM_019048.1,2137-2155).
cccgaggaattggtgaaaa

SEQ ID NO: 216944 - DNA, 19 bp, Homo sapiens
  siRNA target sequence for NS3TP1 (NM_019048.1,2139-2157).
cgaggaattggtgaaaaat

SEQ ID NO: 216945 - DNA, 19 bp, Homo sapiens
  siRNA target sequence for NS3TP1 (NM_019048.1,2140-2158).
gaggaattggtgaaaaatt

SEQ ID NO: 216946 - DNA, 19 bp, Homo sapiens
  siRNA target sequence for NS3TP1 (NM_019048.1,2284-2302).
gtggacggctccaaatcat

SEQ ID NO: 216947 - DNA, 19 bp, Homo sapiens
  siRNA target sequence for NS3TP1 (NM_019048.1,2286-2304).
ggacggctccaaatcatgt

SEQ ID NO: 216948 - DNA, 19 bp, Homo sapiens
  siRNA target sequence for NS3TP1 (NM_019048.1,2300-2318).
catgtccttagaaaatctt

SEQ ID NO: 216949 - DNA, 19 bp, Homo sapiens
  siRNA target sequence for NS3TP1 (NM_019048.1,2320-2338).
ctattgaaaaggagactaa

SEQ ID NO: 216950 - DNA, 19 bp, Homo sapiens
  siRNA target sequence for COX10 (NM_001303.2,260-278).
gctctgtctggtatcttga

SEQ ID NO: 216951 - DNA, 19 bp, Homo sapiens
  siRNA target sequence for COX10 (NM_001303.2,261-279).
ctctgtctggtatcttgaa

SEQ ID NO: 216952 - DNA, 19 bp, Homo sapiens
  siRNA target sequence for COX10 (NM_001303.2,267-285).
ctggtatcttgaaagaaga

SEQ ID NO: 216953 - DNA, 19 bp, Homo sapiens
  siRNA target sequence for COX10 (NM_001303.2,295-313).
gactcccctcacaagttct

SEQ ID NO: 216954 - DNA, 19 bp, Homo sapiens
  siRNA target sequence for COX10 (NM_001303.2,300-318).
ccctcacaagttcttacat

SEQ ID NO: 216955 - DNA, 19 bp, Homo sapiens
  siRNA target sequence for COX10 (NM_001303.2,302-320).
ctcacaagttcttacatct

SEQ ID NO: 216956 - DNA, 19 bp, Homo sapiens
  siRNA target sequence for COX10 (NM_001303.2,331-349).
gtcaataagcagtggatta

SEQ ID NO: 216957 - DNA, 19 bp, Homo sapiens
  siRNA target sequence for COX10 (NM_001303.2,654-672).
gtatgatttgccaggaatt

SEQ ID NO: 216958 - DNA, 19 bp, Homo sapiens
  siRNA target sequence for COX10 (NM_001303.2,676-694).
gctcgactatccaaaatca

SEQ ID NO: 216959 - DNA, 19 bp, Homo sapiens
  siRNA target sequence for COX10 (NM_001303.2,680-698).
gactatccaaaatcaaact

SEQ ID NO: 216960 - DNA, 19 bp, Homo sapiens
  siRNA target sequence for COX10 (NM_001303.2,809-827).
ctgccaactccatcaatca

SEQ ID NO: 216961 - DNA, 19 bp, Homo sapiens
  siRNA target sequence for COX10 (NM_001303.2,816-834).
ctccatcaatcagtttttt

SEQ ID NO: 216962 - DNA, 19 bp, Homo sapiens
  siRNA target sequence for COX10 (NM_001303.2,838-856).
gtgccatttgactcaaaca

SEQ ID NO: 216963 - DNA, 19 bp, Homo sapiens
  siRNA target sequence for COX10 (NM_001303.2,842-860).
catttgactcaaacatgaa

SEQ ID NO: 216964 - DNA, 19 bp, Homo sapiens
  siRNA target sequence for COX10 (NM_001303.2,847-865).
gactcaaacatgaatagga

SEQ ID NO: 216965 - DNA, 19 bp, Homo sapiens
  siRNA target sequence for COX10 (NM_001303.2,940-958).
ccgggagttgccattctga

SEQ ID NO: 216966 - DNA, 19 bp, Homo sapiens
  siRNA target sequence for COX10 (NM_001303.2,992-1010).
ggctcttcaacattttcct

SEQ ID NO: 216967 - DNA, 19 bp, Homo sapiens
  siRNA target sequence for COX10 (NM_001303.2,1353-1371).
catggcccttcccatcaat

SEQ ID NO: 216968 - DNA, 19 bp, Homo sapiens
  siRNA target sequence for COX10 (NM_001303.2,1363-1381).
cccatcaatgcgtacatct

SEQ ID NO: 216969 - DNA, 19 bp, Homo sapiens
  siRNA target sequence for COX10 (NM_001303.2,1424-1442).
gctcgcggagactgttctt

SEQ ID NO: 216970 - DNA, 19 bp, Homo sapiens
  siRNA target sequence for GGPS1 (NM_004837.2,388-406).
gacagaaatgttgcataat

SEQ ID NO: 216971 - DNA, 19 bp, Homo sapiens
  siRNA target sequence for GGPS1 (NM_004837.2,524-542).
cttggcttggagaaagtct

SEQ ID NO: 216972 - DNA, 19 bp, Homo sapiens
  siRNA target sequence for GGPS1 (NM_004837.2,527-545).
ggcttggagaaagtcttaa

SEQ ID NO: 216973 - DNA, 19 bp, Homo sapiens
  siRNA target sequence for GGPS1 (NM_004837.2,558-576).
cagatgcagtgaagctttt

SEQ ID NO: 216974 - DNA, 19 bp, Homo sapiens
  siRNA target sequence for GGPS1 (NM_004837.2,606-624).
gacaaggcctagatattta

SEQ ID NO: 216975 - DNA, 19 bp, Homo sapiens
  siRNA target sequence for GGPS1 (NM_004837.2,608-626).
caaggcctagatatttact

SEQ ID NO: 216976 - DNA, 19 bp, Homo sapiens
  siRNA target sequence for GGPS1 (NM_004837.2,625-643).
ctggagggataattacact

SEQ ID NO: 216977 - DNA, 19 bp, Homo sapiens
  siRNA target sequence for GGPS1 (NM_004837.2,640-658).
cacttgtcccactgaagaa

SEQ ID NO: 216978 - DNA, 19 bp, Homo sapiens
  siRNA target sequence for GGPS1 (NM_004837.2,871-889).
ctcatttcctactattcat

SEQ ID NO: 216979 - DNA, 19 bp, Homo sapiens
  siRNA target sequence for GGPS1 (NM_004837.2,912-930).
gcacccaggtgcagaatat

SEQ ID NO: 216980 - DNA, 19 bp, Homo sapiens
  siRNA target sequence for GGPS1 (NM_004837.2,915-933).
cccaggtgcagaatatctt

SEQ ID NO: 216981 - DNA, 19 bp, Homo sapiens
  siRNA target sequence for GGPS1 (NM_004837.2,931-949).
cttgcgccagagaacagaa

SEQ ID NO: 216982 - DNA, 19 bp, Homo sapiens
  siRNA target sequence for GGPS1 (NM_004837.2,989-1007).
gatgtaggttcttttgaat

SEQ ID NO: 216983 - DNA, 19 bp, Homo sapiens
  siRNA target sequence for GGPS1 (NM_004837.2,992-1010).
gtaggttcttttgaataca

SEQ ID NO: 216984 - DNA, 19 bp, Homo sapiens
  siRNA target sequence for GGPS1 (NM_004837.2,1009-1027).
cactcgtaatacccttaaa

SEQ ID NO: 216985 - DNA, 19 bp, Homo sapiens
  siRNA target sequence for GGPS1 (NM_004837.2,1011-1029).
ctcgtaatacccttaaaga

SEQ ID NO: 216986 - DNA, 19 bp, Homo sapiens
  siRNA target sequence for GGPS1 (NM_004837.2,1038-1056).
ctaaagcctataaacagat

SEQ ID NO: 216987 - DNA, 19 bp, Homo sapiens
  siRNA target sequence for GGPS1 (NM_004837.2,1079-1097).
gagctagtagccttagtaa

SEQ ID NO: 216988 - DNA, 19 bp, Homo sapiens
  siRNA target sequence for GGPS1 (NM_004837.2,1085-1103).
gtagccttagtaaaacact

SEQ ID NO: 216989 - DNA, 19 bp, Homo sapiens
  siRNA target sequence for GGPS1 (NM_004837.2,1094-1112).
gtaaaacacttaagtaaga

SEQ ID NO: 216990 - DNA, 19 bp, Homo sapiens
  siRNA target sequence for FDPS (NM_002004.1,121-139).
ctgtcccgctggttgagat

SEQ ID NO: 216991 - DNA, 19 bp, Homo sapiens
  siRNA target sequence for FDPS (NM_002004.1,469-487).
gccattggaggcaagtata

SEQ ID NO: 216992 - DNA, 19 bp, Homo sapiens
  siRNA target sequence for FDPS (NM_002004.1,470-488).
ccattggaggcaagtataa

SEQ ID NO: 216993 - DNA, 19 bp, Homo sapiens
  siRNA target sequence for FDPS (NM_002004.1,1017-1035).
gggggagttctttcagatt

SEQ ID NO: 216994 - DNA, 19 bp, Homo sapiens
  siRNA target sequence for FDPS (NM_002004.1,1142-1160).
gggccactccagaacagta

SEQ ID NO: 216995 - DNA, 19 bp, Homo sapiens
  siRNA target sequence for FDPS (NM_002004.1,1211-1229).
gggtgaaggcgctatatga

SEQ ID NO: 216996 - DNA, 19 bp, Homo sapiens
  siRNA target sequence for FDPS (NM_002004.1,1244-1262).
cagcagtgttcttgcaata

SEQ ID NO: 216997 - DNA, 19 bp, Homo sapiens
  siRNA target sequence for FDPS (NM_002004.1,1270-1288).
gacagttacagccacatta

SEQ ID NO: 216998 - DNA, 19 bp, Homo sapiens
  siRNA target sequence for FDPS (NM_002004.1,1281-1299).
ccacattatggctctcatt

SEQ ID NO: 216999 - DNA, 19 bp, Homo sapiens
  siRNA target sequence for FDPS (NM_002004.1,1339-1357).
gggcttgcgcgcaaaatct

SEQ ID NO: 217000 - DNA, 19 bp, Homo sapiens
  siRNA target sequence for FDPS (NM_002004.1,1340-1358).
ggcttgcgcgcaaaatcta

SEQ ID NO: 217001 - DNA, 19 bp, Homo sapiens
  siRNA target sequence for FDPS (NM_002004.1,1342-1360).
cttgcgcgcaaaatctaca

SEQ ID NO: 217002 - DNA, 19 bp, Homo sapiens
  siRNA target sequence for CL640 (NM_015697.3,325-343).
gtacctggagcattggttt

SEQ ID NO: 217003 - DNA, 19 bp, Homo sapiens
  siRNA target sequence for CL640 (NM_015697.3,346-364).
cagctgaaccaggttgttt

SEQ ID NO: 217004 - DNA, 19 bp, Homo sapiens
  siRNA target sequence for CL640 (NM_015697.3,394-412).
gcactggagctattctgat

SEQ ID NO: 217005 - DNA, 19 bp, Homo sapiens
  siRNA target sequence for CL640 (NM_015697.3,414-432).
cgtggagcaggctgtacta

SEQ ID NO: 217006 - DNA, 19 bp, Homo sapiens
  siRNA target sequence for CL640 (NM_015697.3,415-433).
gtggagcaggctgtactat

SEQ ID NO: 217007 - DNA, 19 bp, Homo sapiens
  siRNA target sequence for CL640 (NM_015697.3,417-435).
ggagcaggctgtactatta

SEQ ID NO: 217008 - DNA, 19 bp, Homo sapiens
  siRNA target sequence for CL640 (NM_015697.3,418-436).
gagcaggctgtactattaa

SEQ ID NO: 217009 - DNA, 19 bp, Homo sapiens
  siRNA target sequence for CL640 (NM_015697.3,421-439).
caggctgtactattaatga

SEQ ID NO: 217010 - DNA, 19 bp, Homo sapiens
  siRNA target sequence for CL640 (NM_015697.3,423-441).
ggctgtactattaatgaca

SEQ ID NO: 217011 - DNA, 19 bp, Homo sapiens
  siRNA target sequence for CL640 (NM_015697.3,424-442).
gctgtactattaatgacat

SEQ ID NO: 217012 - DNA, 19 bp, Homo sapiens
  siRNA target sequence for CL640 (NM_015697.3,446-464).
ggaccaggactatgataaa

SEQ ID NO: 217013 - DNA, 19 bp, Homo sapiens
  siRNA target sequence for CL640 (NM_015697.3,459-477).
gataaaaaggttacaagaa

SEQ ID NO: 217014 - DNA, 19 bp, Homo sapiens
  siRNA target sequence for CL640 (NM_015697.3,497-515).
cgctggagacatttcaact

SEQ ID NO: 217015 - DNA, 19 bp, Homo sapiens
  siRNA target sequence for CL640 (NM_015697.3,561-579).
ggtgttcttctgtgtctaa

SEQ ID NO: 217016 - DNA, 19 bp, Homo sapiens
  siRNA target sequence for CL640 (NM_015697.3,564-582).
gttcttctgtgtctaaatt

SEQ ID NO: 217017 - DNA, 19 bp, Homo sapiens
  siRNA target sequence for CL640 (NM_015697.3,599-617).
gggagcaggatccttactt

SEQ ID NO: 217018 - DNA, 19 bp, Homo sapiens
  siRNA target sequence for CL640 (NM_015697.3,601-619).
gagcaggatccttacttct

SEQ ID NO: 217019 - DNA, 19 bp, Homo sapiens
  siRNA target sequence for CL640 (NM_015697.3,604-622).
caggatccttacttcttgt

SEQ ID NO: 217020 - DNA, 19 bp, Homo sapiens
  siRNA target sequence for CL640 (NM_015697.3,607-625).
gatccttacttcttgtcat

SEQ ID NO: 217021 - DNA, 19 bp, Homo sapiens
  siRNA target sequence for CL640 (NM_015697.3,670-688).
ccttgggcttgacatttaa

SEQ ID NO: 217022 - DNA, 19 bp, Homo sapiens
  siRNA target sequence for CL640 (NM_015697.3,671-689).
cttgggcttgacatttaat

SEQ ID NO: 217023 - DNA, 19 bp, Homo sapiens
  siRNA target sequence for CL640 (NM_015697.3,765-783).
ggagttatgtggacactaa

SEQ ID NO: 217024 - DNA, 19 bp, Homo sapiens
  siRNA target sequence for CL640 (NM_015697.3,766-784).
gagttatgtggacactaat

SEQ ID NO: 217025 - DNA, 19 bp, Homo sapiens
  siRNA target sequence for CL640 (NM_015697.3,825-843).
gttttgattggtcttaagt

SEQ ID NO: 217026 - DNA, 19 bp, Homo sapiens
  siRNA target sequence for CL640 (NM_015697.3,850-868).
ctctgcggttcggagaaaa

SEQ ID NO: 217027 - DNA, 19 bp, Homo sapiens
  siRNA target sequence for CL640 (NM_015697.3,855-873).
cggttcggagaaaatacca

SEQ ID NO: 217028 - DNA, 19 bp, Homo sapiens
  siRNA target sequence for CL640 (NM_015697.3,886-904).
gcggcttcagtgttgcaat

SEQ ID NO: 217029 - DNA, 19 bp, Homo sapiens
  siRNA target sequence for CL640 (NM_015697.3,984-1002).
catctgactcaccagattt

SEQ ID NO: 217030 - DNA, 19 bp, Homo sapiens
  siRNA target sequence for CL640 (NM_015697.3,987-1005).
ctgactcaccagatttaca

SEQ ID NO: 217031 - DNA, 19 bp, Homo sapiens
  siRNA target sequence for CL640 (NM_015697.3,989-1007).
gactcaccagatttacact

SEQ ID NO: 217032 - DNA, 19 bp, Homo sapiens
  siRNA target sequence for CL640 (NM_015697.3,1028-1046).
ggattgttggaataaattt

SEQ ID NO: 217033 - DNA, 19 bp, Homo sapiens
  siRNA target sequence for CL640 (NM_015697.3,1055-1073).
ccgaacactgggactaata

SEQ ID NO: 217034 - DNA, 19 bp, Homo sapiens
  siRNA target sequence for RABGGTB (NM_004582.2,106-124).
cagatgcaccggacacttt

SEQ ID NO: 217035 - DNA, 19 bp, Homo sapiens
  siRNA target sequence for RABGGTB (NM_004582.2,108-126).
gatgcaccggacactttgt

SEQ ID NO: 217036 - DNA, 19 bp, Homo sapiens
  siRNA target sequence for RABGGTB (NM_004582.2,111-129).
gcaccggacactttgttat

SEQ ID NO: 217037 - DNA, 19 bp, Homo sapiens
  siRNA target sequence for RABGGTB (NM_004582.2,112-130).
caccggacactttgttatt

SEQ ID NO: 217038 - DNA, 19 bp, Homo sapiens
  siRNA target sequence for RABGGTB (NM_004582.2,115-133).
cggacactttgttattgga

SEQ ID NO: 217039 - DNA, 19 bp, Homo sapiens
  siRNA target sequence for RABGGTB (NM_004582.2,131-149).
ggagaaacatgcagattat

SEQ ID NO: 217040 - DNA, 19 bp, Homo sapiens
  siRNA target sequence for RABGGTB (NM_004582.2,154-172).
catcctatggctcaaagaa

SEQ ID NO: 217041 - DNA, 19 bp, Homo sapiens
  siRNA target sequence for RABGGTB (NM_004582.2,206-224).
gagaatgagtggcatctat

SEQ ID NO: 217042 - DNA, 19 bp, Homo sapiens
  siRNA target sequence for RABGGTB (NM_004582.2,255-273).
caacttcatcgcatgaata

SEQ ID NO: 217043 - DNA, 19 bp, Homo sapiens
  siRNA target sequence for RABGGTB (NM_004582.2,279-297).
gagattctggcatttatta

SEQ ID NO: 217044 - DNA, 19 bp, Homo sapiens
  siRNA target sequence for RABGGTB (NM_004582.2,319-337).
gtggaataagtgctagtat

SEQ ID NO: 217045 - DNA, 19 bp, Homo sapiens
  siRNA target sequence for RABGGTB (NM_004582.2,338-356).
cggacatgatcctcatctt

SEQ ID NO: 217046 - DNA, 19 bp, Homo sapiens
  siRNA target sequence for RABGGTB (NM_004582.2,342-360).
catgatcctcatcttttat

SEQ ID NO: 217047 - DNA, 19 bp, Homo sapiens
  siRNA target sequence for RABGGTB (NM_004582.2,388-406).
cgctgtatgacagtattaa

SEQ ID NO: 217048 - DNA, 19 bp, Homo sapiens
  siRNA target sequence for RABGGTB (NM_004582.2,389-407).
gctgtatgacagtattaat

SEQ ID NO: 217049 - DNA, 19 bp, Homo sapiens
  siRNA target sequence for RABGGTB (NM_004582.2,497-515).
cacaagattctctttttgt

SEQ ID NO: 217050 - DNA, 19 bp, Homo sapiens
  siRNA target sequence for RABGGTB (NM_004582.2,539-557).
ggggaagcttgatgctatt

SEQ ID NO: 217051 - DNA, 19 bp, Homo sapiens
  siRNA target sequence for RABGGTB (NM_004582.2,540-558).
gggaagcttgatgctatta

SEQ ID NO: 217052 - DNA, 19 bp, Homo sapiens
  siRNA target sequence for RABGGTB (NM_004582.2,541-559).
ggaagcttgatgctattaa

SEQ ID NO: 217053 - DNA, 19 bp, Homo sapiens
  siRNA target sequence for RABGGTB (NM_004582.2,542-560).
gaagcttgatgctattaat

SEQ ID NO: 217054 - DNA, 19 bp, Homo sapiens
  siRNA target sequence for RABGGTB (NM_004582.2,561-579).
gtggaaaaggcaatcgaat

SEQ ID NO: 217055 - DNA, 19 bp, Homo sapiens
  siRNA target sequence for RABGGTB (NM_004582.2,569-587).
ggcaatcgaatttgtttta

SEQ ID NO: 217056 - DNA, 19 bp, Homo sapiens
  siRNA target sequence for RABGGTB (NM_004582.2,599-617).
ctttgacggtggatttggt

SEQ ID NO: 217057 - DNA, 19 bp, Homo sapiens
  siRNA target sequence for RABGGTB (NM_004582.2,653-671).
ctattgttgcacaggattt

SEQ ID NO: 217058 - DNA, 19 bp, Homo sapiens
  siRNA target sequence for RABGGTB (NM_004582.2,682-700).
caagtcagttgcatcaagt

SEQ ID NO: 217059 - DNA, 19 bp, Homo sapiens
  siRNA target sequence for RABGGTB (NM_004582.2,685-703).
gtcagttgcatcaagtaaa

SEQ ID NO: 217060 - DNA, 19 bp, Homo sapiens
  siRNA target sequence for RABGGTB (NM_004582.2,724-742).
ggctttgtgaacgacaatt

SEQ ID NO: 217061 - DNA, 19 bp, Homo sapiens
  siRNA target sequence for RABGGTB (NM_004582.2,725-743).
gctttgtgaacgacaatta

SEQ ID NO: 217062 - DNA, 19 bp, Homo sapiens
  siRNA target sequence for RABGGTB (NM_004582.2,770-788).
ggagaagttaccagatgta

SEQ ID NO: 217063 - DNA, 19 bp, Homo sapiens
  siRNA target sequence for RABGGTB (NM_004582.2,809-827).
ggcttccctaaagataatt

SEQ ID NO: 217064 - DNA, 19 bp, Homo sapiens
  siRNA target sequence for RABGGTB (NM_004582.2,841-859).
ggattgatagagagaaact

SEQ ID NO: 217065 - DNA, 19 bp, Homo sapiens
  siRNA target sequence for RABGGTB (NM_004582.2,850-868).
gagagaaactgcgtaattt

SEQ ID NO: 217066 - DNA, 19 bp, Homo sapiens
  siRNA target sequence for RABGGTB (NM_004582.2,860-878).
gcgtaatttcattttagca

SEQ ID NO: 217067 - DNA, 19 bp, Homo sapiens
  siRNA target sequence for RABGGTB (NM_004582.2,967-985).
cacttttgggagaagaaca

SEQ ID NO: 217068 - DNA, 19 bp, Homo sapiens
  siRNA target sequence for SMS (NM_004595.2,518-536).
ggtatatgacgaagattca

SEQ ID NO: 217069 - DNA, 19 bp, Homo sapiens
  siRNA target sequence for SMS (NM_004595.2,527-545).
cgaagattcaccttatcaa

SEQ ID NO: 217070 - DNA, 19 bp, Homo sapiens
  siRNA target sequence for SMS (NM_004595.2,561-579).
cactcgaagcagtttggaa

SEQ ID NO: 217071 - DNA, 19 bp, Homo sapiens
  siRNA target sequence for SMS (NM_004595.2,591-609).
cttagtggggatgttaatt

SEQ ID NO: 217072 - DNA, 19 bp, Homo sapiens
  siRNA target sequence for SMS (NM_004595.2,673-691).
gcaaagatgtactcattct

SEQ ID NO: 217073 - DNA, 19 bp, Homo sapiens
  siRNA target sequence for SMS (NM_004595.2,697-715).
gtggagacggaggcatatt

SEQ ID NO: 217074 - DNA, 19 bp, Homo sapiens
  siRNA target sequence for SMS (NM_004595.2,709-727).
gcatattgtgtgaaatagt

SEQ ID NO: 217075 - DNA, 19 bp, Homo sapiens
  siRNA target sequence for SMS (NM_004595.2,746-764).
ggtcactatggtagagatt

SEQ ID NO: 217076 - DNA, 19 bp, Homo sapiens
  siRNA target sequence for SMS (NM_004595.2,774-792).
gtgattgatgggtgtaaga

SEQ ID NO: 217077 - DNA, 19 bp, Homo sapiens
  siRNA target sequence for SMS (NM_004595.2,776-794).
gattgatgggtgtaagaaa

SEQ ID NO: 217078 - DNA, 19 bp, Homo sapiens
  siRNA target sequence for SMS (NM_004595.2,808-826).
cgtgtggcgatgtcttaga

SEQ ID NO: 217079 - DNA, 19 bp, Homo sapiens
  siRNA target sequence for SMS (NM_004595.2,840-858).
gactgctatcaggttctaa

SEQ ID NO: 217080 - DNA, 19 bp, Homo sapiens
  siRNA target sequence for SMS (NM_004595.2,844-862).
gctatcaggttctaataga

SEQ ID NO: 217081 - DNA, 19 bp, Homo sapiens
  siRNA target sequence for SMS (NM_004595.2,845-863).
ctatcaggttctaatagaa

SEQ ID NO: 217082 - DNA, 19 bp, Homo sapiens
  siRNA target sequence for SMS (NM_004595.2,881-899).
gaagaggtacgccaaagaa

SEQ ID NO: 217083 - DNA, 19 bp, Homo sapiens
  siRNA target sequence for SMS (NM_004595.2,999-1017).
gacctctcaatgaaagtgt

SEQ ID NO: 217084 - DNA, 19 bp, Homo sapiens
  siRNA target sequence for SMS (NM_004595.2,1047-1065).
gggaactgtgtcaatctga

SEQ ID NO: 217085 - DNA, 19 bp, Homo sapiens
  siRNA target sequence for SMS (NM_004595.2,1143-1161).
gtcccttcatacttggaat

SEQ ID NO: 217086 - DNA, 19 bp, Homo sapiens
  siRNA target sequence for LTC4S (NM_145867.1,306-324).
cggcatcttctttcatgaa

SEQ ID NO: 217087 - DNA, 19 bp, Homo sapiens
  siRNA target sequence for HMBS (NM_000190.2,173-191).
gctgcaacggcggaagaaa

SEQ ID NO: 217088 - DNA, 19 bp, Homo sapiens
  siRNA target sequence for HMBS (NM_000190.2,174-192).
ctgcaacggcggaagaaaa

SEQ ID NO: 217089 - DNA, 19 bp, Homo sapiens
  siRNA target sequence for HMBS (NM_000190.2,236-254).
cagcttgctcgcatacaga

SEQ ID NO: 217090 - DNA, 19 bp, Homo sapiens
  siRNA target sequence for HMBS (NM_000190.2,261-279).
gtgtggtggcaacattgaa

SEQ ID NO: 217091 - DNA, 19 bp, Homo sapiens
  siRNA target sequence for HMBS (NM_000190.2,329-347).
ggggacaagattcttgata

SEQ ID NO: 217092 - DNA, 19 bp, Homo sapiens
  siRNA target sequence for HMBS (NM_000190.2,496-514).
gcgggaaaaccctcatgat

SEQ ID NO: 217093 - DNA, 19 bp, Homo sapiens
  siRNA target sequence for HMBS (NM_000190.2,507-525).
ctcatgatgctgttgtctt

SEQ ID NO: 217094 - DNA, 19 bp, Homo sapiens
  siRNA target sequence for HMBS (NM_000190.2,523-541).
ctttcacccaaaatttgtt

SEQ ID NO: 217095 - DNA, 19 bp, Homo sapiens
  siRNA target sequence for HMBS (NM_000190.2,772-790).
ccctgaggaatgcatgtat

SEQ ID NO: 217096 - DNA, 19 bp, Homo sapiens
  siRNA target sequence for HMBS (NM_000190.2,948-966).
ccgtgcatacagctatgaa

SEQ ID NO: 217097 - DNA, 19 bp, Homo sapiens
  siRNA target sequence for HMBS (NM_000190.2,1009-1027).
cggctcagatagcatacaa

SEQ ID NO: 217098 - DNA, 19 bp, Homo sapiens
  siRNA target sequence for HMBS (NM_000190.2,1011-1029).
gctcagatagcatacaaga

SEQ ID NO: 217099 - DNA, 19 bp, Homo sapiens
  siRNA target sequence for HMBS (NM_000190.2,1102-1120).
catcactgctcgtaacatt

SEQ ID NO: 217100 - DNA, 19 bp, Homo sapiens
  siRNA target sequence for HMBS (NM_000190.2,1182-1200).
gcaaaggagccaaaaacat

SEQ ID NO: 217101 - DNA, 19 bp, Homo sapiens
  siRNA target sequence for DHPS (NM_001930.2,279-297).
gcgctgtacagcaagtcaa

SEQ ID NO: 217102 - DNA, 19 bp, Homo sapiens
  siRNA target sequence for DHPS (NM_001930.2,280-298).
cgctgtacagcaagtcaat

SEQ ID NO: 217103 - DNA, 19 bp, Homo sapiens
  siRNA target sequence for DHPS (NM_001930.2,324-342).
cactgtcacaggatgaaga

SEQ ID NO: 217104 - DNA, 19 bp, Homo sapiens
  siRNA target sequence for DHPS (NM_001930.2,575-593).
gagaacgggatcaatagga

SEQ ID NO: 217105 - DNA, 19 bp, Homo sapiens
  siRNA target sequence for DHPS (NM_001930.2,699-717).
ggacgccttctaagatgat

SEQ ID NO: 217106 - DNA, 19 bp, Homo sapiens
  siRNA target sequence for DHPS (NM_001930.2,790-808).
gtttagtcccgcacttaca

SEQ ID NO: 217107 - DNA, 19 bp, Homo sapiens
  siRNA target sequence for DHPS (NM_001930.2,813-831).
gctcgctgggcgacatgat

SEQ ID NO: 217108 - DNA, 19 bp, Homo sapiens
  siRNA target sequence for DHPS (NM_001930.2,816-834).
cgctgggcgacatgatctt

SEQ ID NO: 217109 - DNA, 19 bp, Homo sapiens
  siRNA target sequence for DHPS (NM_001930.2,818-836).
ctgggcgacatgatcttct

SEQ ID NO: 217110 - DNA, 19 bp, Homo sapiens
  siRNA target sequence for DHPS (NM_001930.2,921-939).
gcactgggatgatcattct

SEQ ID NO: 217111 - DNA, 19 bp, Homo sapiens
  siRNA target sequence for DHPS (NM_001930.2,995-1013).
gccgactacgctgtttaca

SEQ ID NO: 217112 - DNA, 19 bp, Homo sapiens
  siRNA target sequence for DHPS (NM_001930.2,996-1014).
ccgactacgctgtttacat

SEQ ID NO: 217113 - DNA, 19 bp, Homo sapiens
  siRNA target sequence for DHPS (NM_001930.2,998-1016).
gactacgctgtttacatca

SEQ ID NO: 217114 - DNA, 19 bp, Homo sapiens
  siRNA target sequence for AGPS (NM_003659.1,169-187).
gctctgagtaccaatgagt

SEQ ID NO: 217115 - DNA, 19 bp, Homo sapiens
  siRNA target sequence for AGPS (NM_003659.1,254-272).
cgggcaccatcccaaagaa

SEQ ID NO: 217116 - DNA, 19 bp, Homo sapiens
  siRNA target sequence for AGPS (NM_003659.1,274-292).
cggcaagaagttatgaaat

SEQ ID NO: 217117 - DNA, 19 bp, Homo sapiens
  siRNA target sequence for AGPS (NM_003659.1,294-312).
gaatggatggggatataat

SEQ ID NO: 217118 - DNA, 19 bp, Homo sapiens
  siRNA target sequence for AGPS (NM_003659.1,339-357).
gggccaaattgaattgact

SEQ ID NO: 217119 - DNA, 19 bp, Homo sapiens
  siRNA target sequence for AGPS (NM_003659.1,360-378).
gaaaaggtaccctcttagt

SEQ ID NO: 217120 - DNA, 19 bp, Homo sapiens
  siRNA target sequence for AGPS (NM_003659.1,380-398).
gcatgggtttaccaacatt

SEQ ID NO: 217121 - DNA, 19 bp, Homo sapiens
  siRNA target sequence for AGPS (NM_003659.1,381-399).
catgggtttaccaacattt

SEQ ID NO: 217122 - DNA, 19 bp, Homo sapiens
  siRNA target sequence for AGPS (NM_003659.1,425-443).
gagtaaatgtggagcataa

SEQ ID NO: 217123 - DNA, 19 bp, Homo sapiens
  siRNA target sequence for AGPS (NM_003659.1,438-456).
gcataaaactacctctaaa

SEQ ID NO: 217124 - DNA, 19 bp, Homo sapiens
  siRNA target sequence for AGPS (NM_003659.1,462-480).
cttaaatcctagtgataca

SEQ ID NO: 217125 - DNA, 19 bp, Homo sapiens
  siRNA target sequence for AGPS (NM_003659.1,550-568).
gcagatgatcgagtattta

SEQ ID NO: 217126 - DNA, 19 bp, Homo sapiens
  siRNA target sequence for AGPS (NM_003659.1,603-621).
gctcagggaaggaatgttt

SEQ ID NO: 217127 - DNA, 19 bp, Homo sapiens
  siRNA target sequence for AGPS (NM_003659.1,624-642).
gcgaattcctgatatagtt

SEQ ID NO: 217128 - DNA, 19 bp, Homo sapiens
  siRNA target sequence for AGPS (NM_003659.1,625-643).
cgaattcctgatatagttt

SEQ ID NO: 217129 - DNA, 19 bp, Homo sapiens
  siRNA target sequence for AGPS (NM_003659.1,647-665).
ggccaacatgccatgatga

SEQ ID NO: 217130 - DNA, 19 bp, Homo sapiens
  siRNA target sequence for AGPS (NM_003659.1,650-668).
caacatgccatgatgatgt

SEQ ID NO: 217131 - DNA, 19 bp, Homo sapiens
  siRNA target sequence for AGPS (NM_003659.1,679-697).
gtgaatctagcttgcaaat

SEQ ID NO: 217132 - DNA, 19 bp, Homo sapiens
  siRNA target sequence for AGPS (NM_003659.1,763-781).
gatgagacaagaacaatta

SEQ ID NO: 217133 - DNA, 19 bp, Homo sapiens
  siRNA target sequence for AGPS (NM_003659.1,794-812).
cttcacaaatgaatcgaat

SEQ ID NO: 217134 - DNA, 19 bp, Homo sapiens
  siRNA target sequence for AGPS (NM_003659.1,799-817).
caaatgaatcgaattctct

SEQ ID NO: 217135 - DNA, 19 bp, Homo sapiens
  siRNA target sequence for AGPS (NM_003659.1,922-940).
gattccctggagttcagta

SEQ ID NO: 217136 - DNA, 19 bp, Homo sapiens
  siRNA target sequence for AGPS (NM_003659.1,943-961).
gtaggaggatgggtatcta

SEQ ID NO: 217137 - DNA, 19 bp, Homo sapiens
  siRNA target sequence for AGPS (NM_003659.1,964-982).
cgcgcatcaggcatgaaga

SEQ ID NO: 217138 - DNA, 19 bp, Homo sapiens
  siRNA target sequence for AGPS (NM_003659.1,965-983).
gcgcatcaggcatgaagaa

SEQ ID NO: 217139 - DNA, 19 bp, Homo sapiens
  siRNA target sequence for AGPS (NM_003659.1,973-991).
ggcatgaagaagaatatct

SEQ ID NO: 217140 - DNA, 19 bp, Homo sapiens
  siRNA target sequence for AGPS (NM_003659.1,1030-1048).
gtaacacctagaggtataa

SEQ ID NO: 217141 - DNA, 19 bp, Homo sapiens
  siRNA target sequence for AGPS (NM_003659.1,1034-1052).
cacctagaggtataataga

SEQ ID NO: 217142 - DNA, 19 bp, Homo sapiens
  siRNA target sequence for AGPS (NM_003659.1,1036-1054).
cctagaggtataatagaaa

SEQ ID NO: 217143 - DNA, 19 bp, Homo sapiens
  siRNA target sequence for AGPS (NM_003659.1,1037-1055).
ctagaggtataatagaaaa

SEQ ID NO: 217144 - DNA, 19 bp, Homo sapiens
  siRNA target sequence for AGPS (NM_003659.1,1063-1081).
caaggacctcgtatgtcaa

SEQ ID NO: 217145 - DNA, 19 bp, Homo sapiens
  siRNA target sequence for AGPS (NM_003659.1,1090-1108).
gatatccatcacttcatca

SEQ ID NO: 217146 - DNA, 19 bp, Homo sapiens
  siRNA target sequence for AGPS (NM_003659.1,1124-1142).
ctcttggtgtaataacaga

SEQ ID NO: 217147 - DNA, 19 bp, Homo sapiens
  siRNA target sequence for AGPS (NM_003659.1,1160-1178).
gaccagtccctgaatacca

SEQ ID NO: 217148 - DNA, 19 bp, Homo sapiens
  siRNA target sequence for AGPS (NM_003659.1,1165-1183).
gtccctgaataccaaaagt

SEQ ID NO: 217149 - DNA, 19 bp, Homo sapiens
  siRNA target sequence for AGPS (NM_003659.1,1190-1208).
cagtagctttccctaattt

SEQ ID NO: 217150 - DNA, 19 bp, Homo sapiens
  siRNA target sequence for AGPS (NM_003659.1,1217-1235).
gagtagcctgtttaagaga

SEQ ID NO: 217151 - DNA, 19 bp, Homo sapiens
  siRNA target sequence for AGPS (NM_003659.1,1219-1237).
gtagcctgtttaagagaaa

SEQ ID NO: 217152 - DNA, 19 bp, Homo sapiens
  siRNA target sequence for AGPS (NM_003659.1,1250-1268).
gatgtgctccggcatctat

SEQ ID NO: 217153 - DNA, 19 bp, Homo sapiens
  siRNA target sequence for AGPS (NM_003659.1,1440-1458).
gaaggttcttcaacatgaa

SEQ ID NO: 217154 - DNA, 19 bp, Homo sapiens
  siRNA target sequence for AGPS (NM_003659.1,1467-1485).
gtatgatattgctgcaaaa

SEQ ID NO: 217155 - DNA, 19 bp, Homo sapiens
  siRNA target sequence for AGPS (NM_003659.1,1517-1535).
gacagagaggttatttgct

SEQ ID NO: 217156 - DNA, 19 bp, Homo sapiens
  siRNA target sequence for AGPS (NM_003659.1,1533-1551).
gctgacctatgttattgca

SEQ ID NO: 217157 - DNA, 19 bp, Homo sapiens
  siRNA target sequence for AGPS (NM_003659.1,1558-1576).
cgagacttggctttggaat

SEQ ID NO: 217158 - DNA, 19 bp, Homo sapiens
  siRNA target sequence for AGPS (NM_003659.1,1563-1581).
cttggctttggaatactat

SEQ ID NO: 217159 - DNA, 19 bp, Homo sapiens
  siRNA target sequence for AGPS (NM_003659.1,1578-1596).
ctatgtattaggagaatct

SEQ ID NO: 217160 - DNA, 19 bp, Homo sapiens
  siRNA target sequence for AGPS (NM_003659.1,1616-1634).
gggacagggtggtagatct

SEQ ID NO: 217161 - DNA, 19 bp, Homo sapiens
  siRNA target sequence for AGPS (NM_003659.1,1624-1642).
gtggtagatctctgtagaa

SEQ ID NO: 217162 - DNA, 19 bp, Homo sapiens
  siRNA target sequence for AGPS (NM_003659.1,1626-1644).
ggtagatctctgtagaaat

SEQ ID NO: 217163 - DNA, 19 bp, Homo sapiens
  siRNA target sequence for AGPS (NM_003659.1,1630-1648).
gatctctgtagaaatgtaa

SEQ ID NO: 217164 - DNA, 19 bp, Homo sapiens
  siRNA target sequence for AGPS (NM_003659.1,1655-1673).
gaataacaagggaatgcaa

SEQ ID NO: 217165 - DNA, 19 bp, Homo sapiens
  siRNA target sequence for AGPS (NM_003659.1,1709-1727).
gcagggtgacgcagactta

SEQ ID NO: 217166 - DNA, 19 bp, Homo sapiens
  siRNA target sequence for AGPS (NM_003659.1,1713-1731).
ggtgacgcagacttacgat

SEQ ID NO: 217167 - DNA, 19 bp, Homo sapiens
  siRNA target sequence for AGPS (NM_003659.1,1732-1750).
gcaggtgcttgtatctact

SEQ ID NO: 217168 - DNA, 19 bp, Homo sapiens
  siRNA target sequence for AGPS (NM_003659.1,1733-1751).
caggtgcttgtatctactt

SEQ ID NO: 217169 - DNA, 19 bp, Homo sapiens
  siRNA target sequence for AGPS (NM_003659.1,1735-1753).
ggtgcttgtatctacttct

SEQ ID NO: 217170 - DNA, 19 bp, Homo sapiens
  siRNA target sequence for AGPS (NM_003659.1,1736-1754).
gtgcttgtatctacttcta

SEQ ID NO: 217171 - DNA, 19 bp, Homo sapiens
  siRNA target sequence for AGPS (NM_003659.1,1787-1805).
cactgaccgtatttgaaca

SEQ ID NO: 217172 - DNA, 19 bp, Homo sapiens
  siRNA target sequence for AGPS (NM_003659.1,1791-1809).
gaccgtatttgaacaaact

SEQ ID NO: 217173 - DNA, 19 bp, Homo sapiens
  siRNA target sequence for AGPS (NM_003659.1,1817-1835).
ctgctagagaagaaatcct

SEQ ID NO: 217174 - DNA, 19 bp, Homo sapiens
  siRNA target sequence for AGPS (NM_003659.1,1863-1881).
ccatggagtgggcaagtta

SEQ ID NO: 217175 - DNA, 19 bp, Homo sapiens
  siRNA target sequence for AGPS (NM_003659.1,1873-1891).
ggcaagttacggaagcaat

SEQ ID NO: 217176 - DNA, 19 bp, Homo sapiens
  siRNA target sequence for AGPS (NM_003659.1,1888-1906).
caatggctaaaggaaagta

SEQ ID NO: 217177 - DNA, 19 bp, Homo sapiens
  siRNA target sequence for SULT1A1 (NM_177536.1,427-445).
ccagggaaaggatgacata

SEQ ID NO: 217178 - DNA, 19 bp, Homo sapiens
  siRNA target sequence for SULT1A1 (NM_177536.1,428-446).
cagggaaaggatgacatat

SEQ ID NO: 217179 - DNA, 19 bp, Homo sapiens
  siRNA target sequence for SULT1A1 (NM_177536.1,452-470).
gacctgaaacagaaattct

SEQ ID NO: 217180 - DNA, 19 bp, Homo sapiens
  siRNA target sequence for SULT1A1 (NM_177536.1,477-495).
cctatatggtggtctatgt

SEQ ID NO: 217181 - DNA, 19 bp, Homo sapiens
  siRNA target sequence for SULT1A1 (NM_177536.1,478-496).
ctatatggtggtctatgtt

SEQ ID NO: 217182 - DNA, 19 bp, Homo sapiens
  siRNA target sequence for SULT1A3 (NM_003166.2,445-463).
cttccttgaggtcaatgat

SEQ ID NO: 217183 - DNA, 19 bp, Homo sapiens
  siRNA target sequence for HS3ST2 (NM_006043.1,503-521).
gcacggaaccccacttctt

SEQ ID NO: 217184 - DNA, 19 bp, Homo sapiens
  siRNA target sequence for HS3ST2 (NM_006043.1,504-522).
cacggaaccccacttcttt

SEQ ID NO: 217185 - DNA, 19 bp, Homo sapiens
  siRNA target sequence for HS3ST2 (NM_006043.1,506-524).
cggaaccccacttctttga

SEQ ID NO: 217186 - DNA, 19 bp, Homo sapiens
  siRNA target sequence for HS3ST2 (NM_006043.1,631-649).
gctcctcgacgcatcttca

SEQ ID NO: 217187 - DNA, 19 bp, Homo sapiens
  siRNA target sequence for HS3ST2 (NM_006043.1,632-650).
ctcctcgacgcatcttcaa

SEQ ID NO: 217188 - DNA, 19 bp, Homo sapiens
  siRNA target sequence for HS3ST2 (NM_006043.1,634-652).
cctcgacgcatcttcaaca

SEQ ID NO: 217189 - DNA, 19 bp, Homo sapiens
  siRNA target sequence for HS3ST2 (NM_006043.1,635-653).
ctcgacgcatcttcaacat

SEQ ID NO: 217190 - DNA, 19 bp, Homo sapiens
  siRNA target sequence for HS3ST2 (NM_006043.1,637-655).
cgacgcatcttcaacatgt

SEQ ID NO: 217191 - DNA, 19 bp, Homo sapiens
  siRNA target sequence for HS3ST2 (NM_006043.1,698-716).
cccgtgccatctctgatta

SEQ ID NO: 217192 - DNA, 19 bp, Homo sapiens
  siRNA target sequence for HS3ST2 (NM_006043.1,700-718).
cgtgccatctctgattaca

SEQ ID NO: 217193 - DNA, 19 bp, Homo sapiens
  siRNA target sequence for HS3ST2 (NM_006043.1,861-879).
cttcccgctagctcagatt

SEQ ID NO: 217194 - DNA, 19 bp, Homo sapiens
  siRNA target sequence for HS3ST2 (NM_006043.1,866-884).
cgctagctcagattcactt

SEQ ID NO: 217195 - DNA, 19 bp, Homo sapiens
  siRNA target sequence for HS3ST2 (NM_006043.1,942-960).
cttcctgggcattaagaga

SEQ ID NO: 217196 - DNA, 19 bp, Homo sapiens
  siRNA target sequence for HS3ST2 (NM_006043.1,1000-1018).
ggattcccttgcttgaaaa

SEQ ID NO: 217197 - DNA, 19 bp, Homo sapiens
  siRNA target sequence for HS3ST2 (NM_006043.1,1001-1019).
gattcccttgcttgaaaaa

SEQ ID NO: 217198 - DNA, 19 bp, Homo sapiens
  siRNA target sequence for HS3ST2 (NM_006043.1,1042-1060).
cgatgcttgggcaaatcaa

SEQ ID NO: 217199 - DNA, 19 bp, Homo sapiens
  siRNA target sequence for HS3ST2 (NM_006043.1,1043-1061).
gatgcttgggcaaatcaaa

SEQ ID NO: 217200 - DNA, 19 bp, Homo sapiens
  siRNA target sequence for HS3ST2 (NM_006043.1,1080-1098).
gattgatcctgaagtgata

SEQ ID NO: 217201 - DNA, 19 bp, Homo sapiens
  siRNA target sequence for HS3ST2 (NM_006043.1,1101-1119).
ccagctccgagaattttat

SEQ ID NO: 217202 - DNA, 19 bp, Homo sapiens
  siRNA target sequence for HS3ST2 (NM_006043.1,1104-1122).
gctccgagaattttataga

SEQ ID NO: 217203 - DNA, 19 bp, Homo sapiens
  siRNA target sequence for HS3ST2 (NM_006043.1,1121-1139).
gaccgtataatatcaaatt

SEQ ID NO: 217204 - DNA, 19 bp, Homo sapiens
  siRNA target sequence for HS3ST3A1 (NM_006042.1,857-875).
gcatcttccggaagttctt

SEQ ID NO: 217205 - DNA, 19 bp, Homo sapiens
  siRNA target sequence for HS3ST3A1 (NM_006042.1,899-917).
cgtccctttacgtcttcta

SEQ ID NO: 217206 - DNA, 19 bp, Homo sapiens
  siRNA target sequence for HS3ST3B1 (NM_006041.1,343-361).
ctgagtggcggcagatctt

SEQ ID NO: 217207 - DNA, 19 bp, Homo sapiens
  siRNA target sequence for NDST2 (NM_003635.2,875-893).
ggagtctagtcgttttcgt

SEQ ID NO: 217208 - DNA, 19 bp, Homo sapiens
  siRNA target sequence for NDST2 (NM_003635.2,876-894).
gagtctagtcgttttcgtt

SEQ ID NO: 217209 - DNA, 19 bp, Homo sapiens
  siRNA target sequence for NDST2 (NM_003635.2,878-896).
gtctagtcgttttcgttat

SEQ ID NO: 217210 - DNA, 19 bp, Homo sapiens
  siRNA target sequence for NDST2 (NM_003635.2,929-947).
gcccacattgactgataat

SEQ ID NO: 217211 - DNA, 19 bp, Homo sapiens
  siRNA target sequence for NDST2 (NM_003635.2,949-967).
cccatggccgctatgtctt

SEQ ID NO: 217212 - DNA, 19 bp, Homo sapiens
  siRNA target sequence for NDST2 (NM_003635.2,958-976).
gctatgtcttggtcattta

SEQ ID NO: 217213 - DNA, 19 bp, Homo sapiens
  siRNA target sequence for NDST2 (NM_003635.2,1046-1064).
gtatggtgtgggcatcatt

SEQ ID NO: 217214 - DNA, 19 bp, Homo sapiens
  siRNA target sequence for NDST2 (NM_003635.2,1152-1170).
gactaccaagtgaatcctt

SEQ ID NO: 217215 - DNA, 19 bp, Homo sapiens
  siRNA target sequence for NDST2 (NM_003635.2,1238-1256).
gaccatcttccaatccaat

SEQ ID NO: 217216 - DNA, 19 bp, Homo sapiens
  siRNA target sequence for NDST2 (NM_003635.2,1252-1270).
ccaatcatagtacatatga

SEQ ID NO: 217217 - DNA, 19 bp, Homo sapiens
  siRNA target sequence for NDST2 (NM_003635.2,1479-1497).
gaccttgaccgctacatct

SEQ ID NO: 217218 - DNA, 19 bp, Homo sapiens
  siRNA target sequence for NDST2 (NM_003635.2,1628-1646).
ctcgggcaagttctatcat

SEQ ID NO: 217219 - DNA, 19 bp, Homo sapiens
  siRNA target sequence for NDST2 (NM_003635.2,1631-1649).
gggcaagttctatcatact

SEQ ID NO: 217220 - DNA, 19 bp, Homo sapiens
  siRNA target sequence for NDST2 (NM_003635.2,1775-1793).
ccagatgaggctcaacaaa

SEQ ID NO: 217221 - DNA, 19 bp, Homo sapiens
  siRNA target sequence for NDST2 (NM_003635.2,1881-1899).
ctctatgaggcctggaaat

SEQ ID NO: 217222 - DNA, 19 bp, Homo sapiens
  siRNA target sequence for NDST2 (NM_003635.2,2021-2039).
cactcacacaatcttctat

SEQ ID NO: 217223 - DNA, 19 bp, Homo sapiens
  siRNA target sequence for NDST2 (NM_003635.2,2029-2047).
caatcttctataatgagta

SEQ ID NO: 217224 - DNA, 19 bp, Homo sapiens
  siRNA target sequence for NDST2 (NM_003635.2,2085-2103).
ggtggagagctctttctga

SEQ ID NO: 217225 - DNA, 19 bp, Homo sapiens
  siRNA target sequence for NDST2 (NM_003635.2,2138-2156).
ccatctgtccaattatgga

SEQ ID NO: 217226 - DNA, 19 bp, Homo sapiens
  siRNA target sequence for NDST2 (NM_003635.2,2139-2157).
catctgtccaattatggaa

SEQ ID NO: 217227 - DNA, 19 bp, Homo sapiens
  siRNA target sequence for NDST2 (NM_003635.2,2247-2265).
ccacttgcacagaagtact

SEQ ID NO: 217228 - DNA, 19 bp, Homo sapiens
  siRNA target sequence for NDST2 (NM_003635.2,2254-2272).
cacagaagtactttgaact

SEQ ID NO: 217229 - DNA, 19 bp, Homo sapiens
  siRNA target sequence for NDST2 (NM_003635.2,2398-2416).
cagggactacagctattca

SEQ ID NO: 217230 - DNA, 19 bp, Homo sapiens
  siRNA target sequence for NDST2 (NM_003635.2,2400-2418).
gggactacagctattcact

SEQ ID NO: 217231 - DNA, 19 bp, Homo sapiens
  siRNA target sequence for NDST2 (NM_003635.2,2401-2419).
ggactacagctattcactt

SEQ ID NO: 217232 - DNA, 19 bp, Homo sapiens
  siRNA target sequence for NDST2 (NM_003635.2,2404-2422).
ctacagctattcacttctt

SEQ ID NO: 217233 - DNA, 19 bp, Homo sapiens
  siRNA target sequence for NDST2 (NM_003635.2,2456-2474).
ccctagccccagcacattt

SEQ ID NO: 217234 - DNA, 19 bp, Homo sapiens
  siRNA target sequence for NDST2 (NM_003635.2,2551-2569).
ccaatgccagcactgattt

SEQ ID NO: 217235 - DNA, 19 bp, Homo sapiens
  siRNA target sequence for NDST2 (NM_003635.2,2556-2574).
gccagcactgatttcctat

SEQ ID NO: 217236 - DNA, 19 bp, Homo sapiens
  siRNA target sequence for NDST2 (NM_003635.2,2557-2575).
ccagcactgatttcctatt

SEQ ID NO: 217237 - DNA, 19 bp, Homo sapiens
  siRNA target sequence for NDST2 (NM_003635.2,2560-2578).
gcactgatttcctatttga

SEQ ID NO: 217238 - DNA, 19 bp, Homo sapiens
  siRNA target sequence for NDST2 (NM_003635.2,2721-2739).
ccagttgctctgaactata

SEQ ID NO: 217239 - DNA, 19 bp, Homo sapiens
  siRNA target sequence for NDST2 (NM_003635.2,2741-2759).
cttctatcaggtgatttca

SEQ ID NO: 217240 - DNA, 19 bp, Homo sapiens
  siRNA target sequence for NDST2 (NM_003635.2,2811-2829).
gtccctggctactattcta

SEQ ID NO: 217241 - DNA, 19 bp, Homo sapiens
  siRNA target sequence for NDST2 (NM_003635.2,2822-2840).
ctattctacccatctacaa

SEQ ID NO: 217242 - DNA, 19 bp, Homo sapiens
  siRNA target sequence for NDST2 (NM_003635.2,2838-2856).
caacgctggctgacttact

SEQ ID NO: 217243 - DNA, 19 bp, Homo sapiens
  siRNA target sequence for NDST2 (NM_003635.2,2933-2951).
gaagttcctgggtatcaca

SEQ ID NO: 217244 - DNA, 19 bp, Homo sapiens
  siRNA target sequence for NDST2 (NM_003635.2,2974-2992).
ccctcaggtttgatgatga

SEQ ID NO: 217245 - DNA, 19 bp, Homo sapiens
  siRNA target sequence for NDST2 (NM_003635.2,3055-3073).
gccggaggtatccagatat

SEQ ID NO: 217246 - DNA, 19 bp, Homo sapiens
  siRNA target sequence for NDST2 (NM_003635.2,3079-3097).
ctgagtcccgtcttttcct

SEQ ID NO: 217247 - DNA, 19 bp, Homo sapiens
  siRNA target sequence for NDST2 (NM_003635.2,3169-3187).
cgtggcttcgggaagaact

SEQ ID NO: 217248 - DNA, 19 bp, Homo sapiens
  siRNA target sequence for NDST3 (NM_004784.1,468-486).
gtatggtgagcattatcat

SEQ ID NO: 217249 - DNA, 19 bp, Homo sapiens
  siRNA target sequence for NDST3 (NM_004784.1,568-586).
ccaacacctaccatatcaa

SEQ ID NO: 217250 - DNA, 19 bp, Homo sapiens
  siRNA target sequence for NDST3 (NM_004784.1,634-652).
ccccacagtcctagtattt

SEQ ID NO: 217251 - DNA, 19 bp, Homo sapiens
  siRNA target sequence for NDST3 (NM_004784.1,688-706).
cattatgattctagaatca

SEQ ID NO: 217252 - DNA, 19 bp, Homo sapiens
  siRNA target sequence for NDST3 (NM_004784.1,708-726).
gtagattccagtatcacat

SEQ ID NO: 217253 - DNA, 19 bp, Homo sapiens
  siRNA target sequence for NDST3 (NM_004784.1,752-770).
ctcccagtgcttatagaca

SEQ ID NO: 217254 - DNA, 19 bp, Homo sapiens
  siRNA target sequence for NDST3 (NM_004784.1,842-860).
cgaagccttctagataaat

SEQ ID NO: 217255 - DNA, 19 bp, Homo sapiens
  siRNA target sequence for NDST3 (NM_004784.1,847-865).
ccttctagataaatactgt

SEQ ID NO: 217256 - DNA, 19 bp, Homo sapiens
  siRNA target sequence for NDST3 (NM_004784.1,884-902).
gtcattggattccacaaaa

SEQ ID NO: 217257 - DNA, 19 bp, Homo sapiens
  siRNA target sequence for NDST3 (NM_004784.1,1006-1024).
gattcgtgtgaccaaatct

SEQ ID NO: 217258 - DNA, 19 bp, Homo sapiens
  siRNA target sequence for NDST3 (NM_004784.1,1058-1076).
gactggacagtttttcaga

SEQ ID NO: 217259 - DNA, 19 bp, Homo sapiens
  siRNA target sequence for NDST3 (NM_004784.1,1088-1106).
gcctatcaaccagtaatat

SEQ ID NO: 217260 - DNA, 19 bp, Homo sapiens
  siRNA target sequence for NDST3 (NM_004784.1,1406-1424).
cttttgcgtgcacaaatca

SEQ ID NO: 217261 - DNA, 19 bp, Homo sapiens
  siRNA target sequence for NDST3 (NM_004784.1,1411-1429).
gcgtgcacaaatcacaaat

SEQ ID NO: 217262 - DNA, 19 bp, Homo sapiens
  siRNA target sequence for NDST3 (NM_004784.1,1412-1430).
cgtgcacaaatcacaaatt

SEQ ID NO: 217263 - DNA, 19 bp, Homo sapiens
  siRNA target sequence for NDST3 (NM_004784.1,1680-1698).
gcgtctaccctgtacatgt

SEQ ID NO: 217264 - DNA, 19 bp, Homo sapiens
  siRNA target sequence for NDST3 (NM_004784.1,1681-1699).
cgtctaccctgtacatgtt

SEQ ID NO: 217265 - DNA, 19 bp, Homo sapiens
  siRNA target sequence for NDST3 (NM_004784.1,1689-1707).
ctgtacatgttcagcttta

SEQ ID NO: 217266 - DNA, 19 bp, Homo sapiens
  siRNA target sequence for NDST3 (NM_004784.1,1838-1856).
cttttcactcacaccattt

SEQ ID NO: 217267 - DNA, 19 bp, Homo sapiens
  siRNA target sequence for NDST3 (NM_004784.1,1982-2000).
gaccgactgggattatata

SEQ ID NO: 217268 - DNA, 19 bp, Homo sapiens
  siRNA target sequence for NDST3 (NM_004784.1,2125-2143).
gaatccttgcgatgacaaa

SEQ ID NO: 217269 - DNA, 19 bp, Homo sapiens
  siRNA target sequence for NDST3 (NM_004784.1,2144-2162).
cgccacagagacatttggt

SEQ ID NO: 217270 - DNA, 19 bp, Homo sapiens
  siRNA target sequence for NDST3 (NM_004784.1,2220-2238).
ctggtaccactgctttgta

SEQ ID NO: 217271 - DNA, 19 bp, Homo sapiens
  siRNA target sequence for NDST3 (NM_004784.1,2222-2240).
ggtaccactgctttgtatt

SEQ ID NO: 217272 - DNA, 19 bp, Homo sapiens
  siRNA target sequence for NDST3 (NM_004784.1,2223-2241).
gtaccactgctttgtattt

SEQ ID NO: 217273 - DNA, 19 bp, Homo sapiens
  siRNA target sequence for NDST3 (NM_004784.1,2258-2276).
ccttccatccttagtaact

SEQ ID NO: 217274 - DNA, 19 bp, Homo sapiens
  siRNA target sequence for NDST3 (NM_004784.1,2302-2320).
ggtacagttctttaataga

SEQ ID NO: 217275 - DNA, 19 bp, Homo sapiens
  siRNA target sequence for NDST3 (NM_004784.1,2326-2344).
ctaccacagggggattgat

SEQ ID NO: 217276 - DNA, 19 bp, Homo sapiens
  siRNA target sequence for NDST3 (NM_004784.1,2337-2355).
ggattgattggtatatgga

SEQ ID NO: 217277 - DNA, 19 bp, Homo sapiens
  siRNA target sequence for NDST3 (NM_004784.1,2359-2377).
cttcccagtcccatctaat

SEQ ID NO: 217278 - DNA, 19 bp, Homo sapiens
  siRNA target sequence for NDST3 (NM_004784.1,2382-2400).
ctaccgactttttgtttga

SEQ ID NO: 217279 - DNA, 19 bp, Homo sapiens
  siRNA target sequence for NDST3 (NM_004784.1,2385-2403).
ccgactttttgtttgagaa

SEQ ID NO: 217280 - DNA, 19 bp, Homo sapiens
  siRNA target sequence for NDST3 (NM_004784.1,2455-2473).
ggttcccaaagccaagatt

SEQ ID NO: 217281 - DNA, 19 bp, Homo sapiens
  siRNA target sequence for NDST3 (NM_004784.1,2546-2564).
gcagctctgaagtttagct

SEQ ID NO: 217282 - DNA, 19 bp, Homo sapiens
  siRNA target sequence for NDST3 (NM_004784.1,2547-2565).
cagctctgaagtttagctt

SEQ ID NO: 217283 - DNA, 19 bp, Homo sapiens
  siRNA target sequence for NDST3 (NM_004784.1,2705-2723).
gatgggcaacaactaagaa

SEQ ID NO: 217284 - DNA, 19 bp, Homo sapiens
  siRNA target sequence for NDST3 (NM_004784.1,2765-2783).
ggagtcttgcctcattata

SEQ ID NO: 217285 - DNA, 19 bp, Homo sapiens
  siRNA target sequence for NDST3 (NM_004784.1,2773-2791).
gcctcattataattactca

SEQ ID NO: 217286 - DNA, 19 bp, Homo sapiens
  siRNA target sequence for NDST3 (NM_004784.1,2788-2806).
ctcagaagctttaacgttt

SEQ ID NO: 217287 - DNA, 19 bp, Homo sapiens
  siRNA target sequence for NDST3 (NM_004784.1,2792-2810).
gaagctttaacgtttgatt

SEQ ID NO: 217288 - DNA, 19 bp, Homo sapiens
  siRNA target sequence for NDST3 (NM_004784.1,2833-2851).
gttactggaagaaggtaaa

SEQ ID NO: 217289 - DNA, 19 bp, Homo sapiens
  siRNA target sequence for NDST3 (NM_004784.1,2887-2905).
ccctccaatggattctgat

SEQ ID NO: 217290 - DNA, 19 bp, Homo sapiens
  siRNA target sequence for NDST3 (NM_004784.1,2888-2906).
cctccaatggattctgata

SEQ ID NO: 217291 - DNA, 19 bp, Homo sapiens
  siRNA target sequence for NDST3 (NM_004784.1,2903-2921).
gatagcaggacatttctgt

SEQ ID NO: 217292 - DNA, 19 bp, Homo sapiens
  siRNA target sequence for NDST3 (NM_004784.1,2925-2943).
gctactatcgagatcacaa

SEQ ID NO: 217293 - DNA, 19 bp, Homo sapiens
  siRNA target sequence for CHST8 (NM_022467.3,783-801).
cggctggcctgcatgttct

SEQ ID NO: 217294 - DNA, 19 bp, Homo sapiens
  siRNA target sequence for CHST8 (NM_022467.3,879-897).
caggtgccaggaataaagt

SEQ ID NO: 217295 - DNA, 19 bp, Homo sapiens
  siRNA target sequence for CHST8 (NM_022467.3,981-999).
gtcactcgggacttatcca

SEQ ID NO: 217296 - DNA, 19 bp, Homo sapiens
  siRNA target sequence for CHST8 (NM_022467.3,1294-1312).
gccacgtgtcccgtatctt

SEQ ID NO: 217297 - DNA, 19 bp, Homo sapiens
  siRNA target sequence for CHST8 (NM_022467.3,1558-1576).
ccttccgcgacaagtttga

SEQ ID NO: 217298 - DNA, 19 bp, Homo sapiens
  siRNA target sequence for CHST8 (NM_022467.3,1577-1595).
gcaccccaacagctactat

SEQ ID NO: 217299 - DNA, 19 bp, Homo sapiens
  siRNA target sequence for CHST8 (NM_022467.3,1771-1789).
gcctcatcgactacgattt

SEQ ID NO: 217300 - DNA, 19 bp, Homo sapiens
  siRNA target sequence for CHST8 (NM_022467.3,1775-1793).
catcgactacgatttcgta

SEQ ID NO: 217301 - DNA, 19 bp, Homo sapiens
  siRNA target sequence for CHST8 (NM_022467.3,1962-1980).
cgcacctacgacttctact

SEQ ID NO: 217302 - DNA, 19 bp, Homo sapiens
  siRNA target sequence for CHST8 (NM_022467.3,1963-1981).
gcacctacgacttctacta

SEQ ID NO: 217303 - DNA, 19 bp, Homo sapiens
  siRNA target sequence for CHST8 (NM_022467.3,1971-1989).
gacttctactacatggatt

SEQ ID NO: 217304 - DNA, 19 bp, Homo sapiens
  siRNA target sequence for CHST9 (NM_031422.1,246-264).
gggctactcctcttcatgt

SEQ ID NO: 217305 - DNA, 19 bp, Homo sapiens
  siRNA target sequence for CHST9 (NM_031422.1,248-266).
gctactcctcttcatgtat

SEQ ID NO: 217306 - DNA, 19 bp, Homo sapiens
  siRNA target sequence for CHST9 (NM_031422.1,278-296).
gattgaagaacaacataca

SEQ ID NO: 217307 - DNA, 19 bp, Homo sapiens
  siRNA target sequence for CHST9 (NM_031422.1,337-355).
gatggggaccagtgaagta

SEQ ID NO: 217308 - DNA, 19 bp, Homo sapiens
  siRNA target sequence for CHST9 (NM_031422.1,340-358).
ggggaccagtgaagtactt

SEQ ID NO: 217309 - DNA, 19 bp, Homo sapiens
  siRNA target sequence for CHST9 (NM_031422.1,360-378).
cggcctgtacccagaatca

SEQ ID NO: 217310 - DNA, 19 bp, Homo sapiens
  siRNA target sequence for CHST9 (NM_031422.1,361-379).
ggcctgtacccagaatcat

SEQ ID NO: 217311 - DNA, 19 bp, Homo sapiens
  siRNA target sequence for CHST9 (NM_031422.1,458-476).
ggaaaatcttctactcaat

SEQ ID NO: 217312 - DNA, 19 bp, Homo sapiens
  siRNA target sequence for CHST9 (NM_031422.1,459-477).
gaaaatcttctactcaatt

SEQ ID NO: 217313 - DNA, 19 bp, Homo sapiens
  siRNA target sequence for CHST9 (NM_031422.1,471-489).
ctcaattctgagagatcta

SEQ ID NO: 217314 - DNA, 19 bp, Homo sapiens
  siRNA target sequence for CHST9 (NM_031422.1,473-491).
caattctgagagatctact

SEQ ID NO: 217315 - DNA, 19 bp, Homo sapiens
  siRNA target sequence for CHST9 (NM_031422.1,487-505).
ctactaggctcttaacaaa

SEQ ID NO: 217316 - DNA, 19 bp, Homo sapiens
  siRNA target sequence for CHST9 (NM_031422.1,525-543).
ggggatcaagctttaagta

SEQ ID NO: 217317 - DNA, 19 bp, Homo sapiens
  siRNA target sequence for CHST9 (NM_031422.1,526-544).
gggatcaagctttaagtaa

SEQ ID NO: 217318 - DNA, 19 bp, Homo sapiens
  siRNA target sequence for CHST9 (NM_031422.1,585-603).
caaggagctaagactgttt

SEQ ID NO: 217319 - DNA, 19 bp, Homo sapiens
  siRNA target sequence for CHST9 (NM_031422.1,743-761).
cggtggggtgagtcatcat

SEQ ID NO: 217320 - DNA, 19 bp, Homo sapiens
  siRNA target sequence for CHST9 (NM_031422.1,781-799).
cagtatccagaatctatgt

SEQ ID NO: 217321 - DNA, 19 bp, Homo sapiens
  siRNA target sequence for CHST9 (NM_031422.1,843-861).
ggctgttccaattggaaaa

SEQ ID NO: 217322 - DNA, 19 bp, Homo sapiens
  siRNA target sequence for CHST9 (NM_031422.1,862-880).
gaattctgatggtactaaa

SEQ ID NO: 217323 - DNA, 19 bp, Homo sapiens
  siRNA target sequence for CHST9 (NM_031422.1,889-907).
cttcctctgcatacaacat

SEQ ID NO: 217324 - DNA, 19 bp, Homo sapiens
  siRNA target sequence for CHST9 (NM_031422.1,921-939).
gtccactacgggaagcatt

SEQ ID NO: 217325 - DNA, 19 bp, Homo sapiens
  siRNA target sequence for CHST9 (NM_031422.1,924-942).
cactacgggaagcatttga

SEQ ID NO: 217326 - DNA, 19 bp, Homo sapiens
  siRNA target sequence for CHST9 (NM_031422.1,960-978).
gacctaaaagggatatata

SEQ ID NO: 217327 - DNA, 19 bp, Homo sapiens
  siRNA target sequence for CHST9 (NM_031422.1,970-988).
ggatatatacccgcttaaa

SEQ ID NO: 217328 - DNA, 19 bp, Homo sapiens
  siRNA target sequence for CHST9 (NM_031422.1,1011-1029).
gttcgtgatcccatggaaa

SEQ ID NO: 217329 - DNA, 19 bp, Homo sapiens
  siRNA target sequence for CHST9 (NM_031422.1,1064-1082).
ccccaatagttattaccat

SEQ ID NO: 217330 - DNA, 19 bp, Homo sapiens
  siRNA target sequence for CHST9 (NM_031422.1,1086-1104).
gtattcggaaaggcaatta

SEQ ID NO: 217331 - DNA, 19 bp, Homo sapiens
  siRNA target sequence for CHST9 (NM_031422.1,1092-1110).
ggaaaggcaattatcaaga

SEQ ID NO: 217332 - DNA, 19 bp, Homo sapiens
  siRNA target sequence for CHST9 (NM_031422.1,1097-1115).
ggcaattatcaagaaatat

SEQ ID NO: 217333 - DNA, 19 bp, Homo sapiens
  siRNA target sequence for CHST9 (NM_031422.1,1106-1124).
caagaaatatcgaccaaat

SEQ ID NO: 217334 - DNA, 19 bp, Homo sapiens
  siRNA target sequence for CHST9 (NM_031422.1,1149-1167).
ggatctggagtcaagttca

SEQ ID NO: 217335 - DNA, 19 bp, Homo sapiens
  siRNA target sequence for CHST9 (NM_031422.1,1150-1168).
gatctggagtcaagttcaa

SEQ ID NO: 217336 - DNA, 19 bp, Homo sapiens
  siRNA target sequence for CHST9 (NM_031422.1,1158-1176).
gtcaagttcaaagagttta

SEQ ID NO: 217337 - DNA, 19 bp, Homo sapiens
  siRNA target sequence for CHST9 (NM_031422.1,1204-1222).
cagtaggaatggacattca

SEQ ID NO: 217338 - DNA, 19 bp, Homo sapiens
  siRNA target sequence for CHST9 (NM_031422.1,1242-1260).
ctctgctatccgtgtttga

SEQ ID NO: 217339 - DNA, 19 bp, Homo sapiens
  siRNA target sequence for CHST9 (NM_031422.1,1246-1264).
gctatccgtgtttgatcaa

SEQ ID NO: 217340 - DNA, 19 bp, Homo sapiens
  siRNA target sequence for CHST9 (NM_031422.1,1252-1270).
cgtgtttgatcaactatga

SEQ ID NO: 217341 - DNA, 19 bp, Homo sapiens
  siRNA target sequence for CHST9 (NM_031422.1,1253-1271).
gtgtttgatcaactatgat

SEQ ID NO: 217342 - DNA, 19 bp, Homo sapiens
  siRNA target sequence for CHST9 (NM_031422.1,1259-1277).
gatcaactatgattttgta

SEQ ID NO: 217343 - DNA, 19 bp, Homo sapiens
  siRNA target sequence for CHST9 (NM_031422.1,1370-1388).
gcactcttccgatgaaaga

SEQ ID NO: 217344 - DNA, 19 bp, Homo sapiens
  siRNA target sequence for CHST9 (NM_031422.1,1371-1389).
cactcttccgatgaaagaa

SEQ ID NO: 217345 - DNA, 19 bp, Homo sapiens
  siRNA target sequence for CHST9 (NM_031422.1,1401-1419).
gtcgtgagacagtatttaa

SEQ ID NO: 217346 - DNA, 19 bp, Homo sapiens
  siRNA target sequence for CHST9 (NM_031422.1,1435-1453).
ctgagagacaattaatcta

SEQ ID NO: 217347 - DNA, 19 bp, Homo sapiens
  siRNA target sequence for CHST9 (NM_031422.1,1441-1459).
gacaattaatctatgactt

SEQ ID NO: 217348 - DNA, 19 bp, Homo sapiens
  siRNA target sequence for TPST1 (NM_003596.2,439-457).
cgtagccagccagtcaaat

SEQ ID NO: 217349 - DNA, 19 bp, Homo sapiens
  siRNA target sequence for TPST1 (NM_003596.2,440-458).
gtagccagccagtcaaatt

SEQ ID NO: 217350 - DNA, 19 bp, Homo sapiens
  siRNA target sequence for TPST1 (NM_003596.2,443-461).
gccagccagtcaaattgga

SEQ ID NO: 217351 - DNA, 19 bp, Homo sapiens
  siRNA target sequence for TPST1 (NM_003596.2,523-541).
cacaaagatatgcctttaa

SEQ ID NO: 217352 - DNA, 19 bp, Homo sapiens
  siRNA target sequence for TPST1 (NM_003596.2,666-684).
gtggtcacggtcaagtaaa

SEQ ID NO: 217353 - DNA, 19 bp, Homo sapiens
  siRNA target sequence for TPST1 (NM_003596.2,668-686).
ggtcacggtcaagtaaaga

SEQ ID NO: 217354 - DNA, 19 bp, Homo sapiens
  siRNA target sequence for TPST1 (NM_003596.2,737-755).
ccatgcaagccttcttact

SEQ ID NO: 217355 - DNA, 19 bp, Homo sapiens
  siRNA target sequence for TPST1 (NM_003596.2,738-756).
catgcaagccttcttacta

SEQ ID NO: 217356 - DNA, 19 bp, Homo sapiens
  siRNA target sequence for TPST1 (NM_003596.2,777-795).
ggagccagccccttattta

SEQ ID NO: 217357 - DNA, 19 bp, Homo sapiens
  siRNA target sequence for TPST1 (NM_003596.2,778-796).
gagccagccccttatttat

SEQ ID NO: 217358 - DNA, 19 bp, Homo sapiens
  siRNA target sequence for TPST1 (NM_003596.2,781-799).
ccagccccttatttatgta

SEQ ID NO: 217359 - DNA, 19 bp, Homo sapiens
  siRNA target sequence for TPST1 (NM_003596.2,830-848).
cttacctttctaggttatt

SEQ ID NO: 217360 - DNA, 19 bp, Homo sapiens
  siRNA target sequence for TPST1 (NM_003596.2,887-905).
gggcatcagtacattcaat

SEQ ID NO: 217361 - DNA, 19 bp, Homo sapiens
  siRNA target sequence for TPST1 (NM_003596.2,889-907).
gcatcagtacattcaatga

SEQ ID NO: 217362 - DNA, 19 bp, Homo sapiens
  siRNA target sequence for TPST1 (NM_003596.2,890-908).
catcagtacattcaatgat

SEQ ID NO: 217363 - DNA, 19 bp, Homo sapiens
  siRNA target sequence for TPST1 (NM_003596.2,902-920).
caatgatttctcgaaaagt

SEQ ID NO: 217364 - DNA, 19 bp, Homo sapiens
  siRNA target sequence for TPST1 (NM_003596.2,979-997).
gctatagagaccatgtata

SEQ ID NO: 217365 - DNA, 19 bp, Homo sapiens
  siRNA target sequence for TPST1 (NM_003596.2,989-1007).
ccatgtataaccagtgtat

SEQ ID NO: 217366 - DNA, 19 bp, Homo sapiens
  siRNA target sequence for TPST1 (NM_003596.2,1002-1020).
gtgtatggaggttggttat

SEQ ID NO: 217367 - DNA, 19 bp, Homo sapiens
  siRNA target sequence for TPST1 (NM_003596.2,1004-1022).
gtatggaggttggttataa

SEQ ID NO: 217368 - DNA, 19 bp, Homo sapiens
  siRNA target sequence for TPST1 (NM_003596.2,1026-1044).
gtgcatgttggttcactat

SEQ ID NO: 217369 - DNA, 19 bp, Homo sapiens
  siRNA target sequence for TPST1 (NM_003596.2,1028-1046).
gcatgttggttcactatga

SEQ ID NO: 217370 - DNA, 19 bp, Homo sapiens
  siRNA target sequence for TPST1 (NM_003596.2,1063-1081).
cctgaacggtggatgagaa

SEQ ID NO: 217371 - DNA, 19 bp, Homo sapiens
  siRNA target sequence for TPST1 (NM_003596.2,1071-1089).
gtggatgagaacactctta

SEQ ID NO: 217372 - DNA, 19 bp, Homo sapiens
  siRNA target sequence for TPST1 (NM_003596.2,1157-1175).
gagtgtctctgtcaaaagt

SEQ ID NO: 217373 - DNA, 19 bp, Homo sapiens
  siRNA target sequence for TPST1 (NM_003596.2,1209-1227).
caatgtaggagctctatca

SEQ ID NO: 217374 - DNA, 19 bp, Homo sapiens
  siRNA target sequence for TPST1 (NM_003596.2,1213-1231).
gtaggagctctatcaaaat

SEQ ID NO: 217375 - DNA, 19 bp, Homo sapiens
  siRNA target sequence for TPST1 (NM_003596.2,1247-1265).
cgccagatgttttacaaga

SEQ ID NO: 217376 - DNA, 19 bp, Homo sapiens
  siRNA target sequence for TPST1 (NM_003596.2,1287-1305).
gcttgccaagcttggatat

SEQ ID NO: 217377 - DNA, 19 bp, Homo sapiens
  siRNA target sequence for TPST1 (NM_003596.2,1342-1360).
gatcccaaaattattgaaa

SEQ ID NO: 217378 - DNA, 19 bp, Homo sapiens
  siRNA target sequence for TPST1 (NM_003596.2,1390-1408).
caactacctgactttctta

SEQ ID NO: 217379 - DNA, 19 bp, Homo sapiens
  siRNA target sequence for TPST2 (NM_003595.2,384-402).
gcaccaaccacgtggaata

SEQ ID NO: 217380 - DNA, 19 bp, Homo sapiens
  siRNA target sequence for TPST2 (NM_003595.2,1071-1089).
ccacggaccaggtcatcaa

SEQ ID NO: 217381 - DNA, 19 bp, Homo sapiens
  siRNA target sequence for TPST2 (NM_003595.2,1186-1204).
cggctatgacccttatgca

SEQ ID NO: 217382 - DNA, 19 bp, Homo sapiens
  siRNA target sequence for TPST2 (NM_003595.2,1249-1267).
cacacagcgggtcttgaaa

SEQ ID NO: 217383 - DNA, 19 bp, Homo sapiens
  siRNA target sequence for TPST2 (NM_003595.2,1261-1279).
cttgaaaggggactataaa

SEQ ID NO: 217384 - DNA, 19 bp, Homo sapiens
  siRNA target sequence for CHST3 (NM_004273.2,505-523).
gcaaatacgcccttttctt

SEQ ID NO: 217385 - DNA, 19 bp, Homo sapiens
  siRNA target sequence for CHST3 (NM_004273.2,540-558).
gtttttgtcttcatcgaaa

SEQ ID NO: 217386 - DNA, 19 bp, Homo sapiens
  siRNA target sequence for CHST3 (NM_004273.2,635-653).
cgacccagccctgatctta

SEQ ID NO: 217387 - DNA, 19 bp, Homo sapiens
  siRNA target sequence for CHST3 (NM_004273.2,877-895).
cgttcgtgggcgagttctt

SEQ ID NO: 217388 - DNA, 19 bp, Homo sapiens
  siRNA target sequence for CHST3 (NM_004273.2,1080-1098).
cacctgactcagttcatgt

SEQ ID NO: 217389 - DNA, 19 bp, Homo sapiens
  siRNA target sequence for CHST3 (NM_004273.2,1141-1159).
gtacgcccttcgtcaagaa

SEQ ID NO: 217390 - DNA, 19 bp, Homo sapiens
  siRNA target sequence for CHST3 (NM_004273.2,1668-1686).
gacggcagcggcatctact

SEQ ID NO: 217391 - DNA, 19 bp, Homo sapiens
  siRNA target sequence for CHST3 (NM_004273.2,1784-1802).
gcgcctcttcggctacaaa

SEQ ID NO: 217392 - DNA, 19 bp, Homo sapiens
  siRNA target sequence for CHST3 (NM_004273.2,1786-1804).
gcctcttcggctacaaact

SEQ ID NO: 217393 - DNA, 19 bp, Homo sapiens
  siRNA target sequence for CHST7 (NM_019886.2,471-489).
gcgagaagcagcacatcta

SEQ ID NO: 217394 - DNA, 19 bp, Homo sapiens
  siRNA target sequence for CHST7 (NM_019886.2,520-538).
cttcctgggcgaactcttt

SEQ ID NO: 217395 - DNA, 19 bp, Homo sapiens
  siRNA target sequence for CHST7 (NM_019886.2,545-563).
cacccggacgttttctact

SEQ ID NO: 217396 - DNA, 19 bp, Homo sapiens
  siRNA target sequence for CHST7 (NM_019886.2,548-566).
ccggacgttttctacttgt

SEQ ID NO: 217397 - DNA, 19 bp, Homo sapiens
  siRNA target sequence for CHST7 (NM_019886.2,549-567).
cggacgttttctacttgta

SEQ ID NO: 217398 - DNA, 19 bp, Homo sapiens
  siRNA target sequence for CHST7 (NM_019886.2,550-568).
ggacgttttctacttgtat

SEQ ID NO: 217399 - DNA, 19 bp, Homo sapiens
  siRNA target sequence for CHST7 (NM_019886.2,719-737).
ccggacacggccaatctta

SEQ ID NO: 217400 - DNA, 19 bp, Homo sapiens
  siRNA target sequence for CHST7 (NM_019886.2,1230-1248).
ggctgcgcgatctgctttt

SEQ ID NO: 217401 - DNA, 19 bp, Homo sapiens
  siRNA target sequence for CHST7 (NM_019886.2,1382-1400).
gccttcgcgctcaacatga

SEQ ID NO: 217402 - DNA, 19 bp, Homo sapiens
  siRNA target sequence for SULT2A1 (NM_003167.2,84-102).
cggacgatttcttatggtt

SEQ ID NO: 217403 - DNA, 19 bp, Homo sapiens
  siRNA target sequence for SULT2A1 (NM_003167.2,85-103).
ggacgatttcttatggttt

SEQ ID NO: 217404 - DNA, 19 bp, Homo sapiens
  siRNA target sequence for SULT2A1 (NM_003167.2,129-147).
gtttcagatccgaaacctt

SEQ ID NO: 217405 - DNA, 19 bp, Homo sapiens
  siRNA target sequence for SULT2A1 (NM_003167.2,138-156).
ccgaaaccttaagaaaagt

SEQ ID NO: 217406 - DNA, 19 bp, Homo sapiens
  siRNA target sequence for SULT2A1 (NM_003167.2,139-157).
cgaaaccttaagaaaagta

SEQ ID NO: 217407 - DNA, 19 bp, Homo sapiens
  siRNA target sequence for SULT2A1 (NM_003167.2,150-168).
gaaaagtacgtgatgagtt

SEQ ID NO: 217408 - DNA, 19 bp, Homo sapiens
  siRNA target sequence for SULT2A1 (NM_003167.2,206-224).
cccaaatcaggaacaaact

SEQ ID NO: 217409 - DNA, 19 bp, Homo sapiens
  siRNA target sequence for SULT2A1 (NM_003167.2,263-281).
gatgccaagtggatccaat

SEQ ID NO: 217410 - DNA, 19 bp, Homo sapiens
  siRNA target sequence for SULT2A1 (NM_003167.2,267-285).
ccaagtggatccaatctgt

SEQ ID NO: 217411 - DNA, 19 bp, Homo sapiens
  siRNA target sequence for SULT2A1 (NM_003167.2,316-334).
gagtgagattgggtataca

SEQ ID NO: 217412 - DNA, 19 bp, Homo sapiens
  siRNA target sequence for SULT2A1 (NM_003167.2,374-392).
cacctccccatccagttat

SEQ ID NO: 217413 - DNA, 19 bp, Homo sapiens
  siRNA target sequence for SULT2A1 (NM_003167.2,506-524).
ccaaagtcatgggaagaat

SEQ ID NO: 217414 - DNA, 19 bp, Homo sapiens
  siRNA target sequence for SULT2A1 (NM_003167.2,540-558).
gtcaaggaactgtgctata

SEQ ID NO: 217415 - DNA, 19 bp, Homo sapiens
  siRNA target sequence for SULT2A1 (NM_003167.2,553-571).
gctatatgggtcatggttt

SEQ ID NO: 217416 - DNA, 19 bp, Homo sapiens
  siRNA target sequence for SULT2A1 (NM_003167.2,682-700).
cctgggaaagacgttagaa

SEQ ID NO: 217417 - DNA, 19 bp, Homo sapiens
  siRNA target sequence for SULT2A1 (NM_003167.2,693-711).
cgttagaacccgaagaact

SEQ ID NO: 217418 - DNA, 19 bp, Homo sapiens
  siRNA target sequence for SULT2A1 (NM_003167.2,702-720).
ccgaagaactgaacttaat

SEQ ID NO: 217419 - DNA, 19 bp, Homo sapiens
  siRNA target sequence for SULT2A1 (NM_003167.2,744-762).
gcatgaaagaaaacaagat

SEQ ID NO: 217420 - DNA, 19 bp, Homo sapiens
  siRNA target sequence for SULT2A1 (NM_003167.2,774-792).
ccctcctgagtgttgatta

SEQ ID NO: 217421 - DNA, 19 bp, Homo sapiens
  siRNA target sequence for SULT2A1 (NM_003167.2,775-793).
cctcctgagtgttgattat

SEQ ID NO: 217422 - DNA, 19 bp, Homo sapiens
  siRNA target sequence for SULT2A1 (NM_003167.2,778-796).
cctgagtgttgattatgta

SEQ ID NO: 217423 - DNA, 19 bp, Homo sapiens
  siRNA target sequence for SULT2A1 (NM_003167.2,863-881).
caagctgaagactttgata

SEQ ID NO: 217424 - DNA, 19 bp, Homo sapiens
  siRNA target sequence for CHST6 (NM_021615.2,1134-1152).
cgcgaagccttcaagactt

SEQ ID NO: 217425 - DNA, 19 bp, Homo sapiens
  siRNA target sequence for CHST6 (NM_021615.2,1291-1309).
gcaacctcgcccttgatct

SEQ ID NO: 217426 - DNA, 19 bp, Homo sapiens
  siRNA target sequence for CHST6 (NM_021615.2,1356-1374).
gcctcgcacccccgaaatt

SEQ ID NO: 217427 - DNA, 19 bp, Homo sapiens
  siRNA target sequence for CHST1 (NM_003654.2,1219-1237).
gcaagtgcgggctactcaa

SEQ ID NO: 217428 - DNA, 19 bp, Homo sapiens
  siRNA target sequence for CHST1 (NM_003654.2,1329-1347).
gtggaagacccgcgattaa

SEQ ID NO: 217429 - DNA, 19 bp, Homo sapiens
  siRNA target sequence for CHST1 (NM_003654.2,1587-1605).
gctcggaaccctatgaaga

SEQ ID NO: 217430 - DNA, 19 bp, Homo sapiens
  siRNA target sequence for CHST1 (NM_003654.2,1588-1606).
ctcggaaccctatgaagaa

SEQ ID NO: 217431 - DNA, 19 bp, Homo sapiens
  siRNA target sequence for CHST10 (NM_004854.2,367-385).
gcatgcttttgggtgattt

SEQ ID NO: 217432 - DNA, 19 bp, Homo sapiens
  siRNA target sequence for CHST10 (NM_004854.2,446-464).
gtgccaaacaggagtttct

SEQ ID NO: 217433 - DNA, 19 bp, Homo sapiens
  siRNA target sequence for CHST10 (NM_004854.2,448-466).
gccaaacaggagtttctgt

SEQ ID NO: 217434 - DNA, 19 bp, Homo sapiens
  siRNA target sequence for CHST10 (NM_004854.2,667-685).
ctggaccgaatatttgtct

SEQ ID NO: 217435 - DNA, 19 bp, Homo sapiens
  siRNA target sequence for CHST10 (NM_004854.2,750-768).
gctgattgttctaaatgga

SEQ ID NO: 217436 - DNA, 19 bp, Homo sapiens
  siRNA target sequence for CHST10 (NM_004854.2,871-889).
cgattgaaaacatacttca

SEQ ID NO: 217437 - DNA, 19 bp, Homo sapiens
  siRNA target sequence for CHST10 (NM_004854.2,901-919).
gtaagagatcccttcgaaa

SEQ ID NO: 217438 - DNA, 19 bp, Homo sapiens
  siRNA target sequence for CHST10 (NM_004854.2,905-923).
gagatcccttcgaaagact

SEQ ID NO: 217439 - DNA, 19 bp, Homo sapiens
  siRNA target sequence for CHST10 (NM_004854.2,907-925).
gatcccttcgaaagactta

SEQ ID NO: 217440 - DNA, 19 bp, Homo sapiens
  siRNA target sequence for CHST10 (NM_004854.2,912-930).
cttcgaaagacttatttct

SEQ ID NO: 217441 - DNA, 19 bp, Homo sapiens
  siRNA target sequence for CHST10 (NM_004854.2,971-989).
cttggtacaggcatgagat

SEQ ID NO: 217442 - DNA, 19 bp, Homo sapiens
  siRNA target sequence for CHST10 (NM_004854.2,991-1009).
gctcctggcatcatcagaa

SEQ ID NO: 217443 - DNA, 19 bp, Homo sapiens
  siRNA target sequence for CHST10 (NM_004854.2,994-1012).
cctggcatcatcagaaaat

SEQ ID NO: 217444 - DNA, 19 bp, Homo sapiens
  siRNA target sequence for CHST10 (NM_004854.2,1104-1122).
gtttggggaccacatcatt

SEQ ID NO: 217445 - DNA, 19 bp, Homo sapiens
  siRNA target sequence for CHST10 (NM_004854.2,1150-1168).
gctccctgtgagataatgt

SEQ ID NO: 217446 - DNA, 19 bp, Homo sapiens
  siRNA target sequence for CHST10 (NM_004854.2,1151-1169).
ctccctgtgagataatgta

SEQ ID NO: 217447 - DNA, 19 bp, Homo sapiens
  siRNA target sequence for CHST10 (NM_004854.2,1201-1219).
gacgatgccccatacatct

SEQ ID NO: 217448 - DNA, 19 bp, Homo sapiens
  siRNA target sequence for CHST10 (NM_004854.2,1267-1285).
ccgggcattaccgtgtata

SEQ ID NO: 217449 - DNA, 19 bp, Homo sapiens
  siRNA target sequence for CHST10 (NM_004854.2,1270-1288).
ggcattaccgtgtataaca

SEQ ID NO: 217450 - DNA, 19 bp, Homo sapiens
  siRNA target sequence for CHST10 (NM_004854.2,1292-1310).
ccaaggtggagcactattt

SEQ ID NO: 217451 - DNA, 19 bp, Homo sapiens
  siRNA target sequence for CHST10 (NM_004854.2,1351-1369).
cgtttcgaaggggacttta

SEQ ID NO: 217452 - DNA, 19 bp, Homo sapiens
  siRNA target sequence for CHST10 (NM_004854.2,1352-1370).
gtttcgaaggggactttaa

SEQ ID NO: 217453 - DNA, 19 bp, Homo sapiens
  siRNA target sequence for CHST10 (NM_004854.2,1390-1408).
ccagactttttgctaaact

SEQ ID NO: 217454 - DNA, 19 bp, Homo sapiens
  siRNA target sequence for CHST2 (NM_004267.2,376-394).
cgtcccctctcggaatgaa

SEQ ID NO: 217455 - DNA, 19 bp, Homo sapiens
  siRNA target sequence for CHST2 (NM_004267.2,781-799).
cgttcttcggcgagctatt

SEQ ID NO: 217456 - DNA, 19 bp, Homo sapiens
  siRNA target sequence for CHST2 (NM_004267.2,806-824).
gaatcccgaggtgttcttt

SEQ ID NO: 217457 - DNA, 19 bp, Homo sapiens
  siRNA target sequence for CHST2 (NM_004267.2,810-828).
cccgaggtgttctttctct

SEQ ID NO: 217458 - DNA, 19 bp, Homo sapiens
  siRNA target sequence for CHST2 (NM_004267.2,811-829).
ccgaggtgttctttctcta

SEQ ID NO: 217459 - DNA, 19 bp, Homo sapiens
  siRNA target sequence for CHST2 (NM_004267.2,1139-1157).
gtaccgcacactagtcata

SEQ ID NO: 217460 - DNA, 19 bp, Homo sapiens
  siRNA target sequence for CHST2 (NM_004267.2,1433-1451).
ggaggtcatctgcaatagt

SEQ ID NO: 217461 - DNA, 19 bp, Homo sapiens
  siRNA target sequence for CHST2 (NM_004267.2,1554-1572).
ctacggagagtgtacgatt

SEQ ID NO: 217462 - DNA, 19 bp, Homo sapiens
  siRNA target sequence for CHST2 (NM_004267.2,1709-1727).
caccttccagcagatcaaa

SEQ ID NO: 217463 - DNA, 19 bp, Homo sapiens
  siRNA target sequence for CHST5 (NM_012126.1,626-644).
gacctgatgcgctctatct

SEQ ID NO: 217464 - DNA, 19 bp, Homo sapiens
  siRNA target sequence for CHST5 (NM_012126.1,628-646).
cctgatgcgctctatcttt

SEQ ID NO: 217465 - DNA, 19 bp, Homo sapiens
  siRNA target sequence for CHST5 (NM_012126.1,629-647).
ctgatgcgctctatctttt

SEQ ID NO: 217466 - DNA, 19 bp, Homo sapiens
  siRNA target sequence for CHST5 (NM_012126.1,690-708).
gaaacctgtccgccttttt

SEQ ID NO: 217467 - DNA, 19 bp, Homo sapiens
  siRNA target sequence for CHST5 (NM_012126.1,695-713).
ctgtccgcctttttcaact

SEQ ID NO: 217468 - DNA, 19 bp, Homo sapiens
  siRNA target sequence for CHST5 (NM_012126.1,1289-1307).
ccaatcgaggccttccata

SEQ ID NO: 217469 - DNA, 19 bp, Homo sapiens
  siRNA target sequence for CHST5 (NM_012126.1,1303-1321).
ccatacttcgtctaggaat

SEQ ID NO: 217470 - DNA, 19 bp, Homo sapiens
  siRNA target sequence for CHST5 (NM_012126.1,1352-1370).
gcgttgcccttcactaaga

SEQ ID NO: 217471 - DNA, 19 bp, Homo sapiens
  siRNA target sequence for CHST5 (NM_012126.1,1353-1371).
cgttgcccttcactaagat

SEQ ID NO: 217472 - DNA, 19 bp, Homo sapiens
  siRNA target sequence for GALNAC4S-6ST (NM_014863.1,723-741).
gacagtaagcagatgaact

SEQ ID NO: 217473 - DNA, 19 bp, Homo sapiens
  siRNA target sequence for GALNAC4S-6ST (NM_014863.1,763-781).
ggactgaagggaacgaaaa

SEQ ID NO: 217474 - DNA, 19 bp, Homo sapiens
  siRNA target sequence for GALNAC4S-6ST (NM_014863.1,790-808).
ggtttttgcgcttcaaaaa

SEQ ID NO: 217475 - DNA, 19 bp, Homo sapiens
  siRNA target sequence for GALNAC4S-6ST (NM_014863.1,815-833).
gcgatgtagcctcgttttt

SEQ ID NO: 217476 - DNA, 19 bp, Homo sapiens
  siRNA target sequence for GALNAC4S-6ST (NM_014863.1,824-842).
cctcgtttttggactgata

SEQ ID NO: 217477 - DNA, 19 bp, Homo sapiens
  siRNA target sequence for GALNAC4S-6ST (NM_014863.1,825-843).
ctcgtttttggactgataa

SEQ ID NO: 217478 - DNA, 19 bp, Homo sapiens
  siRNA target sequence for GALNAC4S-6ST (NM_014863.1,827-845).
cgtttttggactgataata

SEQ ID NO: 217479 - DNA, 19 bp, Homo sapiens
  siRNA target sequence for GALNAC4S-6ST (NM_014863.1,828-846).
gtttttggactgataataa

SEQ ID NO: 217480 - DNA, 19 bp, Homo sapiens
  siRNA target sequence for GALNAC4S-6ST (NM_014863.1,850-868).
ccttggtaatggcttctta

SEQ ID NO: 217481 - DNA, 19 bp, Homo sapiens
  siRNA target sequence for GALNAC4S-6ST (NM_014863.1,888-906).
caagagcttctgatctcat

SEQ ID NO: 217482 - DNA, 19 bp, Homo sapiens
  siRNA target sequence for GALNAC4S-6ST (NM_014863.1,984-1002).
caccaccaatcctctgtaa

SEQ ID NO: 217483 - DNA, 19 bp, Homo sapiens
  siRNA target sequence for GALNAC4S-6ST (NM_014863.1,986-1004).
ccaccaatcctctgtaaat

SEQ ID NO: 217484 - DNA, 19 bp, Homo sapiens
  siRNA target sequence for GALNAC4S-6ST (NM_014863.1,987-1005).
caccaatcctctgtaaata

SEQ ID NO: 217485 - DNA, 19 bp, Homo sapiens
  siRNA target sequence for GALNAC4S-6ST (NM_014863.1,1022-1040).
ggactatccaagcattaaa

SEQ ID NO: 217486 - DNA, 19 bp, Homo sapiens
  siRNA target sequence for GALNAC4S-6ST (NM_014863.1,1023-1041).
gactatccaagcattaaat

SEQ ID NO: 217487 - DNA, 19 bp, Homo sapiens
  siRNA target sequence for GALNAC4S-6ST (NM_014863.1,1052-1070).
cagcatcacaactaggatt

SEQ ID NO: 217488 - DNA, 19 bp, Homo sapiens
  siRNA target sequence for GALNAC4S-6ST (NM_014863.1,1333-1351).
gctgcctgccgcacttcta

SEQ ID NO: 217489 - DNA, 19 bp, Homo sapiens
  siRNA target sequence for GALNAC4S-6ST (NM_014863.1,1340-1358).
gccgcacttctacatcata

SEQ ID NO: 217490 - DNA, 19 bp, Homo sapiens
  siRNA target sequence for GALNAC4S-6ST (NM_014863.1,1375-1393).
ggaccacagacctctatga

SEQ ID NO: 217491 - DNA, 19 bp, Homo sapiens
  siRNA target sequence for GALNAC4S-6ST (NM_014863.1,1468-1486).
gaatcgtccgcctaagaga

SEQ ID NO: 217492 - DNA, 19 bp, Homo sapiens
  siRNA target sequence for GALNAC4S-6ST (NM_014863.1,1501-1519).
gctatcccgtggaagatta

SEQ ID NO: 217493 - DNA, 19 bp, Homo sapiens
  siRNA target sequence for GALNAC4S-6ST (NM_014863.1,1502-1520).
ctatcccgtggaagattat

SEQ ID NO: 217494 - DNA, 19 bp, Homo sapiens
  siRNA target sequence for GALNAC4S-6ST (NM_014863.1,1630-1648).
ccacgatgtgggataataa

SEQ ID NO: 217495 - DNA, 19 bp, Homo sapiens
  siRNA target sequence for GALNAC4S-6ST (NM_014863.1,1631-1649).
cacgatgtgggataataat

SEQ ID NO: 217496 - DNA, 19 bp, Homo sapiens
  siRNA target sequence for GALNAC4S-6ST (NM_014863.1,1727-1745).
gccaaatgccagactgatt

SEQ ID NO: 217497 - DNA, 19 bp, Homo sapiens
  siRNA target sequence for GALNAC4S-6ST (NM_014863.1,1761-1779).
cctgtggagaggttgtact

SEQ ID NO: 217498 - DNA, 19 bp, Homo sapiens
  siRNA target sequence for GALNAC4S-6ST (NM_014863.1,1769-1787).
gaggttgtactcagactat

SEQ ID NO: 217499 - DNA, 19 bp, Homo sapiens
  siRNA target sequence for GALNAC4S-6ST (NM_014863.1,1771-1789).
ggttgtactcagactatct

SEQ ID NO: 217500 - DNA, 19 bp, Homo sapiens
  siRNA target sequence for GALNAC4S-6ST (NM_014863.1,1782-1800).
gactatctctactttgcaa

SEQ ID NO: 217501 - DNA, 19 bp, Homo sapiens
  siRNA target sequence for GALNAC4S-6ST (NM_014863.1,1793-1811).
ctttgcaagttcgaataaa

SEQ ID NO: 217502 - DNA, 19 bp, Homo sapiens
  siRNA target sequence for GALNAC4S-6ST (NM_014863.1,1816-1834).
cggacgacttccatgagaa

SEQ ID NO: 217503 - DNA, 19 bp, Homo sapiens
  siRNA target sequence for GALNAC4S-6ST (NM_014863.1,1817-1835).
ggacgacttccatgagaaa

SEQ ID NO: 217504 - DNA, 19 bp, Homo sapiens
  siRNA target sequence for GALNAC4S-6ST (NM_014863.1,1967-1985).
ggactggctcagcgttttt

SEQ ID NO: 217505 - DNA, 19 bp, Homo sapiens
  siRNA target sequence for GALNAC4S-6ST (NM_014863.1,2069-2087).
gaacctagggcccttaagt

SEQ ID NO: 217506 - DNA, 19 bp, Homo sapiens
  siRNA target sequence for GP3ST (NM_022134.1,280-298).
ccggtcaccaacatcatgt

SEQ ID NO: 217507 - DNA, 19 bp, Homo sapiens
  siRNA target sequence for GP3ST (NM_022134.1,455-473).
cgcagcagcgcttcaacat

SEQ ID NO: 217508 - DNA, 19 bp, Homo sapiens
  siRNA target sequence for GP3ST (NM_022134.1,460-478).
cagcgcttcaacatcatgt

SEQ ID NO: 217509 - DNA, 19 bp, Homo sapiens
  siRNA target sequence for GP3ST (NM_022134.1,503-521).
ctcaggtgcagaaagtcat

SEQ ID NO: 217510 - DNA, 19 bp, Homo sapiens
  siRNA target sequence for GP3ST (NM_022134.1,523-541).
cccaacgacaccttctact

SEQ ID NO: 217511 - DNA, 19 bp, Homo sapiens
  siRNA target sequence for GP3ST (NM_022134.1,578-596).
cctccttcatctactacaa

SEQ ID NO: 217512 - DNA, 19 bp, Homo sapiens
  siRNA target sequence for GP3ST (NM_022134.1,971-989).
ggcgcctgtacgagcattt

SEQ ID NO: 217513 - DNA, 19 bp, Homo sapiens
  siRNA target sequence for GP3ST (NM_022134.1,973-991).
cgcctgtacgagcatttca

SEQ ID NO: 217514 - DNA, 19 bp, Homo sapiens
  siRNA target sequence for GP3ST (NM_022134.1,974-992).
gcctgtacgagcatttcaa

SEQ ID NO: 217515 - DNA, 19 bp, Homo sapiens
  siRNA target sequence for HS3ST5 (NM_153612.1,70-88).
catccatcaagttgttgat

SEQ ID NO: 217516 - DNA, 19 bp, Homo sapiens
  siRNA target sequence for HS3ST5 (NM_153612.1,101-119).
gccaaccacaagagctatt

SEQ ID NO: 217517 - DNA, 19 bp, Homo sapiens
  siRNA target sequence for HS3ST5 (NM_153612.1,102-120).
ccaaccacaagagctattt

SEQ ID NO: 217518 - DNA, 19 bp, Homo sapiens
  siRNA target sequence for HS3ST5 (NM_153612.1,106-124).
ccacaagagctatttctga

SEQ ID NO: 217519 - DNA, 19 bp, Homo sapiens
  siRNA target sequence for HS3ST5 (NM_153612.1,115-133).
ctatttctgattatactca

SEQ ID NO: 217520 - DNA, 19 bp, Homo sapiens
  siRNA target sequence for HS3ST5 (NM_153612.1,154-172).
ggaagaacaaaacttatta

SEQ ID NO: 217521 - DNA, 19 bp, Homo sapiens
  siRNA target sequence for HS3ST5 (NM_153612.1,161-179).
caaaacttattacaagttt

SEQ ID NO: 217522 - DNA, 19 bp, Homo sapiens
  siRNA target sequence for HS3ST5 (NM_153612.1,188-206).
ggccatagaccctaataca

SEQ ID NO: 217523 - DNA, 19 bp, Homo sapiens
  siRNA target sequence for HS3ST5 (NM_153612.1,189-207).
gccatagaccctaatacat

SEQ ID NO: 217524 - DNA, 19 bp, Homo sapiens
  siRNA target sequence for HS3ST5 (NM_153612.1,205-223).
catgcgaagtgaacacaaa

SEQ ID NO: 217525 - DNA, 19 bp, Homo sapiens
  siRNA target sequence for HS3ST5 (NM_153612.1,244-262).
gcatctacaccaaacatct

SEQ ID NO: 217526 - DNA, 19 bp, Homo sapiens
  siRNA target sequence for HS3ST5 (NM_153612.1,271-289).
ggttgaaatactttccaat

SEQ ID NO: 217527 - DNA, 19 bp, Homo sapiens
  siRNA target sequence for HS3ST5 (NM_153612.1,272-290).
gttgaaatactttccaatt

SEQ ID NO: 217528 - DNA, 19 bp, Homo sapiens
  siRNA target sequence for HS3ST5 (NM_153612.1,351-369).
ctcgtggagaagttcctaa

SEQ ID NO: 217529 - DNA, 19 bp, Homo sapiens
  siRNA target sequence for HS3ST5 (NM_153612.1,353-371).
cgtggagaagttcctaaat

SEQ ID NO: 217530 - DNA, 19 bp, Homo sapiens
  siRNA target sequence for HS3ST5 (NM_153612.1,374-392).
gcctccaaggataagtcaa

SEQ ID NO: 217531 - DNA, 19 bp, Homo sapiens
  siRNA target sequence for HS3ST5 (NM_153612.1,375-393).
cctccaaggataagtcaat

SEQ ID NO: 217532 - DNA, 19 bp, Homo sapiens
  siRNA target sequence for HS3ST5 (NM_153612.1,376-394).
ctccaaggataagtcaata

SEQ ID NO: 217533 - DNA, 19 bp, Homo sapiens
  siRNA target sequence for HS3ST5 (NM_153612.1,378-396).
ccaaggataagtcaataca

SEQ ID NO: 217534 - DNA, 19 bp, Homo sapiens
  siRNA target sequence for HS3ST5 (NM_153612.1,411-429).
gctaccagagggttttact

SEQ ID NO: 217535 - DNA, 19 bp, Homo sapiens
  siRNA target sequence for HS3ST5 (NM_153612.1,428-446).
ctgcttgcggtttaatatt

SEQ ID NO: 217536 - DNA, 19 bp, Homo sapiens
  siRNA target sequence for HS3ST5 (NM_153612.1,430-448).
gcttgcggtttaatattat

SEQ ID NO: 217537 - DNA, 19 bp, Homo sapiens
  siRNA target sequence for HS3ST5 (NM_153612.1,434-452).
gcggtttaatattatcttt

SEQ ID NO: 217538 - DNA, 19 bp, Homo sapiens
  siRNA target sequence for HS3ST5 (NM_153612.1,495-513).
gtggacccctctgtcatta

SEQ ID NO: 217539 - DNA, 19 bp, Homo sapiens
  siRNA target sequence for HS3ST5 (NM_153612.1,514-532).
ctaaattgcgcaaattctt

SEQ ID NO: 217540 - DNA, 19 bp, Homo sapiens
  siRNA target sequence for HS3ST5 (NM_153612.1,523-541).
gcaaattctttcatccttt

SEQ ID NO: 217541 - DNA, 19 bp, Homo sapiens
  siRNA target sequence for NCAG1 (NM_032160.1,1499-1517).
catggatcatggcgttaat

SEQ ID NO: 217542 - DNA, 19 bp, Homo sapiens
  siRNA target sequence for NCAG1 (NM_032160.1,1503-1521).
gatcatggcgttaatgttt

SEQ ID NO: 217543 - DNA, 19 bp, Homo sapiens
  siRNA target sequence for NCAG1 (NM_032160.1,1506-1524).
catggcgttaatgtttaca

SEQ ID NO: 217544 - DNA, 19 bp, Homo sapiens
  siRNA target sequence for NCAG1 (NM_032160.1,1518-1536).
gtttacaggacatttacta

SEQ ID NO: 217545 - DNA, 19 bp, Homo sapiens
  siRNA target sequence for NCAG1 (NM_032160.1,1523-1541).
caggacatttactattctt

SEQ ID NO: 217546 - DNA, 19 bp, Homo sapiens
  siRNA target sequence for NCAG1 (NM_032160.1,1576-1594).
gaatctgtgagcaattatt

SEQ ID NO: 217547 - DNA, 19 bp, Homo sapiens
  siRNA target sequence for NCAG1 (NM_032160.1,1613-1631).
cagatgatatagatcagtt

SEQ ID NO: 217548 - DNA, 19 bp, Homo sapiens
  siRNA target sequence for NCAG1 (NM_032160.1,1615-1633).
gatgatatagatcagttta

SEQ ID NO: 217549 - DNA, 19 bp, Homo sapiens
  siRNA target sequence for NCAG1 (NM_032160.1,1618-1636).
gatatagatcagtttaaaa

SEQ ID NO: 217550 - DNA, 19 bp, Homo sapiens
  siRNA target sequence for NCAG1 (NM_032160.1,1651-1669).
gatttcagacccaaccaaa

SEQ ID NO: 217551 - DNA, 19 bp, Homo sapiens
  siRNA target sequence for NCAG1 (NM_032160.1,1682-1700).
gtatgcttcatccaagttt

SEQ ID NO: 217552 - DNA, 19 bp, Homo sapiens
  siRNA target sequence for NCAG1 (NM_032160.1,1686-1704).
gcttcatccaagtttatat

SEQ ID NO: 217553 - DNA, 19 bp, Homo sapiens
  siRNA target sequence for NCAG1 (NM_032160.1,1742-1760).
ctcgtgcaagccatttgca

SEQ ID NO: 217554 - DNA, 19 bp, Homo sapiens
  siRNA target sequence for NCAG1 (NM_032160.1,1781-1799).
gtgcagtgacagttatgct

SEQ ID NO: 217555 - DNA, 19 bp, Homo sapiens
  siRNA target sequence for NCAG1 (NM_032160.1,1885-1903).
cctttagcattgtactgtt

SEQ ID NO: 217556 - DNA, 19 bp, Homo sapiens
  siRNA target sequence for NCAG1 (NM_032160.1,1958-1976).
ggatggttggctacaaaga

SEQ ID NO: 217557 - DNA, 19 bp, Homo sapiens
  siRNA target sequence for NCAG1 (NM_032160.1,2038-2056).
gccactgcctttgactttt

SEQ ID NO: 217558 - DNA, 19 bp, Homo sapiens
  siRNA target sequence for NCAG1 (NM_032160.1,2044-2062).
gcctttgactttttatata

SEQ ID NO: 217559 - DNA, 19 bp, Homo sapiens
  siRNA target sequence for NCAG1 (NM_032160.1,2071-2089).
gataatcatcgaagacaaa

SEQ ID NO: 217560 - DNA, 19 bp, Homo sapiens
  siRNA target sequence for NCAG1 (NM_032160.1,2108-2126).
gggttattactgaggaaat

SEQ ID NO: 217561 - DNA, 19 bp, Homo sapiens
  siRNA target sequence for NCAG1 (NM_032160.1,2156-2174).
gcaaacagcttctccataa

SEQ ID NO: 217562 - DNA, 19 bp, Homo sapiens
  siRNA target sequence for NCAG1 (NM_032160.1,2178-2196).
ccaagccactaatatgata

SEQ ID NO: 217563 - DNA, 19 bp, Homo sapiens
  siRNA target sequence for NCAG1 (NM_032160.1,2182-2200).
gccactaatatgatagcat

SEQ ID NO: 217564 - DNA, 19 bp, Homo sapiens
  siRNA target sequence for NCAG1 (NM_032160.1,2184-2202).
cactaatatgatagcatta

SEQ ID NO: 217565 - DNA, 19 bp, Homo sapiens
  siRNA target sequence for NCAG1 (NM_032160.1,2217-2235).
ggtgactggagtagataaa

SEQ ID NO: 217566 - DNA, 19 bp, Homo sapiens
  siRNA target sequence for NCAG1 (NM_032160.1,2275-2293).
gtcatggaaaagacaatgt

SEQ ID NO: 217567 - DNA, 19 bp, Homo sapiens
  siRNA target sequence for NCAG1 (NM_032160.1,2288-2306).
caatgtttctattgaatca

SEQ ID NO: 217568 - DNA, 19 bp, Homo sapiens
  siRNA target sequence for NCAG1 (NM_032160.1,2329-2347).
gaaggtgtggcctatggaa

SEQ ID NO: 217569 - DNA, 19 bp, Homo sapiens
  siRNA target sequence for NCAG1 (NM_032160.1,2344-2362).
ggaagctacacagctaaat

SEQ ID NO: 217570 - DNA, 19 bp, Homo sapiens
  siRNA target sequence for NCAG1 (NM_032160.1,2433-2451).
gatgcacttttggttctat

SEQ ID NO: 217571 - DNA, 19 bp, Homo sapiens
  siRNA target sequence for NCAG1 (NM_032160.1,2436-2454).
gcacttttggttctattat

SEQ ID NO: 217572 - DNA, 19 bp, Homo sapiens
  siRNA target sequence for NCAG1 (NM_032160.1,2448-2466).
ctattatgccaccctttta

SEQ ID NO: 217573 - DNA, 19 bp, Homo sapiens
  siRNA target sequence for NCAG1 (NM_032160.1,2488-2506).
ggtatagcagattccaatt

SEQ ID NO: 217574 - DNA, 19 bp, Homo sapiens
  siRNA target sequence for NCAG1 (NM_032160.1,2489-2507).
gtatagcagattccaatta

SEQ ID NO: 217575 - DNA, 19 bp, Homo sapiens
  siRNA target sequence for NCAG1 (NM_032160.1,2536-2554).
ctagttttcttggataagt

SEQ ID NO: 217576 - DNA, 19 bp, Homo sapiens
  siRNA target sequence for NCAG1 (NM_032160.1,2583-2601).
gttagctcagcaaattaga

SEQ ID NO: 217577 - DNA, 19 bp, Homo sapiens
  siRNA target sequence for NCAG1 (NM_032160.1,2654-2672).
gtactcttcacactgaata

SEQ ID NO: 217578 - DNA, 19 bp, Homo sapiens
  siRNA target sequence for NCAG1 (NM_032160.1,2659-2677).
cttcacactgaatacatct

SEQ ID NO: 217579 - DNA, 19 bp, Homo sapiens
  siRNA target sequence for NCAG1 (NM_032160.1,2704-2722).
ccacctgctgattatggta

SEQ ID NO: 217580 - DNA, 19 bp, Homo sapiens
  siRNA target sequence for NCAG1 (NM_032160.1,2713-2731).
gattatggtactgcaaaaa

SEQ ID NO: 217581 - DNA, 19 bp, Homo sapiens
  siRNA target sequence for NCAG1 (NM_032160.1,2723-2741).
ctgcaaaaatacacacatt

SEQ ID NO: 217582 - DNA, 19 bp, Homo sapiens
  siRNA target sequence for NCAG1 (NM_032160.1,2826-2844).
ggggggacgagctgtgtat

SEQ ID NO: 217583 - DNA, 19 bp, Homo sapiens
  siRNA target sequence for NCAG1 (NM_032160.1,2828-2846).
ggggacgagctgtgtatga

SEQ ID NO: 217584 - DNA, 19 bp, Homo sapiens
  siRNA target sequence for NCAG1 (NM_032160.1,2830-2848).
ggacgagctgtgtatgaca

SEQ ID NO: 217585 - DNA, 19 bp, Homo sapiens
  siRNA target sequence for NCAG1 (NM_032160.1,2831-2849).
gacgagctgtgtatgacat

SEQ ID NO: 217586 - DNA, 19 bp, Homo sapiens
  siRNA target sequence for NCAG1 (NM_032160.1,2837-2855).
ctgtgtatgacatagttca

SEQ ID NO: 217587 - DNA, 19 bp, Homo sapiens
  siRNA target sequence for NCAG1 (NM_032160.1,2862-2880).
gccatattcctggattgat

SEQ ID NO: 217588 - DNA, 19 bp, Homo sapiens
  siRNA target sequence for NCAG1 (NM_032160.1,2939-2957).
cccccaatggacaagtatt

SEQ ID NO: 217589 - DNA, 19 bp, Homo sapiens
  siRNA target sequence for NCAG1 (NM_032160.1,2948-2966).
gacaagtatttgtttctga

SEQ ID NO: 217590 - DNA, 19 bp, Homo sapiens
  siRNA target sequence for NCAG1 (NM_032160.1,2971-2989).
ctctatggacccaagttga

SEQ ID NO: 217591 - DNA, 19 bp, Homo sapiens
  siRNA target sequence for NCAG1 (NM_032160.1,2985-3003).
gttgagccaccttaacaat

SEQ ID NO: 217592 - DNA, 19 bp, Homo sapiens
  siRNA target sequence for NCAG1 (NM_032160.1,2988-3006).
gagccaccttaacaatgta

SEQ ID NO: 217593 - DNA, 19 bp, Homo sapiens
  siRNA target sequence for NCAG1 (NM_032160.1,3023-3041).
caccctcaagccagtgtaa

SEQ ID NO: 217594 - DNA, 19 bp, Homo sapiens
  siRNA target sequence for NCAG1 (NM_032160.1,3137-3155).
ctcaacatggggaaatggt

SEQ ID NO: 217595 - DNA, 19 bp, Homo sapiens
  siRNA target sequence for NCAG1 (NM_032160.1,3139-3157).
caacatggggaaatggtat

SEQ ID NO: 217596 - DNA, 19 bp, Homo sapiens
  siRNA target sequence for NCAG1 (NM_032160.1,3168-3186).
ggaagccgtgtctgcttat

SEQ ID NO: 217597 - DNA, 19 bp, Homo sapiens
  siRNA target sequence for NCAG1 (NM_032160.1,3169-3187).
gaagccgtgtctgcttatt

SEQ ID NO: 217598 - DNA, 19 bp, Homo sapiens
  siRNA target sequence for NCAG1 (NM_032160.1,3174-3192).
cgtgtctgcttattcttca

SEQ ID NO: 217599 - DNA, 19 bp, Homo sapiens
  siRNA target sequence for NCAG1 (NM_032160.1,3194-3212).
caatgagactgaaaagtgt

SEQ ID NO: 217600 - DNA, 19 bp, Homo sapiens
  siRNA target sequence for NCAG1 (NM_032160.1,3217-3235).
cgtgctttgcttctcttaa

SEQ ID NO: 217601 - DNA, 19 bp, Homo sapiens
  siRNA target sequence for NCAG1 (NM_032160.1,3240-3258).
ccaaactctgctagttgtt

SEQ ID NO: 217602 - DNA, 19 bp, Homo sapiens
  siRNA target sequence for NCAG1 (NM_032160.1,3274-3292).
caagaagattccccaataa

SEQ ID NO: 217603 - DNA, 19 bp, Homo sapiens
  siRNA target sequence for NCAG1 (NM_032160.1,3309-3327).
ctttcataatttggatatt

SEQ ID NO: 217604 - DNA, 19 bp, Homo sapiens
  siRNA target sequence for NCAG1 (NM_032160.1,3385-3403).
gtgtgggatgcacattaca

SEQ ID NO: 217605 - DNA, 19 bp, Homo sapiens
  siRNA target sequence for NCAG1 (NM_032160.1,3389-3407).
gggatgcacattacaaaat

SEQ ID NO: 217606 - DNA, 19 bp, Homo sapiens
  siRNA target sequence for NCAG1 (NM_032160.1,3434-3452).
gtcccatggccagtataca

SEQ ID NO: 217607 - DNA, 19 bp, Homo sapiens
  siRNA target sequence for NCAG1 (NM_032160.1,3484-3502).
cgatggactcaatttgtta

SEQ ID NO: 217608 - DNA, 19 bp, Homo sapiens
  siRNA target sequence for NCAG1 (NM_032160.1,3485-3503).
gatggactcaatttgttaa

SEQ ID NO: 217609 - DNA, 19 bp, Homo sapiens
  siRNA target sequence for NCAG1 (NM_032160.1,3488-3506).
ggactcaatttgttaatgt

SEQ ID NO: 217610 - DNA, 19 bp, Homo sapiens
  siRNA target sequence for NCAG1 (NM_032160.1,3556-3574).
gggccatatatcaatgtct

SEQ ID NO: 217611 - DNA, 19 bp, Homo sapiens
  siRNA target sequence for NCAG1 (NM_032160.1,3579-3597).
ctgcagatttattgatagt

SEQ ID NO: 217612 - DNA, 19 bp, Homo sapiens
  siRNA target sequence for NCAG1 (NM_032160.1,3638-3656).
ctgaacatgttgtttctat

SEQ ID NO: 217613 - DNA, 19 bp, Homo sapiens
  siRNA target sequence for NCAG1 (NM_032160.1,3670-3688).
cataacctgaagacaagat

SEQ ID NO: 217614 - DNA, 19 bp, Homo sapiens
  siRNA target sequence for NCAG1 (NM_032160.1,3676-3694).
ctgaagacaagattcaatt

SEQ ID NO: 217615 - DNA, 19 bp, Homo sapiens
  siRNA target sequence for NCAG1 (NM_032160.1,3723-3741).
ggctgatcaaggccaaata

SEQ ID NO: 217616 - DNA, 19 bp, Homo sapiens
  siRNA target sequence for NCAG1 (NM_032160.1,3724-3742).
gctgatcaaggccaaataa

SEQ ID NO: 217617 - DNA, 19 bp, Homo sapiens
  siRNA target sequence for NCAG1 (NM_032160.1,3735-3753).
ccaaataacccgatttggt

SEQ ID NO: 217618 - DNA, 19 bp, Homo sapiens
  siRNA target sequence for NCAG1 (NM_032160.1,3736-3754).
caaataacccgatttggtt

SEQ ID NO: 217619 - DNA, 19 bp, Homo sapiens
  siRNA target sequence for NCAG1 (NM_032160.1,3757-3775).
ggcactcaagcaatagtaa

SEQ ID NO: 217620 - DNA, 19 bp, Homo sapiens
  siRNA target sequence for NCAG1 (NM_032160.1,3758-3776).
gcactcaagcaatagtaaa

SEQ ID NO: 217621 - DNA, 19 bp, Homo sapiens
  siRNA target sequence for NCAG1 (NM_032160.1,3829-3847).
gcagttggattaattttgt

SEQ ID NO: 217622 - DNA, 19 bp, Homo sapiens
  siRNA target sequence for NCAG1 (NM_032160.1,3848-3866).
gcattagcttggtgatttt

SEQ ID NO: 217623 - DNA, 19 bp, Homo sapiens
  siRNA target sequence for NCAG1 (NM_032160.1,3849-3867).
cattagcttggtgatttta

SEQ ID NO: 217624 - DNA, 19 bp, Homo sapiens
  siRNA target sequence for NCAG1 (NM_032160.1,3858-3876).
ggtgattttaactttccaa

SEQ ID NO: 217625 - DNA, 19 bp, Homo sapiens
  siRNA target sequence for NCAG1 (NM_032160.1,3859-3877).
gtgattttaactttccaat

SEQ ID NO: 217626 - DNA, 19 bp, Homo sapiens
  siRNA target sequence for NCAG1 (NM_032160.1,3869-3887).
ctttccaatggcgttttta

SEQ ID NO: 217627 - DNA, 19 bp, Homo sapiens
  siRNA target sequence for NCAG1 (NM_032160.1,3873-3891).
ccaatggcgtttttacctt

SEQ ID NO: 217628 - DNA, 19 bp, Homo sapiens
  siRNA target sequence for NCAG1 (NM_032160.1,3874-3892).
caatggcgtttttaccttt

SEQ ID NO: 217629 - DNA, 19 bp, Homo sapiens
  siRNA target sequence for NCAG1 (NM_032160.1,3904-3922).
ctaatgcgatggatattaa

SEQ ID NO: 217630 - DNA, 19 bp, Homo sapiens
  siRNA target sequence for NCAG1 (NM_032160.1,3909-3927).
gcgatggatattaatactt

SEQ ID NO: 217631 - DNA, 19 bp, Homo sapiens
  siRNA target sequence for NCAG1 (NM_032160.1,3914-3932).
ggatattaatacttgttat

SEQ ID NO: 217632 - DNA, 19 bp, Homo sapiens
  siRNA target sequence for NCAG1 (NM_032160.1,3982-4000).
cccatttgtgcaaaatgga

SEQ ID NO: 217633 - DNA, 19 bp, Homo sapiens
  siRNA target sequence for NCAG1 (NM_032160.1,4012-4030).
gctgagggaagcaagaagt

SEQ ID NO: 217634 - DNA, 19 bp, Homo sapiens
  siRNA target sequence for NCAG1 (NM_032160.1,4053-4071).
catggatcttcctgatgtt

SEQ ID NO: 217635 - DNA, 19 bp, Homo sapiens
  siRNA target sequence for NCAG1 (NM_032160.1,4152-4170).
ggttcctacagcctacatt

SEQ ID NO: 217636 - DNA, 19 bp, Homo sapiens
  siRNA target sequence for NCAG1 (NM_032160.1,4156-4174).
cctacagcctacattgata

SEQ ID NO: 217637 - DNA, 19 bp, Homo sapiens
  siRNA target sequence for NCAG1 (NM_032160.1,4157-4175).
ctacagcctacattgatat

SEQ ID NO: 217638 - DNA, 19 bp, Homo sapiens
  siRNA target sequence for NCAG1 (NM_032160.1,4188-4206).
gttggaaatcgactcattt

SEQ ID NO: 217639 - DNA, 19 bp, Homo sapiens
  siRNA target sequence for NCAG1 (NM_032160.1,4239-4257).
ccgcagtgggcattttcgt

SEQ ID NO: 217640 - DNA, 19 bp, Homo sapiens
  siRNA target sequence for NCAG1 (NM_032160.1,4240-4258).
cgcagtgggcattttcgtt

SEQ ID NO: 217641 - DNA, 19 bp, Homo sapiens
  siRNA target sequence for NCAG1 (NM_032160.1,4242-4260).
cagtgggcattttcgttta

SEQ ID NO: 217642 - DNA, 19 bp, Homo sapiens
  siRNA target sequence for NCAG1 (NM_032160.1,4244-4262).
gtgggcattttcgtttact

SEQ ID NO: 217643 - DNA, 19 bp, Homo sapiens
  siRNA target sequence for NCAG1 (NM_032160.1,4268-4286).
gctggttgcagtctttagt

SEQ ID NO: 217644 - DNA, 19 bp, Homo sapiens
  siRNA target sequence for NCAG1 (NM_032160.1,4338-4356).
gggtaaactggcccaatat

SEQ ID NO: 217645 - DNA, 19 bp, Homo sapiens
  siRNA target sequence for NCAG1 (NM_032160.1,4339-4357).
ggtaaactggcccaatatt

SEQ ID NO: 217646 - DNA, 19 bp, Homo sapiens
  siRNA target sequence for NCAG1 (NM_032160.1,4340-4358).
gtaaactggcccaatattt

SEQ ID NO: 217647 - DNA, 19 bp, Homo sapiens
  siRNA target sequence for NCAG1 (NM_032160.1,4360-4378).
gcaatgaataaggacaaaa

SEQ ID NO: 217648 - DNA, 19 bp, Homo sapiens
  siRNA target sequence for NCAG1 (NM_032160.1,4428-4446).
gaaaggcgcctttgataga

SEQ ID NO: 217649 - DNA, 19 bp, Homo sapiens
  siRNA target sequence for NCAG1 (NM_032160.1,4473-4491).
gagacacctggtttactat

SEQ ID NO: 217650 - DNA, 19 bp, Homo sapiens
  siRNA target sequence for NCAG1 (NM_032160.1,4501-4519).
cgtcctgtgctcagtttaa

SEQ ID NO: 217651 - DNA, 19 bp, Homo sapiens
  siRNA target sequence for NCAG1 (NM_032160.1,4504-4522).
cctgtgctcagtttaagca

SEQ ID NO: 217652 - DNA, 19 bp, Homo sapiens
  siRNA target sequence for NCAG1 (NM_032160.1,4523-4541).
gtggaagctggacgttaaa

SEQ ID NO: 217653 - DNA, 19 bp, Homo sapiens
  siRNA target sequence for NCAG1 (NM_032160.1,4532-4550).
ggacgttaaagcttcattt

SEQ ID NO: 217654 - DNA, 19 bp, Homo sapiens
  siRNA target sequence for NCAG1 (NM_032160.1,4533-4551).
gacgttaaagcttcatttt

SEQ ID NO: 217655 - DNA, 19 bp, Homo sapiens
  siRNA target sequence for NCAG1 (NM_032160.1,4571-4589).
cttcgatgagggcattgta

SEQ ID NO: 217656 - DNA, 19 bp, Homo sapiens
  siRNA target sequence for NCAG1 (NM_032160.1,4574-4592).
cgatgagggcattgtacat

SEQ ID NO: 217657 - DNA, 19 bp, Homo sapiens
  siRNA target sequence for NCAG1 (NM_032160.1,4602-4620).
ccctcgggcatggatttat

SEQ ID NO: 217658 - DNA, 19 bp, Homo sapiens
  siRNA target sequence for NCAG1 (NM_032160.1,4603-4621).
cctcgggcatggatttatt

SEQ ID NO: 217659 - DNA, 19 bp, Homo sapiens
  siRNA target sequence for NCAG1 (NM_032160.1,4606-4624).
cgggcatggatttattcaa

SEQ ID NO: 217660 - DNA, 19 bp, Homo sapiens
  siRNA target sequence for NCAG1 (NM_032160.1,4626-4644).
gttgtacaatagtaaacca

SEQ ID NO: 217661 - DNA, 19 bp, Homo sapiens
  siRNA target sequence for NCAG1 (NM_032160.1,4722-4740).
cttaaattcgggttatgct

SEQ ID NO: 217662 - DNA, 19 bp, Homo sapiens
  siRNA target sequence for NCAG1 (NM_032160.1,4733-4751).
gttatgctttcgagtatga

SEQ ID NO: 217663 - DNA, 19 bp, Homo sapiens
  siRNA target sequence for NCAG1 (NM_032160.1,4739-4757).
ctttcgagtatgaaccatt

SEQ ID NO: 217664 - DNA, 19 bp, Homo sapiens
  siRNA target sequence for NCAG1 (NM_032160.1,4765-4783).
gaattatcaaaatccaaat

SEQ ID NO: 217665 - DNA, 19 bp, Homo sapiens
  siRNA target sequence for NCAG1 (NM_032160.1,4841-4859).
gaataaatacagatttgct

SEQ ID NO: 217666 - DNA, 19 bp, Homo sapiens
  siRNA target sequence for NCAG1 (NM_032160.1,4906-4924).
cctcagaaaactactgaaa

SEQ ID NO: 217667 - DNA, 19 bp, Homo sapiens
  siRNA target sequence for NCAG1 (NM_032160.1,4955-4973).
ctcctgctagtttaaacca

SEQ ID NO: 217668 - DNA, 19 bp, Homo sapiens
  siRNA target sequence for NCAG1 (NM_032160.1,4960-4978).
gctagtttaaaccaaatat

SEQ ID NO: 217669 - DNA, 19 bp, Homo sapiens
  siRNA target sequence for NCAG1 (NM_032160.1,5030-5048).
caccaactaatactaatgt

SEQ ID NO: 217670 - DNA, 19 bp, Homo sapiens
  siRNA target sequence for NCAG1 (NM_032160.1,5109-5127).
gatggatcgcctaggatat

SEQ ID NO: 217671 - DNA, 19 bp, Homo sapiens
  siRNA target sequence for NCAG1 (NM_032160.1,5112-5130).
ggatcgcctaggatatcca

SEQ ID NO: 217672 - DNA, 19 bp, Homo sapiens
  siRNA target sequence for NCAG1 (NM_032160.1,5113-5131).
gatcgcctaggatatccaa

SEQ ID NO: 217673 - DNA, 19 bp, Homo sapiens
  siRNA target sequence for NCAG1 (NM_032160.1,5118-5136).
cctaggatatccaaagttt

SEQ ID NO: 217674 - DNA, 19 bp, Homo sapiens
  siRNA target sequence for NCAG1 (NM_032160.1,5123-5141).
gatatccaaagtttatgga

SEQ ID NO: 217675 - DNA, 19 bp, Homo sapiens
  siRNA target sequence for NDST4 (NM_022569.1,682-700).
gaatcttattgtgaaactt

SEQ ID NO: 217676 - DNA, 19 bp, Homo sapiens
  siRNA target sequence for NDST4 (NM_022569.1,694-712).
gaaacttcggagaagtttt

SEQ ID NO: 217677 - DNA, 19 bp, Homo sapiens
  siRNA target sequence for NDST4 (NM_022569.1,702-720).
ggagaagttttcgaacatt

SEQ ID NO: 217678 - DNA, 19 bp, Homo sapiens
  siRNA target sequence for NDST4 (NM_022569.1,705-723).
gaagttttcgaacattgat

SEQ ID NO: 217679 - DNA, 19 bp, Homo sapiens
  siRNA target sequence for NDST4 (NM_022569.1,744-762).
gcttggtgagcattgtcat

SEQ ID NO: 217680 - DNA, 19 bp, Homo sapiens
  siRNA target sequence for NDST4 (NM_022569.1,745-763).
cttggtgagcattgtcatt

SEQ ID NO: 217681 - DNA, 19 bp, Homo sapiens
  siRNA target sequence for NDST4 (NM_022569.1,785-803).
ggctacaaacaggaaatga

SEQ ID NO: 217682 - DNA, 19 bp, Homo sapiens
  siRNA target sequence for NDST4 (NM_022569.1,828-846).
cagaatgcactgacatcaa

SEQ ID NO: 217683 - DNA, 19 bp, Homo sapiens
  siRNA target sequence for NDST4 (NM_022569.1,830-848).
gaatgcactgacatcaaaa

SEQ ID NO: 217684 - DNA, 19 bp, Homo sapiens
  siRNA target sequence for NDST4 (NM_022569.1,834-852).
gcactgacatcaaaattct

SEQ ID NO: 217685 - DNA, 19 bp, Homo sapiens
  siRNA target sequence for NDST4 (NM_022569.1,871-889).
gctgaaaacagttaaacct

SEQ ID NO: 217686 - DNA, 19 bp, Homo sapiens
  siRNA target sequence for NDST4 (NM_022569.1,928-946).
cgtggagagccaatactct

SEQ ID NO: 217687 - DNA, 19 bp, Homo sapiens
  siRNA target sequence for NDST4 (NM_022569.1,943-961).
ctctcaactcggtcaagat

SEQ ID NO: 217688 - DNA, 19 bp, Homo sapiens
  siRNA target sequence for NDST4 (NM_022569.1,945-963).
ctcaactcggtcaagatat

SEQ ID NO: 217689 - DNA, 19 bp, Homo sapiens
  siRNA target sequence for NDST4 (NM_022569.1,947-965).
caactcggtcaagatatca

SEQ ID NO: 217690 - DNA, 19 bp, Homo sapiens
  siRNA target sequence for NDST4 (NM_022569.1,953-971).
ggtcaagatatcatagcta

SEQ ID NO: 217691 - DNA, 19 bp, Homo sapiens
  siRNA target sequence for NDST4 (NM_022569.1,954-972).
gtcaagatatcatagctat

SEQ ID NO: 217692 - DNA, 19 bp, Homo sapiens
  siRNA target sequence for NDST4 (NM_022569.1,977-995).
gagtccagccgatttcagt

SEQ ID NO: 217693 - DNA, 19 bp, Homo sapiens
  siRNA target sequence for NDST4 (NM_022569.1,1055-1073).
gggaaatatactttagtta

SEQ ID NO: 217694 - DNA, 19 bp, Homo sapiens
  siRNA target sequence for NDST4 (NM_022569.1,1056-1074).
ggaaatatactttagttat

SEQ ID NO: 217695 - DNA, 19 bp, Homo sapiens
  siRNA target sequence for NDST4 (NM_022569.1,1113-1131).
ggaatcgagagcttttaga

SEQ ID NO: 217696 - DNA, 19 bp, Homo sapiens
  siRNA target sequence for NDST4 (NM_022569.1,1114-1132).
gaatcgagagcttttagaa

SEQ ID NO: 217697 - DNA, 19 bp, Homo sapiens
  siRNA target sequence for NDST4 (NM_022569.1,1144-1162).
ggaatacagtgttagtata

SEQ ID NO: 217698 - DNA, 19 bp, Homo sapiens
  siRNA target sequence for NDST4 (NM_022569.1,1158-1176).
gtataatcggttttcataa

SEQ ID NO: 217699 - DNA, 19 bp, Homo sapiens
  siRNA target sequence for NDST4 (NM_022569.1,1189-1207).
cagcttaccaagtacacaa

SEQ ID NO: 217700 - DNA, 19 bp, Homo sapiens
  siRNA target sequence for NDST4 (NM_022569.1,1277-1295).
cctttgctgcatattacca

SEQ ID NO: 217701 - DNA, 19 bp, Homo sapiens
  siRNA target sequence for NDST4 (NM_022569.1,1278-1296).
ctttgctgcatattaccaa

SEQ ID NO: 217702 - DNA, 19 bp, Homo sapiens
  siRNA target sequence for NDST4 (NM_022569.1,1328-1346).
ggggaagactggactattt

SEQ ID NO: 217703 - DNA, 19 bp, Homo sapiens
  siRNA target sequence for NDST4 (NM_022569.1,1411-1429).
gtcatccttgtctagcaaa

SEQ ID NO: 217704 - DNA, 19 bp, Homo sapiens
  siRNA target sequence for NDST4 (NM_022569.1,1416-1434).
ccttgtctagcaaaacact

SEQ ID NO: 217705 - DNA, 19 bp, Homo sapiens
  siRNA target sequence for NDST4 (NM_022569.1,1628-1646).
ggaacaaggatgaatgtca

SEQ ID NO: 217706 - DNA, 19 bp, Homo sapiens
  siRNA target sequence for NDST4 (NM_022569.1,1629-1647).
gaacaaggatgaatgtcaa

SEQ ID NO: 217707 - DNA, 19 bp, Homo sapiens
  siRNA target sequence for NDST4 (NM_022569.1,1684-1702).
gcgcactcaggttgcaaat

SEQ ID NO: 217708 - DNA, 19 bp, Homo sapiens
  siRNA target sequence for NDST4 (NM_022569.1,1685-1703).
cgcactcaggttgcaaatt

SEQ ID NO: 217709 - DNA, 19 bp, Homo sapiens
  siRNA target sequence for NDST4 (NM_022569.1,1849-1867).
caacgagtcatctttagta

SEQ ID NO: 217710 - DNA, 19 bp, Homo sapiens
  siRNA target sequence for NDST4 (NM_022569.1,1904-1922).
catggaataccaatcaaca

SEQ ID NO: 217711 - DNA, 19 bp, Homo sapiens
  siRNA target sequence for NDST4 (NM_022569.1,1953-1971).
gggtctacccggttcacat

SEQ ID NO: 217712 - DNA, 19 bp, Homo sapiens
  siRNA target sequence for NDST4 (NM_022569.1,1954-1972).
ggtctacccggttcacatt

SEQ ID NO: 217713 - DNA, 19 bp, Homo sapiens
  siRNA target sequence for NDST4 (NM_022569.1,2109-2127).
ggttgttcactcacactat

SEQ ID NO: 217714 - DNA, 19 bp, Homo sapiens
  siRNA target sequence for NDST4 (NM_022569.1,2110-2128).
gttgttcactcacactatt

SEQ ID NO: 217715 - DNA, 19 bp, Homo sapiens
  siRNA target sequence for NDST4 (NM_022569.1,2159-2177).
gaactggataaaagtatca

SEQ ID NO: 217716 - DNA, 19 bp, Homo sapiens
  siRNA target sequence for NDST4 (NM_022569.1,2258-2276).
cgcctagggttatatacct

SEQ ID NO: 217717 - DNA, 19 bp, Homo sapiens
  siRNA target sequence for NDST4 (NM_022569.1,2259-2277).
gcctagggttatatacctt

SEQ ID NO: 217718 - DNA, 19 bp, Homo sapiens
  siRNA target sequence for NDST4 (NM_022569.1,2308-2326).
gaccaacctgaaattgcaa

SEQ ID NO: 217719 - DNA, 19 bp, Homo sapiens
  siRNA target sequence for NDST4 (NM_022569.1,2398-2416).
gaatccatgtgatgataaa

SEQ ID NO: 217720 - DNA, 19 bp, Homo sapiens
  siRNA target sequence for NDST4 (NM_022569.1,2458-2476).
cttaccaaaatttctagta

SEQ ID NO: 217721 - DNA, 19 bp, Homo sapiens
  siRNA target sequence for NDST4 (NM_022569.1,2522-2540).
cttatgcatccttcaatca

SEQ ID NO: 217722 - DNA, 19 bp, Homo sapiens
  siRNA target sequence for NDST4 (NM_022569.1,2553-2571).
ctagtccaaagacatttga

SEQ ID NO: 217723 - DNA, 19 bp, Homo sapiens
  siRNA target sequence for NDST4 (NM_022569.1,2636-2654).
cctacaccatccaatacta

SEQ ID NO: 217724 - DNA, 19 bp, Homo sapiens
  siRNA target sequence for NDST4 (NM_022569.1,2652-2670).
ctacaagtgactttctgtt

SEQ ID NO: 217725 - DNA, 19 bp, Homo sapiens
  siRNA target sequence for NDST4 (NM_022569.1,2655-2673).
caagtgactttctgtttga

SEQ ID NO: 217726 - DNA, 19 bp, Homo sapiens
  siRNA target sequence for NDST4 (NM_022569.1,2767-2785).
ctcagacagggcatactct

SEQ ID NO: 217727 - DNA, 19 bp, Homo sapiens
  siRNA target sequence for NDST4 (NM_022569.1,2797-2815).
ccaacgatcacatgaagat

SEQ ID NO: 217728 - DNA, 19 bp, Homo sapiens
  siRNA target sequence for NDST4 (NM_022569.1,2823-2841).
ctctgaggttcaatttcta

SEQ ID NO: 217729 - DNA, 19 bp, Homo sapiens
  siRNA target sequence for NDST4 (NM_022569.1,2827-2845).
gaggttcaatttctatgaa

SEQ ID NO: 217730 - DNA, 19 bp, Homo sapiens
  siRNA target sequence for NDST4 (NM_022569.1,2865-2883).
gggctccatctgacttaaa

SEQ ID NO: 217731 - DNA, 19 bp, Homo sapiens
  siRNA target sequence for NDST4 (NM_022569.1,2866-2884).
ggctccatctgacttaaaa

SEQ ID NO: 217732 - DNA, 19 bp, Homo sapiens
  siRNA target sequence for NDST4 (NM_022569.1,2867-2885).
gctccatctgacttaaaaa

SEQ ID NO: 217733 - DNA, 19 bp, Homo sapiens
  siRNA target sequence for NDST4 (NM_022569.1,2902-2920).
cctagtacctggatggtat

SEQ ID NO: 217734 - DNA, 19 bp, Homo sapiens
  siRNA target sequence for NDST4 (NM_022569.1,2933-2951).
gaaagatggctaacttact

SEQ ID NO: 217735 - DNA, 19 bp, Homo sapiens
  siRNA target sequence for NDST4 (NM_022569.1,3037-3055).
gggagttacacctcgttat

SEQ ID NO: 217736 - DNA, 19 bp, Homo sapiens
  siRNA target sequence for NDST4 (NM_022569.1,3038-3056).
ggagttacacctcgttata

SEQ ID NO: 217737 - DNA, 19 bp, Homo sapiens
  siRNA target sequence for NDST4 (NM_022569.1,3039-3057).
gagttacacctcgttataa

SEQ ID NO: 217738 - DNA, 19 bp, Homo sapiens
  siRNA target sequence for NDST4 (NM_022569.1,3041-3059).
gttacacctcgttataatt

SEQ ID NO: 217739 - DNA, 19 bp, Homo sapiens
  siRNA target sequence for NDST4 (NM_022569.1,3061-3079).
ctctgaagcactaacgttt

SEQ ID NO: 217740 - DNA, 19 bp, Homo sapiens
  siRNA target sequence for NDST4 (NM_022569.1,3145-3163).
caaaggccgaaaatatcca

SEQ ID NO: 217741 - DNA, 19 bp, Homo sapiens
  siRNA target sequence for NDST4 (NM_022569.1,3180-3198).
ctagaacgttcctctctaa

SEQ ID NO: 217742 - DNA, 19 bp, Homo sapiens
  siRNA target sequence for NDST4 (NM_022569.1,3186-3204).
cgttcctctctaattacta

SEQ ID NO: 217743 - DNA, 19 bp, Homo sapiens
  siRNA target sequence for SULT1B1 (NM_014465.2,332-350).
gaagttggtccatggttat

SEQ ID NO: 217744 - DNA, 19 bp, Homo sapiens
  siRNA target sequence for SULT1B1 (NM_014465.2,416-434).
cattgtgatagccacttat

SEQ ID NO: 217745 - DNA, 19 bp, Homo sapiens
  siRNA target sequence for SULT1B1 (NM_014465.2,420-438).
gtgatagccacttatccta

SEQ ID NO: 217746 - DNA, 19 bp, Homo sapiens
  siRNA target sequence for SULT1B1 (NM_014465.2,422-440).
gatagccacttatcctaaa

SEQ ID NO: 217747 - DNA, 19 bp, Homo sapiens
  siRNA target sequence for SULT1B1 (NM_014465.2,509-527).
gcgaggttttattactgaa

SEQ ID NO: 217748 - DNA, 19 bp, Homo sapiens
  siRNA target sequence for SULT1B1 (NM_014465.2,510-528).
cgaggttttattactgaaa

SEQ ID NO: 217749 - DNA, 19 bp, Homo sapiens
  siRNA target sequence for SULT1B1 (NM_014465.2,531-549).
gttccaatgttggaaatga

SEQ ID NO: 217750 - DNA, 19 bp, Homo sapiens
  siRNA target sequence for SULT1B1 (NM_014465.2,552-570).
ctccctggattaagaacat

SEQ ID NO: 217751 - DNA, 19 bp, Homo sapiens
  siRNA target sequence for SULT1B1 (NM_014465.2,554-572).
ccctggattaagaacatca

SEQ ID NO: 217752 - DNA, 19 bp, Homo sapiens
  siRNA target sequence for SULT1B1 (NM_014465.2,565-583).
gaacatcaggtatagaaca

SEQ ID NO: 217753 - DNA, 19 bp, Homo sapiens
  siRNA target sequence for SULT1B1 (NM_014465.2,597-615).
ccatcaccccggattgtga

SEQ ID NO: 217754 - DNA, 19 bp, Homo sapiens
  siRNA target sequence for SULT1B1 (NM_014465.2,598-616).
catcaccccggattgtgaa

SEQ ID NO: 217755 - DNA, 19 bp, Homo sapiens
  siRNA target sequence for SULT1B1 (NM_014465.2,604-622).
cccggattgtgaaaacaca

SEQ ID NO: 217756 - DNA, 19 bp, Homo sapiens
  siRNA target sequence for SULT1B1 (NM_014465.2,628-646).
cgactgatcttcttcctaa

SEQ ID NO: 217757 - DNA, 19 bp, Homo sapiens
  siRNA target sequence for SULT1B1 (NM_014465.2,657-675).
gaaaacaattgcaagatga

SEQ ID NO: 217758 - DNA, 19 bp, Homo sapiens
  siRNA target sequence for SULT1B1 (NM_014465.2,662-680).
caattgcaagatgatttat

SEQ ID NO: 217759 - DNA, 19 bp, Homo sapiens
  siRNA target sequence for SULT1B1 (NM_014465.2,674-692).
gatttatctggctcgtaat

SEQ ID NO: 217760 - DNA, 19 bp, Homo sapiens
  siRNA target sequence for SULT1B1 (NM_014465.2,698-716).
ggatgtttcagtctcatat

SEQ ID NO: 217761 - DNA, 19 bp, Homo sapiens
  siRNA target sequence for SULT1B1 (NM_014465.2,706-724).
cagtctcatattaccattt

SEQ ID NO: 217762 - DNA, 19 bp, Homo sapiens
  siRNA target sequence for SULT1B1 (NM_014465.2,801-819).
gcctatggttcctggttta

SEQ ID NO: 217763 - DNA, 19 bp, Homo sapiens
  siRNA target sequence for SULT1B1 (NM_014465.2,803-821).
ctatggttcctggtttact

SEQ ID NO: 217764 - DNA, 19 bp, Homo sapiens
  siRNA target sequence for SULT1B1 (NM_014465.2,811-829).
cctggtttactcatgttaa

SEQ ID NO: 217765 - DNA, 19 bp, Homo sapiens
  siRNA target sequence for SULT1B1 (NM_014465.2,914-932).
gaagatcattagatttcta

SEQ ID NO: 217766 - DNA, 19 bp, Homo sapiens
  siRNA target sequence for SULT1B1 (NM_014465.2,999-1017).
gacaatcctttggtaaatt

SEQ ID NO: 217767 - DNA, 19 bp, Homo sapiens
  siRNA target sequence for SULT1B1 (NM_014465.2,1010-1028).
ggtaaattatacacatcta

SEQ ID NO: 217768 - DNA, 19 bp, Homo sapiens
  siRNA target sequence for SULT1B1 (NM_014465.2,1038-1056).
gtgatggatcatagcaaat

SEQ ID NO: 217769 - DNA, 19 bp, Homo sapiens
  siRNA target sequence for SULT1B1 (NM_014465.2,1151-1169).
gtccaaaactgcacttcaa

SEQ ID NO: 217770 - DNA, 19 bp, Homo sapiens
  siRNA target sequence for SULT1B1 (NM_014465.2,1153-1171).
ccaaaactgcacttcaatt

SEQ ID NO: 217771 - DNA, 19 bp, Homo sapiens
  siRNA target sequence for SULT1B1 (NM_014465.2,1167-1185).
caattccgcacagagattt

SEQ ID NO: 217772 - DNA, 19 bp, Homo sapiens
  siRNA target sequence for SULT1C1 (NM_001056.2,585-603).
ctgcacctaccctaaagca

SEQ ID NO: 217773 - DNA, 19 bp, Homo sapiens
  siRNA target sequence for SULT1C1 (NM_001056.2,753-771).
gccctctccacggatacta

SEQ ID NO: 217774 - DNA, 19 bp, Homo sapiens
  siRNA target sequence for SULT1C1 (NM_001056.2,754-772).
ccctctccacggatactaa

SEQ ID NO: 217775 - DNA, 19 bp, Homo sapiens
  siRNA target sequence for SULT1C1 (NM_001056.2,831-849).
cctttatgtagctcgaaat

SEQ ID NO: 217776 - DNA, 19 bp, Homo sapiens
  siRNA target sequence for SULT1C1 (NM_001056.2,841-859).
gctcgaaatgccaaagact

SEQ ID NO: 217777 - DNA, 19 bp, Homo sapiens
  siRNA target sequence for SULT1C1 (NM_001056.2,938-956).
ccttcatcaatggaaaagt

SEQ ID NO: 217778 - DNA, 19 bp, Homo sapiens
  siRNA target sequence for SULT1C1 (NM_001056.2,1006-1024).
gacagacaccagattctct

SEQ ID NO: 217779 - DNA, 19 bp, Homo sapiens
  siRNA target sequence for SULT1C1 (NM_001056.2,1105-1123).
gaaacagtgctagataaaa

SEQ ID NO: 217780 - DNA, 19 bp, Homo sapiens
  siRNA target sequence for SULT1C1 (NM_001056.2,1129-1147).
caggagacgtcatttgaga

SEQ ID NO: 217781 - DNA, 19 bp, Homo sapiens
  siRNA target sequence for SULT1C1 (NM_001056.2,1164-1182).
catgacaaatcgttctaca

SEQ ID NO: 217782 - DNA, 19 bp, Homo sapiens
  siRNA target sequence for SULT1C1 (NM_001056.2,1167-1185).
gacaaatcgttctacagtt

SEQ ID NO: 217783 - DNA, 19 bp, Homo sapiens
  siRNA target sequence for SULT1C1 (NM_001056.2,1174-1192).
cgttctacagtttccaaat

SEQ ID NO: 217784 - DNA, 19 bp, Homo sapiens
  siRNA target sequence for SULT1C1 (NM_001056.2,1193-1211).
ctatcttggaccagtcaat

SEQ ID NO: 217785 - DNA, 19 bp, Homo sapiens
  siRNA target sequence for SULT1C1 (NM_001056.2,1312-1330).
ggaacctccataaacttct

SEQ ID NO: 217786 - DNA, 19 bp, Homo sapiens
  siRNA target sequence for SULT2B1 (NM_004605.2,309-327).
cgggacgacgacatcttta

SEQ ID NO: 217787 - DNA, 19 bp, Homo sapiens
  siRNA target sequence for SULT2B1 (NM_004605.2,310-328).
gggacgacgacatctttat

SEQ ID NO: 217788 - DNA, 19 bp, Homo sapiens
  siRNA target sequence for SULT2B1 (NM_004605.2,312-330).
gacgacgacatctttatca

SEQ ID NO: 217789 - DNA, 19 bp, Homo sapiens
  siRNA target sequence for SULT2B1 (NM_004605.2,594-612).
gtctccctctatcattact

SEQ ID NO: 217790 - DNA, 19 bp, Homo sapiens
  siRNA target sequence for SULT2B1 (NM_004605.2,697-715).
cctggttcgaccacattaa

SEQ ID NO: 217791 - DNA, 19 bp, Homo sapiens
  siRNA target sequence for SULT2B1 (NM_004605.2,726-744).
cggatgaagggcaaagaca

SEQ ID NO: 217792 - DNA, 19 bp, Homo sapiens
  siRNA target sequence for SULT2B1 (NM_004605.2,741-759).
gacaacttcctatttatca

SEQ ID NO: 217793 - DNA, 19 bp, Homo sapiens
  siRNA target sequence for SULT2B1 (NM_177973.1,114-132).
cttgtgggacacctatgaa

SEQ ID NO: 217794 - DNA, 19 bp, Homo sapiens
  siRNA target sequence for SULT2B1 (NM_177973.1,119-137).
gggacacctatgaagatga

SEQ ID NO: 217795 - DNA, 19 bp, Homo sapiens
  siRNA target sequence for SULT2B1 (NM_177973.1,143-161).
cggaaatcagccagaagtt

SEQ ID NO: 217796 - DNA, 19 bp, Homo sapiens
  siRNA target sequence for SULT4A1 (NM_014351.2,140-158).
gagttcgagagcaagtact

SEQ ID NO: 217797 - DNA, 19 bp, Homo sapiens
  siRNA target sequence for SULT4A1 (NM_014351.2,323-341).
gatgagatcggcttgatga

SEQ ID NO: 217798 - DNA, 19 bp, Homo sapiens
  siRNA target sequence for SULT4A1 (NM_014351.2,326-344).
gagatcggcttgatgaaca

SEQ ID NO: 217799 - DNA, 19 bp, Homo sapiens
  siRNA target sequence for SULT4A1 (NM_014351.2,471-489).
gagactccaaggtcatcta

SEQ ID NO: 217800 - DNA, 19 bp, Homo sapiens
  siRNA target sequence for SULT4A1 (NM_014351.2,473-491).
gactccaaggtcatctata

SEQ ID NO: 217801 - DNA, 19 bp, Homo sapiens
  siRNA target sequence for SULT4A1 (NM_014351.2,508-526).
ggatctggtggtgtcttat

SEQ ID NO: 217802 - DNA, 19 bp, Homo sapiens
  siRNA target sequence for SULT4A1 (NM_014351.2,509-527).
gatctggtggtgtcttatt

SEQ ID NO: 217803 - DNA, 19 bp, Homo sapiens
  siRNA target sequence for SULT4A1 (NM_014351.2,515-533).
gtggtgtcttattatcagt

SEQ ID NO: 217804 - DNA, 19 bp, Homo sapiens
  siRNA target sequence for SULT4A1 (NM_014351.2,559-577).
ctaccgaggcacctttcaa

SEQ ID NO: 217805 - DNA, 19 bp, Homo sapiens
  siRNA target sequence for SULT4A1 (NM_014351.2,562-580).
ccgaggcacctttcaagaa

SEQ ID NO: 217806 - DNA, 19 bp, Homo sapiens
  siRNA target sequence for SULT4A1 (NM_014351.2,563-581).
cgaggcacctttcaagaat

SEQ ID NO: 217807 - DNA, 19 bp, Homo sapiens
  siRNA target sequence for SULT4A1 (NM_014351.2,583-601).
ctgccggaggtttatgaat

SEQ ID NO: 217808 - DNA, 19 bp, Homo sapiens
  siRNA target sequence for SULT4A1 (NM_014351.2,585-603).
gccggaggtttatgaatga

SEQ ID NO: 217809 - DNA, 19 bp, Homo sapiens
  siRNA target sequence for SULT4A1 (NM_014351.2,586-604).
ccggaggtttatgaatgat

SEQ ID NO: 217810 - DNA, 19 bp, Homo sapiens
  siRNA target sequence for SULT4A1 (NM_014351.2,587-605).
cggaggtttatgaatgata

SEQ ID NO: 217811 - DNA, 19 bp, Homo sapiens
  siRNA target sequence for SULT4A1 (NM_014351.2,591-609).
ggtttatgaatgataagct

SEQ ID NO: 217812 - DNA, 19 bp, Homo sapiens
  siRNA target sequence for SULT4A1 (NM_014351.2,661-679).
ggactcgaacgtgcttttt

SEQ ID NO: 217813 - DNA, 19 bp, Homo sapiens
  siRNA target sequence for SULT4A1 (NM_014351.2,666-684).
cgaacgtgctttttctcaa

SEQ ID NO: 217814 - DNA, 19 bp, Homo sapiens
  siRNA target sequence for SULT4A1 (NM_014351.2,896-914).
gacttggtgtataaacaga

SEQ ID NO: 217815 - DNA, 19 bp, Homo sapiens
  siRNA target sequence for SULT4A1 (NM_014351.2,929-947).
gacctcacgtttgactttt

SEQ ID NO: 217816 - DNA, 19 bp, Homo sapiens
  siRNA target sequence for SULT4A1 (NM_176874.1,851-869).
gtctttgctcggaagatct

SEQ ID NO: 217817 - DNA, 19 bp, Homo sapiens
  siRNA target sequence for UST (NM_005715.1,338-356).
cggcagtacttgggaaatt

SEQ ID NO: 217818 - DNA, 19 bp, Homo sapiens
  siRNA target sequence for UST (NM_005715.1,387-405).
ctagtaaggtactaccttt

SEQ ID NO: 217819 - DNA, 19 bp, Homo sapiens
  siRNA target sequence for UST (NM_005715.1,408-426).
caagccaggtggtgtacaa

SEQ ID NO: 217820 - DNA, 19 bp, Homo sapiens
  siRNA target sequence for UST (NM_005715.1,480-498).
cggagaagcacggatttaa

SEQ ID NO: 217821 - DNA, 19 bp, Homo sapiens
  siRNA target sequence for UST (NM_005715.1,481-499).
ggagaagcacggatttaat

SEQ ID NO: 217822 - DNA, 19 bp, Homo sapiens
  siRNA target sequence for UST (NM_005715.1,482-500).
gagaagcacggatttaatt

SEQ ID NO: 217823 - DNA, 19 bp, Homo sapiens
  siRNA target sequence for UST (NM_005715.1,512-530).
gacattcacaacaaaacca

SEQ ID NO: 217824 - DNA, 19 bp, Homo sapiens
  siRNA target sequence for UST (NM_005715.1,531-549).
ggcttactaaaaatgaaca

SEQ ID NO: 217825 - DNA, 19 bp, Homo sapiens
  siRNA target sequence for UST (NM_005715.1,576-594).
ctgccgaacaaccctattt

SEQ ID NO: 217826 - DNA, 19 bp, Homo sapiens
  siRNA target sequence for UST (NM_005715.1,581-599).
gaacaaccctatttattca

SEQ ID NO: 217827 - DNA, 19 bp, Homo sapiens
  siRNA target sequence for UST (NM_005715.1,674-692).
cccgtcaaccggttcttat

SEQ ID NO: 217828 - DNA, 19 bp, Homo sapiens
  siRNA target sequence for UST (NM_005715.1,677-695).
gtcaaccggttcttatcca

SEQ ID NO: 217829 - DNA, 19 bp, Homo sapiens
  siRNA target sequence for UST (NM_005715.1,684-702).
ggttcttatccaactattt

SEQ ID NO: 217830 - DNA, 19 bp, Homo sapiens
  siRNA target sequence for UST (NM_005715.1,729-747).
gggaacaaaatcacatgat

SEQ ID NO: 217831 - DNA, 19 bp, Homo sapiens
  siRNA target sequence for UST (NM_005715.1,775-793).
gcgctacctggatatcaat

SEQ ID NO: 217832 - DNA, 19 bp, Homo sapiens
  siRNA target sequence for UST (NM_005715.1,777-795).
gctacctggatatcaatga

SEQ ID NO: 217833 - DNA, 19 bp, Homo sapiens
  siRNA target sequence for UST (NM_005715.1,796-814).
gtgtattcttgaaaactat

SEQ ID NO: 217834 - DNA, 19 bp, Homo sapiens
  siRNA target sequence for UST (NM_005715.1,844-862).
catcattccgtacttttgt

SEQ ID NO: 217835 - DNA, 19 bp, Homo sapiens
  siRNA target sequence for UST (NM_005715.1,1013-1031).
ggcgtgctcagtatctaca

SEQ ID NO: 217836 - DNA, 19 bp, Homo sapiens
  siRNA target sequence for UST (NM_005715.1,1014-1032).
gcgtgctcagtatctacaa

SEQ ID NO: 217837 - DNA, 19 bp, Homo sapiens
  siRNA target sequence for UST (NM_005715.1,1015-1033).
cgtgctcagtatctacaaa

SEQ ID NO: 217838 - DNA, 19 bp, Homo sapiens
  siRNA target sequence for UST (NM_005715.1,1112-1130).
ctctaccagcggatgagat

SEQ ID NO: 217839 - DNA, 19 bp, Homo sapiens
  siRNA target sequence for UST (NM_005715.1,1128-1146).
gatacgagtacgagtttta

SEQ ID NO: 217840 - DNA, 19 bp, Homo sapiens
  siRNA target sequence for UST (NM_005715.1,1171-1189).
cctgctgaagcgcaagttt

SEQ ID NO: 217841 - DNA, 19 bp, Homo sapiens
  siRNA target sequence for UST (NM_005715.1,1264-1282).
gccaatcgacgatgaagaa

SEQ ID NO: 217842 - DNA, 19 bp, Homo sapiens
  siRNA target sequence for UST (NM_005715.1,1266-1284).
caatcgacgatgaagaaca

SEQ ID NO: 217843 - DNA, 19 bp, Homo sapiens
  siRNA target sequence for MPST (NM_021126.3,428-446).
ccacccacgtcgtgatcta

SEQ ID NO: 217844 - DNA, 19 bp, Homo sapiens
  siRNA target sequence for MPST (NM_021126.3,732-750).
gccccgagacggcattgaa

SEQ ID NO: 217845 - DNA, 19 bp, Homo sapiens
  siRNA target sequence for TST (NM_003312.4,275-293).
cgtcgccctacgagatgat

SEQ ID NO: 217846 - DNA, 19 bp, Homo sapiens
  siRNA target sequence for TST (NM_003312.4,308-326).
ctggcttcgccgagtatgt

SEQ ID NO: 217847 - DNA, 19 bp, Homo sapiens
  siRNA target sequence for TST (NM_003312.4,353-371).
cgcacgtggtggtgtatga

SEQ ID NO: 217848 - DNA, 19 bp, Homo sapiens
  siRNA target sequence for TST (NM_003312.4,431-449).
gccaccgcaccgtatcagt

SEQ ID NO: 217849 - DNA, 19 bp, Homo sapiens
  siRNA target sequence for TST (NM_003312.4,577-595).
ctggagaaccttgaatcta

SEQ ID NO: 217850 - DNA, 19 bp, Homo sapiens
  siRNA target sequence for TST (NM_003312.4,580-598).
gagaaccttgaatctaaga

SEQ ID NO: 217851 - DNA, 19 bp, Homo sapiens
  siRNA target sequence for OXCT (NM_000436.1,167-185).
ctggtacaagggatgtgtt

SEQ ID NO: 217852 - DNA, 19 bp, Homo sapiens
  siRNA target sequence for OXCT (NM_000436.1,202-220).
gtgctcatcgccataccaa

SEQ ID NO: 217853 - DNA, 19 bp, Homo sapiens
  siRNA target sequence for OXCT (NM_000436.1,210-228).
cgccataccaagttttata

SEQ ID NO: 217854 - DNA, 19 bp, Homo sapiens
  siRNA target sequence for OXCT (NM_000436.1,311-329).
gaatcttatagatgcttta

SEQ ID NO: 217855 - DNA, 19 bp, Homo sapiens
  siRNA target sequence for OXCT (NM_000436.1,332-350).
gaaaactggagtaaaagga

SEQ ID NO: 217856 - DNA, 19 bp, Homo sapiens
  siRNA target sequence for OXCT (NM_000436.1,427-445).
gcatggtctcttcatatgt

SEQ ID NO: 217857 - DNA, 19 bp, Homo sapiens
  siRNA target sequence for OXCT (NM_000436.1,545-563).
ggctggagttcctgcattt

SEQ ID NO: 217858 - DNA, 19 bp, Homo sapiens
  siRNA target sequence for OXCT (NM_000436.1,546-564).
gctggagttcctgcatttt

SEQ ID NO: 217859 - DNA, 19 bp, Homo sapiens
  siRNA target sequence for OXCT (NM_000436.1,603-621).
ggatcgcccatcaaataca

SEQ ID NO: 217860 - DNA, 19 bp, Homo sapiens
  siRNA target sequence for OXCT (NM_000436.1,604-622).
gatcgcccatcaaatacaa

SEQ ID NO: 217861 - DNA, 19 bp, Homo sapiens
  siRNA target sequence for OXCT (NM_000436.1,607-625).
cgcccatcaaatacaacaa

SEQ ID NO: 217862 - DNA, 19 bp, Homo sapiens
  siRNA target sequence for OXCT (NM_000436.1,674-692).
caatggtcagcactttatt

SEQ ID NO: 217863 - DNA, 19 bp, Homo sapiens
  siRNA target sequence for OXCT (NM_000436.1,747-765).
cgagcaggaaacgtgattt

SEQ ID NO: 217864 - DNA, 19 bp, Homo sapiens
  siRNA target sequence for OXCT (NM_000436.1,748-766).
gagcaggaaacgtgatttt

SEQ ID NO: 217865 - DNA, 19 bp, Homo sapiens
  siRNA target sequence for OXCT (NM_000436.1,758-776).
cgtgattttcaggaaaagt

SEQ ID NO: 217866 - DNA, 19 bp, Homo sapiens
  siRNA target sequence for OXCT (NM_000436.1,999-1017).
gtaagggaacgaatcatca

SEQ ID NO: 217867 - DNA, 19 bp, Homo sapiens
  siRNA target sequence for OXCT (NM_000436.1,1075-1093).
ctctcctggccagcaattt

SEQ ID NO: 217868 - DNA, 19 bp, Homo sapiens
  siRNA target sequence for OXCT (NM_000436.1,1142-1160).
gggtttgggtccatatcca

SEQ ID NO: 217869 - DNA, 19 bp, Homo sapiens
  siRNA target sequence for OXCT (NM_000436.1,1238-1256).
ctccagcgatgaatcattt

SEQ ID NO: 217870 - DNA, 19 bp, Homo sapiens
  siRNA target sequence for OXCT (NM_000436.1,1241-1259).
cagcgatgaatcatttgca

SEQ ID NO: 217871 - DNA, 19 bp, Homo sapiens
  siRNA target sequence for OXCT (NM_000436.1,1243-1261).
gcgatgaatcatttgcaat

SEQ ID NO: 217872 - DNA, 19 bp, Homo sapiens
  siRNA target sequence for OXCT (NM_000436.1,1273-1291).
gacacgtcgatctgacaat

SEQ ID NO: 217873 - DNA, 19 bp, Homo sapiens
  siRNA target sequence for OXCT (NM_000436.1,1277-1295).
cgtcgatctgacaatgcta

SEQ ID NO: 217874 - DNA, 19 bp, Homo sapiens
  siRNA target sequence for OXCT (NM_000436.1,1607-1625).
gtgtgattttgcagtttca

SEQ ID NO: 217875 - DNA, 19 bp, Homo sapiens
  siRNA target sequence for OXCT2 (NM_022120.1,202-220).
cggctccgtgccaagttct

SEQ ID NO: 217876 - DNA, 19 bp, Homo sapiens
  siRNA target sequence for OXCT2 (NM_022120.1,870-888).
ccacgttcctaacatttat

SEQ ID NO: 217877 - DNA, 19 bp, Homo sapiens
  siRNA target sequence for OXCT2 (NM_022120.1,873-891).
cgttcctaacatttatgta

SEQ ID NO: 217878 - DNA, 19 bp, Homo sapiens
  siRNA target sequence for AGXT (NM_000030.1,265-283).
ccatgagcaaggatatgta

SEQ ID NO: 217879 - DNA, 19 bp, Homo sapiens
  siRNA target sequence for AGXT (NM_000030.1,895-913).
ggatgtaccatcacacaat

SEQ ID NO: 217880 - DNA, 19 bp, Homo sapiens
  siRNA target sequence for AGXT (NM_000030.1,1098-1116).
gtacccgctggctatgact

SEQ ID NO: 217881 - DNA, 19 bp, Homo sapiens
  siRNA target sequence for AGXT (NM_000030.1,1143-1161).
gaccacttcgacattgaga

SEQ ID NO: 217882 - DNA, 19 bp, Homo sapiens
  siRNA target sequence for AGXT2 (NM_031900.1,100-118).
cccggacatcagtaaccaa

SEQ ID NO: 217883 - DNA, 19 bp, Homo sapiens
  siRNA target sequence for AGXT2 (NM_031900.1,156-174).
gacttcatgcctgaaagat

SEQ ID NO: 217884 - DNA, 19 bp, Homo sapiens
  siRNA target sequence for AGXT2 (NM_031900.1,228-246).
cctgtggtgacggcatatt

SEQ ID NO: 217885 - DNA, 19 bp, Homo sapiens
  siRNA target sequence for AGXT2 (NM_031900.1,323-341).
cttttccgggattgttact

SEQ ID NO: 217886 - DNA, 19 bp, Homo sapiens
  siRNA target sequence for AGXT2 (NM_031900.1,429-447).
caccctccaatgcatgaat

SEQ ID NO: 217887 - DNA, 19 bp, Homo sapiens
  siRNA target sequence for AGXT2 (NM_031900.1,431-449).
ccctccaatgcatgaatat

SEQ ID NO: 217888 - DNA, 19 bp, Homo sapiens
  siRNA target sequence for AGXT2 (NM_031900.1,477-495).
gagcctcttaaggtcattt

SEQ ID NO: 217889 - DNA, 19 bp, Homo sapiens
  siRNA target sequence for AGXT2 (NM_031900.1,480-498).
cctcttaaggtcattttct

SEQ ID NO: 217890 - DNA, 19 bp, Homo sapiens
  siRNA target sequence for AGXT2 (NM_031900.1,543-561).
gccagggcgcactcaaaca

SEQ ID NO: 217891 - DNA, 19 bp, Homo sapiens
  siRNA target sequence for AGXT2 (NM_031900.1,544-562).
ccagggcgcactcaaacaa

SEQ ID NO: 217892 - DNA, 19 bp, Homo sapiens
  siRNA target sequence for AGXT2 (NM_031900.1,547-565).
gggcgcactcaaacaacat

SEQ ID NO: 217893 - DNA, 19 bp, Homo sapiens
  siRNA target sequence for AGXT2 (NM_031900.1,548-566).
ggcgcactcaaacaacata

SEQ ID NO: 217894 - DNA, 19 bp, Homo sapiens
  siRNA target sequence for AGXT2 (NM_031900.1,550-568).
cgcactcaaacaacataga

SEQ ID NO: 217895 - DNA, 19 bp, Homo sapiens
  siRNA target sequence for AGXT2 (NM_031900.1,552-570).
cactcaaacaacatagaca

SEQ ID NO: 217896 - DNA, 19 bp, Homo sapiens
  siRNA target sequence for AGXT2 (NM_031900.1,664-682).
caggttgccaaccaacaat

SEQ ID NO: 217897 - DNA, 19 bp, Homo sapiens
  siRNA target sequence for AGXT2 (NM_031900.1,683-701).
gtgtccagatgtttttcgt

SEQ ID NO: 217898 - DNA, 19 bp, Homo sapiens
  siRNA target sequence for AGXT2 (NM_031900.1,729-747).
gattctccagtgcaaacaa

SEQ ID NO: 217899 - DNA, 19 bp, Homo sapiens
  siRNA target sequence for AGXT2 (NM_031900.1,780-798).
caagctaaagatcagtata

SEQ ID NO: 217900 - DNA, 19 bp, Homo sapiens
  siRNA target sequence for AGXT2 (NM_031900.1,784-802).
ctaaagatcagtatattga

SEQ ID NO: 217901 - DNA, 19 bp, Homo sapiens
  siRNA target sequence for AGXT2 (NM_031900.1,794-812).
gtatattgagcaattcaaa

SEQ ID NO: 217902 - DNA, 19 bp, Homo sapiens
  siRNA target sequence for AGXT2 (NM_031900.1,850-868).
gatttttcgcagaacctat

SEQ ID NO: 217903 - DNA, 19 bp, Homo sapiens
  siRNA target sequence for AGXT2 (NM_031900.1,947-965).
cgtgtgcattgcagatgaa

SEQ ID NO: 217904 - DNA, 19 bp, Homo sapiens
  siRNA target sequence for AGXT2 (NM_031900.1,1085-1103).
cataaccactccagagatt

SEQ ID NO: 217905 - DNA, 19 bp, Homo sapiens
  siRNA target sequence for AGXT2 (NM_031900.1,1234-1252).
ggacctacatgttactaaa

SEQ ID NO: 217906 - DNA, 19 bp, Homo sapiens
  siRNA target sequence for AGXT2 (NM_031900.1,1237-1255).
cctacatgttactaaagtt

SEQ ID NO: 217907 - DNA, 19 bp, Homo sapiens
  siRNA target sequence for AGXT2 (NM_031900.1,1257-1275).
gctaagctgcgggatgaat

SEQ ID NO: 217908 - DNA, 19 bp, Homo sapiens
  siRNA target sequence for AGXT2 (NM_031900.1,1297-1315).
gaggcaaaggtctcatgat

SEQ ID NO: 217909 - DNA, 19 bp, Homo sapiens
  siRNA target sequence for AGXT2 (NM_031900.1,1308-1326).
ctcatgataggcatagaaa

SEQ ID NO: 217910 - DNA, 19 bp, Homo sapiens
  siRNA target sequence for AGXT2 (NM_031900.1,1352-1370).
gcctcttccccgtgaagaa

SEQ ID NO: 217911 - DNA, 19 bp, Homo sapiens
  siRNA target sequence for AGXT2 (NM_031900.1,1356-1374).
cttccccgtgaagaagtaa

SEQ ID NO: 217912 - DNA, 19 bp, Homo sapiens
  siRNA target sequence for AGXT2 (NM_031900.1,1420-1438).
gaggcagcattttttctca

SEQ ID NO: 217913 - DNA, 19 bp, Homo sapiens
  siRNA target sequence for AGXT2 (NM_031900.1,1426-1444).
gcattttttctcagacatt

SEQ ID NO: 217914 - DNA, 19 bp, Homo sapiens
  siRNA target sequence for AGXT2 (NM_031900.1,1446-1464).
cgcattgcgccctcaatgt

SEQ ID NO: 217915 - DNA, 19 bp, Homo sapiens
  siRNA target sequence for AGXT2 (NM_031900.1,1456-1474).
cctcaatgtgcatcactaa

SEQ ID NO: 217916 - DNA, 19 bp, Homo sapiens
  siRNA target sequence for AGXT2 (NM_031900.1,1491-1509).
gcagtagaagtatttcgtt

SEQ ID NO: 217917 - DNA, 19 bp, Homo sapiens
  siRNA target sequence for AGXT2L1 (NM_031279.2,213-231).
ccctcatgcaaagttttct

SEQ ID NO: 217918 - DNA, 19 bp, Homo sapiens
  siRNA target sequence for AGXT2L1 (NM_031279.2,234-252).
gcatcggatcccatcaaaa

SEQ ID NO: 217919 - DNA, 19 bp, Homo sapiens
  siRNA target sequence for AGXT2L1 (NM_031279.2,238-256).
cggatcccatcaaaatagt

SEQ ID NO: 217920 - DNA, 19 bp, Homo sapiens
  siRNA target sequence for AGXT2L1 (NM_031279.2,240-258).
gatcccatcaaaatagtga

SEQ ID NO: 217921 - DNA, 19 bp, Homo sapiens
  siRNA target sequence for AGXT2L1 (NM_031279.2,400-418).
gattcctccacgacaacat

SEQ ID NO: 217922 - DNA, 19 bp, Homo sapiens
  siRNA target sequence for AGXT2L1 (NM_031279.2,445-463).
caactctgccggagaaact

SEQ ID NO: 217923 - DNA, 19 bp, Homo sapiens
  siRNA target sequence for AGXT2L1 (NM_031279.2,456-474).
gagaaactctctgtttgtt

SEQ ID NO: 217924 - DNA, 19 bp, Homo sapiens
  siRNA target sequence for AGXT2L1 (NM_031279.2,458-476).
gaaactctctgtttgttat

SEQ ID NO: 217925 - DNA, 19 bp, Homo sapiens
  siRNA target sequence for AGXT2L1 (NM_031279.2,535-553).
gaggccaccaggatgtgat

SEQ ID NO: 217926 - DNA, 19 bp, Homo sapiens
  siRNA target sequence for AGXT2L1 (NM_031279.2,576-594).
ggtcacctatcatccttaa

SEQ ID NO: 217927 - DNA, 19 bp, Homo sapiens
  siRNA target sequence for AGXT2L1 (NM_031279.2,599-617).
gattagcccatataagttt

SEQ ID NO: 217928 - DNA, 19 bp, Homo sapiens
  siRNA target sequence for AGXT2L1 (NM_031279.2,707-725).
ctcagccagtgcttatgca

SEQ ID NO: 217929 - DNA, 19 bp, Homo sapiens
  siRNA target sequence for AGXT2L1 (NM_031279.2,713-731).
cagtgcttatgcagatgaa

SEQ ID NO: 217930 - DNA, 19 bp, Homo sapiens
  siRNA target sequence for AGXT2L1 (NM_031279.2,773-791).
gattgctgcctttattgct

SEQ ID NO: 217931 - DNA, 19 bp, Homo sapiens
  siRNA target sequence for AGXT2L1 (NM_031279.2,805-823).
gttgtggcggacaaataat

SEQ ID NO: 217932 - DNA, 19 bp, Homo sapiens
  siRNA target sequence for AGXT2L1 (NM_031279.2,866-884).
cggtgcagggggtgtgttt

SEQ ID NO: 217933 - DNA, 19 bp, Homo sapiens
  siRNA target sequence for AGXT2L1 (NM_031279.2,881-899).
gtttatagctgatgaagtt

SEQ ID NO: 217934 - DNA, 19 bp, Homo sapiens
  siRNA target sequence for AGXT2L1 (NM_031279.2,912-930).
ggcagagttgggaaacatt

SEQ ID NO: 217935 - DNA, 19 bp, Homo sapiens
  siRNA target sequence for AGXT2L1 (NM_031279.2,1020-1038).
gtggtaacaaccaaagaaa

SEQ ID NO: 217936 - DNA, 19 bp, Homo sapiens
  siRNA target sequence for AGXT2L1 (NM_031279.2,1120-1138).
ctgtcctggatataattga

SEQ ID NO: 217937 - DNA, 19 bp, Homo sapiens
  siRNA target sequence for AGXT2L1 (NM_031279.2,1162-1180).
ccaagagagtagggaatta

SEQ ID NO: 217938 - DNA, 19 bp, Homo sapiens
  siRNA target sequence for AGXT2L1 (NM_031279.2,1163-1181).
caagagagtagggaattat

SEQ ID NO: 217939 - DNA, 19 bp, Homo sapiens
  siRNA target sequence for AGXT2L1 (NM_031279.2,1311-1329).
cagcacatcatctacaaga

SEQ ID NO: 217940 - DNA, 19 bp, Homo sapiens
  siRNA target sequence for AGXT2L1 (NM_031279.2,1356-1374).
gccgatggacctcatagaa

SEQ ID NO: 217941 - DNA, 19 bp, Homo sapiens
  siRNA target sequence for AGXT2L1 (NM_031279.2,1358-1376).
cgatggacctcatagaaat

SEQ ID NO: 217942 - DNA, 19 bp, Homo sapiens
  siRNA target sequence for AGXT2L1 (NM_031279.2,1443-1461).
gataggattctaacagttt

SEQ ID NO: 217943 - DNA, 19 bp, Homo sapiens
  siRNA target sequence for AGXT2L1 (NM_031279.2,1467-1485).
gaagctatgggaaccaaaa

SEQ ID NO: 217944 - DNA, 19 bp, Homo sapiens
  siRNA target sequence for AGXT2L1 (NM_031279.2,1606-1624).
gaatgtgcacggatacaca

SEQ ID NO: 217945 - DNA, 19 bp, Homo sapiens
  siRNA target sequence for AGXT2L1 (NM_031279.2,1612-1630).
gcacggatacacattcact

SEQ ID NO: 217946 - DNA, 19 bp, Homo sapiens
  siRNA target sequence for BCAT1 (NM_005504.3,445-463).
gctaaagacctaatagtca

SEQ ID NO: 217947 - DNA, 19 bp, Homo sapiens
  siRNA target sequence for BCAT1 (NM_005504.3,462-480).
cacaccagctaccatttta

SEQ ID NO: 217948 - DNA, 19 bp, Homo sapiens
  siRNA target sequence for BCAT1 (NM_005504.3,518-536).
ctgtgttcacggatcatat

SEQ ID NO: 217949 - DNA, 19 bp, Homo sapiens
  siRNA target sequence for BCAT1 (NM_005504.3,569-587).
gggagaaacctcatatcaa

SEQ ID NO: 217950 - DNA, 19 bp, Homo sapiens
  siRNA target sequence for BCAT1 (NM_005504.3,590-608).
ctcttcagaacctgtcatt

SEQ ID NO: 217951 - DNA, 19 bp, Homo sapiens
  siRNA target sequence for BCAT1 (NM_005504.3,630-648).
gcactatgcagtggaatta

SEQ ID NO: 217952 - DNA, 19 bp, Homo sapiens
  siRNA target sequence for BCAT1 (NM_005504.3,631-649).
cactatgcagtggaattat

SEQ ID NO: 217953 - DNA, 19 bp, Homo sapiens
  siRNA target sequence for BCAT1 (NM_005504.3,663-681).
ggcatttcgaggagtagat

SEQ ID NO: 217954 - DNA, 19 bp, Homo sapiens
  siRNA target sequence for BCAT1 (NM_005504.3,664-682).
gcatttcgaggagtagata

SEQ ID NO: 217955 - DNA, 19 bp, Homo sapiens
  siRNA target sequence for BCAT1 (NM_005504.3,665-683).
catttcgaggagtagataa

SEQ ID NO: 217956 - DNA, 19 bp, Homo sapiens
  siRNA target sequence for BCAT1 (NM_005504.3,703-721).
ccaaacctcaacatggata

SEQ ID NO: 217957 - DNA, 19 bp, Homo sapiens
  siRNA target sequence for BCAT1 (NM_005504.3,709-727).
ctcaacatggatagaatgt

SEQ ID NO: 217958 - DNA, 19 bp, Homo sapiens
  siRNA target sequence for BCAT1 (NM_005504.3,744-762).
ggcaactctgccggtattt

SEQ ID NO: 217959 - DNA, 19 bp, Homo sapiens
  siRNA target sequence for BCAT1 (NM_005504.3,746-764).
caactctgccggtatttga

SEQ ID NO: 217960 - DNA, 19 bp, Homo sapiens
  siRNA target sequence for BCAT1 (NM_005504.3,749-767).
ctctgccggtatttgacaa

SEQ ID NO: 217961 - DNA, 19 bp, Homo sapiens
  siRNA target sequence for BCAT1 (NM_005504.3,753-771).
gccggtatttgacaaagaa

SEQ ID NO: 217962 - DNA, 19 bp, Homo sapiens
  siRNA target sequence for BCAT1 (NM_005504.3,799-817).
gtgaaattggatcaagaat

SEQ ID NO: 217963 - DNA, 19 bp, Homo sapiens
  siRNA target sequence for BCAT1 (NM_005504.3,811-829).
caagaatgggtcccatatt

SEQ ID NO: 217964 - DNA, 19 bp, Homo sapiens
  siRNA target sequence for BCAT1 (NM_005504.3,819-837).
ggtcccatattcaacatct

SEQ ID NO: 217965 - DNA, 19 bp, Homo sapiens
  siRNA target sequence for BCAT1 (NM_005504.3,853-871).
cgtcctacattcattggaa

SEQ ID NO: 217966 - DNA, 19 bp, Homo sapiens
  siRNA target sequence for BCAT1 (NM_005504.3,908-926).
ccctgctctttgtactctt

SEQ ID NO: 217967 - DNA, 19 bp, Homo sapiens
  siRNA target sequence for BCAT1 (NM_005504.3,931-949).
ccagtgggaccttattttt

SEQ ID NO: 217968 - DNA, 19 bp, Homo sapiens
  siRNA target sequence for BCAT1 (NM_005504.3,978-996).
gtgggccaatcccaagtat

SEQ ID NO: 217969 - DNA, 19 bp, Homo sapiens
  siRNA target sequence for BCAT1 (NM_005504.3,980-998).
gggccaatcccaagtatgt

SEQ ID NO: 217970 - DNA, 19 bp, Homo sapiens
  siRNA target sequence for BCAT1 (NM_005504.3,981-999).
ggccaatcccaagtatgta

SEQ ID NO: 217971 - DNA, 19 bp, Homo sapiens
  siRNA target sequence for BCAT1 (NM_005504.3,982-1000).
gccaatcccaagtatgtaa

SEQ ID NO: 217972 - DNA, 19 bp, Homo sapiens
  siRNA target sequence for BCAT1 (NM_005504.3,984-1002).
caatcccaagtatgtaaga

SEQ ID NO: 217973 - DNA, 19 bp, Homo sapiens
  siRNA target sequence for BCAT1 (NM_005504.3,1041-1059).
gaattacggctcatctctt

SEQ ID NO: 217974 - DNA, 19 bp, Homo sapiens
  siRNA target sequence for BCAT1 (NM_005504.3,1055-1073).
ctctttttgcccaatgtga

SEQ ID NO: 217975 - DNA, 19 bp, Homo sapiens
  siRNA target sequence for BCAT1 (NM_005504.3,1065-1083).
ccaatgtgaagcagtagat

SEQ ID NO: 217976 - DNA, 19 bp, Homo sapiens
  siRNA target sequence for BCAT1 (NM_005504.3,1140-1158).
gggaactatgaatcttttt

SEQ ID NO: 217977 - DNA, 19 bp, Homo sapiens
  siRNA target sequence for BCAT1 (NM_005504.3,1194-1212).
ggcaactcctccactagat

SEQ ID NO: 217978 - DNA, 19 bp, Homo sapiens
  siRNA target sequence for BCAT1 (NM_005504.3,1360-1378).
ggtacagcctgtgttgttt

SEQ ID NO: 217979 - DNA, 19 bp, Homo sapiens
  siRNA target sequence for BCAT1 (NM_005504.3,1382-1400).
cagtttctgatatactgta

SEQ ID NO: 217980 - DNA, 19 bp, Homo sapiens
  siRNA target sequence for BCAT1 (NM_005504.3,1398-1416).
gtacaaaggcgagacaata

SEQ ID NO: 217981 - DNA, 19 bp, Homo sapiens
  siRNA target sequence for BCAT2 (NM_001190.1,24-42).
gatctgggcacgaaagctt

SEQ ID NO: 217982 - DNA, 19 bp, Homo sapiens
  siRNA target sequence for BCAT2 (NM_001190.1,61-79).
ctgtgtggtcccagaagat

SEQ ID NO: 217983 - DNA, 19 bp, Homo sapiens
  siRNA target sequence for BCAT2 (NM_001190.1,309-327).
gggcatgaaggcgttcaaa

SEQ ID NO: 217984 - DNA, 19 bp, Homo sapiens
  siRNA target sequence for BCAT2 (NM_001190.1,563-581).
cgctcctgttcgtcattct

SEQ ID NO: 217985 - DNA, 19 bp, Homo sapiens
  siRNA target sequence for BCAT2 (NM_001190.1,565-583).
ctcctgttcgtcattctct

SEQ ID NO: 217986 - DNA, 19 bp, Homo sapiens
  siRNA target sequence for BCAT2 (NM_001190.1,670-688).
ggggtcggcaactacaagt

SEQ ID NO: 217987 - DNA, 19 bp, Homo sapiens
  siRNA target sequence for BCAT2 (NM_001190.1,671-689).
gggtcggcaactacaagtt

SEQ ID NO: 217988 - DNA, 19 bp, Homo sapiens
  siRNA target sequence for BCAT2 (NM_001190.1,672-690).
ggtcggcaactacaagtta

SEQ ID NO: 217989 - DNA, 19 bp, Homo sapiens
  siRNA target sequence for BCAT2 (NM_001190.1,860-878).
cgctgaatggtgttatcct

SEQ ID NO: 217990 - DNA, 19 bp, Homo sapiens
  siRNA target sequence for BCAT2 (NM_001190.1,1041-1059).
gcaccgaatcctgtacaaa

SEQ ID NO: 217991 - DNA, 19 bp, Homo sapiens
  siRNA target sequence for BCAT2 (NM_001190.1,1045-1063).
cgaatcctgtacaaagaca

SEQ ID NO: 217992 - DNA, 19 bp, Homo sapiens
  siRNA target sequence for BCAT2 (NM_001190.1,1134-1152).
gatccagtacggaatcaga

SEQ ID NO: 217993 - DNA, 19 bp, Homo sapiens
  siRNA target sequence for GOT1 (NM_002079.1,27-45).
ggcacctccgtcagtcttt

SEQ ID NO: 217994 - DNA, 19 bp, Homo sapiens
  siRNA target sequence for GOT1 (NM_002079.1,195-213).
ggagcagaagattgctaat

SEQ ID NO: 217995 - DNA, 19 bp, Homo sapiens
  siRNA target sequence for GOT1 (NM_002079.1,221-239).
gcctaaatcacgagtatct

SEQ ID NO: 217996 - DNA, 19 bp, Homo sapiens
  siRNA target sequence for GOT1 (NM_002079.1,325-343).
gtaggaggtgtgcaatctt

SEQ ID NO: 217997 - DNA, 19 bp, Homo sapiens
  siRNA target sequence for GOT1 (NM_002079.1,350-368).
gaacaggtgcacttcgaat

SEQ ID NO: 217998 - DNA, 19 bp, Homo sapiens
  siRNA target sequence for GOT1 (NM_002079.1,364-382).
cgaattggagctgatttct

SEQ ID NO: 217999 - DNA, 19 bp, Homo sapiens
  siRNA target sequence for GOT1 (NM_002079.1,365-383).
gaattggagctgatttctt

SEQ ID NO: 218000 - DNA, 19 bp, Homo sapiens
  siRNA target sequence for GOT1 (NM_002079.1,381-399).
cttagcgcgttggtacaat

SEQ ID NO: 218001 - DNA, 19 bp, Homo sapiens
  siRNA target sequence for GOT1 (NM_002079.1,385-403).
gcgcgttggtacaatggaa

SEQ ID NO: 218002 - DNA, 19 bp, Homo sapiens
  siRNA target sequence for GOT1 (NM_002079.1,392-410).
ggtacaatggaacaaacaa

SEQ ID NO: 218003 - DNA, 19 bp, Homo sapiens
  siRNA target sequence for GOT1 (NM_002079.1,411-429).
caagaacacacctgtctat

SEQ ID NO: 218004 - DNA, 19 bp, Homo sapiens
  siRNA target sequence for GOT1 (NM_002079.1,437-455).
caccaacctgggagaatca

SEQ ID NO: 218005 - DNA, 19 bp, Homo sapiens
  siRNA target sequence for GOT1 (NM_002079.1,439-457).
ccaacctgggagaatcaca

SEQ ID NO: 218006 - DNA, 19 bp, Homo sapiens
  siRNA target sequence for GOT1 (NM_002079.1,440-458).
caacctgggagaatcacaa

SEQ ID NO: 218007 - DNA, 19 bp, Homo sapiens
  siRNA target sequence for GOT1 (NM_002079.1,450-468).
gaatcacaatgctgtgttt

SEQ ID NO: 218008 - DNA, 19 bp, Homo sapiens
  siRNA target sequence for GOT1 (NM_002079.1,465-483).
gttttccgctgctggtttt

SEQ ID NO: 218009 - DNA, 19 bp, Homo sapiens
  siRNA target sequence for GOT1 (NM_002079.1,676-694).
ctgttccccttctttgact

SEQ ID NO: 218010 - DNA, 19 bp, Homo sapiens
  siRNA target sequence for GOT1 (NM_002079.1,738-756).
ctgggccattcgctatttt

SEQ ID NO: 218011 - DNA, 19 bp, Homo sapiens
  siRNA target sequence for GOT1 (NM_002079.1,740-758).
gggccattcgctattttgt

SEQ ID NO: 218012 - DNA, 19 bp, Homo sapiens
  siRNA target sequence for GOT1 (NM_002079.1,801-819).
gaacttcgggctctacaat

SEQ ID NO: 218013 - DNA, 19 bp, Homo sapiens
  siRNA target sequence for GOT1 (NM_002079.1,891-909).
gaagatcgtgcggattact

SEQ ID NO: 218014 - DNA, 19 bp, Homo sapiens
  siRNA target sequence for GOT1 (NM_002079.1,926-944).
cccagggagcacgaattgt

SEQ ID NO: 218015 - DNA, 19 bp, Homo sapiens
  siRNA target sequence for GOT1 (NM_002079.1,959-977).
ctaaccctgagctctttga

SEQ ID NO: 218016 - DNA, 19 bp, Homo sapiens
  siRNA target sequence for GOT1 (NM_002079.1,986-1004).
caggtaatgtgaagacaat

SEQ ID NO: 218017 - DNA, 19 bp, Homo sapiens
  siRNA target sequence for GOT1 (NM_002079.1,1012-1030).
cggattctgaccatgagat

SEQ ID NO: 218018 - DNA, 19 bp, Homo sapiens
  siRNA target sequence for GOT1 (NM_002079.1,1045-1063).
cgactagaagccctcaaaa

SEQ ID NO: 218019 - DNA, 19 bp, Homo sapiens
  siRNA target sequence for GOT1 (NM_002079.1,1077-1095).
gaaccacatcactgatcaa

SEQ ID NO: 218020 - DNA, 19 bp, Homo sapiens
  siRNA target sequence for GOT1 (NM_002079.1,1125-1143).
ccccaagcaggttgagtat

SEQ ID NO: 218021 - DNA, 19 bp, Homo sapiens
  siRNA target sequence for GOT1 (NM_002079.1,1200-1218).
cttaaccaccaaaaatcta

SEQ ID NO: 218022 - DNA, 19 bp, Homo sapiens
  siRNA target sequence for GOT1 (NM_002079.1,1208-1226).
ccaaaaatctagattacgt

SEQ ID NO: 218023 - DNA, 19 bp, Homo sapiens
  siRNA target sequence for GOT2 (NM_002080.1,103-121).
ggtggacccatgtggaaat

SEQ ID NO: 218024 - DNA, 19 bp, Homo sapiens
  siRNA target sequence for GOT2 (NM_002080.1,201-219).
ggtgcctaccgggatgata

SEQ ID NO: 218025 - DNA, 19 bp, Homo sapiens
  siRNA target sequence for GOT2 (NM_002080.1,202-220).
gtgcctaccgggatgataa

SEQ ID NO: 218026 - DNA, 19 bp, Homo sapiens
  siRNA target sequence for GOT2 (NM_002080.1,206-224).
ctaccgggatgataatgga

SEQ ID NO: 218027 - DNA, 19 bp, Homo sapiens
  siRNA target sequence for GOT2 (NM_002080.1,306-324).
gggggactggctgaatttt

SEQ ID NO: 218028 - DNA, 19 bp, Homo sapiens
  siRNA target sequence for GOT2 (NM_002080.1,310-328).
gactggctgaattttgcaa

SEQ ID NO: 218029 - DNA, 19 bp, Homo sapiens
  siRNA target sequence for GOT2 (NM_002080.1,326-344).
caaggcatctgcagaacta

SEQ ID NO: 218030 - DNA, 19 bp, Homo sapiens
  siRNA target sequence for GOT2 (NM_002080.1,352-370).
gtgagaacagcgaagtctt

SEQ ID NO: 218031 - DNA, 19 bp, Homo sapiens
  siRNA target sequence for GOT2 (NM_002080.1,409-427).
gaactggagccttaaggat

SEQ ID NO: 218032 - DNA, 19 bp, Homo sapiens
  siRNA target sequence for GOT2 (NM_002080.1,526-544).
gcatgcagctacaaggtta

SEQ ID NO: 218033 - DNA, 19 bp, Homo sapiens
  siRNA target sequence for GOT2 (NM_002080.1,527-545).
catgcagctacaaggttat

SEQ ID NO: 218034 - DNA, 19 bp, Homo sapiens
  siRNA target sequence for GOT2 (NM_002080.1,559-577).
ccaagacttgcggttttga

SEQ ID NO: 218035 - DNA, 19 bp, Homo sapiens
  siRNA target sequence for GOT2 (NM_002080.1,585-603).
ggcgctgtggaggatattt

SEQ ID NO: 218036 - DNA, 19 bp, Homo sapiens
  siRNA target sequence for GOT2 (NM_002080.1,587-605).
cgctgtggaggatatttca

SEQ ID NO: 218037 - DNA, 19 bp, Homo sapiens
  siRNA target sequence for GOT2 (NM_002080.1,593-611).
ggaggatatttcaaaaata

SEQ ID NO: 218038 - DNA, 19 bp, Homo sapiens
  siRNA target sequence for GOT2 (NM_002080.1,716-734).
gaatctctttgcgttcttt

SEQ ID NO: 218039 - DNA, 19 bp, Homo sapiens
  siRNA target sequence for GOT2 (NM_002080.1,800-818).
catcgaacagggcattaat

SEQ ID NO: 218040 - DNA, 19 bp, Homo sapiens
  siRNA target sequence for GOT2 (NM_002080.1,803-821).
cgaacagggcattaatgtt

SEQ ID NO: 218041 - DNA, 19 bp, Homo sapiens
  siRNA target sequence for GOT2 (NM_002080.1,841-859).
ccaagaacatgggcttata

SEQ ID NO: 218042 - DNA, 19 bp, Homo sapiens
  siRNA target sequence for GOT2 (NM_002080.1,867-885).
cgtgtaggagccttcacta

SEQ ID NO: 218043 - DNA, 19 bp, Homo sapiens
  siRNA target sequence for GOT2 (NM_002080.1,868-886).
gtgtaggagccttcactat

SEQ ID NO: 218044 - DNA, 19 bp, Homo sapiens
  siRNA target sequence for GOT2 (NM_002080.1,938-956).
cttgatccgtcccatgtat

SEQ ID NO: 218045 - DNA, 19 bp, Homo sapiens
  siRNA target sequence for GOT2 (NM_002080.1,1008-1026).
ccagatttgcgaaaacaat

SEQ ID NO: 218046 - DNA, 19 bp, Homo sapiens
  siRNA target sequence for GOT2 (NM_002080.1,1046-1064).
catggctgaccgcatcatt

SEQ ID NO: 218047 - DNA, 19 bp, Homo sapiens
  siRNA target sequence for GOT2 (NM_002080.1,1101-1119).
gagggttccacccacaatt

SEQ ID NO: 218048 - DNA, 19 bp, Homo sapiens
  siRNA target sequence for GOT2 (NM_002080.1,1111-1129).
cccacaattggcaacacat

SEQ ID NO: 218049 - DNA, 19 bp, Homo sapiens
  siRNA target sequence for GOT2 (NM_002080.1,1197-1215).
gagttctccatctacatga

SEQ ID NO: 218050 - DNA, 19 bp, Homo sapiens
  siRNA target sequence for TAT (NM_000353.1,100-118).
gacccatacatgattcaga

SEQ ID NO: 218051 - DNA, 19 bp, Homo sapiens
  siRNA target sequence for TAT (NM_000353.1,266-284).
gagccattgtggacaacat

SEQ ID NO: 218052 - DNA, 19 bp, Homo sapiens
  siRNA target sequence for TAT (NM_000353.1,282-300).
catgaaggtgaaaccaaat

SEQ ID NO: 218053 - DNA, 19 bp, Homo sapiens
  siRNA target sequence for TAT (NM_000353.1,396-414).
cctggactcgggcaaatat

SEQ ID NO: 218054 - DNA, 19 bp, Homo sapiens
  siRNA target sequence for TAT (NM_000353.1,397-415).
ctggactcgggcaaatata

SEQ ID NO: 218055 - DNA, 19 bp, Homo sapiens
  siRNA target sequence for TAT (NM_000353.1,399-417).
ggactcgggcaaatataat

SEQ ID NO: 218056 - DNA, 19 bp, Homo sapiens
  siRNA target sequence for TAT (NM_000353.1,454-472).
gaggagattgcttcttatt

SEQ ID NO: 218057 - DNA, 19 bp, Homo sapiens
  siRNA target sequence for TAT (NM_000353.1,499-517).
gctaaggacgtcattctga

SEQ ID NO: 218058 - DNA, 19 bp, Homo sapiens
  siRNA target sequence for TAT (NM_000353.1,521-539).
gtggctgcagccaagctat

SEQ ID NO: 218059 - DNA, 19 bp, Homo sapiens
  siRNA target sequence for TAT (NM_000353.1,640-658).
gaggtcaaactctacaatt

SEQ ID NO: 218060 - DNA, 19 bp, Homo sapiens
  siRNA target sequence for TAT (NM_000353.1,643-661).
gtcaaactctacaatttgt

SEQ ID NO: 218061 - DNA, 19 bp, Homo sapiens
  siRNA target sequence for TAT (NM_000353.1,677-695).
gggaaattgacctgaaaca

SEQ ID NO: 218062 - DNA, 19 bp, Homo sapiens
  siRNA target sequence for TAT (NM_000353.1,687-705).
cctgaaacaactggaatat

SEQ ID NO: 218063 - DNA, 19 bp, Homo sapiens
  siRNA target sequence for TAT (NM_000353.1,725-743).
cttgtctcattgtcaataa

SEQ ID NO: 218064 - DNA, 19 bp, Homo sapiens
  siRNA target sequence for TAT (NM_000353.1,773-791).
gcaaacgtcatcttcagaa

SEQ ID NO: 218065 - DNA, 19 bp, Homo sapiens
  siRNA target sequence for TAT (NM_000353.1,828-846).
cttagctgatgagatctat

SEQ ID NO: 218066 - DNA, 19 bp, Homo sapiens
  siRNA target sequence for TAT (NM_000353.1,855-873).
ggtgttttcggattgcaaa

SEQ ID NO: 218067 - DNA, 19 bp, Homo sapiens
  siRNA target sequence for TAT (NM_000353.1,856-874).
gtgttttcggattgcaaat

SEQ ID NO: 218068 - DNA, 19 bp, Homo sapiens
  siRNA target sequence for TAT (NM_000353.1,1066-1084).
cagggagctctgaaaagca

SEQ ID NO: 218069 - DNA, 19 bp, Homo sapiens
  siRNA target sequence for TAT (NM_000353.1,1072-1090).
gctctgaaaagcatcctat

SEQ ID NO: 218070 - DNA, 19 bp, Homo sapiens
  siRNA target sequence for TAT (NM_000353.1,1212-1230).
gtacctcatggttggaatt

SEQ ID NO: 218071 - DNA, 19 bp, Homo sapiens
  siRNA target sequence for TAT (NM_000353.1,1269-1287).
gttcacggagcggttagtt

SEQ ID NO: 218072 - DNA, 19 bp, Homo sapiens
  siRNA target sequence for TAT (NM_000353.1,1312-1330).
ccagcaacgtgctttgagt

SEQ ID NO: 218073 - DNA, 19 bp, Homo sapiens
  siRNA target sequence for TAT (NM_000353.1,1313-1331).
cagcaacgtgctttgagta

SEQ ID NO: 218074 - DNA, 19 bp, Homo sapiens
  siRNA target sequence for TAT (NM_000353.1,1322-1340).
gctttgagtacccgaattt

SEQ ID NO: 218075 - DNA, 19 bp, Homo sapiens
  siRNA target sequence for PSAT1 (NM_021154.3,79-97).
ccaggcaggtggtcaactt

SEQ ID NO: 218076 - DNA, 19 bp, Homo sapiens
  siRNA target sequence for PSAT1 (NM_021154.3,80-98).
caggcaggtggtcaacttt

SEQ ID NO: 218077 - DNA, 19 bp, Homo sapiens
  siRNA target sequence for PSAT1 (NM_021154.3,119-137).
gccgcactcagtgttgtta

SEQ ID NO: 218078 - DNA, 19 bp, Homo sapiens
  siRNA target sequence for PSAT1 (NM_021154.3,121-139).
cgcactcagtgttgttaga

SEQ ID NO: 218079 - DNA, 19 bp, Homo sapiens
  siRNA target sequence for PSAT1 (NM_021154.3,134-152).
gttagagatacaaaaggaa

SEQ ID NO: 218080 - DNA, 19 bp, Homo sapiens
  siRNA target sequence for PSAT1 (NM_021154.3,149-167).
ggaattattagactacaaa

SEQ ID NO: 218081 - DNA, 19 bp, Homo sapiens
  siRNA target sequence for PSAT1 (NM_021154.3,196-214).
gtcacaggtcatcagattt

SEQ ID NO: 218082 - DNA, 19 bp, Homo sapiens
  siRNA target sequence for PSAT1 (NM_021154.3,270-288).
gacaactataaggtgattt

SEQ ID NO: 218083 - DNA, 19 bp, Homo sapiens
  siRNA target sequence for PSAT1 (NM_021154.3,272-290).
caactataaggtgattttt

SEQ ID NO: 218084 - DNA, 19 bp, Homo sapiens
  siRNA target sequence for PSAT1 (NM_021154.3,319-337).
gtgctgtccccttaaacct

SEQ ID NO: 218085 - DNA, 19 bp, Homo sapiens
  siRNA target sequence for PSAT1 (NM_021154.3,355-373).
gaaggtgtgctgactatgt

SEQ ID NO: 218086 - DNA, 19 bp, Homo sapiens
  siRNA target sequence for PSAT1 (NM_021154.3,416-434).
gaagtttgggactataaat

SEQ ID NO: 218087 - DNA, 19 bp, Homo sapiens
  siRNA target sequence for PSAT1 (NM_021154.3,444-462).
cctaaacttgggagttata

SEQ ID NO: 218088 - DNA, 19 bp, Homo sapiens
  siRNA target sequence for PSAT1 (NM_021154.3,501-519).
gatgcctcctacgtgtatt

SEQ ID NO: 218089 - DNA, 19 bp, Homo sapiens
  siRNA target sequence for PSAT1 (NM_021154.3,504-522).
gcctcctacgtgtattatt

SEQ ID NO: 218090 - DNA, 19 bp, Homo sapiens
  siRNA target sequence for OAT (NM_000274.1,94-112).
cttagtcgcggagttcatt

SEQ ID NO: 218091 - DNA, 19 bp, Homo sapiens
  siRNA target sequence for OAT (NM_000274.1,120-138).
ggcttctgctacatctgtt

SEQ ID NO: 218092 - DNA, 19 bp, Homo sapiens
  siRNA target sequence for OAT (NM_000274.1,213-231).
caactaccatcctttacct

SEQ ID NO: 218093 - DNA, 19 bp, Homo sapiens
  siRNA target sequence for OAT (NM_000274.1,268-286).
gatgtagaaggcagaaaat

SEQ ID NO: 218094 - DNA, 19 bp, Homo sapiens
  siRNA target sequence for OAT (NM_000274.1,271-289).
gtagaaggcagaaaatatt

SEQ ID NO: 218095 - DNA, 19 bp, Homo sapiens
  siRNA target sequence for OAT (NM_000274.1,327-345).
gcattgtcaccccaagatt

SEQ ID NO: 218096 - DNA, 19 bp, Homo sapiens
  siRNA target sequence for OAT (NM_000274.1,367-385).
gtggacaaattgaccttaa

SEQ ID NO: 218097 - DNA, 19 bp, Homo sapiens
  siRNA target sequence for OAT (NM_000274.1,369-387).
ggacaaattgaccttaaca

SEQ ID NO: 218098 - DNA, 19 bp, Homo sapiens
  siRNA target sequence for OAT (NM_000274.1,392-410).
gagctttctataataacgt

SEQ ID NO: 218099 - DNA, 19 bp, Homo sapiens
  siRNA target sequence for OAT (NM_000274.1,426-444).
ggagtatattactaaactt

SEQ ID NO: 218100 - DNA, 19 bp, Homo sapiens
  siRNA target sequence for OAT (NM_000274.1,427-445).
gagtatattactaaacttt

SEQ ID NO: 218101 - DNA, 19 bp, Homo sapiens
  siRNA target sequence for OAT (NM_000274.1,491-509).
gagagactgcctgtaaact

SEQ ID NO: 218102 - DNA, 19 bp, Homo sapiens
  siRNA target sequence for OAT (NM_000274.1,630-648).
cagttacgatggttttgga

SEQ ID NO: 218103 - DNA, 19 bp, Homo sapiens
  siRNA target sequence for OAT (NM_000274.1,636-654).
cgatggttttggaccattt

SEQ ID NO: 218104 - DNA, 19 bp, Homo sapiens
  siRNA target sequence for OAT (NM_000274.1,657-675).
gccgggattcgacatcatt

SEQ ID NO: 218105 - DNA, 19 bp, Homo sapiens
  siRNA target sequence for OAT (NM_000274.1,666-684).
cgacatcattccctataat

SEQ ID NO: 218106 - DNA, 19 bp, Homo sapiens
  siRNA target sequence for OAT (NM_000274.1,704-722).
gtgctcttcaggatccaaa

SEQ ID NO: 218107 - DNA, 19 bp, Homo sapiens
  siRNA target sequence for OAT (NM_000274.1,731-749).
cgttcatggtagaaccaat

SEQ ID NO: 218108 - DNA, 19 bp, Homo sapiens
  siRNA target sequence for OAT (NM_000274.1,755-773).
gtgaagcaggcgttgttgt

SEQ ID NO: 218109 - DNA, 19 bp, Homo sapiens
  siRNA target sequence for OAT (NM_000274.1,775-793).
ccggatccaggttacctaa

SEQ ID NO: 218110 - DNA, 19 bp, Homo sapiens
  siRNA target sequence for OAT (NM_000274.1,776-794).
cggatccaggttacctaat

SEQ ID NO: 218111 - DNA, 19 bp, Homo sapiens
  siRNA target sequence for OAT (NM_000274.1,875-893).
gatggctggctgttgatta

SEQ ID NO: 218112 - DNA, 19 bp, Homo sapiens
  siRNA target sequence for OAT (NM_000274.1,878-896).
ggctggctgttgattatga

SEQ ID NO: 218113 - DNA, 19 bp, Homo sapiens
  siRNA target sequence for OAT (NM_000274.1,1056-1074).
cgcagcccttgaggtttta

SEQ ID NO: 218114 - DNA, 19 bp, Homo sapiens
  siRNA target sequence for OAT (NM_000274.1,1058-1076).
cagcccttgaggttttaga

SEQ ID NO: 218115 - DNA, 19 bp, Homo sapiens
  siRNA target sequence for OAT (NM_000274.1,1100-1118).
cagacaaattgggcattat

SEQ ID NO: 218116 - DNA, 19 bp, Homo sapiens
  siRNA target sequence for OAT (NM_000274.1,1137-1155).
gaagctaccttctgatgtt

SEQ ID NO: 218117 - DNA, 19 bp, Homo sapiens
  siRNA target sequence for OAT (NM_000274.1,1178-1196).
gattattaaacgctattgt

SEQ ID NO: 218118 - DNA, 19 bp, Homo sapiens
  siRNA target sequence for OAT (NM_000274.1,1188-1206).
cgctattgtcattaaagaa

SEQ ID NO: 218119 - DNA, 19 bp, Homo sapiens
  siRNA target sequence for OAT (NM_000274.1,1235-1253).
gtctacgacttcgagataa

SEQ ID NO: 218120 - DNA, 19 bp, Homo sapiens
  siRNA target sequence for OAT (NM_000274.1,1270-1288).
ccaacccatggcgacatta

SEQ ID NO: 218121 - DNA, 19 bp, Homo sapiens
  siRNA target sequence for OAT (NM_000274.1,1271-1289).
caacccatggcgacattat

SEQ ID NO: 218122 - DNA, 19 bp, Homo sapiens
  siRNA target sequence for OAT (NM_000274.1,1298-1316).
cgcctccgctggtgatcaa

SEQ ID NO: 218123 - DNA, 19 bp, Homo sapiens
  siRNA target sequence for OAT (NM_000274.1,1326-1344).
gcttcgagagtccattgaa

SEQ ID NO: 218124 - DNA, 19 bp, Homo sapiens
  siRNA target sequence for OAT (NM_000274.1,1327-1345).
cttcgagagtccattgaaa

SEQ ID NO: 218125 - DNA, 19 bp, Homo sapiens
  siRNA target sequence for OAT (NM_000274.1,1330-1348).
cgagagtccattgaaatta

SEQ ID NO: 218126 - DNA, 19 bp, Homo sapiens
  siRNA target sequence for OAT (NM_000274.1,1331-1349).
gagagtccattgaaattat

SEQ ID NO: 218127 - DNA, 19 bp, Homo sapiens
  siRNA target sequence for OAT (NM_000274.1,1333-1351).
gagtccattgaaattatta

SEQ ID NO: 218128 - DNA, 19 bp, Homo sapiens
  siRNA target sequence for ABAT (NM_000663.2,195-213).
gccaaagtcgacgttgaat

SEQ ID NO: 218129 - DNA, 19 bp, Homo sapiens
  siRNA target sequence for ABAT (NM_000663.2,196-214).
ccaaagtcgacgttgaatt

SEQ ID NO: 218130 - DNA, 19 bp, Homo sapiens
  siRNA target sequence for ABAT (NM_000663.2,201-219).
gtcgacgttgaatttgatt

SEQ ID NO: 218131 - DNA, 19 bp, Homo sapiens
  siRNA target sequence for ABAT (NM_000663.2,203-221).
cgacgttgaatttgattat

SEQ ID NO: 218132 - DNA, 19 bp, Homo sapiens
  siRNA target sequence for ABAT (NM_000663.2,255-273).
cctagatctcaggagttaa

SEQ ID NO: 218133 - DNA, 19 bp, Homo sapiens
  siRNA target sequence for ABAT (NM_000663.2,256-274).
ctagatctcaggagttaat

SEQ ID NO: 218134 - DNA, 19 bp, Homo sapiens
  siRNA target sequence for ABAT (NM_000663.2,279-297).
cagctgaatataattcaga

SEQ ID NO: 218135 - DNA, 19 bp, Homo sapiens
  siRNA target sequence for ABAT (NM_000663.2,400-418).
cctctgtccccataggtta

SEQ ID NO: 218136 - DNA, 19 bp, Homo sapiens
  siRNA target sequence for ABAT (NM_000663.2,443-461).
catccaacagcctcaaaat

SEQ ID NO: 218137 - DNA, 19 bp, Homo sapiens
  siRNA target sequence for ABAT (NM_000663.2,677-695).
gctggagacgtgcatgatt

SEQ ID NO: 218138 - DNA, 19 bp, Homo sapiens
  siRNA target sequence for ABAT (NM_000663.2,678-696).
ctggagacgtgcatgatta

SEQ ID NO: 218139 - DNA, 19 bp, Homo sapiens
  siRNA target sequence for ABAT (NM_000663.2,755-773).
gaggaccatgggttgctta

SEQ ID NO: 218140 - DNA, 19 bp, Homo sapiens
  siRNA target sequence for ABAT (NM_000663.2,783-801).
cactctaaagccattcaca

SEQ ID NO: 218141 - DNA, 19 bp, Homo sapiens
  siRNA target sequence for ABAT (NM_000663.2,803-821).
gatcgacatcccttccttt

SEQ ID NO: 218142 - DNA, 19 bp, Homo sapiens
  siRNA target sequence for ABAT (NM_000663.2,807-825).
gacatcccttcctttgact

SEQ ID NO: 218143 - DNA, 19 bp, Homo sapiens
  siRNA target sequence for ABAT (NM_000663.2,838-856).
cgttcccacggctgaaata

SEQ ID NO: 218144 - DNA, 19 bp, Homo sapiens
  siRNA target sequence for ABAT (NM_000663.2,1218-1236).
gctccctaccggatcttca

SEQ ID NO: 218145 - DNA, 19 bp, Homo sapiens
  siRNA target sequence for ABAT (NM_000663.2,1221-1239).
ccctaccggatcttcaaca

SEQ ID NO: 218146 - DNA, 19 bp, Homo sapiens
  siRNA target sequence for ABAT (NM_000663.2,1299-1317).
cgggaggacctgctaaata

SEQ ID NO: 218147 - DNA, 19 bp, Homo sapiens
  siRNA target sequence for ABAT (NM_000663.2,1300-1318).
gggaggacctgctaaataa

SEQ ID NO: 218148 - DNA, 19 bp, Homo sapiens
  siRNA target sequence for ABAT (NM_000663.2,1371-1389).
cggtacccccagttcatca

SEQ ID NO: 218149 - DNA, 19 bp, Homo sapiens
  siRNA target sequence for ABAT (NM_000663.2,1500-1518).
ggtgacaaatccattcgtt

SEQ ID NO: 218150 - DNA, 19 bp, Homo sapiens
  siRNA target sequence for ABAT (NM_000663.2,1551-1569).
gctcacctgttcctcaata

SEQ ID NO: 218151 - DNA, 19 bp, Homo sapiens
  siRNA target sequence for ABAT (NM_000663.2,1554-1572).
cacctgttcctcaatattt

SEQ ID NO: 218152 - DNA, 19 bp, Homo sapiens
  siRNA target sequence for CCBL1 (NM_004059.2,167-185).
gagacttcatgcttaacca

SEQ ID NO: 218153 - DNA, 19 bp, Homo sapiens
  siRNA target sequence for CCBL1 (NM_004059.2,183-201).
ccagtacaccaagacattt

SEQ ID NO: 218154 - DNA, 19 bp, Homo sapiens
  siRNA target sequence for CCBL1 (NM_004059.2,218-236).
cgaagatcctggcaagttt

SEQ ID NO: 218155 - DNA, 19 bp, Homo sapiens
  siRNA target sequence for CCBL1 (NM_004059.2,222-240).
gatcctggcaagtttcttt

SEQ ID NO: 218156 - DNA, 19 bp, Homo sapiens
  siRNA target sequence for CCBL1 (NM_004059.2,357-375).
catcatcgaaccctttttt

SEQ ID NO: 218157 - DNA, 19 bp, Homo sapiens
  siRNA target sequence for CCBL1 (NM_004059.2,380-398).
gctacgagcccatgacaat

SEQ ID NO: 218158 - DNA, 19 bp, Homo sapiens
  siRNA target sequence for CCBL1 (NM_004059.2,407-425).
ggggtcgtcctgtgtttgt

SEQ ID NO: 218159 - DNA, 19 bp, Homo sapiens
  siRNA target sequence for CCBL1 (NM_004059.2,409-427).
ggtcgtcctgtgtttgtgt

SEQ ID NO: 218160 - DNA, 19 bp, Homo sapiens
  siRNA target sequence for CCBL1 (NM_004059.2,616-634).
catgacgtggtgtgtatca

SEQ ID NO: 218161 - DNA, 19 bp, Homo sapiens
  siRNA target sequence for CCBL1 (NM_004059.2,945-963).
ctgccgtgaccacatgata

SEQ ID NO: 218162 - DNA, 19 bp, Homo sapiens
  siRNA target sequence for CCBL1 (NM_004059.2,949-967).
cgtgaccacatgatacgta

SEQ ID NO: 218163 - DNA, 19 bp, Homo sapiens
  siRNA target sequence for CCBL1 (NM_004059.2,1183-1201).
cactatatccgcttctgtt

SEQ ID NO: 218164 - DNA, 19 bp, Homo sapiens
  siRNA target sequence for AADAT (NM_016228.3,399-417).
ccggaccatgactgacata

SEQ ID NO: 218165 - DNA, 19 bp, Homo sapiens
  siRNA target sequence for AADAT (NM_016228.3,427-445).
ggaccaaaatcgatgatct

SEQ ID NO: 218166 - DNA, 19 bp, Homo sapiens
  siRNA target sequence for AADAT (NM_016228.3,450-468).
ggctggtggcttaccaaat

SEQ ID NO: 218167 - DNA, 19 bp, Homo sapiens
  siRNA target sequence for AADAT (NM_016228.3,454-472).
ggtggcttaccaaatccaa

SEQ ID NO: 218168 - DNA, 19 bp, Homo sapiens
  siRNA target sequence for AADAT (NM_016228.3,458-476).
gcttaccaaatccaaacat

SEQ ID NO: 218169 - DNA, 19 bp, Homo sapiens
  siRNA target sequence for AADAT (NM_016228.3,493-511).
gccgtaatcactgtagaaa

SEQ ID NO: 218170 - DNA, 19 bp, Homo sapiens
  siRNA target sequence for AADAT (NM_016228.3,495-513).
cgtaatcactgtagaaaat

SEQ ID NO: 218171 - DNA, 19 bp, Homo sapiens
  siRNA target sequence for AADAT (NM_016228.3,577-595).
ggaattccagagcttttgt

SEQ ID NO: 218172 - DNA, 19 bp, Homo sapiens
  siRNA target sequence for AADAT (NM_016228.3,600-618).
gctaaaacagttacaaata

SEQ ID NO: 218173 - DNA, 19 bp, Homo sapiens
  siRNA target sequence for AADAT (NM_016228.3,650-668).
cacccagtcaaggacaaat

SEQ ID NO: 218174 - DNA, 19 bp, Homo sapiens
  siRNA target sequence for AADAT (NM_016228.3,653-671).
ccagtcaaggacaaatgga

SEQ ID NO: 218175 - DNA, 19 bp, Homo sapiens
  siRNA target sequence for AADAT (NM_016228.3,658-676).
caaggacaaatggatctat

SEQ ID NO: 218176 - DNA, 19 bp, Homo sapiens
  siRNA target sequence for AADAT (NM_016228.3,690-708).
cagccaacaaggtctttgt

SEQ ID NO: 218177 - DNA, 19 bp, Homo sapiens
  siRNA target sequence for AADAT (NM_016228.3,703-721).
ctttgtaaggtgtttgaaa

SEQ ID NO: 218178 - DNA, 19 bp, Homo sapiens
  siRNA target sequence for AADAT (NM_016228.3,751-769).
ctagatgaacctgcttatt

SEQ ID NO: 218179 - DNA, 19 bp, Homo sapiens
  siRNA target sequence for AADAT (NM_016228.3,800-818).
gctgcaacattattaatgt

SEQ ID NO: 218180 - DNA, 19 bp, Homo sapiens
  siRNA target sequence for AADAT (NM_016228.3,914-932).
ccaaatttctttatactgt

SEQ ID NO: 218181 - DNA, 19 bp, Homo sapiens
  siRNA target sequence for AADAT (NM_016228.3,945-963).
caaccctactggaaactca

SEQ ID NO: 218182 - DNA, 19 bp, Homo sapiens
  siRNA target sequence for AADAT (NM_016228.3,948-966).
ccctactggaaactcatta

SEQ ID NO: 218183 - DNA, 19 bp, Homo sapiens
  siRNA target sequence for AADAT (NM_016228.3,949-967).
cctactggaaactcattaa

SEQ ID NO: 218184 - DNA, 19 bp, Homo sapiens
  siRNA target sequence for AADAT (NM_016228.3,996-1014).
gcttgcaagaaaatatgat

SEQ ID NO: 218185 - DNA, 19 bp, Homo sapiens
  siRNA target sequence for AADAT (NM_016228.3,1048-1066).
ctccagtttaacaagttca

SEQ ID NO: 218186 - DNA, 19 bp, Homo sapiens
  siRNA target sequence for AADAT (NM_016228.3,1062-1080).
gttcagggtaccaacattt

SEQ ID NO: 218187 - DNA, 19 bp, Homo sapiens
  siRNA target sequence for AADAT (NM_016228.3,1145-1163).
ggttgagaataggattttt

SEQ ID NO: 218188 - DNA, 19 bp, Homo sapiens
  siRNA target sequence for AADAT (NM_016228.3,1149-1167).
gagaataggatttttaact

SEQ ID NO: 218189 - DNA, 19 bp, Homo sapiens
  siRNA target sequence for AADAT (NM_016228.3,1169-1187).
gtccaaaacccttaataga

SEQ ID NO: 218190 - DNA, 19 bp, Homo sapiens
  siRNA target sequence for AADAT (NM_016228.3,1177-1195).
cccttaatagagagagtta

SEQ ID NO: 218191 - DNA, 19 bp, Homo sapiens
  siRNA target sequence for AADAT (NM_016228.3,1178-1196).
ccttaatagagagagttat

SEQ ID NO: 218192 - DNA, 19 bp, Homo sapiens
  siRNA target sequence for AADAT (NM_016228.3,1232-1250).
cttttaaccagctcatgat

SEQ ID NO: 218193 - DNA, 19 bp, Homo sapiens
  siRNA target sequence for AADAT (NM_016228.3,1283-1301).
gtttcatggctcatgtaga

SEQ ID NO: 218194 - DNA, 19 bp, Homo sapiens
  siRNA target sequence for AADAT (NM_016228.3,1302-1320).
cagggttattgatttctat

SEQ ID NO: 218195 - DNA, 19 bp, Homo sapiens
  siRNA target sequence for AADAT (NM_016228.3,1322-1340).
gtaaccagaaggatgcaat

SEQ ID NO: 218196 - DNA, 19 bp, Homo sapiens
  siRNA target sequence for AADAT (NM_016228.3,1464-1482).
cgttaagatgggggtatta

SEQ ID NO: 218197 - DNA, 19 bp, Homo sapiens
  siRNA target sequence for AADAT (NM_016228.3,1465-1483).
gttaagatgggggtattaa

SEQ ID NO: 218198 - DNA, 19 bp, Homo sapiens
  siRNA target sequence for AADAT (NM_016228.3,1517-1535).
cagctcctagcccttactt

SEQ ID NO: 218199 - DNA, 19 bp, Homo sapiens
  siRNA target sequence for AADAT (NM_016228.3,1578-1596).
ggccttccaggtattagca

SEQ ID NO: 218200 - DNA, 19 bp, Homo sapiens
  siRNA target sequence for AADAT (NM_016228.3,1585-1603).
caggtattagcacaactta

SEQ ID NO: 218201 - DNA, 19 bp, Homo sapiens
  siRNA target sequence for AADAT (NM_016228.3,1587-1605).
ggtattagcacaacttata

SEQ ID NO: 218202 - DNA, 19 bp, Homo sapiens
  siRNA target sequence for AADAT (NM_016228.3,1588-1606).
gtattagcacaacttataa

SEQ ID NO: 218203 - DNA, 19 bp, Homo sapiens
  siRNA target sequence for GPT2 (NM_133443.1,328-346).
gctgcagcggggtatcaaa

SEQ ID NO: 218204 - DNA, 19 bp, Homo sapiens
  siRNA target sequence for GPT2 (NM_133443.1,329-347).
ctgcagcggggtatcaaaa

SEQ ID NO: 218205 - DNA, 19 bp, Homo sapiens
  siRNA target sequence for GPT2 (NM_133443.1,562-580).
caactgcatccgtgaagat

SEQ ID NO: 218206 - DNA, 19 bp, Homo sapiens
  siRNA target sequence for GPT2 (NM_133443.1,621-639).
cggaccccgacaacatcta

SEQ ID NO: 218207 - DNA, 19 bp, Homo sapiens
  siRNA target sequence for GPT2 (NM_133443.1,653-671).
gctagtgacggcatttcta

SEQ ID NO: 218208 - DNA, 19 bp, Homo sapiens
  siRNA target sequence for GPT2 (NM_133443.1,708-726).
cacggacaggtgtgatgat

SEQ ID NO: 218209 - DNA, 19 bp, Homo sapiens
  siRNA target sequence for GPT2 (NM_133443.1,773-791).
gacgccatccaggtgaatt

SEQ ID NO: 218210 - DNA, 19 bp, Homo sapiens
  siRNA target sequence for GPT2 (NM_133443.1,776-794).
gccatccaggtgaattact

SEQ ID NO: 218211 - DNA, 19 bp, Homo sapiens
  siRNA target sequence for GPT2 (NM_133443.1,813-831).
gctgggcgctgaatgtgaa

SEQ ID NO: 218212 - DNA, 19 bp, Homo sapiens
  siRNA target sequence for GPT2 (NM_133443.1,814-832).
ctgggcgctgaatgtgaat

SEQ ID NO: 218213 - DNA, 19 bp, Homo sapiens
  siRNA target sequence for GPT2 (NM_133443.1,875-893).
cctaaggtgctctgcataa

SEQ ID NO: 218214 - DNA, 19 bp, Homo sapiens
  siRNA target sequence for GPT2 (NM_133443.1,1324-1342).
gggtaatctggccaaaaaa

SEQ ID NO: 218215 - DNA, 19 bp, Homo sapiens
  siRNA target sequence for GPT2 (NM_133443.1,1353-1371).
cggaagacctgtttaacca

SEQ ID NO: 218216 - DNA, 19 bp, Homo sapiens
  siRNA target sequence for GPT2 (NM_133443.1,1370-1388).
caagtcccaggaattcact

SEQ ID NO: 218217 - DNA, 19 bp, Homo sapiens
  siRNA target sequence for GPT2 (NM_133443.1,1415-1433).
gccttccctcggatcttca

SEQ ID NO: 218218 - DNA, 19 bp, Homo sapiens
  siRNA target sequence for GPT2 (NM_133443.1,1454-1472).
gctgctcaggcccatcaaa

SEQ ID NO: 218219 - DNA, 19 bp, Homo sapiens
  siRNA target sequence for GPT2 (NM_133443.1,1475-1493).
gctccagacatgttctact

SEQ ID NO: 218220 - DNA, 19 bp, Homo sapiens
  siRNA target sequence for MGC15875 (NM_032921.1,707-725).
ctgtggcgagggcatttga

SEQ ID NO: 218221 - DNA, 19 bp, Homo sapiens
  siRNA target sequence for MGC15875 (NM_032921.1,728-746).
ccaccggcgttgagtactt

SEQ ID NO: 218222 - DNA, 19 bp, Homo sapiens
  siRNA target sequence for MGC15875 (NM_032921.1,731-749).
ccggcgttgagtacttcaa

SEQ ID NO: 218223 - DNA, 19 bp, Homo sapiens
  siRNA target sequence for MGC15875 (NM_032921.1,865-883).
ctcgggcagcaaaaaatca

SEQ ID NO: 218224 - DNA, 19 bp, Homo sapiens
  siRNA target sequence for MGC15875 (NM_032921.1,979-997).
gctgcctacttggtatcaa

SEQ ID NO: 218225 - DNA, 19 bp, Homo sapiens
  siRNA target sequence for MGC15875 (NM_032921.1,1000-1018).
ctgaaggagaactacgttt

SEQ ID NO: 218226 - DNA, 19 bp, Homo sapiens
  siRNA target sequence for MGC15875 (NM_153373.1,344-362).
cccaagggcagtacatgta

SEQ ID NO: 218227 - DNA, 19 bp, Homo sapiens
  siRNA target sequence for MGC15875 (NM_153373.1,377-395).
cagaatacatcgattgcat

SEQ ID NO: 218228 - DNA, 19 bp, Homo sapiens
  siRNA target sequence for MGC15875 (NM_153373.1,540-558).
gcagctctgtgtgttctat

SEQ ID NO: 218229 - DNA, 19 bp, Homo sapiens
  siRNA target sequence for MGC15875 (NM_153373.1,541-559).
cagctctgtgtgttctatt

SEQ ID NO: 218230 - DNA, 19 bp, Homo sapiens
  siRNA target sequence for MGC15875 (NM_153373.1,627-645).
ggacgtggtggtattagat

SEQ ID NO: 218231 - DNA, 19 bp, Homo sapiens
  siRNA target sequence for MGC15875 (NM_153373.1,630-648).
cgtggtggtattagatcat

SEQ ID NO: 218232 - DNA, 19 bp, Homo sapiens
  siRNA target sequence for MGC15875 (NM_153373.1,664-682).
ctgagctccctgattgaca

SEQ ID NO: 218233 - DNA, 19 bp, Homo sapiens
  siRNA target sequence for MGC15875 (NM_153373.1,679-697).
gacatcagtccctacaagt

SEQ ID NO: 218234 - DNA, 19 bp, Homo sapiens
  siRNA target sequence for MGC33309 (NM_152413.1,146-164).
gctagagggcagcttgtta

SEQ ID NO: 218235 - DNA, 19 bp, Homo sapiens
  siRNA target sequence for MGC33309 (NM_152413.1,147-165).
ctagagggcagcttgttaa

SEQ ID NO: 218236 - DNA, 19 bp, Homo sapiens
  siRNA target sequence for MGC33309 (NM_152413.1,150-168).
gagggcagcttgttaaaga

SEQ ID NO: 218237 - DNA, 19 bp, Homo sapiens
  siRNA target sequence for MGC33309 (NM_152413.1,158-176).
cttgttaaagacctacaaa

SEQ ID NO: 218238 - DNA, 19 bp, Homo sapiens
  siRNA target sequence for MGC33309 (NM_152413.1,161-179).
gttaaagacctacaaacaa

SEQ ID NO: 218239 - DNA, 19 bp, Homo sapiens
  siRNA target sequence for MGC33309 (NM_152413.1,167-185).
gacctacaaacaagatgat

SEQ ID NO: 218240 - DNA, 19 bp, Homo sapiens
  siRNA target sequence for MGC33309 (NM_152413.1,180-198).
gatgattacccgaacaaga

SEQ ID NO: 218241 - DNA, 19 bp, Homo sapiens
  siRNA target sequence for MGC33309 (NM_152413.1,183-201).
gattacccgaacaagatat

SEQ ID NO: 218242 - DNA, 19 bp, Homo sapiens
  siRNA target sequence for MGC33309 (NM_152413.1,266-284).
gactcgactacagatttca

SEQ ID NO: 218243 - DNA, 19 bp, Homo sapiens
  siRNA target sequence for MGC33309 (NM_152413.1,268-286).
ctcgactacagatttcaca

SEQ ID NO: 218244 - DNA, 19 bp, Homo sapiens
  siRNA target sequence for MGC33309 (NM_152413.1,291-309).
ccctccctgaattatgagt

SEQ ID NO: 218245 - DNA, 19 bp, Homo sapiens
  siRNA target sequence for MGC33309 (NM_152413.1,292-310).
cctccctgaattatgagta

SEQ ID NO: 218246 - DNA, 19 bp, Homo sapiens
  siRNA target sequence for MGC33309 (NM_152413.1,295-313).
ccctgaattatgagtactt

SEQ ID NO: 218247 - DNA, 19 bp, Homo sapiens
  siRNA target sequence for MGC33309 (NM_152413.1,317-335).
caccatgggcctgaaatca

SEQ ID NO: 218248 - DNA, 19 bp, Homo sapiens
  siRNA target sequence for MGC33309 (NM_152413.1,351-369).
ctagcactcctctttggaa

SEQ ID NO: 218249 - DNA, 19 bp, Homo sapiens
  siRNA target sequence for MGC33309 (NM_152413.1,441-459).
cttggcgtccagtttctca

SEQ ID NO: 218250 - DNA, 19 bp, Homo sapiens
  siRNA target sequence for MGC33309 (NM_152413.1,467-485).
gcataaggatgctcgtata

SEQ ID NO: 218251 - DNA, 19 bp, Homo sapiens
  siRNA target sequence for MGC33309 (NM_152413.1,474-492).
gatgctcgtatagtttaca

SEQ ID NO: 218252 - DNA, 19 bp, Homo sapiens
  siRNA target sequence for MGC33309 (NM_152413.1,477-495).
gctcgtatagtttacatca

SEQ ID NO: 218253 - DNA, 19 bp, Homo sapiens
  siRNA target sequence for MGC33309 (NM_152413.1,478-496).
ctcgtatagtttacatcat

SEQ ID NO: 218254 - DNA, 19 bp, Homo sapiens
  siRNA target sequence for MGC33309 (NM_152413.1,480-498).
cgtatagtttacatcatct

SEQ ID NO: 218255 - DNA, 19 bp, Homo sapiens
  siRNA target sequence for MGC33309 (NM_152413.1,536-554).
catgggctttacagtttat

SEQ ID NO: 218256 - DNA, 19 bp, Homo sapiens
  siRNA target sequence for MGC33309 (NM_152413.1,586-604).
gcatggaccccgacatact

SEQ ID NO: 218257 - DNA, 19 bp, Homo sapiens
  siRNA target sequence for MGC33309 (NM_152413.1,595-613).
ccgacatactcctcaatgt

SEQ ID NO: 218258 - DNA, 19 bp, Homo sapiens
  siRNA target sequence for MGC33309 (NM_152413.1,641-659).
ccttgtgatggggaacatt

SEQ ID NO: 218259 - DNA, 19 bp, Homo sapiens
  siRNA target sequence for MGC33309 (NM_152413.1,684-702).
gggtgggcaaagttgatgt

SEQ ID NO: 218260 - DNA, 19 bp, Homo sapiens
  siRNA target sequence for MGC33309 (NM_152413.1,744-762).
ccctgtcaaggtttataca

SEQ ID NO: 218261 - DNA, 19 bp, Homo sapiens
  siRNA target sequence for MGC33309 (NM_152413.1,787-805).
gaatcttacaatactttgt

SEQ ID NO: 218262 - DNA, 19 bp, Homo sapiens
  siRNA target sequence for MGC33309 (NM_152413.1,1217-1235).
ccccaagaacggtcagatt

SEQ ID NO: 218263 - DNA, 19 bp, Homo sapiens
  siRNA target sequence for MGC33309 (NM_152413.1,1246-1264).
gtatcaatgccaacaacat

SEQ ID NO: 218264 - DNA, 19 bp, Homo sapiens
  siRNA target sequence for MGC33309 (NM_152413.1,1255-1273).
ccaacaacataaattacat

SEQ ID NO: 218265 - DNA, 19 bp, Homo sapiens
  siRNA target sequence for NFS1 (NM_021100.3,473-491).
ggggtggcccgattctaca

SEQ ID NO: 218266 - DNA, 19 bp, Homo sapiens
  siRNA target sequence for NFS1 (NM_021100.3,516-534).
ccacccagacagaacacaa

SEQ ID NO: 218267 - DNA, 19 bp, Homo sapiens
  siRNA target sequence for NFS1 (NM_021100.3,638-656).
gctatccagccagatacta

SEQ ID NO: 218268 - DNA, 19 bp, Homo sapiens
  siRNA target sequence for NFS1 (NM_021100.3,666-684).
cagtcatgactgtgaacaa

SEQ ID NO: 218269 - DNA, 19 bp, Homo sapiens
  siRNA target sequence for NFS1 (NM_021100.3,713-731).
gaaatagggcggatttgca

SEQ ID NO: 218270 - DNA, 19 bp, Homo sapiens
  siRNA target sequence for NFS1 (NM_021100.3,729-747).
gcagttccagaaaggtata

SEQ ID NO: 218271 - DNA, 19 bp, Homo sapiens
  siRNA target sequence for NFS1 (NM_021100.3,730-748).
cagttccagaaaggtatat

SEQ ID NO: 218272 - DNA, 19 bp, Homo sapiens
  siRNA target sequence for NFS1 (NM_021100.3,820-838).
gagcattagtggtcacaaa

SEQ ID NO: 218273 - DNA, 19 bp, Homo sapiens
  siRNA target sequence for NFS1 (NM_021100.3,854-872).
ggggttggtgccatctaca

SEQ ID NO: 218274 - DNA, 19 bp, Homo sapiens
  siRNA target sequence for NFS1 (NM_021100.3,1041-1059).
cagagcggctgatacagaa

SEQ ID NO: 218275 - DNA, 19 bp, Homo sapiens
  siRNA target sequence for NFS1 (NM_021100.3,1045-1063).
gcggctgatacagaatata

SEQ ID NO: 218276 - DNA, 19 bp, Homo sapiens
  siRNA target sequence for NFS1 (NM_021100.3,1095-1113).
gggaccctaagcaccatta

SEQ ID NO: 218277 - DNA, 19 bp, Homo sapiens
  siRNA target sequence for NFS1 (NM_021100.3,1096-1114).
ggaccctaagcaccattat

SEQ ID NO: 218278 - DNA, 19 bp, Homo sapiens
  siRNA target sequence for NFS1 (NM_021100.3,1218-1236).
ccctggagccctcttatgt

SEQ ID NO: 218279 - DNA, 19 bp, Homo sapiens
  siRNA target sequence for NFS1 (NM_021100.3,1262-1280).
gatttagcgcactcttcta

SEQ ID NO: 218280 - DNA, 19 bp, Homo sapiens
  siRNA target sequence for PHACS (NM_032592.1,546-564).
ggtgatcctgccatgatct

SEQ ID NO: 218281 - DNA, 19 bp, Homo sapiens
  siRNA target sequence for PHACS (NM_032592.1,586-604).
cctctagaggaagaatgat

SEQ ID NO: 218282 - DNA, 19 bp, Homo sapiens
  siRNA target sequence for PHACS (NM_032592.1,589-607).
ctagaggaagaatgattaa

SEQ ID NO: 218283 - DNA, 19 bp, Homo sapiens
  siRNA target sequence for PHACS (NM_032592.1,678-696).
cccagtggcatcattaact

SEQ ID NO: 218284 - DNA, 19 bp, Homo sapiens
  siRNA target sequence for PHACS (NM_032592.1,1166-1184).
gaaccctctgggtgatgta

SEQ ID NO: 218285 - DNA, 19 bp, Homo sapiens
  siRNA target sequence for PHACS (NM_032592.1,1228-1246).
ggcacaggctgcatgtgat

SEQ ID NO: 218286 - DNA, 19 bp, Homo sapiens
  siRNA target sequence for PHACS (NM_032592.1,1229-1247).
gcacaggctgcatgtgatt

SEQ ID NO: 218287 - DNA, 19 bp, Homo sapiens
  siRNA target sequence for PHACS (NM_032592.1,1392-1410).
ggcacgctgtacacagaaa

SEQ ID NO: 218288 - DNA, 19 bp, Homo sapiens
  siRNA target sequence for PHACS (NM_032592.1,1396-1414).
cgctgtacacagaaaacca

SEQ ID NO: 218289 - DNA, 19 bp, Homo sapiens
  siRNA target sequence for PHACS (NM_032592.1,1523-1541).
gtacctgccggaaaaccat

SEQ ID NO: 218290 - DNA, 19 bp, Homo sapiens
  siRNA target sequence for PHACS (NM_032592.1,1611-1629).
cgtggggctggcttcttca

SEQ ID NO: 218291 - DNA, 19 bp, Homo sapiens
  siRNA target sequence for PHACS (NM_032592.1,1612-1630).
gtggggctggcttcttcat

SEQ ID NO: 218292 - DNA, 19 bp, Homo sapiens
  siRNA target sequence for PHACS (NM_032592.1,1633-1651).
gggttgacttgagaaagta

SEQ ID NO: 218293 - DNA, 19 bp, Homo sapiens
  siRNA target sequence for PHACS (NM_032592.1,1730-1748).
caaggccttcgagtgtaaa

SEQ ID NO: 218294 - DNA, 19 bp, Homo sapiens
  siRNA target sequence for SCLY (NM_016510.3,94-112).
ctcgccggagaggaaagtt

SEQ ID NO: 218295 - DNA, 19 bp, Homo sapiens
  siRNA target sequence for SCLY (NM_016510.3,96-114).
cgccggagaggaaagttta

SEQ ID NO: 218296 - DNA, 19 bp, Homo sapiens
  siRNA target sequence for SCLY (NM_016510.3,97-115).
gccggagaggaaagtttat

SEQ ID NO: 218297 - DNA, 19 bp, Homo sapiens
  siRNA target sequence for SCLY (NM_016510.3,98-116).
ccggagaggaaagtttata

SEQ ID NO: 218298 - DNA, 19 bp, Homo sapiens
  siRNA target sequence for SCLY (NM_016510.3,99-117).
cggagaggaaagtttatat

SEQ ID NO: 218299 - DNA, 19 bp, Homo sapiens
  siRNA target sequence for SCLY (NM_016510.3,229-247).
caaggatattataaatgca

SEQ ID NO: 218300 - DNA, 19 bp, Homo sapiens
  siRNA target sequence for SCLY (NM_016510.3,254-272).
gaaagcctcgcgaagatga

SEQ ID NO: 218301 - DNA, 19 bp, Homo sapiens
  siRNA target sequence for SCLY (NM_016510.3,275-293).
ggggggaaacctcaagata

SEQ ID NO: 218302 - DNA, 19 bp, Homo sapiens
  siRNA target sequence for SCLY (NM_016510.3,276-294).
gggggaaacctcaagatat

SEQ ID NO: 218303 - DNA, 19 bp, Homo sapiens
  siRNA target sequence for SCLY (NM_016510.3,277-295).
ggggaaacctcaagatata

SEQ ID NO: 218304 - DNA, 19 bp, Homo sapiens
  siRNA target sequence for SCLY (NM_016510.3,279-297).
ggaaacctcaagatataat

SEQ ID NO: 218305 - DNA, 19 bp, Homo sapiens
  siRNA target sequence for SCLY (NM_016510.3,317-335).
gagtcaaataatttagtaa

SEQ ID NO: 218306 - DNA, 19 bp, Homo sapiens
  siRNA target sequence for SCLY (NM_016510.3,337-355).
ccattctgtggtgaaacat

SEQ ID NO: 218307 - DNA, 19 bp, Homo sapiens
  siRNA target sequence for SCLY (NM_016510.3,416-434).
gccaagccccatttcatta

SEQ ID NO: 218308 - DNA, 19 bp, Homo sapiens
  siRNA target sequence for SCLY (NM_016510.3,762-780).
gcgtggacttccttacaat

SEQ ID NO: 218309 - DNA, 19 bp, Homo sapiens
  siRNA target sequence for SCLY (NM_016510.3,777-795).
caatcgtggggcacaagtt

SEQ ID NO: 218310 - DNA, 19 bp, Homo sapiens
  siRNA target sequence for SCLY (NM_016510.3,804-822).
ccaggattggcgcacttta

SEQ ID NO: 218311 - DNA, 19 bp, Homo sapiens
  siRNA target sequence for SCLY (NM_016510.3,805-823).
caggattggcgcactttat

SEQ ID NO: 218312 - DNA, 19 bp, Homo sapiens
  siRNA target sequence for SCLY (NM_016510.3,808-826).
gattggcgcactttatata

SEQ ID NO: 218313 - DNA, 19 bp, Homo sapiens
  siRNA target sequence for SCLY (NM_016510.3,853-871).
ctaccctatgctatttgga

SEQ ID NO: 218314 - DNA, 19 bp, Homo sapiens
  siRNA target sequence for SCLY (NM_016510.3,873-891).
gtggacaagaacggaattt

SEQ ID NO: 218315 - DNA, 19 bp, Homo sapiens
  siRNA target sequence for SCLY (NM_016510.3,1079-1097).
cttcccaatacctgtaact

SEQ ID NO: 218316 - DNA, 19 bp, Homo sapiens
  siRNA target sequence for TALDO1 (NM_006755.1,281-299).
ggaccagattaaaaatgct

SEQ ID NO: 218317 - DNA, 19 bp, Homo sapiens
  siRNA target sequence for TALDO1 (NM_006755.1,317-335).
gttgtttggagcagaaata

SEQ ID NO: 218318 - DNA, 19 bp, Homo sapiens
  siRNA target sequence for TALDO1 (NM_006755.1,353-371).
ccgagtatccacagaagta

SEQ ID NO: 218319 - DNA, 19 bp, Homo sapiens
  siRNA target sequence for TALDO1 (NM_006755.1,355-373).
gagtatccacagaagtaga

SEQ ID NO: 218320 - DNA, 19 bp, Homo sapiens
  siRNA target sequence for TALDO1 (NM_006755.1,374-392).
cgcaaggctctcctttgat

SEQ ID NO: 218321 - DNA, 19 bp, Homo sapiens
  siRNA target sequence for TALDO1 (NM_006755.1,375-393).
gcaaggctctcctttgata

SEQ ID NO: 218322 - DNA, 19 bp, Homo sapiens
  siRNA target sequence for TALDO1 (NM_006755.1,421-439).
ggctcatcgagctctacaa

SEQ ID NO: 218323 - DNA, 19 bp, Homo sapiens
  siRNA target sequence for TALDO1 (NM_006755.1,455-473).
caaggaccgaattcttata

SEQ ID NO: 218324 - DNA, 19 bp, Homo sapiens
  siRNA target sequence for TALDO1 (NM_006755.1,481-499).
catcaacctgggaaggaat

SEQ ID NO: 218325 - DNA, 19 bp, Homo sapiens
  siRNA target sequence for TALDO1 (NM_006755.1,541-559).
gcaacatgacgttactctt

SEQ ID NO: 218326 - DNA, 19 bp, Homo sapiens
  siRNA target sequence for TALDO1 (NM_006755.1,618-636).
gttgggcgcatccttgatt

SEQ ID NO: 218327 - DNA, 19 bp, Homo sapiens
  siRNA target sequence for TALDO1 (NM_006755.1,678-696).
gaagaccctggggtaaaga

SEQ ID NO: 218328 - DNA, 19 bp, Homo sapiens
  siRNA target sequence for TALDO1 (NM_006755.1,689-707).
ggtaaagagtgtcactaaa

SEQ ID NO: 218329 - DNA, 19 bp, Homo sapiens
  siRNA target sequence for TALDO1 (NM_006755.1,697-715).
gtgtcactaaaatctacaa

SEQ ID NO: 218330 - DNA, 19 bp, Homo sapiens
  siRNA target sequence for TALDO1 (NM_006755.1,699-717).
gtcactaaaatctacaact

SEQ ID NO: 218331 - DNA, 19 bp, Homo sapiens
  siRNA target sequence for TALDO1 (NM_006755.1,722-740).
caagaagtttagctacaaa

SEQ ID NO: 218332 - DNA, 19 bp, Homo sapiens
  siRNA target sequence for TALDO1 (NM_006755.1,728-746).
gtttagctacaaaaccatt

SEQ ID NO: 218333 - DNA, 19 bp, Homo sapiens
  siRNA target sequence for TALDO1 (NM_006755.1,733-751).
gctacaaaaccattgtcat

SEQ ID NO: 218334 - DNA, 19 bp, Homo sapiens
  siRNA target sequence for TALDO1 (NM_006755.1,1021-1039).
ggatgctgacagaacgaat

SEQ ID NO: 218335 - DNA, 19 bp, Homo sapiens
  siRNA target sequence for ACAT2 (NM_005891.1,85-103).
catcataggttccttcaat

SEQ ID NO: 218336 - DNA, 19 bp, Homo sapiens
  siRNA target sequence for ACAT2 (NM_005891.1,138-156).
gctccactgtcatcaaaga

SEQ ID NO: 218337 - DNA, 19 bp, Homo sapiens
  siRNA target sequence for ACAT2 (NM_005891.1,139-157).
ctccactgtcatcaaagaa

SEQ ID NO: 218338 - DNA, 19 bp, Homo sapiens
  siRNA target sequence for ACAT2 (NM_005891.1,174-192).
ctgtggctccggaagatgt

SEQ ID NO: 218339 - DNA, 19 bp, Homo sapiens
  siRNA target sequence for ACAT2 (NM_005891.1,624-642).
gccattttgacaaagagat

SEQ ID NO: 218340 - DNA, 19 bp, Homo sapiens
  siRNA target sequence for ACAT2 (NM_005891.1,660-678).
caactagaaaaggtcttat

SEQ ID NO: 218341 - DNA, 19 bp, Homo sapiens
  siRNA target sequence for ACAT2 (NM_005891.1,663-681).
ctagaaaaggtcttattga

SEQ ID NO: 218342 - DNA, 19 bp, Homo sapiens
  siRNA target sequence for ACAT2 (NM_005891.1,736-754).
gctaaagccttactttctt

SEQ ID NO: 218343 - DNA, 19 bp, Homo sapiens
  siRNA target sequence for ACAT2 (NM_005891.1,742-760).
gccttactttcttactgat

SEQ ID NO: 218344 - DNA, 19 bp, Homo sapiens
  siRNA target sequence for ACAT2 (NM_005891.1,835-853).
gtcagaagctgataaacgt

SEQ ID NO: 218345 - DNA, 19 bp, Homo sapiens
  siRNA target sequence for ACAT2 (NM_005891.1,897-915).
gtgtggagccttccattat

SEQ ID NO: 218346 - DNA, 19 bp, Homo sapiens
  siRNA target sequence for ACAT2 (NM_005891.1,924-942).
gaccaattccagccataaa

SEQ ID NO: 218347 - DNA, 19 bp, Homo sapiens
  siRNA target sequence for ACAT2 (NM_005891.1,943-961).
gcaagctgttacaaaagca

SEQ ID NO: 218348 - DNA, 19 bp, Homo sapiens
  siRNA target sequence for ACAT2 (NM_005891.1,963-981).
gttggtcactggaagatgt

SEQ ID NO: 218349 - DNA, 19 bp, Homo sapiens
  siRNA target sequence for ACAT2 (NM_005891.1,971-989).
ctggaagatgttgacatat

SEQ ID NO: 218350 - DNA, 19 bp, Homo sapiens
  siRNA target sequence for ACAT2 (NM_005891.1,1020-1038).
ctgctgcaatagttaaaga

SEQ ID NO: 218351 - DNA, 19 bp, Homo sapiens
  siRNA target sequence for ACAT2 (NM_005891.1,1107-1125).
catctggctgtcgaattct

SEQ ID NO: 218352 - DNA, 19 bp, Homo sapiens
  siRNA target sequence for ACAT2 (NM_005891.1,1110-1128).
ctggctgtcgaattcttgt

SEQ ID NO: 218353 - DNA, 19 bp, Homo sapiens
  siRNA target sequence for ALG2 (NM_033087.1,152-170).
gggtgtagcgtgaagatct

SEQ ID NO: 218354 - DNA, 19 bp, Homo sapiens
  siRNA target sequence for ALG2 (NM_033087.1,290-308).
gcctacgtgcgcatggttt

SEQ ID NO: 218355 - DNA, 19 bp, Homo sapiens
  siRNA target sequence for ALG2 (NM_033087.1,291-309).
cctacgtgcgcatggtttt

SEQ ID NO: 218356 - DNA, 19 bp, Homo sapiens
  siRNA target sequence for ALG2 (NM_033087.1,401-419).
gctagacggcggaagaaga

SEQ ID NO: 218357 - DNA, 19 bp, Homo sapiens
  siRNA target sequence for ALG2 (NM_033087.1,402-420).
ctagacggcggaagaagat

SEQ ID NO: 218358 - DNA, 19 bp, Homo sapiens
  siRNA target sequence for ALG2 (NM_033087.1,407-425).
cggcggaagaagatcctat

SEQ ID NO: 218359 - DNA, 19 bp, Homo sapiens
  siRNA target sequence for ALG2 (NM_033087.1,408-426).
ggcggaagaagatcctatt

SEQ ID NO: 218360 - DNA, 19 bp, Homo sapiens
  siRNA target sequence for ALG2 (NM_033087.1,409-427).
gcggaagaagatcctattt

SEQ ID NO: 218361 - DNA, 19 bp, Homo sapiens
  siRNA target sequence for ALG2 (NM_033087.1,410-428).
cggaagaagatcctatttt

SEQ ID NO: 218362 - DNA, 19 bp, Homo sapiens
  siRNA target sequence for ALG2 (NM_033087.1,411-429).
ggaagaagatcctatttta

SEQ ID NO: 218363 - DNA, 19 bp, Homo sapiens
  siRNA target sequence for ALG2 (NM_033087.1,531-549).
cagactgcatcttagtcaa

SEQ ID NO: 218364 - DNA, 19 bp, Homo sapiens
  siRNA target sequence for ALG2 (NM_033087.1,750-768).
cactggaagccctagtaca

SEQ ID NO: 218365 - DNA, 19 bp, Homo sapiens
  siRNA target sequence for ALG2 (NM_033087.1,767-785).
cagctgcgtggaagattga

SEQ ID NO: 218366 - DNA, 19 bp, Homo sapiens
  siRNA target sequence for ALG2 (NM_033087.1,769-787).
gctgcgtggaagattgaca

SEQ ID NO: 218367 - DNA, 19 bp, Homo sapiens
  siRNA target sequence for ALG2 (NM_033087.1,770-788).
ctgcgtggaagattgacat

SEQ ID NO: 218368 - DNA, 19 bp, Homo sapiens
  siRNA target sequence for ALG2 (NM_033087.1,857-875).
gaacattatcaggaattga

SEQ ID NO: 218369 - DNA, 19 bp, Homo sapiens
  siRNA target sequence for ALG2 (NM_033087.1,896-914).
gaccttggccagtatgtga

SEQ ID NO: 218370 - DNA, 19 bp, Homo sapiens
  siRNA target sequence for ALG2 (NM_033087.1,963-981).
gctgcacgtgtgtgcttta

SEQ ID NO: 218371 - DNA, 19 bp, Homo sapiens
  siRNA target sequence for ALG2 (NM_033087.1,967-985).
cacgtgtgtgctttacaca

SEQ ID NO: 218372 - DNA, 19 bp, Homo sapiens
  siRNA target sequence for ALG2 (NM_033087.1,1038-1056).
gcccagtcattgctgttaa

SEQ ID NO: 218373 - DNA, 19 bp, Homo sapiens
  siRNA target sequence for ALG2 (NM_033087.1,1153-1171).
ccgtgaaccttccttaaaa

SEQ ID NO: 218374 - DNA, 19 bp, Homo sapiens
  siRNA target sequence for ALG2 (NM_033087.1,1238-1256).
cagctctaccgatatgtta

SEQ ID NO: 218375 - DNA, 19 bp, Homo sapiens
  siRNA target sequence for ALG2 (NM_033087.1,1243-1261).
ctaccgatatgttaccaaa

SEQ ID NO: 218376 - DNA, 19 bp, Homo sapiens
  siRNA target sequence for ALG2 (NM_197973.1,489-507).
gcccctattaaaacttgta

SEQ ID NO: 218377 - DNA, 19 bp, Homo sapiens
  siRNA target sequence for ALG2 (NM_197973.1,513-531).
ctccccattggtttttgga

SEQ ID NO: 218378 - DNA, 19 bp, Homo sapiens
  siRNA target sequence for C20orf155 (NM_019095.3,331-349).
catggacaatcccgaatat

SEQ ID NO: 218379 - DNA, 19 bp, Homo sapiens
  siRNA target sequence for C20orf155 (NM_019095.3,334-352).
ggacaatcccgaatatgtt

SEQ ID NO: 218380 - DNA, 19 bp, Homo sapiens
  siRNA target sequence for C20orf155 (NM_019095.3,350-368).
gttgtcaatgacgagaatt

SEQ ID NO: 218381 - DNA, 19 bp, Homo sapiens
  siRNA target sequence for C20orf155 (NM_019095.3,376-394).
ccccagttctgggctattt

SEQ ID NO: 218382 - DNA, 19 bp, Homo sapiens
  siRNA target sequence for C20orf155 (NM_019095.3,378-396).
ccagttctgggctatttga

SEQ ID NO: 218383 - DNA, 19 bp, Homo sapiens
  siRNA target sequence for C20orf155 (NM_019095.3,379-397).
cagttctgggctatttgat

SEQ ID NO: 218384 - DNA, 19 bp, Homo sapiens
  siRNA target sequence for C20orf155 (NM_019095.3,381-399).
gttctgggctatttgatta

SEQ ID NO: 218385 - DNA, 19 bp, Homo sapiens
  siRNA target sequence for C20orf155 (NM_019095.3,386-404).
gggctatttgattattgaa

SEQ ID NO: 218386 - DNA, 19 bp, Homo sapiens
  siRNA target sequence for C20orf155 (NM_019095.3,388-406).
gctatttgattattgaaga

SEQ ID NO: 218387 - DNA, 19 bp, Homo sapiens
  siRNA target sequence for C20orf155 (NM_019095.3,441-459).
gctggactaacagatttgt

SEQ ID NO: 218388 - DNA, 19 bp, Homo sapiens
  siRNA target sequence for C20orf155 (NM_019095.3,442-460).
ctggactaacagatttgtt

SEQ ID NO: 218389 - DNA, 19 bp, Homo sapiens
  siRNA target sequence for C20orf155 (NM_019095.3,477-495).
cgaaactgggccaatcaaa

SEQ ID NO: 218390 - DNA, 19 bp, Homo sapiens
  siRNA target sequence for C20orf155 (NM_019095.3,482-500).
ctgggccaatcaaagatca

SEQ ID NO: 218391 - DNA, 19 bp, Homo sapiens
  siRNA target sequence for C20orf155 (NM_019095.3,525-543).
cttgctgataaaatactta

SEQ ID NO: 218392 - DNA, 19 bp, Homo sapiens
  siRNA target sequence for C20orf155 (NM_019095.3,528-546).
gctgataaaatacttatca

SEQ ID NO: 218393 - DNA, 19 bp, Homo sapiens
  siRNA target sequence for C20orf155 (NM_019095.3,531-549).
gataaaatacttatcagta

SEQ ID NO: 218394 - DNA, 19 bp, Homo sapiens
  siRNA target sequence for C20orf155 (NM_019095.3,563-581).
cttgacctatgcagatctt

SEQ ID NO: 218395 - DNA, 19 bp, Homo sapiens
  siRNA target sequence for C20orf155 (NM_019095.3,592-610).
cacttacttacatgatcat

SEQ ID NO: 218396 - DNA, 19 bp, Homo sapiens
  siRNA target sequence for C20orf155 (NM_019095.3,605-623).
gatcatttcgagagatgta

SEQ ID NO: 218397 - DNA, 19 bp, Homo sapiens
  siRNA target sequence for C20orf155 (NM_019095.3,710-728).
cactgctaggttaaaacca

SEQ ID NO: 218398 - DNA, 19 bp, Homo sapiens
  siRNA target sequence for C20orf155 (NM_019095.3,715-733).
ctaggttaaaaccaacatt

SEQ ID NO: 218399 - DNA, 19 bp, Homo sapiens
  siRNA target sequence for C20orf155 (NM_019095.3,751-769).
cagcagtccagttaatctt

SEQ ID NO: 218400 - DNA, 19 bp, Homo sapiens
  siRNA target sequence for C20orf155 (NM_019095.3,803-821).
ctatgctgacagcatttat

SEQ ID NO: 218401 - DNA, 19 bp, Homo sapiens
  siRNA target sequence for C20orf155 (NM_019095.3,815-833).
catttatcttcagatacta

SEQ ID NO: 218402 - DNA, 19 bp, Homo sapiens
  siRNA target sequence for C20orf155 (NM_019095.3,858-876).
gctgcatcagcttatagtt

SEQ ID NO: 218403 - DNA, 19 bp, Homo sapiens
  siRNA target sequence for C20orf155 (NM_019095.3,859-877).
ctgcatcagcttatagtta

SEQ ID NO: 218404 - DNA, 19 bp, Homo sapiens
  siRNA target sequence for C20orf155 (NM_019095.3,861-879).
gcatcagcttatagttact

SEQ ID NO: 218405 - DNA, 19 bp, Homo sapiens
  siRNA target sequence for C20orf155 (NM_019095.3,896-914).
gactgttcaggtgataaaa

SEQ ID NO: 218406 - DNA, 19 bp, Homo sapiens
  siRNA target sequence for C20orf155 (NM_019095.3,900-918).
gttcaggtgataaaagact

SEQ ID NO: 218407 - DNA, 19 bp, Homo sapiens
  siRNA target sequence for CARKL (NM_013276.1,278-296).
gagcaggatgtgagtagaa

SEQ ID NO: 218408 - DNA, 19 bp, Homo sapiens
  siRNA target sequence for CARKL (NM_013276.1,386-404).
ggagtcgtgttttggaaaa

SEQ ID NO: 218409 - DNA, 19 bp, Homo sapiens
  siRNA target sequence for CARKL (NM_013276.1,495-513).
gatgtagcagcgaattcct

SEQ ID NO: 218410 - DNA, 19 bp, Homo sapiens
  siRNA target sequence for CARKL (NM_013276.1,563-581).
ggctgtgcaaccatcttct

SEQ ID NO: 218411 - DNA, 19 bp, Homo sapiens
  siRNA target sequence for CARKL (NM_013276.1,630-648).
gtaccatccacgactatgt

SEQ ID NO: 218412 - DNA, 19 bp, Homo sapiens
  siRNA target sequence for CARKL (NM_013276.1,702-720).
ccagctggggctatttcaa

SEQ ID NO: 218413 - DNA, 19 bp, Homo sapiens
  siRNA target sequence for CARKL (NM_013276.1,884-902).
caggcctctgtctattcct

SEQ ID NO: 218414 - DNA, 19 bp, Homo sapiens
  siRNA target sequence for CARKL (NM_013276.1,1311-1329).
gccgaggcattgttcagaa

SEQ ID NO: 218415 - DNA, 19 bp, Homo sapiens
  siRNA target sequence for CARKL (NM_013276.1,1520-1538).
ctcaaccagaaggaatctt

SEQ ID NO: 218416 - DNA, 19 bp, Homo sapiens
  siRNA target sequence for CAS1 (NM_022900.3,335-353).
ccgctaccgaggcaatgat

SEQ ID NO: 218417 - DNA, 19 bp, Homo sapiens
  siRNA target sequence for CAS1 (NM_022900.3,336-354).
cgctaccgaggcaatgatt

SEQ ID NO: 218418 - DNA, 19 bp, Homo sapiens
  siRNA target sequence for CAS1 (NM_022900.3,403-421).
ggcaacctcacagttgtat

SEQ ID NO: 218419 - DNA, 19 bp, Homo sapiens
  siRNA target sequence for CAS1 (NM_022900.3,405-423).
caacctcacagttgtatga

SEQ ID NO: 218420 - DNA, 19 bp, Homo sapiens
  siRNA target sequence for CAS1 (NM_022900.3,415-433).
gttgtatgatgcataaata

SEQ ID NO: 218421 - DNA, 19 bp, Homo sapiens
  siRNA target sequence for CAS1 (NM_022900.3,462-480).
gtagataaacatattgcat

SEQ ID NO: 218422 - DNA, 19 bp, Homo sapiens
  siRNA target sequence for CAS1 (NM_022900.3,494-512).
cagaattcgtcaattgttt

SEQ ID NO: 218423 - DNA, 19 bp, Homo sapiens
  siRNA target sequence for CAS1 (NM_022900.3,585-603).
gacaagactgcatcagtta

SEQ ID NO: 218424 - DNA, 19 bp, Homo sapiens
  siRNA target sequence for CAS1 (NM_022900.3,587-605).
caagactgcatcagttaaa

SEQ ID NO: 218425 - DNA, 19 bp, Homo sapiens
  siRNA target sequence for CAS1 (NM_022900.3,627-645).
gaagttaatggttctatga

SEQ ID NO: 218426 - DNA, 19 bp, Homo sapiens
  siRNA target sequence for CAS1 (NM_022900.3,637-655).
gttctatgaaacagtgtat

SEQ ID NO: 218427 - DNA, 19 bp, Homo sapiens
  siRNA target sequence for CAS1 (NM_022900.3,640-658).
ctatgaaacagtgtatcaa

SEQ ID NO: 218428 - DNA, 19 bp, Homo sapiens
  siRNA target sequence for CAS1 (NM_022900.3,662-680).
gtggactgaggattccatt

SEQ ID NO: 218429 - DNA, 19 bp, Homo sapiens
  siRNA target sequence for CAS1 (NM_022900.3,711-729).
gccacatggtccatcaaga

SEQ ID NO: 218430 - DNA, 19 bp, Homo sapiens
  siRNA target sequence for CAS1 (NM_022900.3,718-736).
ggtccatcaagattcacaa

SEQ ID NO: 218431 - DNA, 19 bp, Homo sapiens
  siRNA target sequence for CAS1 (NM_022900.3,719-737).
gtccatcaagattcacaat

SEQ ID NO: 218432 - DNA, 19 bp, Homo sapiens
  siRNA target sequence for CAS1 (NM_022900.3,742-760).
gcagtgaagcgctttctca

SEQ ID NO: 218433 - DNA, 19 bp, Homo sapiens
  siRNA target sequence for CAS1 (NM_022900.3,745-763).
gtgaagcgctttctcaata

SEQ ID NO: 218434 - DNA, 19 bp, Homo sapiens
  siRNA target sequence for CAS1 (NM_022900.3,747-765).
gaagcgctttctcaatata

SEQ ID NO: 218435 - DNA, 19 bp, Homo sapiens
  siRNA target sequence for CAS1 (NM_022900.3,781-799).
ccatagcaccacttttaga

SEQ ID NO: 218436 - DNA, 19 bp, Homo sapiens
  siRNA target sequence for CAS1 (NM_022900.3,787-805).
caccacttttagaaaaatt

SEQ ID NO: 218437 - DNA, 19 bp, Homo sapiens
  siRNA target sequence for CAS1 (NM_022900.3,806-824).
ggcaaagactagtgatgtt

SEQ ID NO: 218438 - DNA, 19 bp, Homo sapiens
  siRNA target sequence for CAS1 (NM_022900.3,807-825).
gcaaagactagtgatgttt

SEQ ID NO: 218439 - DNA, 19 bp, Homo sapiens
  siRNA target sequence for CAS1 (NM_022900.3,808-826).
caaagactagtgatgttta

SEQ ID NO: 218440 - DNA, 19 bp, Homo sapiens
  siRNA target sequence for CAS1 (NM_022900.3,846-864).
gtttatgaagatctattaa

SEQ ID NO: 218441 - DNA, 19 bp, Homo sapiens
  siRNA target sequence for CAS1 (NM_022900.3,881-899).
gatcactaatgagaagata

SEQ ID NO: 218442 - DNA, 19 bp, Homo sapiens
  siRNA target sequence for CAS1 (NM_022900.3,884-902).
cactaatgagaagatagat

SEQ ID NO: 218443 - DNA, 19 bp, Homo sapiens
  siRNA target sequence for CAS1 (NM_022900.3,893-911).
gaagatagatgcttacaat

SEQ ID NO: 218444 - DNA, 19 bp, Homo sapiens
  siRNA target sequence for CAS1 (NM_022900.3,915-933).
gctgcagtcagtattttga

SEQ ID NO: 218445 - DNA, 19 bp, Homo sapiens
  siRNA target sequence for CAS1 (NM_022900.3,921-939).
gtcagtattttgaatagta

SEQ ID NO: 218446 - DNA, 19 bp, Homo sapiens
  siRNA target sequence for CAS1 (NM_022900.3,1015-1033).
ctttggatggcttacatct

SEQ ID NO: 218447 - DNA, 19 bp, Homo sapiens
  siRNA target sequence for CAS1 (NM_022900.3,1038-1056).
gaatcgagcagagaaacta

SEQ ID NO: 218448 - DNA, 19 bp, Homo sapiens
  siRNA target sequence for CAS1 (NM_022900.3,1048-1066).
gagaaactactgcaatgat

SEQ ID NO: 218449 - DNA, 19 bp, Homo sapiens
  siRNA target sequence for CAS1 (NM_022900.3,1054-1072).
ctactgcaatgattcttat

SEQ ID NO: 218450 - DNA, 19 bp, Homo sapiens
  siRNA target sequence for CAS1 (NM_022900.3,1060-1078).
caatgattcttatgaatgt

SEQ ID NO: 218451 - DNA, 19 bp, Homo sapiens
  siRNA target sequence for CAS1 (NM_022900.3,1126-1144).
ctcggcctcctgttactct

SEQ ID NO: 218452 - DNA, 19 bp, Homo sapiens
  siRNA target sequence for CAS1 (NM_022900.3,1132-1150).
ctcctgttactctcataca

SEQ ID NO: 218453 - DNA, 19 bp, Homo sapiens
  siRNA target sequence for CAS1 (NM_022900.3,1134-1152).
cctgttactctcatacaga

SEQ ID NO: 218454 - DNA, 19 bp, Homo sapiens
  siRNA target sequence for CAS1 (NM_022900.3,1135-1153).
ctgttactctcatacagaa

SEQ ID NO: 218455 - DNA, 19 bp, Homo sapiens
  siRNA target sequence for CAS1 (NM_022900.3,1151-1169).
gaagctagctgcttgtttt

SEQ ID NO: 218456 - DNA, 19 bp, Homo sapiens
  siRNA target sequence for CAS1 (NM_022900.3,1205-1223).
cataattcatcgtaatgct

SEQ ID NO: 218457 - DNA, 19 bp, Homo sapiens
  siRNA target sequence for CAS1 (NM_022900.3,1232-1250).
gaataagccgtgtactgat

SEQ ID NO: 218458 - DNA, 19 bp, Homo sapiens
  siRNA target sequence for CAS1 (NM_022900.3,1238-1256).
gccgtgtactgatttggaa

SEQ ID NO: 218459 - DNA, 19 bp, Homo sapiens
  siRNA target sequence for CAS1 (NM_022900.3,1335-1353).
ggcctgattatggcatatt

SEQ ID NO: 218460 - DNA, 19 bp, Homo sapiens
  siRNA target sequence for CAS1 (NM_022900.3,1336-1354).
gcctgattatggcatattt

SEQ ID NO: 218461 - DNA, 19 bp, Homo sapiens
  siRNA target sequence for CAS1 (NM_022900.3,1340-1358).
gattatggcatatttctat

SEQ ID NO: 218462 - DNA, 19 bp, Homo sapiens
  siRNA target sequence for CAS1 (NM_022900.3,1369-1387).
gtgcaaatctgttcatgaa

SEQ ID NO: 218463 - DNA, 19 bp, Homo sapiens
  siRNA target sequence for CAS1 (NM_022900.3,1394-1412).
caaattttatacacattca

SEQ ID NO: 218464 - DNA, 19 bp, Homo sapiens
  siRNA target sequence for CAS1 (NM_022900.3,1411-1429).
catctttctttattccaat

SEQ ID NO: 218465 - DNA, 19 bp, Homo sapiens
  siRNA target sequence for CAS1 (NM_022900.3,1476-1494).
gagactaaagtattaaata

SEQ ID NO: 218466 - DNA, 19 bp, Homo sapiens
  siRNA target sequence for CAS1 (NM_022900.3,1520-1538).
ctggatgcaacttgtgatt

SEQ ID NO: 218467 - DNA, 19 bp, Homo sapiens
  siRNA target sequence for CAS1 (NM_022900.3,1550-1568).
catttctggagcaagtaca

SEQ ID NO: 218468 - DNA, 19 bp, Homo sapiens
  siRNA target sequence for CAS1 (NM_022900.3,1599-1617).
ctggttgctgcatatttat

SEQ ID NO: 218469 - DNA, 19 bp, Homo sapiens
  siRNA target sequence for CAS1 (NM_022900.3,1626-1644).
gggtatgggcatttctcat

SEQ ID NO: 218470 - DNA, 19 bp, Homo sapiens
  siRNA target sequence for CAS1 (NM_022900.3,1627-1645).
ggtatgggcatttctcata

SEQ ID NO: 218471 - DNA, 19 bp, Homo sapiens
  siRNA target sequence for CAS1 (NM_022900.3,1688-1706).
ggttttatttcgtctcaat

SEQ ID NO: 218472 - DNA, 19 bp, Homo sapiens
  siRNA target sequence for CAS1 (NM_022900.3,1721-1739).
gttatgtatagtaatggat

SEQ ID NO: 218473 - DNA, 19 bp, Homo sapiens
  siRNA target sequence for CAS1 (NM_022900.3,1737-1755).
gatcgaccttatcaattct

SEQ ID NO: 218474 - DNA, 19 bp, Homo sapiens
  siRNA target sequence for CAS1 (NM_022900.3,1784-1802).
gttcatggtcatatatgtt

SEQ ID NO: 218475 - DNA, 19 bp, Homo sapiens
  siRNA target sequence for CAS1 (NM_022900.3,1787-1805).
catggtcatatatgttact

SEQ ID NO: 218476 - DNA, 19 bp, Homo sapiens
  siRNA target sequence for CAS1 (NM_022900.3,1793-1811).
catatatgttactttagca

SEQ ID NO: 218477 - DNA, 19 bp, Homo sapiens
  siRNA target sequence for CAS1 (NM_022900.3,1809-1827).
gcactatggccacaaataa

SEQ ID NO: 218478 - DNA, 19 bp, Homo sapiens
  siRNA target sequence for CAS1 (NM_022900.3,1816-1834).
ggccacaaataatccaaaa

SEQ ID NO: 218479 - DNA, 19 bp, Homo sapiens
  siRNA target sequence for CAS1 (NM_022900.3,1858-1876).
ggcattttggcttactgtt

SEQ ID NO: 218480 - DNA, 19 bp, Homo sapiens
  siRNA target sequence for CAS1 (NM_022900.3,1885-1903).
gctttttgctgttattcat

SEQ ID NO: 218481 - DNA, 19 bp, Homo sapiens
  siRNA target sequence for CAS1 (NM_022900.3,1954-1972).
ggccattgtccaagtgttt

SEQ ID NO: 218482 - DNA, 19 bp, Homo sapiens
  siRNA target sequence for CAS1 (NM_022900.3,2012-2030).
gaggttagaccgttatgta

SEQ ID NO: 218483 - DNA, 19 bp, Homo sapiens
  siRNA target sequence for CAS1 (NM_022900.3,2014-2032).
ggttagaccgttatgtagt

SEQ ID NO: 218484 - DNA, 19 bp, Homo sapiens
  siRNA target sequence for CAS1 (NM_022900.3,2015-2033).
gttagaccgttatgtagtt

SEQ ID NO: 218485 - DNA, 19 bp, Homo sapiens
  siRNA target sequence for CAS1 (NM_022900.3,2040-2058).
ggaatgctgtttgctttta

SEQ ID NO: 218486 - DNA, 19 bp, Homo sapiens
  siRNA target sequence for CAS1 (NM_022900.3,2072-2090).
gcagaagcgtcaaatactt

SEQ ID NO: 218487 - DNA, 19 bp, Homo sapiens
  siRNA target sequence for CAS1 (NM_022900.3,2073-2091).
cagaagcgtcaaatacttt

SEQ ID NO: 218488 - DNA, 19 bp, Homo sapiens
  siRNA target sequence for CAS1 (NM_022900.3,2075-2093).
gaagcgtcaaatactttct

SEQ ID NO: 218489 - DNA, 19 bp, Homo sapiens
  siRNA target sequence for CAS1 (NM_022900.3,2098-2116).
gaaagggtgaacctctttt

SEQ ID NO: 218490 - DNA, 19 bp, Homo sapiens
  siRNA target sequence for CAS1 (NM_022900.3,2102-2120).
gggtgaacctcttttttca

SEQ ID NO: 218491 - DNA, 19 bp, Homo sapiens
  siRNA target sequence for CAS1 (NM_022900.3,2141-2159).
gttgtttatttcagtagtt

SEQ ID NO: 218492 - DNA, 19 bp, Homo sapiens
  siRNA target sequence for CAS1 (NM_022900.3,2180-2198).
ctgggctagcagttgtaaa

SEQ ID NO: 218493 - DNA, 19 bp, Homo sapiens
  siRNA target sequence for CAS1 (NM_022900.3,2182-2200).
gggctagcagttgtaaaaa

SEQ ID NO: 218494 - DNA, 19 bp, Homo sapiens
  siRNA target sequence for CAS1 (NM_022900.3,2184-2202).
gctagcagttgtaaaaaca

SEQ ID NO: 218495 - DNA, 19 bp, Homo sapiens
  siRNA target sequence for CAS1 (NM_022900.3,2201-2219).
caaagcagagtgcaatgaa

SEQ ID NO: 218496 - DNA, 19 bp, Homo sapiens
  siRNA target sequence for CAS1 (NM_022900.3,2217-2235).
gaactccatccgtctgttt

SEQ ID NO: 218497 - DNA, 19 bp, Homo sapiens
  siRNA target sequence for CAS1 (NM_022900.3,2253-2271).
gccttcatcctaataagaa

SEQ ID NO: 218498 - DNA, 19 bp, Homo sapiens
  siRNA target sequence for CAS1 (NM_022900.3,2280-2298).
ggatatgcccgttcagttt

SEQ ID NO: 218499 - DNA, 19 bp, Homo sapiens
  siRNA target sequence for CAS1 (NM_022900.3,2281-2299).
gatatgcccgttcagttta

SEQ ID NO: 218500 - DNA, 19 bp, Homo sapiens
  siRNA target sequence for CAS1 (NM_022900.3,2374-2392).
cggacacaaggggtatctt

SEQ ID NO: 218501 - DNA, 19 bp, Homo sapiens
  siRNA target sequence for CAS1 (NM_022900.3,2383-2401).
ggggtatcttggtactgat

SEQ ID NO: 218502 - DNA, 19 bp, Homo sapiens
  siRNA target sequence for CAS1 (NM_022900.3,2384-2402).
gggtatcttggtactgata

SEQ ID NO: 218503 - DNA, 19 bp, Homo sapiens
  siRNA target sequence for CAS1 (NM_022900.3,2426-2444).
cattgtcagcactttcata

SEQ ID NO: 218504 - DNA, 19 bp, Homo sapiens
  siRNA target sequence for CAS1 (NM_022900.3,2470-2488).
ctcagatcactaatgatct

SEQ ID NO: 218505 - DNA, 19 bp, Homo sapiens
  siRNA target sequence for CAS1 (NM_022900.3,2484-2502).
gatcttgcacagattatta

SEQ ID NO: 218506 - DNA, 19 bp, Homo sapiens
  siRNA target sequence for CAS1 (NM_022900.3,2490-2508).
gcacagattattattccta

SEQ ID NO: 218507 - DNA, 19 bp, Homo sapiens
  siRNA target sequence for CAS1 (NM_022900.3,2518-2536).
catctctcttgaaaaggtt

SEQ ID NO: 218508 - DNA, 19 bp, Homo sapiens
  siRNA target sequence for CAS1 (NM_022900.3,2528-2546).
gaaaaggttggcatgtata

SEQ ID NO: 218509 - DNA, 19 bp, Homo sapiens
  siRNA target sequence for CAS1 (NM_022900.3,2537-2555).
ggcatgtatagctgcattt

SEQ ID NO: 218510 - DNA, 19 bp, Homo sapiens
  siRNA target sequence for CAS1 (NM_022900.3,2538-2556).
gcatgtatagctgcatttt

SEQ ID NO: 218511 - DNA, 19 bp, Homo sapiens
  siRNA target sequence for CAS1 (NM_022900.3,2562-2580).
ggactcctcatcttatcat

SEQ ID NO: 218512 - DNA, 19 bp, Homo sapiens
  siRNA target sequence for CAS1 (NM_022900.3,2573-2591).
cttatcatccattcaagat

SEQ ID NO: 218513 - DNA, 19 bp, Homo sapiens
  siRNA target sequence for CDSN (NM_001264.2,195-213).
gactccagcggcttcagta

SEQ ID NO: 218514 - DNA, 19 bp, Homo sapiens
  siRNA target sequence for CDSN (NM_001264.2,533-551).
ctctgctctgccaaccaat

SEQ ID NO: 218515 - DNA, 19 bp, Homo sapiens
  siRNA target sequence for CDSN (NM_001264.2,543-561).
ccaaccaatgacaactctt

SEQ ID NO: 218516 - DNA, 19 bp, Homo sapiens
  siRNA target sequence for CDSN (NM_001264.2,544-562).
caaccaatgacaactctta

SEQ ID NO: 218517 - DNA, 19 bp, Homo sapiens
  siRNA target sequence for CDSN (NM_001264.2,557-575).
ctcttaccgcggaatacta

SEQ ID NO: 218518 - DNA, 19 bp, Homo sapiens
  siRNA target sequence for CDSN (NM_001264.2,559-577).
cttaccgcggaatactaaa

SEQ ID NO: 218519 - DNA, 19 bp, Homo sapiens
  siRNA target sequence for CDSN (NM_001264.2,916-934).
gctcctctgacagttatct

SEQ ID NO: 218520 - DNA, 19 bp, Homo sapiens
  siRNA target sequence for CDSN (NM_001264.2,953-971).
cagtaagggtaaaatctat

SEQ ID NO: 218521 - DNA, 19 bp, Homo sapiens
  siRNA target sequence for CDSN (NM_001264.2,1208-1226).
ccccagcagttctagcatt

SEQ ID NO: 218522 - DNA, 19 bp, Homo sapiens
  siRNA target sequence for CDSN (NM_001264.2,1209-1227).
cccagcagttctagcattt

SEQ ID NO: 218523 - DNA, 19 bp, Homo sapiens
  siRNA target sequence for CDSN (NM_001264.2,1324-1342).
cccaatcgagtggcaaaat

SEQ ID NO: 218524 - DNA, 19 bp, Homo sapiens
  siRNA target sequence for CDSN (NM_001264.2,1477-1495).
ccagcagtgctggaaagat

SEQ ID NO: 218525 - DNA, 19 bp, Homo sapiens
  siRNA target sequence for CDSN (NM_001264.2,1550-1568).
gctagctgaccctgaagtt

SEQ ID NO: 218526 - DNA, 19 bp, Homo sapiens
  siRNA target sequence for CDSN (NM_001264.2,1551-1569).
ctagctgaccctgaagttt

SEQ ID NO: 218527 - DNA, 19 bp, Homo sapiens
  siRNA target sequence for CDSN (NM_001264.2,1571-1589).
cctaccccaaggagagtta

SEQ ID NO: 218528 - DNA, 19 bp, Homo sapiens
  siRNA target sequence for ChGn (NM_018371.3,673-691).
gggctgcttgcgtggattt

SEQ ID NO: 218529 - DNA, 19 bp, Homo sapiens
  siRNA target sequence for ChGn (NM_018371.3,750-768).
ggcctgcaccccaaaaggt

SEQ ID NO: 218530 - DNA, 19 bp, Homo sapiens
  siRNA target sequence for ChGn (NM_018371.3,1084-1102).
gcagcagtgcctttcgata

SEQ ID NO: 218531 - DNA, 19 bp, Homo sapiens
  siRNA target sequence for ChGn (NM_018371.3,1088-1106).
cagtgcctttcgatagctt

SEQ ID NO: 218532 - DNA, 19 bp, Homo sapiens
  siRNA target sequence for ChGn (NM_018371.3,1090-1108).
gtgcctttcgatagcttta

SEQ ID NO: 218533 - DNA, 19 bp, Homo sapiens
  siRNA target sequence for ChGn (NM_018371.3,1092-1110).
gcctttcgatagctttact

SEQ ID NO: 218534 - DNA, 19 bp, Homo sapiens
  siRNA target sequence for ChGn (NM_018371.3,1094-1112).
ctttcgatagctttactct

SEQ ID NO: 218535 - DNA, 19 bp, Homo sapiens
  siRNA target sequence for ChGn (NM_018371.3,1261-1279).
ccttacacggcctctgatt

SEQ ID NO: 218536 - DNA, 19 bp, Homo sapiens
  siRNA target sequence for ChGn (NM_018371.3,1262-1280).
cttacacggcctctgattt

SEQ ID NO: 218537 - DNA, 19 bp, Homo sapiens
  siRNA target sequence for ChGn (NM_018371.3,1266-1284).
cacggcctctgatttcata

SEQ ID NO: 218538 - DNA, 19 bp, Homo sapiens
  siRNA target sequence for ChGn (NM_018371.3,1268-1286).
cggcctctgatttcataga

SEQ ID NO: 218539 - DNA, 19 bp, Homo sapiens
  siRNA target sequence for ChGn (NM_018371.3,1307-1325).
gggacaaagggacattgta

SEQ ID NO: 218540 - DNA, 19 bp, Homo sapiens
  siRNA target sequence for ChGn (NM_018371.3,1308-1326).
ggacaaagggacattgtat

SEQ ID NO: 218541 - DNA, 19 bp, Homo sapiens
  siRNA target sequence for ChGn (NM_018371.3,1323-1341).
gtatgagctcaccttcaaa

SEQ ID NO: 218542 - DNA, 19 bp, Homo sapiens
  siRNA target sequence for ChGn (NM_018371.3,1343-1361).
gggaccacaaacacgaatt

SEQ ID NO: 218543 - DNA, 19 bp, Homo sapiens
  siRNA target sequence for ChGn (NM_018371.3,1362-1380).
caaacggctcatcttattt

SEQ ID NO: 218544 - DNA, 19 bp, Homo sapiens
  siRNA target sequence for ChGn (NM_018371.3,1428-1446).
ggccaacacgcttatcaat

SEQ ID NO: 218545 - DNA, 19 bp, Homo sapiens
  siRNA target sequence for ChGn (NM_018371.3,1430-1448).
ccaacacgcttatcaatgt

SEQ ID NO: 218546 - DNA, 19 bp, Homo sapiens
  siRNA target sequence for ChGn (NM_018371.3,1431-1449).
caacacgcttatcaatgtt

SEQ ID NO: 218547 - DNA, 19 bp, Homo sapiens
  siRNA target sequence for ChGn (NM_018371.3,1436-1454).
cgcttatcaatgttatcgt

SEQ ID NO: 218548 - DNA, 19 bp, Homo sapiens
  siRNA target sequence for ChGn (NM_018371.3,1534-1552).
gtccatctcactgttgttt

SEQ ID NO: 218549 - DNA, 19 bp, Homo sapiens
  siRNA target sequence for ChGn (NM_018371.3,1612-1630).
gccaacttcaggaacttta

SEQ ID NO: 218550 - DNA, 19 bp, Homo sapiens
  siRNA target sequence for ChGn (NM_018371.3,1700-1718).
gaagcaacgtccttctctt

SEQ ID NO: 218551 - DNA, 19 bp, Homo sapiens
  siRNA target sequence for ChGn (NM_018371.3,1729-1747).
gtggacatctacttcacat

SEQ ID NO: 218552 - DNA, 19 bp, Homo sapiens
  siRNA target sequence for ChGn (NM_018371.3,1763-1781).
cgtgtaggctgaatacaca

SEQ ID NO: 218553 - DNA, 19 bp, Homo sapiens
  siRNA target sequence for ChGn (NM_018371.3,1788-1806).
gaagaaggtattttatcca

SEQ ID NO: 218554 - DNA, 19 bp, Homo sapiens
  siRNA target sequence for ChGn (NM_018371.3,1794-1812).
ggtattttatccagttctt

SEQ ID NO: 218555 - DNA, 19 bp, Homo sapiens
  siRNA target sequence for ChGn (NM_018371.3,1821-1839).
gtacaatcctggcataata

SEQ ID NO: 218556 - DNA, 19 bp, Homo sapiens
  siRNA target sequence for ChGn (NM_018371.3,1943-1961).
ggtcagacttcatcaatat

SEQ ID NO: 218557 - DNA, 19 bp, Homo sapiens
  siRNA target sequence for ChGn (NM_018371.3,1968-1986).
gtttgatctggacatcaaa

SEQ ID NO: 218558 - DNA, 19 bp, Homo sapiens
  siRNA target sequence for ChGn (NM_018371.3,1997-2015).
gagaggatgtgcaccttta

SEQ ID NO: 218559 - DNA, 19 bp, Homo sapiens
  siRNA target sequence for ChGn (NM_018371.3,2007-2025).
gcacctttatcgcaagtat

SEQ ID NO: 218560 - DNA, 19 bp, Homo sapiens
  siRNA target sequence for CHST11 (NM_018413.2,357-375).
cttgcttgggatcctttat

SEQ ID NO: 218561 - DNA, 19 bp, Homo sapiens
  siRNA target sequence for CHST11 (NM_018413.2,926-944).
cggtacggcaccaagatca

SEQ ID NO: 218562 - DNA, 19 bp, Homo sapiens
  siRNA target sequence for CHST11 (NM_018413.2,927-945).
ggtacggcaccaagatcat

SEQ ID NO: 218563 - DNA, 19 bp, Homo sapiens
  siRNA target sequence for CHST11 (NM_018413.2,990-1008).
gggacgatgtcaaattcga

SEQ ID NO: 218564 - DNA, 19 bp, Homo sapiens
  siRNA target sequence for CHST11 (NM_018413.2,1198-1216).
ccccacctatgcaaagtct

SEQ ID NO: 218565 - DNA, 19 bp, Homo sapiens
  siRNA target sequence for CHST11 (NM_018413.2,1199-1217).
cccacctatgcaaagtcta

SEQ ID NO: 218566 - DNA, 19 bp, Homo sapiens
  siRNA target sequence for CHST11 (NM_018413.2,1213-1231).
gtctacgagaactactgat

SEQ ID NO: 218567 - DNA, 19 bp, Homo sapiens
  siRNA target sequence for CHST11 (NM_018413.2,1278-1296).
cgcagctgtacgaagtcta

SEQ ID NO: 218568 - DNA, 19 bp, Homo sapiens
  siRNA target sequence for CHST11 (NM_018413.2,1282-1300).
gctgtacgaagtctacaaa

SEQ ID NO: 218569 - DNA, 19 bp, Homo sapiens
  siRNA target sequence for CHST11 (NM_018413.2,1294-1312).
ctacaaactcgatttttta

SEQ ID NO: 218570 - DNA, 19 bp, Homo sapiens
  siRNA target sequence for CHST12 (NM_018641.2,181-199).
ctggggtcggtgttcatga

SEQ ID NO: 218571 - DNA, 19 bp, Homo sapiens
  siRNA target sequence for CHST12 (NM_018641.2,781-799).
cacctgaccttcaacaagt

SEQ ID NO: 218572 - DNA, 19 bp, Homo sapiens
  siRNA target sequence for CHST12 (NM_018641.2,841-859).
gtcaagctcaagaagtaca

SEQ ID NO: 218573 - DNA, 19 bp, Homo sapiens
  siRNA target sequence for CHST12 (NM_018641.2,1307-1325).
ggaggcagcagctgtataa

SEQ ID NO: 218574 - DNA, 19 bp, Homo sapiens
  siRNA target sequence for CHST12 (NM_018641.2,1308-1326).
gaggcagcagctgtataaa

SEQ ID NO: 218575 - DNA, 19 bp, Homo sapiens
  siRNA target sequence for CHST12 (NM_018641.2,1329-1347).
ctacgaggccgactttgtt

SEQ ID NO: 218576 - DNA, 19 bp, Homo sapiens
  siRNA target sequence for D4ST-1 (NM_130468.2,803-821).
ccgcctgcagcactacttt

SEQ ID NO: 218577 - DNA, 19 bp, Homo sapiens
  siRNA target sequence for D4ST-1 (NM_130468.2,805-823).
gcctgcagcactactttaa

SEQ ID NO: 218578 - DNA, 19 bp, Homo sapiens
  siRNA target sequence for D4ST-1 (NM_130468.2,907-925).
gctatggggctgagatagt

SEQ ID NO: 218579 - DNA, 19 bp, Homo sapiens
  siRNA target sequence for D4ST-1 (NM_130468.2,961-979).
caggcgacgatgtcacatt

SEQ ID NO: 218580 - DNA, 19 bp, Homo sapiens
  siRNA target sequence for D4ST-1 (NM_130468.2,1021-1039).
gcatgaatgagcattggat

SEQ ID NO: 218581 - DNA, 19 bp, Homo sapiens
  siRNA target sequence for D4ST-1 (NM_130468.2,1066-1084).
gtgccgtgcactatgactt

SEQ ID NO: 218582 - DNA, 19 bp, Homo sapiens
  siRNA target sequence for D4ST-1 (NM_130468.2,1195-1213).
gccccgaaagcctgcatta

SEQ ID NO: 218583 - DNA, 19 bp, Homo sapiens
  siRNA target sequence for D4ST-1 (NM_130468.2,1288-1306).
cctacccactgcctaatgt

SEQ ID NO: 218584 - DNA, 19 bp, Homo sapiens
  siRNA target sequence for DHDDS (NM_024887.1,147-165).
ggcccaatgccgaaacaca

SEQ ID NO: 218585 - DNA, 19 bp, Homo sapiens
  siRNA target sequence for DHDDS (NM_024887.1,148-166).
gcccaatgccgaaacacat

SEQ ID NO: 218586 - DNA, 19 bp, Homo sapiens
  siRNA target sequence for DHDDS (NM_024887.1,158-176).
gaaacacattgcattcata

SEQ ID NO: 218587 - DNA, 19 bp, Homo sapiens
  siRNA target sequence for DHDDS (NM_024887.1,189-207).
cgtcgctatgccaagaagt

SEQ ID NO: 218588 - DNA, 19 bp, Homo sapiens
  siRNA target sequence for DHDDS (NM_024887.1,262-280).
ctctgcggtggtgtttgaa

SEQ ID NO: 218589 - DNA, 19 bp, Homo sapiens
  siRNA target sequence for DHDDS (NM_024887.1,385-403).
gccgcttgatggaagaaaa

SEQ ID NO: 218590 - DNA, 19 bp, Homo sapiens
  siRNA target sequence for DHDDS (NM_024887.1,501-519).
gccacgaagaactacaaca

SEQ ID NO: 218591 - DNA, 19 bp, Homo sapiens
  siRNA target sequence for DHDDS (NM_024887.1,534-552).
gtctgttttgcatacacat

SEQ ID NO: 218592 - DNA, 19 bp, Homo sapiens
  siRNA target sequence for DHDDS (NM_024887.1,614-632).
ggatcccagtgatatctct

SEQ ID NO: 218593 - DNA, 19 bp, Homo sapiens
  siRNA target sequence for DHDDS (NM_024887.1,642-660).
cttgataagtgcctctata

SEQ ID NO: 218594 - DNA, 19 bp, Homo sapiens
  siRNA target sequence for DHDDS (NM_024887.1,645-663).
gataagtgcctctatacca

SEQ ID NO: 218595 - DNA, 19 bp, Homo sapiens
  siRNA target sequence for DHDDS (NM_024887.1,672-690).
cctcatcctgacatcttga

SEQ ID NO: 218596 - DNA, 19 bp, Homo sapiens
  siRNA target sequence for DHDDS (NM_024887.1,673-691).
ctcatcctgacatcttgat

SEQ ID NO: 218597 - DNA, 19 bp, Homo sapiens
  siRNA target sequence for DHDDS (NM_024887.1,767-785).
cgttctgtggccagagtat

SEQ ID NO: 218598 - DNA, 19 bp, Homo sapiens
  siRNA target sequence for DHDDS (NM_024887.1,771-789).
ctgtggccagagtatacat

SEQ ID NO: 218599 - DNA, 19 bp, Homo sapiens
  siRNA target sequence for DHDDS (NM_024887.1,773-791).
gtggccagagtatacattt

SEQ ID NO: 218600 - DNA, 19 bp, Homo sapiens
  siRNA target sequence for DHDDS (NM_024887.1,777-795).
ccagagtatacattttgga

SEQ ID NO: 218601 - DNA, 19 bp, Homo sapiens
  siRNA target sequence for DHDDS (NM_024887.1,778-796).
cagagtatacattttggaa

SEQ ID NO: 218602 - DNA, 19 bp, Homo sapiens
  siRNA target sequence for DHDDS (NM_024887.1,816-834).
cagttccagatgaaccata

SEQ ID NO: 218603 - DNA, 19 bp, Homo sapiens
  siRNA target sequence for DHDDS (NM_024887.1,970-988).
ggacacgcttgcacaaact

SEQ ID NO: 218604 - DNA, 19 bp, Homo sapiens
  siRNA target sequence for FLJ12171 (NM_024619.2,133-151).
gacgagtgttcgtgaaagt

SEQ ID NO: 218605 - DNA, 19 bp, Homo sapiens
  siRNA target sequence for FLJ12171 (NM_024619.2,135-153).
cgagtgttcgtgaaagtga

SEQ ID NO: 218606 - DNA, 19 bp, Homo sapiens
  siRNA target sequence for FLJ12171 (NM_024619.2,340-358).
cccagctggccgatttaca

SEQ ID NO: 218607 - DNA, 19 bp, Homo sapiens
  siRNA target sequence for FLJ12171 (NM_024619.2,604-622).
ggtctgctctgcagttaaa

SEQ ID NO: 218608 - DNA, 19 bp, Homo sapiens
  siRNA target sequence for FLJ12171 (NM_024619.2,740-758).
ctacggccactcggaatat

SEQ ID NO: 218609 - DNA, 19 bp, Homo sapiens
  siRNA target sequence for FLJ12171 (NM_024619.2,808-826).
ccgcctaccacggcaaaat

SEQ ID NO: 218610 - DNA, 19 bp, Homo sapiens
  siRNA target sequence for FLJ12171 (NM_024619.2,867-885).
cagctctttcactacttga

SEQ ID NO: 218611 - DNA, 19 bp, Homo sapiens
  siRNA target sequence for FLJ12171 (NM_024619.2,881-899).
cttgaaccactggaatcat

SEQ ID NO: 218612 - DNA, 19 bp, Homo sapiens
  siRNA target sequence for FN3K (NM_022158.2,112-130).
gcccagtgttcgtcaaagt

SEQ ID NO: 218613 - DNA, 19 bp, Homo sapiens
  siRNA target sequence for FN3K (NM_022158.2,114-132).
ccagtgttcgtcaaagtca

SEQ ID NO: 218614 - DNA, 19 bp, Homo sapiens
  siRNA target sequence for FN3K (NM_022158.2,115-133).
cagtgttcgtcaaagtcaa

SEQ ID NO: 218615 - DNA, 19 bp, Homo sapiens
  siRNA target sequence for FN3K (NM_022158.2,293-311).
gagcagtcaagcatcaaaa

SEQ ID NO: 218616 - DNA, 19 bp, Homo sapiens
  siRNA target sequence for FN3K (NM_022158.2,489-507).
gatgactggccgacctttt

SEQ ID NO: 218617 - DNA, 19 bp, Homo sapiens
  siRNA target sequence for FN3K (NM_022158.2,586-604).
cccggctacaggtgaagat

SEQ ID NO: 218618 - DNA, 19 bp, Homo sapiens
  siRNA target sequence for FN3K (NM_022158.2,599-617).
gaagatcccggatctgttt

SEQ ID NO: 218619 - DNA, 19 bp, Homo sapiens
  siRNA target sequence for FN3K (NM_022158.2,602-620).
gatcccggatctgttttgt

SEQ ID NO: 218620 - DNA, 19 bp, Homo sapiens
  siRNA target sequence for FN3K (NM_022158.2,704-722).
cgacccggcttccttctat

SEQ ID NO: 218621 - DNA, 19 bp, Homo sapiens
  siRNA target sequence for FN3K (NM_022158.2,724-742).
gccattccgagtttgaact

SEQ ID NO: 218622 - DNA, 19 bp, Homo sapiens
  siRNA target sequence for FN3K (NM_022158.2,741-759).
ctggcaatcgccttgatgt

SEQ ID NO: 218623 - DNA, 19 bp, Homo sapiens
  siRNA target sequence for GAL3ST-4 (NM_024637.3,736-754).
ctgccttctcctactataa

SEQ ID NO: 218624 - DNA, 19 bp, Homo sapiens
  siRNA target sequence for GAL3ST-4 (NM_024637.3,845-863).
ccactacgctcgcaactta

SEQ ID NO: 218625 - DNA, 19 bp, Homo sapiens
  siRNA target sequence for GAL3ST-4 (NM_024637.3,848-866).
ctacgctcgcaacttacta

SEQ ID NO: 218626 - DNA, 19 bp, Homo sapiens
  siRNA target sequence for GAL3ST-4 (NM_024637.3,853-871).
ctcgcaacttactatggtt

SEQ ID NO: 218627 - DNA, 19 bp, Homo sapiens
  siRNA target sequence for GAL3ST-4 (NM_024637.3,1041-1059).
catcgcagccagatatcaa

SEQ ID NO: 218628 - DNA, 19 bp, Homo sapiens
  siRNA target sequence for GAL3ST-4 (NM_024637.3,1060-1078).
gccctgcctctttcgattt

SEQ ID NO: 218629 - DNA, 19 bp, Homo sapiens
  siRNA target sequence for GAL3ST-4 (NM_024637.3,1369-1387).
gggcacggatagagaaata

SEQ ID NO: 218630 - DNA, 19 bp, Homo sapiens
  siRNA target sequence for GAL3ST-4 (NM_024637.3,1437-1455).
gaggccctagcgaaacatt

SEQ ID NO: 218631 - DNA, 19 bp, Homo sapiens
  siRNA target sequence for GAL3ST-4 (NM_024637.3,1439-1457).
ggccctagcgaaacattgt

SEQ ID NO: 218632 - DNA, 19 bp, Homo sapiens
  siRNA target sequence for GAL3ST-4 (NM_024637.3,1441-1459).
ccctagcgaaacattgtct

SEQ ID NO: 218633 - DNA, 19 bp, Homo sapiens
  siRNA target sequence for GAL3ST-4 (NM_024637.3,1531-1549).
ctaaggttttgggctatat

SEQ ID NO: 218634 - DNA, 19 bp, Homo sapiens
  siRNA target sequence for GAL3ST-4 (NM_024637.3,1535-1553).
ggttttgggctatatactt

SEQ ID NO: 218635 - DNA, 19 bp, Homo sapiens
  siRNA target sequence for GAL3ST2 (NM_033036.1,365-383).
gcaccgtaagccttctcat

SEQ ID NO: 218636 - DNA, 19 bp, Homo sapiens
  siRNA target sequence for GAL3ST2 (NM_033036.1,968-986).
gccaggtggaggaggtttt

SEQ ID NO: 218637 - DNA, 19 bp, Homo sapiens
  siRNA target sequence for GAL3ST2 (NM_033036.1,1358-1376).
gccgcaaggtggacattat

SEQ ID NO: 218638 - DNA, 19 bp, Homo sapiens
  siRNA target sequence for GALGT2 (NM_153446.1,73-91).
gcttttccgtgggaaaatt

SEQ ID NO: 218639 - DNA, 19 bp, Homo sapiens
  siRNA target sequence for GALGT2 (NM_153446.1,245-263).
ccgtcagggctcgagattt

SEQ ID NO: 218640 - DNA, 19 bp, Homo sapiens
  siRNA target sequence for GALGT2 (NM_153446.1,247-265).
gtcagggctcgagatttct

SEQ ID NO: 218641 - DNA, 19 bp, Homo sapiens
  siRNA target sequence for GALGT2 (NM_153446.1,264-282).
ctgtggctcctcaagatat

SEQ ID NO: 218642 - DNA, 19 bp, Homo sapiens
  siRNA target sequence for GALGT2 (NM_153446.1,268-286).
ggctcctcaagatattggt

SEQ ID NO: 218643 - DNA, 19 bp, Homo sapiens
  siRNA target sequence for GALGT2 (NM_153446.1,293-311).
cctggtacttggcattgtt

SEQ ID NO: 218644 - DNA, 19 bp, Homo sapiens
  siRNA target sequence for GALGT2 (NM_153446.1,303-321).
ggcattgttggatttatgt

SEQ ID NO: 218645 - DNA, 19 bp, Homo sapiens
  siRNA target sequence for GALGT2 (NM_153446.1,420-438).
cgtctcaggaacctctttt

SEQ ID NO: 218646 - DNA, 19 bp, Homo sapiens
  siRNA target sequence for GALGT2 (NM_153446.1,456-474).
ctgttcccgaaaaatcagt

SEQ ID NO: 218647 - DNA, 19 bp, Homo sapiens
  siRNA target sequence for GALGT2 (NM_153446.1,462-480).
ccgaaaaatcagtgcaaat

SEQ ID NO: 218648 - DNA, 19 bp, Homo sapiens
  siRNA target sequence for GALGT2 (NM_153446.1,495-513).
gagcagggaggttacaact

SEQ ID NO: 218649 - DNA, 19 bp, Homo sapiens
  siRNA target sequence for GALGT2 (NM_153446.1,497-515).
gcagggaggttacaacttt

SEQ ID NO: 218650 - DNA, 19 bp, Homo sapiens
  siRNA target sequence for GALGT2 (NM_153446.1,556-574).
cgaggagacaggctgaatt

SEQ ID NO: 218651 - DNA, 19 bp, Homo sapiens
  siRNA target sequence for GALGT2 (NM_153446.1,838-856).
gtgaccggaagctgttgaa

SEQ ID NO: 218652 - DNA, 19 bp, Homo sapiens
  siRNA target sequence for GALGT2 (NM_153446.1,840-858).
gaccggaagctgttgaagt

SEQ ID NO: 218653 - DNA, 19 bp, Homo sapiens
  siRNA target sequence for GALGT2 (NM_153446.1,843-861).
cggaagctgttgaagttca

SEQ ID NO: 218654 - DNA, 19 bp, Homo sapiens
  siRNA target sequence for GALGT2 (NM_153446.1,864-882).
cttcagcacgtgacataca

SEQ ID NO: 218655 - DNA, 19 bp, Homo sapiens
  siRNA target sequence for GALGT2 (NM_153446.1,903-921).
cagaaggtagacatagtga

SEQ ID NO: 218656 - DNA, 19 bp, Homo sapiens
  siRNA target sequence for GALGT2 (NM_153446.1,962-980).
catccgccatcctgtcata

SEQ ID NO: 218657 - DNA, 19 bp, Homo sapiens
  siRNA target sequence for GALGT2 (NM_153446.1,1016-1034).
cagaaacctggttaccatt

SEQ ID NO: 218658 - DNA, 19 bp, Homo sapiens
  siRNA target sequence for GALGT2 (NM_153446.1,1030-1048).
ccattgctaccaagacttt

SEQ ID NO: 218659 - DNA, 19 bp, Homo sapiens
  siRNA target sequence for GALGT2 (NM_153446.1,1056-1074).
ccccacaagctcatgatca

SEQ ID NO: 218660 - DNA, 19 bp, Homo sapiens
  siRNA target sequence for GALGT2 (NM_153446.1,1057-1075).
cccacaagctcatgatcat

SEQ ID NO: 218661 - DNA, 19 bp, Homo sapiens
  siRNA target sequence for GALGT2 (NM_153446.1,1073-1091).
catgctccggagtattcga

SEQ ID NO: 218662 - DNA, 19 bp, Homo sapiens
  siRNA target sequence for GALGT2 (NM_153446.1,1079-1097).
ccggagtattcgagagtat

SEQ ID NO: 218663 - DNA, 19 bp, Homo sapiens
  siRNA target sequence for GALGT2 (NM_153446.1,1080-1098).
cggagtattcgagagtatt

SEQ ID NO: 218664 - DNA, 19 bp, Homo sapiens
  siRNA target sequence for GALGT2 (NM_153446.1,1081-1099).
ggagtattcgagagtatta

SEQ ID NO: 218665 - DNA, 19 bp, Homo sapiens
  siRNA target sequence for GALGT2 (NM_153446.1,1100-1118).
cccagacttgaccgtaata

SEQ ID NO: 218666 - DNA, 19 bp, Homo sapiens
  siRNA target sequence for GALGT2 (NM_153446.1,1161-1179).
cacgtggagtattacacta

SEQ ID NO: 218667 - DNA, 19 bp, Homo sapiens
  siRNA target sequence for GALGT2 (NM_153446.1,1229-1247).
ggtcaccaccaaatacgtt

SEQ ID NO: 218668 - DNA, 19 bp, Homo sapiens
  siRNA target sequence for GALGT2 (NM_153446.1,1248-1266).
ctctgggtggacgatgatt

SEQ ID NO: 218669 - DNA, 19 bp, Homo sapiens
  siRNA target sequence for GALGT2 (NM_153446.1,1250-1268).
ctgggtggacgatgatttt

SEQ ID NO: 218670 - DNA, 19 bp, Homo sapiens
  siRNA target sequence for GALGT2 (NM_153446.1,1252-1270).
gggtggacgatgattttct

SEQ ID NO: 218671 - DNA, 19 bp, Homo sapiens
  siRNA target sequence for GALGT2 (NM_153446.1,1254-1272).
gtggacgatgattttctct

SEQ ID NO: 218672 - DNA, 19 bp, Homo sapiens
  siRNA target sequence for GALGT2 (NM_153446.1,1465-1483).
ccagtggcgtggtcaactt

SEQ ID NO: 218673 - DNA, 19 bp, Homo sapiens
  siRNA target sequence for GALGT2 (NM_153446.1,1468-1486).
gtggcgtggtcaacttctt

SEQ ID NO: 218674 - DNA, 19 bp, Homo sapiens
  siRNA target sequence for GALGT2 (NM_153446.1,1498-1516).
cggagcgactccaaagagt

SEQ ID NO: 218675 - DNA, 19 bp, Homo sapiens
  siRNA target sequence for GALGT2 (NM_153446.1,1499-1517).
ggagcgactccaaagagtt

SEQ ID NO: 218676 - DNA, 19 bp, Homo sapiens
  siRNA target sequence for GALGT2 (NM_153446.1,1539-1557).
cgagtggctcactcagaat

SEQ ID NO: 218677 - DNA, 19 bp, Homo sapiens
  siRNA target sequence for GALGT2 (NM_153446.1,1542-1560).
gtggctcactcagaattct

SEQ ID NO: 218678 - DNA, 19 bp, Homo sapiens
  siRNA target sequence for GALGT2 (NM_153446.1,1591-1609).
ggtcatgcccagaagtgat

SEQ ID NO: 218679 - DNA, 19 bp, Homo sapiens
  siRNA target sequence for GALGT2 (NM_153446.1,1592-1610).
gtcatgcccagaagtgatt

SEQ ID NO: 218680 - DNA, 19 bp, Homo sapiens
  siRNA target sequence for GALGT2 (NM_153446.1,1598-1616).
cccagaagtgattataggt

SEQ ID NO: 218681 - DNA, 19 bp, Homo sapiens
  siRNA target sequence for GALNACT-2 (NM_018590.3,338-356).
gcctagaagaggactgatt

SEQ ID NO: 218682 - DNA, 19 bp, Homo sapiens
  siRNA target sequence for GALNACT-2 (NM_018590.3,343-361).
gaagaggactgattcttca

SEQ ID NO: 218683 - DNA, 19 bp, Homo sapiens
  siRNA target sequence for GALNACT-2 (NM_018590.3,398-416).
gctctgcagtttggtatta

SEQ ID NO: 218684 - DNA, 19 bp, Homo sapiens
  siRNA target sequence for GALNACT-2 (NM_018590.3,406-424).
gtttggtattatttatgta

SEQ ID NO: 218685 - DNA, 19 bp, Homo sapiens
  siRNA target sequence for GALNACT-2 (NM_018590.3,471-489).
ggtgttgttggggaaaatt

SEQ ID NO: 218686 - DNA, 19 bp, Homo sapiens
  siRNA target sequence for GALNACT-2 (NM_018590.3,678-696).
caagcacctagtgatcttt

SEQ ID NO: 218687 - DNA, 19 bp, Homo sapiens
  siRNA target sequence for GALNACT-2 (NM_018590.3,682-700).
cacctagtgatcttttaga

SEQ ID NO: 218688 - DNA, 19 bp, Homo sapiens
  siRNA target sequence for GALNACT-2 (NM_018590.3,684-702).
cctagtgatcttttagagt

SEQ ID NO: 218689 - DNA, 19 bp, Homo sapiens
  siRNA target sequence for GALNACT-2 (NM_018590.3,685-703).
ctagtgatcttttagagtt

SEQ ID NO: 218690 - DNA, 19 bp, Homo sapiens
  siRNA target sequence for GALNACT-2 (NM_018590.3,767-785).
ggtcattccctttgaaagt

SEQ ID NO: 218691 - DNA, 19 bp, Homo sapiens
  siRNA target sequence for GALNACT-2 (NM_018590.3,768-786).
gtcattccctttgaaagtt

SEQ ID NO: 218692 - DNA, 19 bp, Homo sapiens
  siRNA target sequence for GALNACT-2 (NM_018590.3,824-842).
cactcgccatcctgaagaa

SEQ ID NO: 218693 - DNA, 19 bp, Homo sapiens
  siRNA target sequence for GALNACT-2 (NM_018590.3,984-1002).
gacttcgtagaaggttatt

SEQ ID NO: 218694 - DNA, 19 bp, Homo sapiens
  siRNA target sequence for GALNACT-2 (NM_018590.3,986-1004).
cttcgtagaaggttattat

SEQ ID NO: 218695 - DNA, 19 bp, Homo sapiens
  siRNA target sequence for GALNACT-2 (NM_018590.3,1058-1076).
ccttacggaatatagacat

SEQ ID NO: 218696 - DNA, 19 bp, Homo sapiens
  siRNA target sequence for GALNACT-2 (NM_018590.3,1093-1111).
cttttggacctctcatgaa

SEQ ID NO: 218697 - DNA, 19 bp, Homo sapiens
  siRNA target sequence for GALNACT-2 (NM_018590.3,1098-1116).
ggacctctcatgaaagtga

SEQ ID NO: 218698 - DNA, 19 bp, Homo sapiens
  siRNA target sequence for GALNACT-2 (NM_018590.3,1099-1117).
gacctctcatgaaagtgaa

SEQ ID NO: 218699 - DNA, 19 bp, Homo sapiens
  siRNA target sequence for GALNACT-2 (NM_018590.3,1131-1149).
gacatcactagatcaatta

SEQ ID NO: 218700 - DNA, 19 bp, Homo sapiens
  siRNA target sequence for GALNACT-2 (NM_018590.3,1133-1151).
catcactagatcaattatt

SEQ ID NO: 218701 - DNA, 19 bp, Homo sapiens
  siRNA target sequence for GALNACT-2 (NM_018590.3,1136-1154).
cactagatcaattattaat

SEQ ID NO: 218702 - DNA, 19 bp, Homo sapiens
  siRNA target sequence for GALNACT-2 (NM_018590.3,1194-1212).
caatttatgcagaacttca

SEQ ID NO: 218703 - DNA, 19 bp, Homo sapiens
  siRNA target sequence for GALNACT-2 (NM_018590.3,1213-1231).
gggatgtttgtattcatca

SEQ ID NO: 218704 - DNA, 19 bp, Homo sapiens
  siRNA target sequence for GALNACT-2 (NM_018590.3,1222-1240).
gtattcatcaagacaagaa

SEQ ID NO: 218705 - DNA, 19 bp, Homo sapiens
  siRNA target sequence for GALNACT-2 (NM_018590.3,1245-1263).
catctcacagtggtgtatt

SEQ ID NO: 218706 - DNA, 19 bp, Homo sapiens
  siRNA target sequence for GALNACT-2 (NM_018590.3,1278-1296).
ctgtctaaagtcaagtcta

SEQ ID NO: 218707 - DNA, 19 bp, Homo sapiens
  siRNA target sequence for GALNACT-2 (NM_018590.3,1337-1355).
caccttggtctcattgaat

SEQ ID NO: 218708 - DNA, 19 bp, Homo sapiens
  siRNA target sequence for GALNACT-2 (NM_018590.3,1339-1357).
ccttggtctcattgaatga

SEQ ID NO: 218709 - DNA, 19 bp, Homo sapiens
  siRNA target sequence for GALNACT-2 (NM_018590.3,1343-1361).
ggtctcattgaatgaagaa

SEQ ID NO: 218710 - DNA, 19 bp, Homo sapiens
  siRNA target sequence for GALNT12 (NM_024642.2,292-310).
gtgcggctgcaccagatta

SEQ ID NO: 218711 - DNA, 19 bp, Homo sapiens
  siRNA target sequence for GALNT12 (NM_024642.2,296-314).
ggctgcaccagattaacat

SEQ ID NO: 218712 - DNA, 19 bp, Homo sapiens
  siRNA target sequence for GALNT12 (NM_024642.2,298-316).
ctgcaccagattaacatct

SEQ ID NO: 218713 - DNA, 19 bp, Homo sapiens
  siRNA target sequence for GALNT12 (NM_024642.2,408-426).
caggacatctgttatcata

SEQ ID NO: 218714 - DNA, 19 bp, Homo sapiens
  siRNA target sequence for GALNT12 (NM_024642.2,456-474).
ccttcggacagtttacagt

SEQ ID NO: 218715 - DNA, 19 bp, Homo sapiens
  siRNA target sequence for GALNT12 (NM_024642.2,492-510).
ggatatcctgctagaagaa

SEQ ID NO: 218716 - DNA, 19 bp, Homo sapiens
  siRNA target sequence for GALNT12 (NM_024642.2,653-671).
cggcgaggggcgatgttct

SEQ ID NO: 218717 - DNA, 19 bp, Homo sapiens
  siRNA target sequence for GALNT12 (NM_024642.2,781-799).
gactggaacaccttcgaat

SEQ ID NO: 218718 - DNA, 19 bp, Homo sapiens
  siRNA target sequence for GALNT12 (NM_024642.2,785-803).
ggaacaccttcgaatacct

SEQ ID NO: 218719 - DNA, 19 bp, Homo sapiens
  siRNA target sequence for GALNT12 (NM_024642.2,1049-1067).
gtggggttctggaaacaca

SEQ ID NO: 218720 - DNA, 19 bp, Homo sapiens
  siRNA target sequence for GALNT12 (NM_024642.2,1145-1163).
gtgcagctgaagtatggat

SEQ ID NO: 218721 - DNA, 19 bp, Homo sapiens
  siRNA target sequence for GALNT12 (NM_024642.2,1250-1268).
gggacaagctccagtgtaa

SEQ ID NO: 218722 - DNA, 19 bp, Homo sapiens
  siRNA target sequence for GALNT12 (NM_024642.2,1251-1269).
ggacaagctccagtgtaaa

SEQ ID NO: 218723 - DNA, 19 bp, Homo sapiens
  siRNA target sequence for GALNT12 (NM_024642.2,1261-1279).
cagtgtaaagacttcaagt

SEQ ID NO: 218724 - DNA, 19 bp, Homo sapiens
  siRNA target sequence for GALNT12 (NM_024642.2,1281-1299).
gttcttggagactgtgtat

SEQ ID NO: 218725 - DNA, 19 bp, Homo sapiens
  siRNA target sequence for GALNT12 (NM_024642.2,1338-1356).
cgggatgctccagaacaaa

SEQ ID NO: 218726 - DNA, 19 bp, Homo sapiens
  siRNA target sequence for GALNT12 (NM_024642.2,1347-1365).
ccagaacaaaggactaaca

SEQ ID NO: 218727 - DNA, 19 bp, Homo sapiens
  siRNA target sequence for GALNT12 (NM_024642.2,1391-1409).
ccgatgaaaaccagattgt

SEQ ID NO: 218728 - DNA, 19 bp, Homo sapiens
  siRNA target sequence for GALNT12 (NM_024642.2,1441-1459).
gggatgggccagaatcagt

SEQ ID NO: 218729 - DNA, 19 bp, Homo sapiens
  siRNA target sequence for GALNT12 (NM_024642.2,1442-1460).
ggatgggccagaatcagtt

SEQ ID NO: 218730 - DNA, 19 bp, Homo sapiens
  siRNA target sequence for GALNT12 (NM_024642.2,1448-1466).
gccagaatcagtttttcga

SEQ ID NO: 218731 - DNA, 19 bp, Homo sapiens
  siRNA target sequence for GALNT12 (NM_024642.2,1470-1488).
cacgtcccagaaagaaata

SEQ ID NO: 218732 - DNA, 19 bp, Homo sapiens
  siRNA target sequence for GALNT12 (NM_024642.2,1554-1572).
gcatctctgcgaagaaact

SEQ ID NO: 218733 - DNA, 19 bp, Homo sapiens
  siRNA target sequence for GALNT12 (NM_024642.2,1623-1641).
cgaacagtccaagaaatgt

SEQ ID NO: 218734 - DNA, 19 bp, Homo sapiens
  siRNA target sequence for GALNT12 (NM_024642.2,1662-1680).
gtcgagtgacagtttcgtt

SEQ ID NO: 218735 - DNA, 19 bp, Homo sapiens
  siRNA target sequence for GALNT12 (NM_024642.2,1671-1689).
cagtttcgttccactctta

SEQ ID NO: 218736 - DNA, 19 bp, Homo sapiens
  siRNA target sequence for GALNT12 (NM_024642.2,1701-1719).
caactcggatcatcagaaa

SEQ ID NO: 218737 - DNA, 19 bp, Homo sapiens
  siRNA target sequence for GALNT12 (NM_024642.2,1706-1724).
cggatcatcagaaatggtt

SEQ ID NO: 218738 - DNA, 19 bp, Homo sapiens
  siRNA target sequence for GALNT12 (NM_024642.2,1725-1743).
cttcaaagagcgcatgtta

SEQ ID NO: 218739 - DNA, 19 bp, Homo sapiens
  siRNA target sequence for GALNT14 (NM_024572.1,235-253).
gcctcaggtgcctgtatca

SEQ ID NO: 218740 - DNA, 19 bp, Homo sapiens
  siRNA target sequence for GALNT14 (NM_024572.1,407-425).
ccacccactagcatcatca

SEQ ID NO: 218741 - DNA, 19 bp, Homo sapiens
  siRNA target sequence for GALNT14 (NM_024572.1,408-426).
cacccactagcatcatcat

SEQ ID NO: 218742 - DNA, 19 bp, Homo sapiens
  siRNA target sequence for GALNT14 (NM_024572.1,410-428).
cccactagcatcatcatca

SEQ ID NO: 218743 - DNA, 19 bp, Homo sapiens
  siRNA target sequence for GALNT14 (NM_024572.1,462-480).
ggaccatccgcagtgtatt

SEQ ID NO: 218744 - DNA, 19 bp, Homo sapiens
  siRNA target sequence for GALNT14 (NM_024572.1,463-481).
gaccatccgcagtgtatta

SEQ ID NO: 218745 - DNA, 19 bp, Homo sapiens
  siRNA target sequence for GALNT14 (NM_024572.1,497-515).
catctgatccgggaaatca

SEQ ID NO: 218746 - DNA, 19 bp, Homo sapiens
  siRNA target sequence for GALNT14 (NM_024572.1,502-520).
gatccgggaaatcatatta

SEQ ID NO: 218747 - DNA, 19 bp, Homo sapiens
  siRNA target sequence for GALNT14 (NM_024572.1,580-598).
gaaatgcttgcgcaataat

SEQ ID NO: 218748 - DNA, 19 bp, Homo sapiens
  siRNA target sequence for GALNT14 (NM_024572.1,750-768).
gccctgtgatcgatatcat

SEQ ID NO: 218749 - DNA, 19 bp, Homo sapiens
  siRNA target sequence for GALNT14 (NM_024572.1,751-769).
ccctgtgatcgatatcatt

SEQ ID NO: 218750 - DNA, 19 bp, Homo sapiens
  siRNA target sequence for GALNT14 (NM_024572.1,752-770).
cctgtgatcgatatcatta

SEQ ID NO: 218751 - DNA, 19 bp, Homo sapiens
  siRNA target sequence for GALNT14 (NM_024572.1,753-771).
ctgtgatcgatatcattaa

SEQ ID NO: 218752 - DNA, 19 bp, Homo sapiens
  siRNA target sequence for GALNT14 (NM_024572.1,809-827).
ctcagaggggggtttgact

SEQ ID NO: 218753 - DNA, 19 bp, Homo sapiens
  siRNA target sequence for GALNT14 (NM_024572.1,897-915).
ccatcaggactcctatcat

SEQ ID NO: 218754 - DNA, 19 bp, Homo sapiens
  siRNA target sequence for GALNT14 (NM_024572.1,898-916).
catcaggactcctatcata

SEQ ID NO: 218755 - DNA, 19 bp, Homo sapiens
  siRNA target sequence for GALNT14 (NM_024572.1,934-952).
gatcgacaaagcttggttt

SEQ ID NO: 218756 - DNA, 19 bp, Homo sapiens
  siRNA target sequence for GALNT14 (NM_024572.1,937-955).
cgacaaagcttggtttgat

SEQ ID NO: 218757 - DNA, 19 bp, Homo sapiens
  siRNA target sequence for GALNT14 (NM_024572.1,995-1013).
ggggagaactttgaaatct

SEQ ID NO: 218758 - DNA, 19 bp, Homo sapiens
  siRNA target sequence for GALNT14 (NM_024572.1,1118-1136).
gccaacacgtatataaaga

SEQ ID NO: 218759 - DNA, 19 bp, Homo sapiens
  siRNA target sequence for GALNT14 (NM_024572.1,1215-1233).
ggcccttcgggaatgttga

SEQ ID NO: 218760 - DNA, 19 bp, Homo sapiens
  siRNA target sequence for GALNT14 (NM_024572.1,1394-1412).
gaaaccccaaacctaaagt

SEQ ID NO: 218761 - DNA, 19 bp, Homo sapiens
  siRNA target sequence for GALNT14 (NM_024572.1,1457-1475).
gtatgggccttcacataca

SEQ ID NO: 218762 - DNA, 19 bp, Homo sapiens
  siRNA target sequence for GALNT14 (NM_024572.1,1571-1589).
cgacagcaatggaccaaaa

SEQ ID NO: 218763 - DNA, 19 bp, Homo sapiens
  siRNA target sequence for GALNT14 (NM_024572.1,1598-1616).
cacatcgagcacatagcat

SEQ ID NO: 218764 - DNA, 19 bp, Homo sapiens
  siRNA target sequence for GALNT14 (NM_024572.1,1621-1639).
cctctgcctcgatacagat

SEQ ID NO: 218765 - DNA, 19 bp, Homo sapiens
  siRNA target sequence for GALNT14 (NM_024572.1,1622-1640).
ctctgcctcgatacagata

SEQ ID NO: 218766 - DNA, 19 bp, Homo sapiens
  siRNA target sequence for GALNT14 (NM_024572.1,1626-1644).
gcctcgatacagatatgtt

SEQ ID NO: 218767 - DNA, 19 bp, Homo sapiens
  siRNA target sequence for GALNT14 (NM_024572.1,1656-1674).
ccgagaacggcaaggaaat

SEQ ID NO: 218768 - DNA, 19 bp, Homo sapiens
  siRNA target sequence for HS2ST1 (NM_012262.2,363-381).
ggctcctcaggattatgat

SEQ ID NO: 218769 - DNA, 19 bp, Homo sapiens
  siRNA target sequence for HS2ST1 (NM_012262.2,420-438).
cggtggcgatgctcttctt

SEQ ID NO: 218770 - DNA, 19 bp, Homo sapiens
  siRNA target sequence for HS2ST1 (NM_012262.2,425-443).
gcgatgctcttcttggaaa

SEQ ID NO: 218771 - DNA, 19 bp, Homo sapiens
  siRNA target sequence for HS2ST1 (NM_012262.2,498-516).
gacacgaagtccgagaaat

SEQ ID NO: 218772 - DNA, 19 bp, Homo sapiens
  siRNA target sequence for HS2ST1 (NM_012262.2,546-564).
ggcaagatgccactttaga

SEQ ID NO: 218773 - DNA, 19 bp, Homo sapiens
  siRNA target sequence for HS2ST1 (NM_012262.2,641-659).
gacctgtgtgcaaagaata

SEQ ID NO: 218774 - DNA, 19 bp, Homo sapiens
  siRNA target sequence for HS2ST1 (NM_012262.2,716-734).
gatcaggtgcgctttgtaa

SEQ ID NO: 218775 - DNA, 19 bp, Homo sapiens
  siRNA target sequence for HS2ST1 (NM_012262.2,722-740).
gtgcgctttgtaaagaata

SEQ ID NO: 218776 - DNA, 19 bp, Homo sapiens
  siRNA target sequence for HS2ST1 (NM_012262.2,724-742).
gcgctttgtaaagaatata

SEQ ID NO: 218777 - DNA, 19 bp, Homo sapiens
  siRNA target sequence for HS2ST1 (NM_012262.2,782-800).
cacgtttcttacttggatt

SEQ ID NO: 218778 - DNA, 19 bp, Homo sapiens
  siRNA target sequence for HS2ST1 (NM_012262.2,784-802).
cgtttcttacttggatttt

SEQ ID NO: 218779 - DNA, 19 bp, Homo sapiens
  siRNA target sequence for HS2ST1 (NM_012262.2,796-814).
ggattttgcaaaatttggt

SEQ ID NO: 218780 - DNA, 19 bp, Homo sapiens
  siRNA target sequence for HS2ST1 (NM_012262.2,915-933).
ggttacggagacgaaaaca

SEQ ID NO: 218781 - DNA, 19 bp, Homo sapiens
  siRNA target sequence for HS2ST1 (NM_012262.2,916-934).
gttacggagacgaaaacaa

SEQ ID NO: 218782 - DNA, 19 bp, Homo sapiens
  siRNA target sequence for HS2ST1 (NM_012262.2,1073-1091).
caagccaagtataacctaa

SEQ ID NO: 218783 - DNA, 19 bp, Homo sapiens
  siRNA target sequence for HS2ST1 (NM_012262.2,1076-1094).
gccaagtataacctaatta

SEQ ID NO: 218784 - DNA, 19 bp, Homo sapiens
  siRNA target sequence for HS2ST1 (NM_012262.2,1077-1095).
ccaagtataacctaattaa

SEQ ID NO: 218785 - DNA, 19 bp, Homo sapiens
  siRNA target sequence for HS2ST1 (NM_012262.2,1081-1099).
gtataacctaattaatgaa

SEQ ID NO: 218786 - DNA, 19 bp, Homo sapiens
  siRNA target sequence for HS2ST1 (NM_012262.2,1111-1129).
gggagttactgaagaactt

SEQ ID NO: 218787 - DNA, 19 bp, Homo sapiens
  siRNA target sequence for HS2ST1 (NM_012262.2,1130-1148).
gaagattttatcatgttat

SEQ ID NO: 218788 - DNA, 19 bp, Homo sapiens
  siRNA target sequence for HS2ST1 (NM_012262.2,1177-1195).
gggtgctactgaactctat

SEQ ID NO: 218789 - DNA, 19 bp, Homo sapiens
  siRNA target sequence for HS2ST1 (NM_012262.2,1202-1220).
ggaaagaaatctcatctta

SEQ ID NO: 218790 - DNA, 19 bp, Homo sapiens
  siRNA target sequence for HS2ST1 (NM_012262.2,1234-1252).
gaagaaactccccactaaa

SEQ ID NO: 218791 - DNA, 19 bp, Homo sapiens
  siRNA target sequence for HS2ST1 (NM_012262.2,1243-1261).
ccccactaaacaaaccatt

SEQ ID NO: 218792 - DNA, 19 bp, Homo sapiens
  siRNA target sequence for HS2ST1 (NM_012262.2,1271-1289).
cagcaatctgatatttgga

SEQ ID NO: 218793 - DNA, 19 bp, Homo sapiens
  siRNA target sequence for HS2ST1 (NM_012262.2,1316-1334).
gcactagagcagttccaat

SEQ ID NO: 218794 - DNA, 19 bp, Homo sapiens
  siRNA target sequence for HS2ST1 (NM_012262.2,1317-1335).
cactagagcagttccaatt

SEQ ID NO: 218795 - DNA, 19 bp, Homo sapiens
  siRNA target sequence for HS2ST1 (NM_012262.2,1319-1337).
ctagagcagttccaattca

SEQ ID NO: 218796 - DNA, 19 bp, Homo sapiens
  siRNA target sequence for HS2ST1 (NM_012262.2,1344-1362).
cccatgccgttcgagaaaa

SEQ ID NO: 218797 - DNA, 19 bp, Homo sapiens
  siRNA target sequence for HS2ST1 (NM_012262.2,1345-1363).
ccatgccgttcgagaaaaa

SEQ ID NO: 218798 - DNA, 19 bp, Homo sapiens
  siRNA target sequence for HS2ST1 (NM_012262.2,1378-1396).
catcctcgcacaaaacttt

SEQ ID NO: 218799 - DNA, 19 bp, Homo sapiens
  siRNA target sequence for HS2ST1 (NM_012262.2,1386-1404).
cacaaaactttttctatga

SEQ ID NO: 218800 - DNA, 19 bp, Homo sapiens
  siRNA target sequence for HS6ST2 (NM_147174.2,423-441).
gccacttggtgcgtaacat

SEQ ID NO: 218801 - DNA, 19 bp, Homo sapiens
  siRNA target sequence for HS6ST2 (NM_147174.2,465-483).
gccgcgtgggtcagaagaa

SEQ ID NO: 218802 - DNA, 19 bp, Homo sapiens
  siRNA target sequence for HS6ST2 (NM_147174.2,466-484).
ccgcgtgggtcagaagaaa

SEQ ID NO: 218803 - DNA, 19 bp, Homo sapiens
  siRNA target sequence for HS6ST2 (NM_147174.2,467-485).
cgcgtgggtcagaagaaat

SEQ ID NO: 218804 - DNA, 19 bp, Homo sapiens
  siRNA target sequence for HS6ST2 (NM_147174.2,671-689).
ccagtgtcccggtacttga

SEQ ID NO: 218805 - DNA, 19 bp, Homo sapiens
  siRNA target sequence for HS6ST2 (NM_147174.2,808-826).
ctgccccctcaaagagttt

SEQ ID NO: 218806 - DNA, 19 bp, Homo sapiens
  siRNA target sequence for HS6ST2 (NM_147174.2,829-847).
ggactgtccctacaatcta

SEQ ID NO: 218807 - DNA, 19 bp, Homo sapiens
  siRNA target sequence for HS6ST2 (NM_147174.2,911-929).
gtcatgcctgaaaagcaaa

SEQ ID NO: 218808 - DNA, 19 bp, Homo sapiens
  siRNA target sequence for HS6ST2 (NM_147174.2,1004-1022).
cggaagacccaatatctgt

SEQ ID NO: 218809 - DNA, 19 bp, Homo sapiens
  siRNA target sequence for HS6ST2 (NM_147174.2,1032-1050).
ccttcaacatgaactttat

SEQ ID NO: 218810 - DNA, 19 bp, Homo sapiens
  siRNA target sequence for HS6ST2 (NM_147174.2,1053-1071).
cgccatttacccagtataa

SEQ ID NO: 218811 - DNA, 19 bp, Homo sapiens
  siRNA target sequence for HS6ST2 (NM_147174.2,1075-1093).
cactagggcctctagtgta

SEQ ID NO: 218812 - DNA, 19 bp, Homo sapiens
  siRNA target sequence for HS6ST2 (NM_147174.2,1080-1098).
gggcctctagtgtagagat

SEQ ID NO: 218813 - DNA, 19 bp, Homo sapiens
  siRNA target sequence for HS6ST2 (NM_147174.2,1083-1101).
cctctagtgtagagatcaa

SEQ ID NO: 218814 - DNA, 19 bp, Homo sapiens
  siRNA target sequence for HS6ST2 (NM_147174.2,1084-1102).
ctctagtgtagagatcaat

SEQ ID NO: 218815 - DNA, 19 bp, Homo sapiens
  siRNA target sequence for HS6ST2 (NM_147174.2,1086-1104).
ctagtgtagagatcaatga

SEQ ID NO: 218816 - DNA, 19 bp, Homo sapiens
  siRNA target sequence for HS6ST2 (NM_147174.2,1238-1256).
gaacaacgcaaatttctga

SEQ ID NO: 218817 - DNA, 19 bp, Homo sapiens
  siRNA target sequence for HS6ST2 (NM_147174.2,1483-1501).
cataggcagtgtagagaaa

SEQ ID NO: 218818 - DNA, 19 bp, Homo sapiens
  siRNA target sequence for HS6ST3 (NM_153456.1,28-46).
gatgaaaggttcaacaagt

SEQ ID NO: 218819 - DNA, 19 bp, Homo sapiens
  siRNA target sequence for HS6ST3 (NM_153456.1,428-446).
cccgcttcgtggatttcaa

SEQ ID NO: 218820 - DNA, 19 bp, Homo sapiens
  siRNA target sequence for HS6ST3 (NM_153456.1,430-448).
cgcttcgtggatttcaaca

SEQ ID NO: 218821 - DNA, 19 bp, Homo sapiens
  siRNA target sequence for HS6ST3 (NM_153456.1,722-740).
gccacaccaggaatttcta

SEQ ID NO: 218822 - DNA, 19 bp, Homo sapiens
  siRNA target sequence for HS6ST3 (NM_153456.1,724-742).
cacaccaggaatttctatt

SEQ ID NO: 218823 - DNA, 19 bp, Homo sapiens
  siRNA target sequence for HS6ST3 (NM_153456.1,901-919).
gtcagcttgcgggagttta

SEQ ID NO: 218824 - DNA, 19 bp, Homo sapiens
  siRNA target sequence for HS6ST3 (NM_153456.1,982-1000).
gtgggctgctataacttga

SEQ ID NO: 218825 - DNA, 19 bp, Homo sapiens
  siRNA target sequence for HS6ST3 (NM_153456.1,989-1007).
gctataacttgactttcat

SEQ ID NO: 218826 - DNA, 19 bp, Homo sapiens
  siRNA target sequence for HS6ST3 (NM_153456.1,1005-1023).
catgaacgagagtgaaaga

SEQ ID NO: 218827 - DNA, 19 bp, Homo sapiens
  siRNA target sequence for HS6ST3 (NM_153456.1,1210-1228).
cgcattgaggatctaaact

SEQ ID NO: 218828 - DNA, 19 bp, Homo sapiens
  siRNA target sequence for HS6ST3 (NM_153456.1,1211-1229).
gcattgaggatctaaactt

SEQ ID NO: 218829 - DNA, 19 bp, Homo sapiens
  siRNA target sequence for HS6ST3 (NM_153456.1,1240-1258).
cagctttacgagtatgcaa

SEQ ID NO: 218830 - DNA, 19 bp, Homo sapiens
  siRNA target sequence for HS6ST3 (NM_153456.1,1242-1260).
gctttacgagtatgcaaaa

SEQ ID NO: 218831 - DNA, 19 bp, Homo sapiens
  siRNA target sequence for KIAA0290 (NM_015122.1,238-256).
cgtattttggggagcattt

SEQ ID NO: 218832 - DNA, 19 bp, Homo sapiens
  siRNA target sequence for KIAA0290 (NM_015122.1,502-520).
ggaagttacaggatctcat

SEQ ID NO: 218833 - DNA, 19 bp, Homo sapiens
  siRNA target sequence for KIAA0290 (NM_015122.1,637-655).
ccaagtcccgcgagaacta

SEQ ID NO: 218834 - DNA, 19 bp, Homo sapiens
  siRNA target sequence for KIAA0290 (NM_015122.1,716-734).
ggacaaggcggagactaaa

SEQ ID NO: 218835 - DNA, 19 bp, Homo sapiens
  siRNA target sequence for KIAA0290 (NM_015122.1,717-735).
gacaaggcggagactaaaa

SEQ ID NO: 218836 - DNA, 19 bp, Homo sapiens
  siRNA target sequence for KIAA0290 (NM_015122.1,971-989).
gatgctactcaggaagttt

SEQ ID NO: 218837 - DNA, 19 bp, Homo sapiens
  siRNA target sequence for KIAA0290 (NM_015122.1,1062-1080).
caggaagcgatgaaacgtt

SEQ ID NO: 218838 - DNA, 19 bp, Homo sapiens
  siRNA target sequence for KIAA0290 (NM_015122.1,1144-1162).
ctgcagctgtagatttcct

SEQ ID NO: 218839 - DNA, 19 bp, Homo sapiens
  siRNA target sequence for KIAA0290 (NM_015122.1,1273-1291).
ccgacttcgacgatgaaga

SEQ ID NO: 218840 - DNA, 19 bp, Homo sapiens
  siRNA target sequence for KIAA0290 (NM_015122.1,1409-1427).
cccagggggcaccatgaaa

SEQ ID NO: 218841 - DNA, 19 bp, Homo sapiens
  siRNA target sequence for KIAA0290 (NM_015122.1,1560-1578).
gcctttgaccacgaagatt

SEQ ID NO: 218842 - DNA, 19 bp, Homo sapiens
  siRNA target sequence for KIAA0290 (NM_015122.1,1562-1580).
ctttgaccacgaagatttt

SEQ ID NO: 218843 - DNA, 19 bp, Homo sapiens
  siRNA target sequence for KIAA0290 (NM_015122.1,1630-1648).
cctcgtcgcccgaaaacgt

SEQ ID NO: 218844 - DNA, 19 bp, Homo sapiens
  siRNA target sequence for KIAA0290 (NM_015122.1,1946-1964).
ccctctcacacgtagcaat

SEQ ID NO: 218845 - DNA, 19 bp, Homo sapiens
  siRNA target sequence for KIAA0290 (NM_015122.1,2028-2046).
gaacggcccagcttcttat

SEQ ID NO: 218846 - DNA, 19 bp, Homo sapiens
  siRNA target sequence for KIAA0290 (NM_015122.1,2171-2189).
ctgcctggctcgagtaact

SEQ ID NO: 218847 - DNA, 19 bp, Homo sapiens
  siRNA target sequence for MAT2B (NM_013283.3,129-147).
gctctctatacactttgtt

SEQ ID NO: 218848 - DNA, 19 bp, Homo sapiens
  siRNA target sequence for MAT2B (NM_013283.3,293-311).
gagcaagaccaaaatttga

SEQ ID NO: 218849 - DNA, 19 bp, Homo sapiens
  siRNA target sequence for MAT2B (NM_013283.3,366-384).
gccccatgttatagtacat

SEQ ID NO: 218850 - DNA, 19 bp, Homo sapiens
  siRNA target sequence for MAT2B (NM_013283.3,427-445).
gatgctgcctctcaactta

SEQ ID NO: 218851 - DNA, 19 bp, Homo sapiens
  siRNA target sequence for MAT2B (NM_013283.3,455-473).
cttctgggaatttagcaaa

SEQ ID NO: 218852 - DNA, 19 bp, Homo sapiens
  siRNA target sequence for MAT2B (NM_013283.3,485-503).
ctgttggagcatttctcat

SEQ ID NO: 218853 - DNA, 19 bp, Homo sapiens
  siRNA target sequence for MAT2B (NM_013283.3,490-508).
ggagcatttctcatctaca

SEQ ID NO: 218854 - DNA, 19 bp, Homo sapiens
  siRNA target sequence for MAT2B (NM_013283.3,491-509).
gagcatttctcatctacat

SEQ ID NO: 218855 - DNA, 19 bp, Homo sapiens
  siRNA target sequence for MAT2B (NM_013283.3,513-531).
ctcagattatgtatttgat

SEQ ID NO: 218856 - DNA, 19 bp, Homo sapiens
  siRNA target sequence for MAT2B (NM_013283.3,561-579).
cataccagctcccctaaat

SEQ ID NO: 218857 - DNA, 19 bp, Homo sapiens
  siRNA target sequence for MAT2B (NM_013283.3,565-583).
ccagctcccctaaatttgt

SEQ ID NO: 218858 - DNA, 19 bp, Homo sapiens
  siRNA target sequence for MAT2B (NM_013283.3,566-584).
cagctcccctaaatttgta

SEQ ID NO: 218859 - DNA, 19 bp, Homo sapiens
  siRNA target sequence for MAT2B (NM_013283.3,648-666).
gaggattcctattctgtat

SEQ ID NO: 218860 - DNA, 19 bp, Homo sapiens
  siRNA target sequence for MAT2B (NM_013283.3,695-713).
ctgtgactgttatgtttga

SEQ ID NO: 218861 - DNA, 19 bp, Homo sapiens
  siRNA target sequence for MAT2B (NM_013283.3,697-715).
gtgactgttatgtttgata

SEQ ID NO: 218862 - DNA, 19 bp, Homo sapiens
  siRNA target sequence for MAT2B (NM_013283.3,728-746).
gcaacaagtcagcaaacat

SEQ ID NO: 218863 - DNA, 19 bp, Homo sapiens
  siRNA target sequence for MAT2B (NM_013283.3,768-786).
ccccacacatgtcaaagat

SEQ ID NO: 218864 - DNA, 19 bp, Homo sapiens
  siRNA target sequence for MAT2B (NM_013283.3,821-839).
gaatgctggatccatcaat

SEQ ID NO: 218865 - DNA, 19 bp, Homo sapiens
  siRNA target sequence for MAT2B (NM_013283.3,862-880).
ggcaatgaacagatgacta

SEQ ID NO: 218866 - DNA, 19 bp, Homo sapiens
  siRNA target sequence for MAT2B (NM_013283.3,988-1006).
cagcttgactgctccaaat

SEQ ID NO: 218867 - DNA, 19 bp, Homo sapiens
  siRNA target sequence for MAT2B (NM_013283.3,1026-1044).
ccaacgaacaccatttcga

SEQ ID NO: 218868 - DNA, 19 bp, Homo sapiens
  siRNA target sequence for MAT2B (NM_013283.3,1027-1045).
caacgaacaccatttcgaa

SEQ ID NO: 218869 - DNA, 19 bp, Homo sapiens
  siRNA target sequence for MAT2B (NM_013283.3,1034-1052).
caccatttcgaattggaat

SEQ ID NO: 218870 - DNA, 19 bp, Homo sapiens
  siRNA target sequence for MAT2B (NM_013283.3,1037-1055).
catttcgaattggaatcaa

SEQ ID NO: 218871 - DNA, 19 bp, Homo sapiens
  siRNA target sequence for MAT2B (NM_013283.3,1091-1109).
ggagacaaacggtctttca

SEQ ID NO: 218872 - DNA, 19 bp, Homo sapiens
  siRNA target sequence for MAT2B (NM_013283.3,1092-1110).
gagacaaacggtctttcat

SEQ ID NO: 218873 - DNA, 19 bp, Homo sapiens
  siRNA target sequence for MMAB (NM_052845.1,184-202).
ccaggatccccaagattta

SEQ ID NO: 218874 - DNA, 19 bp, Homo sapiens
  siRNA target sequence for MMAB (NM_052845.1,192-210).
cccaagatttacaccaaaa

SEQ ID NO: 218875 - DNA, 19 bp, Homo sapiens
  siRNA target sequence for MMAB (NM_052845.1,257-275).
caaagatgaccaagtgttt

SEQ ID NO: 218876 - DNA, 19 bp, Homo sapiens
  siRNA target sequence for MMAB (NM_052845.1,433-451).
gggaggctcacttaaagta

SEQ ID NO: 218877 - DNA, 19 bp, Homo sapiens
  siRNA target sequence for MMAB (NM_052845.1,434-452).
ggaggctcacttaaagtat

SEQ ID NO: 218878 - DNA, 19 bp, Homo sapiens
  siRNA target sequence for MMAB (NM_052845.1,489-507).
cagtggatcgacaagtaca

SEQ ID NO: 218879 - DNA, 19 bp, Homo sapiens
  siRNA target sequence for MMAB (NM_052845.1,645-663).
gcgaacgtggccaagttct

SEQ ID NO: 218880 - DNA, 19 bp, Homo sapiens
  siRNA target sequence for MMAB (NM_052845.1,689-707).
cacgctagccagatatgca

SEQ ID NO: 218881 - DNA, 19 bp, Homo sapiens
  siRNA target sequence for MTRR (NM_002454.1,88-106).
gtttctgttactatatgct

SEQ ID NO: 218882 - DNA, 19 bp, Homo sapiens
  siRNA target sequence for MTRR (NM_002454.1,174-192).
ctgcagatcttcactgtat

SEQ ID NO: 218883 - DNA, 19 bp, Homo sapiens
  siRNA target sequence for MTRR (NM_002454.1,195-213).
gtgaatccgataagtatga

SEQ ID NO: 218884 - DNA, 19 bp, Homo sapiens
  siRNA target sequence for MTRR (NM_002454.1,201-219).
ccgataagtatgacctaaa

SEQ ID NO: 218885 - DNA, 19 bp, Homo sapiens
  siRNA target sequence for MTRR (NM_002454.1,202-220).
cgataagtatgacctaaaa

SEQ ID NO: 218886 - DNA, 19 bp, Homo sapiens
  siRNA target sequence for MTRR (NM_002454.1,223-241).
cgaaacagctcctcttgtt

SEQ ID NO: 218887 - DNA, 19 bp, Homo sapiens
  siRNA target sequence for MTRR (NM_002454.1,277-295).
cgacacagcccgcaagttt

SEQ ID NO: 218888 - DNA, 19 bp, Homo sapiens
  siRNA target sequence for MTRR (NM_002454.1,280-298).
cacagcccgcaagtttgtt

SEQ ID NO: 218889 - DNA, 19 bp, Homo sapiens
  siRNA target sequence for MTRR (NM_002454.1,282-300).
cagcccgcaagtttgttaa

SEQ ID NO: 218890 - DNA, 19 bp, Homo sapiens
  siRNA target sequence for MTRR (NM_002454.1,314-332).
caaacactgccggttgatt

SEQ ID NO: 218891 - DNA, 19 bp, Homo sapiens
  siRNA target sequence for MTRR (NM_002454.1,318-336).
cactgccggttgatttctt

SEQ ID NO: 218892 - DNA, 19 bp, Homo sapiens
  siRNA target sequence for MTRR (NM_002454.1,361-379).
gggtctcggtgattcagaa

SEQ ID NO: 218893 - DNA, 19 bp, Homo sapiens
  siRNA target sequence for MTRR (NM_002454.1,362-380).
ggtctcggtgattcagaat

SEQ ID NO: 218894 - DNA, 19 bp, Homo sapiens
  siRNA target sequence for MTRR (NM_002454.1,399-417).
gggggaagataattgataa

SEQ ID NO: 218895 - DNA, 19 bp, Homo sapiens
  siRNA target sequence for MTRR (NM_002454.1,403-421).
gaagataattgataaacga

SEQ ID NO: 218896 - DNA, 19 bp, Homo sapiens
  siRNA target sequence for MTRR (NM_002454.1,472-490).
ctgtgtaggtttagaactt

SEQ ID NO: 218897 - DNA, 19 bp, Homo sapiens
  siRNA target sequence for MTRR (NM_002454.1,474-492).
gtgtaggtttagaacttgt

SEQ ID NO: 218898 - DNA, 19 bp, Homo sapiens
  siRNA target sequence for MTRR (NM_002454.1,524-542).
gccctcagaaagcatttta

SEQ ID NO: 218899 - DNA, 19 bp, Homo sapiens
  siRNA target sequence for MTRR (NM_002454.1,622-640).
gtcagagctgctacacatt

SEQ ID NO: 218900 - DNA, 19 bp, Homo sapiens
  siRNA target sequence for MTRR (NM_002454.1,626-644).
gagctgctacacattgaat

SEQ ID NO: 218901 - DNA, 19 bp, Homo sapiens
  siRNA target sequence for MTRR (NM_002454.1,628-646).
gctgctacacattgaatct

SEQ ID NO: 218902 - DNA, 19 bp, Homo sapiens
  siRNA target sequence for MTRR (NM_002454.1,631-649).
gctacacattgaatctcaa

SEQ ID NO: 218903 - DNA, 19 bp, Homo sapiens
  siRNA target sequence for MTRR (NM_002454.1,652-670).
cgagcttctgagattcgat

SEQ ID NO: 218904 - DNA, 19 bp, Homo sapiens
  siRNA target sequence for MTRR (NM_002454.1,656-674).
cttctgagattcgatgatt

SEQ ID NO: 218905 - DNA, 19 bp, Homo sapiens
  siRNA target sequence for MTRR (NM_002454.1,694-712).
ggttttgaagcaaaatgca

SEQ ID NO: 218906 - DNA, 19 bp, Homo sapiens
  siRNA target sequence for MTRR (NM_002454.1,710-728).
gcagtgaacagcaaccaat

SEQ ID NO: 218907 - DNA, 19 bp, Homo sapiens
  siRNA target sequence for MTRR (NM_002454.1,715-733).
gaacagcaaccaatccaat

SEQ ID NO: 218908 - DNA, 19 bp, Homo sapiens
  siRNA target sequence for MTRR (NM_002454.1,718-736).
cagcaaccaatccaatgtt

SEQ ID NO: 218909 - DNA, 19 bp, Homo sapiens
  siRNA target sequence for MTRR (NM_002454.1,720-738).
gcaaccaatccaatgttgt

SEQ ID NO: 218910 - DNA, 19 bp, Homo sapiens
  siRNA target sequence for MTRR (NM_002454.1,721-739).
caaccaatccaatgttgta

SEQ ID NO: 218911 - DNA, 19 bp, Homo sapiens
  siRNA target sequence for MTRR (NM_002454.1,724-742).
ccaatccaatgttgtaatt

SEQ ID NO: 218912 - DNA, 19 bp, Homo sapiens
  siRNA target sequence for MTRR (NM_002454.1,729-747).
ccaatgttgtaattgaaga

SEQ ID NO: 218913 - DNA, 19 bp, Homo sapiens
  siRNA target sequence for MTRR (NM_002454.1,784-802).
ctcacaagcctctctgaat

SEQ ID NO: 218914 - DNA, 19 bp, Homo sapiens
  siRNA target sequence for MTRR (NM_002454.1,807-825).
ctggtttacccccagaata

SEQ ID NO: 218915 - DNA, 19 bp, Homo sapiens
  siRNA target sequence for MTRR (NM_002454.1,809-827).
ggtttacccccagaatatt

SEQ ID NO: 218916 - DNA, 19 bp, Homo sapiens
  siRNA target sequence for MTRR (NM_002454.1,810-828).
gtttacccccagaatattt

SEQ ID NO: 218917 - DNA, 19 bp, Homo sapiens
  siRNA target sequence for MTRR (NM_002454.1,882-900).
cttcagcagatccagtttt

SEQ ID NO: 218918 - DNA, 19 bp, Homo sapiens
  siRNA target sequence for MTRR (NM_002454.1,933-951).
ctacgaatgatgccataaa

SEQ ID NO: 218919 - DNA, 19 bp, Homo sapiens
  siRNA target sequence for MTRR (NM_002454.1,962-980).
ctggtagaattggacattt

SEQ ID NO: 218920 - DNA, 19 bp, Homo sapiens
  siRNA target sequence for MTRR (NM_002454.1,1021-1039).
cgtgatctgccctaacagt

SEQ ID NO: 218921 - DNA, 19 bp, Homo sapiens
  siRNA target sequence for MTRR (NM_002454.1,1072-1090).
gcagcttgaagataaaaga

SEQ ID NO: 218922 - DNA, 19 bp, Homo sapiens
  siRNA target sequence for MTRR (NM_002454.1,1091-1109).
gagcactgcgtccttttga

SEQ ID NO: 218923 - DNA, 19 bp, Homo sapiens
  siRNA target sequence for MTRR (NM_002454.1,1093-1111).
gcactgcgtccttttgaaa

SEQ ID NO: 218924 - DNA, 19 bp, Homo sapiens
  siRNA target sequence for MTRR (NM_002454.1,1129-1147).
gaagaaaggagctacctta

SEQ ID NO: 218925 - DNA, 19 bp, Homo sapiens
  siRNA target sequence for MTRR (NM_002454.1,1140-1158).
ctaccttaccccagcatat

SEQ ID NO: 218926 - DNA, 19 bp, Homo sapiens
  siRNA target sequence for MTRR (NM_002454.1,1144-1162).
cttaccccagcatatacct

SEQ ID NO: 218927 - DNA, 19 bp, Homo sapiens
  siRNA target sequence for MTRR (NM_002454.1,1202-1220).
gaaatccgagcaattccta

SEQ ID NO: 218928 - DNA, 19 bp, Homo sapiens
  siRNA target sequence for MTRR (NM_002454.1,1238-1256).
gcccttgtggactatacca

SEQ ID NO: 218929 - DNA, 19 bp, Homo sapiens
  siRNA target sequence for MTRR (NM_002454.1,1312-1330).
cgattatagccgctttgta

SEQ ID NO: 218930 - DNA, 19 bp, Homo sapiens
  siRNA target sequence for MTRR (NM_002454.1,1395-1413).
gtctcctgctcgaacatct

SEQ ID NO: 218931 - DNA, 19 bp, Homo sapiens
  siRNA target sequence for MTRR (NM_002454.1,1402-1420).
gctcgaacatcttcctaaa

SEQ ID NO: 218932 - DNA, 19 bp, Homo sapiens
  siRNA target sequence for MTRR (NM_002454.1,1421-1439).
cttcaacccagaccatatt

SEQ ID NO: 218933 - DNA, 19 bp, Homo sapiens
  siRNA target sequence for MTRR (NM_002454.1,1424-1442).
caacccagaccatattcgt

SEQ ID NO: 218934 - DNA, 19 bp, Homo sapiens
  siRNA target sequence for MTRR (NM_002454.1,1443-1461).
gtgcaagctcaagtttatt

SEQ ID NO: 218935 - DNA, 19 bp, Homo sapiens
  siRNA target sequence for MTRR (NM_002454.1,1529-1547).
ctgcggaagggagtatgta

SEQ ID NO: 218936 - DNA, 19 bp, Homo sapiens
  siRNA target sequence for MTRR (NM_002454.1,1561-1579).
cttgttggttgcttcagtt

SEQ ID NO: 218937 - DNA, 19 bp, Homo sapiens
  siRNA target sequence for MTRR (NM_002454.1,1622-1640).
gccctggctcctaagatat

SEQ ID NO: 218938 - DNA, 19 bp, Homo sapiens
  siRNA target sequence for MTRR (NM_002454.1,1645-1663).
ctctcctcgaacaacaaat

SEQ ID NO: 218939 - DNA, 19 bp, Homo sapiens
  siRNA target sequence for MTRR (NM_002454.1,1649-1667).
cctcgaacaacaaattctt

SEQ ID NO: 218940 - DNA, 19 bp, Homo sapiens
  siRNA target sequence for MTRR (NM_002454.1,1650-1668).
ctcgaacaacaaattcttt

SEQ ID NO: 218941 - DNA, 19 bp, Homo sapiens
  siRNA target sequence for MTRR (NM_002454.1,1684-1702).
cccctcaatccccatcata

SEQ ID NO: 218942 - DNA, 19 bp, Homo sapiens
  siRNA target sequence for MTRR (NM_002454.1,1689-1707).
caatccccatcataatggt

SEQ ID NO: 218943 - DNA, 19 bp, Homo sapiens
  siRNA target sequence for MTRR (NM_002454.1,1719-1737).
ccggcatagccccgtttat

SEQ ID NO: 218944 - DNA, 19 bp, Homo sapiens
  siRNA target sequence for MTRR (NM_002454.1,1720-1738).
cggcatagccccgtttatt

SEQ ID NO: 218945 - DNA, 19 bp, Homo sapiens
  siRNA target sequence for MTRR (NM_002454.1,1867-1885).
ccttaagcatgggatctta

SEQ ID NO: 218946 - DNA, 19 bp, Homo sapiens
  siRNA target sequence for MTRR (NM_002454.1,1873-1891).
gcatgggatcttaactcat

SEQ ID NO: 218947 - DNA, 19 bp, Homo sapiens
  siRNA target sequence for MTRR (NM_002454.1,1877-1895).
gggatcttaactcatctaa

SEQ ID NO: 218948 - DNA, 19 bp, Homo sapiens
  siRNA target sequence for MTRR (NM_002454.1,1878-1896).
ggatcttaactcatctaaa

SEQ ID NO: 218949 - DNA, 19 bp, Homo sapiens
  siRNA target sequence for MTRR (NM_002454.1,1897-1915).
ggtttccttctcaagagat

SEQ ID NO: 218950 - DNA, 19 bp, Homo sapiens
  siRNA target sequence for MTRR (NM_002454.1,2005-2023).
ggagaacggccatatttat

SEQ ID NO: 218951 - DNA, 19 bp, Homo sapiens
  siRNA target sequence for MTRR (NM_002454.1,2028-2046).
gtggagatgcaaagaatat

SEQ ID NO: 218952 - DNA, 19 bp, Homo sapiens
  siRNA target sequence for MTRR (NM_002454.1,2047-2065).
ggccaaggatgtacatgat

SEQ ID NO: 218953 - DNA, 19 bp, Homo sapiens
  siRNA target sequence for MTRR (NM_002454.1,2063-2081).
gatgcccttgtgcaaataa

SEQ ID NO: 218954 - DNA, 19 bp, Homo sapiens
  siRNA target sequence for MTRR (NM_002454.1,2092-2110).
ggttggagttgaaaaacta

SEQ ID NO: 218955 - DNA, 19 bp, Homo sapiens
  siRNA target sequence for MTRR (NM_002454.1,2150-2168).
cgctaccttcaggatattt

SEQ ID NO: 218956 - DNA, 19 bp, Homo sapiens
  siRNA target sequence for MTRR (NM_024010.1,75-93).
cgcgttgtgcagtttcact

SEQ ID NO: 218957 - DNA, 19 bp, Homo sapiens
  siRNA target sequence for PIGM (NM_145167.1,242-260).
gcgaatggctcctgaactt

SEQ ID NO: 218958 - DNA, 19 bp, Homo sapiens
  siRNA target sequence for PIGM (NM_145167.1,302-320).
ccagagtcgccctggtttt

SEQ ID NO: 218959 - DNA, 19 bp, Homo sapiens
  siRNA target sequence for PIGM (NM_145167.1,305-323).
gagtcgccctggttttcta

SEQ ID NO: 218960 - DNA, 19 bp, Homo sapiens
  siRNA target sequence for PIGM (NM_145167.1,532-550).
ctcaccgctttcctcttat

SEQ ID NO: 218961 - DNA, 19 bp, Homo sapiens
  siRNA target sequence for PIGM (NM_145167.1,647-665).
gcggtaatgcggactctat

SEQ ID NO: 218962 - DNA, 19 bp, Homo sapiens
  siRNA target sequence for PIGM (NM_145167.1,648-666).
cggtaatgcggactctatt

SEQ ID NO: 218963 - DNA, 19 bp, Homo sapiens
  siRNA target sequence for PIGM (NM_145167.1,650-668).
gtaatgcggactctattgt

SEQ ID NO: 218964 - DNA, 19 bp, Homo sapiens
  siRNA target sequence for PIGM (NM_145167.1,682-700).
ctgatggtcctctacttga

SEQ ID NO: 218965 - DNA, 19 bp, Homo sapiens
  siRNA target sequence for PIGM (NM_145167.1,684-702).
gatggtcctctacttgata

SEQ ID NO: 218966 - DNA, 19 bp, Homo sapiens
  siRNA target sequence for PIGM (NM_145167.1,719-737).
cgtgtgcagctgtattcta

SEQ ID NO: 218967 - DNA, 19 bp, Homo sapiens
  siRNA target sequence for PIGM (NM_145167.1,720-738).
gtgtgcagctgtattctat

SEQ ID NO: 218968 - DNA, 19 bp, Homo sapiens
  siRNA target sequence for PIGM (NM_145167.1,739-757).
ggtttcgcggtgcatatga

SEQ ID NO: 218969 - DNA, 19 bp, Homo sapiens
  siRNA target sequence for PIGM (NM_145167.1,740-758).
gtttcgcggtgcatatgaa

SEQ ID NO: 218970 - DNA, 19 bp, Homo sapiens
  siRNA target sequence for PIGM (NM_145167.1,744-762).
cgcggtgcatatgaagata

SEQ ID NO: 218971 - DNA, 19 bp, Homo sapiens
  siRNA target sequence for PIGM (NM_145167.1,745-763).
gcggtgcatatgaagatat

SEQ ID NO: 218972 - DNA, 19 bp, Homo sapiens
  siRNA target sequence for PIGM (NM_145167.1,746-764).
cggtgcatatgaagatata

SEQ ID NO: 218973 - DNA, 19 bp, Homo sapiens
  siRNA target sequence for PIGM (NM_145167.1,805-823).
ccagatcgcgacaatgaca

SEQ ID NO: 218974 - DNA, 19 bp, Homo sapiens
  siRNA target sequence for PIGM (NM_145167.1,806-824).
cagatcgcgacaatgacaa

SEQ ID NO: 218975 - DNA, 19 bp, Homo sapiens
  siRNA target sequence for PIGM (NM_145167.1,808-826).
gatcgcgacaatgacaaaa

SEQ ID NO: 218976 - DNA, 19 bp, Homo sapiens
  siRNA target sequence for PIGM (NM_145167.1,832-850).
cgtcaattccggtacactt

SEQ ID NO: 218977 - DNA, 19 bp, Homo sapiens
  siRNA target sequence for PIGM (NM_145167.1,833-851).
gtcaattccggtacacttt

SEQ ID NO: 218978 - DNA, 19 bp, Homo sapiens
  siRNA target sequence for PIGM (NM_145167.1,961-979).
gagtacggctgggaatttt

SEQ ID NO: 218979 - DNA, 19 bp, Homo sapiens
  siRNA target sequence for PIGM (NM_145167.1,981-999).
ggaacacacctacttttat

SEQ ID NO: 218980 - DNA, 19 bp, Homo sapiens
  siRNA target sequence for PIGM (NM_145167.1,1013-1031).
gggatatccgtcacaactt

SEQ ID NO: 218981 - DNA, 19 bp, Homo sapiens
  siRNA target sequence for PIGM (NM_145167.1,1015-1033).
gatatccgtcacaactttt

SEQ ID NO: 218982 - DNA, 19 bp, Homo sapiens
  siRNA target sequence for PIGM (NM_145167.1,1130-1148).
ctgtgtctttcgcctatta

SEQ ID NO: 218983 - DNA, 19 bp, Homo sapiens
  siRNA target sequence for PIGM (NM_145167.1,1132-1150).
gtgtctttcgcctattaca

SEQ ID NO: 218984 - DNA, 19 bp, Homo sapiens
  siRNA target sequence for PIGM (NM_145167.1,1134-1152).
gtctttcgcctattacaga

SEQ ID NO: 218985 - DNA, 19 bp, Homo sapiens
  siRNA target sequence for PIGM (NM_145167.1,1149-1167).
cagagacctcgttttttgt

SEQ ID NO: 218986 - DNA, 19 bp, Homo sapiens
  siRNA target sequence for PIGM (NM_145167.1,1192-1210).
gtgacttttaacaaagtct

SEQ ID NO: 218987 - DNA, 19 bp, Homo sapiens
  siRNA target sequence for PIGM (NM_145167.1,1209-1227).
ctgcacctcccagtacttt

SEQ ID NO: 218988 - DNA, 19 bp, Homo sapiens
  siRNA target sequence for PIGM (NM_145167.1,1211-1229).
gcacctcccagtactttct

SEQ ID NO: 218989 - DNA, 19 bp, Homo sapiens
  siRNA target sequence for PIGM (NM_145167.1,1212-1230).
cacctcccagtactttctt

SEQ ID NO: 218990 - DNA, 19 bp, Homo sapiens
  siRNA target sequence for PIGM (NM_145167.1,1217-1235).
cccagtactttctttggta

SEQ ID NO: 218991 - DNA, 19 bp, Homo sapiens
  siRNA target sequence for PIGM (NM_145167.1,1241-1259).
gcttactgcctcttgtgat

SEQ ID NO: 218992 - DNA, 19 bp, Homo sapiens
  siRNA target sequence for PIGM (NM_145167.1,1280-1298).
ggaaaagagctgtagttct

SEQ ID NO: 218993 - DNA, 19 bp, Homo sapiens
  siRNA target sequence for PIGM (NM_145167.1,1286-1304).
gagctgtagttctcctaat

SEQ ID NO: 218994 - DNA, 19 bp, Homo sapiens
  siRNA target sequence for PIGM (NM_145167.1,1288-1306).
gctgtagttctcctaatgt

SEQ ID NO: 218995 - DNA, 19 bp, Homo sapiens
  siRNA target sequence for PIGM (NM_145167.1,1289-1307).
ctgtagttctcctaatgtt

SEQ ID NO: 218996 - DNA, 19 bp, Homo sapiens
  siRNA target sequence for PIGM (NM_145167.1,1340-1358).
ctgcctatgttctagagtt

SEQ ID NO: 218997 - DNA, 19 bp, Homo sapiens
  siRNA target sequence for PNR (NM_003967.1,124-142).
gcagcaggcatgctgatta

SEQ ID NO: 218998 - DNA, 19 bp, Homo sapiens
  siRNA target sequence for PNR (NM_003967.1,125-143).
cagcaggcatgctgattat

SEQ ID NO: 218999 - DNA, 19 bp, Homo sapiens
  siRNA target sequence for PNR (NM_003967.1,128-146).
caggcatgctgattatcgt

SEQ ID NO: 219000 - DNA, 19 bp, Homo sapiens
  siRNA target sequence for PNR (NM_003967.1,144-162).
cgtgctagggaatgtattt

SEQ ID NO: 219001 - DNA, 19 bp, Homo sapiens
  siRNA target sequence for PNR (NM_003967.1,481-499).
gtgcccgcagcatacactt

SEQ ID NO: 219002 - DNA, 19 bp, Homo sapiens
  siRNA target sequence for PNR (NM_003967.1,486-504).
cgcagcatacacttcgtta

SEQ ID NO: 219003 - DNA, 19 bp, Homo sapiens
  siRNA target sequence for PNR (NM_003967.1,487-505).
gcagcatacacttcgttat

SEQ ID NO: 219004 - DNA, 19 bp, Homo sapiens
  siRNA target sequence for PNR (NM_003967.1,605-623).
ggttaaacttccctttgtt

SEQ ID NO: 219005 - DNA, 19 bp, Homo sapiens
  siRNA target sequence for PNR (NM_003967.1,823-841).
gacagcctccttcacttta

SEQ ID NO: 219006 - DNA, 19 bp, Homo sapiens
  siRNA target sequence for PNR (NM_003967.1,848-866).
ccccactggtctttgacat

SEQ ID NO: 219007 - DNA, 19 bp, Homo sapiens
  siRNA target sequence for PNR (NM_003967.1,933-951).
gtttcggaaggcactgaaa

SEQ ID NO: 219008 - DNA, 19 bp, Homo sapiens
  siRNA target sequence for PNR (NM_003967.1,994-1012).
gttgatttgtaccaagaat

SEQ ID NO: 219009 - DNA, 19 bp, Homo sapiens
  siRNA target sequence for PTDSS1 (NM_014754.1,128-146).
ccctaagcaaggatgatgt

SEQ ID NO: 219010 - DNA, 19 bp, Homo sapiens
  siRNA target sequence for PTDSS1 (NM_014754.1,397-415).
gccttatggcgaatggttt

SEQ ID NO: 219011 - DNA, 19 bp, Homo sapiens
  siRNA target sequence for PTDSS1 (NM_014754.1,398-416).
ccttatggcgaatggtttt

SEQ ID NO: 219012 - DNA, 19 bp, Homo sapiens
  siRNA target sequence for PTDSS1 (NM_014754.1,471-489).
cgagcaggttaaatctcta

SEQ ID NO: 219013 - DNA, 19 bp, Homo sapiens
  siRNA target sequence for PTDSS1 (NM_014754.1,472-490).
gagcaggttaaatctctaa

SEQ ID NO: 219014 - DNA, 19 bp, Homo sapiens
  siRNA target sequence for PTDSS1 (NM_014754.1,581-599).
ggattatcagccactttga

SEQ ID NO: 219015 - DNA, 19 bp, Homo sapiens
  siRNA target sequence for PTDSS1 (NM_014754.1,641-659).
ccttgctgatccgtagtta

SEQ ID NO: 219016 - DNA, 19 bp, Homo sapiens
  siRNA target sequence for PTDSS1 (NM_014754.1,666-684).
ctgctggacaatcagtatt

SEQ ID NO: 219017 - DNA, 19 bp, Homo sapiens
  siRNA target sequence for PTDSS1 (NM_014754.1,740-758).
gctggtgggatcaagtcat

SEQ ID NO: 219018 - DNA, 19 bp, Homo sapiens
  siRNA target sequence for PTDSS1 (NM_014754.1,741-759).
ctggtgggatcaagtcatt

SEQ ID NO: 219019 - DNA, 19 bp, Homo sapiens
  siRNA target sequence for PTDSS1 (NM_014754.1,743-761).
ggtgggatcaagtcattct

SEQ ID NO: 219020 - DNA, 19 bp, Homo sapiens
  siRNA target sequence for PTDSS1 (NM_014754.1,804-822).
ggtcgtttgccggttttta

SEQ ID NO: 219021 - DNA, 19 bp, Homo sapiens
  siRNA target sequence for PTDSS1 (NM_014754.1,918-936).
gacctatgttcgatggttt

SEQ ID NO: 219022 - DNA, 19 bp, Homo sapiens
  siRNA target sequence for PTDSS1 (NM_014754.1,961-979).
gtagctggagtgtaccttt

SEQ ID NO: 219023 - DNA, 19 bp, Homo sapiens
  siRNA target sequence for PTDSS1 (NM_014754.1,967-985).
ggagtgtaccttttcatga

SEQ ID NO: 219024 - DNA, 19 bp, Homo sapiens
  siRNA target sequence for PTDSS1 (NM_014754.1,968-986).
gagtgtaccttttcatgat

SEQ ID NO: 219025 - DNA, 19 bp, Homo sapiens
  siRNA target sequence for PTDSS1 (NM_014754.1,970-988).
gtgtaccttttcatgatca

SEQ ID NO: 219026 - DNA, 19 bp, Homo sapiens
  siRNA target sequence for PTDSS1 (NM_014754.1,1003-1021).
gagttgaataccttcttct

SEQ ID NO: 219027 - DNA, 19 bp, Homo sapiens
  siRNA target sequence for PTDSS1 (NM_014754.1,1041-1059).
ccaagccagtcatccatta

SEQ ID NO: 219028 - DNA, 19 bp, Homo sapiens
  siRNA target sequence for PTDSS1 (NM_014754.1,1042-1060).
caagccagtcatccattaa

SEQ ID NO: 219029 - DNA, 19 bp, Homo sapiens
  siRNA target sequence for PTDSS1 (NM_014754.1,1045-1063).
gccagtcatccattaagtt

SEQ ID NO: 219030 - DNA, 19 bp, Homo sapiens
  siRNA target sequence for PTDSS1 (NM_014754.1,1055-1073).
cattaagttggggtagaat

SEQ ID NO: 219031 - DNA, 19 bp, Homo sapiens
  siRNA target sequence for PTDSS1 (NM_014754.1,1064-1082).
ggggtagaattctctttat

SEQ ID NO: 219032 - DNA, 19 bp, Homo sapiens
  siRNA target sequence for PTDSS1 (NM_014754.1,1100-1118).
ccacagtgagacagtacta

SEQ ID NO: 219033 - DNA, 19 bp, Homo sapiens
  siRNA target sequence for PTDSS1 (NM_014754.1,1143-1161).
caagcgcgtaggaacacaa

SEQ ID NO: 219034 - DNA, 19 bp, Homo sapiens
  siRNA target sequence for PTDSS1 (NM_014754.1,1238-1256).
cccaaatactctatgttgt

SEQ ID NO: 219035 - DNA, 19 bp, Homo sapiens
  siRNA target sequence for PTDSS1 (NM_014754.1,1297-1315).
ctgtacggcatgatttggt

SEQ ID NO: 219036 - DNA, 19 bp, Homo sapiens
  siRNA target sequence for PTDSS1 (NM_014754.1,1299-1317).
gtacggcatgatttggtat

SEQ ID NO: 219037 - DNA, 19 bp, Homo sapiens
  siRNA target sequence for PTDSS1 (NM_014754.1,1438-1456).
catgcaggcaacaacgaaa

SEQ ID NO: 219038 - DNA, 19 bp, Homo sapiens
  siRNA target sequence for PTDSS1 (NM_014754.1,1472-1490).
gaaggaatcggcattccaa

SEQ ID NO: 219039 - DNA, 19 bp, Homo sapiens
  siRNA target sequence for PTDSS1 (NM_014754.1,1483-1501).
cattccaagtcaaaagtca

SEQ ID NO: 219040 - DNA, 19 bp, Homo sapiens
  siRNA target sequence for TBDN100 (NM_025085.2,324-342).
gcggatcttgaggtgttat

SEQ ID NO: 219041 - DNA, 19 bp, Homo sapiens
  siRNA target sequence for TBDN100 (NM_025085.2,326-344).
ggatcttgaggtgttatga

SEQ ID NO: 219042 - DNA, 19 bp, Homo sapiens
  siRNA target sequence for TBDN100 (NM_025085.2,327-345).
gatcttgaggtgttatgaa

SEQ ID NO: 219043 - DNA, 19 bp, Homo sapiens
  siRNA target sequence for TBDN100 (NM_025085.2,377-395).
gtaaacaaatactttctaa

SEQ ID NO: 219044 - DNA, 19 bp, Homo sapiens
  siRNA target sequence for TBDN100 (NM_025085.2,483-501).
ggttcgtagaggtttgaga

SEQ ID NO: 219045 - DNA, 19 bp, Homo sapiens
  siRNA target sequence for TBDN100 (NM_025085.2,549-567).
gaggtcagacaagaagtat

SEQ ID NO: 219046 - DNA, 19 bp, Homo sapiens
  siRNA target sequence for TBDN100 (NM_025085.2,571-589).
gaagccattaagtgttaca

SEQ ID NO: 219047 - DNA, 19 bp, Homo sapiens
  siRNA target sequence for TBDN100 (NM_025085.2,627-645).
cttaagggacctttcctta

SEQ ID NO: 219048 - DNA, 19 bp, Homo sapiens
  siRNA target sequence for TBDN100 (NM_025085.2,632-650).
gggacctttccttactaca

SEQ ID NO: 219049 - DNA, 19 bp, Homo sapiens
  siRNA target sequence for TBDN100 (NM_025085.2,680-698).
gggaaacgaggtatcagtt

SEQ ID NO: 219050 - DNA, 19 bp, Homo sapiens
  siRNA target sequence for TBDN100 (NM_025085.2,681-699).
ggaaacgaggtatcagtta

SEQ ID NO: 219051 - DNA, 19 bp, Homo sapiens
  siRNA target sequence for TBDN100 (NM_025085.2,686-704).
cgaggtatcagttacttca

SEQ ID NO: 219052 - DNA, 19 bp, Homo sapiens
  siRNA target sequence for TBDN100 (NM_025085.2,742-760).
gctattgcttaccatttat

SEQ ID NO: 219053 - DNA, 19 bp, Homo sapiens
  siRNA target sequence for TBDN100 (NM_025085.2,743-761).
ctattgcttaccatttatt

SEQ ID NO: 219054 - DNA, 19 bp, Homo sapiens
  siRNA target sequence for TBDN100 (NM_025085.2,821-839).
cccctgacaaggtggatta

SEQ ID NO: 219055 - DNA, 19 bp, Homo sapiens
  siRNA target sequence for TBDN100 (NM_025085.2,848-866).
gtgaactactcttatatca

SEQ ID NO: 219056 - DNA, 19 bp, Homo sapiens
  siRNA target sequence for TBDN100 (NM_025085.2,850-868).
gaactactcttatatcaga

SEQ ID NO: 219057 - DNA, 19 bp, Homo sapiens
  siRNA target sequence for TBDN100 (NM_025085.2,858-876).
cttatatcagaatcaagtt

SEQ ID NO: 219058 - DNA, 19 bp, Homo sapiens
  siRNA target sequence for TBDN100 (NM_025085.2,880-898).
cgggaagcaggtctctata

SEQ ID NO: 219059 - DNA, 19 bp, Homo sapiens
  siRNA target sequence for TBDN100 (NM_025085.2,894-912).
ctatagagaagctttggaa

SEQ ID NO: 219060 - DNA, 19 bp, Homo sapiens
  siRNA target sequence for TBDN100 (NM_025085.2,909-927).
ggaacatctttgtacctat

SEQ ID NO: 219061 - DNA, 19 bp, Homo sapiens
  siRNA target sequence for TBDN100 (NM_025085.2,973-991).
gaacttctgttgcaactat

SEQ ID NO: 219062 - DNA, 19 bp, Homo sapiens
  siRNA target sequence for TBDN100 (NM_025085.2,984-1002).
gcaactatgtcgtttggaa

SEQ ID NO: 219063 - DNA, 19 bp, Homo sapiens
  siRNA target sequence for TBDN100 (NM_025085.2,1043-1061).
ctgaaaactgggcctatta

SEQ ID NO: 219064 - DNA, 19 bp, Homo sapiens
  siRNA target sequence for TBDN100 (NM_025085.2,1062-1080).
caaaggcttggaaaaagca

SEQ ID NO: 219065 - DNA, 19 bp, Homo sapiens
  siRNA target sequence for TBDN100 (NM_025085.2,1078-1096).
gcactcaagccagctaata

SEQ ID NO: 219066 - DNA, 19 bp, Homo sapiens
  siRNA target sequence for TBDN100 (NM_025085.2,1079-1097).
cactcaagccagctaatat

SEQ ID NO: 219067 - DNA, 19 bp, Homo sapiens
  siRNA target sequence for TBDN100 (NM_025085.2,1098-1116).
gttagaacggctaaaaatt

SEQ ID NO: 219068 - DNA, 19 bp, Homo sapiens
  siRNA target sequence for TBDN100 (NM_025085.2,1120-1138).
gaggaagcctggactaaat

SEQ ID NO: 219069 - DNA, 19 bp, Homo sapiens
  siRNA target sequence for TBDN100 (NM_025085.2,1122-1140).
ggaagcctggactaaatat

SEQ ID NO: 219070 - DNA, 19 bp, Homo sapiens
  siRNA target sequence for TBDN100 (NM_025085.2,1157-1175).
caagaaggctgccgttaaa

SEQ ID NO: 219071 - DNA, 19 bp, Homo sapiens
  siRNA target sequence for TBDN100 (NM_025085.2,1160-1178).
gaaggctgccgttaaactt

SEQ ID NO: 219072 - DNA, 19 bp, Homo sapiens
  siRNA target sequence for TBDN100 (NM_025085.2,1167-1185).
gccgttaaactttttatct

SEQ ID NO: 219073 - DNA, 19 bp, Homo sapiens
  siRNA target sequence for TBDN100 (NM_025085.2,1311-1329).
gttagtagtaggttatgaa

SEQ ID NO: 219074 - DNA, 19 bp, Homo sapiens
  siRNA target sequence for TBDN100 (NM_025085.2,1350-1368).
gttatttaaccccaatgat

SEQ ID NO: 219075 - DNA, 19 bp, Homo sapiens
  siRNA target sequence for TBDN100 (NM_025085.2,1380-1398).
ggaaccaccaaccacatta

SEQ ID NO: 219076 - DNA, 19 bp, Homo sapiens
  siRNA target sequence for TBDN100 (NM_025085.2,1399-1417).
ctttgggtccagtactact

SEQ ID NO: 219077 - DNA, 19 bp, Homo sapiens
  siRNA target sequence for TBDN100 (NM_025085.2,1496-1514).
cattaatagaactctttct

SEQ ID NO: 219078 - DNA, 19 bp, Homo sapiens
  siRNA target sequence for TBDN100 (NM_025085.2,1509-1527).
ctttctcgtgaaagctaaa

SEQ ID NO: 219079 - DNA, 19 bp, Homo sapiens
  siRNA target sequence for TBDN100 (NM_025085.2,1597-1615).
gcagacagatttatcaact

SEQ ID NO: 219080 - DNA, 19 bp, Homo sapiens
  siRNA target sequence for TBDN100 (NM_025085.2,1694-1712).
gaacatcagcggtagagaa

SEQ ID NO: 219081 - DNA, 19 bp, Homo sapiens
  siRNA target sequence for TBDN100 (NM_025085.2,1697-1715).
catcagcggtagagaattt

SEQ ID NO: 219082 - DNA, 19 bp, Homo sapiens
  siRNA target sequence for TBDN100 (NM_025085.2,1700-1718).
cagcggtagagaatttgaa

SEQ ID NO: 219083 - DNA, 19 bp, Homo sapiens
  siRNA target sequence for TBDN100 (NM_025085.2,1703-1721).
cggtagagaatttgaatga

SEQ ID NO: 219084 - DNA, 19 bp, Homo sapiens
  siRNA target sequence for TBDN100 (NM_025085.2,1726-1744).
cagtgcatgtggttccaaa

SEQ ID NO: 219085 - DNA, 19 bp, Homo sapiens
  siRNA target sequence for TBDN100 (NM_025085.2,1747-1765).
gaatgtgcccaggcttata

SEQ ID NO: 219086 - DNA, 19 bp, Homo sapiens
  siRNA target sequence for TBDN100 (NM_025085.2,1753-1771).
gcccaggcttataaagcaa

SEQ ID NO: 219087 - DNA, 19 bp, Homo sapiens
  siRNA target sequence for TBDN100 (NM_025085.2,1754-1772).
cccaggcttataaagcaat

SEQ ID NO: 219088 - DNA, 19 bp, Homo sapiens
  siRNA target sequence for TBDN100 (NM_025085.2,1759-1777).
gcttataaagcaatgaata

SEQ ID NO: 219089 - DNA, 19 bp, Homo sapiens
  siRNA target sequence for TBDN100 (NM_057175.2,1870-1888).
gaagattacccttagatca

SEQ ID NO: 219090 - DNA, 19 bp, Homo sapiens
  siRNA target sequence for TBDN100 (NM_057175.2,1884-1902).
gatcatatgtggacttatt

SEQ ID NO: 219091 - DNA, 19 bp, Homo sapiens
  siRNA target sequence for TBDN100 (NM_057175.2,1894-1912).
ggacttattaaaactagaa

SEQ ID NO: 219092 - DNA, 19 bp, Homo sapiens
  siRNA target sequence for TBDN100 (NM_057175.2,1925-1943).
cagcatccattttacttca

SEQ ID NO: 219093 - DNA, 19 bp, Homo sapiens
  siRNA target sequence for TBDN100 (NM_057175.2,1947-1965).
cagcaagaattgctataga

SEQ ID NO: 219094 - DNA, 19 bp, Homo sapiens
  siRNA target sequence for TBDN100 (NM_057175.2,1949-1967).
gcaagaattgctatagaga

SEQ ID NO: 219095 - DNA, 19 bp, Homo sapiens
  siRNA target sequence for TBDN100 (NM_057175.2,1950-1968).
caagaattgctatagagat

SEQ ID NO: 219096 - DNA, 19 bp, Homo sapiens
  siRNA target sequence for TBDN100 (NM_057175.2,1959-1977).
ctatagagatctatttgaa

SEQ ID NO: 219097 - DNA, 19 bp, Homo sapiens
  siRNA target sequence for TBDN100 (NM_057175.2,1991-2009).
ccccttacagatgagaata

SEQ ID NO: 219098 - DNA, 19 bp, Homo sapiens
  siRNA target sequence for TBDN100 (NM_057175.2,2021-2039).
gctgatacagcaaacatgt

SEQ ID NO: 219099 - DNA, 19 bp, Homo sapiens
  siRNA target sequence for TBDN100 (NM_057175.2,2031-2049).
caaacatgtctgacaaaga

SEQ ID NO: 219100 - DNA, 19 bp, Homo sapiens
  siRNA target sequence for TBDN100 (NM_057175.2,2059-2077).
gctacgtaataaacaaaga

SEQ ID NO: 219101 - DNA, 19 bp, Homo sapiens
  siRNA target sequence for TBDN100 (NM_057175.2,2224-2242).
ggttgaaactccattggaa

SEQ ID NO: 219102 - DNA, 19 bp, Homo sapiens
  siRNA target sequence for TBDN100 (NM_057175.2,2234-2252).
ccattggaagaagctatta

SEQ ID NO: 219103 - DNA, 19 bp, Homo sapiens
  siRNA target sequence for TBDN100 (NM_057175.2,2287-2305).
caagatagagactcatctt

SEQ ID NO: 219104 - DNA, 19 bp, Homo sapiens
  siRNA target sequence for TBDN100 (NM_057175.2,2365-2383).
gagggcatttgctattgat

SEQ ID NO: 219105 - DNA, 19 bp, Homo sapiens
  siRNA target sequence for TBDN100 (NM_057175.2,2397-2415).
ggcttcatgagtgtatgat

SEQ ID NO: 219106 - DNA, 19 bp, Homo sapiens
  siRNA target sequence for TBDN100 (NM_057175.2,2398-2416).
gcttcatgagtgtatgatt

SEQ ID NO: 219107 - DNA, 19 bp, Homo sapiens
  siRNA target sequence for TBDN100 (NM_057175.2,2407-2425).
gtgtatgattcgtctcttt

SEQ ID NO: 219108 - DNA, 19 bp, Homo sapiens
  siRNA target sequence for TBDN100 (NM_057175.2,2409-2427).
gtatgattcgtctctttaa

SEQ ID NO: 219109 - DNA, 19 bp, Homo sapiens
  siRNA target sequence for TBDN100 (NM_057175.2,2505-2523).
gagcaacgaatccaaagaa

SEQ ID NO: 219110 - DNA, 19 bp, Homo sapiens
  siRNA target sequence for TBDN100 (NM_057175.2,2507-2525).
gcaacgaatccaaagaatt

SEQ ID NO: 219111 - DNA, 19 bp, Homo sapiens
  siRNA target sequence for TBDN100 (NM_057175.2,2508-2526).
caacgaatccaaagaattt

SEQ ID NO: 219112 - DNA, 19 bp, Homo sapiens
  siRNA target sequence for TBDN100 (NM_057175.2,2571-2589).
gattatcagctgccaaaat

SEQ ID NO: 219113 - DNA, 19 bp, Homo sapiens
  siRNA target sequence for TBDN100 (NM_057175.2,2584-2602).
caaaatggtatattactta

SEQ ID NO: 219114 - DNA, 19 bp, Homo sapiens
  siRNA target sequence for TBDN100 (NM_057175.2,2613-2631).
gtcagaagcgagctataga

SEQ ID NO: 219115 - DNA, 19 bp, Homo sapiens
  siRNA target sequence for TBDN100 (NM_057175.2,2632-2650).
gttggcaacaacacttgat

SEQ ID NO: 219116 - DNA, 19 bp, Homo sapiens
  siRNA target sequence for TBDN100 (NM_057175.2,2667-2685).
gaaacctccagacatgtat

SEQ ID NO: 219117 - DNA, 19 bp, Homo sapiens
  siRNA target sequence for TBDN100 (NM_057175.2,2716-2734).
cctaggagactgtaaagaa

SEQ ID NO: 219118 - DNA, 19 bp, Homo sapiens
  siRNA target sequence for TBDN100 (NM_057175.2,2791-2809).
catgcctcctggatatgaa

SEQ ID NO: 219119 - DNA, 19 bp, Homo sapiens
  siRNA target sequence for TBDN100 (NM_057175.2,2858-2876).
gaactggccaatgaaattt

SEQ ID NO: 219120 - DNA, 19 bp, Homo sapiens
  siRNA target sequence for TPT (NM_014317.2,485-503).
ggcccgagcatgcaatatt

SEQ ID NO: 219121 - DNA, 19 bp, Homo sapiens
  siRNA target sequence for TPT (NM_014317.2,487-505).
cccgagcatgcaatattca

SEQ ID NO: 219122 - DNA, 19 bp, Homo sapiens
  siRNA target sequence for TPT (NM_014317.2,492-510).
gcatgcaatattcatcata

SEQ ID NO: 219123 - DNA, 19 bp, Homo sapiens
  siRNA target sequence for TPT (NM_014317.2,493-511).
catgcaatattcatcataa

SEQ ID NO: 219124 - DNA, 19 bp, Homo sapiens
  siRNA target sequence for TPT (NM_014317.2,542-560).
cgccatagccttaattgca

SEQ ID NO: 219125 - DNA, 19 bp, Homo sapiens
  siRNA target sequence for TPT (NM_014317.2,584-602).
ggttcacgatgacgttatt

SEQ ID NO: 219126 - DNA, 19 bp, Homo sapiens
  siRNA target sequence for TPT (NM_014317.2,705-723).
gctctggcacgaattggaa

SEQ ID NO: 219127 - DNA, 19 bp, Homo sapiens
  siRNA target sequence for TPT (NM_014317.2,706-724).
ctctggcacgaattggaaa

SEQ ID NO: 219128 - DNA, 19 bp, Homo sapiens
  siRNA target sequence for TPT (NM_014317.2,708-726).
ctggcacgaattggaaata

SEQ ID NO: 219129 - DNA, 19 bp, Homo sapiens
  siRNA target sequence for TPT (NM_014317.2,720-738).
ggaaatacaactgttatat

SEQ ID NO: 219130 - DNA, 19 bp, Homo sapiens
  siRNA target sequence for TPT (NM_014317.2,748-766).
cccaagttattgaagattt

SEQ ID NO: 219131 - DNA, 19 bp, Homo sapiens
  siRNA target sequence for TPT (NM_014317.2,767-785).
ggtgcgtggtgaatttctt

SEQ ID NO: 219132 - DNA, 19 bp, Homo sapiens
  siRNA target sequence for TPT (NM_014317.2,786-804).
cagctcgggtcaaaagaaa

SEQ ID NO: 219133 - DNA, 19 bp, Homo sapiens
  siRNA target sequence for TPT (NM_014317.2,788-806).
gctcgggtcaaaagaaaat

SEQ ID NO: 219134 - DNA, 19 bp, Homo sapiens
  siRNA target sequence for TPT (NM_014317.2,863-881).
gatagccaacagttgtaaa

SEQ ID NO: 219135 - DNA, 19 bp, Homo sapiens
  siRNA target sequence for TPT (NM_014317.2,918-936).
catgagatcgcctatcagt

SEQ ID NO: 219136 - DNA, 19 bp, Homo sapiens
  siRNA target sequence for TPT (NM_014317.2,927-945).
gcctatcagtacggaaaaa

SEQ ID NO: 219137 - DNA, 19 bp, Homo sapiens
  siRNA target sequence for TPT (NM_014317.2,928-946).
cctatcagtacggaaaaaa

SEQ ID NO: 219138 - DNA, 19 bp, Homo sapiens
  siRNA target sequence for TPT (NM_014317.2,929-947).
ctatcagtacggaaaaaat

SEQ ID NO: 219139 - DNA, 19 bp, Homo sapiens
  siRNA target sequence for TPT (NM_014317.2,938-956).
cggaaaaaatgtaggaata

SEQ ID NO: 219140 - DNA, 19 bp, Homo sapiens
  siRNA target sequence for TPT (NM_014317.2,952-970).
gaatagcttttcagctaat

SEQ ID NO: 219141 - DNA, 19 bp, Homo sapiens
  siRNA target sequence for TPT (NM_014317.2,963-981).
cagctaatagatgatgtat

SEQ ID NO: 219142 - DNA, 19 bp, Homo sapiens
  siRNA target sequence for TPT (NM_014317.2,1115-1133).
cagtttgcctggagatgta

SEQ ID NO: 219143 - DNA, 19 bp, Homo sapiens
  siRNA target sequence for TPT (NM_014317.2,1117-1135).
gtttgcctggagatgtaga

SEQ ID NO: 219144 - DNA, 19 bp, Homo sapiens
  siRNA target sequence for TPT (NM_014317.2,1136-1154).
cagagctcgacagtatgta

SEQ ID NO: 219145 - DNA, 19 bp, Homo sapiens
  siRNA target sequence for TPT (NM_014317.2,1138-1156).
gagctcgacagtatgtact

SEQ ID NO: 219146 - DNA, 19 bp, Homo sapiens
  siRNA target sequence for TPT (NM_014317.2,1141-1159).
ctcgacagtatgtactaca

SEQ ID NO: 219147 - DNA, 19 bp, Homo sapiens
  siRNA target sequence for TPT (NM_014317.2,1199-1217).
gtactgccatgaagcaata

SEQ ID NO: 219148 - DNA, 19 bp, Homo sapiens
  siRNA target sequence for TPT (NM_014317.2,1213-1231).
caataagagagatcagtaa

SEQ ID NO: 219149 - DNA, 19 bp, Homo sapiens
  siRNA target sequence for TPT (NM_014317.2,1237-1255).
gaccatccccagaaagaga

SEQ ID NO: 219150 - DNA, 19 bp, Homo sapiens
  siRNA target sequence for WBSCR17 (NM_022479.1,232-250).
ctgaatggcttatccaaat

SEQ ID NO: 219151 - DNA, 19 bp, Homo sapiens
  siRNA target sequence for WBSCR17 (NM_022479.1,258-276).
gctcattgaaggttatggt

SEQ ID NO: 219152 - DNA, 19 bp, Homo sapiens
  siRNA target sequence for WBSCR17 (NM_022479.1,393-411).
ccgttccattccggattat

SEQ ID NO: 219153 - DNA, 19 bp, Homo sapiens
  siRNA target sequence for WBSCR17 (NM_022479.1,517-535).
cacagtgccgtcaatcaca

SEQ ID NO: 219154 - DNA, 19 bp, Homo sapiens
  siRNA target sequence for WBSCR17 (NM_022479.1,819-837).
ctccattgacaacatcaaa

SEQ ID NO: 219155 - DNA, 19 bp, Homo sapiens
  siRNA target sequence for WBSCR17 (NM_022479.1,895-913).
ctgtggtgcatgtacatca

SEQ ID NO: 219156 - DNA, 19 bp, Homo sapiens
  siRNA target sequence for WBSCR17 (NM_022479.1,1005-1023).
gttcttcggtgaaattggt

SEQ ID NO: 219157 - DNA, 19 bp, Homo sapiens
  siRNA target sequence for WBSCR17 (NM_022479.1,1152-1170).
gccatataatagcaacatt

SEQ ID NO: 219158 - DNA, 19 bp, Homo sapiens
  siRNA target sequence for WBSCR17 (NM_022479.1,1227-1245).
caagtctcatgtgtacata

SEQ ID NO: 219159 - DNA, 19 bp, Homo sapiens
  siRNA target sequence for WBSCR17 (NM_022479.1,1285-1303).
ggtgatgtctccgaaagaa

SEQ ID NO: 219160 - DNA, 19 bp, Homo sapiens
  siRNA target sequence for WBSCR17 (NM_022479.1,1293-1311).
ctccgaaagaagagcatta

SEQ ID NO: 219161 - DNA, 19 bp, Homo sapiens
  siRNA target sequence for WBSCR17 (NM_022479.1,1304-1322).
gagcattaaggaaaagttt

SEQ ID NO: 219162 - DNA, 19 bp, Homo sapiens
  siRNA target sequence for WBSCR17 (NM_022479.1,1354-1372).
catgtttacccagaaatga

SEQ ID NO: 219163 - DNA, 19 bp, Homo sapiens
  siRNA target sequence for WBSCR17 (NM_022479.1,1458-1476).
ccacacagcaatattgtat

SEQ ID NO: 219164 - DNA, 19 bp, Homo sapiens
  siRNA target sequence for WBSCR17 (NM_022479.1,1666-1684).
cagaatggagccatcatga

SEQ ID NO: 219165 - DNA, 19 bp, Homo sapiens
  siRNA target sequence for WBSCR17 (NM_022479.1,1762-1780).
ggtcagaggtggaccatta

SEQ ID NO: 219166 - DNA, 19 bp, Homo sapiens
  siRNA target sequence for WBSCR17 (NM_022479.1,1763-1781).
gtcagaggtggaccattaa

SEQ ID NO: 219167 - DNA, 19 bp, Homo sapiens
  siRNA target sequence for WBSCR17 (NM_022479.1,1765-1783).
cagaggtggaccattaaga

SEQ ID NO: 219168 - DNA, 19 bp, Homo sapiens
  siRNA target sequence for AKAP28 (NM_178813.3,92-110).
gagactcaaaattcaacaa

SEQ ID NO: 219169 - DNA, 19 bp, Homo sapiens
  siRNA target sequence for AKAP28 (NM_178813.3,119-137).
gcaatggatgaggataaca

SEQ ID NO: 219170 - DNA, 19 bp, Homo sapiens
  siRNA target sequence for AKAP28 (NM_178813.3,178-196).
ctacgaggatgaattgact

SEQ ID NO: 219171 - DNA, 19 bp, Homo sapiens
  siRNA target sequence for AKAP28 (NM_178813.3,257-275).
gagcgaaaccctttgaaaa

SEQ ID NO: 219172 - DNA, 19 bp, Homo sapiens
  siRNA target sequence for AKAP28 (NM_178813.3,285-303).
ggatgactcacggtgaatt

SEQ ID NO: 219173 - DNA, 19 bp, Homo sapiens
  siRNA target sequence for AKAP28 (NM_178813.3,311-329).
gaaaagggtcttaaacaaa

SEQ ID NO: 219174 - DNA, 19 bp, Homo sapiens
  siRNA target sequence for AKAP28 (NM_178813.3,372-390).
cacatggcgtagagtttgt

SEQ ID NO: 219175 - DNA, 19 bp, Homo sapiens
  siRNA target sequence for AKAP28 (NM_178813.3,434-452).
gtacactggagtatctcaa

SEQ ID NO: 219176 - DNA, 19 bp, Homo sapiens
  siRNA target sequence for AKAP28 (NM_178813.3,502-520).
gaaggtctccaaaaccaaa

SEQ ID NO: 219177 - DNA, 19 bp, Homo sapiens
  siRNA target sequence for AKAP28 (NM_178813.3,590-608).
gttcgctttcgagaaaact

SEQ ID NO: 219178 - DNA, 19 bp, Homo sapiens
  siRNA target sequence for AKAP28 (NM_178813.3,624-642).
ctgatgccaaatatagttt

SEQ ID NO: 219179 - DNA, 19 bp, Homo sapiens
  siRNA target sequence for AKAP28 (NM_178813.3,647-665).
gagtcattccccttcttat

SEQ ID NO: 219180 - DNA, 19 bp, Homo sapiens
  siRNA target sequence for ALS2CR8 (NM_024744.12,708-726).
ctaatgattcattaagagt

SEQ ID NO: 219181 - DNA, 19 bp, Homo sapiens
  siRNA target sequence for ALS2CR8 (NM_024744.12,737-755).
gacggtgaagagtcaaaaa

SEQ ID NO: 219182 - DNA, 19 bp, Homo sapiens
  siRNA target sequence for ALS2CR8 (NM_024744.12,740-758).
ggtgaagagtcaaaaacca

SEQ ID NO: 219183 - DNA, 19 bp, Homo sapiens
  siRNA target sequence for ALS2CR8 (NM_024744.12,844-862).
cactactcgtgaagcaaat

SEQ ID NO: 219184 - DNA, 19 bp, Homo sapiens
  siRNA target sequence for ALS2CR8 (NM_024744.12,846-864).
ctactcgtgaagcaaataa

SEQ ID NO: 219185 - DNA, 19 bp, Homo sapiens
  siRNA target sequence for ALS2CR8 (NM_024744.12,857-875).
gcaaataattcactcatat

SEQ ID NO: 219186 - DNA, 19 bp, Homo sapiens
  siRNA target sequence for ALS2CR8 (NM_024744.12,871-889).
catatcacagaatatacca

SEQ ID NO: 219187 - DNA, 19 bp, Homo sapiens
  siRNA target sequence for ALS2CR8 (NM_024744.12,912-930).
ctctttctgcagagcaatt

SEQ ID NO: 219188 - DNA, 19 bp, Homo sapiens
  siRNA target sequence for ALS2CR8 (NM_024744.12,921-939).
cagagcaattccatctagt

SEQ ID NO: 219189 - DNA, 19 bp, Homo sapiens
  siRNA target sequence for ALS2CR8 (NM_024744.12,931-949).
ccatctagtggaccaaaat

SEQ ID NO: 219190 - DNA, 19 bp, Homo sapiens
  siRNA target sequence for ALS2CR8 (NM_024744.12,951-969).
ggcaggctattcaatatga

SEQ ID NO: 219191 - DNA, 19 bp, Homo sapiens
  siRNA target sequence for ALS2CR8 (NM_024744.12,955-973).
ggctattcaatatgaactt

SEQ ID NO: 219192 - DNA, 19 bp, Homo sapiens
  siRNA target sequence for ALS2CR8 (NM_024744.12,957-975).
ctattcaatatgaacttca

SEQ ID NO: 219193 - DNA, 19 bp, Homo sapiens
  siRNA target sequence for ALS2CR8 (NM_024744.12,976-994).
gtcattgggggaatccaat

SEQ ID NO: 219194 - DNA, 19 bp, Homo sapiens
  siRNA target sequence for ALS2CR8 (NM_024744.12,986-1004).
gaatccaatgcacaaatga

SEQ ID NO: 219195 - DNA, 19 bp, Homo sapiens
  siRNA target sequence for ALS2CR8 (NM_024744.12,1032-1050).
gacaggtacttcgtgtaat

SEQ ID NO: 219196 - DNA, 19 bp, Homo sapiens
  siRNA target sequence for ALS2CR8 (NM_024744.12,1036-1054).
ggtacttcgtgtaattcca

SEQ ID NO: 219197 - DNA, 19 bp, Homo sapiens
  siRNA target sequence for ALS2CR8 (NM_024744.12,1068-1086).
gaatggcacaagtgattat

SEQ ID NO: 219198 - DNA, 19 bp, Homo sapiens
  siRNA target sequence for ALS2CR8 (NM_024744.12,1096-1114).
gcaacttgtggatgtgaat

SEQ ID NO: 219199 - DNA, 19 bp, Homo sapiens
  siRNA target sequence for ALS2CR8 (NM_024744.12,1097-1115).
caacttgtggatgtgaata

SEQ ID NO: 219200 - DNA, 19 bp, Homo sapiens
  siRNA target sequence for ALS2CR8 (NM_024744.12,1174-1192).
ggatactctagcagacaat

SEQ ID NO: 219201 - DNA, 19 bp, Homo sapiens
  siRNA target sequence for ALS2CR8 (NM_024744.12,1175-1193).
gatactctagcagacaata

SEQ ID NO: 219202 - DNA, 19 bp, Homo sapiens
  siRNA target sequence for ALS2CR8 (NM_024744.12,1184-1202).
gcagacaataccagcaatt

SEQ ID NO: 219203 - DNA, 19 bp, Homo sapiens
  siRNA target sequence for ALS2CR8 (NM_024744.12,1187-1205).
gacaataccagcaattaca

SEQ ID NO: 219204 - DNA, 19 bp, Homo sapiens
  siRNA target sequence for ALS2CR8 (NM_024744.12,1330-1348).
gagctgtgagaaaattgga

SEQ ID NO: 219205 - DNA, 19 bp, Homo sapiens
  siRNA target sequence for ALS2CR8 (NM_024744.12,1357-1375).
ccgtggctactgtgtaagt

SEQ ID NO: 219206 - DNA, 19 bp, Homo sapiens
  siRNA target sequence for ALS2CR8 (NM_024744.12,1368-1386).
gtgtaagtgagactgaatt

SEQ ID NO: 219207 - DNA, 19 bp, Homo sapiens
  siRNA target sequence for ALS2CR8 (NM_024744.12,1463-1481).
cctgctacacgcttgatgt

SEQ ID NO: 219208 - DNA, 19 bp, Homo sapiens
  siRNA target sequence for ALS2CR8 (NM_024744.12,1530-1548).
ggagtagagctgtggtaat

SEQ ID NO: 219209 - DNA, 19 bp, Homo sapiens
  siRNA target sequence for ALS2CR8 (NM_024744.12,1533-1551).
gtagagctgtggtaatgga

SEQ ID NO: 219210 - DNA, 19 bp, Homo sapiens
  siRNA target sequence for ALS2CR8 (NM_024744.12,1543-1561).
ggtaatggagtgtcagtat

SEQ ID NO: 219211 - DNA, 19 bp, Homo sapiens
  siRNA target sequence for ALS2CR8 (NM_024744.12,1614-1632).
ggtcttgtcagctctacaa

SEQ ID NO: 219212 - DNA, 19 bp, Homo sapiens
  siRNA target sequence for ALS2CR8 (NM_024744.12,1615-1633).
gtcttgtcagctctacaaa

SEQ ID NO: 219213 - DNA, 19 bp, Homo sapiens
  siRNA target sequence for ALS2CR8 (NM_024744.12,1638-1656).
cttgtccagctcggattta

SEQ ID NO: 219214 - DNA, 19 bp, Homo sapiens
  siRNA target sequence for ALS2CR8 (NM_024744.12,1643-1661).
ccagctcggatttacatta

SEQ ID NO: 219215 - DNA, 19 bp, Homo sapiens
  siRNA target sequence for ALS2CR8 (NM_024744.12,1644-1662).
cagctcggatttacattaa

SEQ ID NO: 219216 - DNA, 19 bp, Homo sapiens
  siRNA target sequence for ALS2CR8 (NM_024744.12,1646-1664).
gctcggatttacattaaaa

SEQ ID NO: 219217 - DNA, 19 bp, Homo sapiens
  siRNA target sequence for ALS2CR8 (NM_024744.12,1745-1763).
gcttttaacatgctaaaga

SEQ ID NO: 219218 - DNA, 19 bp, Homo sapiens
  siRNA target sequence for ALS2CR8 (NM_024744.12,1990-2008).
gggaatagaacaagtgtat

SEQ ID NO: 219219 - DNA, 19 bp, Homo sapiens
  siRNA target sequence for ALS2CR8 (NM_024744.12,2012-2030).
gtaaggaaacagctaagaa

SEQ ID NO: 219220 - DNA, 19 bp, Homo sapiens
  siRNA target sequence for ALS2CR8 (NM_024744.12,2059-2077).
cgatgaggtacctgaaaga

SEQ ID NO: 219221 - DNA, 19 bp, Homo sapiens
  siRNA target sequence for ALS2CR8 (NM_024744.12,2063-2081).
gaggtacctgaaagacata

SEQ ID NO: 219222 - DNA, 19 bp, Homo sapiens
  siRNA target sequence for ALS2CR8 (NM_024744.12,2065-2083).
ggtacctgaaagacataat

SEQ ID NO: 219223 - DNA, 19 bp, Homo sapiens
  siRNA target sequence for ALS2CR8 (NM_024744.12,2096-2114).
ccaactgtaaatgatataa

SEQ ID NO: 219224 - DNA, 19 bp, Homo sapiens
  siRNA target sequence for ALS2CR8 (NM_024744.12,2126-2144).
catgaggtacagaaatcct

SEQ ID NO: 219225 - DNA, 19 bp, Homo sapiens
  siRNA target sequence for ALS2CR8 (NM_024744.12,2132-2150).
gtacagaaatccttgagaa

SEQ ID NO: 219226 - DNA, 19 bp, Homo sapiens
  siRNA target sequence for ALS2CR8 (NM_024744.12,2153-2171).
ggagatacggtatataact

SEQ ID NO: 219227 - DNA, 19 bp, Homo sapiens
  siRNA target sequence for ALS2CR8 (NM_024744.12,2230-2248).
gaccatgacagttacattt

SEQ ID NO: 219228 - DNA, 19 bp, Homo sapiens
  siRNA target sequence for ALS2CR8 (NM_024744.12,2233-2251).
catgacagttacatttgca

SEQ ID NO: 219229 - DNA, 19 bp, Homo sapiens
  siRNA target sequence for ALS2CR8 (NM_024744.12,2353-2371).
ctcatttcagcccaaaata

SEQ ID NO: 219230 - DNA, 19 bp, Homo sapiens
  siRNA target sequence for ALS2CR8 (NM_024744.12,2355-2373).
catttcagcccaaaatatt

SEQ ID NO: 219231 - DNA, 19 bp, Homo sapiens
  siRNA target sequence for ALS2CR8 (NM_024744.12,2407-2425).
gtacacctctcctgatgaa

SEQ ID NO: 219232 - DNA, 19 bp, Homo sapiens
  siRNA target sequence for ALS2CR8 (NM_024744.12,2487-2505).
caataggaagtgctgtaat

SEQ ID NO: 219233 - DNA, 19 bp, Homo sapiens
  siRNA target sequence for ALS2CR8 (NM_024744.12,2584-2602).
ctccaccatgggtaacctt

SEQ ID NO: 219234 - DNA, 19 bp, Homo sapiens
  siRNA target sequence for ALS2CR8 (NM_024744.12,2632-2650).
ggacgagctggtagaagtt

SEQ ID NO: 219235 - DNA, 19 bp, Homo sapiens
  siRNA target sequence for ALS2CR8 (NM_024744.12,2685-2703).
ctgttcatcggattctgtt

SEQ ID NO: 219236 - DNA, 19 bp, Homo sapiens
  siRNA target sequence for ALS2CR8 (NM_024744.12,2708-2726).
gatgtgcagactattccaa

SEQ ID NO: 219237 - DNA, 19 bp, Homo sapiens
  siRNA target sequence for ALS2CR8 (NM_024744.12,2718-2736).
ctattccaatacagattat

SEQ ID NO: 219238 - DNA, 19 bp, Homo sapiens
  siRNA target sequence for ALS2CR8 (NM_024744.12,2723-2741).
ccaatacagattatagaca

SEQ ID NO: 219239 - DNA, 19 bp, Homo sapiens
  siRNA target sequence for ALS2CR8 (NM_024744.12,2740-2758).
caaccactcagctcttatt

SEQ ID NO: 219240 - DNA, 19 bp, Homo sapiens
  siRNA target sequence for ALS2CR8 (NM_024744.12,2784-2802).
ctgtgagccaagttaaaca

SEQ ID NO: 219241 - DNA, 19 bp, Homo sapiens
  siRNA target sequence for ALS2CR8 (NM_024744.12,2809-2827).
caaagaaccagcattgtct

SEQ ID NO: 219242 - DNA, 19 bp, Homo sapiens
  siRNA target sequence for C9orf12 (NM_022755.3,319-337).
cacggagagggcaataaga

SEQ ID NO: 219243 - DNA, 19 bp, Homo sapiens
  siRNA target sequence for C9orf12 (NM_022755.3,507-525).
ggtcgttcagctaccttta

SEQ ID NO: 219244 - DNA, 19 bp, Homo sapiens
  siRNA target sequence for C9orf12 (NM_022755.3,532-550).
gtgaaacagctttgtttaa

SEQ ID NO: 219245 - DNA, 19 bp, Homo sapiens
  siRNA target sequence for C9orf12 (NM_022755.3,612-630).
cgctatgtgccttcctaat

SEQ ID NO: 219246 - DNA, 19 bp, Homo sapiens
  siRNA target sequence for C9orf12 (NM_022755.3,613-631).
gctatgtgccttcctaatt

SEQ ID NO: 219247 - DNA, 19 bp, Homo sapiens
  siRNA target sequence for C9orf12 (NM_022755.3,671-689).
cgattctgtgtgtagagat

SEQ ID NO: 219248 - DNA, 19 bp, Homo sapiens
  siRNA target sequence for C9orf12 (NM_022755.3,682-700).
gtagagattaagccaaaat

SEQ ID NO: 219249 - DNA, 19 bp, Homo sapiens
  siRNA target sequence for C9orf12 (NM_022755.3,722-740).
gtgatgtcacgcatgagat

SEQ ID NO: 219250 - DNA, 19 bp, Homo sapiens
  siRNA target sequence for C9orf12 (NM_022755.3,927-945).
gatttacggctgcaaagat

SEQ ID NO: 219251 - DNA, 19 bp, Homo sapiens
  siRNA target sequence for C9orf12 (NM_022755.3,1367-1385).
ggccttatgatgaagcatt

SEQ ID NO: 219252 - DNA, 19 bp, Homo sapiens
  siRNA target sequence for C9orf12 (NM_022755.3,1368-1386).
gccttatgatgaagcattt

SEQ ID NO: 219253 - DNA, 19 bp, Homo sapiens
  siRNA target sequence for C9orf12 (NM_022755.3,1522-1540).
gatgccagctctgatcaaa

SEQ ID NO: 219254 - DNA, 19 bp, Homo sapiens
  siRNA target sequence for C9orf12 (NM_022755.3,1644-1662).
cggcaagatcgtcaactat

SEQ ID NO: 219255 - DNA, 19 bp, Homo sapiens
  siRNA target sequence for CDK5R2 (NM_003936.2,847-865).
caagaccaggccttcatta

SEQ ID NO: 219256 - DNA, 19 bp, Homo sapiens
  siRNA target sequence for CDK5R2 (NM_003936.2,1122-1140).
cttcacgcaggtctttcaa

SEQ ID NO: 219257 - DNA, 19 bp, Homo sapiens
  siRNA target sequence for CDKN1B (NM_004064.2,470-488).
caaacgtgcgagtgtctaa

SEQ ID NO: 219258 - DNA, 19 bp, Homo sapiens
  siRNA target sequence for CDKN1B (NM_004064.2,570-588).
ggtggaccacgaagagtta

SEQ ID NO: 219259 - DNA, 19 bp, Homo sapiens
  siRNA target sequence for CDKN1B (NM_004064.2,632-650).
gccagcgcaagtggaattt

SEQ ID NO: 219260 - DNA, 19 bp, Homo sapiens
  siRNA target sequence for CDKN1B (NM_004064.2,637-655).
cgcaagtggaatttcgatt

SEQ ID NO: 219261 - DNA, 19 bp, Homo sapiens
  siRNA target sequence for CDKN1B (NM_004064.2,644-662).
ggaatttcgattttcagaa

SEQ ID NO: 219262 - DNA, 19 bp, Homo sapiens
  siRNA target sequence for CDKN1B (NM_004064.2,713-731).
gcttgcccgagttctacta

SEQ ID NO: 219263 - DNA, 19 bp, Homo sapiens
  siRNA target sequence for CDKN1B (NM_004064.2,839-857).
ctgaggacacgcatttggt

SEQ ID NO: 219264 - DNA, 19 bp, Homo sapiens
  siRNA target sequence for CDKN1B (NM_004064.2,900-918).
ggagcaatgcgcaggaata

SEQ ID NO: 219265 - DNA, 19 bp, Homo sapiens
  siRNA target sequence for CDKN1B (NM_004064.2,904-922).
caatgcgcaggaataagga

SEQ ID NO: 219266 - DNA, 19 bp, Homo sapiens
  siRNA target sequence for CDKN1B (NM_004064.2,928-946).
cctgcaaccgacgattctt

SEQ ID NO: 219267 - DNA, 19 bp, Homo sapiens
  siRNA target sequence for CDKN1B (NM_004064.2,931-949).
gcaaccgacgattcttcta

SEQ ID NO: 219268 - DNA, 19 bp, Homo sapiens
  siRNA target sequence for CDKN1B (NM_004064.2,936-954).
cgacgattcttctactcaa

SEQ ID NO: 219269 - DNA, 19 bp, Homo sapiens
  siRNA target sequence for CDKN2A (NM_000077.2,382-400).
gcccaacgcaccgaatagt

SEQ ID NO: 219270 - DNA, 19 bp, Homo sapiens
  siRNA target sequence for CDKN2A (NM_000077.2,383-401).
cccaacgcaccgaatagtt

SEQ ID NO: 219271 - DNA, 19 bp, Homo sapiens
  siRNA target sequence for CDKN2A (NM_000077.2,384-402).
ccaacgcaccgaatagtta

SEQ ID NO: 219272 - DNA, 19 bp, Homo sapiens
  siRNA target sequence for CDKN2A (NM_000077.2,679-697).
caccagaggcagtaaccat

SEQ ID NO: 219273 - DNA, 19 bp, Homo sapiens
  siRNA target sequence for CDKN2A (NM_058195.1,338-356).
cgcgagtgagggttttcgt

SEQ ID NO: 219274 - DNA, 19 bp, Homo sapiens
  siRNA target sequence for CDKN2A (NM_058195.1,347-365).
gggttttcgtggttcacat

SEQ ID NO: 219275 - DNA, 19 bp, Homo sapiens
  siRNA target sequence for CDKN2A (NM_058197.1,502-520).
gtttgcaggggaattggaa

SEQ ID NO: 219276 - DNA, 19 bp, Homo sapiens
  siRNA target sequence for CDKN2A (NM_058197.1,531-549).
cttcgattctccggaaaaa

SEQ ID NO: 219277 - DNA, 19 bp, Homo sapiens
  siRNA target sequence for CINP (NM_032630.2,144-162).
gcggctgattggcacaatt

SEQ ID NO: 219278 - DNA, 19 bp, Homo sapiens
  siRNA target sequence for CINP (NM_032630.2,145-163).
cggctgattggcacaattt

SEQ ID NO: 219279 - DNA, 19 bp, Homo sapiens
  siRNA target sequence for CINP (NM_032630.2,146-164).
ggctgattggcacaattta

SEQ ID NO: 219280 - DNA, 19 bp, Homo sapiens
  siRNA target sequence for CINP (NM_032630.2,195-213).
ggttttaccactgcaaata

SEQ ID NO: 219281 - DNA, 19 bp, Homo sapiens
  siRNA target sequence for CINP (NM_032630.2,221-239).
caacttgaaaatcagttta

SEQ ID NO: 219282 - DNA, 19 bp, Homo sapiens
  siRNA target sequence for CINP (NM_032630.2,277-295).
cagcctcgaaggaaaatga

SEQ ID NO: 219283 - DNA, 19 bp, Homo sapiens
  siRNA target sequence for CINP (NM_032630.2,362-380).
ggatgggttgaccaaaata

SEQ ID NO: 219284 - DNA, 19 bp, Homo sapiens
  siRNA target sequence for CINP (NM_032630.2,393-411).
gaaaagctgtcttcaacta

SEQ ID NO: 219285 - DNA, 19 bp, Homo sapiens
  siRNA target sequence for CINP (NM_032630.2,413-431).
caagggaatttgtgaacta

SEQ ID NO: 219286 - DNA, 19 bp, Homo sapiens
  siRNA target sequence for CINP (NM_032630.2,485-503).
gcctacaacccatttctat

SEQ ID NO: 219287 - DNA, 19 bp, Homo sapiens
  siRNA target sequence for DKFZP434N1923 (NM_030974.2,657-675).
ccctggagtcagtttccta

SEQ ID NO: 219288 - DNA, 19 bp, Homo sapiens
  siRNA target sequence for DKFZP434N1923 (NM_030974.2,1402-1420).
ggaacttggacgcttgttt

SEQ ID NO: 219289 - DNA, 19 bp, Homo sapiens
  siRNA target sequence for DVL3 (NM_004423.2,398-416).
gcgagaccaagatcatcta

SEQ ID NO: 219290 - DNA, 19 bp, Homo sapiens
  siRNA target sequence for DVL3 (NM_004423.2,475-493).
gtcaccttggcggacttta

SEQ ID NO: 219291 - DNA, 19 bp, Homo sapiens
  siRNA target sequence for DVL3 (NM_004423.2,508-526).
cgacccagctataagttct

SEQ ID NO: 219292 - DNA, 19 bp, Homo sapiens
  siRNA target sequence for DVL3 (NM_004423.2,509-527).
gacccagctataagttctt

SEQ ID NO: 219293 - DNA, 19 bp, Homo sapiens
  siRNA target sequence for DVL3 (NM_004423.2,515-533).
gctataagttcttcttcaa

SEQ ID NO: 219294 - DNA, 19 bp, Homo sapiens
  siRNA target sequence for DVL3 (NM_004423.2,588-606).
caagctaccatgcttcaat

SEQ ID NO: 219295 - DNA, 19 bp, Homo sapiens
  siRNA target sequence for DVL3 (NM_004423.2,852-870).
gcatgcaacccggctaaat

SEQ ID NO: 219296 - DNA, 19 bp, Homo sapiens
  siRNA target sequence for DVL3 (NM_004423.2,856-874).
gcaacccggctaaatggaa

SEQ ID NO: 219297 - DNA, 19 bp, Homo sapiens
  siRNA target sequence for DVL3 (NM_004423.2,896-914).
gagaaccagggggttatga

SEQ ID NO: 219298 - DNA, 19 bp, Homo sapiens
  siRNA target sequence for DVL3 (NM_004423.2,898-916).
gaaccagggggttatgata

SEQ ID NO: 219299 - DNA, 19 bp, Homo sapiens
  siRNA target sequence for DVL3 (NM_004423.2,1021-1039).
gcctcacgcctgatgagaa

SEQ ID NO: 219300 - DNA, 19 bp, Homo sapiens
  siRNA target sequence for DVL3 (NM_004423.2,1268-1286).
gcatcgagccaggagatat

SEQ ID NO: 219301 - DNA, 19 bp, Homo sapiens
  siRNA target sequence for DVL3 (NM_004423.2,1275-1293).
gccaggagatatgttgtta

SEQ ID NO: 219302 - DNA, 19 bp, Homo sapiens
  siRNA target sequence for DVL3 (NM_004423.2,1294-1312).
caggtaaacgagatcaact

SEQ ID NO: 219303 - DNA, 19 bp, Homo sapiens
  siRNA target sequence for DVL3 (NM_004423.2,1296-1314).
ggtaaacgagatcaacttt

SEQ ID NO: 219304 - DNA, 19 bp, Homo sapiens
  siRNA target sequence for DVL3 (NM_004423.2,1415-1433).
cacgtggttgcttcacatt

SEQ ID NO: 219305 - DNA, 19 bp, Homo sapiens
  siRNA target sequence for DVL3 (NM_004423.2,1624-1642).
gacatggctgccatcgtaa

SEQ ID NO: 219306 - DNA, 19 bp, Homo sapiens
  siRNA target sequence for DVL3 (NM_004423.2,1626-1644).
catggctgccatcgtaaaa

SEQ ID NO: 219307 - DNA, 19 bp, Homo sapiens
  siRNA target sequence for DVL3 (NM_004423.2,1703-1721).
ccatccctaatgctttcat

SEQ ID NO: 219308 - DNA, 19 bp, Homo sapiens
  siRNA target sequence for FLJ12476 (NM_022784.1,605-623).
gaaatcactgtgggattat

SEQ ID NO: 219309 - DNA, 19 bp, Homo sapiens
  siRNA target sequence for FLJ12476 (NM_022784.1,610-628).
cactgtgggattatgactt

SEQ ID NO: 219310 - DNA, 19 bp, Homo sapiens
  siRNA target sequence for FLJ12476 (NM_022784.1,616-634).
gggattatgactttttaat

SEQ ID NO: 219311 - DNA, 19 bp, Homo sapiens
  siRNA target sequence for FLJ12476 (NM_022784.1,661-679).
ccccagacttcttagcatt

SEQ ID NO: 219312 - DNA, 19 bp, Homo sapiens
  siRNA target sequence for FLJ12476 (NM_022784.1,684-702).
gaacattttagcttagctt

SEQ ID NO: 219313 - DNA, 19 bp, Homo sapiens
  siRNA target sequence for FLJ12476 (NM_022784.1,725-743).
ggaacacgtcgagaagttt

SEQ ID NO: 219314 - DNA, 19 bp, Homo sapiens
  siRNA target sequence for FLJ12476 (NM_022784.1,729-747).
cacgtcgagaagtttctca

SEQ ID NO: 219315 - DNA, 19 bp, Homo sapiens
  siRNA target sequence for FLJ12476 (NM_022784.1,746-764).
caggaactatgctatacca

SEQ ID NO: 219316 - DNA, 19 bp, Homo sapiens
  siRNA target sequence for FLJ12476 (NM_022784.1,757-775).
ctataccagaagtcaaaat

SEQ ID NO: 219317 - DNA, 19 bp, Homo sapiens
  siRNA target sequence for FLJ12476 (NM_022784.1,794-812).
ggccctccttccagagttt

SEQ ID NO: 219318 - DNA, 19 bp, Homo sapiens
  siRNA target sequence for FLJ12476 (NM_022784.1,809-827).
gtttgagctgacgaataaa

SEQ ID NO: 219319 - DNA, 19 bp, Homo sapiens
  siRNA target sequence for FLJ12476 (NM_022784.1,813-831).
gagctgacgaataaactta

SEQ ID NO: 219320 - DNA, 19 bp, Homo sapiens
  siRNA target sequence for FLJ12476 (NM_022784.1,865-883).
cagctcatgtccaaatgct

SEQ ID NO: 219321 - DNA, 19 bp, Homo sapiens
  siRNA target sequence for FLJ12476 (NM_022784.1,964-982).
gctacaaagcaagaaaatt

SEQ ID NO: 219322 - DNA, 19 bp, Homo sapiens
  siRNA target sequence for FLJ12476 (NM_022784.1,1007-1025).
gtgggcatcaggtgtgatt

SEQ ID NO: 219323 - DNA, 19 bp, Homo sapiens
  siRNA target sequence for FLJ12476 (NM_022784.1,1017-1035).
ggtgtgattgccattgctt

SEQ ID NO: 219324 - DNA, 19 bp, Homo sapiens
  siRNA target sequence for FLJ12476 (NM_022784.1,1038-1056).
ctgttatattgccataaga

SEQ ID NO: 219325 - DNA, 19 bp, Homo sapiens
  siRNA target sequence for FLJ12476 (NM_022784.1,1040-1058).
gttatattgccataagact

SEQ ID NO: 219326 - DNA, 19 bp, Homo sapiens
  siRNA target sequence for FLJ12476 (NM_022784.1,1048-1066).
gccataagactcgactaaa

SEQ ID NO: 219327 - DNA, 19 bp, Homo sapiens
  siRNA target sequence for FLJ12476 (NM_022784.1,1055-1073).
gactcgactaaagaagata

SEQ ID NO: 219328 - DNA, 19 bp, Homo sapiens
  siRNA target sequence for FLJ12476 (NM_022784.1,1059-1077).
cgactaaagaagatactaa

SEQ ID NO: 219329 - DNA, 19 bp, Homo sapiens
  siRNA target sequence for FLJ12476 (NM_022784.1,1215-1233).
catattgccgatttcaaca

SEQ ID NO: 219330 - DNA, 19 bp, Homo sapiens
  siRNA target sequence for FLJ12476 (NM_022784.1,1259-1277).
gctgtgtgacatcttagat

SEQ ID NO: 219331 - DNA, 19 bp, Homo sapiens
  siRNA target sequence for FLJ12476 (NM_022784.1,1301-1319).
ctgctcccatcatatgaat

SEQ ID NO: 219332 - DNA, 19 bp, Homo sapiens
  siRNA target sequence for FLJ12476 (NM_022784.1,1303-1321).
gctcccatcatatgaatga

SEQ ID NO: 219333 - DNA, 19 bp, Homo sapiens
  siRNA target sequence for FLJ12476 (NM_022784.1,1320-1338).
gacgagttagtgctgtatt

SEQ ID NO: 219334 - DNA, 19 bp, Homo sapiens
  siRNA target sequence for FLJ12476 (NM_022784.1,1325-1343).
gttagtgctgtattacaaa

SEQ ID NO: 219335 - DNA, 19 bp, Homo sapiens
  siRNA target sequence for FLJ12476 (NM_022784.1,1356-1374).
ctacatgcagccgtcaaat

SEQ ID NO: 219336 - DNA, 19 bp, Homo sapiens
  siRNA target sequence for FLJ12476 (NM_022784.1,1400-1418).
cctgcaggacaggttcaaa

SEQ ID NO: 219337 - DNA, 19 bp, Homo sapiens
  siRNA target sequence for FLJ12476 (NM_022784.1,1403-1421).
gcaggacaggttcaaaatt

SEQ ID NO: 219338 - DNA, 19 bp, Homo sapiens
  siRNA target sequence for FLJ12476 (NM_022784.1,1404-1422).
caggacaggttcaaaatta

SEQ ID NO: 219339 - DNA, 19 bp, Homo sapiens
  siRNA target sequence for FLJ12476 (NM_022784.1,1554-1572).
gatattccttcctacctaa

SEQ ID NO: 219340 - DNA, 19 bp, Homo sapiens
  siRNA target sequence for FLJ12476 (NM_022784.1,1565-1583).
ctacctaaagtgctacaaa

SEQ ID NO: 219341 - DNA, 19 bp, Homo sapiens
  siRNA target sequence for FLJ12476 (NM_022784.1,1694-1712).
gcacgcacagccagtcaat

SEQ ID NO: 219342 - DNA, 19 bp, Homo sapiens
  siRNA target sequence for FLJ12476 (NM_022784.1,1765-1783).
ggggtgtgatcgaagcatt

SEQ ID NO: 219343 - DNA, 19 bp, Homo sapiens
  siRNA target sequence for FLJ12476 (NM_022784.1,1830-1848).
gagcccaacgggaaaatca

SEQ ID NO: 219344 - DNA, 19 bp, Homo sapiens
  siRNA target sequence for FLJ12476 (NM_022784.1,1924-1942).
cagtggatccccaagttct

SEQ ID NO: 219345 - DNA, 19 bp, Homo sapiens
  siRNA target sequence for FLJ12476 (NM_022784.1,1984-2002).
gagatgtggttggttactt

SEQ ID NO: 219346 - DNA, 19 bp, Homo sapiens
  siRNA target sequence for FLJ12476 (NM_022784.1,1989-2007).
gtggttggttacttttcga

SEQ ID NO: 219347 - DNA, 19 bp, Homo sapiens
  siRNA target sequence for FLJ12476 (NM_022784.1,1991-2009).
ggttggttacttttcgata

SEQ ID NO: 219348 - DNA, 19 bp, Homo sapiens
  siRNA target sequence for FLJ12476 (NM_022784.1,1996-2014).
gttacttttcgatagatct

SEQ ID NO: 219349 - DNA, 19 bp, Homo sapiens
  siRNA target sequence for FLJ12476 (NM_022784.1,2005-2023).
cgatagatctggtgacttt

SEQ ID NO: 219350 - DNA, 19 bp, Homo sapiens
  siRNA target sequence for FLJ12476 (NM_022784.1,2032-2050).
caagcaccttggaacaaca

SEQ ID NO: 219351 - DNA, 19 bp, Homo sapiens
  siRNA target sequence for FLJ12476 (NM_022784.1,2064-2082).
ggccttaacctcgcatata

SEQ ID NO: 219352 - DNA, 19 bp, Homo sapiens
  siRNA target sequence for FLJ12476 (NM_022784.1,2066-2084).
ccttaacctcgcatatagt

SEQ ID NO: 219353 - DNA, 19 bp, Homo sapiens
  siRNA target sequence for FLJ12476 (NM_022784.1,2272-2290).
gcaatctctcactggtttt

SEQ ID NO: 219354 - DNA, 19 bp, Homo sapiens
  siRNA target sequence for FLJ12476 (NM_022784.1,2281-2299).
cactggttttccactatgt

SEQ ID NO: 219355 - DNA, 19 bp, Homo sapiens
  siRNA target sequence for FLJ12476 (NM_022784.1,2321-2339).
ccatggcattggctatgat

SEQ ID NO: 219356 - DNA, 19 bp, Homo sapiens
  siRNA target sequence for FLJ12476 (NM_022784.1,2386-2404).
gctcgccatctcttcatca

SEQ ID NO: 219357 - DNA, 19 bp, Homo sapiens
  siRNA target sequence for FLJ12476 (NM_022784.1,2387-2405).
ctcgccatctcttcatcat

SEQ ID NO: 219358 - DNA, 19 bp, Homo sapiens
  siRNA target sequence for GKAP42 (NM_025211.2,404-422).
ggcctcagcagtacttagt

SEQ ID NO: 219359 - DNA, 19 bp, Homo sapiens
  siRNA target sequence for GKAP42 (NM_025211.2,405-423).
gcctcagcagtacttagtt

SEQ ID NO: 219360 - DNA, 19 bp, Homo sapiens
  siRNA target sequence for GKAP42 (NM_025211.2,407-425).
ctcagcagtacttagttct

SEQ ID NO: 219361 - DNA, 19 bp, Homo sapiens
  siRNA target sequence for GKAP42 (NM_025211.2,431-449).
caccaccgcttctcgtttt

SEQ ID NO: 219362 - DNA, 19 bp, Homo sapiens
  siRNA target sequence for GKAP42 (NM_025211.2,442-460).
ctcgttttgccctgttaca

SEQ ID NO: 219363 - DNA, 19 bp, Homo sapiens
  siRNA target sequence for GKAP42 (NM_025211.2,676-694).
ctcaacatgatcttccatt

SEQ ID NO: 219364 - DNA, 19 bp, Homo sapiens
  siRNA target sequence for GKAP42 (NM_025211.2,681-699).
catgatcttccattgtcaa

SEQ ID NO: 219365 - DNA, 19 bp, Homo sapiens
  siRNA target sequence for GKAP42 (NM_025211.2,759-777).
cagctgacatctgaaatgt

SEQ ID NO: 219366 - DNA, 19 bp, Homo sapiens
  siRNA target sequence for GKAP42 (NM_025211.2,799-817).
cattgttactaagtaaact

SEQ ID NO: 219367 - DNA, 19 bp, Homo sapiens
  siRNA target sequence for GKAP42 (NM_025211.2,872-890).
gtccaaagttatgaataaa

SEQ ID NO: 219368 - DNA, 19 bp, Homo sapiens
  siRNA target sequence for GKAP42 (NM_025211.2,921-939).
gacagacctctcacagtat

SEQ ID NO: 219369 - DNA, 19 bp, Homo sapiens
  siRNA target sequence for GKAP42 (NM_025211.2,925-943).
gacctctcacagtatcact

SEQ ID NO: 219370 - DNA, 19 bp, Homo sapiens
  siRNA target sequence for GKAP42 (NM_025211.2,927-945).
cctctcacagtatcactaa

SEQ ID NO: 219371 - DNA, 19 bp, Homo sapiens
  siRNA target sequence for GKAP42 (NM_025211.2,932-950).
cacagtatcactaaaagat

SEQ ID NO: 219372 - DNA, 19 bp, Homo sapiens
  siRNA target sequence for GKAP42 (NM_025211.2,954-972).
cattcggaagatcacatta

SEQ ID NO: 219373 - DNA, 19 bp, Homo sapiens
  siRNA target sequence for GKAP42 (NM_025211.2,958-976).
cggaagatcacattagtaa

SEQ ID NO: 219374 - DNA, 19 bp, Homo sapiens
  siRNA target sequence for GKAP42 (NM_025211.2,963-981).
gatcacattagtaaaaaga

SEQ ID NO: 219375 - DNA, 19 bp, Homo sapiens
  siRNA target sequence for GKAP42 (NM_025211.2,1012-1030).
cacatgatggaggattctt

SEQ ID NO: 219376 - DNA, 19 bp, Homo sapiens
  siRNA target sequence for GKAP42 (NM_025211.2,1014-1032).
catgatggaggattcttca

SEQ ID NO: 219377 - DNA, 19 bp, Homo sapiens
  siRNA target sequence for GKAP42 (NM_025211.2,1088-1106).
gcttacagaatataatgga

SEQ ID NO: 219378 - DNA, 19 bp, Homo sapiens
  siRNA target sequence for GKAP42 (NM_025211.2,1095-1113).
gaatataatggaacagata

SEQ ID NO: 219379 - DNA, 19 bp, Homo sapiens
  siRNA target sequence for GKAP42 (NM_025211.2,1231-1249).
ctcaatgggaggcaaagta

SEQ ID NO: 219380 - DNA, 19 bp, Homo sapiens
  siRNA target sequence for GKAP42 (NM_025211.2,1243-1261).
caaagtataaggaagtaaa

SEQ ID NO: 219381 - DNA, 19 bp, Homo sapiens
  siRNA target sequence for GKAP42 (NM_025211.2,1262-1280).
ggcaagaaatgcacaatta

SEQ ID NO: 219382 - DNA, 19 bp, Homo sapiens
  siRNA target sequence for GKAP42 (NM_025211.2,1263-1281).
gcaagaaatgcacaattat

SEQ ID NO: 219383 - DNA, 19 bp, Homo sapiens
  siRNA target sequence for GKAP42 (NM_025211.2,1331-1349).
gcaagttgatgaatcacaa

SEQ ID NO: 219384 - DNA, 19 bp, Homo sapiens
  siRNA target sequence for GKAP42 (NM_025211.2,1341-1359).
gaatcacaaagtatcaaga

SEQ ID NO: 219385 - DNA, 19 bp, Homo sapiens
  siRNA target sequence for GKAP42 (NM_025211.2,1355-1373).
caagaatgagctcactatt

SEQ ID NO: 219386 - DNA, 19 bp, Homo sapiens
  siRNA target sequence for GKAP42 (NM_025211.2,1435-1453).
cagagttagccaaatacca

SEQ ID NO: 219387 - DNA, 19 bp, Homo sapiens
  siRNA target sequence for HINT3 (NM_138571.3,385-403).
gcgagaatgaggacctaat

SEQ ID NO: 219388 - DNA, 19 bp, Homo sapiens
  siRNA target sequence for HINT3 (NM_138571.3,386-404).
cgagaatgaggacctaatt

SEQ ID NO: 219389 - DNA, 19 bp, Homo sapiens
  siRNA target sequence for HINT3 (NM_138571.3,387-405).
gagaatgaggacctaattt

SEQ ID NO: 219390 - DNA, 19 bp, Homo sapiens
  siRNA target sequence for HINT3 (NM_138571.3,447-465).
gtggtgccaaagaagcata

SEQ ID NO: 219391 - DNA, 19 bp, Homo sapiens
  siRNA target sequence for HINT3 (NM_138571.3,478-496).
gaactctaaggaaagatca

SEQ ID NO: 219392 - DNA, 19 bp, Homo sapiens
  siRNA target sequence for HINT3 (NM_138571.3,481-499).
ctctaaggaaagatcaagt

SEQ ID NO: 219393 - DNA, 19 bp, Homo sapiens
  siRNA target sequence for HINT3 (NM_138571.3,614-632).
ccacttgcaccttcatgtt

SEQ ID NO: 219394 - DNA, 19 bp, Homo sapiens
  siRNA target sequence for HINT3 (NM_138571.3,644-662).
ggatcagcttggcttctta

SEQ ID NO: 219395 - DNA, 19 bp, Homo sapiens
  siRNA target sequence for HINT3 (NM_138571.3,645-663).
gatcagcttggcttcttat

SEQ ID NO: 219396 - DNA, 19 bp, Homo sapiens
  siRNA target sequence for HINT3 (NM_138571.3,648-666).
cagcttggcttcttatcca

SEQ ID NO: 219397 - DNA, 19 bp, Homo sapiens
  siRNA target sequence for HINT3 (NM_138571.3,664-682).
ccaagttggtttatagagt

SEQ ID NO: 219398 - DNA, 19 bp, Homo sapiens
  siRNA target sequence for HINT3 (NM_138571.3,672-690).
gtttatagagtcaattcct

SEQ ID NO: 219399 - DNA, 19 bp, Homo sapiens
  siRNA target sequence for HINT3 (NM_138571.3,681-699).
gtcaattcctattggttta

SEQ ID NO: 219400 - DNA, 19 bp, Homo sapiens
  siRNA target sequence for HINT3 (NM_138571.3,701-719).
cacagctgatcacttgatt

SEQ ID NO: 219401 - DNA, 19 bp, Homo sapiens
  siRNA target sequence for IKBKAP (NM_003640.2,311-329).
gcgaaatctgaaattattt

SEQ ID NO: 219402 - DNA, 19 bp, Homo sapiens
  siRNA target sequence for IKBKAP (NM_003640.2,338-356).
ggagttcagggatattcaa

SEQ ID NO: 219403 - DNA, 19 bp, Homo sapiens
  siRNA target sequence for IKBKAP (NM_003640.2,399-417).
gggacggtgctcattggtt

SEQ ID NO: 219404 - DNA, 19 bp, Homo sapiens
  siRNA target sequence for IKBKAP (NM_003640.2,407-425).
gctcattggttcagaacat

SEQ ID NO: 219405 - DNA, 19 bp, Homo sapiens
  siRNA target sequence for IKBKAP (NM_003640.2,639-657).
ggtatctctgttatgagtt

SEQ ID NO: 219406 - DNA, 19 bp, Homo sapiens
  siRNA target sequence for IKBKAP (NM_003640.2,693-711).
ggtcaacagaccctgatta

SEQ ID NO: 219407 - DNA, 19 bp, Homo sapiens
  siRNA target sequence for IKBKAP (NM_003640.2,694-712).
gtcaacagaccctgattat

SEQ ID NO: 219408 - DNA, 19 bp, Homo sapiens
  siRNA target sequence for IKBKAP (NM_003640.2,752-770).
ccatcaggatgattttggt

SEQ ID NO: 219409 - DNA, 19 bp, Homo sapiens
  siRNA target sequence for IKBKAP (NM_003640.2,914-932).
ggatggacagttttttgct

SEQ ID NO: 219410 - DNA, 19 bp, Homo sapiens
  siRNA target sequence for IKBKAP (NM_003640.2,1087-1105).
ccaaccagcaggatattgt

SEQ ID NO: 219411 - DNA, 19 bp, Homo sapiens
  siRNA target sequence for IKBKAP (NM_003640.2,1164-1182).
gaggttaaggtaaatgact

SEQ ID NO: 219412 - DNA, 19 bp, Homo sapiens
  siRNA target sequence for IKBKAP (NM_003640.2,1274-1292).
ctggactgttggaaactat

SEQ ID NO: 219413 - DNA, 19 bp, Homo sapiens
  siRNA target sequence for IKBKAP (NM_003640.2,1293-1311).
cactggtatctcaagcaaa

SEQ ID NO: 219414 - DNA, 19 bp, Homo sapiens
  siRNA target sequence for IKBKAP (NM_003640.2,1298-1316).
gtatctcaagcaaagttta

SEQ ID NO: 219415 - DNA, 19 bp, Homo sapiens
  siRNA target sequence for IKBKAP (NM_003640.2,1302-1320).
ctcaagcaaagtttatcct

SEQ ID NO: 219416 - DNA, 19 bp, Homo sapiens
  siRNA target sequence for IKBKAP (NM_003640.2,1396-1414).
gtcagggctggcattacct

SEQ ID NO: 219417 - DNA, 19 bp, Homo sapiens
  siRNA target sequence for IKBKAP (NM_003640.2,1406-1424).
gcattacctcgcctatgat

SEQ ID NO: 219418 - DNA, 19 bp, Homo sapiens
  siRNA target sequence for IKBKAP (NM_003640.2,1407-1425).
cattacctcgcctatgatt

SEQ ID NO: 219419 - DNA, 19 bp, Homo sapiens
  siRNA target sequence for IKBKAP (NM_003640.2,1442-1460).
ccggagcgtgggagataat

SEQ ID NO: 219420 - DNA, 19 bp, Homo sapiens
  siRNA target sequence for IKBKAP (NM_003640.2,1443-1461).
cggagcgtgggagataatt

SEQ ID NO: 219421 - DNA, 19 bp, Homo sapiens
  siRNA target sequence for IKBKAP (NM_003640.2,1445-1463).
gagcgtgggagataattca

SEQ ID NO: 219422 - DNA, 19 bp, Homo sapiens
  siRNA target sequence for IKBKAP (NM_003640.2,1448-1466).
cgtgggagataattcaagt

SEQ ID NO: 219423 - DNA, 19 bp, Homo sapiens
  siRNA target sequence for IKBKAP (NM_003640.2,1472-1490).
gtccaatgtggctgtcatt

SEQ ID NO: 219424 - DNA, 19 bp, Homo sapiens
  siRNA target sequence for IKBKAP (NM_003640.2,1570-1588).
cacaccctgtgaatcaagt

SEQ ID NO: 219425 - DNA, 19 bp, Homo sapiens
  siRNA target sequence for IKBKAP (NM_003640.2,1578-1596).
gtgaatcaagtcacattct

SEQ ID NO: 219426 - DNA, 19 bp, Homo sapiens
  siRNA target sequence for IKBKAP (NM_003640.2,1599-1617).
gcacaccctcaaaagagta

SEQ ID NO: 219427 - DNA, 19 bp, Homo sapiens
  siRNA target sequence for IKBKAP (NM_003640.2,1600-1618).
cacaccctcaaaagagtaa

SEQ ID NO: 219428 - DNA, 19 bp, Homo sapiens
  siRNA target sequence for IKBKAP (NM_003640.2,1635-1653).
gatgccagtaaccagattt

SEQ ID NO: 219429 - DNA, 19 bp, Homo sapiens
  siRNA target sequence for IKBKAP (NM_003640.2,1639-1657).
ccagtaaccagatttctgt

SEQ ID NO: 219430 - DNA, 19 bp, Homo sapiens
  siRNA target sequence for IKBKAP (NM_003640.2,1882-1900).
ggtctgtcattcaccattt

SEQ ID NO: 219431 - DNA, 19 bp, Homo sapiens
  siRNA target sequence for IKBKAP (NM_003640.2,1962-1980).
gcggtggatggggtcataa

SEQ ID NO: 219432 - DNA, 19 bp, Homo sapiens
  siRNA target sequence for IKBKAP (NM_003640.2,1963-1981).
cggtggatggggtcataat

SEQ ID NO: 219433 - DNA, 19 bp, Homo sapiens
  siRNA target sequence for IKBKAP (NM_003640.2,1967-1985).
ggatggggtcataatcagt

SEQ ID NO: 219434 - DNA, 19 bp, Homo sapiens
  siRNA target sequence for IKBKAP (NM_003640.2,1971-1989).
ggggtcataatcagtctat

SEQ ID NO: 219435 - DNA, 19 bp, Homo sapiens
  siRNA target sequence for IKBKAP (NM_003640.2,1973-1991).
ggtcataatcagtctatgt

SEQ ID NO: 219436 - DNA, 19 bp, Homo sapiens
  siRNA target sequence for IKBKAP (NM_003640.2,1974-1992).
gtcataatcagtctatgtt

SEQ ID NO: 219437 - DNA, 19 bp, Homo sapiens
  siRNA target sequence for IKBKAP (NM_003640.2,2025-2043).
ctggctgatggccagatat

SEQ ID NO: 219438 - DNA, 19 bp, Homo sapiens
  siRNA target sequence for IKBKAP (NM_003640.2,2028-2046).
gctgatggccagatattta

SEQ ID NO: 219439 - DNA, 19 bp, Homo sapiens
  siRNA target sequence for IKBKAP (NM_003640.2,2087-2105).
gaagaactctggtggattt

SEQ ID NO: 219440 - DNA, 19 bp, Homo sapiens
  siRNA target sequence for IKBKAP (NM_003640.2,2109-2127).
gttcggtttccttatccat

SEQ ID NO: 219441 - DNA, 19 bp, Homo sapiens
  siRNA target sequence for IKBKAP (NM_003640.2,2135-2153).
gaccgaattggccatgatt

SEQ ID NO: 219442 - DNA, 19 bp, Homo sapiens
  siRNA target sequence for IKBKAP (NM_003640.2,2184-2202).
gacaggtgtcgctttttca

SEQ ID NO: 219443 - DNA, 19 bp, Homo sapiens
  siRNA target sequence for IKBKAP (NM_003640.2,2188-2206).
ggtgtcgctttttcatcaa

SEQ ID NO: 219444 - DNA, 19 bp, Homo sapiens
  siRNA target sequence for IKBKAP (NM_003640.2,2189-2207).
gtgtcgctttttcatcaat

SEQ ID NO: 219445 - DNA, 19 bp, Homo sapiens
  siRNA target sequence for IKBKAP (NM_003640.2,2193-2211).
cgctttttcatcaatgaca

SEQ ID NO: 219446 - DNA, 19 bp, Homo sapiens
  siRNA target sequence for IKBKAP (NM_003640.2,2214-2232).
gaggttgcgtcaaatatca

SEQ ID NO: 219447 - DNA, 19 bp, Homo sapiens
  siRNA target sequence for IKBKAP (NM_003640.2,2278-2296).
cccatacctgccagtgttt

SEQ ID NO: 219448 - DNA, 19 bp, Homo sapiens
  siRNA target sequence for IKBKAP (NM_003640.2,2417-2435).
ggacacaaagcttgtatta

SEQ ID NO: 219449 - DNA, 19 bp, Homo sapiens
  siRNA target sequence for IKBKAP (NM_003640.2,2422-2440).
caaagcttgtattacagat

SEQ ID NO: 219450 - DNA, 19 bp, Homo sapiens
  siRNA target sequence for IKBKAP (NM_003640.2,2441-2459).
gccaaggggaaacttagaa

SEQ ID NO: 219451 - DNA, 19 bp, Homo sapiens
  siRNA target sequence for IKBKAP (NM_003640.2,2443-2461).
caaggggaaacttagaagt

SEQ ID NO: 219452 - DNA, 19 bp, Homo sapiens
  siRNA target sequence for IKBKAP (NM_003640.2,2453-2471).
cttagaagttgttcatcat

SEQ ID NO: 219453 - DNA, 19 bp, Homo sapiens
  siRNA target sequence for IKBKAP (NM_003640.2,2497-2515).
ggaagtggttggacaaact

SEQ ID NO: 219454 - DNA, 19 bp, Homo sapiens
  siRNA target sequence for IKBKAP (NM_003640.2,2498-2516).
gaagtggttggacaaactt

SEQ ID NO: 219455 - DNA, 19 bp, Homo sapiens
  siRNA target sequence for IKBKAP (NM_003640.2,2614-2632).
ccttcattaaacagataga

SEQ ID NO: 219456 - DNA, 19 bp, Homo sapiens
  siRNA target sequence for IKBKAP (NM_003640.2,2635-2653).
ctgtgaatcatattaactt

SEQ ID NO: 219457 - DNA, 19 bp, Homo sapiens
  siRNA target sequence for IKBKAP (NM_003640.2,2736-2754).
gatcctgacgggaataaaa

SEQ ID NO: 219458 - DNA, 19 bp, Homo sapiens
  siRNA target sequence for IKBKAP (NM_003640.2,2786-2804).
catggagagcataaatcct

SEQ ID NO: 219459 - DNA, 19 bp, Homo sapiens
  siRNA target sequence for IKBKAP (NM_003640.2,2852-2870).
cccagaactggaaattgta

SEQ ID NO: 219460 - DNA, 19 bp, Homo sapiens
  siRNA target sequence for IKBKAP (NM_003640.2,2854-2872).
cagaactggaaattgtact

SEQ ID NO: 219461 - DNA, 19 bp, Homo sapiens
  siRNA target sequence for IKBKAP (NM_003640.2,2952-2970).
ctgcatctggtagatgtta

SEQ ID NO: 219462 - DNA, 19 bp, Homo sapiens
  siRNA target sequence for IKBKAP (NM_003640.2,2954-2972).
gcatctggtagatgttaat

SEQ ID NO: 219463 - DNA, 19 bp, Homo sapiens
  siRNA target sequence for IKBKAP (NM_003640.2,2994-3012).
ggcacctatgactttgatt

SEQ ID NO: 219464 - DNA, 19 bp, Homo sapiens
  siRNA target sequence for IKBKAP (NM_003640.2,2998-3016).
cctatgactttgatttggt

SEQ ID NO: 219465 - DNA, 19 bp, Homo sapiens
  siRNA target sequence for IKBKAP (NM_003640.2,3104-3122).
gcggtttactatagacaaa

SEQ ID NO: 219466 - DNA, 19 bp, Homo sapiens
  siRNA target sequence for IKBKAP (NM_003640.2,3105-3123).
cggtttactatagacaaat

SEQ ID NO: 219467 - DNA, 19 bp, Homo sapiens
  siRNA target sequence for IKBKAP (NM_003640.2,3117-3135).
gacaaatacttgaaacgat

SEQ ID NO: 219468 - DNA, 19 bp, Homo sapiens
  siRNA target sequence for IKBKAP (NM_003640.2,3119-3137).
caaatacttgaaacgatat

SEQ ID NO: 219469 - DNA, 19 bp, Homo sapiens
  siRNA target sequence for IKBKAP (NM_003640.2,3125-3143).
cttgaaacgatatgaaaaa

SEQ ID NO: 219470 - DNA, 19 bp, Homo sapiens
  siRNA target sequence for IKBKAP (NM_003640.2,3176-3194).
gtacttcccagaatgctta

SEQ ID NO: 219471 - DNA, 19 bp, Homo sapiens
  siRNA target sequence for IKBKAP (NM_003640.2,3224-3242).
cgaagctctgaagttatat

SEQ ID NO: 219472 - DNA, 19 bp, Homo sapiens
  siRNA target sequence for IKBKAP (NM_003640.2,3244-3262).
caccaagctcacaacagta

SEQ ID NO: 219473 - DNA, 19 bp, Homo sapiens
  siRNA target sequence for IKBKAP (NM_003640.2,3266-3284).
ggatatcagcattgcttat

SEQ ID NO: 219474 - DNA, 19 bp, Homo sapiens
  siRNA target sequence for IKBKAP (NM_003640.2,3406-3424).
gtgtggcagcccagcttaa

SEQ ID NO: 219475 - DNA, 19 bp, Homo sapiens
  siRNA target sequence for IKBKAP (NM_003640.2,3408-3426).
gtggcagcccagcttaact

SEQ ID NO: 219476 - DNA, 19 bp, Homo sapiens
  siRNA target sequence for IKBKAP (NM_003640.2,3410-3428).
ggcagcccagcttaacttt

SEQ ID NO: 219477 - DNA, 19 bp, Homo sapiens
  siRNA target sequence for IKBKAP (NM_003640.2,3414-3432).
gcccagcttaactttacca

SEQ ID NO: 219478 - DNA, 19 bp, Homo sapiens
  siRNA target sequence for IKBKAP (NM_003640.2,3632-3650).
cgtaaagccttccatttta

SEQ ID NO: 219479 - DNA, 19 bp, Homo sapiens
  siRNA target sequence for IKBKAP (NM_003640.2,3703-3721).
gtcgccacaagaaacgttt

SEQ ID NO: 219480 - DNA, 19 bp, Homo sapiens
  siRNA target sequence for IKBKAP (NM_003640.2,3705-3723).
cgccacaagaaacgtttat

SEQ ID NO: 219481 - DNA, 19 bp, Homo sapiens
  siRNA target sequence for IKBKAP (NM_003640.2,3710-3728).
caagaaacgtttattggta

SEQ ID NO: 219482 - DNA, 19 bp, Homo sapiens
  siRNA target sequence for IKBKAP (NM_003640.2,3835-3853).
gtgagatgagtggcaaata

SEQ ID NO: 219483 - DNA, 19 bp, Homo sapiens
  siRNA target sequence for IKBKAP (NM_003640.2,3846-3864).
ggcaaatactcccatagta

SEQ ID NO: 219484 - DNA, 19 bp, Homo sapiens
  siRNA target sequence for IKBKAP (NM_003640.2,3847-3865).
gcaaatactcccatagtaa

SEQ ID NO: 219485 - DNA, 19 bp, Homo sapiens
  siRNA target sequence for IKBKAP (NM_003640.2,3858-3876).
catagtaactccaggatat

SEQ ID NO: 219486 - DNA, 19 bp, Homo sapiens
  siRNA target sequence for IKBKAP (NM_003640.2,4122-4140).
gaaatttggactcttactt

SEQ ID NO: 219487 - DNA, 19 bp, Homo sapiens
  siRNA target sequence for IKBKAP (NM_003640.2,4134-4152).
cttacttaccagcagaatt

SEQ ID NO: 219488 - DNA, 19 bp, Homo sapiens
  siRNA target sequence for IKBKAP (NM_003640.2,4163-4181).
ggttctaggtcccaattct

SEQ ID NO: 219489 - DNA, 19 bp, Homo sapiens
  siRNA target sequence for IKBKAP (NM_003640.2,4164-4182).
gttctaggtcccaattcta

SEQ ID NO: 219490 - DNA, 19 bp, Homo sapiens
  siRNA target sequence for IKBKAP (NM_003640.2,4175-4193).
caattctactgcaaatagt

SEQ ID NO: 219491 - DNA, 19 bp, Homo sapiens
  siRNA target sequence for IKBKAP (NM_003640.2,4192-4210).
gtatcatggcatcttatca

SEQ ID NO: 219492 - DNA, 19 bp, Homo sapiens
  siRNA target sequence for IKBKAP (NM_003640.2,4257-4275).
ccaccaaagatcaacagaa

SEQ ID NO: 219493 - DNA, 19 bp, Homo sapiens
  siRNA target sequence for ITPK1 (NM_014216.2,620-638).
gcttgactttcccattcat

SEQ ID NO: 219494 - DNA, 19 bp, Homo sapiens
  siRNA target sequence for ITPK1 (NM_014216.2,621-639).
cttgactttcccattcatt

SEQ ID NO: 219495 - DNA, 19 bp, Homo sapiens
  siRNA target sequence for ITPK1 (NM_014216.2,631-649).
ccattcatttgcaaaacca

SEQ ID NO: 219496 - DNA, 19 bp, Homo sapiens
  siRNA target sequence for ITPK1 (NM_014216.2,724-742).
ccctgcgtggtccagaatt

SEQ ID NO: 219497 - DNA, 19 bp, Homo sapiens
  siRNA target sequence for ITPK1 (NM_014216.2,725-743).
cctgcgtggtccagaattt

SEQ ID NO: 219498 - DNA, 19 bp, Homo sapiens
  siRNA target sequence for ITPK1 (NM_014216.2,847-865).
cgtgagtccatcttcttca

SEQ ID NO: 219499 - DNA, 19 bp, Homo sapiens
  siRNA target sequence for ITPK1 (NM_014216.2,848-866).
gtgagtccatcttcttcaa

SEQ ID NO: 219500 - DNA, 19 bp, Homo sapiens
  siRNA target sequence for ITPK1 (NM_014216.2,1040-1058).
ggcagcacgccgtcattga

SEQ ID NO: 219501 - DNA, 19 bp, Homo sapiens
  siRNA target sequence for ITPK1 (NM_014216.2,1042-1060).
cagcacgccgtcattgaca

SEQ ID NO: 219502 - DNA, 19 bp, Homo sapiens
  siRNA target sequence for LOC147463 (NM_173505.1,385-403).
gagagagtcaggtacaact

SEQ ID NO: 219503 - DNA, 19 bp, Homo sapiens
  siRNA target sequence for LOC147463 (NM_173505.1,421-439).
ccagcaaggccataatgat

SEQ ID NO: 219504 - DNA, 19 bp, Homo sapiens
  siRNA target sequence for LOC147463 (NM_173505.1,467-485).
gcatccactgaatttagga

SEQ ID NO: 219505 - DNA, 19 bp, Homo sapiens
  siRNA target sequence for LOC147463 (NM_173505.1,574-592).
ccatgaccaactttatgat

SEQ ID NO: 219506 - DNA, 19 bp, Homo sapiens
  siRNA target sequence for LOC147463 (NM_173505.1,615-633).
ctgcccaaggtggttactt

SEQ ID NO: 219507 - DNA, 19 bp, Homo sapiens
  siRNA target sequence for LOC147463 (NM_173505.1,631-649).
cttggatgttattcgatta

SEQ ID NO: 219508 - DNA, 19 bp, Homo sapiens
  siRNA target sequence for LOC147463 (NM_173505.1,652-670).
gctggcttcaggagcaaaa

SEQ ID NO: 219509 - DNA, 19 bp, Homo sapiens
  siRNA target sequence for LOC147463 (NM_173505.1,791-809).
ggcacaacagcattattga

SEQ ID NO: 219510 - DNA, 19 bp, Homo sapiens
  siRNA target sequence for LOC147463 (NM_173505.1,792-810).
gcacaacagcattattgaa

SEQ ID NO: 219511 - DNA, 19 bp, Homo sapiens
  siRNA target sequence for LOC147463 (NM_173505.1,813-831).
cagccaacaaagggtataa

SEQ ID NO: 219512 - DNA, 19 bp, Homo sapiens
  siRNA target sequence for LOC147463 (NM_173505.1,816-834).
ccaacaaagggtataatga

SEQ ID NO: 219513 - DNA, 19 bp, Homo sapiens
  siRNA target sequence for LOC147463 (NM_173505.1,989-1007).
gaacttccggcagaactaa

SEQ ID NO: 219514 - DNA, 19 bp, Homo sapiens
  siRNA target sequence for LOC147463 (NM_173505.1,995-1013).
ccggcagaactaaccaaaa

SEQ ID NO: 219515 - DNA, 19 bp, Homo sapiens
  siRNA target sequence for LOC147463 (NM_173505.1,996-1014).
cggcagaactaaccaaaaa

SEQ ID NO: 219516 - DNA, 19 bp, Homo sapiens
  siRNA target sequence for LOC147463 (NM_173505.1,1027-1045).
gcgtctcctgagaagtaaa

SEQ ID NO: 219517 - DNA, 19 bp, Homo sapiens
  siRNA target sequence for LOC55971 (NM_018842.3,255-273).
gagcacctaccggaatgtt

SEQ ID NO: 219518 - DNA, 19 bp, Homo sapiens
  siRNA target sequence for LOC55971 (NM_018842.3,257-275).
gcacctaccggaatgttat

SEQ ID NO: 219519 - DNA, 19 bp, Homo sapiens
  siRNA target sequence for LOC55971 (NM_018842.3,260-278).
cctaccggaatgttatgga

SEQ ID NO: 219520 - DNA, 19 bp, Homo sapiens
  siRNA target sequence for LOC55971 (NM_018842.3,261-279).
ctaccggaatgttatggaa

SEQ ID NO: 219521 - DNA, 19 bp, Homo sapiens
  siRNA target sequence for LOC55971 (NM_018842.3,290-308).
ctgggctgcgaaatttaat

SEQ ID NO: 219522 - DNA, 19 bp, Homo sapiens
  siRNA target sequence for LOC55971 (NM_018842.3,313-331).
ctggggaaaaattatgaga

SEQ ID NO: 219523 - DNA, 19 bp, Homo sapiens
  siRNA target sequence for LOC55971 (NM_018842.3,381-399).
ggccaagatcggtgagatt

SEQ ID NO: 219524 - DNA, 19 bp, Homo sapiens
  siRNA target sequence for LOC55971 (NM_018842.3,436-454).
gtcctcatagagatttcaa

SEQ ID NO: 219525 - DNA, 19 bp, Homo sapiens
  siRNA target sequence for LOC55971 (NM_018842.3,438-456).
cctcatagagatttcaagt

SEQ ID NO: 219526 - DNA, 19 bp, Homo sapiens
  siRNA target sequence for LOC55971 (NM_018842.3,471-489).
caacgagagtcttgatgaa

SEQ ID NO: 219527 - DNA, 19 bp, Homo sapiens
  siRNA target sequence for LOC55971 (NM_018842.3,474-492).
cgagagtcttgatgaaaat

SEQ ID NO: 219528 - DNA, 19 bp, Homo sapiens
  siRNA target sequence for LOC55971 (NM_018842.3,504-522).
ccacaaagagattatccat

SEQ ID NO: 219529 - DNA, 19 bp, Homo sapiens
  siRNA target sequence for LOC55971 (NM_018842.3,541-559).
gaacttgacgtgaaatata

SEQ ID NO: 219530 - DNA, 19 bp, Homo sapiens
  siRNA target sequence for LOC55971 (NM_018842.3,544-562).
cttgacgtgaaatatatga

SEQ ID NO: 219531 - DNA, 19 bp, Homo sapiens
  siRNA target sequence for LOC55971 (NM_018842.3,665-683).
gccgaaacgcactcaaata

SEQ ID NO: 219532 - DNA, 19 bp, Homo sapiens
  siRNA target sequence for LOC55971 (NM_018842.3,666-684).
ccgaaacgcactcaaatat

SEQ ID NO: 219533 - DNA, 19 bp, Homo sapiens
  siRNA target sequence for LOC55971 (NM_018842.3,719-737).
cttctcgtcagagtgaaat

SEQ ID NO: 219534 - DNA, 19 bp, Homo sapiens
  siRNA target sequence for LOC55971 (NM_018842.3,722-740).
ctcgtcagagtgaaatcca

SEQ ID NO: 219535 - DNA, 19 bp, Homo sapiens
  siRNA target sequence for LOC55971 (NM_018842.3,731-749).
gtgaaatccagaaattcat

SEQ ID NO: 219536 - DNA, 19 bp, Homo sapiens
  siRNA target sequence for LOC55971 (NM_018842.3,838-856).
cattattatcacttacagt

SEQ ID NO: 219537 - DNA, 19 bp, Homo sapiens
  siRNA target sequence for LOC55971 (NM_018842.3,1002-1020).
catgatcgagagaagcaat

SEQ ID NO: 219538 - DNA, 19 bp, Homo sapiens
  siRNA target sequence for LOC55971 (NM_018842.3,1013-1031).
gaagcaatgtggttaggaa

SEQ ID NO: 219539 - DNA, 19 bp, Homo sapiens
  siRNA target sequence for LOC55971 (NM_018842.3,1033-1051).
gattacgacaccctttcta

SEQ ID NO: 219540 - DNA, 19 bp, Homo sapiens
  siRNA target sequence for LOC55971 (NM_018842.3,1049-1067).
ctaaatgctcaccaaagat

SEQ ID NO: 219541 - DNA, 19 bp, Homo sapiens
  siRNA target sequence for LOC55971 (NM_018842.3,1102-1120).
cccttgatcgatatgttta

SEQ ID NO: 219542 - DNA, 19 bp, Homo sapiens
  siRNA target sequence for LOC55971 (NM_018842.3,1103-1121).
ccttgatcgatatgtttaa

SEQ ID NO: 219543 - DNA, 19 bp, Homo sapiens
  siRNA target sequence for LOC55971 (NM_018842.3,1104-1122).
cttgatcgatatgtttaat

SEQ ID NO: 219544 - DNA, 19 bp, Homo sapiens
  siRNA target sequence for LOC55971 (NM_018842.3,1131-1149).
cacggctgccccgaattca

SEQ ID NO: 219545 - DNA, 19 bp, Homo sapiens
  siRNA target sequence for LOC55971 (NM_018842.3,1133-1151).
cggctgccccgaattcaca

SEQ ID NO: 219546 - DNA, 19 bp, Homo sapiens
  siRNA target sequence for LOC55971 (NM_018842.3,1134-1152).
ggctgccccgaattcacaa

SEQ ID NO: 219547 - DNA, 19 bp, Homo sapiens
  siRNA target sequence for LOC55971 (NM_018842.3,1135-1153).
gctgccccgaattcacaaa

SEQ ID NO: 219548 - DNA, 19 bp, Homo sapiens
  siRNA target sequence for LOC55971 (NM_018842.3,1213-1231).
gcaacgggactgaacatga

SEQ ID NO: 219549 - DNA, 19 bp, Homo sapiens
  siRNA target sequence for LOC55971 (NM_018842.3,1214-1232).
caacgggactgaacatgat

SEQ ID NO: 219550 - DNA, 19 bp, Homo sapiens
  siRNA target sequence for LOC55971 (NM_018842.3,1217-1235).
cgggactgaacatgatgaa

SEQ ID NO: 219551 - DNA, 19 bp, Homo sapiens
  siRNA target sequence for LOC55971 (NM_018842.3,1485-1503).
cgtgaacttgtctgagaat

SEQ ID NO: 219552 - DNA, 19 bp, Homo sapiens
  siRNA target sequence for LOC55971 (NM_018842.3,1486-1504).
gtgaacttgtctgagaata

SEQ ID NO: 219553 - DNA, 19 bp, Homo sapiens
  siRNA target sequence for LOC55971 (NM_018842.3,1522-1540).
ccacccgactacttggaat

SEQ ID NO: 219554 - DNA, 19 bp, Homo sapiens
  siRNA target sequence for LOC55971 (NM_018842.3,1526-1544).
ccgactacttggaatgctt

SEQ ID NO: 219555 - DNA, 19 bp, Homo sapiens
  siRNA target sequence for LOC55971 (NM_018842.3,1686-1704).
cccctttgccactgtgaaa

SEQ ID NO: 219556 - DNA, 19 bp, Homo sapiens
  siRNA target sequence for LOC55971 (NM_018842.3,1710-1728).
cccgactgtgacgaatgat

SEQ ID NO: 219557 - DNA, 19 bp, Homo sapiens
  siRNA target sequence for MADD (NM_003682.2,214-232).
gtcctcggttacttgacta

SEQ ID NO: 219558 - DNA, 19 bp, Homo sapiens
  siRNA target sequence for MADD (NM_003682.2,217-235).
ctcggttacttgactatct

SEQ ID NO: 219559 - DNA, 19 bp, Homo sapiens
  siRNA target sequence for MADD (NM_003682.2,220-238).
ggttacttgactatctagt

SEQ ID NO: 219560 - DNA, 19 bp, Homo sapiens
  siRNA target sequence for MADD (NM_003682.2,311-329).
ggaggatcacactgagttt

SEQ ID NO: 219561 - DNA, 19 bp, Homo sapiens
  siRNA target sequence for MADD (NM_003682.2,337-355).
ccccagatgtagtgttctt

SEQ ID NO: 219562 - DNA, 19 bp, Homo sapiens
  siRNA target sequence for MADD (NM_003682.2,408-426).
gatgatacctcttttgtct

SEQ ID NO: 219563 - DNA, 19 bp, Homo sapiens
  siRNA target sequence for MADD (NM_003682.2,459-477).
cgatatggcatctgtgtta

SEQ ID NO: 219564 - DNA, 19 bp, Homo sapiens
  siRNA target sequence for MADD (NM_003682.2,465-483).
ggcatctgtgttaacttct

SEQ ID NO: 219565 - DNA, 19 bp, Homo sapiens
  siRNA target sequence for MADD (NM_003682.2,491-509).
cttccaaaagcgaatctct

SEQ ID NO: 219566 - DNA, 19 bp, Homo sapiens
  siRNA target sequence for MADD (NM_003682.2,754-772).
ccttccgagagtgtttgta

SEQ ID NO: 219567 - DNA, 19 bp, Homo sapiens
  siRNA target sequence for MADD (NM_003682.2,758-776).
ccgagagtgtttgtatact

SEQ ID NO: 219568 - DNA, 19 bp, Homo sapiens
  siRNA target sequence for MADD (NM_003682.2,760-778).
gagagtgtttgtatactct

SEQ ID NO: 219569 - DNA, 19 bp, Homo sapiens
  siRNA target sequence for MADD (NM_003682.2,806-824).
gcgccttctgggcaagaaa

SEQ ID NO: 219570 - DNA, 19 bp, Homo sapiens
  siRNA target sequence for MADD (NM_003682.2,854-872).
caccatgtggcggatcttt

SEQ ID NO: 219571 - DNA, 19 bp, Homo sapiens
  siRNA target sequence for MADD (NM_003682.2,857-875).
catgtggcggatctttact

SEQ ID NO: 219572 - DNA, 19 bp, Homo sapiens
  siRNA target sequence for MADD (NM_003682.2,929-947).
gattgaggcctggatctat

SEQ ID NO: 219573 - DNA, 19 bp, Homo sapiens
  siRNA target sequence for MADD (NM_003682.2,979-997).
ggcagaagcgagtagacat

SEQ ID NO: 219574 - DNA, 19 bp, Homo sapiens
  siRNA target sequence for MADD (NM_003682.2,1057-1075).
gattcaccctagtggattt

SEQ ID NO: 219575 - DNA, 19 bp, Homo sapiens
  siRNA target sequence for MADD (NM_003682.2,1085-1103).
ccttcccttggaacttcta

SEQ ID NO: 219576 - DNA, 19 bp, Homo sapiens
  siRNA target sequence for MADD (NM_003682.2,1127-1145).
gctaacctgcattctgtta

SEQ ID NO: 219577 - DNA, 19 bp, Homo sapiens
  siRNA target sequence for MADD (NM_003682.2,1203-1221).
gcattcgtggcaatgatct

SEQ ID NO: 219578 - DNA, 19 bp, Homo sapiens
  siRNA target sequence for MADD (NM_003682.2,1204-1222).
cattcgtggcaatgatcta

SEQ ID NO: 219579 - DNA, 19 bp, Homo sapiens
  siRNA target sequence for MADD (NM_003682.2,1297-1315).
ctccaaccccgtacatcat

SEQ ID NO: 219580 - DNA, 19 bp, Homo sapiens
  siRNA target sequence for MADD (NM_003682.2,1449-1467).
gaatcactagagctgaaaa

SEQ ID NO: 219581 - DNA, 19 bp, Homo sapiens
  siRNA target sequence for MADD (NM_003682.2,1453-1471).
cactagagctgaaaaagca

SEQ ID NO: 219582 - DNA, 19 bp, Homo sapiens
  siRNA target sequence for MADD (NM_003682.2,1520-1538).
caatctggagaaatttcat

SEQ ID NO: 219583 - DNA, 19 bp, Homo sapiens
  siRNA target sequence for MADD (NM_003682.2,1562-1580).
cttgggaaggccttctaat

SEQ ID NO: 219584 - DNA, 19 bp, Homo sapiens
  siRNA target sequence for MADD (NM_003682.2,1591-1609).
ccacaccgtccactgaatt

SEQ ID NO: 219585 - DNA, 19 bp, Homo sapiens
  siRNA target sequence for MADD (NM_003682.2,1665-1683).
gccatggtacggttcttca

SEQ ID NO: 219586 - DNA, 19 bp, Homo sapiens
  siRNA target sequence for MADD (NM_003682.2,1666-1684).
ccatggtacggttcttcaa

SEQ ID NO: 219587 - DNA, 19 bp, Homo sapiens
  siRNA target sequence for MADD (NM_003682.2,1667-1685).
catggtacggttcttcaat

SEQ ID NO: 219588 - DNA, 19 bp, Homo sapiens
  siRNA target sequence for MADD (NM_003682.2,1798-1816).
ctccttttgccgagaaatt

SEQ ID NO: 219589 - DNA, 19 bp, Homo sapiens
  siRNA target sequence for MADD (NM_003682.2,1825-1843).
ctcaggctgtggagtactt

SEQ ID NO: 219590 - DNA, 19 bp, Homo sapiens
  siRNA target sequence for MADD (NM_003682.2,1856-1874).
ccttaaccccaccaactat

SEQ ID NO: 219591 - DNA, 19 bp, Homo sapiens
  siRNA target sequence for MADD (NM_003682.2,1875-1893).
gcctttcagcgaattcaca

SEQ ID NO: 219592 - DNA, 19 bp, Homo sapiens
  siRNA target sequence for MADD (NM_003682.2,1876-1894).
cctttcagcgaattcacaa

SEQ ID NO: 219593 - DNA, 19 bp, Homo sapiens
  siRNA target sequence for MADD (NM_003682.2,1881-1899).
cagcgaattcacaacaata

SEQ ID NO: 219594 - DNA, 19 bp, Homo sapiens
  siRNA target sequence for MADD (NM_003682.2,1962-1980).
cactatcgcgtctatgaca

SEQ ID NO: 219595 - DNA, 19 bp, Homo sapiens
  siRNA target sequence for MADD (NM_003682.2,1968-1986).
cgcgtctatgacagcaatt

SEQ ID NO: 219596 - DNA, 19 bp, Homo sapiens
  siRNA target sequence for MADD (NM_003682.2,2033-2051).
ctccgaacctactgatgat

SEQ ID NO: 219597 - DNA, 19 bp, Homo sapiens
  siRNA target sequence for MADD (NM_003682.2,2056-2074).
gcagtgatagtatggatta

SEQ ID NO: 219598 - DNA, 19 bp, Homo sapiens
  siRNA target sequence for MADD (NM_003682.2,2076-2094).
gacgattcaagctcttctt

SEQ ID NO: 219599 - DNA, 19 bp, Homo sapiens
  siRNA target sequence for MADD (NM_003682.2,2079-2097).
gattcaagctcttcttact

SEQ ID NO: 219600 - DNA, 19 bp, Homo sapiens
  siRNA target sequence for MADD (NM_003682.2,2362-2380).
ctacggagatggatgataa

SEQ ID NO: 219601 - DNA, 19 bp, Homo sapiens
  siRNA target sequence for MADD (NM_003682.2,2487-2505).
cgaatctatgacaatccat

SEQ ID NO: 219602 - DNA, 19 bp, Homo sapiens
  siRNA target sequence for MADD (NM_003682.2,2488-2506).
gaatctatgacaatccata

SEQ ID NO: 219603 - DNA, 19 bp, Homo sapiens
  siRNA target sequence for MADD (NM_003682.2,2550-2568).
gagcagggggaaagttaca

SEQ ID NO: 219604 - DNA, 19 bp, Homo sapiens
  siRNA target sequence for MADD (NM_003682.2,2552-2570).
gcagggggaaagttacact

SEQ ID NO: 219605 - DNA, 19 bp, Homo sapiens
  siRNA target sequence for MADD (NM_003682.2,2572-2590).
cccgattcagccaacatgt

SEQ ID NO: 219606 - DNA, 19 bp, Homo sapiens
  siRNA target sequence for MADD (NM_003682.2,2593-2611).
gtggcaatcgggctcaaaa

SEQ ID NO: 219607 - DNA, 19 bp, Homo sapiens
  siRNA target sequence for MADD (NM_003682.2,2596-2614).
gcaatcgggctcaaaagct

SEQ ID NO: 219608 - DNA, 19 bp, Homo sapiens
  siRNA target sequence for MADD (NM_003682.2,2840-2858).
gaaagtatttgggctaaat

SEQ ID NO: 219609 - DNA, 19 bp, Homo sapiens
  siRNA target sequence for MADD (NM_003682.2,2851-2869).
ggctaaatactctaatgga

SEQ ID NO: 219610 - DNA, 19 bp, Homo sapiens
  siRNA target sequence for MADD (NM_003682.2,2914-2932).
gggcgttagtggatcagaa

SEQ ID NO: 219611 - DNA, 19 bp, Homo sapiens
  siRNA target sequence for MADD (NM_003682.2,2928-2946).
cagaagtcatctgtcatta

SEQ ID NO: 219612 - DNA, 19 bp, Homo sapiens
  siRNA target sequence for MADD (NM_003682.2,2985-3003).
cagggtcgatccagcaatt

SEQ ID NO: 219613 - DNA, 19 bp, Homo sapiens
  siRNA target sequence for MADD (NM_003682.2,2987-3005).
gggtcgatccagcaattct

SEQ ID NO: 219614 - DNA, 19 bp, Homo sapiens
  siRNA target sequence for MADD (NM_003682.2,2988-3006).
ggtcgatccagcaattcta

SEQ ID NO: 219615 - DNA, 19 bp, Homo sapiens
  siRNA target sequence for MADD (NM_003682.2,3061-3079).
gagttggctggctcaacat

SEQ ID NO: 219616 - DNA, 19 bp, Homo sapiens
  siRNA target sequence for MADD (NM_003682.2,3063-3081).
gttggctggctcaacatga

SEQ ID NO: 219617 - DNA, 19 bp, Homo sapiens
  siRNA target sequence for MADD (NM_003682.2,3107-3125).
cgagcagctgcgagtcttt

SEQ ID NO: 219618 - DNA, 19 bp, Homo sapiens
  siRNA target sequence for MADD (NM_003682.2,3209-3227).
ggtgtacaagggaatgtta

SEQ ID NO: 219619 - DNA, 19 bp, Homo sapiens
  siRNA target sequence for MADD (NM_003682.2,3321-3339).
gcccagacccactactata

SEQ ID NO: 219620 - DNA, 19 bp, Homo sapiens
  siRNA target sequence for MADD (NM_003682.2,3326-3344).
gacccactactatagtaaa

SEQ ID NO: 219621 - DNA, 19 bp, Homo sapiens
  siRNA target sequence for MADD (NM_003682.2,3328-3346).
cccactactatagtaaaga

SEQ ID NO: 219622 - DNA, 19 bp, Homo sapiens
  siRNA target sequence for MADD (NM_003682.2,3329-3347).
ccactactatagtaaagaa

SEQ ID NO: 219623 - DNA, 19 bp, Homo sapiens
  siRNA target sequence for MADD (NM_003682.2,3507-3525).
ctggacaccagaagtttaa

SEQ ID NO: 219624 - DNA, 19 bp, Homo sapiens
  siRNA target sequence for MADD (NM_003682.2,3684-3702).
gtgagcctgacgtctagtt

SEQ ID NO: 219625 - DNA, 19 bp, Homo sapiens
  siRNA target sequence for MADD (NM_003682.2,3733-3751).
gcgtgagtccagctgttat

SEQ ID NO: 219626 - DNA, 19 bp, Homo sapiens
  siRNA target sequence for MADD (NM_003682.2,3890-3908).
ctctcggggcactttgtct

SEQ ID NO: 219627 - DNA, 19 bp, Homo sapiens
  siRNA target sequence for MADD (NM_003682.2,3894-3912).
cggggcactttgtctgata

SEQ ID NO: 219628 - DNA, 19 bp, Homo sapiens
  siRNA target sequence for MADD (NM_003682.2,3896-3914).
gggcactttgtctgatagt

SEQ ID NO: 219629 - DNA, 19 bp, Homo sapiens
  siRNA target sequence for MADD (NM_003682.2,3937-3955).
caagcaccatctttggtaa

SEQ ID NO: 219630 - DNA, 19 bp, Homo sapiens
  siRNA target sequence for MADD (NM_003682.2,3964-3982).
gcttgaagccaagcataaa

SEQ ID NO: 219631 - DNA, 19 bp, Homo sapiens
  siRNA target sequence for MADD (NM_003682.2,3993-4011).
gcaggcagccccattcgta

SEQ ID NO: 219632 - DNA, 19 bp, Homo sapiens
  siRNA target sequence for MADD (NM_003682.2,3998-4016).
cagccccattcgtacttct

SEQ ID NO: 219633 - DNA, 19 bp, Homo sapiens
  siRNA target sequence for MADD (NM_003682.2,4001-4019).
ccccattcgtacttctgaa

SEQ ID NO: 219634 - DNA, 19 bp, Homo sapiens
  siRNA target sequence for MADD (NM_003682.2,4004-4022).
cattcgtacttctgaagat

SEQ ID NO: 219635 - DNA, 19 bp, Homo sapiens
  siRNA target sequence for MADD (NM_003682.2,4028-4046).
ccagcgagtctatctctat

SEQ ID NO: 219636 - DNA, 19 bp, Homo sapiens
  siRNA target sequence for MADD (NM_003682.2,4075-4093).
ccatgtgggaccagttaga

SEQ ID NO: 219637 - DNA, 19 bp, Homo sapiens
  siRNA target sequence for MADD (NM_003682.2,4098-4116).
gcagctatggagacctttt

SEQ ID NO: 219638 - DNA, 19 bp, Homo sapiens
  siRNA target sequence for MADD (NM_003682.2,4107-4125).
gagaccttttctataagca

SEQ ID NO: 219639 - DNA, 19 bp, Homo sapiens
  siRNA target sequence for MADD (NM_003682.2,4247-4265).
cctgtcccttggagaacat

SEQ ID NO: 219640 - DNA, 19 bp, Homo sapiens
  siRNA target sequence for MADD (NM_003682.2,4399-4417).
cgcacattgggcttgtgta

SEQ ID NO: 219641 - DNA, 19 bp, Homo sapiens
  siRNA target sequence for MADD (NM_003682.2,4413-4431).
gtgtacagccagcaaatca

SEQ ID NO: 219642 - DNA, 19 bp, Homo sapiens
  siRNA target sequence for MADD (NM_003682.2,4524-4542).
gtacatgcagggacagata

SEQ ID NO: 219643 - DNA, 19 bp, Homo sapiens
  siRNA target sequence for MADD (NM_003682.2,4543-4561).
caaacggagatatcttttt

SEQ ID NO: 219644 - DNA, 19 bp, Homo sapiens
  siRNA target sequence for MADD (NM_003682.2,4582-4600).
gtgtggtgttgcgtagtaa

SEQ ID NO: 219645 - DNA, 19 bp, Homo sapiens
  siRNA target sequence for MADD (NM_003682.2,4584-4602).
gtggtgttgcgtagtaaca

SEQ ID NO: 219646 - DNA, 19 bp, Homo sapiens
  siRNA target sequence for MADD (NM_003682.2,4627-4645).
ggtacgagaagctcatcaa

SEQ ID NO: 219647 - DNA, 19 bp, Homo sapiens
  siRNA target sequence for MADD (NM_003682.2,4676-4694).
gtgcttgtggcgtagaaat

SEQ ID NO: 219648 - DNA, 19 bp, Homo sapiens
  siRNA target sequence for MADD (NM_003682.2,4707-4725).
cagctcaacaagttctata

SEQ ID NO: 219649 - DNA, 19 bp, Homo sapiens
  siRNA target sequence for MADD (NM_003682.2,4710-4728).
ctcaacaagttctatacta

SEQ ID NO: 219650 - DNA, 19 bp, Homo sapiens
  siRNA target sequence for MADD (NM_003682.2,4712-4730).
caacaagttctatactaaa

SEQ ID NO: 219651 - DNA, 19 bp, Homo sapiens
  siRNA target sequence for MADD (NM_003682.2,4923-4941).
gagctgaatcacattaaaa

SEQ ID NO: 219652 - DNA, 19 bp, Homo sapiens
  siRNA target sequence for MADD (NM_003682.2,4951-4969).
cagttcgaggcgtctttgt

SEQ ID NO: 219653 - DNA, 19 bp, Homo sapiens
  siRNA target sequence for MADD (NM_003682.2,5023-5041).
caccaatggcccacgaaat

SEQ ID NO: 219654 - DNA, 19 bp, Homo sapiens
  siRNA target sequence for MADD (NM_003682.2,5025-5043).
ccaatggcccacgaaatct

SEQ ID NO: 219655 - DNA, 19 bp, Homo sapiens
  siRNA target sequence for MADD (NM_003682.2,5044-5062).
gctactccgtattatgtct

SEQ ID NO: 219656 - DNA, 19 bp, Homo sapiens
  siRNA target sequence for MADD (NM_130470.1,3621-3639).
ctattgggcctgaagtaat

SEQ ID NO: 219657 - DNA, 19 bp, Homo sapiens
  siRNA target sequence for MAP3K7IP2 (NM_015093.2,215-233).
catgacctgcgacaaaaat

SEQ ID NO: 219658 - DNA, 19 bp, Homo sapiens
  siRNA target sequence for MAP3K7IP2 (NM_015093.2,315-333).
ctcaggagagtacaagata

SEQ ID NO: 219659 - DNA, 19 bp, Homo sapiens
  siRNA target sequence for MAP3K7IP2 (NM_015093.2,319-337).
ggagagtacaagatatctt

SEQ ID NO: 219660 - DNA, 19 bp, Homo sapiens
  siRNA target sequence for MAP3K7IP2 (NM_015093.2,320-338).
gagagtacaagatatcttt

SEQ ID NO: 219661 - DNA, 19 bp, Homo sapiens
  siRNA target sequence for MAP3K7IP2 (NM_015093.2,322-340).
gagtacaagatatctttat

SEQ ID NO: 219662 - DNA, 19 bp, Homo sapiens
  siRNA target sequence for MAP3K7IP2 (NM_015093.2,381-399).
ctggtctacgcaatcacat

SEQ ID NO: 219663 - DNA, 19 bp, Homo sapiens
  siRNA target sequence for MAP3K7IP2 (NM_015093.2,386-404).
ctacgcaatcacatgactt

SEQ ID NO: 219664 - DNA, 19 bp, Homo sapiens
  siRNA target sequence for MAP3K7IP2 (NM_015093.2,455-473).
ggaagtaggatgaatggaa

SEQ ID NO: 219665 - DNA, 19 bp, Homo sapiens
  siRNA target sequence for MAP3K7IP2 (NM_015093.2,521-539).
cagtccaatagtgaactat

SEQ ID NO: 219666 - DNA, 19 bp, Homo sapiens
  siRNA target sequence for MAP3K7IP2 (NM_015093.2,525-543).
ccaatagtgaactatttca

SEQ ID NO: 219667 - DNA, 19 bp, Homo sapiens
  siRNA target sequence for MAP3K7IP2 (NM_015093.2,575-593).
cctcaaggctttaatgttt

SEQ ID NO: 219668 - DNA, 19 bp, Homo sapiens
  siRNA target sequence for MAP3K7IP2 (NM_015093.2,693-711).
gatttaatcccattatggt

SEQ ID NO: 219669 - DNA, 19 bp, Homo sapiens
  siRNA target sequence for MAP3K7IP2 (NM_015093.2,740-758).
cgtaatactcctacatctt

SEQ ID NO: 219670 - DNA, 19 bp, Homo sapiens
  siRNA target sequence for MAP3K7IP2 (NM_015093.2,741-759).
gtaatactcctacatcttt

SEQ ID NO: 219671 - DNA, 19 bp, Homo sapiens
  siRNA target sequence for MAP3K7IP2 (NM_015093.2,776-794).
cctccacctgtacttaaca

SEQ ID NO: 219672 - DNA, 19 bp, Homo sapiens
  siRNA target sequence for MAP3K7IP2 (NM_015093.2,793-811).
cagtccacagggaaattct

SEQ ID NO: 219673 - DNA, 19 bp, Homo sapiens
  siRNA target sequence for MAP3K7IP2 (NM_015093.2,797-815).
ccacagggaaattctatct

SEQ ID NO: 219674 - DNA, 19 bp, Homo sapiens
  siRNA target sequence for MAP3K7IP2 (NM_015093.2,814-832).
ctatattaggccttacatt

SEQ ID NO: 219675 - DNA, 19 bp, Homo sapiens
  siRNA target sequence for MAP3K7IP2 (NM_015093.2,875-893).
ggctgggtatctcagttta

SEQ ID NO: 219676 - DNA, 19 bp, Homo sapiens
  siRNA target sequence for MAP3K7IP2 (NM_015093.2,876-894).
gctgggtatctcagtttaa

SEQ ID NO: 219677 - DNA, 19 bp, Homo sapiens
  siRNA target sequence for MAP3K7IP2 (NM_015093.2,945-963).
ctacttgtcctgcatctaa

SEQ ID NO: 219678 - DNA, 19 bp, Homo sapiens
  siRNA target sequence for MAP3K7IP2 (NM_015093.2,970-988).
gtcacatacctcatctcaa

SEQ ID NO: 219679 - DNA, 19 bp, Homo sapiens
  siRNA target sequence for MAP3K7IP2 (NM_015093.2,1022-1040).
gtctacatgccaatcagtt

SEQ ID NO: 219680 - DNA, 19 bp, Homo sapiens
  siRNA target sequence for MAP3K7IP2 (NM_015093.2,1036-1054).
cagttcacctactacttca

SEQ ID NO: 219681 - DNA, 19 bp, Homo sapiens
  siRNA target sequence for MAP3K7IP2 (NM_015093.2,1095-1113).
ctgcccatagccaatataa

SEQ ID NO: 219682 - DNA, 19 bp, Homo sapiens
  siRNA target sequence for MAP3K7IP2 (NM_015093.2,1097-1115).
gcccatagccaatataaca

SEQ ID NO: 219683 - DNA, 19 bp, Homo sapiens
  siRNA target sequence for MAP3K7IP2 (NM_015093.2,1098-1116).
cccatagccaatataacat

SEQ ID NO: 219684 - DNA, 19 bp, Homo sapiens
  siRNA target sequence for MAP3K7IP2 (NM_015093.2,1128-1146).
caacaggacctcgaaaaaa

SEQ ID NO: 219685 - DNA, 19 bp, Homo sapiens
  siRNA target sequence for MAP3K7IP2 (NM_015093.2,1137-1155).
ctcgaaaaaaccagattga

SEQ ID NO: 219686 - DNA, 19 bp, Homo sapiens
  siRNA target sequence for MAP3K7IP2 (NM_015093.2,1163-1181).
cttgaacccccacaaagaa

SEQ ID NO: 219687 - DNA, 19 bp, Homo sapiens
  siRNA target sequence for MAP3K7IP2 (NM_015093.2,1171-1189).
cccacaaagaaataattct

SEQ ID NO: 219688 - DNA, 19 bp, Homo sapiens
  siRNA target sequence for MAP3K7IP2 (NM_015093.2,1246-1264).
ccagaccttaaacagaaat

SEQ ID NO: 219689 - DNA, 19 bp, Homo sapiens
  siRNA target sequence for MAP3K7IP2 (NM_015093.2,1323-1341).
gtcaacctaaggtctatat

SEQ ID NO: 219690 - DNA, 19 bp, Homo sapiens
  siRNA target sequence for MAP3K7IP2 (NM_015093.2,1325-1343).
caacctaaggtctatattt

SEQ ID NO: 219691 - DNA, 19 bp, Homo sapiens
  siRNA target sequence for MAP3K7IP2 (NM_015093.2,1396-1414).
cttcatatccacaaactct

SEQ ID NO: 219692 - DNA, 19 bp, Homo sapiens
  siRNA target sequence for MAP3K7IP2 (NM_015093.2,1455-1473).
gcatgggtcctgcctttat

SEQ ID NO: 219693 - DNA, 19 bp, Homo sapiens
  siRNA target sequence for MAP3K7IP2 (NM_015093.2,1459-1477).
gggtcctgcctttattcat

SEQ ID NO: 219694 - DNA, 19 bp, Homo sapiens
  siRNA target sequence for MAP3K7IP2 (NM_015093.2,1461-1479).
gtcctgcctttattcatca

SEQ ID NO: 219695 - DNA, 19 bp, Homo sapiens
  siRNA target sequence for MAP3K7IP2 (NM_015093.2,1494-1512).
gtcgagcaataggcaataa

SEQ ID NO: 219696 - DNA, 19 bp, Homo sapiens
  siRNA target sequence for MAP3K7IP2 (NM_015093.2,1540-1558).
cactcagcccaatacgaaa

SEQ ID NO: 219697 - DNA, 19 bp, Homo sapiens
  siRNA target sequence for MAP3K7IP2 (NM_015093.2,1542-1560).
ctcagcccaatacgaaata

SEQ ID NO: 219698 - DNA, 19 bp, Homo sapiens
  siRNA target sequence for MAP3K7IP2 (NM_015093.2,1612-1630).
ggtggtgtcccctaccttt

SEQ ID NO: 219699 - DNA, 19 bp, Homo sapiens
  siRNA target sequence for MAP3K7IP2 (NM_015093.2,1615-1633).
ggtgtcccctacctttgaa

SEQ ID NO: 219700 - DNA, 19 bp, Homo sapiens
  siRNA target sequence for MAP3K7IP2 (NM_015093.2,1690-1708).
cctcacggaccctacatta

SEQ ID NO: 219701 - DNA, 19 bp, Homo sapiens
  siRNA target sequence for MAP3K7IP2 (NM_015093.2,1693-1711).
cacggaccctacattagca

SEQ ID NO: 219702 - DNA, 19 bp, Homo sapiens
  siRNA target sequence for MAP3K7IP2 (NM_015093.2,1801-1819).
cagaatggaacgacttcaa

SEQ ID NO: 219703 - DNA, 19 bp, Homo sapiens
  siRNA target sequence for MAP3K7IP2 (NM_015093.2,1895-1913).
cgaaggcgcctgaaaagat

SEQ ID NO: 219704 - DNA, 19 bp, Homo sapiens
  siRNA target sequence for MAP3K7IP2 (NM_015093.2,1899-1917).
ggcgcctgaaaagatcaaa

SEQ ID NO: 219705 - DNA, 19 bp, Homo sapiens
  siRNA target sequence for MAP3K7IP2 (NM_015093.2,1900-1918).
gcgcctgaaaagatcaaat

SEQ ID NO: 219706 - DNA, 19 bp, Homo sapiens
  siRNA target sequence for MAP3K7IP2 (NM_015093.2,1901-1919).
cgcctgaaaagatcaaatt

SEQ ID NO: 219707 - DNA, 19 bp, Homo sapiens
  siRNA target sequence for MAP3K7IP2 (NM_015093.2,1951-1969).
gcagcagctgagaagttgt

SEQ ID NO: 219708 - DNA, 19 bp, Homo sapiens
  siRNA target sequence for MAP3K7IP2 (NM_015093.2,1954-1972).
gcagctgagaagttgtaat

SEQ ID NO: 219709 - DNA, 19 bp, Homo sapiens
  siRNA target sequence for MAP3K7IP2 (NM_015093.2,1974-1992).
gacaactccagattgacat

SEQ ID NO: 219710 - DNA, 19 bp, Homo sapiens
  siRNA target sequence for MAP3K7IP2 (NM_015093.2,1979-1997).
ctccagattgacattgact

SEQ ID NO: 219711 - DNA, 19 bp, Homo sapiens
  siRNA target sequence for MAP3K7IP2 (NM_015093.2,1988-2006).
gacattgactgcttaacca

SEQ ID NO: 219712 - DNA, 19 bp, Homo sapiens
  siRNA target sequence for MAP3K7IP2 (NM_015093.2,2049-2067).
ccagcgctattcataactt

SEQ ID NO: 219713 - DNA, 19 bp, Homo sapiens
  siRNA target sequence for MAP3K7IP2 (NM_015093.2,2050-2068).
cagcgctattcataacttt

SEQ ID NO: 219714 - DNA, 19 bp, Homo sapiens
  siRNA target sequence for MAP3K7IP2 (NM_015093.2,2052-2070).
gcgctattcataactttta

SEQ ID NO: 219715 - DNA, 19 bp, Homo sapiens
  siRNA target sequence for MAP3K7IP2 (NM_015093.2,2053-2071).
cgctattcataacttttat

SEQ ID NO: 219716 - DNA, 19 bp, Homo sapiens
  siRNA target sequence for MAP3K7IP2 (NM_015093.2,2055-2073).
ctattcataacttttatga

SEQ ID NO: 219717 - DNA, 19 bp, Homo sapiens
  siRNA target sequence for MAP3K7IP2 (NM_015093.2,2065-2083).
cttttatgacaatattgga

SEQ ID NO: 219718 - DNA, 19 bp, Homo sapiens
  siRNA target sequence for MAP3K7IP2 (NM_015093.2,2184-2202).
gtaccgcctgtactttttt

SEQ ID NO: 219719 - DNA, 19 bp, Homo sapiens
  siRNA target sequence for NYD-SP25 (NM_033516.2,244-262).
cctctgtgggcacatatga

SEQ ID NO: 219720 - DNA, 19 bp, Homo sapiens
  siRNA target sequence for NYD-SP25 (NM_033516.2,317-335).
caaaaccaaactcactaaa

SEQ ID NO: 219721 - DNA, 19 bp, Homo sapiens
  siRNA target sequence for NYD-SP25 (NM_033516.2,331-349).
ctaaattggaggctgaaat

SEQ ID NO: 219722 - DNA, 19 bp, Homo sapiens
  siRNA target sequence for NYD-SP25 (NM_033516.2,385-403).
gacgctgtggggaactcaa

SEQ ID NO: 219723 - DNA, 19 bp, Homo sapiens
  siRNA target sequence for NYD-SP25 (NM_033516.2,395-413).
ggaactcaagaggaagtta

SEQ ID NO: 219724 - DNA, 19 bp, Homo sapiens
  siRNA target sequence for NYD-SP25 (NM_033516.2,452-470).
caagagctggcttgatgtt

SEQ ID NO: 219725 - DNA, 19 bp, Homo sapiens
  siRNA target sequence for NYD-SP25 (NM_033516.2,588-606).
ggtctgatggggacaatca

SEQ ID NO: 219726 - DNA, 19 bp, Homo sapiens
  siRNA target sequence for P101-PI3K (NM_014308.1,841-859).
ggcggtgggagaaaaagct

SEQ ID NO: 219727 - DNA, 19 bp, Homo sapiens
  siRNA target sequence for P101-PI3K (NM_014308.1,861-879).
gcttccctggggtgttaga

SEQ ID NO: 219728 - DNA, 19 bp, Homo sapiens
  siRNA target sequence for P101-PI3K (NM_014308.1,1012-1030).
gatcctgggagatgatgaa

SEQ ID NO: 219729 - DNA, 19 bp, Homo sapiens
  siRNA target sequence for P101-PI3K (NM_014308.1,1713-1731).
cacggttcttcaaacttca

SEQ ID NO: 219730 - DNA, 19 bp, Homo sapiens
  siRNA target sequence for P101-PI3K (NM_014308.1,1917-1935).
ggtatgagcgcaatgtact

SEQ ID NO: 219731 - DNA, 19 bp, Homo sapiens
  siRNA target sequence for P101-PI3K (NM_014308.1,2236-2254).
ggctgttcctctaacacta

SEQ ID NO: 219732 - DNA, 19 bp, Homo sapiens
  siRNA target sequence for P101-PI3K (NM_014308.1,2244-2262).
ctctaacactacagattat

SEQ ID NO: 219733 - DNA, 19 bp, Homo sapiens
  siRNA target sequence for P101-PI3K (NM_014308.1,2438-2456).
ggctttaaccagattagca

SEQ ID NO: 219734 - DNA, 19 bp, Homo sapiens
  siRNA target sequence for P101-PI3K (NM_014308.1,2454-2472).
gcacatcgcagatcaaagt

SEQ ID NO: 219735 - DNA, 19 bp, Homo sapiens
  siRNA target sequence for P15RS (NM_018170.2,149-167).
ctgcggaaagccaaaccaa

SEQ ID NO: 219736 - DNA, 19 bp, Homo sapiens
  siRNA target sequence for P15RS (NM_018170.2,268-286).
ggcttttaagcatgtttca

SEQ ID NO: 219737 - DNA, 19 bp, Homo sapiens
  siRNA target sequence for P15RS (NM_018170.2,290-308).
gaaactgatgaaagttgta

SEQ ID NO: 219738 - DNA, 19 bp, Homo sapiens
  siRNA target sequence for P15RS (NM_018170.2,320-338).
ggaagagtgttatctattt

SEQ ID NO: 219739 - DNA, 19 bp, Homo sapiens
  siRNA target sequence for P15RS (NM_018170.2,411-429).
ctaggaagcgaacttatga

SEQ ID NO: 219740 - DNA, 19 bp, Homo sapiens
  siRNA target sequence for P15RS (NM_018170.2,414-432).
ggaagcgaacttatgaaca

SEQ ID NO: 219741 - DNA, 19 bp, Homo sapiens
  siRNA target sequence for P15RS (NM_018170.2,418-436).
gcgaacttatgaacagata

SEQ ID NO: 219742 - DNA, 19 bp, Homo sapiens
  siRNA target sequence for P15RS (NM_018170.2,486-504).
caccacagactctagatct

SEQ ID NO: 219743 - DNA, 19 bp, Homo sapiens
  siRNA target sequence for P15RS (NM_018170.2,505-523).
cgttagagcattacaagat

SEQ ID NO: 219744 - DNA, 19 bp, Homo sapiens
  siRNA target sequence for P15RS (NM_018170.2,562-580).
gaggatagcttctttacct

SEQ ID NO: 219745 - DNA, 19 bp, Homo sapiens
  siRNA target sequence for P15RS (NM_018170.2,579-597).
ctgttgaagtccaagaagt

SEQ ID NO: 219746 - DNA, 19 bp, Homo sapiens
  siRNA target sequence for P15RS (NM_018170.2,589-607).
ccaagaagtatctctatta

SEQ ID NO: 219747 - DNA, 19 bp, Homo sapiens
  siRNA target sequence for P15RS (NM_018170.2,593-611).
gaagtatctctattagata

SEQ ID NO: 219748 - DNA, 19 bp, Homo sapiens
  siRNA target sequence for P15RS (NM_018170.2,596-614).
gtatctctattagataaaa

SEQ ID NO: 219749 - DNA, 19 bp, Homo sapiens
  siRNA target sequence for P15RS (NM_018170.2,653-671).
gtagaggatgcgtgtatgt

SEQ ID NO: 219750 - DNA, 19 bp, Homo sapiens
  siRNA target sequence for P15RS (NM_018170.2,693-711).
gattggcggcagaaataga

SEQ ID NO: 219751 - DNA, 19 bp, Homo sapiens
  siRNA target sequence for P15RS (NM_018170.2,721-739).
gcaactcactcgaatgtta

SEQ ID NO: 219752 - DNA, 19 bp, Homo sapiens
  siRNA target sequence for P15RS (NM_018170.2,743-761).
gattttcttcgttgtcaaa

SEQ ID NO: 219753 - DNA, 19 bp, Homo sapiens
  siRNA target sequence for P15RS (NM_018170.2,778-796).
gaaagagcataaattggaa

SEQ ID NO: 219754 - DNA, 19 bp, Homo sapiens
  siRNA target sequence for P15RS (NM_018170.2,825-843).
ccctggtgcgcaaagaact

SEQ ID NO: 219755 - DNA, 19 bp, Homo sapiens
  siRNA target sequence for P15RS (NM_018170.2,859-877).
gagcctgccagacttatct

SEQ ID NO: 219756 - DNA, 19 bp, Homo sapiens
  siRNA target sequence for SKP2 (NM_005983.2,428-446).
ccgcaggcctaagctaaat

SEQ ID NO: 219757 - DNA, 19 bp, Homo sapiens
  siRNA target sequence for SKP2 (NM_005983.2,431-449).
caggcctaagctaaatcga

SEQ ID NO: 219758 - DNA, 19 bp, Homo sapiens
  siRNA target sequence for SKP2 (NM_005983.2,540-558).
gtctctggtgtttgtaaga

SEQ ID NO: 219759 - DNA, 19 bp, Homo sapiens
  siRNA target sequence for SKP2 (NM_005983.2,573-591).
gcgtctgatgagtctctat

SEQ ID NO: 219760 - DNA, 19 bp, Homo sapiens
  siRNA target sequence for SKP2 (NM_005983.2,599-617).
cttagacctcacaggtaaa

SEQ ID NO: 219761 - DNA, 19 bp, Homo sapiens
  siRNA target sequence for SKP2 (NM_005983.2,671-689).
ccgctgcccacgatcattt

SEQ ID NO: 219762 - DNA, 19 bp, Homo sapiens
  siRNA target sequence for SKP2 (NM_005983.2,672-690).
cgctgcccacgatcattta

SEQ ID NO: 219763 - DNA, 19 bp, Homo sapiens
  siRNA target sequence for SKP2 (NM_005983.2,673-691).
gctgcccacgatcatttat

SEQ ID NO: 219764 - DNA, 19 bp, Homo sapiens
  siRNA target sequence for SKP2 (NM_005983.2,676-694).
gcccacgatcatttatgga

SEQ ID NO: 219765 - DNA, 19 bp, Homo sapiens
  siRNA target sequence for SKP2 (NM_005983.2,741-759).
gacctatcgaactcagtta

SEQ ID NO: 219766 - DNA, 19 bp, Homo sapiens
  siRNA target sequence for SKP2 (NM_005983.2,743-761).
cctatcgaactcagttata

SEQ ID NO: 219767 - DNA, 19 bp, Homo sapiens
  siRNA target sequence for SKP2 (NM_005983.2,748-766).
cgaactcagttatagaagt

SEQ ID NO: 219768 - DNA, 19 bp, Homo sapiens
  siRNA target sequence for SKP2 (NM_005983.2,796-814).
gttccaagttgcagaatct

SEQ ID NO: 219769 - DNA, 19 bp, Homo sapiens
  siRNA target sequence for SKP2 (NM_005983.2,834-852).
ctttcggatcccattgtca

SEQ ID NO: 219770 - DNA, 19 bp, Homo sapiens
  siRNA target sequence for SKP2 (NM_005983.2,849-867).
gtcaatactctcgcaaaaa

SEQ ID NO: 219771 - DNA, 19 bp, Homo sapiens
  siRNA target sequence for SKP2 (NM_005983.2,856-874).
ctctcgcaaaaaactcaaa

SEQ ID NO: 219772 - DNA, 19 bp, Homo sapiens
  siRNA target sequence for SKP2 (NM_005983.2,858-876).
ctcgcaaaaaactcaaatt

SEQ ID NO: 219773 - DNA, 19 bp, Homo sapiens
  siRNA target sequence for SKP2 (NM_005983.2,860-878).
cgcaaaaaactcaaattta

SEQ ID NO: 219774 - DNA, 19 bp, Homo sapiens
  siRNA target sequence for SKP2 (NM_005983.2,921-939).
gccctgcagactttgctaa

SEQ ID NO: 219775 - DNA, 19 bp, Homo sapiens
  siRNA target sequence for SKP2 (NM_005983.2,965-983).
gaacctctcctggtgtttt

SEQ ID NO: 219776 - DNA, 19 bp, Homo sapiens
  siRNA target sequence for SKP2 (NM_005983.2,1033-1051).
ccatcacccagctgaatct

SEQ ID NO: 219777 - DNA, 19 bp, Homo sapiens
  siRNA target sequence for SKP2 (NM_005983.2,1083-1101).
gatctctctactttagtta

SEQ ID NO: 219778 - DNA, 19 bp, Homo sapiens
  siRNA target sequence for SKP2 (NM_005983.2,1088-1106).
ctctactttagttagaaga

SEQ ID NO: 219779 - DNA, 19 bp, Homo sapiens
  siRNA target sequence for SKP2 (NM_005983.2,1111-1129).
ccaatcttgtccatctaga

SEQ ID NO: 219780 - DNA, 19 bp, Homo sapiens
  siRNA target sequence for SKP2 (NM_005983.2,1116-1134).
cttgtccatctagacttaa

SEQ ID NO: 219781 - DNA, 19 bp, Homo sapiens
  siRNA target sequence for SKP2 (NM_005983.2,1122-1140).
catctagacttaagtgata

SEQ ID NO: 219782 - DNA, 19 bp, Homo sapiens
  siRNA target sequence for SKP2 (NM_005983.2,1141-1159).
gtgtcatgctaaagaatga

SEQ ID NO: 219783 - DNA, 19 bp, Homo sapiens
  siRNA target sequence for SKP2 (NM_005983.2,1206-1224).
ctcagtcggtgctatgata

SEQ ID NO: 219784 - DNA, 19 bp, Homo sapiens
  siRNA target sequence for SKP2 (NM_005983.2,1208-1226).
cagtcggtgctatgatata

SEQ ID NO: 219785 - DNA, 19 bp, Homo sapiens
  siRNA target sequence for SKP2 (NM_005983.2,1210-1228).
gtcggtgctatgatataat

SEQ ID NO: 219786 - DNA, 19 bp, Homo sapiens
  siRNA target sequence for SKP2 (NM_005983.2,1214-1232).
gtgctatgatataatacct

SEQ ID NO: 219787 - DNA, 19 bp, Homo sapiens
  siRNA target sequence for SKP2 (NM_005983.2,1221-1239).
gatataatacctgaaactt

SEQ ID NO: 219788 - DNA, 19 bp, Homo sapiens
  siRNA target sequence for SKP2 (NM_005983.2,1252-1270).
gagaaattcccacactaaa

SEQ ID NO: 219789 - DNA, 19 bp, Homo sapiens
  siRNA target sequence for SKP2 (NM_005983.2,1273-1291).
cactacaagtttttggaat

SEQ ID NO: 219790 - DNA, 19 bp, Homo sapiens
  siRNA target sequence for SKP2 (NM_005983.2,1297-1315).
cagatggtacccttcaact

SEQ ID NO: 219791 - DNA, 19 bp, Homo sapiens
  siRNA target sequence for SKP2 (NM_005983.2,1302-1320).
ggtacccttcaactgttaa

SEQ ID NO: 219792 - DNA, 19 bp, Homo sapiens
  siRNA target sequence for SKP2 (NM_005983.2,1303-1321).
gtacccttcaactgttaaa

SEQ ID NO: 219793 - DNA, 19 bp, Homo sapiens
  siRNA target sequence for SKP2 (NM_005983.2,1306-1324).
cccttcaactgttaaagga

SEQ ID NO: 219794 - DNA, 19 bp, Homo sapiens
  siRNA target sequence for SKP2 (NM_005983.2,1307-1325).
ccttcaactgttaaaggaa

SEQ ID NO: 219795 - DNA, 19 bp, Homo sapiens
  siRNA target sequence for SKP2 (NM_005983.2,1328-1346).
ccttcctcatctacagatt

SEQ ID NO: 219796 - DNA, 19 bp, Homo sapiens
  siRNA target sequence for SKP2 (NM_005983.2,1367-1385).
cattgccaggccaactatt

SEQ ID NO: 219797 - DNA, 19 bp, Homo sapiens
  siRNA target sequence for SKP2 (NM_005983.2,1376-1394).
gccaactattggcaacaaa

SEQ ID NO: 219798 - DNA, 19 bp, Homo sapiens
  siRNA target sequence for SKP2 (NM_005983.2,1403-1421).
ggagatatggggcatcaaa

SEQ ID NO: 219799 - DNA, 19 bp, Homo sapiens
  siRNA target sequence for SKP2 (NM_005983.2,1404-1422).
gagatatggggcatcaaat

SEQ ID NO: 219800 - DNA, 19 bp, Homo sapiens
  siRNA target sequence for SKP2 (NM_005983.2,1437-1455).
caaaagcccagttgtctat

SEQ ID NO: 219801 - DNA, 19 bp, Homo sapiens
  siRNA target sequence for SKP2 (NM_032637.2,1227-1245).
gaaactttactattagtga

SEQ ID NO: 219802 - DNA, 19 bp, Homo sapiens
  siRNA target sequence for SKP2 (NM_032637.2,1344-1362).
catgtcagagtaatctgta

SEQ ID NO: 219803 - DNA, 19 bp, Homo sapiens
  siRNA target sequence for SKP2 (NM_032637.2,1347-1365).
gtcagagtaatctgtattt

SEQ ID NO: 219804 - DNA, 19 bp, Homo sapiens
  siRNA target sequence for STAP2 (NM_017720.1,116-134).
cctgccttcacactactat

SEQ ID NO: 219805 - DNA, 19 bp, Homo sapiens
  siRNA target sequence for STAP2 (NM_017720.1,120-138).
ccttcacactactatgaga

SEQ ID NO: 219806 - DNA, 19 bp, Homo sapiens
  siRNA target sequence for STAP2 (NM_017720.1,159-177).
ccctgtgaccgggattaca

SEQ ID NO: 219807 - DNA, 19 bp, Homo sapiens
  siRNA target sequence for STAP2 (NM_017720.1,160-178).
cctgtgaccgggattacaa

SEQ ID NO: 219808 - DNA, 19 bp, Homo sapiens
  siRNA target sequence for STAP2 (NM_017720.1,450-468).
cttcctgggcacctataca

SEQ ID NO: 219809 - DNA, 19 bp, Homo sapiens
  siRNA target sequence for STAP2 (NM_017720.1,663-681).
cacgtggtccggcattaca

SEQ ID NO: 219810 - DNA, 19 bp, Homo sapiens
  siRNA target sequence for STAP2 (NM_017720.1,746-764).
ggacgccgtggtcaactat

SEQ ID NO: 219811 - DNA, 19 bp, Homo sapiens
  siRNA target sequence for STAP2 (NM_017720.1,747-765).
gacgccgtggtcaactatt

SEQ ID NO: 219812 - DNA, 19 bp, Homo sapiens
  siRNA target sequence for STAP2 (NM_017720.1,852-870).
gagaatggcgagaatgtgt

SEQ ID NO: 219813 - DNA, 19 bp, Homo sapiens
  siRNA target sequence for STAP2 (NM_017720.1,1021-1039).
cagctgttgactatgagaa

SEQ ID NO: 219814 - DNA, 19 bp, Homo sapiens
  siRNA target sequence for STAP2 (NM_017720.1,1044-1062).
gatgtggcttcctctagtt

SEQ ID NO: 219815 - DNA, 19 bp, Homo sapiens
  siRNA target sequence for STAP2 (NM_017720.1,1280-1298).
gcccaaagtctttaatggt

SEQ ID NO: 219816 - DNA, 19 bp, Homo sapiens
  siRNA target sequence for STAP2 (NM_017720.1,1369-1387).
cggcagagctacagaagaa

SEQ ID NO: 219817 - DNA, 19 bp, Homo sapiens
  siRNA target sequence for TSKS (NM_021733.1,517-535).
ctgtgctgagcgagaatct

SEQ ID NO: 219818 - DNA, 19 bp, Homo sapiens
  siRNA target sequence for TSKS (NM_021733.1,566-584).
ggaggggtactgcattcaa

SEQ ID NO: 219819 - DNA, 19 bp, Homo sapiens
  siRNA target sequence for TSKS (NM_021733.1,571-589).
ggtactgcattcaactcaa

SEQ ID NO: 219820 - DNA, 19 bp, Homo sapiens
  siRNA target sequence for TSKS (NM_021733.1,1374-1392).
caggggtcgcagttgtcta

SEQ ID NO: 219821 - DNA, 19 bp, Homo sapiens
  siRNA target sequence for TSKS (NM_021733.1,1480-1498).
gctgtcagaggctacacaa

SEQ ID NO: 219822 - DNA, 19 bp, Homo sapiens
  siRNA target sequence for TSKS (NM_021733.1,1483-1501).
gtcagaggctacacaagaa

SEQ ID NO: 219823 - DNA, 19 bp, Homo sapiens
  siRNA target sequence for TSKS (NM_021733.1,1645-1663).
ccactctggaccatctaca

SEQ ID NO: 219824 - DNA, 19 bp, Homo sapiens
  siRNA target sequence for TSKS (NM_021733.1,1769-1787).
gggctcagcccctgaacaa

SEQ ID NO: 219825 - DNA, 19 bp, Homo sapiens
  siRNA target sequence for DHRS2 (NM_005794.2,462-480).
ctaccagggctggtttcat

SEQ ID NO: 219826 - DNA, 19 bp, Homo sapiens
  siRNA target sequence for DHRS2 (NM_005794.2,939-957).
catcctggtctcttccatt

SEQ ID NO: 219827 - DNA, 19 bp, Homo sapiens
  siRNA target sequence for DHRS2 (NM_005794.2,950-968).
cttccattgcagcttataa

SEQ ID NO: 219828 - DNA, 19 bp, Homo sapiens
  siRNA target sequence for DHRS2 (NM_005794.2,980-998).
cgctgggtgtctacaatgt

SEQ ID NO: 219829 - DNA, 19 bp, Homo sapiens
  siRNA target sequence for DHRS2 (NM_005794.2,1014-1032).
gctgggtctcactagaaca

SEQ ID NO: 219830 - DNA, 19 bp, Homo sapiens
  siRNA target sequence for DHRS2 (NM_005794.2,1126-1144).
gagtctctctggaagaact

SEQ ID NO: 219831 - DNA, 19 bp, Homo sapiens
  siRNA target sequence for DHRS2 (NM_005794.2,1233-1251).
cgtcaacggggagaacatt

SEQ ID NO: 219832 - DNA, 19 bp, Homo sapiens
  siRNA target sequence for HSD17B1 (NM_000413.1,1028-1046).
cgtacgtctggcttcagat

SEQ ID NO: 219833 - DNA, 19 bp, Homo sapiens
  siRNA target sequence for HSD17B1 (NM_000413.1,1051-1069).
cccagagcttcaaagtgta

SEQ ID NO: 219834 - DNA, 19 bp, Homo sapiens
  siRNA target sequence for HSD17B1 (NM_000413.1,1163-1181).
ggacgtaagggactcaaaa

SEQ ID NO: 219835 - DNA, 19 bp, Homo sapiens
  siRNA target sequence for HSD17B1 (NM_000413.1,1164-1182).
gacgtaagggactcaaaat

SEQ ID NO: 219836 - DNA, 19 bp, Homo sapiens
  siRNA target sequence for HSD17B1 (NM_000413.1,1804-1822).
ccatgcaccgggaagtgtt

SEQ ID NO: 219837 - DNA, 19 bp, Homo sapiens
  siRNA target sequence for HSD17B2 (NM_002153.1,206-224).
ggctgtccccacagtacta

SEQ ID NO: 219838 - DNA, 19 bp, Homo sapiens
  siRNA target sequence for HSD17B2 (NM_002153.1,207-225).
gctgtccccacagtactat

SEQ ID NO: 219839 - DNA, 19 bp, Homo sapiens
  siRNA target sequence for HSD17B2 (NM_002153.1,219-237).
gtactatgtgggacagtat

SEQ ID NO: 219840 - DNA, 19 bp, Homo sapiens
  siRNA target sequence for HSD17B2 (NM_002153.1,228-246).
gggacagtattttgcaaat

SEQ ID NO: 219841 - DNA, 19 bp, Homo sapiens
  siRNA target sequence for HSD17B2 (NM_002153.1,356-374).
gtcatgcttcctcatgtat

SEQ ID NO: 219842 - DNA, 19 bp, Homo sapiens
  siRNA target sequence for HSD17B2 (NM_002153.1,361-379).
gcttcctcatgtatactta

SEQ ID NO: 219843 - DNA, 19 bp, Homo sapiens
  siRNA target sequence for HSD17B2 (NM_002153.1,368-386).
catgtatacttacttatct

SEQ ID NO: 219844 - DNA, 19 bp, Homo sapiens
  siRNA target sequence for HSD17B2 (NM_002153.1,479-497).
gctgggcttcacggtattt

SEQ ID NO: 219845 - DNA, 19 bp, Homo sapiens
  siRNA target sequence for HSD17B2 (NM_002153.1,490-508).
cggtatttgccggagtttt

SEQ ID NO: 219846 - DNA, 19 bp, Homo sapiens
  siRNA target sequence for HSD17B2 (NM_002153.1,492-510).
gtatttgccggagttttga

SEQ ID NO: 219847 - DNA, 19 bp, Homo sapiens
  siRNA target sequence for HSD17B2 (NM_002153.1,498-516).
gccggagttttgaatgaaa

SEQ ID NO: 219848 - DNA, 19 bp, Homo sapiens
  siRNA target sequence for HSD17B2 (NM_002153.1,499-517).
ccggagttttgaatgaaaa

SEQ ID NO: 219849 - DNA, 19 bp, Homo sapiens
  siRNA target sequence for HSD17B2 (NM_002153.1,586-604).
cgaagccagtgcagataaa

SEQ ID NO: 219850 - DNA, 19 bp, Homo sapiens
  siRNA target sequence for HSD17B2 (NM_002153.1,587-605).
gaagccagtgcagataaaa

SEQ ID NO: 219851 - DNA, 19 bp, Homo sapiens
  siRNA target sequence for HSD17B2 (NM_002153.1,650-668).
gtgggctgtgatcaacaat

SEQ ID NO: 219852 - DNA, 19 bp, Homo sapiens
  siRNA target sequence for HSD17B2 (NM_002153.1,715-733).
ctgactacaaacaatgcat

SEQ ID NO: 219853 - DNA, 19 bp, Homo sapiens
  siRNA target sequence for HSD17B2 (NM_002153.1,759-777).
gaggtcacaaagacgtttt

SEQ ID NO: 219854 - DNA, 19 bp, Homo sapiens
  siRNA target sequence for HSD17B2 (NM_002153.1,801-819).
gggaggctggtgaatgtca

SEQ ID NO: 219855 - DNA, 19 bp, Homo sapiens
  siRNA target sequence for HSD17B2 (NM_002153.1,855-873).
gcatcttatggctcatcaa

SEQ ID NO: 219856 - DNA, 19 bp, Homo sapiens
  siRNA target sequence for HSD17B2 (NM_002153.1,884-902).
gaccatgttctcatcagtt

SEQ ID NO: 219857 - DNA, 19 bp, Homo sapiens
  siRNA target sequence for HSD17B2 (NM_002153.1,952-970).
ctggaggcttcctaacaaa

SEQ ID NO: 219858 - DNA, 19 bp, Homo sapiens
  siRNA target sequence for HSD17B2 (NM_002153.1,955-973).
gaggcttcctaacaaatat

SEQ ID NO: 219859 - DNA, 19 bp, Homo sapiens
  siRNA target sequence for HSD17B2 (NM_002153.1,985-1003).
gtgacaagtgggaaaagct

SEQ ID NO: 219860 - DNA, 19 bp, Homo sapiens
  siRNA target sequence for HSD17B2 (NM_002153.1,1052-1070).
cggccaggactacatctta

SEQ ID NO: 219861 - DNA, 19 bp, Homo sapiens
  siRNA target sequence for HSD17B2 (NM_002153.1,1135-1153).
gggacatccagcatgctat

SEQ ID NO: 219862 - DNA, 19 bp, Homo sapiens
  siRNA target sequence for HSD17B2 (NM_002153.1,1186-1204).
cagggaaaggcgcttactt

SEQ ID NO: 219863 - DNA, 19 bp, Homo sapiens
  siRNA target sequence for HSD17B2 (NM_002153.1,1208-1226).
gatctgccttgctcactat

SEQ ID NO: 219864 - DNA, 19 bp, Homo sapiens
  siRNA target sequence for HSD17B2 (NM_002153.1,1294-1312).
ctctaagaatgcctaacta

SEQ ID NO: 219865 - DNA, 19 bp, Homo sapiens
  siRNA target sequence for HSD17B2 (NM_002153.1,1296-1314).
ctaagaatgcctaactaca

SEQ ID NO: 219866 - DNA, 19 bp, Homo sapiens
  siRNA target sequence for HSD17B3 (NM_000197.1,112-130).
gcgaagtgcgtgagattct

SEQ ID NO: 219867 - DNA, 19 bp, Homo sapiens
  siRNA target sequence for HSD17B3 (NM_000197.1,131-149).
ccagatgtgttttactgaa

SEQ ID NO: 219868 - DNA, 19 bp, Homo sapiens
  siRNA target sequence for HSD17B3 (NM_000197.1,145-163).
ctgaactactggaaagttt

SEQ ID NO: 219869 - DNA, 19 bp, Homo sapiens
  siRNA target sequence for HSD17B3 (NM_000197.1,209-227).
ctggagcaggcgatggaat

SEQ ID NO: 219870 - DNA, 19 bp, Homo sapiens
  siRNA target sequence for HSD17B3 (NM_000197.1,240-258).
ctcgttcgagctagcaaaa

SEQ ID NO: 219871 - DNA, 19 bp, Homo sapiens
  siRNA target sequence for HSD17B3 (NM_000197.1,243-261).
gttcgagctagcaaaacgt

SEQ ID NO: 219872 - DNA, 19 bp, Homo sapiens
  siRNA target sequence for HSD17B3 (NM_000197.1,254-272).
caaaacgtggactcaatgt

SEQ ID NO: 219873 - DNA, 19 bp, Homo sapiens
  siRNA target sequence for HSD17B3 (NM_000197.1,284-302).
gccggacgctggaaaaact

SEQ ID NO: 219874 - DNA, 19 bp, Homo sapiens
  siRNA target sequence for HSD17B3 (NM_000197.1,285-303).
ccggacgctggaaaaacta

SEQ ID NO: 219875 - DNA, 19 bp, Homo sapiens
  siRNA target sequence for HSD17B3 (NM_000197.1,341-359).
ggagtgtgaagattataca

SEQ ID NO: 219876 - DNA, 19 bp, Homo sapiens
  siRNA target sequence for HSD17B3 (NM_000197.1,379-397).
gacatctacgagcatatta

SEQ ID NO: 219877 - DNA, 19 bp, Homo sapiens
  siRNA target sequence for HSD17B3 (NM_000197.1,412-430).
ggcttagaaattggaattt

SEQ ID NO: 219878 - DNA, 19 bp, Homo sapiens
  siRNA target sequence for HSD17B3 (NM_000197.1,478-496).
ctgaacgcaccggatgaaa

SEQ ID NO: 219879 - DNA, 19 bp, Homo sapiens
  siRNA target sequence for HSD17B3 (NM_000197.1,503-521).
gcctcatccattgtaacat

SEQ ID NO: 219880 - DNA, 19 bp, Homo sapiens
  siRNA target sequence for HSD17B3 (NM_000197.1,580-598).
ggtctcatcctgaacattt

SEQ ID NO: 219881 - DNA, 19 bp, Homo sapiens
  siRNA target sequence for HSD17B3 (NM_000197.1,604-622).
gggatagccctgtttcctt

SEQ ID NO: 219882 - DNA, 19 bp, Homo sapiens
  siRNA target sequence for HSD17B3 (NM_000197.1,646-664).
gcttccaaggcgtttgtgt

SEQ ID NO: 219883 - DNA, 19 bp, Homo sapiens
  siRNA target sequence for HSD17B3 (NM_000197.1,679-697).
gccctgcaagaggaatata

SEQ ID NO: 219884 - DNA, 19 bp, Homo sapiens
  siRNA target sequence for HSD17B3 (NM_000197.1,743-761).
cgactgcaatgacaaagta

SEQ ID NO: 219885 - DNA, 19 bp, Homo sapiens
  siRNA target sequence for HSD17B3 (NM_000197.1,744-762).
gactgcaatgacaaagtat

SEQ ID NO: 219886 - DNA, 19 bp, Homo sapiens
  siRNA target sequence for HSD17B3 (NM_000197.1,753-771).
gacaaagtatctaaataca

SEQ ID NO: 219887 - DNA, 19 bp, Homo sapiens
  siRNA target sequence for HSD17B3 (NM_000197.1,793-811).
gatgagtttgtcaaagagt

SEQ ID NO: 219888 - DNA, 19 bp, Homo sapiens
  siRNA target sequence for HSD17B3 (NM_000197.1,808-826).
gagtcattgaattatgtca

SEQ ID NO: 219889 - DNA, 19 bp, Homo sapiens
  siRNA target sequence for HSD17B3 (NM_000197.1,816-834).
gaattatgtcacaattgga

SEQ ID NO: 219890 - DNA, 19 bp, Homo sapiens
  siRNA target sequence for HSD17B7 (NM_016371.1,681-699).
ggtacagcattgaccaatt

SEQ ID NO: 219891 - DNA, 19 bp, Homo sapiens
  siRNA target sequence for HSD17B7 (NM_016371.1,692-710).
gaccaatttgacatatgga

SEQ ID NO: 219892 - DNA, 19 bp, Homo sapiens
  siRNA target sequence for HSD17B7 (NM_016371.1,709-727).
gaattctgcctccgtttat

SEQ ID NO: 219893 - DNA, 19 bp, Homo sapiens
  siRNA target sequence for HSD17B7 (NM_016371.1,735-753).
ctgttgatgccggcaatat

SEQ ID NO: 219894 - DNA, 19 bp, Homo sapiens
  siRNA target sequence for HSD17B7 (NM_016371.1,755-773).
gctacttcgcttttttgca

SEQ ID NO: 219895 - DNA, 19 bp, Homo sapiens
  siRNA target sequence for HSD17B7 (NM_016371.1,756-774).
ctacttcgcttttttgcaa

SEQ ID NO: 219896 - DNA, 19 bp, Homo sapiens
  siRNA target sequence for HSD17B8 (NM_014234.3,289-307).
caagtgcaggcctgctttt

SEQ ID NO: 219897 - DNA, 19 bp, Homo sapiens
  siRNA target sequence for HSD17B8 (NM_014234.3,448-466).
gccctggtgtccaatggtt

SEQ ID NO: 219898 - DNA, 19 bp, Homo sapiens
  siRNA target sequence for HSD17B8 (NM_014234.3,467-485).
gtcgtggttccatcatcaa

SEQ ID NO: 219899 - DNA, 19 bp, Homo sapiens
  siRNA target sequence for HSD17B8 (NM_014234.3,619-637).
ctcccagggttcattgcaa

SEQ ID NO: 219900 - DNA, 19 bp, Homo sapiens
  siRNA target sequence for H105E3 (NM_015922.1,228-246).
caagtcgcacggactcatt

SEQ ID NO: 219901 - DNA, 19 bp, Homo sapiens
  siRNA target sequence for H105E3 (NM_015922.1,231-249).
gtcgcacggactcatttga

SEQ ID NO: 219902 - DNA, 19 bp, Homo sapiens
  siRNA target sequence for H105E3 (NM_015922.1,233-251).
cgcacggactcatttgaca

SEQ ID NO: 219903 - DNA, 19 bp, Homo sapiens
  siRNA target sequence for H105E3 (NM_015922.1,267-285).
gtgaatgctgacatagaaa

SEQ ID NO: 219904 - DNA, 19 bp, Homo sapiens
  siRNA target sequence for H105E3 (NM_015922.1,273-291).
gctgacatagaaaaggtta

SEQ ID NO: 219905 - DNA, 19 bp, Homo sapiens
  siRNA target sequence for H105E3 (NM_015922.1,373-391).
gaggatatgctgtcaatgt

SEQ ID NO: 219906 - DNA, 19 bp, Homo sapiens
  siRNA target sequence for H105E3 (NM_015922.1,375-393).
ggatatgctgtcaatgtat

SEQ ID NO: 219907 - DNA, 19 bp, Homo sapiens
  siRNA target sequence for H105E3 (NM_015922.1,376-394).
gatatgctgtcaatgtatt

SEQ ID NO: 219908 - DNA, 19 bp, Homo sapiens
  siRNA target sequence for H105E3 (NM_015922.1,401-419).
ccagcaagggtttgataat

SEQ ID NO: 219909 - DNA, 19 bp, Homo sapiens
  siRNA target sequence for H105E3 (NM_015922.1,513-531).
cccccaccatccagtaaca

SEQ ID NO: 219910 - DNA, 19 bp, Homo sapiens
  siRNA target sequence for H105E3 (NM_015922.1,514-532).
ccccaccatccagtaacaa

SEQ ID NO: 219911 - DNA, 19 bp, Homo sapiens
  siRNA target sequence for H105E3 (NM_015922.1,517-535).
caccatccagtaacaacaa

SEQ ID NO: 219912 - DNA, 19 bp, Homo sapiens
  siRNA target sequence for H105E3 (NM_015922.1,539-557).
gctcttttatagagtgaat

SEQ ID NO: 219913 - DNA, 19 bp, Homo sapiens
  siRNA target sequence for H105E3 (NM_015922.1,625-643).
gcagtgccagtgtcatctt

SEQ ID NO: 219914 - DNA, 19 bp, Homo sapiens
  siRNA target sequence for H105E3 (NM_015922.1,645-663).
gagggcgtcgatatcaaga

SEQ ID NO: 219915 - DNA, 19 bp, Homo sapiens
  siRNA target sequence for H105E3 (NM_015922.1,647-665).
gggcgtcgatatcaagaat

SEQ ID NO: 219916 - DNA, 19 bp, Homo sapiens
  siRNA target sequence for H105E3 (NM_015922.1,651-669).
gtcgatatcaagaatggaa

SEQ ID NO: 219917 - DNA, 19 bp, Homo sapiens
  siRNA target sequence for H105E3 (NM_015922.1,1040-1058).
cctgacaggcctcaattat

SEQ ID NO: 219918 - DNA, 19 bp, Homo sapiens
  siRNA target sequence for HSD3B1 (NM_000862.1,681-699).
gccttacgacccatgtata

SEQ ID NO: 219919 - DNA, 19 bp, Homo sapiens
  siRNA target sequence for HSD3B1 (NM_000862.1,682-700).
ccttacgacccatgtatat

SEQ ID NO: 219920 - DNA, 19 bp, Homo sapiens
  siRNA target sequence for HSD3B1 (NM_000862.1,777-795).
ggaaagttctccactgtta

SEQ ID NO: 219921 - DNA, 19 bp, Homo sapiens
  siRNA target sequence for HSD3B2 (NM_000198.1,693-711).
gcgttaagacccacatata

SEQ ID NO: 219922 - DNA, 19 bp, Homo sapiens
  siRNA target sequence for HSD3B2 (NM_000198.1,694-712).
cgttaagacccacatatat

SEQ ID NO: 219923 - DNA, 19 bp, Homo sapiens
  siRNA target sequence for HSD3B2 (NM_000198.1,888-906).
gtccgaggtcaattctatt

SEQ ID NO: 219924 - DNA, 19 bp, Homo sapiens
  siRNA target sequence for HSD3B2 (NM_000198.1,891-909).
cgaggtcaattctattaca

SEQ ID NO: 219925 - DNA, 19 bp, Homo sapiens
  siRNA target sequence for HSD3B2 (NM_000198.1,892-910).
gaggtcaattctattacat

SEQ ID NO: 219926 - DNA, 19 bp, Homo sapiens
  siRNA target sequence for HSD3B7 (NM_025193.2,556-574).
cacaggcacccctatcctt

SEQ ID NO: 219927 - DNA, 19 bp, Homo sapiens
  siRNA target sequence for HSD3B7 (NM_025193.2,680-698).
gtgaaggccaccagatcat

SEQ ID NO: 219928 - DNA, 19 bp, Homo sapiens
  siRNA target sequence for HSD3B7 (NM_025193.2,1153-1171).
cggacccgtaccattctct

SEQ ID NO: 219929 - DNA, 19 bp, Homo sapiens
  siRNA target sequence for HSPC105 (NM_145168.1,84-102).
ggaccccaaaagatctcaa

SEQ ID NO: 219930 - DNA, 19 bp, Homo sapiens
  siRNA target sequence for HSPC105 (NM_145168.1,85-103).
gaccccaaaagatctcaaa

SEQ ID NO: 219931 - DNA, 19 bp, Homo sapiens
  siRNA target sequence for HSPC105 (NM_145168.1,95-113).
gatctcaaaaggaaagtgt

SEQ ID NO: 219932 - DNA, 19 bp, Homo sapiens
  siRNA target sequence for HSPC105 (NM_145168.1,105-123).
ggaaagtgtcctcattaca

SEQ ID NO: 219933 - DNA, 19 bp, Homo sapiens
  siRNA target sequence for HSPC105 (NM_145168.1,128-146).
gaagtggctattttggttt

SEQ ID NO: 219934 - DNA, 19 bp, Homo sapiens
  siRNA target sequence for HSPC105 (NM_145168.1,176-194).
gagtccatgtgattctgtt

SEQ ID NO: 219935 - DNA, 19 bp, Homo sapiens
  siRNA target sequence for HSPC105 (NM_145168.1,204-222).
cagccctgctcaaaccatt

SEQ ID NO: 219936 - DNA, 19 bp, Homo sapiens
  siRNA target sequence for HSPC105 (NM_145168.1,309-327).
gttccatattgcctcttat

SEQ ID NO: 219937 - DNA, 19 bp, Homo sapiens
  siRNA target sequence for HSPC105 (NM_145168.1,340-358).
cgggagcaactcaatcgaa

SEQ ID NO: 219938 - DNA, 19 bp, Homo sapiens
  siRNA target sequence for HSPC105 (NM_145168.1,422-440).
gggtgcccaggttagttta

SEQ ID NO: 219939 - DNA, 19 bp, Homo sapiens
  siRNA target sequence for HSPC105 (NM_145168.1,424-442).
gtgcccaggttagtttaca

SEQ ID NO: 219940 - DNA, 19 bp, Homo sapiens
  siRNA target sequence for HSPC105 (NM_145168.1,459-477).
catctttggaggtcaagtt

SEQ ID NO: 219941 - DNA, 19 bp, Homo sapiens
  siRNA target sequence for HSPC105 (NM_145168.1,466-484).
ggaggtcaagttatcagaa

SEQ ID NO: 219942 - DNA, 19 bp, Homo sapiens
  siRNA target sequence for HSPC105 (NM_145168.1,532-550).
cactactctcggacaaagt

SEQ ID NO: 219943 - DNA, 19 bp, Homo sapiens
  siRNA target sequence for HSPC105 (NM_145168.1,534-552).
ctactctcggacaaagtca

SEQ ID NO: 219944 - DNA, 19 bp, Homo sapiens
  siRNA target sequence for HSPC105 (NM_145168.1,537-555).
ctctcggacaaagtcaatt

SEQ ID NO: 219945 - DNA, 19 bp, Homo sapiens
  siRNA target sequence for HSPC105 (NM_145168.1,597-615).
cagaggcgacggtgtctta

SEQ ID NO: 219946 - DNA, 19 bp, Homo sapiens
  siRNA target sequence for HSPC105 (NM_145168.1,601-619).
ggcgacggtgtcttaagaa

SEQ ID NO: 219947 - DNA, 19 bp, Homo sapiens
  siRNA target sequence for HSPC105 (NM_145168.1,667-685).
caccttcccaggatagtca

SEQ ID NO: 219948 - DNA, 19 bp, Homo sapiens
  siRNA target sequence for HSPC105 (NM_145168.1,700-718).
ggtctgttcaagtttgtct

SEQ ID NO: 219949 - DNA, 19 bp, Homo sapiens
  siRNA target sequence for HSPC105 (NM_145168.1,701-719).
gtctgttcaagtttgtcta

SEQ ID NO: 219950 - DNA, 19 bp, Homo sapiens
  siRNA target sequence for HSPC105 (NM_145168.1,856-874).
cccgtgaacaactttgagt

SEQ ID NO: 219951 - DNA, 19 bp, Homo sapiens
  siRNA target sequence for HSPC105 (NM_145168.1,1011-1029).
cctcactcgcactgaagtt

SEQ ID NO: 219952 - DNA, 19 bp, Homo sapiens
  siRNA target sequence for HSPC105 (NM_145168.1,1012-1030).
ctcactcgcactgaagttt

SEQ ID NO: 219953 - DNA, 19 bp, Homo sapiens
  siRNA target sequence for HSPC105 (NM_145168.1,1016-1034).
ctcgcactgaagtttacaa

SEQ ID NO: 219954 - DNA, 19 bp, Homo sapiens
  siRNA target sequence for HSPC105 (NM_145168.1,1018-1036).
cgcactgaagtttacaaaa

SEQ ID NO: 219955 - DNA, 19 bp, Homo sapiens
  siRNA target sequence for HSPC105 (NM_145168.1,1071-1089).
caagaaagagctaggttat

SEQ ID NO: 219956 - DNA, 19 bp, Homo sapiens
  siRNA target sequence for HSPC105 (NM_145168.1,1163-1181).
gtcgtgactcggagtgttt

SEQ ID NO: 219957 - DNA, 19 bp, Homo sapiens
  siRNA target sequence for HSPC105 (NM_145168.1,1166-1184).
gtgactcggagtgttttgt

SEQ ID NO: 219958 - DNA, 19 bp, Homo sapiens
  siRNA target sequence for HSPC105 (NM_145168.1,1168-1186).
gactcggagtgttttgttt

SEQ ID NO: 219959 - DNA, 19 bp, Homo sapiens
  siRNA target sequence for HSPC105 (NM_145168.1,1200-1218).
ggtcttcctcctgattata

SEQ ID NO: 219960 - DNA, 19 bp, Homo sapiens
  siRNA target sequence for HSPC105 (NM_145168.1,1203-1221).
cttcctcctgattatagca

SEQ ID NO: 219961 - DNA, 19 bp, Homo sapiens
  siRNA target sequence for HSD11B1 (NM_005525.2,145-163).
ggcctactactactattct

SEQ ID NO: 219962 - DNA, 19 bp, Homo sapiens
  siRNA target sequence for HSD11B1 (NM_005525.2,291-309).
cgaggtcaaaagaaactct

SEQ ID NO: 219963 - DNA, 19 bp, Homo sapiens
  siRNA target sequence for HSD11B1 (NM_005525.2,345-363).
cagcctcagcacactacat

SEQ ID NO: 219964 - DNA, 19 bp, Homo sapiens
  siRNA target sequence for HSD11B1 (NM_005525.2,432-450).
gactagacatgctcattct

SEQ ID NO: 219965 - DNA, 19 bp, Homo sapiens
  siRNA target sequence for HSD11B1 (NM_005525.2,434-452).
ctagacatgctcattctca

SEQ ID NO: 219966 - DNA, 19 bp, Homo sapiens
  siRNA target sequence for HSD11B1 (NM_005525.2,455-473).
cacatcaccaacacttctt

SEQ ID NO: 219967 - DNA, 19 bp, Homo sapiens
  siRNA target sequence for HSD11B1 (NM_005525.2,475-493).
gaatctttttcatgatgat

SEQ ID NO: 219968 - DNA, 19 bp, Homo sapiens
  siRNA target sequence for HSD11B1 (NM_005525.2,615-633).
ggaaagtggcttatccaat

SEQ ID NO: 219969 - DNA, 19 bp, Homo sapiens
  siRNA target sequence for HSD11B1 (NM_005525.2,643-661).
ctattctgcaagcaagttt

SEQ ID NO: 219970 - DNA, 19 bp, Homo sapiens
  siRNA target sequence for HSD11B1 (NM_005525.2,682-700).
ctccatcagaaaggaatat

SEQ ID NO: 219971 - DNA, 19 bp, Homo sapiens
  siRNA target sequence for HSD11B1 (NM_005525.2,702-720).
cagtgtccagggtcaatgt

SEQ ID NO: 219972 - DNA, 19 bp, Homo sapiens
  siRNA target sequence for HSD11B1 (NM_005525.2,706-724).
gtccagggtcaatgtatca

SEQ ID NO: 219973 - DNA, 19 bp, Homo sapiens
  siRNA target sequence for HSD11B1 (NM_005525.2,780-798).
ctgggatagtccatatgca

SEQ ID NO: 219974 - DNA, 19 bp, Homo sapiens
  siRNA target sequence for HSD11B1 (NM_005525.2,857-875).
gaagaagtgtattatgaca

SEQ ID NO: 219975 - DNA, 19 bp, Homo sapiens
  siRNA target sequence for HSD11B1 (NM_005525.2,888-906).
ccactcttctgatcagaaa

SEQ ID NO: 219976 - DNA, 19 bp, Homo sapiens
  siRNA target sequence for HSD11B1 (NM_005525.2,893-911).
cttctgatcagaaatccat

SEQ ID NO: 219977 - DNA, 19 bp, Homo sapiens
  siRNA target sequence for HSD11B1 (NM_005525.2,932-950).
ctctactcaacgagctata

SEQ ID NO: 219978 - DNA, 19 bp, Homo sapiens
  siRNA target sequence for HSD11B1 (NM_005525.2,934-952).
ctactcaacgagctataat

SEQ ID NO: 219979 - DNA, 19 bp, Homo sapiens
  siRNA target sequence for HSD11B1 (NM_005525.2,939-957).
caacgagctataatatgga

SEQ ID NO: 219980 - DNA, 19 bp, Homo sapiens
  siRNA target sequence for HSD11B1 (NM_005525.2,945-963).
gctataatatggacagatt

SEQ ID NO: 219981 - DNA, 19 bp, Homo sapiens
  siRNA target sequence for HSD11B2 (NM_000196.2,448-466).
ccaccgtattggagttgaa

SEQ ID NO: 219982 - DNA, 19 bp, Homo sapiens
  siRNA target sequence for HSD11B2 (NM_000196.2,614-632).
caacgcaggccacaatgaa

SEQ ID NO: 219983 - DNA, 19 bp, Homo sapiens
  siRNA target sequence for HSD11B2 (NM_000196.2,617-635).
cgcaggccacaatgaagta

SEQ ID NO: 219984 - DNA, 19 bp, Homo sapiens
  siRNA target sequence for HSD11B2 (NM_000196.2,619-637).
caggccacaatgaagtagt

SEQ ID NO: 219985 - DNA, 19 bp, Homo sapiens
  siRNA target sequence for HSD11B2 (NM_000196.2,1064-1082).
cgacctcaccccagttgta

SEQ ID NO: 219986 - DNA, 19 bp, Homo sapiens
  siRNA target sequence for HSD11B2 (NM_000196.2,1067-1085).
cctcaccccagttgtagat

SEQ ID NO: 219987 - DNA, 19 bp, Homo sapiens
  siRNA target sequence for HADH2 (NM_004493.1,169-187).
gaggcccaagccaagaagt

SEQ ID NO: 219988 - DNA, 19 bp, Homo sapiens
  siRNA target sequence for HADH2 (NM_004493.1,245-263).
cagctctggctctagcaaa

SEQ ID NO: 219989 - DNA, 19 bp, Homo sapiens
  siRNA target sequence for HADH2 (NM_004493.1,316-334).
gctagcaagacgtacaact

SEQ ID NO: 219990 - DNA, 19 bp, Homo sapiens
  siRNA target sequence for HADH2 (NM_004493.1,317-335).
ctagcaagacgtacaactt

SEQ ID NO: 219991 - DNA, 19 bp, Homo sapiens
  siRNA target sequence for HADH2 (NM_004493.1,350-368).
cccataccttggaagactt

SEQ ID NO: 219992 - DNA, 19 bp, Homo sapiens
  siRNA target sequence for HADH2 (NM_004493.1,366-384).
cttccagcgagttcttgat

SEQ ID NO: 219993 - DNA, 19 bp, Homo sapiens
  siRNA target sequence for HADH2 (NM_004493.1,374-392).
gagttcttgatgtgaatct

SEQ ID NO: 219994 - DNA, 19 bp, Homo sapiens
  siRNA target sequence for HADH2 (NM_004493.1,428-446).
gtgagatgggccagaatga

SEQ ID NO: 219995 - DNA, 19 bp, Homo sapiens
  siRNA target sequence for HADH2 (NM_004493.1,461-479).
gccaacgtggggtcatcat

SEQ ID NO: 219996 - DNA, 19 bp, Homo sapiens
  siRNA target sequence for HADH2 (NM_004493.1,580-598).
gatctggctcccataggta

SEQ ID NO: 219997 - DNA, 19 bp, Homo sapiens
  siRNA target sequence for HADH2 (NM_004493.1,784-802).
ctggatggggccattcgta

SEQ ID NO: 219998 - DNA, 19 bp, Homo sapiens
  siRNA target sequence for LDHA (NM_005566.1,148-166).
gaccccccagaataagatt

SEQ ID NO: 219999 - DNA, 19 bp, Homo sapiens
  siRNA target sequence for LDHA (NM_005566.1,201-219).
gtgccatcagtatcttaat

SEQ ID NO: 220000 - DNA, 19 bp, Homo sapiens
  siRNA target sequence for LDHA (NM_005566.1,203-221).
gccatcagtatcttaatga

SEQ ID NO: 220001 - DNA, 19 bp, Homo sapiens
  siRNA target sequence for LDHA (NM_005566.1,254-272).
gtcatcgaagacaaattga

SEQ ID NO: 220002 - DNA, 19 bp, Homo sapiens
  siRNA target sequence for LDHA (NM_005566.1,299-317).
ggcagccttttccttagaa

SEQ ID NO: 220003 - DNA, 19 bp, Homo sapiens
  siRNA target sequence for LDHA (NM_005566.1,810-828).
cttatgaggtgatcaaact

SEQ ID NO: 220004 - DNA, 19 bp, Homo sapiens
  siRNA target sequence for LDHA (NM_005566.1,838-856).
cacatcctgggctattgga

SEQ ID NO: 220005 - DNA, 19 bp, Homo sapiens
  siRNA target sequence for LDHA (NM_005566.1,869-887).
gatttggcagagagtataa

SEQ ID NO: 220006 - DNA, 19 bp, Homo sapiens
  siRNA target sequence for LDHA (NM_005566.1,982-1000).
gggacagaatggaatctca

SEQ ID NO: 220007 - DNA, 19 bp, Homo sapiens
  siRNA target sequence for LDHA (NM_005566.1,993-1011).
gaatctcagaccttgtgaa

SEQ ID NO: 220008 - DNA, 19 bp, Homo sapiens
  siRNA target sequence for LDHB (NM_002300.3,110-128).
ctcttaaggaaaaactcat

SEQ ID NO: 220009 - DNA, 19 bp, Homo sapiens
  siRNA target sequence for LDHB (NM_002300.3,131-149).
caccagttgcggaagaaga

SEQ ID NO: 220010 - DNA, 19 bp, Homo sapiens
  siRNA target sequence for LDHB (NM_002300.3,150-168).
ggcaacagttccaaacaat

SEQ ID NO: 220011 - DNA, 19 bp, Homo sapiens
  siRNA target sequence for LDHB (NM_002300.3,151-169).
gcaacagttccaaacaata

SEQ ID NO: 220012 - DNA, 19 bp, Homo sapiens
  siRNA target sequence for LDHB (NM_002300.3,152-170).
caacagttccaaacaataa

SEQ ID NO: 220013 - DNA, 19 bp, Homo sapiens
  siRNA target sequence for LDHB (NM_002300.3,185-203).
gtgttggacaagttggtat

SEQ ID NO: 220014 - DNA, 19 bp, Homo sapiens
  siRNA target sequence for LDHB (NM_002300.3,256-274).
gtggatgttttggaagata

SEQ ID NO: 220015 - DNA, 19 bp, Homo sapiens
  siRNA target sequence for LDHB (NM_002300.3,303-321).
gcatgggagcttatttctt

SEQ ID NO: 220016 - DNA, 19 bp, Homo sapiens
  siRNA target sequence for LDHB (NM_002300.3,413-431).
gggagagtcggctcaatct

SEQ ID NO: 220017 - DNA, 19 bp, Homo sapiens
  siRNA target sequence for LDHB (NM_002300.3,430-448).
ctggtgcagagaaatgtta

SEQ ID NO: 220018 - DNA, 19 bp, Homo sapiens
  siRNA target sequence for LDHB (NM_002300.3,432-450).
ggtgcagagaaatgttaat

SEQ ID NO: 220019 - DNA, 19 bp, Homo sapiens
  siRNA target sequence for LDHB (NM_002300.3,469-487).
cctcagatcgtcaagtaca

SEQ ID NO: 220020 - DNA, 19 bp, Homo sapiens
  siRNA target sequence for LDHB (NM_002300.3,486-504).
cagtcctgattgcatcata

SEQ ID NO: 220021 - DNA, 19 bp, Homo sapiens
  siRNA target sequence for LDHB (NM_002300.3,515-533).
ccaacccagtggacattct

SEQ ID NO: 220022 - DNA, 19 bp, Homo sapiens
  siRNA target sequence for LDHB (NM_002300.3,525-543).
ggacattcttacgtatgtt

SEQ ID NO: 220023 - DNA, 19 bp, Homo sapiens
  siRNA target sequence for LDHB (NM_002300.3,526-544).
gacattcttacgtatgtta

SEQ ID NO: 220024 - DNA, 19 bp, Homo sapiens
  siRNA target sequence for LDHB (NM_002300.3,546-564).
ctggaaactaagtggatta

SEQ ID NO: 220025 - DNA, 19 bp, Homo sapiens
  siRNA target sequence for LDHB (NM_002300.3,607-625).
gctagatttcgctacctta

SEQ ID NO: 220026 - DNA, 19 bp, Homo sapiens
  siRNA target sequence for LDHB (NM_002300.3,608-626).
ctagatttcgctaccttat

SEQ ID NO: 220027 - DNA, 19 bp, Homo sapiens
  siRNA target sequence for LDHB (NM_002300.3,617-635).
gctaccttatggctgaaaa

SEQ ID NO: 220028 - DNA, 19 bp, Homo sapiens
  siRNA target sequence for LDHB (NM_002300.3,618-636).
ctaccttatggctgaaaaa

SEQ ID NO: 220029 - DNA, 19 bp, Homo sapiens
  siRNA target sequence for LDHB (NM_002300.3,785-803).
ggaaggaagtgcataagat

SEQ ID NO: 220030 - DNA, 19 bp, Homo sapiens
  siRNA target sequence for LDHB (NM_002300.3,826-844).
gtcatcaagctaaaaggat

SEQ ID NO: 220031 - DNA, 19 bp, Homo sapiens
  siRNA target sequence for LDHB (NM_002300.3,828-846).
catcaagctaaaaggatat

SEQ ID NO: 220032 - DNA, 19 bp, Homo sapiens
  siRNA target sequence for LDHB (NM_002300.3,849-867).
caactgggctattggatta

SEQ ID NO: 220033 - DNA, 19 bp, Homo sapiens
  siRNA target sequence for LDHB (NM_002300.3,869-887).
gtgtggctgatcttattga

SEQ ID NO: 220034 - DNA, 19 bp, Homo sapiens
  siRNA target sequence for LDHB (NM_002300.3,880-898).
cttattgaatccatgttga

SEQ ID NO: 220035 - DNA, 19 bp, Homo sapiens
  siRNA target sequence for LDHB (NM_002300.3,919-937).
cccgtgtcaacaatggtaa

SEQ ID NO: 220036 - DNA, 19 bp, Homo sapiens
  siRNA target sequence for LDHB (NM_002300.3,920-938).
ccgtgtcaacaatggtaaa

SEQ ID NO: 220037 - DNA, 19 bp, Homo sapiens
  siRNA target sequence for LDHB (NM_002300.3,1000-1018).
ggattaaccagcgttatca

SEQ ID NO: 220038 - DNA, 19 bp, Homo sapiens
  siRNA target sequence for LDHB (NM_002300.3,1001-1019).
gattaaccagcgttatcaa

SEQ ID NO: 220039 - DNA, 19 bp, Homo sapiens
  siRNA target sequence for LDHB (NM_002300.3,1012-1030).
gttatcaaccagaagctaa

SEQ ID NO: 220040 - DNA, 19 bp, Homo sapiens
  siRNA target sequence for LDHC (NM_002301.2,261-279).
catggcttgtgctattagt

SEQ ID NO: 220041 - DNA, 19 bp, Homo sapiens
  siRNA target sequence for LDHC (NM_002301.2,269-287).
gtgctattagtatcttact

SEQ ID NO: 220042 - DNA, 19 bp, Homo sapiens
  siRNA target sequence for LDHC (NM_002301.2,311-329).
cccttgttgatgttgcatt

SEQ ID NO: 220043 - DNA, 19 bp, Homo sapiens
  siRNA target sequence for LDHC (NM_002301.2,367-385).
ggcagtcttttctttagta

SEQ ID NO: 220044 - DNA, 19 bp, Homo sapiens
  siRNA target sequence for LDHC (NM_002301.2,378-396).
ctttagtacttcaaagatt

SEQ ID NO: 220045 - DNA, 19 bp, Homo sapiens
  siRNA target sequence for LDHC (NM_002301.2,488-506).
ccctggtccaacgtaatgt

SEQ ID NO: 220046 - DNA, 19 bp, Homo sapiens
  siRNA target sequence for LDHC (NM_002301.2,496-514).
caacgtaatgtggctataa

SEQ ID NO: 220047 - DNA, 19 bp, Homo sapiens
  siRNA target sequence for LDHC (NM_002301.2,499-517).
cgtaatgtggctataatga

SEQ ID NO: 220048 - DNA, 19 bp, Homo sapiens
  siRNA target sequence for LDHC (NM_002301.2,500-518).
gtaatgtggctataatgaa

SEQ ID NO: 220049 - DNA, 19 bp, Homo sapiens
  siRNA target sequence for LDHC (NM_002301.2,505-523).
gtggctataatgaaatcaa

SEQ ID NO: 220050 - DNA, 19 bp, Homo sapiens
  siRNA target sequence for LDHC (NM_002301.2,529-547).
cctgccatagtccattata

SEQ ID NO: 220051 - DNA, 19 bp, Homo sapiens
  siRNA target sequence for LDHC (NM_002301.2,548-566).
gtcctgattgtaaaattct

SEQ ID NO: 220052 - DNA, 19 bp, Homo sapiens
  siRNA target sequence for LDHC (NM_002301.2,720-738).
ccatggttggattattgga

SEQ ID NO: 220053 - DNA, 19 bp, Homo sapiens
  siRNA target sequence for LDHC (NM_002301.2,736-754).
ggagaacatggtgattcta

SEQ ID NO: 220054 - DNA, 19 bp, Homo sapiens
  siRNA target sequence for LDHC (NM_002301.2,801-819).
gactctggaccctaaatta

SEQ ID NO: 220055 - DNA, 19 bp, Homo sapiens
  siRNA target sequence for LDHC (NM_002301.2,805-823).
ctggaccctaaattaggaa

SEQ ID NO: 220056 - DNA, 19 bp, Homo sapiens
  siRNA target sequence for LDHC (NM_002301.2,855-873).
ccataaacaagttattcaa

SEQ ID NO: 220057 - DNA, 19 bp, Homo sapiens
  siRNA target sequence for LDHC (NM_002301.2,942-960).
ggtaggatccattttgaaa

SEQ ID NO: 220058 - DNA, 19 bp, Homo sapiens
  siRNA target sequence for LDHC (NM_002301.2,993-1011).
ggttaagggattatatgga

SEQ ID NO: 220059 - DNA, 19 bp, Homo sapiens
  siRNA target sequence for LDHC (NM_002301.2,994-1012).
gttaagggattatatggaa

SEQ ID NO: 220060 - DNA, 19 bp, Homo sapiens
  siRNA target sequence for LDHL (NM_033195.1,145-163).
cggtgggagcgaatttcct

SEQ ID NO: 220061 - DNA, 19 bp, Homo sapiens
  siRNA target sequence for LDHL (NM_033195.1,146-164).
ggtgggagcgaatttccta

SEQ ID NO: 220062 - DNA, 19 bp, Homo sapiens
  siRNA target sequence for LDHL (NM_033195.1,949-967).
ctgcaactgcctatgagat

SEQ ID NO: 220063 - DNA, 19 bp, Homo sapiens
  siRNA target sequence for LDHL (NM_033195.1,1009-1027).
ctgtggccgatttaacaga

SEQ ID NO: 220064 - DNA, 19 bp, Homo sapiens
  siRNA target sequence for LDHL (NM_033195.1,1128-1146).
ctgggagagaacggtatta

SEQ ID NO: 220065 - DNA, 19 bp, Homo sapiens
  siRNA target sequence for LDHL (NM_033195.1,1212-1230).
ctctgggaaattcagaata

SEQ ID NO: 220066 - DNA, 19 bp, Homo sapiens
  siRNA target sequence for MGC23940 (NM_144972.1,273-291).
ctatcaagagtgaacttat

SEQ ID NO: 220067 - DNA, 19 bp, Homo sapiens
  siRNA target sequence for MGC23940 (NM_144972.1,311-329).
gaggccattcatcacaata

SEQ ID NO: 220068 - DNA, 19 bp, Homo sapiens
  siRNA target sequence for MGC23940 (NM_144972.1,315-333).
ccattcatcacaataagat

SEQ ID NO: 220069 - DNA, 19 bp, Homo sapiens
  siRNA target sequence for MGC23940 (NM_144972.1,325-343).
caataagatctccattgta

SEQ ID NO: 220070 - DNA, 19 bp, Homo sapiens
  siRNA target sequence for UEV3 (NM_018314.2,86-104).
cttggcaagtacaagttca

SEQ ID NO: 220071 - DNA, 19 bp, Homo sapiens
  siRNA target sequence for UEV3 (NM_018314.2,119-137).
gaagaactaaggaatgtaa

SEQ ID NO: 220072 - DNA, 19 bp, Homo sapiens
  siRNA target sequence for UEV3 (NM_018314.2,222-240).
gcacaattcctgtgatgta

SEQ ID NO: 220073 - DNA, 19 bp, Homo sapiens
  siRNA target sequence for UEV3 (NM_018314.2,223-241).
cacaattcctgtgatgtat

SEQ ID NO: 220074 - DNA, 19 bp, Homo sapiens
  siRNA target sequence for UEV3 (NM_018314.2,233-251).
gtgatgtatcagggtaata

SEQ ID NO: 220075 - DNA, 19 bp, Homo sapiens
  siRNA target sequence for UEV3 (NM_018314.2,235-253).
gatgtatcagggtaataca

SEQ ID NO: 220076 - DNA, 19 bp, Homo sapiens
  siRNA target sequence for UEV3 (NM_018314.2,293-311).
cctttcgctccccctattt

SEQ ID NO: 220077 - DNA, 19 bp, Homo sapiens
  siRNA target sequence for UEV3 (NM_018314.2,339-357).
gaatcttagtcggaaaaca

SEQ ID NO: 220078 - DNA, 19 bp, Homo sapiens
  siRNA target sequence for UEV3 (NM_018314.2,365-383).
gctcaaggcagaatatatt

SEQ ID NO: 220079 - DNA, 19 bp, Homo sapiens
  siRNA target sequence for UEV3 (NM_018314.2,467-485).
cttcccatgtattctctat

SEQ ID NO: 220080 - DNA, 19 bp, Homo sapiens
  siRNA target sequence for UEV3 (NM_018314.2,470-488).
cccatgtattctctatcat

SEQ ID NO: 220081 - DNA, 19 bp, Homo sapiens
  siRNA target sequence for UEV3 (NM_018314.2,514-532).
cttgctagcctatattgca

SEQ ID NO: 220082 - DNA, 19 bp, Homo sapiens
  siRNA target sequence for UEV3 (NM_018314.2,517-535).
gctagcctatattgcaaaa

SEQ ID NO: 220083 - DNA, 19 bp, Homo sapiens
  siRNA target sequence for UEV3 (NM_018314.2,521-539).
gcctatattgcaaaaatca

SEQ ID NO: 220084 - DNA, 19 bp, Homo sapiens
  siRNA target sequence for UEV3 (NM_018314.2,545-563).
ggtgtttcagatacaaatt

SEQ ID NO: 220085 - DNA, 19 bp, Homo sapiens
  siRNA target sequence for UEV3 (NM_018314.2,564-582).
caaagagctgggcaaatca

SEQ ID NO: 220086 - DNA, 19 bp, Homo sapiens
  siRNA target sequence for UEV3 (NM_018314.2,573-591).
gggcaaatcatgagaataa

SEQ ID NO: 220087 - DNA, 19 bp, Homo sapiens
  siRNA target sequence for UEV3 (NM_018314.2,631-649).
cggtattgcctgcacatta

SEQ ID NO: 220088 - DNA, 19 bp, Homo sapiens
  siRNA target sequence for UEV3 (NM_018314.2,640-658).
ctgcacattagcaatttca

SEQ ID NO: 220089 - DNA, 19 bp, Homo sapiens
  siRNA target sequence for UEV3 (NM_018314.2,694-712).
cctctcagaagggactaaa

SEQ ID NO: 220090 - DNA, 19 bp, Homo sapiens
  siRNA target sequence for UEV3 (NM_018314.2,720-738).
cgatggaccttgaaatctt

SEQ ID NO: 220091 - DNA, 19 bp, Homo sapiens
  siRNA target sequence for UEV3 (NM_018314.2,811-829).
caactctttgggtagttct

SEQ ID NO: 220092 - DNA, 19 bp, Homo sapiens
  siRNA target sequence for UEV3 (NM_018314.2,828-846).
ctcagtcgtaccttgatgt

SEQ ID NO: 220093 - DNA, 19 bp, Homo sapiens
  siRNA target sequence for UEV3 (NM_018314.2,888-906).
ctctgggacattatagtca

SEQ ID NO: 220094 - DNA, 19 bp, Homo sapiens
  siRNA target sequence for UEV3 (NM_018314.2,916-934).
cctgctcgttgcatctcaa

SEQ ID NO: 220095 - DNA, 19 bp, Homo sapiens
  siRNA target sequence for UEV3 (NM_018314.2,932-950).
caaccagtggaaatcatga

SEQ ID NO: 220096 - DNA, 19 bp, Homo sapiens
  siRNA target sequence for UEV3 (NM_018314.2,1005-1023).
gatgtaatctggattcaca

SEQ ID NO: 220097 - DNA, 19 bp, Homo sapiens
  siRNA target sequence for UEV3 (NM_018314.2,1020-1038).
cacagagattacagtatat

SEQ ID NO: 220098 - DNA, 19 bp, Homo sapiens
  siRNA target sequence for UEV3 (NM_018314.2,1024-1042).
gagattacagtatattatt

SEQ ID NO: 220099 - DNA, 19 bp, Homo sapiens
  siRNA target sequence for UEV3 (NM_018314.2,1125-1143).
gtggccaagaagaagtagt

SEQ ID NO: 220100 - DNA, 19 bp, Homo sapiens
  siRNA target sequence for UEV3 (NM_018314.2,1170-1188).
ccaacagggatattatgat

SEQ ID NO: 220101 - DNA, 19 bp, Homo sapiens
  siRNA target sequence for UEV3 (NM_018314.2,1171-1189).
caacagggatattatgata

SEQ ID NO: 220102 - DNA, 19 bp, Homo sapiens
  siRNA target sequence for EHHADH (NM_001966.1,65-83).
ccggtcaacgcgatcagta

SEQ ID NO: 220103 - DNA, 19 bp, Homo sapiens
  siRNA target sequence for EHHADH (NM_001966.1,73-91).
cgcgatcagtacgacttta

SEQ ID NO: 220104 - DNA, 19 bp, Homo sapiens
  siRNA target sequence for EHHADH (NM_001966.1,75-93).
cgatcagtacgactttact

SEQ ID NO: 220105 - DNA, 19 bp, Homo sapiens
  siRNA target sequence for EHHADH (NM_001966.1,161-179).
ggagcagagggcaaatttt

SEQ ID NO: 220106 - DNA, 19 bp, Homo sapiens
  siRNA target sequence for EHHADH (NM_001966.1,235-253).
gggacatgtagtagatgaa

SEQ ID NO: 220107 - DNA, 19 bp, Homo sapiens
  siRNA target sequence for EHHADH (NM_001966.1,236-254).
ggacatgtagtagatgaaa

SEQ ID NO: 220108 - DNA, 19 bp, Homo sapiens
  siRNA target sequence for EHHADH (NM_001966.1,242-260).
gtagtagatgaaatacaga

SEQ ID NO: 220109 - DNA, 19 bp, Homo sapiens
  siRNA target sequence for EHHADH (NM_001966.1,274-292).
cgtggtggcagcaatccaa

SEQ ID NO: 220110 - DNA, 19 bp, Homo sapiens
  siRNA target sequence for EHHADH (NM_001966.1,323-341).
gccctgggctgtcactata

SEQ ID NO: 220111 - DNA, 19 bp, Homo sapiens
  siRNA target sequence for EHHADH (NM_001966.1,326-344).
ctgggctgtcactatagga

SEQ ID NO: 220112 - DNA, 19 bp, Homo sapiens
  siRNA target sequence for EHHADH (NM_001966.1,328-346).
gggctgtcactataggatt

SEQ ID NO: 220113 - DNA, 19 bp, Homo sapiens
  siRNA target sequence for EHHADH (NM_001966.1,444-462).
ctgctgcacttgacttaat

SEQ ID NO: 220114 - DNA, 19 bp, Homo sapiens
  siRNA target sequence for EHHADH (NM_001966.1,449-467).
gcacttgacttaattacct

SEQ ID NO: 220115 - DNA, 19 bp, Homo sapiens
  siRNA target sequence for EHHADH (NM_001966.1,502-520).
gctgggcattctagataaa

SEQ ID NO: 220116 - DNA, 19 bp, Homo sapiens
  siRNA target sequence for EHHADH (NM_001966.1,505-523).
gggcattctagataaagtt

SEQ ID NO: 220117 - DNA, 19 bp, Homo sapiens
  siRNA target sequence for EHHADH (NM_001966.1,529-547).
ctcagacccggttgaagaa

SEQ ID NO: 220118 - DNA, 19 bp, Homo sapiens
  siRNA target sequence for EHHADH (NM_001966.1,627-645).
ccaacatggacagcatttt

SEQ ID NO: 220119 - DNA, 19 bp, Homo sapiens
  siRNA target sequence for EHHADH (NM_001966.1,631-649).
catggacagcatttttagt

SEQ ID NO: 220120 - DNA, 19 bp, Homo sapiens
  siRNA target sequence for EHHADH (NM_001966.1,799-817).
ggctagagccctgcaatat

SEQ ID NO: 220121 - DNA, 19 bp, Homo sapiens
  siRNA target sequence for EHHADH (NM_001966.1,819-837).
ctttcttcgctgaaaggaa

SEQ ID NO: 220122 - DNA, 19 bp, Homo sapiens
  siRNA target sequence for EHHADH (NM_001966.1,898-916).
ctcctcagttggtgttgtt

SEQ ID NO: 220123 - DNA, 19 bp, Homo sapiens
  siRNA target sequence for EHHADH (NM_001966.1,931-949).
gggccgaggcattgtcatt

SEQ ID NO: 220124 - DNA, 19 bp, Homo sapiens
  siRNA target sequence for EHHADH (NM_001966.1,934-952).
ccgaggcattgtcatttct

SEQ ID NO: 220125 - DNA, 19 bp, Homo sapiens
  siRNA target sequence for EHHADH (NM_001966.1,1004-1022).
ctagcaactgcaaacaaga

SEQ ID NO: 220126 - DNA, 19 bp, Homo sapiens
  siRNA target sequence for EHHADH (NM_001966.1,1013-1031).
gcaaacaagatgataacct

SEQ ID NO: 220127 - DNA, 19 bp, Homo sapiens
  siRNA target sequence for EHHADH (NM_001966.1,1075-1093).
cccttggtcaggaccaaaa

SEQ ID NO: 220128 - DNA, 19 bp, Homo sapiens
  siRNA target sequence for EHHADH (NM_001966.1,1120-1138).
gcttggtggtgtagattta

SEQ ID NO: 220129 - DNA, 19 bp, Homo sapiens
  siRNA target sequence for EHHADH (NM_001966.1,1124-1142).
ggtggtgtagatttagtca

SEQ ID NO: 220130 - DNA, 19 bp, Homo sapiens
  siRNA target sequence for EHHADH (NM_001966.1,1311-1329).
cgccagctcatgtcatgaa

SEQ ID NO: 220131 - DNA, 19 bp, Homo sapiens
  siRNA target sequence for EHHADH (NM_001966.1,1316-1334).
gctcatgtcatgaagttgt

SEQ ID NO: 220132 - DNA, 19 bp, Homo sapiens
  siRNA target sequence for EHHADH (NM_001966.1,1317-1335).
ctcatgtcatgaagttgtt

SEQ ID NO: 220133 - DNA, 19 bp, Homo sapiens
  siRNA target sequence for EHHADH (NM_001966.1,1340-1358).
gttattcccagccaatact

SEQ ID NO: 220134 - DNA, 19 bp, Homo sapiens
  siRNA target sequence for EHHADH (NM_001966.1,1376-1394).
gccactgttatgaacttat

SEQ ID NO: 220135 - DNA, 19 bp, Homo sapiens
  siRNA target sequence for EHHADH (NM_001966.1,1378-1396).
cactgttatgaacttatca

SEQ ID NO: 220136 - DNA, 19 bp, Homo sapiens
  siRNA target sequence for EHHADH (NM_001966.1,1380-1398).
ctgttatgaacttatcaaa

SEQ ID NO: 220137 - DNA, 19 bp, Homo sapiens
  siRNA target sequence for EHHADH (NM_001966.1,1439-1457).
ggatttgtggggaatcgaa

SEQ ID NO: 220138 - DNA, 19 bp, Homo sapiens
  siRNA target sequence for EHHADH (NM_001966.1,1440-1458).
gatttgtggggaatcgaat

SEQ ID NO: 220139 - DNA, 19 bp, Homo sapiens
  siRNA target sequence for EHHADH (NM_001966.1,1445-1463).
gtggggaatcgaatgttga

SEQ ID NO: 220140 - DNA, 19 bp, Homo sapiens
  siRNA target sequence for EHHADH (NM_001966.1,1447-1465).
ggggaatcgaatgttgaat

SEQ ID NO: 220141 - DNA, 19 bp, Homo sapiens
  siRNA target sequence for EHHADH (NM_001966.1,1592-1610).
gtgggctggaaatctagaa

SEQ ID NO: 220142 - DNA, 19 bp, Homo sapiens
  siRNA target sequence for EHHADH (NM_001966.1,1620-1638).
gtcttactggacctacatt

SEQ ID NO: 220143 - DNA, 19 bp, Homo sapiens
  siRNA target sequence for EHHADH (NM_001966.1,1655-1673).
gcccgaaaaaggggtaata

SEQ ID NO: 220144 - DNA, 19 bp, Homo sapiens
  siRNA target sequence for EHHADH (NM_001966.1,1658-1676).
cgaaaaaggggtaatagga

SEQ ID NO: 220145 - DNA, 19 bp, Homo sapiens
  siRNA target sequence for EHHADH (NM_001966.1,1729-1747).
gacaggtaagggttggtat

SEQ ID NO: 220146 - DNA, 19 bp, Homo sapiens
  siRNA target sequence for EHHADH (NM_001966.1,1734-1752).
gtaagggttggtatcaata

SEQ ID NO: 220147 - DNA, 19 bp, Homo sapiens
  siRNA target sequence for EHHADH (NM_001966.1,1740-1758).
gttggtatcaatatgacaa

SEQ ID NO: 220148 - DNA, 19 bp, Homo sapiens
  siRNA target sequence for EHHADH (NM_001966.1,1760-1778).
ccattgggtaggattcaca

SEQ ID NO: 220149 - DNA, 19 bp, Homo sapiens
  siRNA target sequence for EHHADH (NM_001966.1,1804-1822).
cctatcacggtatagaaaa

SEQ ID NO: 220150 - DNA, 19 bp, Homo sapiens
  siRNA target sequence for EHHADH (NM_001966.1,1831-1849).
cattgaaccacgtaccatt

SEQ ID NO: 220151 - DNA, 19 bp, Homo sapiens
  siRNA target sequence for EHHADH (NM_001966.1,1864-1882).
ccttgaacgctgcttatat

SEQ ID NO: 220152 - DNA, 19 bp, Homo sapiens
  siRNA target sequence for EHHADH (NM_001966.1,1865-1883).
cttgaacgctgcttatatt

SEQ ID NO: 220153 - DNA, 19 bp, Homo sapiens
  siRNA target sequence for EHHADH (NM_001966.1,1871-1889).
cgctgcttatattcactta

SEQ ID NO: 220154 - DNA, 19 bp, Homo sapiens
  siRNA target sequence for EHHADH (NM_001966.1,1872-1890).
gctgcttatattcacttat

SEQ ID NO: 220155 - DNA, 19 bp, Homo sapiens
  siRNA target sequence for EHHADH (NM_001966.1,1884-1902).
cacttatcaatgaagcatt

SEQ ID NO: 220156 - DNA, 19 bp, Homo sapiens
  siRNA target sequence for EHHADH (NM_001966.1,1932-1950).
gcccagagcacattgatgt

SEQ ID NO: 220157 - DNA, 19 bp, Homo sapiens
  siRNA target sequence for EHHADH (NM_001966.1,1933-1951).
cccagagcacattgatgtt

SEQ ID NO: 220158 - DNA, 19 bp, Homo sapiens
  siRNA target sequence for EHHADH (NM_001966.1,1954-1972).
ctatttacatggatatgga

SEQ ID NO: 220159 - DNA, 19 bp, Homo sapiens
  siRNA target sequence for EHHADH (NM_001966.1,2019-2037).
ggttgcccacagttctaga

SEQ ID NO: 220160 - DNA, 19 bp, Homo sapiens
  siRNA target sequence for EHHADH (NM_001966.1,2025-2043).
ccacagttctagagaaatt

SEQ ID NO: 220161 - DNA, 19 bp, Homo sapiens
  siRNA target sequence for EHHADH (NM_001966.1,2084-2102).
gagccaagtgactatctaa

SEQ ID NO: 220162 - DNA, 19 bp, Homo sapiens
  siRNA target sequence for EHHADH (NM_001966.1,2086-2104).
gccaagtgactatctaaaa

SEQ ID NO: 220163 - DNA, 19 bp, Homo sapiens
  siRNA target sequence for EHHADH (NM_001966.1,2087-2105).
ccaagtgactatctaaaaa

SEQ ID NO: 220164 - DNA, 19 bp, Homo sapiens
  siRNA target sequence for EHHADH (NM_001966.1,2088-2106).
caagtgactatctaaaaaa

SEQ ID NO: 220165 - DNA, 19 bp, Homo sapiens
  siRNA target sequence for EHHADH (NM_001966.1,2091-2109).
gtgactatctaaaaaaact

SEQ ID NO: 220166 - DNA, 19 bp, Homo sapiens
  siRNA target sequence for EHHADH (NM_001966.1,2121-2139).
gaaaccctcccctgaaaga

SEQ ID NO: 220167 - DNA, 19 bp, Homo sapiens
  siRNA target sequence for EHHADH (NM_001966.1,2157-2175).
gctcccctagcagtaaatt

SEQ ID NO: 220168 - DNA, 19 bp, Homo sapiens
  siRNA target sequence for HADHSC (NM_005327.1,144-162).
ggcctcggccaagaagata

SEQ ID NO: 220169 - DNA, 19 bp, Homo sapiens
  siRNA target sequence for HADHSC (NM_005327.1,145-163).
gcctcggccaagaagataa

SEQ ID NO: 220170 - DNA, 19 bp, Homo sapiens
  siRNA target sequence for HADHSC (NM_005327.1,146-164).
cctcggccaagaagataat

SEQ ID NO: 220171 - DNA, 19 bp, Homo sapiens
  siRNA target sequence for HADHSC (NM_005327.1,465-483).
gaaaaacgagctcttcaaa

SEQ ID NO: 220172 - DNA, 19 bp, Homo sapiens
  siRNA target sequence for HADHSC (NM_005327.1,495-513).
gtttgctgctgaacataca

SEQ ID NO: 220173 - DNA, 19 bp, Homo sapiens
  siRNA target sequence for HADHSC (NM_005327.1,500-518).
ctgctgaacatacaatctt

SEQ ID NO: 220174 - DNA, 19 bp, Homo sapiens
  siRNA target sequence for HADHSC (NM_005327.1,581-599).
gattcgctggcctccattt

SEQ ID NO: 220175 - DNA, 19 bp, Homo sapiens
  siRNA target sequence for HADHSC (NM_005327.1,670-688).
gaatctttggtagacttta

SEQ ID NO: 220176 - DNA, 19 bp, Homo sapiens
  siRNA target sequence for HADHSC (NM_005327.1,723-741).
ggacactcctgggtttatt

SEQ ID NO: 220177 - DNA, 19 bp, Homo sapiens
  siRNA target sequence for HADHSC (NM_005327.1,859-877).
ccatttgagcttctagatt

SEQ ID NO: 220178 - DNA, 19 bp, Homo sapiens
  siRNA target sequence for HADHSC (NM_005327.1,860-878).
catttgagcttctagatta

SEQ ID NO: 220179 - DNA, 19 bp, Homo sapiens
  siRNA target sequence for HADHSC (NM_005327.1,886-904).
ctggatactacgaagttca

SEQ ID NO: 220180 - DNA, 19 bp, Homo sapiens
  siRNA target sequence for HADHSC (NM_005327.1,932-950).
cagagaacccattacatca

SEQ ID NO: 220181 - DNA, 19 bp, Homo sapiens
  siRNA target sequence for HADHSC (NM_005327.1,953-971).
ccagcccatccttaaataa

SEQ ID NO: 220182 - DNA, 19 bp, Homo sapiens
  siRNA target sequence for HADHSC (NM_005327.1,956-974).
gcccatccttaaataagct

SEQ ID NO: 220183 - DNA, 19 bp, Homo sapiens
  siRNA target sequence for HADHSC (NM_005327.1,973-991).
ctggtagcagagaacaagt

SEQ ID NO: 220184 - DNA, 19 bp, Homo sapiens
  siRNA target sequence for IDH3A (NM_005530.2,112-130).
ggtggtgttcagacagtaa

SEQ ID NO: 220185 - DNA, 19 bp, Homo sapiens
  siRNA target sequence for IDH3A (NM_005530.2,225-243).
gaacgtcactgccattcaa

SEQ ID NO: 220186 - DNA, 19 bp, Homo sapiens
  siRNA target sequence for IDH3A (NM_005530.2,283-301).
gagtccatggataagaaca

SEQ ID NO: 220187 - DNA, 19 bp, Homo sapiens
  siRNA target sequence for IDH3A (NM_005530.2,340-358).
gccggtcacccatctatga

SEQ ID NO: 220188 - DNA, 19 bp, Homo sapiens
  siRNA target sequence for IDH3A (NM_005530.2,341-359).
ccggtcacccatctatgaa

SEQ ID NO: 220189 - DNA, 19 bp, Homo sapiens
  siRNA target sequence for IDH3A (NM_005530.2,342-360).
cggtcacccatctatgaat

SEQ ID NO: 220190 - DNA, 19 bp, Homo sapiens
  siRNA target sequence for IDH3A (NM_005530.2,344-362).
gtcacccatctatgaattt

SEQ ID NO: 220191 - DNA, 19 bp, Homo sapiens
  siRNA target sequence for IDH3A (NM_005530.2,431-449).
ccccttacaccgatgtaaa

SEQ ID NO: 220192 - DNA, 19 bp, Homo sapiens
  siRNA target sequence for IDH3A (NM_005530.2,432-450).
cccttacaccgatgtaaat

SEQ ID NO: 220193 - DNA, 19 bp, Homo sapiens
  siRNA target sequence for IDH3A (NM_005530.2,433-451).
ccttacaccgatgtaaata

SEQ ID NO: 220194 - DNA, 19 bp, Homo sapiens
  siRNA target sequence for IDH3A (NM_005530.2,434-452).
cttacaccgatgtaaatat

SEQ ID NO: 220195 - DNA, 19 bp, Homo sapiens
  siRNA target sequence for IDH3A (NM_005530.2,514-532).
ggagtcgtgcagagtatca

SEQ ID NO: 220196 - DNA, 19 bp, Homo sapiens
  siRNA target sequence for IDH3A (NM_005530.2,515-533).
gagtcgtgcagagtatcaa

SEQ ID NO: 220197 - DNA, 19 bp, Homo sapiens
  siRNA target sequence for IDH3A (NM_005530.2,734-752).
gtttgaatatggtacaaga

SEQ ID NO: 220198 - DNA, 19 bp, Homo sapiens
  siRNA target sequence for IDH3A (NM_005530.2,759-777).
ccaatttgatgttcttgtt

SEQ ID NO: 220199 - DNA, 19 bp, Homo sapiens
  siRNA target sequence for IDH3A (NM_005530.2,769-787).
gttcttgttatgccaaatt

SEQ ID NO: 220200 - DNA, 19 bp, Homo sapiens
  siRNA target sequence for IDH3A (NM_005530.2,843-861).
gacaccaagtggcaacatt

SEQ ID NO: 220201 - DNA, 19 bp, Homo sapiens
  siRNA target sequence for IDH3A (NM_005530.2,866-884).
ccaatggggttgcaatttt

SEQ ID NO: 220202 - DNA, 19 bp, Homo sapiens
  siRNA target sequence for IDH3A (NM_005530.2,972-990).
gcgccacatgggacttttt

SEQ ID NO: 220203 - DNA, 19 bp, Homo sapiens
  siRNA target sequence for IDH3A (NM_005530.2,1009-1027).
gaggctgcgtgttttgcta

SEQ ID NO: 220204 - DNA, 19 bp, Homo sapiens
  siRNA target sequence for IDH3A (NM_005530.2,1015-1033).
gcgtgttttgctacaatta

SEQ ID NO: 220205 - DNA, 19 bp, Homo sapiens
  siRNA target sequence for IDH3A (NM_005530.2,1016-1034).
cgtgttttgctacaattaa

SEQ ID NO: 220206 - DNA, 19 bp, Homo sapiens
  siRNA target sequence for IDH3A (NM_005530.2,1036-1054).
gacggaaagagcttgacaa

SEQ ID NO: 220207 - DNA, 19 bp, Homo sapiens
  siRNA target sequence for IDH3A (NM_005530.2,1101-1119).
ctgtcgccgagtaaaagat

SEQ ID NO: 220208 - DNA, 19 bp, Homo sapiens
  siRNA target sequence for IDH3A (NM_005530.2,1103-1121).
gtcgccgagtaaaagattt

SEQ ID NO: 220209 - DNA, 19 bp, Homo sapiens
  siRNA target sequence for IDH3A (NM_005530.2,1107-1125).
ccgagtaaaagatttagat

SEQ ID NO: 220210 - DNA, 19 bp, Homo sapiens
  siRNA target sequence for IDH3A (NM_005530.2,1108-1126).
cgagtaaaagatttagatt

SEQ ID NO: 220211 - DNA, 19 bp, Homo sapiens
  siRNA target sequence for IDH3B (NM_006899.2,262-280).
ctgagtgaggtgcagaata

SEQ ID NO: 220212 - DNA, 19 bp, Homo sapiens
  siRNA target sequence for IDH3B (NM_006899.2,355-373).
cataccccgatggagtata

SEQ ID NO: 220213 - DNA, 19 bp, Homo sapiens
  siRNA target sequence for IDH3B (NM_006899.2,378-396).
ggagctagcctcctatgat

SEQ ID NO: 220214 - DNA, 19 bp, Homo sapiens
  siRNA target sequence for IDH3B (NM_006899.2,379-397).
gagctagcctcctatgata

SEQ ID NO: 220215 - DNA, 19 bp, Homo sapiens
  siRNA target sequence for IDH3B (NM_006899.2,407-425).
ggcgtaagttggacttatt

SEQ ID NO: 220216 - DNA, 19 bp, Homo sapiens
  siRNA target sequence for IDH3B (NM_006899.2,408-426).
gcgtaagttggacttattt

SEQ ID NO: 220217 - DNA, 19 bp, Homo sapiens
  siRNA target sequence for IDH3B (NM_006899.2,428-446).
ccaacgtagtccatgtgaa

SEQ ID NO: 220218 - DNA, 19 bp, Homo sapiens
  siRNA target sequence for IDH3B (NM_006899.2,465-483).
gactcggcacaacaatcta

SEQ ID NO: 220219 - DNA, 19 bp, Homo sapiens
  siRNA target sequence for IDH3B (NM_006899.2,467-485).
ctcggcacaacaatctaga

SEQ ID NO: 220220 - DNA, 19 bp, Homo sapiens
  siRNA target sequence for IDH3B (NM_006899.2,542-560).
gtgcaaggggtgtgattga

SEQ ID NO: 220221 - DNA, 19 bp, Homo sapiens
  siRNA target sequence for IDH3B (NM_006899.2,550-568).
ggtgtgattgagtgtttga

SEQ ID NO: 220222 - DNA, 19 bp, Homo sapiens
  siRNA target sequence for IDH3B (NM_006899.2,553-571).
gtgattgagtgtttgaaga

SEQ ID NO: 220223 - DNA, 19 bp, Homo sapiens
  siRNA target sequence for IDH3B (NM_006899.2,555-573).
gattgagtgtttgaagatt

SEQ ID NO: 220224 - DNA, 19 bp, Homo sapiens
  siRNA target sequence for IDH3B (NM_006899.2,602-620).
caaagttcgcctttgacta

SEQ ID NO: 220225 - DNA, 19 bp, Homo sapiens
  siRNA target sequence for IDH3B (NM_006899.2,719-737).
ctgaactgtaccccaaaat

SEQ ID NO: 220226 - DNA, 19 bp, Homo sapiens
  siRNA target sequence for IDH3B (NM_006899.2,726-744).
gtaccccaaaatcaaattt

SEQ ID NO: 220227 - DNA, 19 bp, Homo sapiens
  siRNA target sequence for IDH3B (NM_006899.2,880-898).
gtccctggtgagagctata

SEQ ID NO: 220228 - DNA, 19 bp, Homo sapiens
  siRNA target sequence for IDH3B (NM_006899.2,882-900).
ccctggtgagagctatagt

SEQ ID NO: 220229 - DNA, 19 bp, Homo sapiens
  siRNA target sequence for IDH3B (NM_006899.2,902-920).
cagaatacgcagtctttga

SEQ ID NO: 220230 - DNA, 19 bp, Homo sapiens
  siRNA target sequence for IDH3B (NM_006899.2,1005-1023).
gctgcggcatcttaatctt

SEQ ID NO: 220231 - DNA, 19 bp, Homo sapiens
  siRNA target sequence for IDH3B (NM_006899.2,1010-1028).
ggcatcttaatcttgagta

SEQ ID NO: 220232 - DNA, 19 bp, Homo sapiens
  siRNA target sequence for IDH3B (NM_006899.2,1056-1074).
gaagaaggtgatcaaagtt

SEQ ID NO: 220233 - DNA, 19 bp, Homo sapiens
  siRNA target sequence for IDH3B (NM_006899.2,1109-1127).
gcaccacaaccgacttcat

SEQ ID NO: 220234 - DNA, 19 bp, Homo sapiens
  siRNA target sequence for IDH3B (NM_006899.2,1140-1158).
cggtcacctgcagactaaa

SEQ ID NO: 220235 - DNA, 19 bp, Homo sapiens
  siRNA target sequence for IDH3B (NM_174855.1,1093-1111).
gacatgggtggctatgcta

SEQ ID NO: 220236 - DNA, 19 bp, Homo sapiens
  siRNA target sequence for IDH1 (NM_005896.2,254-272).
gcggttctgtggtagagat

SEQ ID NO: 220237 - DNA, 19 bp, Homo sapiens
  siRNA target sequence for IDH1 (NM_005896.2,283-301).
gaaatgacacgaatcattt

SEQ ID NO: 220238 - DNA, 19 bp, Homo sapiens
  siRNA target sequence for IDH1 (NM_005896.2,292-310).
cgaatcatttgggaattga

SEQ ID NO: 220239 - DNA, 19 bp, Homo sapiens
  siRNA target sequence for IDH1 (NM_005896.2,336-354).
cgtggaattggatctacat

SEQ ID NO: 220240 - DNA, 19 bp, Homo sapiens
  siRNA target sequence for IDH1 (NM_005896.2,346-364).
gatctacatagctatgatt

SEQ ID NO: 220241 - DNA, 19 bp, Homo sapiens
  siRNA target sequence for IDH1 (NM_005896.2,433-451).
cataatgttggcgtcaaat

SEQ ID NO: 220242 - DNA, 19 bp, Homo sapiens
  siRNA target sequence for IDH1 (NM_005896.2,447-465).
caaatgtgccactatcact

SEQ ID NO: 220243 - DNA, 19 bp, Homo sapiens
  siRNA target sequence for IDH1 (NM_005896.2,458-476).
ctatcactcctgatgagaa

SEQ ID NO: 220244 - DNA, 19 bp, Homo sapiens
  siRNA target sequence for IDH1 (NM_005896.2,479-497).
gggttgaggagttcaagtt

SEQ ID NO: 220245 - DNA, 19 bp, Homo sapiens
  siRNA target sequence for IDH1 (NM_005896.2,481-499).
gttgaggagttcaagttga

SEQ ID NO: 220246 - DNA, 19 bp, Homo sapiens
  siRNA target sequence for IDH1 (NM_005896.2,486-504).
ggagttcaagttgaaacaa

SEQ ID NO: 220247 - DNA, 19 bp, Homo sapiens
  siRNA target sequence for IDH1 (NM_005896.2,517-535).
ccaaatggcaccatacgaa

SEQ ID NO: 220248 - DNA, 19 bp, Homo sapiens
  siRNA target sequence for IDH1 (NM_005896.2,518-536).
caaatggcaccatacgaaa

SEQ ID NO: 220249 - DNA, 19 bp, Homo sapiens
  siRNA target sequence for IDH1 (NM_005896.2,524-542).
gcaccatacgaaatattct

SEQ ID NO: 220250 - DNA, 19 bp, Homo sapiens
  siRNA target sequence for IDH1 (NM_005896.2,597-615).
gagtggatgggtaaaacct

SEQ ID NO: 220251 - DNA, 19 bp, Homo sapiens
  siRNA target sequence for IDH1 (NM_005896.2,602-620).
gatgggtaaaacctatcat

SEQ ID NO: 220252 - DNA, 19 bp, Homo sapiens
  siRNA target sequence for IDH1 (NM_005896.2,605-623).
gggtaaaacctatcatcat

SEQ ID NO: 220253 - DNA, 19 bp, Homo sapiens
  siRNA target sequence for IDH1 (NM_005896.2,606-624).
ggtaaaacctatcatcata

SEQ ID NO: 220254 - DNA, 19 bp, Homo sapiens
  siRNA target sequence for IDH1 (NM_005896.2,646-664).
caatacagagcaactgatt

SEQ ID NO: 220255 - DNA, 19 bp, Homo sapiens
  siRNA target sequence for IDH1 (NM_005896.2,653-671).
gagcaactgattttgttgt

SEQ ID NO: 220256 - DNA, 19 bp, Homo sapiens
  siRNA target sequence for IDH1 (NM_005896.2,682-700).
ggaaaagtagagataacct

SEQ ID NO: 220257 - DNA, 19 bp, Homo sapiens
  siRNA target sequence for IDH1 (NM_005896.2,710-728).
gtgacggaacccaaaaggt

SEQ ID NO: 220258 - DNA, 19 bp, Homo sapiens
  siRNA target sequence for IDH1 (NM_005896.2,727-745).
gtgacatacctggtacata

SEQ ID NO: 220259 - DNA, 19 bp, Homo sapiens
  siRNA target sequence for IDH1 (NM_005896.2,731-749).
catacctggtacataactt

SEQ ID NO: 220260 - DNA, 19 bp, Homo sapiens
  siRNA target sequence for IDH1 (NM_005896.2,766-784).
gttgccatggggatgtata

SEQ ID NO: 220261 - DNA, 19 bp, Homo sapiens
  siRNA target sequence for IDH1 (NM_005896.2,774-792).
ggggatgtataatcaagat

SEQ ID NO: 220262 - DNA, 19 bp, Homo sapiens
  siRNA target sequence for IDH1 (NM_005896.2,780-798).
gtataatcaagataagtca

SEQ ID NO: 220263 - DNA, 19 bp, Homo sapiens
  siRNA target sequence for IDH1 (NM_005896.2,844-862).
ggttggcctttgtatctga

SEQ ID NO: 220264 - DNA, 19 bp, Homo sapiens
  siRNA target sequence for IDH1 (NM_005896.2,863-881).
gcaccaaaaacactattct

SEQ ID NO: 220265 - DNA, 19 bp, Homo sapiens
  siRNA target sequence for IDH1 (NM_005896.2,936-954).
gtacaagtcccagtttgaa

SEQ ID NO: 220266 - DNA, 19 bp, Homo sapiens
  siRNA target sequence for IDH1 (NM_005896.2,1035-1053).
ggcctgtaaaaactatgat

SEQ ID NO: 220267 - DNA, 19 bp, Homo sapiens
  siRNA target sequence for IDH1 (NM_005896.2,1357-1375).
gacttggctgcttgcatta

SEQ ID NO: 220268 - DNA, 19 bp, Homo sapiens
  siRNA target sequence for IDH1 (NM_005896.2,1359-1377).
cttggctgcttgcattaaa

SEQ ID NO: 220269 - DNA, 19 bp, Homo sapiens
  siRNA target sequence for IDH1 (NM_005896.2,1396-1414).
cgttctgactacttgaata

SEQ ID NO: 220270 - DNA, 19 bp, Homo sapiens
  siRNA target sequence for IDH1 (NM_005896.2,1400-1418).
ctgactacttgaatacatt

SEQ ID NO: 220271 - DNA, 19 bp, Homo sapiens
  siRNA target sequence for IDH1 (NM_005896.2,1415-1433).
catttgagttcatggataa

SEQ ID NO: 220272 - DNA, 19 bp, Homo sapiens
  siRNA target sequence for IDH1 (NM_005896.2,1429-1447).
gataaacttggagaaaact

SEQ ID NO: 220273 - DNA, 19 bp, Homo sapiens
  siRNA target sequence for IDH2 (NM_002168.2,195-213).
cgccactatgccgacaaaa

SEQ ID NO: 220274 - DNA, 19 bp, Homo sapiens
  siRNA target sequence for IDH2 (NM_002168.2,198-216).
cactatgccgacaaaagga

SEQ ID NO: 220275 - DNA, 19 bp, Homo sapiens
  siRNA target sequence for IDH2 (NM_002168.2,252-270).
gatgagatgacccgtatta

SEQ ID NO: 220276 - DNA, 19 bp, Homo sapiens
  siRNA target sequence for IDH2 (NM_002168.2,255-273).
gagatgacccgtattatct

SEQ ID NO: 220277 - DNA, 19 bp, Homo sapiens
  siRNA target sequence for IDH2 (NM_002168.2,265-283).
gtattatctggcagttcat

SEQ ID NO: 220278 - DNA, 19 bp, Homo sapiens
  siRNA target sequence for IDH2 (NM_002168.2,309-327).
gtggacatccagctaaagt

SEQ ID NO: 220279 - DNA, 19 bp, Homo sapiens
  siRNA target sequence for IDH2 (NM_002168.2,311-329).
ggacatccagctaaagtat

SEQ ID NO: 220280 - DNA, 19 bp, Homo sapiens
  siRNA target sequence for IDH2 (NM_002168.2,312-330).
gacatccagctaaagtatt

SEQ ID NO: 220281 - DNA, 19 bp, Homo sapiens
  siRNA target sequence for IDH2 (NM_002168.2,448-466).
cccgtgtggaagagttcaa

SEQ ID NO: 220282 - DNA, 19 bp, Homo sapiens
  siRNA target sequence for IDH2 (NM_002168.2,607-625).
cccatggcgaccagtacaa

SEQ ID NO: 220283 - DNA, 19 bp, Homo sapiens
  siRNA target sequence for IDH2 (NM_002168.2,668-686).
ggtcttcaccccaaaagat

SEQ ID NO: 220284 - DNA, 19 bp, Homo sapiens
  siRNA target sequence for IDH2 (NM_002168.2,735-753).
gtgggcatgggcatgtaca

SEQ ID NO: 220285 - DNA, 19 bp, Homo sapiens
  siRNA target sequence for IDH2 (NM_002168.2,835-853).
ccaagaacaccatactgaa

SEQ ID NO: 220286 - DNA, 19 bp, Homo sapiens
  siRNA target sequence for IDH2 (NM_002168.2,836-854).
caagaacaccatactgaaa

SEQ ID NO: 220287 - DNA, 19 bp, Homo sapiens
  siRNA target sequence for IDH2 (NM_002168.2,856-874).
cctacgatgggcgtttcaa

SEQ ID NO: 220288 - DNA, 19 bp, Homo sapiens
  siRNA target sequence for IDH2 (NM_002168.2,878-896).
catcttccaggagatcttt

SEQ ID NO: 220289 - DNA, 19 bp, Homo sapiens
  siRNA target sequence for IDH2 (NM_002168.2,911-929).
gaccgacttcgacaagaat

SEQ ID NO: 220290 - DNA, 19 bp, Homo sapiens
  siRNA target sequence for IDH2 (NM_002168.2,913-931).
ccgacttcgacaagaataa

SEQ ID NO: 220291 - DNA, 19 bp, Homo sapiens
  siRNA target sequence for IDH2 (NM_002168.2,915-933).
gacttcgacaagaataaga

SEQ ID NO: 220292 - DNA, 19 bp, Homo sapiens
  siRNA target sequence for IDH2 (NM_002168.2,1001-1019).
gtgggcctgcaagaactat

SEQ ID NO: 220293 - DNA, 19 bp, Homo sapiens
  siRNA target sequence for IDH2 (NM_002168.2,1344-1362).
cacggcctcagcaatgtga

SEQ ID NO: 220294 - DNA, 19 bp, Homo sapiens
  siRNA target sequence for RDH5 (NM_002905.1,347-365).
caccctgttggatatcact

SEQ ID NO: 220295 - DNA, 19 bp, Homo sapiens
  siRNA target sequence for RDH5 (NM_002905.1,481-499).
ggctgacccgggacgattt

SEQ ID NO: 220296 - DNA, 19 bp, Homo sapiens
  siRNA target sequence for RDH5 (NM_002905.1,682-700).
ggcgggatgtagctcattt

SEQ ID NO: 220297 - DNA, 19 bp, Homo sapiens
  siRNA target sequence for RDH5 (NM_002905.1,683-701).
gcgggatgtagctcatttt

SEQ ID NO: 220298 - DNA, 19 bp, Homo sapiens
  siRNA target sequence for RDH5 (NM_002905.1,837-855).
ctcaccaagtacctgaaaa

SEQ ID NO: 220299 - DNA, 19 bp, Homo sapiens
  siRNA target sequence for RDH5 (NM_002905.1,842-860).
caagtacctgaaaatgcaa

SEQ ID NO: 220300 - DNA, 19 bp, Homo sapiens
  siRNA target sequence for RDH5 (NM_002905.1,883-901).
gtgacccggacctaaccaa

SEQ ID NO: 220301 - DNA, 19 bp, Homo sapiens
  siRNA target sequence for RDH8 (NM_015725.1,260-278).
caccccggactgtgttgat

SEQ ID NO: 220302 - DNA, 19 bp, Homo sapiens
  siRNA target sequence for RDH8 (NM_015725.1,262-280).
ccccggactgtgttgatct

SEQ ID NO: 220303 - DNA, 19 bp, Homo sapiens
  siRNA target sequence for RDH8 (NM_015725.1,282-300).
cggctgctcatcaggaatt

SEQ ID NO: 220304 - DNA, 19 bp, Homo sapiens
  siRNA target sequence for RDH8 (NM_015725.1,285-303).
ctgctcatcaggaattggt

SEQ ID NO: 220305 - DNA, 19 bp, Homo sapiens
  siRNA target sequence for RDH8 (NM_015725.1,504-522).
cgtgctggtgaataatgct

SEQ ID NO: 220306 - DNA, 19 bp, Homo sapiens
  siRNA target sequence for RDH8 (NM_015725.1,696-714).
catcttcaacgatgtctat

SEQ ID NO: 220307 - DNA, 19 bp, Homo sapiens
  siRNA target sequence for RDH8 (NM_015725.1,733-751).
ctggagggattcttcgaaa

SEQ ID NO: 220308 - DNA, 19 bp, Homo sapiens
  siRNA target sequence for RDH8 (NM_015725.1,835-853).
cttctggcgcaggtttcta

SEQ ID NO: 220309 - DNA, 19 bp, Homo sapiens
  siRNA target sequence for RDH8 (NM_015725.1,878-896).
ctgagaccctgcactactt

SEQ ID NO: 220310 - DNA, 19 bp, Homo sapiens
  siRNA target sequence for RODH-4 (NM_003708.2,922-940).
ctgagccacctgagagata

SEQ ID NO: 220311 - DNA, 19 bp, Homo sapiens
  siRNA target sequence for RODH-4 (NM_003708.2,926-944).
gccacctgagagataagta

SEQ ID NO: 220312 - DNA, 19 bp, Homo sapiens
  siRNA target sequence for RODH-4 (NM_003708.2,927-945).
ccacctgagagataagtat

SEQ ID NO: 220313 - DNA, 19 bp, Homo sapiens
  siRNA target sequence for RODH-4 (NM_003708.2,937-955).
gataagtatgtgttcatca

SEQ ID NO: 220314 - DNA, 19 bp, Homo sapiens
  siRNA target sequence for RODH-4 (NM_003708.2,1204-1222).
cccacggctcccaatgagt

SEQ ID NO: 220315 - DNA, 19 bp, Homo sapiens
  siRNA target sequence for RODH-4 (NM_003708.2,1263-1281).
cttgttgggggtgattgat

SEQ ID NO: 220316 - DNA, 19 bp, Homo sapiens
  siRNA target sequence for RODH-4 (NM_003708.2,1446-1464).
ggtgaaggtggctatgatt

SEQ ID NO: 220317 - DNA, 19 bp, Homo sapiens
  siRNA target sequence for RODH-4 (NM_003708.2,1493-1511).
ccagtaaggagagattctt

SEQ ID NO: 220318 - DNA, 19 bp, Homo sapiens
  siRNA target sequence for RODH-4 (NM_003708.2,1496-1514).
gtaaggagagattcttaaa

SEQ ID NO: 220319 - DNA, 19 bp, Homo sapiens
  siRNA target sequence for RODH-4 (NM_003708.2,1560-1578).
ggcctatggcgagaagttt

SEQ ID NO: 220320 - DNA, 19 bp, Homo sapiens
  siRNA target sequence for AKR1A1 (NM_006066.2,467-485).
ggcggcttcctgtgttcta

SEQ ID NO: 220321 - DNA, 19 bp, Homo sapiens
  siRNA target sequence for AKR1A1 (NM_006066.2,469-487).
cggcttcctgtgttctact

SEQ ID NO: 220322 - DNA, 19 bp, Homo sapiens
  siRNA target sequence for AKR1A1 (NM_006066.2,539-557).
gcctggtcaggtaaaagca

SEQ ID NO: 220323 - DNA, 19 bp, Homo sapiens
  siRNA target sequence for AKR1A1 (NM_006066.2,584-602).
ctaccgccacattgattgt

SEQ ID NO: 220324 - DNA, 19 bp, Homo sapiens
  siRNA target sequence for AKR1A1 (NM_006066.2,614-632).
cggcaatgagcctgagatt

SEQ ID NO: 220325 - DNA, 19 bp, Homo sapiens
  siRNA target sequence for AKR1A1 (NM_006066.2,845-863).
gaatgctgatgggactata

SEQ ID NO: 220326 - DNA, 19 bp, Homo sapiens
  siRNA target sequence for AKR1A1 (NM_006066.2,849-867).
gctgatgggactatatgct

SEQ ID NO: 220327 - DNA, 19 bp, Homo sapiens
  siRNA target sequence for AKR1A1 (NM_006066.2,850-868).
ctgatgggactatatgcta

SEQ ID NO: 220328 - DNA, 19 bp, Homo sapiens
  siRNA target sequence for AKR1A1 (NM_006066.2,956-974).
caacagtcggcagattgat

SEQ ID NO: 220329 - DNA, 19 bp, Homo sapiens
  siRNA target sequence for AKR1A1 (NM_006066.2,961-979).
gtcggcagattgatgacat

SEQ ID NO: 220330 - DNA, 19 bp, Homo sapiens
  siRNA target sequence for AKR1A1 (NM_006066.2,964-982).
ggcagattgatgacatact

SEQ ID NO: 220331 - DNA, 19 bp, Homo sapiens
  siRNA target sequence for AKR1A1 (NM_006066.2,966-984).
cagattgatgacatactca

SEQ ID NO: 220332 - DNA, 19 bp, Homo sapiens
  siRNA target sequence for AKR1A1 (NM_006066.2,1028-1046).
cccatacttggctcaaaat

SEQ ID NO: 220333 - DNA, 19 bp, Homo sapiens
  siRNA target sequence for AKR1A1 (NM_006066.2,1076-1094).
cctggaggtaactgcttat

SEQ ID NO: 220334 - DNA, 19 bp, Homo sapiens
  siRNA target sequence for AKR1A1 (NM_006066.2,1077-1095).
ctggaggtaactgcttata

SEQ ID NO: 220335 - DNA, 19 bp, Homo sapiens
  siRNA target sequence for AKR1A1 (NM_006066.2,1414-1432).
ctctgtacccctttaatga

SEQ ID NO: 220336 - DNA, 19 bp, Homo sapiens
  siRNA target sequence for AKR1B1 (NM_001628.2,82-100).
gccgtctcctgctcaacaa

SEQ ID NO: 220337 - DNA, 19 bp, Homo sapiens
  siRNA target sequence for AKR1B1 (NM_001628.2,573-591).
gtggagatgatcttaaaca

SEQ ID NO: 220338 - DNA, 19 bp, Homo sapiens
  siRNA target sequence for AKR1B1 (NM_001628.2,613-631).
ctgcagttaaccagattga

SEQ ID NO: 220339 - DNA, 19 bp, Homo sapiens
  siRNA target sequence for AKR1B1 (NM_001628.2,615-633).
gcagttaaccagattgagt

SEQ ID NO: 220340 - DNA, 19 bp, Homo sapiens
  siRNA target sequence for AKR1B1 (NM_001628.2,645-663).
ctcactcaggagaagttaa

SEQ ID NO: 220341 - DNA, 19 bp, Homo sapiens
  siRNA target sequence for AKR1B1 (NM_001628.2,649-667).
ctcaggagaagttaatcca

SEQ ID NO: 220342 - DNA, 19 bp, Homo sapiens
  siRNA target sequence for AKR1B1 (NM_001628.2,879-897).
cgcattgctgagaacttta

SEQ ID NO: 220343 - DNA, 19 bp, Homo sapiens
  siRNA target sequence for AKR1B1 (NM_001628.2,880-898).
gcattgctgagaactttaa

SEQ ID NO: 220344 - DNA, 19 bp, Homo sapiens
  siRNA target sequence for AKR1B1 (NM_001628.2,985-1003).
gtacctcccacaaggatta

SEQ ID NO: 220345 - DNA, 19 bp, Homo sapiens
  siRNA target sequence for AKR1B1 (NM_001628.2,1004-1022).
ccccttccatgaagagttt

SEQ ID NO: 220346 - DNA, 19 bp, Homo sapiens
  siRNA target sequence for AKR1B1 (NM_001628.2,1005-1023).
cccttccatgaagagtttt

SEQ ID NO: 220347 - DNA, 19 bp, Homo sapiens
  siRNA target sequence for AKR7A2 (NM_003689.1,307-325).
ccaacccttgggatggaaa

SEQ ID NO: 220348 - DNA, 19 bp, Homo sapiens
  siRNA target sequence for AKR7A2 (NM_003689.1,308-326).
caacccttgggatggaaaa

SEQ ID NO: 220349 - DNA, 19 bp, Homo sapiens
  siRNA target sequence for HIBADH (NM_152740.1,200-218).
gtcagtggcttcaaagact

SEQ ID NO: 220350 - DNA, 19 bp, Homo sapiens
  siRNA target sequence for HIBADH (NM_152740.1,241-259).
gcaacatggggaatccaat

SEQ ID NO: 220351 - DNA, 19 bp, Homo sapiens
  siRNA target sequence for HIBADH (NM_152740.1,249-267).
gggaatccaatggcaaaaa

SEQ ID NO: 220352 - DNA, 19 bp, Homo sapiens
  siRNA target sequence for HIBADH (NM_152740.1,279-297).
catggctatccacttatta

SEQ ID NO: 220353 - DNA, 19 bp, Homo sapiens
  siRNA target sequence for HIBADH (NM_152740.1,283-301).
gctatccacttattattta

SEQ ID NO: 220354 - DNA, 19 bp, Homo sapiens
  siRNA target sequence for HIBADH (NM_152740.1,313-331).
ctgatgcctgcaaagagtt

SEQ ID NO: 220355 - DNA, 19 bp, Homo sapiens
  siRNA target sequence for HIBADH (NM_152740.1,339-357).
gcaggtgaacaggtagtat

SEQ ID NO: 220356 - DNA, 19 bp, Homo sapiens
  siRNA target sequence for HIBADH (NM_152740.1,342-360).
ggtgaacaggtagtatctt

SEQ ID NO: 220357 - DNA, 19 bp, Homo sapiens
  siRNA target sequence for HIBADH (NM_152740.1,385-403).
ctgacagaattattacaat

SEQ ID NO: 220358 - DNA, 19 bp, Homo sapiens
  siRNA target sequence for HIBADH (NM_152740.1,404-422).
gctgcccaccagtatcaat

SEQ ID NO: 220359 - DNA, 19 bp, Homo sapiens
  siRNA target sequence for HIBADH (NM_152740.1,408-426).
cccaccagtatcaatgcaa

SEQ ID NO: 220360 - DNA, 19 bp, Homo sapiens
  siRNA target sequence for HIBADH (NM_152740.1,410-428).
caccagtatcaatgcaata

SEQ ID NO: 220361 - DNA, 19 bp, Homo sapiens
  siRNA target sequence for HIBADH (NM_152740.1,440-458).
cggagcaaatgggattcta

SEQ ID NO: 220362 - DNA, 19 bp, Homo sapiens
  siRNA target sequence for HIBADH (NM_152740.1,441-459).
ggagcaaatgggattctaa

SEQ ID NO: 220363 - DNA, 19 bp, Homo sapiens
  siRNA target sequence for HIBADH (NM_152740.1,470-488).
gaagggctcattattaata

SEQ ID NO: 220364 - DNA, 19 bp, Homo sapiens
  siRNA target sequence for HIBADH (NM_152740.1,474-492).
ggctcattattaatagatt

SEQ ID NO: 220365 - DNA, 19 bp, Homo sapiens
  siRNA target sequence for HIBADH (NM_152740.1,711-729).
gggcaggcggcaaagatct

SEQ ID NO: 220366 - DNA, 19 bp, Homo sapiens
  siRNA target sequence for HIBADH (NM_152740.1,720-738).
gcaaagatctgcaacaaca

SEQ ID NO: 220367 - DNA, 19 bp, Homo sapiens
  siRNA target sequence for HIBADH (NM_152740.1,721-739).
caaagatctgcaacaacat

SEQ ID NO: 220368 - DNA, 19 bp, Homo sapiens
  siRNA target sequence for HIBADH (NM_152740.1,734-752).
caacatgctgttagctatt

SEQ ID NO: 220369 - DNA, 19 bp, Homo sapiens
  siRNA target sequence for HIBADH (NM_152740.1,737-755).
catgctgttagctattagt

SEQ ID NO: 220370 - DNA, 19 bp, Homo sapiens
  siRNA target sequence for HIBADH (NM_152740.1,741-759).
ctgttagctattagtatga

SEQ ID NO: 220371 - DNA, 19 bp, Homo sapiens
  siRNA target sequence for HIBADH (NM_152740.1,766-784).
ctgctgaagctatgaatct

SEQ ID NO: 220372 - DNA, 19 bp, Homo sapiens
  siRNA target sequence for HIBADH (NM_152740.1,799-817).
ggcttgacccaaaactact

SEQ ID NO: 220373 - DNA, 19 bp, Homo sapiens
  siRNA target sequence for HIBADH (NM_152740.1,807-825).
ccaaaactactggctaaaa

SEQ ID NO: 220374 - DNA, 19 bp, Homo sapiens
  siRNA target sequence for HIBADH (NM_152740.1,808-826).
caaaactactggctaaaat

SEQ ID NO: 220375 - DNA, 19 bp, Homo sapiens
  siRNA target sequence for HIBADH (NM_152740.1,816-834).
ctggctaaaatcctaaata

SEQ ID NO: 220376 - DNA, 19 bp, Homo sapiens
  siRNA target sequence for HIBADH (NM_152740.1,850-868).
gttggtcaagtgacactta

SEQ ID NO: 220377 - DNA, 19 bp, Homo sapiens
  siRNA target sequence for HIBADH (NM_152740.1,853-871).
ggtcaagtgacacttataa

SEQ ID NO: 220378 - DNA, 19 bp, Homo sapiens
  siRNA target sequence for HIBADH (NM_152740.1,901-919).
cctcggctaataactatca

SEQ ID NO: 220379 - DNA, 19 bp, Homo sapiens
  siRNA target sequence for HIBADH (NM_152740.1,914-932).
ctatcagggtggatttgga

SEQ ID NO: 220380 - DNA, 19 bp, Homo sapiens
  siRNA target sequence for HIBADH (NM_152740.1,983-1001).
cacaaagagcccaatcctt

SEQ ID NO: 220381 - DNA, 19 bp, Homo sapiens
  siRNA target sequence for HIBADH (NM_152740.1,1006-1024).
gcagtctggcccatcagat

SEQ ID NO: 220382 - DNA, 19 bp, Homo sapiens
  siRNA target sequence for HIBADH (NM_152740.1,1009-1027).
gtctggcccatcagatcta

SEQ ID NO: 220383 - DNA, 19 bp, Homo sapiens
  siRNA target sequence for HIBADH (NM_152740.1,1011-1029).
ctggcccatcagatctaca

SEQ ID NO: 220384 - DNA, 19 bp, Homo sapiens
  siRNA target sequence for HIBADH (NM_152740.1,1039-1057).
gtgcaaagggctactcaaa

SEQ ID NO: 220385 - DNA, 19 bp, Homo sapiens
  siRNA target sequence for HIBADH (NM_152740.1,1041-1059).
gcaaagggctactcaaaga

SEQ ID NO: 220386 - DNA, 19 bp, Homo sapiens
  siRNA target sequence for IMPDH1 (NM_000883.2,525-543).
gacgacaccccgttcagaa

SEQ ID NO: 220387 - DNA, 19 bp, Homo sapiens
  siRNA target sequence for IMPDH1 (NM_000883.2,528-546).
gacaccccgttcagaacta

SEQ ID NO: 220388 - DNA, 19 bp, Homo sapiens
  siRNA target sequence for IMPDH1 (NM_000883.2,532-550).
ccccgttcagaactatctt

SEQ ID NO: 220389 - DNA, 19 bp, Homo sapiens
  siRNA target sequence for IMPDH1 (NM_000883.2,534-552).
ccgttcagaactatcttca

SEQ ID NO: 220390 - DNA, 19 bp, Homo sapiens
  siRNA target sequence for IMPDH1 (NM_000883.2,856-874).
ctgatgggaggtattggtt

SEQ ID NO: 220391 - DNA, 19 bp, Homo sapiens
  siRNA target sequence for IMPDH1 (NM_000883.2,863-881).
gaggtattggtttcattca

SEQ ID NO: 220392 - DNA, 19 bp, Homo sapiens
  siRNA target sequence for IMPDH1 (NM_000883.2,916-934).
gtgcggaaggtcaagaagt

SEQ ID NO: 220393 - DNA, 19 bp, Homo sapiens
  siRNA target sequence for IMPDH1 (NM_000883.2,1085-1103).
cccgagacatcgactttct

SEQ ID NO: 220394 - DNA, 19 bp, Homo sapiens
  siRNA target sequence for IMPDH1 (NM_000883.2,1086-1104).
ccgagacatcgactttctt

SEQ ID NO: 220395 - DNA, 19 bp, Homo sapiens
  siRNA target sequence for IMPDH1 (NM_000883.2,1137-1155).
ggtgatgacgccaaggatt

SEQ ID NO: 220396 - DNA, 19 bp, Homo sapiens
  siRNA target sequence for IMPDH1 (NM_000883.2,1140-1158).
gatgacgccaaggattgaa

SEQ ID NO: 220397 - DNA, 19 bp, Homo sapiens
  siRNA target sequence for IMPDH1 (NM_000883.2,1184-1202).
cgttgaaagaggcaaatga

SEQ ID NO: 220398 - DNA, 19 bp, Homo sapiens
  siRNA target sequence for IMPDH1 (NM_000883.2,1231-1249).
ctgcctatcgtcaatgatt

SEQ ID NO: 220399 - DNA, 19 bp, Homo sapiens
  siRNA target sequence for IMPDH1 (NM_000883.2,1361-1379).
cccgtgaggatgacaaata

SEQ ID NO: 220400 - DNA, 19 bp, Homo sapiens
  siRNA target sequence for IMPDH1 (NM_000883.2,1405-1423).
ggcgtcgacgtcatagtct

SEQ ID NO: 220401 - DNA, 19 bp, Homo sapiens
  siRNA target sequence for IMPDH1 (NM_000883.2,1406-1424).
gcgtcgacgtcatagtctt

SEQ ID NO: 220402 - DNA, 19 bp, Homo sapiens
  siRNA target sequence for IMPDH1 (NM_000883.2,1438-1456).
gggaattcggtgtatcaga

SEQ ID NO: 220403 - DNA, 19 bp, Homo sapiens
  siRNA target sequence for IMPDH1 (NM_000883.2,1674-1692).
ctttggtgtgcccatcata

SEQ ID NO: 220404 - DNA, 19 bp, Homo sapiens
  siRNA target sequence for IMPDH1 (NM_000883.2,1820-1838).
gggtgcggctcaagaagta

SEQ ID NO: 220405 - DNA, 19 bp, Homo sapiens
  siRNA target sequence for IMPDH1 (NM_000883.2,1880-1898).
gcagccagaaacgatactt

SEQ ID NO: 220406 - DNA, 19 bp, Homo sapiens
  siRNA target sequence for IMPDH1 (NM_000883.2,1896-1914).
cttcagcgagggggataaa

SEQ ID NO: 220407 - DNA, 19 bp, Homo sapiens
  siRNA target sequence for IMPDH1 (NM_000883.2,1947-1965).
ccaggacaaaggatccatt

SEQ ID NO: 220408 - DNA, 19 bp, Homo sapiens
  siRNA target sequence for IMPDH1 (NM_000883.2,2041-2059).
cttcggtccatgatgtact

SEQ ID NO: 220409 - DNA, 19 bp, Homo sapiens
  siRNA target sequence for IMPDH1 (NM_000883.2,2087-2105).
ccatgtcggcccagattga

SEQ ID NO: 220410 - DNA, 19 bp, Homo sapiens
  siRNA target sequence for IMPDH1 (NM_000883.2,2119-2137).
ggcctgcactcttacgaaa

SEQ ID NO: 220411 - DNA, 19 bp, Homo sapiens
  siRNA target sequence for IMPDH1 (NM_000883.2,2120-2138).
gcctgcactcttacgaaaa

SEQ ID NO: 220412 - DNA, 19 bp, Homo sapiens
  siRNA target sequence for IMPDH2 (NM_000884.1,50-68).
ggccgactacctgattagt

SEQ ID NO: 220413 - DNA, 19 bp, Homo sapiens
  siRNA target sequence for IMPDH2 (NM_000884.1,140-158).
ctacaatgactttctcatt

SEQ ID NO: 220414 - DNA, 19 bp, Homo sapiens
  siRNA target sequence for IMPDH2 (NM_000884.1,273-291).
gctgggatggccatagcaa

SEQ ID NO: 220415 - DNA, 19 bp, Homo sapiens
  siRNA target sequence for IMPDH2 (NM_000884.1,274-292).
ctgggatggccatagcaat

SEQ ID NO: 220416 - DNA, 19 bp, Homo sapiens
  siRNA target sequence for IMPDH2 (NM_000884.1,420-438).
gatcgcgtgcgggatgttt

SEQ ID NO: 220417 - DNA, 19 bp, Homo sapiens
  siRNA target sequence for IMPDH2 (NM_000884.1,464-482).
ctgcggtatcccaatcaca

SEQ ID NO: 220418 - DNA, 19 bp, Homo sapiens
  siRNA target sequence for IMPDH2 (NM_000884.1,526-544).
ccagggacattgattttct

SEQ ID NO: 220419 - DNA, 19 bp, Homo sapiens
  siRNA target sequence for IMPDH2 (NM_000884.1,530-548).
ggacattgattttctcaaa

SEQ ID NO: 220420 - DNA, 19 bp, Homo sapiens
  siRNA target sequence for IMPDH2 (NM_000884.1,665-683).
gggaaagttgcccattgta

SEQ ID NO: 220421 - DNA, 19 bp, Homo sapiens
  siRNA target sequence for IMPDH2 (NM_000884.1,802-820).
ctcatgaggatgacaagta

SEQ ID NO: 220422 - DNA, 19 bp, Homo sapiens
  siRNA target sequence for IMPDH2 (NM_000884.1,929-947).
ccctaatctccaagtcatt

SEQ ID NO: 220423 - DNA, 19 bp, Homo sapiens
  siRNA target sequence for IMPDH2 (NM_000884.1,1235-1253).
ccctggtgaatacttcttt

SEQ ID NO: 220424 - DNA, 19 bp, Homo sapiens
  siRNA target sequence for IMPDH2 (NM_000884.1,1257-1275).
gatgggatccggctaaaga

SEQ ID NO: 220425 - DNA, 19 bp, Homo sapiens
  siRNA target sequence for IMPDH2 (NM_000884.1,1260-1278).
gggatccggctaaagaaat

SEQ ID NO: 220426 - DNA, 19 bp, Homo sapiens
  siRNA target sequence for IMPDH2 (NM_000884.1,1321-1339).
gcagccagaacagatattt

SEQ ID NO: 220427 - DNA, 19 bp, Homo sapiens
  siRNA target sequence for IMPDH2 (NM_000884.1,1342-1360).
gtgaagctgacaaaatcaa

SEQ ID NO: 220428 - DNA, 19 bp, Homo sapiens
  siRNA target sequence for IMPDH2 (NM_000884.1,1479-1497).
caagtccgagccatgatgt

SEQ ID NO: 220429 - DNA, 19 bp, Homo sapiens
  siRNA target sequence for IMPDH2 (NM_000884.1,1482-1500).
gtccgagccatgatgtact

SEQ ID NO: 220430 - DNA, 19 bp, Homo sapiens
  siRNA target sequence for IMPDH2 (NM_000884.1,1499-1517).
ctctggggagcttaagttt

SEQ ID NO: 220431 - DNA, 19 bp, Homo sapiens
  siRNA target sequence for IMPDH2 (NM_000884.1,1501-1519).
ctggggagcttaagtttga

SEQ ID NO: 220432 - DNA, 19 bp, Homo sapiens
  siRNA target sequence for IMPDH2 (NM_000884.1,1556-1574).
ccatagcctccattcgtat

SEQ ID NO: 220433 - DNA, 19 bp, Homo sapiens
  siRNA target sequence for IMPDH2 (NM_000884.1,1561-1579).
gcctccattcgtatgagaa

SEQ ID NO: 220434 - DNA, 19 bp, Homo sapiens
  siRNA target sequence for ME1 (NM_002395.2,263-281).
gatccaggttcttagagta

SEQ ID NO: 220435 - DNA, 19 bp, Homo sapiens
  siRNA target sequence for ME1 (NM_002395.2,266-284).
ccaggttcttagagtagta

SEQ ID NO: 220436 - DNA, 19 bp, Homo sapiens
  siRNA target sequence for ME1 (NM_002395.2,277-295).
gagtagtaaaaaatttcga

SEQ ID NO: 220437 - DNA, 19 bp, Homo sapiens
  siRNA target sequence for ME1 (NM_002395.2,315-333).
gacaggtatcttctcttaa

SEQ ID NO: 220438 - DNA, 19 bp, Homo sapiens
  siRNA target sequence for ME1 (NM_002395.2,319-337).
ggtatcttctcttaatgga

SEQ ID NO: 220439 - DNA, 19 bp, Homo sapiens
  siRNA target sequence for ME1 (NM_002395.2,335-353).
ggatctccaagatagaaat

SEQ ID NO: 220440 - DNA, 19 bp, Homo sapiens
  siRNA target sequence for ME1 (NM_002395.2,375-393).
ctgacatctgacattgaga

SEQ ID NO: 220441 - DNA, 19 bp, Homo sapiens
  siRNA target sequence for ME1 (NM_002395.2,426-444).
ggtctggcttgccaacaat

SEQ ID NO: 220442 - DNA, 19 bp, Homo sapiens
  siRNA target sequence for ME1 (NM_002395.2,429-447).
ctggcttgccaacaatata

SEQ ID NO: 220443 - DNA, 19 bp, Homo sapiens
  siRNA target sequence for ME1 (NM_002395.2,433-451).
cttgccaacaatatagttt

SEQ ID NO: 220444 - DNA, 19 bp, Homo sapiens
  siRNA target sequence for ME1 (NM_002395.2,488-506).
ccacgatcgagggcatatt

SEQ ID NO: 220445 - DNA, 19 bp, Homo sapiens
  siRNA target sequence for ME1 (NM_002395.2,491-509).
cgatcgagggcatattgct

SEQ ID NO: 220446 - DNA, 19 bp, Homo sapiens
  siRNA target sequence for ME1 (NM_002395.2,584-602).
gggagaccttggctgtaat

SEQ ID NO: 220447 - DNA, 19 bp, Homo sapiens
  siRNA target sequence for ME1 (NM_002395.2,620-638).
gggtaaattggctctatat

SEQ ID NO: 220448 - DNA, 19 bp, Homo sapiens
  siRNA target sequence for ME1 (NM_002395.2,621-639).
ggtaaattggctctatata

SEQ ID NO: 220449 - DNA, 19 bp, Homo sapiens
  siRNA target sequence for ME1 (NM_002395.2,738-756).
ctacggcagagaagagtaa

SEQ ID NO: 220450 - DNA, 19 bp, Homo sapiens
  siRNA target sequence for ME1 (NM_002395.2,751-769).
gagtaagaggttctgaata

SEQ ID NO: 220451 - DNA, 19 bp, Homo sapiens
  siRNA target sequence for ME1 (NM_002395.2,774-792).
gattttttggacgaattca

SEQ ID NO: 220452 - DNA, 19 bp, Homo sapiens
  siRNA target sequence for ME1 (NM_002395.2,817-835).
gcatgaattgccttattca

SEQ ID NO: 220453 - DNA, 19 bp, Homo sapiens
  siRNA target sequence for ME1 (NM_002395.2,826-844).
gccttattcagtttgaaga

SEQ ID NO: 220454 - DNA, 19 bp, Homo sapiens
  siRNA target sequence for ME1 (NM_002395.2,827-845).
ccttattcagtttgaagat

SEQ ID NO: 220455 - DNA, 19 bp, Homo sapiens
  siRNA target sequence for ME1 (NM_002395.2,870-888).
ctcctgaacaagtatcgaa

SEQ ID NO: 220456 - DNA, 19 bp, Homo sapiens
  siRNA target sequence for ME1 (NM_002395.2,950-968).
ccttgcagctcttcgaata

SEQ ID NO: 220457 - DNA, 19 bp, Homo sapiens
  siRNA target sequence for ME1 (NM_002395.2,954-972).
gcagctcttcgaataacca

SEQ ID NO: 220458 - DNA, 19 bp, Homo sapiens
  siRNA target sequence for ME1 (NM_002395.2,974-992).
gaacaaactgtctgatcaa

SEQ ID NO: 220459 - DNA, 19 bp, Homo sapiens
  siRNA target sequence for ME1 (NM_002395.2,977-995).
caaactgtctgatcaaaca

SEQ ID NO: 220460 - DNA, 19 bp, Homo sapiens
  siRNA target sequence for ME1 (NM_002395.2,983-1001).
gtctgatcaaacaatacta

SEQ ID NO: 220461 - DNA, 19 bp, Homo sapiens
  siRNA target sequence for ME1 (NM_002395.2,1030-1048).
ggattgcacacctgattgt

SEQ ID NO: 220462 - DNA, 19 bp, Homo sapiens
  siRNA target sequence for ME1 (NM_002395.2,1104-1122).
ctggttgattcaaaaggat

SEQ ID NO: 220463 - DNA, 19 bp, Homo sapiens
  siRNA target sequence for ME1 (NM_002395.2,1135-1153).
gacgtgcttccttaacaca

SEQ ID NO: 220464 - DNA, 19 bp, Homo sapiens
  siRNA target sequence for ME1 (NM_002395.2,1235-1253).
cataggagttgctgcaatt

SEQ ID NO: 220465 - DNA, 19 bp, Homo sapiens
  siRNA target sequence for ME1 (NM_002395.2,1261-1279).
cattctcagaacaaattct

SEQ ID NO: 220466 - DNA, 19 bp, Homo sapiens
  siRNA target sequence for ME1 (NM_002395.2,1269-1287).
gaacaaattctcaaagata

SEQ ID NO: 220467 - DNA, 19 bp, Homo sapiens
  siRNA target sequence for ME1 (NM_002395.2,1305-1323).
cggcctattatttttgctt

SEQ ID NO: 220468 - DNA, 19 bp, Homo sapiens
  siRNA target sequence for ME1 (NM_002395.2,1325-1343).
gagtaatccaactagcaaa

SEQ ID NO: 220469 - DNA, 19 bp, Homo sapiens
  siRNA target sequence for ME1 (NM_002395.2,1378-1396).
ccaagggacgtgcaatttt

SEQ ID NO: 220470 - DNA, 19 bp, Homo sapiens
  siRNA target sequence for ME1 (NM_002395.2,1400-1418).
cagtggcagtccttttgat

SEQ ID NO: 220471 - DNA, 19 bp, Homo sapiens
  siRNA target sequence for ME1 (NM_002395.2,1455-1473).
ggccaaggcaacaattcct

SEQ ID NO: 220472 - DNA, 19 bp, Homo sapiens
  siRNA target sequence for ME1 (NM_002395.2,1456-1474).
gccaaggcaacaattccta

SEQ ID NO: 220473 - DNA, 19 bp, Homo sapiens
  siRNA target sequence for ME1 (NM_002395.2,1589-1607).
ggaagagggtcggctttat

SEQ ID NO: 220474 - DNA, 19 bp, Homo sapiens
  siRNA target sequence for ME1 (NM_002395.2,1601-1619).
gctttatcctcctttgaat

SEQ ID NO: 220475 - DNA, 19 bp, Homo sapiens
  siRNA target sequence for ME1 (NM_002395.2,1616-1634).
gaataccattagagatgtt

SEQ ID NO: 220476 - DNA, 19 bp, Homo sapiens
  siRNA target sequence for ME1 (NM_002395.2,1621-1639).
ccattagagatgtttctct

SEQ ID NO: 220477 - DNA, 19 bp, Homo sapiens
  siRNA target sequence for ME1 (NM_002395.2,1699-1717).
ctgaaccgcaaaacaaaga

SEQ ID NO: 220478 - DNA, 19 bp, Homo sapiens
  siRNA target sequence for ME1 (NM_002395.2,1725-1743).
gtccgctcccagatgtata

SEQ ID NO: 220479 - DNA, 19 bp, Homo sapiens
  siRNA target sequence for ME1 (NM_002395.2,1733-1751).
ccagatgtatagtactgat

SEQ ID NO: 220480 - DNA, 19 bp, Homo sapiens
  siRNA target sequence for ME1 (NM_002395.2,1736-1754).
gatgtatagtactgattat

SEQ ID NO: 220481 - DNA, 19 bp, Homo sapiens
  siRNA target sequence for ME1 (NM_002395.2,1747-1765).
ctgattatgaccagattct

SEQ ID NO: 220482 - DNA, 19 bp, Homo sapiens
  siRNA target sequence for ME1 (NM_002395.2,1760-1778).
gattctacctgattgttat

SEQ ID NO: 220483 - DNA, 19 bp, Homo sapiens
  siRNA target sequence for ME1 (NM_002395.2,1764-1782).
ctacctgattgttattctt

SEQ ID NO: 220484 - DNA, 19 bp, Homo sapiens
  siRNA target sequence for ME3 (NM_006680.1,170-188).
gaagaagcgcggatacgat

SEQ ID NO: 220485 - DNA, 19 bp, Homo sapiens
  siRNA target sequence for ME3 (NM_006680.1,297-315).
cagctcctccgaatcatga

SEQ ID NO: 220486 - DNA, 19 bp, Homo sapiens
  siRNA target sequence for ME3 (NM_006680.1,302-320).
cctccgaatcatgagatat

SEQ ID NO: 220487 - DNA, 19 bp, Homo sapiens
  siRNA target sequence for ME3 (NM_006680.1,303-321).
ctccgaatcatgagatatt

SEQ ID NO: 220488 - DNA, 19 bp, Homo sapiens
  siRNA target sequence for ME3 (NM_006680.1,307-325).
gaatcatgagatattacga

SEQ ID NO: 220489 - DNA, 19 bp, Homo sapiens
  siRNA target sequence for ME3 (NM_006680.1,345-363).
gacaagtacatcattctca

SEQ ID NO: 220490 - DNA, 19 bp, Homo sapiens
  siRNA target sequence for ME3 (NM_006680.1,379-397).
ggaacgagaagctcttcta

SEQ ID NO: 220491 - DNA, 19 bp, Homo sapiens
  siRNA target sequence for ME3 (NM_006680.1,716-734).
ggacgtcggcaccaacaat

SEQ ID NO: 220492 - DNA, 19 bp, Homo sapiens
  siRNA target sequence for ME3 (NM_006680.1,785-803).
gcacgggaaggcatacgat

SEQ ID NO: 220493 - DNA, 19 bp, Homo sapiens
  siRNA target sequence for ME3 (NM_006680.1,837-855).
gacaagtttggaataaatt

SEQ ID NO: 220494 - DNA, 19 bp, Homo sapiens
  siRNA target sequence for ME3 (NM_006680.1,1015-1033).
ccaatcacgtgtttgtttt

SEQ ID NO: 220495 - DNA, 19 bp, Homo sapiens
  siRNA target sequence for ME3 (NM_006680.1,1171-1189).
gccacctgaaccatgaaaa

SEQ ID NO: 220496 - DNA, 19 bp, Homo sapiens
  siRNA target sequence for ME3 (NM_006680.1,1409-1427).
cgagggccgagggattttt

SEQ ID NO: 220497 - DNA, 19 bp, Homo sapiens
  siRNA target sequence for ME3 (NM_006680.1,1655-1673).
ccgagacgtgtctttgaga

SEQ ID NO: 220498 - DNA, 19 bp, Homo sapiens
  siRNA target sequence for ME3 (NM_006680.1,1656-1674).
cgagacgtgtctttgagaa

SEQ ID NO: 220499 - DNA, 19 bp, Homo sapiens
  siRNA target sequence for ME3 (NM_006680.1,1657-1675).
gagacgtgtctttgagaat

SEQ ID NO: 220500 - DNA, 19 bp, Homo sapiens
  siRNA target sequence for ME3 (NM_006680.1,1670-1688).
gagaattgccatcaaagtt

SEQ ID NO: 220501 - DNA, 19 bp, Homo sapiens
  siRNA target sequence for ME3 (NM_006680.1,1672-1690).
gaattgccatcaaagttct

SEQ ID NO: 220502 - DNA, 19 bp, Homo sapiens
  siRNA target sequence for ME3 (NM_006680.1,1692-1710).
gactacgcgtacaaacaca

SEQ ID NO: 220503 - DNA, 19 bp, Homo sapiens
  siRNA target sequence for ME3 (NM_006680.1,1739-1757).
ggacaaggaggcttttgta

SEQ ID NO: 220504 - DNA, 19 bp, Homo sapiens
  siRNA target sequence for ME3 (NM_006680.1,1766-1784).
ggtctacactccagactat

SEQ ID NO: 220505 - DNA, 19 bp, Homo sapiens
  siRNA target sequence for GBA2 (NM_020944.2,564-582).
ccagcctcggagcagataa

SEQ ID NO: 220506 - DNA, 19 bp, Homo sapiens
  siRNA target sequence for GBA2 (NM_020944.2,567-585).
gcctcggagcagataagct

SEQ ID NO: 220507 - DNA, 19 bp, Homo sapiens
  siRNA target sequence for GBA2 (NM_020944.2,590-608).
caaagaggatccacaagtt

SEQ ID NO: 220508 - DNA, 19 bp, Homo sapiens
  siRNA target sequence for GBA2 (NM_020944.2,594-612).
gaggatccacaagtttatt

SEQ ID NO: 220509 - DNA, 19 bp, Homo sapiens
  siRNA target sequence for GBA2 (NM_020944.2,647-665).
ggttacagactgtaagagt

SEQ ID NO: 220510 - DNA, 19 bp, Homo sapiens
  siRNA target sequence for GBA2 (NM_020944.2,722-740).
gcagctgatggtttcctat

SEQ ID NO: 220511 - DNA, 19 bp, Homo sapiens
  siRNA target sequence for GBA2 (NM_020944.2,788-806).
ctgtctggctcatgagttt

SEQ ID NO: 220512 - DNA, 19 bp, Homo sapiens
  siRNA target sequence for GBA2 (NM_020944.2,812-830).
gaagaggaaaccctttcaa

SEQ ID NO: 220513 - DNA, 19 bp, Homo sapiens
  siRNA target sequence for GBA2 (NM_020944.2,817-835).
ggaaaccctttcaagctaa

SEQ ID NO: 220514 - DNA, 19 bp, Homo sapiens
  siRNA target sequence for GBA2 (NM_020944.2,840-858).
gtctccctaagcaacatga

SEQ ID NO: 220515 - DNA, 19 bp, Homo sapiens
  siRNA target sequence for GBA2 (NM_020944.2,842-860).
ctccctaagcaacatgata

SEQ ID NO: 220516 - DNA, 19 bp, Homo sapiens
  siRNA target sequence for GBA2 (NM_020944.2,928-946).
cacctttcatcgacatgat

SEQ ID NO: 220517 - DNA, 19 bp, Homo sapiens
  siRNA target sequence for GBA2 (NM_020944.2,935-953).
catcgacatgatcaattct

SEQ ID NO: 220518 - DNA, 19 bp, Homo sapiens
  siRNA target sequence for GBA2 (NM_020944.2,959-977).
cctaagacagatttatggt

SEQ ID NO: 220519 - DNA, 19 bp, Homo sapiens
  siRNA target sequence for GBA2 (NM_020944.2,992-1010).
catcgggggaggcactatt

SEQ ID NO: 220520 - DNA, 19 bp, Homo sapiens
  siRNA target sequence for GBA2 (NM_020944.2,1046-1064).
gcttaaccctggaatgtat

SEQ ID NO: 220521 - DNA, 19 bp, Homo sapiens
  siRNA target sequence for GBA2 (NM_020944.2,1075-1093).
cagtcatcgctgaccaatt

SEQ ID NO: 220522 - DNA, 19 bp, Homo sapiens
  siRNA target sequence for GBA2 (NM_020944.2,1077-1095).
gtcatcgctgaccaattca

SEQ ID NO: 220523 - DNA, 19 bp, Homo sapiens
  siRNA target sequence for GBA2 (NM_020944.2,1079-1097).
catcgctgaccaattcaca

SEQ ID NO: 220524 - DNA, 19 bp, Homo sapiens
  siRNA target sequence for GBA2 (NM_020944.2,1223-1241).
ccgagcctggactgtctat

SEQ ID NO: 220525 - DNA, 19 bp, Homo sapiens
  siRNA target sequence for GBA2 (NM_020944.2,1225-1243).
gagcctggactgtctatca

SEQ ID NO: 220526 - DNA, 19 bp, Homo sapiens
  siRNA target sequence for GBA2 (NM_020944.2,1288-1306).
ccatcttgccccatgacta

SEQ ID NO: 220527 - DNA, 19 bp, Homo sapiens
  siRNA target sequence for GBA2 (NM_020944.2,1323-1341).
cctgtaggagtctttgtgt

SEQ ID NO: 220528 - DNA, 19 bp, Homo sapiens
  siRNA target sequence for GBA2 (NM_020944.2,1360-1378).
gggacgaagctctagatgt

SEQ ID NO: 220529 - DNA, 19 bp, Homo sapiens
  siRNA target sequence for GBA2 (NM_020944.2,1733-1751).
gtgccgcctggagttttca

SEQ ID NO: 220530 - DNA, 19 bp, Homo sapiens
  siRNA target sequence for GBA2 (NM_020944.2,1799-1817).
ccactacaggcggtataca

SEQ ID NO: 220531 - DNA, 19 bp, Homo sapiens
  siRNA target sequence for GBA2 (NM_020944.2,1808-1826).
gcggtatacaaggttcttt

SEQ ID NO: 220532 - DNA, 19 bp, Homo sapiens
  siRNA target sequence for GBA2 (NM_020944.2,1910-1928).
gcagagcccggtattggat

SEQ ID NO: 220533 - DNA, 19 bp, Homo sapiens
  siRNA target sequence for GBA2 (NM_020944.2,1940-1958).
gcctgcctggtacaaatct

SEQ ID NO: 220534 - DNA, 19 bp, Homo sapiens
  siRNA target sequence for GBA2 (NM_020944.2,1952-1970).
caaatctgcgctgttcaat

SEQ ID NO: 220535 - DNA, 19 bp, Homo sapiens
  siRNA target sequence for GBA2 (NM_020944.2,1959-1977).
gcgctgttcaatgaactat

SEQ ID NO: 220536 - DNA, 19 bp, Homo sapiens
  siRNA target sequence for GBA2 (NM_020944.2,1960-1978).
cgctgttcaatgaactata

SEQ ID NO: 220537 - DNA, 19 bp, Homo sapiens
  siRNA target sequence for GBA2 (NM_020944.2,2117-2135).
ccgcatgtacaacacatat

SEQ ID NO: 220538 - DNA, 19 bp, Homo sapiens
  siRNA target sequence for GBA2 (NM_020944.2,2190-2208).
ctcagcctacagtatgaca

SEQ ID NO: 220539 - DNA, 19 bp, Homo sapiens
  siRNA target sequence for GBA2 (NM_020944.2,2291-2309).
cgtcatcccccatgatatt

SEQ ID NO: 220540 - DNA, 19 bp, Homo sapiens
  siRNA target sequence for GBA2 (NM_020944.2,2332-2350).
ggctccgcgtcaatgcata

SEQ ID NO: 220541 - DNA, 19 bp, Homo sapiens
  siRNA target sequence for GBA2 (NM_020944.2,2333-2351).
gctccgcgtcaatgcatat

SEQ ID NO: 220542 - DNA, 19 bp, Homo sapiens
  siRNA target sequence for GBA2 (NM_020944.2,2334-2352).
ctccgcgtcaatgcatatt

SEQ ID NO: 220543 - DNA, 19 bp, Homo sapiens
  siRNA target sequence for GBA2 (NM_020944.2,2336-2354).
ccgcgtcaatgcatattta

SEQ ID NO: 220544 - DNA, 19 bp, Homo sapiens
  siRNA target sequence for GBA2 (NM_020944.2,2337-2355).
cgcgtcaatgcatatttaa

SEQ ID NO: 220545 - DNA, 19 bp, Homo sapiens
  siRNA target sequence for GBA2 (NM_020944.2,2346-2364).
gcatatttaatccatgata

SEQ ID NO: 220546 - DNA, 19 bp, Homo sapiens
  siRNA target sequence for GBA2 (NM_020944.2,2403-2421).
caggtttatcgggactatt

SEQ ID NO: 220547 - DNA, 19 bp, Homo sapiens
  siRNA target sequence for GBA2 (NM_020944.2,2424-2442).
ctcacgggtgatcaaaact

SEQ ID NO: 220548 - DNA, 19 bp, Homo sapiens
  siRNA target sequence for GBA2 (NM_020944.2,2504-2522).
ggaccatgatggactcatt

SEQ ID NO: 220549 - DNA, 19 bp, Homo sapiens
  siRNA target sequence for GBA2 (NM_020944.2,2651-2669).
ggacatccaggataagttt

SEQ ID NO: 220550 - DNA, 19 bp, Homo sapiens
  siRNA target sequence for GBA2 (NM_020944.2,2654-2672).
catccaggataagttttct

SEQ ID NO: 220551 - DNA, 19 bp, Homo sapiens
  siRNA target sequence for GBA2 (NM_020944.2,2716-2734).
ggaatggccgctattacaa

SEQ ID NO: 220552 - DNA, 19 bp, Homo sapiens
  siRNA target sequence for GBA2 (NM_020944.2,2722-2740).
gccgctattacaactatga

SEQ ID NO: 220553 - DNA, 19 bp, Homo sapiens
  siRNA target sequence for GBA2 (NM_020944.2,2724-2742).
cgctattacaactatgaca

SEQ ID NO: 220554 - DNA, 19 bp, Homo sapiens
  siRNA target sequence for GBA2 (NM_020944.2,2753-2771).
gcctcagtctcgtagtgtt

SEQ ID NO: 220555 - DNA, 19 bp, Homo sapiens
  siRNA target sequence for GBA2 (NM_020944.2,2754-2772).
cctcagtctcgtagtgtta

SEQ ID NO: 220556 - DNA, 19 bp, Homo sapiens
  siRNA target sequence for GBA2 (NM_020944.2,2755-2773).
ctcagtctcgtagtgttat

SEQ ID NO: 220557 - DNA, 19 bp, Homo sapiens
  siRNA target sequence for GBA2 (NM_020944.2,2759-2777).
gtctcgtagtgttatgtct

SEQ ID NO: 220558 - DNA, 19 bp, Homo sapiens
  siRNA target sequence for GBA2 (NM_020944.2,2829-2847).
gacactgaggtgtttccta

SEQ ID NO: 220559 - DNA, 19 bp, Homo sapiens
  siRNA target sequence for GBA2 (NM_020944.2,2859-2877).
gtccgtgctctccaaacta

SEQ ID NO: 220560 - DNA, 19 bp, Homo sapiens
  siRNA target sequence for GBA2 (NM_020944.2,2912-2930).
ggccatgggggctgtgaat

SEQ ID NO: 220561 - DNA, 19 bp, Homo sapiens
  siRNA target sequence for GBA2 (NM_020944.2,2941-2959).
cccatggtgtccctgataa

SEQ ID NO: 220562 - DNA, 19 bp, Homo sapiens
  siRNA target sequence for GBA2 (NM_020944.2,2942-2960).
ccatggtgtccctgataaa

SEQ ID NO: 220563 - DNA, 19 bp, Homo sapiens
  siRNA target sequence for GBA2 (NM_020944.2,2943-2961).
catggtgtccctgataaat

SEQ ID NO: 220564 - DNA, 19 bp, Homo sapiens
  siRNA target sequence for GBA2 (NM_020944.2,2946-2964).
ggtgtccctgataaatcca

SEQ ID NO: 220565 - DNA, 19 bp, Homo sapiens
  siRNA target sequence for GBA2 (NM_020944.2,2963-2981).
cagtgtgcagtctgatgaa

SEQ ID NO: 220566 - DNA, 19 bp, Homo sapiens
  siRNA target sequence for GBA2 (NM_020944.2,2965-2983).
gtgtgcagtctgatgaagt

SEQ ID NO: 220567 - DNA, 19 bp, Homo sapiens
  siRNA target sequence for HMGCR (NM_000859.1,95-113).
ccatccctgggaagtcata

SEQ ID NO: 220568 - DNA, 19 bp, Homo sapiens
  siRNA target sequence for HMGCR (NM_000859.1,146-164).
gtccatgaacatgtttact

SEQ ID NO: 220569 - DNA, 19 bp, Homo sapiens
  siRNA target sequence for HMGCR (NM_000859.1,176-194).
gatctgtggttggaattat

SEQ ID NO: 220570 - DNA, 19 bp, Homo sapiens
  siRNA target sequence for HMGCR (NM_000859.1,224-242).
gagcagtgacattataatt

SEQ ID NO: 220571 - DNA, 19 bp, Homo sapiens
  siRNA target sequence for HMGCR (NM_000859.1,226-244).
gcagtgacattataattct

SEQ ID NO: 220572 - DNA, 19 bp, Homo sapiens
  siRNA target sequence for HMGCR (NM_000859.1,245-263).
gacaataacacgatgcata

SEQ ID NO: 220573 - DNA, 19 bp, Homo sapiens
  siRNA target sequence for HMGCR (NM_000859.1,259-277).
gcatagccatcctgtatat

SEQ ID NO: 220574 - DNA, 19 bp, Homo sapiens
  siRNA target sequence for HMGCR (NM_000859.1,290-308).
ccagaatttacgtcaactt

SEQ ID NO: 220575 - DNA, 19 bp, Homo sapiens
  siRNA target sequence for HMGCR (NM_000859.1,300-318).
cgtcaacttggatcaaaat

SEQ ID NO: 220576 - DNA, 19 bp, Homo sapiens
  siRNA target sequence for HMGCR (NM_000859.1,333-351).
gctggccttttcacaattt

SEQ ID NO: 220577 - DNA, 19 bp, Homo sapiens
  siRNA target sequence for HMGCR (NM_000859.1,378-396).
gtcattcacttcttagaca

SEQ ID NO: 220578 - DNA, 19 bp, Homo sapiens
  siRNA target sequence for HMGCR (NM_000859.1,460-478).
caagcacattagcaaagtt

SEQ ID NO: 220579 - DNA, 19 bp, Homo sapiens
  siRNA target sequence for HMGCR (NM_000859.1,500-518).
ggatgaagtaagggaaaat

SEQ ID NO: 220580 - DNA, 19 bp, Homo sapiens
  siRNA target sequence for HMGCR (NM_000859.1,522-540).
gctcgtggaatggcaattt

SEQ ID NO: 220581 - DNA, 19 bp, Homo sapiens
  siRNA target sequence for HMGCR (NM_000859.1,556-574).
ccctcgatgctcttgttga

SEQ ID NO: 220582 - DNA, 19 bp, Homo sapiens
  siRNA target sequence for HMGCR (NM_000859.1,557-575).
cctcgatgctcttgttgaa

SEQ ID NO: 220583 - DNA, 19 bp, Homo sapiens
  siRNA target sequence for HMGCR (NM_000859.1,558-576).
ctcgatgctcttgttgaat

SEQ ID NO: 220584 - DNA, 19 bp, Homo sapiens
  siRNA target sequence for HMGCR (NM_000859.1,560-578).
cgatgctcttgttgaatgt

SEQ ID NO: 220585 - DNA, 19 bp, Homo sapiens
  siRNA target sequence for HMGCR (NM_000859.1,606-624).
ggggtacgtcagcttgaaa

SEQ ID NO: 220586 - DNA, 19 bp, Homo sapiens
  siRNA target sequence for HMGCR (NM_000859.1,608-626).
ggtacgtcagcttgaaatt

SEQ ID NO: 220587 - DNA, 19 bp, Homo sapiens
  siRNA target sequence for HMGCR (NM_000859.1,609-627).
gtacgtcagcttgaaatta

SEQ ID NO: 220588 - DNA, 19 bp, Homo sapiens
  siRNA target sequence for HMGCR (NM_000859.1,649-667).
cagttcttgccaactactt

SEQ ID NO: 220589 - DNA, 19 bp, Homo sapiens
  siRNA target sequence for HMGCR (NM_000859.1,658-676).
ccaactacttcgtgttcat

SEQ ID NO: 220590 - DNA, 19 bp, Homo sapiens
  siRNA target sequence for HMGCR (NM_000859.1,691-709).
cttgtgtgtccttggtatt

SEQ ID NO: 220591 - DNA, 19 bp, Homo sapiens
  siRNA target sequence for HMGCR (NM_000859.1,694-712).
gtgtgtccttggtattaga

SEQ ID NO: 220592 - DNA, 19 bp, Homo sapiens
  siRNA target sequence for HMGCR (NM_000859.1,728-746).
ccgcgagggtcgtccaatt

SEQ ID NO: 220593 - DNA, 19 bp, Homo sapiens
  siRNA target sequence for HMGCR (NM_000859.1,729-747).
cgcgagggtcgtccaattt

SEQ ID NO: 220594 - DNA, 19 bp, Homo sapiens
  siRNA target sequence for HMGCR (NM_000859.1,893-911).
cagtacagcagatacttct

SEQ ID NO: 220595 - DNA, 19 bp, Homo sapiens
  siRNA target sequence for HMGCR (NM_000859.1,947-965).
gagaattgaaccaagtgtt

SEQ ID NO: 220596 - DNA, 19 bp, Homo sapiens
  siRNA target sequence for HMGCR (NM_000859.1,967-985).
ccctctggcagttttatct

SEQ ID NO: 220597 - DNA, 19 bp, Homo sapiens
  siRNA target sequence for HMGCR (NM_000859.1,1041-1059).
cttctggctgtcaagtaca

SEQ ID NO: 220598 - DNA, 19 bp, Homo sapiens
  siRNA target sequence for HMGCR (NM_000859.1,1117-1135).
ctcctgtagtgacacaaaa

SEQ ID NO: 220599 - DNA, 19 bp, Homo sapiens
  siRNA target sequence for HMGCR (NM_000859.1,1136-1154).
gaaagtcccagacaattgt

SEQ ID NO: 220600 - DNA, 19 bp, Homo sapiens
  siRNA target sequence for HMGCR (NM_000859.1,1142-1160).
cccagacaattgttgtaga

SEQ ID NO: 220601 - DNA, 19 bp, Homo sapiens
  siRNA target sequence for HMGCR (NM_000859.1,1153-1171).
gttgtagacgtgaacctat

SEQ ID NO: 220602 - DNA, 19 bp, Homo sapiens
  siRNA target sequence for HMGCR (NM_000859.1,1218-1236).
gggataaaccgagaaagaa

SEQ ID NO: 220603 - DNA, 19 bp, Homo sapiens
  siRNA target sequence for HMGCR (NM_000859.1,1310-1328).
ctccttactcgatacttca

SEQ ID NO: 220604 - DNA, 19 bp, Homo sapiens
  siRNA target sequence for HMGCR (NM_000859.1,1369-1387).
gggaacctcggcctaatga

SEQ ID NO: 220605 - DNA, 19 bp, Homo sapiens
  siRNA target sequence for HMGCR (NM_000859.1,1370-1388).
ggaacctcggcctaatgaa

SEQ ID NO: 220606 - DNA, 19 bp, Homo sapiens
  siRNA target sequence for HMGCR (NM_000859.1,1374-1392).
cctcggcctaatgaagaat

SEQ ID NO: 220607 - DNA, 19 bp, Homo sapiens
  siRNA target sequence for HMGCR (NM_000859.1,1418-1436).
gaaaggtgcaaaattcctt

SEQ ID NO: 220608 - DNA, 19 bp, Homo sapiens
  siRNA target sequence for HMGCR (NM_000859.1,1444-1462).
ctgagatcatccagttagt

SEQ ID NO: 220609 - DNA, 19 bp, Homo sapiens
  siRNA target sequence for HMGCR (NM_000859.1,1448-1466).
gatcatccagttagtcaat

SEQ ID NO: 220610 - DNA, 19 bp, Homo sapiens
  siRNA target sequence for HMGCR (NM_000859.1,1479-1497).
ccagcctacaagttggaaa

SEQ ID NO: 220611 - DNA, 19 bp, Homo sapiens
  siRNA target sequence for HMGCR (NM_000859.1,1512-1530).
catgagcgtggtgtatcta

SEQ ID NO: 220612 - DNA, 19 bp, Homo sapiens
  siRNA target sequence for HMGCR (NM_000859.1,1528-1546).
ctattcgccgacagttact

SEQ ID NO: 220613 - DNA, 19 bp, Homo sapiens
  siRNA target sequence for HMGCR (NM_000859.1,1556-1574).
gctttcagaaccttcttct

SEQ ID NO: 220614 - DNA, 19 bp, Homo sapiens
  siRNA target sequence for HMGCR (NM_000859.1,1583-1601).
cctaccttacagggattat

SEQ ID NO: 220615 - DNA, 19 bp, Homo sapiens
  siRNA target sequence for HMGCR (NM_000859.1,1584-1602).
ctaccttacagggattata

SEQ ID NO: 220616 - DNA, 19 bp, Homo sapiens
  siRNA target sequence for HMGCR (NM_000859.1,1621-1639).
gagcttgttgtgagaatgt

SEQ ID NO: 220617 - DNA, 19 bp, Homo sapiens
  siRNA target sequence for HMGCR (NM_000859.1,1623-1641).
gcttgttgtgagaatgtta

SEQ ID NO: 220618 - DNA, 19 bp, Homo sapiens
  siRNA target sequence for HMGCR (NM_000859.1,1624-1642).
cttgttgtgagaatgttat

SEQ ID NO: 220619 - DNA, 19 bp, Homo sapiens
  siRNA target sequence for HMGCR (NM_000859.1,1675-1693).
gacccctttgcttagatga

SEQ ID NO: 220620 - DNA, 19 bp, Homo sapiens
  siRNA target sequence for HMGCR (NM_000859.1,1678-1696).
ccctttgcttagatgaaaa

SEQ ID NO: 220621 - DNA, 19 bp, Homo sapiens
  siRNA target sequence for HMGCR (NM_000859.1,1706-1724).
ggttccaatggcaacaaca

SEQ ID NO: 220622 - DNA, 19 bp, Homo sapiens
  siRNA target sequence for HMGCR (NM_000859.1,1887-1905).
gaagggttcgcagtgataa

SEQ ID NO: 220623 - DNA, 19 bp, Homo sapiens
  siRNA target sequence for HMGCR (NM_000859.1,1891-1909).
ggttcgcagtgataaagga

SEQ ID NO: 220624 - DNA, 19 bp, Homo sapiens
  siRNA target sequence for HMGCR (NM_000859.1,1936-1954).
cacgtctacagaaacttca

SEQ ID NO: 220625 - DNA, 19 bp, Homo sapiens
  siRNA target sequence for HMGCR (NM_000859.1,1946-1964).
gaaacttcatacaagtata

SEQ ID NO: 220626 - DNA, 19 bp, Homo sapiens
  siRNA target sequence for HMGCR (NM_000859.1,1965-1983).
gctggacgcaacctttata

SEQ ID NO: 220627 - DNA, 19 bp, Homo sapiens
  siRNA target sequence for HMGCR (NM_000859.1,1966-1984).
ctggacgcaacctttatat

SEQ ID NO: 220628 - DNA, 19 bp, Homo sapiens
  siRNA target sequence for HMGCR (NM_000859.1,2015-2033).
ggggatgaacatgatttca

SEQ ID NO: 220629 - DNA, 19 bp, Homo sapiens
  siRNA target sequence for HMGCR (NM_000859.1,2056-2074).
caaaacttcacgagtattt

SEQ ID NO: 220630 - DNA, 19 bp, Homo sapiens
  siRNA target sequence for HMGCR (NM_000859.1,2094-2112).
gccgttagtggtaactatt

SEQ ID NO: 220631 - DNA, 19 bp, Homo sapiens
  siRNA target sequence for HMGCR (NM_000859.1,2096-2114).
cgttagtggtaactattgt

SEQ ID NO: 220632 - DNA, 19 bp, Homo sapiens
  siRNA target sequence for HMGCR (NM_000859.1,2127-2145).
cctgctgctataaattgga

SEQ ID NO: 220633 - DNA, 19 bp, Homo sapiens
  siRNA target sequence for HMGCR (NM_000859.1,2128-2146).
ctgctgctataaattggat

SEQ ID NO: 220634 - DNA, 19 bp, Homo sapiens
  siRNA target sequence for HMGCR (NM_000859.1,2230-2248).
ctatgattgaggtcaacat

SEQ ID NO: 220635 - DNA, 19 bp, Homo sapiens
  siRNA target sequence for HMGCR (NM_000859.1,2367-2385).
ggtagttcaaactgtatta

SEQ ID NO: 220636 - DNA, 19 bp, Homo sapiens
  siRNA target sequence for HMGCR (NM_000859.1,2398-2416).
caagtggtcccacaaatga

SEQ ID NO: 220637 - DNA, 19 bp, Homo sapiens
  siRNA target sequence for HMGCR (NM_000859.1,2403-2421).
ggtcccacaaatgaagatt

SEQ ID NO: 220638 - DNA, 19 bp, Homo sapiens
  siRNA target sequence for HMGCR (NM_000859.1,2559-2577).
cagcttgcccgaattgtgt

SEQ ID NO: 220639 - DNA, 19 bp, Homo sapiens
  siRNA target sequence for HMGCR (NM_000859.1,2592-2610).
gctggggaattgtcactta

SEQ ID NO: 220640 - DNA, 19 bp, Homo sapiens
  siRNA target sequence for HMGCR (NM_000859.1,2593-2611).
ctggggaattgtcacttat

SEQ ID NO: 220641 - DNA, 19 bp, Homo sapiens
  siRNA target sequence for HMGCR (NM_000859.1,2623-2641).
cagcaggacatcttgtcaa

SEQ ID NO: 220642 - DNA, 19 bp, Homo sapiens
  siRNA target sequence for HMGCR (NM_000859.1,2625-2643).
gcaggacatcttgtcaaaa

SEQ ID NO: 220643 - DNA, 19 bp, Homo sapiens
  siRNA target sequence for HMGCR (NM_000859.1,2655-2673).
cacaacaggtcgaagatca

SEQ ID NO: 220644 - DNA, 19 bp, Homo sapiens
  siRNA target sequence for HMGCR (NM_000859.1,2660-2678).
caggtcgaagatcaattta

SEQ ID NO: 220645 - DNA, 19 bp, Homo sapiens
  siRNA target sequence for HMGCR (NM_000859.1,2663-2681).
gtcgaagatcaatttacaa

SEQ ID NO: 220646 - DNA, 19 bp, Homo sapiens
  siRNA target sequence for HMGCR (NM_000859.1,2665-2683).
cgaagatcaatttacaaga

SEQ ID NO: 220647 - DNA, 19 bp, Homo sapiens
  siRNA target sequence for GPD1 (NM_005276.2,138-156).
ggtgaccatgtgggtattt

SEQ ID NO: 220648 - DNA, 19 bp, Homo sapiens
  siRNA target sequence for GPD1 (NM_005276.2,200-218).
cgcagcatgagaatgtcaa

SEQ ID NO: 220649 - DNA, 19 bp, Homo sapiens
  siRNA target sequence for GPD1 (NM_005276.2,201-219).
gcagcatgagaatgtcaaa

SEQ ID NO: 220650 - DNA, 19 bp, Homo sapiens
  siRNA target sequence for GPD1 (NM_005276.2,319-337).
cagttcatcggcaagatct

SEQ ID NO: 220651 - DNA, 19 bp, Homo sapiens
  siRNA target sequence for GPD1 (NM_005276.2,369-387).
cgccactggcatatctctt

SEQ ID NO: 220652 - DNA, 19 bp, Homo sapiens
  siRNA target sequence for GPD1 (NM_005276.2,370-388).
gccactggcatatctctta

SEQ ID NO: 220653 - DNA, 19 bp, Homo sapiens
  siRNA target sequence for GPD1 (NM_005276.2,372-390).
cactggcatatctcttatt

SEQ ID NO: 220654 - DNA, 19 bp, Homo sapiens
  siRNA target sequence for GPD1 (NM_005276.2,374-392).
ctggcatatctcttattaa

SEQ ID NO: 220655 - DNA, 19 bp, Homo sapiens
  siRNA target sequence for GPD1 (NM_005276.2,423-441).
gctcatctcggaagtgatt

SEQ ID NO: 220656 - DNA, 19 bp, Homo sapiens
  siRNA target sequence for GPD1 (NM_005276.2,632-650).
gtggagccttaaagaatgt

SEQ ID NO: 220657 - DNA, 19 bp, Homo sapiens
  siRNA target sequence for GPD1 (NM_005276.2,635-653).
gagccttaaagaatgtagt

SEQ ID NO: 220658 - DNA, 19 bp, Homo sapiens
  siRNA target sequence for GPD1 (NM_005276.2,805-823).
gttgctgacctgatcacta

SEQ ID NO: 220659 - DNA, 19 bp, Homo sapiens
  siRNA target sequence for GPD1 (NM_005276.2,1030-1048).
cagccagtgggtgaattca

SEQ ID NO: 220660 - DNA, 19 bp, Homo sapiens
  siRNA target sequence for KIAA0089 (NM_015141.2,118-136).
gttgcaaaaataattggta

SEQ ID NO: 220661 - DNA, 19 bp, Homo sapiens
  siRNA target sequence for KIAA0089 (NM_015141.2,218-236).
cagacatcataaataatga

SEQ ID NO: 220662 - DNA, 19 bp, Homo sapiens
  siRNA target sequence for KIAA0089 (NM_015141.2,285-303).
ggttgccatgtcaaatctt

SEQ ID NO: 220663 - DNA, 19 bp, Homo sapiens
  siRNA target sequence for KIAA0089 (NM_015141.2,286-304).
gttgccatgtcaaatctta

SEQ ID NO: 220664 - DNA, 19 bp, Homo sapiens
  siRNA target sequence for KIAA0089 (NM_015141.2,558-576).
caccatcggcagcaaagta

SEQ ID NO: 220665 - DNA, 19 bp, Homo sapiens
  siRNA target sequence for KIAA0089 (NM_015141.2,560-578).
ccatcggcagcaaagtaat

SEQ ID NO: 220666 - DNA, 19 bp, Homo sapiens
  siRNA target sequence for KIAA0089 (NM_015141.2,609-627).
gcagactccaaattttcga

SEQ ID NO: 220667 - DNA, 19 bp, Homo sapiens
  siRNA target sequence for KIAA0089 (NM_015141.2,610-628).
cagactccaaattttcgaa

SEQ ID NO: 220668 - DNA, 19 bp, Homo sapiens
  siRNA target sequence for KIAA0089 (NM_015141.2,626-644).
gaattaccgtggttgatga

SEQ ID NO: 220669 - DNA, 19 bp, Homo sapiens
  siRNA target sequence for KIAA0089 (NM_015141.2,665-683).
gtggtgcgcttaagaacat

SEQ ID NO: 220670 - DNA, 19 bp, Homo sapiens
  siRNA target sequence for KIAA0089 (NM_015141.2,1005-1023).
gggactactggacaagttt

SEQ ID NO: 220671 - DNA, 19 bp, Homo sapiens
  siRNA target sequence for KIAA0089 (NM_015141.2,1061-1079).
gcagaccagttcaagagat

SEQ ID NO: 220672 - DNA, 19 bp, Homo sapiens
  siRNA target sequence for G6PD (NM_000402.2,565-583).
cacacatattcatcatcat

SEQ ID NO: 220673 - DNA, 19 bp, Homo sapiens
  siRNA target sequence for G6PD (NM_000402.2,648-666).
ggccttctgcccgaaaaca

SEQ ID NO: 220674 - DNA, 19 bp, Homo sapiens
  siRNA target sequence for G6PD (NM_000402.2,705-723).
gctgacatccgcaaacaga

SEQ ID NO: 220675 - DNA, 19 bp, Homo sapiens
  siRNA target sequence for G6PD (NM_000402.2,917-935).
ggccgtcaccaagaacatt

SEQ ID NO: 220676 - DNA, 19 bp, Homo sapiens
  siRNA target sequence for G6PD (NM_000402.2,1466-1484).
gtccaccaccgccactttt

SEQ ID NO: 220677 - DNA, 19 bp, Homo sapiens
  siRNA target sequence for G6PD (NM_000402.2,1486-1504).
cagccgtcgtcctctatgt

SEQ ID NO: 220678 - DNA, 19 bp, Homo sapiens
  siRNA target sequence for G6PD (NM_000402.2,1741-1759).
cctacggcaacagatacaa

SEQ ID NO: 220679 - DNA, 19 bp, Homo sapiens
  siRNA target sequence for G6PD (NM_000402.2,1848-1866).
cgtgaggcctggcgtattt

SEQ ID NO: 220680 - DNA, 19 bp, Homo sapiens
  siRNA target sequence for G6PD (NM_000402.2,1851-1869).
gaggcctggcgtattttca

SEQ ID NO: 220681 - DNA, 19 bp, Homo sapiens
  siRNA target sequence for G6PD (NM_000402.2,1907-1925).
gcccatcccctatatttat

SEQ ID NO: 220682 - DNA, 19 bp, Homo sapiens
  siRNA target sequence for CBR1 (NM_001757.1,412-430).
gctgaagtgacgatgaaaa

SEQ ID NO: 220683 - DNA, 19 bp, Homo sapiens
  siRNA target sequence for CBR1 (NM_001757.1,449-467).
gagatgtgtgcacagaatt

SEQ ID NO: 220684 - DNA, 19 bp, Homo sapiens
  siRNA target sequence for CBR1 (NM_001757.1,519-537).
gagcgtcagagcccttaaa

SEQ ID NO: 220685 - DNA, 19 bp, Homo sapiens
  siRNA target sequence for CBR1 (NM_001757.1,523-541).
gtcagagcccttaaaagct

SEQ ID NO: 220686 - DNA, 19 bp, Homo sapiens
  siRNA target sequence for CBR1 (NM_001757.1,602-620).
ggctcatgaacaagtttgt

SEQ ID NO: 220687 - DNA, 19 bp, Homo sapiens
  siRNA target sequence for CBR1 (NM_001757.1,879-897).
gggtccccatggacaattt

SEQ ID NO: 220688 - DNA, 19 bp, Homo sapiens
  siRNA target sequence for CBR1 (NM_001757.1,881-899).
gtccccatggacaatttgt

SEQ ID NO: 220689 - DNA, 19 bp, Homo sapiens
  siRNA target sequence for CBR1 (NM_001757.1,883-901).
ccccatggacaatttgttt

SEQ ID NO: 220690 - DNA, 19 bp, Homo sapiens
  siRNA target sequence for CBR1 (NM_001757.1,885-903).
ccatggacaatttgtttca

SEQ ID NO: 220691 - DNA, 19 bp, Homo sapiens
  siRNA target sequence for CBR1 (NM_001757.1,902-920).
cagagaagagagttgaaca

SEQ ID NO: 220692 - DNA, 19 bp, Homo sapiens
  siRNA target sequence for CBR3 (NM_001236.2,317-335).
gatccaatgccctttgaca

SEQ ID NO: 220693 - DNA, 19 bp, Homo sapiens
  siRNA target sequence for CBR3 (NM_001236.2,320-338).
ccaatgccctttgacatta

SEQ ID NO: 220694 - DNA, 19 bp, Homo sapiens
  siRNA target sequence for CBR3 (NM_001236.2,392-410).
gagttactgccgataatga

SEQ ID NO: 220695 - DNA, 19 bp, Homo sapiens
  siRNA target sequence for CBR3 (NM_001236.2,394-412).
gttactgccgataatgaaa

SEQ ID NO: 220696 - DNA, 19 bp, Homo sapiens
  siRNA target sequence for CBR3 (NM_001236.2,416-434).
catgggagagtggtgaata

SEQ ID NO: 220697 - DNA, 19 bp, Homo sapiens
  siRNA target sequence for CBR3 (NM_001236.2,419-437).
gggagagtggtgaatatca

SEQ ID NO: 220698 - DNA, 19 bp, Homo sapiens
  siRNA target sequence for CBR3 (NM_001236.2,436-454).
cagtagtttgcagtgttta

SEQ ID NO: 220699 - DNA, 19 bp, Homo sapiens
  siRNA target sequence for CBR3 (NM_001236.2,620-638).
ggggtcacggtcttatcga

SEQ ID NO: 220700 - DNA, 19 bp, Homo sapiens
  siRNA target sequence for CBR3 (NM_001236.2,823-841).
gttggtccatgacaaagtt

SEQ ID NO: 220701 - DNA, 19 bp, Homo sapiens
  siRNA target sequence for HPGD (NM_000860.2,83-101).
cagaggcgctgctgcttaa

SEQ ID NO: 220702 - DNA, 19 bp, Homo sapiens
  siRNA target sequence for HPGD (NM_000860.2,271-289).
ctggacattttggtcaata

SEQ ID NO: 220703 - DNA, 19 bp, Homo sapiens
  siRNA target sequence for HPGD (NM_000860.2,317-335).
gggaaaaaactctgcaaat

SEQ ID NO: 220704 - DNA, 19 bp, Homo sapiens
  siRNA target sequence for HPGD (NM_000860.2,381-399).
catgagtaagcaaaatgga

SEQ ID NO: 220705 - DNA, 19 bp, Homo sapiens
  siRNA target sequence for HPGD (NM_000860.2,400-418).
ggtgaaggcggcatcatta

SEQ ID NO: 220706 - DNA, 19 bp, Homo sapiens
  siRNA target sequence for HPGD (NM_000860.2,401-419).
gtgaaggcggcatcattat

SEQ ID NO: 220707 - DNA, 19 bp, Homo sapiens
  siRNA target sequence for HPGD (NM_000860.2,403-421).
gaaggcggcatcattatca

SEQ ID NO: 220708 - DNA, 19 bp, Homo sapiens
  siRNA target sequence for HPGD (NM_000860.2,406-424).
ggcggcatcattatcaata

SEQ ID NO: 220709 - DNA, 19 bp, Homo sapiens
  siRNA target sequence for HPGD (NM_000860.2,407-425).
gcggcatcattatcaatat

SEQ ID NO: 220710 - DNA, 19 bp, Homo sapiens
  siRNA target sequence for HPGD (NM_000860.2,409-427).
ggcatcattatcaatatgt

SEQ ID NO: 220711 - DNA, 19 bp, Homo sapiens
  siRNA target sequence for HPGD (NM_000860.2,454-472).
gcacagcagccggtttatt

SEQ ID NO: 220712 - DNA, 19 bp, Homo sapiens
  siRNA target sequence for HPGD (NM_000860.2,464-482).
cggtttattgtgcttcaaa

SEQ ID NO: 220713 - DNA, 19 bp, Homo sapiens
  siRNA target sequence for HPGD (NM_000860.2,512-530).
cagcgttggctgctaatct

SEQ ID NO: 220714 - DNA, 19 bp, Homo sapiens
  siRNA target sequence for HPGD (NM_000860.2,514-532).
gcgttggctgctaatctta

SEQ ID NO: 220715 - DNA, 19 bp, Homo sapiens
  siRNA target sequence for HPGD (NM_000860.2,515-533).
cgttggctgctaatcttat

SEQ ID NO: 220716 - DNA, 19 bp, Homo sapiens
  siRNA target sequence for HPGD (NM_000860.2,537-555).
cagtggtgtgagactgaat

SEQ ID NO: 220717 - DNA, 19 bp, Homo sapiens
  siRNA target sequence for HPGD (NM_000860.2,615-633).
catgggacaatatatagaa

SEQ ID NO: 220718 - DNA, 19 bp, Homo sapiens
  siRNA target sequence for HPGD (NM_000860.2,640-658).
gatcatatcaaggatatga

SEQ ID NO: 220719 - DNA, 19 bp, Homo sapiens
  siRNA target sequence for HPGD (NM_000860.2,657-675).
gattaaatactatggaatt

SEQ ID NO: 220720 - DNA, 19 bp, Homo sapiens
  siRNA target sequence for HPGD (NM_000860.2,695-713).
ccaatggattgataacact

SEQ ID NO: 220721 - DNA, 19 bp, Homo sapiens
  siRNA target sequence for HPGD (NM_000860.2,701-719).
gattgataacactcattga

SEQ ID NO: 220722 - DNA, 19 bp, Homo sapiens
  siRNA target sequence for HPGD (NM_000860.2,705-723).
gataacactcattgaagat

SEQ ID NO: 220723 - DNA, 19 bp, Homo sapiens
  siRNA target sequence for HPGD (NM_000860.2,736-754).
ggtgctattatgaagatca

SEQ ID NO: 220724 - DNA, 19 bp, Homo sapiens
  siRNA target sequence for HPGD (NM_000860.2,758-776).
cttctaagggaattcattt

SEQ ID NO: 220725 - DNA, 19 bp, Homo sapiens
  siRNA target sequence for MDH1 (NM_005917.2,90-108).
gcagctggtcaaattgcat

SEQ ID NO: 220726 - DNA, 19 bp, Homo sapiens
  siRNA target sequence for MDH1 (NM_005917.2,91-109).
cagctggtcaaattgcata

SEQ ID NO: 220727 - DNA, 19 bp, Homo sapiens
  siRNA target sequence for MDH1 (NM_005917.2,93-111).
gctggtcaaattgcatatt

SEQ ID NO: 220728 - DNA, 19 bp, Homo sapiens
  siRNA target sequence for MDH1 (NM_005917.2,168-186).
cttgtgctgttggatatca

SEQ ID NO: 220729 - DNA, 19 bp, Homo sapiens
  siRNA target sequence for MDH1 (NM_005917.2,206-224).
ggacggtgtcctaatggaa

SEQ ID NO: 220730 - DNA, 19 bp, Homo sapiens
  siRNA target sequence for MDH1 (NM_005917.2,393-411).
ggtgcagccttagataaat

SEQ ID NO: 220731 - DNA, 19 bp, Homo sapiens
  siRNA target sequence for MDH1 (NM_005917.2,394-412).
gtgcagccttagataaata

SEQ ID NO: 220732 - DNA, 19 bp, Homo sapiens
  siRNA target sequence for MDH1 (NM_005917.2,405-423).
gataaatacgccaagaagt

SEQ ID NO: 220733 - DNA, 19 bp, Homo sapiens
  siRNA target sequence for MDH1 (NM_005917.2,415-433).
ccaagaagtcagttaaggt

SEQ ID NO: 220734 - DNA, 19 bp, Homo sapiens
  siRNA target sequence for MDH1 (NM_005917.2,416-434).
caagaagtcagttaaggtt

SEQ ID NO: 220735 - DNA, 19 bp, Homo sapiens
  siRNA target sequence for MDH1 (NM_005917.2,419-437).
gaagtcagttaaggttatt

SEQ ID NO: 220736 - DNA, 19 bp, Homo sapiens
  siRNA target sequence for MDH1 (NM_005917.2,422-440).
gtcagttaaggttattgtt

SEQ ID NO: 220737 - DNA, 19 bp, Homo sapiens
  siRNA target sequence for MDH1 (NM_005917.2,444-462).
ggtaatccagccaatacca

SEQ ID NO: 220738 - DNA, 19 bp, Homo sapiens
  siRNA target sequence for MDH1 (NM_005917.2,530-548).
ggatcacaaccgagctaaa

SEQ ID NO: 220739 - DNA, 19 bp, Homo sapiens
  siRNA target sequence for MDH1 (NM_005917.2,539-557).
ccgagctaaagctcaaatt

SEQ ID NO: 220740 - DNA, 19 bp, Homo sapiens
  siRNA target sequence for MDH1 (NM_005917.2,550-568).
ctcaaattgctcttaaact

SEQ ID NO: 220741 - DNA, 19 bp, Homo sapiens
  siRNA target sequence for MDH1 (NM_005917.2,571-589).
gtgtgactgctaatgatgt

SEQ ID NO: 220742 - DNA, 19 bp, Homo sapiens
  siRNA target sequence for MDH1 (NM_005917.2,573-591).
gtgactgctaatgatgtaa

SEQ ID NO: 220743 - DNA, 19 bp, Homo sapiens
  siRNA target sequence for MDH1 (NM_005917.2,667-685).
gaaaggaagttggtgttta

SEQ ID NO: 220744 - DNA, 19 bp, Homo sapiens
  siRNA target sequence for MDH1 (NM_005917.2,706-724).
gctggctcaagggagaatt

SEQ ID NO: 220745 - DNA, 19 bp, Homo sapiens
  siRNA target sequence for MDH1 (NM_005917.2,758-776).
catcaaggctcgaaaacta

SEQ ID NO: 220746 - DNA, 19 bp, Homo sapiens
  siRNA target sequence for MDH1 (NM_005917.2,857-875).
gtccatgggtgttatctct

SEQ ID NO: 220747 - DNA, 19 bp, Homo sapiens
  siRNA target sequence for MDH1 (NM_005917.2,911-929).
ctactcattccctgttgta

SEQ ID NO: 220748 - DNA, 19 bp, Homo sapiens
  siRNA target sequence for MDH1 (NM_005917.2,916-934).
cattccctgttgtaatcaa

SEQ ID NO: 220749 - DNA, 19 bp, Homo sapiens
  siRNA target sequence for MDH1 (NM_005917.2,920-938).
ccctgttgtaatcaagaat

SEQ ID NO: 220750 - DNA, 19 bp, Homo sapiens
  siRNA target sequence for MDH1 (NM_005917.2,924-942).
gttgtaatcaagaataaga

SEQ ID NO: 220751 - DNA, 19 bp, Homo sapiens
  siRNA target sequence for MDH1 (NM_005917.2,941-959).
gacctggaagtttgttgaa

SEQ ID NO: 220752 - DNA, 19 bp, Homo sapiens
  siRNA target sequence for MDH1 (NM_005917.2,954-972).
gttgaaggtctccctatta

SEQ ID NO: 220753 - DNA, 19 bp, Homo sapiens
  siRNA target sequence for MDH1 (NM_005917.2,960-978).
ggtctccctattaatgatt

SEQ ID NO: 220754 - DNA, 19 bp, Homo sapiens
  siRNA target sequence for MDH1 (NM_005917.2,963-981).
ctccctattaatgatttct

SEQ ID NO: 220755 - DNA, 19 bp, Homo sapiens
  siRNA target sequence for MDH1 (NM_005917.2,965-983).
ccctattaatgatttctca

SEQ ID NO: 220756 - DNA, 19 bp, Homo sapiens
  siRNA target sequence for MDH1 (NM_005917.2,984-1002).
cgtgagaagatggatctta

SEQ ID NO: 220757 - DNA, 19 bp, Homo sapiens
  siRNA target sequence for MDH2 (NM_005918.2,139-157).
gcacctcggcccagaacaa

SEQ ID NO: 220758 - DNA, 19 bp, Homo sapiens
  siRNA target sequence for MDH2 (NM_005918.2,140-158).
cacctcggcccagaacaat

SEQ ID NO: 220759 - DNA, 19 bp, Homo sapiens
  siRNA target sequence for MDH2 (NM_005918.2,145-163).
cggcccagaacaatgctaa

SEQ ID NO: 220760 - DNA, 19 bp, Homo sapiens
  siRNA target sequence for MDH2 (NM_005918.2,191-209).
catcgggcagccactttca

SEQ ID NO: 220761 - DNA, 19 bp, Homo sapiens
  siRNA target sequence for MDH2 (NM_005918.2,238-256).
gccgcctgaccctctatga

SEQ ID NO: 220762 - DNA, 19 bp, Homo sapiens
  siRNA target sequence for MDH2 (NM_005918.2,239-257).
ccgcctgaccctctatgat

SEQ ID NO: 220763 - DNA, 19 bp, Homo sapiens
  siRNA target sequence for MDH2 (NM_005918.2,240-258).
cgcctgaccctctatgata

SEQ ID NO: 220764 - DNA, 19 bp, Homo sapiens
  siRNA target sequence for MDH2 (NM_005918.2,241-259).
gcctgaccctctatgatat

SEQ ID NO: 220765 - DNA, 19 bp, Homo sapiens
  siRNA target sequence for MDH2 (NM_005918.2,302-320).
gaccaaagccgctgtgaaa

SEQ ID NO: 220766 - DNA, 19 bp, Homo sapiens
  siRNA target sequence for MDH2 (NM_005918.2,350-368).
ctgcctgaaaggttgtgat

SEQ ID NO: 220767 - DNA, 19 bp, Homo sapiens
  siRNA target sequence for MDH2 (NM_005918.2,503-521).
cattgccaatccggttaat

SEQ ID NO: 220768 - DNA, 19 bp, Homo sapiens
  siRNA target sequence for MDH2 (NM_005918.2,507-525).
gccaatccggttaattcca

SEQ ID NO: 220769 - DNA, 19 bp, Homo sapiens
  siRNA target sequence for MDH2 (NM_005918.2,531-549).
cccatcacagcagaagttt

SEQ ID NO: 220770 - DNA, 19 bp, Homo sapiens
  siRNA target sequence for MDH2 (NM_005918.2,532-550).
ccatcacagcagaagtttt

SEQ ID NO: 220771 - DNA, 19 bp, Homo sapiens
  siRNA target sequence for MDH2 (NM_005918.2,903-921).
gtggaatgttccttcgtta

SEQ ID NO: 220772 - DNA, 19 bp, Homo sapiens
  siRNA target sequence for MDH2 (NM_005918.2,906-924).
gaatgttccttcgttaagt

SEQ ID NO: 220773 - DNA, 19 bp, Homo sapiens
  siRNA target sequence for MDH2 (NM_005918.2,993-1011).
ctgggcatcggcaaagtct

SEQ ID NO: 220774 - DNA, 19 bp, Homo sapiens
  siRNA target sequence for MDH2 (NM_005918.2,1003-1021).
gcaaagtctcctcttttga

SEQ ID NO: 220775 - DNA, 19 bp, Homo sapiens
  siRNA target sequence for MDH2 (NM_005918.2,1012-1030).
cctcttttgaggagaagat

SEQ ID NO: 220776 - DNA, 19 bp, Homo sapiens
  siRNA target sequence for SPR (NM_003124.2,304-322).
gactgctgcttatcaacaa

SEQ ID NO: 220777 - DNA, 19 bp, Homo sapiens
  siRNA target sequence for SPR (NM_003124.2,541-559).
gaaaggctgctcgtgatat

SEQ ID NO: 220778 - DNA, 19 bp, Homo sapiens
  siRNA target sequence for SPR (NM_003124.2,786-804).
cacgtggacttctatgaca

SEQ ID NO: 220779 - DNA, 19 bp, Homo sapiens
  siRNA target sequence for SPR (NM_003124.2,788-806).
cgtggacttctatgacaaa

SEQ ID NO: 220780 - DNA, 19 bp, Homo sapiens
  siRNA target sequence for SPR (NM_003124.2,789-807).
gtggacttctatgacaaat

SEQ ID NO: 220781 - DNA, 19 bp, Homo sapiens
  siRNA target sequence for PHGDH (NM_006623.2,186-204).
cttgctgccggaagatctt

SEQ ID NO: 220782 - DNA, 19 bp, Homo sapiens
  siRNA target sequence for PHGDH (NM_006623.2,774-792).
cgacaggcttgctgaatga

SEQ ID NO: 220783 - DNA, 19 bp, Homo sapiens
  siRNA target sequence for PHGDH (NM_006623.2,1051-1069).
catggtgaaggggaaatct

SEQ ID NO: 220784 - DNA, 19 bp, Homo sapiens
  siRNA target sequence for PHGDH (NM_006623.2,1190-1208).
gggaccatccaggtgataa

SEQ ID NO: 220785 - DNA, 19 bp, Homo sapiens
  siRNA target sequence for UGDH (NM_003359.1,105-123).
catcggtgcaggctatgtt

SEQ ID NO: 220786 - DNA, 19 bp, Homo sapiens
  siRNA target sequence for UGDH (NM_003359.1,168-186).
cagggtaacggttgttgat

SEQ ID NO: 220787 - DNA, 19 bp, Homo sapiens
  siRNA target sequence for UGDH (NM_003359.1,170-188).
gggtaacggttgttgatgt

SEQ ID NO: 220788 - DNA, 19 bp, Homo sapiens
  siRNA target sequence for UGDH (NM_003359.1,176-194).
cggttgttgatgtcaatga

SEQ ID NO: 220789 - DNA, 19 bp, Homo sapiens
  siRNA target sequence for UGDH (NM_003359.1,210-228).
gtggaattctcctacactt

SEQ ID NO: 220790 - DNA, 19 bp, Homo sapiens
  siRNA target sequence for UGDH (NM_003359.1,218-236).
ctcctacacttcctattta

SEQ ID NO: 220791 - DNA, 19 bp, Homo sapiens
  siRNA target sequence for UGDH (NM_003359.1,221-239).
ctacacttcctatttatga

SEQ ID NO: 220792 - DNA, 19 bp, Homo sapiens
  siRNA target sequence for UGDH (NM_003359.1,266-284).
cctgtcgaggaaaaaatct

SEQ ID NO: 220793 - DNA, 19 bp, Homo sapiens
  siRNA target sequence for UGDH (NM_003359.1,267-285).
ctgtcgaggaaaaaatctt

SEQ ID NO: 220794 - DNA, 19 bp, Homo sapiens
  siRNA target sequence for UGDH (NM_003359.1,269-287).
gtcgaggaaaaaatctttt

SEQ ID NO: 220795 - DNA, 19 bp, Homo sapiens
  siRNA target sequence for UGDH (NM_003359.1,319-337).
gaagctgatcttgtattta

SEQ ID NO: 220796 - DNA, 19 bp, Homo sapiens
  siRNA target sequence for UGDH (NM_003359.1,341-359).
ctgtgaatactccaacaaa

SEQ ID NO: 220797 - DNA, 19 bp, Homo sapiens
  siRNA target sequence for UGDH (NM_003359.1,352-370).
ccaacaaaaacctatggaa

SEQ ID NO: 220798 - DNA, 19 bp, Homo sapiens
  siRNA target sequence for UGDH (NM_003359.1,353-371).
caacaaaaacctatggaat

SEQ ID NO: 220799 - DNA, 19 bp, Homo sapiens
  siRNA target sequence for UGDH (NM_003359.1,383-401).
gggcagcagatctgaagta

SEQ ID NO: 220800 - DNA, 19 bp, Homo sapiens
  siRNA target sequence for UGDH (NM_003359.1,386-404).
cagcagatctgaagtatat

SEQ ID NO: 220801 - DNA, 19 bp, Homo sapiens
  siRNA target sequence for UGDH (NM_003359.1,416-434).
ctagacgcattgtgcaaaa

SEQ ID NO: 220802 - DNA, 19 bp, Homo sapiens
  siRNA target sequence for UGDH (NM_003359.1,494-512).
gtatccgtcgcatatttga

SEQ ID NO: 220803 - DNA, 19 bp, Homo sapiens
  siRNA target sequence for UGDH (NM_003359.1,500-518).
gtcgcatatttgatgcaaa

SEQ ID NO: 220804 - DNA, 19 bp, Homo sapiens
  siRNA target sequence for UGDH (NM_003359.1,657-675).
ggccctgtgtgctgtatat

SEQ ID NO: 220805 - DNA, 19 bp, Homo sapiens
  siRNA target sequence for UGDH (NM_003359.1,659-677).
ccctgtgtgctgtatatga

SEQ ID NO: 220806 - DNA, 19 bp, Homo sapiens
  siRNA target sequence for UGDH (NM_003359.1,735-753).
caaactggcagcaaatgct

SEQ ID NO: 220807 - DNA, 19 bp, Homo sapiens
  siRNA target sequence for UGDH (NM_003359.1,829-847).
gtagcaacagcgattggaa

SEQ ID NO: 220808 - DNA, 19 bp, Homo sapiens
  siRNA target sequence for UGDH (NM_003359.1,957-975).
gccagaagtagctcgttat

SEQ ID NO: 220809 - DNA, 19 bp, Homo sapiens
  siRNA target sequence for UGDH (NM_003359.1,958-976).
ccagaagtagctcgttatt

SEQ ID NO: 220810 - DNA, 19 bp, Homo sapiens
  siRNA target sequence for UGDH (NM_003359.1,977-995).
ggcagcaggtcatagacat

SEQ ID NO: 220811 - DNA, 19 bp, Homo sapiens
  siRNA target sequence for UGDH (NM_003359.1,1017-1035).
gtttgcttcccggatcata

SEQ ID NO: 220812 - DNA, 19 bp, Homo sapiens
  siRNA target sequence for UGDH (NM_003359.1,1021-1039).
gcttcccggatcatagata

SEQ ID NO: 220813 - DNA, 19 bp, Homo sapiens
  siRNA target sequence for UGDH (NM_003359.1,1025-1043).
cccggatcatagatagtct

SEQ ID NO: 220814 - DNA, 19 bp, Homo sapiens
  siRNA target sequence for UGDH (NM_003359.1,1029-1047).
gatcatagatagtctgttt

SEQ ID NO: 220815 - DNA, 19 bp, Homo sapiens
  siRNA target sequence for UGDH (NM_003359.1,1032-1050).
catagatagtctgtttaat

SEQ ID NO: 220816 - DNA, 19 bp, Homo sapiens
  siRNA target sequence for UGDH (NM_003359.1,1072-1090).
gctattttgggatttgcat

SEQ ID NO: 220817 - DNA, 19 bp, Homo sapiens
  siRNA target sequence for UGDH (NM_003359.1,1115-1133).
gagaatcttctagtatata

SEQ ID NO: 220818 - DNA, 19 bp, Homo sapiens
  siRNA target sequence for UGDH (NM_003359.1,1117-1135).
gaatcttctagtatatata

SEQ ID NO: 220819 - DNA, 19 bp, Homo sapiens
  siRNA target sequence for UGDH (NM_003359.1,1159-1177).
ggtgcacatctacatatat

SEQ ID NO: 220820 - DNA, 19 bp, Homo sapiens
  siRNA target sequence for UGDH (NM_003359.1,1193-1211).
ctagggaacaaatagttgt

SEQ ID NO: 220821 - DNA, 19 bp, Homo sapiens
  siRNA target sequence for UGDH (NM_003359.1,1255-1273).
cggctcgtgaccatttcca

SEQ ID NO: 220822 - DNA, 19 bp, Homo sapiens
  siRNA target sequence for UGDH (NM_003359.1,1265-1283).
ccatttccaaggatccata

SEQ ID NO: 220823 - DNA, 19 bp, Homo sapiens
  siRNA target sequence for UGDH (NM_003359.1,1266-1284).
catttccaaggatccatat

SEQ ID NO: 220824 - DNA, 19 bp, Homo sapiens
  siRNA target sequence for UGDH (NM_003359.1,1303-1321).
catgctgttgttatttgca

SEQ ID NO: 220825 - DNA, 19 bp, Homo sapiens
  siRNA target sequence for UGDH (NM_003359.1,1320-1338).
cactgagtgggacatgttt

SEQ ID NO: 220826 - DNA, 19 bp, Homo sapiens
  siRNA target sequence for UGDH (NM_003359.1,1322-1340).
ctgagtgggacatgtttaa

SEQ ID NO: 220827 - DNA, 19 bp, Homo sapiens
  siRNA target sequence for UGDH (NM_003359.1,1328-1346).
gggacatgtttaaggaatt

SEQ ID NO: 220828 - DNA, 19 bp, Homo sapiens
  siRNA target sequence for UGDH (NM_003359.1,1332-1350).
catgtttaaggaattggat

SEQ ID NO: 220829 - DNA, 19 bp, Homo sapiens
  siRNA target sequence for UGDH (NM_003359.1,1335-1353).
gtttaaggaattggattat

SEQ ID NO: 220830 - DNA, 19 bp, Homo sapiens
  siRNA target sequence for UGDH (NM_003359.1,1347-1365).
ggattatgaacgcattcat

SEQ ID NO: 220831 - DNA, 19 bp, Homo sapiens
  siRNA target sequence for UGDH (NM_003359.1,1348-1366).
gattatgaacgcattcata

SEQ ID NO: 220832 - DNA, 19 bp, Homo sapiens
  siRNA target sequence for UGDH (NM_003359.1,1420-1438).
ctccacaatgaactacaaa

SEQ ID NO: 220833 - DNA, 19 bp, Homo sapiens
  siRNA target sequence for UGDH (NM_003359.1,1465-1483).
ggcaaaaaggtgtcttcaa

SEQ ID NO: 220834 - DNA, 19 bp, Homo sapiens
  siRNA target sequence for UGDH (NM_003359.1,1466-1484).
gcaaaaaggtgtcttcaaa

SEQ ID NO: 220835 - DNA, 19 bp, Homo sapiens
  siRNA target sequence for UGDH (NM_003359.1,1507-1525).
ggtgaaattccgaagttta

SEQ ID NO: 220836 - DNA, 19 bp, Homo sapiens
  siRNA target sequence for UGDH (NM_003359.1,1517-1535).
cgaagtttagtcttcaaga

SEQ ID NO: 220837 - DNA, 19 bp, Homo sapiens
  siRNA target sequence for UGDH (NM_003359.1,1531-1549).
caagatccacctaacaaga

SEQ ID NO: 220838 - DNA, 19 bp, Homo sapiens
  siRNA target sequence for BDH (NM_004051.2,280-298).
gtcacggctcccaggaaaa

SEQ ID NO: 220839 - DNA, 19 bp, Homo sapiens
  siRNA target sequence for BDH (NM_004051.2,327-345).
gagcaagacgcccactatt

SEQ ID NO: 220840 - DNA, 19 bp, Homo sapiens
  siRNA target sequence for BDH (NM_004051.2,330-348).
caagacgcccactattgct

SEQ ID NO: 220841 - DNA, 19 bp, Homo sapiens
  siRNA target sequence for BDH (NM_004051.2,341-359).
ctattgcttggttctactt

SEQ ID NO: 220842 - DNA, 19 bp, Homo sapiens
  siRNA target sequence for BDH (NM_004051.2,370-388).
gattggccgtcggacttat

SEQ ID NO: 220843 - DNA, 19 bp, Homo sapiens
  siRNA target sequence for BDH (NM_004051.2,464-482).
gccaagcatctgcattcaa

SEQ ID NO: 220844 - DNA, 19 bp, Homo sapiens
  siRNA target sequence for BDH (NM_004051.2,466-484).
caagcatctgcattcaaaa

SEQ ID NO: 220845 - DNA, 19 bp, Homo sapiens
  siRNA target sequence for BDH (NM_004051.2,544-562).
gctggacagcctaaacagt

SEQ ID NO: 220846 - DNA, 19 bp, Homo sapiens
  siRNA target sequence for BDH (NM_004051.2,767-785).
gtgcggatgacgaaatcct

SEQ ID NO: 220847 - DNA, 19 bp, Homo sapiens
  siRNA target sequence for BDH (NM_004051.2,769-787).
gcggatgacgaaatccttt

SEQ ID NO: 220848 - DNA, 19 bp, Homo sapiens
  siRNA target sequence for BDH (NM_004051.2,908-926).
gactgcctgcgctatgaga

SEQ ID NO: 220849 - DNA, 19 bp, Homo sapiens
  siRNA target sequence for BDH (NM_004051.2,912-930).
gcctgcgctatgagatgta

SEQ ID NO: 220850 - DNA, 19 bp, Homo sapiens
  siRNA target sequence for BDH (NM_004051.2,1010-1028).
caggccatcgccaagaaga

SEQ ID NO: 220851 - DNA, 19 bp, Homo sapiens
  siRNA target sequence for BDH (NM_004051.2,1063-1081).
ctacggcaagaagtacttt

SEQ ID NO: 220852 - DNA, 19 bp, Homo sapiens
  siRNA target sequence for BDH (NM_004051.2,1251-1269).
gagccatctccgacatgat

SEQ ID NO: 220853 - DNA, 19 bp, Homo sapiens
  siRNA target sequence for BDH (NM_004051.2,1253-1271).
gccatctccgacatgatct

SEQ ID NO: 220854 - DNA, 19 bp, Homo sapiens
  siRNA target sequence for BDH (NM_004051.2,1254-1272).
ccatctccgacatgatcta

SEQ ID NO: 220855 - DNA, 19 bp, Homo sapiens
  siRNA target sequence for ME2 (NM_002396.2,92-110).
gttgtcccggttaagagta

SEQ ID NO: 220856 - DNA, 19 bp, Homo sapiens
  siRNA target sequence for ME2 (NM_002396.2,95-113).
gtcccggttaagagtagtt

SEQ ID NO: 220857 - DNA, 19 bp, Homo sapiens
  siRNA target sequence for ME2 (NM_002396.2,108-126).
gtagtttccaccacttgta

SEQ ID NO: 220858 - DNA, 19 bp, Homo sapiens
  siRNA target sequence for ME2 (NM_002396.2,257-275).
caaaatagagacacaagat

SEQ ID NO: 220859 - DNA, 19 bp, Homo sapiens
  siRNA target sequence for ME2 (NM_002396.2,663-681).
ggaatacggcctgatagat

SEQ ID NO: 220860 - DNA, 19 bp, Homo sapiens
  siRNA target sequence for ME2 (NM_002396.2,682-700).
gcctgccagtgtgtattga

SEQ ID NO: 220861 - DNA, 19 bp, Homo sapiens
  siRNA target sequence for ME2 (NM_002396.2,683-701).
cctgccagtgtgtattgat

SEQ ID NO: 220862 - DNA, 19 bp, Homo sapiens
  siRNA target sequence for ME2 (NM_002396.2,711-729).
gataatatcgcactcttaa

SEQ ID NO: 220863 - DNA, 19 bp, Homo sapiens
  siRNA target sequence for ME2 (NM_002396.2,763-781).
gagatcgcacacaacagta

SEQ ID NO: 220864 - DNA, 19 bp, Homo sapiens
  siRNA target sequence for ME2 (NM_002396.2,769-787).
gcacacaacagtatgatga

SEQ ID NO: 220865 - DNA, 19 bp, Homo sapiens
  siRNA target sequence for ME2 (NM_002396.2,779-797).
gtatgatgacctgattgat

SEQ ID NO: 220866 - DNA, 19 bp, Homo sapiens
  siRNA target sequence for ME2 (NM_002396.2,829-847).
gccggaacacactcattca

SEQ ID NO: 220867 - DNA, 19 bp, Homo sapiens
  siRNA target sequence for ME2 (NM_002396.2,831-849).
cggaacacactcattcagt

SEQ ID NO: 220868 - DNA, 19 bp, Homo sapiens
  siRNA target sequence for ME2 (NM_002396.2,842-860).
cattcagttcgaagacttt

SEQ ID NO: 220869 - DNA, 19 bp, Homo sapiens
  siRNA target sequence for ME2 (NM_002396.2,848-866).
gttcgaagactttggaaat

SEQ ID NO: 220870 - DNA, 19 bp, Homo sapiens
  siRNA target sequence for ME2 (NM_002396.2,896-914).
ccgagaaaaatattgtact

SEQ ID NO: 220871 - DNA, 19 bp, Homo sapiens
  siRNA target sequence for ME2 (NM_002396.2,897-915).
cgagaaaaatattgtactt

SEQ ID NO: 220872 - DNA, 19 bp, Homo sapiens
  siRNA target sequence for ME2 (NM_002396.2,966-984).
gcagcacaaaaagttatta

SEQ ID NO: 220873 - DNA, 19 bp, Homo sapiens
  siRNA target sequence for ME2 (NM_002396.2,990-1008).
ccaatctccgaacacaaaa

SEQ ID NO: 220874 - DNA, 19 bp, Homo sapiens
  siRNA target sequence for ME2 (NM_002396.2,995-1013).
ctccgaacacaaaatctta

SEQ ID NO: 220875 - DNA, 19 bp, Homo sapiens
  siRNA target sequence for ME2 (NM_002396.2,997-1015).
ccgaacacaaaatcttatt

SEQ ID NO: 220876 - DNA, 19 bp, Homo sapiens
  siRNA target sequence for ME2 (NM_002396.2,1027-1045).
gagaggctgctcttggaat

SEQ ID NO: 220877 - DNA, 19 bp, Homo sapiens
  siRNA target sequence for ME2 (NM_002396.2,1042-1060).
gaattgcaaatcttatagt

SEQ ID NO: 220878 - DNA, 19 bp, Homo sapiens
  siRNA target sequence for ME2 (NM_002396.2,1047-1065).
gcaaatcttatagttatgt

SEQ ID NO: 220879 - DNA, 19 bp, Homo sapiens
  siRNA target sequence for ME2 (NM_002396.2,1059-1077).
gttatgtctatggtagaaa

SEQ ID NO: 220880 - DNA, 19 bp, Homo sapiens
  siRNA target sequence for ME2 (NM_002396.2,1149-1167).
cggaaagcaaaaatagata

SEQ ID NO: 220881 - DNA, 19 bp, Homo sapiens
  siRNA target sequence for ME2 (NM_002396.2,1151-1169).
gaaagcaaaaatagatagt

SEQ ID NO: 220882 - DNA, 19 bp, Homo sapiens
  siRNA target sequence for ME2 (NM_002396.2,1202-1220).
gagcatacctgatactttt

SEQ ID NO: 220883 - DNA, 19 bp, Homo sapiens
  siRNA target sequence for ME2 (NM_002396.2,1204-1222).
gcatacctgatacttttga

SEQ ID NO: 220884 - DNA, 19 bp, Homo sapiens
  siRNA target sequence for ME2 (NM_002396.2,1267-1285).
caggtgctggccgtctttt

SEQ ID NO: 220885 - DNA, 19 bp, Homo sapiens
  siRNA target sequence for ME2 (NM_002396.2,1286-1304).
cactcctgatgtaatcaga

SEQ ID NO: 220886 - DNA, 19 bp, Homo sapiens
  siRNA target sequence for ME2 (NM_002396.2,1306-1324).
ccatggcctctatcaatga

SEQ ID NO: 220887 - DNA, 19 bp, Homo sapiens
  siRNA target sequence for ME2 (NM_002396.2,1372-1390).
gcacggctgaagaagcata

SEQ ID NO: 220888 - DNA, 19 bp, Homo sapiens
  siRNA target sequence for ME2 (NM_002396.2,1376-1394).
ggctgaagaagcatataca

SEQ ID NO: 220889 - DNA, 19 bp, Homo sapiens
  siRNA target sequence for ME2 (NM_002396.2,1378-1396).
ctgaagaagcatatacact

SEQ ID NO: 220890 - DNA, 19 bp, Homo sapiens
  siRNA target sequence for ME2 (NM_002396.2,1380-1398).
gaagaagcatatacactta

SEQ ID NO: 220891 - DNA, 19 bp, Homo sapiens
  siRNA target sequence for ME2 (NM_002396.2,1477-1495).
gtcaaggaaacaatgttta

SEQ ID NO: 220892 - DNA, 19 bp, Homo sapiens
  siRNA target sequence for ME2 (NM_002396.2,1479-1497).
caaggaaacaatgtttata

SEQ ID NO: 220893 - DNA, 19 bp, Homo sapiens
  siRNA target sequence for ME2 (NM_002396.2,1507-1525).
gtgtggctttagctgttat

SEQ ID NO: 220894 - DNA, 19 bp, Homo sapiens
  siRNA target sequence for ME2 (NM_002396.2,1529-1547).
ctgtaacacccggcatatt

SEQ ID NO: 220895 - DNA, 19 bp, Homo sapiens
  siRNA target sequence for ME2 (NM_002396.2,1580-1598).
cctgacaagccaattgaca

SEQ ID NO: 220896 - DNA, 19 bp, Homo sapiens
  siRNA target sequence for ME2 (NM_002396.2,1628-1646).
cccaccgcttgctaatatt

SEQ ID NO: 220897 - DNA, 19 bp, Homo sapiens
  siRNA target sequence for ME2 (NM_002396.2,1630-1648).
caccgcttgctaatattca

SEQ ID NO: 220898 - DNA, 19 bp, Homo sapiens
  siRNA target sequence for ME2 (NM_002396.2,1638-1656).
gctaatattcaggaagttt

SEQ ID NO: 220899 - DNA, 19 bp, Homo sapiens
  siRNA target sequence for ME2 (NM_002396.2,1756-1774).
gaacatggcggagtgaata

SEQ ID NO: 220900 - DNA, 19 bp, Homo sapiens
  siRNA target sequence for ME2 (NM_002396.2,1759-1777).
catggcggagtgaatatga

SEQ ID NO: 220901 - DNA, 19 bp, Homo sapiens
  siRNA target sequence for ME2 (NM_002396.2,1781-1799).
cctgctgccagatgtgtat

SEQ ID NO: 220902 - DNA, 19 bp, Homo sapiens
  siRNA target sequence for ME2 (NM_002396.2,1796-1814).
gtatgaatggccagaatct

SEQ ID NO: 220903 - DNA, 19 bp, Homo sapiens
  siRNA target sequence for AKR1C4 (NM_001818.2,407-425).
gtgagacgccactaccaaa

SEQ ID NO: 220904 - DNA, 19 bp, Homo sapiens
  siRNA target sequence for AKR1C4 (NM_001818.2,411-429).
gacgccactaccaaaagat

SEQ ID NO: 220905 - DNA, 19 bp, Homo sapiens
  siRNA target sequence for AKR1C4 (NM_001818.2,690-708).
gggaacccaacgacataaa

SEQ ID NO: 220906 - DNA, 19 bp, Homo sapiens
  siRNA target sequence for AKR1C4 (NM_001818.2,692-710).
gaacccaacgacataaact

SEQ ID NO: 220907 - DNA, 19 bp, Homo sapiens
  siRNA target sequence for AKR1C4 (NM_001818.2,933-951).
cagaaattatcgatatgtt

SEQ ID NO: 220908 - DNA, 19 bp, Homo sapiens
  siRNA target sequence for AKR1C4 (NM_001818.2,935-953).
gaaattatcgatatgttgt

SEQ ID NO: 220909 - DNA, 19 bp, Homo sapiens
  siRNA target sequence for AKR1C4 (NM_001818.2,943-961).
cgatatgttgtcatggatt

SEQ ID NO: 220910 - DNA, 19 bp, Homo sapiens
  siRNA target sequence for AKR1C4 (NM_001818.2,969-987).
ggaccatcctgattatcca

SEQ ID NO: 220911 - DNA, 19 bp, Homo sapiens
  siRNA target sequence for AKR1C3 (NM_003739.4,148-166).
ccagaggttccgagaagta

SEQ ID NO: 220912 - DNA, 19 bp, Homo sapiens
  siRNA target sequence for AKR1C3 (NM_003739.4,374-392).
cactgaagaaagctcaatt

SEQ ID NO: 220913 - DNA, 19 bp, Homo sapiens
  siRNA target sequence for AKR1C3 (NM_003739.4,654-672).
gtatttcaaccggagtaaa

SEQ ID NO: 220914 - DNA, 19 bp, Homo sapiens
  siRNA target sequence for AKR1C3 (NM_003739.4,660-678).
caaccggagtaaattgcta

SEQ ID NO: 220915 - DNA, 19 bp, Homo sapiens
  siRNA target sequence for AKR1C3 (NM_003739.4,664-682).
cggagtaaattgctagatt

SEQ ID NO: 220916 - DNA, 19 bp, Homo sapiens
  siRNA target sequence for AKR1C3 (NM_003739.4,665-683).
ggagtaaattgctagattt

SEQ ID NO: 220917 - DNA, 19 bp, Homo sapiens
  siRNA target sequence for AKR1C3 (NM_003739.4,726-744).
gggatctcaacgagacaaa

SEQ ID NO: 220918 - DNA, 19 bp, Homo sapiens
  siRNA target sequence for AKR1C3 (NM_003739.4,967-985).
gacagaaatctccactatt

SEQ ID NO: 220919 - DNA, 19 bp, Homo sapiens
  siRNA target sequence for AKR1C3 (NM_003739.4,979-997).
cactattttaacagtgata

SEQ ID NO: 220920 - DNA, 19 bp, Homo sapiens
  siRNA target sequence for GRHPR (NM_012203.1,46-64).
gaccggtgcgactcatgaa

SEQ ID NO: 220921 - DNA, 19 bp, Homo sapiens
  siRNA target sequence for GRHPR (NM_012203.1,253-271).
caggggccaatctcaaagt

SEQ ID NO: 220922 - DNA, 19 bp, Homo sapiens
  siRNA target sequence for GRHPR (NM_012203.1,256-274).
gggccaatctcaaagtcat

SEQ ID NO: 220923 - DNA, 19 bp, Homo sapiens
  siRNA target sequence for GRHPR (NM_012203.1,546-564).
gctcggcgtctgaaaccat

SEQ ID NO: 220924 - DNA, 19 bp, Homo sapiens
  siRNA target sequence for GRHPR (NM_012203.1,562-580).
cattcggtgtccagagatt

SEQ ID NO: 220925 - DNA, 19 bp, Homo sapiens
  siRNA target sequence for GRHPR (NM_012203.1,568-586).
gtgtccagagatttctgta

SEQ ID NO: 220926 - DNA, 19 bp, Homo sapiens
  siRNA target sequence for GRHPR (NM_012203.1,653-671).
gctggctgcccaatctgat

SEQ ID NO: 220927 - DNA, 19 bp, Homo sapiens
  siRNA target sequence for GRHPR (NM_012203.1,678-696).
gtcgtggcctgctccttaa

SEQ ID NO: 220928 - DNA, 19 bp, Homo sapiens
  siRNA target sequence for GRHPR (NM_012203.1,680-698).
cgtggcctgctccttaaca

SEQ ID NO: 220929 - DNA, 19 bp, Homo sapiens
  siRNA target sequence for GRHPR (NM_012203.1,772-790).
gcaggggcgacgtcgtaaa

SEQ ID NO: 220930 - DNA, 19 bp, Homo sapiens
  siRNA target sequence for GRHPR (NM_012203.1,775-793).
ggggcgacgtcgtaaacca

SEQ ID NO: 220931 - DNA, 19 bp, Homo sapiens
  siRNA target sequence for GRHPR (NM_012203.1,998-1016).
ggagccgatgcctagtgaa

SEQ ID NO: 220932 - DNA, 19 bp, Homo sapiens
  siRNA target sequence for CTBP2 (NM_022802.1,346-364).
gtaccgggaggccgtttat

SEQ ID NO: 220933 - DNA, 19 bp, Homo sapiens
  siRNA target sequence for CTBP2 (NM_022802.1,352-370).
ggaggccgtttataactca

SEQ ID NO: 220934 - DNA, 19 bp, Homo sapiens
  siRNA target sequence for CTBP2 (NM_022802.1,452-470).
ctgccacgggagtactaca

SEQ ID NO: 220935 - DNA, 19 bp, Homo sapiens
  siRNA target sequence for CTBP2 (NM_022802.1,570-588).
gaacgtcatgggatccaat

SEQ ID NO: 220936 - DNA, 19 bp, Homo sapiens
  siRNA target sequence for CTBP2 (NM_022802.1,574-592).
gtcatgggatccaatgcaa

SEQ ID NO: 220937 - DNA, 19 bp, Homo sapiens
  siRNA target sequence for CTBP2 (NM_022802.1,633-651).
gggatcctggaggtaaaat

SEQ ID NO: 220938 - DNA, 19 bp, Homo sapiens
  siRNA target sequence for CTBP2 (NM_022802.1,940-958).
ggcttacgagacttacgaa

SEQ ID NO: 220939 - DNA, 19 bp, Homo sapiens
  siRNA target sequence for CTBP2 (NM_022802.1,1109-1127).
gaggacgcggatatcaagt

SEQ ID NO: 220940 - DNA, 19 bp, Homo sapiens
  siRNA target sequence for CTBP2 (NM_022802.1,1382-1400).
gagacggcagccacctatt

SEQ ID NO: 220941 - DNA, 19 bp, Homo sapiens
  siRNA target sequence for CTBP2 (NM_022802.1,1384-1402).
gacggcagccacctattct

SEQ ID NO: 220942 - DNA, 19 bp, Homo sapiens
  siRNA target sequence for CTBP2 (NM_022802.1,1511-1529).
gcaggggtggccttgacta

SEQ ID NO: 220943 - DNA, 19 bp, Homo sapiens
  siRNA target sequence for UBE1DC1 (NM_024818.2,346-364).
gggtccgcatcgagaagat

SEQ ID NO: 220944 - DNA, 19 bp, Homo sapiens
  siRNA target sequence for UBE1DC1 (NM_024818.2,424-442).
gaattgtaagcgactatga

SEQ ID NO: 220945 - DNA, 19 bp, Homo sapiens
  siRNA target sequence for UBE1DC1 (NM_024818.2,429-447).
gtaagcgactatgagaaaa

SEQ ID NO: 220946 - DNA, 19 bp, Homo sapiens
  siRNA target sequence for UBE1DC1 (NM_024818.2,451-469).
gtacctttgccgtagcaat

SEQ ID NO: 220947 - DNA, 19 bp, Homo sapiens
  siRNA target sequence for UBE1DC1 (NM_024818.2,455-473).
ctttgccgtagcaatagta

SEQ ID NO: 220948 - DNA, 19 bp, Homo sapiens
  siRNA target sequence for UBE1DC1 (NM_024818.2,490-508).
gtagtgtgactgctgaaat

SEQ ID NO: 220949 - DNA, 19 bp, Homo sapiens
  siRNA target sequence for UBE1DC1 (NM_024818.2,533-551).
gttgctactctttgattat

SEQ ID NO: 220950 - DNA, 19 bp, Homo sapiens
  siRNA target sequence for UBE1DC1 (NM_024818.2,560-578).
ggaactagccaatatgaat

SEQ ID NO: 220951 - DNA, 19 bp, Homo sapiens
  siRNA target sequence for UBE1DC1 (NM_024818.2,561-579).
gaactagccaatatgaata

SEQ ID NO: 220952 - DNA, 19 bp, Homo sapiens
  siRNA target sequence for UBE1DC1 (NM_024818.2,597-615).
catcaagcaggattaagta

SEQ ID NO: 220953 - DNA, 19 bp, Homo sapiens
  siRNA target sequence for UBE1DC1 (NM_024818.2,672-690).
gtacacaactataatataa

SEQ ID NO: 220954 - DNA, 19 bp, Homo sapiens
  siRNA target sequence for UBE1DC1 (NM_024818.2,675-693).
cacaactataatataacca

SEQ ID NO: 220955 - DNA, 19 bp, Homo sapiens
  siRNA target sequence for UBE1DC1 (NM_024818.2,691-709).
ccacagtggaaaactttca

SEQ ID NO: 220956 - DNA, 19 bp, Homo sapiens
  siRNA target sequence for UBE1DC1 (NM_024818.2,696-714).
gtggaaaactttcaacatt

SEQ ID NO: 220957 - DNA, 19 bp, Homo sapiens
  siRNA target sequence for UBE1DC1 (NM_024818.2,730-748).
gtaatggtgggttagaaga

SEQ ID NO: 220958 - DNA, 19 bp, Homo sapiens
  siRNA target sequence for UBE1DC1 (NM_024818.2,751-769).
gaaaacctgttgatctagt

SEQ ID NO: 220959 - DNA, 19 bp, Homo sapiens
  siRNA target sequence for UBE1DC1 (NM_024818.2,771-789).
cttagctgtgtggacaatt

SEQ ID NO: 220960 - DNA, 19 bp, Homo sapiens
  siRNA target sequence for UBE1DC1 (NM_024818.2,795-813).
gctcgaatgacaataaata

SEQ ID NO: 220961 - DNA, 19 bp, Homo sapiens
  siRNA target sequence for UBE1DC1 (NM_024818.2,831-849).
ggacaaacatggatggaat

SEQ ID NO: 220962 - DNA, 19 bp, Homo sapiens
  siRNA target sequence for UBE1DC1 (NM_024818.2,876-894).
gggcatatacagcttataa

SEQ ID NO: 220963 - DNA, 19 bp, Homo sapiens
  siRNA target sequence for UBE1DC1 (NM_024818.2,877-895).
ggcatatacagcttataat

SEQ ID NO: 220964 - DNA, 19 bp, Homo sapiens
  siRNA target sequence for UBE1DC1 (NM_024818.2,878-896).
gcatatacagcttataatt

SEQ ID NO: 220965 - DNA, 19 bp, Homo sapiens
  siRNA target sequence for UBE1DC1 (NM_024818.2,898-916).
ctggagaatctgcttgttt

SEQ ID NO: 220966 - DNA, 19 bp, Homo sapiens
  siRNA target sequence for UBE1DC1 (NM_024818.2,920-938).
gtgtgctccaccacttgta

SEQ ID NO: 220967 - DNA, 19 bp, Homo sapiens
  siRNA target sequence for UBE1DC1 (NM_024818.2,922-940).
gtgctccaccacttgtagt

SEQ ID NO: 220968 - DNA, 19 bp, Homo sapiens
  siRNA target sequence for UBE1DC1 (NM_024818.2,933-951).
cttgtagttgctgcaaata

SEQ ID NO: 220969 - DNA, 19 bp, Homo sapiens
  siRNA target sequence for UBE1DC1 (NM_024818.2,968-986).
gaaacgagaaggtgtttgt

SEQ ID NO: 220970 - DNA, 19 bp, Homo sapiens
  siRNA target sequence for UBE1DC1 (NM_024818.2,1016-1034).
ggttgctgggatcttagta

SEQ ID NO: 220971 - DNA, 19 bp, Homo sapiens
  siRNA target sequence for UBE1DC1 (NM_024818.2,1021-1039).
ctgggatcttagtacaaaa

SEQ ID NO: 220972 - DNA, 19 bp, Homo sapiens
  siRNA target sequence for UBE1DC1 (NM_024818.2,1024-1042).
ggatcttagtacaaaacgt

SEQ ID NO: 220973 - DNA, 19 bp, Homo sapiens
  siRNA target sequence for UBE1DC1 (NM_024818.2,1040-1058).
cgtgttaaagtttctgtta

SEQ ID NO: 220974 - DNA, 19 bp, Homo sapiens
  siRNA target sequence for UBE1DC1 (NM_024818.2,1055-1073).
gttaaattttggtactgtt

SEQ ID NO: 220975 - DNA, 19 bp, Homo sapiens
  siRNA target sequence for UBE1DC1 (NM_024818.2,1140-1158).
cagtgtgatgacagaaatt

SEQ ID NO: 220976 - DNA, 19 bp, Homo sapiens
  siRNA target sequence for UBE1DC1 (NM_024818.2,1195-1213).
cagcactgcctaaacaaga

SEQ ID NO: 220977 - DNA, 19 bp, Homo sapiens
  siRNA target sequence for UBE1DC1 (NM_024818.2,1202-1220).
gcctaaacaagaggttata

SEQ ID NO: 220978 - DNA, 19 bp, Homo sapiens
  siRNA target sequence for UBE1DC1 (NM_024818.2,1204-1222).
ctaaacaagaggttataca

SEQ ID NO: 220979 - DNA, 19 bp, Homo sapiens
  siRNA target sequence for UBE1DC1 (NM_024818.2,1323-1341).
gacttacctgaaggaatta

SEQ ID NO: 220980 - DNA, 19 bp, Homo sapiens
  siRNA target sequence for UBE1DC1 (NM_024818.2,1325-1343).
cttacctgaaggaattaca

SEQ ID NO: 220981 - DNA, 19 bp, Homo sapiens
  siRNA target sequence for UBE1DC1 (NM_024818.2,1346-1364).
ggcatacacaattccaaaa

SEQ ID NO: 220982 - DNA, 19 bp, Homo sapiens
  siRNA target sequence for UBE1DC1 (NM_024818.2,1378-1396).
ctgtcactgagttaacagt

SEQ ID NO: 220983 - DNA, 19 bp, Homo sapiens
  siRNA target sequence for HAO1 (NM_017545.2,35-53).
ggctaatttgtatcaatga

SEQ ID NO: 220984 - DNA, 19 bp, Homo sapiens
  siRNA target sequence for HAO1 (NM_017545.2,74-92).
cagtacttccaaagtctat

SEQ ID NO: 220985 - DNA, 19 bp, Homo sapiens
  siRNA target sequence for HAO1 (NM_017545.2,82-100).
ccaaagtctatatatgact

SEQ ID NO: 220986 - DNA, 19 bp, Homo sapiens
  siRNA target sequence for HAO1 (NM_017545.2,105-123).
caggtctggggcaaatgat

SEQ ID NO: 220987 - DNA, 19 bp, Homo sapiens
  siRNA target sequence for HAO1 (NM_017545.2,127-145).
gaaactttggctgataata

SEQ ID NO: 220988 - DNA, 19 bp, Homo sapiens
  siRNA target sequence for HAO1 (NM_017545.2,188-206).
ggaatgttgctgaaacaga

SEQ ID NO: 220989 - DNA, 19 bp, Homo sapiens
  siRNA target sequence for HAO1 (NM_017545.2,210-228).
gtcgacttctgttttagga

SEQ ID NO: 220990 - DNA, 19 bp, Homo sapiens
  siRNA target sequence for HAO1 (NM_017545.2,328-346).
ggaacgggcatgatgttga

SEQ ID NO: 220991 - DNA, 19 bp, Homo sapiens
  siRNA target sequence for HAO1 (NM_017545.2,353-371).
gggccacctcctcaattga

SEQ ID NO: 220992 - DNA, 19 bp, Homo sapiens
  siRNA target sequence for HAO1 (NM_017545.2,407-425).
ggctgcaactgtatatcta

SEQ ID NO: 220993 - DNA, 19 bp, Homo sapiens
  siRNA target sequence for HAO1 (NM_017545.2,474-492).
gggctacaaggccatattt

SEQ ID NO: 220994 - DNA, 19 bp, Homo sapiens
  siRNA target sequence for HAO1 (NM_017545.2,529-547).
gatgatgtgcgtaacagat

SEQ ID NO: 220995 - DNA, 19 bp, Homo sapiens
  siRNA target sequence for HAO1 (NM_017545.2,532-550).
gatgtgcgtaacagattca

SEQ ID NO: 220996 - DNA, 19 bp, Homo sapiens
  siRNA target sequence for HAO1 (NM_017545.2,558-576).
gccacaactcaggatgaaa

SEQ ID NO: 220997 - DNA, 19 bp, Homo sapiens
  siRNA target sequence for HAO1 (NM_017545.2,632-650).
gtggacttgctgcatatgt

SEQ ID NO: 220998 - DNA, 19 bp, Homo sapiens
  siRNA target sequence for HAO1 (NM_017545.2,643-661).
gcatatgtggctaaagcaa

SEQ ID NO: 220999 - DNA, 19 bp, Homo sapiens
  siRNA target sequence for HAO1 (NM_017545.2,708-726).
gacatcattgccaattgtt

SEQ ID NO: 221000 - DNA, 19 bp, Homo sapiens
  siRNA target sequence for HAO1 (NM_017545.2,713-731).
cattgccaattgttgcaaa

SEQ ID NO: 221001 - DNA, 19 bp, Homo sapiens
  siRNA target sequence for HAO1 (NM_017545.2,724-742).
gttgcaaagggcattttga

SEQ ID NO: 221002 - DNA, 19 bp, Homo sapiens
  siRNA target sequence for HAO1 (NM_017545.2,786-804).
gatcttggtgtcgaatcat

SEQ ID NO: 221003 - DNA, 19 bp, Homo sapiens
  siRNA target sequence for HAO1 (NM_017545.2,825-843).
ggtgccagccactattgat

SEQ ID NO: 221004 - DNA, 19 bp, Homo sapiens
  siRNA target sequence for HAO1 (NM_017545.2,830-848).
cagccactattgatgttct

SEQ ID NO: 221005 - DNA, 19 bp, Homo sapiens
  siRNA target sequence for HAO1 (NM_017545.2,961-979).
gtggggagaccaatcgttt

SEQ ID NO: 221006 - DNA, 19 bp, Homo sapiens
  siRNA target sequence for HAO1 (NM_017545.2,1015-1033).
gatgtcctcgagatactaa

SEQ ID NO: 221007 - DNA, 19 bp, Homo sapiens
  siRNA target sequence for HAO2 (NM_016527.1,275-293).
gagatcagtgcccctattt

SEQ ID NO: 221008 - DNA, 19 bp, Homo sapiens
  siRNA target sequence for HAO2 (NM_016527.1,277-295).
gatcagtgcccctatttgt

SEQ ID NO: 221009 - DNA, 19 bp, Homo sapiens
  siRNA target sequence for HAO2 (NM_016527.1,403-421).
ctgtagccttgaagacatt

SEQ ID NO: 221010 - DNA, 19 bp, Homo sapiens
  siRNA target sequence for HAO2 (NM_016527.1,504-522).
gggtagaatccctaggttt

SEQ ID NO: 221011 - DNA, 19 bp, Homo sapiens
  siRNA target sequence for HAO2 (NM_016527.1,518-536).
ggtttcaaagctttggtaa

SEQ ID NO: 221012 - DNA, 19 bp, Homo sapiens
  siRNA target sequence for HAO2 (NM_016527.1,567-585).
ggcgacatgacattcgaaa

SEQ ID NO: 221013 - DNA, 19 bp, Homo sapiens
  siRNA target sequence for HAO2 (NM_016527.1,592-610).
gaggaggaacttaacacta

SEQ ID NO: 221014 - DNA, 19 bp, Homo sapiens
  siRNA target sequence for HAO2 (NM_016527.1,595-613).
gaggaacttaacactaaca

SEQ ID NO: 221015 - DNA, 19 bp, Homo sapiens
  siRNA target sequence for HAO2 (NM_016527.1,597-615).
ggaacttaacactaacaga

SEQ ID NO: 221016 - DNA, 19 bp, Homo sapiens
  siRNA target sequence for HAO2 (NM_016527.1,601-619).
cttaacactaacagatctt

SEQ ID NO: 221017 - DNA, 19 bp, Homo sapiens
  siRNA target sequence for HAO2 (NM_016527.1,614-632).
gatcttcaatcacctaaaa

SEQ ID NO: 221018 - DNA, 19 bp, Homo sapiens
  siRNA target sequence for HAO2 (NM_016527.1,785-803).
gtccagggtatcattgttt

SEQ ID NO: 221019 - DNA, 19 bp, Homo sapiens
  siRNA target sequence for HAO2 (NM_016527.1,910-928).
ggtccgaactggcaatgat

SEQ ID NO: 221020 - DNA, 19 bp, Homo sapiens
  siRNA target sequence for HAO2 (NM_016527.1,968-986).
cttgggagaccaatcctat

SEQ ID NO: 221021 - DNA, 19 bp, Homo sapiens
  siRNA target sequence for HAO2 (NM_016527.1,1005-1023).
gtgaacatggtgttaagga

SEQ ID NO: 221022 - DNA, 19 bp, Homo sapiens
  siRNA target sequence for HAO2 (NM_016527.1,1080-1098).
ggtcggtcgctgagatcaa

SEQ ID NO: 221023 - DNA, 19 bp, Homo sapiens
  siRNA target sequence for HAO2 (NM_016527.1,1085-1103).
gtcgctgagatcaatcgaa

SEQ ID NO: 221024 - DNA, 19 bp, Homo sapiens
  siRNA target sequence for CYP11B2 (NM_000498.2,891-909).
ggcggaactgtcactagaa

SEQ ID NO: 221025 - DNA, 19 bp, Homo sapiens
  siRNA target sequence for CYP11B2 (NM_000498.2,1205-1223).
cattggtacaggttttcct

SEQ ID NO: 221026 - DNA, 19 bp, Homo sapiens
  siRNA target sequence for CYP39A1 (NM_016593.3,262-280).
ctccttcagcggaagaatt

SEQ ID NO: 221027 - DNA, 19 bp, Homo sapiens
  siRNA target sequence for CYP39A1 (NM_016593.3,317-335).
ggattggagttggatttga

SEQ ID NO: 221028 - DNA, 19 bp, Homo sapiens
  siRNA target sequence for CYP39A1 (NM_016593.3,340-358).
gggaaagcccctctagaat

SEQ ID NO: 221029 - DNA, 19 bp, Homo sapiens
  siRNA target sequence for CYP39A1 (NM_016593.3,341-359).
ggaaagcccctctagaatt

SEQ ID NO: 221030 - DNA, 19 bp, Homo sapiens
  siRNA target sequence for CYP39A1 (NM_016593.3,342-360).
gaaagcccctctagaattt

SEQ ID NO: 221031 - DNA, 19 bp, Homo sapiens
  siRNA target sequence for CYP39A1 (NM_016593.3,347-365).
cccctctagaatttataga

SEQ ID NO: 221032 - DNA, 19 bp, Homo sapiens
  siRNA target sequence for CYP39A1 (NM_016593.3,349-367).
cctctagaatttatagaga

SEQ ID NO: 221033 - DNA, 19 bp, Homo sapiens
  siRNA target sequence for CYP39A1 (NM_016593.3,491-509).
cagtgcaaaatatcgttta

SEQ ID NO: 221034 - DNA, 19 bp, Homo sapiens
  siRNA target sequence for CYP39A1 (NM_016593.3,495-513).
gcaaaatatcgtttatcgt

SEQ ID NO: 221035 - DNA, 19 bp, Homo sapiens
  siRNA target sequence for CYP39A1 (NM_016593.3,511-529).
cgtacagcatcaattccaa

SEQ ID NO: 221036 - DNA, 19 bp, Homo sapiens
  siRNA target sequence for CYP39A1 (NM_016593.3,521-539).
caattccaaagaatgtctt

SEQ ID NO: 221037 - DNA, 19 bp, Homo sapiens
  siRNA target sequence for CYP39A1 (NM_016593.3,544-562).
gcactgcatgaaaaactct

SEQ ID NO: 221038 - DNA, 19 bp, Homo sapiens
  siRNA target sequence for CYP39A1 (NM_016593.3,579-597).
gaaaatggggactgtcaat

SEQ ID NO: 221039 - DNA, 19 bp, Homo sapiens
  siRNA target sequence for CYP39A1 (NM_016593.3,672-690).
ggacctgaacaacttagta

SEQ ID NO: 221040 - DNA, 19 bp, Homo sapiens
  siRNA target sequence for CYP39A1 (NM_016593.3,673-691).
gacctgaacaacttagtaa

SEQ ID NO: 221041 - DNA, 19 bp, Homo sapiens
  siRNA target sequence for CYP39A1 (NM_016593.3,822-840).
gttgccagagtgtcttcta

SEQ ID NO: 221042 - DNA, 19 bp, Homo sapiens
  siRNA target sequence for CYP39A1 (NM_016593.3,826-844).
ccagagtgtcttctaagaa

SEQ ID NO: 221043 - DNA, 19 bp, Homo sapiens
  siRNA target sequence for CYP39A1 (NM_016593.3,891-909).
cattccagatataaaagca

SEQ ID NO: 221044 - DNA, 19 bp, Homo sapiens
  siRNA target sequence for CYP39A1 (NM_016593.3,898-916).
gatataaaagcatgtaaat

SEQ ID NO: 221045 - DNA, 19 bp, Homo sapiens
  siRNA target sequence for CYP39A1 (NM_016593.3,945-963).
gcaagctacgctggatatt

SEQ ID NO: 221046 - DNA, 19 bp, Homo sapiens
  siRNA target sequence for CYP39A1 (NM_016593.3,950-968).
ctacgctggatattgtaga

SEQ ID NO: 221047 - DNA, 19 bp, Homo sapiens
  siRNA target sequence for CYP39A1 (NM_016593.3,964-982).
gtagagacggaaacaagta

SEQ ID NO: 221048 - DNA, 19 bp, Homo sapiens
  siRNA target sequence for CYP39A1 (NM_016593.3,984-1002).
ggaaaactcacccaattat

SEQ ID NO: 221049 - DNA, 19 bp, Homo sapiens
  siRNA target sequence for CYP39A1 (NM_016593.3,995-1013).
ccaattatgggctcttact

SEQ ID NO: 221050 - DNA, 19 bp, Homo sapiens
  siRNA target sequence for CYP39A1 (NM_016593.3,1098-1116).
cattatggaaggcatatct

SEQ ID NO: 221051 - DNA, 19 bp, Homo sapiens
  siRNA target sequence for CYP39A1 (NM_016593.3,1225-1243).
cctggtgtcattactagaa

SEQ ID NO: 221052 - DNA, 19 bp, Homo sapiens
  siRNA target sequence for CYP39A1 (NM_016593.3,1226-1244).
ctggtgtcattactagaaa

SEQ ID NO: 221053 - DNA, 19 bp, Homo sapiens
  siRNA target sequence for CYP39A1 (NM_016593.3,1282-1300).
ccttctggtgacttgttga

SEQ ID NO: 221054 - DNA, 19 bp, Homo sapiens
  siRNA target sequence for CYP39A1 (NM_016593.3,1309-1327).
ccattttggctgcatagaa

SEQ ID NO: 221055 - DNA, 19 bp, Homo sapiens
  siRNA target sequence for CYP39A1 (NM_016593.3,1343-1361).
ctgagcctgaattgttcaa

SEQ ID NO: 221056 - DNA, 19 bp, Homo sapiens
  siRNA target sequence for CYP39A1 (NM_016593.3,1359-1377).
caaacctgaacgttggaaa

SEQ ID NO: 221057 - DNA, 19 bp, Homo sapiens
  siRNA target sequence for CYP39A1 (NM_016593.3,1471-1489).
gaggttcagatgtgtatta

SEQ ID NO: 221058 - DNA, 19 bp, Homo sapiens
  siRNA target sequence for CYP39A1 (NM_016593.3,1473-1491).
ggttcagatgtgtattatt

SEQ ID NO: 221059 - DNA, 19 bp, Homo sapiens
  siRNA target sequence for CYP39A1 (NM_016593.3,1474-1492).
gttcagatgtgtattattt

SEQ ID NO: 221060 - DNA, 19 bp, Homo sapiens
  siRNA target sequence for CYP39A1 (NM_016593.3,1529-1547).
cattacccaaacagagtta

SEQ ID NO: 221061 - DNA, 19 bp, Homo sapiens
  siRNA target sequence for CYP39A1 (NM_016593.3,1580-1598).
ggcaatgccgaattgaata

SEQ ID NO: 221062 - DNA, 19 bp, Homo sapiens
  siRNA target sequence for CYP39A1 (NM_016593.3,1586-1604).
gccgaattgaatataaaca

SEQ ID NO: 221063 - DNA, 19 bp, Homo sapiens
  siRNA target sequence for CYP39A1 (NM_016593.3,1587-1605).
ccgaattgaatataaacaa

SEQ ID NO: 221064 - DNA, 19 bp, Homo sapiens
  siRNA target sequence for CYP39A1 (NM_016593.3,1588-1606).
cgaattgaatataaacaaa

SEQ ID NO: 221065 - DNA, 19 bp, Homo sapiens
  siRNA target sequence for CYP7B1 (NM_004820.2,332-350).
ccggtgagcctccattgat

SEQ ID NO: 221066 - DNA, 19 bp, Homo sapiens
  siRNA target sequence for CYP7B1 (NM_004820.2,333-351).
cggtgagcctccattgata

SEQ ID NO: 221067 - DNA, 19 bp, Homo sapiens
  siRNA target sequence for CYP7B1 (NM_004820.2,334-352).
ggtgagcctccattgataa

SEQ ID NO: 221068 - DNA, 19 bp, Homo sapiens
  siRNA target sequence for CYP7B1 (NM_004820.2,339-357).
gcctccattgataaaaggt

SEQ ID NO: 221069 - DNA, 19 bp, Homo sapiens
  siRNA target sequence for CYP7B1 (NM_004820.2,391-409).
cgaaaagaccccttaaggt

SEQ ID NO: 221070 - DNA, 19 bp, Homo sapiens
  siRNA target sequence for CYP7B1 (NM_004820.2,392-410).
gaaaagaccccttaaggtt

SEQ ID NO: 221071 - DNA, 19 bp, Homo sapiens
  siRNA target sequence for CYP7B1 (NM_004820.2,397-415).
gaccccttaaggttcatga

SEQ ID NO: 221072 - DNA, 19 bp, Homo sapiens
  siRNA target sequence for CYP7B1 (NM_004820.2,402-420).
cttaaggttcatgaaaaca

SEQ ID NO: 221073 - DNA, 19 bp, Homo sapiens
  siRNA target sequence for CYP7B1 (NM_004820.2,457-475).
cttggtggaaagtacataa

SEQ ID NO: 221074 - DNA, 19 bp, Homo sapiens
  siRNA target sequence for CYP7B1 (NM_004820.2,495-513).
ccagtaccagctagtgata

SEQ ID NO: 221075 - DNA, 19 bp, Homo sapiens
  siRNA target sequence for CYP7B1 (NM_004820.2,496-514).
cagtaccagctagtgataa

SEQ ID NO: 221076 - DNA, 19 bp, Homo sapiens
  siRNA target sequence for CYP7B1 (NM_004820.2,498-516).
gtaccagctagtgataaaa

SEQ ID NO: 221077 - DNA, 19 bp, Homo sapiens
  siRNA target sequence for CYP7B1 (NM_004820.2,505-523).
ctagtgataaaaaatcata

SEQ ID NO: 221078 - DNA, 19 bp, Homo sapiens
  siRNA target sequence for CYP7B1 (NM_004820.2,533-551).
gctttcgagtattttctaa

SEQ ID NO: 221079 - DNA, 19 bp, Homo sapiens
  siRNA target sequence for CYP7B1 (NM_004820.2,575-593).
gcatcagtcagttgcaaaa

SEQ ID NO: 221080 - DNA, 19 bp, Homo sapiens
  siRNA target sequence for CYP7B1 (NM_004820.2,619-637).
cacctctgctatcaatttt

SEQ ID NO: 221081 - DNA, 19 bp, Homo sapiens
  siRNA target sequence for CYP7B1 (NM_004820.2,728-746).
gggacacggcagaactgta

SEQ ID NO: 221082 - DNA, 19 bp, Homo sapiens
  siRNA target sequence for CYP7B1 (NM_004820.2,729-747).
ggacacggcagaactgtat

SEQ ID NO: 221083 - DNA, 19 bp, Homo sapiens
  siRNA target sequence for CYP7B1 (NM_004820.2,734-752).
cggcagaactgtatccatt

SEQ ID NO: 221084 - DNA, 19 bp, Homo sapiens
  siRNA target sequence for CYP7B1 (NM_004820.2,774-792).
gatcacatttacaactata

SEQ ID NO: 221085 - DNA, 19 bp, Homo sapiens
  siRNA target sequence for CYP7B1 (NM_004820.2,814-832).
gacaacaacaaatttatta

SEQ ID NO: 221086 - DNA, 19 bp, Homo sapiens
  siRNA target sequence for CYP7B1 (NM_004820.2,907-925).
ctaggaaatgtcaagtcta

SEQ ID NO: 221087 - DNA, 19 bp, Homo sapiens
  siRNA target sequence for CYP7B1 (NM_004820.2,948-966).
cttctcatcagaaaagtta

SEQ ID NO: 221088 - DNA, 19 bp, Homo sapiens
  siRNA target sequence for CYP7B1 (NM_004820.2,980-998).
gatggtcagaagtttttca

SEQ ID NO: 221089 - DNA, 19 bp, Homo sapiens
  siRNA target sequence for CYP7B1 (NM_004820.2,1045-1063).
gaaataggagcacatcatt

SEQ ID NO: 221090 - DNA, 19 bp, Homo sapiens
  siRNA target sequence for CYP7B1 (NM_004820.2,1077-1095).
ggcctctgtggcaaacact

SEQ ID NO: 221091 - DNA, 19 bp, Homo sapiens
  siRNA target sequence for CYP7B1 (NM_004820.2,1078-1096).
gcctctgtggcaaacacta

SEQ ID NO: 221092 - DNA, 19 bp, Homo sapiens
  siRNA target sequence for CYP7B1 (NM_004820.2,1110-1128).
ctgggcaatgtattatctt

SEQ ID NO: 221093 - DNA, 19 bp, Homo sapiens
  siRNA target sequence for CYP7B1 (NM_004820.2,1151-1169).
cagcagtgcgtgacgaaat

SEQ ID NO: 221094 - DNA, 19 bp, Homo sapiens
  siRNA target sequence for CYP7B1 (NM_004820.2,1154-1172).
cagtgcgtgacgaaattga

SEQ ID NO: 221095 - DNA, 19 bp, Homo sapiens
  siRNA target sequence for CYP7B1 (NM_004820.2,1237-1255).
caattggacagcctaatct

SEQ ID NO: 221096 - DNA, 19 bp, Homo sapiens
  siRNA target sequence for CYP7B1 (NM_004820.2,1257-1275).
cctagaaagcagcattttt

SEQ ID NO: 221097 - DNA, 19 bp, Homo sapiens
  siRNA target sequence for CYP7B1 (NM_004820.2,1285-1303).
cgactgtcctcatattcaa

SEQ ID NO: 221098 - DNA, 19 bp, Homo sapiens
  siRNA target sequence for CYP7B1 (NM_004820.2,1304-1322).
ccaccattcgttttgttga

SEQ ID NO: 221099 - DNA, 19 bp, Homo sapiens
  siRNA target sequence for CYP7B1 (NM_004820.2,1429-1447).
gctccagaggagtttagat

SEQ ID NO: 221100 - DNA, 19 bp, Homo sapiens
  siRNA target sequence for CYP7B1 (NM_004820.2,1430-1448).
ctccagaggagtttagata

SEQ ID NO: 221101 - DNA, 19 bp, Homo sapiens
  siRNA target sequence for CYP7B1 (NM_004820.2,1445-1463).
gatatgatcgttttataga

SEQ ID NO: 221102 - DNA, 19 bp, Homo sapiens
  siRNA target sequence for CYP7B1 (NM_004820.2,1556-1574).
gccgattttttgcacttat

SEQ ID NO: 221103 - DNA, 19 bp, Homo sapiens
  siRNA target sequence for CYP7B1 (NM_004820.2,1559-1577).
gattttttgcacttatgga

SEQ ID NO: 221104 - DNA, 19 bp, Homo sapiens
  siRNA target sequence for CYP7B1 (NM_004820.2,1600-1618).
cttttaacttattttgatt

SEQ ID NO: 221105 - DNA, 19 bp, Homo sapiens
  siRNA target sequence for CYP7B1 (NM_004820.2,1639-1657).
cccataggactaaactaca

SEQ ID NO: 221106 - DNA, 19 bp, Homo sapiens
  siRNA target sequence for CYP7B1 (NM_004820.2,1653-1671).
ctacagccgcttgttgttt

SEQ ID NO: 221107 - DNA, 19 bp, Homo sapiens
  siRNA target sequence for CYP7B1 (NM_004820.2,1661-1679).
gcttgttgtttggtattca

SEQ ID NO: 221108 - DNA, 19 bp, Homo sapiens
  siRNA target sequence for CYP7B1 (NM_004820.2,1665-1683).
gttgtttggtattcagtat

SEQ ID NO: 221109 - DNA, 19 bp, Homo sapiens
  siRNA target sequence for CYP21A2 (NM_000500.4,244-262).
gcccgacctcccaatctat

SEQ ID NO: 221110 - DNA, 19 bp, Homo sapiens
  siRNA target sequence for CYP21A2 (NM_000500.4,246-264).
ccgacctcccaatctatct

SEQ ID NO: 221111 - DNA, 19 bp, Homo sapiens
  siRNA target sequence for CYP21A2 (NM_000500.4,661-679).
gatcaaggacgacaactta

SEQ ID NO: 221112 - DNA, 19 bp, Homo sapiens
  siRNA target sequence for CYP21A2 (NM_000500.4,704-722).
caggaggtgttaaaaacct

SEQ ID NO: 221113 - DNA, 19 bp, Homo sapiens
  siRNA target sequence for CYP21A2 (NM_000500.4,726-744).
gccactggtccatccaaat

SEQ ID NO: 221114 - DNA, 19 bp, Homo sapiens
  siRNA target sequence for CYP21A2 (NM_000500.4,727-745).
ccactggtccatccaaatt

SEQ ID NO: 221115 - DNA, 19 bp, Homo sapiens
  siRNA target sequence for CYP21A2 (NM_000500.4,873-891).
gccagtggagggacatgat

SEQ ID NO: 221116 - DNA, 19 bp, Homo sapiens
  siRNA target sequence for CYP21A2 (NM_000500.4,882-900).
gggacatgatggactacat

SEQ ID NO: 221117 - DNA, 19 bp, Homo sapiens
  siRNA target sequence for CYP21A2 (NM_000500.4,1534-1552).
caagatgcagcctttccaa

SEQ ID NO: 221118 - DNA, 19 bp, Homo sapiens
  siRNA target sequence for CYP17A1 (NM_000102.2,84-102).
gctgcttaccctagcttat

SEQ ID NO: 221119 - DNA, 19 bp, Homo sapiens
  siRNA target sequence for CYP17A1 (NM_000102.2,200-218).
gccatatgcataacaactt

SEQ ID NO: 221120 - DNA, 19 bp, Homo sapiens
  siRNA target sequence for CYP17A1 (NM_000102.2,259-277).
cgtatgggcaccaagacta

SEQ ID NO: 221121 - DNA, 19 bp, Homo sapiens
  siRNA target sequence for CYP17A1 (NM_000102.2,304-322).
gccaaggaggtgcttatta

SEQ ID NO: 221122 - DNA, 19 bp, Homo sapiens
  siRNA target sequence for CYP17A1 (NM_000102.2,348-366).
gcctcaaatggcaactcta

SEQ ID NO: 221123 - DNA, 19 bp, Homo sapiens
  siRNA target sequence for CYP17A1 (NM_000102.2,504-522).
ggaaatcagtacattgtgt

SEQ ID NO: 221124 - DNA, 19 bp, Homo sapiens
  siRNA target sequence for CYP17A1 (NM_000102.2,573-591).
cttcgtggcggtaaccaat

SEQ ID NO: 221125 - DNA, 19 bp, Homo sapiens
  siRNA target sequence for CYP17A1 (NM_000102.2,597-615).
ctccttgatctgcttcaat

SEQ ID NO: 221126 - DNA, 19 bp, Homo sapiens
  siRNA target sequence for CYP17A1 (NM_000102.2,636-654).
ccctgagttgaatgtcata

SEQ ID NO: 221127 - DNA, 19 bp, Homo sapiens
  siRNA target sequence for CYP17A1 (NM_000102.2,651-669).
catacagaattacaatgaa

SEQ ID NO: 221128 - DNA, 19 bp, Homo sapiens
  siRNA target sequence for CYP17A1 (NM_000102.2,709-727).
ctagtcccctggttgaaga

SEQ ID NO: 221129 - DNA, 19 bp, Homo sapiens
  siRNA target sequence for CYP17A1 (NM_000102.2,712-730).
gtcccctggttgaagattt

SEQ ID NO: 221130 - DNA, 19 bp, Homo sapiens
  siRNA target sequence for CYP17A1 (NM_000102.2,759-777).
gagccatgttaaaatacga

SEQ ID NO: 221131 - DNA, 19 bp, Homo sapiens
  siRNA target sequence for CYP17A1 (NM_000102.2,762-780).
ccatgttaaaatacgaaat

SEQ ID NO: 221132 - DNA, 19 bp, Homo sapiens
  siRNA target sequence for CYP17A1 (NM_000102.2,786-804).
gctgaataaaatacttgaa

SEQ ID NO: 221133 - DNA, 19 bp, Homo sapiens
  siRNA target sequence for CYP17A1 (NM_000102.2,856-874).
ctgatgcaagccaagatga

SEQ ID NO: 221134 - DNA, 19 bp, Homo sapiens
  siRNA target sequence for CYP17A1 (NM_000102.2,867-885).
caagatgaactcagataat

SEQ ID NO: 221135 - DNA, 19 bp, Homo sapiens
  siRNA target sequence for CYP17A1 (NM_000102.2,942-960).
caccataggggacatcttt

SEQ ID NO: 221136 - DNA, 19 bp, Homo sapiens
  siRNA target sequence for CYP17A1 (NM_000102.2,1226-1244).
gcacagaagttatcatcaa

SEQ ID NO: 221137 - DNA, 19 bp, Homo sapiens
  siRNA target sequence for CYP17A1 (NM_000102.2,1229-1247).
cagaagttatcatcaatct

SEQ ID NO: 221138 - DNA, 19 bp, Homo sapiens
  siRNA target sequence for CYP17A1 (NM_000102.2,1231-1249).
gaagttatcatcaatctgt

SEQ ID NO: 221139 - DNA, 19 bp, Homo sapiens
  siRNA target sequence for CYP17A1 (NM_000102.2,1299-1317).
gcctgagcgtttcttgaat

SEQ ID NO: 221140 - DNA, 19 bp, Homo sapiens
  siRNA target sequence for CYP17A1 (NM_000102.2,1333-1351).
ctcatctcaccgtcagtaa

SEQ ID NO: 221141 - DNA, 19 bp, Homo sapiens
  siRNA target sequence for CYP17A1 (NM_000102.2,1338-1356).
ctcaccgtcagtaagctat

SEQ ID NO: 221142 - DNA, 19 bp, Homo sapiens
  siRNA target sequence for CYP17A1 (NM_000102.2,1340-1358).
caccgtcagtaagctattt

SEQ ID NO: 221143 - DNA, 19 bp, Homo sapiens
  siRNA target sequence for CYP8B1 (NM_004391.1,463-481).
catggctttccggaagaat

SEQ ID NO: 221144 - DNA, 19 bp, Homo sapiens
  siRNA target sequence for CYP8B1 (NM_004391.1,467-485).
gctttccggaagaatatgt

SEQ ID NO: 221145 - DNA, 19 bp, Homo sapiens
  siRNA target sequence for CYP8B1 (NM_004391.1,468-486).
ctttccggaagaatatgtt

SEQ ID NO: 221146 - DNA, 19 bp, Homo sapiens
  siRNA target sequence for CYP8B1 (NM_004391.1,617-635).
gactttgggcaatatgcaa

SEQ ID NO: 221147 - DNA, 19 bp, Homo sapiens
  siRNA target sequence for CYP8B1 (NM_004391.1,624-642).
ggcaatatgcaaaaaaact

SEQ ID NO: 221148 - DNA, 19 bp, Homo sapiens
  siRNA target sequence for CYP8B1 (NM_004391.1,680-698).
gaccatgagatgatacact

SEQ ID NO: 221149 - DNA, 19 bp, Homo sapiens
  siRNA target sequence for CYP8B1 (NM_004391.1,725-743).
gatggcttgaaggatctta

SEQ ID NO: 221150 - DNA, 19 bp, Homo sapiens
  siRNA target sequence for CYP8B1 (NM_004391.1,830-848).
ctctttcgcttctgctatt

SEQ ID NO: 221151 - DNA, 19 bp, Homo sapiens
  siRNA target sequence for CYP8B1 (NM_004391.1,836-854).
cgcttctgctattacatct

SEQ ID NO: 221152 - DNA, 19 bp, Homo sapiens
  siRNA target sequence for CYP8B1 (NM_004391.1,917-935).
caggcaggagagttattca

SEQ ID NO: 221153 - DNA, 19 bp, Homo sapiens
  siRNA target sequence for CYP8B1 (NM_004391.1,944-962).
cgcaagtttgaccttcttt

SEQ ID NO: 221154 - DNA, 19 bp, Homo sapiens
  siRNA target sequence for CYP8B1 (NM_004391.1,1090-1108).
gggcaacatgcttcagttt

SEQ ID NO: 221155 - DNA, 19 bp, Homo sapiens
  siRNA target sequence for CYP8B1 (NM_004391.1,1131-1149).
cagctatgcaggacaagtt

SEQ ID NO: 221156 - DNA, 19 bp, Homo sapiens
  siRNA target sequence for CYP8B1 (NM_004391.1,1393-1411).
cctcaggttggttcatgaa

SEQ ID NO: 221157 - DNA, 19 bp, Homo sapiens
  siRNA target sequence for CYP8B1 (NM_004391.1,1399-1417).
gttggttcatgaagactat

SEQ ID NO: 221158 - DNA, 19 bp, Homo sapiens
  siRNA target sequence for CYP8B1 (NM_004391.1,1520-1538).
gagcccaccgtcttcaagt

SEQ ID NO: 221159 - DNA, 19 bp, Homo sapiens
  siRNA target sequence for CYP8B1 (NM_004391.1,1566-1584).
gccggaaagtggacttctt

SEQ ID NO: 221160 - DNA, 19 bp, Homo sapiens
  siRNA target sequence for CYP8B1 (NM_004391.1,1623-1641).
ggggttcgggcgtttccat

SEQ ID NO: 221161 - DNA, 19 bp, Homo sapiens
  siRNA target sequence for CYP8B1 (NM_004391.1,1701-1719).
cacactttgacttagagtt

SEQ ID NO: 221162 - DNA, 19 bp, Homo sapiens
  siRNA target sequence for CYP8B1 (NM_004391.1,1734-1752).
caccactaccccatgttga

SEQ ID NO: 221163 - DNA, 19 bp, Homo sapiens
  siRNA target sequence for CYP11A1 (NM_000781.1,173-191).
cagtcctcgccccttcaat

SEQ ID NO: 221164 - DNA, 19 bp, Homo sapiens
  siRNA target sequence for CYP11A1 (NM_000781.1,175-193).
gtcctcgccccttcaatga

SEQ ID NO: 221165 - DNA, 19 bp, Homo sapiens
  siRNA target sequence for CYP11A1 (NM_000781.1,177-195).
cctcgccccttcaatgaga

SEQ ID NO: 221166 - DNA, 19 bp, Homo sapiens
  siRNA target sequence for CYP11A1 (NM_000781.1,178-196).
ctcgccccttcaatgagat

SEQ ID NO: 221167 - DNA, 19 bp, Homo sapiens
  siRNA target sequence for CYP11A1 (NM_000781.1,281-299).
ccagaatttccagaagtat

SEQ ID NO: 221168 - DNA, 19 bp, Homo sapiens
  siRNA target sequence for CYP11A1 (NM_000781.1,326-344).
caacgtggagtcggtttat

SEQ ID NO: 221169 - DNA, 19 bp, Homo sapiens
  siRNA target sequence for CYP11A1 (NM_000781.1,330-348).
gtggagtcggtttatgtca

SEQ ID NO: 221170 - DNA, 19 bp, Homo sapiens
  siRNA target sequence for CYP11A1 (NM_000781.1,363-381).
gtggcccttctctttaagt

SEQ ID NO: 221171 - DNA, 19 bp, Homo sapiens
  siRNA target sequence for CYP11A1 (NM_000781.1,423-441).
gtcgcctatcaccagtatt

SEQ ID NO: 221172 - DNA, 19 bp, Homo sapiens
  siRNA target sequence for CYP11A1 (NM_000781.1,451-469).
ccataggagtcctgttgaa

SEQ ID NO: 221173 - DNA, 19 bp, Homo sapiens
  siRNA target sequence for CYP11A1 (NM_000781.1,456-474).
ggagtcctgttgaagaagt

SEQ ID NO: 221174 - DNA, 19 bp, Homo sapiens
  siRNA target sequence for CYP11A1 (NM_000781.1,473-491).
gtcggcagcctggaagaaa

SEQ ID NO: 221175 - DNA, 19 bp, Homo sapiens
  siRNA target sequence for CYP11A1 (NM_000781.1,849-867).
gcatgggacgtgattttca

SEQ ID NO: 221176 - DNA, 19 bp, Homo sapiens
  siRNA target sequence for CYP11A1 (NM_000781.1,853-871).
gggacgtgattttcagtaa

SEQ ID NO: 221177 - DNA, 19 bp, Homo sapiens
  siRNA target sequence for CYP11A1 (NM_000781.1,854-872).
ggacgtgattttcagtaaa

SEQ ID NO: 221178 - DNA, 19 bp, Homo sapiens
  siRNA target sequence for CYP11A1 (NM_000781.1,1046-1064).
cctgcagtggcacttgtat

SEQ ID NO: 221179 - DNA, 19 bp, Homo sapiens
  siRNA target sequence for CYP11A1 (NM_000781.1,1050-1068).
cagtggcacttgtatgaga

SEQ ID NO: 221180 - DNA, 19 bp, Homo sapiens
  siRNA target sequence for CYP11A1 (NM_000781.1,1518-1536).
gatgtgggcaccacattca

SEQ ID NO: 221181 - DNA, 19 bp, Homo sapiens
  siRNA target sequence for CYP7A1 (NM_000780.2,67-85).
gatgaccacatctttgatt

SEQ ID NO: 221182 - DNA, 19 bp, Homo sapiens
  siRNA target sequence for CYP7A1 (NM_000780.2,82-100).
gatttgggggattgctata

SEQ ID NO: 221183 - DNA, 19 bp, Homo sapiens
  siRNA target sequence for CYP7A1 (NM_000780.2,153-171).
gtgaaccacctctagagaa

SEQ ID NO: 221184 - DNA, 19 bp, Homo sapiens
  siRNA target sequence for CYP7A1 (NM_000780.2,158-176).
ccacctctagagaatggat

SEQ ID NO: 221185 - DNA, 19 bp, Homo sapiens
  siRNA target sequence for CYP7A1 (NM_000780.2,161-179).
cctctagagaatggattaa

SEQ ID NO: 221186 - DNA, 19 bp, Homo sapiens
  siRNA target sequence for CYP7A1 (NM_000780.2,226-244).
gttcctcagagcaaatcaa

SEQ ID NO: 221187 - DNA, 19 bp, Homo sapiens
  siRNA target sequence for CYP7A1 (NM_000780.2,309-327).
ccttgtcataccataaggt

SEQ ID NO: 221188 - DNA, 19 bp, Homo sapiens
  siRNA target sequence for CYP7A1 (NM_000780.2,326-344).
gtgttgtgccacggaaaat

SEQ ID NO: 221189 - DNA, 19 bp, Homo sapiens
  siRNA target sequence for CYP7A1 (NM_000780.2,328-346).
gttgtgccacggaaaatat

SEQ ID NO: 221190 - DNA, 19 bp, Homo sapiens
  siRNA target sequence for CYP7A1 (NM_000780.2,333-351).
gccacggaaaatattttga

SEQ ID NO: 221191 - DNA, 19 bp, Homo sapiens
  siRNA target sequence for CYP7A1 (NM_000780.2,410-428).
ccgatggatggaaatacca

SEQ ID NO: 221192 - DNA, 19 bp, Homo sapiens
  siRNA target sequence for CYP7A1 (NM_000780.2,533-551).
gtctcctctaactcaaaga

SEQ ID NO: 221193 - DNA, 19 bp, Homo sapiens
  siRNA target sequence for CYP7A1 (NM_000780.2,562-580).
ggtgacagaagggatgtat

SEQ ID NO: 221194 - DNA, 19 bp, Homo sapiens
  siRNA target sequence for CYP7A1 (NM_000780.2,563-581).
gtgacagaagggatgtatt

SEQ ID NO: 221195 - DNA, 19 bp, Homo sapiens
  siRNA target sequence for CYP7A1 (NM_000780.2,565-583).
gacagaagggatgtattct

SEQ ID NO: 221196 - DNA, 19 bp, Homo sapiens
  siRNA target sequence for CYP7A1 (NM_000780.2,567-585).
cagaagggatgtattcttt

SEQ ID NO: 221197 - DNA, 19 bp, Homo sapiens
  siRNA target sequence for CYP7A1 (NM_000780.2,569-587).
gaagggatgtattctttct

SEQ ID NO: 221198 - DNA, 19 bp, Homo sapiens
  siRNA target sequence for CYP7A1 (NM_000780.2,588-606).
gctaccgagtgatgtttga

SEQ ID NO: 221199 - DNA, 19 bp, Homo sapiens
  siRNA target sequence for CYP7A1 (NM_000780.2,605-623).
gaagctgggtatttaacta

SEQ ID NO: 221200 - DNA, 19 bp, Homo sapiens
  siRNA target sequence for CYP7A1 (NM_000780.2,608-626).
gctgggtatttaactatct

SEQ ID NO: 221201 - DNA, 19 bp, Homo sapiens
  siRNA target sequence for CYP7A1 (NM_000780.2,654-672).
cacagaaagcacatattct

SEQ ID NO: 221202 - DNA, 19 bp, Homo sapiens
  siRNA target sequence for CYP7A1 (NM_000780.2,680-698).
cttgacaacttcaagcaat

SEQ ID NO: 221203 - DNA, 19 bp, Homo sapiens
  siRNA target sequence for CYP7A1 (NM_000780.2,729-747).
gcctccccattcacatgtt

SEQ ID NO: 221204 - DNA, 19 bp, Homo sapiens
  siRNA target sequence for CYP7A1 (NM_000780.2,731-749).
ctccccattcacatgttca

SEQ ID NO: 221205 - DNA, 19 bp, Homo sapiens
  siRNA target sequence for CYP7A1 (NM_000780.2,792-810).
ggcacgagaacctccaaaa

SEQ ID NO: 221206 - DNA, 19 bp, Homo sapiens
  siRNA target sequence for CYP7A1 (NM_000780.2,832-850).
gatcagcctgcgcatgttt

SEQ ID NO: 221207 - DNA, 19 bp, Homo sapiens
  siRNA target sequence for CYP7A1 (NM_000780.2,837-855).
gcctgcgcatgtttctcaa

SEQ ID NO: 221208 - DNA, 19 bp, Homo sapiens
  siRNA target sequence for CYP7A1 (NM_000780.2,861-879).
ctttgtccacctttgatga

SEQ ID NO: 221209 - DNA, 19 bp, Homo sapiens
  siRNA target sequence for CYP7A1 (NM_000780.2,951-969).
ggagtttatttcaaatgat

SEQ ID NO: 221210 - DNA, 19 bp, Homo sapiens
  siRNA target sequence for CYP7A1 (NM_000780.2,952-970).
gagtttatttcaaatgatt

SEQ ID NO: 221211 - DNA, 19 bp, Homo sapiens
  siRNA target sequence for CYP7A1 (NM_000780.2,1044-1062).
gcttggaaggcaatcctat

SEQ ID NO: 221212 - DNA, 19 bp, Homo sapiens
  siRNA target sequence for CYP7A1 (NM_000780.2,1048-1066).
ggaaggcaatcctatttgt

SEQ ID NO: 221213 - DNA, 19 bp, Homo sapiens
  siRNA target sequence for CYP7A1 (NM_000780.2,1054-1072).
caatcctatttgtttgagt

SEQ ID NO: 221214 - DNA, 19 bp, Homo sapiens
  siRNA target sequence for CYP7A1 (NM_000780.2,1187-1205).
gaggacggttcctacaaca

SEQ ID NO: 221215 - DNA, 19 bp, Homo sapiens
  siRNA target sequence for CYP7A1 (NM_000780.2,1226-1244).
gctctttacccacagttaa

SEQ ID NO: 221216 - DNA, 19 bp, Homo sapiens
  siRNA target sequence for CYP7A1 (NM_000780.2,1227-1245).
ctctttacccacagttaat

SEQ ID NO: 221217 - DNA, 19 bp, Homo sapiens
  siRNA target sequence for CYP7A1 (NM_000780.2,1247-1265).
cacttagatccagaaatct

SEQ ID NO: 221218 - DNA, 19 bp, Homo sapiens
  siRNA target sequence for CYP7A1 (NM_000780.2,1304-1322).
gatgaaaacgggaagacaa

SEQ ID NO: 221219 - DNA, 19 bp, Homo sapiens
  siRNA target sequence for CYP7A1 (NM_000780.2,1318-1336).
gacaaagactaccttctat

SEQ ID NO: 221220 - DNA, 19 bp, Homo sapiens
  siRNA target sequence for CYP7A1 (NM_000780.2,1376-1394).
ggatcgggagctacaatat

SEQ ID NO: 221221 - DNA, 19 bp, Homo sapiens
  siRNA target sequence for CYP7A1 (NM_000780.2,1418-1436).
cacgaaatcaagcaatttt

SEQ ID NO: 221222 - DNA, 19 bp, Homo sapiens
  siRNA target sequence for CYP7A1 (NM_000780.2,1531-1549).
gccgccattgaatgatatt

SEQ ID NO: 221223 - DNA, 19 bp, Homo sapiens
  siRNA target sequence for CH25H (NM_003956.2,298-316).
ctaccagcatgtgatgttt

SEQ ID NO: 221224 - DNA, 19 bp, Homo sapiens
  siRNA target sequence for CH25H (NM_003956.2,302-320).
cagcatgtgatgtttgtgt

SEQ ID NO: 221225 - DNA, 19 bp, Homo sapiens
  siRNA target sequence for CH25H (NM_003956.2,524-542).
gcgctggcaacgcagtata

SEQ ID NO: 221226 - DNA, 19 bp, Homo sapiens
  siRNA target sequence for CH25H (NM_003956.2,525-543).
cgctggcaacgcagtatat

SEQ ID NO: 221227 - DNA, 19 bp, Homo sapiens
  siRNA target sequence for CH25H (NM_003956.2,569-587).
ggcttcttcgacatgatga

SEQ ID NO: 221228 - DNA, 19 bp, Homo sapiens
  siRNA target sequence for CH25H (NM_003956.2,662-680).
gaccactccggctacaact

SEQ ID NO: 221229 - DNA, 19 bp, Homo sapiens
  siRNA target sequence for CH25H (NM_003956.2,766-784).
caacttcgctccgtacttt

SEQ ID NO: 221230 - DNA, 19 bp, Homo sapiens
  siRNA target sequence for CH25H (NM_003956.2,769-787).
cttcgctccgtactttaca

SEQ ID NO: 221231 - DNA, 19 bp, Homo sapiens
  siRNA target sequence for CYP27A1 (NM_000784.2,392-410).
gacagctgcgcttcttctt

SEQ ID NO: 221232 - DNA, 19 bp, Homo sapiens
  siRNA target sequence for CYP27A1 (NM_000784.2,448-466).
cagttacaggtgctttaca

SEQ ID NO: 221233 - DNA, 19 bp, Homo sapiens
  siRNA target sequence for CYP27A1 (NM_000784.2,706-724).
gcggaagcagcgctctata

SEQ ID NO: 221234 - DNA, 19 bp, Homo sapiens
  siRNA target sequence for CYP27A1 (NM_000784.2,739-757).
gaggtgattgatgacttta

SEQ ID NO: 221235 - DNA, 19 bp, Homo sapiens
  siRNA target sequence for CYP27A1 (NM_000784.2,809-827).
cggacatggctcaactctt

SEQ ID NO: 221236 - DNA, 19 bp, Homo sapiens
  siRNA target sequence for CYP27A1 (NM_000784.2,817-835).
gctcaactcttctactact

SEQ ID NO: 221237 - DNA, 19 bp, Homo sapiens
  siRNA target sequence for CYP27A1 (NM_000784.2,818-836).
ctcaactcttctactactt

SEQ ID NO: 221238 - DNA, 19 bp, Homo sapiens
  siRNA target sequence for CYP27A1 (NM_000784.2,926-944).
gatccatcgggttaatgtt

SEQ ID NO: 221239 - DNA, 19 bp, Homo sapiens
  siRNA target sequence for CYP27A1 (NM_000784.2,1021-1039).
ggttggaatgccatctttt

SEQ ID NO: 221240 - DNA, 19 bp, Homo sapiens
  siRNA target sequence for CYP27A1 (NM_000784.2,1404-1422).
cacaaactcccggatcata

SEQ ID NO: 221241 - DNA, 19 bp, Homo sapiens
  siRNA target sequence for CYP27A1 (NM_000784.2,1412-1430).
cccggatcatagaaaagga

SEQ ID NO: 221242 - DNA, 19 bp, Homo sapiens
  siRNA target sequence for CYP27A1 (NM_000784.2,1709-1727).
cggagacgggggagttgaa

SEQ ID NO: 221243 - DNA, 19 bp, Homo sapiens
  siRNA target sequence for CYP27A1 (NM_000784.2,1744-1762).
gtcctggttcccaataaga

SEQ ID NO: 221244 - DNA, 19 bp, Homo sapiens
  siRNA target sequence for CYP27A1 (NM_000784.2,1746-1764).
cctggttcccaataagaaa

SEQ ID NO: 221245 - DNA, 19 bp, Homo sapiens
  siRNA target sequence for CYP46A1 (NM_006668.1,195-213).
ggattgggctaagaagtat

SEQ ID NO: 221246 - DNA, 19 bp, Homo sapiens
  siRNA target sequence for CYP46A1 (NM_006668.1,266-284).
gtcctgagtcggttaagaa

SEQ ID NO: 221247 - DNA, 19 bp, Homo sapiens
  siRNA target sequence for CYP46A1 (NM_006668.1,268-286).
cctgagtcggttaagaagt

SEQ ID NO: 221248 - DNA, 19 bp, Homo sapiens
  siRNA target sequence for CYP46A1 (NM_006668.1,269-287).
ctgagtcggttaagaagtt

SEQ ID NO: 221249 - DNA, 19 bp, Homo sapiens
  siRNA target sequence for CYP46A1 (NM_006668.1,289-307).
ctgatgtcaaccaagtaca

SEQ ID NO: 221250 - DNA, 19 bp, Homo sapiens
  siRNA target sequence for CYP46A1 (NM_006668.1,371-389).
gcttggtgtccgaatgcaa

SEQ ID NO: 221251 - DNA, 19 bp, Homo sapiens
  siRNA target sequence for CYP46A1 (NM_006668.1,375-393).
ggtgtccgaatgcaactat

SEQ ID NO: 221252 - DNA, 19 bp, Homo sapiens
  siRNA target sequence for CYP46A1 (NM_006668.1,405-423).
caagcagcggagagtcata

SEQ ID NO: 221253 - DNA, 19 bp, Homo sapiens
  siRNA target sequence for CYP46A1 (NM_006668.1,440-458).
ggagctccttggttagctt

SEQ ID NO: 221254 - DNA, 19 bp, Homo sapiens
  siRNA target sequence for CYP46A1 (NM_006668.1,441-459).
gagctccttggttagctta

SEQ ID NO: 221255 - DNA, 19 bp, Homo sapiens
  siRNA target sequence for CYP46A1 (NM_006668.1,446-464).
ccttggttagcttaatgga

SEQ ID NO: 221256 - DNA, 19 bp, Homo sapiens
  siRNA target sequence for CYP46A1 (NM_006668.1,451-469).
gttagcttaatggaaacat

SEQ ID NO: 221257 - DNA, 19 bp, Homo sapiens
  siRNA target sequence for CYP46A1 (NM_006668.1,635-653).
cccaggcagtgaaacttat

SEQ ID NO: 221258 - DNA, 19 bp, Homo sapiens
  siRNA target sequence for CYP46A1 (NM_006668.1,1000-1018).
gaggtcattggttctaaga

SEQ ID NO: 221259 - DNA, 19 bp, Homo sapiens
  siRNA target sequence for CYP46A1 (NM_006668.1,1197-1215).
gcggatggacacatacttt

SEQ ID NO: 221260 - DNA, 19 bp, Homo sapiens
  siRNA target sequence for FMO1 (NM_002021.1,138-156).
ggcctggcctccatcaagt

SEQ ID NO: 221261 - DNA, 19 bp, Homo sapiens
  siRNA target sequence for FMO1 (NM_002021.1,220-238).
ggagattcaccgaacatgt

SEQ ID NO: 221262 - DNA, 19 bp, Homo sapiens
  siRNA target sequence for FMO1 (NM_002021.1,221-239).
gagattcaccgaacatgtt

SEQ ID NO: 221263 - DNA, 19 bp, Homo sapiens
  siRNA target sequence for FMO1 (NM_002021.1,223-241).
gattcaccgaacatgttga

SEQ ID NO: 221264 - DNA, 19 bp, Homo sapiens
  siRNA target sequence for FMO1 (NM_002021.1,286-304).
gcaaggagatgtcttgtta

SEQ ID NO: 221265 - DNA, 19 bp, Homo sapiens
  siRNA target sequence for FMO1 (NM_002021.1,338-356).
ctatgtgccaaattctcaa

SEQ ID NO: 221266 - DNA, 19 bp, Homo sapiens
  siRNA target sequence for FMO1 (NM_002021.1,422-440).
caaagtctgcagtgtaaca

SEQ ID NO: 221267 - DNA, 19 bp, Homo sapiens
  siRNA target sequence for FMO1 (NM_002021.1,500-518).
gcaagagtcagccatcttt

SEQ ID NO: 221268 - DNA, 19 bp, Homo sapiens
  siRNA target sequence for FMO1 (NM_002021.1,535-553).
gcactggctttcttactaa

SEQ ID NO: 221269 - DNA, 19 bp, Homo sapiens
  siRNA target sequence for FMO1 (NM_002021.1,541-559).
gctttcttactaatcctta

SEQ ID NO: 221270 - DNA, 19 bp, Homo sapiens
  siRNA target sequence for FMO1 (NM_002021.1,542-560).
ctttcttactaatccttat

SEQ ID NO: 221271 - DNA, 19 bp, Homo sapiens
  siRNA target sequence for FMO1 (NM_002021.1,580-598).
caggtattaatgcctttaa

SEQ ID NO: 221272 - DNA, 19 bp, Homo sapiens
  siRNA target sequence for FMO1 (NM_002021.1,592-610).
cctttaaaggccagtactt

SEQ ID NO: 221273 - DNA, 19 bp, Homo sapiens
  siRNA target sequence for FMO1 (NM_002021.1,608-626).
ctttcatagccggcaatat

SEQ ID NO: 221274 - DNA, 19 bp, Homo sapiens
  siRNA target sequence for FMO1 (NM_002021.1,754-772).
gggtgatcagccgaatctt

SEQ ID NO: 221275 - DNA, 19 bp, Homo sapiens
  siRNA target sequence for FMO1 (NM_002021.1,755-773).
ggtgatcagccgaatcttt

SEQ ID NO: 221276 - DNA, 19 bp, Homo sapiens
  siRNA target sequence for FMO1 (NM_002021.1,787-805).
catgggacatggtgttcat

SEQ ID NO: 221277 - DNA, 19 bp, Homo sapiens
  siRNA target sequence for FMO1 (NM_002021.1,808-826).
cacgctttcagaacatgtt

SEQ ID NO: 221278 - DNA, 19 bp, Homo sapiens
  siRNA target sequence for FMO1 (NM_002021.1,860-878).
gttgatggagcgaaagata

SEQ ID NO: 221279 - DNA, 19 bp, Homo sapiens
  siRNA target sequence for FMO1 (NM_002021.1,867-885).
gagcgaaagataaacaact

SEQ ID NO: 221280 - DNA, 19 bp, Homo sapiens
  siRNA target sequence for FMO1 (NM_002021.1,886-904).
ggctcaatcatgcaaatta

SEQ ID NO: 221281 - DNA, 19 bp, Homo sapiens
  siRNA target sequence for FMO1 (NM_002021.1,960-978).
ctcccaggacgcatcatca

SEQ ID NO: 221282 - DNA, 19 bp, Homo sapiens
  siRNA target sequence for FMO1 (NM_002021.1,989-1007).
gttcatcaggccaagcata

SEQ ID NO: 221283 - DNA, 19 bp, Homo sapiens
  siRNA target sequence for FMO1 (NM_002021.1,1059-1077).
cctattgacatcattgtct

SEQ ID NO: 221284 - DNA, 19 bp, Homo sapiens
  siRNA target sequence for FMO1 (NM_002021.1,1118-1136).
gtctgtagtgaaagttgaa

SEQ ID NO: 221285 - DNA, 19 bp, Homo sapiens
  siRNA target sequence for FMO1 (NM_002021.1,1145-1163).
ggcctcactgtacaagtat

SEQ ID NO: 221286 - DNA, 19 bp, Homo sapiens
  siRNA target sequence for FMO1 (NM_002021.1,1146-1164).
gcctcactgtacaagtata

SEQ ID NO: 221287 - DNA, 19 bp, Homo sapiens
  siRNA target sequence for FMO1 (NM_002021.1,1147-1165).
cctcactgtacaagtatat

SEQ ID NO: 221288 - DNA, 19 bp, Homo sapiens
  siRNA target sequence for FMO1 (NM_002021.1,1187-1205).
gccaaccctggccattatt

SEQ ID NO: 221289 - DNA, 19 bp, Homo sapiens
  siRNA target sequence for FMO1 (NM_002021.1,1232-1250).
gatacctacaggagaaaca

SEQ ID NO: 221290 - DNA, 19 bp, Homo sapiens
  siRNA target sequence for FMO1 (NM_002021.1,1300-1318).
caccaagtgtcatgataga

SEQ ID NO: 221291 - DNA, 19 bp, Homo sapiens
  siRNA target sequence for FMO1 (NM_002021.1,1376-1394).
ggctttacaatcagattat

SEQ ID NO: 221292 - DNA, 19 bp, Homo sapiens
  siRNA target sequence for FMO1 (NM_002021.1,1377-1395).
gctttacaatcagattata

SEQ ID NO: 221293 - DNA, 19 bp, Homo sapiens
  siRNA target sequence for FMO1 (NM_002021.1,1407-1425).
gatgaactcctgacctata

SEQ ID NO: 221294 - DNA, 19 bp, Homo sapiens
  siRNA target sequence for FMO1 (NM_002021.1,1410-1428).
gaactcctgacctatatca

SEQ ID NO: 221295 - DNA, 19 bp, Homo sapiens
  siRNA target sequence for FMO1 (NM_002021.1,1592-1610).
catcaaagctcgagttgta

SEQ ID NO: 221296 - DNA, 19 bp, Homo sapiens
  siRNA target sequence for FMO1 (NM_002021.1,1595-1613).
caaagctcgagttgtacaa

SEQ ID NO: 221297 - DNA, 19 bp, Homo sapiens
  siRNA target sequence for FMO3 (NM_006894.3,194-212).
ggcagggctagcatttaca

SEQ ID NO: 221298 - DNA, 19 bp, Homo sapiens
  siRNA target sequence for FMO3 (NM_006894.3,271-289).
cgatgacttccccaacttt

SEQ ID NO: 221299 - DNA, 19 bp, Homo sapiens
  siRNA target sequence for FMO3 (NM_006894.3,272-290).
gatgacttccccaacttta

SEQ ID NO: 221300 - DNA, 19 bp, Homo sapiens
  siRNA target sequence for FMO3 (NM_006894.3,340-358).
gaacctcctgaagtacata

SEQ ID NO: 221301 - DNA, 19 bp, Homo sapiens
  siRNA target sequence for FMO3 (NM_006894.3,346-364).
cctgaagtacatacaattt

SEQ ID NO: 221302 - DNA, 19 bp, Homo sapiens
  siRNA target sequence for FMO3 (NM_006894.3,347-365).
ctgaagtacatacaattta

SEQ ID NO: 221303 - DNA, 19 bp, Homo sapiens
  siRNA target sequence for FMO3 (NM_006894.3,478-496).
ggtttgttccggacatcat

SEQ ID NO: 221304 - DNA, 19 bp, Homo sapiens
  siRNA target sequence for FMO3 (NM_006894.3,483-501).
gttccggacatcatgtgta

SEQ ID NO: 221305 - DNA, 19 bp, Homo sapiens
  siRNA target sequence for FMO3 (NM_006894.3,499-517).
gtatcccaacctaccaaaa

SEQ ID NO: 221306 - DNA, 19 bp, Homo sapiens
  siRNA target sequence for FMO3 (NM_006894.3,527-545).
ccaggactaaaccacttta

SEQ ID NO: 221307 - DNA, 19 bp, Homo sapiens
  siRNA target sequence for FMO3 (NM_006894.3,559-577).
ccacagcagggactataaa

SEQ ID NO: 221308 - DNA, 19 bp, Homo sapiens
  siRNA target sequence for FMO3 (NM_006894.3,624-642).
ggaattcgggctgtgatat

SEQ ID NO: 221309 - DNA, 19 bp, Homo sapiens
  siRNA target sequence for FMO3 (NM_006894.3,625-643).
gaattcgggctgtgatatt

SEQ ID NO: 221310 - DNA, 19 bp, Homo sapiens
  siRNA target sequence for FMO3 (NM_006894.3,663-681).
cagcagaacaggtcatgat

SEQ ID NO: 221311 - DNA, 19 bp, Homo sapiens
  siRNA target sequence for FMO3 (NM_006894.3,665-683).
gcagaacaggtcatgatca

SEQ ID NO: 221312 - DNA, 19 bp, Homo sapiens
  siRNA target sequence for FMO3 (NM_006894.3,713-731).
cgggtctgggacaatggtt

SEQ ID NO: 221313 - DNA, 19 bp, Homo sapiens
  siRNA target sequence for FMO3 (NM_006894.3,714-732).
gggtctgggacaatggtta

SEQ ID NO: 221314 - DNA, 19 bp, Homo sapiens
  siRNA target sequence for FMO3 (NM_006894.3,745-763).
gctgctcgtcactcgattt

SEQ ID NO: 221315 - DNA, 19 bp, Homo sapiens
  siRNA target sequence for FMO3 (NM_006894.3,748-766).
gctcgtcactcgatttgga

SEQ ID NO: 221316 - DNA, 19 bp, Homo sapiens
  siRNA target sequence for FMO3 (NM_006894.3,749-767).
ctcgtcactcgatttggaa

SEQ ID NO: 221317 - DNA, 19 bp, Homo sapiens
  siRNA target sequence for FMO3 (NM_006894.3,765-783).
gaaccttcctcaagaacaa

SEQ ID NO: 221318 - DNA, 19 bp, Homo sapiens
  siRNA target sequence for FMO3 (NM_006894.3,880-898).
gaggaaagagcctgtattt

SEQ ID NO: 221319 - DNA, 19 bp, Homo sapiens
  siRNA target sequence for FMO3 (NM_006894.3,882-900).
ggaaagagcctgtatttaa

SEQ ID NO: 221320 - DNA, 19 bp, Homo sapiens
  siRNA target sequence for FMO3 (NM_006894.3,966-984).
cagagacctcggccatttt

SEQ ID NO: 221321 - DNA, 19 bp, Homo sapiens
  siRNA target sequence for FMO3 (NM_006894.3,1058-1076).
cttgatgagtctatcatca

SEQ ID NO: 221322 - DNA, 19 bp, Homo sapiens
  siRNA target sequence for FMO3 (NM_006894.3,1205-1223).
cgctgggcagcacaagtaa

SEQ ID NO: 221323 - DNA, 19 bp, Homo sapiens
  siRNA target sequence for FMO3 (NM_006894.3,1206-1224).
gctgggcagcacaagtaat

SEQ ID NO: 221324 - DNA, 19 bp, Homo sapiens
  siRNA target sequence for FMO3 (NM_006894.3,1207-1225).
ctgggcagcacaagtaata

SEQ ID NO: 221325 - DNA, 19 bp, Homo sapiens
  siRNA target sequence for FMO3 (NM_006894.3,1209-1227).
gggcagcacaagtaataaa

SEQ ID NO: 221326 - DNA, 19 bp, Homo sapiens
  siRNA target sequence for FMO3 (NM_006894.3,1286-1304).
gagaaaaagcgcaaatggt

SEQ ID NO: 221327 - DNA, 19 bp, Homo sapiens
  siRNA target sequence for FMO3 (NM_006894.3,1316-1334).
gagaccatacagacagatt

SEQ ID NO: 221328 - DNA, 19 bp, Homo sapiens
  siRNA target sequence for FMO3 (NM_006894.3,1325-1343).
cagacagattacattgttt

SEQ ID NO: 221329 - DNA, 19 bp, Homo sapiens
  siRNA target sequence for FMO3 (NM_006894.3,1587-1605).
ggctgaagctctttgcaat

SEQ ID NO: 221330 - DNA, 19 bp, Homo sapiens
  siRNA target sequence for FMO3 (NM_006894.3,1588-1606).
gctgaagctctttgcaatt

SEQ ID NO: 221331 - DNA, 19 bp, Homo sapiens
  siRNA target sequence for FMO3 (NM_006894.3,1594-1612).
gctctttgcaattcctatt

SEQ ID NO: 221332 - DNA, 19 bp, Homo sapiens
  siRNA target sequence for FMO3 (NM_006894.3,1601-1619).
gcaattcctattctgttaa

SEQ ID NO: 221333 - DNA, 19 bp, Homo sapiens
  siRNA target sequence for FMO4 (NM_002022.1,329-347).
gggggattatggaagttta

SEQ ID NO: 221334 - DNA, 19 bp, Homo sapiens
  siRNA target sequence for FMO4 (NM_002022.1,333-351).
gattatggaagtttactga

SEQ ID NO: 221335 - DNA, 19 bp, Homo sapiens
  siRNA target sequence for FMO4 (NM_002022.1,366-384).
ggatgaccagggtctataa

SEQ ID NO: 221336 - DNA, 19 bp, Homo sapiens
  siRNA target sequence for FMO4 (NM_002022.1,372-390).
ccagggtctataagtcatt

SEQ ID NO: 221337 - DNA, 19 bp, Homo sapiens
  siRNA target sequence for FMO4 (NM_002022.1,375-393).
gggtctataagtcattagt

SEQ ID NO: 221338 - DNA, 19 bp, Homo sapiens
  siRNA target sequence for FMO4 (NM_002022.1,377-395).
gtctataagtcattagtga

SEQ ID NO: 221339 - DNA, 19 bp, Homo sapiens
  siRNA target sequence for FMO4 (NM_002022.1,394-412).
gacaaatgtctgtaaggaa

SEQ ID NO: 221340 - DNA, 19 bp, Homo sapiens
  siRNA target sequence for FMO4 (NM_002022.1,433-451).
ccctttccacgaagattat

SEQ ID NO: 221341 - DNA, 19 bp, Homo sapiens
  siRNA target sequence for FMO4 (NM_002022.1,439-457).
ccacgaagattatcctaat

SEQ ID NO: 221342 - DNA, 19 bp, Homo sapiens
  siRNA target sequence for FMO4 (NM_002022.1,440-458).
cacgaagattatcctaatt

SEQ ID NO: 221343 - DNA, 19 bp, Homo sapiens
  siRNA target sequence for FMO4 (NM_002022.1,480-498).
gggactatctccaagaatt

SEQ ID NO: 221344 - DNA, 19 bp, Homo sapiens
  siRNA target sequence for FMO4 (NM_002022.1,481-499).
ggactatctccaagaattt

SEQ ID NO: 221345 - DNA, 19 bp, Homo sapiens
  siRNA target sequence for FMO4 (NM_002022.1,582-600).
ctggtcagtgggatgttgt

SEQ ID NO: 221346 - DNA, 19 bp, Homo sapiens
  siRNA target sequence for FMO4 (NM_002022.1,619-637).
gcaaaatagagctgtcttt

SEQ ID NO: 221347 - DNA, 19 bp, Homo sapiens
  siRNA target sequence for FMO4 (NM_002022.1,667-685).
cctgaatccccatttacct

SEQ ID NO: 221348 - DNA, 19 bp, Homo sapiens
  siRNA target sequence for FMO4 (NM_002022.1,668-686).
ctgaatccccatttacctt

SEQ ID NO: 221349 - DNA, 19 bp, Homo sapiens
  siRNA target sequence for FMO4 (NM_002022.1,692-710).
gcctttcctggaattcata

SEQ ID NO: 221350 - DNA, 19 bp, Homo sapiens
  siRNA target sequence for FMO4 (NM_002022.1,698-716).
cctggaattcataagttta

SEQ ID NO: 221351 - DNA, 19 bp, Homo sapiens
  siRNA target sequence for FMO4 (NM_002022.1,699-717).
ctggaattcataagtttaa

SEQ ID NO: 221352 - DNA, 19 bp, Homo sapiens
  siRNA target sequence for FMO4 (NM_002022.1,720-738).
gtcagatcctgcatagtca

SEQ ID NO: 221353 - DNA, 19 bp, Homo sapiens
  siRNA target sequence for FMO4 (NM_002022.1,796-814).
gaacactggaggagacatt

SEQ ID NO: 221354 - DNA, 19 bp, Homo sapiens
  siRNA target sequence for FMO4 (NM_002022.1,834-852).
cggcagctcaggtacttct

SEQ ID NO: 221355 - DNA, 19 bp, Homo sapiens
  siRNA target sequence for FMO4 (NM_002022.1,844-862).
ggtacttctcagtactaga

SEQ ID NO: 221356 - DNA, 19 bp, Homo sapiens
  siRNA target sequence for FMO4 (NM_002022.1,845-863).
gtacttctcagtactagaa

SEQ ID NO: 221357 - DNA, 19 bp, Homo sapiens
  siRNA target sequence for FMO4 (NM_002022.1,878-896).
cttgggcgctcttcagatt

SEQ ID NO: 221358 - DNA, 19 bp, Homo sapiens
  siRNA target sequence for FMO4 (NM_002022.1,897-915).
ggggctatccttataatat

SEQ ID NO: 221359 - DNA, 19 bp, Homo sapiens
  siRNA target sequence for FMO4 (NM_002022.1,900-918).
gctatccttataatatgat

SEQ ID NO: 221360 - DNA, 19 bp, Homo sapiens
  siRNA target sequence for FMO4 (NM_002022.1,905-923).
ccttataatatgatggtta

SEQ ID NO: 221361 - DNA, 19 bp, Homo sapiens
  siRNA target sequence for FMO4 (NM_002022.1,959-977).
ccttcacgttttctaaact

SEQ ID NO: 221362 - DNA, 19 bp, Homo sapiens
  siRNA target sequence for FMO4 (NM_002022.1,1016-1034).
gaggattatggattaagta

SEQ ID NO: 221363 - DNA, 19 bp, Homo sapiens
  siRNA target sequence for FMO4 (NM_002022.1,1091-1109).
ctctgtggggcaatcacta

SEQ ID NO: 221364 - DNA, 19 bp, Homo sapiens
  siRNA target sequence for FMO4 (NM_002022.1,1095-1113).
gtggggcaatcactatgaa

SEQ ID NO: 221365 - DNA, 19 bp, Homo sapiens
  siRNA target sequence for FMO4 (NM_002022.1,1097-1115).
ggggcaatcactatgaaaa

SEQ ID NO: 221366 - DNA, 19 bp, Homo sapiens
  siRNA target sequence for FMO4 (NM_002022.1,1117-1135).
cagcgtgattgaatttaca

SEQ ID NO: 221367 - DNA, 19 bp, Homo sapiens
  siRNA target sequence for FMO4 (NM_002022.1,1120-1138).
cgtgattgaatttacagaa

SEQ ID NO: 221368 - DNA, 19 bp, Homo sapiens
  siRNA target sequence for FMO4 (NM_002022.1,1157-1175).
gatgggacagtggaagaaa

SEQ ID NO: 221369 - DNA, 19 bp, Homo sapiens
  siRNA target sequence for FMO4 (NM_002022.1,1238-1256).
cttaaaagcctctgtacaa

SEQ ID NO: 221370 - DNA, 19 bp, Homo sapiens
  siRNA target sequence for FMO4 (NM_002022.1,1321-1339).
cggccttatcggccttaaa

SEQ ID NO: 221371 - DNA, 19 bp, Homo sapiens
  siRNA target sequence for FMO4 (NM_002022.1,1324-1342).
ccttatcggccttaaagga

SEQ ID NO: 221372 - DNA, 19 bp, Homo sapiens
  siRNA target sequence for FMO4 (NM_002022.1,1325-1343).
cttatcggccttaaaggat

SEQ ID NO: 221373 - DNA, 19 bp, Homo sapiens
  siRNA target sequence for FMO4 (NM_002022.1,1333-1351).
ccttaaaggatccatctta

SEQ ID NO: 221374 - DNA, 19 bp, Homo sapiens
  siRNA target sequence for FMO4 (NM_002022.1,1334-1352).
cttaaaggatccatcttat

SEQ ID NO: 221375 - DNA, 19 bp, Homo sapiens
  siRNA target sequence for FMO4 (NM_002022.1,1374-1392).
gatgggtcacaagagtatt

SEQ ID NO: 221376 - DNA, 19 bp, Homo sapiens
  siRNA target sequence for FMO4 (NM_002022.1,1393-1411).
caaaggactctgtaagata

SEQ ID NO: 221377 - DNA, 19 bp, Homo sapiens
  siRNA target sequence for FMO4 (NM_002022.1,1415-1433).
ccatcccaaaaattgatga

SEQ ID NO: 221378 - DNA, 19 bp, Homo sapiens
  siRNA target sequence for FMO4 (NM_002022.1,1488-1506).
gcaaagacaaatttgacta

SEQ ID NO: 221379 - DNA, 19 bp, Homo sapiens
  siRNA target sequence for FMO4 (NM_002022.1,1610-1628).
ccatgtactccttatcagt

SEQ ID NO: 221380 - DNA, 19 bp, Homo sapiens
  siRNA target sequence for FMO4 (NM_002022.1,1684-1702).
gtgggacagaacattgaaa

SEQ ID NO: 221381 - DNA, 19 bp, Homo sapiens
  siRNA target sequence for FMO4 (NM_002022.1,1704-1722).
ctttaaaaactcgaattgt

SEQ ID NO: 221382 - DNA, 19 bp, Homo sapiens
  siRNA target sequence for FMO4 (NM_002022.1,1739-1757).
cctgcctccatgtcacatt

SEQ ID NO: 221383 - DNA, 19 bp, Homo sapiens
  siRNA target sequence for FMO4 (NM_002022.1,1740-1758).
ctgcctccatgtcacatta

SEQ ID NO: 221384 - DNA, 19 bp, Homo sapiens
  siRNA target sequence for FMO4 (NM_002022.1,1742-1760).
gcctccatgtcacattatt

SEQ ID NO: 221385 - DNA, 19 bp, Homo sapiens
  siRNA target sequence for FMO4 (NM_002022.1,1743-1761).
cctccatgtcacattattt

SEQ ID NO: 221386 - DNA, 19 bp, Homo sapiens
  siRNA target sequence for FMO4 (NM_002022.1,1799-1817).
ctacttatctgtaaatctt

SEQ ID NO: 221387 - DNA, 19 bp, Homo sapiens
  siRNA target sequence for FMO4 (NM_002022.1,1818-1836).
cacttttcttgaaattggt

SEQ ID NO: 221388 - DNA, 19 bp, Homo sapiens
  siRNA target sequence for FMO4 (NM_002022.1,1828-1846).
gaaattggtgagagataaa

SEQ ID NO: 221389 - DNA, 19 bp, Homo sapiens
  siRNA target sequence for FMO4 (NM_002022.1,1855-1873).
cagaatgtccccttaccta

SEQ ID NO: 221390 - DNA, 19 bp, Homo sapiens
  siRNA target sequence for FMO4 (NM_002022.1,1861-1879).
gtccccttacctagtaagt

SEQ ID NO: 221391 - DNA, 19 bp, Homo sapiens
  siRNA target sequence for FMO4 (NM_002022.1,1863-1881).
ccccttacctagtaagtct

SEQ ID NO: 221392 - DNA, 19 bp, Homo sapiens
  siRNA target sequence for FMO5 (NM_001461.1,124-142).
gggctctcttccatcaagt

SEQ ID NO: 221393 - DNA, 19 bp, Homo sapiens
  siRNA target sequence for FMO5 (NM_001461.1,138-156).
caagtgctgcgtagaagaa

SEQ ID NO: 221394 - DNA, 19 bp, Homo sapiens
  siRNA target sequence for FMO5 (NM_001461.1,232-250).
ggaagggccagtatttaca

SEQ ID NO: 221395 - DNA, 19 bp, Homo sapiens
  siRNA target sequence for FMO5 (NM_001461.1,233-251).
gaagggccagtatttacaa

SEQ ID NO: 221396 - DNA, 19 bp, Homo sapiens
  siRNA target sequence for FMO5 (NM_001461.1,381-399).
ccttctaaagtatattcga

SEQ ID NO: 221397 - DNA, 19 bp, Homo sapiens
  siRNA target sequence for FMO5 (NM_001461.1,382-400).
cttctaaagtatattcgat

SEQ ID NO: 221398 - DNA, 19 bp, Homo sapiens
  siRNA target sequence for FMO5 (NM_001461.1,385-403).
ctaaagtatattcgattta

SEQ ID NO: 221399 - DNA, 19 bp, Homo sapiens
  siRNA target sequence for FMO5 (NM_001461.1,555-573).
ggaaagcttccctggaatt

SEQ ID NO: 221400 - DNA, 19 bp, Homo sapiens
  siRNA target sequence for FMO5 (NM_001461.1,594-612).
cttccacagtcgagactat

SEQ ID NO: 221401 - DNA, 19 bp, Homo sapiens
  siRNA target sequence for FMO5 (NM_001461.1,598-616).
cacagtcgagactataaga

SEQ ID NO: 221402 - DNA, 19 bp, Homo sapiens
  siRNA target sequence for FMO5 (NM_001461.1,630-648).
cactggaaagagagtcatt

SEQ ID NO: 221403 - DNA, 19 bp, Homo sapiens
  siRNA target sequence for FMO5 (NM_001461.1,632-650).
ctggaaagagagtcattat

SEQ ID NO: 221404 - DNA, 19 bp, Homo sapiens
  siRNA target sequence for FMO5 (NM_001461.1,635-653).
gaaagagagtcattataat

SEQ ID NO: 221405 - DNA, 19 bp, Homo sapiens
  siRNA target sequence for FMO5 (NM_001461.1,674-692).
gggatctggctgtagagat

SEQ ID NO: 221406 - DNA, 19 bp, Homo sapiens
  siRNA target sequence for FMO5 (NM_001461.1,676-694).
gatctggctgtagagatta

SEQ ID NO: 221407 - DNA, 19 bp, Homo sapiens
  siRNA target sequence for FMO5 (NM_001461.1,786-804).
gttctcttctcgacttaca

SEQ ID NO: 221408 - DNA, 19 bp, Homo sapiens
  siRNA target sequence for FMO5 (NM_001461.1,794-812).
ctcgacttacacattttat

SEQ ID NO: 221409 - DNA, 19 bp, Homo sapiens
  siRNA target sequence for FMO5 (NM_001461.1,799-817).
cttacacattttatatgga

SEQ ID NO: 221410 - DNA, 19 bp, Homo sapiens
  siRNA target sequence for FMO5 (NM_001461.1,824-842).
gtggccaatcattagcaaa

SEQ ID NO: 221411 - DNA, 19 bp, Homo sapiens
  siRNA target sequence for FMO5 (NM_001461.1,868-886).
caaaggtttgaccatgaaa

SEQ ID NO: 221412 - DNA, 19 bp, Homo sapiens
  siRNA target sequence for FMO5 (NM_001461.1,924-942).
gcatccaaccttaaatgat

SEQ ID NO: 221413 - DNA, 19 bp, Homo sapiens
  siRNA target sequence for FMO5 (NM_001461.1,940-958).
gatgacctgccaaatcgta

SEQ ID NO: 221414 - DNA, 19 bp, Homo sapiens
  siRNA target sequence for FMO5 (NM_001461.1,945-963).
cctgccaaatcgtatcatt

SEQ ID NO: 221415 - DNA, 19 bp, Homo sapiens
  siRNA target sequence for FMO5 (NM_001461.1,946-964).
ctgccaaatcgtatcattt

SEQ ID NO: 221416 - DNA, 19 bp, Homo sapiens
  siRNA target sequence for FMO5 (NM_001461.1,948-966).
gccaaatcgtatcatttct

SEQ ID NO: 221417 - DNA, 19 bp, Homo sapiens
  siRNA target sequence for FMO5 (NM_001461.1,985-1003).
ggaaatgtgaaggaattca

SEQ ID NO: 221418 - DNA, 19 bp, Homo sapiens
  siRNA target sequence for FMO5 (NM_001461.1,1004-1022).
cggagacagctgccatatt

SEQ ID NO: 221419 - DNA, 19 bp, Homo sapiens
  siRNA target sequence for FMO5 (NM_001461.1,1005-1023).
ggagacagctgccatattt

SEQ ID NO: 221420 - DNA, 19 bp, Homo sapiens
  siRNA target sequence for FMO5 (NM_001461.1,1108-1126).
gtcaaagtggtcaaaaaca

SEQ ID NO: 221421 - DNA, 19 bp, Homo sapiens
  siRNA target sequence for FMO5 (NM_001461.1,1161-1179).
cctggaaaggccaactctt

SEQ ID NO: 221422 - DNA, 19 bp, Homo sapiens
  siRNA target sequence for FMO5 (NM_001461.1,1169-1187).
ggccaactcttgcaatcat

SEQ ID NO: 221423 - DNA, 19 bp, Homo sapiens
  siRNA target sequence for FMO5 (NM_001461.1,1170-1188).
gccaactcttgcaatcata

SEQ ID NO: 221424 - DNA, 19 bp, Homo sapiens
  siRNA target sequence for FMO5 (NM_001461.1,1181-1199).
caatcataggcttgattca

SEQ ID NO: 221425 - DNA, 19 bp, Homo sapiens
  siRNA target sequence for FMO5 (NM_001461.1,1211-1229).
ccattatgcccatttcaga

SEQ ID NO: 221426 - DNA, 19 bp, Homo sapiens
  siRNA target sequence for FMO5 (NM_001461.1,1244-1262).
gggccactcaggtatttaa

SEQ ID NO: 221427 - DNA, 19 bp, Homo sapiens
  siRNA target sequence for FMO5 (NM_001461.1,1245-1263).
ggccactcaggtatttaaa

SEQ ID NO: 221428 - DNA, 19 bp, Homo sapiens
  siRNA target sequence for FMO5 (NM_001461.1,1255-1273).
gtatttaaaggtctaaaga

SEQ ID NO: 221429 - DNA, 19 bp, Homo sapiens
  siRNA target sequence for FMO5 (NM_001461.1,1279-1297).
ccctcacagagtgaaatga

SEQ ID NO: 221430 - DNA, 19 bp, Homo sapiens
  siRNA target sequence for FMO5 (NM_001461.1,1280-1298).
cctcacagagtgaaatgat

SEQ ID NO: 221431 - DNA, 19 bp, Homo sapiens
  siRNA target sequence for FMO5 (NM_001461.1,1299-1317).
ggcagaaatatctaaagct

SEQ ID NO: 221432 - DNA, 19 bp, Homo sapiens
  siRNA target sequence for FMO5 (NM_001461.1,1362-1380).
cattcagggagactacata

SEQ ID NO: 221433 - DNA, 19 bp, Homo sapiens
  siRNA target sequence for FMO5 (NM_001461.1,1366-1384).
cagggagactacatagata

SEQ ID NO: 221434 - DNA, 19 bp, Homo sapiens
  siRNA target sequence for FMO5 (NM_001461.1,1455-1473).
gctggcattacacttatta

SEQ ID NO: 221435 - DNA, 19 bp, Homo sapiens
  siRNA target sequence for FMO5 (NM_001461.1,1521-1539).
gtgggatggggctcgaaaa

SEQ ID NO: 221436 - DNA, 19 bp, Homo sapiens
  siRNA target sequence for FMO5 (NM_001461.1,1524-1542).
ggatggggctcgaaaagct

SEQ ID NO: 221437 - DNA, 19 bp, Homo sapiens
  siRNA target sequence for FMO5 (NM_001461.1,1591-1609).
gttgaaaggagtagttcta

SEQ ID NO: 221438 - DNA, 19 bp, Homo sapiens
  siRNA target sequence for FMO5 (NM_001461.1,1594-1612).
gaaaggagtagttctatga

SEQ ID NO: 221439 - DNA, 19 bp, Homo sapiens
  siRNA target sequence for FMO5 (NM_001461.1,1611-1629).
gacttcaacaatgacaata

SEQ ID NO: 221440 - DNA, 19 bp, Homo sapiens
  siRNA target sequence for FMO5 (NM_001461.1,1651-1669).
gccttctttgctataatta

SEQ ID NO: 221441 - DNA, 19 bp, Homo sapiens
  siRNA target sequence for CYP4F8 (NM_007253.2,325-343).
cgtccgatctgtcatcaat

SEQ ID NO: 221442 - DNA, 19 bp, Homo sapiens
  siRNA target sequence for CYP4F8 (NM_007253.2,326-344).
gtccgatctgtcatcaata

SEQ ID NO: 221443 - DNA, 19 bp, Homo sapiens
  siRNA target sequence for CYP4F8 (NM_007253.2,345-363).
cctcagatgccattacaga

SEQ ID NO: 221444 - DNA, 19 bp, Homo sapiens
  siRNA target sequence for CYP4F8 (NM_007253.2,368-386).
gacatagtcttctacaaga

SEQ ID NO: 221445 - DNA, 19 bp, Homo sapiens
  siRNA target sequence for CYP4F8 (NM_007253.2,403-421).
gggggatgggctcttgtta

SEQ ID NO: 221446 - DNA, 19 bp, Homo sapiens
  siRNA target sequence for CYP4F8 (NM_007253.2,914-932).
ctgctgagcgaggataaaa

SEQ ID NO: 221447 - DNA, 19 bp, Homo sapiens
  siRNA target sequence for CYP4F8 (NM_007253.2,916-934).
gctgagcgaggataaaaat

SEQ ID NO: 221448 - DNA, 19 bp, Homo sapiens
  siRNA target sequence for CYP4F8 (NM_007253.2,1256-1274).
gggaatgtctgtaacatca

SEQ ID NO: 221449 - DNA, 19 bp, Homo sapiens
  siRNA target sequence for CYP4F8 (NM_007253.2,1273-1291).
caacatcttcgcaatccat

SEQ ID NO: 221450 - DNA, 19 bp, Homo sapiens
  siRNA target sequence for CYP4F8 (NM_007253.2,1503-1521).
gcaggacgccggagattgt

SEQ ID NO: 221451 - DNA, 19 bp, Homo sapiens
  siRNA target sequence for CYP4F8 (NM_007253.2,1504-1522).
caggacgccggagattgtt

SEQ ID NO: 221452 - DNA, 19 bp, Homo sapiens
  siRNA target sequence for CYP4F8 (NM_007253.2,1506-1524).
ggacgccggagattgtttt

SEQ ID NO: 221453 - DNA, 19 bp, Homo sapiens
  siRNA target sequence for SQLE (NM_003129.2,403-421).
cgccctcttctcggatatt

SEQ ID NO: 221454 - DNA, 19 bp, Homo sapiens
  siRNA target sequence for SQLE (NM_003129.2,405-423).
ccctcttctcggatattct

SEQ ID NO: 221455 - DNA, 19 bp, Homo sapiens
  siRNA target sequence for SQLE (NM_003129.2,407-425).
ctcttctcggatattctct

SEQ ID NO: 221456 - DNA, 19 bp, Homo sapiens
  siRNA target sequence for SQLE (NM_003129.2,505-523).
gcgcagaaaaggaaccaat

SEQ ID NO: 221457 - DNA, 19 bp, Homo sapiens
  siRNA target sequence for SQLE (NM_003129.2,506-524).
cgcagaaaaggaaccaata

SEQ ID NO: 221458 - DNA, 19 bp, Homo sapiens
  siRNA target sequence for SQLE (NM_003129.2,712-730).
cctgcagccgggtggttat

SEQ ID NO: 221459 - DNA, 19 bp, Homo sapiens
  siRNA target sequence for SQLE (NM_003129.2,720-738).
cgggtggttatcatgttct

SEQ ID NO: 221460 - DNA, 19 bp, Homo sapiens
  siRNA target sequence for SQLE (NM_003129.2,723-741).
gtggttatcatgttctcaa

SEQ ID NO: 221461 - DNA, 19 bp, Homo sapiens
  siRNA target sequence for SQLE (NM_003129.2,745-763).
ccttggtcttggagataca

SEQ ID NO: 221462 - DNA, 19 bp, Homo sapiens
  siRNA target sequence for SQLE (NM_003129.2,819-837).
gcaaatcagaggttcagat

SEQ ID NO: 221463 - DNA, 19 bp, Homo sapiens
  siRNA target sequence for SQLE (NM_003129.2,825-843).
cagaggttcagattcctta

SEQ ID NO: 221464 - DNA, 19 bp, Homo sapiens
  siRNA target sequence for SQLE (NM_003129.2,871-889).
gagtggaagagctttccat

SEQ ID NO: 221465 - DNA, 19 bp, Homo sapiens
  siRNA target sequence for SQLE (NM_003129.2,890-908).
cacggaagattcatcatga

SEQ ID NO: 221466 - DNA, 19 bp, Homo sapiens
  siRNA target sequence for SQLE (NM_003129.2,932-950).
gagcccaatgcaaagttta

SEQ ID NO: 221467 - DNA, 19 bp, Homo sapiens
  siRNA target sequence for SQLE (NM_003129.2,934-952).
gcccaatgcaaagtttatt

SEQ ID NO: 221468 - DNA, 19 bp, Homo sapiens
  siRNA target sequence for SQLE (NM_003129.2,956-974).
ggtgttgtgttacagttat

SEQ ID NO: 221469 - DNA, 19 bp, Homo sapiens
  siRNA target sequence for SQLE (NM_003129.2,999-1017).
gagttcagtacaaggataa

SEQ ID NO: 221470 - DNA, 19 bp, Homo sapiens
  siRNA target sequence for SQLE (NM_003129.2,1095-1113).
gcctggtctccaataaagt

SEQ ID NO: 221471 - DNA, 19 bp, Homo sapiens
  siRNA target sequence for SQLE (NM_003129.2,1116-1134).
ctgtatcatctcattttgt

SEQ ID NO: 221472 - DNA, 19 bp, Homo sapiens
  siRNA target sequence for SQLE (NM_003129.2,1150-1168).
gaatgcaccacagtttaaa

SEQ ID NO: 221473 - DNA, 19 bp, Homo sapiens
  siRNA target sequence for SQLE (NM_003129.2,1154-1172).
gcaccacagtttaaagcaa

SEQ ID NO: 221474 - DNA, 19 bp, Homo sapiens
  siRNA target sequence for SQLE (NM_003129.2,1178-1196).
gctgaacttattttagcta

SEQ ID NO: 221475 - DNA, 19 bp, Homo sapiens
  siRNA target sequence for SQLE (NM_003129.2,1200-1218).
cgagtccagttctcatcta

SEQ ID NO: 221476 - DNA, 19 bp, Homo sapiens
  siRNA target sequence for SQLE (NM_003129.2,1233-1251).
gtgaaactcgagtacttgt

SEQ ID NO: 221477 - DNA, 19 bp, Homo sapiens
  siRNA target sequence for SQLE (NM_003129.2,1239-1257).
ctcgagtacttgttgacat

SEQ ID NO: 221478 - DNA, 19 bp, Homo sapiens
  siRNA target sequence for SQLE (NM_003129.2,1241-1259).
cgagtacttgttgacatta

SEQ ID NO: 221479 - DNA, 19 bp, Homo sapiens
  siRNA target sequence for SQLE (NM_003129.2,1427-1445).
cttttgggagacgcatata

SEQ ID NO: 221480 - DNA, 19 bp, Homo sapiens
  siRNA target sequence for SQLE (NM_003129.2,1472-1490).
ggaatgactgttgctttta

SEQ ID NO: 221481 - DNA, 19 bp, Homo sapiens
  siRNA target sequence for SQLE (NM_003129.2,1522-1540).
gggtatccctgacctttat

SEQ ID NO: 221482 - DNA, 19 bp, Homo sapiens
  siRNA target sequence for SQLE (NM_003129.2,1598-1616).
cattcctttgtcgtgaata

SEQ ID NO: 221483 - DNA, 19 bp, Homo sapiens
  siRNA target sequence for SQLE (NM_003129.2,1603-1621).
ctttgtcgtgaatatcctt

SEQ ID NO: 221484 - DNA, 19 bp, Homo sapiens
  siRNA target sequence for SQLE (NM_003129.2,1658-1676).
gattccctgcatcaactaa

SEQ ID NO: 221485 - DNA, 19 bp, Homo sapiens
  siRNA target sequence for SQLE (NM_003129.2,1662-1680).
ccctgcatcaactaagaaa

SEQ ID NO: 221486 - DNA, 19 bp, Homo sapiens
  siRNA target sequence for SQLE (NM_003129.2,1733-1751).
gggctgctttctgtattgt

SEQ ID NO: 221487 - DNA, 19 bp, Homo sapiens
  siRNA target sequence for SQLE (NM_003129.2,1783-1801).
ctttgctgttgcaatctat

SEQ ID NO: 221488 - DNA, 19 bp, Homo sapiens
  siRNA target sequence for SQLE (NM_003129.2,1793-1811).
gcaatctatgccgtgtatt

SEQ ID NO: 221489 - DNA, 19 bp, Homo sapiens
  siRNA target sequence for SQLE (NM_003129.2,1794-1812).
caatctatgccgtgtattt

SEQ ID NO: 221490 - DNA, 19 bp, Homo sapiens
  siRNA target sequence for SQLE (NM_003129.2,1876-1894).
gtacaaagcgtgttctgta

SEQ ID NO: 221491 - DNA, 19 bp, Homo sapiens
  siRNA target sequence for SQLE (NM_003129.2,1879-1897).
caaagcgtgttctgtaata

SEQ ID NO: 221492 - DNA, 19 bp, Homo sapiens
  siRNA target sequence for TYR (NM_000372.2,569-587).
gcctgtgtctcctctaaga

SEQ ID NO: 221493 - DNA, 19 bp, Homo sapiens
  siRNA target sequence for TYR (NM_000372.2,657-675).
gaggttcctgtcagaatat

SEQ ID NO: 221494 - DNA, 19 bp, Homo sapiens
  siRNA target sequence for TYR (NM_000372.2,738-756).
cgtggccttccgtctttta

SEQ ID NO: 221495 - DNA, 19 bp, Homo sapiens
  siRNA target sequence for TYR (NM_000372.2,739-757).
gtggccttccgtcttttat

SEQ ID NO: 221496 - DNA, 19 bp, Homo sapiens
  siRNA target sequence for TYR (NM_000372.2,742-760).
gccttccgtcttttataat

SEQ ID NO: 221497 - DNA, 19 bp, Homo sapiens
  siRNA target sequence for TYR (NM_000372.2,780-798).
gcaacttcatgggattcaa

SEQ ID NO: 221498 - DNA, 19 bp, Homo sapiens
  siRNA target sequence for TYR (NM_000372.2,848-866).
cgactcttggtgagaagaa

SEQ ID NO: 221499 - DNA, 19 bp, Homo sapiens
  siRNA target sequence for TYR (NM_000372.2,908-926).
gcctacctcactttagcaa

SEQ ID NO: 221500 - DNA, 19 bp, Homo sapiens
  siRNA target sequence for TYR (NM_000372.2,933-951).
ccatcagctcagactatgt

SEQ ID NO: 221501 - DNA, 19 bp, Homo sapiens
  siRNA target sequence for TYR (NM_000372.2,962-980).
gggacctatggccaaatga

SEQ ID NO: 221502 - DNA, 19 bp, Homo sapiens
  siRNA target sequence for TYR (NM_000372.2,990-1008).
caacacccatgtttaacga

SEQ ID NO: 221503 - DNA, 19 bp, Homo sapiens
  siRNA target sequence for TYR (NM_000372.2,996-1014).
ccatgtttaacgacatcaa

SEQ ID NO: 221504 - DNA, 19 bp, Homo sapiens
  siRNA target sequence for TYR (NM_000372.2,1027-1045).
ctttgtctggatgcattat

SEQ ID NO: 221505 - DNA, 19 bp, Homo sapiens
  siRNA target sequence for TYR (NM_000372.2,1147-1165).
gttgcggtgggaacaagaa

SEQ ID NO: 221506 - DNA, 19 bp, Homo sapiens
  siRNA target sequence for TYR (NM_000372.2,1182-1200).
gagatgaaaacttcactat

SEQ ID NO: 221507 - DNA, 19 bp, Homo sapiens
  siRNA target sequence for TYR (NM_000372.2,1270-1288).
ccccacaaatcctaactta

SEQ ID NO: 221508 - DNA, 19 bp, Homo sapiens
  siRNA target sequence for TYR (NM_000372.2,1272-1290).
ccacaaatcctaacttact

SEQ ID NO: 221509 - DNA, 19 bp, Homo sapiens
  siRNA target sequence for TYR (NM_000372.2,1332-1350).
gccgattggaggagtacaa

SEQ ID NO: 221510 - DNA, 19 bp, Homo sapiens
  siRNA target sequence for TYR (NM_000372.2,1353-1371).
gccatcagtctttatgcaa

SEQ ID NO: 221511 - DNA, 19 bp, Homo sapiens
  siRNA target sequence for TYR (NM_000372.2,1396-1414).
gcgtaatcctggaaaccat

SEQ ID NO: 221512 - DNA, 19 bp, Homo sapiens
  siRNA target sequence for TYR (NM_000372.2,1438-1456).
cccctcttcagctgatgta

SEQ ID NO: 221513 - DNA, 19 bp, Homo sapiens
  siRNA target sequence for TYR (NM_000372.2,1468-1486).
gagtttgacccaatatgaa

SEQ ID NO: 221514 - DNA, 19 bp, Homo sapiens
  siRNA target sequence for TYR (NM_000372.2,1484-1502).
gaatctggttccatggata

SEQ ID NO: 221515 - DNA, 19 bp, Homo sapiens
  siRNA target sequence for TYR (NM_000372.2,1499-1517).
gataaagctgccaatttca

SEQ ID NO: 221516 - DNA, 19 bp, Homo sapiens
  siRNA target sequence for TYR (NM_000372.2,1508-1526).
gccaatttcagctttagaa

SEQ ID NO: 221517 - DNA, 19 bp, Homo sapiens
  siRNA target sequence for TYR (NM_000372.2,1524-1542).
gaaatacactggaaggatt

SEQ ID NO: 221518 - DNA, 19 bp, Homo sapiens
  siRNA target sequence for TYR (NM_000372.2,1591-1609).
caatgccttgcacatctat

SEQ ID NO: 221519 - DNA, 19 bp, Homo sapiens
  siRNA target sequence for TYR (NM_000372.2,1596-1614).
ccttgcacatctatatgaa

SEQ ID NO: 221520 - DNA, 19 bp, Homo sapiens
  siRNA target sequence for TYR (NM_000372.2,1597-1615).
cttgcacatctatatgaat

SEQ ID NO: 221521 - DNA, 19 bp, Homo sapiens
  siRNA target sequence for TYR (NM_000372.2,1641-1659).
ctgccaacgatcctatctt

SEQ ID NO: 221522 - DNA, 19 bp, Homo sapiens
  siRNA target sequence for TYR (NM_000372.2,1758-1776).
gacataaccgggaatccta

SEQ ID NO: 221523 - DNA, 19 bp, Homo sapiens
  siRNA target sequence for TYR (NM_000372.2,1774-1792).
ctacatggttccttttata

SEQ ID NO: 221524 - DNA, 19 bp, Homo sapiens
  siRNA target sequence for TYR (NM_000372.2,1777-1795).
catggttccttttatacca

SEQ ID NO: 221525 - DNA, 19 bp, Homo sapiens
  siRNA target sequence for TYR (NM_000372.2,1816-1834).
ctttatttcatccaaagat

SEQ ID NO: 221526 - DNA, 19 bp, Homo sapiens
  siRNA target sequence for TYR (NM_000372.2,1832-1850).
gatctgggctatgactata

SEQ ID NO: 221527 - DNA, 19 bp, Homo sapiens
  siRNA target sequence for TYR (NM_000372.2,1846-1864).
ctatagctatctacaagat

SEQ ID NO: 221528 - DNA, 19 bp, Homo sapiens
  siRNA target sequence for TYR (NM_000372.2,1851-1869).
gctatctacaagattcaga

SEQ ID NO: 221529 - DNA, 19 bp, Homo sapiens
  siRNA target sequence for KMO (NM_003679.1,96-114).
gcttggttggctcattaca

SEQ ID NO: 221530 - DNA, 19 bp, Homo sapiens
  siRNA target sequence for KMO (NM_003679.1,97-115).
cttggttggctcattacaa

SEQ ID NO: 221531 - DNA, 19 bp, Homo sapiens
  siRNA target sequence for KMO (NM_003679.1,135-153).
ggaatttccagattgatgt

SEQ ID NO: 221532 - DNA, 19 bp, Homo sapiens
  siRNA target sequence for KMO (NM_003679.1,192-210).
cacgtggaagaagcattaa

SEQ ID NO: 221533 - DNA, 19 bp, Homo sapiens
  siRNA target sequence for KMO (NM_003679.1,255-273).
gcctggaagatcagattgt

SEQ ID NO: 221534 - DNA, 19 bp, Homo sapiens
  siRNA target sequence for KMO (NM_003679.1,307-325).
ccactctctttcaggaaaa

SEQ ID NO: 221535 - DNA, 19 bp, Homo sapiens
  siRNA target sequence for KMO (NM_003679.1,413-431).
gagaaataccccaatgtga

SEQ ID NO: 221536 - DNA, 19 bp, Homo sapiens
  siRNA target sequence for KMO (NM_003679.1,415-433).
gaaataccccaatgtgaaa

SEQ ID NO: 221537 - DNA, 19 bp, Homo sapiens
  siRNA target sequence for KMO (NM_003679.1,451-469).
gctgttgaaatgtaatcca

SEQ ID NO: 221538 - DNA, 19 bp, Homo sapiens
  siRNA target sequence for KMO (NM_003679.1,567-585).
gatctcacctgatgaagaa

SEQ ID NO: 221539 - DNA, 19 bp, Homo sapiens
  siRNA target sequence for KMO (NM_003679.1,623-641).
gggtacatggagttgacta

SEQ ID NO: 221540 - DNA, 19 bp, Homo sapiens
  siRNA target sequence for KMO (NM_003679.1,628-646).
catggagttgactattcca

SEQ ID NO: 221541 - DNA, 19 bp, Homo sapiens
  siRNA target sequence for KMO (NM_003679.1,645-663).
cacctaagaacggagatta

SEQ ID NO: 221542 - DNA, 19 bp, Homo sapiens
  siRNA target sequence for KMO (NM_003679.1,666-684).
ccatggaacctaattatct

SEQ ID NO: 221543 - DNA, 19 bp, Homo sapiens
  siRNA target sequence for KMO (NM_003679.1,685-703).
gcatatttggcctagaaat

SEQ ID NO: 221544 - DNA, 19 bp, Homo sapiens
  siRNA target sequence for KMO (NM_003679.1,725-743).
cctaacatgaacaaatcat

SEQ ID NO: 221545 - DNA, 19 bp, Homo sapiens
  siRNA target sequence for KMO (NM_003679.1,831-849).
cggatgccatccctctaat

SEQ ID NO: 221546 - DNA, 19 bp, Homo sapiens
  siRNA target sequence for KMO (NM_003679.1,896-914).
cccatgatatctgtaaagt

SEQ ID NO: 221547 - DNA, 19 bp, Homo sapiens
  siRNA target sequence for KMO (NM_003679.1,906-924).
ctgtaaagtgctcttcatt

SEQ ID NO: 221548 - DNA, 19 bp, Homo sapiens
  siRNA target sequence for KMO (NM_003679.1,978-996).
cgttttttgggcaaggaat

SEQ ID NO: 221549 - DNA, 19 bp, Homo sapiens
  siRNA target sequence for KMO (NM_003679.1,1073-1091).
cctgtgttctcaagattga

SEQ ID NO: 221550 - DNA, 19 bp, Homo sapiens
  siRNA target sequence for KMO (NM_003679.1,1110-1128).
cgatttcagacctatccat

SEQ ID NO: 221551 - DNA, 19 bp, Homo sapiens
  siRNA target sequence for KMO (NM_003679.1,1116-1134).
cagacctatccatgtacaa

SEQ ID NO: 221552 - DNA, 19 bp, Homo sapiens
  siRNA target sequence for KMO (NM_003679.1,1125-1143).
ccatgtacaattacataga

SEQ ID NO: 221553 - DNA, 19 bp, Homo sapiens
  siRNA target sequence for KMO (NM_003679.1,1167-1185).
gctggttcatttttcagaa

SEQ ID NO: 221554 - DNA, 19 bp, Homo sapiens
  siRNA target sequence for KMO (NM_003679.1,1222-1240).
gacctttatccctctctat

SEQ ID NO: 221555 - DNA, 19 bp, Homo sapiens
  siRNA target sequence for KMO (NM_003679.1,1427-1445).
gctcacttccggaatacaa

SEQ ID NO: 221556 - DNA, 19 bp, Homo sapiens
  siRNA target sequence for KMO (NM_003679.1,1430-1448).
cacttccggaatacaacat

SEQ ID NO: 221557 - DNA, 19 bp, Homo sapiens
  siRNA target sequence for KMO (NM_003679.1,1464-1482).
ccgtggactccctagaaca

SEQ ID NO: 221558 - DNA, 19 bp, Homo sapiens
  siRNA target sequence for KMO (NM_003679.1,1465-1483).
cgtggactccctagaacaa

SEQ ID NO: 221559 - DNA, 19 bp, Homo sapiens
  siRNA target sequence for KMO (NM_003679.1,1468-1486).
ggactccctagaacaaatt

SEQ ID NO: 221560 - DNA, 19 bp, Homo sapiens
  siRNA target sequence for KMO (NM_003679.1,1469-1487).
gactccctagaacaaattt

SEQ ID NO: 221561 - DNA, 19 bp, Homo sapiens
  siRNA target sequence for CYP27B1 (NM_000785.2,733-751).
gtgggctcggtgtttgtgt

SEQ ID NO: 221562 - DNA, 19 bp, Homo sapiens
  siRNA target sequence for CYP27B1 (NM_000785.2,831-849).
ggaccagatgtttgcattt

SEQ ID NO: 221563 - DNA, 19 bp, Homo sapiens
  siRNA target sequence for CYP27B1 (NM_000785.2,1204-1222).
cctgtggtacctggaaatt

SEQ ID NO: 221564 - DNA, 19 bp, Homo sapiens
  siRNA target sequence for CYP27B1 (NM_000785.2,1225-1243).
cgtgtcccagacaaagaca

SEQ ID NO: 221565 - DNA, 19 bp, Homo sapiens
  siRNA target sequence for CYP27B1 (NM_000785.2,1281-1299).
ggtcactctgtgtcactat

SEQ ID NO: 221566 - DNA, 19 bp, Homo sapiens
  siRNA target sequence for CYP27B1 (NM_000785.2,1323-1341).
gttcccagagccaaattct

SEQ ID NO: 221567 - DNA, 19 bp, Homo sapiens
  siRNA target sequence for CYP27B1 (NM_000785.2,1435-1453).
cgcctggcagagcttgaat

SEQ ID NO: 221568 - DNA, 19 bp, Homo sapiens
  siRNA target sequence for CYP27B1 (NM_000785.2,1436-1454).
gcctggcagagcttgaatt

SEQ ID NO: 221569 - DNA, 19 bp, Homo sapiens
  siRNA target sequence for CYP27B1 (NM_000785.2,1462-1480).
gctttggcccagatcctaa

SEQ ID NO: 221570 - DNA, 19 bp, Homo sapiens
  siRNA target sequence for CYP27B1 (NM_000785.2,1559-1577).
gcatcaacctacagttttt

SEQ ID NO: 221571 - DNA, 19 bp, Homo sapiens
  siRNA target sequence for CYP26A1 (NM_000783.2,243-261).
ggaaatacggcttcatcta

SEQ ID NO: 221572 - DNA, 19 bp, Homo sapiens
  siRNA target sequence for CYP26A1 (NM_000783.2,428-446).
cagcgcaagaaggtgatta

SEQ ID NO: 221573 - DNA, 19 bp, Homo sapiens
  siRNA target sequence for CYP26A1 (NM_000783.2,462-480).
gcgaggcactcgaatgcta

SEQ ID NO: 221574 - DNA, 19 bp, Homo sapiens
  siRNA target sequence for CYP26A1 (NM_000783.2,671-689).
gaaatgacccgcaatctct

SEQ ID NO: 221575 - DNA, 19 bp, Homo sapiens
  siRNA target sequence for CYP26A1 (NM_000783.2,760-778).
gcgcatcgagcagaacatt

SEQ ID NO: 221576 - DNA, 19 bp, Homo sapiens
  siRNA target sequence for CYP26A1 (NM_000783.2,887-905).
caggcactaaagcaatctt

SEQ ID NO: 221577 - DNA, 19 bp, Homo sapiens
  siRNA target sequence for CYP26A1 (NM_000783.2,889-907).
ggcactaaagcaatcttca

SEQ ID NO: 221578 - DNA, 19 bp, Homo sapiens
  siRNA target sequence for CYP26A1 (NM_000783.2,890-908).
gcactaaagcaatcttcaa

SEQ ID NO: 221579 - DNA, 19 bp, Homo sapiens
  siRNA target sequence for CYP26A1 (NM_000783.2,950-968).
gccacatctctgatcactt

SEQ ID NO: 221580 - DNA, 19 bp, Homo sapiens
  siRNA target sequence for CYP26A1 (NM_000783.2,951-969).
ccacatctctgatcactta

SEQ ID NO: 221581 - DNA, 19 bp, Homo sapiens
  siRNA target sequence for CYP26A1 (NM_000783.2,973-991).
ggggctctacccacatgtt

SEQ ID NO: 221582 - DNA, 19 bp, Homo sapiens
  siRNA target sequence for CYP26A1 (NM_000783.2,1020-1038).
gtaagggtttactttgcaa

SEQ ID NO: 221583 - DNA, 19 bp, Homo sapiens
  siRNA target sequence for CYP26A1 (NM_000783.2,1041-1059).
gcaatcaagacaacaagtt

SEQ ID NO: 221584 - DNA, 19 bp, Homo sapiens
  siRNA target sequence for CYP26A1 (NM_000783.2,1054-1072).
caagttggacatggaaatt

SEQ ID NO: 221585 - DNA, 19 bp, Homo sapiens
  siRNA target sequence for CYP26A1 (NM_000783.2,1148-1166).
cgggttgctctgaagactt

SEQ ID NO: 221586 - DNA, 19 bp, Homo sapiens
  siRNA target sequence for CYP26A1 (NM_000783.2,1150-1168).
ggttgctctgaagactttt

SEQ ID NO: 221587 - DNA, 19 bp, Homo sapiens
  siRNA target sequence for CYP26A1 (NM_000783.2,1191-1209).
ccaagggctggaatgttat

SEQ ID NO: 221588 - DNA, 19 bp, Homo sapiens
  siRNA target sequence for CYP26A1 (NM_000783.2,1196-1214).
ggctggaatgttatctaca

SEQ ID NO: 221589 - DNA, 19 bp, Homo sapiens
  siRNA target sequence for CYP26A1 (NM_000783.2,1200-1218).
ggaatgttatctacagtat

SEQ ID NO: 221590 - DNA, 19 bp, Homo sapiens
  siRNA target sequence for CYP26A1 (NM_000783.2,1210-1228).
ctacagtatctgtgatact

SEQ ID NO: 221591 - DNA, 19 bp, Homo sapiens
  siRNA target sequence for CYP26A1 (NM_000783.2,1213-1231).
cagtatctgtgatactcat

SEQ ID NO: 221592 - DNA, 19 bp, Homo sapiens
  siRNA target sequence for CYP26A1 (NM_000783.2,1345-1363).
gagctgtgtaggcaaagaa

SEQ ID NO: 221593 - DNA, 19 bp, Homo sapiens
  siRNA target sequence for CYP26A1 (NM_000783.2,1433-1451).
ggacctcctacaatgaaaa

SEQ ID NO: 221594 - DNA, 19 bp, Homo sapiens
  siRNA target sequence for CYP26A1 (NM_000783.2,1499-1517).
catttccatggggaaatct

SEQ ID NO: 221595 - DNA, 19 bp, Homo sapiens
  siRNA target sequence for CYP2J2 (NM_000775.2,204-222).
gaggttcagctgtttgtga

SEQ ID NO: 221596 - DNA, 19 bp, Homo sapiens
  siRNA target sequence for CYP2J2 (NM_000775.2,245-263).
cttggagcttggtgacata

SEQ ID NO: 221597 - DNA, 19 bp, Homo sapiens
  siRNA target sequence for CYP2J2 (NM_000775.2,344-362).
gacccctatgcgagaacat

SEQ ID NO: 221598 - DNA, 19 bp, Homo sapiens
  siRNA target sequence for CYP2J2 (NM_000775.2,346-364).
cccctatgcgagaacatat

SEQ ID NO: 221599 - DNA, 19 bp, Homo sapiens
  siRNA target sequence for CYP2J2 (NM_000775.2,348-366).
cctatgcgagaacatatct

SEQ ID NO: 221600 - DNA, 19 bp, Homo sapiens
  siRNA target sequence for CYP2J2 (NM_000775.2,349-367).
ctatgcgagaacatatctt

SEQ ID NO: 221601 - DNA, 19 bp, Homo sapiens
  siRNA target sequence for CYP2J2 (NM_000775.2,431-449).
gacagcactaaggaacttt

SEQ ID NO: 221602 - DNA, 19 bp, Homo sapiens
  siRNA target sequence for CYP2J2 (NM_000775.2,436-454).
cactaaggaactttggttt

SEQ ID NO: 221603 - DNA, 19 bp, Homo sapiens
  siRNA target sequence for CYP2J2 (NM_000775.2,543-561).
cctcatttcaagatcaaca

SEQ ID NO: 221604 - DNA, 19 bp, Homo sapiens
  siRNA target sequence for CYP2J2 (NM_000775.2,564-582).
gcagtttccaatatcattt

SEQ ID NO: 221605 - DNA, 19 bp, Homo sapiens
  siRNA target sequence for CYP2J2 (NM_000775.2,567-585).
gtttccaatatcatttgct

SEQ ID NO: 221606 - DNA, 19 bp, Homo sapiens
  siRNA target sequence for CYP2J2 (NM_000775.2,648-666).
ctagatgaagtcacatact

SEQ ID NO: 221607 - DNA, 19 bp, Homo sapiens
  siRNA target sequence for CYP2J2 (NM_000775.2,680-698).
gacatgccagctctacaat

SEQ ID NO: 221608 - DNA, 19 bp, Homo sapiens
  siRNA target sequence for CYP2J2 (NM_000775.2,682-700).
catgccagctctacaatgt

SEQ ID NO: 221609 - DNA, 19 bp, Homo sapiens
  siRNA target sequence for CYP2J2 (NM_000775.2,781-799).
ctcatatgattgacaaaca

SEQ ID NO: 221610 - DNA, 19 bp, Homo sapiens
  siRNA target sequence for CYP2J2 (NM_000775.2,869-887).
cacaggcaatcctacttca

SEQ ID NO: 221611 - DNA, 19 bp, Homo sapiens
  siRNA target sequence for CYP2J2 (NM_000775.2,965-983).
gcgatgggctctgctttat

SEQ ID NO: 221612 - DNA, 19 bp, Homo sapiens
  siRNA target sequence for CYP2J2 (NM_000775.2,966-984).
cgatgggctctgctttata

SEQ ID NO: 221613 - DNA, 19 bp, Homo sapiens
  siRNA target sequence for CYP2J2 (NM_000775.2,1264-1282).
cattcaatccggaccattt

SEQ ID NO: 221614 - DNA, 19 bp, Homo sapiens
  siRNA target sequence for CYP2J2 (NM_000775.2,1366-1384).
ccaggactgagctgtttat

SEQ ID NO: 221615 - DNA, 19 bp, Homo sapiens
  siRNA target sequence for CYP2J2 (NM_000775.2,1367-1385).
caggactgagctgtttatt

SEQ ID NO: 221616 - DNA, 19 bp, Homo sapiens
  siRNA target sequence for CYP2J2 (NM_000775.2,1391-1409).
cacttcccttatgcaaaaa

SEQ ID NO: 221617 - DNA, 19 bp, Homo sapiens
  siRNA target sequence for COQ6 (NM_182476.1,235-253).
gtgccttgggatatgatat

SEQ ID NO: 221618 - DNA, 19 bp, Homo sapiens
  siRNA target sequence for COQ6 (NM_182476.1,244-262).
gatatgatattcactttca

SEQ ID NO: 221619 - DNA, 19 bp, Homo sapiens
  siRNA target sequence for COQ6 (NM_182476.1,255-273).
cactttcatgacaagaaaa

SEQ ID NO: 221620 - DNA, 19 bp, Homo sapiens
  siRNA target sequence for COQ6 (NM_182476.1,284-302).
cgaagcaggtccaaagaaa

SEQ ID NO: 221621 - DNA, 19 bp, Homo sapiens
  siRNA target sequence for COQ6 (NM_182476.1,458-476).
ggccctgataatgtttgat

SEQ ID NO: 221622 - DNA, 19 bp, Homo sapiens
  siRNA target sequence for COQ6 (NM_182476.1,459-477).
gccctgataatgtttgata

SEQ ID NO: 221623 - DNA, 19 bp, Homo sapiens
  siRNA target sequence for COQ6 (NM_182476.1,460-478).
ccctgataatgtttgataa

SEQ ID NO: 221624 - DNA, 19 bp, Homo sapiens
  siRNA target sequence for COQ6 (NM_182476.1,499-517).
gctatatcgtggagaatga

SEQ ID NO: 221625 - DNA, 19 bp, Homo sapiens
  siRNA target sequence for COQ6 (NM_182476.1,500-518).
ctatatcgtggagaatgat

SEQ ID NO: 221626 - DNA, 19 bp, Homo sapiens
  siRNA target sequence for COQ6 (NM_182476.1,634-652).
ccagcccttgggttcatat

SEQ ID NO: 221627 - DNA, 19 bp, Homo sapiens
  siRNA target sequence for COQ6 (NM_182476.1,635-653).
cagcccttgggttcatatt

SEQ ID NO: 221628 - DNA, 19 bp, Homo sapiens
  siRNA target sequence for COQ6 (NM_182476.1,677-695).
ccagaccaaattgttgata

SEQ ID NO: 221629 - DNA, 19 bp, Homo sapiens
  siRNA target sequence for COQ6 (NM_182476.1,743-761).
gaatgtgagctggaactat

SEQ ID NO: 221630 - DNA, 19 bp, Homo sapiens
  siRNA target sequence for COQ6 (NM_182476.1,815-833).
cgtagcctggcagagattt

SEQ ID NO: 221631 - DNA, 19 bp, Homo sapiens
  siRNA target sequence for COQ6 (NM_182476.1,892-910).
ggtccacgtcccatgaaca

SEQ ID NO: 221632 - DNA, 19 bp, Homo sapiens
  siRNA target sequence for COQ6 (NM_182476.1,893-911).
gtccacgtcccatgaacat

SEQ ID NO: 221633 - DNA, 19 bp, Homo sapiens
  siRNA target sequence for COQ6 (NM_182476.1,909-927).
catgcagcagagctagtta

SEQ ID NO: 221634 - DNA, 19 bp, Homo sapiens
  siRNA target sequence for COQ6 (NM_182476.1,913-931).
cagcagagctagttagcat

SEQ ID NO: 221635 - DNA, 19 bp, Homo sapiens
  siRNA target sequence for COQ6 (NM_182476.1,982-1000).
ctgaccacacggacttcat

SEQ ID NO: 221636 - DNA, 19 bp, Homo sapiens
  siRNA target sequence for COQ6 (NM_182476.1,1204-1222).
caggacagggtgtcaacat

SEQ ID NO: 221637 - DNA, 19 bp, Homo sapiens
  siRNA target sequence for COQ6 (NM_182476.1,1259-1277).
cagtacggcagccttcaat

SEQ ID NO: 221638 - DNA, 19 bp, Homo sapiens
  siRNA target sequence for COQ6 (NM_182476.1,1300-1318).
gccacctcacaggttatga

SEQ ID NO: 221639 - DNA, 19 bp, Homo sapiens
  siRNA target sequence for COQ6 (NM_182476.1,1304-1322).
cctcacaggttatgaaaca

SEQ ID NO: 221640 - DNA, 19 bp, Homo sapiens
  siRNA target sequence for COQ6 (NM_182476.1,1312-1330).
gttatgaaacagaaagaca

SEQ ID NO: 221641 - DNA, 19 bp, Homo sapiens
  siRNA target sequence for COQ6 (NM_182476.1,1352-1370).
ggctgctacagacttacta

SEQ ID NO: 221642 - DNA, 19 bp, Homo sapiens
  siRNA target sequence for COQ6 (NM_182476.1,1356-1374).
gctacagacttactaaaaa

SEQ ID NO: 221643 - DNA, 19 bp, Homo sapiens
  siRNA target sequence for COQ6 (NM_182476.1,1390-1408).
gtgcctccccgcttgtgtt

SEQ ID NO: 221644 - DNA, 19 bp, Homo sapiens
  siRNA target sequence for COQ6 (NM_182476.1,1424-1442).
cttgcaggccacaaatgca

SEQ ID NO: 221645 - DNA, 19 bp, Homo sapiens
  siRNA target sequence for COQ6 (NM_182476.1,1449-1467).
ccactcaaagaacagatta

SEQ ID NO: 221646 - DNA, 19 bp, Homo sapiens
  siRNA target sequence for COQ6 (NM_182476.1,1450-1468).
cactcaaagaacagattat

SEQ ID NO: 221647 - DNA, 19 bp, Homo sapiens
  siRNA target sequence for CYP19A1 (NM_000103.2,156-174).
gctgaacccgatacattat

SEQ ID NO: 221648 - DNA, 19 bp, Homo sapiens
  siRNA target sequence for CYP19A1 (NM_000103.2,157-175).
ctgaacccgatacattata

SEQ ID NO: 221649 - DNA, 19 bp, Homo sapiens
  siRNA target sequence for CYP19A1 (NM_000103.2,163-181).
ccgatacattataacatca

SEQ ID NO: 221650 - DNA, 19 bp, Homo sapiens
  siRNA target sequence for CYP19A1 (NM_000103.2,352-370).
ggcagtgcctgcaactact

SEQ ID NO: 221651 - DNA, 19 bp, Homo sapiens
  siRNA target sequence for CYP19A1 (NM_000103.2,353-371).
gcagtgcctgcaactacta

SEQ ID NO: 221652 - DNA, 19 bp, Homo sapiens
  siRNA target sequence for CYP19A1 (NM_000103.2,369-387).
ctacaaccgggtatatgga

SEQ ID NO: 221653 - DNA, 19 bp, Homo sapiens
  siRNA target sequence for CYP19A1 (NM_000103.2,376-394).
cgggtatatggagaattca

SEQ ID NO: 221654 - DNA, 19 bp, Homo sapiens
  siRNA target sequence for CYP19A1 (NM_000103.2,415-433).
gaggaaacactcattatca

SEQ ID NO: 221655 - DNA, 19 bp, Homo sapiens
  siRNA target sequence for CYP19A1 (NM_000103.2,434-452).
gcaagtcctcaagtatgtt

SEQ ID NO: 221656 - DNA, 19 bp, Homo sapiens
  siRNA target sequence for CYP19A1 (NM_000103.2,443-461).
caagtatgttccacataat

SEQ ID NO: 221657 - DNA, 19 bp, Homo sapiens
  siRNA target sequence for CYP19A1 (NM_000103.2,507-525).
gcagtgcatcggtatgcat

SEQ ID NO: 221658 - DNA, 19 bp, Homo sapiens
  siRNA target sequence for CYP19A1 (NM_000103.2,512-530).
gcatcggtatgcatgagaa

SEQ ID NO: 221659 - DNA, 19 bp, Homo sapiens
  siRNA target sequence for CYP19A1 (NM_000103.2,513-531).
catcggtatgcatgagaaa

SEQ ID NO: 221660 - DNA, 19 bp, Homo sapiens
  siRNA target sequence for CYP19A1 (NM_000103.2,532-550).
ggcatcatatttaacaaca

SEQ ID NO: 221661 - DNA, 19 bp, Homo sapiens
  siRNA target sequence for CYP19A1 (NM_000103.2,667-685).
gaggaggtgaccaatgaat

SEQ ID NO: 221662 - DNA, 19 bp, Homo sapiens
  siRNA target sequence for CYP19A1 (NM_000103.2,734-752).
cctctaacacgctcttctt

SEQ ID NO: 221663 - DNA, 19 bp, Homo sapiens
  siRNA target sequence for CYP19A1 (NM_000103.2,773-791).
gtgctatcgtggttaaaat

SEQ ID NO: 221664 - DNA, 19 bp, Homo sapiens
  siRNA target sequence for CYP19A1 (NM_000103.2,776-794).
ctatcgtggttaaaatcca

SEQ ID NO: 221665 - DNA, 19 bp, Homo sapiens
  siRNA target sequence for CYP19A1 (NM_000103.2,812-830).
ggcaagctctcctcatcaa

SEQ ID NO: 221666 - DNA, 19 bp, Homo sapiens
  siRNA target sequence for CYP19A1 (NM_000103.2,813-831).
gcaagctctcctcatcaaa

SEQ ID NO: 221667 - DNA, 19 bp, Homo sapiens
  siRNA target sequence for CYP19A1 (NM_000103.2,832-850).
ccagacatcttctttaaga

SEQ ID NO: 221668 - DNA, 19 bp, Homo sapiens
  siRNA target sequence for CYP19A1 (NM_000103.2,1173-1191).
cataaagattgatgatata

SEQ ID NO: 221669 - DNA, 19 bp, Homo sapiens
  siRNA target sequence for CYP19A1 (NM_000103.2,1206-1224).
gatggaaaacttcatttat

SEQ ID NO: 221670 - DNA, 19 bp, Homo sapiens
  siRNA target sequence for CYP19A1 (NM_000103.2,1260-1278).
catgcgcaaagccttagaa

SEQ ID NO: 221671 - DNA, 19 bp, Homo sapiens
  siRNA target sequence for CYP19A1 (NM_000103.2,1271-1289).
ccttagaagatgatgtaat

SEQ ID NO: 221672 - DNA, 19 bp, Homo sapiens
  siRNA target sequence for CYP19A1 (NM_000103.2,1371-1389).
caatgaatttactcttgaa

SEQ ID NO: 221673 - DNA, 19 bp, Homo sapiens
  siRNA target sequence for CYP19A1 (NM_000103.2,1396-1414).
gcaaagaatgttccttata

SEQ ID NO: 221674 - DNA, 19 bp, Homo sapiens
  siRNA target sequence for CYP19A1 (NM_000103.2,1510-1528).
cgattccacgtgaagacat

SEQ ID NO: 221675 - DNA, 19 bp, Homo sapiens
  siRNA target sequence for CYP19A1 (NM_000103.2,1511-1529).
gattccacgtgaagacatt

SEQ ID NO: 221676 - DNA, 19 bp, Homo sapiens
  siRNA target sequence for CYP19A1 (NM_000103.2,1578-1596).
gcacccagatgagactaaa

SEQ ID NO: 221677 - DNA, 19 bp, Homo sapiens
  siRNA target sequence for CYP19A1 (NM_000103.2,1579-1597).
cacccagatgagactaaaa

SEQ ID NO: 221678 - DNA, 19 bp, Homo sapiens
  siRNA target sequence for CYP1A1 (NM_000499.2,143-161).
gtcggccacggagtttctt

SEQ ID NO: 221679 - DNA, 19 bp, Homo sapiens
  siRNA target sequence for CYP1A1 (NM_000499.2,458-476).
caccctcatcagtaatggt

SEQ ID NO: 221680 - DNA, 19 bp, Homo sapiens
  siRNA target sequence for CYP1A1 (NM_000499.2,685-703).
ggtatgtggtggtatcagt

SEQ ID NO: 221681 - DNA, 19 bp, Homo sapiens
  siRNA target sequence for CYP1A1 (NM_000499.2,696-714).
gtatcagtgaccaatgtca

SEQ ID NO: 221682 - DNA, 19 bp, Homo sapiens
  siRNA target sequence for CYP1A1 (NM_000499.2,711-729).
gtcatctgtgccatttgct

SEQ ID NO: 221683 - DNA, 19 bp, Homo sapiens
  siRNA target sequence for CYP1A1 (NM_000499.2,769-787).
gcctagtcaacctgaataa

SEQ ID NO: 221684 - DNA, 19 bp, Homo sapiens
  siRNA target sequence for CYP1A1 (NM_000499.2,770-788).
cctagtcaacctgaataat

SEQ ID NO: 221685 - DNA, 19 bp, Homo sapiens
  siRNA target sequence for CYP1A1 (NM_000499.2,823-841).
ctgacttcatccctattct

SEQ ID NO: 221686 - DNA, 19 bp, Homo sapiens
  siRNA target sequence for CYP1A1 (NM_000499.2,879-897).
gacctgaatgagaagttct

SEQ ID NO: 221687 - DNA, 19 bp, Homo sapiens
  siRNA target sequence for CYP1A1 (NM_000499.2,927-945).
cactacaaaacctttgaga

SEQ ID NO: 221688 - DNA, 19 bp, Homo sapiens
  siRNA target sequence for CYP1A1 (NM_000499.2,1210-1228).
cccatctgccctatatgga

SEQ ID NO: 221689 - DNA, 19 bp, Homo sapiens
  siRNA target sequence for CYP1A1 (NM_000499.2,1332-1350).
gggcgttgtgtctttgtaa

SEQ ID NO: 221690 - DNA, 19 bp, Homo sapiens
  siRNA target sequence for CYP1A1 (NM_000499.2,1333-1351).
ggcgttgtgtctttgtaaa

SEQ ID NO: 221691 - DNA, 19 bp, Homo sapiens
  siRNA target sequence for CYP1A1 (NM_000499.2,1434-1452).
gctatcgacaaggtgttaa

SEQ ID NO: 221692 - DNA, 19 bp, Homo sapiens
  siRNA target sequence for CYP1A1 (NM_000499.2,1510-1528).
cccgctgggaggtctttct

SEQ ID NO: 221693 - DNA, 19 bp, Homo sapiens
  siRNA target sequence for CYP1A1 (NM_000499.2,1512-1530).
cgctgggaggtctttctct

SEQ ID NO: 221694 - DNA, 19 bp, Homo sapiens
  siRNA target sequence for CYP1A1 (NM_000499.2,1586-1604).
ggacatgacccccatctat

SEQ ID NO: 221695 - DNA, 19 bp, Homo sapiens
  siRNA target sequence for CYP1A1 (NM_000499.2,1627-1645).
gctgtgagcacttccaaat

SEQ ID NO: 221696 - DNA, 19 bp, Homo sapiens
  siRNA target sequence for CYP1A2 (NM_000761.2,615-633).
ggcacttcgacccttacaa

SEQ ID NO: 221697 - DNA, 19 bp, Homo sapiens
  siRNA target sequence for CYP1A2 (NM_000761.2,616-634).
gcacttcgacccttacaat

SEQ ID NO: 221698 - DNA, 19 bp, Homo sapiens
  siRNA target sequence for CYP1A2 (NM_000761.2,693-711).
ctgagagtagcgatgagat

SEQ ID NO: 221699 - DNA, 19 bp, Homo sapiens
  siRNA target sequence for CYP1A2 (NM_000761.2,864-882).
cagtccaggagcactatca

SEQ ID NO: 221700 - DNA, 19 bp, Homo sapiens
  siRNA target sequence for CYP1A2 (NM_000761.2,1368-1386).
ccgatggcactgccattaa

SEQ ID NO: 221701 - DNA, 19 bp, Homo sapiens
  siRNA target sequence for CYP1B1 (NM_000104.2,611-629).
gctacggcgacgttttcca

SEQ ID NO: 221702 - DNA, 19 bp, Homo sapiens
  siRNA target sequence for CYP1B1 (NM_000104.2,821-839).
gcatgatgcgcaacttctt

SEQ ID NO: 221703 - DNA, 19 bp, Homo sapiens
  siRNA target sequence for CYP1B1 (NM_000104.2,1139-1157).
ccgttttccgcgaattcga

SEQ ID NO: 221704 - DNA, 19 bp, Homo sapiens
  siRNA target sequence for CYP1B1 (NM_000104.2,1329-1347).
cgtaccggccactatcact

SEQ ID NO: 221705 - DNA, 19 bp, Homo sapiens
  siRNA target sequence for CYP1B1 (NM_000104.2,1676-1694).
ctaacccggagaactttga

SEQ ID NO: 221706 - DNA, 19 bp, Homo sapiens
  siRNA target sequence for CYP1B1 (NM_000104.2,1778-1796).
ggtgcattggcgaagaact

SEQ ID NO: 221707 - DNA, 19 bp, Homo sapiens
  siRNA target sequence for CYP1B1 (NM_000104.2,1782-1800).
cattggcgaagaactttct

SEQ ID NO: 221708 - DNA, 19 bp, Homo sapiens
  siRNA target sequence for CYP1B1 (NM_000104.2,1834-1852).
gctcaccagtgcgatttca

SEQ ID NO: 221709 - DNA, 19 bp, Homo sapiens
  siRNA target sequence for CYP1B1 (NM_000104.2,1867-1885).
gagcctgcgaaaatgaatt

SEQ ID NO: 221710 - DNA, 19 bp, Homo sapiens
  siRNA target sequence for CYP1B1 (NM_000104.2,1887-1905).
cagttatggtctaaccatt

SEQ ID NO: 221711 - DNA, 19 bp, Homo sapiens
  siRNA target sequence for CYP1B1 (NM_000104.2,1889-1907).
gttatggtctaaccattaa

SEQ ID NO: 221712 - DNA, 19 bp, Homo sapiens
  siRNA target sequence for CYP1B1 (NM_000104.2,1901-1919).
ccattaaacccaagtcatt

SEQ ID NO: 221713 - DNA, 19 bp, Homo sapiens
  siRNA target sequence for CYP1B1 (NM_000104.2,1960-1978).
gatagtgctgtccaaaatt

SEQ ID NO: 221714 - DNA, 19 bp, Homo sapiens
  siRNA target sequence for CYP20A1 (NM_020674.2,451-469).
cagacaagctgcaggaatt

SEQ ID NO: 221715 - DNA, 19 bp, Homo sapiens
  siRNA target sequence for CYP20A1 (NM_020674.2,520-538).
gaatagtggaagtttgcat

SEQ ID NO: 221716 - DNA, 19 bp, Homo sapiens
  siRNA target sequence for CYP20A1 (NM_020674.2,541-559).
gttcctggttaatttgcat

SEQ ID NO: 221717 - DNA, 19 bp, Homo sapiens
  siRNA target sequence for CYP20A1 (NM_020674.2,597-615).
ggcgcctcgtggttagttt

SEQ ID NO: 221718 - DNA, 19 bp, Homo sapiens
  siRNA target sequence for CYP20A1 (NM_020674.2,618-636).
gcactgttgatgtactgaa

SEQ ID NO: 221719 - DNA, 19 bp, Homo sapiens
  siRNA target sequence for CYP20A1 (NM_020674.2,629-647).
gtactgaagcagcatatca

SEQ ID NO: 221720 - DNA, 19 bp, Homo sapiens
  siRNA target sequence for CYP20A1 (NM_020674.2,641-659).
catatcaatcccaataaga

SEQ ID NO: 221721 - DNA, 19 bp, Homo sapiens
  siRNA target sequence for CYP20A1 (NM_020674.2,663-681).
cggacccttttgaaaccat

SEQ ID NO: 221722 - DNA, 19 bp, Homo sapiens
  siRNA target sequence for CYP20A1 (NM_020674.2,683-701).
ctgaagtcattattaaggt

SEQ ID NO: 221723 - DNA, 19 bp, Homo sapiens
  siRNA target sequence for CYP20A1 (NM_020674.2,685-703).
gaagtcattattaaggtat

SEQ ID NO: 221724 - DNA, 19 bp, Homo sapiens
  siRNA target sequence for CYP20A1 (NM_020674.2,688-706).
gtcattattaaggtatcaa

SEQ ID NO: 221725 - DNA, 19 bp, Homo sapiens
  siRNA target sequence for CYP20A1 (NM_020674.2,810-828).
cagaagaattattagataa

SEQ ID NO: 221726 - DNA, 19 bp, Homo sapiens
  siRNA target sequence for CYP20A1 (NM_020674.2,867-885).
gccagcatatgcttggttt

SEQ ID NO: 221727 - DNA, 19 bp, Homo sapiens
  siRNA target sequence for CYP20A1 (NM_020674.2,872-890).
catatgcttggttttgcta

SEQ ID NO: 221728 - DNA, 19 bp, Homo sapiens
  siRNA target sequence for CYP20A1 (NM_020674.2,897-915).
ctgttacacagatggtaat

SEQ ID NO: 221729 - DNA, 19 bp, Homo sapiens
  siRNA target sequence for CYP20A1 (NM_020674.2,907-925).
gatggtaatgggtagtaca

SEQ ID NO: 221730 - DNA, 19 bp, Homo sapiens
  siRNA target sequence for CYP20A1 (NM_020674.2,910-928).
ggtaatgggtagtacattt

SEQ ID NO: 221731 - DNA, 19 bp, Homo sapiens
  siRNA target sequence for CYP20A1 (NM_177538.1,1004-1022).
gatgggtcacttgataaaa

SEQ ID NO: 221732 - DNA, 19 bp, Homo sapiens
  siRNA target sequence for CYP20A1 (NM_177538.1,1007-1025).
gggtcacttgataaaaaca

SEQ ID NO: 221733 - DNA, 19 bp, Homo sapiens
  siRNA target sequence for CYP20A1 (NM_177538.1,1027-1045).
gactcggaaaaaacaatat

SEQ ID NO: 221734 - DNA, 19 bp, Homo sapiens
  siRNA target sequence for CYP20A1 (NM_177538.1,1073-1091).
gttttaaggaacatcataa

SEQ ID NO: 221735 - DNA, 19 bp, Homo sapiens
  siRNA target sequence for CYP20A1 (NM_177538.1,1107-1125).
ggaacttcagtcaacatat

SEQ ID NO: 221736 - DNA, 19 bp, Homo sapiens
  siRNA target sequence for CYP20A1 (NM_177538.1,1108-1126).
gaacttcagtcaacatatt

SEQ ID NO: 221737 - DNA, 19 bp, Homo sapiens
  siRNA target sequence for CYP20A1 (NM_177538.1,1129-1147).
cattgactccttagtacaa

SEQ ID NO: 221738 - DNA, 19 bp, Homo sapiens
  siRNA target sequence for CYP20A1 (NM_177538.1,1404-1422).
cccagcttcaagatattga

SEQ ID NO: 221739 - DNA, 19 bp, Homo sapiens
  siRNA target sequence for CYP20A1 (NM_177538.1,1452-1470).
gagagaccctcgtccttta

SEQ ID NO: 221740 - DNA, 19 bp, Homo sapiens
  siRNA target sequence for CYP20A1 (NM_177538.1,1483-1501).
ggtacttcaggatcctaat

SEQ ID NO: 221741 - DNA, 19 bp, Homo sapiens
  siRNA target sequence for CYP20A1 (NM_177538.1,1487-1505).
cttcaggatcctaatactt

SEQ ID NO: 221742 - DNA, 19 bp, Homo sapiens
  siRNA target sequence for CYP20A1 (NM_177538.1,1506-1524).
ggccatctccacacaagtt

SEQ ID NO: 221743 - DNA, 19 bp, Homo sapiens
  siRNA target sequence for CYP20A1 (NM_177538.1,1507-1525).
gccatctccacacaagttt

SEQ ID NO: 221744 - DNA, 19 bp, Homo sapiens
  siRNA target sequence for CYP20A1 (NM_177538.1,1530-1548).
cagatcggtttgatgatga

SEQ ID NO: 221745 - DNA, 19 bp, Homo sapiens
  siRNA target sequence for CYP20A1 (NM_177538.1,1532-1550).
gatcggtttgatgatgaat

SEQ ID NO: 221746 - DNA, 19 bp, Homo sapiens
  siRNA target sequence for CYP20A1 (NM_177538.1,1537-1555).
gtttgatgatgaattagta

SEQ ID NO: 221747 - DNA, 19 bp, Homo sapiens
  siRNA target sequence for CYP20A1 (NM_177538.1,1541-1559).
gatgatgaattagtaatga

SEQ ID NO: 221748 - DNA, 19 bp, Homo sapiens
  siRNA target sequence for CYP20A1 (NM_177538.1,1601-1619).
ccagagttgaggtttgcat

SEQ ID NO: 221749 - DNA, 19 bp, Homo sapiens
  siRNA target sequence for CYP20A1 (NM_177538.1,1602-1620).
cagagttgaggtttgcata

SEQ ID NO: 221750 - DNA, 19 bp, Homo sapiens
  siRNA target sequence for CYP20A1 (NM_177538.1,1604-1622).
gagttgaggtttgcatata

SEQ ID NO: 221751 - DNA, 19 bp, Homo sapiens
  siRNA target sequence for CYP20A1 (NM_177538.1,1624-1642).
ggtgaccacagtacttctt

SEQ ID NO: 221752 - DNA, 19 bp, Homo sapiens
  siRNA target sequence for CYP20A1 (NM_177538.1,1627-1645).
gaccacagtacttcttagt

SEQ ID NO: 221753 - DNA, 19 bp, Homo sapiens
  siRNA target sequence for CYP20A1 (NM_177538.1,1630-1648).
cacagtacttcttagtgta

SEQ ID NO: 221754 - DNA, 19 bp, Homo sapiens
  siRNA target sequence for CYP20A1 (NM_177538.1,1632-1650).
cagtacttcttagtgtatt

SEQ ID NO: 221755 - DNA, 19 bp, Homo sapiens
  siRNA target sequence for CYP20A1 (NM_177538.1,1674-1692).
ctgtggagggacaggttat

SEQ ID NO: 221756 - DNA, 19 bp, Homo sapiens
  siRNA target sequence for CYP20A1 (NM_177538.1,1683-1701).
gacaggttattgaaacaaa

SEQ ID NO: 221757 - DNA, 19 bp, Homo sapiens
  siRNA target sequence for CYP20A1 (NM_177538.1,1738-1756).
gatcactgtctcaaagaga

SEQ ID NO: 221758 - DNA, 19 bp, Homo sapiens
  siRNA target sequence for CYP24A1 (NM_000782.2,477-495).
ccgagactggtgacatcta

SEQ ID NO: 221759 - DNA, 19 bp, Homo sapiens
  siRNA target sequence for CYP24A1 (NM_000782.2,665-683).
ggagtaccacaagaagtat

SEQ ID NO: 221760 - DNA, 19 bp, Homo sapiens
  siRNA target sequence for CYP24A1 (NM_000782.2,872-890).
ggtccggagtgcctttcaa

SEQ ID NO: 221761 - DNA, 19 bp, Homo sapiens
  siRNA target sequence for CYP24A1 (NM_000782.2,873-891).
gtccggagtgcctttcaaa

SEQ ID NO: 221762 - DNA, 19 bp, Homo sapiens
  siRNA target sequence for CYP24A1 (NM_000782.2,876-894).
cggagtgcctttcaaaaga

SEQ ID NO: 221763 - DNA, 19 bp, Homo sapiens
  siRNA target sequence for CYP24A1 (NM_000782.2,942-960).
gaggtcttggccgatttta

SEQ ID NO: 221764 - DNA, 19 bp, Homo sapiens
  siRNA target sequence for CYP24A1 (NM_000782.2,953-971).
cgattttatgggcagaata

SEQ ID NO: 221765 - DNA, 19 bp, Homo sapiens
  siRNA target sequence for CYP24A1 (NM_000782.2,1042-1060).
gtatctgcctcgtgttgta

SEQ ID NO: 221766 - DNA, 19 bp, Homo sapiens
  siRNA target sequence for CYP24A1 (NM_000782.2,1053-1071).
gtgttgtatgagaagagat

SEQ ID NO: 221767 - DNA, 19 bp, Homo sapiens
  siRNA target sequence for CYP24A1 (NM_000782.2,1221-1239).
gcctgggacaccattttca

SEQ ID NO: 221768 - DNA, 19 bp, Homo sapiens
  siRNA target sequence for CYP24A1 (NM_000782.2,1226-1244).
ggacaccattttcaaatca

SEQ ID NO: 221769 - DNA, 19 bp, Homo sapiens
  siRNA target sequence for CYP24A1 (NM_000782.2,1262-1280).
caaccggttagagaagtat

SEQ ID NO: 221770 - DNA, 19 bp, Homo sapiens
  siRNA target sequence for CYP24A1 (NM_000782.2,1265-1283).
ccggttagagaagtattct

SEQ ID NO: 221771 - DNA, 19 bp, Homo sapiens
  siRNA target sequence for CYP24A1 (NM_000782.2,1290-1308).
cctagtgcagatttccttt

SEQ ID NO: 221772 - DNA, 19 bp, Homo sapiens
  siRNA target sequence for CYP24A1 (NM_000782.2,1320-1338).
caccagaatcggctttcaa

SEQ ID NO: 221773 - DNA, 19 bp, Homo sapiens
  siRNA target sequence for CYP24A1 (NM_000782.2,1390-1408).
cgacagcaaacagtctaat

SEQ ID NO: 221774 - DNA, 19 bp, Homo sapiens
  siRNA target sequence for CYP24A1 (NM_000782.2,1443-1461).
gtgcaacaaaagcttctta

SEQ ID NO: 221775 - DNA, 19 bp, Homo sapiens
  siRNA target sequence for CYP24A1 (NM_000782.2,1536-1554).
gcctgtctgaaagaatcta

SEQ ID NO: 221776 - DNA, 19 bp, Homo sapiens
  siRNA target sequence for CYP24A1 (NM_000782.2,1537-1555).
cctgtctgaaagaatctat

SEQ ID NO: 221777 - DNA, 19 bp, Homo sapiens
  siRNA target sequence for CYP24A1 (NM_000782.2,1582-1600).
caactcggactcttgacaa

SEQ ID NO: 221778 - DNA, 19 bp, Homo sapiens
  siRNA target sequence for CYP24A1 (NM_000782.2,1603-1621).
caacagttctgggtgaata

SEQ ID NO: 221779 - DNA, 19 bp, Homo sapiens
  siRNA target sequence for CYP24A1 (NM_000782.2,1668-1686).
ggatccagtgaagacaatt

SEQ ID NO: 221780 - DNA, 19 bp, Homo sapiens
  siRNA target sequence for CYP24A1 (NM_000782.2,1682-1700).
caattttgaagattcaagt

SEQ ID NO: 221781 - DNA, 19 bp, Homo sapiens
  siRNA target sequence for CYP24A1 (NM_000782.2,1747-1765).
cttttgcgcatcttccatt

SEQ ID NO: 221782 - DNA, 19 bp, Homo sapiens
  siRNA target sequence for CYP24A1 (NM_000782.2,1761-1779).
ccatttggcgttggaaaaa

SEQ ID NO: 221783 - DNA, 19 bp, Homo sapiens
  siRNA target sequence for CYP24A1 (NM_000782.2,1787-1805).
cattggtcgccgattagca

SEQ ID NO: 221784 - DNA, 19 bp, Homo sapiens
  siRNA target sequence for CYP24A1 (NM_000782.2,1798-1816).
gattagcagagcttcaact

SEQ ID NO: 221785 - DNA, 19 bp, Homo sapiens
  siRNA target sequence for CYP24A1 (NM_000782.2,1804-1822).
cagagcttcaactgcattt

SEQ ID NO: 221786 - DNA, 19 bp, Homo sapiens
  siRNA target sequence for CYP24A1 (NM_000782.2,1831-1849).
gttggattgtccgcaaata

SEQ ID NO: 221787 - DNA, 19 bp, Homo sapiens
  siRNA target sequence for CYP24A1 (NM_000782.2,1834-1852).
ggattgtccgcaaatacga

SEQ ID NO: 221788 - DNA, 19 bp, Homo sapiens
  siRNA target sequence for CYP2A13 (NM_000766.3,1401-1419).
ccctcagtcgcctaaggat

SEQ ID NO: 221789 - DNA, 19 bp, Homo sapiens
  siRNA target sequence for CYP2A13 (NM_000766.3,1402-1420).
cctcagtcgcctaaggata

SEQ ID NO: 221790 - DNA, 19 bp, Homo sapiens
  siRNA target sequence for CYP2A13 (NM_000766.3,1403-1421).
ctcagtcgcctaaggatat

SEQ ID NO: 221791 - DNA, 19 bp, Homo sapiens
  siRNA target sequence for CYP2B6 (NM_000767.4,333-351).
ggggatatggtgtgatctt

SEQ ID NO: 221792 - DNA, 19 bp, Homo sapiens
  siRNA target sequence for CYP2B6 (NM_000767.4,610-628).
gttctaccagactttttca

SEQ ID NO: 221793 - DNA, 19 bp, Homo sapiens
  siRNA target sequence for CYP2B6 (NM_000767.4,627-645).
cactcatcagctctgtatt

SEQ ID NO: 221794 - DNA, 19 bp, Homo sapiens
  siRNA target sequence for CYP2C18 (NM_000772.1,500-518).
ccagtggctgaaaaagtta

SEQ ID NO: 221795 - DNA, 19 bp, Homo sapiens
  siRNA target sequence for CYP2C18 (NM_000772.1,749-767).
catgatcgatttgattata

SEQ ID NO: 221796 - DNA, 19 bp, Homo sapiens
  siRNA target sequence for CYP2C18 (NM_000772.1,858-876).
ctgctctcatcgattatct

SEQ ID NO: 221797 - DNA, 19 bp, Homo sapiens
  siRNA target sequence for CYP2C18 (NM_000772.1,875-893).
ctcccaggaagtcataata

SEQ ID NO: 221798 - DNA, 19 bp, Homo sapiens
  siRNA target sequence for CYP2C18 (NM_000772.1,878-896).
ccaggaagtcataataaaa

SEQ ID NO: 221799 - DNA, 19 bp, Homo sapiens
  siRNA target sequence for CYP2C18 (NM_000772.1,973-991).
cagtgctcgggactttatt

SEQ ID NO: 221800 - DNA, 19 bp, Homo sapiens
  siRNA target sequence for CYP2C18 (NM_000772.1,975-993).
gtgctcgggactttattga

SEQ ID NO: 221801 - DNA, 19 bp, Homo sapiens
  siRNA target sequence for CYP2C18 (NM_000772.1,1064-1082).
gccactgtaactgatatgt

SEQ ID NO: 221802 - DNA, 19 bp, Homo sapiens
  siRNA target sequence for CYP2C18 (NM_000772.1,1066-1084).
cactgtaactgatatgttt

SEQ ID NO: 221803 - DNA, 19 bp, Homo sapiens
  siRNA target sequence for CYP2C18 (NM_000772.1,1348-1366).
gggcacgaccataataaca

SEQ ID NO: 221804 - DNA, 19 bp, Homo sapiens
  siRNA target sequence for CYP2C18 (NM_000772.1,1349-1367).
ggcacgaccataataacat

SEQ ID NO: 221805 - DNA, 19 bp, Homo sapiens
  siRNA target sequence for CYP2C18 (NM_000772.1,1377-1395).
ctgtgctgcacaatgacaa

SEQ ID NO: 221806 - DNA, 19 bp, Homo sapiens
  siRNA target sequence for CYP2C19 (NM_000769.1,659-677).
ccactatcattgattattt

SEQ ID NO: 221807 - DNA, 19 bp, Homo sapiens
  siRNA target sequence for CYP2C8 (NM_000770.2,316-334).
gcaattccccaatatctca

SEQ ID NO: 221808 - DNA, 19 bp, Homo sapiens
  siRNA target sequence for CYP2C8 (NM_000770.2,317-335).
caattccccaatatctcaa

SEQ ID NO: 221809 - DNA, 19 bp, Homo sapiens
  siRNA target sequence for CYP2C8 (NM_000770.2,322-340).
ccccaatatctcaaagaat

SEQ ID NO: 221810 - DNA, 19 bp, Homo sapiens
  siRNA target sequence for CYP2C8 (NM_000770.2,343-361).
ctaaaggacttggaatcat

SEQ ID NO: 221811 - DNA, 19 bp, Homo sapiens
  siRNA target sequence for CYP2C8 (NM_000770.2,606-624).
ctcaccctgatgaaaagat

SEQ ID NO: 221812 - DNA, 19 bp, Homo sapiens
  siRNA target sequence for CYP2C8 (NM_000770.2,736-754).
ctcttacacgaagttacat

SEQ ID NO: 221813 - DNA, 19 bp, Homo sapiens
  siRNA target sequence for CYP2C8 (NM_000770.2,738-756).
cttacacgaagttacatta

SEQ ID NO: 221814 - DNA, 19 bp, Homo sapiens
  siRNA target sequence for CYP2C8 (NM_000770.2,781-799).
catcactggatgttaacaa

SEQ ID NO: 221815 - DNA, 19 bp, Homo sapiens
  siRNA target sequence for CYP2C8 (NM_000770.2,892-910).
ctgtagctgatctatttgt

SEQ ID NO: 221816 - DNA, 19 bp, Homo sapiens
  siRNA target sequence for CYP2C8 (NM_000770.2,1128-1146).
gcagtgaccactgatacta

SEQ ID NO: 221817 - DNA, 19 bp, Homo sapiens
  siRNA target sequence for CYP2C8 (NM_000770.2,1129-1147).
cagtgaccactgatactaa

SEQ ID NO: 221818 - DNA, 19 bp, Homo sapiens
  siRNA target sequence for CYP2C8 (NM_000770.2,1131-1149).
gtgaccactgatactaagt

SEQ ID NO: 221819 - DNA, 19 bp, Homo sapiens
  siRNA target sequence for CYP2C8 (NM_000770.2,1177-1195).
caaccataatggcattact

SEQ ID NO: 221820 - DNA, 19 bp, Homo sapiens
  siRNA target sequence for CYP2C8 (NM_000770.2,1397-1415).
gaaatctgttgatgattta

SEQ ID NO: 221821 - DNA, 19 bp, Homo sapiens
  siRNA target sequence for CYP2C8 (NM_000770.2,1437-1455).
gttaccaaagggattgttt

SEQ ID NO: 221822 - DNA, 19 bp, Homo sapiens
  siRNA target sequence for CYP2C8 (NM_030878.1,1167-1185).
cccaagagctttgataaca

SEQ ID NO: 221823 - DNA, 19 bp, Homo sapiens
  siRNA target sequence for CYP2C8 (NM_030878.1,1168-1186).
ccaagagctttgataacaa

SEQ ID NO: 221824 - DNA, 19 bp, Homo sapiens
  siRNA target sequence for CYP2C8 (NM_030878.1,1172-1190).
gagctttgataacaagata

SEQ ID NO: 221825 - DNA, 19 bp, Homo sapiens
  siRNA target sequence for CYP2C9 (NM_000771.2,825-843).
gcacaaccaaccatctgaa

SEQ ID NO: 221826 - DNA, 19 bp, Homo sapiens
  siRNA target sequence for CYP2C9 (NM_000771.2,826-844).
cacaaccaaccatctgaat

SEQ ID NO: 221827 - DNA, 19 bp, Homo sapiens
  siRNA target sequence for CYP2C9 (NM_000771.2,828-846).
caaccaaccatctgaattt

SEQ ID NO: 221828 - DNA, 19 bp, Homo sapiens
  siRNA target sequence for CYP2C9 (NM_000771.2,836-854).
catctgaatttactattga

SEQ ID NO: 221829 - DNA, 19 bp, Homo sapiens
  siRNA target sequence for CYP2D6 (NM_000106.3,1224-1242).
cccgtgacatcgaagtaca

SEQ ID NO: 221830 - DNA, 19 bp, Homo sapiens
  siRNA target sequence for CYP2E1 (NM_000773.2,362-380).
cagggacaggggaatcatt

SEQ ID NO: 221831 - DNA, 19 bp, Homo sapiens
  siRNA target sequence for CYP2E1 (NM_000773.2,425-443).
gaccaccctccggaactat

SEQ ID NO: 221832 - DNA, 19 bp, Homo sapiens
  siRNA target sequence for CYP2E1 (NM_000773.2,450-468).
gggaaacagggcaatgaga

SEQ ID NO: 221833 - DNA, 19 bp, Homo sapiens
  siRNA target sequence for CYP2E1 (NM_000773.2,584-602).
cctcttccgcaagcatttt

SEQ ID NO: 221834 - DNA, 19 bp, Homo sapiens
  siRNA target sequence for CYP2E1 (NM_000773.2,674-692).
ctggctccagctttacaat

SEQ ID NO: 221835 - DNA, 19 bp, Homo sapiens
  siRNA target sequence for CYP2E1 (NM_000773.2,676-694).
ggctccagctttacaataa

SEQ ID NO: 221836 - DNA, 19 bp, Homo sapiens
  siRNA target sequence for CYP2E1 (NM_000773.2,783-801).
gtgaaggagcaccatcaat

SEQ ID NO: 221837 - DNA, 19 bp, Homo sapiens
  siRNA target sequence for CYP2E1 (NM_000773.2,785-803).
gaaggagcaccatcaatct

SEQ ID NO: 221838 - DNA, 19 bp, Homo sapiens
  siRNA target sequence for CYP2E1 (NM_000773.2,873-891).
gcagagcgcttgtacacaa

SEQ ID NO: 221839 - DNA, 19 bp, Homo sapiens
  siRNA target sequence for CYP2E1 (NM_000773.2,874-892).
cagagcgcttgtacacaat

SEQ ID NO: 221840 - DNA, 19 bp, Homo sapiens
  siRNA target sequence for CYP2E1 (NM_000773.2,968-986).
gctcctgattctcatgaaa

SEQ ID NO: 221841 - DNA, 19 bp, Homo sapiens
  siRNA target sequence for CYP2E1 (NM_000773.2,1149-1167).
gcaacccgagacaccattt

SEQ ID NO: 221842 - DNA, 19 bp, Homo sapiens
  siRNA target sequence for CYP2E1 (NM_000773.2,1150-1168).
caacccgagacaccatttt

SEQ ID NO: 221843 - DNA, 19 bp, Homo sapiens
  siRNA target sequence for CYP2E1 (NM_000773.2,1154-1172).
ccgagacaccattttcaga

SEQ ID NO: 221844 - DNA, 19 bp, Homo sapiens
  siRNA target sequence for CYP2E1 (NM_000773.2,1363-1381).
ctcgcatggagttgtttct

SEQ ID NO: 221845 - DNA, 19 bp, Homo sapiens
  siRNA target sequence for CYP2E1 (NM_000773.2,1365-1383).
cgcatggagttgtttcttt

SEQ ID NO: 221846 - DNA, 19 bp, Homo sapiens
  siRNA target sequence for CYP2E1 (NM_000773.2,1442-1460).
cgacctcagccctatacat

SEQ ID NO: 221847 - DNA, 19 bp, Homo sapiens
  siRNA target sequence for CYP2E1 (NM_000773.2,1445-1463).
cctcagccctatacatatt

SEQ ID NO: 221848 - DNA, 19 bp, Homo sapiens
  siRNA target sequence for CYP2E1 (NM_000773.2,1479-1497).
ccaccacgttacaaactct

SEQ ID NO: 221849 - DNA, 19 bp, Homo sapiens
  siRNA target sequence for CYP2F1 (NM_000774.3,479-497).
cattgaggagcgaatccta

SEQ ID NO: 221850 - DNA, 19 bp, Homo sapiens
  siRNA target sequence for CYP2F1 (NM_000774.3,573-591).
cgctcagtgtccaacatta

SEQ ID NO: 221851 - DNA, 19 bp, Homo sapiens
  siRNA target sequence for CYP2F1 (NM_000774.3,574-592).
gctcagtgtccaacattat

SEQ ID NO: 221852 - DNA, 19 bp, Homo sapiens
  siRNA target sequence for CYP2F1 (NM_000774.3,579-597).
gtgtccaacattatctgtt

SEQ ID NO: 221853 - DNA, 19 bp, Homo sapiens
  siRNA target sequence for CYP2F1 (NM_000774.3,633-651).
gagcgtctgctcaccatta

SEQ ID NO: 221854 - DNA, 19 bp, Homo sapiens
  siRNA target sequence for CYP2F1 (NM_000774.3,646-664).
ccattatccgccttatcaa

SEQ ID NO: 221855 - DNA, 19 bp, Homo sapiens
  siRNA target sequence for CYP2F1 (NM_000774.3,647-665).
cattatccgccttatcaat

SEQ ID NO: 221856 - DNA, 19 bp, Homo sapiens
  siRNA target sequence for CYP2F1 (NM_000774.3,688-706).
gcccctggggcgagttgta

SEQ ID NO: 221857 - DNA, 19 bp, Homo sapiens
  siRNA target sequence for CYP2S1 (NM_030622.5,169-187).
ctcatgcggctgagtaaga

SEQ ID NO: 221858 - DNA, 19 bp, Homo sapiens
  siRNA target sequence for CYP2S1 (NM_030622.5,650-668).
gtcagacctacgagatgtt

SEQ ID NO: 221859 - DNA, 19 bp, Homo sapiens
  siRNA target sequence for CYP2S1 (NM_030622.5,652-670).
cagacctacgagatgttct

SEQ ID NO: 221860 - DNA, 19 bp, Homo sapiens
  siRNA target sequence for CYP2S1 (NM_030622.5,877-895).
ctgatgacagtcatttatt

SEQ ID NO: 221861 - DNA, 19 bp, Homo sapiens
  siRNA target sequence for CYP3A4 (NM_017460.3,260-278).
ctaccataagggcttttgt

SEQ ID NO: 221862 - DNA, 19 bp, Homo sapiens
  siRNA target sequence for CYP3A4 (NM_017460.3,264-282).
cataagggcttttgtatgt

SEQ ID NO: 221863 - DNA, 19 bp, Homo sapiens
  siRNA target sequence for CYP3A4 (NM_017460.3,791-809).
catcccaattcttgaagta

SEQ ID NO: 221864 - DNA, 19 bp, Homo sapiens
  siRNA target sequence for CYP3A43 (NM_022820.3,160-178).
ggtactcctctatatttat

SEQ ID NO: 221865 - DNA, 19 bp, Homo sapiens
  siRNA target sequence for CYP3A43 (NM_022820.3,180-198).
ggacccattcacataaact

SEQ ID NO: 221866 - DNA, 19 bp, Homo sapiens
  siRNA target sequence for CYP3A43 (NM_022820.3,262-280).
ccttaggggtctttggaat

SEQ ID NO: 221867 - DNA, 19 bp, Homo sapiens
  siRNA target sequence for CYP3A43 (NM_022820.3,604-622).
caagtccatcaacttgaaa

SEQ ID NO: 221868 - DNA, 19 bp, Homo sapiens
  siRNA target sequence for CYP3A43 (NM_022820.3,650-668).
gtaatcactggcacattat

SEQ ID NO: 221869 - DNA, 19 bp, Homo sapiens
  siRNA target sequence for CYP3A43 (NM_022820.3,672-690).
gagtgaacttggattctct

SEQ ID NO: 221870 - DNA, 19 bp, Homo sapiens
  siRNA target sequence for CYP3A43 (NM_022820.3,701-719).
caagatccctttctgaaaa

SEQ ID NO: 221871 - DNA, 19 bp, Homo sapiens
  siRNA target sequence for CYP3A43 (NM_022820.3,901-919).
gcatcgagtagatttcttt

SEQ ID NO: 221872 - DNA, 19 bp, Homo sapiens
  siRNA target sequence for CYP3A43 (NM_022820.3,906-924).
gagtagatttctttcaaca

SEQ ID NO: 221873 - DNA, 19 bp, Homo sapiens
  siRNA target sequence for CYP3A43 (NM_022820.3,1016-1034).
gctgcctatgacacaacta

SEQ ID NO: 221874 - DNA, 19 bp, Homo sapiens
  siRNA target sequence for CYP3A43 (NM_022820.3,1391-1409).
ctttacagatacatacctt

SEQ ID NO: 221875 - DNA, 19 bp, Homo sapiens
  siRNA target sequence for CYP3A43 (NM_022820.3,1396-1414).
cagatacataccttttgga

SEQ ID NO: 221876 - DNA, 19 bp, Homo sapiens
  siRNA target sequence for CYP3A43 (NM_022820.3,1459-1477).
cataaaacttgctgtcatt

SEQ ID NO: 221877 - DNA, 19 bp, Homo sapiens
  siRNA target sequence for CYP3A43 (NM_022820.3,1527-1545).
cactgaaattagacaatct

SEQ ID NO: 221878 - DNA, 19 bp, Homo sapiens
  siRNA target sequence for CYP3A5 (NM_000777.2,268-286).
gacacagagtgctataaaa

SEQ ID NO: 221879 - DNA, 19 bp, Homo sapiens
  siRNA target sequence for CYP3A5 (NM_000777.2,393-411).
cacaaatcgaaggtcttta

SEQ ID NO: 221880 - DNA, 19 bp, Homo sapiens
  siRNA target sequence for CYP3A5 (NM_000777.2,973-991).
gcagcccagtcaataatct

SEQ ID NO: 221881 - DNA, 19 bp, Homo sapiens
  siRNA target sequence for CYP3A5 (NM_000777.2,1518-1536).
cacgcaaggacttcttcaa

SEQ ID NO: 221882 - DNA, 19 bp, Homo sapiens
  siRNA target sequence for CYP3A7 (NM_000765.2,311-329).
gaaaagtctggggtattta

SEQ ID NO: 221883 - DNA, 19 bp, Homo sapiens
  siRNA target sequence for CYP4B1 (NM_000779.2,203-221).
cggggagcctggacaaagt

SEQ ID NO: 221884 - DNA, 19 bp, Homo sapiens
  siRNA target sequence for CYP4B1 (NM_000779.2,291-309).
catctatgagcctgactat

SEQ ID NO: 221885 - DNA, 19 bp, Homo sapiens
  siRNA target sequence for CYP4B1 (NM_000779.2,338-356).
ctaaggcccctgatgtgta

SEQ ID NO: 221886 - DNA, 19 bp, Homo sapiens
  siRNA target sequence for CYP4B1 (NM_000779.2,343-361).
gcccctgatgtgtatgact

SEQ ID NO: 221887 - DNA, 19 bp, Homo sapiens
  siRNA target sequence for CYP4B1 (NM_000779.2,344-362).
cccctgatgtgtatgactt

SEQ ID NO: 221888 - DNA, 19 bp, Homo sapiens
  siRNA target sequence for CYP4B1 (NM_000779.2,347-365).
ctgatgtgtatgacttctt

SEQ ID NO: 221889 - DNA, 19 bp, Homo sapiens
  siRNA target sequence for CYP4B1 (NM_000779.2,485-503).
ctgagtctacacgtatcat

SEQ ID NO: 221890 - DNA, 19 bp, Homo sapiens
  siRNA target sequence for CYP4B1 (NM_000779.2,532-550).
gagggtaagtcctttgaca

SEQ ID NO: 221891 - DNA, 19 bp, Homo sapiens
  siRNA target sequence for CYP4B1 (NM_000779.2,695-713).
ccttccagtaccataatga

SEQ ID NO: 221892 - DNA, 19 bp, Homo sapiens
  siRNA target sequence for CYP4B1 (NM_000779.2,929-947).
gggctgaagtggacacatt

SEQ ID NO: 221893 - DNA, 19 bp, Homo sapiens
  siRNA target sequence for CYP4B1 (NM_000779.2,980-998).
gtatctcctggtttctcta

SEQ ID NO: 221894 - DNA, 19 bp, Homo sapiens
  siRNA target sequence for CYP4B1 (NM_000779.2,1020-1038).
gcaccagcatcgttgtaga

SEQ ID NO: 221895 - DNA, 19 bp, Homo sapiens
  siRNA target sequence for CYP4B1 (NM_000779.2,1220-1238).
gcctgatctctatgcatat

SEQ ID NO: 221896 - DNA, 19 bp, Homo sapiens
  siRNA target sequence for CYP4B1 (NM_000779.2,1296-1314).
gcgcttttccactgagaat

SEQ ID NO: 221897 - DNA, 19 bp, Homo sapiens
  siRNA target sequence for CYP4B1 (NM_000779.2,1421-1439).
gcttgctccgctttgagtt

SEQ ID NO: 221898 - DNA, 19 bp, Homo sapiens
  siRNA target sequence for CYP4F11 (NM_021187.1,454-472).
gctgtcgcacccaaggata

SEQ ID NO: 221899 - DNA, 19 bp, Homo sapiens
  siRNA target sequence for CYP4F11 (NM_021187.1,455-473).
ctgtcgcacccaaggatat

SEQ ID NO: 221900 - DNA, 19 bp, Homo sapiens
  siRNA target sequence for CYP4F11 (NM_021187.1,665-683).
gcgccagactggacatgtt

SEQ ID NO: 221901 - DNA, 19 bp, Homo sapiens
  siRNA target sequence for CYP4F11 (NM_021187.1,666-684).
cgccagactggacatgttt

SEQ ID NO: 221902 - DNA, 19 bp, Homo sapiens
  siRNA target sequence for CYP4F11 (NM_021187.1,812-830).
gaaaccagcagattctctt

SEQ ID NO: 221903 - DNA, 19 bp, Homo sapiens
  siRNA target sequence for CYP4F11 (NM_021187.1,1310-1328).
gttgcacgcaggactttgt

SEQ ID NO: 221904 - DNA, 19 bp, Homo sapiens
  siRNA target sequence for CYP4F11 (NM_021187.1,1607-1625).
ggaaacccgagctgatatt

SEQ ID NO: 221905 - DNA, 19 bp, Homo sapiens
  siRNA target sequence for CYP4F12 (NM_023944.1,383-401).
cacccaaggataatctctt

SEQ ID NO: 221906 - DNA, 19 bp, Homo sapiens
  siRNA target sequence for CYP4F2 (NM_001082.3,603-621).
ggtagtgcctgtttggata

SEQ ID NO: 221907 - DNA, 19 bp, Homo sapiens
  siRNA target sequence for CYP4F2 (NM_001082.3,977-995).
cgggaagaagttatctgat

SEQ ID NO: 221908 - DNA, 19 bp, Homo sapiens
  siRNA target sequence for CYP4F3 (NM_000896.1,259-277).
cggaggaaggtctcctata

SEQ ID NO: 221909 - DNA, 19 bp, Homo sapiens
  siRNA target sequence for CYP4F3 (NM_000896.1,261-279).
gaggaaggtctcctataca

SEQ ID NO: 221910 - DNA, 19 bp, Homo sapiens
  siRNA target sequence for CYP4F3 (NM_000896.1,263-281).
ggaaggtctcctatacaca

SEQ ID NO: 221911 - DNA, 19 bp, Homo sapiens
  siRNA target sequence for CYP4F3 (NM_000896.1,267-285).
ggtctcctatacacacaaa

SEQ ID NO: 221912 - DNA, 19 bp, Homo sapiens
  siRNA target sequence for CYP4F3 (NM_000896.1,607-625).
gtgcccgtctggacatgtt

SEQ ID NO: 221913 - DNA, 19 bp, Homo sapiens
  siRNA target sequence for CYP4X1 (NM_178033.1,412-430).
ccttgggcaccagaagttt

SEQ ID NO: 221914 - DNA, 19 bp, Homo sapiens
  siRNA target sequence for CYP4X1 (NM_178033.1,413-431).
cttgggcaccagaagttta

SEQ ID NO: 221915 - DNA, 19 bp, Homo sapiens
  siRNA target sequence for CYP4X1 (NM_178033.1,506-524).
ccctttcaggcatttttct

SEQ ID NO: 221916 - DNA, 19 bp, Homo sapiens
  siRNA target sequence for CYP4X1 (NM_178033.1,653-671).
cagcatcgtcgcctactaa

SEQ ID NO: 221917 - DNA, 19 bp, Homo sapiens
  siRNA target sequence for CYP4X1 (NM_178033.1,655-673).
gcatcgtcgcctactaact

SEQ ID NO: 221918 - DNA, 19 bp, Homo sapiens
  siRNA target sequence for CYP4X1 (NM_178033.1,675-693).
ctggattccattttaacat

SEQ ID NO: 221919 - DNA, 19 bp, Homo sapiens
  siRNA target sequence for CYP4X1 (NM_178033.1,777-795).
caagcgtggaggtctatga

SEQ ID NO: 221920 - DNA, 19 bp, Homo sapiens
  siRNA target sequence for CYP4X1 (NM_178033.1,805-823).
ctcgatgtctctggatata

SEQ ID NO: 221921 - DNA, 19 bp, Homo sapiens
  siRNA target sequence for CYP4X1 (NM_178033.1,871-889).
cacccatgatccttatgca

SEQ ID NO: 221922 - DNA, 19 bp, Homo sapiens
  siRNA target sequence for CYP4X1 (NM_178033.1,873-891).
cccatgatccttatgcaaa

SEQ ID NO: 221923 - DNA, 19 bp, Homo sapiens
  siRNA target sequence for CYP4X1 (NM_178033.1,923-941).
caccgcttgtacagtttgt

SEQ ID NO: 221924 - DNA, 19 bp, Homo sapiens
  siRNA target sequence for CYP4X1 (NM_178033.1,926-944).
cgcttgtacagtttgttgt

SEQ ID NO: 221925 - DNA, 19 bp, Homo sapiens
  siRNA target sequence for CYP4X1 (NM_178033.1,927-945).
gcttgtacagtttgttgta

SEQ ID NO: 221926 - DNA, 19 bp, Homo sapiens
  siRNA target sequence for CYP4X1 (NM_178033.1,947-965).
cacagtgacataattttca

SEQ ID NO: 221927 - DNA, 19 bp, Homo sapiens
  siRNA target sequence for CYP4X1 (NM_178033.1,981-999).
gctaccgcttccagaagtt

SEQ ID NO: 221928 - DNA, 19 bp, Homo sapiens
  siRNA target sequence for CYP4X1 (NM_178033.1,982-1000).
ctaccgcttccagaagtta

SEQ ID NO: 221929 - DNA, 19 bp, Homo sapiens
  siRNA target sequence for CYP4X1 (NM_178033.1,997-1015).
gttaagccgagtgttgaat

SEQ ID NO: 221930 - DNA, 19 bp, Homo sapiens
  siRNA target sequence for CYP4X1 (NM_178033.1,1002-1020).
gccgagtgttgaatcagta

SEQ ID NO: 221931 - DNA, 19 bp, Homo sapiens
  siRNA target sequence for CYP4X1 (NM_178033.1,1016-1034).
cagtacacagatacaataa

SEQ ID NO: 221932 - DNA, 19 bp, Homo sapiens
  siRNA target sequence for CYP4X1 (NM_178033.1,1064-1082).
ggggtaaagcaggataaca

SEQ ID NO: 221933 - DNA, 19 bp, Homo sapiens
  siRNA target sequence for CYP4X1 (NM_178033.1,1066-1084).
ggtaaagcaggataacact

SEQ ID NO: 221934 - DNA, 19 bp, Homo sapiens
  siRNA target sequence for CYP4X1 (NM_178033.1,1366-1384).
ggagacgtgccgattgatt

SEQ ID NO: 221935 - DNA, 19 bp, Homo sapiens
  siRNA target sequence for CYP4X1 (NM_178033.1,1385-1403).
cctgcagtcccgtccattt

SEQ ID NO: 221936 - DNA, 19 bp, Homo sapiens
  siRNA target sequence for CYP4X1 (NM_178033.1,1388-1406).
gcagtcccgtccatttcca

SEQ ID NO: 221937 - DNA, 19 bp, Homo sapiens
  siRNA target sequence for CYP4X1 (NM_178033.1,1457-1475).
gggatcaccgtggttctta

SEQ ID NO: 221938 - DNA, 19 bp, Homo sapiens
  siRNA target sequence for CYP4X1 (NM_178033.1,1459-1477).
gatcaccgtggttcttagt

SEQ ID NO: 221939 - DNA, 19 bp, Homo sapiens
  siRNA target sequence for CYP4X1 (NM_178033.1,1462-1480).
caccgtggttcttagtatt

SEQ ID NO: 221940 - DNA, 19 bp, Homo sapiens
  siRNA target sequence for CYP4X1 (NM_178033.1,1630-1648).
catgattgagttaaaggta

SEQ ID NO: 221941 - DNA, 19 bp, Homo sapiens
  siRNA target sequence for CYP4X1 (NM_178033.1,1703-1721).
cttactttccccaaccatt

SEQ ID NO: 221942 - DNA, 19 bp, Homo sapiens
  siRNA target sequence for CYP51A1 (NM_000786.2,560-578).
cttgggcatgccatagcat

SEQ ID NO: 221943 - DNA, 19 bp, Homo sapiens
  siRNA target sequence for CYP51A1 (NM_000786.2,590-608).
ccaattgaatttctagaaa

SEQ ID NO: 221944 - DNA, 19 bp, Homo sapiens
  siRNA target sequence for CYP51A1 (NM_000786.2,619-637).
gaagtatggacctgtattt

SEQ ID NO: 221945 - DNA, 19 bp, Homo sapiens
  siRNA target sequence for CYP51A1 (NM_000786.2,622-640).
gtatggacctgtatttagt

SEQ ID NO: 221946 - DNA, 19 bp, Homo sapiens
  siRNA target sequence for CYP51A1 (NM_000786.2,626-644).
ggacctgtatttagtttta

SEQ ID NO: 221947 - DNA, 19 bp, Homo sapiens
  siRNA target sequence for CYP51A1 (NM_000786.2,629-647).
cctgtatttagttttacca

SEQ ID NO: 221948 - DNA, 19 bp, Homo sapiens
  siRNA target sequence for CYP51A1 (NM_000786.2,687-705).
ctgctgcactgctttttaa

SEQ ID NO: 221949 - DNA, 19 bp, Homo sapiens
  siRNA target sequence for CYP51A1 (NM_000786.2,689-707).
gctgcactgctttttaata

SEQ ID NO: 221950 - DNA, 19 bp, Homo sapiens
  siRNA target sequence for CYP51A1 (NM_000786.2,693-711).
cactgctttttaatagtaa

SEQ ID NO: 221951 - DNA, 19 bp, Homo sapiens
  siRNA target sequence for CYP51A1 (NM_000786.2,769-787).
gaagggagttgcatacgat

SEQ ID NO: 221952 - DNA, 19 bp, Homo sapiens
  siRNA target sequence for CYP51A1 (NM_000786.2,1828-1846).
cccagttatccgttacaaa

SEQ ID NO: 221953 - DNA, 19 bp, Homo sapiens
  siRNA target sequence for CYP51A1 (NM_000786.2,1832-1850).
gttatccgttacaaacgaa

SEQ ID NO: 221954 - DNA, 19 bp, Homo sapiens
  siRNA target sequence for CYP51A1 (NM_000786.2,1837-1855).
ccgttacaaacgaagatca

SEQ ID NO: 221955 - DNA, 19 bp, Homo sapiens
  siRNA target sequence for CYP51A1 (NM_000786.2,1838-1856).
cgttacaaacgaagatcaa

SEQ ID NO: 221956 - DNA, 19 bp, Homo sapiens
  siRNA target sequence for FLJ20359 (NM_017781.1,96-114).
ggttcgaggcggtcaaaga

SEQ ID NO: 221957 - DNA, 19 bp, Homo sapiens
  siRNA target sequence for FLJ20359 (NM_017781.1,279-297).
cggtggctgacaagattct

SEQ ID NO: 221958 - DNA, 19 bp, Homo sapiens
  siRNA target sequence for FLJ20359 (NM_017781.1,368-386).
ggctgggctccctccaata

SEQ ID NO: 221959 - DNA, 19 bp, Homo sapiens
  siRNA target sequence for FLJ20359 (NM_017781.1,425-443).
cgggaccccgtgtttgtgt

SEQ ID NO: 221960 - DNA, 19 bp, Homo sapiens
  siRNA target sequence for FLJ20359 (NM_017781.1,569-587).
gaggtccgtgccattctga

SEQ ID NO: 221961 - DNA, 19 bp, Homo sapiens
  siRNA target sequence for FLJ20359 (NM_017781.1,1091-1109).
gcgaatgggcactttgtga

SEQ ID NO: 221962 - DNA, 19 bp, Homo sapiens
  siRNA target sequence for FLJ20359 (NM_017781.1,1092-1110).
cgaatgggcactttgtgaa

SEQ ID NO: 221963 - DNA, 19 bp, Homo sapiens
  siRNA target sequence for FLJ39501 (NM_173483.1,383-401).
gggcatgtaccttccaaat

SEQ ID NO: 221964 - DNA, 19 bp, Homo sapiens
  siRNA target sequence for FLJ39501 (NM_173483.1,492-510).
ctggtgcaccctgattaca

SEQ ID NO: 221965 - DNA, 19 bp, Homo sapiens
  siRNA target sequence for FLJ39501 (NM_173483.1,692-710).
caaccagagcgctgacatt

SEQ ID NO: 221966 - DNA, 19 bp, Homo sapiens
  siRNA target sequence for FLJ39501 (NM_173483.1,698-716).
gagcgctgacattatgcat

SEQ ID NO: 221967 - DNA, 19 bp, Homo sapiens
  siRNA target sequence for FLJ39501 (NM_173483.1,703-721).
ctgacattatgcatgctaa

SEQ ID NO: 221968 - DNA, 19 bp, Homo sapiens
  siRNA target sequence for FLJ39501 (NM_173483.1,705-723).
gacattatgcatgctaaat

SEQ ID NO: 221969 - DNA, 19 bp, Homo sapiens
  siRNA target sequence for FLJ39501 (NM_173483.1,745-763).
cagcggtctcccttgatat

SEQ ID NO: 221970 - DNA, 19 bp, Homo sapiens
  siRNA target sequence for FLJ39501 (NM_173483.1,747-765).
gcggtctcccttgatatgt

SEQ ID NO: 221971 - DNA, 19 bp, Homo sapiens
  siRNA target sequence for FLJ39501 (NM_173483.1,748-766).
cggtctcccttgatatgtt

SEQ ID NO: 221972 - DNA, 19 bp, Homo sapiens
  siRNA target sequence for FLJ39501 (NM_173483.1,1170-1188).
gagggtcacgacacaacat

SEQ ID NO: 221973 - DNA, 19 bp, Homo sapiens
  siRNA target sequence for FLJ39501 (NM_173483.1,1320-1338).
ctgccctttacaactatgt

SEQ ID NO: 221974 - DNA, 19 bp, Homo sapiens
  siRNA target sequence for FLJ39501 (NM_173483.1,1445-1463).
ctgcttggtcagcatctat

SEQ ID NO: 221975 - DNA, 19 bp, Homo sapiens
  siRNA target sequence for FLJ39501 (NM_173483.1,1625-1643).
cgtggttgtggcactaaca

SEQ ID NO: 221976 - DNA, 19 bp, Homo sapiens
  siRNA target sequence for FLJ39501 (NM_173483.1,1636-1654).
cactaacactgctacgttt

SEQ ID NO: 221977 - DNA, 19 bp, Homo sapiens
  siRNA target sequence for LOC116123 (NM_138784.1,336-354).
gcctagtatctacaaatct

SEQ ID NO: 221978 - DNA, 19 bp, Homo sapiens
  siRNA target sequence for LOC116123 (NM_138784.1,338-356).
ctagtatctacaaatctgt

SEQ ID NO: 221979 - DNA, 19 bp, Homo sapiens
  siRNA target sequence for LOC116123 (NM_138784.1,437-455).
ccaaactcatggactactt

SEQ ID NO: 221980 - DNA, 19 bp, Homo sapiens
  siRNA target sequence for LOC116123 (NM_138784.1,481-499).
ctcctgaattacattcgtt

SEQ ID NO: 221981 - DNA, 19 bp, Homo sapiens
  siRNA target sequence for LOC116123 (NM_138784.1,483-501).
cctgaattacattcgtttt

SEQ ID NO: 221982 - DNA, 19 bp, Homo sapiens
  siRNA target sequence for LOC116123 (NM_138784.1,484-502).
ctgaattacattcgtttta

SEQ ID NO: 221983 - DNA, 19 bp, Homo sapiens
  siRNA target sequence for LOC116123 (NM_138784.1,600-618).
ctttgatggggtcttagtt

SEQ ID NO: 221984 - DNA, 19 bp, Homo sapiens
  siRNA target sequence for LOC116123 (NM_138784.1,696-714).
ccatagtcgggaatacaaa

SEQ ID NO: 221985 - DNA, 19 bp, Homo sapiens
  siRNA target sequence for LOC116123 (NM_138784.1,697-715).
catagtcgggaatacaaaa

SEQ ID NO: 221986 - DNA, 19 bp, Homo sapiens
  siRNA target sequence for LOC116123 (NM_138784.1,748-766).
gtgatcggcattggaaatt

SEQ ID NO: 221987 - DNA, 19 bp, Homo sapiens
  siRNA target sequence for LOC116123 (NM_138784.1,761-779).
gaaattctggagtggatat

SEQ ID NO: 221988 - DNA, 19 bp, Homo sapiens
  siRNA target sequence for LOC116123 (NM_138784.1,789-807).
gctcagtcgtgtagcaaaa

SEQ ID NO: 221989 - DNA, 19 bp, Homo sapiens
  siRNA target sequence for LOC116123 (NM_138784.1,794-812).
gtcgtgtagcaaaacagat

SEQ ID NO: 221990 - DNA, 19 bp, Homo sapiens
  siRNA target sequence for LOC116123 (NM_138784.1,796-814).
cgtgtagcaaaacagattt

SEQ ID NO: 221991 - DNA, 19 bp, Homo sapiens
  siRNA target sequence for MICAL2 (NM_014632.1,328-346).
gcatccacgtgcaaaggta

SEQ ID NO: 221992 - DNA, 19 bp, Homo sapiens
  siRNA target sequence for MICAL2 (NM_014632.1,396-414).
ggaccacagaaacttttat

SEQ ID NO: 221993 - DNA, 19 bp, Homo sapiens
  siRNA target sequence for MICAL2 (NM_014632.1,456-474).
cctgtggtacaaattggat

SEQ ID NO: 221994 - DNA, 19 bp, Homo sapiens
  siRNA target sequence for MICAL2 (NM_014632.1,478-496).
cgtggttcccacaaagagt

SEQ ID NO: 221995 - DNA, 19 bp, Homo sapiens
  siRNA target sequence for MICAL2 (NM_014632.1,479-497).
gtggttcccacaaagagta

SEQ ID NO: 221996 - DNA, 19 bp, Homo sapiens
  siRNA target sequence for MICAL2 (NM_014632.1,561-579).
gcgcactgccattgaactt

SEQ ID NO: 221997 - DNA, 19 bp, Homo sapiens
  siRNA target sequence for MICAL2 (NM_014632.1,745-763).
caactacagctcatcctat

SEQ ID NO: 221998 - DNA, 19 bp, Homo sapiens
  siRNA target sequence for MICAL2 (NM_014632.1,775-793).
ctgatgctgggagttgaaa

SEQ ID NO: 221999 - DNA, 19 bp, Homo sapiens
  siRNA target sequence for MICAL2 (NM_014632.1,893-911).
ctctgtcggagtttgagtt

SEQ ID NO: 222000 - DNA, 19 bp, Homo sapiens
  siRNA target sequence for MICAL2 (NM_014632.1,1143-1161).
ggactgcacccactatttt

SEQ ID NO: 222001 - DNA, 19 bp, Homo sapiens
  siRNA target sequence for MICAL2 (NM_014632.1,1146-1164).
ctgcacccactattttgta

SEQ ID NO: 222002 - DNA, 19 bp, Homo sapiens
  siRNA target sequence for MICAL2 (NM_014632.1,1148-1166).
gcacccactattttgtaat

SEQ ID NO: 222003 - DNA, 19 bp, Homo sapiens
  siRNA target sequence for MICAL2 (NM_014632.1,1191-1209).
cgacaaaggtgtcatcatt

SEQ ID NO: 222004 - DNA, 19 bp, Homo sapiens
  siRNA target sequence for MICAL2 (NM_014632.1,1192-1210).
gacaaaggtgtcatcatta

SEQ ID NO: 222005 - DNA, 19 bp, Homo sapiens
  siRNA target sequence for MICAL2 (NM_014632.1,1308-1326).
ctaccagctgccatcctta

SEQ ID NO: 222006 - DNA, 19 bp, Homo sapiens
  siRNA target sequence for MICAL2 (NM_014632.1,1621-1639).
ccggagaacatcaacaaga

SEQ ID NO: 222007 - DNA, 19 bp, Homo sapiens
  siRNA target sequence for MICAL2 (NM_014632.1,1706-1724).
cccatcaggtgaagcattt

SEQ ID NO: 222008 - DNA, 19 bp, Homo sapiens
  siRNA target sequence for MICAL2 (NM_014632.1,1711-1729).
caggtgaagcatttgtata

SEQ ID NO: 222009 - DNA, 19 bp, Homo sapiens
  siRNA target sequence for MICAL2 (NM_014632.1,1796-1814).
ccaggaaggagtcagatat

SEQ ID NO: 222010 - DNA, 19 bp, Homo sapiens
  siRNA target sequence for MICAL2 (NM_014632.1,1992-2010).
caaccagctcgcatttgat

SEQ ID NO: 222011 - DNA, 19 bp, Homo sapiens
  siRNA target sequence for MICAL2 (NM_014632.1,2193-2211).
cttggccaaatcatccatt

SEQ ID NO: 222012 - DNA, 19 bp, Homo sapiens
  siRNA target sequence for MICAL2 (NM_014632.1,2196-2214).
ggccaaatcatccatttct

SEQ ID NO: 222013 - DNA, 19 bp, Homo sapiens
  siRNA target sequence for MICAL2 (NM_014632.1,2220-2238).
ctatctcaacctcacattt

SEQ ID NO: 222014 - DNA, 19 bp, Homo sapiens
  siRNA target sequence for MICAL2 (NM_014632.1,2224-2242).
ctcaacctcacatttccaa

SEQ ID NO: 222015 - DNA, 19 bp, Homo sapiens
  siRNA target sequence for MICAL2 (NM_014632.1,2269-2287).
caaaccggagagaatgaca

SEQ ID NO: 222016 - DNA, 19 bp, Homo sapiens
  siRNA target sequence for MICAL2 (NM_014632.1,2273-2291).
ccggagagaatgacatgaa

SEQ ID NO: 222017 - DNA, 19 bp, Homo sapiens
  siRNA target sequence for MICAL2 (NM_014632.1,2320-2338).
ctggacgagccttcaaact

SEQ ID NO: 222018 - DNA, 19 bp, Homo sapiens
  siRNA target sequence for MICAL2 (NM_014632.1,2322-2340).
ggacgagccttcaaacttt

SEQ ID NO: 222019 - DNA, 19 bp, Homo sapiens
  siRNA target sequence for MICAL2 (NM_014632.1,2323-2341).
gacgagccttcaaactttt

SEQ ID NO: 222020 - DNA, 19 bp, Homo sapiens
  siRNA target sequence for MICAL2 (NM_014632.1,2351-2369).
gcttgggctccaatcaaga

SEQ ID NO: 222021 - DNA, 19 bp, Homo sapiens
  siRNA target sequence for MICAL2 (NM_014632.1,2456-2474).
ggaacccctcactcatgaa

SEQ ID NO: 222022 - DNA, 19 bp, Homo sapiens
  siRNA target sequence for MICAL2 (NM_014632.1,2846-2864).
gggaatttcacacaaagaa

SEQ ID NO: 222023 - DNA, 19 bp, Homo sapiens
  siRNA target sequence for MICAL2 (NM_014632.1,2908-2926).
ggggatttcccgcagaata

SEQ ID NO: 222024 - DNA, 19 bp, Homo sapiens
  siRNA target sequence for MICAL2 (NM_014632.1,2909-2927).
gggatttcccgcagaataa

SEQ ID NO: 222025 - DNA, 19 bp, Homo sapiens
  siRNA target sequence for MICAL2 (NM_014632.1,3112-3130).
ctgacggtagggaaagtgt

SEQ ID NO: 222026 - DNA, 19 bp, Homo sapiens
  siRNA target sequence for MICAL2 (NM_014632.1,3220-3238).
gaatctatgcgaaagtcat

SEQ ID NO: 222027 - DNA, 19 bp, Homo sapiens
  siRNA target sequence for MICAL2 (NM_014632.1,3262-3280).
gacacgtgttacttctgta

SEQ ID NO: 222028 - DNA, 19 bp, Homo sapiens
  siRNA target sequence for MICAL2 (NM_014632.1,3396-3414).
ctgcgatgaaggcaaattt

SEQ ID NO: 222029 - DNA, 19 bp, Homo sapiens
  siRNA target sequence for MICAL2 (NM_014632.1,3535-3553).
gacactcccaccgaaagtt

SEQ ID NO: 222030 - DNA, 19 bp, Homo sapiens
  siRNA target sequence for MICAL2 (NM_014632.1,3537-3555).
cactcccaccgaaagttct

SEQ ID NO: 222031 - DNA, 19 bp, Homo sapiens
  siRNA target sequence for P450RAI-2 (NM_019885.2,221-239).
cgtcgcggagggagaagta

SEQ ID NO: 222032 - DNA, 19 bp, Homo sapiens
  siRNA target sequence for P450RAI-2 (NM_019885.2,222-240).
gtcgcggagggagaagtat

SEQ ID NO: 222033 - DNA, 19 bp, Homo sapiens
  siRNA target sequence for P450RAI-2 (NM_019885.2,247-265).
gtgttcaagacgcatttgt

SEQ ID NO: 222034 - DNA, 19 bp, Homo sapiens
  siRNA target sequence for P450RAI-2 (NM_019885.2,384-402).
cacggtgtccaattccatt

SEQ ID NO: 222035 - DNA, 19 bp, Homo sapiens
  siRNA target sequence for P450RAI-2 (NM_019885.2,797-815).
ccctggacctcctcattga

SEQ ID NO: 222036 - DNA, 19 bp, Homo sapiens
  siRNA target sequence for PAMCI (NM_005447.2,147-165).
gactcggcataaaaacaga

SEQ ID NO: 222037 - DNA, 19 bp, Homo sapiens
  siRNA target sequence for PAMCI (NM_005447.2,173-191).
ctaaagacatggattcaga

SEQ ID NO: 222038 - DNA, 19 bp, Homo sapiens
  siRNA target sequence for PAMCI (NM_005447.2,291-309).
ggaacatgaggctacgttt

SEQ ID NO: 222039 - DNA, 19 bp, Homo sapiens
  siRNA target sequence for PAMCI (NM_005447.2,300-318).
ggctacgtttggagagaaa

SEQ ID NO: 222040 - DNA, 19 bp, Homo sapiens
  siRNA target sequence for PAMCI (NM_005447.2,331-349).
gggaagcccagtgattact

SEQ ID NO: 222041 - DNA, 19 bp, Homo sapiens
  siRNA target sequence for PAMCI (NM_005447.2,385-403).
cttcctccactaactagaa

SEQ ID NO: 222042 - DNA, 19 bp, Homo sapiens
  siRNA target sequence for PAMCI (NM_005447.2,428-446).
gagatgagcagcccaatat

SEQ ID NO: 222043 - DNA, 19 bp, Homo sapiens
  siRNA target sequence for PAMCI (NM_005447.2,433-451).
gagcagcccaatatgcaat

SEQ ID NO: 222044 - DNA, 19 bp, Homo sapiens
  siRNA target sequence for PAMCI (NM_005447.2,435-453).
gcagcccaatatgcaattt

SEQ ID NO: 222045 - DNA, 19 bp, Homo sapiens
  siRNA target sequence for PAMCI (NM_005447.2,439-457).
cccaatatgcaatttgttt

SEQ ID NO: 222046 - DNA, 19 bp, Homo sapiens
  siRNA target sequence for PAMCI (NM_005447.2,459-477).
ggttaaagcagatgctttt

SEQ ID NO: 222047 - DNA, 19 bp, Homo sapiens
  siRNA target sequence for PAMCI (NM_005447.2,497-515).
ggacagctgaagccaaatt

SEQ ID NO: 222048 - DNA, 19 bp, Homo sapiens
  siRNA target sequence for PAMCI (NM_005447.2,500-518).
cagctgaagccaaattagt

SEQ ID NO: 222049 - DNA, 19 bp, Homo sapiens
  siRNA target sequence for PAMCI (NM_005447.2,508-526).
gccaaattagtgcaaaaca

SEQ ID NO: 222050 - DNA, 19 bp, Homo sapiens
  siRNA target sequence for PAMCI (NM_005447.2,548-566).
gcccagcaaactacatgaa

SEQ ID NO: 222051 - DNA, 19 bp, Homo sapiens
  siRNA target sequence for PAMCI (NM_005447.2,613-631).
cggaaactggctaaaatta

SEQ ID NO: 222052 - DNA, 19 bp, Homo sapiens
  siRNA target sequence for PAMCI (NM_005447.2,647-665).
ctcatgatcgagataatat

SEQ ID NO: 222053 - DNA, 19 bp, Homo sapiens
  siRNA target sequence for PAMCI (NM_005447.2,704-722).
ctattcatcagcaagtcaa

SEQ ID NO: 222054 - DNA, 19 bp, Homo sapiens
  siRNA target sequence for PAMCI (NM_005447.2,808-826).
gttcaggatgcatatttaa

SEQ ID NO: 222055 - DNA, 19 bp, Homo sapiens
  siRNA target sequence for PAMCI (NM_005447.2,899-917).
gcgaaagtgatggaattga

SEQ ID NO: 222056 - DNA, 19 bp, Homo sapiens
  siRNA target sequence for PAMCI (NM_005447.2,900-918).
cgaaagtgatggaattgaa

SEQ ID NO: 222057 - DNA, 19 bp, Homo sapiens
  siRNA target sequence for PAMCI (NM_005447.2,1063-1081).
gagagtgttaagtgtgatt

SEQ ID NO: 222058 - DNA, 19 bp, Homo sapiens
  siRNA target sequence for PAMCI (NM_005447.2,1158-1176).
ctcattgcttcagatgaaa

SEQ ID NO: 222059 - DNA, 19 bp, Homo sapiens
  siRNA target sequence for PAMCI (NM_005447.2,1237-1255).
gggtgccagttaaaggaaa

SEQ ID NO: 222060 - DNA, 19 bp, Homo sapiens
  siRNA target sequence for PAMCI (NM_005447.2,1347-1365).
ctcggacactggtatcagt

SEQ ID NO: 222061 - DNA, 19 bp, Homo sapiens
  siRNA target sequence for PAMCI (NM_005447.2,1351-1369).
gacactggtatcagttcta

SEQ ID NO: 222062 - DNA, 19 bp, Homo sapiens
  siRNA target sequence for PAMCI (NM_005447.2,1380-1398).
ggactccgaaacaacagta

SEQ ID NO: 222063 - DNA, 19 bp, Homo sapiens
  siRNA target sequence for TBXAS1 (NM_001061.2,250-268).
ggggtttctaaaattggaa

SEQ ID NO: 222064 - DNA, 19 bp, Homo sapiens
  siRNA target sequence for TBXAS1 (NM_001061.2,331-349).
ctccacatcagcattctca

SEQ ID NO: 222065 - DNA, 19 bp, Homo sapiens
  siRNA target sequence for TBXAS1 (NM_001061.2,482-500).
cttggtcgtcggatgttta

SEQ ID NO: 222066 - DNA, 19 bp, Homo sapiens
  siRNA target sequence for TBXAS1 (NM_001061.2,486-504).
gtcgtcggatgtttattgt

SEQ ID NO: 222067 - DNA, 19 bp, Homo sapiens
  siRNA target sequence for TBXAS1 (NM_001061.2,488-506).
cgtcggatgtttattgtta

SEQ ID NO: 222068 - DNA, 19 bp, Homo sapiens
  siRNA target sequence for TBXAS1 (NM_001061.2,489-507).
gtcggatgtttattgttat

SEQ ID NO: 222069 - DNA, 19 bp, Homo sapiens
  siRNA target sequence for TBXAS1 (NM_001061.2,491-509).
cggatgtttattgttattt

SEQ ID NO: 222070 - DNA, 19 bp, Homo sapiens
  siRNA target sequence for TBXAS1 (NM_001061.2,552-570).
gtaactttaccaacagaat

SEQ ID NO: 222071 - DNA, 19 bp, Homo sapiens
  siRNA target sequence for TBXAS1 (NM_001061.2,573-591).
cgtcgggtttggagttcaa

SEQ ID NO: 222072 - DNA, 19 bp, Homo sapiens
  siRNA target sequence for TBXAS1 (NM_001061.2,600-618).
ccgacagcgttctgttttt

SEQ ID NO: 222073 - DNA, 19 bp, Homo sapiens
  siRNA target sequence for TBXAS1 (NM_001061.2,601-619).
cgacagcgttctgttttta

SEQ ID NO: 222074 - DNA, 19 bp, Homo sapiens
  siRNA target sequence for TBXAS1 (NM_001061.2,604-622).
cagcgttctgtttttacgt

SEQ ID NO: 222075 - DNA, 19 bp, Homo sapiens
  siRNA target sequence for TBXAS1 (NM_001061.2,613-631).
gtttttacgtgacaaaaga

SEQ ID NO: 222076 - DNA, 19 bp, Homo sapiens
  siRNA target sequence for TBXAS1 (NM_001061.2,719-737).
cttctcctggctcatttaa

SEQ ID NO: 222077 - DNA, 19 bp, Homo sapiens
  siRNA target sequence for TBXAS1 (NM_001061.2,753-771).
ctggggacgcatttgacat

SEQ ID NO: 222078 - DNA, 19 bp, Homo sapiens
  siRNA target sequence for TBXAS1 (NM_001061.2,773-791).
cagaggtgctactgcaatt

SEQ ID NO: 222079 - DNA, 19 bp, Homo sapiens
  siRNA target sequence for TBXAS1 (NM_001061.2,876-894).
gcaagcgtttcttcgaatt

SEQ ID NO: 222080 - DNA, 19 bp, Homo sapiens
  siRNA target sequence for TBXAS1 (NM_001061.2,904-922).
cagacctatcctggtttta

SEQ ID NO: 222081 - DNA, 19 bp, Homo sapiens
  siRNA target sequence for TBXAS1 (NM_001061.2,906-924).
gacctatcctggttttact

SEQ ID NO: 222082 - DNA, 19 bp, Homo sapiens
  siRNA target sequence for TBXAS1 (NM_001061.2,908-926).
cctatcctggttttactct

SEQ ID NO: 222083 - DNA, 19 bp, Homo sapiens
  siRNA target sequence for TBXAS1 (NM_001061.2,930-948).
catttccatccataatggt

SEQ ID NO: 222084 - DNA, 19 bp, Homo sapiens
  siRNA target sequence for TBXAS1 (NM_001061.2,959-977).
cggattttgcccaataaga

SEQ ID NO: 222085 - DNA, 19 bp, Homo sapiens
  siRNA target sequence for TBXAS1 (NM_001061.2,976-994).
gaaccgagacgaactgaat

SEQ ID NO: 222086 - DNA, 19 bp, Homo sapiens
  siRNA target sequence for TBXAS1 (NM_001061.2,985-1003).
cgaactgaatggctttttt

SEQ ID NO: 222087 - DNA, 19 bp, Homo sapiens
  siRNA target sequence for TBXAS1 (NM_001061.2,1084-1102).
cctggatgcccgacattct

SEQ ID NO: 222088 - DNA, 19 bp, Homo sapiens
  siRNA target sequence for TBXAS1 (NM_001061.2,1115-1133).
ggcgtgcaagactttgaca

SEQ ID NO: 222089 - DNA, 19 bp, Homo sapiens
  siRNA target sequence for TBXAS1 (NM_001061.2,1116-1134).
gcgtgcaagactttgacat

SEQ ID NO: 222090 - DNA, 19 bp, Homo sapiens
  siRNA target sequence for TBXAS1 (NM_001061.2,1342-1360).
gagagaggtagacgttttt

SEQ ID NO: 222091 - DNA, 19 bp, Homo sapiens
  siRNA target sequence for TBXAS1 (NM_001061.2,1451-1469).
ccgccagctttcagattca

SEQ ID NO: 222092 - DNA, 19 bp, Homo sapiens
  siRNA target sequence for TBXAS1 (NM_001061.2,1766-1784).
gtaccgctgcagctagaat

SEQ ID NO: 222093 - DNA, 19 bp, Homo sapiens
  siRNA target sequence for TBXAS1 (NM_001061.2,1795-1813).
cctaggtccaaaaaatggt

SEQ ID NO: 222094 - DNA, 19 bp, Homo sapiens
  siRNA target sequence for TBXAS1 (NM_001061.2,1803-1821).
caaaaaatggtgtctatat

SEQ ID NO: 222095 - DNA, 19 bp, Homo sapiens
  siRNA target sequence for TYRP1 (NM_000550.1,275-293).
gaccgctgtggctcatcat

SEQ ID NO: 222096 - DNA, 19 bp, Homo sapiens
  siRNA target sequence for TYRP1 (NM_000550.1,385-403).
gcccttgcgcttcttcaat

SEQ ID NO: 222097 - DNA, 19 bp, Homo sapiens
  siRNA target sequence for TYRP1 (NM_000550.1,386-404).
cccttgcgcttcttcaata

SEQ ID NO: 222098 - DNA, 19 bp, Homo sapiens
  siRNA target sequence for TYRP1 (NM_000550.1,496-514).
catagtcaggagaaatctt

SEQ ID NO: 222099 - DNA, 19 bp, Homo sapiens
  siRNA target sequence for TYRP1 (NM_000550.1,572-590).
cgcacaactcaccctttat

SEQ ID NO: 222100 - DNA, 19 bp, Homo sapiens
  siRNA target sequence for TYRP1 (NM_000550.1,573-591).
gcacaactcaccctttatt

SEQ ID NO: 222101 - DNA, 19 bp, Homo sapiens
  siRNA target sequence for TYRP1 (NM_000550.1,576-594).
caactcaccctttatttgt

SEQ ID NO: 222102 - DNA, 19 bp, Homo sapiens
  siRNA target sequence for TYRP1 (NM_000550.1,642-660).
cgccacaatttgagaacat

SEQ ID NO: 222103 - DNA, 19 bp, Homo sapiens
  siRNA target sequence for TYRP1 (NM_000550.1,689-707).
cactattactcagtcaaaa

SEQ ID NO: 222104 - DNA, 19 bp, Homo sapiens
  siRNA target sequence for TYRP1 (NM_000550.1,720-738).
gggtaggacaggaaagctt

SEQ ID NO: 222105 - DNA, 19 bp, Homo sapiens
  siRNA target sequence for TYRP1 (NM_000550.1,761-779).
gagggaccagcttttctca

SEQ ID NO: 222106 - DNA, 19 bp, Homo sapiens
  siRNA target sequence for TYRP1 (NM_000550.1,854-872).
ccttactggaattttgcaa

SEQ ID NO: 222107 - DNA, 19 bp, Homo sapiens
  siRNA target sequence for TYRP1 (NM_000550.1,869-887).
gcaacggggaaaaatgtct

SEQ ID NO: 222108 - DNA, 19 bp, Homo sapiens
  siRNA target sequence for TYRP1 (NM_000550.1,913-931).
gggatccagaagcaacttt

SEQ ID NO: 222109 - DNA, 19 bp, Homo sapiens
  siRNA target sequence for TYRP1 (NM_000550.1,984-1002).
gtgactccttggaagatta

SEQ ID NO: 222110 - DNA, 19 bp, Homo sapiens
  siRNA target sequence for TYRP1 (NM_000550.1,1034-1052).
gaggatgggccaattagga

SEQ ID NO: 222111 - DNA, 19 bp, Homo sapiens
  siRNA target sequence for TYRP1 (NM_000550.1,1120-1138).
gtgcttggaagttggttta

SEQ ID NO: 222112 - DNA, 19 bp, Homo sapiens
  siRNA target sequence for TYRP1 (NM_000550.1,1122-1140).
gcttggaagttggtttatt

SEQ ID NO: 222113 - DNA, 19 bp, Homo sapiens
  siRNA target sequence for TYRP1 (NM_000550.1,1123-1141).
cttggaagttggtttattt

SEQ ID NO: 222114 - DNA, 19 bp, Homo sapiens
  siRNA target sequence for TYRP1 (NM_000550.1,1127-1145).
gaagttggtttatttgaca

SEQ ID NO: 222115 - DNA, 19 bp, Homo sapiens
  siRNA target sequence for TYRP1 (NM_000550.1,1151-1169).
cctttttattccaactcta

SEQ ID NO: 222116 - DNA, 19 bp, Homo sapiens
  siRNA target sequence for TYRP1 (NM_000550.1,1203-1221).
gtgaccccacgggaaagta

SEQ ID NO: 222117 - DNA, 19 bp, Homo sapiens
  siRNA target sequence for TYRP1 (NM_000550.1,1230-1248).
ctgttcgaagtcttcacaa

SEQ ID NO: 222118 - DNA, 19 bp, Homo sapiens
  siRNA target sequence for TYRP1 (NM_000550.1,1232-1250).
gttcgaagtcttcacaatt

SEQ ID NO: 222119 - DNA, 19 bp, Homo sapiens
  siRNA target sequence for TYRP1 (NM_000550.1,1244-1262).
cacaatttggctcatctat

SEQ ID NO: 222120 - DNA, 19 bp, Homo sapiens
  siRNA target sequence for TYRP1 (NM_000550.1,1287-1305).
cccatttgtctccaaatga

SEQ ID NO: 222121 - DNA, 19 bp, Homo sapiens
  siRNA target sequence for TYRP1 (NM_000550.1,1288-1306).
ccatttgtctccaaatgat

SEQ ID NO: 222122 - DNA, 19 bp, Homo sapiens
  siRNA target sequence for TYRP1 (NM_000550.1,1294-1312).
gtctccaaatgatcctatt

SEQ ID NO: 222123 - DNA, 19 bp, Homo sapiens
  siRNA target sequence for TYRP1 (NM_000550.1,1296-1314).
ctccaaatgatcctatttt

SEQ ID NO: 222124 - DNA, 19 bp, Homo sapiens
  siRNA target sequence for TYRP1 (NM_000550.1,1337-1355).
gatgcagtctttgatgaat

SEQ ID NO: 222125 - DNA, 19 bp, Homo sapiens
  siRNA target sequence for TYRP1 (NM_000550.1,1376-1394).
gatatatccacatttccat

SEQ ID NO: 222126 - DNA, 19 bp, Homo sapiens
  siRNA target sequence for TYRP1 (NM_000550.1,1403-1421).
gcccctattggacataata

SEQ ID NO: 222127 - DNA, 19 bp, Homo sapiens
  siRNA target sequence for TYRP1 (NM_000550.1,1492-1510).
cctgggatacacttatgaa

SEQ ID NO: 222128 - DNA, 19 bp, Homo sapiens
  siRNA target sequence for TYRP1 (NM_000550.1,1495-1513).
gggatacacttatgaaatt

SEQ ID NO: 222129 - DNA, 19 bp, Homo sapiens
  siRNA target sequence for TYRP1 (NM_000550.1,1519-1537).
gccaagtcgggagtttagt

SEQ ID NO: 222130 - DNA, 19 bp, Homo sapiens
  siRNA target sequence for TYRP1 (NM_000550.1,1521-1539).
caagtcgggagtttagtgt

SEQ ID NO: 222131 - DNA, 19 bp, Homo sapiens
  siRNA target sequence for TYRP1 (NM_000550.1,1576-1594).
gttactggttgcactcatt

SEQ ID NO: 222132 - DNA, 19 bp, Homo sapiens
  siRNA target sequence for TYRP1 (NM_000550.1,1658-1676).
ctcactgatcagtatcaat

SEQ ID NO: 222133 - DNA, 19 bp, Homo sapiens
  siRNA target sequence for TYRP1 (NM_000550.1,1673-1691).
caatgctatgctgaagaat

SEQ ID NO: 222134 - DNA, 19 bp, Homo sapiens
  siRNA target sequence for TYRP1 (NM_000550.1,1700-1718).
ctccagaatcctaatcagt

SEQ ID NO: 222135 - DNA, 19 bp, Homo sapiens
  siRNA target sequence for FLJ13491 (NM_024623.1,714-732).
cagcggctggagacagtat

SEQ ID NO: 222136 - DNA, 19 bp, Homo sapiens
  siRNA target sequence for FLJ13491 (NM_024623.1,1355-1373).
cgccacggtggatgtatgt

SEQ ID NO: 222137 - DNA, 19 bp, Homo sapiens
  siRNA target sequence for PLOD (NM_000302.2,160-178).
gccggaggacaacctttta

SEQ ID NO: 222138 - DNA, 19 bp, Homo sapiens
  siRNA target sequence for PLOD (NM_000302.2,162-180).
cggaggacaaccttttagt

SEQ ID NO: 222139 - DNA, 19 bp, Homo sapiens
  siRNA target sequence for PLOD (NM_000302.2,620-638).
gacagcgatcagctgtttt

SEQ ID NO: 222140 - DNA, 19 bp, Homo sapiens
  siRNA target sequence for PLOD (NM_000302.2,739-757).
ggtcgtgctcaagtttgaa

SEQ ID NO: 222141 - DNA, 19 bp, Homo sapiens
  siRNA target sequence for PLOD (NM_000302.2,740-758).
gtcgtgctcaagtttgaaa

SEQ ID NO: 222142 - DNA, 19 bp, Homo sapiens
  siRNA target sequence for PLOD (NM_000302.2,987-1005).
cgtttgtgtccctgttctt

SEQ ID NO: 222143 - DNA, 19 bp, Homo sapiens
  siRNA target sequence for PLOD (NM_000302.2,1272-1290).
ggctgctgatccaacagaa

SEQ ID NO: 222144 - DNA, 19 bp, Homo sapiens
  siRNA target sequence for PLOD (NM_000302.2,1357-1375).
cagtgcagatggctactat

SEQ ID NO: 222145 - DNA, 19 bp, Homo sapiens
  siRNA target sequence for PLOD (NM_000302.2,1426-1444).
ctggaatgtgccctatatt

SEQ ID NO: 222146 - DNA, 19 bp, Homo sapiens
  siRNA target sequence for PLOD (NM_000302.2,1446-1464).
caaacatctacttgatcaa

SEQ ID NO: 222147 - DNA, 19 bp, Homo sapiens
  siRNA target sequence for PLOD (NM_000302.2,1742-1760).
ccctgcccggatgtctatt

SEQ ID NO: 222148 - DNA, 19 bp, Homo sapiens
  siRNA target sequence for PLOD (NM_000302.2,1746-1764).
gcccggatgtctattggtt

SEQ ID NO: 222149 - DNA, 19 bp, Homo sapiens
  siRNA target sequence for PLOD (NM_000302.2,1870-1888).
cgagaacgtgccgactatt

SEQ ID NO: 222150 - DNA, 19 bp, Homo sapiens
  siRNA target sequence for PLOD (NM_000302.2,2196-2214).
gacgactcacgcattacca

SEQ ID NO: 222151 - DNA, 19 bp, Homo sapiens
  siRNA target sequence for PLOD2 (NM_000935.1,95-113).
cgagcatccccacagataa

SEQ ID NO: 222152 - DNA, 19 bp, Homo sapiens
  siRNA target sequence for PLOD2 (NM_000935.1,96-114).
gagcatccccacagataaa

SEQ ID NO: 222153 - DNA, 19 bp, Homo sapiens
  siRNA target sequence for PLOD2 (NM_000935.1,99-117).
catccccacagataaatta

SEQ ID NO: 222154 - DNA, 19 bp, Homo sapiens
  siRNA target sequence for PLOD2 (NM_000935.1,104-122).
ccacagataaattattagt

SEQ ID NO: 222155 - DNA, 19 bp, Homo sapiens
  siRNA target sequence for PLOD2 (NM_000935.1,146-164).
gtgatggattccatcgatt

SEQ ID NO: 222156 - DNA, 19 bp, Homo sapiens
  siRNA target sequence for PLOD2 (NM_000935.1,148-166).
gatggattccatcgattta

SEQ ID NO: 222157 - DNA, 19 bp, Homo sapiens
  siRNA target sequence for PLOD2 (NM_000935.1,152-170).
gattccatcgatttatgca

SEQ ID NO: 222158 - DNA, 19 bp, Homo sapiens
  siRNA target sequence for PLOD2 (NM_000935.1,169-187).
cagtcagccaaatatttca

SEQ ID NO: 222159 - DNA, 19 bp, Homo sapiens
  siRNA target sequence for PLOD2 (NM_000935.1,171-189).
gtcagccaaatatttcaat

SEQ ID NO: 222160 - DNA, 19 bp, Homo sapiens
  siRNA target sequence for PLOD2 (NM_000935.1,173-191).
cagccaaatatttcaatta

SEQ ID NO: 222161 - DNA, 19 bp, Homo sapiens
  siRNA target sequence for PLOD2 (NM_000935.1,175-193).
gccaaatatttcaattata

SEQ ID NO: 222162 - DNA, 19 bp, Homo sapiens
  siRNA target sequence for PLOD2 (NM_000935.1,229-247).
ggtggtgatggaattaata

SEQ ID NO: 222163 - DNA, 19 bp, Homo sapiens
  siRNA target sequence for PLOD2 (NM_000935.1,259-277).
ggccagaaagtgagattaa

SEQ ID NO: 222164 - DNA, 19 bp, Homo sapiens
  siRNA target sequence for PLOD2 (NM_000935.1,260-278).
gccagaaagtgagattaat

SEQ ID NO: 222165 - DNA, 19 bp, Homo sapiens
  siRNA target sequence for PLOD2 (NM_000935.1,319-337).
gttgtcatgtttactgaat

SEQ ID NO: 222166 - DNA, 19 bp, Homo sapiens
  siRNA target sequence for PLOD2 (NM_000935.1,339-357).
ctttgatgtcatatttgct

SEQ ID NO: 222167 - DNA, 19 bp, Homo sapiens
  siRNA target sequence for PLOD2 (NM_000935.1,432-450).
gtggccagataaaagacta

SEQ ID NO: 222168 - DNA, 19 bp, Homo sapiens
  siRNA target sequence for PLOD2 (NM_000935.1,478-496).
gggaaacgctatctgaatt

SEQ ID NO: 222169 - DNA, 19 bp, Homo sapiens
  siRNA target sequence for PLOD2 (NM_000935.1,480-498).
gaaacgctatctgaattca

SEQ ID NO: 222170 - DNA, 19 bp, Homo sapiens
  siRNA target sequence for PLOD2 (NM_000935.1,521-539).
catatgtcaaccgtatagt

SEQ ID NO: 222171 - DNA, 19 bp, Homo sapiens
  siRNA target sequence for PLOD2 (NM_000935.1,528-546).
caaccgtatagttcaacaa

SEQ ID NO: 222172 - DNA, 19 bp, Homo sapiens
  siRNA target sequence for PLOD2 (NM_000935.1,568-586).
gatgatcagctcttttaca

SEQ ID NO: 222173 - DNA, 19 bp, Homo sapiens
  siRNA target sequence for PLOD2 (NM_000935.1,577-595).
ctcttttacactaaagttt

SEQ ID NO: 222174 - DNA, 19 bp, Homo sapiens
  siRNA target sequence for PLOD2 (NM_000935.1,632-650).
cattggatcacaaatgcaa

SEQ ID NO: 222175 - DNA, 19 bp, Homo sapiens
  siRNA target sequence for PLOD2 (NM_000935.1,663-681).
cttaaatggagctgtagat

SEQ ID NO: 222176 - DNA, 19 bp, Homo sapiens
  siRNA target sequence for PLOD2 (NM_000935.1,712-730).
gccagagctaagaatacat

SEQ ID NO: 222177 - DNA, 19 bp, Homo sapiens
  siRNA target sequence for PLOD2 (NM_000935.1,716-734).
gagctaagaatacatttta

SEQ ID NO: 222178 - DNA, 19 bp, Homo sapiens
  siRNA target sequence for PLOD2 (NM_000935.1,740-758).
cattaccagtggcaattaa

SEQ ID NO: 222179 - DNA, 19 bp, Homo sapiens
  siRNA target sequence for PLOD2 (NM_000935.1,826-844).
gataatggctgcactcttt

SEQ ID NO: 222180 - DNA, 19 bp, Homo sapiens
  siRNA target sequence for PLOD2 (NM_000935.1,832-850).
ggctgcactctttgtgaat

SEQ ID NO: 222181 - DNA, 19 bp, Homo sapiens
  siRNA target sequence for PLOD2 (NM_000935.1,833-851).
gctgcactctttgtgaatt

SEQ ID NO: 222182 - DNA, 19 bp, Homo sapiens
  siRNA target sequence for PLOD2 (NM_000935.1,836-854).
gcactctttgtgaattcga

SEQ ID NO: 222183 - DNA, 19 bp, Homo sapiens
  siRNA target sequence for PLOD2 (NM_000935.1,837-855).
cactctttgtgaattcgat

SEQ ID NO: 222184 - DNA, 19 bp, Homo sapiens
  siRNA target sequence for PLOD2 (NM_000935.1,861-879).
cgacttgtctgcagtagat

SEQ ID NO: 222185 - DNA, 19 bp, Homo sapiens
  siRNA target sequence for PLOD2 (NM_000935.1,872-890).
cagtagatgtccatccaaa

SEQ ID NO: 222186 - DNA, 19 bp, Homo sapiens
  siRNA target sequence for PLOD2 (NM_000935.1,877-895).
gatgtccatccaaacgtat

SEQ ID NO: 222187 - DNA, 19 bp, Homo sapiens
  siRNA target sequence for PLOD2 (NM_000935.1,880-898).
gtccatccaaacgtatcaa

SEQ ID NO: 222188 - DNA, 19 bp, Homo sapiens
  siRNA target sequence for PLOD2 (NM_000935.1,915-933).
gcaaccaaccccttttcta

SEQ ID NO: 222189 - DNA, 19 bp, Homo sapiens
  siRNA target sequence for PLOD2 (NM_000935.1,934-952).
cctcggtttctggacatat

SEQ ID NO: 222190 - DNA, 19 bp, Homo sapiens
  siRNA target sequence for PLOD2 (NM_000935.1,935-953).
ctcggtttctggacatatt

SEQ ID NO: 222191 - DNA, 19 bp, Homo sapiens
  siRNA target sequence for PLOD2 (NM_000935.1,937-955).
cggtttctggacatattgt

SEQ ID NO: 222192 - DNA, 19 bp, Homo sapiens
  siRNA target sequence for PLOD2 (NM_000935.1,938-956).
ggtttctggacatattgtt

SEQ ID NO: 222193 - DNA, 19 bp, Homo sapiens
  siRNA target sequence for PLOD2 (NM_000935.1,1137-1155).
ccgtcaggatgaaaagtgt

SEQ ID NO: 222194 - DNA, 19 bp, Homo sapiens
  siRNA target sequence for PLOD2 (NM_000935.1,1193-1211).
caaatccaaggactttaaa

SEQ ID NO: 222195 - DNA, 19 bp, Homo sapiens
  siRNA target sequence for PLOD2 (NM_000935.1,1239-1257).
cattgctcctcttgtaact

SEQ ID NO: 222196 - DNA, 19 bp, Homo sapiens
  siRNA target sequence for PLOD2 (NM_000935.1,1292-1310).
cattgagtcctgatggata

SEQ ID NO: 222197 - DNA, 19 bp, Homo sapiens
  siRNA target sequence for PLOD2 (NM_000935.1,1316-1334).
cacgatctgaagattatgt

SEQ ID NO: 222198 - DNA, 19 bp, Homo sapiens
  siRNA target sequence for PLOD2 (NM_000935.1,1390-1408).
gtgtacttaattaaaggaa

SEQ ID NO: 222199 - DNA, 19 bp, Homo sapiens
  siRNA target sequence for PLOD2 (NM_000935.1,1395-1413).
cttaattaaaggaaagaca

SEQ ID NO: 222200 - DNA, 19 bp, Homo sapiens
  siRNA target sequence for PLOD2 (NM_000935.1,1425-1443).
gatgaatgaaaggaactat

SEQ ID NO: 222201 - DNA, 19 bp, Homo sapiens
  siRNA target sequence for PLOD2 (NM_000935.1,1473-1491).
ggctctttgccgaaatgct

SEQ ID NO: 222202 - DNA, 19 bp, Homo sapiens
  siRNA target sequence for PLOD2 (NM_000935.1,1474-1492).
gctctttgccgaaatgcta

SEQ ID NO: 222203 - DNA, 19 bp, Homo sapiens
  siRNA target sequence for PLOD2 (NM_000935.1,1504-1522).
gtatttatgtacatttcta

SEQ ID NO: 222204 - DNA, 19 bp, Homo sapiens
  siRNA target sequence for PLOD2 (NM_000935.1,1512-1530).
gtacatttctaatagacat

SEQ ID NO: 222205 - DNA, 19 bp, Homo sapiens
  siRNA target sequence for PLOD2 (NM_000935.1,1681-1699).
ccctgtccagatgtctttt

SEQ ID NO: 222206 - DNA, 19 bp, Homo sapiens
  siRNA target sequence for PLOD2 (NM_000935.1,1685-1703).
gtccagatgtcttttggtt

SEQ ID NO: 222207 - DNA, 19 bp, Homo sapiens
  siRNA target sequence for PLOD2 (NM_000935.1,1750-1768).
gaacattacggcaaatggt

SEQ ID NO: 222208 - DNA, 19 bp, Homo sapiens
  siRNA target sequence for PLOD2 (NM_000935.1,1771-1789).
gggggaaaacatcatgata

SEQ ID NO: 222209 - DNA, 19 bp, Homo sapiens
  siRNA target sequence for PLOD2 (NM_000935.1,1791-1809).
ccgtatatctggtggttat

SEQ ID NO: 222210 - DNA, 19 bp, Homo sapiens
  siRNA target sequence for PLOD2 (NM_000935.1,1793-1811).
gtatatctggtggttatga

SEQ ID NO: 222211 - DNA, 19 bp, Homo sapiens
  siRNA target sequence for PLOD2 (NM_000935.1,1833-1851).
ccacatgaagcaagttgat

SEQ ID NO: 222212 - DNA, 19 bp, Homo sapiens
  siRNA target sequence for PLOD2 (NM_000935.1,1884-1902).
gttcattgcaccagttaca

SEQ ID NO: 222213 - DNA, 19 bp, Homo sapiens
  siRNA target sequence for PLOD2 (NM_000935.1,1908-1926).
ggtctttgcaggctattat

SEQ ID NO: 222214 - DNA, 19 bp, Homo sapiens
  siRNA target sequence for PLOD2 (NM_000935.1,1932-1950).
gggatttgcactactgaat

SEQ ID NO: 222215 - DNA, 19 bp, Homo sapiens
  siRNA target sequence for PLOD2 (NM_000935.1,1933-1951).
ggatttgcactactgaatt

SEQ ID NO: 222216 - DNA, 19 bp, Homo sapiens
  siRNA target sequence for PLOD2 (NM_000935.1,1934-1952).
gatttgcactactgaattt

SEQ ID NO: 222217 - DNA, 19 bp, Homo sapiens
  siRNA target sequence for PLOD2 (NM_000935.1,1996-2014).
catcatgatgcttctacat

SEQ ID NO: 222218 - DNA, 19 bp, Homo sapiens
  siRNA target sequence for PLOD2 (NM_000935.1,2002-2020).
gatgcttctacatttacca

SEQ ID NO: 222219 - DNA, 19 bp, Homo sapiens
  siRNA target sequence for PLOD2 (NM_000935.1,2056-2074).
cagggaggtggttgcaaat

SEQ ID NO: 222220 - DNA, 19 bp, Homo sapiens
  siRNA target sequence for PLOD2 (NM_000935.1,2058-2076).
gggaggtggttgcaaattt

SEQ ID NO: 222221 - DNA, 19 bp, Homo sapiens
  siRNA target sequence for PLOD2 (NM_000935.1,2066-2084).
gttgcaaatttctaaggta

SEQ ID NO: 222222 - DNA, 19 bp, Homo sapiens
  siRNA target sequence for PLOD2 (NM_000935.1,2070-2088).
caaatttctaaggtacaat

SEQ ID NO: 222223 - DNA, 19 bp, Homo sapiens
  siRNA target sequence for PLOD2 (NM_182943.1,1706-1724).
ctccggaaacattccaaat

SEQ ID NO: 222224 - DNA, 19 bp, Homo sapiens
  siRNA target sequence for PLOD2 (NM_182943.1,1733-1751).
ccccaaagggtgtatttat

SEQ ID NO: 222225 - DNA, 19 bp, Homo sapiens
  siRNA target sequence for PLOD2 (NM_182943.1,1735-1753).
ccaaagggtgtatttatgt

SEQ ID NO: 222226 - DNA, 19 bp, Homo sapiens
  siRNA target sequence for PLOD2 (NM_182943.1,2095-2113).
gagaatgtatggcttcatt

SEQ ID NO: 222227 - DNA, 19 bp, Homo sapiens
  siRNA target sequence for PLOD3 (NM_001084.3,575-593).
cagaaggtccggtggttaa

SEQ ID NO: 222228 - DNA, 19 bp, Homo sapiens
  siRNA target sequence for PLOD3 (NM_001084.3,614-632).
gctgaccgggaggatatga

SEQ ID NO: 222229 - DNA, 19 bp, Homo sapiens
  siRNA target sequence for PLOD3 (NM_001084.3,617-635).
gaccgggaggatatgatca

SEQ ID NO: 222230 - DNA, 19 bp, Homo sapiens
  siRNA target sequence for PLOD3 (NM_001084.3,620-638).
cgggaggatatgatcatca

SEQ ID NO: 222231 - DNA, 19 bp, Homo sapiens
  siRNA target sequence for PLOD3 (NM_001084.3,623-641).
gaggatatgatcatcatgt

SEQ ID NO: 222232 - DNA, 19 bp, Homo sapiens
  siRNA target sequence for PLOD3 (NM_001084.3,791-809).
gggaagcgcttcctcaatt

SEQ ID NO: 222233 - DNA, 19 bp, Homo sapiens
  siRNA target sequence for PLOD3 (NM_001084.3,793-811).
gaagcgcttcctcaattct

SEQ ID NO: 222234 - DNA, 19 bp, Homo sapiens
  siRNA target sequence for PLOD3 (NM_001084.3,851-869).
gtgcgccagtggaagtaca

SEQ ID NO: 222235 - DNA, 19 bp, Homo sapiens
  siRNA target sequence for PLOD3 (NM_001084.3,918-936).
caggactgagggagaaact

SEQ ID NO: 222236 - DNA, 19 bp, Homo sapiens
  siRNA target sequence for PLOD3 (NM_001084.3,979-997).
caacggggctttagatgaa

SEQ ID NO: 222237 - DNA, 19 bp, Homo sapiens
  siRNA target sequence for PLOD3 (NM_001084.3,1086-1104).
ctaagctgcagctcaacta

SEQ ID NO: 222238 - DNA, 19 bp, Homo sapiens
  siRNA target sequence for PLOD3 (NM_001084.3,1460-1478).
cccgagtgtgagttctact

SEQ ID NO: 222239 - DNA, 19 bp, Homo sapiens
  siRNA target sequence for PLOD3 (NM_001084.3,1461-1479).
ccgagtgtgagttctactt

SEQ ID NO: 222240 - DNA, 19 bp, Homo sapiens
  siRNA target sequence for PLOD3 (NM_001084.3,1779-1797).
cggacatggccttctgtaa

SEQ ID NO: 222241 - DNA, 19 bp, Homo sapiens
  siRNA target sequence for PLOD3 (NM_001084.3,1831-1849).
gagcaatcagcatgaattt

SEQ ID NO: 222242 - DNA, 19 bp, Homo sapiens
  siRNA target sequence for PLOD3 (NM_001084.3,1896-1914).
ccgacctctggcagatctt

SEQ ID NO: 222243 - DNA, 19 bp, Homo sapiens
  siRNA target sequence for PLOD3 (NM_001084.3,2022-2040).
cactgctgtcagaacaaat

SEQ ID NO: 222244 - DNA, 19 bp, Homo sapiens
  siRNA target sequence for PLOD3 (NM_001084.3,2026-2044).
gctgtcagaacaaatgtgt

SEQ ID NO: 222245 - DNA, 19 bp, Homo sapiens
  siRNA target sequence for PLOD3 (NM_001084.3,2490-2508).
ggggcacacgctacatcat

SEQ ID NO: 222246 - DNA, 19 bp, Homo sapiens
  siRNA target sequence for P4HA1 (NM_000917.1,166-184).
ggctcatccaggctttttt

SEQ ID NO: 222247 - DNA, 19 bp, Homo sapiens
  siRNA target sequence for P4HA1 (NM_000917.1,167-185).
gctcatccaggctttttta

SEQ ID NO: 222248 - DNA, 19 bp, Homo sapiens
  siRNA target sequence for P4HA1 (NM_000917.1,173-191).
ccaggcttttttacttcaa

SEQ ID NO: 222249 - DNA, 19 bp, Homo sapiens
  siRNA target sequence for P4HA1 (NM_000917.1,178-196).
cttttttacttcaattggt

SEQ ID NO: 222250 - DNA, 19 bp, Homo sapiens
  siRNA target sequence for P4HA1 (NM_000917.1,204-222).
ctgatttgatccatactga

SEQ ID NO: 222251 - DNA, 19 bp, Homo sapiens
  siRNA target sequence for P4HA1 (NM_000917.1,233-251).
gtgacttctctgaaagatt

SEQ ID NO: 222252 - DNA, 19 bp, Homo sapiens
  siRNA target sequence for P4HA1 (NM_000917.1,235-253).
gacttctctgaaagattat

SEQ ID NO: 222253 - DNA, 19 bp, Homo sapiens
  siRNA target sequence for P4HA1 (NM_000917.1,237-255).
cttctctgaaagattatat

SEQ ID NO: 222254 - DNA, 19 bp, Homo sapiens
  siRNA target sequence for P4HA1 (NM_000917.1,240-258).
ctctgaaagattatattaa

SEQ ID NO: 222255 - DNA, 19 bp, Homo sapiens
  siRNA target sequence for P4HA1 (NM_000917.1,304-322).
gttagatcggctaactagt

SEQ ID NO: 222256 - DNA, 19 bp, Homo sapiens
  siRNA target sequence for P4HA1 (NM_000917.1,318-336).
ctagtacagcgacaaaaga

SEQ ID NO: 222257 - DNA, 19 bp, Homo sapiens
  siRNA target sequence for P4HA1 (NM_000917.1,353-371).
gggcatccagtaaatgcat

SEQ ID NO: 222258 - DNA, 19 bp, Homo sapiens
  siRNA target sequence for P4HA1 (NM_000917.1,354-372).
ggcatccagtaaatgcatt

SEQ ID NO: 222259 - DNA, 19 bp, Homo sapiens
  siRNA target sequence for P4HA1 (NM_000917.1,415-433).
gaatctggtccttaaggat

SEQ ID NO: 222260 - DNA, 19 bp, Homo sapiens
  siRNA target sequence for P4HA1 (NM_000917.1,421-439).
ggtccttaaggatatgtca

SEQ ID NO: 222261 - DNA, 19 bp, Homo sapiens
  siRNA target sequence for P4HA1 (NM_000917.1,532-550).
ggatacctacaatttggat

SEQ ID NO: 222262 - DNA, 19 bp, Homo sapiens
  siRNA target sequence for P4HA1 (NM_000917.1,537-555).
cctacaatttggatacaga

SEQ ID NO: 222263 - DNA, 19 bp, Homo sapiens
  siRNA target sequence for P4HA1 (NM_000917.1,538-556).
ctacaatttggatacagat

SEQ ID NO: 222264 - DNA, 19 bp, Homo sapiens
  siRNA target sequence for P4HA1 (NM_000917.1,558-576).
ccatctcaaagggtaatct

SEQ ID NO: 222265 - DNA, 19 bp, Homo sapiens
  siRNA target sequence for P4HA1 (NM_000917.1,559-577).
catctcaaagggtaatctt

SEQ ID NO: 222266 - DNA, 19 bp, Homo sapiens
  siRNA target sequence for P4HA1 (NM_000917.1,609-627).
ctgaggactgctttgagtt

SEQ ID NO: 222267 - DNA, 19 bp, Homo sapiens
  siRNA target sequence for P4HA1 (NM_000917.1,628-646).
gggcaaagtggcctataca

SEQ ID NO: 222268 - DNA, 19 bp, Homo sapiens
  siRNA target sequence for P4HA1 (NM_000917.1,709-727).
cgagatttctaccatagat

SEQ ID NO: 222269 - DNA, 19 bp, Homo sapiens
  siRNA target sequence for P4HA1 (NM_000917.1,710-728).
gagatttctaccatagata

SEQ ID NO: 222270 - DNA, 19 bp, Homo sapiens
  siRNA target sequence for P4HA1 (NM_000917.1,731-749).
gtctctgttctagattatt

SEQ ID NO: 222271 - DNA, 19 bp, Homo sapiens
  siRNA target sequence for P4HA1 (NM_000917.1,835-853).
gagagctaatggtaactta

SEQ ID NO: 222272 - DNA, 19 bp, Homo sapiens
  siRNA target sequence for P4HA1 (NM_000917.1,837-855).
gagctaatggtaacttaaa

SEQ ID NO: 222273 - DNA, 19 bp, Homo sapiens
  siRNA target sequence for P4HA1 (NM_000917.1,903-921).
cttcagatgaccaatctga

SEQ ID NO: 222274 - DNA, 19 bp, Homo sapiens
  siRNA target sequence for P4HA1 (NM_000917.1,911-929).
gaccaatctgatcagaaaa

SEQ ID NO: 222275 - DNA, 19 bp, Homo sapiens
  siRNA target sequence for P4HA1 (NM_000917.1,913-931).
ccaatctgatcagaaaact

SEQ ID NO: 222276 - DNA, 19 bp, Homo sapiens
  siRNA target sequence for P4HA1 (NM_000917.1,1018-1036).
gacccctcggagacagaaa

SEQ ID NO: 222277 - DNA, 19 bp, Homo sapiens
  siRNA target sequence for P4HA1 (NM_000917.1,1023-1041).
ctcggagacagaaaaaact

SEQ ID NO: 222278 - DNA, 19 bp, Homo sapiens
  siRNA target sequence for P4HA1 (NM_000917.1,1047-1065).
gccgctaccatgatggaaa

SEQ ID NO: 222279 - DNA, 19 bp, Homo sapiens
  siRNA target sequence for P4HA1 (NM_000917.1,1058-1076).
gatggaaaccgtaatccta

SEQ ID NO: 222280 - DNA, 19 bp, Homo sapiens
  siRNA target sequence for P4HA1 (NM_000917.1,1061-1079).
ggaaaccgtaatcctaaat

SEQ ID NO: 222281 - DNA, 19 bp, Homo sapiens
  siRNA target sequence for P4HA1 (NM_000917.1,1062-1080).
gaaaccgtaatcctaaatt

SEQ ID NO: 222282 - DNA, 19 bp, Homo sapiens
  siRNA target sequence for P4HA1 (NM_000917.1,1066-1084).
ccgtaatcctaaatttatt

SEQ ID NO: 222283 - DNA, 19 bp, Homo sapiens
  siRNA target sequence for P4HA1 (NM_000917.1,1113-1131).
gggacaagcctcgtattat

SEQ ID NO: 222284 - DNA, 19 bp, Homo sapiens
  siRNA target sequence for P4HA1 (NM_000917.1,1114-1132).
ggacaagcctcgtattatt

SEQ ID NO: 222285 - DNA, 19 bp, Homo sapiens
  siRNA target sequence for P4HA1 (NM_000917.1,1133-1151).
cgcttccatgatattattt

SEQ ID NO: 222286 - DNA, 19 bp, Homo sapiens
  siRNA target sequence for P4HA1 (NM_000917.1,1174-1192).
caaagacctagcaaaacca

SEQ ID NO: 222287 - DNA, 19 bp, Homo sapiens
  siRNA target sequence for P4HA1 (NM_000917.1,1195-1213).
gctgagccgagctacagta

SEQ ID NO: 222288 - DNA, 19 bp, Homo sapiens
  siRNA target sequence for P4HA1 (NM_000917.1,1198-1216).
gagccgagctacagtacat

SEQ ID NO: 222289 - DNA, 19 bp, Homo sapiens
  siRNA target sequence for P4HA1 (NM_000917.1,1244-1262).
gcacagtacagagtatcta

SEQ ID NO: 222290 - DNA, 19 bp, Homo sapiens
  siRNA target sequence for P4HA1 (NM_000917.1,1245-1263).
cacagtacagagtatctaa

SEQ ID NO: 222291 - DNA, 19 bp, Homo sapiens
  siRNA target sequence for P4HA1 (NM_000917.1,1249-1267).
gtacagagtatctaagagt

SEQ ID NO: 222292 - DNA, 19 bp, Homo sapiens
  siRNA target sequence for P4HA1 (NM_000917.1,1273-1291).
gctctctggctatgaaaat

SEQ ID NO: 222293 - DNA, 19 bp, Homo sapiens
  siRNA target sequence for P4HA1 (NM_000917.1,1293-1311).
ctgtggtgtctcgaattaa

SEQ ID NO: 222294 - DNA, 19 bp, Homo sapiens
  siRNA target sequence for P4HA1 (NM_000917.1,1295-1313).
gtggtgtctcgaattaata

SEQ ID NO: 222295 - DNA, 19 bp, Homo sapiens
  siRNA target sequence for P4HA1 (NM_000917.1,1298-1316).
gtgtctcgaattaatatga

SEQ ID NO: 222296 - DNA, 19 bp, Homo sapiens
  siRNA target sequence for P4HA1 (NM_000917.1,1302-1320).
ctcgaattaatatgagaat

SEQ ID NO: 222297 - DNA, 19 bp, Homo sapiens
  siRNA target sequence for P4HA1 (NM_000917.1,1357-1375).
ggaattacaggtagcaaat

SEQ ID NO: 222298 - DNA, 19 bp, Homo sapiens
  siRNA target sequence for P4HA1 (NM_000917.1,1358-1376).
gaattacaggtagcaaatt

SEQ ID NO: 222299 - DNA, 19 bp, Homo sapiens
  siRNA target sequence for P4HA1 (NM_000917.1,1469-1487).
gctacatggctgttttata

SEQ ID NO: 222300 - DNA, 19 bp, Homo sapiens
  siRNA target sequence for P4HA1 (NM_000917.1,1526-1544).
gaagttggagctagtgttt

SEQ ID NO: 222301 - DNA, 19 bp, Homo sapiens
  siRNA target sequence for P4HA1 (NM_000917.1,1536-1554).
ctagtgtttggcccaaaaa

SEQ ID NO: 222302 - DNA, 19 bp, Homo sapiens
  siRNA target sequence for P4HA1 (NM_000917.1,1592-1610).
ggagaaggagattatagta

SEQ ID NO: 222303 - DNA, 19 bp, Homo sapiens
  siRNA target sequence for P4HA1 (NM_000917.1,1676-1694).
cgtggacaagaatttcgaa

SEQ ID NO: 222304 - DNA, 19 bp, Homo sapiens
  siRNA target sequence for P4HA1 (NM_000917.1,1697-1715).
ccttgtacgttgtcagaat

SEQ ID NO: 222305 - DNA, 19 bp, Homo sapiens
  siRNA target sequence for P4HA1 (NM_000917.1,1698-1716).
cttgtacgttgtcagaatt

SEQ ID NO: 222306 - DNA, 19 bp, Homo sapiens
  siRNA target sequence for P4HA1 (NM_000917.1,1701-1719).
gtacgttgtcagaattgga

SEQ ID NO: 222307 - DNA, 19 bp, Homo sapiens
  siRNA target sequence for P4HA2 (NM_004199.1,240-258).
gtgtgcaggccgaattctt

SEQ ID NO: 222308 - DNA, 19 bp, Homo sapiens
  siRNA target sequence for P4HA2 (NM_004199.1,272-290).
cacatgactgacctgattt

SEQ ID NO: 222309 - DNA, 19 bp, Homo sapiens
  siRNA target sequence for P4HA2 (NM_004199.1,274-292).
catgactgacctgatttat

SEQ ID NO: 222310 - DNA, 19 bp, Homo sapiens
  siRNA target sequence for P4HA2 (NM_004199.1,344-362).
gccaagctttccaagatta

SEQ ID NO: 222311 - DNA, 19 bp, Homo sapiens
  siRNA target sequence for P4HA2 (NM_004199.1,454-472).
ggtgaagcggctaaacaca

SEQ ID NO: 222312 - DNA, 19 bp, Homo sapiens
  siRNA target sequence for P4HA2 (NM_004199.1,537-555).
ctgtgcagcggcagttctt

SEQ ID NO: 222313 - DNA, 19 bp, Homo sapiens
  siRNA target sequence for P4HA2 (NM_004199.1,706-724).
ccgctcggcctacaatgaa

SEQ ID NO: 222314 - DNA, 19 bp, Homo sapiens
  siRNA target sequence for P4HA2 (NM_004199.1,929-947).
cggtactttgagcagttat

SEQ ID NO: 222315 - DNA, 19 bp, Homo sapiens
  siRNA target sequence for P4HA2 (NM_004199.1,930-948).
ggtactttgagcagttatt

SEQ ID NO: 222316 - DNA, 19 bp, Homo sapiens
  siRNA target sequence for P4HA2 (NM_004199.1,958-976).
gagagaaaaaacgttaaca

SEQ ID NO: 222317 - DNA, 19 bp, Homo sapiens
  siRNA target sequence for P4HA2 (NM_004199.1,1041-1059).
ctgagagggatgtttacga

SEQ ID NO: 222318 - DNA, 19 bp, Homo sapiens
  siRNA target sequence for P4HA2 (NM_004199.1,1153-1171).
gctcattgcccccttcaaa

SEQ ID NO: 222319 - DNA, 19 bp, Homo sapiens
  siRNA target sequence for P4HA2 (NM_004199.1,1246-1264).
caaggagatcgcaaaacct

SEQ ID NO: 222320 - DNA, 19 bp, Homo sapiens
  siRNA target sequence for P4HA2 (NM_004199.1,1317-1335).
ccagctaccgggtttccaa

SEQ ID NO: 222321 - DNA, 19 bp, Homo sapiens
  siRNA target sequence for P4HA2 (NM_004199.1,1318-1336).
cagctaccgggtttccaaa

SEQ ID NO: 222322 - DNA, 19 bp, Homo sapiens
  siRNA target sequence for P4HA2 (NM_004199.1,1385-1403).
cgtcggatgcagcatatca

SEQ ID NO: 222323 - DNA, 19 bp, Homo sapiens
  siRNA target sequence for P4HA2 (NM_004199.1,1472-1490).
ccgcacttcgacttctcta

SEQ ID NO: 222324 - DNA, 19 bp, Homo sapiens
  siRNA target sequence for P4HA2 (NM_004199.1,1492-1510).
gaatgatgagcgagatact

SEQ ID NO: 222325 - DNA, 19 bp, Homo sapiens
  siRNA target sequence for P4HA2 (NM_004199.1,1502-1520).
cgagatactttcaagcatt

SEQ ID NO: 222326 - DNA, 19 bp, Homo sapiens
  siRNA target sequence for P4HA2 (NM_004199.1,1530-1548).
ggaatcgtgtggctacttt

SEQ ID NO: 222327 - DNA, 19 bp, Homo sapiens
  siRNA target sequence for P4HA2 (NM_004199.1,1535-1553).
cgtgtggctactttcttaa

SEQ ID NO: 222328 - DNA, 19 bp, Homo sapiens
  siRNA target sequence for P4HA2 (NM_004199.1,1538-1556).
gtggctactttcttaaact

SEQ ID NO: 222329 - DNA, 19 bp, Homo sapiens
  siRNA target sequence for P4HA2 (NM_004199.1,1598-1616).
gatctgggggctgcaattt

SEQ ID NO: 222330 - DNA, 19 bp, Homo sapiens
  siRNA target sequence for P4HA2 (NM_004199.1,1716-1734).
gcaagtgggtctccaataa

SEQ ID NO: 222331 - DNA, 19 bp, Homo sapiens
  siRNA target sequence for P4HA2 (NM_004199.1,1765-1783).
gagaccttgtggatcaaca

SEQ ID NO: 222332 - DNA, 19 bp, Homo sapiens
  siRNA target sequence for P4HB (NM_000918.2,1234-1252).
gtggtcactgcaaacagtt

SEQ ID NO: 222333 - DNA, 19 bp, Homo sapiens
  siRNA target sequence for P4HB (NM_000918.2,1253-1271).
ggctcccatttgggataaa

SEQ ID NO: 222334 - DNA, 19 bp, Homo sapiens
  siRNA target sequence for P4HB (NM_000918.2,1255-1273).
ctcccatttgggataaact

SEQ ID NO: 222335 - DNA, 19 bp, Homo sapiens
  siRNA target sequence for P4HB (NM_000918.2,1393-1411).
ccgacaggacggtcattga

SEQ ID NO: 222336 - DNA, 19 bp, Homo sapiens
  siRNA target sequence for P4HB (NM_000918.2,1399-1417).
ggacggtcattgattacaa

SEQ ID NO: 222337 - DNA, 19 bp, Homo sapiens
  siRNA target sequence for LOC57168 (NM_020437.3,583-601).
ctcttcgtgtggtactgtt

SEQ ID NO: 222338 - DNA, 19 bp, Homo sapiens
  siRNA target sequence for LOC57168 (NM_020437.3,585-603).
cttcgtgtggtactgttat

SEQ ID NO: 222339 - DNA, 19 bp, Homo sapiens
  siRNA target sequence for LOC57168 (NM_020437.3,895-913).
cccaccacgccctatttct

SEQ ID NO: 222340 - DNA, 19 bp, Homo sapiens
  siRNA target sequence for LOC57168 (NM_020437.3,914-932).
cccgggacgcacagaaaca

SEQ ID NO: 222341 - DNA, 19 bp, Homo sapiens
  siRNA target sequence for LOC57168 (NM_020437.3,915-933).
ccgggacgcacagaaacat

SEQ ID NO: 222342 - DNA, 19 bp, Homo sapiens
  siRNA target sequence for LOC57168 (NM_020437.3,965-983).
ccatcctgtgtgagtttga

SEQ ID NO: 222343 - DNA, 19 bp, Homo sapiens
  siRNA target sequence for LOC57168 (NM_020437.3,1054-1072).
gagtggttcaccttttact

SEQ ID NO: 222344 - DNA, 19 bp, Homo sapiens
  siRNA target sequence for LOC57168 (NM_020437.3,1077-1095).
caatcagggggtttgtgtt

SEQ ID NO: 222345 - DNA, 19 bp, Homo sapiens
  siRNA target sequence for LOC57168 (NM_020437.3,1149-1167).
gacctgtattgggaacaat

SEQ ID NO: 222346 - DNA, 19 bp, Homo sapiens
  siRNA target sequence for LOC57168 (NM_020437.3,1151-1169).
cctgtattgggaacaatgt

SEQ ID NO: 222347 - DNA, 19 bp, Homo sapiens
  siRNA target sequence for LOC57168 (NM_020437.3,1154-1172).
gtattgggaacaatgtttt

SEQ ID NO: 222348 - DNA, 19 bp, Homo sapiens
  siRNA target sequence for LOC57168 (NM_020437.3,1242-1260).
ccgcatccgatgccattta

SEQ ID NO: 222349 - DNA, 19 bp, Homo sapiens
  siRNA target sequence for LOC57168 (NM_020437.3,1245-1263).
catccgatgccatttaggt

SEQ ID NO: 222350 - DNA, 19 bp, Homo sapiens
  siRNA target sequence for LOC57168 (NM_020437.3,1391-1409).
gcccacgggtggttttcat

SEQ ID NO: 222351 - DNA, 19 bp, Homo sapiens
  siRNA target sequence for LOC57168 (NM_020437.3,1443-1461).
cgaacggcaggctcttgat

SEQ ID NO: 222352 - DNA, 19 bp, Homo sapiens
  siRNA target sequence for LOC57168 (NM_020437.3,1444-1462).
gaacggcaggctcttgatt

SEQ ID NO: 222353 - DNA, 19 bp, Homo sapiens
  siRNA target sequence for LOC57168 (NM_020437.3,1447-1465).
cggcaggctcttgatttca

SEQ ID NO: 222354 - DNA, 19 bp, Homo sapiens
  siRNA target sequence for LOC57168 (NM_020437.3,1448-1466).
ggcaggctcttgatttcat

SEQ ID NO: 222355 - DNA, 19 bp, Homo sapiens
  siRNA target sequence for BBOX1 (NM_003986.1,95-113).
cacttgacggggctcattt

SEQ ID NO: 222356 - DNA, 19 bp, Homo sapiens
  siRNA target sequence for BBOX1 (NM_003986.1,97-115).
cttgacggggctcatttga

SEQ ID NO: 222357 - DNA, 19 bp, Homo sapiens
  siRNA target sequence for BBOX1 (NM_003986.1,117-135).
gcagatcctctggtatgat

SEQ ID NO: 222358 - DNA, 19 bp, Homo sapiens
  siRNA target sequence for BBOX1 (NM_003986.1,179-197).
gtccgtgctctgattgcta

SEQ ID NO: 222359 - DNA, 19 bp, Homo sapiens
  siRNA target sequence for BBOX1 (NM_003986.1,209-227).
caaaagcacggaaacttct

SEQ ID NO: 222360 - DNA, 19 bp, Homo sapiens
  siRNA target sequence for BBOX1 (NM_003986.1,241-259).
gatgtgaacattggaatta

SEQ ID NO: 222361 - DNA, 19 bp, Homo sapiens
  siRNA target sequence for BBOX1 (NM_003986.1,254-272).
gaattaaaggcttgatatt

SEQ ID NO: 222362 - DNA, 19 bp, Homo sapiens
  siRNA target sequence for BBOX1 (NM_003986.1,296-314).
catggcccgatgagcatta

SEQ ID NO: 222363 - DNA, 19 bp, Homo sapiens
  siRNA target sequence for BBOX1 (NM_003986.1,300-318).
gcccgatgagcattacagt

SEQ ID NO: 222364 - DNA, 19 bp, Homo sapiens
  siRNA target sequence for BBOX1 (NM_003986.1,426-444).
ccagctacccactttggat

SEQ ID NO: 222365 - DNA, 19 bp, Homo sapiens
  siRNA target sequence for BBOX1 (NM_003986.1,427-445).
cagctacccactttggatt

SEQ ID NO: 222366 - DNA, 19 bp, Homo sapiens
  siRNA target sequence for BBOX1 (NM_003986.1,485-503).
ggctctccaccctcaagaa

SEQ ID NO: 222367 - DNA, 19 bp, Homo sapiens
  siRNA target sequence for BBOX1 (NM_003986.1,489-507).
ctccaccctcaagaaagta

SEQ ID NO: 222368 - DNA, 19 bp, Homo sapiens
  siRNA target sequence for BBOX1 (NM_003986.1,569-587).
ggatgggtttcctctatct

SEQ ID NO: 222369 - DNA, 19 bp, Homo sapiens
  siRNA target sequence for BBOX1 (NM_003986.1,575-593).
gtttcctctatctcacatt

SEQ ID NO: 222370 - DNA, 19 bp, Homo sapiens
  siRNA target sequence for BBOX1 (NM_003986.1,588-606).
cacattttatggacatact

SEQ ID NO: 222371 - DNA, 19 bp, Homo sapiens
  siRNA target sequence for BBOX1 (NM_003986.1,650-668).
caactgggaagctaagctt

SEQ ID NO: 222372 - DNA, 19 bp, Homo sapiens
  siRNA target sequence for BBOX1 (NM_003986.1,655-673).
gggaagctaagctttcaca

SEQ ID NO: 222373 - DNA, 19 bp, Homo sapiens
  siRNA target sequence for BBOX1 (NM_003986.1,661-679).
ctaagctttcacactgatt

SEQ ID NO: 222374 - DNA, 19 bp, Homo sapiens
  siRNA target sequence for BBOX1 (NM_003986.1,709-727).
cagcttcttcactgcataa

SEQ ID NO: 222375 - DNA, 19 bp, Homo sapiens
  siRNA target sequence for BBOX1 (NM_003986.1,738-756).
cacagggggtgattcagaa

SEQ ID NO: 222376 - DNA, 19 bp, Homo sapiens
  siRNA target sequence for BBOX1 (NM_003986.1,743-761).
ggggtgattcagaaattgt

SEQ ID NO: 222377 - DNA, 19 bp, Homo sapiens
  siRNA target sequence for BBOX1 (NM_003986.1,760-778).
gtagatgggtttaatgtgt

SEQ ID NO: 222378 - DNA, 19 bp, Homo sapiens
  siRNA target sequence for BBOX1 (NM_003986.1,847-865).
gacattggagtggattact

SEQ ID NO: 222379 - DNA, 19 bp, Homo sapiens
  siRNA target sequence for BBOX1 (NM_003986.1,853-871).
ggagtggattactgtgatt

SEQ ID NO: 222380 - DNA, 19 bp, Homo sapiens
  siRNA target sequence for BBOX1 (NM_003986.1,919-937).
caagtggttcgcatcaact

SEQ ID NO: 222381 - DNA, 19 bp, Homo sapiens
  siRNA target sequence for BBOX1 (NM_003986.1,922-940).
gtggttcgcatcaacttca

SEQ ID NO: 222382 - DNA, 19 bp, Homo sapiens
  siRNA target sequence for BBOX1 (NM_003986.1,924-942).
ggttcgcatcaacttcaat

SEQ ID NO: 222383 - DNA, 19 bp, Homo sapiens
  siRNA target sequence for BBOX1 (NM_003986.1,925-943).
gttcgcatcaacttcaata

SEQ ID NO: 222384 - DNA, 19 bp, Homo sapiens
  siRNA target sequence for BBOX1 (NM_003986.1,945-963).
cgcaactagggacacaata

SEQ ID NO: 222385 - DNA, 19 bp, Homo sapiens
  siRNA target sequence for BBOX1 (NM_003986.1,946-964).
gcaactagggacacaatat

SEQ ID NO: 222386 - DNA, 19 bp, Homo sapiens
  siRNA target sequence for BBOX1 (NM_003986.1,947-965).
caactagggacacaatatt

SEQ ID NO: 222387 - DNA, 19 bp, Homo sapiens
  siRNA target sequence for BBOX1 (NM_003986.1,1123-1141).
gaagcaggaactgagatat

SEQ ID NO: 222388 - DNA, 19 bp, Homo sapiens
  siRNA target sequence for BBOX1 (NM_003986.1,1185-1203).
gtcaaggcttcgtatctta

SEQ ID NO: 222389 - DNA, 19 bp, Homo sapiens
  siRNA target sequence for EGLN1 (NM_022051.1,3904-3922).
gacatccgaggcgataaga

SEQ ID NO: 222390 - DNA, 19 bp, Homo sapiens
  siRNA target sequence for EGLN1 (NM_022051.1,4017-4035).
gggcagctacaaaatcaat

SEQ ID NO: 222391 - DNA, 19 bp, Homo sapiens
  siRNA target sequence for EGLN2 (NM_017555.1,2440-2458).
cctgcctagccccagtaaa

SEQ ID NO: 222392 - DNA, 19 bp, Homo sapiens
  siRNA target sequence for EGLN2 (NM_017555.1,2443-2461).
gcctagccccagtaaacct

SEQ ID NO: 222393 - DNA, 19 bp, Homo sapiens
  siRNA target sequence for EGLN2 (NM_017555.1,2444-2462).
cctagccccagtaaaccta

SEQ ID NO: 222394 - DNA, 19 bp, Homo sapiens
  siRNA target sequence for EGLN2 (NM_017555.1,2521-2539).
cgtaaggcacgttgacaat

SEQ ID NO: 222395 - DNA, 19 bp, Homo sapiens
  siRNA target sequence for EGLN2 (NM_053046.2,1105-1123).
cggctgggcagctatgtca

SEQ ID NO: 222396 - DNA, 19 bp, Homo sapiens
  siRNA target sequence for EGLN2 (NM_053046.2,1311-1329).
caacatcgagccactcttt

SEQ ID NO: 222397 - DNA, 19 bp, Homo sapiens
  siRNA target sequence for EGLN3 (NM_022073.2,648-666).
gccggctgggcaaatacta

SEQ ID NO: 222398 - DNA, 19 bp, Homo sapiens
  siRNA target sequence for EGLN3 (NM_022073.2,771-789).
gcatctactatctgaacaa

SEQ ID NO: 222399 - DNA, 19 bp, Homo sapiens
  siRNA target sequence for EGLN3 (NM_022073.2,813-831).
gtgggatcctgcggatatt

SEQ ID NO: 222400 - DNA, 19 bp, Homo sapiens
  siRNA target sequence for EGLN3 (NM_022073.2,817-835).
gatcctgcggatatttcca

SEQ ID NO: 222401 - DNA, 19 bp, Homo sapiens
  siRNA target sequence for EGLN3 (NM_022073.2,860-878).
gtggagcccatttttgaca

SEQ ID NO: 222402 - DNA, 19 bp, Homo sapiens
  siRNA target sequence for EGLN3 (NM_022073.2,928-946).
ctcttacgcaaccagatat

SEQ ID NO: 222403 - DNA, 19 bp, Homo sapiens
  siRNA target sequence for EGLN3 (NM_022073.2,1006-1024).
gaatttaactaggaaaact

SEQ ID NO: 222404 - DNA, 19 bp, Homo sapiens
  siRNA target sequence for FLJ10826 (NM_018233.1,285-303).
gtcctgtgctaaatatgaa

SEQ ID NO: 222405 - DNA, 19 bp, Homo sapiens
  siRNA target sequence for FLJ10826 (NM_018233.1,436-454).
cagccgaagcagattgtca

SEQ ID NO: 222406 - DNA, 19 bp, Homo sapiens
  siRNA target sequence for FLJ10826 (NM_018233.1,470-488).
cgtggaacaaactggtttt

SEQ ID NO: 222407 - DNA, 19 bp, Homo sapiens
  siRNA target sequence for FLJ10826 (NM_018233.1,569-587).
ggtttcatggtccatcatt

SEQ ID NO: 222408 - DNA, 19 bp, Homo sapiens
  siRNA target sequence for FLJ10826 (NM_018233.1,594-612).
gcctcccaactactttgaa

SEQ ID NO: 222409 - DNA, 19 bp, Homo sapiens
  siRNA target sequence for FLJ10826 (NM_018233.1,630-648).
ccctcacatcccacaagat

SEQ ID NO: 222410 - DNA, 19 bp, Homo sapiens
  siRNA target sequence for FLJ10826 (NM_018233.1,643-661).
caagatcatgagattttgt

SEQ ID NO: 222411 - DNA, 19 bp, Homo sapiens
  siRNA target sequence for FLJ10826 (NM_018233.1,668-686).
ggatcaaccctacttatct

SEQ ID NO: 222412 - DNA, 19 bp, Homo sapiens
  siRNA target sequence for FLJ10826 (NM_018233.1,690-708).
catggattaccaagttcaa

SEQ ID NO: 222413 - DNA, 19 bp, Homo sapiens
  siRNA target sequence for FLJ10826 (NM_018233.1,693-711).
ggattaccaagttcaaatt

SEQ ID NO: 222414 - DNA, 19 bp, Homo sapiens
  siRNA target sequence for FLJ10826 (NM_018233.1,757-775).
cttaagcctgagaaattca

SEQ ID NO: 222415 - DNA, 19 bp, Homo sapiens
  siRNA target sequence for FLJ10826 (NM_018233.1,766-784).
gagaaattcacgaaagtct

SEQ ID NO: 222416 - DNA, 19 bp, Homo sapiens
  siRNA target sequence for FLJ10826 (NM_018233.1,1191-1209).
gaccggtcactacacttta

SEQ ID NO: 222417 - DNA, 19 bp, Homo sapiens
  siRNA target sequence for FLJ10826 (NM_018233.1,1193-1211).
ccggtcactacactttaat

SEQ ID NO: 222418 - DNA, 19 bp, Homo sapiens
  siRNA target sequence for FLJ10826 (NM_018233.1,1194-1212).
cggtcactacactttaatt

SEQ ID NO: 222419 - DNA, 19 bp, Homo sapiens
  siRNA target sequence for FLJ10826 (NM_018233.1,1196-1214).
gtcactacactttaattca

SEQ ID NO: 222420 - DNA, 19 bp, Homo sapiens
  siRNA target sequence for FLJ10826 (NM_018233.1,1288-1306).
ggcggttttacttcttaca

SEQ ID NO: 222421 - DNA, 19 bp, Homo sapiens
  siRNA target sequence for FLJ10826 (NM_018233.1,1289-1307).
gcggttttacttcttacat

SEQ ID NO: 222422 - DNA, 19 bp, Homo sapiens
  siRNA target sequence for FLJ10826 (NM_018233.1,1339-1357).
gtgaatccagaaagcaatt

SEQ ID NO: 222423 - DNA, 19 bp, Homo sapiens
  siRNA target sequence for FLJ22222 (NM_024648.1,339-357).
gtcgtggcagggagattca

SEQ ID NO: 222424 - DNA, 19 bp, Homo sapiens
  siRNA target sequence for FLJ22222 (NM_024648.1,576-594).
gtgaacctgtacagatact

SEQ ID NO: 222425 - DNA, 19 bp, Homo sapiens
  siRNA target sequence for FLJ22222 (NM_024648.1,589-607).
gatacttcggggataaaat

SEQ ID NO: 222426 - DNA, 19 bp, Homo sapiens
  siRNA target sequence for FLJ22222 (NM_024648.1,598-616).
gggataaaatacagaacat

SEQ ID NO: 222427 - DNA, 19 bp, Homo sapiens
  siRNA target sequence for FLJ22222 (NM_024648.1,864-882).
ggcggagggcggttcatgt

SEQ ID NO: 222428 - DNA, 19 bp, Homo sapiens
  siRNA target sequence for FLJ22222 (NM_024648.1,865-883).
gcggagggcggttcatgtt

SEQ ID NO: 222429 - DNA, 19 bp, Homo sapiens
  siRNA target sequence for FLJ22222 (NM_024648.1,867-885).
ggagggcggttcatgttca

SEQ ID NO: 222430 - DNA, 19 bp, Homo sapiens
  siRNA target sequence for FLJ22222 (NM_024648.1,868-886).
gagggcggttcatgttcat

SEQ ID NO: 222431 - DNA, 19 bp, Homo sapiens
  siRNA target sequence for FLJ22222 (NM_175902.3,942-960).
gtgggttccaagaagttaa

SEQ ID NO: 222432 - DNA, 19 bp, Homo sapiens
  siRNA target sequence for LEPRE1 (NM_022356.2,578-596).
gcagcagaacctagactat

SEQ ID NO: 222433 - DNA, 19 bp, Homo sapiens
  siRNA target sequence for LEPRE1 (NM_022356.2,584-602).
gaacctagactattaccaa

SEQ ID NO: 222434 - DNA, 19 bp, Homo sapiens
  siRNA target sequence for LEPRE1 (NM_022356.2,644-662).
gactcaaccccatatgcaa

SEQ ID NO: 222435 - DNA, 19 bp, Homo sapiens
  siRNA target sequence for LEPRE1 (NM_022356.2,648-666).
caaccccatatgcaagaat

SEQ ID NO: 222436 - DNA, 19 bp, Homo sapiens
  siRNA target sequence for LEPRE1 (NM_022356.2,653-671).
ccatatgcaagaatttcga

SEQ ID NO: 222437 - DNA, 19 bp, Homo sapiens
  siRNA target sequence for LEPRE1 (NM_022356.2,733-751).
cgctgcaagaatactttgt

SEQ ID NO: 222438 - DNA, 19 bp, Homo sapiens
  siRNA target sequence for LEPRE1 (NM_022356.2,778-796).
gcgaagggccctatgacta

SEQ ID NO: 222439 - DNA, 19 bp, Homo sapiens
  siRNA target sequence for LEPRE1 (NM_022356.2,792-810).
gactacgatggctacaact

SEQ ID NO: 222440 - DNA, 19 bp, Homo sapiens
  siRNA target sequence for LEPRE1 (NM_022356.2,841-859).
ccatcacagatcattacat

SEQ ID NO: 222441 - DNA, 19 bp, Homo sapiens
  siRNA target sequence for LEPRE1 (NM_022356.2,938-956).
cctcccatcgcattataat

SEQ ID NO: 222442 - DNA, 19 bp, Homo sapiens
  siRNA target sequence for LEPRE1 (NM_022356.2,939-957).
ctcccatcgcattataatt

SEQ ID NO: 222443 - DNA, 19 bp, Homo sapiens
  siRNA target sequence for LEPRE1 (NM_022356.2,943-961).
catcgcattataattatct

SEQ ID NO: 222444 - DNA, 19 bp, Homo sapiens
  siRNA target sequence for LEPRE1 (NM_022356.2,965-983).
gtttgcctactataacatt

SEQ ID NO: 222445 - DNA, 19 bp, Homo sapiens
  siRNA target sequence for LEPRE1 (NM_022356.2,1043-1061).
cgaggtgatgaaccaaaat

SEQ ID NO: 222446 - DNA, 19 bp, Homo sapiens
  siRNA target sequence for LEPRE1 (NM_022356.2,1055-1073).
ccaaaatttggcctattat

SEQ ID NO: 222447 - DNA, 19 bp, Homo sapiens
  siRNA target sequence for LEPRE1 (NM_022356.2,1142-1160).
gcgaagcctactggaaaaa

SEQ ID NO: 222448 - DNA, 19 bp, Homo sapiens
  siRNA target sequence for LEPRE1 (NM_022356.2,1172-1190).
cttcgcttatgatgttttt

SEQ ID NO: 222449 - DNA, 19 bp, Homo sapiens
  siRNA target sequence for LEPRE1 (NM_022356.2,1175-1193).
cgcttatgatgtttttgga

SEQ ID NO: 222450 - DNA, 19 bp, Homo sapiens
  siRNA target sequence for LEPRE1 (NM_022356.2,1460-1478).
gatggacggcgtaatctct

SEQ ID NO: 222451 - DNA, 19 bp, Homo sapiens
  siRNA target sequence for LEPRE1 (NM_022356.2,1706-1724).
ggatacgcccctctacttt

SEQ ID NO: 222452 - DNA, 19 bp, Homo sapiens
  siRNA target sequence for LEPRE1 (NM_022356.2,1707-1725).
gatacgcccctctactttt

SEQ ID NO: 222453 - DNA, 19 bp, Homo sapiens
  siRNA target sequence for LEPRE1 (NM_022356.2,1711-1729).
cgcccctctacttttccta

SEQ ID NO: 222454 - DNA, 19 bp, Homo sapiens
  siRNA target sequence for LEPRE1 (NM_022356.2,1775-1793).
gaggaaggatgatagtcat

SEQ ID NO: 222455 - DNA, 19 bp, Homo sapiens
  siRNA target sequence for LEPRE1 (NM_022356.2,1877-1895).
cagcgccatcctttaccta

SEQ ID NO: 222456 - DNA, 19 bp, Homo sapiens
  siRNA target sequence for LEPRE1 (NM_022356.2,1879-1897).
gcgccatcctttacctaaa

SEQ ID NO: 222457 - DNA, 19 bp, Homo sapiens
  siRNA target sequence for LEPRE1 (NM_022356.2,1880-1898).
cgccatcctttacctaaat

SEQ ID NO: 222458 - DNA, 19 bp, Homo sapiens
  siRNA target sequence for LEPRE1 (NM_022356.2,1904-1922).
cttcgatggcggaaacttt

SEQ ID NO: 222459 - DNA, 19 bp, Homo sapiens
  siRNA target sequence for LEPRE1 (NM_022356.2,1907-1925).
cgatggcggaaacttttat

SEQ ID NO: 222460 - DNA, 19 bp, Homo sapiens
  siRNA target sequence for LEPRE1 (NM_022356.2,1913-1931).
cggaaacttttatttcact

SEQ ID NO: 222461 - DNA, 19 bp, Homo sapiens
  siRNA target sequence for LEPRE1 (NM_022356.2,2147-2165).
cccagagcgcccttggttt

SEQ ID NO: 222462 - DNA, 19 bp, Homo sapiens
  siRNA target sequence for LEPRE1 (NM_022356.2,2230-2248).
gctccaacgccctgtcatt

SEQ ID NO: 222463 - DNA, 19 bp, Homo sapiens
  siRNA target sequence for LEPRE1 (NM_022356.2,2407-2425).
gcctggggccattaaggaa

SEQ ID NO: 222464 - DNA, 19 bp, Homo sapiens
  siRNA target sequence for LEPREL2 (NM_014262.2,754-772).
cgtcgggagccctacaact

SEQ ID NO: 222465 - DNA, 19 bp, Homo sapiens
  siRNA target sequence for LEPREL2 (NM_014262.2,755-773).
gtcgggagccctacaacta

SEQ ID NO: 222466 - DNA, 19 bp, Homo sapiens
  siRNA target sequence for LEPREL2 (NM_014262.2,782-800).
gggcctattaccagttgaa

SEQ ID NO: 222467 - DNA, 19 bp, Homo sapiens
  siRNA target sequence for LEPREL2 (NM_014262.2,1295-1313).
cccaggctatagaaaatgt

SEQ ID NO: 222468 - DNA, 19 bp, Homo sapiens
  siRNA target sequence for LEPREL2 (NM_014262.2,1455-1473).
gaagaggcagctctactat

SEQ ID NO: 222469 - DNA, 19 bp, Homo sapiens
  siRNA target sequence for LEPREL2 (NM_014262.2,2158-2176).
ggtggggacctgttcttca

SEQ ID NO: 222470 - DNA, 19 bp, Homo sapiens
  siRNA target sequence for MLAT4 (NM_018192.2,637-655).
cgcagagtgccctacaact

SEQ ID NO: 222471 - DNA, 19 bp, Homo sapiens
  siRNA target sequence for MLAT4 (NM_018192.2,638-656).
gcagagtgccctacaacta

SEQ ID NO: 222472 - DNA, 19 bp, Homo sapiens
  siRNA target sequence for MLAT4 (NM_018192.2,707-725).
cagctcacacatttttcgt

SEQ ID NO: 222473 - DNA, 19 bp, Homo sapiens
  siRNA target sequence for MLAT4 (NM_018192.2,836-854).
gttacaatgcaggagttaa

SEQ ID NO: 222474 - DNA, 19 bp, Homo sapiens
  siRNA target sequence for MLAT4 (NM_018192.2,897-915).
cgaacaagccttaagagaa

SEQ ID NO: 222475 - DNA, 19 bp, Homo sapiens
  siRNA target sequence for MLAT4 (NM_018192.2,898-916).
gaacaagccttaagagaat

SEQ ID NO: 222476 - DNA, 19 bp, Homo sapiens
  siRNA target sequence for MLAT4 (NM_018192.2,905-923).
ccttaagagaatatttcgt

SEQ ID NO: 222477 - DNA, 19 bp, Homo sapiens
  siRNA target sequence for MLAT4 (NM_018192.2,965-983).
gatttgaagaatatgagta

SEQ ID NO: 222478 - DNA, 19 bp, Homo sapiens
  siRNA target sequence for MLAT4 (NM_018192.2,998-1016).
ctggtctgtatgaagctat

SEQ ID NO: 222479 - DNA, 19 bp, Homo sapiens
  siRNA target sequence for MLAT4 (NM_018192.2,1013-1031).
ctattgcagatcactacat

SEQ ID NO: 222480 - DNA, 19 bp, Homo sapiens
  siRNA target sequence for MLAT4 (NM_018192.2,1090-1108).
ctctctcccatcgagaatt

SEQ ID NO: 222481 - DNA, 19 bp, Homo sapiens
  siRNA target sequence for MLAT4 (NM_018192.2,1122-1140).
ctatgattacctacagttt

SEQ ID NO: 222482 - DNA, 19 bp, Homo sapiens
  siRNA target sequence for MLAT4 (NM_018192.2,1146-1164).
ctatcgagttggtgagtat

SEQ ID NO: 222483 - DNA, 19 bp, Homo sapiens
  siRNA target sequence for MLAT4 (NM_018192.2,1150-1168).
cgagttggtgagtatgtga

SEQ ID NO: 222484 - DNA, 19 bp, Homo sapiens
  siRNA target sequence for MLAT4 (NM_018192.2,1179-1197).
gtgtgccaaagcctatctt

SEQ ID NO: 222485 - DNA, 19 bp, Homo sapiens
  siRNA target sequence for MLAT4 (NM_018192.2,1183-1201).
gccaaagcctatcttctat

SEQ ID NO: 222486 - DNA, 19 bp, Homo sapiens
  siRNA target sequence for MLAT4 (NM_018192.2,1246-1264).
gagagtctgctggatgata

SEQ ID NO: 222487 - DNA, 19 bp, Homo sapiens
  siRNA target sequence for MLAT4 (NM_018192.2,1250-1268).
gtctgctggatgatagcat

SEQ ID NO: 222488 - DNA, 19 bp, Homo sapiens
  siRNA target sequence for MLAT4 (NM_018192.2,1266-1284).
cattgacccggcatccatt

SEQ ID NO: 222489 - DNA, 19 bp, Homo sapiens
  siRNA target sequence for MLAT4 (NM_018192.2,1285-1303).
gaggccagagaggatttaa

SEQ ID NO: 222490 - DNA, 19 bp, Homo sapiens
  siRNA target sequence for MLAT4 (NM_018192.2,1287-1305).
ggccagagaggatttaaca

SEQ ID NO: 222491 - DNA, 19 bp, Homo sapiens
  siRNA target sequence for MLAT4 (NM_018192.2,1373-1391).
catacactgaaccgaatta

SEQ ID NO: 222492 - DNA, 19 bp, Homo sapiens
  siRNA target sequence for MLAT4 (NM_018192.2,1379-1397).
ctgaaccgaattattggat

SEQ ID NO: 222493 - DNA, 19 bp, Homo sapiens
  siRNA target sequence for MLAT4 (NM_018192.2,1468-1486).
ggattctcaatgggaaaaa

SEQ ID NO: 222494 - DNA, 19 bp, Homo sapiens
  siRNA target sequence for MLAT4 (NM_018192.2,1488-1506).
gctatcacccaagatagat

SEQ ID NO: 222495 - DNA, 19 bp, Homo sapiens
  siRNA target sequence for MLAT4 (NM_018192.2,1523-1541).
gtggtcctctactctatga

SEQ ID NO: 222496 - DNA, 19 bp, Homo sapiens
  siRNA target sequence for MLAT4 (NM_018192.2,1529-1547).
ctctactctatgagaacat

SEQ ID NO: 222497 - DNA, 19 bp, Homo sapiens
  siRNA target sequence for MLAT4 (NM_018192.2,1589-1607).
gggttctcctggataacgt

SEQ ID NO: 222498 - DNA, 19 bp, Homo sapiens
  siRNA target sequence for MLAT4 (NM_018192.2,1640-1658).
gcgtggccagtggaatcat

SEQ ID NO: 222499 - DNA, 19 bp, Homo sapiens
  siRNA target sequence for MLAT4 (NM_018192.2,1672-1690).
ggatacagaggaaaaactt

SEQ ID NO: 222500 - DNA, 19 bp, Homo sapiens
  siRNA target sequence for MLAT4 (NM_018192.2,1700-1718).
cacccaatgaaaagtttga

SEQ ID NO: 222501 - DNA, 19 bp, Homo sapiens
  siRNA target sequence for MLAT4 (NM_018192.2,1731-1749).
cctgaaagcactcaaatct

SEQ ID NO: 222502 - DNA, 19 bp, Homo sapiens
  siRNA target sequence for MLAT4 (NM_018192.2,1739-1757).
cactcaaatctggttatga

SEQ ID NO: 222503 - DNA, 19 bp, Homo sapiens
  siRNA target sequence for MLAT4 (NM_018192.2,1776-1794).
gagcgctcgtctgttttat

SEQ ID NO: 222504 - DNA, 19 bp, Homo sapiens
  siRNA target sequence for MLAT4 (NM_018192.2,1778-1796).
gcgctcgtctgttttatga

SEQ ID NO: 222505 - DNA, 19 bp, Homo sapiens
  siRNA target sequence for MLAT4 (NM_018192.2,1803-1821).
cgaaaaggctcgaaggatt

SEQ ID NO: 222506 - DNA, 19 bp, Homo sapiens
  siRNA target sequence for MLAT4 (NM_018192.2,1809-1827).
ggctcgaaggattgtagaa

SEQ ID NO: 222507 - DNA, 19 bp, Homo sapiens
  siRNA target sequence for MLAT4 (NM_018192.2,1810-1828).
gctcgaaggattgtagaat

SEQ ID NO: 222508 - DNA, 19 bp, Homo sapiens
  siRNA target sequence for MLAT4 (NM_018192.2,1936-1954).
catgctgacaactgtttgt

SEQ ID NO: 222509 - DNA, 19 bp, Homo sapiens
  siRNA target sequence for MLAT4 (NM_018192.2,1957-1975).
gatccagaggccaacgaat

SEQ ID NO: 222510 - DNA, 19 bp, Homo sapiens
  siRNA target sequence for MLAT4 (NM_018192.2,1998-2016).
cacatttcgagactatagt

SEQ ID NO: 222511 - DNA, 19 bp, Homo sapiens
  siRNA target sequence for MLAT4 (NM_018192.2,2010-2028).
ctatagtgctctcctatat

SEQ ID NO: 222512 - DNA, 19 bp, Homo sapiens
  siRNA target sequence for MLAT4 (NM_018192.2,2015-2033).
gtgctctcctatatatgaa

SEQ ID NO: 222513 - DNA, 19 bp, Homo sapiens
  siRNA target sequence for MLAT4 (NM_018192.2,2082-2100).
gactgtgactgcctctata

SEQ ID NO: 222514 - DNA, 19 bp, Homo sapiens
  siRNA target sequence for MLAT4 (NM_018192.2,2088-2106).
gactgcctctataaaacca

SEQ ID NO: 222515 - DNA, 19 bp, Homo sapiens
  siRNA target sequence for MLAT4 (NM_018192.2,2208-2226).
cttggacccactttataga

SEQ ID NO: 222516 - DNA, 19 bp, Homo sapiens
  siRNA target sequence for MLAT4 (NM_018192.2,2225-2243).
gagaattggagcgaataca

SEQ ID NO: 222517 - DNA, 19 bp, Homo sapiens
  siRNA target sequence for MLAT4 (NM_018192.2,2245-2263).
gctgatgaagtgattgcaa

SEQ ID NO: 222518 - DNA, 19 bp, Homo sapiens
  siRNA target sequence for MLAT4 (NM_018192.2,2298-2316).
gaatatcaaccctaaagat

SEQ ID NO: 222519 - DNA, 19 bp, Homo sapiens
  siRNA target sequence for PTGS1 (NM_000962.2,226-244).
ccagtgaatccctgttgtt

SEQ ID NO: 222520 - DNA, 19 bp, Homo sapiens
  siRNA target sequence for PTGS1 (NM_000962.2,227-245).
cagtgaatccctgttgtta

SEQ ID NO: 222521 - DNA, 19 bp, Homo sapiens
  siRNA target sequence for PTGS1 (NM_000962.2,231-249).
gaatccctgttgttactat

SEQ ID NO: 222522 - DNA, 19 bp, Homo sapiens
  siRNA target sequence for PTGS1 (NM_000962.2,235-253).
ccctgttgttactatccat

SEQ ID NO: 222523 - DNA, 19 bp, Homo sapiens
  siRNA target sequence for PTGS1 (NM_000962.2,357-375).
gacctggctccggaattca

SEQ ID NO: 222524 - DNA, 19 bp, Homo sapiens
  siRNA target sequence for PTGS1 (NM_000962.2,485-503).
cagtgcgctccaaccttat

SEQ ID NO: 222525 - DNA, 19 bp, Homo sapiens
  siRNA target sequence for PTGS1 (NM_000962.2,561-579).
caacgtgagctattacact

SEQ ID NO: 222526 - DNA, 19 bp, Homo sapiens
  siRNA target sequence for PTGS1 (NM_000962.2,567-585).
gagctattacactcgtatt

SEQ ID NO: 222527 - DNA, 19 bp, Homo sapiens
  siRNA target sequence for PTGS1 (NM_000962.2,569-587).
gctattacactcgtattct

SEQ ID NO: 222528 - DNA, 19 bp, Homo sapiens
  siRNA target sequence for PTGS1 (NM_000962.2,589-607).
ccctctgtgcctaaagatt

SEQ ID NO: 222529 - DNA, 19 bp, Homo sapiens
  siRNA target sequence for PTGS1 (NM_000962.2,728-746).
ccttctttgcacaacactt

SEQ ID NO: 222530 - DNA, 19 bp, Homo sapiens
  siRNA target sequence for PTGS1 (NM_000962.2,819-837).
cctcggccacatttatgga

SEQ ID NO: 222531 - DNA, 19 bp, Homo sapiens
  siRNA target sequence for PTGS1 (NM_000962.2,840-858).
caatctggagcgtcagtat

SEQ ID NO: 222532 - DNA, 19 bp, Homo sapiens
  siRNA target sequence for PTGS1 (NM_000962.2,1340-1358).
gctacgagcagttcttgtt

SEQ ID NO: 222533 - DNA, 19 bp, Homo sapiens
  siRNA target sequence for PTGS1 (NM_000962.2,1506-1524).
gcggctgcagcccttcaat

SEQ ID NO: 222534 - DNA, 19 bp, Homo sapiens
  siRNA target sequence for PTGS1 (NM_000962.2,1508-1526).
ggctgcagcccttcaatga

SEQ ID NO: 222535 - DNA, 19 bp, Homo sapiens
  siRNA target sequence for PTGS1 (NM_000962.2,1668-1686).
ccatccaaactctatcttt

SEQ ID NO: 222536 - DNA, 19 bp, Homo sapiens
  siRNA target sequence for PTGS1 (NM_000962.2,1788-1806).
cgaggtgggctttaacatt

SEQ ID NO: 222537 - DNA, 19 bp, Homo sapiens
  siRNA target sequence for PTGS1 (NM_000962.2,1792-1810).
gtgggctttaacattgtca

SEQ ID NO: 222538 - DNA, 19 bp, Homo sapiens
  siRNA target sequence for PTGS2 (NM_000963.1,213-231).
caaaaccgaggtgtatgta

SEQ ID NO: 222539 - DNA, 19 bp, Homo sapiens
  siRNA target sequence for PTGS2 (NM_000963.1,218-236).
ccgaggtgtatgtatgagt

SEQ ID NO: 222540 - DNA, 19 bp, Homo sapiens
  siRNA target sequence for PTGS2 (NM_000963.1,237-255).
gtgggatttgaccagtata

SEQ ID NO: 222541 - DNA, 19 bp, Homo sapiens
  siRNA target sequence for PTGS2 (NM_000963.1,240-258).
ggatttgaccagtataagt

SEQ ID NO: 222542 - DNA, 19 bp, Homo sapiens
  siRNA target sequence for PTGS2 (NM_000963.1,249-267).
cagtataagtgcgattgta

SEQ ID NO: 222543 - DNA, 19 bp, Homo sapiens
  siRNA target sequence for PTGS2 (NM_000963.1,293-311).
ctgctcaacaccggaattt

SEQ ID NO: 222544 - DNA, 19 bp, Homo sapiens
  siRNA target sequence for PTGS2 (NM_000963.1,304-322).
cggaatttttgacaagaat

SEQ ID NO: 222545 - DNA, 19 bp, Homo sapiens
  siRNA target sequence for PTGS2 (NM_000963.1,372-390).
cacttcaagggattttgga

SEQ ID NO: 222546 - DNA, 19 bp, Homo sapiens
  siRNA target sequence for PTGS2 (NM_000963.1,382-400).
gattttggaacgttgtgaa

SEQ ID NO: 222547 - DNA, 19 bp, Homo sapiens
  siRNA target sequence for PTGS2 (NM_000963.1,388-406).
ggaacgttgtgaataacat

SEQ ID NO: 222548 - DNA, 19 bp, Homo sapiens
  siRNA target sequence for PTGS2 (NM_000963.1,408-426).
cccttccttcgaaatgcaa

SEQ ID NO: 222549 - DNA, 19 bp, Homo sapiens
  siRNA target sequence for PTGS2 (NM_000963.1,409-427).
ccttccttcgaaatgcaat

SEQ ID NO: 222550 - DNA, 19 bp, Homo sapiens
  siRNA target sequence for PTGS2 (NM_000963.1,410-428).
cttccttcgaaatgcaatt

SEQ ID NO: 222551 - DNA, 19 bp, Homo sapiens
  siRNA target sequence for PTGS2 (NM_000963.1,414-432).
cttcgaaatgcaattatga

SEQ ID NO: 222552 - DNA, 19 bp, Homo sapiens
  siRNA target sequence for PTGS2 (NM_000963.1,417-435).
cgaaatgcaattatgagtt

SEQ ID NO: 222553 - DNA, 19 bp, Homo sapiens
  siRNA target sequence for PTGS2 (NM_000963.1,418-436).
gaaatgcaattatgagtta

SEQ ID NO: 222554 - DNA, 19 bp, Homo sapiens
  siRNA target sequence for PTGS2 (NM_000963.1,445-463).
catccagatcacatttgat

SEQ ID NO: 222555 - DNA, 19 bp, Homo sapiens
  siRNA target sequence for PTGS2 (NM_000963.1,465-483).
gacagtccaccaacttaca

SEQ ID NO: 222556 - DNA, 19 bp, Homo sapiens
  siRNA target sequence for PTGS2 (NM_000963.1,518-536).
ctctaacctctcctattat

SEQ ID NO: 222557 - DNA, 19 bp, Homo sapiens
  siRNA target sequence for PTGS2 (NM_000963.1,524-542).
cctctcctattatactaga

SEQ ID NO: 222558 - DNA, 19 bp, Homo sapiens
  siRNA target sequence for PTGS2 (NM_000963.1,572-590).
gactcccttgggtgtcaaa

SEQ ID NO: 222559 - DNA, 19 bp, Homo sapiens
  siRNA target sequence for PTGS2 (NM_000963.1,576-594).
cccttgggtgtcaaaggta

SEQ ID NO: 222560 - DNA, 19 bp, Homo sapiens
  siRNA target sequence for PTGS2 (NM_000963.1,577-595).
ccttgggtgtcaaaggtaa

SEQ ID NO: 222561 - DNA, 19 bp, Homo sapiens
  siRNA target sequence for PTGS2 (NM_000963.1,583-601).
gtgtcaaaggtaaaaagca

SEQ ID NO: 222562 - DNA, 19 bp, Homo sapiens
  siRNA target sequence for PTGS2 (NM_000963.1,599-617).
gcagcttcctgattcaaat

SEQ ID NO: 222563 - DNA, 19 bp, Homo sapiens
  siRNA target sequence for PTGS2 (NM_000963.1,663-681).
ccccagggctcaaacatga

SEQ ID NO: 222564 - DNA, 19 bp, Homo sapiens
  siRNA target sequence for PTGS2 (NM_000963.1,766-784).
gccatggggtggacttaaa

SEQ ID NO: 222565 - DNA, 19 bp, Homo sapiens
  siRNA target sequence for PTGS2 (NM_000963.1,771-789).
ggggtggacttaaatcata

SEQ ID NO: 222566 - DNA, 19 bp, Homo sapiens
  siRNA target sequence for PTGS2 (NM_000963.1,772-790).
gggtggacttaaatcatat

SEQ ID NO: 222567 - DNA, 19 bp, Homo sapiens
  siRNA target sequence for PTGS2 (NM_000963.1,773-791).
ggtggacttaaatcatatt

SEQ ID NO: 222568 - DNA, 19 bp, Homo sapiens
  siRNA target sequence for PTGS2 (NM_000963.1,774-792).
gtggacttaaatcatattt

SEQ ID NO: 222569 - DNA, 19 bp, Homo sapiens
  siRNA target sequence for PTGS2 (NM_000963.1,879-897).
cctcccacagtcaaagata

SEQ ID NO: 222570 - DNA, 19 bp, Homo sapiens
  siRNA target sequence for PTGS2 (NM_000963.1,883-901).
ccacagtcaaagatactca

SEQ ID NO: 222571 - DNA, 19 bp, Homo sapiens
  siRNA target sequence for PTGS2 (NM_000963.1,1024-1042).
gagtatgcgatgtgcttaa

SEQ ID NO: 222572 - DNA, 19 bp, Homo sapiens
  siRNA target sequence for PTGS2 (NM_000963.1,1098-1116).
ctgataggagagactatta

SEQ ID NO: 222573 - DNA, 19 bp, Homo sapiens
  siRNA target sequence for PTGS2 (NM_000963.1,1107-1125).
gagactattaagattgtga

SEQ ID NO: 222574 - DNA, 19 bp, Homo sapiens
  siRNA target sequence for PTGS2 (NM_000963.1,1143-1161).
cacttgagtggctatcact

SEQ ID NO: 222575 - DNA, 19 bp, Homo sapiens
  siRNA target sequence for PTGS2 (NM_000963.1,1150-1168).
gtggctatcacttcaaact

SEQ ID NO: 222576 - DNA, 19 bp, Homo sapiens
  siRNA target sequence for PTGS2 (NM_000963.1,1208-1226).
gtaccaaaatcgtattgct

SEQ ID NO: 222577 - DNA, 19 bp, Homo sapiens
  siRNA target sequence for PTGS2 (NM_000963.1,1267-1285).
ctgacacctttcaaattca

SEQ ID NO: 222578 - DNA, 19 bp, Homo sapiens
  siRNA target sequence for PTGS2 (NM_000963.1,1345-1363).
gaattacccagtttgttga

SEQ ID NO: 222579 - DNA, 19 bp, Homo sapiens
  siRNA target sequence for PTGS2 (NM_000963.1,1414-1432).
cacccgcagtacagaaagt

SEQ ID NO: 222580 - DNA, 19 bp, Homo sapiens
  siRNA target sequence for PTGS2 (NM_000963.1,1690-1708).
gacttatgggtaatgttat

SEQ ID NO: 222581 - DNA, 19 bp, Homo sapiens
  siRNA target sequence for PTGS2 (NM_000963.1,1692-1710).
cttatgggtaatgttatat

SEQ ID NO: 222582 - DNA, 19 bp, Homo sapiens
  siRNA target sequence for PTGS2 (NM_000963.1,1749-1767).
gaagtgggttttcaaatca

SEQ ID NO: 222583 - DNA, 19 bp, Homo sapiens
  siRNA target sequence for PTGS2 (NM_000963.1,1752-1770).
gtgggttttcaaatcatca

SEQ ID NO: 222584 - DNA, 19 bp, Homo sapiens
  siRNA target sequence for PTGS2 (NM_000963.1,1755-1773).
ggttttcaaatcatcaaca

SEQ ID NO: 222585 - DNA, 19 bp, Homo sapiens
  siRNA target sequence for PTGS2 (NM_000963.1,1789-1807).
ctctcatctgcaataacgt

SEQ ID NO: 222586 - DNA, 19 bp, Homo sapiens
  siRNA target sequence for PTGS2 (NM_000963.1,1808-1826).
gaagggctgtccctttact

SEQ ID NO: 222587 - DNA, 19 bp, Homo sapiens
  siRNA target sequence for PTGS2 (NM_000963.1,1812-1830).
ggctgtccctttacttcat

SEQ ID NO: 222588 - DNA, 19 bp, Homo sapiens
  siRNA target sequence for PTGS2 (NM_000963.1,1839-1857).
ccagatccagagctcatta

SEQ ID NO: 222589 - DNA, 19 bp, Homo sapiens
  siRNA target sequence for PTGS2 (NM_000963.1,1840-1858).
cagatccagagctcattaa

SEQ ID NO: 222590 - DNA, 19 bp, Homo sapiens
  siRNA target sequence for PTGS2 (NM_000963.1,1885-1903).
cccgctccggactagatga

SEQ ID NO: 222591 - DNA, 19 bp, Homo sapiens
  siRNA target sequence for PTGS2 (NM_000963.1,1886-1904).
ccgctccggactagatgat

SEQ ID NO: 222592 - DNA, 19 bp, Homo sapiens
  siRNA target sequence for PTGS2 (NM_000963.1,1887-1905).
cgctccggactagatgata

SEQ ID NO: 222593 - DNA, 19 bp, Homo sapiens
  siRNA target sequence for PTGS2 (NM_000963.1,1888-1906).
gctccggactagatgatat

SEQ ID NO: 222594 - DNA, 19 bp, Homo sapiens
  siRNA target sequence for PTGS2 (NM_000963.1,1891-1909).
ccggactagatgatatcaa

SEQ ID NO: 222595 - DNA, 19 bp, Homo sapiens
  siRNA target sequence for HMOX1 (NM_002133.1,408-426).
gccatgcagcgctatgtga

SEQ ID NO: 222596 - DNA, 19 bp, Homo sapiens
  siRNA target sequence for HMOX1 (NM_002133.1,409-427).
ccatgcagcgctatgtgaa

SEQ ID NO: 222597 - DNA, 19 bp, Homo sapiens
  siRNA target sequence for HMOX1 (NM_002133.1,597-615).
gccagtgccaccaagttca

SEQ ID NO: 222598 - DNA, 19 bp, Homo sapiens
  siRNA target sequence for HMOX1 (NM_002133.1,598-616).
ccagtgccaccaagttcaa

SEQ ID NO: 222599 - DNA, 19 bp, Homo sapiens
  siRNA target sequence for HMOX1 (NM_002133.1,694-712).
ctgcgttcctgctcaacat

SEQ ID NO: 222600 - DNA, 19 bp, Homo sapiens
  siRNA target sequence for HMOX2 (NM_002134.2,112-130).
ggggtagacgagtcagaaa

SEQ ID NO: 222601 - DNA, 19 bp, Homo sapiens
  siRNA target sequence for HMOX2 (NM_002134.2,215-233).
cacacgaccgggcagaaaa

SEQ ID NO: 222602 - DNA, 19 bp, Homo sapiens
  siRNA target sequence for HMOX2 (NM_002134.2,217-235).
cacgaccgggcagaaaaca

SEQ ID NO: 222603 - DNA, 19 bp, Homo sapiens
  siRNA target sequence for HMOX2 (NM_002134.2,229-247).
gaaaacacccagtttgtca

SEQ ID NO: 222604 - DNA, 19 bp, Homo sapiens
  siRNA target sequence for HMOX2 (NM_002134.2,292-310).
gccaccacggcactttact

SEQ ID NO: 222605 - DNA, 19 bp, Homo sapiens
  siRNA target sequence for HMOX2 (NM_002134.2,299-317).
cggcactttacttcacata

SEQ ID NO: 222606 - DNA, 19 bp, Homo sapiens
  siRNA target sequence for HMOX2 (NM_002134.2,413-431).
ccaaggacatggagtattt

SEQ ID NO: 222607 - DNA, 19 bp, Homo sapiens
  siRNA target sequence for HMOX2 (NM_002134.2,417-435).
ggacatggagtatttcttt

SEQ ID NO: 222608 - DNA, 19 bp, Homo sapiens
  siRNA target sequence for HMOX2 (NM_002134.2,489-507).
ggagcggatccactacata

SEQ ID NO: 222609 - DNA, 19 bp, Homo sapiens
  siRNA target sequence for DAP13 (NM_018838.3,109-127).
cggtctccgaggctatcta

SEQ ID NO: 222610 - DNA, 19 bp, Homo sapiens
  siRNA target sequence for DAP13 (NM_018838.3,119-137).
ggctatctacgggtttttt

SEQ ID NO: 222611 - DNA, 19 bp, Homo sapiens
  siRNA target sequence for DAP13 (NM_018838.3,120-138).
gctatctacgggttttttt

SEQ ID NO: 222612 - DNA, 19 bp, Homo sapiens
  siRNA target sequence for DAP13 (NM_018838.3,153-171).
cgaaggttggtacattagt

SEQ ID NO: 222613 - DNA, 19 bp, Homo sapiens
  siRNA target sequence for DAP13 (NM_018838.3,173-191).
ggggaagacaaatatggaa

SEQ ID NO: 222614 - DNA, 19 bp, Homo sapiens
  siRNA target sequence for DAP13 (NM_018838.3,227-245).
cgtcaccgatgggttgtat

SEQ ID NO: 222615 - DNA, 19 bp, Homo sapiens
  siRNA target sequence for DAP13 (NM_018838.3,232-250).
ccgatgggttgtatatact

SEQ ID NO: 222616 - DNA, 19 bp, Homo sapiens
  siRNA target sequence for DAP13 (NM_018838.3,233-251).
cgatgggttgtatatacta

SEQ ID NO: 222617 - DNA, 19 bp, Homo sapiens
  siRNA target sequence for DAP13 (NM_018838.3,317-335).
cgttggcttcacagtatga

SEQ ID NO: 222618 - DNA, 19 bp, Homo sapiens
  siRNA target sequence for DAP13 (NM_018838.3,359-377).
ccacttactgctcgtaaat

SEQ ID NO: 222619 - DNA, 19 bp, Homo sapiens
  siRNA target sequence for DAP13 (NM_018838.3,360-378).
cacttactgctcgtaaatt

SEQ ID NO: 222620 - DNA, 19 bp, Homo sapiens
  siRNA target sequence for DAP13 (NM_018838.3,362-380).
cttactgctcgtaaattca

SEQ ID NO: 222621 - DNA, 19 bp, Homo sapiens
  siRNA target sequence for DAP13 (NM_018838.3,368-386).
gctcgtaaattcatttgga

SEQ ID NO: 222622 - DNA, 19 bp, Homo sapiens
  siRNA target sequence for DAP13 (NM_018838.3,379-397).
catttggacgaaccataaa

SEQ ID NO: 222623 - DNA, 19 bp, Homo sapiens
  siRNA target sequence for DAP13 (NM_018838.3,384-402).
ggacgaaccataaattcaa

SEQ ID NO: 222624 - DNA, 19 bp, Homo sapiens
  siRNA target sequence for DAP13 (NM_018838.3,406-424).
gactggcaccccagaacaa

SEQ ID NO: 222625 - DNA, 19 bp, Homo sapiens
  siRNA target sequence for DAP13 (NM_018838.3,408-426).
ctggcaccccagaacaata

SEQ ID NO: 222626 - DNA, 19 bp, Homo sapiens
  siRNA target sequence for DAP13 (NM_018838.3,417-435).
cagaacaatatgtacctta

SEQ ID NO: 222627 - DNA, 19 bp, Homo sapiens
  siRNA target sequence for DAP13 (NM_018838.3,419-437).
gaacaatatgtaccttatt

SEQ ID NO: 222628 - DNA, 19 bp, Homo sapiens
  siRNA target sequence for DAP13 (NM_018838.3,431-449).
ccttattctaccactagaa

SEQ ID NO: 222629 - DNA, 19 bp, Homo sapiens
  siRNA target sequence for DAP13 (NM_018838.3,432-450).
cttattctaccactagaaa

SEQ ID NO: 222630 - DNA, 19 bp, Homo sapiens
  siRNA target sequence for DAP13 (NM_018838.3,463-481).
gtggatcccaccttcaaca

SEQ ID NO: 222631 - DNA, 19 bp, Homo sapiens
  siRNA target sequence for DAP13 (NM_018838.3,471-489).
caccttcaacaccttacaa

SEQ ID NO: 222632 - DNA, 19 bp, Homo sapiens
  siRNA target sequence for DAP13 (NM_018838.3,473-491).
ccttcaacaccttacaagt

SEQ ID NO: 222633 - DNA, 19 bp, Homo sapiens
  siRNA target sequence for GRIM19 (NM_015965.3,325-343).
gcggtcggatagttacact

SEQ ID NO: 222634 - DNA, 19 bp, Homo sapiens
  siRNA target sequence for GRIM19 (NM_015965.3,326-344).
cggtcggatagttacacta

SEQ ID NO: 222635 - DNA, 19 bp, Homo sapiens
  siRNA target sequence for GRIM19 (NM_015965.3,403-421).
catggcggtggcagtaagt

SEQ ID NO: 222636 - DNA, 19 bp, Homo sapiens
  siRNA target sequence for GRIM19 (NM_015965.3,576-594).
ggattggaaccctgatcta

SEQ ID NO: 222637 - DNA, 19 bp, Homo sapiens
  siRNA target sequence for GRIM19 (NM_015965.3,626-644).
gagcgcaggcgcctacaaa

SEQ ID NO: 222638 - DNA, 19 bp, Homo sapiens
  siRNA target sequence for GRIM19 (NM_015965.3,630-648).
gcaggcgcctacaaatcga

SEQ ID NO: 222639 - DNA, 19 bp, Homo sapiens
  siRNA target sequence for GRIM19 (NM_015965.3,667-685).
cgcgctgttgccactgtta

SEQ ID NO: 222640 - DNA, 19 bp, Homo sapiens
  siRNA target sequence for GRIM19 (NM_015965.3,669-687).
cgctgttgccactgttaca

SEQ ID NO: 222641 - DNA, 19 bp, Homo sapiens
  siRNA target sequence for NDUFA11 (NM_175614.1,66-84).
ctacagcaccaccagtatt

SEQ ID NO: 222642 - DNA, 19 bp, Homo sapiens
  siRNA target sequence for NDUFA11 (NM_175614.1,305-323).
gagcacgcacgcacaacta

SEQ ID NO: 222643 - DNA, 19 bp, Homo sapiens
  siRNA target sequence for NDUFA11 (NM_175614.1,396-414).
ctgggaggtgtttgcaaaa

SEQ ID NO: 222644 - DNA, 19 bp, Homo sapiens
  siRNA target sequence for NDUFA2 (NM_002488.2,125-143).
gagattcgcatccacttat

SEQ ID NO: 222645 - DNA, 19 bp, Homo sapiens
  siRNA target sequence for NDUFA2 (NM_002488.2,127-145).
gattcgcatccacttatgt

SEQ ID NO: 222646 - DNA, 19 bp, Homo sapiens
  siRNA target sequence for NDUFA2 (NM_002488.2,218-236).
cccgacctacccatcctaa

SEQ ID NO: 222647 - DNA, 19 bp, Homo sapiens
  siRNA target sequence for NDUFA2 (NM_002488.2,302-320).
gtccctttgaacaacttca

SEQ ID NO: 222648 - DNA, 19 bp, Homo sapiens
  siRNA target sequence for NDUFA2 (NM_002488.2,343-361).
cctggagaacgttctaagt

SEQ ID NO: 222649 - DNA, 19 bp, Homo sapiens
  siRNA target sequence for NDUFA2 (NM_002488.2,349-367).
gaacgttctaagtggtaaa

SEQ ID NO: 222650 - DNA, 19 bp, Homo sapiens
  siRNA target sequence for NDUFA3 (NM_004542.1,128-146).
ccattgagcccctacttca

SEQ ID NO: 222651 - DNA, 19 bp, Homo sapiens
  siRNA target sequence for NDUFA6 (NM_002490.2,16-34).
cgtccgccaagctacttct

SEQ ID NO: 222652 - DNA, 19 bp, Homo sapiens
  siRNA target sequence for NDUFA6 (NM_002490.2,17-35).
gtccgccaagctacttcta

SEQ ID NO: 222653 - DNA, 19 bp, Homo sapiens
  siRNA target sequence for NDUFA6 (NM_002490.2,132-150).
cgaacactgtgcaccaatt

SEQ ID NO: 222654 - DNA, 19 bp, Homo sapiens
  siRNA target sequence for NDUFA6 (NM_002490.2,169-187).
gaaaatgggacgggataaa

SEQ ID NO: 222655 - DNA, 19 bp, Homo sapiens
  siRNA target sequence for NDUFA6 (NM_002490.2,180-198).
gggataaagtccgagaaat

SEQ ID NO: 222656 - DNA, 19 bp, Homo sapiens
  siRNA target sequence for NDUFA6 (NM_002490.2,182-200).
gataaagtccgagaaatgt

SEQ ID NO: 222657 - DNA, 19 bp, Homo sapiens
  siRNA target sequence for NDUFA6 (NM_002490.2,191-209).
cgagaaatgtttatgaaga

SEQ ID NO: 222658 - DNA, 19 bp, Homo sapiens
  siRNA target sequence for NDUFA6 (NM_002490.2,228-246).
ccagggtggttgatcttct

SEQ ID NO: 222659 - DNA, 19 bp, Homo sapiens
  siRNA target sequence for NDUFA6 (NM_002490.2,335-353).
gcgccaaggccaaaggatt

SEQ ID NO: 222660 - DNA, 19 bp, Homo sapiens
  siRNA target sequence for NDUFA6 (NM_002490.2,336-354).
cgccaaggccaaaggattt

SEQ ID NO: 222661 - DNA, 19 bp, Homo sapiens
  siRNA target sequence for NDUFA7 (NM_005001.1,164-182).
ccacaagctctccaacaat

SEQ ID NO: 222662 - DNA, 19 bp, Homo sapiens
  siRNA target sequence for NDUFA7 (NM_005001.1,170-188).
gctctccaacaattactat

SEQ ID NO: 222663 - DNA, 19 bp, Homo sapiens
  siRNA target sequence for NDUFA7 (NM_005001.1,171-189).
ctctccaacaattactatt

SEQ ID NO: 222664 - DNA, 19 bp, Homo sapiens
  siRNA target sequence for NDUFA8 (NM_014222.2,235-253).
ctatggagctcaatgtgat

SEQ ID NO: 222665 - DNA, 19 bp, Homo sapiens
  siRNA target sequence for NDUFA8 (NM_014222.2,320-338).
ggcaaactggtcaacaagt

SEQ ID NO: 222666 - DNA, 19 bp, Homo sapiens
  siRNA target sequence for NDUFA8 (NM_014222.2,352-370).
ctttaggcagataaaacgt

SEQ ID NO: 222667 - DNA, 19 bp, Homo sapiens
  siRNA target sequence for NDUFA8 (NM_014222.2,400-418).
gacttgcattgattatact

SEQ ID NO: 222668 - DNA, 19 bp, Homo sapiens
  siRNA target sequence for NDUFA8 (NM_014222.2,554-572).
ccggagaatccctatcact

SEQ ID NO: 222669 - DNA, 19 bp, Homo sapiens
  siRNA target sequence for NDUFA8 (NM_014222.2,632-650).
ggcagccgcttttatttct

SEQ ID NO: 222670 - DNA, 19 bp, Homo sapiens
  siRNA target sequence for NDUFA9 (NM_005002.3,38-56).
gtccgggtcctgtcaatgt

SEQ ID NO: 222671 - DNA, 19 bp, Homo sapiens
  siRNA target sequence for NDUFA9 (NM_005002.3,40-58).
ccgggtcctgtcaatgtca

SEQ ID NO: 222672 - DNA, 19 bp, Homo sapiens
  siRNA target sequence for NDUFA9 (NM_005002.3,55-73).
gtcacgttctgccattact

SEQ ID NO: 222673 - DNA, 19 bp, Homo sapiens
  siRNA target sequence for NDUFA9 (NM_005002.3,198-216).
gattcctggggcgatatgt

SEQ ID NO: 222674 - DNA, 19 bp, Homo sapiens
  siRNA target sequence for NDUFA9 (NM_005002.3,234-252).
gcatggggtcacaggtaat

SEQ ID NO: 222675 - DNA, 19 bp, Homo sapiens
  siRNA target sequence for NDUFA9 (NM_005002.3,238-256).
ggggtcacaggtaatcata

SEQ ID NO: 222676 - DNA, 19 bp, Homo sapiens
  siRNA target sequence for NDUFA9 (NM_005002.3,263-281).
cggtgtgataaatatgaca

SEQ ID NO: 222677 - DNA, 19 bp, Homo sapiens
  siRNA target sequence for NDUFA9 (NM_005002.3,329-347).
gaatgggacgcgagagata

SEQ ID NO: 222678 - DNA, 19 bp, Homo sapiens
  siRNA target sequence for NDUFA9 (NM_005002.3,335-353).
gacgcgagagataaagatt

SEQ ID NO: 222679 - DNA, 19 bp, Homo sapiens
  siRNA target sequence for NDUFA9 (NM_005002.3,337-355).
cgcgagagataaagattct

SEQ ID NO: 222680 - DNA, 19 bp, Homo sapiens
  siRNA target sequence for NDUFA9 (NM_005002.3,338-356).
gcgagagataaagattcta

SEQ ID NO: 222681 - DNA, 19 bp, Homo sapiens
  siRNA target sequence for NDUFA9 (NM_005002.3,354-372).
ctatccgacgagtagtaca

SEQ ID NO: 222682 - DNA, 19 bp, Homo sapiens
  siRNA target sequence for NDUFA9 (NM_005002.3,404-422).
cgagactgggaaaccaaaa

SEQ ID NO: 222683 - DNA, 19 bp, Homo sapiens
  siRNA target sequence for NDUFA9 (NM_005002.3,412-430).
ggaaaccaaaaactttgat

SEQ ID NO: 222684 - DNA, 19 bp, Homo sapiens
  siRNA target sequence for NDUFA9 (NM_005002.3,513-531).
cacatctgaatgcgaatat

SEQ ID NO: 222685 - DNA, 19 bp, Homo sapiens
  siRNA target sequence for NDUFA9 (NM_005002.3,515-533).
catctgaatgcgaatatta

SEQ ID NO: 222686 - DNA, 19 bp, Homo sapiens
  siRNA target sequence for NDUFA9 (NM_005002.3,562-580).
ggctgttggagagaaagta

SEQ ID NO: 222687 - DNA, 19 bp, Homo sapiens
  siRNA target sequence for NDUFA9 (NM_005002.3,564-582).
ctgttggagagaaagtagt

SEQ ID NO: 222688 - DNA, 19 bp, Homo sapiens
  siRNA target sequence for NDUFA9 (NM_005002.3,617-635).
ccgtcggacatctttggaa

SEQ ID NO: 222689 - DNA, 19 bp, Homo sapiens
  siRNA target sequence for NDUFA9 (NM_005002.3,670-688).
gcatcggtttggtcctata

SEQ ID NO: 222690 - DNA, 19 bp, Homo sapiens
  siRNA target sequence for NDUFA9 (NM_005002.3,726-744).
cagtatatgtcgtagatgt

SEQ ID NO: 222691 - DNA, 19 bp, Homo sapiens
  siRNA target sequence for NDUFA9 (NM_005002.3,743-761).
gtatccaaaggaattgtta

SEQ ID NO: 222692 - DNA, 19 bp, Homo sapiens
  siRNA target sequence for NDUFA9 (NM_005002.3,790-808).
gaaatcctttgctttcgtt

SEQ ID NO: 222693 - DNA, 19 bp, Homo sapiens
  siRNA target sequence for NDUFA9 (NM_005002.3,855-873).
ctgtggctcacagattgtt

SEQ ID NO: 222694 - DNA, 19 bp, Homo sapiens
  siRNA target sequence for NDUFA9 (NM_005002.3,890-908).
ccgctttttgcctatcgat

SEQ ID NO: 222695 - DNA, 19 bp, Homo sapiens
  siRNA target sequence for NDUFA9 (NM_005002.3,909-927).
gggtagcaagagtctttga

SEQ ID NO: 222696 - DNA, 19 bp, Homo sapiens
  siRNA target sequence for NDUFA9 (NM_005002.3,910-928).
ggtagcaagagtctttgaa

SEQ ID NO: 222697 - DNA, 19 bp, Homo sapiens
  siRNA target sequence for NDUFA9 (NM_005002.3,946-964).
ctggataacaagggataaa

SEQ ID NO: 222698 - DNA, 19 bp, Homo sapiens
  siRNA target sequence for NDUFA9 (NM_005002.3,948-966).
ggataacaagggataaagt

SEQ ID NO: 222699 - DNA, 19 bp, Homo sapiens
  siRNA target sequence for NDUFB1 (NM_004545.3,169-187).
ctatcatggtgaacttact

SEQ ID NO: 222700 - DNA, 19 bp, Homo sapiens
  siRNA target sequence for NDUFB1 (NM_004545.3,176-194).
ggtgaacttacttcagatt

SEQ ID NO: 222701 - DNA, 19 bp, Homo sapiens
  siRNA target sequence for NDUFB1 (NM_004545.3,200-218).
ggaccactgggttcatgtt

SEQ ID NO: 222702 - DNA, 19 bp, Homo sapiens
  siRNA target sequence for NDUFB1 (NM_004545.3,224-242).
ccctatgggatttgtcatt

SEQ ID NO: 222703 - DNA, 19 bp, Homo sapiens
  siRNA target sequence for NDUFB1 (NM_004545.3,282-300).
gccttccggaacaagagta

SEQ ID NO: 222704 - DNA, 19 bp, Homo sapiens
  siRNA target sequence for NDUFB1 (NM_004545.3,283-301).
ccttccggaacaagagtat

SEQ ID NO: 222705 - DNA, 19 bp, Homo sapiens
  siRNA target sequence for NDUFB10 (NM_004548.1,171-189).
cccatcgtctacatgatga

SEQ ID NO: 222706 - DNA, 19 bp, Homo sapiens
  siRNA target sequence for NDUFB10 (NM_004548.1,221-239).
gaccctcgtgagagaattt

SEQ ID NO: 222707 - DNA, 19 bp, Homo sapiens
  siRNA target sequence for NDUFB10 (NM_004548.1,223-241).
ccctcgtgagagaatttat

SEQ ID NO: 222708 - DNA, 19 bp, Homo sapiens
  siRNA target sequence for NDUFB10 (NM_004548.1,224-242).
cctcgtgagagaatttata

SEQ ID NO: 222709 - DNA, 19 bp, Homo sapiens
  siRNA target sequence for NDUFB10 (NM_004548.1,252-270).
cacgcaaagaacaggtatt

SEQ ID NO: 222710 - DNA, 19 bp, Homo sapiens
  siRNA target sequence for NDUFB10 (NM_004548.1,326-344).
ggacatcatgtgcatgtat

SEQ ID NO: 222711 - DNA, 19 bp, Homo sapiens
  siRNA target sequence for NDUFB10 (NM_004548.1,378-396).
gtcgaccaagaaattatca

SEQ ID NO: 222712 - DNA, 19 bp, Homo sapiens
  siRNA target sequence for NDUFB3 (NM_002491.1,298-316).
cttccagattatagacaat

SEQ ID NO: 222713 - DNA, 19 bp, Homo sapiens
  siRNA target sequence for NDUFB5 (NM_002492.2,174-192).
gaccatgggaaaagactat

SEQ ID NO: 222714 - DNA, 19 bp, Homo sapiens
  siRNA target sequence for NDUFB5 (NM_002492.2,180-198).
gggaaaagactatttgtca

SEQ ID NO: 222715 - DNA, 19 bp, Homo sapiens
  siRNA target sequence for NDUFB5 (NM_002492.2,204-222).
ccttctagattctatgaca

SEQ ID NO: 222716 - DNA, 19 bp, Homo sapiens
  siRNA target sequence for NDUFB5 (NM_002492.2,219-237).
gacaggcgttttttgaagt

SEQ ID NO: 222717 - DNA, 19 bp, Homo sapiens
  siRNA target sequence for NDUFB5 (NM_002492.2,221-239).
caggcgttttttgaagtta

SEQ ID NO: 222718 - DNA, 19 bp, Homo sapiens
  siRNA target sequence for NDUFB5 (NM_002492.2,264-282).
gggattccagtagcaattt

SEQ ID NO: 222719 - DNA, 19 bp, Homo sapiens
  siRNA target sequence for NDUFB5 (NM_002492.2,305-323).
cattggtcaagctgaacta

SEQ ID NO: 222720 - DNA, 19 bp, Homo sapiens
  siRNA target sequence for NDUFB5 (NM_002492.2,385-403).
gatggattgcccgtaattt

SEQ ID NO: 222721 - DNA, 19 bp, Homo sapiens
  siRNA target sequence for NDUFB5 (NM_002492.2,388-406).
ggattgcccgtaatttcta

SEQ ID NO: 222722 - DNA, 19 bp, Homo sapiens
  siRNA target sequence for NDUFB5 (NM_002492.2,389-407).
gattgcccgtaatttctat

SEQ ID NO: 222723 - DNA, 19 bp, Homo sapiens
  siRNA target sequence for NDUFB5 (NM_002492.2,393-411).
gcccgtaatttctatgata

SEQ ID NO: 222724 - DNA, 19 bp, Homo sapiens
  siRNA target sequence for NDUFB5 (NM_002492.2,395-413).
ccgtaatttctatgatagt

SEQ ID NO: 222725 - DNA, 19 bp, Homo sapiens
  siRNA target sequence for NDUFB5 (NM_002492.2,436-454).
caatggccgtccttcagat

SEQ ID NO: 222726 - DNA, 19 bp, Homo sapiens
  siRNA target sequence for NDUFB5 (NM_002492.2,440-458).
ggccgtccttcagattgaa

SEQ ID NO: 222727 - DNA, 19 bp, Homo sapiens
  siRNA target sequence for NDUFB5 (NM_002492.2,469-487).
ctgaattacgggtaaagga

SEQ ID NO: 222728 - DNA, 19 bp, Homo sapiens
  siRNA target sequence for NDUFB5 (NM_002492.2,486-504).
gagctggaagtgcgaaaat

SEQ ID NO: 222729 - DNA, 19 bp, Homo sapiens
  siRNA target sequence for NDUFB5 (NM_002492.2,489-507).
ctggaagtgcgaaaattga

SEQ ID NO: 222730 - DNA, 19 bp, Homo sapiens
  siRNA target sequence for NDUFB5 (NM_002492.2,519-537).
ggagatggaccctggtatt

SEQ ID NO: 222731 - DNA, 19 bp, Homo sapiens
  siRNA target sequence for NDUFB5 (NM_002492.2,520-538).
gagatggaccctggtatta

SEQ ID NO: 222732 - DNA, 19 bp, Homo sapiens
  siRNA target sequence for NDUFB5 (NM_002492.2,522-540).
gatggaccctggtattact

SEQ ID NO: 222733 - DNA, 19 bp, Homo sapiens
  siRNA target sequence for NDUFB5 (NM_002492.2,547-565).
caattgacaaggaacttat

SEQ ID NO: 222734 - DNA, 19 bp, Homo sapiens
  siRNA target sequence for NDUFB5 (NM_002492.2,557-575).
ggaacttattgatcattct

SEQ ID NO: 222735 - DNA, 19 bp, Homo sapiens
  siRNA target sequence for NDUFB5 (NM_002492.2,567-585).
gatcattctccgaaagcaa

SEQ ID NO: 222736 - DNA, 19 bp, Homo sapiens
  siRNA target sequence for NDUFB6 (NM_002493.3,132-150).
ggtacactccggatgagaa

SEQ ID NO: 222737 - DNA, 19 bp, Homo sapiens
  siRNA target sequence for NDUFB6 (NM_002493.3,133-151).
gtacactccggatgagaaa

SEQ ID NO: 222738 - DNA, 19 bp, Homo sapiens
  siRNA target sequence for NDUFB6 (NM_002493.3,304-322).
ggtccatggggtatacaaa

SEQ ID NO: 222739 - DNA, 19 bp, Homo sapiens
  siRNA target sequence for NDUFB6 (NM_002493.3,404-422).
ccatatggcatagttgaaa

SEQ ID NO: 222740 - DNA, 19 bp, Homo sapiens
  siRNA target sequence for NDUFB7 (NM_004146.4,343-361).
gcgagcaccgcgactatgt

SEQ ID NO: 222741 - DNA, 19 bp, Homo sapiens
  siRNA target sequence for NDUFB8 (NM_005004.1,275-293).
gagagagatccatggtata

SEQ ID NO: 222742 - DNA, 19 bp, Homo sapiens
  siRNA target sequence for NDUFB8 (NM_005004.1,344-362).
cacctagacatgtacaaca

SEQ ID NO: 222743 - DNA, 19 bp, Homo sapiens
  siRNA target sequence for NDUFB9 (NM_005005.1,171-189).
gcgtccagagagacaaata

SEQ ID NO: 222744 - DNA, 19 bp, Homo sapiens
  siRNA target sequence for NDUFB9 (NM_005005.1,180-198).
gagacaaataccgatactt

SEQ ID NO: 222745 - DNA, 19 bp, Homo sapiens
  siRNA target sequence for NDUFB9 (NM_005005.1,215-233).
gcccggtttgaagaacata

SEQ ID NO: 222746 - DNA, 19 bp, Homo sapiens
  siRNA target sequence for NDUFB9 (NM_005005.1,338-356).
gggggcacctcctatgaga

SEQ ID NO: 222747 - DNA, 19 bp, Homo sapiens
  siRNA target sequence for NDUFB9 (NM_005005.1,342-360).
gcacctcctatgagagata

SEQ ID NO: 222748 - DNA, 19 bp, Homo sapiens
  siRNA target sequence for NDUFB9 (NM_005005.1,346-364).
ctcctatgagagatacgat

SEQ ID NO: 222749 - DNA, 19 bp, Homo sapiens
  siRNA target sequence for NDUFB9 (NM_005005.1,541-559).
gccccctgcccgaaaggaa

SEQ ID NO: 222750 - DNA, 19 bp, Homo sapiens
  siRNA target sequence for NDUFB9 (NM_005005.1,549-567).
cccgaaaggaaggtgattt

SEQ ID NO: 222751 - DNA, 19 bp, Homo sapiens
  siRNA target sequence for NDUFC1 (NM_002494.2,70-88).
gcccttcagtgcgatcaaa

SEQ ID NO: 222752 - DNA, 19 bp, Homo sapiens
  siRNA target sequence for NDUFC1 (NM_002494.2,72-90).
ccttcagtgcgatcaaagt

SEQ ID NO: 222753 - DNA, 19 bp, Homo sapiens
  siRNA target sequence for NDUFC1 (NM_002494.2,73-91).
cttcagtgcgatcaaagtt

SEQ ID NO: 222754 - DNA, 19 bp, Homo sapiens
  siRNA target sequence for NDUFC1 (NM_002494.2,76-94).
cagtgcgatcaaagttcta

SEQ ID NO: 222755 - DNA, 19 bp, Homo sapiens
  siRNA target sequence for NDUFC1 (NM_002494.2,167-185).
gtggatctatctcatcaaa

SEQ ID NO: 222756 - DNA, 19 bp, Homo sapiens
  siRNA target sequence for NDUFC1 (NM_002494.2,169-187).
ggatctatctcatcaaaca

SEQ ID NO: 222757 - DNA, 19 bp, Homo sapiens
  siRNA target sequence for NDUFC2 (NM_004549.3,255-273).
ctgctccggcctgattgat

SEQ ID NO: 222758 - DNA, 19 bp, Homo sapiens
  siRNA target sequence for NDUFC2 (NM_004549.3,257-275).
gctccggcctgattgataa

SEQ ID NO: 222759 - DNA, 19 bp, Homo sapiens
  siRNA target sequence for NDUFC2 (NM_004549.3,260-278).
ccggcctgattgataacct

SEQ ID NO: 222760 - DNA, 19 bp, Homo sapiens
  siRNA target sequence for NDUFC2 (NM_004549.3,297-315).
cgcgacggctggtttgcat

SEQ ID NO: 222761 - DNA, 19 bp, Homo sapiens
  siRNA target sequence for NDUFC2 (NM_004549.3,312-330).
gcatcgccagcttctatat

SEQ ID NO: 222762 - DNA, 19 bp, Homo sapiens
  siRNA target sequence for NDUFC2 (NM_004549.3,313-331).
catcgccagcttctatata

SEQ ID NO: 222763 - DNA, 19 bp, Homo sapiens
  siRNA target sequence for NDUFC2 (NM_004549.3,316-334).
cgccagcttctatatatta

SEQ ID NO: 222764 - DNA, 19 bp, Homo sapiens
  siRNA target sequence for NDUFC2 (NM_004549.3,349-367).
gctggatattatcttgtaa

SEQ ID NO: 222765 - DNA, 19 bp, Homo sapiens
  siRNA target sequence for NDUFC2 (NM_004549.3,391-409).
gtgagggaccgtgaaatgt

SEQ ID NO: 222766 - DNA, 19 bp, Homo sapiens
  siRNA target sequence for NDUFC2 (NM_004549.3,393-411).
gagggaccgtgaaatgttt

SEQ ID NO: 222767 - DNA, 19 bp, Homo sapiens
  siRNA target sequence for NDUFC2 (NM_004549.3,397-415).
gaccgtgaaatgtttggat

SEQ ID NO: 222768 - DNA, 19 bp, Homo sapiens
  siRNA target sequence for NDUFC2 (NM_004549.3,399-417).
ccgtgaaatgtttggatat

SEQ ID NO: 222769 - DNA, 19 bp, Homo sapiens
  siRNA target sequence for NDUFS1 (NM_005006.5,152-170).
gccttagtaggcctttcta

SEQ ID NO: 222770 - DNA, 19 bp, Homo sapiens
  siRNA target sequence for NDUFS1 (NM_005006.5,153-171).
ccttagtaggcctttctaa

SEQ ID NO: 222771 - DNA, 19 bp, Homo sapiens
  siRNA target sequence for NDUFS1 (NM_005006.5,214-232).
caacttgattgaagtattt

SEQ ID NO: 222772 - DNA, 19 bp, Homo sapiens
  siRNA target sequence for NDUFS1 (NM_005006.5,304-322).
gatccctcgattctgttat

SEQ ID NO: 222773 - DNA, 19 bp, Homo sapiens
  siRNA target sequence for NDUFS1 (NM_005006.5,309-327).
ctcgattctgttatcatga

SEQ ID NO: 222774 - DNA, 19 bp, Homo sapiens
  siRNA target sequence for NDUFS1 (NM_005006.5,399-417).
cttgtgccatgccagtaat

SEQ ID NO: 222775 - DNA, 19 bp, Homo sapiens
  siRNA target sequence for NDUFS1 (NM_005006.5,413-431).
gtaatgaagggttggaata

SEQ ID NO: 222776 - DNA, 19 bp, Homo sapiens
  siRNA target sequence for NDUFS1 (NM_005006.5,418-436).
gaagggttggaatatccta

SEQ ID NO: 222777 - DNA, 19 bp, Homo sapiens
  siRNA target sequence for NDUFS1 (NM_005006.5,478-496).
ggagttcttattagcaaat

SEQ ID NO: 222778 - DNA, 19 bp, Homo sapiens
  siRNA target sequence for NDUFS1 (NM_005006.5,551-569).
cagtccatgatgtttggaa

SEQ ID NO: 222779 - DNA, 19 bp, Homo sapiens
  siRNA target sequence for NDUFS1 (NM_005006.5,616-634).
gaacattgggccattggta

SEQ ID NO: 222780 - DNA, 19 bp, Homo sapiens
  siRNA target sequence for NDUFS1 (NM_005006.5,632-650).
gtaaagaccatcatgacaa

SEQ ID NO: 222781 - DNA, 19 bp, Homo sapiens
  siRNA target sequence for NDUFS1 (NM_005006.5,739-757).
gcaagttggcacatacatt

SEQ ID NO: 222782 - DNA, 19 bp, Homo sapiens
  siRNA target sequence for NDUFS1 (NM_005006.5,781-799).
gtctgggaatatcattgat

SEQ ID NO: 222783 - DNA, 19 bp, Homo sapiens
  siRNA target sequence for NDUFS1 (NM_005006.5,783-801).
ctgggaatatcattgatat

SEQ ID NO: 222784 - DNA, 19 bp, Homo sapiens
  siRNA target sequence for NDUFS1 (NM_005006.5,849-867).
ggccttgggaaacaagaaa

SEQ ID NO: 222785 - DNA, 19 bp, Homo sapiens
  siRNA target sequence for NDUFS1 (NM_005006.5,889-907).
ggatgcggttggaagtaat

SEQ ID NO: 222786 - DNA, 19 bp, Homo sapiens
  siRNA target sequence for NDUFS1 (NM_005006.5,890-908).
gatgcggttggaagtaata

SEQ ID NO: 222787 - DNA, 19 bp, Homo sapiens
  siRNA target sequence for NDUFS1 (NM_005006.5,894-912).
cggttggaagtaatattgt

SEQ ID NO: 222788 - DNA, 19 bp, Homo sapiens
  siRNA target sequence for NDUFS1 (NM_005006.5,943-961).
gattttgccacgtatgcat

SEQ ID NO: 222789 - DNA, 19 bp, Homo sapiens
  siRNA target sequence for NDUFS1 (NM_005006.5,1006-1024).
ctatgatgggctaaaacgt

SEQ ID NO: 222790 - DNA, 19 bp, Homo sapiens
  siRNA target sequence for NDUFS1 (NM_005006.5,1014-1032).
ggctaaaacgtcaaagact

SEQ ID NO: 222791 - DNA, 19 bp, Homo sapiens
  siRNA target sequence for NDUFS1 (NM_005006.5,1015-1033).
gctaaaacgtcaaagactt

SEQ ID NO: 222792 - DNA, 19 bp, Homo sapiens
  siRNA target sequence for NDUFS1 (NM_005006.5,1016-1034).
ctaaaacgtcaaagactta

SEQ ID NO: 222793 - DNA, 19 bp, Homo sapiens
  siRNA target sequence for NDUFS1 (NM_005006.5,1035-1053).
ccgagccaatggtcagaaa

SEQ ID NO: 222794 - DNA, 19 bp, Homo sapiens
  siRNA target sequence for NDUFS1 (NM_005006.5,1036-1054).
cgagccaatggtcagaaat

SEQ ID NO: 222795 - DNA, 19 bp, Homo sapiens
  siRNA target sequence for NDUFS1 (NM_005006.5,1064-1082).
cttttaacctatacttctt

SEQ ID NO: 222796 - DNA, 19 bp, Homo sapiens
  siRNA target sequence for NDUFS1 (NM_005006.5,1098-1116).
ctcgcgtagctggaatgtt

SEQ ID NO: 222797 - DNA, 19 bp, Homo sapiens
  siRNA target sequence for NDUFS1 (NM_005006.5,1107-1125).
ctggaatgttgcagagttt

SEQ ID NO: 222798 - DNA, 19 bp, Homo sapiens
  siRNA target sequence for NDUFS1 (NM_005006.5,1132-1150).
caaagatgtggcagcaatt

SEQ ID NO: 222799 - DNA, 19 bp, Homo sapiens
  siRNA target sequence for NDUFS1 (NM_005006.5,1176-1194).
ccctggtagctctcaaaga

SEQ ID NO: 222800 - DNA, 19 bp, Homo sapiens
  siRNA target sequence for NDUFS1 (NM_005006.5,1177-1195).
cctggtagctctcaaagat

SEQ ID NO: 222801 - DNA, 19 bp, Homo sapiens
  siRNA target sequence for NDUFS1 (NM_005006.5,1178-1196).
ctggtagctctcaaagatt

SEQ ID NO: 222802 - DNA, 19 bp, Homo sapiens
  siRNA target sequence for NDUFS1 (NM_005006.5,1208-1226).
gtggactctgacaccttat

SEQ ID NO: 222803 - DNA, 19 bp, Homo sapiens
  siRNA target sequence for NDUFS1 (NM_005006.5,1211-1229).
gactctgacaccttatgca

SEQ ID NO: 222804 - DNA, 19 bp, Homo sapiens
  siRNA target sequence for NDUFS1 (NM_005006.5,1263-1281).
cagatttgcgttccaatta

SEQ ID NO: 222805 - DNA, 19 bp, Homo sapiens
  siRNA target sequence for NDUFS1 (NM_005006.5,1276-1294).
caattatcttcttaatact

SEQ ID NO: 222806 - DNA, 19 bp, Homo sapiens
  siRNA target sequence for NDUFS1 (NM_005006.5,1338-1356).
gtacaaacccacgttttga

SEQ ID NO: 222807 - DNA, 19 bp, Homo sapiens
  siRNA target sequence for NDUFS1 (NM_005006.5,1357-1375).
ggcaccactgtttaatgct

SEQ ID NO: 222808 - DNA, 19 bp, Homo sapiens
  siRNA target sequence for NDUFS1 (NM_005006.5,1358-1376).
gcaccactgtttaatgcta

SEQ ID NO: 222809 - DNA, 19 bp, Homo sapiens
  siRNA target sequence for NDUFS1 (NM_005006.5,1390-1408).
ctggctgcataatgactta

SEQ ID NO: 222810 - DNA, 19 bp, Homo sapiens
  siRNA target sequence for NDUFS1 (NM_005006.5,1405-1423).
cttaaaagtggcccttata

SEQ ID NO: 222811 - DNA, 19 bp, Homo sapiens
  siRNA target sequence for NDUFS1 (NM_005006.5,1428-1446).
gtccagtggacctcactta

SEQ ID NO: 222812 - DNA, 19 bp, Homo sapiens
  siRNA target sequence for NDUFS1 (NM_005006.5,1435-1453).
ggacctcacttacacatat

SEQ ID NO: 222813 - DNA, 19 bp, Homo sapiens
  siRNA target sequence for NDUFS1 (NM_005006.5,1462-1480).
gggagactcccccaaaatt

SEQ ID NO: 222814 - DNA, 19 bp, Homo sapiens
  siRNA target sequence for NDUFS1 (NM_005006.5,1494-1512).
cttcgggaagccatccatt

SEQ ID NO: 222815 - DNA, 19 bp, Homo sapiens
  siRNA target sequence for NDUFS1 (NM_005006.5,1509-1527).
catttagccaggtcctaaa

SEQ ID NO: 222816 - DNA, 19 bp, Homo sapiens
  siRNA target sequence for NDUFS1 (NM_005006.5,1619-1637).
caaaagattcggatgacta

SEQ ID NO: 222817 - DNA, 19 bp, Homo sapiens
  siRNA target sequence for NDUFS1 (NM_005006.5,1647-1665).
ctggtgattggaaagttat

SEQ ID NO: 222818 - DNA, 19 bp, Homo sapiens
  siRNA target sequence for NDUFS1 (NM_005006.5,1649-1667).
ggtgattggaaagttatga

SEQ ID NO: 222819 - DNA, 19 bp, Homo sapiens
  siRNA target sequence for NDUFS1 (NM_005006.5,1650-1668).
gtgattggaaagttatgaa

SEQ ID NO: 222820 - DNA, 19 bp, Homo sapiens
  siRNA target sequence for NDUFS1 (NM_005006.5,1666-1684).
gaatatccttcataggatt

SEQ ID NO: 222821 - DNA, 19 bp, Homo sapiens
  siRNA target sequence for NDUFS1 (NM_005006.5,1773-1791).
gagcagatggaggttgtat

SEQ ID NO: 222822 - DNA, 19 bp, Homo sapiens
  siRNA target sequence for NDUFS1 (NM_005006.5,1775-1793).
gcagatggaggttgtatca

SEQ ID NO: 222823 - DNA, 19 bp, Homo sapiens
  siRNA target sequence for NDUFS1 (NM_005006.5,1788-1806).
gtatcacacgacaggattt

SEQ ID NO: 222824 - DNA, 19 bp, Homo sapiens
  siRNA target sequence for NDUFS1 (NM_005006.5,1807-1825).
gccaaaggattgtttcatt

SEQ ID NO: 222825 - DNA, 19 bp, Homo sapiens
  siRNA target sequence for NDUFS1 (NM_005006.5,1808-1826).
ccaaaggattgtttcatta

SEQ ID NO: 222826 - DNA, 19 bp, Homo sapiens
  siRNA target sequence for NDUFS1 (NM_005006.5,1809-1827).
caaaggattgtttcattat

SEQ ID NO: 222827 - DNA, 19 bp, Homo sapiens
  siRNA target sequence for NDUFS1 (NM_005006.5,1855-1873).
ggctcccatagctgatgtt

SEQ ID NO: 222828 - DNA, 19 bp, Homo sapiens
  siRNA target sequence for NDUFS1 (NM_005006.5,1896-1914).
cagagaagtctgctacata

SEQ ID NO: 222829 - DNA, 19 bp, Homo sapiens
  siRNA target sequence for NDUFS1 (NM_005006.5,1929-1947).
gtagagctcagcagactaa

SEQ ID NO: 222830 - DNA, 19 bp, Homo sapiens
  siRNA target sequence for NDUFS1 (NM_005006.5,2019-2037).
gaatgactcttccatatga

SEQ ID NO: 222831 - DNA, 19 bp, Homo sapiens
  siRNA target sequence for NDUFS1 (NM_005006.5,2055-2073).
ggaacagattggaagaagt

SEQ ID NO: 222832 - DNA, 19 bp, Homo sapiens
  siRNA target sequence for NDUFS1 (NM_005006.5,2099-2117).
gatattgaaggggctaatt

SEQ ID NO: 222833 - DNA, 19 bp, Homo sapiens
  siRNA target sequence for NDUFS1 (NM_005006.5,2180-2198).
gttccacctcagctaacta

SEQ ID NO: 222834 - DNA, 19 bp, Homo sapiens
  siRNA target sequence for NDUFS1 (NM_005006.5,2189-2207).
cagctaactataaaagact

SEQ ID NO: 222835 - DNA, 19 bp, Homo sapiens
  siRNA target sequence for NDUFS1 (NM_005006.5,2204-2222).
gacttctacatgacagatt

SEQ ID NO: 222836 - DNA, 19 bp, Homo sapiens
  siRNA target sequence for NDUFS1 (NM_005006.5,2209-2227).
ctacatgacagattcaatt

SEQ ID NO: 222837 - DNA, 19 bp, Homo sapiens
  siRNA target sequence for NDUFS1 (NM_005006.5,2288-2306).
gtagaggaaccatccatat

SEQ ID NO: 222838 - DNA, 19 bp, Homo sapiens
  siRNA target sequence for NDUFS1 (NM_005006.5,2291-2309).
gaggaaccatccatatgct

SEQ ID NO: 222839 - DNA, 19 bp, Homo sapiens
  siRNA target sequence for NDUFS2 (NM_004550.3,636-654).
ctccaccttggaatgatgt

SEQ ID NO: 222840 - DNA, 19 bp, Homo sapiens
  siRNA target sequence for NDUFS2 (NM_004550.3,658-676).
ccctccaaaggacacaatt

SEQ ID NO: 222841 - DNA, 19 bp, Homo sapiens
  siRNA target sequence for NDUFS2 (NM_004550.3,662-680).
ccaaaggacacaattgtga

SEQ ID NO: 222842 - DNA, 19 bp, Homo sapiens
  siRNA target sequence for NDUFS2 (NM_004550.3,663-681).
caaaggacacaattgtgaa

SEQ ID NO: 222843 - DNA, 19 bp, Homo sapiens
  siRNA target sequence for NDUFS2 (NM_004550.3,726-744).
gtgtcctgcgactagtgat

SEQ ID NO: 222844 - DNA, 19 bp, Homo sapiens
  siRNA target sequence for NDUFS2 (NM_004550.3,731-749).
ctgcgactagtgatggaat

SEQ ID NO: 222845 - DNA, 19 bp, Homo sapiens
  siRNA target sequence for NDUFS2 (NM_004550.3,734-752).
cgactagtgatggaattga

SEQ ID NO: 222846 - DNA, 19 bp, Homo sapiens
  siRNA target sequence for NDUFS2 (NM_004550.3,807-825).
ctgagaagctcattgaata

SEQ ID NO: 222847 - DNA, 19 bp, Homo sapiens
  siRNA target sequence for NDUFS2 (NM_004550.3,853-871).
ctttgaccggctagactat

SEQ ID NO: 222848 - DNA, 19 bp, Homo sapiens
  siRNA target sequence for NDUFS2 (NM_004550.3,857-875).
gaccggctagactatgtgt

SEQ ID NO: 222849 - DNA, 19 bp, Homo sapiens
  siRNA target sequence for NDUFS2 (NM_004550.3,866-884).
gactatgtgtccatgatgt

SEQ ID NO: 222850 - DNA, 19 bp, Homo sapiens
  siRNA target sequence for NDUFS2 (NM_004550.3,889-907).
cgaacaggcctattctcta

SEQ ID NO: 222851 - DNA, 19 bp, Homo sapiens
  siRNA target sequence for NDUFS2 (NM_004550.3,960-978).
gagtgctgtttggagaaat

SEQ ID NO: 222852 - DNA, 19 bp, Homo sapiens
  siRNA target sequence for NDUFS2 (NM_004550.3,984-1002).
gtttgttgaaccacatcat

SEQ ID NO: 222853 - DNA, 19 bp, Homo sapiens
  siRNA target sequence for NDUFS2 (NM_004550.3,1099-1117).
gtctggagcccgaatgcat

SEQ ID NO: 222854 - DNA, 19 bp, Homo sapiens
  siRNA target sequence for NDUFS2 (NM_004550.3,1109-1127).
cgaatgcatgctgcttata

SEQ ID NO: 222855 - DNA, 19 bp, Homo sapiens
  siRNA target sequence for NDUFS2 (NM_004550.3,1165-1183).
gcttatggatgacatttat

SEQ ID NO: 222856 - DNA, 19 bp, Homo sapiens
  siRNA target sequence for NDUFS2 (NM_004550.3,1203-1221).
ctcttcggcttgatgagtt

SEQ ID NO: 222857 - DNA, 19 bp, Homo sapiens
  siRNA target sequence for NDUFS2 (NM_004550.3,1249-1267).
ctggcgaaatcggacaatt

SEQ ID NO: 222858 - DNA, 19 bp, Homo sapiens
  siRNA target sequence for NDUFS2 (NM_004550.3,1251-1269).
ggcgaaatcggacaattga

SEQ ID NO: 222859 - DNA, 19 bp, Homo sapiens
  siRNA target sequence for NDUFS2 (NM_004550.3,1253-1271).
cgaaatcggacaattgaca

SEQ ID NO: 222860 - DNA, 19 bp, Homo sapiens
  siRNA target sequence for NDUFS2 (NM_004550.3,1362-1380).
cccagccctatgatgttta

SEQ ID NO: 222861 - DNA, 19 bp, Homo sapiens
  siRNA target sequence for NDUFS2 (NM_004550.3,1461-1479).
gccagtccctgagaattat

SEQ ID NO: 222862 - DNA, 19 bp, Homo sapiens
  siRNA target sequence for NDUFS2 (NM_004550.3,1482-1500).
cacagtgtctaaacaagat

SEQ ID NO: 222863 - DNA, 19 bp, Homo sapiens
  siRNA target sequence for NDUFS2 (NM_004550.3,1509-1527).
gggagatcaaggttgatga

SEQ ID NO: 222864 - DNA, 19 bp, Homo sapiens
  siRNA target sequence for NDUFS2 (NM_004550.3,1510-1528).
ggagatcaaggttgatgat

SEQ ID NO: 222865 - DNA, 19 bp, Homo sapiens
  siRNA target sequence for NDUFS2 (NM_004550.3,1545-1563).
ctaagcgagcagagatgaa

SEQ ID NO: 222866 - DNA, 19 bp, Homo sapiens
  siRNA target sequence for NDUFS2 (NM_004550.3,1578-1596).
cactgattcatcactttaa

SEQ ID NO: 222867 - DNA, 19 bp, Homo sapiens
  siRNA target sequence for NDUFS2 (NM_004550.3,1622-1640).
cctccaggagccacatata

SEQ ID NO: 222868 - DNA, 19 bp, Homo sapiens
  siRNA target sequence for NDUFS2 (NM_004550.3,1703-1721).
ccttatcgatgcaagatca

SEQ ID NO: 222869 - DNA, 19 bp, Homo sapiens
  siRNA target sequence for NDUFS2 (NM_004550.3,1704-1722).
cttatcgatgcaagatcaa

SEQ ID NO: 222870 - DNA, 19 bp, Homo sapiens
  siRNA target sequence for NDUFS2 (NM_004550.3,1717-1735).
gatcaaggctcctggtttt

SEQ ID NO: 222871 - DNA, 19 bp, Homo sapiens
  siRNA target sequence for NDUFS2 (NM_004550.3,1787-1805).
gtcgttgccatcataggta

SEQ ID NO: 222872 - DNA, 19 bp, Homo sapiens
  siRNA target sequence for NDUFS2 (NM_004550.3,1802-1820).
ggtacccaagatattgtat

SEQ ID NO: 222873 - DNA, 19 bp, Homo sapiens
  siRNA target sequence for NDUFS3 (NM_004551.1,86-104).
ggcgaccctccgttctgtt

SEQ ID NO: 222874 - DNA, 19 bp, Homo sapiens
  siRNA target sequence for NDUFS3 (NM_004551.1,221-239).
ccaagtatgtccaacaagt

SEQ ID NO: 222875 - DNA, 19 bp, Homo sapiens
  siRNA target sequence for NDUFS3 (NM_004551.1,246-264).
gtcctgcttcaatgagtta

SEQ ID NO: 222876 - DNA, 19 bp, Homo sapiens
  siRNA target sequence for NDUFS3 (NM_004551.1,248-266).
cctgcttcaatgagttaga

SEQ ID NO: 222877 - DNA, 19 bp, Homo sapiens
  siRNA target sequence for NDUFS3 (NM_004551.1,261-279).
gttagaggtctgtatccat

SEQ ID NO: 222878 - DNA, 19 bp, Homo sapiens
  siRNA target sequence for NDUFS3 (NM_004551.1,321-339).
caccaatgcacagttcaaa

SEQ ID NO: 222879 - DNA, 19 bp, Homo sapiens
  siRNA target sequence for NDUFS3 (NM_004551.1,376-394).
cggcaaaaccgttttgaga

SEQ ID NO: 222880 - DNA, 19 bp, Homo sapiens
  siRNA target sequence for NDUFS3 (NM_004551.1,377-395).
ggcaaaaccgttttgagat

SEQ ID NO: 222881 - DNA, 19 bp, Homo sapiens
  siRNA target sequence for NDUFS3 (NM_004551.1,378-396).
gcaaaaccgttttgagatt

SEQ ID NO: 222882 - DNA, 19 bp, Homo sapiens
  siRNA target sequence for NDUFS3 (NM_004551.1,457-475).
gagctgacgcccattgagt

SEQ ID NO: 222883 - DNA, 19 bp, Homo sapiens
  siRNA target sequence for NDUFS3 (NM_004551.1,587-605).
gcttcgagggacatccttt

SEQ ID NO: 222884 - DNA, 19 bp, Homo sapiens
  siRNA target sequence for NDUFS3 (NM_004551.1,609-627).
gaaagactttcctctatct

SEQ ID NO: 222885 - DNA, 19 bp, Homo sapiens
  siRNA target sequence for NDUFS3 (NM_004551.1,620-638).
ctctatctggctatgttga

SEQ ID NO: 222886 - DNA, 19 bp, Homo sapiens
  siRNA target sequence for NDUFS3 (NM_004551.1,628-646).
ggctatgttgagttacgtt

SEQ ID NO: 222887 - DNA, 19 bp, Homo sapiens
  siRNA target sequence for NDUFS3 (NM_004551.1,629-647).
gctatgttgagttacgtta

SEQ ID NO: 222888 - DNA, 19 bp, Homo sapiens
  siRNA target sequence for NDUFS3 (NM_004551.1,630-648).
ctatgttgagttacgttat

SEQ ID NO: 222889 - DNA, 19 bp, Homo sapiens
  siRNA target sequence for NDUFS3 (NM_004551.1,729-747).
ggaggctttcccagtctat

SEQ ID NO: 222890 - DNA, 19 bp, Homo sapiens
  siRNA target sequence for NDUFS4 (NM_002495.1,162-180).
ctcataacagttgatgaaa

SEQ ID NO: 222891 - DNA, 19 bp, Homo sapiens
  siRNA target sequence for NDUFS4 (NM_002495.1,171-189).
gttgatgaaaaattggata

SEQ ID NO: 222892 - DNA, 19 bp, Homo sapiens
  siRNA target sequence for NDUFS4 (NM_002495.1,177-195).
gaaaaattggatatcacta

SEQ ID NO: 222893 - DNA, 19 bp, Homo sapiens
  siRNA target sequence for NDUFS4 (NM_002495.1,249-267).
gttcctgctcgcaataaca

SEQ ID NO: 222894 - DNA, 19 bp, Homo sapiens
  siRNA target sequence for NDUFS4 (NM_002495.1,321-339).
gagcgatgggaaaatcctt

SEQ ID NO: 222895 - DNA, 19 bp, Homo sapiens
  siRNA target sequence for NDUFS4 (NM_002495.1,358-376).
cggctgatcccttatccaa

SEQ ID NO: 222896 - DNA, 19 bp, Homo sapiens
  siRNA target sequence for NDUFS4 (NM_002495.1,373-391).
ccaacatggttctaacctt

SEQ ID NO: 222897 - DNA, 19 bp, Homo sapiens
  siRNA target sequence for NDUFS4 (NM_002495.1,381-399).
gttctaaccttcagtacta

SEQ ID NO: 222898 - DNA, 19 bp, Homo sapiens
  siRNA target sequence for NDUFS4 (NM_002495.1,433-451).
gatggagctatgacattga

SEQ ID NO: 222899 - DNA, 19 bp, Homo sapiens
  siRNA target sequence for NDUFS5 (NM_004552.1,201-219).
gcacatggaatcggttata

SEQ ID NO: 222900 - DNA, 19 bp, Homo sapiens
  siRNA target sequence for NDUFS6 (NM_004553.2,143-161).
gcacactggccaggtttat

SEQ ID NO: 222901 - DNA, 19 bp, Homo sapiens
  siRNA target sequence for NDUFS6 (NM_004553.2,146-164).
cactggccaggtttatgat

SEQ ID NO: 222902 - DNA, 19 bp, Homo sapiens
  siRNA target sequence for NDUFS6 (NM_004553.2,176-194).
caggagaattcggtttgta

SEQ ID NO: 222903 - DNA, 19 bp, Homo sapiens
  siRNA target sequence for NDUFS6 (NM_004553.2,221-239).
ctttgccattgatttgata

SEQ ID NO: 222904 - DNA, 19 bp, Homo sapiens
  siRNA target sequence for NDUFS6 (NM_004553.2,307-325).
gccacccaaaagtgtatat

SEQ ID NO: 222905 - DNA, 19 bp, Homo sapiens
  siRNA target sequence for NDUFS6 (NM_004553.2,308-326).
ccacccaaaagtgtatata

SEQ ID NO: 222906 - DNA, 19 bp, Homo sapiens
  siRNA target sequence for NDUFS6 (NM_004553.2,309-327).
cacccaaaagtgtatataa

SEQ ID NO: 222907 - DNA, 19 bp, Homo sapiens
  siRNA target sequence for NDUFS6 (NM_004553.2,312-330).
ccaaaagtgtatataaact

SEQ ID NO: 222908 - DNA, 19 bp, Homo sapiens
  siRNA target sequence for NDUFS6 (NM_004553.2,313-331).
caaaagtgtatataaactt

SEQ ID NO: 222909 - DNA, 19 bp, Homo sapiens
  siRNA target sequence for NDUFS6 (NM_004553.2,350-368).
cggcacatgcggttactgt

SEQ ID NO: 222910 - DNA, 19 bp, Homo sapiens
  siRNA target sequence for NDUFS8 (NM_002496.1,192-210).
gccacctacaagtatgtga

SEQ ID NO: 222911 - DNA, 19 bp, Homo sapiens
  siRNA target sequence for NDUFS8 (NM_002496.1,196-214).
cctacaagtatgtgaacat

SEQ ID NO: 222912 - DNA, 19 bp, Homo sapiens
  siRNA target sequence for NDUFS8 (NM_002496.1,222-240).
cccgagatggacatgaagt

SEQ ID NO: 222913 - DNA, 19 bp, Homo sapiens
  siRNA target sequence for NDUFS8 (NM_002496.1,410-428).
cggggaggagcgttgcatt

SEQ ID NO: 222914 - DNA, 19 bp, Homo sapiens
  siRNA target sequence for NDUFS8 (NM_002496.1,508-526).
ggaccacccgctatgacat

SEQ ID NO: 222915 - DNA, 19 bp, Homo sapiens
  siRNA target sequence for NDUFV1 (NM_007103.2,138-156).
cacgacagcacccaagaaa

SEQ ID NO: 222916 - DNA, 19 bp, Homo sapiens
  siRNA target sequence for NDUFV1 (NM_007103.2,244-262).
cgaggtgactggtacaaga

SEQ ID NO: 222917 - DNA, 19 bp, Homo sapiens
  siRNA target sequence for NDUFV1 (NM_007103.2,444-462).
caaggaccgggagatctta

SEQ ID NO: 222918 - DNA, 19 bp, Homo sapiens
  siRNA target sequence for NDUFV1 (NM_007103.2,524-542).
gcgctgcctatatctacat

SEQ ID NO: 222919 - DNA, 19 bp, Homo sapiens
  siRNA target sequence for NDUFV1 (NM_007103.2,597-615).
ctatgaggcaggtctgatt

SEQ ID NO: 222920 - DNA, 19 bp, Homo sapiens
  siRNA target sequence for NDUFV1 (NM_007103.2,942-960).
gatgtctgtgcccttgaaa

SEQ ID NO: 222921 - DNA, 19 bp, Homo sapiens
  siRNA target sequence for NDUFV1 (NM_007103.2,1174-1192).
cgcctcattgagttctata

SEQ ID NO: 222922 - DNA, 19 bp, Homo sapiens
  siRNA target sequence for NDUFV1 (NM_007103.2,1311-1329).
gatcagcaagcagatagaa

SEQ ID NO: 222923 - DNA, 19 bp, Homo sapiens
  siRNA target sequence for NDUFV1 (NM_007103.2,1323-1341).
gatagaaggccatacgatt

SEQ ID NO: 222924 - DNA, 19 bp, Homo sapiens
  siRNA target sequence for NDUFV2 (NM_021074.1,203-221).
ggatagaggcaattgtaaa

SEQ ID NO: 222925 - DNA, 19 bp, Homo sapiens
  siRNA target sequence for NDUFV2 (NM_021074.1,225-243).
ctatccagaaggccataaa

SEQ ID NO: 222926 - DNA, 19 bp, Homo sapiens
  siRNA target sequence for NDUFV2 (NM_021074.1,312-330).
gaacaaggttgcagaagtt

SEQ ID NO: 222927 - DNA, 19 bp, Homo sapiens
  siRNA target sequence for NDUFV2 (NM_021074.1,315-333).
caaggttgcagaagtttta

SEQ ID NO: 222928 - DNA, 19 bp, Homo sapiens
  siRNA target sequence for NDUFV2 (NM_021074.1,341-359).
ctccaatgagagtatatga

SEQ ID NO: 222929 - DNA, 19 bp, Homo sapiens
  siRNA target sequence for NDUFV2 (NM_021074.1,344-362).
caatgagagtatatgaagt

SEQ ID NO: 222930 - DNA, 19 bp, Homo sapiens
  siRNA target sequence for NDUFV2 (NM_021074.1,394-412).
ccagttggaaagtatcaca

SEQ ID NO: 222931 - DNA, 19 bp, Homo sapiens
  siRNA target sequence for NDUFV2 (NM_021074.1,395-413).
cagttggaaagtatcacat

SEQ ID NO: 222932 - DNA, 19 bp, Homo sapiens
  siRNA target sequence for NDUFV2 (NM_021074.1,577-595).
caaataaatgacaattact

SEQ ID NO: 222933 - DNA, 19 bp, Homo sapiens
  siRNA target sequence for NDUFV2 (NM_021074.1,601-619).
gatttgacagctaaggata

SEQ ID NO: 222934 - DNA, 19 bp, Homo sapiens
  siRNA target sequence for P17.3 (NM_019056.2,369-387).
cggctgggctgtttggttt

SEQ ID NO: 222935 - DNA, 19 bp, Homo sapiens
  siRNA target sequence for P17.3 (NM_019056.2,440-458).
cgcgtccgctgggaatcta

SEQ ID NO: 222936 - DNA, 19 bp, Homo sapiens
  siRNA target sequence for P17.3 (NM_019056.2,545-563).
cccgaggacgaaaacttgt

SEQ ID NO: 222937 - DNA, 19 bp, Homo sapiens
  siRNA target sequence for P17.3 (NM_019056.2,546-564).
ccgaggacgaaaacttgta

SEQ ID NO: 222938 - DNA, 19 bp, Homo sapiens
  siRNA target sequence for P17.3 (NM_019056.2,547-565).
cgaggacgaaaacttgtat

SEQ ID NO: 222939 - DNA, 19 bp, Homo sapiens
  siRNA target sequence for P17.3 (NM_019056.2,551-569).
gacgaaaacttgtatgaga

SEQ ID NO: 222940 - DNA, 19 bp, Homo sapiens
  siRNA target sequence for NQO1 (NM_000903.1,127-145).
ctgcagcggctttgaagaa

SEQ ID NO: 222941 - DNA, 19 bp, Homo sapiens
  siRNA target sequence for NQO1 (NM_000903.1,129-147).
gcagcggctttgaagaaga

SEQ ID NO: 222942 - DNA, 19 bp, Homo sapiens
  siRNA target sequence for NQO1 (NM_000903.1,185-203).
gaacttcaatcccatcatt

SEQ ID NO: 222943 - DNA, 19 bp, Homo sapiens
  siRNA target sequence for NQO1 (NM_000903.1,234-252).
gaccctgcgaactttcagt

SEQ ID NO: 222944 - DNA, 19 bp, Homo sapiens
  siRNA target sequence for NQO1 (NM_000903.1,236-254).
ccctgcgaactttcagtat

SEQ ID NO: 222945 - DNA, 19 bp, Homo sapiens
  siRNA target sequence for NQO1 (NM_000903.1,261-279).
gagtctgttctggcttata

SEQ ID NO: 222946 - DNA, 19 bp, Homo sapiens
  siRNA target sequence for NQO1 (NM_000903.1,300-318).
gatattgtggctgaacaaa

SEQ ID NO: 222947 - DNA, 19 bp, Homo sapiens
  siRNA target sequence for NQO1 (NM_000903.1,330-348).
gccgcagaccttgtgatat

SEQ ID NO: 222948 - DNA, 19 bp, Homo sapiens
  siRNA target sequence for NQO1 (NM_000903.1,331-349).
ccgcagaccttgtgatatt

SEQ ID NO: 222949 - DNA, 19 bp, Homo sapiens
  siRNA target sequence for NQO1 (NM_000903.1,397-415).
ggtttgagcgagtgttcat

SEQ ID NO: 222950 - DNA, 19 bp, Homo sapiens
  siRNA target sequence for NQO1 (NM_000903.1,398-416).
gtttgagcgagtgttcata

SEQ ID NO: 222951 - DNA, 19 bp, Homo sapiens
  siRNA target sequence for NQO1 (NM_000903.1,417-435).
ggagagtttgcttacactt

SEQ ID NO: 222952 - DNA, 19 bp, Homo sapiens
  siRNA target sequence for NQO1 (NM_000903.1,418-436).
gagagtttgcttacactta

SEQ ID NO: 222953 - DNA, 19 bp, Homo sapiens
  siRNA target sequence for NQO1 (NM_000903.1,433-451).
cttacgctgccatgtatga

SEQ ID NO: 222954 - DNA, 19 bp, Homo sapiens
  siRNA target sequence for NQO1 (NM_000903.1,529-547).
ggatccacggggacatgaa

SEQ ID NO: 222955 - DNA, 19 bp, Homo sapiens
  siRNA target sequence for NQO1 (NM_000903.1,534-552).
cacggggacatgaatgtca

SEQ ID NO: 222956 - DNA, 19 bp, Homo sapiens
  siRNA target sequence for NQO1 (NM_000903.1,536-554).
cggggacatgaatgtcatt

SEQ ID NO: 222957 - DNA, 19 bp, Homo sapiens
  siRNA target sequence for NQO1 (NM_000903.1,538-556).
gggacatgaatgtcattct

SEQ ID NO: 222958 - DNA, 19 bp, Homo sapiens
  siRNA target sequence for NQO1 (NM_000903.1,609-627).
cctcaactgacatatagca

SEQ ID NO: 222959 - DNA, 19 bp, Homo sapiens
  siRNA target sequence for NQO1 (NM_000903.1,640-658).
cagcagacgcccgaattca

SEQ ID NO: 222960 - DNA, 19 bp, Homo sapiens
  siRNA target sequence for NQO1 (NM_000903.1,642-660).
gcagacgcccgaattcaaa

SEQ ID NO: 222961 - DNA, 19 bp, Homo sapiens
  siRNA target sequence for NQO1 (NM_000903.1,699-717).
gatgagacaccactgtatt

SEQ ID NO: 222962 - DNA, 19 bp, Homo sapiens
  siRNA target sequence for NQO1 (NM_000903.1,721-739).
ctccaagcagcctctttga

SEQ ID NO: 222963 - DNA, 19 bp, Homo sapiens
  siRNA target sequence for NQO1 (NM_000903.1,727-745).
gcagcctctttgacctaaa

SEQ ID NO: 222964 - DNA, 19 bp, Homo sapiens
  siRNA target sequence for NQO1 (NM_000903.1,730-748).
gcctctttgacctaaactt

SEQ ID NO: 222965 - DNA, 19 bp, Homo sapiens
  siRNA target sequence for NQO1 (NM_000903.1,844-862).
caactgacaaccagatcaa

SEQ ID NO: 222966 - DNA, 19 bp, Homo sapiens
  siRNA target sequence for NQO2 (NM_000904.1,183-201).
gtaagaaagtactcattgt

SEQ ID NO: 222967 - DNA, 19 bp, Homo sapiens
  siRNA target sequence for NQO2 (NM_000904.1,392-410).
cacgaagcctacaagcaaa

SEQ ID NO: 222968 - DNA, 19 bp, Homo sapiens
  siRNA target sequence for NQO2 (NM_000904.1,455-473).
gaggctgacctagtgatat

SEQ ID NO: 222969 - DNA, 19 bp, Homo sapiens
  siRNA target sequence for NQO2 (NM_000904.1,457-475).
ggctgacctagtgatattt

SEQ ID NO: 222970 - DNA, 19 bp, Homo sapiens
  siRNA target sequence for NQO2 (NM_000904.1,459-477).
ctgacctagtgatatttca

SEQ ID NO: 222971 - DNA, 19 bp, Homo sapiens
  siRNA target sequence for NQO2 (NM_000904.1,624-642).
gaggcacggccgagatgta

SEQ ID NO: 222972 - DNA, 19 bp, Homo sapiens
  siRNA target sequence for NQO2 (NM_000904.1,643-661).
cacgaagacaggagtcaat

SEQ ID NO: 222973 - DNA, 19 bp, Homo sapiens
  siRNA target sequence for CYB561 (NM_001915.2,455-473).
ggtgcgggatccttgtctt

SEQ ID NO: 222974 - DNA, 19 bp, Homo sapiens
  siRNA target sequence for CYB561 (NM_001915.2,456-474).
gtgcgggatccttgtcttt

SEQ ID NO: 222975 - DNA, 19 bp, Homo sapiens
  siRNA target sequence for CYB561 (NM_001915.2,458-476).
gcgggatccttgtctttgt

SEQ ID NO: 222976 - DNA, 19 bp, Homo sapiens
  siRNA target sequence for CYB561 (NM_001915.2,653-671).
gcaagtatagcgcatttga

SEQ ID NO: 222977 - DNA, 19 bp, Homo sapiens
  siRNA target sequence for CYB561 (NM_001915.2,727-745).
gcggtgctctacatcttga

SEQ ID NO: 222978 - DNA, 19 bp, Homo sapiens
  siRNA target sequence for CYB5R2 (NM_016229.1,290-308).
gcttcctgtaggtaactat

SEQ ID NO: 222979 - DNA, 19 bp, Homo sapiens
  siRNA target sequence for CYB5R2 (NM_016229.1,309-327).
gtccagctcttggcaaaaa

SEQ ID NO: 222980 - DNA, 19 bp, Homo sapiens
  siRNA target sequence for CYB5R2 (NM_016229.1,317-335).
cttggcaaaaatcgataat

SEQ ID NO: 222981 - DNA, 19 bp, Homo sapiens
  siRNA target sequence for CYB5R2 (NM_016229.1,321-339).
gcaaaaatcgataatgaat

SEQ ID NO: 222982 - DNA, 19 bp, Homo sapiens
  siRNA target sequence for CYB5R2 (NM_016229.1,359-377).
ccctgtctccagtgatgat

SEQ ID NO: 222983 - DNA, 19 bp, Homo sapiens
  siRNA target sequence for CYB5R2 (NM_016229.1,382-400).
gaggctttgtggacctaat

SEQ ID NO: 222984 - DNA, 19 bp, Homo sapiens
  siRNA target sequence for CYB5R2 (NM_016229.1,385-403).
gctttgtggacctaattat

SEQ ID NO: 222985 - DNA, 19 bp, Homo sapiens
  siRNA target sequence for CYB5R2 (NM_016229.1,386-404).
ctttgtggacctaattata

SEQ ID NO: 222986 - DNA, 19 bp, Homo sapiens
  siRNA target sequence for CYB5R2 (NM_016229.1,407-425).
gatctacttcaaaaatgta

SEQ ID NO: 222987 - DNA, 19 bp, Homo sapiens
  siRNA target sequence for CYB5R2 (NM_016229.1,447-465).
gggaagatgactcagtatt

SEQ ID NO: 222988 - DNA, 19 bp, Homo sapiens
  siRNA target sequence for CYB5R2 (NM_016229.1,482-500).
cggggagaccatctttttt

SEQ ID NO: 222989 - DNA, 19 bp, Homo sapiens
  siRNA target sequence for CYB5R2 (NM_016229.1,507-525).
ccaaggggacgcttgtttt

SEQ ID NO: 222990 - DNA, 19 bp, Homo sapiens
  siRNA target sequence for CYB5R2 (NM_016229.1,511-529).
ggggacgcttgttttacca

SEQ ID NO: 222991 - DNA, 19 bp, Homo sapiens
  siRNA target sequence for CYB5R2 (NM_016229.1,512-530).
gggacgcttgttttaccat

SEQ ID NO: 222992 - DNA, 19 bp, Homo sapiens
  siRNA target sequence for CYB5R2 (NM_016229.1,561-579).
cagacgagtgagcctaaaa

SEQ ID NO: 222993 - DNA, 19 bp, Homo sapiens
  siRNA target sequence for CYB5R2 (NM_016229.1,563-581).
gacgagtgagcctaaaaaa

SEQ ID NO: 222994 - DNA, 19 bp, Homo sapiens
  siRNA target sequence for CYB5R2 (NM_016229.1,568-586).
gtgagcctaaaaaaacact

SEQ ID NO: 222995 - DNA, 19 bp, Homo sapiens
  siRNA target sequence for CYB5R2 (NM_016229.1,590-608).
cgatcacctgggaatgatt

SEQ ID NO: 222996 - DNA, 19 bp, Homo sapiens
  siRNA target sequence for CYB5R2 (NM_016229.1,949-967).
gttatacccaggacatgat

SEQ ID NO: 222997 - DNA, 19 bp, Homo sapiens
  siRNA target sequence for DIA1 (NM_000398.3,278-296).
ctgtcggccagcacatcta

SEQ ID NO: 222998 - DNA, 19 bp, Homo sapiens
  siRNA target sequence for DIA1 (NM_000398.3,294-312).
ctacctctcggctcgaatt

SEQ ID NO: 222999 - DNA, 19 bp, Homo sapiens
  siRNA target sequence for DIA1 (NM_000398.3,297-315).
cctctcggctcgaattgat

SEQ ID NO: 223000 - DNA, 19 bp, Homo sapiens
  siRNA target sequence for DIA1 (NM_000398.3,302-320).
cggctcgaattgatggaaa

SEQ ID NO: 223001 - DNA, 19 bp, Homo sapiens
  siRNA target sequence for DIA1 (NM_000398.3,379-397).
ctggtcatcaaggtttact

SEQ ID NO: 223002 - DNA, 19 bp, Homo sapiens
  siRNA target sequence for DIA1 (NM_000398.3,528-546).
cgccatccgacctgacaaa

SEQ ID NO: 223003 - DNA, 19 bp, Homo sapiens
  siRNA target sequence for DIA1 (NM_000398.3,529-547).
gccatccgacctgacaaaa

SEQ ID NO: 223004 - DNA, 19 bp, Homo sapiens
  siRNA target sequence for DIA1 (NM_000398.3,530-548).
ccatccgacctgacaaaaa

SEQ ID NO: 223005 - DNA, 19 bp, Homo sapiens
  siRNA target sequence for DIA1 (NM_000398.3,727-745).
gaactcaggaacaaacatt

SEQ ID NO: 223006 - DNA, 19 bp, Homo sapiens
  siRNA target sequence for NCB5OR (NM_016230.2,210-228).
gattcgactgaccaaaagt

SEQ ID NO: 223007 - DNA, 19 bp, Homo sapiens
  siRNA target sequence for NCB5OR (NM_016230.2,244-262).
ggattaaaaggcaggttaa

SEQ ID NO: 223008 - DNA, 19 bp, Homo sapiens
  siRNA target sequence for NCB5OR (NM_016230.2,253-271).
ggcaggttaattgaagtaa

SEQ ID NO: 223009 - DNA, 19 bp, Homo sapiens
  siRNA target sequence for NCB5OR (NM_016230.2,255-273).
caggttaattgaagtaact

SEQ ID NO: 223010 - DNA, 19 bp, Homo sapiens
  siRNA target sequence for NCB5OR (NM_016230.2,307-325).
gattgttggatatgcataa

SEQ ID NO: 223011 - DNA, 19 bp, Homo sapiens
  siRNA target sequence for NCB5OR (NM_016230.2,321-339).
cataagaggtttcgtttat

SEQ ID NO: 223012 - DNA, 19 bp, Homo sapiens
  siRNA target sequence for NCB5OR (NM_016230.2,326-344).
gaggtttcgtttataatgt

SEQ ID NO: 223013 - DNA, 19 bp, Homo sapiens
  siRNA target sequence for NCB5OR (NM_016230.2,347-365).
gcccttatatggagtatca

SEQ ID NO: 223014 - DNA, 19 bp, Homo sapiens
  siRNA target sequence for NCB5OR (NM_016230.2,348-366).
cccttatatggagtatcat

SEQ ID NO: 223015 - DNA, 19 bp, Homo sapiens
  siRNA target sequence for NCB5OR (NM_016230.2,430-448).
gttcatcgttgggtcaatt

SEQ ID NO: 223016 - DNA, 19 bp, Homo sapiens
  siRNA target sequence for NCB5OR (NM_016230.2,436-454).
cgttgggtcaattatgaat

SEQ ID NO: 223017 - DNA, 19 bp, Homo sapiens
  siRNA target sequence for NCB5OR (NM_016230.2,560-578).
gccaagtgacagatacact

SEQ ID NO: 223018 - DNA, 19 bp, Homo sapiens
  siRNA target sequence for NCB5OR (NM_016230.2,581-599).
ccaaagaaggtcctagtta

SEQ ID NO: 223019 - DNA, 19 bp, Homo sapiens
  siRNA target sequence for NCB5OR (NM_016230.2,582-600).
caaagaaggtcctagttat

SEQ ID NO: 223020 - DNA, 19 bp, Homo sapiens
  siRNA target sequence for NCB5OR (NM_016230.2,586-604).
gaaggtcctagttatccaa

SEQ ID NO: 223021 - DNA, 19 bp, Homo sapiens
  siRNA target sequence for NCB5OR (NM_016230.2,615-633).
gttccaaacagactcttta

SEQ ID NO: 223022 - DNA, 19 bp, Homo sapiens
  siRNA target sequence for NCB5OR (NM_016230.2,639-657).
cattgccatatatactaaa

SEQ ID NO: 223023 - DNA, 19 bp, Homo sapiens
  siRNA target sequence for NCB5OR (NM_016230.2,643-661).
gccatatatactaaacaga

SEQ ID NO: 223024 - DNA, 19 bp, Homo sapiens
  siRNA target sequence for NCB5OR (NM_016230.2,653-671).
ctaaacagaaggatatcaa

SEQ ID NO: 223025 - DNA, 19 bp, Homo sapiens
  siRNA target sequence for NCB5OR (NM_016230.2,688-706).
gttgatcatcagaatgatt

SEQ ID NO: 223026 - DNA, 19 bp, Homo sapiens
  siRNA target sequence for NCB5OR (NM_016230.2,694-712).
catcagaatgattccttta

SEQ ID NO: 223027 - DNA, 19 bp, Homo sapiens
  siRNA target sequence for NCB5OR (NM_016230.2,713-731).
gagcagaaacaattattaa

SEQ ID NO: 223028 - DNA, 19 bp, Homo sapiens
  siRNA target sequence for NCB5OR (NM_016230.2,871-889).
cccctgaagaatcataatt

SEQ ID NO: 223029 - DNA, 19 bp, Homo sapiens
  siRNA target sequence for NCB5OR (NM_016230.2,873-891).
cctgaagaatcataattca

SEQ ID NO: 223030 - DNA, 19 bp, Homo sapiens
  siRNA target sequence for NCB5OR (NM_016230.2,892-910).
cttattccaaggaaagata

SEQ ID NO: 223031 - DNA, 19 bp, Homo sapiens
  siRNA target sequence for NCB5OR (NM_016230.2,913-931).
ggtttgtactacagaaagt

SEQ ID NO: 223032 - DNA, 19 bp, Homo sapiens
  siRNA target sequence for NCB5OR (NM_016230.2,961-979).
catgatacgaggcttttct

SEQ ID NO: 223033 - DNA, 19 bp, Homo sapiens
  siRNA target sequence for NCB5OR (NM_016230.2,995-1013).
caagcactcatcttcaagt

SEQ ID NO: 223034 - DNA, 19 bp, Homo sapiens
  siRNA target sequence for NCB5OR (NM_016230.2,1014-1032).
gcccattgggcaacatgtt

SEQ ID NO: 223035 - DNA, 19 bp, Homo sapiens
  siRNA target sequence for NCB5OR (NM_016230.2,1015-1033).
cccattgggcaacatgttt

SEQ ID NO: 223036 - DNA, 19 bp, Homo sapiens
  siRNA target sequence for NCB5OR (NM_016230.2,1016-1034).
ccattgggcaacatgttta

SEQ ID NO: 223037 - DNA, 19 bp, Homo sapiens
  siRNA target sequence for NCB5OR (NM_016230.2,1045-1063).
cctattacaggtacagaaa

SEQ ID NO: 223038 - DNA, 19 bp, Homo sapiens
  siRNA target sequence for NCB5OR (NM_016230.2,1107-1125).
gttcaaggaaccagttctt

SEQ ID NO: 223039 - DNA, 19 bp, Homo sapiens
  siRNA target sequence for NCB5OR (NM_016230.2,1117-1135).
ccagttcttcccaacaata

SEQ ID NO: 223040 - DNA, 19 bp, Homo sapiens
  siRNA target sequence for NCB5OR (NM_016230.2,1118-1136).
cagttcttcccaacaataa

SEQ ID NO: 223041 - DNA, 19 bp, Homo sapiens
  siRNA target sequence for NCB5OR (NM_016230.2,1188-1206).
gcttgatcgtcttcagatt

SEQ ID NO: 223042 - DNA, 19 bp, Homo sapiens
  siRNA target sequence for NCB5OR (NM_016230.2,1226-1244).
gcagtcctgagggcaattt

SEQ ID NO: 223043 - DNA, 19 bp, Homo sapiens
  siRNA target sequence for NCB5OR (NM_016230.2,1227-1245).
cagtcctgagggcaatttt

SEQ ID NO: 223044 - DNA, 19 bp, Homo sapiens
  siRNA target sequence for NCB5OR (NM_016230.2,1229-1247).
gtcctgagggcaattttaa

SEQ ID NO: 223045 - DNA, 19 bp, Homo sapiens
  siRNA target sequence for NCB5OR (NM_016230.2,1257-1275).
gttccaagaattagaagat

SEQ ID NO: 223046 - DNA, 19 bp, Homo sapiens
  siRNA target sequence for NCB5OR (NM_016230.2,1300-1318).
ggcttcacaccaatggtta

SEQ ID NO: 223047 - DNA, 19 bp, Homo sapiens
  siRNA target sequence for NCB5OR (NM_016230.2,1309-1327).
ccaatggttaaaatactga

SEQ ID NO: 223048 - DNA, 19 bp, Homo sapiens
  siRNA target sequence for NCB5OR (NM_016230.2,1310-1328).
caatggttaaaatactgaa

SEQ ID NO: 223049 - DNA, 19 bp, Homo sapiens
  siRNA target sequence for NCB5OR (NM_016230.2,1413-1431).
ccaattggagaaattagca

SEQ ID NO: 223050 - DNA, 19 bp, Homo sapiens
  siRNA target sequence for NNT (NM_012343.2,225-243).
ggcaaacctattgaaaaca

SEQ ID NO: 223051 - DNA, 19 bp, Homo sapiens
  siRNA target sequence for NNT (NM_012343.2,255-273).
ctgctcgtgtcctctactt

SEQ ID NO: 223052 - DNA, 19 bp, Homo sapiens
  siRNA target sequence for NNT (NM_012343.2,260-278).
cgtgtcctctacttagcaa

SEQ ID NO: 223053 - DNA, 19 bp, Homo sapiens
  siRNA target sequence for NNT (NM_012343.2,261-279).
gtgtcctctacttagcaat

SEQ ID NO: 223054 - DNA, 19 bp, Homo sapiens
  siRNA target sequence for NNT (NM_012343.2,263-281).
gtcctctacttagcaattt

SEQ ID NO: 223055 - DNA, 19 bp, Homo sapiens
  siRNA target sequence for NNT (NM_012343.2,312-330).
ggattttttacgaacattt

SEQ ID NO: 223056 - DNA, 19 bp, Homo sapiens
  siRNA target sequence for NNT (NM_012343.2,350-368).
ggtgtaaagcgcctgtaaa

SEQ ID NO: 223057 - DNA, 19 bp, Homo sapiens
  siRNA target sequence for NNT (NM_012343.2,351-369).
gtgtaaagcgcctgtaaaa

SEQ ID NO: 223058 - DNA, 19 bp, Homo sapiens
  siRNA target sequence for NNT (NM_012343.2,405-423).
ccccaaagagatattccaa

SEQ ID NO: 223059 - DNA, 19 bp, Homo sapiens
  siRNA target sequence for NNT (NM_012343.2,522-540).
gttctcagatgatcactat

SEQ ID NO: 223060 - DNA, 19 bp, Homo sapiens
  siRNA target sequence for NNT (NM_012343.2,525-543).
ctcagatgatcactataga

SEQ ID NO: 223061 - DNA, 19 bp, Homo sapiens
  siRNA target sequence for NNT (NM_012343.2,604-622).
gtgcgagcccctatggtta

SEQ ID NO: 223062 - DNA, 19 bp, Homo sapiens
  siRNA target sequence for NNT (NM_012343.2,606-624).
gcgagcccctatggttaat

SEQ ID NO: 223063 - DNA, 19 bp, Homo sapiens
  siRNA target sequence for NNT (NM_012343.2,610-628).
gcccctatggttaatccaa

SEQ ID NO: 223064 - DNA, 19 bp, Homo sapiens
  siRNA target sequence for NNT (NM_012343.2,614-632).
ctatggttaatccaacatt

SEQ ID NO: 223065 - DNA, 19 bp, Homo sapiens
  siRNA target sequence for NNT (NM_012343.2,618-636).
ggttaatccaacattaggt

SEQ ID NO: 223066 - DNA, 19 bp, Homo sapiens
  siRNA target sequence for NNT (NM_012343.2,665-683).
caggaacgctgattagttt

SEQ ID NO: 223067 - DNA, 19 bp, Homo sapiens
  siRNA target sequence for NNT (NM_012343.2,667-685).
ggaacgctgattagtttta

SEQ ID NO: 223068 - DNA, 19 bp, Homo sapiens
  siRNA target sequence for NNT (NM_012343.2,668-686).
gaacgctgattagttttat

SEQ ID NO: 223069 - DNA, 19 bp, Homo sapiens
  siRNA target sequence for NNT (NM_012343.2,759-777).
ggttccaagagtcacaatt

SEQ ID NO: 223070 - DNA, 19 bp, Homo sapiens
  siRNA target sequence for NNT (NM_012343.2,809-827).
ccaacattgcgggttataa

SEQ ID NO: 223071 - DNA, 19 bp, Homo sapiens
  siRNA target sequence for NNT (NM_012343.2,963-981).
gtcgatgggtgcaattgtt

SEQ ID NO: 223072 - DNA, 19 bp, Homo sapiens
  siRNA target sequence for NNT (NM_012343.2,974-992).
caattgttcgaggatttga

SEQ ID NO: 223073 - DNA, 19 bp, Homo sapiens
  siRNA target sequence for NNT (NM_012343.2,1079-1097).
gaggatatgcaaaagagat

SEQ ID NO: 223074 - DNA, 19 bp, Homo sapiens
  siRNA target sequence for NNT (NM_012343.2,1125-1143).
gaaactctttgctcaacaa

SEQ ID NO: 223075 - DNA, 19 bp, Homo sapiens
  siRNA target sequence for NNT (NM_012343.2,1150-1168).
gaggtagacatccttatca

SEQ ID NO: 223076 - DNA, 19 bp, Homo sapiens
  siRNA target sequence for NNT (NM_012343.2,1174-1192).
gcacttattccaggtaaaa

SEQ ID NO: 223077 - DNA, 19 bp, Homo sapiens
  siRNA target sequence for NNT (NM_012343.2,1292-1310).
ctaagccaggagaactcta

SEQ ID NO: 223078 - DNA, 19 bp, Homo sapiens
  siRNA target sequence for NNT (NM_012343.2,1298-1316).
caggagaactctacattca

SEQ ID NO: 223079 - DNA, 19 bp, Homo sapiens
  siRNA target sequence for NNT (NM_012343.2,1300-1318).
ggagaactctacattcata

SEQ ID NO: 223080 - DNA, 19 bp, Homo sapiens
  siRNA target sequence for NNT (NM_012343.2,1311-1329).
cattcataagggaattact

SEQ ID NO: 223081 - DNA, 19 bp, Homo sapiens
  siRNA target sequence for NNT (NM_012343.2,1369-1387).
caggccagcaccctatatt

SEQ ID NO: 223082 - DNA, 19 bp, Homo sapiens
  siRNA target sequence for NNT (NM_012343.2,1372-1390).
gccagcaccctatattcca

SEQ ID NO: 223083 - DNA, 19 bp, Homo sapiens
  siRNA target sequence for NNT (NM_012343.2,1373-1391).
ccagcaccctatattccaa

SEQ ID NO: 223084 - DNA, 19 bp, Homo sapiens
  siRNA target sequence for NNT (NM_012343.2,1379-1397).
ccctatattccaacaacat

SEQ ID NO: 223085 - DNA, 19 bp, Homo sapiens
  siRNA target sequence for NNT (NM_012343.2,1419-1437).
cagcccggacaaagataat

SEQ ID NO: 223086 - DNA, 19 bp, Homo sapiens
  siRNA target sequence for NNT (NM_012343.2,1424-1442).
cggacaaagataattttta

SEQ ID NO: 223087 - DNA, 19 bp, Homo sapiens
  siRNA target sequence for NNT (NM_012343.2,1472-1490).
gtacgatgggtcatgtcat

SEQ ID NO: 223088 - DNA, 19 bp, Homo sapiens
  siRNA target sequence for NNT (NM_012343.2,1476-1494).
gatgggtcatgtcattaga

SEQ ID NO: 223089 - DNA, 19 bp, Homo sapiens
  siRNA target sequence for NNT (NM_012343.2,1534-1552).
gctcccacaccgaaaaata

SEQ ID NO: 223090 - DNA, 19 bp, Homo sapiens
  siRNA target sequence for NNT (NM_012343.2,1535-1553).
ctcccacaccgaaaaatat

SEQ ID NO: 223091 - DNA, 19 bp, Homo sapiens
  siRNA target sequence for NNT (NM_012343.2,1556-1574).
ctcaaggtgccccagtaaa

SEQ ID NO: 223092 - DNA, 19 bp, Homo sapiens
  siRNA target sequence for NNT (NM_012343.2,1641-1659).
gtcaacggcttctgcatat

SEQ ID NO: 223093 - DNA, 19 bp, Homo sapiens
  siRNA target sequence for NNT (NM_012343.2,1703-1721).
ccaatctagccttttctca

SEQ ID NO: 223094 - DNA, 19 bp, Homo sapiens
  siRNA target sequence for NNT (NM_012343.2,1747-1765).
ggcattgtggggtatcata

SEQ ID NO: 223095 - DNA, 19 bp, Homo sapiens
  siRNA target sequence for NNT (NM_012343.2,1872-1890).
gtatccttccacaacttct

SEQ ID NO: 223096 - DNA, 19 bp, Homo sapiens
  siRNA target sequence for NNT (NM_012343.2,2031-2049).
cacctttgttggtggatat

SEQ ID NO: 223097 - DNA, 19 bp, Homo sapiens
  siRNA target sequence for NNT (NM_012343.2,2056-2074).
gccctctacagtggttata

SEQ ID NO: 223098 - DNA, 19 bp, Homo sapiens
  siRNA target sequence for NNT (NM_012343.2,2057-2075).
ccctctacagtggttataa

SEQ ID NO: 223099 - DNA, 19 bp, Homo sapiens
  siRNA target sequence for NNT (NM_012343.2,2205-2223).
caccctcggagtcctaaaa

SEQ ID NO: 223100 - DNA, 19 bp, Homo sapiens
  siRNA target sequence for NNT (NM_012343.2,2273-2291).
gtaccattggattgacaat

SEQ ID NO: 223101 - DNA, 19 bp, Homo sapiens
  siRNA target sequence for NNT (NM_012343.2,2293-2311).
gccaaacgcatccagattt

SEQ ID NO: 223102 - DNA, 19 bp, Homo sapiens
  siRNA target sequence for NNT (NM_012343.2,2295-2313).
caaacgcatccagatttct

SEQ ID NO: 223103 - DNA, 19 bp, Homo sapiens
  siRNA target sequence for NNT (NM_012343.2,2300-2318).
gcatccagatttctgattt

SEQ ID NO: 223104 - DNA, 19 bp, Homo sapiens
  siRNA target sequence for NNT (NM_012343.2,2352-2370).
gggtttggcagctgtactt

SEQ ID NO: 223105 - DNA, 19 bp, Homo sapiens
  siRNA target sequence for NNT (NM_012343.2,2353-2371).
ggtttggcagctgtactta

SEQ ID NO: 223106 - DNA, 19 bp, Homo sapiens
  siRNA target sequence for NNT (NM_012343.2,2372-2390).
cttgcatagctgagtacat

SEQ ID NO: 223107 - DNA, 19 bp, Homo sapiens
  siRNA target sequence for NNT (NM_012343.2,2375-2393).
gcatagctgagtacattat

SEQ ID NO: 223108 - DNA, 19 bp, Homo sapiens
  siRNA target sequence for NNT (NM_012343.2,2376-2394).
catagctgagtacattata

SEQ ID NO: 223109 - DNA, 19 bp, Homo sapiens
  siRNA target sequence for NNT (NM_012343.2,2385-2403).
gtacattatagaatatcca

SEQ ID NO: 223110 - DNA, 19 bp, Homo sapiens
  siRNA target sequence for NNT (NM_012343.2,2395-2413).
gaatatccacattttgcta

SEQ ID NO: 223111 - DNA, 19 bp, Homo sapiens
  siRNA target sequence for NNT (NM_012343.2,2426-2444).
caaatctcaccaagattgt

SEQ ID NO: 223112 - DNA, 19 bp, Homo sapiens
  siRNA target sequence for NNT (NM_012343.2,2446-2464).
gcctacctcggcacttaca

SEQ ID NO: 223113 - DNA, 19 bp, Homo sapiens
  siRNA target sequence for NNT (NM_012343.2,2447-2465).
cctacctcggcacttacat

SEQ ID NO: 223114 - DNA, 19 bp, Homo sapiens
  siRNA target sequence for NNT (NM_012343.2,2448-2466).
ctacctcggcacttacatt

SEQ ID NO: 223115 - DNA, 19 bp, Homo sapiens
  siRNA target sequence for NNT (NM_012343.2,2613-2631).
ggacccaagctttactact

SEQ ID NO: 223116 - DNA, 19 bp, Homo sapiens
  siRNA target sequence for NNT (NM_012343.2,2673-2691).
catgggtgtgactttgaca

SEQ ID NO: 223117 - DNA, 19 bp, Homo sapiens
  siRNA target sequence for NNT (NM_012343.2,2708-2726).
ctgacatgcccgtcgttat

SEQ ID NO: 223118 - DNA, 19 bp, Homo sapiens
  siRNA target sequence for NNT (NM_012343.2,2712-2730).
catgcccgtcgttatcact

SEQ ID NO: 223119 - DNA, 19 bp, Homo sapiens
  siRNA target sequence for NNT (NM_012343.2,2799-2817).
catcgtgggtgcactcata

SEQ ID NO: 223120 - DNA, 19 bp, Homo sapiens
  siRNA target sequence for NNT (NM_012343.2,2825-2843).
ctggtgctatcctgtcata

SEQ ID NO: 223121 - DNA, 19 bp, Homo sapiens
  siRNA target sequence for NNT (NM_012343.2,2827-2845).
ggtgctatcctgtcataca

SEQ ID NO: 223122 - DNA, 19 bp, Homo sapiens
  siRNA target sequence for NNT (NM_012343.2,2828-2846).
gtgctatcctgtcatacat

SEQ ID NO: 223123 - DNA, 19 bp, Homo sapiens
  siRNA target sequence for NNT (NM_012343.2,2830-2848).
gctatcctgtcatacatca

SEQ ID NO: 223124 - DNA, 19 bp, Homo sapiens
  siRNA target sequence for NNT (NM_012343.2,2932-2950).
gaaatttctggcacacata

SEQ ID NO: 223125 - DNA, 19 bp, Homo sapiens
  siRNA target sequence for NNT (NM_012343.2,2941-2959).
ggcacacatacggaaatca

SEQ ID NO: 223126 - DNA, 19 bp, Homo sapiens
  siRNA target sequence for NNT (NM_012343.2,2942-2960).
gcacacatacggaaatcaa

SEQ ID NO: 223127 - DNA, 19 bp, Homo sapiens
  siRNA target sequence for NNT (NM_012343.2,2951-2969).
cggaaatcaaccttgacaa

SEQ ID NO: 223128 - DNA, 19 bp, Homo sapiens
  siRNA target sequence for NNT (NM_012343.2,2952-2970).
ggaaatcaaccttgacaat

SEQ ID NO: 223129 - DNA, 19 bp, Homo sapiens
  siRNA target sequence for NNT (NM_012343.2,2958-2976).
caaccttgacaatgcaatt

SEQ ID NO: 223130 - DNA, 19 bp, Homo sapiens
  siRNA target sequence for NNT (NM_012343.2,2967-2985).
caatgcaattgacatgatt

SEQ ID NO: 223131 - DNA, 19 bp, Homo sapiens
  siRNA target sequence for NNT (NM_012343.2,2979-2997).
catgattcgagaagctaat

SEQ ID NO: 223132 - DNA, 19 bp, Homo sapiens
  siRNA target sequence for NNT (NM_012343.2,2986-3004).
cgagaagctaatagcatta

SEQ ID NO: 223133 - DNA, 19 bp, Homo sapiens
  siRNA target sequence for NNT (NM_012343.2,2987-3005).
gagaagctaatagcattat

SEQ ID NO: 223134 - DNA, 19 bp, Homo sapiens
  siRNA target sequence for NNT (NM_012343.2,3029-3047).
gtgcagccaaagctcaata

SEQ ID NO: 223135 - DNA, 19 bp, Homo sapiens
  siRNA target sequence for NNT (NM_012343.2,3048-3066).
ccccattgctgatttggta

SEQ ID NO: 223136 - DNA, 19 bp, Homo sapiens
  siRNA target sequence for NNT (NM_012343.2,3049-3067).
cccattgctgatttggtaa

SEQ ID NO: 223137 - DNA, 19 bp, Homo sapiens
  siRNA target sequence for NNT (NM_012343.2,3125-3143).
gaatgcctggtcagcttaa

SEQ ID NO: 223138 - DNA, 19 bp, Homo sapiens
  siRNA target sequence for NNT (NM_012343.2,3204-3222).
ccatgattttccagatact

SEQ ID NO: 223139 - DNA, 19 bp, Homo sapiens
  siRNA target sequence for NNT (NM_012343.2,3235-3253).
gtaattggagctaatgaca

SEQ ID NO: 223140 - DNA, 19 bp, Homo sapiens
  siRNA target sequence for NNT (NM_012343.2,3271-3289).
caagaagatcccaactcta

SEQ ID NO: 223141 - DNA, 19 bp, Homo sapiens
  siRNA target sequence for NNT (NM_012343.2,3331-3349).
caggtgattgttatgaaga

SEQ ID NO: 223142 - DNA, 19 bp, Homo sapiens
  siRNA target sequence for NNT (NM_012343.2,3370-3388).
gctgcagtggacaatccaa

SEQ ID NO: 223143 - DNA, 19 bp, Homo sapiens
  siRNA target sequence for NNT (NM_012343.2,3371-3389).
ctgcagtggacaatccaat

SEQ ID NO: 223144 - DNA, 19 bp, Homo sapiens
  siRNA target sequence for NNT (NM_012343.2,3374-3392).
cagtggacaatccaatctt

SEQ ID NO: 223145 - DNA, 19 bp, Homo sapiens
  siRNA target sequence for NNT (NM_012343.2,3444-3462).
cgcgctccaggcgaaagtt

SEQ ID NO: 223146 - DNA, 19 bp, Homo sapiens
  siRNA target sequence for NNT (NM_012343.2,3445-3463).
gcgctccaggcgaaagtta

SEQ ID NO: 223147 - DNA, 19 bp, Homo sapiens
  siRNA target sequence for NNT (NM_012343.2,3447-3465).
gctccaggcgaaagttaga

SEQ ID NO: 223148 - DNA, 19 bp, Homo sapiens
  siRNA target sequence for NNT (NM_012343.2,3450-3468).
ccaggcgaaagttagagaa

SEQ ID NO: 223149 - DNA, 19 bp, Homo sapiens
  siRNA target sequence for NNT (NM_012343.2,3451-3469).
caggcgaaagttagagaat

SEQ ID NO: 223150 - DNA, 19 bp, Homo sapiens
  siRNA target sequence for DHDH (NM_014475.2,395-413).
cccgagccctcttccttat

SEQ ID NO: 223151 - DNA, 19 bp, Homo sapiens
  siRNA target sequence for DHDH (NM_014475.2,398-416).
gagccctcttccttatgga

SEQ ID NO: 223152 - DNA, 19 bp, Homo sapiens
  siRNA target sequence for DHDH (NM_014475.2,420-438).
catctggacccgcttcttt

SEQ ID NO: 223153 - DNA, 19 bp, Homo sapiens
  siRNA target sequence for DHDH (NM_014475.2,494-512).
gggtggctcgggcagaatt

SEQ ID NO: 223154 - DNA, 19 bp, Homo sapiens
  siRNA target sequence for DHDH (NM_014475.2,574-592).
ctggacatcggcatctact

SEQ ID NO: 223155 - DNA, 19 bp, Homo sapiens
  siRNA target sequence for DHDH (NM_014475.2,648-666).
cgtgggaaggcgtcatgaa

SEQ ID NO: 223156 - DNA, 19 bp, Homo sapiens
  siRNA target sequence for DHDH (NM_014475.2,649-667).
gtgggaaggcgtcatgaaa

SEQ ID NO: 223157 - DNA, 19 bp, Homo sapiens
  siRNA target sequence for DHDH (NM_014475.2,894-912).
cggggcaggcatgagttat

SEQ ID NO: 223158 - DNA, 19 bp, Homo sapiens
  siRNA target sequence for DHDH (NM_014475.2,896-914).
gggcaggcatgagttatga

SEQ ID NO: 223159 - DNA, 19 bp, Homo sapiens
  siRNA target sequence for DHDH (NM_014475.2,935-953).
gcctacgcaagggtatgaa

SEQ ID NO: 223160 - DNA, 19 bp, Homo sapiens
  siRNA target sequence for DHDH (NM_014475.2,940-958).
cgcaagggtatgaaggaaa

SEQ ID NO: 223161 - DNA, 19 bp, Homo sapiens
  siRNA target sequence for POR (NM_000941.1,67-85).
gcggtggccgaagaagtat

SEQ ID NO: 223162 - DNA, 19 bp, Homo sapiens
  siRNA target sequence for POR (NM_000941.1,93-111).
cagcatgacggacatgatt

SEQ ID NO: 223163 - DNA, 19 bp, Homo sapiens
  siRNA target sequence for POR (NM_000941.1,175-193).
gtccccgagttcaccaaaa

SEQ ID NO: 223164 - DNA, 19 bp, Homo sapiens
  siRNA target sequence for POR (NM_000941.1,177-195).
ccccgagttcaccaaaatt

SEQ ID NO: 223165 - DNA, 19 bp, Homo sapiens
  siRNA target sequence for POR (NM_000941.1,257-275).
ggaacatcatcgtgttcta

SEQ ID NO: 223166 - DNA, 19 bp, Homo sapiens
  siRNA target sequence for POR (NM_000941.1,940-958).
gacatctcggactccaaaa

SEQ ID NO: 223167 - DNA, 19 bp, Homo sapiens
  siRNA target sequence for POR (NM_000941.1,951-969).
ctccaaaatcaggtatgaa

SEQ ID NO: 223168 - DNA, 19 bp, Homo sapiens
  siRNA target sequence for POR (NM_000941.1,1697-1715).
gggagacgctgctgtacta

SEQ ID NO: 223169 - DNA, 19 bp, Homo sapiens
  siRNA target sequence for POR (NM_000941.1,1991-2009).
cgcaggcggtggactacat

SEQ ID NO: 223170 - DNA, 19 bp, Homo sapiens
  siRNA target sequence for POR (NM_000941.1,1993-2011).
caggcggtggactacatca

SEQ ID NO: 223171 - DNA, 19 bp, Homo sapiens
  siRNA target sequence for POR (NM_000941.1,1996-2014).
gcggtggactacatcaaga

SEQ ID NO: 223172 - DNA, 19 bp, Homo sapiens
  siRNA target sequence for TXNRD2 (NM_006440.2,207-225).
ggcgctgcggggattagga

SEQ ID NO: 223173 - DNA, 19 bp, Homo sapiens
  siRNA target sequence for TXNRD2 (NM_006440.2,293-311).
caggtcagcgggactatga

SEQ ID NO: 223174 - DNA, 19 bp, Homo sapiens
  siRNA target sequence for TXNRD2 (NM_006440.2,296-314).
gtcagcgggactatgatct

SEQ ID NO: 223175 - DNA, 19 bp, Homo sapiens
  siRNA target sequence for TXNRD2 (NM_006440.2,510-528).
ccaagatgcccccaactat

SEQ ID NO: 223176 - DNA, 19 bp, Homo sapiens
  siRNA target sequence for TXNRD2 (NM_006440.2,783-801).
cgaaggtgccttggaatat

SEQ ID NO: 223177 - DNA, 19 bp, Homo sapiens
  siRNA target sequence for TXNRD2 (NM_006440.2,787-805).
ggtgccttggaatatggaa

SEQ ID NO: 223178 - DNA, 19 bp, Homo sapiens
  siRNA target sequence for TXNRD2 (NM_006440.2,803-821).
gaatcacaagtgatgacat

SEQ ID NO: 223179 - DNA, 19 bp, Homo sapiens
  siRNA target sequence for TXNRD2 (NM_006440.2,952-970).
ggcttcgaccagcaaatgt

SEQ ID NO: 223180 - DNA, 19 bp, Homo sapiens
  siRNA target sequence for TXNRD2 (NM_006440.2,1102-1120).
gacacgggcacctttgaca

SEQ ID NO: 223181 - DNA, 19 bp, Homo sapiens
  siRNA target sequence for TXNRD2 (NM_006440.2,1173-1191).
gaaggctggggtagatact

SEQ ID NO: 223182 - DNA, 19 bp, Homo sapiens
  siRNA target sequence for TXNRD2 (NM_006440.2,1356-1374).
gatggactacgacaatgtt

SEQ ID NO: 223183 - DNA, 19 bp, Homo sapiens
  siRNA target sequence for TXNRD2 (NM_006440.2,1465-1483).
gtctatcacgcccattata

SEQ ID NO: 223184 - DNA, 19 bp, Homo sapiens
  siRNA target sequence for TXNRD2 (NM_006440.2,1467-1485).
ctatcacgcccattataaa

SEQ ID NO: 223185 - DNA, 19 bp, Homo sapiens
  siRNA target sequence for TXNRD2 (NM_006440.2,1511-1529).
gagatgcatcccagtgtta

SEQ ID NO: 223186 - DNA, 19 bp, Homo sapiens
  siRNA target sequence for TXNRD2 (NM_006440.2,1591-1609).
cccaacgcaggcgaagtta

SEQ ID NO: 223187 - DNA, 19 bp, Homo sapiens
  siRNA target sequence for TXNRD2 (NM_006440.2,1593-1611).
caacgcaggcgaagttact

SEQ ID NO: 223188 - DNA, 19 bp, Homo sapiens
  siRNA target sequence for TXNRD2 (NM_006440.2,1596-1614).
cgcaggcgaagttactcaa

SEQ ID NO: 223189 - DNA, 19 bp, Homo sapiens
  siRNA target sequence for TXNRD2 (NM_006440.2,1688-1706).
gctctgaggaggtagtcaa

SEQ ID NO: 223190 - DNA, 19 bp, Homo sapiens
  siRNA target sequence for PRDX3 (NM_006793.2,556-574).
ctacggtgtgctgttagaa

SEQ ID NO: 223191 - DNA, 19 bp, Homo sapiens
  siRNA target sequence for PRDX3 (NM_006793.2,659-677).
ggccgaagcgtggaagaaa

SEQ ID NO: 223192 - DNA, 19 bp, Homo sapiens
  siRNA target sequence for PRDX3 (NM_006793.2,691-709).
gaaggcgttccagtatgta

SEQ ID NO: 223193 - DNA, 19 bp, Homo sapiens
  siRNA target sequence for PRDX3 (NM_006793.2,700-718).
ccagtatgtagaaacacat

SEQ ID NO: 223194 - DNA, 19 bp, Homo sapiens
  siRNA target sequence for PRDX3 (NM_006793.2,773-791).
ccagctgcttccaaagagt

SEQ ID NO: 223195 - DNA, 19 bp, Homo sapiens
  siRNA target sequence for PRDX3 (NM_006793.2,788-806).
gagtactttcagaaggtaa

SEQ ID NO: 223196 - DNA, 19 bp, Homo sapiens
  siRNA target sequence for PRDX3 (NM_006793.2,790-808).
gtactttcagaaggtaaat

SEQ ID NO: 223197 - DNA, 19 bp, Homo sapiens
  siRNA target sequence for PRDX3 (NM_014098.2,186-204).
ccagtcaagcaccctattt

SEQ ID NO: 223198 - DNA, 19 bp, Homo sapiens
  siRNA target sequence for PRDX3 (NM_014098.2,189-207).
gtcaagcaccctattttaa

SEQ ID NO: 223199 - DNA, 19 bp, Homo sapiens
  siRNA target sequence for GMPR (NM_006877.2,214-232).
cgcaccttcacgtttcgaa

SEQ ID NO: 223200 - DNA, 19 bp, Homo sapiens
  siRNA target sequence for GMPR (NM_006877.2,219-237).
cttcacgtttcgaaattca

SEQ ID NO: 223201 - DNA, 19 bp, Homo sapiens
  siRNA target sequence for GMPR (NM_006877.2,315-333).
gtcacagcactccatgttt

SEQ ID NO: 223202 - DNA, 19 bp, Homo sapiens
  siRNA target sequence for GMPR (NM_006877.2,337-355).
gcaattcataagcattact

SEQ ID NO: 223203 - DNA, 19 bp, Homo sapiens
  siRNA target sequence for GMPR (NM_006877.2,392-410).
cagaatgcctgcagaatgt

SEQ ID NO: 223204 - DNA, 19 bp, Homo sapiens
  siRNA target sequence for GMPR (NM_006877.2,474-492).
gccacaggttaagtttatt

SEQ ID NO: 223205 - DNA, 19 bp, Homo sapiens
  siRNA target sequence for GMPR (NM_006877.2,622-640).
ctttccggagcagatatca

SEQ ID NO: 223206 - DNA, 19 bp, Homo sapiens
  siRNA target sequence for GMPR (NM_006877.2,627-645).
cggagcagatatcatcaaa

SEQ ID NO: 223207 - DNA, 19 bp, Homo sapiens
  siRNA target sequence for GMPR (NM_006877.2,629-647).
gagcagatatcatcaaagt

SEQ ID NO: 223208 - DNA, 19 bp, Homo sapiens
  siRNA target sequence for GMPR (NM_006877.2,709-727).
ctgagtgccgtcattgagt

SEQ ID NO: 223209 - DNA, 19 bp, Homo sapiens
  siRNA target sequence for GMPR2 (NM_016576.2,415-433).
gaggtggatctcacaagat

SEQ ID NO: 223210 - DNA, 19 bp, Homo sapiens
  siRNA target sequence for GMPR2 (NM_016576.2,420-438).
ggatctcacaagatccttt

SEQ ID NO: 223211 - DNA, 19 bp, Homo sapiens
  siRNA target sequence for GMPR2 (NM_016576.2,421-439).
gatctcacaagatcctttt

SEQ ID NO: 223212 - DNA, 19 bp, Homo sapiens
  siRNA target sequence for GMPR2 (NM_016576.2,450-468).
ctcaaagcagacatactct

SEQ ID NO: 223213 - DNA, 19 bp, Homo sapiens
  siRNA target sequence for GMPR2 (NM_016576.2,480-498).
cattgctgccaatatggat

SEQ ID NO: 223214 - DNA, 19 bp, Homo sapiens
  siRNA target sequence for GMPR2 (NM_016576.2,686-704).
ctattccccaggtgaagta

SEQ ID NO: 223215 - DNA, 19 bp, Homo sapiens
  siRNA target sequence for GMPR2 (NM_016576.2,691-709).
ccccaggtgaagtatatat

SEQ ID NO: 223216 - DNA, 19 bp, Homo sapiens
  siRNA target sequence for GMPR2 (NM_016576.2,885-903).
gtgtactactcggaagaaa

SEQ ID NO: 223217 - DNA, 19 bp, Homo sapiens
  siRNA target sequence for GMPR2 (NM_016576.2,1340-1358).
cccagcaggtgaatccaat

SEQ ID NO: 223218 - DNA, 19 bp, Homo sapiens
  siRNA target sequence for GMPR2 (NM_016576.2,1345-1363).
caggtgaatccaatcttca

SEQ ID NO: 223219 - DNA, 19 bp, Homo sapiens
  siRNA target sequence for NOX1 (NM_007052.3,306-324).
gagaaggccgacaaatact

SEQ ID NO: 223220 - DNA, 19 bp, Homo sapiens
  siRNA target sequence for NOX1 (NM_007052.3,315-333).
gacaaatactactacacaa

SEQ ID NO: 223221 - DNA, 19 bp, Homo sapiens
  siRNA target sequence for NOX1 (NM_007052.3,463-481).
gcagccgcacactgagaaa

SEQ ID NO: 223222 - DNA, 19 bp, Homo sapiens
  siRNA target sequence for NOX1 (NM_007052.3,467-485).
ccgcacactgagaaagcaa

SEQ ID NO: 223223 - DNA, 19 bp, Homo sapiens
  siRNA target sequence for NOX1 (NM_007052.3,468-486).
cgcacactgagaaagcaat

SEQ ID NO: 223224 - DNA, 19 bp, Homo sapiens
  siRNA target sequence for NOX1 (NM_007052.3,513-531).
ctggtggcctatatgatct

SEQ ID NO: 223225 - DNA, 19 bp, Homo sapiens
  siRNA target sequence for NOX1 (NM_007052.3,530-548).
ctgcctacatacagctatt

SEQ ID NO: 223226 - DNA, 19 bp, Homo sapiens
  siRNA target sequence for NOX1 (NM_007052.3,532-550).
gcctacatacagctattca

SEQ ID NO: 223227 - DNA, 19 bp, Homo sapiens
  siRNA target sequence for NOX1 (NM_007052.3,629-647).
ctccagcctatctcatgat

SEQ ID NO: 223228 - DNA, 19 bp, Homo sapiens
  siRNA target sequence for NOX1 (NM_007052.3,634-652).
gcctatctcatgatgagaa

SEQ ID NO: 223229 - DNA, 19 bp, Homo sapiens
  siRNA target sequence for NOX1 (NM_007052.3,635-653).
cctatctcatgatgagaaa

SEQ ID NO: 223230 - DNA, 19 bp, Homo sapiens
  siRNA target sequence for NOX1 (NM_007052.3,656-674).
ggggggttcttggctaaat

SEQ ID NO: 223231 - DNA, 19 bp, Homo sapiens
  siRNA target sequence for NOX1 (NM_007052.3,699-717).
gtggagtatgtgacattca

SEQ ID NO: 223232 - DNA, 19 bp, Homo sapiens
  siRNA target sequence for NOX1 (NM_007052.3,730-748).
gtctcactggagtgatcat

SEQ ID NO: 223233 - DNA, 19 bp, Homo sapiens
  siRNA target sequence for NOX1 (NM_007052.3,751-769).
caatagccttgattctcat

SEQ ID NO: 223234 - DNA, 19 bp, Homo sapiens
  siRNA target sequence for NOX1 (NM_007052.3,756-774).
gccttgattctcatggtaa

SEQ ID NO: 223235 - DNA, 19 bp, Homo sapiens
  siRNA target sequence for NOX1 (NM_007052.3,788-806).
gttcatccggaggagttat

SEQ ID NO: 223236 - DNA, 19 bp, Homo sapiens
  siRNA target sequence for NOX1 (NM_007052.3,794-812).
ccggaggagttattttgaa

SEQ ID NO: 223237 - DNA, 19 bp, Homo sapiens
  siRNA target sequence for NOX1 (NM_007052.3,799-817).
ggagttattttgaagtctt

SEQ ID NO: 223238 - DNA, 19 bp, Homo sapiens
  siRNA target sequence for NOX1 (NM_007052.3,820-838).
ggtatactcaccacctttt

SEQ ID NO: 223239 - DNA, 19 bp, Homo sapiens
  siRNA target sequence for NOX1 (NM_007052.3,821-839).
gtatactcaccaccttttt

SEQ ID NO: 223240 - DNA, 19 bp, Homo sapiens
  siRNA target sequence for NOX1 (NM_007052.3,928-946).
gcaagtgtgcagagtcttt

SEQ ID NO: 223241 - DNA, 19 bp, Homo sapiens
  siRNA target sequence for NOX1 (NM_007052.3,1025-1043).
ccttgcaccggtcattctt

SEQ ID NO: 223242 - DNA, 19 bp, Homo sapiens
  siRNA target sequence for NOX1 (NM_007052.3,1026-1044).
cttgcaccggtcattcttt

SEQ ID NO: 223243 - DNA, 19 bp, Homo sapiens
  siRNA target sequence for NOX1 (NM_007052.3,1029-1047).
gcaccggtcattctttata

SEQ ID NO: 223244 - DNA, 19 bp, Homo sapiens
  siRNA target sequence for NOX1 (NM_007052.3,1030-1048).
caccggtcattctttatat

SEQ ID NO: 223245 - DNA, 19 bp, Homo sapiens
  siRNA target sequence for NOX1 (NM_007052.3,1092-1110).
gtgattaccaaggttgtta

SEQ ID NO: 223246 - DNA, 19 bp, Homo sapiens
  siRNA target sequence for NOX1 (NM_007052.3,1169-1187).
ggggcagtatatctttgtt

SEQ ID NO: 223247 - DNA, 19 bp, Homo sapiens
  siRNA target sequence for NOX1 (NM_007052.3,1170-1188).
gggcagtatatctttgtta

SEQ ID NO: 223248 - DNA, 19 bp, Homo sapiens
  siRNA target sequence for NOX1 (NM_007052.3,1237-1255).
ctgctccagaggaagattt

SEQ ID NO: 223249 - DNA, 19 bp, Homo sapiens
  siRNA target sequence for NOX1 (NM_007052.3,1307-1325).
ggctttcgaacaacaatat

SEQ ID NO: 223250 - DNA, 19 bp, Homo sapiens
  siRNA target sequence for NOX1 (NM_007052.3,1308-1326).
gctttcgaacaacaatatt

SEQ ID NO: 223251 - DNA, 19 bp, Homo sapiens
  siRNA target sequence for NOX1 (NM_007052.3,1369-1387).
ccagtgaggatgttttcca

SEQ ID NO: 223252 - DNA, 19 bp, Homo sapiens
  siRNA target sequence for NOX1 (NM_007052.3,1438-1456).
cttctatcttgaaatccat

SEQ ID NO: 223253 - DNA, 19 bp, Homo sapiens
  siRNA target sequence for NOX1 (NM_007052.3,1479-1497).
gaccacaacctcaaaacaa

SEQ ID NO: 223254 - DNA, 19 bp, Homo sapiens
  siRNA target sequence for NOX1 (NM_007052.3,1536-1554).
gccttttcctggttcaaca

SEQ ID NO: 223255 - DNA, 19 bp, Homo sapiens
  siRNA target sequence for NOX1 (NM_007052.3,1537-1555).
ccttttcctggttcaacaa

SEQ ID NO: 223256 - DNA, 19 bp, Homo sapiens
  siRNA target sequence for NOX1 (NM_007052.3,1593-1611).
ggcaaagtgggttttctaa

SEQ ID NO: 223257 - DNA, 19 bp, Homo sapiens
  siRNA target sequence for NOX1 (NM_007052.3,1594-1612).
gcaaagtgggttttctaaa

SEQ ID NO: 223258 - DNA, 19 bp, Homo sapiens
  siRNA target sequence for NOX1 (NM_007052.3,1630-1648).
ccggatgggacagcaatat

SEQ ID NO: 223259 - DNA, 19 bp, Homo sapiens
  siRNA target sequence for NOX1 (NM_007052.3,1653-1671).
ggtcatgcagcattaaact

SEQ ID NO: 223260 - DNA, 19 bp, Homo sapiens
  siRNA target sequence for NOX1 (NM_007052.3,1654-1672).
gtcatgcagcattaaactt

SEQ ID NO: 223261 - DNA, 19 bp, Homo sapiens
  siRNA target sequence for NOX1 (NM_007052.3,1688-1706).
catcgtgacaggtctgaaa

SEQ ID NO: 223262 - DNA, 19 bp, Homo sapiens
  siRNA target sequence for NOX1 (NM_007052.3,1737-1755).
gacaatgagttttctacaa

SEQ ID NO: 223263 - DNA, 19 bp, Homo sapiens
  siRNA target sequence for NOX1 (NM_007052.3,1857-1875).
gatcctagaaaggttcaat

SEQ ID NO: 223264 - DNA, 19 bp, Homo sapiens
  siRNA target sequence for NOX1 (NM_007052.3,1860-1878).
cctagaaaggttcaattct

SEQ ID NO: 223265 - DNA, 19 bp, Homo sapiens
  siRNA target sequence for NOX1 (NM_007052.3,1861-1879).
ctagaaaggttcaattcta

SEQ ID NO: 223266 - DNA, 19 bp, Homo sapiens
  siRNA target sequence for NOX1 (NM_007052.3,1864-1882).
gaaaggttcaattctactt

SEQ ID NO: 223267 - DNA, 19 bp, Homo sapiens
  siRNA target sequence for NOX1 (NM_007052.3,1869-1887).
gttcaattctacttcaaca

SEQ ID NO: 223268 - DNA, 19 bp, Homo sapiens
  siRNA target sequence for NOX1 (NM_013954.1,539-557).
cccatccatccccatataa

SEQ ID NO: 223269 - DNA, 19 bp, Homo sapiens
  siRNA target sequence for NOX1 (NM_013954.1,579-597).
ctgtcacttttgatatggt

SEQ ID NO: 223270 - DNA, 19 bp, Homo sapiens
  siRNA target sequence for NOX1 (NM_013954.1,603-621).
ccagtgtgaacagcaattt

SEQ ID NO: 223271 - DNA, 19 bp, Homo sapiens
  siRNA target sequence for NOX1 (NM_013954.1,604-622).
cagtgtgaacagcaattta

SEQ ID NO: 223272 - DNA, 19 bp, Homo sapiens
  siRNA target sequence for AASS (NM_005763.2,255-273).
gggatacaaggtcttgata

SEQ ID NO: 223273 - DNA, 19 bp, Homo sapiens
  siRNA target sequence for AASS (NM_005763.2,267-285).
cttgatacagccttcgaat

SEQ ID NO: 223274 - DNA, 19 bp, Homo sapiens
  siRNA target sequence for AASS (NM_005763.2,326-344).
gcattcttcaggaggatat

SEQ ID NO: 223275 - DNA, 19 bp, Homo sapiens
  siRNA target sequence for AASS (NM_005763.2,458-476).
gcttgttggatgagattct

SEQ ID NO: 223276 - DNA, 19 bp, Homo sapiens
  siRNA target sequence for AASS (NM_005763.2,484-502).
gaaattcgccttattgatt

SEQ ID NO: 223277 - DNA, 19 bp, Homo sapiens
  siRNA target sequence for AASS (NM_005763.2,490-508).
cgccttattgattatgaga

SEQ ID NO: 223278 - DNA, 19 bp, Homo sapiens
  siRNA target sequence for AASS (NM_005763.2,491-509).
gccttattgattatgagaa

SEQ ID NO: 223279 - DNA, 19 bp, Homo sapiens
  siRNA target sequence for AASS (NM_005763.2,564-582).
ggcaggaatgatcaacatt

SEQ ID NO: 223280 - DNA, 19 bp, Homo sapiens
  siRNA target sequence for AASS (NM_005763.2,565-583).
gcaggaatgatcaacattt

SEQ ID NO: 223281 - DNA, 19 bp, Homo sapiens
  siRNA target sequence for AASS (NM_005763.2,566-584).
caggaatgatcaacatttt

SEQ ID NO: 223282 - DNA, 19 bp, Homo sapiens
  siRNA target sequence for AASS (NM_005763.2,569-587).
gaatgatcaacattttaca

SEQ ID NO: 223283 - DNA, 19 bp, Homo sapiens
  siRNA target sequence for AASS (NM_005763.2,596-614).
gtttaaggctccttgcttt

SEQ ID NO: 223284 - DNA, 19 bp, Homo sapiens
  siRNA target sequence for AASS (NM_005763.2,616-634).
ggacatcacacacctttta

SEQ ID NO: 223285 - DNA, 19 bp, Homo sapiens
  siRNA target sequence for AASS (NM_005763.2,617-635).
gacatcacacaccttttat

SEQ ID NO: 223286 - DNA, 19 bp, Homo sapiens
  siRNA target sequence for AASS (NM_005763.2,643-661).
ggcatggctcataactaca

SEQ ID NO: 223287 - DNA, 19 bp, Homo sapiens
  siRNA target sequence for AASS (NM_005763.2,649-667).
gctcataactacaggaata

SEQ ID NO: 223288 - DNA, 19 bp, Homo sapiens
  siRNA target sequence for AASS (NM_005763.2,652-670).
cataactacaggaatagca

SEQ ID NO: 223289 - DNA, 19 bp, Homo sapiens
  siRNA target sequence for AASS (NM_005763.2,690-708).
ccgtgatgctggctatgaa

SEQ ID NO: 223290 - DNA, 19 bp, Homo sapiens
  siRNA target sequence for AASS (NM_005763.2,691-709).
cgtgatgctggctatgaaa

SEQ ID NO: 223291 - DNA, 19 bp, Homo sapiens
  siRNA target sequence for AASS (NM_005763.2,692-710).
gtgatgctggctatgaaat

SEQ ID NO: 223292 - DNA, 19 bp, Homo sapiens
  siRNA target sequence for AASS (NM_005763.2,694-712).
gatgctggctatgaaatat

SEQ ID NO: 223293 - DNA, 19 bp, Homo sapiens
  siRNA target sequence for AASS (NM_005763.2,698-716).
ctggctatgaaatatcttt

SEQ ID NO: 223294 - DNA, 19 bp, Homo sapiens
  siRNA target sequence for AASS (NM_005763.2,717-735).
gggtttgatgcctaagtca

SEQ ID NO: 223295 - DNA, 19 bp, Homo sapiens
  siRNA target sequence for AASS (NM_005763.2,719-737).
gtttgatgcctaagtcaat

SEQ ID NO: 223296 - DNA, 19 bp, Homo sapiens
  siRNA target sequence for AASS (NM_005763.2,723-741).
gatgcctaagtcaatagga

SEQ ID NO: 223297 - DNA, 19 bp, Homo sapiens
  siRNA target sequence for AASS (NM_005763.2,732-750).
gtcaataggacccttaaca

SEQ ID NO: 223298 - DNA, 19 bp, Homo sapiens
  siRNA target sequence for AASS (NM_005763.2,756-774).
gttcacaggaactggtaat

SEQ ID NO: 223299 - DNA, 19 bp, Homo sapiens
  siRNA target sequence for AASS (NM_005763.2,784-802).
ggagcccaagcaatcttta

SEQ ID NO: 223300 - DNA, 19 bp, Homo sapiens
  siRNA target sequence for AASS (NM_005763.2,823-841).
gtggagccccatgaattaa

SEQ ID NO: 223301 - DNA, 19 bp, Homo sapiens
  siRNA target sequence for AASS (NM_005763.2,859-877).
ggagacctcagaaaagtgt

SEQ ID NO: 223302 - DNA, 19 bp, Homo sapiens
  siRNA target sequence for AASS (NM_005763.2,874-892).
gtgtatgggacggtgttaa

SEQ ID NO: 223303 - DNA, 19 bp, Homo sapiens
  siRNA target sequence for AASS (NM_005763.2,876-894).
gtatgggacggtgttaagt

SEQ ID NO: 223304 - DNA, 19 bp, Homo sapiens
  siRNA target sequence for AASS (NM_005763.2,885-903).
ggtgttaagtcgtcatcat

SEQ ID NO: 223305 - DNA, 19 bp, Homo sapiens
  siRNA target sequence for AASS (NM_005763.2,888-906).
gttaagtcgtcatcatcat

SEQ ID NO: 223306 - DNA, 19 bp, Homo sapiens
  siRNA target sequence for AASS (NM_005763.2,955-973).
catccggagcgctacataa

SEQ ID NO: 223307 - DNA, 19 bp, Homo sapiens
  siRNA target sequence for AASS (NM_005763.2,963-981).
gcgctacataagtcgtttt

SEQ ID NO: 223308 - DNA, 19 bp, Homo sapiens
  siRNA target sequence for AASS (NM_005763.2,964-982).
cgctacataagtcgtttta

SEQ ID NO: 223309 - DNA, 19 bp, Homo sapiens
  siRNA target sequence for AASS (NM_005763.2,965-983).
gctacataagtcgttttaa

SEQ ID NO: 223310 - DNA, 19 bp, Homo sapiens
  siRNA target sequence for AASS (NM_005763.2,966-984).
ctacataagtcgttttaat

SEQ ID NO: 223311 - DNA, 19 bp, Homo sapiens
  siRNA target sequence for AASS (NM_005763.2,969-987).
cataagtcgttttaatact

SEQ ID NO: 223312 - DNA, 19 bp, Homo sapiens
  siRNA target sequence for AASS (NM_005763.2,974-992).
gtcgttttaatactgatat

SEQ ID NO: 223313 - DNA, 19 bp, Homo sapiens
  siRNA target sequence for AASS (NM_005763.2,1122-1140).
ccctgcattaccacacaaa

SEQ ID NO: 223314 - DNA, 19 bp, Homo sapiens
  siRNA target sequence for AASS (NM_005763.2,1137-1155).
caaactcgtggcaatatgt

SEQ ID NO: 223315 - DNA, 19 bp, Homo sapiens
  siRNA target sequence for AASS (NM_005763.2,1143-1161).
cgtggcaatatgtgacatt

SEQ ID NO: 223316 - DNA, 19 bp, Homo sapiens
  siRNA target sequence for AASS (NM_005763.2,1144-1162).
gtggcaatatgtgacattt

SEQ ID NO: 223317 - DNA, 19 bp, Homo sapiens
  siRNA target sequence for AASS (NM_005763.2,1179-1197).
gtctatagagtttatgact

SEQ ID NO: 223318 - DNA, 19 bp, Homo sapiens
  siRNA target sequence for AASS (NM_005763.2,1215-1233).
gcatcccttttgcatgtat

SEQ ID NO: 223319 - DNA, 19 bp, Homo sapiens
  siRNA target sequence for AASS (NM_005763.2,1234-1252).
gatgcagaccagcatatta

SEQ ID NO: 223320 - DNA, 19 bp, Homo sapiens
  siRNA target sequence for AASS (NM_005763.2,1307-1325).
cggcacagctcccaattga

SEQ ID NO: 223321 - DNA, 19 bp, Homo sapiens
  siRNA target sequence for AASS (NM_005763.2,1317-1335).
cccaattgaagctacagaa

SEQ ID NO: 223322 - DNA, 19 bp, Homo sapiens
  siRNA target sequence for AASS (NM_005763.2,1318-1336).
ccaattgaagctacagaat

SEQ ID NO: 223323 - DNA, 19 bp, Homo sapiens
  siRNA target sequence for AASS (NM_005763.2,1386-1404).
cgcgacacagcctcttgaa

SEQ ID NO: 223324 - DNA, 19 bp, Homo sapiens
  siRNA target sequence for AASS (NM_005763.2,1387-1405).
gcgacacagcctcttgaaa

SEQ ID NO: 223325 - DNA, 19 bp, Homo sapiens
  siRNA target sequence for AASS (NM_005763.2,1389-1407).
gacacagcctcttgaaagt

SEQ ID NO: 223326 - DNA, 19 bp, Homo sapiens
  siRNA target sequence for AASS (NM_005763.2,1395-1413).
gcctcttgaaagtcagaat

SEQ ID NO: 223327 - DNA, 19 bp, Homo sapiens
  siRNA target sequence for AASS (NM_005763.2,1396-1414).
cctcttgaaagtcagaatt

SEQ ID NO: 223328 - DNA, 19 bp, Homo sapiens
  siRNA target sequence for AASS (NM_005763.2,1397-1415).
ctcttgaaagtcagaattt

SEQ ID NO: 223329 - DNA, 19 bp, Homo sapiens
  siRNA target sequence for AASS (NM_005763.2,1425-1443).
ggtgagagatgcagtgatt

SEQ ID NO: 223330 - DNA, 19 bp, Homo sapiens
  siRNA target sequence for AASS (NM_005763.2,1452-1470).
cggtacattacctgataaa

SEQ ID NO: 223331 - DNA, 19 bp, Homo sapiens
  siRNA target sequence for AASS (NM_005763.2,1453-1471).
ggtacattacctgataaat

SEQ ID NO: 223332 - DNA, 19 bp, Homo sapiens
  siRNA target sequence for AASS (NM_005763.2,1504-1522).
gaacgtgctcagtcacttt

SEQ ID NO: 223333 - DNA, 19 bp, Homo sapiens
  siRNA target sequence for AASS (NM_005763.2,1507-1525).
cgtgctcagtcactttcaa

SEQ ID NO: 223334 - DNA, 19 bp, Homo sapiens
  siRNA target sequence for AASS (NM_005763.2,1508-1526).
gtgctcagtcactttcaat

SEQ ID NO: 223335 - DNA, 19 bp, Homo sapiens
  siRNA target sequence for AASS (NM_005763.2,1556-1574).
gatctggctacatatctga

SEQ ID NO: 223336 - DNA, 19 bp, Homo sapiens
  siRNA target sequence for AASS (NM_005763.2,1579-1597).
gtattagaatatttatcaa

SEQ ID NO: 223337 - DNA, 19 bp, Homo sapiens
  siRNA target sequence for AASS (NM_005763.2,1621-1639).
gtaggatctgacatgaaga

SEQ ID NO: 223338 - DNA, 19 bp, Homo sapiens
  siRNA target sequence for AASS (NM_005763.2,1678-1696).
cctgttagcatggacattt

SEQ ID NO: 223339 - DNA, 19 bp, Homo sapiens
  siRNA target sequence for AASS (NM_005763.2,1681-1699).
gttagcatggacatttgta

SEQ ID NO: 223340 - DNA, 19 bp, Homo sapiens
  siRNA target sequence for AASS (NM_005763.2,1749-1767).
cagcttgttgccttatgta

SEQ ID NO: 223341 - DNA, 19 bp, Homo sapiens
  siRNA target sequence for AASS (NM_005763.2,1783-1801).
gccaaggcctgcatcacaa

SEQ ID NO: 223342 - DNA, 19 bp, Homo sapiens
  siRNA target sequence for AASS (NM_005763.2,1788-1806).
ggcctgcatcacaaacaaa

SEQ ID NO: 223343 - DNA, 19 bp, Homo sapiens
  siRNA target sequence for AASS (NM_005763.2,1790-1808).
cctgcatcacaaacaaagt

SEQ ID NO: 223344 - DNA, 19 bp, Homo sapiens
  siRNA target sequence for AASS (NM_005763.2,1816-1834).
gtcactgcaagctacatca

SEQ ID NO: 223345 - DNA, 19 bp, Homo sapiens
  siRNA target sequence for AASS (NM_005763.2,1910-1928).
ctggtctggatcacatgtt

SEQ ID NO: 223346 - DNA, 19 bp, Homo sapiens
  siRNA target sequence for AASS (NM_005763.2,1915-1933).
ctggatcacatgttagcaa

SEQ ID NO: 223347 - DNA, 19 bp, Homo sapiens
  siRNA target sequence for AASS (NM_005763.2,1960-1978).
gtgggagccacgattgaat

SEQ ID NO: 223348 - DNA, 19 bp, Homo sapiens
  siRNA target sequence for AASS (NM_005763.2,1964-1982).
gagccacgattgaatcata

SEQ ID NO: 223349 - DNA, 19 bp, Homo sapiens
  siRNA target sequence for AASS (NM_005763.2,1966-1984).
gccacgattgaatcatata

SEQ ID NO: 223350 - DNA, 19 bp, Homo sapiens
  siRNA target sequence for AASS (NM_005763.2,1967-1985).
ccacgattgaatcatatat

SEQ ID NO: 223351 - DNA, 19 bp, Homo sapiens
  siRNA target sequence for AASS (NM_005763.2,1968-1986).
cacgattgaatcatatatt

SEQ ID NO: 223352 - DNA, 19 bp, Homo sapiens
  siRNA target sequence for AASS (NM_005763.2,2008-2026).
gcccctgaacattcaaaca

SEQ ID NO: 223353 - DNA, 19 bp, Homo sapiens
  siRNA target sequence for AASS (NM_005763.2,2009-2027).
cccctgaacattcaaacaa

SEQ ID NO: 223354 - DNA, 19 bp, Homo sapiens
  siRNA target sequence for AASS (NM_005763.2,2025-2043).
caatccattgagatataaa

SEQ ID NO: 223355 - DNA, 19 bp, Homo sapiens
  siRNA target sequence for AASS (NM_005763.2,2062-2080).
ggagttttgatgaatgtaa

SEQ ID NO: 223356 - DNA, 19 bp, Homo sapiens
  siRNA target sequence for AASS (NM_005763.2,2093-2111).
cctatctgctcgatggaaa

SEQ ID NO: 223357 - DNA, 19 bp, Homo sapiens
  siRNA target sequence for AASS (NM_005763.2,2103-2121).
cgatggaaaggttgtgaat

SEQ ID NO: 223358 - DNA, 19 bp, Homo sapiens
  siRNA target sequence for AASS (NM_005763.2,2129-2147).
gaggcatctcctttcttga

SEQ ID NO: 223359 - DNA, 19 bp, Homo sapiens
  siRNA target sequence for AASS (NM_005763.2,2149-2167).
gccgttacgtccatggatt

SEQ ID NO: 223360 - DNA, 19 bp, Homo sapiens
  siRNA target sequence for AASS (NM_005763.2,2150-2168).
ccgttacgtccatggattt

SEQ ID NO: 223361 - DNA, 19 bp, Homo sapiens
  siRNA target sequence for AASS (NM_005763.2,2151-2169).
cgttacgtccatggatttt

SEQ ID NO: 223362 - DNA, 19 bp, Homo sapiens
  siRNA target sequence for AASS (NM_005763.2,2152-2170).
gttacgtccatggattttt

SEQ ID NO: 223363 - DNA, 19 bp, Homo sapiens
  siRNA target sequence for AASS (NM_005763.2,2163-2181).
ggatttttttccaggatta

SEQ ID NO: 223364 - DNA, 19 bp, Homo sapiens
  siRNA target sequence for AASS (NM_005763.2,2213-2231).
cgaaatatgctgagattta

SEQ ID NO: 223365 - DNA, 19 bp, Homo sapiens
  siRNA target sequence for AASS (NM_005763.2,2273-2291).
gatataagggatatatgaa

SEQ ID NO: 223366 - DNA, 19 bp, Homo sapiens
  siRNA target sequence for AASS (NM_005763.2,2293-2311).
gctttgaatggatttgtaa

SEQ ID NO: 223367 - DNA, 19 bp, Homo sapiens
  siRNA target sequence for AASS (NM_005763.2,2414-2432).
cctctgagcatgatgtgtt

SEQ ID NO: 223368 - DNA, 19 bp, Homo sapiens
  siRNA target sequence for AASS (NM_005763.2,2417-2435).
ctgagcatgatgtgttgaa

SEQ ID NO: 223369 - DNA, 19 bp, Homo sapiens
  siRNA target sequence for AASS (NM_005763.2,2576-2594).
cctatggtcctgaagaaaa

SEQ ID NO: 223370 - DNA, 19 bp, Homo sapiens
  siRNA target sequence for AASS (NM_005763.2,2639-2657).
ctggacatttagaacataa

SEQ ID NO: 223371 - DNA, 19 bp, Homo sapiens
  siRNA target sequence for AASS (NM_005763.2,2799-2817).
ggagatctatggaccaata

SEQ ID NO: 223372 - DNA, 19 bp, Homo sapiens
  siRNA target sequence for AASS (NM_005763.2,2800-2818).
gagatctatggaccaatat

SEQ ID NO: 223373 - DNA, 19 bp, Homo sapiens
  siRNA target sequence for AASS (NM_005763.2,2812-2830).
ccaatattggagcgaatta

SEQ ID NO: 223374 - DNA, 19 bp, Homo sapiens
  siRNA target sequence for CAT (NM_001752.1,168-186).
ccagtaggagacaaactta

SEQ ID NO: 223375 - DNA, 19 bp, Homo sapiens
  siRNA target sequence for CAT (NM_001752.1,177-195).
gacaaacttaatgttatta

SEQ ID NO: 223376 - DNA, 19 bp, Homo sapiens
  siRNA target sequence for CAT (NM_001752.1,179-197).
caaacttaatgttattaca

SEQ ID NO: 223377 - DNA, 19 bp, Homo sapiens
  siRNA target sequence for CAT (NM_001752.1,241-259).
ctgatgaaatggctcattt

SEQ ID NO: 223378 - DNA, 19 bp, Homo sapiens
  siRNA target sequence for CAT (NM_001752.1,281-299).
gagagttgtgcatgctaaa

SEQ ID NO: 223379 - DNA, 19 bp, Homo sapiens
  siRNA target sequence for CAT (NM_001752.1,350-368).
ctccaaggcaaaggtattt

SEQ ID NO: 223380 - DNA, 19 bp, Homo sapiens
  siRNA target sequence for CAT (NM_001752.1,362-380).
ggtatttgagcatattgga

SEQ ID NO: 223381 - DNA, 19 bp, Homo sapiens
  siRNA target sequence for CAT (NM_001752.1,470-488).
gaaattttacacagaagat

SEQ ID NO: 223382 - DNA, 19 bp, Homo sapiens
  siRNA target sequence for CAT (NM_001752.1,498-516).
gatctcgttggaaataaca

SEQ ID NO: 223383 - DNA, 19 bp, Homo sapiens
  siRNA target sequence for CAT (NM_001752.1,693-711).
catcgccacatgaatggat

SEQ ID NO: 223384 - DNA, 19 bp, Homo sapiens
  siRNA target sequence for CAT (NM_001752.1,698-716).
ccacatgaatggatatgga

SEQ ID NO: 223385 - DNA, 19 bp, Homo sapiens
  siRNA target sequence for CAT (NM_001752.1,699-717).
cacatgaatggatatggat

SEQ ID NO: 223386 - DNA, 19 bp, Homo sapiens
  siRNA target sequence for CAT (NM_001752.1,728-746).
caagctggttaatgcaaat

SEQ ID NO: 223387 - DNA, 19 bp, Homo sapiens
  siRNA target sequence for CAT (NM_001752.1,747-765).
ggggaggcagtttattgca

SEQ ID NO: 223388 - DNA, 19 bp, Homo sapiens
  siRNA target sequence for CAT (NM_001752.1,748-766).
gggaggcagtttattgcaa

SEQ ID NO: 223389 - DNA, 19 bp, Homo sapiens
  siRNA target sequence for CAT (NM_001752.1,749-767).
ggaggcagtttattgcaaa

SEQ ID NO: 223390 - DNA, 19 bp, Homo sapiens
  siRNA target sequence for CAT (NM_001752.1,750-768).
gaggcagtttattgcaaat

SEQ ID NO: 223391 - DNA, 19 bp, Homo sapiens
  siRNA target sequence for CAT (NM_001752.1,764-782).
caaattccattataagact

SEQ ID NO: 223392 - DNA, 19 bp, Homo sapiens
  siRNA target sequence for CAT (NM_001752.1,779-797).
gactgaccagggcatcaaa

SEQ ID NO: 223393 - DNA, 19 bp, Homo sapiens
  siRNA target sequence for CAT (NM_001752.1,794-812).
caaaaacctttctgttgaa

SEQ ID NO: 223394 - DNA, 19 bp, Homo sapiens
  siRNA target sequence for CAT (NM_001752.1,830-848).
ccaggaagatcctgactat

SEQ ID NO: 223395 - DNA, 19 bp, Homo sapiens
  siRNA target sequence for CAT (NM_001752.1,887-905).
gtacccctcctggactttt

SEQ ID NO: 223396 - DNA, 19 bp, Homo sapiens
  siRNA target sequence for CAT (NM_001752.1,892-910).
cctcctggactttttacat

SEQ ID NO: 223397 - DNA, 19 bp, Homo sapiens
  siRNA target sequence for CAT (NM_001752.1,908-926).
catccaggtcatgacattt

SEQ ID NO: 223398 - DNA, 19 bp, Homo sapiens
  siRNA target sequence for CAT (NM_001752.1,911-929).
ccaggtcatgacatttaat

SEQ ID NO: 223399 - DNA, 19 bp, Homo sapiens
  siRNA target sequence for CAT (NM_001752.1,1005-1023).
gttggtaaactggtcttaa

SEQ ID NO: 223400 - DNA, 19 bp, Homo sapiens
  siRNA target sequence for CAT (NM_001752.1,1026-1044).
cggaatccagttaattact

SEQ ID NO: 223401 - DNA, 19 bp, Homo sapiens
  siRNA target sequence for CAT (NM_001752.1,1102-1120).
ccagtcctgacaaaatgct

SEQ ID NO: 223402 - DNA, 19 bp, Homo sapiens
  siRNA target sequence for CAT (NM_001752.1,1162-1180).
gcctgggacccaattatct

SEQ ID NO: 223403 - DNA, 19 bp, Homo sapiens
  siRNA target sequence for CAT (NM_001752.1,1163-1181).
cctgggacccaattatctt

SEQ ID NO: 223404 - DNA, 19 bp, Homo sapiens
  siRNA target sequence for CAT (NM_001752.1,1166-1184).
gggacccaattatcttcat

SEQ ID NO: 223405 - DNA, 19 bp, Homo sapiens
  siRNA target sequence for CAT (NM_001752.1,1167-1185).
ggacccaattatcttcata

SEQ ID NO: 223406 - DNA, 19 bp, Homo sapiens
  siRNA target sequence for CAT (NM_001752.1,1260-1278).
cagggtggtgctccaaatt

SEQ ID NO: 223407 - DNA, 19 bp, Homo sapiens
  siRNA target sequence for CAT (NM_001752.1,1263-1281).
ggtggtgctccaaattact

SEQ ID NO: 223408 - DNA, 19 bp, Homo sapiens
  siRNA target sequence for CAT (NM_001752.1,1264-1282).
gtggtgctccaaattacta

SEQ ID NO: 223409 - DNA, 19 bp, Homo sapiens
  siRNA target sequence for CAT (NM_001752.1,1323-1341).
ctggagcacagcatccaat

SEQ ID NO: 223410 - DNA, 19 bp, Homo sapiens
  siRNA target sequence for CAT (NM_001752.1,1325-1343).
ggagcacagcatccaatat

SEQ ID NO: 223411 - DNA, 19 bp, Homo sapiens
  siRNA target sequence for CAT (NM_001752.1,1328-1346).
gcacagcatccaatattct

SEQ ID NO: 223412 - DNA, 19 bp, Homo sapiens
  siRNA target sequence for CAT (NM_001752.1,1348-1366).
gagaagtgcggagattcaa

SEQ ID NO: 223413 - DNA, 19 bp, Homo sapiens
  siRNA target sequence for CAT (NM_001752.1,1350-1368).
gaagtgcggagattcaaca

SEQ ID NO: 223414 - DNA, 19 bp, Homo sapiens
  siRNA target sequence for CAT (NM_001752.1,1371-1389).
gccaatgatgataacgtta

SEQ ID NO: 223415 - DNA, 19 bp, Homo sapiens
  siRNA target sequence for CAT (NM_001752.1,1390-1408).
ctcaggtgcgggcattcta

SEQ ID NO: 223416 - DNA, 19 bp, Homo sapiens
  siRNA target sequence for CAT (NM_001752.1,1581-1599).
cctaagaatgcgattcaca

SEQ ID NO: 223417 - DNA, 19 bp, Homo sapiens
  siRNA target sequence for EPX (NM_000502.1,138-156).
ggtggatgctgcctacaat

SEQ ID NO: 223418 - DNA, 19 bp, Homo sapiens
  siRNA target sequence for EPX (NM_000502.1,139-157).
gtggatgctgcctacaatt

SEQ ID NO: 223419 - DNA, 19 bp, Homo sapiens
  siRNA target sequence for EPX (NM_000502.1,294-312).
gctgcttgaagagaagtta

SEQ ID NO: 223420 - DNA, 19 bp, Homo sapiens
  siRNA target sequence for EPX (NM_000502.1,321-339).
gcggtccggacccttcaat

SEQ ID NO: 223421 - DNA, 19 bp, Homo sapiens
  siRNA target sequence for EPX (NM_000502.1,323-341).
ggtccggacccttcaatgt

SEQ ID NO: 223422 - DNA, 19 bp, Homo sapiens
  siRNA target sequence for EPX (NM_000502.1,446-464).
ctggacggtgcaacaacaa

SEQ ID NO: 223423 - DNA, 19 bp, Homo sapiens
  siRNA target sequence for EPX (NM_000502.1,448-466).
ggacggtgcaacaacaaga

SEQ ID NO: 223424 - DNA, 19 bp, Homo sapiens
  siRNA target sequence for EPX (NM_000502.1,655-673).
ggccgagccctcatgttca

SEQ ID NO: 223425 - DNA, 19 bp, Homo sapiens
  siRNA target sequence for EPX (NM_000502.1,865-883).
ccctcatgcccccaaaaca

SEQ ID NO: 223426 - DNA, 19 bp, Homo sapiens
  siRNA target sequence for EPX (NM_000502.1,890-908).
gagtccgcaaccagatcaa

SEQ ID NO: 223427 - DNA, 19 bp, Homo sapiens
  siRNA target sequence for EPX (NM_000502.1,1284-1302).
catcacctaccgagacttt

SEQ ID NO: 223428 - DNA, 19 bp, Homo sapiens
  siRNA target sequence for EPX (NM_000502.1,1378-1396).
ccacgggtggccaatgtct

SEQ ID NO: 223429 - DNA, 19 bp, Homo sapiens
  siRNA target sequence for EPX (NM_000502.1,1379-1397).
cacgggtggccaatgtctt

SEQ ID NO: 223430 - DNA, 19 bp, Homo sapiens
  siRNA target sequence for EPX (NM_000502.1,1517-1535).
gctggcggatcgtgtatga

SEQ ID NO: 223431 - DNA, 19 bp, Homo sapiens
  siRNA target sequence for EPX (NM_000502.1,1518-1536).
ctggcggatcgtgtatgaa

SEQ ID NO: 223432 - DNA, 19 bp, Homo sapiens
  siRNA target sequence for EPX (NM_000502.1,1590-1608).
ccgtcaggatgccatgtta

SEQ ID NO: 223433 - DNA, 19 bp, Homo sapiens
  siRNA target sequence for EPX (NM_000502.1,1702-1720).
cttccagggtacaatgctt

SEQ ID NO: 223434 - DNA, 19 bp, Homo sapiens
  siRNA target sequence for EPX (NM_000502.1,1765-1783).
cttagccgggtgctgaaaa

SEQ ID NO: 223435 - DNA, 19 bp, Homo sapiens
  siRNA target sequence for EPX (NM_000502.1,1955-1973).
ggcagaaacgaggtgtttt

SEQ ID NO: 223436 - DNA, 19 bp, Homo sapiens
  siRNA target sequence for EPX (NM_000502.1,1957-1975).
cagaaacgaggtgttttca

SEQ ID NO: 223437 - DNA, 19 bp, Homo sapiens
  siRNA target sequence for EPX (NM_000502.1,2010-2028).
cttgtctcgaattatatgt

SEQ ID NO: 223438 - DNA, 19 bp, Homo sapiens
  siRNA target sequence for EPX (NM_000502.1,2038-2056).
ggtatcaccacggtttcaa

SEQ ID NO: 223439 - DNA, 19 bp, Homo sapiens
  siRNA target sequence for EPX (NM_000502.1,2048-2066).
cggtttcaagggacatctt

SEQ ID NO: 223440 - DNA, 19 bp, Homo sapiens
  siRNA target sequence for EPX (NM_000502.1,2050-2068).
gtttcaagggacatcttca

SEQ ID NO: 223441 - DNA, 19 bp, Homo sapiens
  siRNA target sequence for FLJ20473 (NM_017836.2,123-141).
ccctgtagcctcagaagat

SEQ ID NO: 223442 - DNA, 19 bp, Homo sapiens
  siRNA target sequence for FLJ20473 (NM_017836.2,280-298).
ggcatgcttctggactatt

SEQ ID NO: 223443 - DNA, 19 bp, Homo sapiens
  siRNA target sequence for FLJ20473 (NM_017836.2,410-428).
ctgccaacactggacaaat

SEQ ID NO: 223444 - DNA, 19 bp, Homo sapiens
  siRNA target sequence for FLJ20473 (NM_017836.2,629-647).
gggtgctgatggtctgtat

SEQ ID NO: 223445 - DNA, 19 bp, Homo sapiens
  siRNA target sequence for FLJ20473 (NM_017836.2,630-648).
ggtgctgatggtctgtata

SEQ ID NO: 223446 - DNA, 19 bp, Homo sapiens
  siRNA target sequence for FLJ20473 (NM_017836.2,634-652).
ctgatggtctgtatagtga

SEQ ID NO: 223447 - DNA, 19 bp, Homo sapiens
  siRNA target sequence for FLJ20473 (NM_017836.2,748-766).
gttagcagcttcttctaca

SEQ ID NO: 223448 - DNA, 19 bp, Homo sapiens
  siRNA target sequence for FLJ20473 (NM_017836.2,759-777).
cttctacagacacaaagat

SEQ ID NO: 223449 - DNA, 19 bp, Homo sapiens
  siRNA target sequence for FLJ20473 (NM_017836.2,854-872).
gcccacccatcgtgaagat

SEQ ID NO: 223450 - DNA, 19 bp, Homo sapiens
  siRNA target sequence for FLJ20473 (NM_017836.2,941-959).
gcaaaaccgtttctaaaca

SEQ ID NO: 223451 - DNA, 19 bp, Homo sapiens
  siRNA target sequence for FLJ20473 (NM_017836.2,966-984).
caaaggcatggcgatattt

SEQ ID NO: 223452 - DNA, 19 bp, Homo sapiens
  siRNA target sequence for FLJ20473 (NM_017836.2,1080-1098).
gcccctccagatgaagaaa

SEQ ID NO: 223453 - DNA, 19 bp, Homo sapiens
  siRNA target sequence for FLJ20473 (NM_017836.2,1105-1123).
cccaacccgtgttctactt

SEQ ID NO: 223454 - DNA, 19 bp, Homo sapiens
  siRNA target sequence for FLJ20473 (NM_017836.2,1106-1124).
ccaacccgtgttctacttt

SEQ ID NO: 223455 - DNA, 19 bp, Homo sapiens
  siRNA target sequence for FLJ20473 (NM_017836.2,1121-1139).
ctttctgcacgtcagaaat

SEQ ID NO: 223456 - DNA, 19 bp, Homo sapiens
  siRNA target sequence for FLJ20473 (NM_017836.2,1125-1143).
ctgcacgtcagaaatcaat

SEQ ID NO: 223457 - DNA, 19 bp, Homo sapiens
  siRNA target sequence for FLJ20473 (NM_017836.2,1177-1195).
gtcccaggccatctgattt

SEQ ID NO: 223458 - DNA, 19 bp, Homo sapiens
  siRNA target sequence for FLJ20473 (NM_017836.2,1218-1236).
ggagggtcagtcagtcata

SEQ ID NO: 223459 - DNA, 19 bp, Homo sapiens
  siRNA target sequence for FLJ20473 (NM_017836.2,1222-1240).
ggtcagtcagtcataaaca

SEQ ID NO: 223460 - DNA, 19 bp, Homo sapiens
  siRNA target sequence for FLJ20473 (NM_017836.2,1274-1292).
gcctgatccaggtgacaat

SEQ ID NO: 223461 - DNA, 19 bp, Homo sapiens
  siRNA target sequence for FLJ20473 (NM_017836.2,1357-1375).
cactgcatcccctacctta

SEQ ID NO: 223462 - DNA, 19 bp, Homo sapiens
  siRNA target sequence for FLJ25471 (NM_144651.1,438-456).
cgtgaatgcaggcatcatt

SEQ ID NO: 223463 - DNA, 19 bp, Homo sapiens
  siRNA target sequence for FLJ25471 (NM_144651.1,439-457).
gtgaatgcaggcatcatta

SEQ ID NO: 223464 - DNA, 19 bp, Homo sapiens
  siRNA target sequence for FLJ25471 (NM_144651.1,445-463).
gcaggcatcattaactctt

SEQ ID NO: 223465 - DNA, 19 bp, Homo sapiens
  siRNA target sequence for FLJ25471 (NM_144651.1,482-500).
gatttggccacacattaat

SEQ ID NO: 223466 - DNA, 19 bp, Homo sapiens
  siRNA target sequence for FLJ25471 (NM_144651.1,490-508).
cacacattaatcaatccta

SEQ ID NO: 223467 - DNA, 19 bp, Homo sapiens
  siRNA target sequence for FLJ25471 (NM_144651.1,526-544).
gccaccttaggtgaaattt

SEQ ID NO: 223468 - DNA, 19 bp, Homo sapiens
  siRNA target sequence for FLJ25471 (NM_144651.1,550-568).
ggccaccttccgttccata

SEQ ID NO: 223469 - DNA, 19 bp, Homo sapiens
  siRNA target sequence for FLJ25471 (NM_144651.1,564-582).
ccataaagcgctcttttca

SEQ ID NO: 223470 - DNA, 19 bp, Homo sapiens
  siRNA target sequence for FLJ25471 (NM_144651.1,581-599).
caccgtccagaataatcaa

SEQ ID NO: 223471 - DNA, 19 bp, Homo sapiens
  siRNA target sequence for FLJ25471 (NM_144651.1,633-651).
gtttggcgtggctgctaaa

SEQ ID NO: 223472 - DNA, 19 bp, Homo sapiens
  siRNA target sequence for FLJ25471 (NM_144651.1,800-818).
gtaatttgacttcagttaa

SEQ ID NO: 223473 - DNA, 19 bp, Homo sapiens
  siRNA target sequence for FLJ25471 (NM_144651.1,819-837).
gaactttgaggatcttcaa

SEQ ID NO: 223474 - DNA, 19 bp, Homo sapiens
  siRNA target sequence for FLJ25471 (NM_144651.1,826-844).
gaggatcttcaaaatgaaa

SEQ ID NO: 223475 - DNA, 19 bp, Homo sapiens
  siRNA target sequence for FLJ25471 (NM_144651.1,854-872).
cagagattagacaaaaact

SEQ ID NO: 223476 - DNA, 19 bp, Homo sapiens
  siRNA target sequence for FLJ25471 (NM_144651.1,865-883).
caaaaactgagaaagttgt

SEQ ID NO: 223477 - DNA, 19 bp, Homo sapiens
  siRNA target sequence for FLJ25471 (NM_144651.1,950-968).
gagtgggaccaacacttat

SEQ ID NO: 223478 - DNA, 19 bp, Homo sapiens
  siRNA target sequence for FLJ25471 (NM_144651.1,987-1005).
gtttcagcggctaagagat

SEQ ID NO: 223479 - DNA, 19 bp, Homo sapiens
  siRNA target sequence for FLJ25471 (NM_144651.1,1083-1101).
ccgggtgctttgtgacaat

SEQ ID NO: 223480 - DNA, 19 bp, Homo sapiens
  siRNA target sequence for FLJ25471 (NM_144651.1,1123-1141).
caggctgatgtctttgtaa

SEQ ID NO: 223481 - DNA, 19 bp, Homo sapiens
  siRNA target sequence for FLJ25471 (NM_144651.1,1145-1163).
cagaatacccacaggatta

SEQ ID NO: 223482 - DNA, 19 bp, Homo sapiens
  siRNA target sequence for FLJ25471 (NM_144651.1,1252-1270).
gtgacgcaagagtctcaaa

SEQ ID NO: 223483 - DNA, 19 bp, Homo sapiens
  siRNA target sequence for FLJ25471 (NM_144651.1,1292-1310).
gctatcctgttgataagga

SEQ ID NO: 223484 - DNA, 19 bp, Homo sapiens
  siRNA target sequence for FLJ25471 (NM_144651.1,1293-1311).
ctatcctgttgataaggat

SEQ ID NO: 223485 - DNA, 19 bp, Homo sapiens
  siRNA target sequence for FLJ25471 (NM_144651.1,1308-1326).
ggatatggagttaagtcat

SEQ ID NO: 223486 - DNA, 19 bp, Homo sapiens
  siRNA target sequence for FLJ25471 (NM_144651.1,1419-1437).
cacgtttgcagcggaaatt

SEQ ID NO: 223487 - DNA, 19 bp, Homo sapiens
  siRNA target sequence for FLJ25471 (NM_144651.1,1421-1439).
cgtttgcagcggaaattca

SEQ ID NO: 223488 - DNA, 19 bp, Homo sapiens
  siRNA target sequence for FLJ25471 (NM_144651.1,1430-1448).
cggaaattcaggaaaccat

SEQ ID NO: 223489 - DNA, 19 bp, Homo sapiens
  siRNA target sequence for FLJ25471 (NM_144651.1,1494-1512).
gcaggcagggtgtacagat

SEQ ID NO: 223490 - DNA, 19 bp, Homo sapiens
  siRNA target sequence for FLJ25471 (NM_144651.1,1536-1554).
cgaggagcgctggatgaaa

SEQ ID NO: 223491 - DNA, 19 bp, Homo sapiens
  siRNA target sequence for GPR156 (NM_153002.1,140-158).
ctgtcctcttgggtattgt

SEQ ID NO: 223492 - DNA, 19 bp, Homo sapiens
  siRNA target sequence for GPR156 (NM_153002.1,176-194).
gtggacttctgctgatact

SEQ ID NO: 223493 - DNA, 19 bp, Homo sapiens
  siRNA target sequence for GPR156 (NM_153002.1,280-298).
ggcagttgtctcacttaca

SEQ ID NO: 223494 - DNA, 19 bp, Homo sapiens
  siRNA target sequence for GPR156 (NM_153002.1,282-300).
cagttgtctcacttacagt

SEQ ID NO: 223495 - DNA, 19 bp, Homo sapiens
  siRNA target sequence for GPR156 (NM_153002.1,338-356).
ggagctcaatggaaactct

SEQ ID NO: 223496 - DNA, 19 bp, Homo sapiens
  siRNA target sequence for GPR156 (NM_153002.1,430-448).
cgactctacaaggtgttta

SEQ ID NO: 223497 - DNA, 19 bp, Homo sapiens
  siRNA target sequence for GPR156 (NM_153002.1,459-477).
cccggacaagagagtgatt

SEQ ID NO: 223498 - DNA, 19 bp, Homo sapiens
  siRNA target sequence for GPR156 (NM_153002.1,460-478).
ccggacaagagagtgatta

SEQ ID NO: 223499 - DNA, 19 bp, Homo sapiens
  siRNA target sequence for GPR156 (NM_153002.1,461-479).
cggacaagagagtgattat

SEQ ID NO: 223500 - DNA, 19 bp, Homo sapiens
  siRNA target sequence for GPR156 (NM_153002.1,656-674).
ggtattccgatgtttggat

SEQ ID NO: 223501 - DNA, 19 bp, Homo sapiens
  siRNA target sequence for GPR156 (NM_153002.1,657-675).
gtattccgatgtttggatt

SEQ ID NO: 223502 - DNA, 19 bp, Homo sapiens
  siRNA target sequence for GPR156 (NM_153002.1,749-767).
gctcccctcctgtgaatca

SEQ ID NO: 223503 - DNA, 19 bp, Homo sapiens
  siRNA target sequence for GPR156 (NM_153002.1,788-806).
gggtcaacctccttgtact

SEQ ID NO: 223504 - DNA, 19 bp, Homo sapiens
  siRNA target sequence for GPR156 (NM_153002.1,829-847).
gtcaccagatacttgcatt

SEQ ID NO: 223505 - DNA, 19 bp, Homo sapiens
  siRNA target sequence for GPR156 (NM_153002.1,873-891).
cacatctggagggatcttt

SEQ ID NO: 223506 - DNA, 19 bp, Homo sapiens
  siRNA target sequence for GPR156 (NM_153002.1,880-898).
ggagggatctttgtttgta

SEQ ID NO: 223507 - DNA, 19 bp, Homo sapiens
  siRNA target sequence for GPR156 (NM_153002.1,975-993).
cagacgcatggccaaatat

SEQ ID NO: 223508 - DNA, 19 bp, Homo sapiens
  siRNA target sequence for GPR156 (NM_153002.1,977-995).
gacgcatggccaaatattt

SEQ ID NO: 223509 - DNA, 19 bp, Homo sapiens
  siRNA target sequence for GPR156 (NM_153002.1,979-997).
cgcatggccaaatatttca

SEQ ID NO: 223510 - DNA, 19 bp, Homo sapiens
  siRNA target sequence for GPR156 (NM_153002.1,998-1016).
gcactcccaacaaaagctt

SEQ ID NO: 223511 - DNA, 19 bp, Homo sapiens
  siRNA target sequence for GPR156 (NM_153002.1,1003-1021).
cccaacaaaagcttccata

SEQ ID NO: 223512 - DNA, 19 bp, Homo sapiens
  siRNA target sequence for GPR156 (NM_153002.1,1051-1069).
ccgaggggagagaaaagct

SEQ ID NO: 223513 - DNA, 19 bp, Homo sapiens
  siRNA target sequence for GPR156 (NM_153002.1,1077-1095).
gaggctcctcacagaaaaa

SEQ ID NO: 223514 - DNA, 19 bp, Homo sapiens
  siRNA target sequence for GPR156 (NM_153002.1,1114-1132).
ctgcaggaacaagtaaaca

SEQ ID NO: 223515 - DNA, 19 bp, Homo sapiens
  siRNA target sequence for GPR156 (NM_153002.1,1278-1296).
gggtcacctctctgacttt

SEQ ID NO: 223516 - DNA, 19 bp, Homo sapiens
  siRNA target sequence for GPR156 (NM_153002.1,1611-1629).
gcggtcacgggttagttca

SEQ ID NO: 223517 - DNA, 19 bp, Homo sapiens
  siRNA target sequence for GPR156 (NM_153002.1,1614-1632).
gtcacgggttagttcagta

SEQ ID NO: 223518 - DNA, 19 bp, Homo sapiens
  siRNA target sequence for GPR156 (NM_153002.1,1616-1634).
cacgggttagttcagtaat

SEQ ID NO: 223519 - DNA, 19 bp, Homo sapiens
  siRNA target sequence for GPR156 (NM_153002.1,1618-1636).
cgggttagttcagtaatca

SEQ ID NO: 223520 - DNA, 19 bp, Homo sapiens
  siRNA target sequence for GPR156 (NM_153002.1,1932-1950).
cctggccccacaaactact

SEQ ID NO: 223521 - DNA, 19 bp, Homo sapiens
  siRNA target sequence for GPR156 (NM_153002.1,1935-1953).
ggccccacaaactactgat

SEQ ID NO: 223522 - DNA, 19 bp, Homo sapiens
  siRNA target sequence for GPR156 (NM_153002.1,1936-1954).
gccccacaaactactgatt

SEQ ID NO: 223523 - DNA, 19 bp, Homo sapiens
  siRNA target sequence for GPR156 (NM_153002.1,2218-2236).
caacacagctattttgata

SEQ ID NO: 223524 - DNA, 19 bp, Homo sapiens
  siRNA target sequence for GPR156 (NM_153002.1,2392-2410).
cgctccaagcctattgtga

SEQ ID NO: 223525 - DNA, 19 bp, Homo sapiens
  siRNA target sequence for GPR156 (NM_153002.1,2393-2411).
gctccaagcctattgtgaa

SEQ ID NO: 223526 - DNA, 19 bp, Homo sapiens
  siRNA target sequence for GPR156 (NM_153002.1,2402-2420).
ctattgtgaacttcaaaga

SEQ ID NO: 223527 - DNA, 19 bp, Homo sapiens
  siRNA target sequence for GPX2 (NM_002083.2,96-114).
cattgccaagtccttctat

SEQ ID NO: 223528 - DNA, 19 bp, Homo sapiens
  siRNA target sequence for GPX2 (NM_002083.2,136-154).
gatggggagaaggtagatt

SEQ ID NO: 223529 - DNA, 19 bp, Homo sapiens
  siRNA target sequence for GPX2 (NM_002083.2,384-402).
cacccttgtccaaaaatgt

SEQ ID NO: 223530 - DNA, 19 bp, Homo sapiens
  siRNA target sequence for GPX2 (NM_002083.2,492-510).
cgatcccaagctcatcatt

SEQ ID NO: 223531 - DNA, 19 bp, Homo sapiens
  siRNA target sequence for GPX2 (NM_002083.2,496-514).
cccaagctcatcatttgga

SEQ ID NO: 223532 - DNA, 19 bp, Homo sapiens
  siRNA target sequence for GPX2 (NM_002083.2,633-651).
caagcgcctccttaaagtt

SEQ ID NO: 223533 - DNA, 19 bp, Homo sapiens
  siRNA target sequence for GPX3 (NM_002084.2,391-409).
ctgccatggtggcataagt

SEQ ID NO: 223534 - DNA, 19 bp, Homo sapiens
  siRNA target sequence for GPX3 (NM_002084.2,427-445).
cggagccctcaccattgat

SEQ ID NO: 223535 - DNA, 19 bp, Homo sapiens
  siRNA target sequence for GPX3 (NM_002084.2,523-541).
gacgggccagtacattgaa

SEQ ID NO: 223536 - DNA, 19 bp, Homo sapiens
  siRNA target sequence for GPX3 (NM_002084.2,525-543).
cgggccagtacattgaact

SEQ ID NO: 223537 - DNA, 19 bp, Homo sapiens
  siRNA target sequence for GPX3 (NM_002084.2,528-546).
gccagtacattgaactgaa

SEQ ID NO: 223538 - DNA, 19 bp, Homo sapiens
  siRNA target sequence for GPX3 (NM_002084.2,529-547).
ccagtacattgaactgaat

SEQ ID NO: 223539 - DNA, 19 bp, Homo sapiens
  siRNA target sequence for GPX3 (NM_002084.2,570-588).
cattcggtctggtcattct

SEQ ID NO: 223540 - DNA, 19 bp, Homo sapiens
  siRNA target sequence for GPX3 (NM_002084.2,643-661).
ccttcctaccctcaagtat

SEQ ID NO: 223541 - DNA, 19 bp, Homo sapiens
  siRNA target sequence for GPX3 (NM_002084.2,906-924).
cggtcagcaacgtcaagat

SEQ ID NO: 223542 - DNA, 19 bp, Homo sapiens
  siRNA target sequence for GPX4 (NM_002085.1,195-213).
cgctccatgcacgagtttt

SEQ ID NO: 223543 - DNA, 19 bp, Homo sapiens
  siRNA target sequence for GPX4 (NM_002085.1,298-316).
gaggcaagaccgaagtaaa

SEQ ID NO: 223544 - DNA, 19 bp, Homo sapiens
  siRNA target sequence for GPX4 (NM_002085.1,300-318).
ggcaagaccgaagtaaact

SEQ ID NO: 223545 - DNA, 19 bp, Homo sapiens
  siRNA target sequence for GPX4 (NM_002085.1,409-427).
cagggagtaacgaagagat

SEQ ID NO: 223546 - DNA, 19 bp, Homo sapiens
  siRNA target sequence for GPX4 (NM_002085.1,413-431).
gagtaacgaagagatcaaa

SEQ ID NO: 223547 - DNA, 19 bp, Homo sapiens
  siRNA target sequence for GPX4 (NM_002085.1,445-463).
gctacaacgtcaaattcga

SEQ ID NO: 223548 - DNA, 19 bp, Homo sapiens
  siRNA target sequence for GPX4 (NM_002085.1,453-471).
gtcaaattcgatatgttca

SEQ ID NO: 223549 - DNA, 19 bp, Homo sapiens
  siRNA target sequence for GPX5 (NM_001509.1,132-150).
gaggccatcgcacttaata

SEQ ID NO: 223550 - DNA, 19 bp, Homo sapiens
  siRNA target sequence for GPX5 (NM_001509.1,137-155).
catcgcacttaataagaat

SEQ ID NO: 223551 - DNA, 19 bp, Homo sapiens
  siRNA target sequence for GPX5 (NM_001509.1,140-158).
cgcacttaataagaatgaa

SEQ ID NO: 223552 - DNA, 19 bp, Homo sapiens
  siRNA target sequence for GPX5 (NM_001509.1,141-159).
gcacttaataagaatgaat

SEQ ID NO: 223553 - DNA, 19 bp, Homo sapiens
  siRNA target sequence for GPX5 (NM_001509.1,231-249).
gcgcaatatcctgaactaa

SEQ ID NO: 223554 - DNA, 19 bp, Homo sapiens
  siRNA target sequence for GPX5 (NM_001509.1,232-250).
cgcaatatcctgaactaaa

SEQ ID NO: 223555 - DNA, 19 bp, Homo sapiens
  siRNA target sequence for GPX5 (NM_001509.1,269-287).
gaagccctatggtctagtt

SEQ ID NO: 223556 - DNA, 19 bp, Homo sapiens
  siRNA target sequence for GPX5 (NM_001509.1,274-292).
cctatggtctagttgtgtt

SEQ ID NO: 223557 - DNA, 19 bp, Homo sapiens
  siRNA target sequence for GPX5 (NM_001509.1,472-490).
ctcatccctctgagatttt

SEQ ID NO: 223558 - DNA, 19 bp, Homo sapiens
  siRNA target sequence for GPX5 (NM_001509.1,491-509).
gggcacattcaaatctata

SEQ ID NO: 223559 - DNA, 19 bp, Homo sapiens
  siRNA target sequence for GPX5 (NM_001509.1,492-510).
ggcacattcaaatctatat

SEQ ID NO: 223560 - DNA, 19 bp, Homo sapiens
  siRNA target sequence for GPX5 (NM_001509.1,630-648).
gacatcctggcgtacttga

SEQ ID NO: 223561 - DNA, 19 bp, Homo sapiens
  siRNA target sequence for GPX5 (NM_001509.1,640-658).
cgtacttgaagcaattcaa

SEQ ID NO: 223562 - DNA, 19 bp, Homo sapiens
  siRNA target sequence for GPX6 (NM_015696.2,356-374).
gcacctacagtgtctcatt

SEQ ID NO: 223563 - DNA, 19 bp, Homo sapiens
  siRNA target sequence for GPX6 (NM_015696.2,367-385).
gtctcattccccatgttta

SEQ ID NO: 223564 - DNA, 19 bp, Homo sapiens
  siRNA target sequence for GPX6 (NM_015696.2,371-389).
cattccccatgtttagcaa

SEQ ID NO: 223565 - DNA, 19 bp, Homo sapiens
  siRNA target sequence for GPX6 (NM_015696.2,375-393).
ccccatgtttagcaagatt

SEQ ID NO: 223566 - DNA, 19 bp, Homo sapiens
  siRNA target sequence for GPX6 (NM_015696.2,569-587).
ggaagctcatcctactgaa

SEQ ID NO: 223567 - DNA, 19 bp, Homo sapiens
  siRNA target sequence for HCCA3 (NM_020232.3,94-112).
cctaatgccagcagtatct

SEQ ID NO: 223568 - DNA, 19 bp, Homo sapiens
  siRNA target sequence for HCCA3 (NM_020232.3,168-186).
ctaagattggttacttcta

SEQ ID NO: 223569 - DNA, 19 bp, Homo sapiens
  siRNA target sequence for HCCA3 (NM_020232.3,202-220).
gccaatggttggaaacaat

SEQ ID NO: 223570 - DNA, 19 bp, Homo sapiens
  siRNA target sequence for HCCA3 (NM_020232.3,239-257).
ggaaattcaacagaactta

SEQ ID NO: 223571 - DNA, 19 bp, Homo sapiens
  siRNA target sequence for HCCA3 (NM_020232.3,274-292).
gtattcattgccttcaaga

SEQ ID NO: 223572 - DNA, 19 bp, Homo sapiens
  siRNA target sequence for HCCA3 (NM_020232.3,296-314).
ctggtggctctacagttaa

SEQ ID NO: 223573 - DNA, 19 bp, Homo sapiens
  siRNA target sequence for HCCA3 (NM_020232.3,299-317).
gtggctctacagttaagat

SEQ ID NO: 223574 - DNA, 19 bp, Homo sapiens
  siRNA target sequence for HCCA3 (NM_020232.3,305-323).
ctacagttaagatccattt

SEQ ID NO: 223575 - DNA, 19 bp, Homo sapiens
  siRNA target sequence for HCCA3 (NM_020232.3,308-326).
cagttaagatccattttta

SEQ ID NO: 223576 - DNA, 19 bp, Homo sapiens
  siRNA target sequence for HCCA3 (NM_020232.3,387-405).
gtgccagagtcattgttct

SEQ ID NO: 223577 - DNA, 19 bp, Homo sapiens
  siRNA target sequence for HCCA3 (NM_020232.3,391-409).
cagagtcattgttctttca

SEQ ID NO: 223578 - DNA, 19 bp, Homo sapiens
  siRNA target sequence for HCCA3 (NM_020232.3,455-473).
cccttccggtacctactta

SEQ ID NO: 223579 - DNA, 19 bp, Homo sapiens
  siRNA target sequence for HCCA3 (NM_020232.3,457-475).
cttccggtacctacttaca

SEQ ID NO: 223580 - DNA, 19 bp, Homo sapiens
  siRNA target sequence for HCCA3 (NM_020232.3,541-559).
ccggtgcattcctgaaata

SEQ ID NO: 223581 - DNA, 19 bp, Homo sapiens
  siRNA target sequence for HCCA3 (NM_020232.3,543-561).
ggtgcattcctgaaataga

SEQ ID NO: 223582 - DNA, 19 bp, Homo sapiens
  siRNA target sequence for HCCA3 (NM_020232.3,544-562).
gtgcattcctgaaatagat

SEQ ID NO: 223583 - DNA, 19 bp, Homo sapiens
  siRNA target sequence for HCCA3 (NM_020232.3,587-605).
ccgggaggaggtatcacaa

SEQ ID NO: 223584 - DNA, 19 bp, Homo sapiens
  siRNA target sequence for HCCA3 (NM_020232.3,625-643).
ctgttctaaagaaatccaa

SEQ ID NO: 223585 - DNA, 19 bp, Homo sapiens
  siRNA target sequence for HCCA3 (NM_020232.3,693-711).
cattaggtcttgttgagta

SEQ ID NO: 223586 - DNA, 19 bp, Homo sapiens
  siRNA target sequence for HCCA3 (NM_020232.3,698-716).
ggtcttgttgagtatctta

SEQ ID NO: 223587 - DNA, 19 bp, Homo sapiens
  siRNA target sequence for HCCA3 (NM_020232.3,704-722).
gttgagtatcttaatgagt

SEQ ID NO: 223588 - DNA, 19 bp, Homo sapiens
  siRNA target sequence for HCCA3 (NM_020232.3,721-739).
gtggcttcagatactcaaa

SEQ ID NO: 223589 - DNA, 19 bp, Homo sapiens
  siRNA target sequence for HCCA3 (NM_020232.3,789-807).
gttcttggagattactctt

SEQ ID NO: 223590 - DNA, 19 bp, Homo sapiens
  siRNA target sequence for MMS19L (NM_022362.2,139-157).
gtgaaatctggcaactata

SEQ ID NO: 223591 - DNA, 19 bp, Homo sapiens
  siRNA target sequence for MMS19L (NM_022362.2,149-167).
gcaactatacagtgttaca

SEQ ID NO: 223592 - DNA, 19 bp, Homo sapiens
  siRNA target sequence for MMS19L (NM_022362.2,150-168).
caactatacagtgttacaa

SEQ ID NO: 223593 - DNA, 19 bp, Homo sapiens
  siRNA target sequence for MMS19L (NM_022362.2,317-335).
ggctgaaggaccatcatct

SEQ ID NO: 223594 - DNA, 19 bp, Homo sapiens
  siRNA target sequence for MMS19L (NM_022362.2,318-336).
gctgaaggaccatcatctt

SEQ ID NO: 223595 - DNA, 19 bp, Homo sapiens
  siRNA target sequence for MMS19L (NM_022362.2,465-483).
ccgacacacagtctacaat

SEQ ID NO: 223596 - DNA, 19 bp, Homo sapiens
  siRNA target sequence for MMS19L (NM_022362.2,466-484).
cgacacacagtctacaata

SEQ ID NO: 223597 - DNA, 19 bp, Homo sapiens
  siRNA target sequence for MMS19L (NM_022362.2,467-485).
gacacacagtctacaatat

SEQ ID NO: 223598 - DNA, 19 bp, Homo sapiens
  siRNA target sequence for MMS19L (NM_022362.2,506-524).
cccgggaagaagagctaaa

SEQ ID NO: 223599 - DNA, 19 bp, Homo sapiens
  siRNA target sequence for MMS19L (NM_022362.2,622-640).
ctcatctccagggactata

SEQ ID NO: 223600 - DNA, 19 bp, Homo sapiens
  siRNA target sequence for MMS19L (NM_022362.2,683-701).
gttatttccctatcgattt

SEQ ID NO: 223601 - DNA, 19 bp, Homo sapiens
  siRNA target sequence for MMS19L (NM_022362.2,771-789).
ggcttctacaccacgattt

SEQ ID NO: 223602 - DNA, 19 bp, Homo sapiens
  siRNA target sequence for MMS19L (NM_022362.2,782-800).
cacgatttgctgagtttct

SEQ ID NO: 223603 - DNA, 19 bp, Homo sapiens
  siRNA target sequence for MMS19L (NM_022362.2,804-822).
gcccctgttgattgagaaa

SEQ ID NO: 223604 - DNA, 19 bp, Homo sapiens
  siRNA target sequence for MMS19L (NM_022362.2,859-877).
ctacagactctgaatgctt

SEQ ID NO: 223605 - DNA, 19 bp, Homo sapiens
  siRNA target sequence for MMS19L (NM_022362.2,1005-1023).
cctgactgcgtgtttgtct

SEQ ID NO: 223606 - DNA, 19 bp, Homo sapiens
  siRNA target sequence for MMS19L (NM_022362.2,1104-1122).
gtgtgaaccggacatgaaa

SEQ ID NO: 223607 - DNA, 19 bp, Homo sapiens
  siRNA target sequence for MMS19L (NM_022362.2,1106-1124).
gtgaaccggacatgaaact

SEQ ID NO: 223608 - DNA, 19 bp, Homo sapiens
  siRNA target sequence for MMS19L (NM_022362.2,1208-1226).
ctttactgctggaacagtt

SEQ ID NO: 223609 - DNA, 19 bp, Homo sapiens
  siRNA target sequence for MMS19L (NM_022362.2,1307-1325).
gctatgaagacaaagatca

SEQ ID NO: 223610 - DNA, 19 bp, Homo sapiens
  siRNA target sequence for MMS19L (NM_022362.2,1445-1463).
cagatctcctatcttatga

SEQ ID NO: 223611 - DNA, 19 bp, Homo sapiens
  siRNA target sequence for MMS19L (NM_022362.2,1623-1641).
gcgtgtaggggagtcaaat

SEQ ID NO: 223612 - DNA, 19 bp, Homo sapiens
  siRNA target sequence for MMS19L (NM_022362.2,1624-1642).
cgtgtaggggagtcaaatt

SEQ ID NO: 223613 - DNA, 19 bp, Homo sapiens
  siRNA target sequence for MMS19L (NM_022362.2,1627-1645).
gtaggggagtcaaatttga

SEQ ID NO: 223614 - DNA, 19 bp, Homo sapiens
  siRNA target sequence for MMS19L (NM_022362.2,1630-1648).
ggggagtcaaatttgacta

SEQ ID NO: 223615 - DNA, 19 bp, Homo sapiens
  siRNA target sequence for MMS19L (NM_022362.2,1696-1714).
gccttgtcagctgtatcaa

SEQ ID NO: 223616 - DNA, 19 bp, Homo sapiens
  siRNA target sequence for MMS19L (NM_022362.2,1701-1719).
gtcagctgtatcaacacat

SEQ ID NO: 223617 - DNA, 19 bp, Homo sapiens
  siRNA target sequence for MMS19L (NM_022362.2,1773-1791).
gaacagagggaatatggtt

SEQ ID NO: 223618 - DNA, 19 bp, Homo sapiens
  siRNA target sequence for MMS19L (NM_022362.2,1793-1811).
cacaatccagtgacgttat

SEQ ID NO: 223619 - DNA, 19 bp, Homo sapiens
  siRNA target sequence for MMS19L (NM_022362.2,1862-1880).
ctgagagttgctggtattt

SEQ ID NO: 223620 - DNA, 19 bp, Homo sapiens
  siRNA target sequence for MMS19L (NM_022362.2,2022-2040).
ccacctgagccctgagtta

SEQ ID NO: 223621 - DNA, 19 bp, Homo sapiens
  siRNA target sequence for MMS19L (NM_022362.2,2162-2180).
ggctgattgcactgcttat

SEQ ID NO: 223622 - DNA, 19 bp, Homo sapiens
  siRNA target sequence for MMS19L (NM_022362.2,2219-2237).
ctcagctgaaccaactcat

SEQ ID NO: 223623 - DNA, 19 bp, Homo sapiens
  siRNA target sequence for MMS19L (NM_022362.2,2266-2284).
cacagctgccccttttctt

SEQ ID NO: 223624 - DNA, 19 bp, Homo sapiens
  siRNA target sequence for MMS19L (NM_022362.2,2448-2466).
cctagtgctcagataccat

SEQ ID NO: 223625 - DNA, 19 bp, Homo sapiens
  siRNA target sequence for MMS19L (NM_022362.2,2505-2523).
cctgagtgacccagaatta

SEQ ID NO: 223626 - DNA, 19 bp, Homo sapiens
  siRNA target sequence for MMS19L (NM_022362.2,2596-2614).
gccgaagtgcggatcatgt

SEQ ID NO: 223627 - DNA, 19 bp, Homo sapiens
  siRNA target sequence for MMS19L (NM_022362.2,2597-2615).
ccgaagtgcggatcatgtt

SEQ ID NO: 223628 - DNA, 19 bp, Homo sapiens
  siRNA target sequence for MMS19L (NM_022362.2,2620-2638).
cagcggttcttcacagata

SEQ ID NO: 223629 - DNA, 19 bp, Homo sapiens
  siRNA target sequence for MMS19L (NM_022362.2,2622-2640).
gcggttcttcacagataat

SEQ ID NO: 223630 - DNA, 19 bp, Homo sapiens
  siRNA target sequence for MMS19L (NM_022362.2,2624-2642).
ggttcttcacagataatgt

SEQ ID NO: 223631 - DNA, 19 bp, Homo sapiens
  siRNA target sequence for MMS19L (NM_022362.2,2700-2718).
gaagggtctttctcatgta

SEQ ID NO: 223632 - DNA, 19 bp, Homo sapiens
  siRNA target sequence for MMS19L (NM_022362.2,2752-2770).
gagctgcccacgcttcttt

SEQ ID NO: 223633 - DNA, 19 bp, Homo sapiens
  siRNA target sequence for MMS19L (NM_022362.2,2883-2901).
caccctcgtcaccaagttt

SEQ ID NO: 223634 - DNA, 19 bp, Homo sapiens
  siRNA target sequence for MMS19L (NM_022362.2,2885-2903).
ccctcgtcaccaagtttct

SEQ ID NO: 223635 - DNA, 19 bp, Homo sapiens
  siRNA target sequence for MMS19L (NM_022362.2,2887-2905).
ctcgtcaccaagtttctga

SEQ ID NO: 223636 - DNA, 19 bp, Homo sapiens
  siRNA target sequence for PI16 (NM_153370.1,549-567).
gcgtgtggggccacaacaa

SEQ ID NO: 223637 - DNA, 19 bp, Homo sapiens
  siRNA target sequence for PI16 (NM_153370.1,1041-1059).
cggggattccggctttctt

SEQ ID NO: 223638 - DNA, 19 bp, Homo sapiens
  siRNA target sequence for PI16 (NM_153370.1,1050-1068).
cggctttcttggtaacaga

SEQ ID NO: 223639 - DNA, 19 bp, Homo sapiens
  siRNA target sequence for PI16 (NM_153370.1,1114-1132).
ccaggccccaacttcctta

SEQ ID NO: 223640 - DNA, 19 bp, Homo sapiens
  siRNA target sequence for PI16 (NM_153370.1,1241-1259).
gttaccttccccaaatcga

SEQ ID NO: 223641 - DNA, 19 bp, Homo sapiens
  siRNA target sequence for PI16 (NM_153370.1,1262-1280).
catgttcctatcccaaaat

SEQ ID NO: 223642 - DNA, 19 bp, Homo sapiens
  siRNA target sequence for PRDX1 (NM_002574.2,410-428).
ggtcagtttaaagatatca

SEQ ID NO: 223643 - DNA, 19 bp, Homo sapiens
  siRNA target sequence for PRDX1 (NM_002574.2,497-515).
cccacggagatcattgctt

SEQ ID NO: 223644 - DNA, 19 bp, Homo sapiens
  siRNA target sequence for PRDX1 (NM_002574.2,498-516).
ccacggagatcattgcttt

SEQ ID NO: 223645 - DNA, 19 bp, Homo sapiens
  siRNA target sequence for PRDX1 (NM_002574.2,502-520).
ggagatcattgctttcagt

SEQ ID NO: 223646 - DNA, 19 bp, Homo sapiens
  siRNA target sequence for PRDX1 (NM_002574.2,590-608).
catctagcatgggtcaata

SEQ ID NO: 223647 - DNA, 19 bp, Homo sapiens
  siRNA target sequence for PRDX1 (NM_002574.2,600-618).
gggtcaatacacctaagaa

SEQ ID NO: 223648 - DNA, 19 bp, Homo sapiens
  siRNA target sequence for PRDX1 (NM_002574.2,632-650).
ggacccatgaacattcctt

SEQ ID NO: 223649 - DNA, 19 bp, Homo sapiens
  siRNA target sequence for PRDX1 (NM_002574.2,633-651).
gacccatgaacattccttt

SEQ ID NO: 223650 - DNA, 19 bp, Homo sapiens
  siRNA target sequence for PRDX1 (NM_002574.2,637-655).
catgaacattcctttggta

SEQ ID NO: 223651 - DNA, 19 bp, Homo sapiens
  siRNA target sequence for PRDX1 (NM_002574.2,715-733).
ctcgttcaggggccttttt

SEQ ID NO: 223652 - DNA, 19 bp, Homo sapiens
  siRNA target sequence for PRDX1 (NM_002574.2,717-735).
cgttcaggggcctttttat

SEQ ID NO: 223653 - DNA, 19 bp, Homo sapiens
  siRNA target sequence for PRDX2 (NM_005809.4,210-228).
ggttgatggcgccttcaaa

SEQ ID NO: 223654 - DNA, 19 bp, Homo sapiens
  siRNA target sequence for PRDX2 (NM_005809.4,476-494).
gacgcttgtctgaggatta

SEQ ID NO: 223655 - DNA, 19 bp, Homo sapiens
  siRNA target sequence for PRDX2 (NM_005809.4,490-508).
gattacggcgtgctgaaaa

SEQ ID NO: 223656 - DNA, 19 bp, Homo sapiens
  siRNA target sequence for PRDX2 (NM_005809.4,495-513).
cggcgtgctgaaaacagat

SEQ ID NO: 223657 - DNA, 19 bp, Homo sapiens
  siRNA target sequence for PRDX2 (NM_005809.4,523-541).
gcctacaggggcctcttta

SEQ ID NO: 223658 - DNA, 19 bp, Homo sapiens
  siRNA target sequence for PRDX2 (NM_005809.4,524-542).
cctacaggggcctctttat

SEQ ID NO: 223659 - DNA, 19 bp, Homo sapiens
  siRNA target sequence for PRDX2 (NM_005809.4,646-664).
gacgagcatggggaagttt

SEQ ID NO: 223660 - DNA, 19 bp, Homo sapiens
  siRNA target sequence for PRDX2 (NM_005809.4,648-666).
cgagcatggggaagtttgt

SEQ ID NO: 223661 - DNA, 19 bp, Homo sapiens
  siRNA target sequence for PRDX2 (NM_005809.4,682-700).
cctggcagtgacacgatta

SEQ ID NO: 223662 - DNA, 19 bp, Homo sapiens
  siRNA target sequence for PRDX2 (NM_005809.4,683-701).
ctggcagtgacacgattaa

SEQ ID NO: 223663 - DNA, 19 bp, Homo sapiens
  siRNA target sequence for PRDX2 (NM_181738.1,393-411).
cacccacctggcttggtat

SEQ ID NO: 223664 - DNA, 19 bp, Homo sapiens
  siRNA target sequence for PRDX2 (NM_181738.1,558-576).
gatgacagtaattagcatt

SEQ ID NO: 223665 - DNA, 19 bp, Homo sapiens
  siRNA target sequence for PRDX4 (NM_006406.1,259-277).
ctccctgcacctaagcaaa

SEQ ID NO: 223666 - DNA, 19 bp, Homo sapiens
  siRNA target sequence for PRDX4 (NM_006406.1,268-286).
cctaagcaaagcgaagatt

SEQ ID NO: 223667 - DNA, 19 bp, Homo sapiens
  siRNA target sequence for PRDX4 (NM_006406.1,269-287).
ctaagcaaagcgaagattt

SEQ ID NO: 223668 - DNA, 19 bp, Homo sapiens
  siRNA target sequence for PRDX4 (NM_006406.1,273-291).
gcaaagcgaagatttccaa

SEQ ID NO: 223669 - DNA, 19 bp, Homo sapiens
  siRNA target sequence for PRDX4 (NM_006406.1,318-336).
ctgtgatcgatggagaatt

SEQ ID NO: 223670 - DNA, 19 bp, Homo sapiens
  siRNA target sequence for PRDX4 (NM_006406.1,343-361).
gctgaagttaactgattat

SEQ ID NO: 223671 - DNA, 19 bp, Homo sapiens
  siRNA target sequence for PRDX4 (NM_006406.1,346-364).
gaagttaactgattatcgt

SEQ ID NO: 223672 - DNA, 19 bp, Homo sapiens
  siRNA target sequence for PRDX4 (NM_006406.1,354-372).
ctgattatcgtgggaaata

SEQ ID NO: 223673 - DNA, 19 bp, Homo sapiens
  siRNA target sequence for PRDX4 (NM_006406.1,356-374).
gattatcgtgggaaatact

SEQ ID NO: 223674 - DNA, 19 bp, Homo sapiens
  siRNA target sequence for PRDX4 (NM_006406.1,362-380).
cgtgggaaatacttggttt

SEQ ID NO: 223675 - DNA, 19 bp, Homo sapiens
  siRNA target sequence for PRDX4 (NM_006406.1,382-400).
cttcttctacccacttgat

SEQ ID NO: 223676 - DNA, 19 bp, Homo sapiens
  siRNA target sequence for PRDX4 (NM_006406.1,410-428).
gtgtgtccaactgaaatta

SEQ ID NO: 223677 - DNA, 19 bp, Homo sapiens
  siRNA target sequence for PRDX4 (NM_006406.1,438-456).
gcgacagacttgaagaatt

SEQ ID NO: 223678 - DNA, 19 bp, Homo sapiens
  siRNA target sequence for PRDX4 (NM_006406.1,449-467).
gaagaattcagatctataa

SEQ ID NO: 223679 - DNA, 19 bp, Homo sapiens
  siRNA target sequence for PRDX4 (NM_006406.1,478-496).
ggtagcatgctctgttgat

SEQ ID NO: 223680 - DNA, 19 bp, Homo sapiens
  siRNA target sequence for PRDX4 (NM_006406.1,479-497).
gtagcatgctctgttgatt

SEQ ID NO: 223681 - DNA, 19 bp, Homo sapiens
  siRNA target sequence for PRDX4 (NM_006406.1,542-560).
ggaggacttgggccaataa

SEQ ID NO: 223682 - DNA, 19 bp, Homo sapiens
  siRNA target sequence for PRDX4 (NM_006406.1,561-579).
ggattccacttctttcaga

SEQ ID NO: 223683 - DNA, 19 bp, Homo sapiens
  siRNA target sequence for PRDX4 (NM_006406.1,562-580).
gattccacttctttcagat

SEQ ID NO: 223684 - DNA, 19 bp, Homo sapiens
  siRNA target sequence for PRDX4 (NM_006406.1,601-619).
ggactatggtgtataccta

SEQ ID NO: 223685 - DNA, 19 bp, Homo sapiens
  siRNA target sequence for PRDX4 (NM_006406.1,794-812).
cctggtagtgaaacaataa

SEQ ID NO: 223686 - DNA, 19 bp, Homo sapiens
  siRNA target sequence for PRDX4 (NM_006406.1,824-842).
gctggaaagctgaagtatt

SEQ ID NO: 223687 - DNA, 19 bp, Homo sapiens
  siRNA target sequence for PRDX4 (NM_006406.1,828-846).
gaaagctgaagtatttcga

SEQ ID NO: 223688 - DNA, 19 bp, Homo sapiens
  siRNA target sequence for RTDR1 (NM_014433.2,185-203).
gcttcccattaacatcaat

SEQ ID NO: 223689 - DNA, 19 bp, Homo sapiens
  siRNA target sequence for RTDR1 (NM_014433.2,321-339).
catgaccccgagtgtatct

SEQ ID NO: 223690 - DNA, 19 bp, Homo sapiens
  siRNA target sequence for RTDR1 (NM_014433.2,324-342).
gaccccgagtgtatctaca

SEQ ID NO: 223691 - DNA, 19 bp, Homo sapiens
  siRNA target sequence for RTDR1 (NM_014433.2,384-402).
ctgaaggatagcaacagta

SEQ ID NO: 223692 - DNA, 19 bp, Homo sapiens
  siRNA target sequence for RTDR1 (NM_014433.2,455-473).
gggcagatacgcctttcta

SEQ ID NO: 223693 - DNA, 19 bp, Homo sapiens
  siRNA target sequence for RTDR1 (NM_014433.2,457-475).
gcagatacgcctttctaga

SEQ ID NO: 223694 - DNA, 19 bp, Homo sapiens
  siRNA target sequence for RTDR1 (NM_014433.2,790-808).
cccgtgcgctccttaatgt

SEQ ID NO: 223695 - DNA, 19 bp, Homo sapiens
  siRNA target sequence for RTDR1 (NM_014433.2,792-810).
cgtgcgctccttaatgtca

SEQ ID NO: 223696 - DNA, 19 bp, Homo sapiens
  siRNA target sequence for RTDR1 (NM_014433.2,1033-1051).
ccaccaaggcccttaccat

SEQ ID NO: 223697 - DNA, 19 bp, Homo sapiens
  siRNA target sequence for RTDR1 (NM_014433.2,1115-1133).
ggaggtggagacttacgaa

SEQ ID NO: 223698 - DNA, 19 bp, Homo sapiens
  siRNA target sequence for RTDR1 (NM_014433.2,1116-1134).
gaggtggagacttacgaaa

SEQ ID NO: 223699 - DNA, 19 bp, Homo sapiens
  siRNA target sequence for TPRA40 (NM_016372.1,344-362).
cacccctggcaccaaacat

SEQ ID NO: 223700 - DNA, 19 bp, Homo sapiens
  siRNA target sequence for TPRA40 (NM_016372.1,346-364).
cccctggcaccaaacatca

SEQ ID NO: 223701 - DNA, 19 bp, Homo sapiens
  siRNA target sequence for TPRA40 (NM_016372.1,609-627).
ctcgaacgctgcaactgtt

SEQ ID NO: 223702 - DNA, 19 bp, Homo sapiens
  siRNA target sequence for TPRA40 (NM_016372.1,619-637).
gcaactgttgctgataaga

SEQ ID NO: 223703 - DNA, 19 bp, Homo sapiens
  siRNA target sequence for TPRA40 (NM_016372.1,825-843).
ctcagctgaggactttaat

SEQ ID NO: 223704 - DNA, 19 bp, Homo sapiens
  siRNA target sequence for TPRA40 (NM_016372.1,827-845).
cagctgaggactttaatat

SEQ ID NO: 223705 - DNA, 19 bp, Homo sapiens
  siRNA target sequence for TPRA40 (NM_016372.1,1076-1094).
ccacaaccttcctgtactt

SEQ ID NO: 223706 - DNA, 19 bp, Homo sapiens
  siRNA target sequence for TPRA40 (NM_016372.1,1191-1209).
gacagaggagccagatgta

SEQ ID NO: 223707 - DNA, 19 bp, Homo sapiens
  siRNA target sequence for TPRA40 (NM_016372.1,1389-1407).
gcgctggaaggccatcaat

SEQ ID NO: 223708 - DNA, 19 bp, Homo sapiens
  siRNA target sequence for ACADL (NM_001608.1,147-165).
ggaattcgaagaatctttt

SEQ ID NO: 223709 - DNA, 19 bp, Homo sapiens
  siRNA target sequence for ACADL (NM_001608.1,179-197).
cattttccggaaaagtgta

SEQ ID NO: 223710 - DNA, 19 bp, Homo sapiens
  siRNA target sequence for ACADL (NM_001608.1,200-218).
gaagtttttccaagaagaa

SEQ ID NO: 223711 - DNA, 19 bp, Homo sapiens
  siRNA target sequence for ACADL (NM_001608.1,331-349).
gaattggaggggatctgta

SEQ ID NO: 223712 - DNA, 19 bp, Homo sapiens
  siRNA target sequence for ACADL (NM_001608.1,375-393).
caagcttattcaaattgtt

SEQ ID NO: 223713 - DNA, 19 bp, Homo sapiens
  siRNA target sequence for ACADL (NM_001608.1,394-412).
caggcccaggttttagtat

SEQ ID NO: 223714 - DNA, 19 bp, Homo sapiens
  siRNA target sequence for ACADL (NM_001608.1,399-417).
ccaggttttagtattcatt

SEQ ID NO: 223715 - DNA, 19 bp, Homo sapiens
  siRNA target sequence for ACADL (NM_001608.1,488-506).
gactgcaggcaaatgtatt

SEQ ID NO: 223716 - DNA, 19 bp, Homo sapiens
  siRNA target sequence for ACADL (NM_001608.1,497-515).
caaatgtattggtgcaata

SEQ ID NO: 223717 - DNA, 19 bp, Homo sapiens
  siRNA target sequence for ACADL (NM_001608.1,502-520).
gtattggtgcaatagcaat

SEQ ID NO: 223718 - DNA, 19 bp, Homo sapiens
  siRNA target sequence for ACADL (NM_001608.1,579-597).
ggaagtgactggattctca

SEQ ID NO: 223719 - DNA, 19 bp, Homo sapiens
  siRNA target sequence for ACADL (NM_001608.1,604-622).
gcaaggtgttcatcagtaa

SEQ ID NO: 223720 - DNA, 19 bp, Homo sapiens
  siRNA target sequence for ACADL (NM_001608.1,605-623).
caaggtgttcatcagtaat

SEQ ID NO: 223721 - DNA, 19 bp, Homo sapiens
  siRNA target sequence for ACADL (NM_001608.1,614-632).
catcagtaatgggtcatta

SEQ ID NO: 223722 - DNA, 19 bp, Homo sapiens
  siRNA target sequence for ACADL (NM_001608.1,619-637).
gtaatgggtcattaagtga

SEQ ID NO: 223723 - DNA, 19 bp, Homo sapiens
  siRNA target sequence for ACADL (NM_001608.1,625-643).
ggtcattaagtgatgttgt

SEQ ID NO: 223724 - DNA, 19 bp, Homo sapiens
  siRNA target sequence for ACADL (NM_001608.1,628-646).
cattaagtgatgttgtgat

SEQ ID NO: 223725 - DNA, 19 bp, Homo sapiens
  siRNA target sequence for ACADL (NM_001608.1,634-652).
gtgatgttgtgattgtagt

SEQ ID NO: 223726 - DNA, 19 bp, Homo sapiens
  siRNA target sequence for ACADL (NM_001608.1,677-695).
ctcccctgcccatggtatt

SEQ ID NO: 223727 - DNA, 19 bp, Homo sapiens
  siRNA target sequence for ACADL (NM_001608.1,686-704).
ccatggtattagccttttt

SEQ ID NO: 223728 - DNA, 19 bp, Homo sapiens
  siRNA target sequence for ACADL (NM_001608.1,737-755).
gggacgaaagctacataaa

SEQ ID NO: 223729 - DNA, 19 bp, Homo sapiens
  siRNA target sequence for ACADL (NM_001608.1,738-756).
ggacgaaagctacataaaa

SEQ ID NO: 223730 - DNA, 19 bp, Homo sapiens
  siRNA target sequence for ACADL (NM_001608.1,770-788).
ccaggataccgcagaacta

SEQ ID NO: 223731 - DNA, 19 bp, Homo sapiens
  siRNA target sequence for ACADL (NM_001608.1,771-789).
caggataccgcagaactat

SEQ ID NO: 223732 - DNA, 19 bp, Homo sapiens
  siRNA target sequence for ACADL (NM_001608.1,774-792).
gataccgcagaactattct

SEQ ID NO: 223733 - DNA, 19 bp, Homo sapiens
  siRNA target sequence for ACADL (NM_001608.1,834-852).
gagaataaaggcttctatt

SEQ ID NO: 223734 - DNA, 19 bp, Homo sapiens
  siRNA target sequence for ACADL (NM_001608.1,843-861).
ggcttctattacatcatga

SEQ ID NO: 223735 - DNA, 19 bp, Homo sapiens
  siRNA target sequence for ACADL (NM_001608.1,844-862).
gcttctattacatcatgaa

SEQ ID NO: 223736 - DNA, 19 bp, Homo sapiens
  siRNA target sequence for ACADL (NM_001608.1,845-863).
cttctattacatcatgaaa

SEQ ID NO: 223737 - DNA, 19 bp, Homo sapiens
  siRNA target sequence for ACADL (NM_001608.1,1065-1083).
ctgcatgaagcgaaacgtt

SEQ ID NO: 223738 - DNA, 19 bp, Homo sapiens
  siRNA target sequence for ACADL (NM_001608.1,1096-1114).
ctgcttgcatggcgaaata

SEQ ID NO: 223739 - DNA, 19 bp, Homo sapiens
  siRNA target sequence for ACADL (NM_001608.1,1098-1116).
gcttgcatggcgaaatatt

SEQ ID NO: 223740 - DNA, 19 bp, Homo sapiens
  siRNA target sequence for ACADL (NM_001608.1,1167-1185).
ggaggttggggatacatgt

SEQ ID NO: 223741 - DNA, 19 bp, Homo sapiens
  siRNA target sequence for ACADL (NM_001608.1,1186-1204).
gggagtacccaattgcaaa

SEQ ID NO: 223742 - DNA, 19 bp, Homo sapiens
  siRNA target sequence for ACADL (NM_001608.1,1187-1205).
ggagtacccaattgcaaaa

SEQ ID NO: 223743 - DNA, 19 bp, Homo sapiens
  siRNA target sequence for ACADL (NM_001608.1,1190-1208).
gtacccaattgcaaaagct

SEQ ID NO: 223744 - DNA, 19 bp, Homo sapiens
  siRNA target sequence for ACADL (NM_001608.1,1193-1211).
cccaattgcaaaagcttat

SEQ ID NO: 223745 - DNA, 19 bp, Homo sapiens
  siRNA target sequence for ACADL (NM_001608.1,1195-1213).
caattgcaaaagcttatgt

SEQ ID NO: 223746 - DNA, 19 bp, Homo sapiens
  siRNA target sequence for ACADL (NM_001608.1,1219-1237).
ccagagttcagccaatcta

SEQ ID NO: 223747 - DNA, 19 bp, Homo sapiens
  siRNA target sequence for ACADL (NM_001608.1,1231-1249).
caatctatggtggtacaaa

SEQ ID NO: 223748 - DNA, 19 bp, Homo sapiens
  siRNA target sequence for ACADL (NM_001608.1,1235-1253).
ctatggtggtacaaatgaa

SEQ ID NO: 223749 - DNA, 19 bp, Homo sapiens
  siRNA target sequence for ACADL (NM_001608.1,1265-1283).
gctgattgcaagagagatt

SEQ ID NO: 223750 - DNA, 19 bp, Homo sapiens
  siRNA target sequence for ACADL (NM_001608.1,1276-1294).
gagagattgtctttgacaa

SEQ ID NO: 223751 - DNA, 19 bp, Homo sapiens
  siRNA target sequence for ACADVL (NM_000018.1,278-296).
ccggccaaggcggaatcta

SEQ ID NO: 223752 - DNA, 19 bp, Homo sapiens
  siRNA target sequence for ACADVL (NM_000018.1,279-297).
cggccaaggcggaatctaa

SEQ ID NO: 223753 - DNA, 19 bp, Homo sapiens
  siRNA target sequence for ACADVL (NM_000018.1,281-299).
gccaaggcggaatctaagt

SEQ ID NO: 223754 - DNA, 19 bp, Homo sapiens
  siRNA target sequence for ACADVL (NM_000018.1,370-388).
cgaagagcagacacagttt

SEQ ID NO: 223755 - DNA, 19 bp, Homo sapiens
  siRNA target sequence for ACADVL (NM_000018.1,417-435).
gtttcttcgaggaagtgaa

SEQ ID NO: 223756 - DNA, 19 bp, Homo sapiens
  siRNA target sequence for ACADVL (NM_000018.1,716-734).
gtggccgctttctgtctaa

SEQ ID NO: 223757 - DNA, 19 bp, Homo sapiens
  siRNA target sequence for ACADVL (NM_000018.1,873-891).
ccaagacaccagttacaga

SEQ ID NO: 223758 - DNA, 19 bp, Homo sapiens
  siRNA target sequence for ACADVL (NM_000018.1,1084-1102).
catgcacatcctcaacaat

SEQ ID NO: 223759 - DNA, 19 bp, Homo sapiens
  siRNA target sequence for ACADVL (NM_000018.1,1088-1106).
cacatcctcaacaatggaa

SEQ ID NO: 223760 - DNA, 19 bp, Homo sapiens
  siRNA target sequence for ACADVL (NM_000018.1,1162-1180).
ggtagatcatgccactaat

SEQ ID NO: 223761 - DNA, 19 bp, Homo sapiens
  siRNA target sequence for ACADVL (NM_000018.1,1194-1212).
gggagaaaattcacaactt

SEQ ID NO: 223762 - DNA, 19 bp, Homo sapiens
  siRNA target sequence for ACADVL (NM_000018.1,1308-1326).
ccacggacttccagataga

SEQ ID NO: 223763 - DNA, 19 bp, Homo sapiens
  siRNA target sequence for ACADVL (NM_000018.1,1330-1348).
cgccatcagcaaaatcttt

SEQ ID NO: 223764 - DNA, 19 bp, Homo sapiens
  siRNA target sequence for ACADVL (NM_000018.1,1432-1450).
gcgtgtgctccgagatctt

SEQ ID NO: 223765 - DNA, 19 bp, Homo sapiens
  siRNA target sequence for ACADVL (NM_000018.1,1452-1470).
gcatcttccggatctttga

SEQ ID NO: 223766 - DNA, 19 bp, Homo sapiens
  siRNA target sequence for ACADVL (NM_000018.1,1745-1763).
cacaagaaggggattgtca

SEQ ID NO: 223767 - DNA, 19 bp, Homo sapiens
  siRNA target sequence for ACADVL (NM_000018.1,1755-1773).
ggattgtcaatgaacagtt

SEQ ID NO: 223768 - DNA, 19 bp, Homo sapiens
  siRNA target sequence for GCDH (NM_000159.1,292-310).
gccaatcgcaacgaagttt

SEQ ID NO: 223769 - DNA, 19 bp, Homo sapiens
  siRNA target sequence for GCDH (NM_000159.1,293-311).
ccaatcgcaacgaagtttt

SEQ ID NO: 223770 - DNA, 19 bp, Homo sapiens
  siRNA target sequence for GCDH (NM_000159.1,294-312).
caatcgcaacgaagttttt

SEQ ID NO: 223771 - DNA, 19 bp, Homo sapiens
  siRNA target sequence for GCDH (NM_000159.1,477-495).
cgtcatgcaccctatctat

SEQ ID NO: 223772 - DNA, 19 bp, Homo sapiens
  siRNA target sequence for GCDH (NM_000159.1,683-701).
cgcctatggccgatctgtt

SEQ ID NO: 223773 - DNA, 19 bp, Homo sapiens
  siRNA target sequence for GCDH (NM_000159.1,684-702).
gcctatggccgatctgttt

SEQ ID NO: 223774 - DNA, 19 bp, Homo sapiens
  siRNA target sequence for GCDH (NM_000159.1,1048-1066).
gacatgctcactgagatta

SEQ ID NO: 223775 - DNA, 19 bp, Homo sapiens
  siRNA target sequence for GCDH (NM_000159.1,1214-1232).
ggatttctgacgagtatca

SEQ ID NO: 223776 - DNA, 19 bp, Homo sapiens
  siRNA target sequence for GCDH (NM_013976.1,1271-1289).
cctacgaagtcgttcagat

SEQ ID NO: 223777 - DNA, 19 bp, Homo sapiens
  siRNA target sequence for GCDH (NM_013976.1,1281-1299).
cgttcagatgtgttcctta

SEQ ID NO: 223778 - DNA, 19 bp, Homo sapiens
  siRNA target sequence for ACADS (NM_000017.1,235-253).
cggctcaggtgaagaagat

SEQ ID NO: 223779 - DNA, 19 bp, Homo sapiens
  siRNA target sequence for ACADS (NM_000017.1,298-316).
gcggtgctggcctcgatta

SEQ ID NO: 223780 - DNA, 19 bp, Homo sapiens
  siRNA target sequence for ACADS (NM_000017.1,301-319).
gtgctggcctcgattacct

SEQ ID NO: 223781 - DNA, 19 bp, Homo sapiens
  siRNA target sequence for ACADS (NM_000017.1,743-761).
cacggccaacctcatcttt

SEQ ID NO: 223782 - DNA, 19 bp, Homo sapiens
  siRNA target sequence for ACADS (NM_000017.1,801-819).
ccagggatgggcttcaaga

SEQ ID NO: 223783 - DNA, 19 bp, Homo sapiens
  siRNA target sequence for ACADS (NM_000017.1,1023-1041).
gctgccatgctgaaggata

SEQ ID NO: 223784 - DNA, 19 bp, Homo sapiens
  siRNA target sequence for ACADS (NM_000017.1,1024-1042).
ctgccatgctgaaggataa

SEQ ID NO: 223785 - DNA, 19 bp, Homo sapiens
  siRNA target sequence for IVD (NM_002225.2,444-462).
ccgtggacgatgcaatcaa

SEQ ID NO: 223786 - DNA, 19 bp, Homo sapiens
  siRNA target sequence for IVD (NM_002225.2,445-463).
cgtggacgatgcaatcaat

SEQ ID NO: 223787 - DNA, 19 bp, Homo sapiens
  siRNA target sequence for IVD (NM_002225.2,492-510).
gtcagaccatggctaagtt

SEQ ID NO: 223788 - DNA, 19 bp, Homo sapiens
  siRNA target sequence for IVD (NM_002225.2,551-569).
cgcagcaatgagttcaaga

SEQ ID NO: 223789 - DNA, 19 bp, Homo sapiens
  siRNA target sequence for IVD (NM_002225.2,702-720).
gagcagtggggctcagtta

SEQ ID NO: 223790 - DNA, 19 bp, Homo sapiens
  siRNA target sequence for IVD (NM_002225.2,774-792).
cccagaaagagaagtatct

SEQ ID NO: 223791 - DNA, 19 bp, Homo sapiens
  siRNA target sequence for IVD (NM_002225.2,947-965).
gctgacgtcctgattgtct

SEQ ID NO: 223792 - DNA, 19 bp, Homo sapiens
  siRNA target sequence for IVD (NM_002225.2,948-966).
ctgacgtcctgattgtcta

SEQ ID NO: 223793 - DNA, 19 bp, Homo sapiens
  siRNA target sequence for IVD (NM_002225.2,1031-1049).
ggtatgcctggctttagca

SEQ ID NO: 223794 - DNA, 19 bp, Homo sapiens
  siRNA target sequence for IVD (NM_002225.2,1040-1058).
ggctttagcacctctaaga

SEQ ID NO: 223795 - DNA, 19 bp, Homo sapiens
  siRNA target sequence for IVD (NM_002225.2,1041-1059).
gctttagcacctctaagaa

SEQ ID NO: 223796 - DNA, 19 bp, Homo sapiens
  siRNA target sequence for IVD (NM_002225.2,1073-1091).
gggatgaggggctctaaca

SEQ ID NO: 223797 - DNA, 19 bp, Homo sapiens
  siRNA target sequence for IVD (NM_002225.2,1086-1104).
ctaacacctgtgagctaat

SEQ ID NO: 223798 - DNA, 19 bp, Homo sapiens
  siRNA target sequence for IVD (NM_002225.2,1093-1111).
ctgtgagctaatctttgaa

SEQ ID NO: 223799 - DNA, 19 bp, Homo sapiens
  siRNA target sequence for IVD (NM_002225.2,1346-1364).
gcgtgtcggcagtatgtct

SEQ ID NO: 223800 - DNA, 19 bp, Homo sapiens
  siRNA target sequence for IVD (NM_002225.2,1347-1365).
cgtgtcggcagtatgtcta

SEQ ID NO: 223801 - DNA, 19 bp, Homo sapiens
  siRNA target sequence for IVD (NM_002225.2,1350-1368).
gtcggcagtatgtctacaa

SEQ ID NO: 223802 - DNA, 19 bp, Homo sapiens
  siRNA target sequence for IVD (NM_002225.2,1457-1475).
gccctggacggcattcagt

SEQ ID NO: 223803 - DNA, 19 bp, Homo sapiens
  siRNA target sequence for ACAD8 (NM_014384.1,259-277).
ccgagagatggctccaaat

SEQ ID NO: 223804 - DNA, 19 bp, Homo sapiens
  siRNA target sequence for ACAD8 (NM_014384.1,260-278).
cgagagatggctccaaata

SEQ ID NO: 223805 - DNA, 19 bp, Homo sapiens
  siRNA target sequence for ACAD8 (NM_014384.1,261-279).
gagagatggctccaaatat

SEQ ID NO: 223806 - DNA, 19 bp, Homo sapiens
  siRNA target sequence for ACAD8 (NM_014384.1,342-360).
gcttcggaggggtctacat

SEQ ID NO: 223807 - DNA, 19 bp, Homo sapiens
  siRNA target sequence for ACAD8 (NM_014384.1,343-361).
cttcggaggggtctacata

SEQ ID NO: 223808 - DNA, 19 bp, Homo sapiens
  siRNA target sequence for ACAD8 (NM_014384.1,351-369).
gggtctacatacaaacaga

SEQ ID NO: 223809 - DNA, 19 bp, Homo sapiens
  siRNA target sequence for ACAD8 (NM_014384.1,439-457).
cagcaccacagcctatata

SEQ ID NO: 223810 - DNA, 19 bp, Homo sapiens
  siRNA target sequence for ACAD8 (NM_014384.1,503-521).
gaggaacagaggcacaaat

SEQ ID NO: 223811 - DNA, 19 bp, Homo sapiens
  siRNA target sequence for ACAD8 (NM_014384.1,672-690).
ctggtgagtcagacatcta

SEQ ID NO: 223812 - DNA, 19 bp, Homo sapiens
  siRNA target sequence for ACAD8 (NM_014384.1,727-745).
gggcatctcatgcatagtt

SEQ ID NO: 223813 - DNA, 19 bp, Homo sapiens
  siRNA target sequence for ACAD8 (NM_014384.1,729-747).
gcatctcatgcatagttgt

SEQ ID NO: 223814 - DNA, 19 bp, Homo sapiens
  siRNA target sequence for ACAD8 (NM_014384.1,910-928).
cggagggaggatcaatatt

SEQ ID NO: 223815 - DNA, 19 bp, Homo sapiens
  siRNA target sequence for ACAD8 (NM_014384.1,914-932).
gggaggatcaatattgctt

SEQ ID NO: 223816 - DNA, 19 bp, Homo sapiens
  siRNA target sequence for ACAD8 (NM_014384.1,1020-1038).
gtaaccagtacttgcaatt

SEQ ID NO: 223817 - DNA, 19 bp, Homo sapiens
  siRNA target sequence for ACAD8 (NM_014384.1,1024-1042).
ccagtacttgcaattcaca

SEQ ID NO: 223818 - DNA, 19 bp, Homo sapiens
  siRNA target sequence for ACAD8 (NM_014384.1,1273-1291).
gattctagaaggtagcaat

SEQ ID NO: 223819 - DNA, 19 bp, Homo sapiens
  siRNA target sequence for ACAD9 (NM_014049.3,192-210).
ctttcgccaaagagctttt

SEQ ID NO: 223820 - DNA, 19 bp, Homo sapiens
  siRNA target sequence for ACAD9 (NM_014049.3,212-230).
ctaggcaaaatcaagaaga

SEQ ID NO: 223821 - DNA, 19 bp, Homo sapiens
  siRNA target sequence for ACAD9 (NM_014049.3,254-272).
gttagccaagatgaactta

SEQ ID NO: 223822 - DNA, 19 bp, Homo sapiens
  siRNA target sequence for ACAD9 (NM_014049.3,269-287).
cttaatgaaatcaatcagt

SEQ ID NO: 223823 - DNA, 19 bp, Homo sapiens
  siRNA target sequence for ACAD9 (NM_014049.3,289-307).
cttgggacccgtggaaaaa

SEQ ID NO: 223824 - DNA, 19 bp, Homo sapiens
  siRNA target sequence for ACAD9 (NM_014049.3,293-311).
ggacccgtggaaaaattct

SEQ ID NO: 223825 - DNA, 19 bp, Homo sapiens
  siRNA target sequence for ACAD9 (NM_014049.3,294-312).
gacccgtggaaaaattctt

SEQ ID NO: 223826 - DNA, 19 bp, Homo sapiens
  siRNA target sequence for ACAD9 (NM_014049.3,296-314).
cccgtggaaaaattcttca

SEQ ID NO: 223827 - DNA, 19 bp, Homo sapiens
  siRNA target sequence for ACAD9 (NM_014049.3,322-340).
ggtggactcccgaaaaatt

SEQ ID NO: 223828 - DNA, 19 bp, Homo sapiens
  siRNA target sequence for ACAD9 (NM_014049.3,382-400).
gaagagcctagggcttttt

SEQ ID NO: 223829 - DNA, 19 bp, Homo sapiens
  siRNA target sequence for ACAD9 (NM_014049.3,656-674).
cggagcagagccacactaa

SEQ ID NO: 223830 - DNA, 19 bp, Homo sapiens
  siRNA target sequence for ACAD9 (NM_014049.3,658-676).
gagcagagccacactaagt

SEQ ID NO: 223831 - DNA, 19 bp, Homo sapiens
  siRNA target sequence for ACAD9 (NM_014049.3,660-678).
gcagagccacactaagtga

SEQ ID NO: 223832 - DNA, 19 bp, Homo sapiens
  siRNA target sequence for ACAD9 (NM_014049.3,661-679).
cagagccacactaagtgaa

SEQ ID NO: 223833 - DNA, 19 bp, Homo sapiens
  siRNA target sequence for ACAD9 (NM_014049.3,666-684).
ccacactaagtgaagacaa

SEQ ID NO: 223834 - DNA, 19 bp, Homo sapiens
  siRNA target sequence for ACAD9 (NM_014049.3,708-726).
ccaaggtctggattactaa

SEQ ID NO: 223835 - DNA, 19 bp, Homo sapiens
  siRNA target sequence for ACAD9 (NM_014049.3,763-781).
gactgaggtcgttgattct

SEQ ID NO: 223836 - DNA, 19 bp, Homo sapiens
  siRNA target sequence for ACAD9 (NM_014049.3,765-783).
ctgaggtcgttgattctga

SEQ ID NO: 223837 - DNA, 19 bp, Homo sapiens
  siRNA target sequence for ACAD9 (NM_014049.3,877-895).
gggctccaacacttgtgaa

SEQ ID NO: 223838 - DNA, 19 bp, Homo sapiens
  siRNA target sequence for ACAD9 (NM_014049.3,886-904).
cacttgtgaagtccatttt

SEQ ID NO: 223839 - DNA, 19 bp, Homo sapiens
  siRNA target sequence for ACAD9 (NM_014049.3,888-906).
cttgtgaagtccattttga

SEQ ID NO: 223840 - DNA, 19 bp, Homo sapiens
  siRNA target sequence for ACAD9 (NM_014049.3,1018-1036).
gctgctcaagagattgatt

SEQ ID NO: 223841 - DNA, 19 bp, Homo sapiens
  siRNA target sequence for ACAD9 (NM_014049.3,1081-1099).
gaggctcagtgaatttgga

SEQ ID NO: 223842 - DNA, 19 bp, Homo sapiens
  siRNA target sequence for ACAD9 (NM_014049.3,1137-1155).
cttacgtcatggagagtat

SEQ ID NO: 223843 - DNA, 19 bp, Homo sapiens
  siRNA target sequence for ACAD9 (NM_014049.3,1348-1366).
catcttcgagggaaccaat

SEQ ID NO: 223844 - DNA, 19 bp, Homo sapiens
  siRNA target sequence for ACAD9 (NM_014049.3,1367-1385).
gagattctccggatgtaca

SEQ ID NO: 223845 - DNA, 19 bp, Homo sapiens
  siRNA target sequence for ACAD9 (NM_014049.3,1563-1581).
cggacagtgccaacaagtt

SEQ ID NO: 223846 - DNA, 19 bp, Homo sapiens
  siRNA target sequence for ACAD9 (NM_014049.3,1564-1582).
ggacagtgccaacaagttt

SEQ ID NO: 223847 - DNA, 19 bp, Homo sapiens
  siRNA target sequence for ACAD9 (NM_014049.3,1788-1806).
ccttctgcgtggaagctta

SEQ ID NO: 223848 - DNA, 19 bp, Homo sapiens
  siRNA target sequence for ACAD9 (NM_014049.3,1859-1877).
ctagatgagcagattaaga

SEQ ID NO: 223849 - DNA, 19 bp, Homo sapiens
  siRNA target sequence for ACAD9 (NM_014049.3,1900-1918).
gaagcgagcctatatctgt

SEQ ID NO: 223850 - DNA, 19 bp, Homo sapiens
  siRNA target sequence for ACADM (NM_000016.2,282-300).
cgtgaaccaggattaggat

SEQ ID NO: 223851 - DNA, 19 bp, Homo sapiens
  siRNA target sequence for ACADM (NM_000016.2,288-306).
ccaggattaggatttagtt

SEQ ID NO: 223852 - DNA, 19 bp, Homo sapiens
  siRNA target sequence for ACADM (NM_000016.2,289-307).
caggattaggatttagttt

SEQ ID NO: 223853 - DNA, 19 bp, Homo sapiens
  siRNA target sequence for ACADM (NM_000016.2,336-354).
caagctactgctcgtaaat

SEQ ID NO: 223854 - DNA, 19 bp, Homo sapiens
  siRNA target sequence for ACADM (NM_000016.2,374-392).
cccagtggctgcagaatat

SEQ ID NO: 223855 - DNA, 19 bp, Homo sapiens
  siRNA target sequence for ACADM (NM_000016.2,411-429).
ccagtccccctaattagaa

SEQ ID NO: 223856 - DNA, 19 bp, Homo sapiens
  siRNA target sequence for ACADM (NM_000016.2,438-456).
gaacttggtttaatgaaca

SEQ ID NO: 223857 - DNA, 19 bp, Homo sapiens
  siRNA target sequence for ACADM (NM_000016.2,544-562).
gggttcagactgctattga

SEQ ID NO: 223858 - DNA, 19 bp, Homo sapiens
  siRNA target sequence for ACADM (NM_000016.2,575-593).
ggggcaaatgcctattatt

SEQ ID NO: 223859 - DNA, 19 bp, Homo sapiens
  siRNA target sequence for ACADM (NM_000016.2,576-594).
gggcaaatgcctattatta

SEQ ID NO: 223860 - DNA, 19 bp, Homo sapiens
  siRNA target sequence for ACADM (NM_000016.2,648-666).
ccattgatgtgtgcttatt

SEQ ID NO: 223861 - DNA, 19 bp, Homo sapiens
  siRNA target sequence for ACADM (NM_000016.2,693-711).
gatgtagctggtataaaga

SEQ ID NO: 223862 - DNA, 19 bp, Homo sapiens
  siRNA target sequence for ACADM (NM_000016.2,808-826).
gttctgatccagatcctaa

SEQ ID NO: 223863 - DNA, 19 bp, Homo sapiens
  siRNA target sequence for ACADM (NM_000016.2,887-905).
gattgggagaaaggaatta

SEQ ID NO: 223864 - DNA, 19 bp, Homo sapiens
  siRNA target sequence for ACADM (NM_000016.2,908-926).
catgggccagcgatgttca

SEQ ID NO: 223865 - DNA, 19 bp, Homo sapiens
  siRNA target sequence for ACADM (NM_000016.2,911-929).
gggccagcgatgttcagat

SEQ ID NO: 223866 - DNA, 19 bp, Homo sapiens
  siRNA target sequence for ACADM (NM_000016.2,912-930).
ggccagcgatgttcagata

SEQ ID NO: 223867 - DNA, 19 bp, Homo sapiens
  siRNA target sequence for ACADM (NM_000016.2,914-932).
ccagcgatgttcagatact

SEQ ID NO: 223868 - DNA, 19 bp, Homo sapiens
  siRNA target sequence for ACADM (NM_000016.2,915-933).
cagcgatgttcagatacta

SEQ ID NO: 223869 - DNA, 19 bp, Homo sapiens
  siRNA target sequence for ACADM (NM_000016.2,917-935).
gcgatgttcagatactaga

SEQ ID NO: 223870 - DNA, 19 bp, Homo sapiens
  siRNA target sequence for ACADM (NM_000016.2,925-943).
cagatactagaggaattgt

SEQ ID NO: 223871 - DNA, 19 bp, Homo sapiens
  siRNA target sequence for ACADM (NM_000016.2,927-945).
gatactagaggaattgtct

SEQ ID NO: 223872 - DNA, 19 bp, Homo sapiens
  siRNA target sequence for ACADM (NM_000016.2,937-955).
gaattgtcttcgaagatgt

SEQ ID NO: 223873 - DNA, 19 bp, Homo sapiens
  siRNA target sequence for ACADM (NM_000016.2,1008-1026).
gcaatgggagcttttgata

SEQ ID NO: 223874 - DNA, 19 bp, Homo sapiens
  siRNA target sequence for ACADM (NM_000016.2,1160-1178).
ggctgaaatggcaatgaaa

SEQ ID NO: 223875 - DNA, 19 bp, Homo sapiens
  siRNA target sequence for ACADM (NM_000016.2,1179-1197).
gttgaactagctagaatga

SEQ ID NO: 223876 - DNA, 19 bp, Homo sapiens
  siRNA target sequence for ACADM (NM_000016.2,1182-1200).
gaactagctagaatgagtt

SEQ ID NO: 223877 - DNA, 19 bp, Homo sapiens
  siRNA target sequence for ACADM (NM_000016.2,1224-1242).
gattctggtcgtcgaaata

SEQ ID NO: 223878 - DNA, 19 bp, Homo sapiens
  siRNA target sequence for ACADM (NM_000016.2,1228-1246).
ctggtcgtcgaaataccta

SEQ ID NO: 223879 - DNA, 19 bp, Homo sapiens
  siRNA target sequence for ACADM (NM_000016.2,1230-1248).
ggtcgtcgaaatacctatt

SEQ ID NO: 223880 - DNA, 19 bp, Homo sapiens
  siRNA target sequence for ACADM (NM_000016.2,1231-1249).
gtcgtcgaaatacctatta

SEQ ID NO: 223881 - DNA, 19 bp, Homo sapiens
  siRNA target sequence for ACADM (NM_000016.2,1366-1384).
gggatgccaaaatctatca

SEQ ID NO: 223882 - DNA, 19 bp, Homo sapiens
  siRNA target sequence for ACADM (NM_000016.2,1371-1389).
gccaaaatctatcagattt

SEQ ID NO: 223883 - DNA, 19 bp, Homo sapiens
  siRNA target sequence for ACADM (NM_000016.2,1395-1413).
ggtacttcacaaattcaaa

SEQ ID NO: 223884 - DNA, 19 bp, Homo sapiens
  siRNA target sequence for ACADM (NM_000016.2,1426-1444).
cccgtgaacacattgacaa

SEQ ID NO: 223885 - DNA, 19 bp, Homo sapiens
  siRNA target sequence for ACADSB (NM_001609.2,43-61).
ggcagcaggctgctaagaa

SEQ ID NO: 223886 - DNA, 19 bp, Homo sapiens
  siRNA target sequence for ACADSB (NM_001609.2,100-118).
cctcatgtctcaaaatctt

SEQ ID NO: 223887 - DNA, 19 bp, Homo sapiens
  siRNA target sequence for ACADSB (NM_001609.2,123-141).
gtcagaagctctactcaat

SEQ ID NO: 223888 - DNA, 19 bp, Homo sapiens
  siRNA target sequence for ACADSB (NM_001609.2,146-164).
caaataatggaatacactt

SEQ ID NO: 223889 - DNA, 19 bp, Homo sapiens
  siRNA target sequence for ACADSB (NM_001609.2,279-297).
ggagaaatcagtaatacaa

SEQ ID NO: 223890 - DNA, 19 bp, Homo sapiens
  siRNA target sequence for ACADSB (NM_001609.2,287-305).
cagtaatacaaggattatt

SEQ ID NO: 223891 - DNA, 19 bp, Homo sapiens
  siRNA target sequence for ACADSB (NM_001609.2,347-365).
gaggcacaggagcttcatt

SEQ ID NO: 223892 - DNA, 19 bp, Homo sapiens
  siRNA target sequence for ACADSB (NM_001609.2,371-389).
ccactgtgctcgtgataga

SEQ ID NO: 223893 - DNA, 19 bp, Homo sapiens
  siRNA target sequence for ACADSB (NM_001609.2,378-396).
gctcgtgatagaggaatta

SEQ ID NO: 223894 - DNA, 19 bp, Homo sapiens
  siRNA target sequence for ACADSB (NM_001609.2,390-408).
ggaattagccaaagttgat

SEQ ID NO: 223895 - DNA, 19 bp, Homo sapiens
  siRNA target sequence for ACADSB (NM_001609.2,430-448).
gagatccagaacacattaa

SEQ ID NO: 223896 - DNA, 19 bp, Homo sapiens
  siRNA target sequence for ACADSB (NM_001609.2,432-450).
gatccagaacacattaatt

SEQ ID NO: 223897 - DNA, 19 bp, Homo sapiens
  siRNA target sequence for ACADSB (NM_001609.2,501-519).
gcctcagctcactacagaa

SEQ ID NO: 223898 - DNA, 19 bp, Homo sapiens
  siRNA target sequence for ACADSB (NM_001609.2,551-569).
gagcaggtagtgactcatt

SEQ ID NO: 223899 - DNA, 19 bp, Homo sapiens
  siRNA target sequence for ACADSB (NM_001609.2,556-574).
ggtagtgactcatttgctt

SEQ ID NO: 223900 - DNA, 19 bp, Homo sapiens
  siRNA target sequence for ACADSB (NM_001609.2,560-578).
gtgactcatttgctttgaa

SEQ ID NO: 223901 - DNA, 19 bp, Homo sapiens
  siRNA target sequence for ACADSB (NM_001609.2,587-605).
ctgataaagagggagatta

SEQ ID NO: 223902 - DNA, 19 bp, Homo sapiens
  siRNA target sequence for ACADSB (NM_001609.2,610-628).
gtcctcaatggatcaaaga

SEQ ID NO: 223903 - DNA, 19 bp, Homo sapiens
  siRNA target sequence for ACADSB (NM_001609.2,682-700).
gaccctaccattggatata

SEQ ID NO: 223904 - DNA, 19 bp, Homo sapiens
  siRNA target sequence for ACADSB (NM_001609.2,694-712).
ggatataagggaattacct

SEQ ID NO: 223905 - DNA, 19 bp, Homo sapiens
  siRNA target sequence for ACADSB (NM_001609.2,702-720).
gggaattacctccttctta

SEQ ID NO: 223906 - DNA, 19 bp, Homo sapiens
  siRNA target sequence for ACADSB (NM_001609.2,704-722).
gaattacctccttcttagt

SEQ ID NO: 223907 - DNA, 19 bp, Homo sapiens
  siRNA target sequence for ACADSB (NM_001609.2,788-806).
ccacctgcccgttaacatt

SEQ ID NO: 223908 - DNA, 19 bp, Homo sapiens
  siRNA target sequence for ACADSB (NM_001609.2,792-810).
ctgcccgttaacattcgaa

SEQ ID NO: 223909 - DNA, 19 bp, Homo sapiens
  siRNA target sequence for ACADSB (NM_001609.2,794-812).
gcccgttaacattcgaaaa

SEQ ID NO: 223910 - DNA, 19 bp, Homo sapiens
  siRNA target sequence for ACADSB (NM_001609.2,795-813).
cccgttaacattcgaaaat

SEQ ID NO: 223911 - DNA, 19 bp, Homo sapiens
  siRNA target sequence for ACADSB (NM_001609.2,797-815).
cgttaacattcgaaaatgt

SEQ ID NO: 223912 - DNA, 19 bp, Homo sapiens
  siRNA target sequence for ACADSB (NM_001609.2,925-943).
gcgcaaggatgttttgact

SEQ ID NO: 223913 - DNA, 19 bp, Homo sapiens
  siRNA target sequence for ACADSB (NM_001609.2,926-944).
cgcaaggatgttttgacta

SEQ ID NO: 223914 - DNA, 19 bp, Homo sapiens
  siRNA target sequence for ACADSB (NM_001609.2,931-949).
ggatgttttgactacacta

SEQ ID NO: 223915 - DNA, 19 bp, Homo sapiens
  siRNA target sequence for ACADSB (NM_001609.2,932-950).
gatgttttgactacactat

SEQ ID NO: 223916 - DNA, 19 bp, Homo sapiens
  siRNA target sequence for ACADSB (NM_001609.2,1045-1063).
gctgcaagattactaacat

SEQ ID NO: 223917 - DNA, 19 bp, Homo sapiens
  siRNA target sequence for ACADSB (NM_001609.2,1046-1064).
ctgcaagattactaacata

SEQ ID NO: 223918 - DNA, 19 bp, Homo sapiens
  siRNA target sequence for ACADSB (NM_001609.2,1087-1105).
gctggaaagccattcataa

SEQ ID NO: 223919 - DNA, 19 bp, Homo sapiens
  siRNA target sequence for ACADSB (NM_001609.2,1111-1129).
gcgtcaatggccaaatact

SEQ ID NO: 223920 - DNA, 19 bp, Homo sapiens
  siRNA target sequence for ACADSB (NM_001609.2,1113-1131).
gtcaatggccaaatactat

SEQ ID NO: 223921 - DNA, 19 bp, Homo sapiens
  siRNA target sequence for ACADSB (NM_001609.2,1150-1168).
caaacaacgagtaaatgta

SEQ ID NO: 223922 - DNA, 19 bp, Homo sapiens
  siRNA target sequence for ACADSB (NM_001609.2,1186-1204).
gtaggctacaccaaagatt

SEQ ID NO: 223923 - DNA, 19 bp, Homo sapiens
  siRNA target sequence for ACADSB (NM_001609.2,1225-1243).
cgagatgcaaagattggta

SEQ ID NO: 223924 - DNA, 19 bp, Homo sapiens
  siRNA target sequence for ACADSB (NM_001609.2,1231-1249).
gcaaagattggtacgatat

SEQ ID NO: 223925 - DNA, 19 bp, Homo sapiens
  siRNA target sequence for ACADSB (NM_001609.2,1232-1250).
caaagattggtacgatata

SEQ ID NO: 223926 - DNA, 19 bp, Homo sapiens
  siRNA target sequence for ACADSB (NM_001609.2,1236-1254).
gattggtacgatatatgaa

SEQ ID NO: 223927 - DNA, 19 bp, Homo sapiens
  siRNA target sequence for ACADSB (NM_001609.2,1275-1293).
gaacaccattgcaaagcat

SEQ ID NO: 223928 - DNA, 19 bp, Homo sapiens
  siRNA target sequence for SRD5A1 (NM_001047.1,412-430).
cgggcatcggtgcttaatt

SEQ ID NO: 223929 - DNA, 19 bp, Homo sapiens
  siRNA target sequence for SRD5A1 (NM_001047.1,414-432).
ggcatcggtgcttaattta

SEQ ID NO: 223930 - DNA, 19 bp, Homo sapiens
  siRNA target sequence for SRD5A1 (NM_001047.1,501-519).
cctgtaacggctatttgca

SEQ ID NO: 223931 - DNA, 19 bp, Homo sapiens
  siRNA target sequence for SRD5A1 (NM_001047.1,502-520).
ctgtaacggctatttgcaa

SEQ ID NO: 223932 - DNA, 19 bp, Homo sapiens
  siRNA target sequence for SRD5A1 (NM_001047.1,567-585).
cagatccccgttttctaat

SEQ ID NO: 223933 - DNA, 19 bp, Homo sapiens
  siRNA target sequence for SRD5A1 (NM_001047.1,572-590).
ccccgttttctaataggtt

SEQ ID NO: 223934 - DNA, 19 bp, Homo sapiens
  siRNA target sequence for SRD5A1 (NM_001047.1,573-591).
cccgttttctaataggttt

SEQ ID NO: 223935 - DNA, 19 bp, Homo sapiens
  siRNA target sequence for SRD5A1 (NM_001047.1,574-592).
ccgttttctaataggtttt

SEQ ID NO: 223936 - DNA, 19 bp, Homo sapiens
  siRNA target sequence for SRD5A1 (NM_001047.1,626-644).
cattcagatcatatcctaa

SEQ ID NO: 223937 - DNA, 19 bp, Homo sapiens
  siRNA target sequence for SRD5A1 (NM_001047.1,635-653).
catatcctaaggaatctca

SEQ ID NO: 223938 - DNA, 19 bp, Homo sapiens
  siRNA target sequence for SRD5A1 (NM_001047.1,684-702).
caaggggaggcttatttga

SEQ ID NO: 223939 - DNA, 19 bp, Homo sapiens
  siRNA target sequence for SRD5A1 (NM_001047.1,687-705).
ggggaggcttatttgaata

SEQ ID NO: 223940 - DNA, 19 bp, Homo sapiens
  siRNA target sequence for SRD5A1 (NM_001047.1,690-708).
gaggcttatttgaatacgt

SEQ ID NO: 223941 - DNA, 19 bp, Homo sapiens
  siRNA target sequence for SRD5A1 (NM_001047.1,692-710).
ggcttatttgaatacgtaa

SEQ ID NO: 223942 - DNA, 19 bp, Homo sapiens
  siRNA target sequence for SRD5A1 (NM_001047.1,706-724).
cgtaactgcagccaactat

SEQ ID NO: 223943 - DNA, 19 bp, Homo sapiens
  siRNA target sequence for SRD5A1 (NM_001047.1,707-725).
gtaactgcagccaactatt

SEQ ID NO: 223944 - DNA, 19 bp, Homo sapiens
  siRNA target sequence for SRD5A1 (NM_001047.1,841-859).
gtggtacctccggaaattt

SEQ ID NO: 223945 - DNA, 19 bp, Homo sapiens
  siRNA target sequence for SRD5A1 (NM_001047.1,843-861).
ggtacctccggaaatttga

SEQ ID NO: 223946 - DNA, 19 bp, Homo sapiens
  siRNA target sequence for SRD5A1 (NM_001047.1,860-878).
gaagagtatccaaagttca

SEQ ID NO: 223947 - DNA, 19 bp, Homo sapiens
  siRNA target sequence for SRD5A2 (NM_000348.2,304-322).
cacctgggacggtacttct

SEQ ID NO: 223948 - DNA, 19 bp, Homo sapiens
  siRNA target sequence for SRD5A2 (NM_000348.2,383-401).
gaggccttatccagctata

SEQ ID NO: 223949 - DNA, 19 bp, Homo sapiens
  siRNA target sequence for SRD5A2 (NM_000348.2,387-405).
ccttatccagctatactca

SEQ ID NO: 223950 - DNA, 19 bp, Homo sapiens
  siRNA target sequence for SRD5A2 (NM_000348.2,422-440).
cttctgcactggaaatgga

SEQ ID NO: 223951 - DNA, 19 bp, Homo sapiens
  siRNA target sequence for SRD5A2 (NM_000348.2,444-462).
cttcaaggctactatctga

SEQ ID NO: 223952 - DNA, 19 bp, Homo sapiens
  siRNA target sequence for SRD5A2 (NM_000348.2,447-465).
caaggctactatctgattt

SEQ ID NO: 223953 - DNA, 19 bp, Homo sapiens
  siRNA target sequence for SRD5A2 (NM_000348.2,450-468).
ggctactatctgatttact

SEQ ID NO: 223954 - DNA, 19 bp, Homo sapiens
  siRNA target sequence for SRD5A2 (NM_000348.2,496-514).
cagacatacggtttagctt

SEQ ID NO: 223955 - DNA, 19 bp, Homo sapiens
  siRNA target sequence for SRD5A2 (NM_000348.2,542-560).
gggaataaacattcatagt

SEQ ID NO: 223956 - DNA, 19 bp, Homo sapiens
  siRNA target sequence for SRD5A2 (NM_000348.2,551-569).
cattcatagtgactatata

SEQ ID NO: 223957 - DNA, 19 bp, Homo sapiens
  siRNA target sequence for SRD5A2 (NM_000348.2,615-633).
caaggtggcttgtttacgt

SEQ ID NO: 223958 - DNA, 19 bp, Homo sapiens
  siRNA target sequence for SRD5A2 (NM_000348.2,621-639).
ggcttgtttacgtatgttt

SEQ ID NO: 223959 - DNA, 19 bp, Homo sapiens
  siRNA target sequence for SRD5A2 (NM_000348.2,653-671).
cctcggtgagatcattgaa

SEQ ID NO: 223960 - DNA, 19 bp, Homo sapiens
  siRNA target sequence for SRD5A2 (NM_000348.2,654-672).
ctcggtgagatcattgaat

SEQ ID NO: 223961 - DNA, 19 bp, Homo sapiens
  siRNA target sequence for SRD5A2 (NM_000348.2,658-676).
gtgagatcattgaatggat

SEQ ID NO: 223962 - DNA, 19 bp, Homo sapiens
  siRNA target sequence for SRD5A2 (NM_000348.2,701-719).
cctcccagcacttgcattt

SEQ ID NO: 223963 - DNA, 19 bp, Homo sapiens
  siRNA target sequence for SRD5A2 (NM_000348.2,754-772).
cttttcaccaccataggtt

SEQ ID NO: 223964 - DNA, 19 bp, Homo sapiens
  siRNA target sequence for SRD5A2 (NM_000348.2,769-787).
ggttctacctcaagatgtt

SEQ ID NO: 223965 - DNA, 19 bp, Homo sapiens
  siRNA target sequence for SRD5A2 (NM_000348.2,807-825).
cggaaagcccttattccat

SEQ ID NO: 223966 - DNA, 19 bp, Homo sapiens
  siRNA target sequence for DHODH (NM_001361.1,97-115).
cgggagatgagcgtttcta

SEQ ID NO: 223967 - DNA, 19 bp, Homo sapiens
  siRNA target sequence for DHODH (NM_001361.1,203-221).
ccttccacgggccagattt

SEQ ID NO: 223968 - DNA, 19 bp, Homo sapiens
  siRNA target sequence for DHODH (NM_001361.1,245-263).
gagagttctgggccataaa

SEQ ID NO: 223969 - DNA, 19 bp, Homo sapiens
  siRNA target sequence for DHODH (NM_001361.1,247-265).
gagttctgggccataaatt

SEQ ID NO: 223970 - DNA, 19 bp, Homo sapiens
  siRNA target sequence for DHODH (NM_001361.1,257-275).
ccataaattccgaaatcca

SEQ ID NO: 223971 - DNA, 19 bp, Homo sapiens
  siRNA target sequence for DHODH (NM_001361.1,313-331).
ccgtggacggactttataa

SEQ ID NO: 223972 - DNA, 19 bp, Homo sapiens
  siRNA target sequence for DHODH (NM_001361.1,315-333).
gtggacggactttataaga

SEQ ID NO: 223973 - DNA, 19 bp, Homo sapiens
  siRNA target sequence for DHODH (NM_001361.1,417-435).
gaggaccaagctgtcatta

SEQ ID NO: 223974 - DNA, 19 bp, Homo sapiens
  siRNA target sequence for DHODH (NM_001361.1,429-447).
gtcattaacaggtatggat

SEQ ID NO: 223975 - DNA, 19 bp, Homo sapiens
  siRNA target sequence for DHODH (NM_001361.1,437-455).
caggtatggatttaacagt

SEQ ID NO: 223976 - DNA, 19 bp, Homo sapiens
  siRNA target sequence for DHODH (NM_001361.1,807-825).
gccagtgtggtcaaagagt

SEQ ID NO: 223977 - DNA, 19 bp, Homo sapiens
  siRNA target sequence for DHODH (NM_001361.1,808-826).
ccagtgtggtcaaagagtt

SEQ ID NO: 223978 - DNA, 19 bp, Homo sapiens
  siRNA target sequence for DHODH (NM_001361.1,829-847).
gcatcgatgggctgattgt

SEQ ID NO: 223979 - DNA, 19 bp, Homo sapiens
  siRNA target sequence for DHODH (NM_001361.1,830-848).
catcgatgggctgattgtt

SEQ ID NO: 223980 - DNA, 19 bp, Homo sapiens
  siRNA target sequence for DHODH (NM_001361.1,885-903).
ggtgccctgcgctctgaaa

SEQ ID NO: 223981 - DNA, 19 bp, Homo sapiens
  siRNA target sequence for DHODH (NM_001361.1,929-947).
ccgggatttatcaactcaa

SEQ ID NO: 223982 - DNA, 19 bp, Homo sapiens
  siRNA target sequence for DHODH (NM_001361.1,930-948).
cgggatttatcaactcaaa

SEQ ID NO: 223983 - DNA, 19 bp, Homo sapiens
  siRNA target sequence for DHODH (NM_001361.1,1095-1113).
cccgttgtgggcaaagtca

SEQ ID NO: 223984 - DNA, 19 bp, Homo sapiens
  siRNA target sequence for DHODH (NM_001361.1,1096-1114).
ccgttgtgggcaaagtcaa

SEQ ID NO: 223985 - DNA, 19 bp, Homo sapiens
  siRNA target sequence for DPYD (NM_000110.2,127-145).
cggcggacatcgagagtat

SEQ ID NO: 223986 - DNA, 19 bp, Homo sapiens
  siRNA target sequence for DPYD (NM_000110.2,138-156).
gagagtatcctggctttaa

SEQ ID NO: 223987 - DNA, 19 bp, Homo sapiens
  siRNA target sequence for DPYD (NM_000110.2,140-158).
gagtatcctggctttaaat

SEQ ID NO: 223988 - DNA, 19 bp, Homo sapiens
  siRNA target sequence for DPYD (NM_000110.2,191-209).
cacttcggccaagaaatta

SEQ ID NO: 223989 - DNA, 19 bp, Homo sapiens
  siRNA target sequence for DPYD (NM_000110.2,193-211).
cttcggccaagaaattaga

SEQ ID NO: 223990 - DNA, 19 bp, Homo sapiens
  siRNA target sequence for DPYD (NM_000110.2,318-336).
ctccgagaagcaatgagat

SEQ ID NO: 223991 - DNA, 19 bp, Homo sapiens
  siRNA target sequence for DPYD (NM_000110.2,365-383).
gaagagctgtccaactaat

SEQ ID NO: 223992 - DNA, 19 bp, Homo sapiens
  siRNA target sequence for DPYD (NM_000110.2,368-386).
gagctgtccaactaatctt

SEQ ID NO: 223993 - DNA, 19 bp, Homo sapiens
  siRNA target sequence for DPYD (NM_000110.2,370-388).
gctgtccaactaatcttga

SEQ ID NO: 223994 - DNA, 19 bp, Homo sapiens
  siRNA target sequence for DPYD (NM_000110.2,371-389).
ctgtccaactaatcttgat

SEQ ID NO: 223995 - DNA, 19 bp, Homo sapiens
  siRNA target sequence for DPYD (NM_000110.2,375-393).
ccaactaatcttgatatta

SEQ ID NO: 223996 - DNA, 19 bp, Homo sapiens
  siRNA target sequence for DPYD (NM_000110.2,439-457).
ctaagatgatattttctga

SEQ ID NO: 223997 - DNA, 19 bp, Homo sapiens
  siRNA target sequence for DPYD (NM_000110.2,537-555).
gaagagggacccattaata

SEQ ID NO: 223998 - DNA, 19 bp, Homo sapiens
  siRNA target sequence for DPYD (NM_000110.2,561-579).
ggattgcagcaatttgcta

SEQ ID NO: 223999 - DNA, 19 bp, Homo sapiens
  siRNA target sequence for DPYD (NM_000110.2,580-598).
ctgaggtattcaaagcaat

SEQ ID NO: 224000 - DNA, 19 bp, Homo sapiens
  siRNA target sequence for DPYD (NM_000110.2,584-602).
ggtattcaaagcaatgagt

SEQ ID NO: 224001 - DNA, 19 bp, Homo sapiens
  siRNA target sequence for DPYD (NM_000110.2,585-603).
gtattcaaagcaatgagta

SEQ ID NO: 224002 - DNA, 19 bp, Homo sapiens
  siRNA target sequence for DPYD (NM_000110.2,601-619).
gtatcccacagatcagaaa

SEQ ID NO: 224003 - DNA, 19 bp, Homo sapiens
  siRNA target sequence for DPYD (NM_000110.2,768-786).
gttggtggtttaagtactt

SEQ ID NO: 224004 - DNA, 19 bp, Homo sapiens
  siRNA target sequence for DPYD (NM_000110.2,800-818).
gttccggctgccgtatgat

SEQ ID NO: 224005 - DNA, 19 bp, Homo sapiens
  siRNA target sequence for DPYD (NM_000110.2,805-823).
ggctgccgtatgatgtagt

SEQ ID NO: 224006 - DNA, 19 bp, Homo sapiens
  siRNA target sequence for DPYD (NM_000110.2,809-827).
gccgtatgatgtagtgaat

SEQ ID NO: 224007 - DNA, 19 bp, Homo sapiens
  siRNA target sequence for DPYD (NM_000110.2,810-828).
ccgtatgatgtagtgaatt

SEQ ID NO: 224008 - DNA, 19 bp, Homo sapiens
  siRNA target sequence for DPYD (NM_000110.2,811-829).
cgtatgatgtagtgaattt

SEQ ID NO: 224009 - DNA, 19 bp, Homo sapiens
  siRNA target sequence for DPYD (NM_000110.2,851-869).
ccttggtgtaaagataatt

SEQ ID NO: 224010 - DNA, 19 bp, Homo sapiens
  siRNA target sequence for DPYD (NM_000110.2,871-889).
gcggtaaaagcctttcagt

SEQ ID NO: 224011 - DNA, 19 bp, Homo sapiens
  siRNA target sequence for DPYD (NM_000110.2,937-955).
ctttcattggaataggttt

SEQ ID NO: 224012 - DNA, 19 bp, Homo sapiens
  siRNA target sequence for DPYD (NM_000110.2,956-974).
gccagaacccaataaagat

SEQ ID NO: 224013 - DNA, 19 bp, Homo sapiens
  siRNA target sequence for DPYD (NM_000110.2,994-1012).
cgcaggaccaggggtttta

SEQ ID NO: 224014 - DNA, 19 bp, Homo sapiens
  siRNA target sequence for DPYD (NM_000110.2,995-1013).
gcaggaccaggggttttat

SEQ ID NO: 224015 - DNA, 19 bp, Homo sapiens
  siRNA target sequence for DPYD (NM_000110.2,1004-1022).
ggggttttatacatccaaa

SEQ ID NO: 224016 - DNA, 19 bp, Homo sapiens
  siRNA target sequence for DPYD (NM_000110.2,1096-1114).
ggggagtcgtgattgtact

SEQ ID NO: 224017 - DNA, 19 bp, Homo sapiens
  siRNA target sequence for DPYD (NM_000110.2,1097-1115).
gggagtcgtgattgtactt

SEQ ID NO: 224018 - DNA, 19 bp, Homo sapiens
  siRNA target sequence for DPYD (NM_000110.2,1176-1194).
gtgttcatcgtcttcagaa

SEQ ID NO: 224019 - DNA, 19 bp, Homo sapiens
  siRNA target sequence for DPYD (NM_000110.2,1190-1208).
cagaaaaggctttgttaat

SEQ ID NO: 224020 - DNA, 19 bp, Homo sapiens
  siRNA target sequence for DPYD (NM_000110.2,1272-1290).
ctgtccccacggaaggtta

SEQ ID NO: 224021 - DNA, 19 bp, Homo sapiens
  siRNA target sequence for DPYD (NM_000110.2,1274-1292).
gtccccacggaaggttata

SEQ ID NO: 224022 - DNA, 19 bp, Homo sapiens
  siRNA target sequence for DPYD (NM_000110.2,1276-1294).
ccccacggaaggttatagt

SEQ ID NO: 224023 - DNA, 19 bp, Homo sapiens
  siRNA target sequence for DPYD (NM_000110.2,1277-1295).
cccacggaaggttatagta

SEQ ID NO: 224024 - DNA, 19 bp, Homo sapiens
  siRNA target sequence for DPYD (NM_000110.2,1278-1296).
ccacggaaggttatagtaa

SEQ ID NO: 224025 - DNA, 19 bp, Homo sapiens
  siRNA target sequence for DPYD (NM_000110.2,1279-1297).
cacggaaggttatagtaaa

SEQ ID NO: 224026 - DNA, 19 bp, Homo sapiens
  siRNA target sequence for DPYD (NM_000110.2,1429-1447).
gtgatcctaaagtaaaaga

SEQ ID NO: 224027 - DNA, 19 bp, Homo sapiens
  siRNA target sequence for DPYD (NM_000110.2,1446-1464).
gaagccttgagccctataa

SEQ ID NO: 224028 - DNA, 19 bp, Homo sapiens
  siRNA target sequence for DPYD (NM_000110.2,1449-1467).
gccttgagccctataaaat

SEQ ID NO: 224029 - DNA, 19 bp, Homo sapiens
  siRNA target sequence for DPYD (NM_000110.2,1548-1566).
gttggtttggctaacacta

SEQ ID NO: 224030 - DNA, 19 bp, Homo sapiens
  siRNA target sequence for DPYD (NM_000110.2,1592-1610).
gcaagcttcttggtacatt

SEQ ID NO: 224031 - DNA, 19 bp, Homo sapiens
  siRNA target sequence for DPYD (NM_000110.2,1659-1677).
gaactacccctcttttaca

SEQ ID NO: 224032 - DNA, 19 bp, Homo sapiens
  siRNA target sequence for DPYD (NM_000110.2,1670-1688).
cttttacactcctattgat

SEQ ID NO: 224033 - DNA, 19 bp, Homo sapiens
  siRNA target sequence for DPYD (NM_000110.2,1691-1709).
ggtggacattagtgtagaa

SEQ ID NO: 224034 - DNA, 19 bp, Homo sapiens
  siRNA target sequence for DPYD (NM_000110.2,1692-1710).
gtggacattagtgtagaaa

SEQ ID NO: 224035 - DNA, 19 bp, Homo sapiens
  siRNA target sequence for DPYD (NM_000110.2,1707-1725).
gaaatggccggattgaagt

SEQ ID NO: 224036 - DNA, 19 bp, Homo sapiens
  siRNA target sequence for DPYD (NM_000110.2,1712-1730).
ggccggattgaagtttata

SEQ ID NO: 224037 - DNA, 19 bp, Homo sapiens
  siRNA target sequence for DPYD (NM_000110.2,1713-1731).
gccggattgaagtttataa

SEQ ID NO: 224038 - DNA, 19 bp, Homo sapiens
  siRNA target sequence for DPYD (NM_000110.2,1761-1779).
gccaccagcacatcaatga

SEQ ID NO: 224039 - DNA, 19 bp, Homo sapiens
  siRNA target sequence for DPYD (NM_000110.2,1763-1781).
caccagcacatcaatgatt

SEQ ID NO: 224040 - DNA, 19 bp, Homo sapiens
  siRNA target sequence for DPYD (NM_000110.2,1814-1832).
cctcaccaaaactttctct

SEQ ID NO: 224041 - DNA, 19 bp, Homo sapiens
  siRNA target sequence for DPYD (NM_000110.2,1831-1849).
ctcttgataaggacattgt

SEQ ID NO: 224042 - DNA, 19 bp, Homo sapiens
  siRNA target sequence for DPYD (NM_000110.2,1915-1933).
gctcctttctgaatattga

SEQ ID NO: 224043 - DNA, 19 bp, Homo sapiens
  siRNA target sequence for DPYD (NM_000110.2,1932-1950).
gagctcatcagtgagaaaa

SEQ ID NO: 224044 - DNA, 19 bp, Homo sapiens
  siRNA target sequence for DPYD (NM_000110.2,1968-1986).
caaagtgtcactgaactaa

SEQ ID NO: 224045 - DNA, 19 bp, Homo sapiens
  siRNA target sequence for DPYD (NM_000110.2,2020-2038).
gcattatgtgcagttacaa

SEQ ID NO: 224046 - DNA, 19 bp, Homo sapiens
  siRNA target sequence for DPYD (NM_000110.2,2085-2103).
gcagatgccctggagttaa

SEQ ID NO: 224047 - DNA, 19 bp, Homo sapiens
  siRNA target sequence for DPYD (NM_000110.2,2094-2112).
ctggagttaaatttatcat

SEQ ID NO: 224048 - DNA, 19 bp, Homo sapiens
  siRNA target sequence for DPYD (NM_000110.2,2096-2114).
ggagttaaatttatcatgt

SEQ ID NO: 224049 - DNA, 19 bp, Homo sapiens
  siRNA target sequence for DPYD (NM_000110.2,2233-2251).
ccccaaatgtcactgatat

SEQ ID NO: 224050 - DNA, 19 bp, Homo sapiens
  siRNA target sequence for DPYD (NM_000110.2,2261-2279).
cgcaagagctgcaaaggaa

SEQ ID NO: 224051 - DNA, 19 bp, Homo sapiens
  siRNA target sequence for DPYD (NM_000110.2,2324-2342).
gatgggattaaaatctgat

SEQ ID NO: 224052 - DNA, 19 bp, Homo sapiens
  siRNA target sequence for DPYD (NM_000110.2,2366-2384).
gattgcaaagcgaactaca

SEQ ID NO: 224053 - DNA, 19 bp, Homo sapiens
  siRNA target sequence for DPYD (NM_000110.2,2402-2420).
gacagcaatcagacctatt

SEQ ID NO: 224054 - DNA, 19 bp, Homo sapiens
  siRNA target sequence for DPYD (NM_000110.2,2411-2429).
cagacctattgctttgaga

SEQ ID NO: 224055 - DNA, 19 bp, Homo sapiens
  siRNA target sequence for DPYD (NM_000110.2,2698-2716).
cacgtatagctgaactcat

SEQ ID NO: 224056 - DNA, 19 bp, Homo sapiens
  siRNA target sequence for DPYD (NM_000110.2,2729-2747).
gccaagttttggaccttat

SEQ ID NO: 224057 - DNA, 19 bp, Homo sapiens
  siRNA target sequence for DPYD (NM_000110.2,2731-2749).
caagttttggaccttatct

SEQ ID NO: 224058 - DNA, 19 bp, Homo sapiens
  siRNA target sequence for DPYD (NM_000110.2,2751-2769).
gaacagcgcaagaaaatca

SEQ ID NO: 224059 - DNA, 19 bp, Homo sapiens
  siRNA target sequence for DPYD (NM_000110.2,2808-2826).
gctttttcaccacttaaga

SEQ ID NO: 224060 - DNA, 19 bp, Homo sapiens
  siRNA target sequence for DPYD (NM_000110.2,2891-2909).
gtaccttggaacatttggt

SEQ ID NO: 224061 - DNA, 19 bp, Homo sapiens
  siRNA target sequence for DPYD (NM_000110.2,2898-2916).
ggaacatttggtgaattga

SEQ ID NO: 224062 - DNA, 19 bp, Homo sapiens
  siRNA target sequence for DPYD (NM_000110.2,2917-2935).
gcaacgtagagcaagttgt

SEQ ID NO: 224063 - DNA, 19 bp, Homo sapiens
  siRNA target sequence for DPYD (NM_000110.2,2957-2975).
gtgtatcaactgtggtaaa

SEQ ID NO: 224064 - DNA, 19 bp, Homo sapiens
  siRNA target sequence for DPYD (NM_000110.2,2977-2995).
gctacatgacctgtaatga

SEQ ID NO: 224065 - DNA, 19 bp, Homo sapiens
  siRNA target sequence for DPYD (NM_000110.2,3000-3018).
ggctaccaggctatacagt

SEQ ID NO: 224066 - DNA, 19 bp, Homo sapiens
  siRNA target sequence for DPYD (NM_000110.2,3001-3019).
gctaccaggctatacagtt

SEQ ID NO: 224067 - DNA, 19 bp, Homo sapiens
  siRNA target sequence for DPYD (NM_000110.2,3002-3020).
ctaccaggctatacagttt

SEQ ID NO: 224068 - DNA, 19 bp, Homo sapiens
  siRNA target sequence for DPYD (NM_000110.2,3044-3062).
cataaccgacacttgtaca

SEQ ID NO: 224069 - DNA, 19 bp, Homo sapiens
  siRNA target sequence for DPYD (NM_000110.2,3098-3116).
cgactgcatcaaaatggtt

SEQ ID NO: 224070 - DNA, 19 bp, Homo sapiens
  siRNA target sequence for DPYD (NM_000110.2,3119-3137).
caggacaacaccttatgaa

SEQ ID NO: 224071 - DNA, 19 bp, Homo sapiens
  siRNA target sequence for DPYD (NM_000110.2,3124-3142).
caacaccttatgaaccaaa

SEQ ID NO: 224072 - DNA, 19 bp, Homo sapiens
  siRNA target sequence for SDHC (NM_003001.2,143-161).
gcggttctggaataagaat

SEQ ID NO: 224073 - DNA, 19 bp, Homo sapiens
  siRNA target sequence for SDHC (NM_003001.2,144-162).
cggttctggaataagaata

SEQ ID NO: 224074 - DNA, 19 bp, Homo sapiens
  siRNA target sequence for SDHC (NM_003001.2,149-167).
ctggaataagaatataggt

SEQ ID NO: 224075 - DNA, 19 bp, Homo sapiens
  siRNA target sequence for SDHC (NM_003001.2,180-198).
ctgtctccccacattacta

SEQ ID NO: 224076 - DNA, 19 bp, Homo sapiens
  siRNA target sequence for SDHC (NM_003001.2,184-202).
ctccccacattactatcta

SEQ ID NO: 224077 - DNA, 19 bp, Homo sapiens
  siRNA target sequence for SDHC (NM_003001.2,186-204).
ccccacattactatctaca

SEQ ID NO: 224078 - DNA, 19 bp, Homo sapiens
  siRNA target sequence for SDHC (NM_003001.2,189-207).
cacattactatctacagtt

SEQ ID NO: 224079 - DNA, 19 bp, Homo sapiens
  siRNA target sequence for ACOX1 (NM_004035.4,341-359).
gacggcagccccgagaaaa

SEQ ID NO: 224080 - DNA, 19 bp, Homo sapiens
  siRNA target sequence for ACOX1 (NM_004035.4,371-389).
cgagagatcgagaacatga

SEQ ID NO: 224081 - DNA, 19 bp, Homo sapiens
  siRNA target sequence for ACOX1 (NM_004035.4,435-453).
ctcgcagccagcgttatga

SEQ ID NO: 224082 - DNA, 19 bp, Homo sapiens
  siRNA target sequence for ACOX1 (NM_004035.4,471-489).
gtgccatcatggtgaagaa

SEQ ID NO: 224083 - DNA, 19 bp, Homo sapiens
  siRNA target sequence for ACOX1 (NM_004035.4,508-526).
cgctgaccctgatgaaatt

SEQ ID NO: 224084 - DNA, 19 bp, Homo sapiens
  siRNA target sequence for ACOX1 (NM_004035.4,510-528).
ctgaccctgatgaaattat

SEQ ID NO: 224085 - DNA, 19 bp, Homo sapiens
  siRNA target sequence for ACOX1 (NM_004035.4,661-679).
ggagatcattggcacttat

SEQ ID NO: 224086 - DNA, 19 bp, Homo sapiens
  siRNA target sequence for ACOX1 (NM_004035.4,773-791).
cctactgtgacctccatta

SEQ ID NO: 224087 - DNA, 19 bp, Homo sapiens
  siRNA target sequence for ACOX1 (NM_004035.4,779-797).
gtgacctccattaaatggt

SEQ ID NO: 224088 - DNA, 19 bp, Homo sapiens
  siRNA target sequence for ACOX1 (NM_004035.4,803-821).
ggtgggcttggaaagactt

SEQ ID NO: 224089 - DNA, 19 bp, Homo sapiens
  siRNA target sequence for ACOX1 (NM_004035.4,806-824).
gggcttggaaagacttcaa

SEQ ID NO: 224090 - DNA, 19 bp, Homo sapiens
  siRNA target sequence for ACOX1 (NM_004035.4,822-840).
caaatcatgcaatagttct

SEQ ID NO: 224091 - DNA, 19 bp, Homo sapiens
  siRNA target sequence for ACOX1 (NM_004035.4,839-857).
cttgcccagctcatcacta

SEQ ID NO: 224092 - DNA, 19 bp, Homo sapiens
  siRNA target sequence for ACOX1 (NM_004035.4,861-879).
ggaaatgctatggattaca

SEQ ID NO: 224093 - DNA, 19 bp, Homo sapiens
  siRNA target sequence for ACOX1 (NM_004035.4,862-880).
gaaatgctatggattacat

SEQ ID NO: 224094 - DNA, 19 bp, Homo sapiens
  siRNA target sequence for ACOX1 (NM_004035.4,873-891).
gattacatgcctttatcgt

SEQ ID NO: 224095 - DNA, 19 bp, Homo sapiens
  siRNA target sequence for ACOX1 (NM_004035.4,883-901).
ctttatcgtacctattcgt

SEQ ID NO: 224096 - DNA, 19 bp, Homo sapiens
  siRNA target sequence for ACOX1 (NM_004035.4,962-980).
ggttatgatgagatagaca

SEQ ID NO: 224097 - DNA, 19 bp, Homo sapiens
  siRNA target sequence for ACOX1 (NM_004035.4,963-981).
gttatgatgagatagacaa

SEQ ID NO: 224098 - DNA, 19 bp, Homo sapiens
  siRNA target sequence for ACOX1 (NM_004035.4,1067-1085).
gtgaaaccgctgagtaaca

SEQ ID NO: 224099 - DNA, 19 bp, Homo sapiens
  siRNA target sequence for ACOX1 (NM_004035.4,1191-1209).
ggcaccagtctgaaatcaa

SEQ ID NO: 224100 - DNA, 19 bp, Homo sapiens
  siRNA target sequence for ACOX1 (NM_004035.4,1248-1266).
cccagcagtataaactctt

SEQ ID NO: 224101 - DNA, 19 bp, Homo sapiens
  siRNA target sequence for ACOX1 (NM_004035.4,1284-1302).
cctatgccttccagtttgt

SEQ ID NO: 224102 - DNA, 19 bp, Homo sapiens
  siRNA target sequence for ACOX1 (NM_004035.4,1323-1341).
cctatcaccggattaacga

SEQ ID NO: 224103 - DNA, 19 bp, Homo sapiens
  siRNA target sequence for ACOX1 (NM_004035.4,1324-1342).
ctatcaccggattaacgaa

SEQ ID NO: 224104 - DNA, 19 bp, Homo sapiens
  siRNA target sequence for ACOX1 (NM_004035.4,1482-1500).
gcagtggtcttccaaatat

SEQ ID NO: 224105 - DNA, 19 bp, Homo sapiens
  siRNA target sequence for ACOX1 (NM_004035.4,1483-1501).
cagtggtcttccaaatatt

SEQ ID NO: 224106 - DNA, 19 bp, Homo sapiens
  siRNA target sequence for ACOX1 (NM_004035.4,1485-1503).
gtggtcttccaaatattta

SEQ ID NO: 224107 - DNA, 19 bp, Homo sapiens
  siRNA target sequence for ACOX1 (NM_004035.4,1573-1591).
cctgatgaaaagttatgat

SEQ ID NO: 224108 - DNA, 19 bp, Homo sapiens
  siRNA target sequence for ACOX1 (NM_004035.4,1617-1635).
gtggcatggtgtcctattt

SEQ ID NO: 224109 - DNA, 19 bp, Homo sapiens
  siRNA target sequence for ACOX1 (NM_004035.4,1619-1637).
ggcatggtgtcctatttga

SEQ ID NO: 224110 - DNA, 19 bp, Homo sapiens
  siRNA target sequence for ACOX1 (NM_004035.4,1620-1638).
gcatggtgtcctatttgaa

SEQ ID NO: 224111 - DNA, 19 bp, Homo sapiens
  siRNA target sequence for ACOX1 (NM_004035.4,1683-1701).
ggccaaccatggtggatat

SEQ ID NO: 224112 - DNA, 19 bp, Homo sapiens
  siRNA target sequence for ACOX1 (NM_004035.4,1716-1734).
gcctaaccgaagcatataa

SEQ ID NO: 224113 - DNA, 19 bp, Homo sapiens
  siRNA target sequence for ACOX1 (NM_004035.4,1717-1735).
cctaaccgaagcatataaa

SEQ ID NO: 224114 - DNA, 19 bp, Homo sapiens
  siRNA target sequence for ACOX1 (NM_004035.4,1740-1758).
gtgcagccagattagtaga

SEQ ID NO: 224115 - DNA, 19 bp, Homo sapiens
  siRNA target sequence for ACOX1 (NM_004035.4,1778-1796).
caaaaagaagtgattcaca

SEQ ID NO: 224116 - DNA, 19 bp, Homo sapiens
  siRNA target sequence for ACOX1 (NM_004035.4,1808-1826).
gaggtagcttggaacctaa

SEQ ID NO: 224117 - DNA, 19 bp, Homo sapiens
  siRNA target sequence for ACOX1 (NM_004035.4,1811-1829).
gtagcttggaacctaactt

SEQ ID NO: 224118 - DNA, 19 bp, Homo sapiens
  siRNA target sequence for ACOX1 (NM_004035.4,1863-1881).
gccactatgtggtagttaa

SEQ ID NO: 224119 - DNA, 19 bp, Homo sapiens
  siRNA target sequence for ACOX1 (NM_004035.4,1871-1889).
gtggtagttaagctctttt

SEQ ID NO: 224120 - DNA, 19 bp, Homo sapiens
  siRNA target sequence for ACOX1 (NM_004035.4,1873-1891).
ggtagttaagctcttttca

SEQ ID NO: 224121 - DNA, 19 bp, Homo sapiens
  siRNA target sequence for ACOX1 (NM_004035.4,2013-2031).
cagagcctcagattacaca

SEQ ID NO: 224122 - DNA, 19 bp, Homo sapiens
  siRNA target sequence for ACOX1 (NM_004035.4,2138-2156).
cgctatgatgggaatgtgt

SEQ ID NO: 224123 - DNA, 19 bp, Homo sapiens
  siRNA target sequence for ACOX1 (NM_004035.4,2139-2157).
gctatgatgggaatgtgta

SEQ ID NO: 224124 - DNA, 19 bp, Homo sapiens
  siRNA target sequence for ACOX1 (NM_004035.4,2140-2158).
ctatgatgggaatgtgtat

SEQ ID NO: 224125 - DNA, 19 bp, Homo sapiens
  siRNA target sequence for ACOX1 (NM_004035.4,2201-2219).
gcagaggtccacgaatctt

SEQ ID NO: 224126 - DNA, 19 bp, Homo sapiens
  siRNA target sequence for ACOX1 (NM_004035.4,2202-2220).
cagaggtccacgaatctta

SEQ ID NO: 224127 - DNA, 19 bp, Homo sapiens
  siRNA target sequence for ACOX1 (NM_007292.3,563-581).
gaacctgtgggcctcaatt

SEQ ID NO: 224128 - DNA, 19 bp, Homo sapiens
  siRNA target sequence for ACOX1 (NM_007292.3,566-584).
cctgtgggcctcaattact

SEQ ID NO: 224129 - DNA, 19 bp, Homo sapiens
  siRNA target sequence for ACOX1 (NM_007292.3,575-593).
ctcaattactccatgttta

SEQ ID NO: 224130 - DNA, 19 bp, Homo sapiens
  siRNA target sequence for ACOX2 (NM_003500.1,103-121).
cagtgcaccgagtgtcatt

SEQ ID NO: 224131 - DNA, 19 bp, Homo sapiens
  siRNA target sequence for ACOX2 (NM_003500.1,130-148).
cctggagcaggcaaatgca

SEQ ID NO: 224132 - DNA, 19 bp, Homo sapiens
  siRNA target sequence for ACOX2 (NM_003500.1,235-253).
cactccgcaggaaagttga

SEQ ID NO: 224133 - DNA, 19 bp, Homo sapiens
  siRNA target sequence for ACOX2 (NM_003500.1,264-282).
cacagttacccggagttta

SEQ ID NO: 224134 - DNA, 19 bp, Homo sapiens
  siRNA target sequence for ACOX2 (NM_003500.1,283-301).
gctgtaaggacaattattt

SEQ ID NO: 224135 - DNA, 19 bp, Homo sapiens
  siRNA target sequence for ACOX2 (NM_003500.1,307-325).
cccagaatgagcgttataa

SEQ ID NO: 224136 - DNA, 19 bp, Homo sapiens
  siRNA target sequence for ACOX2 (NM_003500.1,371-389).
cctgggttggttagaagat

SEQ ID NO: 224137 - DNA, 19 bp, Homo sapiens
  siRNA target sequence for ACOX2 (NM_003500.1,527-545).
ccagatcatcgcaacgtat

SEQ ID NO: 224138 - DNA, 19 bp, Homo sapiens
  siRNA target sequence for ACOX2 (NM_003500.1,557-575).
gttgggacatgggacatat

SEQ ID NO: 224139 - DNA, 19 bp, Homo sapiens
  siRNA target sequence for ACOX2 (NM_003500.1,560-578).
gggacatgggacatatctt

SEQ ID NO: 224140 - DNA, 19 bp, Homo sapiens
  siRNA target sequence for ACOX2 (NM_003500.1,613-631).
ccacccaggagtttgtgat

SEQ ID NO: 224141 - DNA, 19 bp, Homo sapiens
  siRNA target sequence for ACOX2 (NM_003500.1,614-632).
cacccaggagtttgtgata

SEQ ID NO: 224142 - DNA, 19 bp, Homo sapiens
  siRNA target sequence for ACOX2 (NM_003500.1,737-755).
gggcatgcacgcttttatt

SEQ ID NO: 224143 - DNA, 19 bp, Homo sapiens
  siRNA target sequence for ACOX2 (NM_003500.1,786-804).
ccactgccaggaatcatca

SEQ ID NO: 224144 - DNA, 19 bp, Homo sapiens
  siRNA target sequence for ACOX2 (NM_003500.1,824-842).
gatggactttgatcaaaca

SEQ ID NO: 224145 - DNA, 19 bp, Homo sapiens
  siRNA target sequence for ACOX2 (NM_003500.1,830-848).
ctttgatcaaacagacaat

SEQ ID NO: 224146 - DNA, 19 bp, Homo sapiens
  siRNA target sequence for ACOX2 (NM_003500.1,1000-1018).
gggagatcctccctatact

SEQ ID NO: 224147 - DNA, 19 bp, Homo sapiens
  siRNA target sequence for ACOX2 (NM_003500.1,1117-1135).
cacaacagcagaaactctt

SEQ ID NO: 224148 - DNA, 19 bp, Homo sapiens
  siRNA target sequence for ACOX2 (NM_003500.1,1504-1522).
ctccatctgtcgcatatct

SEQ ID NO: 224149 - DNA, 19 bp, Homo sapiens
  siRNA target sequence for ACOX2 (NM_003500.1,1506-1524).
ccatctgtcgcatatctca

SEQ ID NO: 224150 - DNA, 19 bp, Homo sapiens
  siRNA target sequence for ACOX2 (NM_003500.1,1725-1743).
gtgcactgctactatgtca

SEQ ID NO: 224151 - DNA, 19 bp, Homo sapiens
  siRNA target sequence for ACOX2 (NM_003500.1,1836-1854).
catggaatcttgactaact

SEQ ID NO: 224152 - DNA, 19 bp, Homo sapiens
  siRNA target sequence for ACOX2 (NM_003500.1,1847-1865).
gactaactcgggtgacttt

SEQ ID NO: 224153 - DNA, 19 bp, Homo sapiens
  siRNA target sequence for ACOX2 (NM_003500.1,1976-1994).
cttcaccgatcagtgttta

SEQ ID NO: 224154 - DNA, 19 bp, Homo sapiens
  siRNA target sequence for ACOX2 (NM_003500.1,1982-2000).
cgatcagtgtttaaattca

SEQ ID NO: 224155 - DNA, 19 bp, Homo sapiens
  siRNA target sequence for ACOX2 (NM_003500.1,2052-2070).
cagaagtcaccaaccaata

SEQ ID NO: 224156 - DNA, 19 bp, Homo sapiens
  siRNA target sequence for ACOX2 (NM_003500.1,2054-2072).
gaagtcaccaaccaatact

SEQ ID NO: 224157 - DNA, 19 bp, Homo sapiens
  siRNA target sequence for ACOX2 (NM_003500.1,2081-2099).
ccctgcctatgaggaatat

SEQ ID NO: 224158 - DNA, 19 bp, Homo sapiens
  siRNA target sequence for ACOX2 (NM_003500.1,2082-2100).
cctgcctatgaggaatata

SEQ ID NO: 224159 - DNA, 19 bp, Homo sapiens
  siRNA target sequence for ACOX3 (NM_003501.1,436-454).
cctccatagcttggttttt

SEQ ID NO: 224160 - DNA, 19 bp, Homo sapiens
  siRNA target sequence for ACOX3 (NM_003501.1,491-509).
ctcacatatattcaaaaga

SEQ ID NO: 224161 - DNA, 19 bp, Homo sapiens
  siRNA target sequence for ACOX3 (NM_003501.1,555-573).
gccacggcagtaataccaa

SEQ ID NO: 224162 - DNA, 19 bp, Homo sapiens
  siRNA target sequence for ACOX3 (NM_003501.1,799-817).
ggttggcgacataggaaaa

SEQ ID NO: 224163 - DNA, 19 bp, Homo sapiens
  siRNA target sequence for ACOX3 (NM_003501.1,800-818).
gttggcgacataggaaaaa

SEQ ID NO: 224164 - DNA, 19 bp, Homo sapiens
  siRNA target sequence for ACOX3 (NM_003501.1,924-942).
cctatgtcagcccctttaa

SEQ ID NO: 224165 - DNA, 19 bp, Homo sapiens
  siRNA target sequence for ACOX3 (NM_003501.1,1004-1022).
gtgagcctggccatcctta

SEQ ID NO: 224166 - DNA, 19 bp, Homo sapiens
  siRNA target sequence for ACOX3 (NM_003501.1,1009-1027).
cctggccatccttaaccta

SEQ ID NO: 224167 - DNA, 19 bp, Homo sapiens
  siRNA target sequence for ACOX3 (NM_003501.1,1010-1028).
ctggccatccttaacctaa

SEQ ID NO: 224168 - DNA, 19 bp, Homo sapiens
  siRNA target sequence for ACOX3 (NM_003501.1,1104-1122).
cagtgcttgagtatccaat

SEQ ID NO: 224169 - DNA, 19 bp, Homo sapiens
  siRNA target sequence for ACOX3 (NM_003501.1,1131-1149).
ggcgcttgcttccatatct

SEQ ID NO: 224170 - DNA, 19 bp, Homo sapiens
  siRNA target sequence for ACOX3 (NM_003501.1,1383-1401).
gtgtccttagagatgacaa

SEQ ID NO: 224171 - DNA, 19 bp, Homo sapiens
  siRNA target sequence for ACOX3 (NM_003501.1,1444-1462).
gcagcagacaagcaactat

SEQ ID NO: 224172 - DNA, 19 bp, Homo sapiens
  siRNA target sequence for ACOX3 (NM_003501.1,1648-1666).
ccgagagacttatcaaaaa

SEQ ID NO: 224173 - DNA, 19 bp, Homo sapiens
  siRNA target sequence for ACOX3 (NM_003501.1,1649-1667).
cgagagacttatcaaaaat

SEQ ID NO: 224174 - DNA, 19 bp, Homo sapiens
  siRNA target sequence for ACOX3 (NM_003501.1,1942-1960).
cgccgtcctggctttgtgt

SEQ ID NO: 224175 - DNA, 19 bp, Homo sapiens
  siRNA target sequence for ACOX3 (NM_003501.1,2043-2061).
ccgacggcgagctctacaa

SEQ ID NO: 224176 - DNA, 19 bp, Homo sapiens
  siRNA target sequence for ACOX3 (NM_003501.1,2044-2062).
cgacggcgagctctacaaa

SEQ ID NO: 224177 - DNA, 19 bp, Homo sapiens
  siRNA target sequence for ACOX3 (NM_003501.1,2045-2063).
gacggcgagctctacaaaa

SEQ ID NO: 224178 - DNA, 19 bp, Homo sapiens
  siRNA target sequence for ACOX3 (NM_003501.1,2076-2094).
ctgtcctgcaggaaagcaa

SEQ ID NO: 224179 - DNA, 19 bp, Homo sapiens
  siRNA target sequence for ACOX3 (NM_003501.1,2144-2162).
gtcataggaagtctgaaat

SEQ ID NO: 224180 - DNA, 19 bp, Homo sapiens
  siRNA target sequence for CPO (NM_000097.3,622-640).
cggcatcagctgtgtactt

SEQ ID NO: 224181 - DNA, 19 bp, Homo sapiens
  siRNA target sequence for CPO (NM_000097.3,628-646).
cagctgtgtacttcaagat

SEQ ID NO: 224182 - DNA, 19 bp, Homo sapiens
  siRNA target sequence for CPO (NM_000097.3,644-662).
gatgggtgtgttttcgaaa

SEQ ID NO: 224183 - DNA, 19 bp, Homo sapiens
  siRNA target sequence for CPO (NM_000097.3,783-801).
gcgtgagctctgttatcca

SEQ ID NO: 224184 - DNA, 19 bp, Homo sapiens
  siRNA target sequence for CPO (NM_000097.3,815-833).
catgctcctactatccatt

SEQ ID NO: 224185 - DNA, 19 bp, Homo sapiens
  siRNA target sequence for CPO (NM_000097.3,822-840).
ctactatccatttcaacta

SEQ ID NO: 224186 - DNA, 19 bp, Homo sapiens
  siRNA target sequence for CPO (NM_000097.3,830-848).
catttcaactacagatact

SEQ ID NO: 224187 - DNA, 19 bp, Homo sapiens
  siRNA target sequence for CPO (NM_000097.3,900-918).
gtgacctcactccaacata

SEQ ID NO: 224188 - DNA, 19 bp, Homo sapiens
  siRNA target sequence for CPO (NM_000097.3,902-920).
gacctcactccaacatact

SEQ ID NO: 224189 - DNA, 19 bp, Homo sapiens
  siRNA target sequence for CPO (NM_000097.3,915-933).
catacttgaatcaagaaga

SEQ ID NO: 224190 - DNA, 19 bp, Homo sapiens
  siRNA target sequence for CPO (NM_000097.3,932-950).
gacgctgtccattttcaca

SEQ ID NO: 224191 - DNA, 19 bp, Homo sapiens
  siRNA target sequence for CPO (NM_000097.3,1102-1120).
ggaggtgtttcgctttgta

SEQ ID NO: 224192 - DNA, 19 bp, Homo sapiens
  siRNA target sequence for CPO (NM_000097.3,1134-1152).
gggctgtagttccttctta

SEQ ID NO: 224193 - DNA, 19 bp, Homo sapiens
  siRNA target sequence for CPO (NM_000097.3,1221-1239).
gaagaggacggtatgtaga

SEQ ID NO: 224194 - DNA, 19 bp, Homo sapiens
  siRNA target sequence for CPO (NM_000097.3,1224-1242).
gaggacggtatgtagaatt

SEQ ID NO: 224195 - DNA, 19 bp, Homo sapiens
  siRNA target sequence for CPO (NM_000097.3,1230-1248).
ggtatgtagaatttaatct

SEQ ID NO: 224196 - DNA, 19 bp, Homo sapiens
  siRNA target sequence for CPO (NM_000097.3,1286-1304).
ccaggatccagaattgaaa

SEQ ID NO: 224197 - DNA, 19 bp, Homo sapiens
  siRNA target sequence for CPO (NM_000097.3,1289-1307).
ggatccagaattgaaagta

SEQ ID NO: 224198 - DNA, 19 bp, Homo sapiens
  siRNA target sequence for CPO (NM_000097.3,1290-1308).
gatccagaattgaaagtat

SEQ ID NO: 224199 - DNA, 19 bp, Homo sapiens
  siRNA target sequence for CPO (NM_000097.3,1312-1330).
gatgtctttacctctaact

SEQ ID NO: 224200 - DNA, 19 bp, Homo sapiens
  siRNA target sequence for CPO (NM_000097.3,1329-1347).
ctgcccgatgggagtacat

SEQ ID NO: 224201 - DNA, 19 bp, Homo sapiens
  siRNA target sequence for FLJ11164 (NM_018346.1,204-222).
gagaagcgctgcagttact

SEQ ID NO: 224202 - DNA, 19 bp, Homo sapiens
  siRNA target sequence for FLJ11164 (NM_018346.1,440-458).
cacattggaggctaatcct

SEQ ID NO: 224203 - DNA, 19 bp, Homo sapiens
  siRNA target sequence for FLJ11164 (NM_018346.1,492-510).
ggggcagcaggggttaaca

SEQ ID NO: 224204 - DNA, 19 bp, Homo sapiens
  siRNA target sequence for FLJ11164 (NM_018346.1,502-520).
gggttaacaggttgtctat

SEQ ID NO: 224205 - DNA, 19 bp, Homo sapiens
  siRNA target sequence for FLJ11164 (NM_018346.1,628-646).
gcgtgtctgtagacttgat

SEQ ID NO: 224206 - DNA, 19 bp, Homo sapiens
  siRNA target sequence for FLJ11164 (NM_018346.1,900-918).
gcgctcagtacccacaatt

SEQ ID NO: 224207 - DNA, 19 bp, Homo sapiens
  siRNA target sequence for FLJ11164 (NM_018346.1,903-921).
ctcagtacccacaattgga

SEQ ID NO: 224208 - DNA, 19 bp, Homo sapiens
  siRNA target sequence for PPOX (NM_000309.1,412-430).
cgttcgaggccctaatggt

SEQ ID NO: 224209 - DNA, 19 bp, Homo sapiens
  siRNA target sequence for PPOX (NM_000309.1,423-441).
ctaatggtgctatctttga

SEQ ID NO: 224210 - DNA, 19 bp, Homo sapiens
  siRNA target sequence for PPOX (NM_000309.1,443-461).
cttggacctcggggaatta

SEQ ID NO: 224211 - DNA, 19 bp, Homo sapiens
  siRNA target sequence for PPOX (NM_000309.1,508-526).
gcttggcttggattcagaa

SEQ ID NO: 224212 - DNA, 19 bp, Homo sapiens
  siRNA target sequence for PPOX (NM_000309.1,851-869).
caaacccatcgttccatat

SEQ ID NO: 224213 - DNA, 19 bp, Homo sapiens
  siRNA target sequence for PPOX (NM_000309.1,855-873).
cccatcgttccatattact

SEQ ID NO: 224214 - DNA, 19 bp, Homo sapiens
  siRNA target sequence for PPOX (NM_000309.1,998-1016).
gaaacccacctgactagta

SEQ ID NO: 224215 - DNA, 19 bp, Homo sapiens
  siRNA target sequence for PPOX (NM_000309.1,1070-1088).
gaagggcgctggaaggtat

SEQ ID NO: 224216 - DNA, 19 bp, Homo sapiens
  siRNA target sequence for PPOX (NM_000309.1,1074-1092).
ggcgctggaaggtatctct

SEQ ID NO: 224217 - DNA, 19 bp, Homo sapiens
  siRNA target sequence for PPOX (NM_000309.1,1075-1093).
gcgctggaaggtatctcta

SEQ ID NO: 224218 - DNA, 19 bp, Homo sapiens
  siRNA target sequence for PPOX (NM_000309.1,1076-1094).
cgctggaaggtatctctaa

SEQ ID NO: 224219 - DNA, 19 bp, Homo sapiens
  siRNA target sequence for PPOX (NM_000309.1,1108-1126).
ggaggctgaccacgttatt

SEQ ID NO: 224220 - DNA, 19 bp, Homo sapiens
  siRNA target sequence for PPOX (NM_000309.1,1109-1127).
gaggctgaccacgttatta

SEQ ID NO: 224221 - DNA, 19 bp, Homo sapiens
  siRNA target sequence for PPOX (NM_000309.1,1111-1129).
ggctgaccacgttattagt

SEQ ID NO: 224222 - DNA, 19 bp, Homo sapiens
  siRNA target sequence for PPOX (NM_000309.1,1307-1325).
ctgggaatcgtgtatgact

SEQ ID NO: 224223 - DNA, 19 bp, Homo sapiens
  siRNA target sequence for PPOX (NM_000309.1,1416-1434).
gtggctgtgtcttatctca

SEQ ID NO: 224224 - DNA, 19 bp, Homo sapiens
  siRNA target sequence for PPOX (NM_000309.1,1506-1524).
gcttggtccatctacacaa

SEQ ID NO: 224225 - DNA, 19 bp, Homo sapiens
  siRNA target sequence for PPOX (NM_000309.1,1511-1529).
gtccatctacacaagaact

SEQ ID NO: 224226 - DNA, 19 bp, Homo sapiens
  siRNA target sequence for PPOX (NM_000309.1,1530-1548).
gcattccccagtatacact

SEQ ID NO: 224227 - DNA, 19 bp, Homo sapiens
  siRNA target sequence for PPOX (NM_000309.1,1531-1549).
cattccccagtatacacta

SEQ ID NO: 224228 - DNA, 19 bp, Homo sapiens
  siRNA target sequence for PPOX (NM_000309.1,1551-1569).
gtcactggcaaaaactaga

SEQ ID NO: 224229 - DNA, 19 bp, Homo sapiens
  siRNA target sequence for PPOX (NM_000309.1,1634-1652).
ggagttgctgttaatgact

SEQ ID NO: 224230 - DNA, 19 bp, Homo sapiens
  siRNA target sequence for BLVRA (NM_000712.3,221-239).
ggagctcgggagcattgat

SEQ ID NO: 224231 - DNA, 19 bp, Homo sapiens
  siRNA target sequence for BLVRA (NM_000712.3,285-303).
gtggaggtcgcctatatct

SEQ ID NO: 224232 - DNA, 19 bp, Homo sapiens
  siRNA target sequence for BLVRA (NM_000712.3,335-353).
caggcagttccttaatgct

SEQ ID NO: 224233 - DNA, 19 bp, Homo sapiens
  siRNA target sequence for BLVRA (NM_000712.3,659-677).
gcgaaaggaagatcagtat

SEQ ID NO: 224234 - DNA, 19 bp, Homo sapiens
  siRNA target sequence for BLVRA (NM_000712.3,660-678).
cgaaaggaagatcagtata

SEQ ID NO: 224235 - DNA, 19 bp, Homo sapiens
  siRNA target sequence for BLVRA (NM_000712.3,661-679).
gaaaggaagatcagtatat

SEQ ID NO: 224236 - DNA, 19 bp, Homo sapiens
  siRNA target sequence for BLVRA (NM_000712.3,741-759).
ggacctggtctaaaacgaa

SEQ ID NO: 224237 - DNA, 19 bp, Homo sapiens
  siRNA target sequence for BLVRA (NM_000712.3,742-760).
gacctggtctaaaacgaaa

SEQ ID NO: 224238 - DNA, 19 bp, Homo sapiens
  siRNA target sequence for BLVRA (NM_000712.3,747-765).
ggtctaaaacgaaacagat

SEQ ID NO: 224239 - DNA, 19 bp, Homo sapiens
  siRNA target sequence for BLVRA (NM_000712.3,748-766).
gtctaaaacgaaacagata

SEQ ID NO: 224240 - DNA, 19 bp, Homo sapiens
  siRNA target sequence for BLVRA (NM_000712.3,750-768).
ctaaaacgaaacagatatt

SEQ ID NO: 224241 - DNA, 19 bp, Homo sapiens
  siRNA target sequence for BLVRA (NM_000712.3,756-774).
cgaaacagatatttaagct

SEQ ID NO: 224242 - DNA, 19 bp, Homo sapiens
  siRNA target sequence for BLVRA (NM_000712.3,757-775).
gaaacagatatttaagctt

SEQ ID NO: 224243 - DNA, 19 bp, Homo sapiens
  siRNA target sequence for BLVRA (NM_000712.3,787-805).
ctgggtccttggagaatgt

SEQ ID NO: 224244 - DNA, 19 bp, Homo sapiens
  siRNA target sequence for BLVRA (NM_000712.3,806-824).
gccaaatgtaggagtgaat

SEQ ID NO: 224245 - DNA, 19 bp, Homo sapiens
  siRNA target sequence for BLVRA (NM_000712.3,807-825).
ccaaatgtaggagtgaata

SEQ ID NO: 224246 - DNA, 19 bp, Homo sapiens
  siRNA target sequence for BLVRA (NM_000712.3,813-831).
gtaggagtgaataagaaca

SEQ ID NO: 224247 - DNA, 19 bp, Homo sapiens
  siRNA target sequence for BLVRB (NM_000713.1,178-196).
ggtgcaagcaggttacgaa

SEQ ID NO: 224248 - DNA, 19 bp, Homo sapiens
  siRNA target sequence for BLVRB (NM_000713.1,256-274).
cgtggtagtgggagatgtt

SEQ ID NO: 224249 - DNA, 19 bp, Homo sapiens
  siRNA target sequence for DECR1 (NM_001359.1,148-166).
ctaccggccagggttttct

SEQ ID NO: 224250 - DNA, 19 bp, Homo sapiens
  siRNA target sequence for DECR1 (NM_001359.1,196-214).
ctcgctcctcggaggtttt

SEQ ID NO: 224251 - DNA, 19 bp, Homo sapiens
  siRNA target sequence for DECR1 (NM_001359.1,202-220).
cctcggaggtttttcagtt

SEQ ID NO: 224252 - DNA, 19 bp, Homo sapiens
  siRNA target sequence for DECR1 (NM_001359.1,203-221).
ctcggaggtttttcagtta

SEQ ID NO: 224253 - DNA, 19 bp, Homo sapiens
  siRNA target sequence for DECR1 (NM_001359.1,248-266).
ctgaagctttgcaatctaa

SEQ ID NO: 224254 - DNA, 19 bp, Homo sapiens
  siRNA target sequence for DECR1 (NM_001359.1,254-272).
ctttgcaatctaaattctt

SEQ ID NO: 224255 - DNA, 19 bp, Homo sapiens
  siRNA target sequence for DECR1 (NM_001359.1,289-307).
gcgatgctaccacctaata

SEQ ID NO: 224256 - DNA, 19 bp, Homo sapiens
  siRNA target sequence for DECR1 (NM_001359.1,291-309).
gatgctaccacctaatagt

SEQ ID NO: 224257 - DNA, 19 bp, Homo sapiens
  siRNA target sequence for DECR1 (NM_001359.1,294-312).
gctaccacctaatagtttt

SEQ ID NO: 224258 - DNA, 19 bp, Homo sapiens
  siRNA target sequence for DECR1 (NM_001359.1,347-365).
ctggccttggtaaaggaat

SEQ ID NO: 224259 - DNA, 19 bp, Homo sapiens
  siRNA target sequence for DECR1 (NM_001359.1,410-428).
gccggaagatggatgtttt

SEQ ID NO: 224260 - DNA, 19 bp, Homo sapiens
  siRNA target sequence for DECR1 (NM_001359.1,412-430).
cggaagatggatgttttga

SEQ ID NO: 224261 - DNA, 19 bp, Homo sapiens
  siRNA target sequence for DECR1 (NM_001359.1,429-447).
gaaagctaccgcagaacaa

SEQ ID NO: 224262 - DNA, 19 bp, Homo sapiens
  siRNA target sequence for DECR1 (NM_001359.1,433-451).
gctaccgcagaacaaattt

SEQ ID NO: 224263 - DNA, 19 bp, Homo sapiens
  siRNA target sequence for DECR1 (NM_001359.1,438-456).
cgcagaacaaatttcttct

SEQ ID NO: 224264 - DNA, 19 bp, Homo sapiens
  siRNA target sequence for DECR1 (NM_001359.1,525-543).
gtcagaactgatcaaagtt

SEQ ID NO: 224265 - DNA, 19 bp, Homo sapiens
  siRNA target sequence for DECR1 (NM_001359.1,541-559).
gttgcaggacatcctaata

SEQ ID NO: 224266 - DNA, 19 bp, Homo sapiens
  siRNA target sequence for DECR1 (NM_001359.1,658-676).
gccttcgtgacactagaaa

SEQ ID NO: 224267 - DNA, 19 bp, Homo sapiens
  siRNA target sequence for DECR1 (NM_001359.1,659-677).
ccttcgtgacactagaaat

SEQ ID NO: 224268 - DNA, 19 bp, Homo sapiens
  siRNA target sequence for DECR1 (NM_001359.1,663-681).
cgtgacactagaaattgga

SEQ ID NO: 224269 - DNA, 19 bp, Homo sapiens
  siRNA target sequence for DECR1 (NM_001359.1,664-682).
gtgacactagaaattggaa

SEQ ID NO: 224270 - DNA, 19 bp, Homo sapiens
  siRNA target sequence for DECR1 (NM_001359.1,666-684).
gacactagaaattggaaaa

SEQ ID NO: 224271 - DNA, 19 bp, Homo sapiens
  siRNA target sequence for DECR1 (NM_001359.1,744-762).
gactggttcaggttttgta

SEQ ID NO: 224272 - DNA, 19 bp, Homo sapiens
  siRNA target sequence for DECR1 (NM_001359.1,820-838).
gaatggggtaaatatggaa

SEQ ID NO: 224273 - DNA, 19 bp, Homo sapiens
  siRNA target sequence for DECR1 (NM_001359.1,835-853).
ggaatgcgattcaatgtga

SEQ ID NO: 224274 - DNA, 19 bp, Homo sapiens
  siRNA target sequence for DECR1 (NM_001359.1,836-854).
gaatgcgattcaatgtgat

SEQ ID NO: 224275 - DNA, 19 bp, Homo sapiens
  siRNA target sequence for DECR1 (NM_001359.1,840-858).
gcgattcaatgtgattcaa

SEQ ID NO: 224276 - DNA, 19 bp, Homo sapiens
  siRNA target sequence for DECR1 (NM_001359.1,856-874).
caaccagggcctataaaaa

SEQ ID NO: 224277 - DNA, 19 bp, Homo sapiens
  siRNA target sequence for DECR1 (NM_001359.1,897-915).
ggacccaactggaacattt

SEQ ID NO: 224278 - DNA, 19 bp, Homo sapiens
  siRNA target sequence for DECR1 (NM_001359.1,901-919).
ccaactggaacatttgaga

SEQ ID NO: 224279 - DNA, 19 bp, Homo sapiens
  siRNA target sequence for DECR1 (NM_001359.1,902-920).
caactggaacatttgagaa

SEQ ID NO: 224280 - DNA, 19 bp, Homo sapiens
  siRNA target sequence for DECR1 (NM_001359.1,990-1008).
cctttgtagtgattatgct

SEQ ID NO: 224281 - DNA, 19 bp, Homo sapiens
  siRNA target sequence for DECR1 (NM_001359.1,991-1009).
ctttgtagtgattatgctt

SEQ ID NO: 224282 - DNA, 19 bp, Homo sapiens
  siRNA target sequence for DECR1 (NM_001359.1,1041-1059).
cggtggagaggaagtactt

SEQ ID NO: 224283 - DNA, 19 bp, Homo sapiens
  siRNA target sequence for DECR1 (NM_001359.1,1043-1061).
gtggagaggaagtacttat

SEQ ID NO: 224284 - DNA, 19 bp, Homo sapiens
  siRNA target sequence for DECR1 (NM_001359.1,1057-1075).
cttatttcaggggaattca

SEQ ID NO: 224285 - DNA, 19 bp, Homo sapiens
  siRNA target sequence for DECR1 (NM_001359.1,1101-1119).
gcagtgggacaccatagaa

SEQ ID NO: 224286 - DNA, 19 bp, Homo sapiens
  siRNA target sequence for SDHA (NM_004168.1,611-629).
ctggccactcgctattgca

SEQ ID NO: 224287 - DNA, 19 bp, Homo sapiens
  siRNA target sequence for SDHB (NM_003000.1,240-258).
gctccccgtatcaagaaat

SEQ ID NO: 224288 - DNA, 19 bp, Homo sapiens
  siRNA target sequence for SDHB (NM_003000.1,241-259).
ctccccgtatcaagaaatt

SEQ ID NO: 224289 - DNA, 19 bp, Homo sapiens
  siRNA target sequence for SDHB (NM_003000.1,251-269).
caagaaatttgccatctat

SEQ ID NO: 224290 - DNA, 19 bp, Homo sapiens
  siRNA target sequence for SDHB (NM_003000.1,292-310).
gagacaaacctcatatgca

SEQ ID NO: 224291 - DNA, 19 bp, Homo sapiens
  siRNA target sequence for SDHB (NM_003000.1,337-355).
gtggccccatggtattgga

SEQ ID NO: 224292 - DNA, 19 bp, Homo sapiens
  siRNA target sequence for SDHB (NM_003000.1,348-366).
gtattggatgctttaatca

SEQ ID NO: 224293 - DNA, 19 bp, Homo sapiens
  siRNA target sequence for SDHB (NM_003000.1,378-396).
gaagttgactctactttga

SEQ ID NO: 224294 - DNA, 19 bp, Homo sapiens
  siRNA target sequence for SDHB (NM_003000.1,429-447).
ggctcttgtgcaatgaaca

SEQ ID NO: 224295 - DNA, 19 bp, Homo sapiens
  siRNA target sequence for SDHB (NM_003000.1,430-448).
gctcttgtgcaatgaacat

SEQ ID NO: 224296 - DNA, 19 bp, Homo sapiens
  siRNA target sequence for SDHB (NM_003000.1,522-540).
cttccacacatgtatgtga

SEQ ID NO: 224297 - DNA, 19 bp, Homo sapiens
  siRNA target sequence for SDHB (NM_003000.1,546-564).
gatcttgttcccgatttga

SEQ ID NO: 224298 - DNA, 19 bp, Homo sapiens
  siRNA target sequence for SDHB (NM_003000.1,555-573).
cccgatttgagcaacttct

SEQ ID NO: 224299 - DNA, 19 bp, Homo sapiens
  siRNA target sequence for SDHB (NM_003000.1,556-574).
ccgatttgagcaacttcta

SEQ ID NO: 224300 - DNA, 19 bp, Homo sapiens
  siRNA target sequence for SDHB (NM_003000.1,557-575).
cgatttgagcaacttctat

SEQ ID NO: 224301 - DNA, 19 bp, Homo sapiens
  siRNA target sequence for SDHB (NM_003000.1,569-587).
cttctatgcacagtacaaa

SEQ ID NO: 224302 - DNA, 19 bp, Homo sapiens
  siRNA target sequence for SDHB (NM_003000.1,681-699).
ctctacgagtgcattctct

SEQ ID NO: 224303 - DNA, 19 bp, Homo sapiens
  siRNA target sequence for FADS1 (NM_013402.3,779-797).
catgcatcccttcttcttt

SEQ ID NO: 224304 - DNA, 19 bp, Homo sapiens
  siRNA target sequence for FADS1 (NM_013402.3,898-916).
ccttgctgcctctctactt

SEQ ID NO: 224305 - DNA, 19 bp, Homo sapiens
  siRNA target sequence for FADS1 (NM_013402.3,911-929).
ctacttccagtggtatatt

SEQ ID NO: 224306 - DNA, 19 bp, Homo sapiens
  siRNA target sequence for FADS1 (NM_013402.3,1041-1059).
ggccttttcttcatagtca

SEQ ID NO: 224307 - DNA, 19 bp, Homo sapiens
  siRNA target sequence for FADS1 (NM_013402.3,1089-1107).
gtgacacagatgaaccata

SEQ ID NO: 224308 - DNA, 19 bp, Homo sapiens
  siRNA target sequence for FADS1 (NM_013402.3,1178-1196).
ccacaagtctgccttcaat

SEQ ID NO: 224309 - DNA, 19 bp, Homo sapiens
  siRNA target sequence for FADS1 (NM_013402.3,1247-1265).
cacgatgcctcgacacaat

SEQ ID NO: 224310 - DNA, 19 bp, Homo sapiens
  siRNA target sequence for FADS1 (NM_013402.3,1342-1360).
cagccttcgccgacatcat

SEQ ID NO: 224311 - DNA, 19 bp, Homo sapiens
  siRNA target sequence for FADS1 (NM_013402.3,1353-1371).
gacatcatccactcactaa

SEQ ID NO: 224312 - DNA, 19 bp, Homo sapiens
  siRNA target sequence for SC5DL (NM_006918.2,63-81).
ccgtgttgcagattactat

SEQ ID NO: 224313 - DNA, 19 bp, Homo sapiens
  siRNA target sequence for SC5DL (NM_006918.2,64-82).
cgtgttgcagattactatt

SEQ ID NO: 224314 - DNA, 19 bp, Homo sapiens
  siRNA target sequence for SC5DL (NM_006918.2,65-83).
gtgttgcagattactattt

SEQ ID NO: 224315 - DNA, 19 bp, Homo sapiens
  siRNA target sequence for SC5DL (NM_006918.2,113-131).
ggccagaagatgacatctt

SEQ ID NO: 224316 - DNA, 19 bp, Homo sapiens
  siRNA target sequence for SC5DL (NM_006918.2,126-144).
catcttccgacaagctatt

SEQ ID NO: 224317 - DNA, 19 bp, Homo sapiens
  siRNA target sequence for SC5DL (NM_006918.2,129-147).
cttccgacaagctattagt

SEQ ID NO: 224318 - DNA, 19 bp, Homo sapiens
  siRNA target sequence for SC5DL (NM_006918.2,132-150).
ccgacaagctattagtctt

SEQ ID NO: 224319 - DNA, 19 bp, Homo sapiens
  siRNA target sequence for SC5DL (NM_006918.2,194-212).
gtgcaacactgagctatta

SEQ ID NO: 224320 - DNA, 19 bp, Homo sapiens
  siRNA target sequence for SC5DL (NM_006918.2,196-214).
gcaacactgagctattatt

SEQ ID NO: 224321 - DNA, 19 bp, Homo sapiens
  siRNA target sequence for SC5DL (NM_006918.2,217-235).
gtcttcgatcatgcattaa

SEQ ID NO: 224322 - DNA, 19 bp, Homo sapiens
  siRNA target sequence for SC5DL (NM_006918.2,222-240).
cgatcatgcattaatgaaa

SEQ ID NO: 224323 - DNA, 19 bp, Homo sapiens
  siRNA target sequence for SC5DL (NM_006918.2,262-280).
caagtccgtcgagagatta

SEQ ID NO: 224324 - DNA, 19 bp, Homo sapiens
  siRNA target sequence for SC5DL (NM_006918.2,265-283).
gtccgtcgagagattaagt

SEQ ID NO: 224325 - DNA, 19 bp, Homo sapiens
  siRNA target sequence for SC5DL (NM_006918.2,267-285).
ccgtcgagagattaagttt

SEQ ID NO: 224326 - DNA, 19 bp, Homo sapiens
  siRNA target sequence for SC5DL (NM_006918.2,268-286).
cgtcgagagattaagttta

SEQ ID NO: 224327 - DNA, 19 bp, Homo sapiens
  siRNA target sequence for SC5DL (NM_006918.2,300-318).
gccatggataagtattctt

SEQ ID NO: 224328 - DNA, 19 bp, Homo sapiens
  siRNA target sequence for SC5DL (NM_006918.2,301-319).
ccatggataagtattctta

SEQ ID NO: 224329 - DNA, 19 bp, Homo sapiens
  siRNA target sequence for SC5DL (NM_006918.2,330-348).
gttcttgctggagataaga

SEQ ID NO: 224330 - DNA, 19 bp, Homo sapiens
  siRNA target sequence for SC5DL (NM_006918.2,372-390).
cctaggagagtttccatat

SEQ ID NO: 224331 - DNA, 19 bp, Homo sapiens
  siRNA target sequence for SC5DL (NM_006918.2,386-404).
catatggattgtttgaact

SEQ ID NO: 224332 - DNA, 19 bp, Homo sapiens
  siRNA target sequence for SC5DL (NM_006918.2,400-418).
gaacttgtcgttagtataa

SEQ ID NO: 224333 - DNA, 19 bp, Homo sapiens
  siRNA target sequence for SC5DL (NM_006918.2,403-421).
cttgtcgttagtataatat

SEQ ID NO: 224334 - DNA, 19 bp, Homo sapiens
  siRNA target sequence for SC5DL (NM_006918.2,522-540).
gattcctactccatttgca

SEQ ID NO: 224335 - DNA, 19 bp, Homo sapiens
  siRNA target sequence for SC5DL (NM_006918.2,533-551).
catttgcaagtcatgcttt

SEQ ID NO: 224336 - DNA, 19 bp, Homo sapiens
  siRNA target sequence for SC5DL (NM_006918.2,574-592).
cagagtctaccttaccata

SEQ ID NO: 224337 - DNA, 19 bp, Homo sapiens
  siRNA target sequence for SC5DL (NM_006918.2,611-629).
cattacacaaggtggttta

SEQ ID NO: 224338 - DNA, 19 bp, Homo sapiens
  siRNA target sequence for SC5DL (NM_006918.2,648-666).
ggttaatatctggacaatt

SEQ ID NO: 224339 - DNA, 19 bp, Homo sapiens
  siRNA target sequence for SC5DL (NM_006918.2,649-667).
gttaatatctggacaattt

SEQ ID NO: 224340 - DNA, 19 bp, Homo sapiens
  siRNA target sequence for SC5DL (NM_006918.2,657-675).
ctggacaatttccattcat

SEQ ID NO: 224341 - DNA, 19 bp, Homo sapiens
  siRNA target sequence for SC5DL (NM_006918.2,668-686).
ccattcatgacggtgattt

SEQ ID NO: 224342 - DNA, 19 bp, Homo sapiens
  siRNA target sequence for SC5DL (NM_006918.2,689-707).
gtgtcccccaaatcttaca

SEQ ID NO: 224343 - DNA, 19 bp, Homo sapiens
  siRNA target sequence for SC5DL (NM_006918.2,744-762).
ccatatgttctttgactat

SEQ ID NO: 224344 - DNA, 19 bp, Homo sapiens
  siRNA target sequence for SC5DL (NM_006918.2,745-763).
catatgttctttgactata

SEQ ID NO: 224345 - DNA, 19 bp, Homo sapiens
  siRNA target sequence for SC5DL (NM_006918.2,750-768).
gttctttgactataattat

SEQ ID NO: 224346 - DNA, 19 bp, Homo sapiens
  siRNA target sequence for SC5DL (NM_006918.2,794-812).
ggattggcggctcattcaa

SEQ ID NO: 224347 - DNA, 19 bp, Homo sapiens
  siRNA target sequence for SC5DL (NM_006918.2,795-813).
gattggcggctcattcaaa

SEQ ID NO: 224348 - DNA, 19 bp, Homo sapiens
  siRNA target sequence for SC5DL (NM_006918.2,801-819).
cggctcattcaaaaatcct

SEQ ID NO: 224349 - DNA, 19 bp, Homo sapiens
  siRNA target sequence for SC5DL (NM_006918.2,834-852).
gaagggaccgctcagttat

SEQ ID NO: 224350 - DNA, 19 bp, Homo sapiens
  siRNA target sequence for SC5DL (NM_006918.2,838-856).
ggaccgctcagttatgtga

SEQ ID NO: 224351 - DNA, 19 bp, Homo sapiens
  siRNA target sequence for SC5DL (NM_006918.2,839-857).
gaccgctcagttatgtgaa

SEQ ID NO: 224352 - DNA, 19 bp, Homo sapiens
  siRNA target sequence for SC5DL (NM_006918.2,928-946).
gagtttacaaagactgaat

SEQ ID NO: 224353 - DNA, 19 bp, Homo sapiens
  siRNA target sequence for TDO2 (NM_005651.1,67-85).
gagtgggtgcccattttta

SEQ ID NO: 224354 - DNA, 19 bp, Homo sapiens
  siRNA target sequence for TDO2 (NM_005651.1,75-93).
gcccatttttaggaaacaa

SEQ ID NO: 224355 - DNA, 19 bp, Homo sapiens
  siRNA target sequence for TDO2 (NM_005651.1,128-146).
ggcagcgaagaagacaaat

SEQ ID NO: 224356 - DNA, 19 bp, Homo sapiens
  siRNA target sequence for TDO2 (NM_005651.1,171-189).
gcaaaggaggtcttatcta

SEQ ID NO: 224357 - DNA, 19 bp, Homo sapiens
  siRNA target sequence for TDO2 (NM_005651.1,172-190).
caaaggaggtcttatctat

SEQ ID NO: 224358 - DNA, 19 bp, Homo sapiens
  siRNA target sequence for TDO2 (NM_005651.1,225-243).
cacaagaactgcaaagtga

SEQ ID NO: 224359 - DNA, 19 bp, Homo sapiens
  siRNA target sequence for TDO2 (NM_005651.1,269-287).
gaacatctttttatcataa

SEQ ID NO: 224360 - DNA, 19 bp, Homo sapiens
  siRNA target sequence for TDO2 (NM_005651.1,283-301).
cataactcatcaagcttat

SEQ ID NO: 224361 - DNA, 19 bp, Homo sapiens
  siRNA target sequence for TDO2 (NM_005651.1,302-320).
gaactctggtttaagcaaa

SEQ ID NO: 224362 - DNA, 19 bp, Homo sapiens
  siRNA target sequence for TDO2 (NM_005651.1,490-508).
cttcagagagtacttatct

SEQ ID NO: 224363 - DNA, 19 bp, Homo sapiens
  siRNA target sequence for TDO2 (NM_005651.1,528-546).
gtttgcaattccgactatt

SEQ ID NO: 224364 - DNA, 19 bp, Homo sapiens
  siRNA target sequence for TDO2 (NM_005651.1,532-550).
gcaattccgactattagaa

SEQ ID NO: 224365 - DNA, 19 bp, Homo sapiens
  siRNA target sequence for TDO2 (NM_005651.1,533-551).
caattccgactattagaaa

SEQ ID NO: 224366 - DNA, 19 bp, Homo sapiens
  siRNA target sequence for TDO2 (NM_005651.1,577-595).
gagagtcccttataacaga

SEQ ID NO: 224367 - DNA, 19 bp, Homo sapiens
  siRNA target sequence for TDO2 (NM_005651.1,583-601).
cccttataacagaagacat

SEQ ID NO: 224368 - DNA, 19 bp, Homo sapiens
  siRNA target sequence for TDO2 (NM_005651.1,594-612).
gaagacattatcgtgataa

SEQ ID NO: 224369 - DNA, 19 bp, Homo sapiens
  siRNA target sequence for TDO2 (NM_005651.1,597-615).
gacattatcgtgataactt

SEQ ID NO: 224370 - DNA, 19 bp, Homo sapiens
  siRNA target sequence for TDO2 (NM_005651.1,599-617).
cattatcgtgataacttca

SEQ ID NO: 224371 - DNA, 19 bp, Homo sapiens
  siRNA target sequence for TDO2 (NM_005651.1,848-866).
gaggtgctactgtccttat

SEQ ID NO: 224372 - DNA, 19 bp, Homo sapiens
  siRNA target sequence for TDO2 (NM_005651.1,850-868).
ggtgctactgtccttattt

SEQ ID NO: 224373 - DNA, 19 bp, Homo sapiens
  siRNA target sequence for TDO2 (NM_005651.1,853-871).
gctactgtccttatttgat

SEQ ID NO: 224374 - DNA, 19 bp, Homo sapiens
  siRNA target sequence for TDO2 (NM_005651.1,881-899).
catgaacatctccttagta

SEQ ID NO: 224375 - DNA, 19 bp, Homo sapiens
  siRNA target sequence for TDO2 (NM_005651.1,903-921).
gtgaaagacggctgtcata

SEQ ID NO: 224376 - DNA, 19 bp, Homo sapiens
  siRNA target sequence for TDO2 (NM_005651.1,932-950).
cagggagcattgatgatat

SEQ ID NO: 224377 - DNA, 19 bp, Homo sapiens
  siRNA target sequence for TDO2 (NM_005651.1,989-1007).
cagttgctgacttctctta

SEQ ID NO: 224378 - DNA, 19 bp, Homo sapiens
  siRNA target sequence for TDO2 (NM_005651.1,1094-1112).
ggttcctcaggctatcact

SEQ ID NO: 224379 - DNA, 19 bp, Homo sapiens
  siRNA target sequence for TDO2 (NM_005651.1,1095-1113).
gttcctcaggctatcacta

SEQ ID NO: 224380 - DNA, 19 bp, Homo sapiens
  siRNA target sequence for TDO2 (NM_005651.1,1118-1136).
cgatcaactgtgagtgata

SEQ ID NO: 224381 - DNA, 19 bp, Homo sapiens
  siRNA target sequence for TDO2 (NM_005651.1,1122-1140).
caactgtgagtgataggta

SEQ ID NO: 224382 - DNA, 19 bp, Homo sapiens
  siRNA target sequence for TDO2 (NM_005651.1,1138-1156).
gtacaaggtatttgtagat

SEQ ID NO: 224383 - DNA, 19 bp, Homo sapiens
  siRNA target sequence for TDO2 (NM_005651.1,1190-1208).
cactggataccgaagatga

SEQ ID NO: 224384 - DNA, 19 bp, Homo sapiens
  siRNA target sequence for TDO2 (NM_005651.1,1207-1225).
gaacccaaccattcacaaa

SEQ ID NO: 224385 - DNA, 19 bp, Homo sapiens
  siRNA target sequence for TDO2 (NM_005651.1,1229-1247).
ctatatacagcagaatact

SEQ ID NO: 224386 - DNA, 19 bp, Homo sapiens
  siRNA target sequence for HPD (NM_002150.2,262-280).
gctcaacccctggaacaaa

SEQ ID NO: 224387 - DNA, 19 bp, Homo sapiens
  siRNA target sequence for HPD (NM_002150.2,288-306).
gcgatcacctggtgaaaca

SEQ ID NO: 224388 - DNA, 19 bp, Homo sapiens
  siRNA target sequence for HPD (NM_002150.2,329-347).
gcgttcgaggtggaagatt

SEQ ID NO: 224389 - DNA, 19 bp, Homo sapiens
  siRNA target sequence for HPD (NM_002150.2,331-349).
gttcgaggtggaagattgt

SEQ ID NO: 224390 - DNA, 19 bp, Homo sapiens
  siRNA target sequence for HPD (NM_002150.2,402-420).
cctgggtagagcaagacaa

SEQ ID NO: 224391 - DNA, 19 bp, Homo sapiens
  siRNA target sequence for HPD (NM_002150.2,551-569).
cctaaactgcccaaatgca

SEQ ID NO: 224392 - DNA, 19 bp, Homo sapiens
  siRNA target sequence for HPD (NM_002150.2,630-648).
ccgaatggtacctgaaaaa

SEQ ID NO: 224393 - DNA, 19 bp, Homo sapiens
  siRNA target sequence for HPD (NM_002150.2,685-703).
gcaggtgcacacggaatat

SEQ ID NO: 224394 - DNA, 19 bp, Homo sapiens
  siRNA target sequence for HPD (NM_002150.2,686-704).
caggtgcacacggaatata

SEQ ID NO: 224395 - DNA, 19 bp, Homo sapiens
  siRNA target sequence for HPD (NM_002150.2,689-707).
gtgcacacggaatatagct

SEQ ID NO: 224396 - DNA, 19 bp, Homo sapiens
  siRNA target sequence for HPD (NM_002150.2,911-929).
gttccctccacgtactaca

SEQ ID NO: 224397 - DNA, 19 bp, Homo sapiens
  siRNA target sequence for HPD (NM_002150.2,916-934).
ctccacgtactacaaacaa

SEQ ID NO: 224398 - DNA, 19 bp, Homo sapiens
  siRNA target sequence for HPD (NM_002150.2,1029-1047).
gctacctcctgcagatctt

SEQ ID NO: 224399 - DNA, 19 bp, Homo sapiens
  siRNA target sequence for HPD (NM_002150.2,1102-1120).
caaccaccagggttttgga

SEQ ID NO: 224400 - DNA, 19 bp, Homo sapiens
  siRNA target sequence for INDO (NM_002164.3,140-158).
ggacaatcagtaaagagta

SEQ ID NO: 224401 - DNA, 19 bp, Homo sapiens
  siRNA target sequence for INDO (NM_002164.3,156-174).
gtaccatattgatgaagaa

SEQ ID NO: 224402 - DNA, 19 bp, Homo sapiens
  siRNA target sequence for INDO (NM_002164.3,191-209).
caaatccacaggaaaatct

SEQ ID NO: 224403 - DNA, 19 bp, Homo sapiens
  siRNA target sequence for INDO (NM_002164.3,226-244).
gactggatgttcattgcta

SEQ ID NO: 224404 - DNA, 19 bp, Homo sapiens
  siRNA target sequence for INDO (NM_002164.3,342-360).
gcgccttgcacgtctagtt

SEQ ID NO: 224405 - DNA, 19 bp, Homo sapiens
  siRNA target sequence for INDO (NM_002164.3,368-386).
gcatcaccatggcatatgt

SEQ ID NO: 224406 - DNA, 19 bp, Homo sapiens
  siRNA target sequence for INDO (NM_002164.3,413-431).
gtaaggtcttgccaagaaa

SEQ ID NO: 224407 - DNA, 19 bp, Homo sapiens
  siRNA target sequence for INDO (NM_002164.3,558-576).
ggacgttttgttctcattt

SEQ ID NO: 224408 - DNA, 19 bp, Homo sapiens
  siRNA target sequence for INDO (NM_002164.3,652-670).
gtaattcctactgtattca

SEQ ID NO: 224409 - DNA, 19 bp, Homo sapiens
  siRNA target sequence for INDO (NM_002164.3,688-706).
gaacgggacactttgctaa

SEQ ID NO: 224410 - DNA, 19 bp, Homo sapiens
  siRNA target sequence for INDO (NM_002164.3,708-726).
ggcgctgttggaaatagct

SEQ ID NO: 224411 - DNA, 19 bp, Homo sapiens
  siRNA target sequence for INDO (NM_002164.3,772-790).
catgtgaacccaaaagcat

SEQ ID NO: 224412 - DNA, 19 bp, Homo sapiens
  siRNA target sequence for INDO (NM_002164.3,797-815).
gtgttcttcgcatatattt

SEQ ID NO: 224413 - DNA, 19 bp, Homo sapiens
  siRNA target sequence for INDO (NM_002164.3,799-817).
gttcttcgcatatatttgt

SEQ ID NO: 224414 - DNA, 19 bp, Homo sapiens
  siRNA target sequence for INDO (NM_002164.3,845-863).
cagacggtctggtgtatga

SEQ ID NO: 224415 - DNA, 19 bp, Homo sapiens
  siRNA target sequence for INDO (NM_002164.3,910-928).
caaagcagcgtctttcagt

SEQ ID NO: 224416 - DNA, 19 bp, Homo sapiens
  siRNA target sequence for INDO (NM_002164.3,991-1009).
caggacatgagaagatata

SEQ ID NO: 224417 - DNA, 19 bp, Homo sapiens
  siRNA target sequence for INDO (NM_002164.3,1026-1044).
gaacttcctgtgctcatta

SEQ ID NO: 224418 - DNA, 19 bp, Homo sapiens
  siRNA target sequence for INDO (NM_002164.3,1035-1053).
gtgctcattagagtcaaat

SEQ ID NO: 224419 - DNA, 19 bp, Homo sapiens
  siRNA target sequence for INDO (NM_002164.3,1063-1081).
cgtgagtttgtcctttcaa

SEQ ID NO: 224420 - DNA, 19 bp, Homo sapiens
  siRNA target sequence for INDO (NM_002164.3,1091-1109).
ctggcctgcgggaagctta

SEQ ID NO: 224421 - DNA, 19 bp, Homo sapiens
  siRNA target sequence for INDO (NM_002164.3,1094-1112).
gcctgcgggaagcttatga

SEQ ID NO: 224422 - DNA, 19 bp, Homo sapiens
  siRNA target sequence for INDO (NM_002164.3,1145-1163).
gctaccatctgcaaatcgt

SEQ ID NO: 224423 - DNA, 19 bp, Homo sapiens
  siRNA target sequence for INDO (NM_002164.3,1247-1265).
gaactggaggcactgattt

SEQ ID NO: 224424 - DNA, 19 bp, Homo sapiens
  siRNA target sequence for INDO (NM_002164.3,1252-1270).
ggaggcactgatttaatga

SEQ ID NO: 224425 - DNA, 19 bp, Homo sapiens
  siRNA target sequence for INDO (NM_002164.3,1256-1274).
gcactgatttaatgaattt

SEQ ID NO: 224426 - DNA, 19 bp, Homo sapiens
  siRNA target sequence for HGD (NM_000187.1,267-285).
gtctgcccctacaatctct

SEQ ID NO: 224427 - DNA, 19 bp, Homo sapiens
  siRNA target sequence for HGD (NM_000187.1,269-287).
ctgcccctacaatctctat

SEQ ID NO: 224428 - DNA, 19 bp, Homo sapiens
  siRNA target sequence for HGD (NM_000187.1,299-317).
ctcaggatcggctttcact

SEQ ID NO: 224429 - DNA, 19 bp, Homo sapiens
  siRNA target sequence for HGD (NM_000187.1,319-337).
gtccacggagcaccaataa

SEQ ID NO: 224430 - DNA, 19 bp, Homo sapiens
  siRNA target sequence for HGD (NM_000187.1,321-339).
ccacggagcaccaataaga

SEQ ID NO: 224431 - DNA, 19 bp, Homo sapiens
  siRNA target sequence for HGD (NM_000187.1,340-358).
gaagctggctgtataggat

SEQ ID NO: 224432 - DNA, 19 bp, Homo sapiens
  siRNA target sequence for HGD (NM_000187.1,344-362).
ctggctgtataggattcta

SEQ ID NO: 224433 - DNA, 19 bp, Homo sapiens
  siRNA target sequence for HGD (NM_000187.1,356-374).
gattctaccttcagtttct

SEQ ID NO: 224434 - DNA, 19 bp, Homo sapiens
  siRNA target sequence for HGD (NM_000187.1,534-552).
ggagacataaagtctaaca

SEQ ID NO: 224435 - DNA, 19 bp, Homo sapiens
  siRNA target sequence for HGD (NM_000187.1,535-553).
gagacataaagtctaacaa

SEQ ID NO: 224436 - DNA, 19 bp, Homo sapiens
  siRNA target sequence for HGD (NM_000187.1,547-565).
ctaacaatgggcttgctat

SEQ ID NO: 224437 - DNA, 19 bp, Homo sapiens
  siRNA target sequence for HGD (NM_000187.1,596-614).
gaacagatgcttttacaat

SEQ ID NO: 224438 - DNA, 19 bp, Homo sapiens
  siRNA target sequence for HGD (NM_000187.1,616-634).
cagatggggacttcttgat

SEQ ID NO: 224439 - DNA, 19 bp, Homo sapiens
  siRNA target sequence for HGD (NM_000187.1,644-662).
gaaagggaaccttctcatt

SEQ ID NO: 224440 - DNA, 19 bp, Homo sapiens
  siRNA target sequence for HGD (NM_000187.1,648-666).
gggaaccttctcatttaca

SEQ ID NO: 224441 - DNA, 19 bp, Homo sapiens
  siRNA target sequence for HGD (NM_000187.1,684-702).
cttgtacagcccaatgaga

SEQ ID NO: 224442 - DNA, 19 bp, Homo sapiens
  siRNA target sequence for HGD (NM_000187.1,750-768).
gagaccaggggctacatct

SEQ ID NO: 224443 - DNA, 19 bp, Homo sapiens
  siRNA target sequence for HGD (NM_000187.1,831-849).
gccaatcctcgtgatttct

SEQ ID NO: 224444 - DNA, 19 bp, Homo sapiens
  siRNA target sequence for HGD (NM_000187.1,832-850).
ccaatcctcgtgatttctt

SEQ ID NO: 224445 - DNA, 19 bp, Homo sapiens
  siRNA target sequence for HGD (NM_000187.1,888-906).
ggtggttacacggtcatta

SEQ ID NO: 224446 - DNA, 19 bp, Homo sapiens
  siRNA target sequence for HGD (NM_000187.1,889-907).
gtggttacacggtcattaa

SEQ ID NO: 224447 - DNA, 19 bp, Homo sapiens
  siRNA target sequence for HGD (NM_000187.1,891-909).
ggttacacggtcattaata

SEQ ID NO: 224448 - DNA, 19 bp, Homo sapiens
  siRNA target sequence for HGD (NM_000187.1,941-959).
ggatgtctccccgttcaat

SEQ ID NO: 224449 - DNA, 19 bp, Homo sapiens
  siRNA target sequence for HGD (NM_000187.1,966-984).
gcctggcacgggaattata

SEQ ID NO: 224450 - DNA, 19 bp, Homo sapiens
  siRNA target sequence for HGD (NM_000187.1,968-986).
ctggcacgggaattataca

SEQ ID NO: 224451 - DNA, 19 bp, Homo sapiens
  siRNA target sequence for HGD (NM_000187.1,1041-1059).
catgcagacccatccattt

SEQ ID NO: 224452 - DNA, 19 bp, Homo sapiens
  siRNA target sequence for HGD (NM_000187.1,1287-1305).
gatgctgactgctttgaga

SEQ ID NO: 224453 - DNA, 19 bp, Homo sapiens
  siRNA target sequence for HGD (NM_000187.1,1344-1362).
gatggcaccatggcattta

SEQ ID NO: 224454 - DNA, 19 bp, Homo sapiens
  siRNA target sequence for HGD (NM_000187.1,1347-1365).
ggcaccatggcatttatgt

SEQ ID NO: 224455 - DNA, 19 bp, Homo sapiens
  siRNA target sequence for HGD (NM_000187.1,1348-1366).
gcaccatggcatttatgtt

SEQ ID NO: 224456 - DNA, 19 bp, Homo sapiens
  siRNA target sequence for HGD (NM_000187.1,1349-1367).
caccatggcatttatgttt

SEQ ID NO: 224457 - DNA, 19 bp, Homo sapiens
  siRNA target sequence for HGD (NM_000187.1,1351-1369).
ccatggcatttatgtttga

SEQ ID NO: 224458 - DNA, 19 bp, Homo sapiens
  siRNA target sequence for CDO1 (NM_001801.1,424-442).
ggtatacccgaaatcttgt

SEQ ID NO: 224459 - DNA, 19 bp, Homo sapiens
  siRNA target sequence for CDO1 (NM_001801.1,505-523).
gtattcatgatcataccaa

SEQ ID NO: 224460 - DNA, 19 bp, Homo sapiens
  siRNA target sequence for CDO1 (NM_001801.1,638-656).
ccagtgtgcctacatcaat

SEQ ID NO: 224461 - DNA, 19 bp, Homo sapiens
  siRNA target sequence for CDO1 (NM_001801.1,641-659).
gtgtgcctacatcaatgat

SEQ ID NO: 224462 - DNA, 19 bp, Homo sapiens
  siRNA target sequence for CDO1 (NM_001801.1,646-664).
cctacatcaatgattccat

SEQ ID NO: 224463 - DNA, 19 bp, Homo sapiens
  siRNA target sequence for CDO1 (NM_001801.1,667-685).
gcttacatcgagtagagaa

SEQ ID NO: 224464 - DNA, 19 bp, Homo sapiens
  siRNA target sequence for CDO1 (NM_001801.1,708-726).
gtgagccttcacttgtaca

SEQ ID NO: 224465 - DNA, 19 bp, Homo sapiens
  siRNA target sequence for CDO1 (NM_001801.1,742-760).
catgccatgcctttgatca

SEQ ID NO: 224466 - DNA, 19 bp, Homo sapiens
  siRNA target sequence for CDO1 (NM_001801.1,746-764).
ccatgcctttgatcaaaga

SEQ ID NO: 224467 - DNA, 19 bp, Homo sapiens
  siRNA target sequence for HAAO (NM_012205.1,268-286).
cattcggcagggagagata

SEQ ID NO: 224468 - DNA, 19 bp, Homo sapiens
  siRNA target sequence for BCDO1 (NM_017429.1,261-279).
cctgtgagggccaaagtga

SEQ ID NO: 224469 - DNA, 19 bp, Homo sapiens
  siRNA target sequence for BCDO1 (NM_017429.1,272-290).
caaagtgacaggcaagatt

SEQ ID NO: 224470 - DNA, 19 bp, Homo sapiens
  siRNA target sequence for BCDO1 (NM_017429.1,348-366).
gagtccagatacaaccatt

SEQ ID NO: 224471 - DNA, 19 bp, Homo sapiens
  siRNA target sequence for BCDO1 (NM_017429.1,352-370).
ccagatacaaccattggtt

SEQ ID NO: 224472 - DNA, 19 bp, Homo sapiens
  siRNA target sequence for BCDO1 (NM_017429.1,408-426).
gacggtgaagtctattaca

SEQ ID NO: 224473 - DNA, 19 bp, Homo sapiens
  siRNA target sequence for BCDO1 (NM_017429.1,447-465).
gatacctacaacaccaata

SEQ ID NO: 224474 - DNA, 19 bp, Homo sapiens
  siRNA target sequence for BCDO1 (NM_017429.1,514-532).
cggacccctgcaaaaacat

SEQ ID NO: 224475 - DNA, 19 bp, Homo sapiens
  siRNA target sequence for BCDO1 (NM_017429.1,515-533).
ggacccctgcaaaaacata

SEQ ID NO: 224476 - DNA, 19 bp, Homo sapiens
  siRNA target sequence for BCDO1 (NM_017429.1,516-534).
gacccctgcaaaaacatat

SEQ ID NO: 224477 - DNA, 19 bp, Homo sapiens
  siRNA target sequence for BCDO1 (NM_017429.1,627-645).
gcgacctcagagaccaatt

SEQ ID NO: 224478 - DNA, 19 bp, Homo sapiens
  siRNA target sequence for BCDO1 (NM_017429.1,628-646).
cgacctcagagaccaatta

SEQ ID NO: 224479 - DNA, 19 bp, Homo sapiens
  siRNA target sequence for BCDO1 (NM_017429.1,683-701).
ggagaaggttgattatcgt

SEQ ID NO: 224480 - DNA, 19 bp, Homo sapiens
  siRNA target sequence for BCDO1 (NM_017429.1,684-702).
gagaaggttgattatcgta

SEQ ID NO: 224481 - DNA, 19 bp, Homo sapiens
  siRNA target sequence for BCDO1 (NM_017429.1,727-745).
cgtcacatccccattatga

SEQ ID NO: 224482 - DNA, 19 bp, Homo sapiens
  siRNA target sequence for BCDO1 (NM_017429.1,730-748).
cacatccccattatgatga

SEQ ID NO: 224483 - DNA, 19 bp, Homo sapiens
  siRNA target sequence for BCDO1 (NM_017429.1,793-811).
ggaagacaaagtatgtgat

SEQ ID NO: 224484 - DNA, 19 bp, Homo sapiens
  siRNA target sequence for BCDO1 (NM_017429.1,937-955).
gagtcaccgagaactatgt

SEQ ID NO: 224485 - DNA, 19 bp, Homo sapiens
  siRNA target sequence for BCDO1 (NM_017429.1,943-961).
ccgagaactatgtcatctt

SEQ ID NO: 224486 - DNA, 19 bp, Homo sapiens
  siRNA target sequence for BCDO1 (NM_017429.1,973-991).
ctttcaggttggatattct

SEQ ID NO: 224487 - DNA, 19 bp, Homo sapiens
  siRNA target sequence for BCDO1 (NM_017429.1,1005-1023).
gcatacatccggagaatga

SEQ ID NO: 224488 - DNA, 19 bp, Homo sapiens
  siRNA target sequence for BCDO1 (NM_017429.1,1346-1364).
caaagtggcatctacaaca

SEQ ID NO: 224489 - DNA, 19 bp, Homo sapiens
  siRNA target sequence for BCDO1 (NM_017429.1,1397-1415).
ctactgccagccggaattt

SEQ ID NO: 224490 - DNA, 19 bp, Homo sapiens
  siRNA target sequence for BCDO1 (NM_017429.1,1402-1420).
gccagccggaatttcttta

SEQ ID NO: 224491 - DNA, 19 bp, Homo sapiens
  siRNA target sequence for BCDO1 (NM_017429.1,1431-1449).
gagcttccacgggtcaatt

SEQ ID NO: 224492 - DNA, 19 bp, Homo sapiens
  siRNA target sequence for BCDO1 (NM_017429.1,1433-1451).
gcttccacgggtcaattat

SEQ ID NO: 224493 - DNA, 19 bp, Homo sapiens
  siRNA target sequence for BCDO1 (NM_017429.1,1442-1460).
ggtcaattatgctcacaat

SEQ ID NO: 224494 - DNA, 19 bp, Homo sapiens
  siRNA target sequence for BCDO1 (NM_017429.1,1452-1470).
gctcacaatggaaagcaat

SEQ ID NO: 224495 - DNA, 19 bp, Homo sapiens
  siRNA target sequence for BCDO1 (NM_017429.1,1453-1471).
ctcacaatggaaagcaata

SEQ ID NO: 224496 - DNA, 19 bp, Homo sapiens
  siRNA target sequence for BCDO1 (NM_017429.1,1466-1484).
gcaataccgatatgtcttt

SEQ ID NO: 224497 - DNA, 19 bp, Homo sapiens
  siRNA target sequence for BCDO1 (NM_017429.1,1582-1600).
cagcggaacccctgtttgt

SEQ ID NO: 224498 - DNA, 19 bp, Homo sapiens
  siRNA target sequence for BCDO1 (NM_017429.1,1623-1641).
gaggatgacggagtaatct

SEQ ID NO: 224499 - DNA, 19 bp, Homo sapiens
  siRNA target sequence for BCDO1 (NM_017429.1,1625-1643).
ggatgacggagtaatctta

SEQ ID NO: 224500 - DNA, 19 bp, Homo sapiens
  siRNA target sequence for BCDO1 (NM_017429.1,1626-1644).
gatgacggagtaatcttat

SEQ ID NO: 224501 - DNA, 19 bp, Homo sapiens
  siRNA target sequence for BCDO1 (NM_017429.1,1718-1736).
ggcccgtgcctctgttgat

SEQ ID NO: 224502 - DNA, 19 bp, Homo sapiens
  siRNA target sequence for BCDO1 (NM_017429.1,1726-1744).
cctctgttgatgtcgatat

SEQ ID NO: 224503 - DNA, 19 bp, Homo sapiens
  siRNA target sequence for BCDO1 (NM_017429.1,1729-1747).
ctgttgatgtcgatatgca

SEQ ID NO: 224504 - DNA, 19 bp, Homo sapiens
  siRNA target sequence for BCDO1 (NM_017429.1,1748-1766).
catggatctccatggatta

SEQ ID NO: 224505 - DNA, 19 bp, Homo sapiens
  siRNA target sequence for BCDO1 (NM_017429.1,1752-1770).
gatctccatggattattca

SEQ ID NO: 224506 - DNA, 19 bp, Homo sapiens
  siRNA target sequence for BCDO1 (NM_017429.1,1757-1775).
ccatggattattcattaca

SEQ ID NO: 224507 - DNA, 19 bp, Homo sapiens
  siRNA target sequence for BCDO1 (NM_017429.1,1778-1796).
catggactgggacacaaaa

SEQ ID NO: 224508 - DNA, 19 bp, Homo sapiens
  siRNA target sequence for BCDO2 (NM_031938.1,45-63).
ccggctcccagttttcaaa

SEQ ID NO: 224509 - DNA, 19 bp, Homo sapiens
  siRNA target sequence for BCDO2 (NM_031938.1,46-64).
cggctcccagttttcaaaa

SEQ ID NO: 224510 - DNA, 19 bp, Homo sapiens
  siRNA target sequence for BCDO2 (NM_031938.1,176-194).
ctcgagtctggggacattt

SEQ ID NO: 224511 - DNA, 19 bp, Homo sapiens
  siRNA target sequence for BCDO2 (NM_031938.1,204-222).
gctcaatggctctctactt

SEQ ID NO: 224512 - DNA, 19 bp, Homo sapiens
  siRNA target sequence for BCDO2 (NM_031938.1,213-231).
ctctctacttcgaattgga

SEQ ID NO: 224513 - DNA, 19 bp, Homo sapiens
  siRNA target sequence for BCDO2 (NM_031938.1,251-269).
ggaaggataagtacaatca

SEQ ID NO: 224514 - DNA, 19 bp, Homo sapiens
  siRNA target sequence for BCDO2 (NM_031938.1,252-270).
gaaggataagtacaatcat

SEQ ID NO: 224515 - DNA, 19 bp, Homo sapiens
  siRNA target sequence for BCDO2 (NM_031938.1,311-329).
caaagggcacagtgacata

SEQ ID NO: 224516 - DNA, 19 bp, Homo sapiens
  siRNA target sequence for BCDO2 (NM_031938.1,324-342).
gacatacaggagcaagttt

SEQ ID NO: 224517 - DNA, 19 bp, Homo sapiens
  siRNA target sequence for BCDO2 (NM_031938.1,326-344).
catacaggagcaagtttct

SEQ ID NO: 224518 - DNA, 19 bp, Homo sapiens
  siRNA target sequence for BCDO2 (NM_031938.1,339-357).
gtttctacagagtgataca

SEQ ID NO: 224519 - DNA, 19 bp, Homo sapiens
  siRNA target sequence for BCDO2 (NM_031938.1,343-361).
ctacagagtgatacatata

SEQ ID NO: 224520 - DNA, 19 bp, Homo sapiens
  siRNA target sequence for BCDO2 (NM_031938.1,436-454).
gtttttgaacgtttcatgt

SEQ ID NO: 224521 - DNA, 19 bp, Homo sapiens
  siRNA target sequence for BCDO2 (NM_031938.1,547-565).
gagaccaactttatgaata

SEQ ID NO: 224522 - DNA, 19 bp, Homo sapiens
  siRNA target sequence for BCDO2 (NM_031938.1,551-569).
ccaactttatgaataaagt

SEQ ID NO: 224523 - DNA, 19 bp, Homo sapiens
  siRNA target sequence for BCDO2 (NM_031938.1,600-618).
ggtagattggagcaaattt

SEQ ID NO: 224524 - DNA, 19 bp, Homo sapiens
  siRNA target sequence for BCDO2 (NM_031938.1,601-619).
gtagattggagcaaattta

SEQ ID NO: 224525 - DNA, 19 bp, Homo sapiens
  siRNA target sequence for BCDO2 (NM_031938.1,635-653).
caactgcacatcctcatta

SEQ ID NO: 224526 - DNA, 19 bp, Homo sapiens
  siRNA target sequence for BCDO2 (NM_031938.1,638-656).
ctgcacatcctcattatga

SEQ ID NO: 224527 - DNA, 19 bp, Homo sapiens
  siRNA target sequence for BCDO2 (NM_031938.1,703-721).
ggtttctcctataaggtta

SEQ ID NO: 224528 - DNA, 19 bp, Homo sapiens
  siRNA target sequence for BCDO2 (NM_031938.1,704-722).
gtttctcctataaggttat

SEQ ID NO: 224529 - DNA, 19 bp, Homo sapiens
  siRNA target sequence for BCDO2 (NM_031938.1,763-781).
catggagtccaggtgatat

SEQ ID NO: 224530 - DNA, 19 bp, Homo sapiens
  siRNA target sequence for BCDO2 (NM_031938.1,766-784).
ggagtccaggtgatatgtt

SEQ ID NO: 224531 - DNA, 19 bp, Homo sapiens
  siRNA target sequence for BCDO2 (NM_031938.1,769-787).
gtccaggtgatatgttcta

SEQ ID NO: 224532 - DNA, 19 bp, Homo sapiens
  siRNA target sequence for BCDO2 (NM_031938.1,774-792).
ggtgatatgttctattgct

SEQ ID NO: 224533 - DNA, 19 bp, Homo sapiens
  siRNA target sequence for BCDO2 (NM_031938.1,775-793).
gtgatatgttctattgctt

SEQ ID NO: 224534 - DNA, 19 bp, Homo sapiens
  siRNA target sequence for BCDO2 (NM_031938.1,812-830).
cttcttactaccatagctt

SEQ ID NO: 224535 - DNA, 19 bp, Homo sapiens
  siRNA target sequence for BCDO2 (NM_031938.1,822-840).
ccatagctttggaatgaca

SEQ ID NO: 224536 - DNA, 19 bp, Homo sapiens
  siRNA target sequence for BCDO2 (NM_031938.1,887-905).
ggaaaattgccacttctaa

SEQ ID NO: 224537 - DNA, 19 bp, Homo sapiens
  siRNA target sequence for BCDO2 (NM_031938.1,912-930).
gggaaaggccttttcagat

SEQ ID NO: 224538 - DNA, 19 bp, Homo sapiens
  siRNA target sequence for BCDO2 (NM_031938.1,951-969).
gtgtaatacgcggtttcat

SEQ ID NO: 224539 - DNA, 19 bp, Homo sapiens
  siRNA target sequence for BCDO2 (NM_031938.1,953-971).
gtaatacgcggtttcatgt

SEQ ID NO: 224540 - DNA, 19 bp, Homo sapiens
  siRNA target sequence for BCDO2 (NM_031938.1,997-1015).
cttccagggagatactaca

SEQ ID NO: 224541 - DNA, 19 bp, Homo sapiens
  siRNA target sequence for BCDO2 (NM_031938.1,1016-1034).
gcaaaccttttgttacatt

SEQ ID NO: 224542 - DNA, 19 bp, Homo sapiens
  siRNA target sequence for BCDO2 (NM_031938.1,1057-1075).
gaccagggctgtgttataa

SEQ ID NO: 224543 - DNA, 19 bp, Homo sapiens
  siRNA target sequence for BCDO2 (NM_031938.1,1063-1081).
ggctgtgttataattgatt

SEQ ID NO: 224544 - DNA, 19 bp, Homo sapiens
  siRNA target sequence for BCDO2 (NM_031938.1,1064-1082).
gctgtgttataattgattt

SEQ ID NO: 224545 - DNA, 19 bp, Homo sapiens
  siRNA target sequence for BCDO2 (NM_031938.1,1078-1096).
gatttgtgctgtcaagata

SEQ ID NO: 224546 - DNA, 19 bp, Homo sapiens
  siRNA target sequence for BCDO2 (NM_031938.1,1083-1101).
gtgctgtcaagataatgga

SEQ ID NO: 224547 - DNA, 19 bp, Homo sapiens
  siRNA target sequence for BCDO2 (NM_031938.1,1099-1117).
ggaagaaccctagaagttt

SEQ ID NO: 224548 - DNA, 19 bp, Homo sapiens
  siRNA target sequence for BCDO2 (NM_031938.1,1100-1118).
gaagaaccctagaagttta

SEQ ID NO: 224549 - DNA, 19 bp, Homo sapiens
  siRNA target sequence for BCDO2 (NM_031938.1,1103-1121).
gaaccctagaagtttacca

SEQ ID NO: 224550 - DNA, 19 bp, Homo sapiens
  siRNA target sequence for BCDO2 (NM_031938.1,1142-1160).
ctggggaagggcttgatca

SEQ ID NO: 224551 - DNA, 19 bp, Homo sapiens
  siRNA target sequence for BCDO2 (NM_031938.1,1151-1169).
ggcttgatcaggtccataa

SEQ ID NO: 224552 - DNA, 19 bp, Homo sapiens
  siRNA target sequence for BCDO2 (NM_031938.1,1152-1170).
gcttgatcaggtccataat

SEQ ID NO: 224553 - DNA, 19 bp, Homo sapiens
  siRNA target sequence for BCDO2 (NM_031938.1,1207-1225).
cctttaaatgtcagtttga

SEQ ID NO: 224554 - DNA, 19 bp, Homo sapiens
  siRNA target sequence for BCDO2 (NM_031938.1,1246-1264).
ctgagtccattgtcctata

SEQ ID NO: 224555 - DNA, 19 bp, Homo sapiens
  siRNA target sequence for BCDO2 (NM_031938.1,1248-1266).
gagtccattgtcctatact

SEQ ID NO: 224556 - DNA, 19 bp, Homo sapiens
  siRNA target sequence for BCDO2 (NM_031938.1,1357-1375).
gaatttcctcagatctact

SEQ ID NO: 224557 - DNA, 19 bp, Homo sapiens
  siRNA target sequence for BCDO2 (NM_031938.1,1371-1389).
ctactatgatcgattcagt

SEQ ID NO: 224558 - DNA, 19 bp, Homo sapiens
  siRNA target sequence for BCDO2 (NM_031938.1,1381-1399).
cgattcagtggcaaaaagt

SEQ ID NO: 224559 - DNA, 19 bp, Homo sapiens
  siRNA target sequence for BCDO2 (NM_031938.1,1386-1404).
cagtggcaaaaagtatcat

SEQ ID NO: 224560 - DNA, 19 bp, Homo sapiens
  siRNA target sequence for BCDO2 (NM_031938.1,1390-1408).
ggcaaaaagtatcatttct

SEQ ID NO: 224561 - DNA, 19 bp, Homo sapiens
  siRNA target sequence for BCDO2 (NM_031938.1,1418-1436).
gtggctttcggcatttagt

SEQ ID NO: 224562 - DNA, 19 bp, Homo sapiens
  siRNA target sequence for BCDO2 (NM_031938.1,1445-1463).
ctctgatcaaggttgatgt

SEQ ID NO: 224563 - DNA, 19 bp, Homo sapiens
  siRNA target sequence for BCDO2 (NM_031938.1,1509-1527).
ctcagaacctgtttttgtt

SEQ ID NO: 224564 - DNA, 19 bp, Homo sapiens
  siRNA target sequence for BCDO2 (NM_031938.1,1556-1574).
gtggggttattctttctgt

SEQ ID NO: 224565 - DNA, 19 bp, Homo sapiens
  siRNA target sequence for FLJ32115 (NM_152321.1,23-41).
gccccgtccaggttcatgt

SEQ ID NO: 224566 - DNA, 19 bp, Homo sapiens
  siRNA target sequence for FLJ32115 (NM_152321.1,238-256).
ccatagcatggtgcaaaaa

SEQ ID NO: 224567 - DNA, 19 bp, Homo sapiens
  siRNA target sequence for FLJ32115 (NM_152321.1,239-257).
catagcatggtgcaaaaat

SEQ ID NO: 224568 - DNA, 19 bp, Homo sapiens
  siRNA target sequence for FLJ32115 (NM_152321.1,337-355).
ctttcgcctggtagacaat

SEQ ID NO: 224569 - DNA, 19 bp, Homo sapiens
  siRNA target sequence for FLJ32115 (NM_152321.1,343-361).
cctggtagacaatgaacaa

SEQ ID NO: 224570 - DNA, 19 bp, Homo sapiens
  siRNA target sequence for FLJ32115 (NM_152321.1,376-394).
cgaagacattgaaagcatt

SEQ ID NO: 224571 - DNA, 19 bp, Homo sapiens
  siRNA target sequence for FLJ32115 (NM_152321.1,411-429).
gccgtttcattgagatcaa

SEQ ID NO: 224572 - DNA, 19 bp, Homo sapiens
  siRNA target sequence for FLJ32115 (NM_152321.1,475-493).
gttattcaacagcgtaatt

SEQ ID NO: 224573 - DNA, 19 bp, Homo sapiens
  siRNA target sequence for FLJ32115 (NM_152321.1,481-499).
caacagcgtaattcagatt

SEQ ID NO: 224574 - DNA, 19 bp, Homo sapiens
  siRNA target sequence for FLJ32115 (NM_152321.1,486-504).
gcgtaattcagattcatct

SEQ ID NO: 224575 - DNA, 19 bp, Homo sapiens
  siRNA target sequence for FLJ32115 (NM_152321.1,581-599).
caggggaagattctcttta

SEQ ID NO: 224576 - DNA, 19 bp, Homo sapiens
  siRNA target sequence for FLJ32115 (NM_152321.1,637-655).
gatatcatttttcaaacta

SEQ ID NO: 224577 - DNA, 19 bp, Homo sapiens
  siRNA target sequence for FLJ32115 (NM_152321.1,735-753).
ccgtagagcatgtgcaaaa

SEQ ID NO: 224578 - DNA, 19 bp, Homo sapiens
  siRNA target sequence for FLJ32115 (NM_152321.1,740-758).
gagcatgtgcaaaactttt

SEQ ID NO: 224579 - DNA, 19 bp, Homo sapiens
  siRNA target sequence for FLJ32115 (NM_152321.1,742-760).
gcatgtgcaaaacttttgt

SEQ ID NO: 224580 - DNA, 19 bp, Homo sapiens
  siRNA target sequence for FLJ32115 (NM_152321.1,754-772).
cttttgtgatggattccta

SEQ ID NO: 224581 - DNA, 19 bp, Homo sapiens
  siRNA target sequence for FLJ32115 (NM_152321.1,770-788).
ctaagtggaaaattgttga

SEQ ID NO: 224582 - DNA, 19 bp, Homo sapiens
  siRNA target sequence for TMLHE (NM_018196.1,194-212).
gctgaagggaggagtcata

SEQ ID NO: 224583 - DNA, 19 bp, Homo sapiens
  siRNA target sequence for TMLHE (NM_018196.1,327-345).
gagctgaaatatgctaata

SEQ ID NO: 224584 - DNA, 19 bp, Homo sapiens
  siRNA target sequence for TMLHE (NM_018196.1,346-364).
ccgtgatgcgctttgatta

SEQ ID NO: 224585 - DNA, 19 bp, Homo sapiens
  siRNA target sequence for TMLHE (NM_018196.1,442-460).
gtgtggatttatgtatcaa

SEQ ID NO: 224586 - DNA, 19 bp, Homo sapiens
  siRNA target sequence for TMLHE (NM_018196.1,485-503).
gaccacactctttttcact

SEQ ID NO: 224587 - DNA, 19 bp, Homo sapiens
  siRNA target sequence for TMLHE (NM_018196.1,514-532).
gtcatgtgactaaatatga

SEQ ID NO: 224588 - DNA, 19 bp, Homo sapiens
  siRNA target sequence for TMLHE (NM_018196.1,521-539).
gactaaatatgatttgaat

SEQ ID NO: 224589 - DNA, 19 bp, Homo sapiens
  siRNA target sequence for TMLHE (NM_018196.1,565-583).
ggcagaaacaaaaagtcat

SEQ ID NO: 224590 - DNA, 19 bp, Homo sapiens
  siRNA target sequence for TMLHE (NM_018196.1,587-605).
gcctagaatactatggaat

SEQ ID NO: 224591 - DNA, 19 bp, Homo sapiens
  siRNA target sequence for TMLHE (NM_018196.1,704-722).
ctatggaattgcattcgta

SEQ ID NO: 224592 - DNA, 19 bp, Homo sapiens
  siRNA target sequence for TMLHE (NM_018196.1,869-887).
gcacactgacactacctat

SEQ ID NO: 224593 - DNA, 19 bp, Homo sapiens
  siRNA target sequence for TMLHE (NM_018196.1,870-888).
cacactgacactacctatt

SEQ ID NO: 224594 - DNA, 19 bp, Homo sapiens
  siRNA target sequence for TMLHE (NM_018196.1,872-890).
cactgacactacctatttt

SEQ ID NO: 224595 - DNA, 19 bp, Homo sapiens
  siRNA target sequence for TMLHE (NM_018196.1,874-892).
ctgacactacctattttca

SEQ ID NO: 224596 - DNA, 19 bp, Homo sapiens
  siRNA target sequence for TMLHE (NM_018196.1,946-964).
gcaggacactgctagtaga

SEQ ID NO: 224597 - DNA, 19 bp, Homo sapiens
  siRNA target sequence for TMLHE (NM_018196.1,952-970).
cactgctagtagatggatt

SEQ ID NO: 224598 - DNA, 19 bp, Homo sapiens
  siRNA target sequence for TMLHE (NM_018196.1,956-974).
gctagtagatggattctat

SEQ ID NO: 224599 - DNA, 19 bp, Homo sapiens
  siRNA target sequence for TMLHE (NM_018196.1,976-994).
cagcagaacaggtacttca

SEQ ID NO: 224600 - DNA, 19 bp, Homo sapiens
  siRNA target sequence for TMLHE (NM_018196.1,998-1016).
ggcacctgaggaatttgaa

SEQ ID NO: 224601 - DNA, 19 bp, Homo sapiens
  siRNA target sequence for TMLHE (NM_018196.1,1029-1047).
gtgccattgaagcatgaat

SEQ ID NO: 224602 - DNA, 19 bp, Homo sapiens
  siRNA target sequence for TMLHE (NM_018196.1,1031-1049).
gccattgaagcatgaatat

SEQ ID NO: 224603 - DNA, 19 bp, Homo sapiens
  siRNA target sequence for TMLHE (NM_018196.1,1032-1050).
ccattgaagcatgaatata

SEQ ID NO: 224604 - DNA, 19 bp, Homo sapiens
  siRNA target sequence for TMLHE (NM_018196.1,1037-1055).
gaagcatgaatatattgaa

SEQ ID NO: 224605 - DNA, 19 bp, Homo sapiens
  siRNA target sequence for ALDRL6 (NM_017584.4,287-305).
cggacccggacgtagattt

SEQ ID NO: 224606 - DNA, 19 bp, Homo sapiens
  siRNA target sequence for ALDRL6 (NM_017584.4,476-494).
cgcaggcctccgtggtttt

SEQ ID NO: 224607 - DNA, 19 bp, Homo sapiens
  siRNA target sequence for ALDRL6 (NM_017584.4,546-564).
cacagagctcgggatgtat

SEQ ID NO: 224608 - DNA, 19 bp, Homo sapiens
  siRNA target sequence for ALDRL6 (NM_017584.4,548-566).
cagagctcgggatgtatca

SEQ ID NO: 224609 - DNA, 19 bp, Homo sapiens
  siRNA target sequence for ALDRL6 (NM_017584.4,621-639).
gtaccaggtgatgaagttt

SEQ ID NO: 224610 - DNA, 19 bp, Homo sapiens
  siRNA target sequence for ALDRL6 (NM_017584.4,656-674).
cccctgaggctttctacat

SEQ ID NO: 224611 - DNA, 19 bp, Homo sapiens
  siRNA target sequence for ALDRL6 (NM_017584.4,659-677).
ctgaggctttctacatgat

SEQ ID NO: 224612 - DNA, 19 bp, Homo sapiens
  siRNA target sequence for ALDRL6 (NM_017584.4,844-862).
gggctcattgacaagtact

SEQ ID NO: 224613 - DNA, 19 bp, Homo sapiens
  siRNA target sequence for C12orf8 (NM_006817.2,732-750).
ctccagaagagcttaaaca

SEQ ID NO: 224614 - DNA, 19 bp, Homo sapiens
  siRNA target sequence for ERP70 (NM_004911.3,321-339).
ccggacgaggattcttcta

SEQ ID NO: 224615 - DNA, 19 bp, Homo sapiens
  siRNA target sequence for ERP70 (NM_004911.3,322-340).
cggacgaggattcttctaa

SEQ ID NO: 224616 - DNA, 19 bp, Homo sapiens
  siRNA target sequence for ERP70 (NM_004911.3,324-342).
gacgaggattcttctaaca

SEQ ID NO: 224617 - DNA, 19 bp, Homo sapiens
  siRNA target sequence for ERP70 (NM_004911.3,326-344).
cgaggattcttctaacaga

SEQ ID NO: 224618 - DNA, 19 bp, Homo sapiens
  siRNA target sequence for ERP70 (NM_004911.3,399-417).
gaagacgacttggaagtta

SEQ ID NO: 224619 - DNA, 19 bp, Homo sapiens
  siRNA target sequence for ERP70 (NM_004911.3,430-448).
gagtcttggtcctaaatga

SEQ ID NO: 224620 - DNA, 19 bp, Homo sapiens
  siRNA target sequence for ERP70 (NM_004911.3,451-469).
caaactttgataattttgt

SEQ ID NO: 224621 - DNA, 19 bp, Homo sapiens
  siRNA target sequence for ERP70 (NM_004911.3,488-506).
gctgctggagttttatgct

SEQ ID NO: 224622 - DNA, 19 bp, Homo sapiens
  siRNA target sequence for ERP70 (NM_004911.3,527-545).
gcagtttgctccggaatat

SEQ ID NO: 224623 - DNA, 19 bp, Homo sapiens
  siRNA target sequence for ERP70 (NM_004911.3,530-548).
gtttgctccggaatatgaa

SEQ ID NO: 224624 - DNA, 19 bp, Homo sapiens
  siRNA target sequence for ERP70 (NM_004911.3,555-573).
gccaacatattaaaggata

SEQ ID NO: 224625 - DNA, 19 bp, Homo sapiens
  siRNA target sequence for ERP70 (NM_004911.3,654-672).
cccaccatcaagatcctta

SEQ ID NO: 224626 - DNA, 19 bp, Homo sapiens
  siRNA target sequence for ERP70 (NM_004911.3,780-798).
cttgtgttgaccaaagaga

SEQ ID NO: 224627 - DNA, 19 bp, Homo sapiens
  siRNA target sequence for ERP70 (NM_004911.3,788-806).
gaccaaagagaactttgat

SEQ ID NO: 224628 - DNA, 19 bp, Homo sapiens
  siRNA target sequence for ERP70 (NM_004911.3,813-831).
gtgaatgatgcagatatca

SEQ ID NO: 224629 - DNA, 19 bp, Homo sapiens
  siRNA target sequence for ERP70 (NM_004911.3,947-965).
cgacgccaccgcagaaaca

SEQ ID NO: 224630 - DNA, 19 bp, Homo sapiens
  siRNA target sequence for ERP70 (NM_004911.3,993-1011).
ggctatcccaccctgaaaa

SEQ ID NO: 224631 - DNA, 19 bp, Homo sapiens
  siRNA target sequence for ERP70 (NM_004911.3,994-1012).
gctatcccaccctgaaaat

SEQ ID NO: 224632 - DNA, 19 bp, Homo sapiens
  siRNA target sequence for ERP70 (NM_004911.3,995-1013).
ctatcccaccctgaaaatt

SEQ ID NO: 224633 - DNA, 19 bp, Homo sapiens
  siRNA target sequence for ERP70 (NM_004911.3,1062-1080).
ggaatcgttgattacatga

SEQ ID NO: 224634 - DNA, 19 bp, Homo sapiens
  siRNA target sequence for ERP70 (NM_004911.3,1063-1081).
gaatcgttgattacatgat

SEQ ID NO: 224635 - DNA, 19 bp, Homo sapiens
  siRNA target sequence for ERP70 (NM_004911.3,1230-1248).
ctgagagaagattacaaat

SEQ ID NO: 224636 - DNA, 19 bp, Homo sapiens
  siRNA target sequence for ERP70 (NM_004911.3,1269-1287).
gaaatagcaaagttcttga

SEQ ID NO: 224637 - DNA, 19 bp, Homo sapiens
  siRNA target sequence for ERP70 (NM_004911.3,1275-1293).
gcaaagttcttgaaagtct

SEQ ID NO: 224638 - DNA, 19 bp, Homo sapiens
  siRNA target sequence for ERP70 (NM_004911.3,1300-1318).
ggcagttggttgtaatgca

SEQ ID NO: 224639 - DNA, 19 bp, Homo sapiens
  siRNA target sequence for ERP70 (NM_004911.3,1435-1453).
gccaccgcaaggtgtcaaa

SEQ ID NO: 224640 - DNA, 19 bp, Homo sapiens
  siRNA target sequence for ERP70 (NM_004911.3,1439-1457).
ccgcaaggtgtcaaacgat

SEQ ID NO: 224641 - DNA, 19 bp, Homo sapiens
  siRNA target sequence for ERP70 (NM_004911.3,1523-1541).
cagagctgcaactcagttt

SEQ ID NO: 224642 - DNA, 19 bp, Homo sapiens
  siRNA target sequence for ERP70 (NM_004911.3,1770-1788).
ctgaagccagtcatcaaat

SEQ ID NO: 224643 - DNA, 19 bp, Homo sapiens
  siRNA target sequence for ERP70 (NM_004911.3,1923-1941).
ctagagcccgtgtacaaca

SEQ ID NO: 224644 - DNA, 19 bp, Homo sapiens
  siRNA target sequence for ERP70 (NM_004911.3,2061-2079).
cccagtggggacaaaaaga

SEQ ID NO: 224645 - DNA, 19 bp, Homo sapiens
  siRNA target sequence for ERP70 (NM_004911.3,2072-2090).
caaaaagaacccagttaaa

SEQ ID NO: 224646 - DNA, 19 bp, Homo sapiens
  siRNA target sequence for P5 (NM_005742.2,162-180).
ggtgagctgtaccttcttt

SEQ ID NO: 224647 - DNA, 19 bp, Homo sapiens
  siRNA target sequence for P5 (NM_005742.2,184-202).
gcagtgaatggtctgtatt

SEQ ID NO: 224648 - DNA, 19 bp, Homo sapiens
  siRNA target sequence for P5 (NM_005742.2,211-229).
gatgatgtgatcgaattaa

SEQ ID NO: 224649 - DNA, 19 bp, Homo sapiens
  siRNA target sequence for P5 (NM_005742.2,222-240).
cgaattaactccatcgaat

SEQ ID NO: 224650 - DNA, 19 bp, Homo sapiens
  siRNA target sequence for P5 (NM_005742.2,223-241).
gaattaactccatcgaatt

SEQ ID NO: 224651 - DNA, 19 bp, Homo sapiens
  siRNA target sequence for P5 (NM_005742.2,237-255).
gaatttcaaccgagaagtt

SEQ ID NO: 224652 - DNA, 19 bp, Homo sapiens
  siRNA target sequence for P5 (NM_005742.2,269-287).
gtttgtggcttgtagaatt

SEQ ID NO: 224653 - DNA, 19 bp, Homo sapiens
  siRNA target sequence for P5 (NM_005742.2,273-291).
gtggcttgtagaattctat

SEQ ID NO: 224654 - DNA, 19 bp, Homo sapiens
  siRNA target sequence for P5 (NM_005742.2,317-335).
gattaacaccagaatggaa

SEQ ID NO: 224655 - DNA, 19 bp, Homo sapiens
  siRNA target sequence for P5 (NM_005742.2,344-362).
caactgcattaaaagatgt

SEQ ID NO: 224656 - DNA, 19 bp, Homo sapiens
  siRNA target sequence for P5 (NM_005742.2,366-384).
caaagttggtgcagttgat

SEQ ID NO: 224657 - DNA, 19 bp, Homo sapiens
  siRNA target sequence for P5 (NM_005742.2,377-395).
cagttgatgcagataagca

SEQ ID NO: 224658 - DNA, 19 bp, Homo sapiens
  siRNA target sequence for P5 (NM_005742.2,418-436).
ggtgttcagggatttccta

SEQ ID NO: 224659 - DNA, 19 bp, Homo sapiens
  siRNA target sequence for P5 (NM_005742.2,424-442).
cagggatttcctaccatta

SEQ ID NO: 224660 - DNA, 19 bp, Homo sapiens
  siRNA target sequence for P5 (NM_005742.2,494-512).
ctggtgaagccattgtaga

SEQ ID NO: 224661 - DNA, 19 bp, Homo sapiens
  siRNA target sequence for P5 (NM_005742.2,599-617).
gtgatagttcaagtaagaa

SEQ ID NO: 224662 - DNA, 19 bp, Homo sapiens
  siRNA target sequence for P5 (NM_005742.2,633-651).
gacagacgacagctttgat

SEQ ID NO: 224663 - DNA, 19 bp, Homo sapiens
  siRNA target sequence for P5 (NM_005742.2,635-653).
cagacgacagctttgataa

SEQ ID NO: 224664 - DNA, 19 bp, Homo sapiens
  siRNA target sequence for P5 (NM_005742.2,642-660).
cagctttgataagaatgtt

SEQ ID NO: 224665 - DNA, 19 bp, Homo sapiens
  siRNA target sequence for P5 (NM_005742.2,644-662).
gctttgataagaatgttct

SEQ ID NO: 224666 - DNA, 19 bp, Homo sapiens
  siRNA target sequence for P5 (NM_005742.2,744-762).
cgcagcttcagaagtaaaa

SEQ ID NO: 224667 - DNA, 19 bp, Homo sapiens
  siRNA target sequence for P5 (NM_005742.2,766-784).
cagacgaaaggaaaagtga

SEQ ID NO: 224668 - DNA, 19 bp, Homo sapiens
  siRNA target sequence for P5 (NM_005742.2,825-843).
ctcccgatacgggattaga

SEQ ID NO: 224669 - DNA, 19 bp, Homo sapiens
  siRNA target sequence for P5 (NM_005742.2,835-853).
gggattagaggatttccta

SEQ ID NO: 224670 - DNA, 19 bp, Homo sapiens
  siRNA target sequence for P5 (NM_005742.2,842-860).
gaggatttcctacaatcaa

SEQ ID NO: 224671 - DNA, 19 bp, Homo sapiens
  siRNA target sequence for P5 (NM_005742.2,875-893).
gcgagtctcctgtggatta

SEQ ID NO: 224672 - DNA, 19 bp, Homo sapiens
  siRNA target sequence for P5 (NM_005742.2,876-894).
cgagtctcctgtggattat

SEQ ID NO: 224673 - DNA, 19 bp, Homo sapiens
  siRNA target sequence for P5 (NM_005742.2,895-913).
gacggtgggcggacaagat

SEQ ID NO: 224674 - DNA, 19 bp, Homo sapiens
  siRNA target sequence for P5 (NM_005742.2,965-983).
ctgagctgcttgagattat

SEQ ID NO: 224675 - DNA, 19 bp, Homo sapiens
  siRNA target sequence for P5 (NM_005742.2,1042-1060).
ctgccccatatccttgata

SEQ ID NO: 224676 - DNA, 19 bp, Homo sapiens
  siRNA target sequence for P5 (NM_005742.2,1044-1062).
gccccatatccttgatact

SEQ ID NO: 224677 - DNA, 19 bp, Homo sapiens
  siRNA target sequence for PDIP (NM_006849.1,644-662).
ctgtggttctcttcaagaa

SEQ ID NO: 224678 - DNA, 19 bp, Homo sapiens
  siRNA target sequence for PDIP (NM_006849.1,778-796).
cagacgtctgccaagatct

SEQ ID NO: 224679 - DNA, 19 bp, Homo sapiens
  siRNA target sequence for PDIP (NM_006849.1,994-1012).
cgcttggtcaaccttgaaa

SEQ ID NO: 224680 - DNA, 19 bp, Homo sapiens
  siRNA target sequence for PDIP (NM_006849.1,1139-1157).
gggatcagcggccagttaa

SEQ ID NO: 224681 - DNA, 19 bp, Homo sapiens
  siRNA target sequence for PDIP (NM_006849.1,1141-1159).
gatcagcggccagttaaga

SEQ ID NO: 224682 - DNA, 19 bp, Homo sapiens
  siRNA target sequence for PDIP (NM_006849.1,1195-1213).
gacgaaaccaagaatgtgt

SEQ ID NO: 224683 - DNA, 19 bp, Homo sapiens
  siRNA target sequence for PDIP (NM_006849.1,1364-1382).
gcttccctactctcaagta

SEQ ID NO: 224684 - DNA, 19 bp, Homo sapiens
  siRNA target sequence for PDIP (NM_006849.1,1397-1415).
caggtcggaaggtgattga

SEQ ID NO: 224685 - DNA, 19 bp, Homo sapiens
  siRNA target sequence for PDIP (NM_006849.1,1400-1418).
gtcggaaggtgattgaata

SEQ ID NO: 224686 - DNA, 19 bp, Homo sapiens
  siRNA target sequence for PDIR (NM_006810.1,132-150).
gtctcctcgctcattgaga

SEQ ID NO: 224687 - DNA, 19 bp, Homo sapiens
  siRNA target sequence for PDIR (NM_006810.1,136-154).
cctcgctcattgagagaat

SEQ ID NO: 224688 - DNA, 19 bp, Homo sapiens
  siRNA target sequence for PDIR (NM_006810.1,140-158).
gctcattgagagaatctct

SEQ ID NO: 224689 - DNA, 19 bp, Homo sapiens
  siRNA target sequence for PDIR (NM_006810.1,185-203).
cagaacccggaataatgta

SEQ ID NO: 224690 - DNA, 19 bp, Homo sapiens
  siRNA target sequence for PDIR (NM_006810.1,187-205).
gaacccggaataatgtact

SEQ ID NO: 224691 - DNA, 19 bp, Homo sapiens
  siRNA target sequence for PDIR (NM_006810.1,204-222).
ctggtgctttactccaaat

SEQ ID NO: 224692 - DNA, 19 bp, Homo sapiens
  siRNA target sequence for PDIR (NM_006810.1,206-224).
ggtgctttactccaaatct

SEQ ID NO: 224693 - DNA, 19 bp, Homo sapiens
  siRNA target sequence for PDIR (NM_006810.1,362-380).
cccgaaggacaaaaaggtt

SEQ ID NO: 224694 - DNA, 19 bp, Homo sapiens
  siRNA target sequence for PDIR (NM_006810.1,368-386).
ggacaaaaaggttgaatta

SEQ ID NO: 224695 - DNA, 19 bp, Homo sapiens
  siRNA target sequence for PDIR (NM_006810.1,369-387).
gacaaaaaggttgaattat

SEQ ID NO: 224696 - DNA, 19 bp, Homo sapiens
  siRNA target sequence for PDIR (NM_006810.1,395-413).
ccaggatggtgcatttcat

SEQ ID NO: 224697 - DNA, 19 bp, Homo sapiens
  siRNA target sequence for PDIR (NM_006810.1,396-414).
caggatggtgcatttcata

SEQ ID NO: 224698 - DNA, 19 bp, Homo sapiens
  siRNA target sequence for PDIR (NM_006810.1,398-416).
ggatggtgcatttcatact

SEQ ID NO: 224699 - DNA, 19 bp, Homo sapiens
  siRNA target sequence for PDIR (NM_006810.1,402-420).
ggtgcatttcatactgaat

SEQ ID NO: 224700 - DNA, 19 bp, Homo sapiens
  siRNA target sequence for PDIR (NM_006810.1,426-444).
cgagctgtgacatttaagt

SEQ ID NO: 224701 - DNA, 19 bp, Homo sapiens
  siRNA target sequence for PDIR (NM_006810.1,570-588).
ccgctcctgatcatgtttt

SEQ ID NO: 224702 - DNA, 19 bp, Homo sapiens
  siRNA target sequence for PDIR (NM_006810.1,571-589).
cgctcctgatcatgtttta

SEQ ID NO: 224703 - DNA, 19 bp, Homo sapiens
  siRNA target sequence for PDIR (NM_006810.1,616-634).
ggatgatgccgcatttcca

SEQ ID NO: 224704 - DNA, 19 bp, Homo sapiens
  siRNA target sequence for PDIR (NM_006810.1,739-757).
ccaccatctgctattttga

SEQ ID NO: 224705 - DNA, 19 bp, Homo sapiens
  siRNA target sequence for PDIR (NM_006810.1,742-760).
ccatctgctattttgagaa

SEQ ID NO: 224706 - DNA, 19 bp, Homo sapiens
  siRNA target sequence for PDIR (NM_006810.1,896-914).
cctgaccgatgaagacttt

SEQ ID NO: 224707 - DNA, 19 bp, Homo sapiens
  siRNA target sequence for PDIR (NM_006810.1,1098-1116).
cacatctcagagtttccta

SEQ ID NO: 224708 - DNA, 19 bp, Homo sapiens
  siRNA target sequence for PDIR (NM_006810.1,1107-1125).
gagtttcctacgttgaagt

SEQ ID NO: 224709 - DNA, 19 bp, Homo sapiens
  siRNA target sequence for PDIR (NM_006810.1,1109-1127).
gtttcctacgttgaagtat

SEQ ID NO: 224710 - DNA, 19 bp, Homo sapiens
  siRNA target sequence for PDIR (NM_006810.1,1113-1131).
cctacgttgaagtatttta

SEQ ID NO: 224711 - DNA, 19 bp, Homo sapiens
  siRNA target sequence for PDIR (NM_006810.1,1500-1518).
gggaagttcgcagaaaagt

SEQ ID NO: 224712 - DNA, 19 bp, Homo sapiens
  siRNA target sequence for PDIR (NM_006810.1,1502-1520).
gaagttcgcagaaaagtat

SEQ ID NO: 224713 - DNA, 19 bp, Homo sapiens
  siRNA target sequence for PDIR (NM_006810.1,1521-1539).
gacagcgaccgcacagaat

SEQ ID NO: 224714 - DNA, 19 bp, Homo sapiens
  siRNA target sequence for PDIR (NM_006810.1,1530-1548).
cgcacagaattgggattta

SEQ ID NO: 224715 - DNA, 19 bp, Homo sapiens
  siRNA target sequence for PDIR (NM_006810.1,1569-1587).
cgggagggagaccatgaaa

SEQ ID NO: 224716 - DNA, 19 bp, Homo sapiens
  siRNA target sequence for TXN (NM_003329.1,78-96).
cgagagcaagactgctttt

SEQ ID NO: 224717 - DNA, 19 bp, Homo sapiens
  siRNA target sequence for TXN (NM_003329.1,108-126).
ggacgctgcaggtgataaa

SEQ ID NO: 224718 - DNA, 19 bp, Homo sapiens
  siRNA target sequence for TXN (NM_003329.1,111-129).
cgctgcaggtgataaactt

SEQ ID NO: 224719 - DNA, 19 bp, Homo sapiens
  siRNA target sequence for TXN (NM_003329.1,119-137).
gtgataaacttgtagtagt

SEQ ID NO: 224720 - DNA, 19 bp, Homo sapiens
  siRNA target sequence for TXN (NM_003329.1,190-208).
cattccctctctgaaaagt

SEQ ID NO: 224721 - DNA, 19 bp, Homo sapiens
  siRNA target sequence for TXN (NM_003329.1,311-329).
gacaaaaggtgggtgaatt

SEQ ID NO: 224722 - DNA, 19 bp, Homo sapiens
  siRNA target sequence for TXN2 (NM_012473.3,272-290).
ggatggacctgactttcaa

SEQ ID NO: 224723 - DNA, 19 bp, Homo sapiens
  siRNA target sequence for TXN2 (NM_012473.3,413-431).
gatggccaaggtggatatt

SEQ ID NO: 224724 - DNA, 19 bp, Homo sapiens
  siRNA target sequence for TXN2 (NM_012473.3,416-434).
ggccaaggtggatattgat

SEQ ID NO: 224725 - DNA, 19 bp, Homo sapiens
  siRNA target sequence for TXN2 (NM_012473.3,442-460).
cagacctcgccattgagta

SEQ ID NO: 224726 - DNA, 19 bp, Homo sapiens
  siRNA target sequence for TXNL (NM_004786.1,228-246).
ggagcgacccggatttcca

SEQ ID NO: 224727 - DNA, 19 bp, Homo sapiens
  siRNA target sequence for TXNL (NM_004786.1,273-291).
gactcgccgtggtcaagtt

SEQ ID NO: 224728 - DNA, 19 bp, Homo sapiens
  siRNA target sequence for TXNL (NM_004786.1,275-293).
ctcgccgtggtcaagttca

SEQ ID NO: 224729 - DNA, 19 bp, Homo sapiens
  siRNA target sequence for TXNL (NM_004786.1,300-318).
gagggtgtgggccatgttt

SEQ ID NO: 224730 - DNA, 19 bp, Homo sapiens
  siRNA target sequence for TXNL (NM_004786.1,302-320).
gggtgtgggccatgtttga

SEQ ID NO: 224731 - DNA, 19 bp, Homo sapiens
  siRNA target sequence for TXNL (NM_004786.1,322-340).
gattgccccagcattcagt

SEQ ID NO: 224732 - DNA, 19 bp, Homo sapiens
  siRNA target sequence for TXNL (NM_004786.1,327-345).
ccccagcattcagttctat

SEQ ID NO: 224733 - DNA, 19 bp, Homo sapiens
  siRNA target sequence for TXNL (NM_004786.1,373-391).
cttggaagtcgatgtacat

SEQ ID NO: 224734 - DNA, 19 bp, Homo sapiens
  siRNA target sequence for TXNL (NM_004786.1,544-562).
caatgaggacacagatatt

SEQ ID NO: 224735 - DNA, 19 bp, Homo sapiens
  siRNA target sequence for TXNL (NM_004786.1,548-566).
gaggacacagatattccaa

SEQ ID NO: 224736 - DNA, 19 bp, Homo sapiens
  siRNA target sequence for TXNL (NM_004786.1,606-624).
gttgtgaatgtcttaatga

SEQ ID NO: 224737 - DNA, 19 bp, Homo sapiens
  siRNA target sequence for TXNL (NM_004786.1,662-680).
gacacaaccttcttggaat

SEQ ID NO: 224738 - DNA, 19 bp, Homo sapiens
  siRNA target sequence for TXNL (NM_004786.1,687-705).
gtgatgaacagctgcttat

SEQ ID NO: 224739 - DNA, 19 bp, Homo sapiens
  siRNA target sequence for TXNL (NM_004786.1,689-707).
gatgaacagctgcttatta

SEQ ID NO: 224740 - DNA, 19 bp, Homo sapiens
  siRNA target sequence for TXNL (NM_004786.1,718-736).
caatcaacctgttaagctt

SEQ ID NO: 224741 - DNA, 19 bp, Homo sapiens
  siRNA target sequence for TXNL (NM_004786.1,770-788).
cagggccctaaatatgtaa

SEQ ID NO: 224742 - DNA, 19 bp, Homo sapiens
  siRNA target sequence for TXNL (NM_004786.1,772-790).
gggccctaaatatgtaaaa

SEQ ID NO: 224743 - DNA, 19 bp, Homo sapiens
  siRNA target sequence for TXNL (NM_004786.1,802-820).
cctaccccgatctatggat

SEQ ID NO: 224744 - DNA, 19 bp, Homo sapiens
  siRNA target sequence for TXNL (NM_004786.1,803-821).
ctaccccgatctatggatt

SEQ ID NO: 224745 - DNA, 19 bp, Homo sapiens
  siRNA target sequence for TXNL (NM_004786.1,860-878).
gaactgacagaggatgata

SEQ ID NO: 224746 - DNA, 19 bp, Homo sapiens
  siRNA target sequence for TXNL (NM_004786.1,863-881).
ctgacagaggatgatatta

SEQ ID NO: 224747 - DNA, 19 bp, Homo sapiens
  siRNA target sequence for TXNL (NM_004786.1,891-909).
gcattgttccacttcgtta

SEQ ID NO: 224748 - DNA, 19 bp, Homo sapiens
  siRNA target sequence for TXNL (NM_004786.1,892-910).
cattgttccacttcgttat

SEQ ID NO: 224749 - DNA, 19 bp, Homo sapiens
  siRNA target sequence for TXNL (NM_004786.1,896-914).
gttccacttcgttatgtta

SEQ ID NO: 224750 - DNA, 19 bp, Homo sapiens
  siRNA target sequence for TXNL (NM_004786.1,899-917).
ccacttcgttatgttaagt

SEQ ID NO: 224751 - DNA, 19 bp, Homo sapiens
  siRNA target sequence for TXNL (NM_004786.1,900-918).
cacttcgttatgttaagtt

SEQ ID NO: 224752 - DNA, 19 bp, Homo sapiens
  siRNA target sequence for TXNL (NM_004786.1,905-923).
cgttatgttaagtttcaga

SEQ ID NO: 224753 - DNA, 19 bp, Homo sapiens
  siRNA target sequence for TXNL (NM_004786.1,906-924).
gttatgttaagtttcagaa

SEQ ID NO: 224754 - DNA, 19 bp, Homo sapiens
  siRNA target sequence for TXNL (NM_004786.1,922-940).
gaatgttaacagtgtaact

SEQ ID NO: 224755 - DNA, 19 bp, Homo sapiens
  siRNA target sequence for TXNL (NM_004786.1,933-951).
gtgtaactatatttgttca

SEQ ID NO: 224756 - DNA, 19 bp, Homo sapiens
  siRNA target sequence for TXNL (NM_004786.1,1013-1031).
gtccaggcaacaaatatga

SEQ ID NO: 224757 - DNA, 19 bp, Homo sapiens
  siRNA target sequence for TXNL (NM_004786.1,1020-1038).
caacaaatatgaatgactt

SEQ ID NO: 224758 - DNA, 19 bp, Homo sapiens
  siRNA target sequence for AMID (NM_032797.4,397-415).
cgccaaaaagacattcatt

SEQ ID NO: 224759 - DNA, 19 bp, Homo sapiens
  siRNA target sequence for AMID (NM_032797.4,719-737).
gaggtcactctcattcact

SEQ ID NO: 224760 - DNA, 19 bp, Homo sapiens
  siRNA target sequence for AMID (NM_032797.4,854-872).
gagctgcctctcaatgagt

SEQ ID NO: 224761 - DNA, 19 bp, Homo sapiens
  siRNA target sequence for AMID (NM_032797.4,869-887).
gagtatcgagagtacatca

SEQ ID NO: 224762 - DNA, 19 bp, Homo sapiens
  siRNA target sequence for AMID (NM_032797.4,871-889).
gtatcgagagtacatcaaa

SEQ ID NO: 224763 - DNA, 19 bp, Homo sapiens
  siRNA target sequence for AMID (NM_032797.4,1222-1240).
cggtgtgggccaaatcagt

SEQ ID NO: 224764 - DNA, 19 bp, Homo sapiens
  siRNA target sequence for AMID (NM_032797.4,1299-1317).
ctacgagctggaaaaccat

SEQ ID NO: 224765 - DNA, 19 bp, Homo sapiens
  siRNA target sequence for FLJ22028 (NM_024854.1,110-128).
gcagttggctactcacttt

SEQ ID NO: 224766 - DNA, 19 bp, Homo sapiens
  siRNA target sequence for FLJ22028 (NM_024854.1,123-141).
cactttccatcggaagata

SEQ ID NO: 224767 - DNA, 19 bp, Homo sapiens
  siRNA target sequence for FLJ22028 (NM_024854.1,129-147).
ccatcggaagatattctct

SEQ ID NO: 224768 - DNA, 19 bp, Homo sapiens
  siRNA target sequence for FLJ22028 (NM_024854.1,130-148).
catcggaagatattctctt

SEQ ID NO: 224769 - DNA, 19 bp, Homo sapiens
  siRNA target sequence for FLJ22028 (NM_024854.1,218-236).
cgatgttgaagaacaatca

SEQ ID NO: 224770 - DNA, 19 bp, Homo sapiens
  siRNA target sequence for FLJ22028 (NM_024854.1,262-280).
ccaacattaaggttataga

SEQ ID NO: 224771 - DNA, 19 bp, Homo sapiens
  siRNA target sequence for FLJ22028 (NM_024854.1,263-281).
caacattaaggttatagaa

SEQ ID NO: 224772 - DNA, 19 bp, Homo sapiens
  siRNA target sequence for FLJ22028 (NM_024854.1,334-352).
gcaatcagcacgtatataa

SEQ ID NO: 224773 - DNA, 19 bp, Homo sapiens
  siRNA target sequence for FLJ22028 (NM_024854.1,342-360).
cacgtatataagaaactct

SEQ ID NO: 224774 - DNA, 19 bp, Homo sapiens
  siRNA target sequence for FLJ22028 (NM_024854.1,367-385).
gtgctggagctaaaccaaa

SEQ ID NO: 224775 - DNA, 19 bp, Homo sapiens
  siRNA target sequence for FLJ22028 (NM_024854.1,373-391).
gagctaaaccaaagttgat

SEQ ID NO: 224776 - DNA, 19 bp, Homo sapiens
  siRNA target sequence for FLJ22028 (NM_024854.1,375-393).
gctaaaccaaagttgatat

SEQ ID NO: 224777 - DNA, 19 bp, Homo sapiens
  siRNA target sequence for FLJ22028 (NM_024854.1,389-407).
gatatgtgaaggaaatcct

SEQ ID NO: 224778 - DNA, 19 bp, Homo sapiens
  siRNA target sequence for FLJ22028 (NM_024854.1,485-503).
catagggaacggtggtatt

SEQ ID NO: 224779 - DNA, 19 bp, Homo sapiens
  siRNA target sequence for FLJ22028 (NM_024854.1,496-514).
gtggtattgcacttgagtt

SEQ ID NO: 224780 - DNA, 19 bp, Homo sapiens
  siRNA target sequence for FLJ22028 (NM_024854.1,505-523).
cacttgagttagtgtatga

SEQ ID NO: 224781 - DNA, 19 bp, Homo sapiens
  siRNA target sequence for FLJ22028 (NM_024854.1,507-525).
cttgagttagtgtatgaaa

SEQ ID NO: 224782 - DNA, 19 bp, Homo sapiens
  siRNA target sequence for FLJ22028 (NM_024854.1,549-567).
gccattaaagataaagcta

SEQ ID NO: 224783 - DNA, 19 bp, Homo sapiens
  siRNA target sequence for FLJ22028 (NM_024854.1,564-582).
gctatagggaatactttct

SEQ ID NO: 224784 - DNA, 19 bp, Homo sapiens
  siRNA target sequence for FLJ22028 (NM_024854.1,565-583).
ctatagggaatactttctt

SEQ ID NO: 224785 - DNA, 19 bp, Homo sapiens
  siRNA target sequence for FLJ22028 (NM_024854.1,591-609).
ggagcagctgaattcttga

SEQ ID NO: 224786 - DNA, 19 bp, Homo sapiens
  siRNA target sequence for FLJ22028 (NM_024854.1,594-612).
gcagctgaattcttgactt

SEQ ID NO: 224787 - DNA, 19 bp, Homo sapiens
  siRNA target sequence for FLJ22028 (NM_024854.1,617-635).
gctcattgctgaaaaatca

SEQ ID NO: 224788 - DNA, 19 bp, Homo sapiens
  siRNA target sequence for FLJ23322 (NM_024955.4,522-540).
ggctccgtgtccagtacaa

SEQ ID NO: 224789 - DNA, 19 bp, Homo sapiens
  siRNA target sequence for FLJ23322 (NM_024955.4,585-603).
ggaatggccactacttcat

SEQ ID NO: 224790 - DNA, 19 bp, Homo sapiens
  siRNA target sequence for FLJ23322 (NM_024955.4,590-608).
ggccactacttcatcctaa

SEQ ID NO: 224791 - DNA, 19 bp, Homo sapiens
  siRNA target sequence for FLJ23322 (NM_024955.4,634-652).
gtgcagcgtcctctttgta

SEQ ID NO: 224792 - DNA, 19 bp, Homo sapiens
  siRNA target sequence for FLJ23322 (NM_024955.4,815-833).
gtcacaaactttatccata

SEQ ID NO: 224793 - DNA, 19 bp, Homo sapiens
  siRNA target sequence for FLJ23322 (NM_024955.4,819-837).
caaactttatccatatgct

SEQ ID NO: 224794 - DNA, 19 bp, Homo sapiens
  siRNA target sequence for FLJ23322 (NM_024955.4,884-902).
gacctcagagccatcaaca

SEQ ID NO: 224795 - DNA, 19 bp, Homo sapiens
  siRNA target sequence for FLJ23322 (NM_024955.4,886-904).
cctcagagccatcaacaat

SEQ ID NO: 224796 - DNA, 19 bp, Homo sapiens
  siRNA target sequence for FLJ23322 (NM_024955.4,1072-1090).
ggacgacaatgacaacttt

SEQ ID NO: 224797 - DNA, 19 bp, Homo sapiens
  siRNA target sequence for FLJ23322 (NM_024955.4,1172-1190).
cttaactcgggaaatgcat

SEQ ID NO: 224798 - DNA, 19 bp, Homo sapiens
  siRNA target sequence for FLJ23322 (NM_024955.4,1215-1233).
gagctagctacgaatccaa

SEQ ID NO: 224799 - DNA, 19 bp, Homo sapiens
  siRNA target sequence for FLJ23322 (NM_024955.4,1309-1327).
ccacggattccgatacaca

SEQ ID NO: 224800 - DNA, 19 bp, Homo sapiens
  siRNA target sequence for FLJ23322 (NM_024955.4,1473-1491).
ccgatgtcatcctgttgaa

SEQ ID NO: 224801 - DNA, 19 bp, Homo sapiens
  siRNA target sequence for FLJ23322 (NM_024955.4,1591-1609).
cgtcatcaacatggaatat

SEQ ID NO: 224802 - DNA, 19 bp, Homo sapiens
  siRNA target sequence for FLJ23322 (NM_024955.4,1629-1647).
ccgacaaggacgtcttctt

SEQ ID NO: 224803 - DNA, 19 bp, Homo sapiens
  siRNA target sequence for FLJ23322 (NM_024955.4,1630-1648).
cgacaaggacgtcttcttt

SEQ ID NO: 224804 - DNA, 19 bp, Homo sapiens
  siRNA target sequence for FLJ23322 (NM_024955.4,1680-1698).
cctggcagtctaactttct

SEQ ID NO: 224805 - DNA, 19 bp, Homo sapiens
  siRNA target sequence for FLJ23322 (NM_024955.4,1681-1699).
ctggcagtctaactttctt

SEQ ID NO: 224806 - DNA, 19 bp, Homo sapiens
  siRNA target sequence for FLJ23322 (NM_024955.4,1683-1701).
ggcagtctaactttcttca

SEQ ID NO: 224807 - DNA, 19 bp, Homo sapiens
  siRNA target sequence for FLJ23322 (NM_024955.4,1684-1702).
gcagtctaactttcttcat

SEQ ID NO: 224808 - DNA, 19 bp, Homo sapiens
  siRNA target sequence for FLJ23322 (NM_024955.4,1700-1718).
catcctgtcatctactact

SEQ ID NO: 224809 - DNA, 19 bp, Homo sapiens
  siRNA target sequence for FLJ23322 (NM_024955.4,1703-1721).
cctgtcatctactactata

SEQ ID NO: 224810 - DNA, 19 bp, Homo sapiens
  siRNA target sequence for FLJ23322 (NM_024955.4,1706-1724).
gtcatctactactatagat

SEQ ID NO: 224811 - DNA, 19 bp, Homo sapiens
  siRNA target sequence for FLJ23322 (NM_024955.4,1801-1819).
cgtggaagacttcttaaca

SEQ ID NO: 224812 - DNA, 19 bp, Homo sapiens
  siRNA target sequence for FLJ23322 (NM_024955.4,1885-1903).
cgatttgcgaagcttctat

SEQ ID NO: 224813 - DNA, 19 bp, Homo sapiens
  siRNA target sequence for FLJ23322 (NM_024955.4,1926-1944).
ccctcacgcgccagaagtt

SEQ ID NO: 224814 - DNA, 19 bp, Homo sapiens
  siRNA target sequence for FLJ23322 (NM_024955.4,2133-2151).
ctcagtccgtcgatagcaa

SEQ ID NO: 224815 - DNA, 19 bp, Homo sapiens
  siRNA target sequence for FLJ23322 (NM_024955.4,2137-2155).
gtccgtcgatagcaacaaa

SEQ ID NO: 224816 - DNA, 19 bp, Homo sapiens
  siRNA target sequence for FLJ23322 (NM_024955.4,2139-2157).
ccgtcgatagcaacaaaga

SEQ ID NO: 224817 - DNA, 19 bp, Homo sapiens
  siRNA target sequence for FLJ30473 (NM_144704.1,511-529).
cgccctgggccataagtgt

SEQ ID NO: 224818 - DNA, 19 bp, Homo sapiens
  siRNA target sequence for FLJ30473 (NM_144704.1,1032-1050).
ctaagaaggtcgtgttcaa

SEQ ID NO: 224819 - DNA, 19 bp, Homo sapiens
  siRNA target sequence for FLJ30473 (NM_144704.1,1133-1151).
gtggagaacgtgttcacta

SEQ ID NO: 224820 - DNA, 19 bp, Homo sapiens
  siRNA target sequence for FLJ30473 (NM_144704.1,1629-1647).
ggaacaaccgcaaagtgaa

SEQ ID NO: 224821 - DNA, 19 bp, Homo sapiens
  siRNA target sequence for FLJ30473 (NM_144704.1,1683-1701).
gcgtggcagcccagaacat

SEQ ID NO: 224822 - DNA, 19 bp, Homo sapiens
  siRNA target sequence for FLJ30473 (NM_144704.1,1738-1756).
cctctggaccgccatgttt

SEQ ID NO: 224823 - DNA, 19 bp, Homo sapiens
  siRNA target sequence for MTO1 (NM_012123.1,271-289).
gtcatgtaatccttccttt

SEQ ID NO: 224824 - DNA, 19 bp, Homo sapiens
  siRNA target sequence for MTO1 (NM_012123.1,299-317).
ggaaagggacatttaatga

SEQ ID NO: 224825 - DNA, 19 bp, Homo sapiens
  siRNA target sequence for MTO1 (NM_012123.1,364-382).
gtctggtgtacattataaa

SEQ ID NO: 224826 - DNA, 19 bp, Homo sapiens
  siRNA target sequence for MTO1 (NM_012123.1,366-384).
ctggtgtacattataaagt

SEQ ID NO: 224827 - DNA, 19 bp, Homo sapiens
  siRNA target sequence for MTO1 (NM_012123.1,368-386).
ggtgtacattataaagtat

SEQ ID NO: 224828 - DNA, 19 bp, Homo sapiens
  siRNA target sequence for MTO1 (NM_012123.1,428-446).
cagattgataggaaactct

SEQ ID NO: 224829 - DNA, 19 bp, Homo sapiens
  siRNA target sequence for MTO1 (NM_012123.1,502-520).
gggagctgtagaagatctt

SEQ ID NO: 224830 - DNA, 19 bp, Homo sapiens
  siRNA target sequence for MTO1 (NM_012123.1,504-522).
gagctgtagaagatcttat

SEQ ID NO: 224831 - DNA, 19 bp, Homo sapiens
  siRNA target sequence for MTO1 (NM_012123.1,560-578).
cgtgtcagtggggttgttt

SEQ ID NO: 224832 - DNA, 19 bp, Homo sapiens
  siRNA target sequence for MTO1 (NM_012123.1,561-579).
gtgtcagtggggttgtttt

SEQ ID NO: 224833 - DNA, 19 bp, Homo sapiens
  siRNA target sequence for MTO1 (NM_012123.1,635-653).
ctgagaggcatgattgtaa

SEQ ID NO: 224834 - DNA, 19 bp, Homo sapiens
  siRNA target sequence for MTO1 (NM_012123.1,737-755).
gtggtgggaaggttgaaga

SEQ ID NO: 224835 - DNA, 19 bp, Homo sapiens
  siRNA target sequence for MTO1 (NM_012123.1,786-804).
ccattaatttcagtattct

SEQ ID NO: 224836 - DNA, 19 bp, Homo sapiens
  siRNA target sequence for MTO1 (NM_012123.1,787-805).
cattaatttcagtattcta

SEQ ID NO: 224837 - DNA, 19 bp, Homo sapiens
  siRNA target sequence for MTO1 (NM_012123.1,798-816).
gtattctaaacaagcatat

SEQ ID NO: 224838 - DNA, 19 bp, Homo sapiens
  siRNA target sequence for MTO1 (NM_012123.1,812-830).
catataccggacaatccat

SEQ ID NO: 224839 - DNA, 19 bp, Homo sapiens
  siRNA target sequence for MTO1 (NM_012123.1,821-839).
gacaatccatccataccat

SEQ ID NO: 224840 - DNA, 19 bp, Homo sapiens
  siRNA target sequence for MTO1 (NM_012123.1,850-868).
caatgagacagtatggatt

SEQ ID NO: 224841 - DNA, 19 bp, Homo sapiens
  siRNA target sequence for MTO1 (NM_012123.1,988-1006).
ctgtccctccattgaatca

SEQ ID NO: 224842 - DNA, 19 bp, Homo sapiens
  siRNA target sequence for MTO1 (NM_012123.1,990-1008).
gtccctccattgaatcaaa

SEQ ID NO: 224843 - DNA, 19 bp, Homo sapiens
  siRNA target sequence for MTO1 (NM_012123.1,1029-1047).
gtctacatcaggtttggtt

SEQ ID NO: 224844 - DNA, 19 bp, Homo sapiens
  siRNA target sequence for MTO1 (NM_012123.1,1078-1096).
ctacccacaggggttatct

SEQ ID NO: 224845 - DNA, 19 bp, Homo sapiens
  siRNA target sequence for MTO1 (NM_012123.1,1099-1117).
gacgctaccagctgagtta

SEQ ID NO: 224846 - DNA, 19 bp, Homo sapiens
  siRNA target sequence for MTO1 (NM_012123.1,1101-1119).
cgctaccagctgagttaca

SEQ ID NO: 224847 - DNA, 19 bp, Homo sapiens
  siRNA target sequence for MTO1 (NM_012123.1,1102-1120).
gctaccagctgagttacaa

SEQ ID NO: 224848 - DNA, 19 bp, Homo sapiens
  siRNA target sequence for MTO1 (NM_012123.1,1109-1127).
gctgagttacaagagaaaa

SEQ ID NO: 224849 - DNA, 19 bp, Homo sapiens
  siRNA target sequence for MTO1 (NM_012123.1,1176-1194).
gctacggtgttcagtatga

SEQ ID NO: 224850 - DNA, 19 bp, Homo sapiens
  siRNA target sequence for MTO1 (NM_012123.1,1177-1195).
ctacggtgttcagtatgat

SEQ ID NO: 224851 - DNA, 19 bp, Homo sapiens
  siRNA target sequence for MTO1 (NM_012123.1,1181-1199).
ggtgttcagtatgattact

SEQ ID NO: 224852 - DNA, 19 bp, Homo sapiens
  siRNA target sequence for MTO1 (NM_012123.1,1182-1200).
gtgttcagtatgattactt

SEQ ID NO: 224853 - DNA, 19 bp, Homo sapiens
  siRNA target sequence for MTO1 (NM_012123.1,1224-1242).
ccttggagactcatttggt

SEQ ID NO: 224854 - DNA, 19 bp, Homo sapiens
  siRNA target sequence for MTO1 (NM_012123.1,1225-1243).
cttggagactcatttggtt

SEQ ID NO: 224855 - DNA, 19 bp, Homo sapiens
  siRNA target sequence for MTO1 (NM_012123.1,1308-1326).
gtgtgatagccggaatcaa

SEQ ID NO: 224856 - DNA, 19 bp, Homo sapiens
  siRNA target sequence for MTO1 (NM_012123.1,1368-1386).
gccgaacagaaggttacat

SEQ ID NO: 224857 - DNA, 19 bp, Homo sapiens
  siRNA target sequence for MTO1 (NM_012123.1,1369-1387).
ccgaacagaaggttacata

SEQ ID NO: 224858 - DNA, 19 bp, Homo sapiens
  siRNA target sequence for MTO1 (NM_012123.1,1380-1398).
gttacataggagtcttgat

SEQ ID NO: 224859 - DNA, 19 bp, Homo sapiens
  siRNA target sequence for MTO1 (NM_012123.1,1427-1445).
gaaccataccgcatgttta

SEQ ID NO: 224860 - DNA, 19 bp, Homo sapiens
  siRNA target sequence for MTO1 (NM_012123.1,1430-1448).
ccataccgcatgtttacca

SEQ ID NO: 224861 - DNA, 19 bp, Homo sapiens
  siRNA target sequence for MTO1 (NM_012123.1,1501-1519).
cacactgcgagggtataaa

SEQ ID NO: 224862 - DNA, 19 bp, Homo sapiens
  siRNA target sequence for MTO1 (NM_012123.1,1503-1521).
cactgcgagggtataaaga

SEQ ID NO: 224863 - DNA, 19 bp, Homo sapiens
  siRNA target sequence for MTO1 (NM_012123.1,1530-1548).
gtgtgtcccaacaacgata

SEQ ID NO: 224864 - DNA, 19 bp, Homo sapiens
  siRNA target sequence for MTO1 (NM_012123.1,1534-1552).
gtcccaacaacgatatgaa

SEQ ID NO: 224865 - DNA, 19 bp, Homo sapiens
  siRNA target sequence for MTO1 (NM_012123.1,1556-1574).
gcttgttggatgaagtctt

SEQ ID NO: 224866 - DNA, 19 bp, Homo sapiens
  siRNA target sequence for MTO1 (NM_012123.1,1563-1581).
ggatgaagtcttctttaga

SEQ ID NO: 224867 - DNA, 19 bp, Homo sapiens
  siRNA target sequence for MTO1 (NM_012123.1,1564-1582).
gatgaagtcttctttagaa

SEQ ID NO: 224868 - DNA, 19 bp, Homo sapiens
  siRNA target sequence for MTO1 (NM_012123.1,1586-1604).
ggcatttctgtgttgaaat

SEQ ID NO: 224869 - DNA, 19 bp, Homo sapiens
  siRNA target sequence for MTO1 (NM_012123.1,1620-1638).
gctctaaatggaaaaaatt

SEQ ID NO: 224870 - DNA, 19 bp, Homo sapiens
  siRNA target sequence for MTO1 (NM_012123.1,1648-1666).
ggcttctataagtactagt

SEQ ID NO: 224871 - DNA, 19 bp, Homo sapiens
  siRNA target sequence for MTO1 (NM_012123.1,1649-1667).
gcttctataagtactagta

SEQ ID NO: 224872 - DNA, 19 bp, Homo sapiens
  siRNA target sequence for MTO1 (NM_012123.1,1683-1701).
gagctctcgatgttctgaa

SEQ ID NO: 224873 - DNA, 19 bp, Homo sapiens
  siRNA target sequence for MTO1 (NM_012123.1,1706-1724).
gaggaagttgacatggatt

SEQ ID NO: 224874 - DNA, 19 bp, Homo sapiens
  siRNA target sequence for MTO1 (NM_012123.1,1739-1757).
gttccagagcccttgaaga

SEQ ID NO: 224875 - DNA, 19 bp, Homo sapiens
  siRNA target sequence for MTO1 (NM_012123.1,1745-1763).
gagcccttgaagaagtata

SEQ ID NO: 224876 - DNA, 19 bp, Homo sapiens
  siRNA target sequence for MTO1 (NM_012123.1,1866-1884).
ctctccaactgccaaaaga

SEQ ID NO: 224877 - DNA, 19 bp, Homo sapiens
  siRNA target sequence for MTO1 (NM_012123.1,1877-1895).
ccaaaagacctagattatt

SEQ ID NO: 224878 - DNA, 19 bp, Homo sapiens
  siRNA target sequence for MTO1 (NM_012123.1,1886-1904).
ctagattatttgactatca

SEQ ID NO: 224879 - DNA, 19 bp, Homo sapiens
  siRNA target sequence for MTO1 (NM_012123.1,1899-1917).
ctatcagggatgtgtcttt

SEQ ID NO: 224880 - DNA, 19 bp, Homo sapiens
  siRNA target sequence for MTO1 (NM_012123.1,1928-1946).
gttcgagagaaactacatt

SEQ ID NO: 224881 - DNA, 19 bp, Homo sapiens
  siRNA target sequence for MTO1 (NM_012123.1,2043-2061).
gaagacagtcggctatgaa

SEQ ID NO: 224882 - DNA, 19 bp, Homo sapiens
  siRNA target sequence for MTO1 (NM_012123.1,2046-2064).
gacagtcggctatgaatga

SEQ ID NO: 224883 - DNA, 19 bp, Homo sapiens
  siRNA target sequence for MTO1 (NM_012123.1,2048-2066).
cagtcggctatgaatgaat

SEQ ID NO: 224884 - DNA, 19 bp, Homo sapiens
  siRNA target sequence for MTO1 (NM_012123.1,2050-2068).
gtcggctatgaatgaatca

SEQ ID NO: 224885 - DNA, 19 bp, Homo sapiens
  siRNA target sequence for MTO1 (NM_012123.1,2071-2089).
caagactgatcaatactta

SEQ ID NO: 224886 - DNA, 19 bp, Homo sapiens
  siRNA target sequence for MTO1 (NM_012123.1,2074-2092).
gactgatcaatacttatgt

SEQ ID NO: 224887 - DNA, 19 bp, Homo sapiens
  siRNA target sequence for MTO1 (NM_133645.1,116-134).
gttgggtcgcggtttcctt

SEQ ID NO: 224888 - DNA, 19 bp, Homo sapiens
  siRNA target sequence for MTO1 (NM_133645.1,131-149).
ccttcaccaagcagcaatt

SEQ ID NO: 224889 - DNA, 19 bp, Homo sapiens
  siRNA target sequence for MTO1 (NM_133645.1,194-212).
cgcacttcgacgtgatagt

SEQ ID NO: 224890 - DNA, 19 bp, Homo sapiens
  siRNA target sequence for MTO1 (NM_133645.1,196-214).
cacttcgacgtgatagtca

SEQ ID NO: 224891 - DNA, 19 bp, Homo sapiens
  siRNA target sequence for MTO1 (NM_133645.1,306-324).
cggtcagatgtcatgtaat

SEQ ID NO: 224892 - DNA, 19 bp, Homo sapiens
  siRNA target sequence for MTO1 (NM_133645.1,310-328).
cagatgtcatgtaatcctt

SEQ ID NO: 224893 - DNA, 19 bp, Homo sapiens
  siRNA target sequence for MTO1 (NM_133645.1,984-1002).
ccttcaccttaatagtcat

SEQ ID NO: 224894 - DNA, 19 bp, Homo sapiens
  siRNA target sequence for MTO1 (NM_133645.1,988-1006).
caccttaatagtcatgtta

SEQ ID NO: 224895 - DNA, 19 bp, Homo sapiens
  siRNA target sequence for MTO1 (NM_133645.1,990-1008).
ccttaatagtcatgttaaa

SEQ ID NO: 224896 - DNA, 19 bp, Homo sapiens
  siRNA target sequence for PDCD8 (NM_004208.2,275-293).
cggctcccaggcaacttgt

SEQ ID NO: 224897 - DNA, 19 bp, Homo sapiens
  siRNA target sequence for PDCD8 (NM_004208.2,314-332).
ctagaactccagatgacaa

SEQ ID NO: 224898 - DNA, 19 bp, Homo sapiens
  siRNA target sequence for PDCD8 (NM_004208.2,320-338).
ctccagatgacaagacaaa

SEQ ID NO: 224899 - DNA, 19 bp, Homo sapiens
  siRNA target sequence for PDCD8 (NM_004208.2,361-379).
gggcaaaatcgataattct

SEQ ID NO: 224900 - DNA, 19 bp, Homo sapiens
  siRNA target sequence for PDCD8 (NM_004208.2,363-381).
gcaaaatcgataattctgt

SEQ ID NO: 224901 - DNA, 19 bp, Homo sapiens
  siRNA target sequence for PDCD8 (NM_004208.2,388-406).
ccttattgtgggcttatca

SEQ ID NO: 224902 - DNA, 19 bp, Homo sapiens
  siRNA target sequence for PDCD8 (NM_004208.2,389-407).
cttattgtgggcttatcaa

SEQ ID NO: 224903 - DNA, 19 bp, Homo sapiens
  siRNA target sequence for PDCD8 (NM_004208.2,429-447).
cctacaagactatgaaaga

SEQ ID NO: 224904 - DNA, 19 bp, Homo sapiens
  siRNA target sequence for PDCD8 (NM_004208.2,517-535).
cgcgttatctgcttcagaa

SEQ ID NO: 224905 - DNA, 19 bp, Homo sapiens
  siRNA target sequence for PDCD8 (NM_004208.2,556-574).
caaggcgccaagtcatgtt

SEQ ID NO: 224906 - DNA, 19 bp, Homo sapiens
  siRNA target sequence for PDCD8 (NM_004208.2,561-579).
cgccaagtcatgttccttt

SEQ ID NO: 224907 - DNA, 19 bp, Homo sapiens
  siRNA target sequence for PDCD8 (NM_004208.2,642-660).
ctggggccagggtactgat

SEQ ID NO: 224908 - DNA, 19 bp, Homo sapiens
  siRNA target sequence for PDCD8 (NM_004208.2,645-663).
gggccagggtactgattgt

SEQ ID NO: 224909 - DNA, 19 bp, Homo sapiens
  siRNA target sequence for PDCD8 (NM_004208.2,646-664).
ggccagggtactgattgta

SEQ ID NO: 224910 - DNA, 19 bp, Homo sapiens
  siRNA target sequence for PDCD8 (NM_004208.2,647-665).
gccagggtactgattgtat

SEQ ID NO: 224911 - DNA, 19 bp, Homo sapiens
  siRNA target sequence for PDCD8 (NM_004208.2,649-667).
cagggtactgattgtatct

SEQ ID NO: 224912 - DNA, 19 bp, Homo sapiens
  siRNA target sequence for PDCD8 (NM_004208.2,651-669).
gggtactgattgtatctga

SEQ ID NO: 224913 - DNA, 19 bp, Homo sapiens
  siRNA target sequence for PDCD8 (NM_004208.2,652-670).
ggtactgattgtatctgaa

SEQ ID NO: 224914 - DNA, 19 bp, Homo sapiens
  siRNA target sequence for PDCD8 (NM_004208.2,688-706).
catgcgacctcctctttca

SEQ ID NO: 224915 - DNA, 19 bp, Homo sapiens
  siRNA target sequence for PDCD8 (NM_004208.2,728-746).
gacccaaatgtcacaaaga

SEQ ID NO: 224916 - DNA, 19 bp, Homo sapiens
  siRNA target sequence for PDCD8 (NM_004208.2,741-759).
caaagacactgcgattcaa

SEQ ID NO: 224917 - DNA, 19 bp, Homo sapiens
  siRNA target sequence for PDCD8 (NM_004208.2,797-815).
ccaccttctttctatgtct

SEQ ID NO: 224918 - DNA, 19 bp, Homo sapiens
  siRNA target sequence for PDCD8 (NM_004208.2,826-844).
cctgcctcatattgagaat

SEQ ID NO: 224919 - DNA, 19 bp, Homo sapiens
  siRNA target sequence for PDCD8 (NM_004208.2,922-940).
ctctcaaataacctatgaa

SEQ ID NO: 224920 - DNA, 19 bp, Homo sapiens
  siRNA target sequence for PDCD8 (NM_004208.2,938-956).
gaaaagtgcttgattgcaa

SEQ ID NO: 224921 - DNA, 19 bp, Homo sapiens
  siRNA target sequence for PDCD8 (NM_004208.2,1017-1035).
gaacaacgcttttcagaaa

SEQ ID NO: 224922 - DNA, 19 bp, Homo sapiens
  siRNA target sequence for PDCD8 (NM_004208.2,1020-1038).
caacgcttttcagaaagat

SEQ ID NO: 224923 - DNA, 19 bp, Homo sapiens
  siRNA target sequence for PDCD8 (NM_004208.2,1068-1086).
cacgggaagtcaaatcaat

SEQ ID NO: 224924 - DNA, 19 bp, Homo sapiens
  siRNA target sequence for PDCD8 (NM_004208.2,1070-1088).
cgggaagtcaaatcaatta

SEQ ID NO: 224925 - DNA, 19 bp, Homo sapiens
  siRNA target sequence for PDCD8 (NM_004208.2,1073-1091).
gaagtcaaatcaattacga

SEQ ID NO: 224926 - DNA, 19 bp, Homo sapiens
  siRNA target sequence for PDCD8 (NM_004208.2,1076-1094).
gtcaaatcaattacgatta

SEQ ID NO: 224927 - DNA, 19 bp, Homo sapiens
  siRNA target sequence for PDCD8 (NM_004208.2,1158-1176).
gcacagaagtgattcaact

SEQ ID NO: 224928 - DNA, 19 bp, Homo sapiens
  siRNA target sequence for PDCD8 (NM_004208.2,1225-1243).
caactggaccatggaaaaa

SEQ ID NO: 224929 - DNA, 19 bp, Homo sapiens
  siRNA target sequence for PDCD8 (NM_004208.2,1248-1266).
gacgagagggggttaaggt

SEQ ID NO: 224930 - DNA, 19 bp, Homo sapiens
  siRNA target sequence for PDCD8 (NM_004208.2,1335-1353).
gcaggaaggtagaaactga

SEQ ID NO: 224931 - DNA, 19 bp, Homo sapiens
  siRNA target sequence for PDCD8 (NM_004208.2,1406-1424).
ggtggcctggaaatagact

SEQ ID NO: 224932 - DNA, 19 bp, Homo sapiens
  siRNA target sequence for PDCD8 (NM_004208.2,1493-1511).
gctgcatgcttctacgata

SEQ ID NO: 224933 - DNA, 19 bp, Homo sapiens
  siRNA target sequence for PDCD8 (NM_004208.2,1494-1512).
ctgcatgcttctacgatat

SEQ ID NO: 224934 - DNA, 19 bp, Homo sapiens
  siRNA target sequence for PDCD8 (NM_004208.2,1496-1514).
gcatgcttctacgatataa

SEQ ID NO: 224935 - DNA, 19 bp, Homo sapiens
  siRNA target sequence for PDCD8 (NM_004208.2,1497-1515).
catgcttctacgatataaa

SEQ ID NO: 224936 - DNA, 19 bp, Homo sapiens
  siRNA target sequence for PDCD8 (NM_004208.2,1551-1569).
ctgttgtgagtggaagatt

SEQ ID NO: 224937 - DNA, 19 bp, Homo sapiens
  siRNA target sequence for PDCD8 (NM_004208.2,1602-1620).
cgtactggcatcagtcaat

SEQ ID NO: 224938 - DNA, 19 bp, Homo sapiens
  siRNA target sequence for PDCD8 (NM_004208.2,1664-1682).
ggtcttgtggacagtagtt

SEQ ID NO: 224939 - DNA, 19 bp, Homo sapiens
  siRNA target sequence for PDCD8 (NM_004208.2,1665-1683).
gtcttgtggacagtagttt

SEQ ID NO: 224940 - DNA, 19 bp, Homo sapiens
  siRNA target sequence for PDCD8 (NM_004208.2,1783-1801).
gtccgaggcctcagaaatt

SEQ ID NO: 224941 - DNA, 19 bp, Homo sapiens
  siRNA target sequence for PDCD8 (NM_004208.2,1789-1807).
ggcctcagaaattactatt

SEQ ID NO: 224942 - DNA, 19 bp, Homo sapiens
  siRNA target sequence for PDCD8 (NM_004208.2,1860-1878).
gcaaaggtgtcatcttcta

SEQ ID NO: 224943 - DNA, 19 bp, Homo sapiens
  siRNA target sequence for PDCD8 (NM_004208.2,1907-1925).
gtgctatggaacatcttta

SEQ ID NO: 224944 - DNA, 19 bp, Homo sapiens
  siRNA target sequence for PDCD8 (NM_004208.2,1934-1952).
ccaatagcaaggaagatca

SEQ ID NO: 224945 - DNA, 19 bp, Homo sapiens
  siRNA target sequence for PDCD8 (NM_004208.2,1935-1953).
caatagcaaggaagatcat

SEQ ID NO: 224946 - DNA, 19 bp, Homo sapiens
  siRNA target sequence for PDCD8 (NM_004208.2,1966-1984).
gcagcatgaagatctcaat

SEQ ID NO: 224947 - DNA, 19 bp, Homo sapiens
  siRNA target sequence for PDCD8 (NM_004208.2,1969-1987).
gcatgaagatctcaatgaa

SEQ ID NO: 224948 - DNA, 19 bp, Homo sapiens
  siRNA target sequence for PDCD8 (NM_004208.2,1985-2003).
gaagtagccaaactattca

SEQ ID NO: 224949 - DNA, 19 bp, Homo sapiens
  siRNA target sequence for PDCD8 (NM_004208.2,1988-2006).
gtagccaaactattcaaca

SEQ ID NO: 224950 - DNA, 19 bp, Homo sapiens
  siRNA target sequence for PDCD8 (NM_145812.1,302-320).
ctaggatccccttctagat

SEQ ID NO: 224951 - DNA, 19 bp, Homo sapiens
  siRNA target sequence for PDCD8 (NM_145812.1,357-375).
gcaacctagtgtacttctt

SEQ ID NO: 224952 - DNA, 19 bp, Homo sapiens
  siRNA target sequence for PDCD8 (NM_145812.1,358-376).
caacctagtgtacttctta

SEQ ID NO: 224953 - DNA, 19 bp, Homo sapiens
  siRNA target sequence for PDCD8 (NM_145812.1,396-414).
ctggggcaggagtttatta

SEQ ID NO: 224954 - DNA, 19 bp, Homo sapiens
  siRNA target sequence for SQRDL (NM_021199.1,192-210).
cggccaggaaccattatga

SEQ ID NO: 224955 - DNA, 19 bp, Homo sapiens
  siRNA target sequence for SQRDL (NM_021199.1,344-362).
ggtgctggtgccaaacaat

SEQ ID NO: 224956 - DNA, 19 bp, Homo sapiens
  siRNA target sequence for SQRDL (NM_021199.1,345-363).
gtgctggtgccaaacaatt

SEQ ID NO: 224957 - DNA, 19 bp, Homo sapiens
  siRNA target sequence for SQRDL (NM_021199.1,347-365).
gctggtgccaaacaattgt

SEQ ID NO: 224958 - DNA, 19 bp, Homo sapiens
  siRNA target sequence for SQRDL (NM_021199.1,394-412).
gattccatctggtgtagaa

SEQ ID NO: 224959 - DNA, 19 bp, Homo sapiens
  siRNA target sequence for SQRDL (NM_021199.1,481-499).
gatctcctaccgatatctt

SEQ ID NO: 224960 - DNA, 19 bp, Homo sapiens
  siRNA target sequence for SQRDL (NM_021199.1,484-502).
ctcctaccgatatcttatt

SEQ ID NO: 224961 - DNA, 19 bp, Homo sapiens
  siRNA target sequence for SQRDL (NM_021199.1,486-504).
cctaccgatatcttattat

SEQ ID NO: 224962 - DNA, 19 bp, Homo sapiens
  siRNA target sequence for SQRDL (NM_021199.1,487-505).
ctaccgatatcttattatt

SEQ ID NO: 224963 - DNA, 19 bp, Homo sapiens
  siRNA target sequence for SQRDL (NM_021199.1,490-508).
ccgatatcttattattgct

SEQ ID NO: 224964 - DNA, 19 bp, Homo sapiens
  siRNA target sequence for SQRDL (NM_021199.1,566-584).
cccaaaatagggtcgaatt

SEQ ID NO: 224965 - DNA, 19 bp, Homo sapiens
  siRNA target sequence for SQRDL (NM_021199.1,567-585).
ccaaaatagggtcgaatta

SEQ ID NO: 224966 - DNA, 19 bp, Homo sapiens
  siRNA target sequence for SQRDL (NM_021199.1,568-586).
caaaatagggtcgaattat

SEQ ID NO: 224967 - DNA, 19 bp, Homo sapiens
  siRNA target sequence for SQRDL (NM_021199.1,576-594).
ggtcgaattattcagttaa

SEQ ID NO: 224968 - DNA, 19 bp, Homo sapiens
  siRNA target sequence for SQRDL (NM_021199.1,588-606).
cagttaagactgtagagaa

SEQ ID NO: 224969 - DNA, 19 bp, Homo sapiens
  siRNA target sequence for SQRDL (NM_021199.1,686-704).
gcccctcagaagatcatgt

SEQ ID NO: 224970 - DNA, 19 bp, Homo sapiens
  siRNA target sequence for SQRDL (NM_021199.1,687-705).
cccctcagaagatcatgta

SEQ ID NO: 224971 - DNA, 19 bp, Homo sapiens
  siRNA target sequence for SQRDL (NM_021199.1,690-708).
ctcagaagatcatgtactt

SEQ ID NO: 224972 - DNA, 19 bp, Homo sapiens
  siRNA target sequence for SQRDL (NM_021199.1,692-710).
cagaagatcatgtacttat

SEQ ID NO: 224973 - DNA, 19 bp, Homo sapiens
  siRNA target sequence for SQRDL (NM_021199.1,697-715).
gatcatgtacttatcagaa

SEQ ID NO: 224974 - DNA, 19 bp, Homo sapiens
  siRNA target sequence for SQRDL (NM_021199.1,740-758).
cgatccaaggccaatatca

SEQ ID NO: 224975 - DNA, 19 bp, Homo sapiens
  siRNA target sequence for SQRDL (NM_021199.1,741-759).
gatccaaggccaatatcat

SEQ ID NO: 224976 - DNA, 19 bp, Homo sapiens
  siRNA target sequence for SQRDL (NM_021199.1,744-762).
ccaaggccaatatcatttt

SEQ ID NO: 224977 - DNA, 19 bp, Homo sapiens
  siRNA target sequence for SQRDL (NM_021199.1,779-797).
gccattttcggggttaaga

SEQ ID NO: 224978 - DNA, 19 bp, Homo sapiens
  siRNA target sequence for SQRDL (NM_021199.1,830-848).
gagcggaacctcactgtta

SEQ ID NO: 224979 - DNA, 19 bp, Homo sapiens
  siRNA target sequence for SQRDL (NM_021199.1,833-851).
cggaacctcactgttaact

SEQ ID NO: 224980 - DNA, 19 bp, Homo sapiens
  siRNA target sequence for SQRDL (NM_021199.1,834-852).
ggaacctcactgttaacta

SEQ ID NO: 224981 - DNA, 19 bp, Homo sapiens
  siRNA target sequence for SQRDL (NM_021199.1,918-936).
caggagagacccaagtgat

SEQ ID NO: 224982 - DNA, 19 bp, Homo sapiens
  siRNA target sequence for SQRDL (NM_021199.1,1053-1071).
ggaggtacccaaatgtgtt

SEQ ID NO: 224983 - DNA, 19 bp, Homo sapiens
  siRNA target sequence for SQRDL (NM_021199.1,1054-1072).
gaggtacccaaatgtgttt

SEQ ID NO: 224984 - DNA, 19 bp, Homo sapiens
  siRNA target sequence for SQRDL (NM_021199.1,1125-1143).
ctgcccagtcaggaatact

SEQ ID NO: 224985 - DNA, 19 bp, Homo sapiens
  siRNA target sequence for SQRDL (NM_021199.1,1128-1146).
cccagtcaggaatacttga

SEQ ID NO: 224986 - DNA, 19 bp, Homo sapiens
  siRNA target sequence for SQRDL (NM_021199.1,1129-1147).
ccagtcaggaatacttgat

SEQ ID NO: 224987 - DNA, 19 bp, Homo sapiens
  siRNA target sequence for SQRDL (NM_021199.1,1149-1167).
ggacaatttctgtaattat

SEQ ID NO: 224988 - DNA, 19 bp, Homo sapiens
  siRNA target sequence for SQRDL (NM_021199.1,1225-1243).
cggctacaaccgtgtgatt

SEQ ID NO: 224989 - DNA, 19 bp, Homo sapiens
  siRNA target sequence for SQRDL (NM_021199.1,1227-1245).
gctacaaccgtgtgattct

SEQ ID NO: 224990 - DNA, 19 bp, Homo sapiens
  siRNA target sequence for SQRDL (NM_021199.1,1266-1284).
cagagccgctagaaacctt

SEQ ID NO: 224991 - DNA, 19 bp, Homo sapiens
  siRNA target sequence for SQRDL (NM_021199.1,1285-1303).
cccctttgatcaaagcaaa

SEQ ID NO: 224992 - DNA, 19 bp, Homo sapiens
  siRNA target sequence for SQRDL (NM_021199.1,1299-1317).
gcaaagagcgcctttccat

SEQ ID NO: 224993 - DNA, 19 bp, Homo sapiens
  siRNA target sequence for SQRDL (NM_021199.1,1308-1326).
gcctttccatgtatctcat

SEQ ID NO: 224994 - DNA, 19 bp, Homo sapiens
  siRNA target sequence for SQRDL (NM_021199.1,1342-1360).
gcctttcctgtattggaat

SEQ ID NO: 224995 - DNA, 19 bp, Homo sapiens
  siRNA target sequence for SQRDL (NM_021199.1,1343-1361).
cctttcctgtattggaata

SEQ ID NO: 224996 - DNA, 19 bp, Homo sapiens
  siRNA target sequence for SQRDL (NM_021199.1,1344-1362).
ctttcctgtattggaatat

SEQ ID NO: 224997 - DNA, 19 bp, Homo sapiens
  siRNA target sequence for SQRDL (NM_021199.1,1391-1409).
gcgtttctgcgcaagttgt

SEQ ID NO: 224998 - DNA, 19 bp, Homo sapiens
  siRNA target sequence for SQRDL (NM_021199.1,1408-1426).
gtttcatctaggtatgagt

SEQ ID NO: 224999 - DNA, 19 bp, Homo sapiens
  siRNA target sequence for ALDH1A2 (NM_003888.2,63-81).
cttccagcaagatagagat

SEQ ID NO: 225000 - DNA, 19 bp, Homo sapiens
  siRNA target sequence for ALDH1A2 (NM_003888.2,144-162).
ccacgcccaatctcgaaat

SEQ ID NO: 225001 - DNA, 19 bp, Homo sapiens
  siRNA target sequence for ALDH1A2 (NM_003888.2,145-163).
cacgcccaatctcgaaatt

SEQ ID NO: 225002 - DNA, 19 bp, Homo sapiens
  siRNA target sequence for ALDH1A2 (NM_003888.2,149-167).
cccaatctcgaaattaagt

SEQ ID NO: 225003 - DNA, 19 bp, Homo sapiens
  siRNA target sequence for ALDH1A2 (NM_003888.2,150-168).
ccaatctcgaaattaagta

SEQ ID NO: 225004 - DNA, 19 bp, Homo sapiens
  siRNA target sequence for ALDH1A2 (NM_003888.2,214-232).
gagagtgttccctgtctat

SEQ ID NO: 225005 - DNA, 19 bp, Homo sapiens
  siRNA target sequence for ALDH1A2 (NM_003888.2,220-238).
gttccctgtctataatcca

SEQ ID NO: 225006 - DNA, 19 bp, Homo sapiens
  siRNA target sequence for ALDH1A2 (NM_003888.2,363-381).
ggggacgtctgttggataa

SEQ ID NO: 225007 - DNA, 19 bp, Homo sapiens
  siRNA target sequence for ALDH1A2 (NM_003888.2,413-431).
gttcttgcaaccatggaat

SEQ ID NO: 225008 - DNA, 19 bp, Homo sapiens
  siRNA target sequence for ALDH1A2 (NM_003888.2,424-442).
catggaatccctaaatggt

SEQ ID NO: 225009 - DNA, 19 bp, Homo sapiens
  siRNA target sequence for ALDH1A2 (NM_003888.2,479-497).
cagggcgtcatcaaaacct

SEQ ID NO: 225010 - DNA, 19 bp, Homo sapiens
  siRNA target sequence for ALDH1A2 (NM_003888.2,485-503).
gtcatcaaaacctttcgat

SEQ ID NO: 225011 - DNA, 19 bp, Homo sapiens
  siRNA target sequence for ALDH1A2 (NM_003888.2,487-505).
catcaaaacctttcgatat

SEQ ID NO: 225012 - DNA, 19 bp, Homo sapiens
  siRNA target sequence for ALDH1A2 (NM_003888.2,508-526).
cgcaggctgggctgataaa

SEQ ID NO: 225013 - DNA, 19 bp, Homo sapiens
  siRNA target sequence for ALDH1A2 (NM_003888.2,510-528).
caggctgggctgataaaat

SEQ ID NO: 225014 - DNA, 19 bp, Homo sapiens
  siRNA target sequence for ALDH1A2 (NM_003888.2,535-553).
gatgaccattcctgtagat

SEQ ID NO: 225015 - DNA, 19 bp, Homo sapiens
  siRNA target sequence for ALDH1A2 (NM_003888.2,554-572).
ggagactattttaccttta

SEQ ID NO: 225016 - DNA, 19 bp, Homo sapiens
  siRNA target sequence for ALDH1A2 (NM_003888.2,666-684).
gtggcaatacagtagttat

SEQ ID NO: 225017 - DNA, 19 bp, Homo sapiens
  siRNA target sequence for ALDH1A2 (NM_003888.2,793-811).
ggctggggcagcaatagct

SEQ ID NO: 225018 - DNA, 19 bp, Homo sapiens
  siRNA target sequence for ALDH1A2 (NM_003888.2,794-812).
gctggggcagcaatagctt

SEQ ID NO: 225019 - DNA, 19 bp, Homo sapiens
  siRNA target sequence for ALDH1A2 (NM_003888.2,817-835).
cattggcatagacaagatt

SEQ ID NO: 225020 - DNA, 19 bp, Homo sapiens
  siRNA target sequence for ALDH1A2 (NM_003888.2,921-939).
gaggcaaaagtcctaatat

SEQ ID NO: 225021 - DNA, 19 bp, Homo sapiens
  siRNA target sequence for ALDH1A2 (NM_003888.2,1132-1150).
gcagggtccccagattgat

SEQ ID NO: 225022 - DNA, 19 bp, Homo sapiens
  siRNA target sequence for ALDH1A2 (NM_003888.2,1133-1151).
cagggtccccagattgata

SEQ ID NO: 225023 - DNA, 19 bp, Homo sapiens
  siRNA target sequence for ALDH1A2 (NM_003888.2,1148-1166).
gataagaaacagtacaaca

SEQ ID NO: 225024 - DNA, 19 bp, Homo sapiens
  siRNA target sequence for ALDH1A2 (NM_003888.2,1235-1253).
ggccgaaaggggtttttca

SEQ ID NO: 225025 - DNA, 19 bp, Homo sapiens
  siRNA target sequence for ALDH1A2 (NM_003888.2,1236-1254).
gccgaaaggggtttttcat

SEQ ID NO: 225026 - DNA, 19 bp, Homo sapiens
  siRNA target sequence for ALDH1A2 (NM_003888.2,1237-1255).
ccgaaaggggtttttcatt

SEQ ID NO: 225027 - DNA, 19 bp, Homo sapiens
  siRNA target sequence for ALDH1A2 (NM_003888.2,1272-1290).
ccaacgtcactgatgatat

SEQ ID NO: 225028 - DNA, 19 bp, Homo sapiens
  siRNA target sequence for ALDH1A2 (NM_003888.2,1347-1365).
cgatggatgaagttatcga

SEQ ID NO: 225029 - DNA, 19 bp, Homo sapiens
  siRNA target sequence for ALDH1A2 (NM_003888.2,1363-1381).
cgaaagagccaataactca

SEQ ID NO: 225030 - DNA, 19 bp, Homo sapiens
  siRNA target sequence for ALDH1A2 (NM_003888.2,1391-1409).
ctcgtagcagctgtcttta

SEQ ID NO: 225031 - DNA, 19 bp, Homo sapiens
  siRNA target sequence for ALDH1A2 (NM_003888.2,1393-1411).
cgtagcagctgtctttact

SEQ ID NO: 225032 - DNA, 19 bp, Homo sapiens
  siRNA target sequence for ALDH1A2 (NM_003888.2,1394-1412).
gtagcagctgtctttacta

SEQ ID NO: 225033 - DNA, 19 bp, Homo sapiens
  siRNA target sequence for ALDH1A2 (NM_003888.2,1400-1418).
gctgtctttactaatgaca

SEQ ID NO: 225034 - DNA, 19 bp, Homo sapiens
  siRNA target sequence for ALDH1A2 (NM_003888.2,1558-1576).
gcgggagtactcagaagtt

SEQ ID NO: 225035 - DNA, 19 bp, Homo sapiens
  siRNA target sequence for ALDH1A2 (NM_003888.2,1559-1577).
cgggagtactcagaagtta

SEQ ID NO: 225036 - DNA, 19 bp, Homo sapiens
  siRNA target sequence for ALDH1A2 (NM_003888.2,1560-1578).
gggagtactcagaagttaa

SEQ ID NO: 225037 - DNA, 19 bp, Homo sapiens
  siRNA target sequence for ALDH1A2 (NM_003888.2,1574-1592).
gttaagacggtgacagtaa

SEQ ID NO: 225038 - DNA, 19 bp, Homo sapiens
  siRNA target sequence for ALDH1A2 (NM_170696.1,736-754).
caaggaggttggaaagctt

SEQ ID NO: 225039 - DNA, 19 bp, Homo sapiens
  siRNA target sequence for ALDH2 (NM_000690.2,870-888).
caaatgtctccggtattat

SEQ ID NO: 225040 - DNA, 19 bp, Homo sapiens
  siRNA target sequence for ALDH2 (NM_000690.2,926-944).
ccattgacggagacttctt

SEQ ID NO: 225041 - DNA, 19 bp, Homo sapiens
  siRNA target sequence for ALDH2 (NM_000690.2,972-990).
ggtgtgcgggcagatcatt

SEQ ID NO: 225042 - DNA, 19 bp, Homo sapiens
  siRNA target sequence for ALDH2 (NM_000690.2,1046-1064).
ctggaaacgtggttgtgat

SEQ ID NO: 225043 - DNA, 19 bp, Homo sapiens
  siRNA target sequence for ALDH2 (NM_000690.2,1085-1103).
ccctcaccgccctctatgt

SEQ ID NO: 225044 - DNA, 19 bp, Homo sapiens
  siRNA target sequence for ALDH2 (NM_000690.2,1146-1164).
caacattgtgcctggattt

SEQ ID NO: 225045 - DNA, 19 bp, Homo sapiens
  siRNA target sequence for ALDH2 (NM_000690.2,1206-1224).
ggacaaagtggcattcaca

SEQ ID NO: 225046 - DNA, 19 bp, Homo sapiens
  siRNA target sequence for ALDH2 (NM_000690.2,1326-1344).
gtcagatgccgatatggat

SEQ ID NO: 225047 - DNA, 19 bp, Homo sapiens
  siRNA target sequence for ALDH2 (NM_000690.2,1419-1437).
cgtgcaggaggacatctat

SEQ ID NO: 225048 - DNA, 19 bp, Homo sapiens
  siRNA target sequence for ALDH2 (NM_000690.2,1487-1505).
ggaacccctttgatagcaa

SEQ ID NO: 225049 - DNA, 19 bp, Homo sapiens
  siRNA target sequence for ALDH2 (NM_000690.2,1613-1631).
ctgctgaccgtggttactt

SEQ ID NO: 225050 - DNA, 19 bp, Homo sapiens
  siRNA target sequence for ALDH2 (NM_000690.2,1615-1633).
gctgaccgtggttacttca

SEQ ID NO: 225051 - DNA, 19 bp, Homo sapiens
  siRNA target sequence for ALDH2 (NM_000690.2,1774-1792).
gccgcagctgtcttcacaa

SEQ ID NO: 225052 - DNA, 19 bp, Homo sapiens
  siRNA target sequence for ALDH2 (NM_000690.2,1775-1793).
ccgcagctgtcttcacaaa

SEQ ID NO: 225053 - DNA, 19 bp, Homo sapiens
  siRNA target sequence for ALDH2 (NM_000690.2,1845-1863).
gtgggtcaactgctatgat

SEQ ID NO: 225054 - DNA, 19 bp, Homo sapiens
  siRNA target sequence for ALDH2 (NM_000690.2,1847-1865).
gggtcaactgctatgatgt

SEQ ID NO: 225055 - DNA, 19 bp, Homo sapiens
  siRNA target sequence for ALDH2 (NM_000690.2,1851-1869).
caactgctatgatgtgttt

SEQ ID NO: 225056 - DNA, 19 bp, Homo sapiens
  siRNA target sequence for ALDH2 (NM_000690.2,1932-1950).
cgggctgcaggcatacact

SEQ ID NO: 225057 - DNA, 19 bp, Homo sapiens
  siRNA target sequence for ALDH3A2 (NM_000382.1,333-351).
gacctgtgcaagagtgaat

SEQ ID NO: 225058 - DNA, 19 bp, Homo sapiens
  siRNA target sequence for ALDH3A2 (NM_000382.1,338-356).
gtgcaagagtgaattcaat

SEQ ID NO: 225059 - DNA, 19 bp, Homo sapiens
  siRNA target sequence for ALDH3A2 (NM_000382.1,340-358).
gcaagagtgaattcaatgt

SEQ ID NO: 225060 - DNA, 19 bp, Homo sapiens
  siRNA target sequence for ALDH3A2 (NM_000382.1,359-377).
gtacagtcaggaagtcatt

SEQ ID NO: 225061 - DNA, 19 bp, Homo sapiens
  siRNA target sequence for ALDH3A2 (NM_000382.1,379-397).
ctgtccttggggaaattga

SEQ ID NO: 225062 - DNA, 19 bp, Homo sapiens
  siRNA target sequence for ALDH3A2 (NM_000382.1,464-482).
gctggatgaggcctatatt

SEQ ID NO: 225063 - DNA, 19 bp, Homo sapiens
  siRNA target sequence for ALDH3A2 (NM_000382.1,495-513).
ctgggagtggtgctgataa

SEQ ID NO: 225064 - DNA, 19 bp, Homo sapiens
  siRNA target sequence for ALDH3A2 (NM_000382.1,597-615).
ccttctgaactgagtgaaa

SEQ ID NO: 225065 - DNA, 19 bp, Homo sapiens
  siRNA target sequence for ALDH3A2 (NM_000382.1,668-686).
ctatattgttattaatggt

SEQ ID NO: 225066 - DNA, 19 bp, Homo sapiens
  siRNA target sequence for ALDH3A2 (NM_000382.1,749-767).
cactgcggttggcaaaatt

SEQ ID NO: 225067 - DNA, 19 bp, Homo sapiens
  siRNA target sequence for ALDH3A2 (NM_000382.1,819-837).
gggaaaagtccatgttata

SEQ ID NO: 225068 - DNA, 19 bp, Homo sapiens
  siRNA target sequence for ALDH3A2 (NM_000382.1,820-838).
ggaaaagtccatgttatat

SEQ ID NO: 225069 - DNA, 19 bp, Homo sapiens
  siRNA target sequence for ALDH3A2 (NM_000382.1,821-839).
gaaaagtccatgttatatt

SEQ ID NO: 225070 - DNA, 19 bp, Homo sapiens
  siRNA target sequence for ALDH3A2 (NM_000382.1,826-844).
gtccatgttatattgataa

SEQ ID NO: 225071 - DNA, 19 bp, Homo sapiens
  siRNA target sequence for ALDH3A2 (NM_000382.1,913-931).
gcattgcacccgactatat

SEQ ID NO: 225072 - DNA, 19 bp, Homo sapiens
  siRNA target sequence for ALDH3A2 (NM_000382.1,914-932).
cattgcacccgactatatt

SEQ ID NO: 225073 - DNA, 19 bp, Homo sapiens
  siRNA target sequence for ALDH3A2 (NM_000382.1,918-936).
gcacccgactatattctct

SEQ ID NO: 225074 - DNA, 19 bp, Homo sapiens
  siRNA target sequence for ALDH3A2 (NM_000382.1,937-955).
gtgaagcatccctccaaaa

SEQ ID NO: 225075 - DNA, 19 bp, Homo sapiens
  siRNA target sequence for ALDH3A2 (NM_000382.1,947-965).
cctccaaaatcaaattgta

SEQ ID NO: 225076 - DNA, 19 bp, Homo sapiens
  siRNA target sequence for ALDH3A2 (NM_000382.1,1018-1036).
ctcctgattatgaaaggat

SEQ ID NO: 225077 - DNA, 19 bp, Homo sapiens
  siRNA target sequence for ALDH3A2 (NM_000382.1,1149-1167).
gatgttgatcctaaaacca

SEQ ID NO: 225078 - DNA, 19 bp, Homo sapiens
  siRNA target sequence for ALDH3A2 (NM_000382.1,1203-1221).
ccaatagtgcctgtgaaaa

SEQ ID NO: 225079 - DNA, 19 bp, Homo sapiens
  siRNA target sequence for ALDH3A2 (NM_000382.1,1204-1222).
caatagtgcctgtgaaaaa

SEQ ID NO: 225080 - DNA, 19 bp, Homo sapiens
  siRNA target sequence for ALDH3A2 (NM_000382.1,1262-1280).
gcctctggctctttatgta

SEQ ID NO: 225081 - DNA, 19 bp, Homo sapiens
  siRNA target sequence for ALDH3A2 (NM_000382.1,1278-1296).
gtattttcgcataaccata

SEQ ID NO: 225082 - DNA, 19 bp, Homo sapiens
  siRNA target sequence for ALDH3A2 (NM_000382.1,1298-1316).
gctcatcaaacggatgatt

SEQ ID NO: 225083 - DNA, 19 bp, Homo sapiens
  siRNA target sequence for ALDH3A2 (NM_000382.1,1301-1319).
catcaaacggatgattgat

SEQ ID NO: 225084 - DNA, 19 bp, Homo sapiens
  siRNA target sequence for ALDH3A2 (NM_000382.1,1342-1360).
caggcaatgacgtcattat

SEQ ID NO: 225085 - DNA, 19 bp, Homo sapiens
  siRNA target sequence for ALDH3A2 (NM_000382.1,1362-1380).
cacttcacgctcaactctt

SEQ ID NO: 225086 - DNA, 19 bp, Homo sapiens
  siRNA target sequence for ALDH3A2 (NM_000382.1,1414-1432).
gagcttatcacggaaaaca

SEQ ID NO: 225087 - DNA, 19 bp, Homo sapiens
  siRNA target sequence for ALDH3A2 (NM_000382.1,1416-1434).
gcttatcacggaaaacata

SEQ ID NO: 225088 - DNA, 19 bp, Homo sapiens
  siRNA target sequence for ALDH3A2 (NM_000382.1,1424-1442).
cggaaaacatagttttgat

SEQ ID NO: 225089 - DNA, 19 bp, Homo sapiens
  siRNA target sequence for ALDH3A2 (NM_000382.1,1455-1473).
cagcgtccctgtttattaa

SEQ ID NO: 225090 - DNA, 19 bp, Homo sapiens
  siRNA target sequence for ALDH3A2 (NM_000382.1,1513-1531).
ctcccaacagccagtcaaa

SEQ ID NO: 225091 - DNA, 19 bp, Homo sapiens
  siRNA target sequence for ALDH3A2 (NM_000382.1,1625-1643).
gcttgtcaaggcagaatat

SEQ ID NO: 225092 - DNA, 19 bp, Homo sapiens
  siRNA target sequence for ALDH4A1 (NM_003748.2,320-338).
cataaggtggccaagttct

SEQ ID NO: 225093 - DNA, 19 bp, Homo sapiens
  siRNA target sequence for ALDH4A1 (NM_003748.2,328-346).
ggccaagttctgttatgca

SEQ ID NO: 225094 - DNA, 19 bp, Homo sapiens
  siRNA target sequence for ALDH4A1 (NM_003748.2,403-421).
ggacctgaagcctattgca

SEQ ID NO: 225095 - DNA, 19 bp, Homo sapiens
  siRNA target sequence for ALDH4A1 (NM_003748.2,556-574).
cgacttcttccggttcaat

SEQ ID NO: 225096 - DNA, 19 bp, Homo sapiens
  siRNA target sequence for ALDH4A1 (NM_003748.2,565-583).
ccggttcaatgccaagtat

SEQ ID NO: 225097 - DNA, 19 bp, Homo sapiens
  siRNA target sequence for ALDH4A1 (NM_003748.2,671-689).
gccatctcgccctttaact

SEQ ID NO: 225098 - DNA, 19 bp, Homo sapiens
  siRNA target sequence for ALDH4A1 (NM_003748.2,735-753).
gcaacgtggtcctatggaa

SEQ ID NO: 225099 - DNA, 19 bp, Homo sapiens
  siRNA target sequence for ALDH4A1 (NM_003748.2,915-933).
gtgtgcccaccttcaaaca

SEQ ID NO: 225100 - DNA, 19 bp, Homo sapiens
  siRNA target sequence for ALDH4A1 (NM_003748.2,1188-1206).
gcgaccctgcagaggattt

SEQ ID NO: 225101 - DNA, 19 bp, Homo sapiens
  siRNA target sequence for ALDH4A1 (NM_003748.2,1189-1207).
cgaccctgcagaggatttt

SEQ ID NO: 225102 - DNA, 19 bp, Homo sapiens
  siRNA target sequence for ALDH4A1 (NM_003748.2,1242-1260).
cctttgcccgtatcaagaa

SEQ ID NO: 225103 - DNA, 19 bp, Homo sapiens
  siRNA target sequence for ALDH4A1 (NM_003748.2,1556-1574).
gccggcaacttctacatca

SEQ ID NO: 225104 - DNA, 19 bp, Homo sapiens
  siRNA target sequence for ALDH7A1 (NM_001182.1,693-711).
caagctgcctggtgcaatt

SEQ ID NO: 225105 - DNA, 19 bp, Homo sapiens
  siRNA target sequence for ALDH7A1 (NM_001182.1,722-740).
cttgtggtggagcagatat

SEQ ID NO: 225106 - DNA, 19 bp, Homo sapiens
  siRNA target sequence for ALDH7A1 (NM_001182.1,744-762).
cacagcaatggccaaagat

SEQ ID NO: 225107 - DNA, 19 bp, Homo sapiens
  siRNA target sequence for ALDH7A1 (NM_001182.1,896-914).
cagacctcagcttagttgt

SEQ ID NO: 225108 - DNA, 19 bp, Homo sapiens
  siRNA target sequence for ALDH7A1 (NM_001182.1,965-983).
ctgcgaggcgactgtttat

SEQ ID NO: 225109 - DNA, 19 bp, Homo sapiens
  siRNA target sequence for ALDH7A1 (NM_001182.1,968-986).
cgaggcgactgtttataca

SEQ ID NO: 225110 - DNA, 19 bp, Homo sapiens
  siRNA target sequence for ALDH7A1 (NM_001182.1,969-987).
gaggcgactgtttatacat

SEQ ID NO: 225111 - DNA, 19 bp, Homo sapiens
  siRNA target sequence for ALDH7A1 (NM_001182.1,972-990).
gcgactgtttatacatgaa

SEQ ID NO: 225112 - DNA, 19 bp, Homo sapiens
  siRNA target sequence for ALDH7A1 (NM_001182.1,973-991).
cgactgtttatacatgaaa

SEQ ID NO: 225113 - DNA, 19 bp, Homo sapiens
  siRNA target sequence for ALDH7A1 (NM_001182.1,997-1015).
catgatgaggttgtaaaca

SEQ ID NO: 225114 - DNA, 19 bp, Homo sapiens
  siRNA target sequence for ALDH7A1 (NM_001182.1,1003-1021).
gaggttgtaaacagactta

SEQ ID NO: 225115 - DNA, 19 bp, Homo sapiens
  siRNA target sequence for ALDH7A1 (NM_001182.1,1005-1023).
ggttgtaaacagacttaaa

SEQ ID NO: 225116 - DNA, 19 bp, Homo sapiens
  siRNA target sequence for ALDH7A1 (NM_001182.1,1055-1073).
catgggaccctaatgttct

SEQ ID NO: 225117 - DNA, 19 bp, Homo sapiens
  siRNA target sequence for ALDH7A1 (NM_001182.1,1058-1076).
gggaccctaatgttctcta

SEQ ID NO: 225118 - DNA, 19 bp, Homo sapiens
  siRNA target sequence for ALDH7A1 (NM_001182.1,1059-1077).
ggaccctaatgttctctat

SEQ ID NO: 225119 - DNA, 19 bp, Homo sapiens
  siRNA target sequence for ALDH7A1 (NM_001182.1,1095-1113).
gcaggcagtgagcatgttt

SEQ ID NO: 225120 - DNA, 19 bp, Homo sapiens
  siRNA target sequence for ALDH7A1 (NM_001182.1,1098-1116).
ggcagtgagcatgtttctt

SEQ ID NO: 225121 - DNA, 19 bp, Homo sapiens
  siRNA target sequence for ALDH7A1 (NM_001182.1,1156-1174).
gtctatgggggcaaggtta

SEQ ID NO: 225122 - DNA, 19 bp, Homo sapiens
  siRNA target sequence for ALDH7A1 (NM_001182.1,1176-1194).
ggatcgccctggaaattat

SEQ ID NO: 225123 - DNA, 19 bp, Homo sapiens
  siRNA target sequence for ALDH7A1 (NM_001182.1,1195-1213).
gtagaaccgacaattgtga

SEQ ID NO: 225124 - DNA, 19 bp, Homo sapiens
  siRNA target sequence for ALDH7A1 (NM_001182.1,1258-1276).
gctccgattctctatgtct

SEQ ID NO: 225125 - DNA, 19 bp, Homo sapiens
  siRNA target sequence for ALDH7A1 (NM_001182.1,1259-1277).
ctccgattctctatgtctt

SEQ ID NO: 225126 - DNA, 19 bp, Homo sapiens
  siRNA target sequence for ALDH7A1 (NM_001182.1,1263-1281).
gattctctatgtctttaaa

SEQ ID NO: 225127 - DNA, 19 bp, Homo sapiens
  siRNA target sequence for ALDH7A1 (NM_001182.1,1297-1315).
gaggtctttgcatggaata

SEQ ID NO: 225128 - DNA, 19 bp, Homo sapiens
  siRNA target sequence for ALDH7A1 (NM_001182.1,1343-1361).
gcatctttaccaaagatct

SEQ ID NO: 225129 - DNA, 19 bp, Homo sapiens
  siRNA target sequence for ALDH7A1 (NM_001182.1,1407-1425).
cattgtaaatgtcaacatt

SEQ ID NO: 225130 - DNA, 19 bp, Homo sapiens
  siRNA target sequence for ALDH7A1 (NM_001182.1,1411-1429).
gtaaatgtcaacattccaa

SEQ ID NO: 225131 - DNA, 19 bp, Homo sapiens
  siRNA target sequence for ALDH7A1 (NM_001182.1,1499-1517).
gtgatgcctggaaacagta

SEQ ID NO: 225132 - DNA, 19 bp, Homo sapiens
  siRNA target sequence for ALDH7A1 (NM_001182.1,1518-1536).
catgagaaggtctacttgt

SEQ ID NO: 225133 - DNA, 19 bp, Homo sapiens
  siRNA target sequence for ALDH7A1 (NM_001182.1,1521-1539).
gagaaggtctacttgtact

SEQ ID NO: 225134 - DNA, 19 bp, Homo sapiens
  siRNA target sequence for ALDH7A1 (NM_001182.1,1526-1544).
ggtctacttgtactatcaa

SEQ ID NO: 225135 - DNA, 19 bp, Homo sapiens
  siRNA target sequence for ALDH7A1 (NM_001182.1,1538-1556).
ctatcaactacagtaaaga

SEQ ID NO: 225136 - DNA, 19 bp, Homo sapiens
  siRNA target sequence for ALDH7A1 (NM_001182.1,1566-1584).
ggcccaaggaatcaagttt

SEQ ID NO: 225137 - DNA, 19 bp, Homo sapiens
  siRNA target sequence for ALDH7A1 (NM_001182.1,1568-1586).
cccaaggaatcaagtttca

SEQ ID NO: 225138 - DNA, 19 bp, Homo sapiens
  siRNA target sequence for ALDH7A1 (NM_001182.1,1570-1588).
caaggaatcaagtttcagt

SEQ ID NO: 225139 - DNA, 19 bp, Homo sapiens
  siRNA target sequence for ALDH9A1 (NM_000696.2,399-417).
gtgtcgcagccgctcaatt

SEQ ID NO: 225140 - DNA, 19 bp, Homo sapiens
  siRNA target sequence for ALDH9A1 (NM_000696.2,454-472).
ccggtaccgagaaagcttt

SEQ ID NO: 225141 - DNA, 19 bp, Homo sapiens
  siRNA target sequence for ALDH9A1 (NM_000696.2,487-505).
gccgagtgatagctacttt

SEQ ID NO: 225142 - DNA, 19 bp, Homo sapiens
  siRNA target sequence for ALDH9A1 (NM_000696.2,489-507).
cgagtgatagctactttca

SEQ ID NO: 225143 - DNA, 19 bp, Homo sapiens
  siRNA target sequence for ALDH9A1 (NM_000696.2,528-546).
gtaaatttggctgttcaaa

SEQ ID NO: 225144 - DNA, 19 bp, Homo sapiens
  siRNA target sequence for ALDH9A1 (NM_000696.2,590-608).
ggagcgttgccgaatcctt

SEQ ID NO: 225145 - DNA, 19 bp, Homo sapiens
  siRNA target sequence for ALDH9A1 (NM_000696.2,591-609).
gagcgttgccgaatccttt

SEQ ID NO: 225146 - DNA, 19 bp, Homo sapiens
  siRNA target sequence for ALDH9A1 (NM_000696.2,595-613).
gttgccgaatccttttgga

SEQ ID NO: 225147 - DNA, 19 bp, Homo sapiens
  siRNA target sequence for ALDH9A1 (NM_000696.2,611-629).
ggaggctgccaggataata

SEQ ID NO: 225148 - DNA, 19 bp, Homo sapiens
  siRNA target sequence for ALDH9A1 (NM_000696.2,612-630).
gaggctgccaggataataa

SEQ ID NO: 225149 - DNA, 19 bp, Homo sapiens
  siRNA target sequence for ALDH9A1 (NM_000696.2,636-654).
cgggaggatgaaattgcta

SEQ ID NO: 225150 - DNA, 19 bp, Homo sapiens
  siRNA target sequence for ALDH9A1 (NM_000696.2,695-713).
ccgcttggacattgacatt

SEQ ID NO: 225151 - DNA, 19 bp, Homo sapiens
  siRNA target sequence for ALDH9A1 (NM_000696.2,696-714).
cgcttggacattgacattt

SEQ ID NO: 225152 - DNA, 19 bp, Homo sapiens
  siRNA target sequence for ALDH9A1 (NM_000696.2,776-794).
gctcccaggtggatcgttt

SEQ ID NO: 225153 - DNA, 19 bp, Homo sapiens
  siRNA target sequence for ALDH9A1 (NM_000696.2,780-798).
ccaggtggatcgtttggtt

SEQ ID NO: 225154 - DNA, 19 bp, Homo sapiens
  siRNA target sequence for ALDH9A1 (NM_000696.2,781-799).
caggtggatcgtttggtta

SEQ ID NO: 225155 - DNA, 19 bp, Homo sapiens
  siRNA target sequence for ALDH9A1 (NM_000696.2,783-801).
ggtggatcgtttggttata

SEQ ID NO: 225156 - DNA, 19 bp, Homo sapiens
  siRNA target sequence for ALDH9A1 (NM_000696.2,786-804).
ggatcgtttggttatacca

SEQ ID NO: 225157 - DNA, 19 bp, Homo sapiens
  siRNA target sequence for ALDH9A1 (NM_000696.2,821-839).
ggtatgtgtgggaatagga

SEQ ID NO: 225158 - DNA, 19 bp, Homo sapiens
  siRNA target sequence for ALDH9A1 (NM_000696.2,844-862).
ggaactacccctttcagat

SEQ ID NO: 225159 - DNA, 19 bp, Homo sapiens
  siRNA target sequence for ALDH9A1 (NM_000696.2,845-863).
gaactacccctttcagatt

SEQ ID NO: 225160 - DNA, 19 bp, Homo sapiens
  siRNA target sequence for ALDH9A1 (NM_000696.2,903-921).
gccatggtctttaaacctt

SEQ ID NO: 225161 - DNA, 19 bp, Homo sapiens
  siRNA target sequence for ALDH9A1 (NM_000696.2,1015-1033).
ctgccacaggccagtttct

SEQ ID NO: 225162 - DNA, 19 bp, Homo sapiens
  siRNA target sequence for ALDH9A1 (NM_000696.2,1044-1062).
cccgatgtggccaaagtct

SEQ ID NO: 225163 - DNA, 19 bp, Homo sapiens
  siRNA target sequence for ALDH9A1 (NM_000696.2,1097-1115).
catggagatgtcagctaaa

SEQ ID NO: 225164 - DNA, 19 bp, Homo sapiens
  siRNA target sequence for ALDH9A1 (NM_000696.2,1100-1118).
ggagatgtcagctaaagga

SEQ ID NO: 225165 - DNA, 19 bp, Homo sapiens
  siRNA target sequence for ALDH9A1 (NM_000696.2,1101-1119).
gagatgtcagctaaaggaa

SEQ ID NO: 225166 - DNA, 19 bp, Homo sapiens
  siRNA target sequence for ALDH9A1 (NM_000696.2,1117-1135).
gaatcaaacctgttacctt

SEQ ID NO: 225167 - DNA, 19 bp, Homo sapiens
  siRNA target sequence for ALDH9A1 (NM_000696.2,1147-1165).
gcaaatctccactcatcat

SEQ ID NO: 225168 - DNA, 19 bp, Homo sapiens
  siRNA target sequence for ALDH9A1 (NM_000696.2,1243-1261).
gtaatggcacaagagtatt

SEQ ID NO: 225169 - DNA, 19 bp, Homo sapiens
  siRNA target sequence for ALDH9A1 (NM_000696.2,1304-1322).
gaaacagacccaaaggatt

SEQ ID NO: 225170 - DNA, 19 bp, Homo sapiens
  siRNA target sequence for ALDH9A1 (NM_000696.2,1332-1350).
gatccccttctggaagata

SEQ ID NO: 225171 - DNA, 19 bp, Homo sapiens
  siRNA target sequence for ALDH9A1 (NM_000696.2,1354-1372).
ggatgggtccactcatcaa

SEQ ID NO: 225172 - DNA, 19 bp, Homo sapiens
  siRNA target sequence for ALDH9A1 (NM_000696.2,1419-1437).
gagcagggtgctaaagtgt

SEQ ID NO: 225173 - DNA, 19 bp, Homo sapiens
  siRNA target sequence for ALDH9A1 (NM_000696.2,1421-1439).
gcagggtgctaaagtgtta

SEQ ID NO: 225174 - DNA, 19 bp, Homo sapiens
  siRNA target sequence for ALDH9A1 (NM_000696.2,1422-1440).
cagggtgctaaagtgttat

SEQ ID NO: 225175 - DNA, 19 bp, Homo sapiens
  siRNA target sequence for ALDH9A1 (NM_000696.2,1424-1442).
gggtgctaaagtgttatgt

SEQ ID NO: 225176 - DNA, 19 bp, Homo sapiens
  siRNA target sequence for ALDH9A1 (NM_000696.2,1471-1489).
ccaaattaaaggatggata

SEQ ID NO: 225177 - DNA, 19 bp, Homo sapiens
  siRNA target sequence for ALDH9A1 (NM_000696.2,1472-1490).
caaattaaaggatggatat

SEQ ID NO: 225178 - DNA, 19 bp, Homo sapiens
  siRNA target sequence for ALDH9A1 (NM_000696.2,1493-1511).
catgagaccttgtgtatta

SEQ ID NO: 225179 - DNA, 19 bp, Homo sapiens
  siRNA target sequence for ALDH9A1 (NM_000696.2,1496-1514).
gagaccttgtgtattaact

SEQ ID NO: 225180 - DNA, 19 bp, Homo sapiens
  siRNA target sequence for ALDH9A1 (NM_000696.2,1500-1518).
ccttgtgtattaactaatt

SEQ ID NO: 225181 - DNA, 19 bp, Homo sapiens
  siRNA target sequence for ALDH9A1 (NM_000696.2,1559-1577).
gcctgttatgtccatttta

SEQ ID NO: 225182 - DNA, 19 bp, Homo sapiens
  siRNA target sequence for ALDH9A1 (NM_000696.2,1602-1620).
ctagaaagagccaatgata

SEQ ID NO: 225183 - DNA, 19 bp, Homo sapiens
  siRNA target sequence for ALDH9A1 (NM_000696.2,1613-1631).
caatgataccacttttgga

SEQ ID NO: 225184 - DNA, 19 bp, Homo sapiens
  siRNA target sequence for ALDH9A1 (NM_000696.2,1635-1653).
gcagctggcgtctttacca

SEQ ID NO: 225185 - DNA, 19 bp, Homo sapiens
  siRNA target sequence for ALDH9A1 (NM_000696.2,1658-1676).
catccaacgggctcataga

SEQ ID NO: 225186 - DNA, 19 bp, Homo sapiens
  siRNA target sequence for ALDH9A1 (NM_000696.2,1702-1720).
cgtgcttcattaacaacta

SEQ ID NO: 225187 - DNA, 19 bp, Homo sapiens
  siRNA target sequence for ALDH9A1 (NM_000696.2,1705-1723).
gcttcattaacaactataa

SEQ ID NO: 225188 - DNA, 19 bp, Homo sapiens
  siRNA target sequence for ALDH9A1 (NM_000696.2,1739-1757).
gttgccctttggtggatat

SEQ ID NO: 225189 - DNA, 19 bp, Homo sapiens
  siRNA target sequence for ALDH9A1 (NM_000696.2,1784-1802).
cggccgtgtgacaatcgaa

SEQ ID NO: 225190 - DNA, 19 bp, Homo sapiens
  siRNA target sequence for ALDH9A1 (NM_000696.2,1785-1803).
ggccgtgtgacaatcgaat

SEQ ID NO: 225191 - DNA, 19 bp, Homo sapiens
  siRNA target sequence for ALDH9A1 (NM_000696.2,1786-1804).
gccgtgtgacaatcgaata

SEQ ID NO: 225192 - DNA, 19 bp, Homo sapiens
  siRNA target sequence for ALDH9A1 (NM_000696.2,1787-1805).
ccgtgtgacaatcgaatat

SEQ ID NO: 225193 - DNA, 19 bp, Homo sapiens
  siRNA target sequence for ALDH9A1 (NM_000696.2,1788-1806).
cgtgtgacaatcgaatatt

SEQ ID NO: 225194 - DNA, 19 bp, Homo sapiens
  siRNA target sequence for ALDH9A1 (NM_000696.2,1789-1807).
gtgtgacaatcgaatatta

SEQ ID NO: 225195 - DNA, 19 bp, Homo sapiens
  siRNA target sequence for ALDH1A3 (NM_000693.1,137-155).
gtcaagttcaccaagatat

SEQ ID NO: 225196 - DNA, 19 bp, Homo sapiens
  siRNA target sequence for ALDH1A3 (NM_000693.1,148-166).
caagatatttatcaacaat

SEQ ID NO: 225197 - DNA, 19 bp, Homo sapiens
  siRNA target sequence for ALDH1A3 (NM_000693.1,213-231).
cttcaactcgggagcaaat

SEQ ID NO: 225198 - DNA, 19 bp, Homo sapiens
  siRNA target sequence for ALDH1A3 (NM_000693.1,398-416).
gccctggagacgatggata

SEQ ID NO: 225199 - DNA, 19 bp, Homo sapiens
  siRNA target sequence for ALDH1A3 (NM_000693.1,448-466).
cgacctggagggctgtatt

SEQ ID NO: 225200 - DNA, 19 bp, Homo sapiens
  siRNA target sequence for ALDH1A3 (NM_000693.1,449-467).
gacctggagggctgtatta

SEQ ID NO: 225201 - DNA, 19 bp, Homo sapiens
  siRNA target sequence for ALDH1A3 (NM_000693.1,452-470).
ctggagggctgtattagaa

SEQ ID NO: 225202 - DNA, 19 bp, Homo sapiens
  siRNA target sequence for ALDH1A3 (NM_000693.1,462-480).
gtattagaaccctcagata

SEQ ID NO: 225203 - DNA, 19 bp, Homo sapiens
  siRNA target sequence for ALDH1A3 (NM_000693.1,681-699).
ctctcaccgccctttatct

SEQ ID NO: 225204 - DNA, 19 bp, Homo sapiens
  siRNA target sequence for ALDH1A3 (NM_000693.1,772-790).
gggagcagcaatttcttct

SEQ ID NO: 225205 - DNA, 19 bp, Homo sapiens
  siRNA target sequence for ALDH1A3 (NM_000693.1,857-875).
gcgtcccggagcaatctga

SEQ ID NO: 225206 - DNA, 19 bp, Homo sapiens
  siRNA target sequence for ALDH1A3 (NM_000693.1,858-876).
cgtcccggagcaatctgaa

SEQ ID NO: 225207 - DNA, 19 bp, Homo sapiens
  siRNA target sequence for ALDH1A3 (NM_000693.1,1024-1042).
gcaggtctactctgagttt

SEQ ID NO: 225208 - DNA, 19 bp, Homo sapiens
  siRNA target sequence for ALDH1A3 (NM_000693.1,1083-1101).
gagaccccttcgatgtcaa

SEQ ID NO: 225209 - DNA, 19 bp, Homo sapiens
  siRNA target sequence for ALDH1A3 (NM_000693.1,1085-1103).
gaccccttcgatgtcaaaa

SEQ ID NO: 225210 - DNA, 19 bp, Homo sapiens
  siRNA target sequence for ALDH1A3 (NM_000693.1,1087-1105).
ccccttcgatgtcaaaaca

SEQ ID NO: 225211 - DNA, 19 bp, Homo sapiens
  siRNA target sequence for ALDH1A3 (NM_000693.1,1089-1107).
ccttcgatgtcaaaacaga

SEQ ID NO: 225212 - DNA, 19 bp, Homo sapiens
  siRNA target sequence for ALDH1A3 (NM_000693.1,1111-1129).
ggggcctcagattgatcaa

SEQ ID NO: 225213 - DNA, 19 bp, Homo sapiens
  siRNA target sequence for ALDH1A3 (NM_000693.1,1116-1134).
ctcagattgatcaaaagca

SEQ ID NO: 225214 - DNA, 19 bp, Homo sapiens
  siRNA target sequence for ALDH1A3 (NM_000693.1,1132-1150).
gcagttcgacaaaatctta

SEQ ID NO: 225215 - DNA, 19 bp, Homo sapiens
  siRNA target sequence for ALDH1A3 (NM_000693.1,1214-1232).
gacaaggggctcttcatca

SEQ ID NO: 225216 - DNA, 19 bp, Homo sapiens
  siRNA target sequence for ALDH1A3 (NM_000693.1,1216-1234).
caaggggctcttcatcaaa

SEQ ID NO: 225217 - DNA, 19 bp, Homo sapiens
  siRNA target sequence for ALDH1A3 (NM_000693.1,1291-1309).
cgggccagtgcaaccaata

SEQ ID NO: 225218 - DNA, 19 bp, Homo sapiens
  siRNA target sequence for ALDH1A3 (NM_000693.1,1304-1322).
ccaatactgaagttcaaaa

SEQ ID NO: 225219 - DNA, 19 bp, Homo sapiens
  siRNA target sequence for ALDH1A3 (NM_000693.1,1323-1341).
gtatcgaagaagtgataaa

SEQ ID NO: 225220 - DNA, 19 bp, Homo sapiens
  siRNA target sequence for ALDH1A3 (NM_000693.1,1371-1389).
cagcagccgtgttcacaaa

SEQ ID NO: 225221 - DNA, 19 bp, Homo sapiens
  siRNA target sequence for ALDH1A3 (NM_000693.1,1374-1392).
cagccgtgttcacaaaaaa

SEQ ID NO: 225222 - DNA, 19 bp, Homo sapiens
  siRNA target sequence for ALDH1A3 (NM_000693.1,1433-1451).
ggaacggtctggatcaact

SEQ ID NO: 225223 - DNA, 19 bp, Homo sapiens
  siRNA target sequence for ALDH1A3 (NM_000693.1,1478-1496).
ccatttggtggctttaaaa

SEQ ID NO: 225224 - DNA, 19 bp, Homo sapiens
  siRNA target sequence for ALDH1A3 (NM_000693.1,1479-1497).
catttggtggctttaaaat

SEQ ID NO: 225225 - DNA, 19 bp, Homo sapiens
  siRNA target sequence for ALDH1A3 (NM_000693.1,1528-1546).
cgctttggccgaatacaca

SEQ ID NO: 225226 - DNA, 19 bp, Homo sapiens
  siRNA target sequence for ALDH3A1 (NM_000691.3,189-207).
cgcagacctgcacaagaat

SEQ ID NO: 225227 - DNA, 19 bp, Homo sapiens
  siRNA target sequence for ALDH3A1 (NM_000691.3,193-211).
gacctgcacaagaatgaat

SEQ ID NO: 225228 - DNA, 19 bp, Homo sapiens
  siRNA target sequence for ALDH3A1 (NM_000691.3,523-541).
gatctgtacccagtaatca

SEQ ID NO: 225229 - DNA, 19 bp, Homo sapiens
  siRNA target sequence for ALDH3A1 (NM_000691.3,734-752).
gcatcgcctgggggaaatt

SEQ ID NO: 225230 - DNA, 19 bp, Homo sapiens
  siRNA target sequence for ALDH3A1 (NM_000691.3,802-820).
ccctcgatccagaaccaaa

SEQ ID NO: 225231 - DNA, 19 bp, Homo sapiens
  siRNA target sequence for ALDH3A1 (NM_000691.3,803-821).
cctcgatccagaaccaaat

SEQ ID NO: 225232 - DNA, 19 bp, Homo sapiens
  siRNA target sequence for ALDH3A1 (NM_000691.3,804-822).
ctcgatccagaaccaaatt

SEQ ID NO: 225233 - DNA, 19 bp, Homo sapiens
  siRNA target sequence for ALDH3A1 (NM_000691.3,806-824).
cgatccagaaccaaattgt

SEQ ID NO: 225234 - DNA, 19 bp, Homo sapiens
  siRNA target sequence for ALDH3A1 (NM_000691.3,858-876).
cggggaagatgctaagaaa

SEQ ID NO: 225235 - DNA, 19 bp, Homo sapiens
  siRNA target sequence for ALDH3A1 (NM_000691.3,878-896).
cccgggactatggaagaat

SEQ ID NO: 225236 - DNA, 19 bp, Homo sapiens
  siRNA target sequence for ALDH3A1 (NM_000691.3,1124-1142).
ccctggccctctacatgtt

SEQ ID NO: 225237 - DNA, 19 bp, Homo sapiens
  siRNA target sequence for ALDH3A1 (NM_000691.3,1148-1166).
gcaacgacaaggtgattaa

SEQ ID NO: 225238 - DNA, 19 bp, Homo sapiens
  siRNA target sequence for ALDH3B1 (NM_000694.1,377-395).
cattgcgccctggaactat

SEQ ID NO: 225239 - DNA, 19 bp, Homo sapiens
  siRNA target sequence for ALDH3B1 (NM_000694.1,456-474).
ctgaagccatcggagatta

SEQ ID NO: 225240 - DNA, 19 bp, Homo sapiens
  siRNA target sequence for ALDH3B2 (NM_000695.2,423-441).
ggtccacgaacctgttcat

SEQ ID NO: 225241 - DNA, 19 bp, Homo sapiens
  siRNA target sequence for ALDH3B2 (NM_000695.2,426-444).
ccacgaacctgttcatgaa

SEQ ID NO: 225242 - DNA, 19 bp, Homo sapiens
  siRNA target sequence for ALDH3B2 (NM_000695.2,569-587).
gtgctgaagccgtcagaaa

SEQ ID NO: 225243 - DNA, 19 bp, Homo sapiens
  siRNA target sequence for ALDH3B2 (NM_000695.2,1331-1349).
gagggcttcacctacatat

SEQ ID NO: 225244 - DNA, 19 bp, Homo sapiens
  siRNA target sequence for GAPDS (NM_014364.3,200-218).
caccagtcagggaggaaat

SEQ ID NO: 225245 - DNA, 19 bp, Homo sapiens
  siRNA target sequence for GAPDS (NM_014364.3,300-318).
gggcatcaatggatttgga

SEQ ID NO: 225246 - DNA, 19 bp, Homo sapiens
  siRNA target sequence for GAPDS (NM_014364.3,398-416).
cggaatacatggtgtacat

SEQ ID NO: 225247 - DNA, 19 bp, Homo sapiens
  siRNA target sequence for GAPDS (NM_014364.3,408-426).
ggtgtacatgtttaagtat

SEQ ID NO: 225248 - DNA, 19 bp, Homo sapiens
  siRNA target sequence for GAPDS (NM_014364.3,653-671).
caccggatgcaccaatgtt

SEQ ID NO: 225249 - DNA, 19 bp, Homo sapiens
  siRNA target sequence for GAPDS (NM_014364.3,706-724).
ggctccatgaacattgtga

SEQ ID NO: 225250 - DNA, 19 bp, Homo sapiens
  siRNA target sequence for GAPDS (NM_014364.3,881-899).
ggggtgcccaccagaacat

SEQ ID NO: 225251 - DNA, 19 bp, Homo sapiens
  siRNA target sequence for GAPDS (NM_014364.3,1052-1070).
ccatcaaggaggctgtaaa

SEQ ID NO: 225252 - DNA, 19 bp, Homo sapiens
  siRNA target sequence for GAPDS (NM_014364.3,1187-1205).
cgctcaatgacaatttcgt

SEQ ID NO: 225253 - DNA, 19 bp, Homo sapiens
  siRNA target sequence for GAPDS (NM_014364.3,1217-1235).
catggtacgacaacgaata

SEQ ID NO: 225254 - DNA, 19 bp, Homo sapiens
  siRNA target sequence for GAPDS (NM_014364.3,1261-1279).
ctcctccgctacatgttca

SEQ ID NO: 225255 - DNA, 19 bp, Homo sapiens
  siRNA target sequence for ALDH5A1 (NM_001080.3,398-416).
cttcggaagtggtacaatt

SEQ ID NO: 225256 - DNA, 19 bp, Homo sapiens
  siRNA target sequence for ALDH5A1 (NM_001080.3,401-419).
cggaagtggtacaatttaa

SEQ ID NO: 225257 - DNA, 19 bp, Homo sapiens
  siRNA target sequence for ALDH5A1 (NM_001080.3,502-520).
ctattccgcctttttccta

SEQ ID NO: 225258 - DNA, 19 bp, Homo sapiens
  siRNA target sequence for ALDH5A1 (NM_001080.3,544-562).
ccgtgtttacggagacatt

SEQ ID NO: 225259 - DNA, 19 bp, Homo sapiens
  siRNA target sequence for ALDH5A1 (NM_001080.3,545-563).
cgtgtttacggagacatta

SEQ ID NO: 225260 - DNA, 19 bp, Homo sapiens
  siRNA target sequence for ALDH5A1 (NM_001080.3,546-564).
gtgtttacggagacattat

SEQ ID NO: 225261 - DNA, 19 bp, Homo sapiens
  siRNA target sequence for ALDH5A1 (NM_001080.3,626-644).
gtcatcaccccgtggaatt

SEQ ID NO: 225262 - DNA, 19 bp, Homo sapiens
  siRNA target sequence for ALDH5A1 (NM_001080.3,771-789).
ggattccttcaggtgtata

SEQ ID NO: 225263 - DNA, 19 bp, Homo sapiens
  siRNA target sequence for ALDH5A1 (NM_001080.3,777-795).
cttcaggtgtatacaatgt

SEQ ID NO: 225264 - DNA, 19 bp, Homo sapiens
  siRNA target sequence for ALDH5A1 (NM_001080.3,780-798).
caggtgtatacaatgttat

SEQ ID NO: 225265 - DNA, 19 bp, Homo sapiens
  siRNA target sequence for ALDH5A1 (NM_001080.3,824-842).
gaagtaggggaggcaattt

SEQ ID NO: 225266 - DNA, 19 bp, Homo sapiens
  siRNA target sequence for ALDH5A1 (NM_001080.3,832-850).
ggaggcaatttgtactgat

SEQ ID NO: 225267 - DNA, 19 bp, Homo sapiens
  siRNA target sequence for ALDH5A1 (NM_001080.3,851-869).
cctctggtgtccaaaattt

SEQ ID NO: 225268 - DNA, 19 bp, Homo sapiens
  siRNA target sequence for ALDH5A1 (NM_001080.3,859-877).
gtccaaaatttcctttact

SEQ ID NO: 225269 - DNA, 19 bp, Homo sapiens
  siRNA target sequence for ALDH5A1 (NM_001080.3,871-889).
ctttactggttcaacaact

SEQ ID NO: 225270 - DNA, 19 bp, Homo sapiens
  siRNA target sequence for ALDH5A1 (NM_001080.3,882-900).
caacaactacaggaaagat

SEQ ID NO: 225271 - DNA, 19 bp, Homo sapiens
  siRNA target sequence for ALDH5A1 (NM_001080.3,907-925).
gcaccacgcagcaaactct

SEQ ID NO: 225272 - DNA, 19 bp, Homo sapiens
  siRNA target sequence for ALDH5A1 (NM_001080.3,924-942).
ctgtgaaaagggtctctat

SEQ ID NO: 225273 - DNA, 19 bp, Homo sapiens
  siRNA target sequence for ALDH5A1 (NM_001080.3,1008-1026).
gggccatggcatctaaatt

SEQ ID NO: 225274 - DNA, 19 bp, Homo sapiens
  siRNA target sequence for ALDH5A1 (NM_001080.3,1009-1027).
ggccatggcatctaaattt

SEQ ID NO: 225275 - DNA, 19 bp, Homo sapiens
  siRNA target sequence for ALDH5A1 (NM_001080.3,1010-1028).
gccatggcatctaaattta

SEQ ID NO: 225276 - DNA, 19 bp, Homo sapiens
  siRNA target sequence for ALDH5A1 (NM_001080.3,1047-1065).
gtgtttgctcaaaccaatt

SEQ ID NO: 225277 - DNA, 19 bp, Homo sapiens
  siRNA target sequence for ALDH5A1 (NM_001080.3,1088-1106).
gatgcctttgtaaaagcat

SEQ ID NO: 225278 - DNA, 19 bp, Homo sapiens
  siRNA target sequence for ALDH5A1 (NM_001080.3,1126-1144).
gaacctgcgcgtaggtaat

SEQ ID NO: 225279 - DNA, 19 bp, Homo sapiens
  siRNA target sequence for ALDH5A1 (NM_001080.3,1129-1147).
cctgcgcgtaggtaatgga

SEQ ID NO: 225280 - DNA, 19 bp, Homo sapiens
  siRNA target sequence for ALDH5A1 (NM_001080.3,1130-1148).
ctgcgcgtaggtaatggat

SEQ ID NO: 225281 - DNA, 19 bp, Homo sapiens
  siRNA target sequence for ALDH5A1 (NM_001080.3,1132-1150).
gcgcgtaggtaatggattt

SEQ ID NO: 225282 - DNA, 19 bp, Homo sapiens
  siRNA target sequence for ALDH5A1 (NM_001080.3,1164-1182).
ctcagggcccattaattaa

SEQ ID NO: 225283 - DNA, 19 bp, Homo sapiens
  siRNA target sequence for ALDH5A1 (NM_001080.3,1169-1187).
ggcccattaattaatgaaa

SEQ ID NO: 225284 - DNA, 19 bp, Homo sapiens
  siRNA target sequence for ALDH5A1 (NM_001080.3,1214-1232).
gtgaatgatgccgtttcta

SEQ ID NO: 225285 - DNA, 19 bp, Homo sapiens
  siRNA target sequence for ALDH5A1 (NM_001080.3,1243-1261).
cgttgtgacaggtggaaaa

SEQ ID NO: 225286 - DNA, 19 bp, Homo sapiens
  siRNA target sequence for ALDH5A1 (NM_001080.3,1262-1280).
cgacaccaacttggaaaaa

SEQ ID NO: 225287 - DNA, 19 bp, Homo sapiens
  siRNA target sequence for ALDH5A1 (NM_001080.3,1329-1347).
gcactcatgaagagacttt

SEQ ID NO: 225288 - DNA, 19 bp, Homo sapiens
  siRNA target sequence for ALDH5A1 (NM_001080.3,1352-1370).
cctctggcaccagttatca

SEQ ID NO: 225289 - DNA, 19 bp, Homo sapiens
  siRNA target sequence for ALDH5A1 (NM_001080.3,1353-1371).
ctctggcaccagttatcaa

SEQ ID NO: 225290 - DNA, 19 bp, Homo sapiens
  siRNA target sequence for ALDH5A1 (NM_001080.3,1361-1379).
ccagttatcaagttcgata

SEQ ID NO: 225291 - DNA, 19 bp, Homo sapiens
  siRNA target sequence for ALDH5A1 (NM_001080.3,1402-1420).
cgctaacgcagctgatgtt

SEQ ID NO: 225292 - DNA, 19 bp, Homo sapiens
  siRNA target sequence for ALDH5A1 (NM_001080.3,1418-1436).
gttgggttagcaggttatt

SEQ ID NO: 225293 - DNA, 19 bp, Homo sapiens
  siRNA target sequence for ALDH5A1 (NM_001080.3,1500-1518).
gcgtcaacgaaggattaat

SEQ ID NO: 225294 - DNA, 19 bp, Homo sapiens
  siRNA target sequence for ALDH5A1 (NM_001080.3,1501-1519).
cgtcaacgaaggattaatt

SEQ ID NO: 225295 - DNA, 19 bp, Homo sapiens
  siRNA target sequence for ALDH5A1 (NM_001080.3,1502-1520).
gtcaacgaaggattaattt

SEQ ID NO: 225296 - DNA, 19 bp, Homo sapiens
  siRNA target sequence for ALDH5A1 (NM_001080.3,1576-1594).
gtccaagtatggcattgat

SEQ ID NO: 225297 - DNA, 19 bp, Homo sapiens
  siRNA target sequence for ALDH5A1 (NM_001080.3,1582-1600).
gtatggcattgatgagtat

SEQ ID NO: 225298 - DNA, 19 bp, Homo sapiens
  siRNA target sequence for ALDH6A1 (NM_005589.2,136-154).
cggatcctgcaggtttctt

SEQ ID NO: 225299 - DNA, 19 bp, Homo sapiens
  siRNA target sequence for ALDH6A1 (NM_005589.2,206-224).
cagtgccaactgtaaagct

SEQ ID NO: 225300 - DNA, 19 bp, Homo sapiens
  siRNA target sequence for ALDH6A1 (NM_005589.2,228-246).
cattggtgggaaattcgtt

SEQ ID NO: 225301 - DNA, 19 bp, Homo sapiens
  siRNA target sequence for ALDH6A1 (NM_005589.2,232-250).
ggtgggaaattcgttgaat

SEQ ID NO: 225302 - DNA, 19 bp, Homo sapiens
  siRNA target sequence for ALDH6A1 (NM_005589.2,236-254).
ggaaattcgttgaatccaa

SEQ ID NO: 225303 - DNA, 19 bp, Homo sapiens
  siRNA target sequence for ALDH6A1 (NM_005589.2,257-275).
gtgacaaatggatcgatat

SEQ ID NO: 225304 - DNA, 19 bp, Homo sapiens
  siRNA target sequence for ALDH6A1 (NM_005589.2,377-395).
gggcagacacttcagtatt

SEQ ID NO: 225305 - DNA, 19 bp, Homo sapiens
  siRNA target sequence for ALDH6A1 (NM_005589.2,378-396).
ggcagacacttcagtatta

SEQ ID NO: 225306 - DNA, 19 bp, Homo sapiens
  siRNA target sequence for ALDH6A1 (NM_005589.2,379-397).
gcagacacttcagtattaa

SEQ ID NO: 225307 - DNA, 19 bp, Homo sapiens
  siRNA target sequence for ALDH6A1 (NM_005589.2,415-433).
ctccgctatcaacaactta

SEQ ID NO: 225308 - DNA, 19 bp, Homo sapiens
  siRNA target sequence for ALDH6A1 (NM_005589.2,417-435).
ccgctatcaacaacttatt

SEQ ID NO: 225309 - DNA, 19 bp, Homo sapiens
  siRNA target sequence for ALDH6A1 (NM_005589.2,459-477).
caagttaatcacattggaa

SEQ ID NO: 225310 - DNA, 19 bp, Homo sapiens
  siRNA target sequence for ALDH6A1 (NM_005589.2,548-566).
gtgtgacatccctcatgat

SEQ ID NO: 225311 - DNA, 19 bp, Homo sapiens
  siRNA target sequence for ALDH6A1 (NM_005589.2,638-656).
caggcattgctccattcaa

SEQ ID NO: 225312 - DNA, 19 bp, Homo sapiens
  siRNA target sequence for ALDH6A1 (NM_005589.2,665-683).
ccatgatccccctttggat

SEQ ID NO: 225313 - DNA, 19 bp, Homo sapiens
  siRNA target sequence for ALDH6A1 (NM_005589.2,669-687).
gatccccctttggatgttt

SEQ ID NO: 225314 - DNA, 19 bp, Homo sapiens
  siRNA target sequence for ALDH6A1 (NM_005589.2,693-711).
ggccatggtgtgtggaaat

SEQ ID NO: 225315 - DNA, 19 bp, Homo sapiens
  siRNA target sequence for ALDH6A1 (NM_005589.2,694-712).
gccatggtgtgtggaaata

SEQ ID NO: 225316 - DNA, 19 bp, Homo sapiens
  siRNA target sequence for ALDH6A1 (NM_005589.2,704-722).
gtggaaataccttcctaat

SEQ ID NO: 225317 - DNA, 19 bp, Homo sapiens
  siRNA target sequence for ALDH6A1 (NM_005589.2,741-759).
ccctggagcaactatgctt

SEQ ID NO: 225318 - DNA, 19 bp, Homo sapiens
  siRNA target sequence for ALDH6A1 (NM_005589.2,749-767).
caactatgcttcttgctaa

SEQ ID NO: 225319 - DNA, 19 bp, Homo sapiens
  siRNA target sequence for ALDH6A1 (NM_005589.2,787-805).
gcccctgatggaacattaa

SEQ ID NO: 225320 - DNA, 19 bp, Homo sapiens
  siRNA target sequence for ALDH6A1 (NM_005589.2,845-863).
gcgatcatccggacatcaa

SEQ ID NO: 225321 - DNA, 19 bp, Homo sapiens
  siRNA target sequence for ALDH6A1 (NM_005589.2,846-864).
cgatcatccggacatcaaa

SEQ ID NO: 225322 - DNA, 19 bp, Homo sapiens
  siRNA target sequence for ALDH6A1 (NM_005589.2,850-868).
catccggacatcaaagcaa

SEQ ID NO: 225323 - DNA, 19 bp, Homo sapiens
  siRNA target sequence for ALDH6A1 (NM_005589.2,909-927).
cgagagaggatcaagacat

SEQ ID NO: 225324 - DNA, 19 bp, Homo sapiens
  siRNA target sequence for ALDH6A1 (NM_005589.2,1044-1062).
gcgctgcatggctctttca

SEQ ID NO: 225325 - DNA, 19 bp, Homo sapiens
  siRNA target sequence for ALDH6A1 (NM_005589.2,1045-1063).
cgctgcatggctctttcaa

SEQ ID NO: 225326 - DNA, 19 bp, Homo sapiens
  siRNA target sequence for ALDH6A1 (NM_005589.2,1200-1218).
ctgtaatctgattgatagt

SEQ ID NO: 225327 - DNA, 19 bp, Homo sapiens
  siRNA target sequence for ALDH6A1 (NM_005589.2,1246-1264).
cttgatggacgaaaaatta

SEQ ID NO: 225328 - DNA, 19 bp, Homo sapiens
  siRNA target sequence for ALDH6A1 (NM_005589.2,1294-1312).
gttggaccaaccatcatct

SEQ ID NO: 225329 - DNA, 19 bp, Homo sapiens
  siRNA target sequence for ALDH6A1 (NM_005589.2,1304-1322).
ccatcatctcgaatgtcaa

SEQ ID NO: 225330 - DNA, 19 bp, Homo sapiens
  siRNA target sequence for ALDH6A1 (NM_005589.2,1313-1331).
cgaatgtcaagccaaatat

SEQ ID NO: 225331 - DNA, 19 bp, Homo sapiens
  siRNA target sequence for ALDH6A1 (NM_005589.2,1324-1342).
ccaaatatgacctgttaca

SEQ ID NO: 225332 - DNA, 19 bp, Homo sapiens
  siRNA target sequence for ALDH6A1 (NM_005589.2,1399-1417).
gccatccagattgtaaata

SEQ ID NO: 225333 - DNA, 19 bp, Homo sapiens
  siRNA target sequence for ALDH6A1 (NM_005589.2,1400-1418).
ccatccagattgtaaataa

SEQ ID NO: 225334 - DNA, 19 bp, Homo sapiens
  siRNA target sequence for ALDH6A1 (NM_005589.2,1460-1478).
gagccactgctcggaaata

SEQ ID NO: 225335 - DNA, 19 bp, Homo sapiens
  siRNA target sequence for ALDH6A1 (NM_005589.2,1575-1593).
gggagacaccaatttctat

SEQ ID NO: 225336 - DNA, 19 bp, Homo sapiens
  siRNA target sequence for ALDH6A1 (NM_005589.2,1594-1612).
ggcaaacagggcatccaat

SEQ ID NO: 225337 - DNA, 19 bp, Homo sapiens
  siRNA target sequence for ALDH6A1 (NM_005589.2,1595-1613).
gcaaacagggcatccaatt

SEQ ID NO: 225338 - DNA, 19 bp, Homo sapiens
  siRNA target sequence for ALDH6A1 (NM_005589.2,1608-1626).
ccaattctacactcagtta

SEQ ID NO: 225339 - DNA, 19 bp, Homo sapiens
  siRNA target sequence for ALDH6A1 (NM_005589.2,1623-1641).
gttaaagaccattacttct

SEQ ID NO: 225340 - DNA, 19 bp, Homo sapiens
  siRNA target sequence for PDHA1 (NM_000284.1,177-195).
ggtagcatcccgtaatttt

SEQ ID NO: 225341 - DNA, 19 bp, Homo sapiens
  siRNA target sequence for PDHA1 (NM_000284.1,181-199).
gcatcccgtaattttgcaa

SEQ ID NO: 225342 - DNA, 19 bp, Homo sapiens
  siRNA target sequence for PDHA1 (NM_000284.1,280-298).
gaggatgggctcaaatact

SEQ ID NO: 225343 - DNA, 19 bp, Homo sapiens
  siRNA target sequence for PDHA1 (NM_000284.1,489-507).
cctttccgtccgagaaatt

SEQ ID NO: 225344 - DNA, 19 bp, Homo sapiens
  siRNA target sequence for PDHA1 (NM_000284.1,669-687).
ggtctgcctgactttatat

SEQ ID NO: 225345 - DNA, 19 bp, Homo sapiens
  siRNA target sequence for PDHA1 (NM_000284.1,705-723).
ccagggccagatattcgaa

SEQ ID NO: 225346 - DNA, 19 bp, Homo sapiens
  siRNA target sequence for PDHA1 (NM_000284.1,857-875).
ggctgagagtggatggaat

SEQ ID NO: 225347 - DNA, 19 bp, Homo sapiens
  siRNA target sequence for PDHA1 (NM_000284.1,863-881).
gagtggatggaatggatat

SEQ ID NO: 225348 - DNA, 19 bp, Homo sapiens
  siRNA target sequence for PDHA1 (NM_000284.1,906-924).
gtttgctgctgcctattgt

SEQ ID NO: 225349 - DNA, 19 bp, Homo sapiens
  siRNA target sequence for PDHA1 (NM_000284.1,1044-1062).
gagtgaccctattatgctt

SEQ ID NO: 225350 - DNA, 19 bp, Homo sapiens
  siRNA target sequence for PDHA1 (NM_000284.1,1212-1230).
ctccagcgacccacctttt

SEQ ID NO: 225351 - DNA, 19 bp, Homo sapiens
  siRNA target sequence for PDHA1 (NM_000284.1,1214-1232).
ccagcgacccaccttttga

SEQ ID NO: 225352 - DNA, 19 bp, Homo sapiens
  siRNA target sequence for PDHA1 (NM_000284.1,1215-1233).
cagcgacccaccttttgaa

SEQ ID NO: 225353 - DNA, 19 bp, Homo sapiens
  siRNA target sequence for PDHA1 (NM_000284.1,1217-1235).
gcgacccaccttttgaagt

SEQ ID NO: 225354 - DNA, 19 bp, Homo sapiens
  siRNA target sequence for PDHA2 (NM_005390.3,92-110).
gcgagttgcccagaaatca

SEQ ID NO: 225355 - DNA, 19 bp, Homo sapiens
  siRNA target sequence for PDHA2 (NM_005390.3,133-151).
cccgtaactcctcaaatga

SEQ ID NO: 225356 - DNA, 19 bp, Homo sapiens
  siRNA target sequence for PDHA2 (NM_005390.3,142-160).
cctcaaatgacgctacatt

SEQ ID NO: 225357 - DNA, 19 bp, Homo sapiens
  siRNA target sequence for PDHA2 (NM_005390.3,143-161).
ctcaaatgacgctacattt

SEQ ID NO: 225358 - DNA, 19 bp, Homo sapiens
  siRNA target sequence for PDHA2 (NM_005390.3,226-244).
gggcggaggggcttaaata

SEQ ID NO: 225359 - DNA, 19 bp, Homo sapiens
  siRNA target sequence for PDHA2 (NM_005390.3,228-246).
gcggaggggcttaaatact

SEQ ID NO: 225360 - DNA, 19 bp, Homo sapiens
  siRNA target sequence for PDHA2 (NM_005390.3,229-247).
cggaggggcttaaatacta

SEQ ID NO: 225361 - DNA, 19 bp, Homo sapiens
  siRNA target sequence for PDHA2 (NM_005390.3,262-280).
ctgttcgccgcatggaatt

SEQ ID NO: 225362 - DNA, 19 bp, Homo sapiens
  siRNA target sequence for PDHA2 (NM_005390.3,264-282).
gttcgccgcatggaattga

SEQ ID NO: 225363 - DNA, 19 bp, Homo sapiens
  siRNA target sequence for PDHA2 (NM_005390.3,381-399).
ccctcggatcacgtcatta

SEQ ID NO: 225364 - DNA, 19 bp, Homo sapiens
  siRNA target sequence for PDHA2 (NM_005390.3,383-401).
ctcggatcacgtcattaca

SEQ ID NO: 225365 - DNA, 19 bp, Homo sapiens
  siRNA target sequence for PDHA2 (NM_005390.3,425-443).
ctatactcggggactttct

SEQ ID NO: 225366 - DNA, 19 bp, Homo sapiens
  siRNA target sequence for PDHA2 (NM_005390.3,581-599).
cattgctctggcctgtaaa

SEQ ID NO: 225367 - DNA, 19 bp, Homo sapiens
  siRNA target sequence for PDHA2 (NM_005390.3,606-624).
ggaaacgatgagatctgtt

SEQ ID NO: 225368 - DNA, 19 bp, Homo sapiens
  siRNA target sequence for PDHA2 (NM_005390.3,607-625).
gaaacgatgagatctgttt

SEQ ID NO: 225369 - DNA, 19 bp, Homo sapiens
  siRNA target sequence for PDHA2 (NM_005390.3,658-676).
ggcagatagccgaagcttt

SEQ ID NO: 225370 - DNA, 19 bp, Homo sapiens
  siRNA target sequence for PDHA2 (NM_005390.3,662-680).
gatagccgaagctttcaat

SEQ ID NO: 225371 - DNA, 19 bp, Homo sapiens
  siRNA target sequence for PDHA2 (NM_005390.3,713-731).
catctgtgagaataaccta

SEQ ID NO: 225372 - DNA, 19 bp, Homo sapiens
  siRNA target sequence for PDHA2 (NM_005390.3,716-734).
ctgtgagaataacctatat

SEQ ID NO: 225373 - DNA, 19 bp, Homo sapiens
  siRNA target sequence for PDHA2 (NM_005390.3,805-823).
ggctaaaggtcgatggaat

SEQ ID NO: 225374 - DNA, 19 bp, Homo sapiens
  siRNA target sequence for PDHA2 (NM_005390.3,835-853).
gtgttcgtgaggcaacaaa

SEQ ID NO: 225375 - DNA, 19 bp, Homo sapiens
  siRNA target sequence for PDHA2 (NM_005390.3,850-868).
caaaatttgcagctaacta

SEQ ID NO: 225376 - DNA, 19 bp, Homo sapiens
  siRNA target sequence for PDHA2 (NM_005390.3,905-923).
gcaaacctaccgttatcat

SEQ ID NO: 225377 - DNA, 19 bp, Homo sapiens
  siRNA target sequence for PDHA2 (NM_005390.3,988-1006).
gtaagagggatcctataat

SEQ ID NO: 225378 - DNA, 19 bp, Homo sapiens
  siRNA target sequence for PDHA2 (NM_005390.3,992-1010).
gagggatcctataataatt

SEQ ID NO: 225379 - DNA, 19 bp, Homo sapiens
  siRNA target sequence for PDHA2 (NM_005390.3,1162-1180).
gcagtgattcatcttttga

SEQ ID NO: 225380 - DNA, 19 bp, Homo sapiens
  siRNA target sequence for PDHA2 (NM_005390.3,1182-1200).
gttcgtggtgcaaatccat

SEQ ID NO: 225381 - DNA, 19 bp, Homo sapiens
  siRNA target sequence for PDHB (NM_000925.1,73-91).
ctgaagaggcgctttcact

SEQ ID NO: 225382 - DNA, 19 bp, Homo sapiens
  siRNA target sequence for PDHB (NM_000925.1,117-135).
gacagttcgtgatgctata

SEQ ID NO: 225383 - DNA, 19 bp, Homo sapiens
  siRNA target sequence for PDHB (NM_000925.1,208-226).
gatggggcatacaaggtta

SEQ ID NO: 225384 - DNA, 19 bp, Homo sapiens
  siRNA target sequence for PDHB (NM_000925.1,229-247).
cgagggctgtggaagaaat

SEQ ID NO: 225385 - DNA, 19 bp, Homo sapiens
  siRNA target sequence for PDHB (NM_000925.1,334-352).
cccatttgtgaatttatga

SEQ ID NO: 225386 - DNA, 19 bp, Homo sapiens
  siRNA target sequence for PDHB (NM_000925.1,343-361).
gaatttatgaccttcaatt

SEQ ID NO: 225387 - DNA, 19 bp, Homo sapiens
  siRNA target sequence for PDHB (NM_000925.1,400-418).
gccaagacctactacatgt

SEQ ID NO: 225388 - DNA, 19 bp, Homo sapiens
  siRNA target sequence for PDHB (NM_000925.1,538-556).
gtggtcagtccctggaatt

SEQ ID NO: 225389 - DNA, 19 bp, Homo sapiens
  siRNA target sequence for PDHB (NM_000925.1,561-579).
ggatgctaaaggacttatt

SEQ ID NO: 225390 - DNA, 19 bp, Homo sapiens
  siRNA target sequence for PDHB (NM_000925.1,562-580).
gatgctaaaggacttatta

SEQ ID NO: 225391 - DNA, 19 bp, Homo sapiens
  siRNA target sequence for PDHB (NM_000925.1,659-677).
cggaagctcagtcaaaaga

SEQ ID NO: 225392 - DNA, 19 bp, Homo sapiens
  siRNA target sequence for PDHB (NM_000925.1,660-678).
ggaagctcagtcaaaagat

SEQ ID NO: 225393 - DNA, 19 bp, Homo sapiens
  siRNA target sequence for PDHB (NM_000925.1,661-679).
gaagctcagtcaaaagatt

SEQ ID NO: 225394 - DNA, 19 bp, Homo sapiens
  siRNA target sequence for PDHB (NM_000925.1,667-685).
cagtcaaaagattttctga

SEQ ID NO: 225395 - DNA, 19 bp, Homo sapiens
  siRNA target sequence for PDHB (NM_000925.1,689-707).
ctattggaaaagccaaaat

SEQ ID NO: 225396 - DNA, 19 bp, Homo sapiens
  siRNA target sequence for PDHB (NM_000925.1,714-732).
gcaaggaacacatataact

SEQ ID NO: 225397 - DNA, 19 bp, Homo sapiens
  siRNA target sequence for PDHB (NM_000925.1,772-790).
gctgcagcagtgctatcta

SEQ ID NO: 225398 - DNA, 19 bp, Homo sapiens
  siRNA target sequence for PDHB (NM_000925.1,773-791).
ctgcagcagtgctatctaa

SEQ ID NO: 225399 - DNA, 19 bp, Homo sapiens
  siRNA target sequence for PDHB (NM_000925.1,776-794).
cagcagtgctatctaaaga

SEQ ID NO: 225400 - DNA, 19 bp, Homo sapiens
  siRNA target sequence for PDHB (NM_000925.1,799-817).
gttgaatgtgaggtgataa

SEQ ID NO: 225401 - DNA, 19 bp, Homo sapiens
  siRNA target sequence for PDHB (NM_000925.1,813-831).
gataaatatgcgtaccatt

SEQ ID NO: 225402 - DNA, 19 bp, Homo sapiens
  siRNA target sequence for PDHB (NM_000925.1,948-966).
ggaaggtcctgcgttcaat

SEQ ID NO: 225403 - DNA, 19 bp, Homo sapiens
  siRNA target sequence for PDHB (NM_000925.1,949-967).
gaaggtcctgcgttcaatt

SEQ ID NO: 225404 - DNA, 19 bp, Homo sapiens
  siRNA target sequence for PDHB (NM_000925.1,953-971).
gtcctgcgttcaatttcct

SEQ ID NO: 225405 - DNA, 19 bp, Homo sapiens
  siRNA target sequence for PDHB (NM_000925.1,1006-1024).
gtccctatgccttatgcaa

SEQ ID NO: 225406 - DNA, 19 bp, Homo sapiens
  siRNA target sequence for PDHB (NM_000925.1,1014-1032).
gccttatgcaaagattcta

SEQ ID NO: 225407 - DNA, 19 bp, Homo sapiens
  siRNA target sequence for PDHB (NM_000925.1,1016-1034).
cttatgcaaagattctaga

SEQ ID NO: 225408 - DNA, 19 bp, Homo sapiens
  siRNA target sequence for PDHB (NM_000925.1,1043-1061).
ctatacctcaggtcaaaga

SEQ ID NO: 225409 - DNA, 19 bp, Homo sapiens
  siRNA target sequence for BCKDHA (NM_000709.2,197-215).
ggcctcggcggagtttata

SEQ ID NO: 225410 - DNA, 19 bp, Homo sapiens
  siRNA target sequence for BCKDHA (NM_000709.2,199-217).
cctcggcggagtttataga

SEQ ID NO: 225411 - DNA, 19 bp, Homo sapiens
  siRNA target sequence for BCKDHA (NM_000709.2,200-218).
ctcggcggagtttatagat

SEQ ID NO: 225412 - DNA, 19 bp, Homo sapiens
  siRNA target sequence for BCKDHA (NM_000709.2,202-220).
cggcggagtttatagataa

SEQ ID NO: 225413 - DNA, 19 bp, Homo sapiens
  siRNA target sequence for BCKDHA (NM_000709.2,205-223).
cggagtttatagataagtt

SEQ ID NO: 225414 - DNA, 19 bp, Homo sapiens
  siRNA target sequence for BCKDHA (NM_000709.2,375-393).
gaccgcatcctctatgagt

SEQ ID NO: 225415 - DNA, 19 bp, Homo sapiens
  siRNA target sequence for BCKDHA (NM_000709.2,408-426).
cggatctccttctacatga

SEQ ID NO: 225416 - DNA, 19 bp, Homo sapiens
  siRNA target sequence for BCKDHA (NM_000709.2,531-549).
gactaccccctggaactat

SEQ ID NO: 225417 - DNA, 19 bp, Homo sapiens
  siRNA target sequence for BCKDHA (NM_000709.2,627-645).
cgccacttcgtcactatct

SEQ ID NO: 225418 - DNA, 19 bp, Homo sapiens
  siRNA target sequence for BCKDHA (NM_000709.2,718-736).
gggtcgtcatctgttactt

SEQ ID NO: 225419 - DNA, 19 bp, Homo sapiens
  siRNA target sequence for BCKDHA (NM_000709.2,766-784).
cccatgccggcttcaactt

SEQ ID NO: 225420 - DNA, 19 bp, Homo sapiens
  siRNA target sequence for BCKDHA (NM_000709.2,897-915).
gggtatggcatcatgtcaa

SEQ ID NO: 225421 - DNA, 19 bp, Homo sapiens
  siRNA target sequence for BCKDHA (NM_000709.2,898-916).
ggtatggcatcatgtcaat

SEQ ID NO: 225422 - DNA, 19 bp, Homo sapiens
  siRNA target sequence for BCKDHA (NM_000709.2,913-931).
caatccgcgtggatggtaa

SEQ ID NO: 225423 - DNA, 19 bp, Homo sapiens
  siRNA target sequence for BCKDHA (NM_000709.2,923-941).
ggatggtaatgatgtgttt

SEQ ID NO: 225424 - DNA, 19 bp, Homo sapiens
  siRNA target sequence for BCKDHA (NM_000709.2,933-951).
gatgtgtttgccgtataca

SEQ ID NO: 225425 - DNA, 19 bp, Homo sapiens
  siRNA target sequence for BCKDHA (NM_000709.2,1069-1087).
cggtggatgaggtcaatta

SEQ ID NO: 225426 - DNA, 19 bp, Homo sapiens
  siRNA target sequence for BCKDHA (NM_000709.2,1071-1089).
gtggatgaggtcaattact

SEQ ID NO: 225427 - DNA, 19 bp, Homo sapiens
  siRNA target sequence for BCKDHA (NM_000709.2,1114-1132).
cccggctgcggcactatct

SEQ ID NO: 225428 - DNA, 19 bp, Homo sapiens
  siRNA target sequence for BCKDHA (NM_000709.2,1344-1362).
ccactggatcacttcgata

SEQ ID NO: 225429 - DNA, 19 bp, Homo sapiens
  siRNA target sequence for BCKDHA (NM_000709.2,1345-1363).
cactggatcacttcgataa

SEQ ID NO: 225430 - DNA, 19 bp, Homo sapiens
  siRNA target sequence for BCKDHA (NM_000709.2,1347-1365).
ctggatcacttcgataagt

SEQ ID NO: 225431 - DNA, 19 bp, Homo sapiens
  siRNA target sequence for BCKDHB (NM_000056.2,192-210).
cggcaggtggctcatttta

SEQ ID NO: 225432 - DNA, 19 bp, Homo sapiens
  siRNA target sequence for BCKDHB (NM_000056.2,194-212).
gcaggtggctcattttact

SEQ ID NO: 225433 - DNA, 19 bp, Homo sapiens
  siRNA target sequence for BCKDHB (NM_000056.2,195-213).
caggtggctcattttactt

SEQ ID NO: 225434 - DNA, 19 bp, Homo sapiens
  siRNA target sequence for BCKDHB (NM_000056.2,235-253).
gggagtacgggcaaactca

SEQ ID NO: 225435 - DNA, 19 bp, Homo sapiens
  siRNA target sequence for BCKDHB (NM_000056.2,276-294).
gtaacaagtgccttggata

SEQ ID NO: 225436 - DNA, 19 bp, Homo sapiens
  siRNA target sequence for BCKDHB (NM_000056.2,309-327).
gatcctactgcagtaatat

SEQ ID NO: 225437 - DNA, 19 bp, Homo sapiens
  siRNA target sequence for BCKDHB (NM_000056.2,374-392).
cttgcgagacaaatatgga

SEQ ID NO: 225438 - DNA, 19 bp, Homo sapiens
  siRNA target sequence for BCKDHB (NM_000056.2,472-490).
ctgccattgcggaaattca

SEQ ID NO: 225439 - DNA, 19 bp, Homo sapiens
  siRNA target sequence for BCKDHB (NM_000056.2,474-492).
gccattgcggaaattcagt

SEQ ID NO: 225440 - DNA, 19 bp, Homo sapiens
  siRNA target sequence for BCKDHB (NM_000056.2,476-494).
cattgcggaaattcagttt

SEQ ID NO: 225441 - DNA, 19 bp, Homo sapiens
  siRNA target sequence for BCKDHB (NM_000056.2,509-527).
ccctgcatttgatcagatt

SEQ ID NO: 225442 - DNA, 19 bp, Homo sapiens
  siRNA target sequence for BCKDHB (NM_000056.2,622-640).
gggctctctatcattctca

SEQ ID NO: 225443 - DNA, 19 bp, Homo sapiens
  siRNA target sequence for BCKDHB (NM_000056.2,641-659).
gagtcctgaagcatttttt

SEQ ID NO: 225444 - DNA, 19 bp, Homo sapiens
  siRNA target sequence for BCKDHB (NM_000056.2,670-688).
caggaatcaaggtggttat

SEQ ID NO: 225445 - DNA, 19 bp, Homo sapiens
  siRNA target sequence for BCKDHB (NM_000056.2,708-726).
gccaaaggacttcttttgt

SEQ ID NO: 225446 - DNA, 19 bp, Homo sapiens
  siRNA target sequence for BCKDHB (NM_000056.2,790-808).
cggaagaagtccctataga

SEQ ID NO: 225447 - DNA, 19 bp, Homo sapiens
  siRNA target sequence for BCKDHB (NM_000056.2,829-847).
cccaggccgaagtcataca

SEQ ID NO: 225448 - DNA, 19 bp, Homo sapiens
  siRNA target sequence for BCKDHB (NM_000056.2,848-866).
ggaagggagtgatgttact

SEQ ID NO: 225449 - DNA, 19 bp, Homo sapiens
  siRNA target sequence for BCKDHB (NM_000056.2,854-872).
gagtgatgttactctagtt

SEQ ID NO: 225450 - DNA, 19 bp, Homo sapiens
  siRNA target sequence for BCKDHB (NM_000056.2,880-898).
gcactcaggttcatgtgat

SEQ ID NO: 225451 - DNA, 19 bp, Homo sapiens
  siRNA target sequence for BCKDHB (NM_000056.2,950-968).
cattgatctgaggactata

SEQ ID NO: 225452 - DNA, 19 bp, Homo sapiens
  siRNA target sequence for BCKDHB (NM_000056.2,957-975).
ctgaggactataatacctt

SEQ ID NO: 225453 - DNA, 19 bp, Homo sapiens
  siRNA target sequence for BCKDHB (NM_000056.2,973-991).
cttgggatgtggacacaat

SEQ ID NO: 225454 - DNA, 19 bp, Homo sapiens
  siRNA target sequence for BCKDHB (NM_000056.2,981-999).
gtggacacaatttgtaagt

SEQ ID NO: 225455 - DNA, 19 bp, Homo sapiens
  siRNA target sequence for BCKDHB (NM_000056.2,1053-1071).
ggctttgcatcggaaatca

SEQ ID NO: 225456 - DNA, 19 bp, Homo sapiens
  siRNA target sequence for BCKDHB (NM_000056.2,1083-1101).
caggaggaatgtttcttga

SEQ ID NO: 225457 - DNA, 19 bp, Homo sapiens
  siRNA target sequence for BCKDHB (NM_000056.2,1100-1118).
gaacctagaggctcctata

SEQ ID NO: 225458 - DNA, 19 bp, Homo sapiens
  siRNA target sequence for BCKDHB (NM_000056.2,1109-1127).
ggctcctatatcaagagta

SEQ ID NO: 225459 - DNA, 19 bp, Homo sapiens
  siRNA target sequence for BCKDHB (NM_000056.2,1110-1128).
gctcctatatcaagagtat

SEQ ID NO: 225460 - DNA, 19 bp, Homo sapiens
  siRNA target sequence for BCKDHB (NM_000056.2,1192-1210).
gttatgatgcccttcgaaa

SEQ ID NO: 225461 - DNA, 19 bp, Homo sapiens
  siRNA target sequence for BCKDHB (NM_000056.2,1206-1224).
cgaaaaatgatcaactatt

SEQ ID NO: 225462 - DNA, 19 bp, Homo sapiens
  siRNA target sequence for OGDH (NM_002541.1,71-89).
ggacttgtgctgctaagtt

SEQ ID NO: 225463 - DNA, 19 bp, Homo sapiens
  siRNA target sequence for OGDH (NM_002541.1,101-119).
cggcttcccagactgttaa

SEQ ID NO: 225464 - DNA, 19 bp, Homo sapiens
  siRNA target sequence for OGDH (NM_002541.1,143-161).
cagcagctaggacatttca

SEQ ID NO: 225465 - DNA, 19 bp, Homo sapiens
  siRNA target sequence for OGDH (NM_002541.1,160-178).
caacagattcggtgctatt

SEQ ID NO: 225466 - DNA, 19 bp, Homo sapiens
  siRNA target sequence for OGDH (NM_002541.1,212-230).
ggactagttcgaactatgt

SEQ ID NO: 225467 - DNA, 19 bp, Homo sapiens
  siRNA target sequence for OGDH (NM_002541.1,252-270).
gctggaaaaccccaaaagt

SEQ ID NO: 225468 - DNA, 19 bp, Homo sapiens
  siRNA target sequence for OGDH (NM_002541.1,262-280).
cccaaaagtgtacataagt

SEQ ID NO: 225469 - DNA, 19 bp, Homo sapiens
  siRNA target sequence for OGDH (NM_002541.1,264-282).
caaaagtgtacataagtca

SEQ ID NO: 225470 - DNA, 19 bp, Homo sapiens
  siRNA target sequence for OGDH (NM_002541.1,274-292).
cataagtcatgggacattt

SEQ ID NO: 225471 - DNA, 19 bp, Homo sapiens
  siRNA target sequence for OGDH (NM_002541.1,456-474).
catcagggcatatcagata

SEQ ID NO: 225472 - DNA, 19 bp, Homo sapiens
  siRNA target sequence for OGDH (NM_002541.1,538-556).
gtgcccgctgacattatct

SEQ ID NO: 225473 - DNA, 19 bp, Homo sapiens
  siRNA target sequence for OGDH (NM_002541.1,540-558).
gcccgctgacattatctca

SEQ ID NO: 225474 - DNA, 19 bp, Homo sapiens
  siRNA target sequence for OGDH (NM_002541.1,541-559).
cccgctgacattatctcat

SEQ ID NO: 225475 - DNA, 19 bp, Homo sapiens
  siRNA target sequence for OGDH (NM_002541.1,882-900).
gaagcgctttggtctagaa

SEQ ID NO: 225476 - DNA, 19 bp, Homo sapiens
  siRNA target sequence for OGDH (NM_002541.1,1041-1059).
gatcttctgtcaattcgat

SEQ ID NO: 225477 - DNA, 19 bp, Homo sapiens
  siRNA target sequence for OGDH (NM_002541.1,1138-1156).
gtcaccgacaggaacatta

SEQ ID NO: 225478 - DNA, 19 bp, Homo sapiens
  siRNA target sequence for OGDH (NM_002541.1,1142-1160).
ccgacaggaacattacctt

SEQ ID NO: 225479 - DNA, 19 bp, Homo sapiens
  siRNA target sequence for OGDH (NM_002541.1,1772-1790).
gatctaaagatgagaagat

SEQ ID NO: 225480 - DNA, 19 bp, Homo sapiens
  siRNA target sequence for OGDH (NM_002541.1,1877-1895).
cgggtctgacggaggatat

SEQ ID NO: 225481 - DNA, 19 bp, Homo sapiens
  siRNA target sequence for OGDH (NM_002541.1,1878-1896).
gggtctgacggaggatatt

SEQ ID NO: 225482 - DNA, 19 bp, Homo sapiens
  siRNA target sequence for OGDH (NM_002541.1,1880-1898).
gtctgacggaggatattct

SEQ ID NO: 225483 - DNA, 19 bp, Homo sapiens
  siRNA target sequence for OGDH (NM_002541.1,1927-1945).
gtgcctgtggaaaacttta

SEQ ID NO: 225484 - DNA, 19 bp, Homo sapiens
  siRNA target sequence for OGDH (NM_002541.1,1960-1978).
ctgagccggatcttgaaga

SEQ ID NO: 225485 - DNA, 19 bp, Homo sapiens
  siRNA target sequence for OGDH (NM_002541.1,2015-2033).
gggctctagcggagtacat

SEQ ID NO: 225486 - DNA, 19 bp, Homo sapiens
  siRNA target sequence for OGDH (NM_002541.1,2283-2301).
ctgggaagcccaatttggt

SEQ ID NO: 225487 - DNA, 19 bp, Homo sapiens
  siRNA target sequence for OGDH (NM_002541.1,2409-2427).
gggcatgggtccagaacat

SEQ ID NO: 225488 - DNA, 19 bp, Homo sapiens
  siRNA target sequence for OGDH (NM_002541.1,2410-2428).
ggcatgggtccagaacatt

SEQ ID NO: 225489 - DNA, 19 bp, Homo sapiens
  siRNA target sequence for OGDH (NM_002541.1,2501-2519).
ccaacttcgacatcaatca

SEQ ID NO: 225490 - DNA, 19 bp, Homo sapiens
  siRNA target sequence for OGDH (NM_002541.1,2508-2526).
cgacatcaatcagctatat

SEQ ID NO: 225491 - DNA, 19 bp, Homo sapiens
  siRNA target sequence for OGDH (NM_002541.1,2531-2549).
gcaattgggttgttgtcaa

SEQ ID NO: 225492 - DNA, 19 bp, Homo sapiens
  siRNA target sequence for OGDH (NM_002541.1,2603-2621).
cattccggaagccgttaat

SEQ ID NO: 225493 - DNA, 19 bp, Homo sapiens
  siRNA target sequence for OGDH (NM_002541.1,2608-2626).
cggaagccgttaattatct

SEQ ID NO: 225494 - DNA, 19 bp, Homo sapiens
  siRNA target sequence for OGDH (NM_002541.1,2663-2681).
gatccagctttgatgagat

SEQ ID NO: 225495 - DNA, 19 bp, Homo sapiens
  siRNA target sequence for OGDH (NM_002541.1,2766-2784).
ctgcaccggcaaagtgtat

SEQ ID NO: 225496 - DNA, 19 bp, Homo sapiens
  siRNA target sequence for OGDH (NM_002541.1,2768-2786).
gcaccggcaaagtgtatta

SEQ ID NO: 225497 - DNA, 19 bp, Homo sapiens
  siRNA target sequence for OGDH (NM_002541.1,2769-2787).
caccggcaaagtgtattat

SEQ ID NO: 225498 - DNA, 19 bp, Homo sapiens
  siRNA target sequence for OGDH (NM_002541.1,2937-2955).
caagaaccaaggctactat

SEQ ID NO: 225499 - DNA, 19 bp, Homo sapiens
  siRNA target sequence for DHTKD1 (NM_018706.4,359-377).
cttccacacggcaggatta

SEQ ID NO: 225500 - DNA, 19 bp, Homo sapiens
  siRNA target sequence for DHTKD1 (NM_018706.4,363-381).
cacacggcaggattattga

SEQ ID NO: 225501 - DNA, 19 bp, Homo sapiens
  siRNA target sequence for DHTKD1 (NM_018706.4,367-385).
cggcaggattattgaacat

SEQ ID NO: 225502 - DNA, 19 bp, Homo sapiens
  siRNA target sequence for DHTKD1 (NM_018706.4,403-421).
cacttgaggaagtgttagt

SEQ ID NO: 225503 - DNA, 19 bp, Homo sapiens
  siRNA target sequence for DHTKD1 (NM_018706.4,411-429).
gaagtgttagtctatctca

SEQ ID NO: 225504 - DNA, 19 bp, Homo sapiens
  siRNA target sequence for DHTKD1 (NM_018706.4,416-434).
gttagtctatctcaatcaa

SEQ ID NO: 225505 - DNA, 19 bp, Homo sapiens
  siRNA target sequence for DHTKD1 (NM_018706.4,522-540).
caaaaggagacgtttacca

SEQ ID NO: 225506 - DNA, 19 bp, Homo sapiens
  siRNA target sequence for DHTKD1 (NM_018706.4,539-557).
cacagaagagcgaaaacat

SEQ ID NO: 225507 - DNA, 19 bp, Homo sapiens
  siRNA target sequence for DHTKD1 (NM_018706.4,617-635).
gacagtgaagcgatatgga

SEQ ID NO: 225508 - DNA, 19 bp, Homo sapiens
  siRNA target sequence for DHTKD1 (NM_018706.4,637-655).
gcgaaggggctgaaagcat

SEQ ID NO: 225509 - DNA, 19 bp, Homo sapiens
  siRNA target sequence for DHTKD1 (NM_018706.4,652-670).
gcatgatgggctttttcca

SEQ ID NO: 225510 - DNA, 19 bp, Homo sapiens
  siRNA target sequence for DHTKD1 (NM_018706.4,697-715).
gcgggatcactgatgtcat

SEQ ID NO: 225511 - DNA, 19 bp, Homo sapiens
  siRNA target sequence for DHTKD1 (NM_018706.4,698-716).
cgggatcactgatgtcatt

SEQ ID NO: 225512 - DNA, 19 bp, Homo sapiens
  siRNA target sequence for DHTKD1 (NM_018706.4,699-717).
gggatcactgatgtcatta

SEQ ID NO: 225513 - DNA, 19 bp, Homo sapiens
  siRNA target sequence for DHTKD1 (NM_018706.4,700-718).
ggatcactgatgtcattat

SEQ ID NO: 225514 - DNA, 19 bp, Homo sapiens
  siRNA target sequence for DHTKD1 (NM_018706.4,701-719).
gatcactgatgtcattatt

SEQ ID NO: 225515 - DNA, 19 bp, Homo sapiens
  siRNA target sequence for DHTKD1 (NM_018706.4,894-912).
cccctccatgtgacaatgt

SEQ ID NO: 225516 - DNA, 19 bp, Homo sapiens
  siRNA target sequence for DHTKD1 (NM_018706.4,984-1002).
cgccaagacggcgattact

SEQ ID NO: 225517 - DNA, 19 bp, Homo sapiens
  siRNA target sequence for DHTKD1 (NM_018706.4,986-1004).
ccaagacggcgattactct

SEQ ID NO: 225518 - DNA, 19 bp, Homo sapiens
  siRNA target sequence for DHTKD1 (NM_018706.4,1109-1127).
caatctcccacatttcaga

SEQ ID NO: 225519 - DNA, 19 bp, Homo sapiens
  siRNA target sequence for DHTKD1 (NM_018706.4,1189-1207).
gaggaaggtcttctttata

SEQ ID NO: 225520 - DNA, 19 bp, Homo sapiens
  siRNA target sequence for DHTKD1 (NM_018706.4,1191-1209).
ggaaggtcttctttatact

SEQ ID NO: 225521 - DNA, 19 bp, Homo sapiens
  siRNA target sequence for DHTKD1 (NM_018706.4,1237-1255).
gtgccatcatccatgtcaa

SEQ ID NO: 225522 - DNA, 19 bp, Homo sapiens
  siRNA target sequence for DHTKD1 (NM_018706.4,1316-1334).
gttccgcaaggatgtgatt

SEQ ID NO: 225523 - DNA, 19 bp, Homo sapiens
  siRNA target sequence for DHTKD1 (NM_018706.4,1319-1337).
ccgcaaggatgtgattatt

SEQ ID NO: 225524 - DNA, 19 bp, Homo sapiens
  siRNA target sequence for DHTKD1 (NM_018706.4,1321-1339).
gcaaggatgtgattattga

SEQ ID NO: 225525 - DNA, 19 bp, Homo sapiens
  siRNA target sequence for DHTKD1 (NM_018706.4,1322-1340).
caaggatgtgattattgat

SEQ ID NO: 225526 - DNA, 19 bp, Homo sapiens
  siRNA target sequence for DHTKD1 (NM_018706.4,1484-1502).
ggaggaggtgtctgaaata

SEQ ID NO: 225527 - DNA, 19 bp, Homo sapiens
  siRNA target sequence for DHTKD1 (NM_018706.4,1511-1529).
ctactatgccaagttgaat

SEQ ID NO: 225528 - DNA, 19 bp, Homo sapiens
  siRNA target sequence for DHTKD1 (NM_018706.4,1523-1541).
gttgaatgatcacttaaat

SEQ ID NO: 225529 - DNA, 19 bp, Homo sapiens
  siRNA target sequence for DHTKD1 (NM_018706.4,1646-1664).
cgacctcctgcggtttgtt

SEQ ID NO: 225530 - DNA, 19 bp, Homo sapiens
  siRNA target sequence for DHTKD1 (NM_018706.4,1831-1849).
gtctaagtggccaagatgt

SEQ ID NO: 225531 - DNA, 19 bp, Homo sapiens
  siRNA target sequence for DHTKD1 (NM_018706.4,2015-2033).
cattgagagcccaaagtta

SEQ ID NO: 225532 - DNA, 19 bp, Homo sapiens
  siRNA target sequence for DHTKD1 (NM_018706.4,2049-2067).
gcacagtttggcgatttct

SEQ ID NO: 225533 - DNA, 19 bp, Homo sapiens
  siRNA target sequence for DHTKD1 (NM_018706.4,2054-2072).
gtttggcgatttcttcaat

SEQ ID NO: 225534 - DNA, 19 bp, Homo sapiens
  siRNA target sequence for DHTKD1 (NM_018706.4,2115-2133).
gccaagtggctcctacaaa

SEQ ID NO: 225535 - DNA, 19 bp, Homo sapiens
  siRNA target sequence for DHTKD1 (NM_018706.4,2183-2201).
ccactcatcctgtcgaata

SEQ ID NO: 225536 - DNA, 19 bp, Homo sapiens
  siRNA target sequence for DHTKD1 (NM_018706.4,2316-2334).
cagatggtccggaacttca

SEQ ID NO: 225537 - DNA, 19 bp, Homo sapiens
  siRNA target sequence for DHTKD1 (NM_018706.4,2321-2339).
ggtccggaacttcagaaaa

SEQ ID NO: 225538 - DNA, 19 bp, Homo sapiens
  siRNA target sequence for DHTKD1 (NM_018706.4,2381-2399).
ggcagccgtgtcaactctt

SEQ ID NO: 225539 - DNA, 19 bp, Homo sapiens
  siRNA target sequence for DHTKD1 (NM_018706.4,2386-2404).
ccgtgtcaactcttcaaga

SEQ ID NO: 225540 - DNA, 19 bp, Homo sapiens
  siRNA target sequence for DHTKD1 (NM_018706.4,2409-2427).
gcaccaggaacaacattta

SEQ ID NO: 225541 - DNA, 19 bp, Homo sapiens
  siRNA target sequence for DHTKD1 (NM_018706.4,2410-2428).
caccaggaacaacatttaa

SEQ ID NO: 225542 - DNA, 19 bp, Homo sapiens
  siRNA target sequence for DHTKD1 (NM_018706.4,2429-2447).
cccggtcattggtgattca

SEQ ID NO: 225543 - DNA, 19 bp, Homo sapiens
  siRNA target sequence for DHTKD1 (NM_018706.4,2430-2448).
ccggtcattggtgattcat

SEQ ID NO: 225544 - DNA, 19 bp, Homo sapiens
  siRNA target sequence for DHTKD1 (NM_018706.4,2485-2503).
gctccggcaaacatttcta

SEQ ID NO: 225545 - DNA, 19 bp, Homo sapiens
  siRNA target sequence for DHTKD1 (NM_018706.4,2506-2524).
ccctggtgaaacaaagaga

SEQ ID NO: 225546 - DNA, 19 bp, Homo sapiens
  siRNA target sequence for DHTKD1 (NM_018706.4,2581-2599).
ccttcccgttggattcttt

SEQ ID NO: 225547 - DNA, 19 bp, Homo sapiens
  siRNA target sequence for DHTKD1 (NM_018706.4,2582-2600).
cttcccgttggattcttta

SEQ ID NO: 225548 - DNA, 19 bp, Homo sapiens
  siRNA target sequence for DHTKD1 (NM_018706.4,2601-2619).
cagcaagagatgagcaaat

SEQ ID NO: 225549 - DNA, 19 bp, Homo sapiens
  siRNA target sequence for DHTKD1 (NM_018706.4,2621-2639).
caaacatgttaaagatcat

SEQ ID NO: 225550 - DNA, 19 bp, Homo sapiens
  siRNA target sequence for DHTKD1 (NM_018706.4,2749-2767).
cagtacccgctgtaggaat

SEQ ID NO: 225551 - DNA, 19 bp, Homo sapiens
  siRNA target sequence for FLJ10851 (NM_018245.1,396-414).
cggaccaagaccagcaaat

SEQ ID NO: 225552 - DNA, 19 bp, Homo sapiens
  siRNA target sequence for FLJ10851 (NM_018245.1,397-415).
ggaccaagaccagcaaatt

SEQ ID NO: 225553 - DNA, 19 bp, Homo sapiens
  siRNA target sequence for FLJ10851 (NM_018245.1,539-557).
cttgatcacaaccattgat

SEQ ID NO: 225554 - DNA, 19 bp, Homo sapiens
  siRNA target sequence for FLJ10851 (NM_018245.1,611-629).
gccgacaaccaccttcatt

SEQ ID NO: 225555 - DNA, 19 bp, Homo sapiens
  siRNA target sequence for FLJ10851 (NM_018245.1,826-844).
gctccatgaggtttgaaga

SEQ ID NO: 225556 - DNA, 19 bp, Homo sapiens
  siRNA target sequence for FLJ10851 (NM_018245.1,829-847).
ccatgaggtttgaagactt

SEQ ID NO: 225557 - DNA, 19 bp, Homo sapiens
  siRNA target sequence for FLJ10851 (NM_018245.1,890-908).
gggctgtgaagtgatgatt

SEQ ID NO: 225558 - DNA, 19 bp, Homo sapiens
  siRNA target sequence for FLJ10851 (NM_018245.1,941-959).
cgagatggggattgagaat

SEQ ID NO: 225559 - DNA, 19 bp, Homo sapiens
  siRNA target sequence for FLJ10851 (NM_018245.1,949-967).
ggattgagaatgtcatctt

SEQ ID NO: 225560 - DNA, 19 bp, Homo sapiens
  siRNA target sequence for FLJ10851 (NM_018245.1,1291-1309).
ctggccagggcgtggtata

SEQ ID NO: 225561 - DNA, 19 bp, Homo sapiens
  siRNA target sequence for FLJ10851 (NM_018245.1,1294-1312).
gccagggcgtggtatatga

SEQ ID NO: 225562 - DNA, 19 bp, Homo sapiens
  siRNA target sequence for FLJ10851 (NM_018245.1,1296-1314).
cagggcgtggtatatgaga

SEQ ID NO: 225563 - DNA, 19 bp, Homo sapiens
  siRNA target sequence for FLJ10851 (NM_018245.1,1456-1474).
cgcctatcttccatgtgaa

SEQ ID NO: 225564 - DNA, 19 bp, Homo sapiens
  siRNA target sequence for FLJ10851 (NM_018245.1,1482-1500).
gacccagaggctgtgatat

SEQ ID NO: 225565 - DNA, 19 bp, Homo sapiens
  siRNA target sequence for FLJ10851 (NM_018245.1,1484-1502).
cccagaggctgtgatatat

SEQ ID NO: 225566 - DNA, 19 bp, Homo sapiens
  siRNA target sequence for FLJ10851 (NM_018245.1,1519-1537).
ccgaatggagaaacacttt

SEQ ID NO: 225567 - DNA, 19 bp, Homo sapiens
  siRNA target sequence for FLJ10851 (NM_018245.1,1576-1594).
ggcgtggccacaatgagat

SEQ ID NO: 225568 - DNA, 19 bp, Homo sapiens
  siRNA target sequence for FLJ10851 (NM_018245.1,1758-1776).
ggcaggtccaaggataaaa

SEQ ID NO: 225569 - DNA, 19 bp, Homo sapiens
  siRNA target sequence for FLJ10851 (NM_018245.1,1765-1783).
ccaaggataaaaagattct

SEQ ID NO: 225570 - DNA, 19 bp, Homo sapiens
  siRNA target sequence for FLJ10851 (NM_018245.1,2005-2023).
gggcgttggcagagtacat

SEQ ID NO: 225571 - DNA, 19 bp, Homo sapiens
  siRNA target sequence for FLJ10851 (NM_018245.1,2141-2159).
gacgtgtgtgcctatgaat

SEQ ID NO: 225572 - DNA, 19 bp, Homo sapiens
  siRNA target sequence for FLJ10851 (NM_018245.1,2143-2161).
cgtgtgtgcctatgaatca

SEQ ID NO: 225573 - DNA, 19 bp, Homo sapiens
  siRNA target sequence for FLJ10851 (NM_018245.1,2144-2162).
gtgtgtgcctatgaatcat

SEQ ID NO: 225574 - DNA, 19 bp, Homo sapiens
  siRNA target sequence for FLJ10851 (NM_018245.1,2542-2560).
ccacaccggccaactactt

SEQ ID NO: 225575 - DNA, 19 bp, Homo sapiens
  siRNA target sequence for FLJ10851 (NM_018245.1,2595-2613).
cgcaagccgctgattatct

SEQ ID NO: 225576 - DNA, 19 bp, Homo sapiens
  siRNA target sequence for FLJ10851 (NM_018245.1,2596-2614).
gcaagccgctgattatctt

SEQ ID NO: 225577 - DNA, 19 bp, Homo sapiens
  siRNA target sequence for FLJ10851 (NM_018245.1,2606-2624).
gattatcttcacacctaaa

SEQ ID NO: 225578 - DNA, 19 bp, Homo sapiens
  siRNA target sequence for FLJ10851 (NM_018245.1,2755-2773).
gcacgggaaaggtgtacta

SEQ ID NO: 225579 - DNA, 19 bp, Homo sapiens
  siRNA target sequence for FLJ10851 (NM_018245.1,2756-2774).
cacgggaaaggtgtactat

SEQ ID NO: 225580 - DNA, 19 bp, Homo sapiens
  siRNA target sequence for FLJ10851 (NM_018245.1,2758-2776).
cgggaaaggtgtactatga

SEQ ID NO: 225581 - DNA, 19 bp, Homo sapiens
  siRNA target sequence for FLJ10851 (NM_018245.1,2980-2998).
gcgcacggcccatatggta

SEQ ID NO: 225582 - DNA, 19 bp, Homo sapiens
  siRNA target sequence for FLJ10851 (NM_018245.1,2981-2999).
cgcacggcccatatggtat

SEQ ID NO: 225583 - DNA, 19 bp, Homo sapiens
  siRNA target sequence for FLJ10851 (NM_018245.1,3096-3114).
gcctttgagggcaagacat

SEQ ID NO: 225584 - DNA, 19 bp, Homo sapiens
  siRNA target sequence for COX11 (NM_004375.2,70-88).
gatggaggtgcgttccttt

SEQ ID NO: 225585 - DNA, 19 bp, Homo sapiens
  siRNA target sequence for COX11 (NM_004375.2,272-290).
gagctcgaaccctttcaca

SEQ ID NO: 225586 - DNA, 19 bp, Homo sapiens
  siRNA target sequence for COX15 (NM_004376.3,177-195).
gagcacagtgtgattgcat

SEQ ID NO: 225587 - DNA, 19 bp, Homo sapiens
  siRNA target sequence for COX15 (NM_004376.3,380-398).
ggcctctcgatggtagatt

SEQ ID NO: 225588 - DNA, 19 bp, Homo sapiens
  siRNA target sequence for COX15 (NM_004376.3,388-406).
gatggtagattggcattta

SEQ ID NO: 225589 - DNA, 19 bp, Homo sapiens
  siRNA target sequence for COX15 (NM_004376.3,466-484).
ccagcaatttccagaattt

SEQ ID NO: 225590 - DNA, 19 bp, Homo sapiens
  siRNA target sequence for COX15 (NM_004376.3,619-637).
gctcagccgtggcatgaaa

SEQ ID NO: 225591 - DNA, 19 bp, Homo sapiens
  siRNA target sequence for COX15 (NM_004376.3,631-649).
catgaaaggacgtgttctt

SEQ ID NO: 225592 - DNA, 19 bp, Homo sapiens
  siRNA target sequence for COX15 (NM_004376.3,697-715).
ggtgaaaagtggactagaa

SEQ ID NO: 225593 - DNA, 19 bp, Homo sapiens
  siRNA target sequence for COX15 (NM_004376.3,777-795).
gatcagccctggttcttta

SEQ ID NO: 225594 - DNA, 19 bp, Homo sapiens
  siRNA target sequence for COX15 (NM_004376.3,896-914).
gcaggtctggtgttcctta

SEQ ID NO: 225595 - DNA, 19 bp, Homo sapiens
  siRNA target sequence for COX15 (NM_004376.3,918-936).
ccctctcaggggcttttgt

SEQ ID NO: 225596 - DNA, 19 bp, Homo sapiens
  siRNA target sequence for COX15 (NM_004376.3,1022-1040).
cccatcctgaggaatgttt

SEQ ID NO: 225597 - DNA, 19 bp, Homo sapiens
  siRNA target sequence for COX15 (NM_004376.3,1073-1091).
cggattctgggaatcactt

SEQ ID NO: 225598 - DNA, 19 bp, Homo sapiens
  siRNA target sequence for COX15 (NM_004376.3,1101-1119).
ccattacagtgctctactt

SEQ ID NO: 225599 - DNA, 19 bp, Homo sapiens
  siRNA target sequence for COX15 (NM_004376.3,1174-1192).
gctggctttggcgtataca

SEQ ID NO: 225600 - DNA, 19 bp, Homo sapiens
  siRNA target sequence for COX15 (NM_004376.3,1196-1214).
ggccctgtcttattcaact

SEQ ID NO: 225601 - DNA, 19 bp, Homo sapiens
  siRNA target sequence for COX15 (NM_078470.2,1212-1230).
gcacgctgctgatgtatgt

SEQ ID NO: 225602 - DNA, 19 bp, Homo sapiens
  siRNA target sequence for COX4I1 (NM_001861.2,232-250).
ctcatgaaagtgttgtgaa

SEQ ID NO: 225603 - DNA, 19 bp, Homo sapiens
  siRNA target sequence for COX4I1 (NM_001861.2,246-264).
gtgaagagcgaagactttt

SEQ ID NO: 225604 - DNA, 19 bp, Homo sapiens
  siRNA target sequence for COX4I1 (NM_001861.2,549-567).
ctcccgcaaagctttgaca

SEQ ID NO: 225605 - DNA, 19 bp, Homo sapiens
  siRNA target sequence for COX4I1 (NM_001861.2,637-655).
ccaagtgggactacgaaaa

SEQ ID NO: 225606 - DNA, 19 bp, Homo sapiens
  siRNA target sequence for COX4I2 (NM_032609.2,421-439).
gcagctctggtgatttggt

SEQ ID NO: 225607 - DNA, 19 bp, Homo sapiens
  siRNA target sequence for COX4I2 (NM_032609.2,440-458).
ggcagcgggtctacgtatt

SEQ ID NO: 225608 - DNA, 19 bp, Homo sapiens
  siRNA target sequence for COX4I2 (NM_032609.2,441-459).
gcagcgggtctacgtattt

SEQ ID NO: 225609 - DNA, 19 bp, Homo sapiens
  siRNA target sequence for COX4I2 (NM_032609.2,444-462).
gcgggtctacgtatttcct

SEQ ID NO: 225610 - DNA, 19 bp, Homo sapiens
  siRNA target sequence for COX4I2 (NM_032609.2,554-572).
cccgctgggactatgagaa

SEQ ID NO: 225611 - DNA, 19 bp, Homo sapiens
  siRNA target sequence for COX5A (NM_004255.2,123-141).
cagtcagttcgctgctatt

SEQ ID NO: 225612 - DNA, 19 bp, Homo sapiens
  siRNA target sequence for COX5A (NM_004255.2,177-195).
gctcgctgggtaacatact

SEQ ID NO: 225613 - DNA, 19 bp, Homo sapiens
  siRNA target sequence for COX5A (NM_004255.2,178-196).
ctcgctgggtaacatactt

SEQ ID NO: 225614 - DNA, 19 bp, Homo sapiens
  siRNA target sequence for COX5A (NM_004255.2,180-198).
cgctgggtaacatacttca

SEQ ID NO: 225615 - DNA, 19 bp, Homo sapiens
  siRNA target sequence for COX5A (NM_004255.2,181-199).
gctgggtaacatacttcaa

SEQ ID NO: 225616 - DNA, 19 bp, Homo sapiens
  siRNA target sequence for COX5A (NM_004255.2,184-202).
gggtaacatacttcaacaa

SEQ ID NO: 225617 - DNA, 19 bp, Homo sapiens
  siRNA target sequence for COX5A (NM_004255.2,194-212).
cttcaacaagccagatata

SEQ ID NO: 225618 - DNA, 19 bp, Homo sapiens
  siRNA target sequence for COX5A (NM_004255.2,197-215).
caacaagccagatatagat

SEQ ID NO: 225619 - DNA, 19 bp, Homo sapiens
  siRNA target sequence for COX5A (NM_004255.2,227-245).
gcgtaaagggataaacaca

SEQ ID NO: 225620 - DNA, 19 bp, Homo sapiens
  siRNA target sequence for COX5A (NM_004255.2,234-252).
gggataaacacacttgtta

SEQ ID NO: 225621 - DNA, 19 bp, Homo sapiens
  siRNA target sequence for COX5A (NM_004255.2,242-260).
cacacttgttacctatgat

SEQ ID NO: 225622 - DNA, 19 bp, Homo sapiens
  siRNA target sequence for COX5A (NM_004255.2,244-262).
cacttgttacctatgatat

SEQ ID NO: 225623 - DNA, 19 bp, Homo sapiens
  siRNA target sequence for COX5A (NM_004255.2,298-316).
gggcatgcagacggttaaa

SEQ ID NO: 225624 - DNA, 19 bp, Homo sapiens
  siRNA target sequence for COX5A (NM_004255.2,299-317).
ggcatgcagacggttaaat

SEQ ID NO: 225625 - DNA, 19 bp, Homo sapiens
  siRNA target sequence for COX5A (NM_004255.2,301-319).
catgcagacggttaaatga

SEQ ID NO: 225626 - DNA, 19 bp, Homo sapiens
  siRNA target sequence for COX5A (NM_004255.2,304-322).
gcagacggttaaatgattt

SEQ ID NO: 225627 - DNA, 19 bp, Homo sapiens
  siRNA target sequence for COX5A (NM_004255.2,305-323).
cagacggttaaatgatttt

SEQ ID NO: 225628 - DNA, 19 bp, Homo sapiens
  siRNA target sequence for COX5A (NM_004255.2,402-420).
gaacttagaccaactttaa

SEQ ID NO: 225629 - DNA, 19 bp, Homo sapiens
  siRNA target sequence for COX5A (NM_004255.2,409-427).
gaccaactttaaatgaact

SEQ ID NO: 225630 - DNA, 19 bp, Homo sapiens
  siRNA target sequence for COX5B (NM_001862.2,136-154).
gtgttcccactgatgaaga

SEQ ID NO: 225631 - DNA, 19 bp, Homo sapiens
  siRNA target sequence for COX5B (NM_001862.2,247-265).
ccagggaagaccctaattt

SEQ ID NO: 225632 - DNA, 19 bp, Homo sapiens
  siRNA target sequence for COX5B (NM_001862.2,274-292).
ccatctccaacaagagaat

SEQ ID NO: 225633 - DNA, 19 bp, Homo sapiens
  siRNA target sequence for COX5B (NM_001862.2,278-296).
ctccaacaagagaatagta

SEQ ID NO: 225634 - DNA, 19 bp, Homo sapiens
  siRNA target sequence for COX5B (NM_001862.2,372-390).
cgctgtggagcccattaca

SEQ ID NO: 225635 - DNA, 19 bp, Homo sapiens
  siRNA target sequence for COX6B (NM_001863.3,288-306).
ggcaatgaccgctaaagga

SEQ ID NO: 225636 - DNA, 19 bp, Homo sapiens
  siRNA target sequence for COX6B (NM_001863.3,298-316).
gctaaaggaggcgatatct

SEQ ID NO: 225637 - DNA, 19 bp, Homo sapiens
  siRNA target sequence for COX6C (NM_004374.2,108-126).
caggcgtctgcgaaatcat

SEQ ID NO: 225638 - DNA, 19 bp, Homo sapiens
  siRNA target sequence for COX6C (NM_004374.2,110-128).
ggcgtctgcgaaatcatat

SEQ ID NO: 225639 - DNA, 19 bp, Homo sapiens
  siRNA target sequence for COX6C (NM_004374.2,174-192).
gtttcgtgtggctgatcaa

SEQ ID NO: 225640 - DNA, 19 bp, Homo sapiens
  siRNA target sequence for COX6C (NM_004374.2,178-196).
cgtgtggctgatcaaagaa

SEQ ID NO: 225641 - DNA, 19 bp, Homo sapiens
  siRNA target sequence for COX6C (NM_004374.2,179-197).
gtgtggctgatcaaagaaa

SEQ ID NO: 225642 - DNA, 19 bp, Homo sapiens
  siRNA target sequence for COX6C (NM_004374.2,181-199).
gtggctgatcaaagaaaga

SEQ ID NO: 225643 - DNA, 19 bp, Homo sapiens
  siRNA target sequence for COX6C (NM_004374.2,209-227).
cagatttctacagaaacta

SEQ ID NO: 225644 - DNA, 19 bp, Homo sapiens
  siRNA target sequence for COX7A1 (NM_001864.2,535-553).
cgagtgcgcgagaaacaga

SEQ ID NO: 225645 - DNA, 19 bp, Homo sapiens
  siRNA target sequence for COX7A2L (NM_004718.2,72-90).
gtggcttcacgcagaagtt

SEQ ID NO: 225646 - DNA, 19 bp, Homo sapiens
  siRNA target sequence for COX7A2L (NM_004718.2,173-191).
gccacaccaactaaactga

SEQ ID NO: 225647 - DNA, 19 bp, Homo sapiens
  siRNA target sequence for COX7A2L (NM_004718.2,193-211).
ctccgattccacagtgtat

SEQ ID NO: 225648 - DNA, 19 bp, Homo sapiens
  siRNA target sequence for COX7A2L (NM_004718.2,195-213).
ccgattccacagtgtatga

SEQ ID NO: 225649 - DNA, 19 bp, Homo sapiens
  siRNA target sequence for COX7A2L (NM_004718.2,196-214).
cgattccacagtgtatgat

SEQ ID NO: 225650 - DNA, 19 bp, Homo sapiens
  siRNA target sequence for COX7A2L (NM_004718.2,197-215).
gattccacagtgtatgatt

SEQ ID NO: 225651 - DNA, 19 bp, Homo sapiens
  siRNA target sequence for COX7A2L (NM_004718.2,202-220).
cacagtgtatgattatgct

SEQ ID NO: 225652 - DNA, 19 bp, Homo sapiens
  siRNA target sequence for COX7A2L (NM_004718.2,233-251).
gttccagagctacaaaagt

SEQ ID NO: 225653 - DNA, 19 bp, Homo sapiens
  siRNA target sequence for COX7A2L (NM_004718.2,237-255).
cagagctacaaaagttttt

SEQ ID NO: 225654 - DNA, 19 bp, Homo sapiens
  siRNA target sequence for COX7A2L (NM_004718.2,338-356).
gtgggagggaccatctact

SEQ ID NO: 225655 - DNA, 19 bp, Homo sapiens
  siRNA target sequence for COX7A3 (NM_183003.1,265-283).
gcaatcacttggttcacat

SEQ ID NO: 225656 - DNA, 19 bp, Homo sapiens
  siRNA target sequence for COX7A3 (NM_183003.1,266-284).
caatcacttggttcacatt

SEQ ID NO: 225657 - DNA, 19 bp, Homo sapiens
  siRNA target sequence for COX7B (NM_001866.2,102-120).
ggtcaaaagcgcactaaat

SEQ ID NO: 225658 - DNA, 19 bp, Homo sapiens
  siRNA target sequence for COX7B (NM_001866.2,105-123).
caaaagcgcactaaatcgt

SEQ ID NO: 225659 - DNA, 19 bp, Homo sapiens
  siRNA target sequence for COX7B (NM_001866.2,228-246).
cactttctgtattgttaca

SEQ ID NO: 225660 - DNA, 19 bp, Homo sapiens
  siRNA target sequence for COX7B (NM_001866.2,249-267).
gacatatgtagcaacacaa

SEQ ID NO: 225661 - DNA, 19 bp, Homo sapiens
  siRNA target sequence for COX7B (NM_001866.2,260-278).
caacacaagtcggaataga

SEQ ID NO: 225662 - DNA, 19 bp, Homo sapiens
  siRNA target sequence for COX7C (NM_001867.2,149-167).
ggagggccctgggaagaat

SEQ ID NO: 225663 - DNA, 19 bp, Homo sapiens
  siRNA target sequence for COX7C (NM_001867.2,150-168).
gagggccctgggaagaatt

SEQ ID NO: 225664 - DNA, 19 bp, Homo sapiens
  siRNA target sequence for COX7C (NM_001867.2,193-211).
ggtcgttactagctaagat

SEQ ID NO: 225665 - DNA, 19 bp, Homo sapiens
  siRNA target sequence for COX7C (NM_001867.2,218-236).
gtactttggatctgcattt

SEQ ID NO: 225666 - DNA, 19 bp, Homo sapiens
  siRNA target sequence for COX7C (NM_001867.2,221-239).
ctttggatctgcatttgct

SEQ ID NO: 225667 - DNA, 19 bp, Homo sapiens
  siRNA target sequence for COX7C (NM_001867.2,238-256).
ctacacccttccttgtagt

SEQ ID NO: 225668 - DNA, 19 bp, Homo sapiens
  siRNA target sequence for CYB5 (NM_001914.1,14-32).
cggacgaggccgtgaagta

SEQ ID NO: 225669 - DNA, 19 bp, Homo sapiens
  siRNA target sequence for CYB5 (NM_001914.1,19-37).
gaggccgtgaagtactaca

SEQ ID NO: 225670 - DNA, 19 bp, Homo sapiens
  siRNA target sequence for CYB5 (NM_001914.1,91-109).
caccacaaggtgtacgatt

SEQ ID NO: 225671 - DNA, 19 bp, Homo sapiens
  siRNA target sequence for CYB5 (NM_001914.1,94-112).
cacaaggtgtacgatttga

SEQ ID NO: 225672 - DNA, 19 bp, Homo sapiens
  siRNA target sequence for CYB5 (NM_001914.1,100-118).
gtgtacgatttgaccaaat

SEQ ID NO: 225673 - DNA, 19 bp, Homo sapiens
  siRNA target sequence for CYB5 (NM_001914.1,170-188).
gtgacgctactgagaactt

SEQ ID NO: 225674 - DNA, 19 bp, Homo sapiens
  siRNA target sequence for CYB5 (NM_001914.1,214-232).
gccagggaaatgtccaaaa

SEQ ID NO: 225675 - DNA, 19 bp, Homo sapiens
  siRNA target sequence for CYB5 (NM_001914.1,218-236).
gggaaatgtccaaaacatt

SEQ ID NO: 225676 - DNA, 19 bp, Homo sapiens
  siRNA target sequence for CYB5 (NM_001914.1,225-243).
gtccaaaacattcatcatt

SEQ ID NO: 225677 - DNA, 19 bp, Homo sapiens
  siRNA target sequence for CYB5 (NM_001914.1,259-277).
gatgacagaccaaagttaa

SEQ ID NO: 225678 - DNA, 19 bp, Homo sapiens
  siRNA target sequence for CYB5 (NM_001914.1,262-280).
gacagaccaaagttaaaca

SEQ ID NO: 225679 - DNA, 19 bp, Homo sapiens
  siRNA target sequence for SURF1 (NM_003172.2,572-590).
gttcgttcccaggaagaaa

SEQ ID NO: 225680 - DNA, 19 bp, Homo sapiens
  siRNA target sequence for SURF1 (NM_003172.2,750-768).
ggcgcagagcccatcttca

SEQ ID NO: 225681 - DNA, 19 bp, Homo sapiens
  siRNA target sequence for SURF1 (NM_003172.2,751-769).
gcgcagagcccatcttcat

SEQ ID NO: 225682 - DNA, 19 bp, Homo sapiens
  siRNA target sequence for SURF1 (NM_003172.2,752-770).
cgcagagcccatcttcatt

SEQ ID NO: 225683 - DNA, 19 bp, Homo sapiens
  siRNA target sequence for SURF1 (NM_003172.2,886-904).
catcctacctgtggtttaa

SEQ ID NO: 225684 - DNA, 19 bp, Homo sapiens
  siRNA target sequence for FLJ13852 (NM_023078.1,153-171).
ccaacagacaggaacctat

SEQ ID NO: 225685 - DNA, 19 bp, Homo sapiens
  siRNA target sequence for FLJ13852 (NM_023078.1,161-179).
caggaacctatgtcacttt

SEQ ID NO: 225686 - DNA, 19 bp, Homo sapiens
  siRNA target sequence for FLJ13852 (NM_023078.1,163-181).
ggaacctatgtcactttca

SEQ ID NO: 225687 - DNA, 19 bp, Homo sapiens
  siRNA target sequence for FLJ13852 (NM_023078.1,601-619).
ctgaaggagccgtcaagat

SEQ ID NO: 225688 - DNA, 19 bp, Homo sapiens
  siRNA target sequence for FLJ13852 (NM_023078.1,737-755).
gggtggcaccaccatctat

SEQ ID NO: 225689 - DNA, 19 bp, Homo sapiens
  siRNA target sequence for LOC122945 (NM_138791.1,24-42).
gtccctgcagtttgagtat

SEQ ID NO: 225690 - DNA, 19 bp, Homo sapiens
  siRNA target sequence for LOC122945 (NM_138791.1,58-76).
gatcgtatctggctgtatt

SEQ ID NO: 225691 - DNA, 19 bp, Homo sapiens
  siRNA target sequence for LOC122945 (NM_138791.1,86-104).
gttctcggggactgatgat

SEQ ID NO: 225692 - DNA, 19 bp, Homo sapiens
  siRNA target sequence for LOC122945 (NM_138791.1,125-143).
ccttcttctgcaaactatt

SEQ ID NO: 225693 - DNA, 19 bp, Homo sapiens
  siRNA target sequence for LOC122945 (NM_138791.1,132-150).
ctgcaaactattatataat

SEQ ID NO: 225694 - DNA, 19 bp, Homo sapiens
  siRNA target sequence for LOC122945 (NM_138791.1,179-197).
gttccagacatctctcaat

SEQ ID NO: 225695 - DNA, 19 bp, Homo sapiens
  siRNA target sequence for LOC122945 (NM_138791.1,192-210).
ctcaattggctcccttaat

SEQ ID NO: 225696 - DNA, 19 bp, Homo sapiens
  siRNA target sequence for LOC122945 (NM_138791.1,218-236).
ctcctgaagagtttaaggt

SEQ ID NO: 225697 - DNA, 19 bp, Homo sapiens
  siRNA target sequence for LOC122945 (NM_138791.1,368-386).
gaatcaaatgcttttacca

SEQ ID NO: 225698 - DNA, 19 bp, Homo sapiens
  siRNA target sequence for LOC122945 (NM_138791.1,404-422).
gttgggccgatgtgatatt

SEQ ID NO: 225699 - DNA, 19 bp, Homo sapiens
  siRNA target sequence for LOC122945 (NM_138791.1,407-425).
gggccgatgtgatattcct

SEQ ID NO: 225700 - DNA, 19 bp, Homo sapiens
  siRNA target sequence for LOC122945 (NM_138791.1,436-454).
ccgtctcagctgcctaata

SEQ ID NO: 225701 - DNA, 19 bp, Homo sapiens
  siRNA target sequence for LOC122945 (NM_138791.1,437-455).
cgtctcagctgcctaatat

SEQ ID NO: 225702 - DNA, 19 bp, Homo sapiens
  siRNA target sequence for LOC122945 (NM_138791.1,448-466).
cctaatatctgcgtagaaa

SEQ ID NO: 225703 - DNA, 19 bp, Homo sapiens
  siRNA target sequence for LOC122945 (NM_138791.1,449-467).
ctaatatctgcgtagaaat

SEQ ID NO: 225704 - DNA, 19 bp, Homo sapiens
  siRNA target sequence for LOC122945 (NM_138791.1,527-545).
ccaggctgaaactactgtt

SEQ ID NO: 225705 - DNA, 19 bp, Homo sapiens
  siRNA target sequence for LOC122945 (NM_138791.1,564-582).
gcggcctcagtatcagtat

SEQ ID NO: 225706 - DNA, 19 bp, Homo sapiens
  siRNA target sequence for LOC122945 (NM_138791.1,636-654).
ccaagatcctacgattctt

SEQ ID NO: 225707 - DNA, 19 bp, Homo sapiens
  siRNA target sequence for LOC122945 (NM_138791.1,679-697).
gctggtcacggctcaacat

SEQ ID NO: 225708 - DNA, 19 bp, Homo sapiens
  siRNA target sequence for LOC122945 (NM_138791.1,683-701).
gtcacggctcaacatattt

SEQ ID NO: 225709 - DNA, 19 bp, Homo sapiens
  siRNA target sequence for LOC122945 (NM_138791.1,685-703).
cacggctcaacatatttct

SEQ ID NO: 225710 - DNA, 19 bp, Homo sapiens
  siRNA target sequence for LOC122945 (NM_138791.1,730-748).
gttggcccattgctatctt

SEQ ID NO: 225711 - DNA, 19 bp, Homo sapiens
  siRNA target sequence for P5CR2 (NM_013328.2,227-245).
cctgtcggctcacaagata

SEQ ID NO: 225712 - DNA, 19 bp, Homo sapiens
  siRNA target sequence for P5CR2 (NM_013328.2,230-248).
gtcggctcacaagataata

SEQ ID NO: 225713 - DNA, 19 bp, Homo sapiens
  siRNA target sequence for P5CR2 (NM_013328.2,685-703).
ggcctgcctatgcattcat

SEQ ID NO: 225714 - DNA, 19 bp, Homo sapiens
  siRNA target sequence for P5CR2 (NM_013328.2,872-890).
ccacgccctgcactttcta

SEQ ID NO: 225715 - DNA, 19 bp, Homo sapiens
  siRNA target sequence for P5CR2 (NM_013328.2,964-982).
ccatggccgaccaagaaaa

SEQ ID NO: 225716 - DNA, 19 bp, Homo sapiens
  siRNA target sequence for P5CR2 (NM_013328.2,969-987).
gccgaccaagaaaagatct

SEQ ID NO: 225717 - DNA, 19 bp, Homo sapiens
  siRNA target sequence for PYCR1 (NM_006907.2,1218-1236).
gccccagcgggcaaggatt

SEQ ID NO: 225718 - DNA, 19 bp, Homo sapiens
  siRNA target sequence for PYCR1 (NM_153824.1,1189-1207).
cactcctactccagtatca

SEQ ID NO: 225719 - DNA, 19 bp, Homo sapiens
  siRNA target sequence for QDPR (NM_000320.1,221-239).
ggccagcgctacgatcatt

SEQ ID NO: 225720 - DNA, 19 bp, Homo sapiens
  siRNA target sequence for QDPR (NM_000320.1,223-241).
ccagcgctacgatcattgt

SEQ ID NO: 225721 - DNA, 19 bp, Homo sapiens
  siRNA target sequence for QDPR (NM_000320.1,224-242).
cagcgctacgatcattgtt

SEQ ID NO: 225722 - DNA, 19 bp, Homo sapiens
  siRNA target sequence for QDPR (NM_000320.1,226-244).
gcgctacgatcattgttaa

SEQ ID NO: 225723 - DNA, 19 bp, Homo sapiens
  siRNA target sequence for QDPR (NM_000320.1,227-245).
cgctacgatcattgttaaa

SEQ ID NO: 225724 - DNA, 19 bp, Homo sapiens
  siRNA target sequence for QDPR (NM_000320.1,228-246).
gctacgatcattgttaaaa

SEQ ID NO: 225725 - DNA, 19 bp, Homo sapiens
  siRNA target sequence for QDPR (NM_000320.1,229-247).
ctacgatcattgttaaaat

SEQ ID NO: 225726 - DNA, 19 bp, Homo sapiens
  siRNA target sequence for QDPR (NM_000320.1,314-332).
gaaggtggatgcaattctt

SEQ ID NO: 225727 - DNA, 19 bp, Homo sapiens
  siRNA target sequence for QDPR (NM_000320.1,365-383).
caaatccaagtctctcttt

SEQ ID NO: 225728 - DNA, 19 bp, Homo sapiens
  siRNA target sequence for QDPR (NM_000320.1,641-659).
cccgatgaacaggaaatca

SEQ ID NO: 225729 - DNA, 19 bp, Homo sapiens
  siRNA target sequence for QDPR (NM_000320.1,642-660).
ccgatgaacaggaaatcaa

SEQ ID NO: 225730 - DNA, 19 bp, Homo sapiens
  siRNA target sequence for QDPR (NM_000320.1,643-661).
cgatgaacaggaaatcaat

SEQ ID NO: 225731 - DNA, 19 bp, Homo sapiens
  siRNA target sequence for QDPR (NM_000320.1,680-698).
ctcctggacacccttagaa

SEQ ID NO: 225732 - DNA, 19 bp, Homo sapiens
  siRNA target sequence for QDPR (NM_000320.1,682-700).
cctggacacccttagaatt

SEQ ID NO: 225733 - DNA, 19 bp, Homo sapiens
  siRNA target sequence for QDPR (NM_000320.1,685-703).
ggacacccttagaattcct

SEQ ID NO: 225734 - DNA, 19 bp, Homo sapiens
  siRNA target sequence for QDPR (NM_000320.1,691-709).
ccttagaattcctagttga

SEQ ID NO: 225735 - DNA, 19 bp, Homo sapiens
  siRNA target sequence for QDPR (NM_000320.1,696-714).
gaattcctagttgaaactt

SEQ ID NO: 225736 - DNA, 19 bp, Homo sapiens
  siRNA target sequence for QDPR (NM_000320.1,701-719).
cctagttgaaactttccat

SEQ ID NO: 225737 - DNA, 19 bp, Homo sapiens
  siRNA target sequence for QDPR (NM_000320.1,791-809).
ggaactcaccccagcatat

SEQ ID NO: 225738 - DNA, 19 bp, Homo sapiens
  siRNA target sequence for QDPR (NM_000320.1,792-810).
gaactcaccccagcatatt

SEQ ID NO: 225739 - DNA, 19 bp, Homo sapiens
  siRNA target sequence for PRODH (NM_016335.2,502-520).
ctaggacagaggctattca

SEQ ID NO: 225740 - DNA, 19 bp, Homo sapiens
  siRNA target sequence for PRODH (NM_016335.2,505-523).
ggacagaggctattcaaca

SEQ ID NO: 225741 - DNA, 19 bp, Homo sapiens
  siRNA target sequence for PRODH (NM_016335.2,528-546).
catgaagatgaccttctat

SEQ ID NO: 225742 - DNA, 19 bp, Homo sapiens
  siRNA target sequence for PRODH (NM_016335.2,537-555).
gaccttctatgggcatttt

SEQ ID NO: 225743 - DNA, 19 bp, Homo sapiens
  siRNA target sequence for PRODH (NM_016335.2,1757-1775).
ctgaccaccgggtgtactt

SEQ ID NO: 225744 - DNA, 19 bp, Homo sapiens
  siRNA target sequence for PRODH (NM_016335.2,1870-1888).
gaggtgctgccctacttgt

SEQ ID NO: 225745 - DNA, 19 bp, Homo sapiens
  siRNA target sequence for PRODH2 (NM_021232.1,81-99).
cgtgagaaccgtattttca

SEQ ID NO: 225746 - DNA, 19 bp, Homo sapiens
  siRNA target sequence for PRODH2 (NM_021232.1,86-104).
gaaccgtattttcaaatgt

SEQ ID NO: 225747 - DNA, 19 bp, Homo sapiens
  siRNA target sequence for PRODH2 (NM_021232.1,114-132).
cactacagcgtttccaatt

SEQ ID NO: 225748 - DNA, 19 bp, Homo sapiens
  siRNA target sequence for PRODH2 (NM_021232.1,116-134).
ctacagcgtttccaatttt

SEQ ID NO: 225749 - DNA, 19 bp, Homo sapiens
  siRNA target sequence for PRODH2 (NM_021232.1,455-473).
ggctctcaggcgcatttct

SEQ ID NO: 225750 - DNA, 19 bp, Homo sapiens
  siRNA target sequence for PRODH2 (NM_021232.1,740-758).
ccagtactcggctctgtaa

SEQ ID NO: 225751 - DNA, 19 bp, Homo sapiens
  siRNA target sequence for PRODH2 (NM_021232.1,909-927).
gcatcgggtggcacagtat

SEQ ID NO: 225752 - DNA, 19 bp, Homo sapiens
  siRNA target sequence for PRODH2 (NM_021232.1,1149-1167).
gctggtacgaggtgcatat

SEQ ID NO: 225753 - DNA, 19 bp, Homo sapiens
  siRNA target sequence for PRODH2 (NM_021232.1,1322-1340).
cccacaatgaggaatctgt

SEQ ID NO: 225754 - DNA, 19 bp, Homo sapiens
  siRNA target sequence for PRODH2 (NM_021232.1,1602-1620).
gccaggatgccgaaggata

SEQ ID NO: 225755 - DNA, 19 bp, Homo sapiens
  siRNA target sequence for ETFDH (NM_004453.1,241-259).
cgaattactacccattata

SEQ ID NO: 225756 - DNA, 19 bp, Homo sapiens
  siRNA target sequence for ETFDH (NM_004453.1,248-266).
ctacccattatactattta

SEQ ID NO: 225757 - DNA, 19 bp, Homo sapiens
  siRNA target sequence for ETFDH (NM_004453.1,368-386).
cagctgttcgtctaaaaca

SEQ ID NO: 225758 - DNA, 19 bp, Homo sapiens
  siRNA target sequence for ETFDH (NM_004453.1,370-388).
gctgttcgtctaaaacagt

SEQ ID NO: 225759 - DNA, 19 bp, Homo sapiens
  siRNA target sequence for ETFDH (NM_004453.1,371-389).
ctgttcgtctaaaacagtt

SEQ ID NO: 225760 - DNA, 19 bp, Homo sapiens
  siRNA target sequence for ETFDH (NM_004453.1,387-405).
gttggctgtggcacatgaa

SEQ ID NO: 225761 - DNA, 19 bp, Homo sapiens
  siRNA target sequence for ETFDH (NM_004453.1,441-459).
ccagataggagctcatact

SEQ ID NO: 225762 - DNA, 19 bp, Homo sapiens
  siRNA target sequence for ETFDH (NM_004453.1,522-540).
gggggctccacttaacact

SEQ ID NO: 225763 - DNA, 19 bp, Homo sapiens
  siRNA target sequence for ETFDH (NM_004453.1,555-573).
cagatttggaattttaaca

SEQ ID NO: 225764 - DNA, 19 bp, Homo sapiens
  siRNA target sequence for ETFDH (NM_004453.1,557-575).
gatttggaattttaacaga

SEQ ID NO: 225765 - DNA, 19 bp, Homo sapiens
  siRNA target sequence for ETFDH (NM_004453.1,609-627).
gcttccaatgaataatcat

SEQ ID NO: 225766 - DNA, 19 bp, Homo sapiens
  siRNA target sequence for ETFDH (NM_004453.1,643-661).
cgcttgggacatttagtga

SEQ ID NO: 225767 - DNA, 19 bp, Homo sapiens
  siRNA target sequence for ETFDH (NM_004453.1,686-704).
cccttggtgttgaagtata

SEQ ID NO: 225768 - DNA, 19 bp, Homo sapiens
  siRNA target sequence for ETFDH (NM_004453.1,722-740).
ctgaggtcctttttcatga

SEQ ID NO: 225769 - DNA, 19 bp, Homo sapiens
  siRNA target sequence for ETFDH (NM_004453.1,736-754).
catgatgatggtagtgtaa

SEQ ID NO: 225770 - DNA, 19 bp, Homo sapiens
  siRNA target sequence for ETFDH (NM_004453.1,794-812).
gtgcaccaaaggcaacatt

SEQ ID NO: 225771 - DNA, 19 bp, Homo sapiens
  siRNA target sequence for ETFDH (NM_004453.1,821-839).
gactggaactacatgctaa

SEQ ID NO: 225772 - DNA, 19 bp, Homo sapiens
  siRNA target sequence for ETFDH (NM_004453.1,878-896).
ccaagcaactatataagaa

SEQ ID NO: 225773 - DNA, 19 bp, Homo sapiens
  siRNA target sequence for ETFDH (NM_004453.1,951-969).
gttatgggttattgatgaa

SEQ ID NO: 225774 - DNA, 19 bp, Homo sapiens
  siRNA target sequence for ETFDH (NM_004453.1,1036-1054).
ggatctttcctctatcatt

SEQ ID NO: 225775 - DNA, 19 bp, Homo sapiens
  siRNA target sequence for ETFDH (NM_004453.1,1037-1055).
gatctttcctctatcattt

SEQ ID NO: 225776 - DNA, 19 bp, Homo sapiens
  siRNA target sequence for ETFDH (NM_004453.1,1093-1111).
gttggtctagactatcaga

SEQ ID NO: 225777 - DNA, 19 bp, Homo sapiens
  siRNA target sequence for ETFDH (NM_004453.1,1099-1117).
ctagactatcagaatccat

SEQ ID NO: 225778 - DNA, 19 bp, Homo sapiens
  siRNA target sequence for ETFDH (NM_004453.1,1126-1144).
ccatttagagagttccaaa

SEQ ID NO: 225779 - DNA, 19 bp, Homo sapiens
  siRNA target sequence for ETFDH (NM_004453.1,1261-1279).
ggtggtttactaattggtt

SEQ ID NO: 225780 - DNA, 19 bp, Homo sapiens
  siRNA target sequence for ETFDH (NM_004453.1,1276-1294).
ggttgtagtcctggtttta

SEQ ID NO: 225781 - DNA, 19 bp, Homo sapiens
  siRNA target sequence for ETFDH (NM_004453.1,1280-1298).
gtagtcctggttttatgaa

SEQ ID NO: 225782 - DNA, 19 bp, Homo sapiens
  siRNA target sequence for ETFDH (NM_004453.1,1389-1407).
ccaatcaaagacaatagga

SEQ ID NO: 225783 - DNA, 19 bp, Homo sapiens
  siRNA target sequence for ETFDH (NM_004453.1,1405-1423).
ggactccatgtaactgaat

SEQ ID NO: 225784 - DNA, 19 bp, Homo sapiens
  siRNA target sequence for ETFDH (NM_004453.1,1406-1424).
gactccatgtaactgaata

SEQ ID NO: 225785 - DNA, 19 bp, Homo sapiens
  siRNA target sequence for ETFDH (NM_004453.1,1420-1438).
gaatatgaggacaatttga

SEQ ID NO: 225786 - DNA, 19 bp, Homo sapiens
  siRNA target sequence for ETFDH (NM_004453.1,1462-1480).
ctatattctgttagaaata

SEQ ID NO: 225787 - DNA, 19 bp, Homo sapiens
  siRNA target sequence for ETFDH (NM_004453.1,1510-1528).
gtatatggagggatgattt

SEQ ID NO: 225788 - DNA, 19 bp, Homo sapiens
  siRNA target sequence for ETFDH (NM_004453.1,1563-1581).
ggagccgtggactctgaaa

SEQ ID NO: 225789 - DNA, 19 bp, Homo sapiens
  siRNA target sequence for ETFDH (NM_004453.1,1569-1587).
gtggactctgaaacataaa

SEQ ID NO: 225790 - DNA, 19 bp, Homo sapiens
  siRNA target sequence for ETFDH (NM_004453.1,1572-1590).
gactctgaaacataaaggt

SEQ ID NO: 225791 - DNA, 19 bp, Homo sapiens
  siRNA target sequence for ETFDH (NM_004453.1,1617-1635).
caaggattgcacacctatt

SEQ ID NO: 225792 - DNA, 19 bp, Homo sapiens
  siRNA target sequence for ETFDH (NM_004453.1,1621-1639).
gattgcacacctattgagt

SEQ ID NO: 225793 - DNA, 19 bp, Homo sapiens
  siRNA target sequence for ETFDH (NM_004453.1,1649-1667).
ccgatggacagatcagttt

SEQ ID NO: 225794 - DNA, 19 bp, Homo sapiens
  siRNA target sequence for ETFDH (NM_004453.1,1650-1668).
cgatggacagatcagtttt

SEQ ID NO: 225795 - DNA, 19 bp, Homo sapiens
  siRNA target sequence for ETFDH (NM_004453.1,1686-1704).
ggctctgagtggtactaat

SEQ ID NO: 225796 - DNA, 19 bp, Homo sapiens
  siRNA target sequence for ETFDH (NM_004453.1,1688-1706).
ctctgagtggtactaatca

SEQ ID NO: 225797 - DNA, 19 bp, Homo sapiens
  siRNA target sequence for ETFDH (NM_004453.1,1694-1712).
gtggtactaatcatgaaca

SEQ ID NO: 225798 - DNA, 19 bp, Homo sapiens
  siRNA target sequence for ETFDH (NM_004453.1,1697-1715).
gtactaatcatgaacatga

SEQ ID NO: 225799 - DNA, 19 bp, Homo sapiens
  siRNA target sequence for ETFDH (NM_004453.1,1714-1732).
gaccagccggcacacttaa

SEQ ID NO: 225800 - DNA, 19 bp, Homo sapiens
  siRNA target sequence for ETFDH (NM_004453.1,1717-1735).
cagccggcacacttaacct

SEQ ID NO: 225801 - DNA, 19 bp, Homo sapiens
  siRNA target sequence for ETFDH (NM_004453.1,1719-1737).
gccggcacacttaacctta

SEQ ID NO: 225802 - DNA, 19 bp, Homo sapiens
  siRNA target sequence for ETFDH (NM_004453.1,1733-1751).
ccttaagggatgacagtat

SEQ ID NO: 225803 - DNA, 19 bp, Homo sapiens
  siRNA target sequence for ETFDH (NM_004453.1,1744-1762).
gacagtatacctgtaaata

SEQ ID NO: 225804 - DNA, 19 bp, Homo sapiens
  siRNA target sequence for ETFDH (NM_004453.1,1843-1861).
gatggatttcggttacaga

SEQ ID NO: 225805 - DNA, 19 bp, Homo sapiens
  siRNA target sequence for ETFDH (NM_004453.1,1846-1864).
ggatttcggttacagataa

SEQ ID NO: 225806 - DNA, 19 bp, Homo sapiens
  siRNA target sequence for ETFDH (NM_004453.1,1847-1865).
gatttcggttacagataaa

SEQ ID NO: 225807 - DNA, 19 bp, Homo sapiens
  siRNA target sequence for ETFDH (NM_004453.1,1909-1927).
ccaagtcagaatattaact

SEQ ID NO: 225808 - DNA, 19 bp, Homo sapiens
  siRNA target sequence for PIPOX (NM_016518.1,64-82).
ctgggacgccattgtgatt

SEQ ID NO: 225809 - DNA, 19 bp, Homo sapiens
  siRNA target sequence for PIPOX (NM_016518.1,214-232).
ggcgtacctggaagacttt

SEQ ID NO: 225810 - DNA, 19 bp, Homo sapiens
  siRNA target sequence for PIPOX (NM_016518.1,215-233).
gcgtacctggaagactttt

SEQ ID NO: 225811 - DNA, 19 bp, Homo sapiens
  siRNA target sequence for PIPOX (NM_016518.1,216-234).
cgtacctggaagactttta

SEQ ID NO: 225812 - DNA, 19 bp, Homo sapiens
  siRNA target sequence for PIPOX (NM_016518.1,247-265).
gcatgagtgctatcagata

SEQ ID NO: 225813 - DNA, 19 bp, Homo sapiens
  siRNA target sequence for PIPOX (NM_016518.1,248-266).
catgagtgctatcagatat

SEQ ID NO: 225814 - DNA, 19 bp, Homo sapiens
  siRNA target sequence for PIPOX (NM_016518.1,301-319).
gcacaggcagactggatta

SEQ ID NO: 225815 - DNA, 19 bp, Homo sapiens
  siRNA target sequence for PIPOX (NM_016518.1,386-404).
gtagaacaccagtgtcttt

SEQ ID NO: 225816 - DNA, 19 bp, Homo sapiens
  siRNA target sequence for PIPOX (NM_016518.1,421-439).
gcaacgtttcccaaatatt

SEQ ID NO: 225817 - DNA, 19 bp, Homo sapiens
  siRNA target sequence for PIPOX (NM_016518.1,479-497).
ggaggagttatctatgcat

SEQ ID NO: 225818 - DNA, 19 bp, Homo sapiens
  siRNA target sequence for PIPOX (NM_016518.1,480-498).
gaggagttatctatgcata

SEQ ID NO: 225819 - DNA, 19 bp, Homo sapiens
  siRNA target sequence for PIPOX (NM_016518.1,514-532).
cctgcaggatgcaattcga

SEQ ID NO: 225820 - DNA, 19 bp, Homo sapiens
  siRNA target sequence for PIPOX (NM_016518.1,612-630).
ccaggagctaccaagctaa

SEQ ID NO: 225821 - DNA, 19 bp, Homo sapiens
  siRNA target sequence for PIPOX (NM_016518.1,710-728).
cggatcaacgtgtgttact

SEQ ID NO: 225822 - DNA, 19 bp, Homo sapiens
  siRNA target sequence for PIPOX (NM_016518.1,1036-1054).
cgatcgccacccaaagtat

SEQ ID NO: 225823 - DNA, 19 bp, Homo sapiens
  siRNA target sequence for PIPOX (NM_016518.1,1045-1063).
cccaaagtatgacaacatt

SEQ ID NO: 225824 - DNA, 19 bp, Homo sapiens
  siRNA target sequence for PIPOX (NM_016518.1,1114-1132).
ggggaagatcctgtatgaa

SEQ ID NO: 225825 - DNA, 19 bp, Homo sapiens
  siRNA target sequence for PIPOX (NM_016518.1,1116-1134).
ggaagatcctgtatgaatt

SEQ ID NO: 225826 - DNA, 19 bp, Homo sapiens
  siRNA target sequence for PIPOX (NM_016518.1,1141-1159).
gaaattaacaccatcttat

SEQ ID NO: 225827 - DNA, 19 bp, Homo sapiens
  siRNA target sequence for MAOA (NM_000240.2,513-531).
cctttccaccagtatggaa

SEQ ID NO: 225828 - DNA, 19 bp, Homo sapiens
  siRNA target sequence for MAOA (NM_000240.2,514-532).
ctttccaccagtatggaat

SEQ ID NO: 225829 - DNA, 19 bp, Homo sapiens
  siRNA target sequence for MAOA (NM_000240.2,533-551).
cccattgcatatttggatt

SEQ ID NO: 225830 - DNA, 19 bp, Homo sapiens
  siRNA target sequence for MAOA (NM_000240.2,534-552).
ccattgcatatttggatta

SEQ ID NO: 225831 - DNA, 19 bp, Homo sapiens
  siRNA target sequence for MAOA (NM_000240.2,540-558).
catatttggattacaataa

SEQ ID NO: 225832 - DNA, 19 bp, Homo sapiens
  siRNA target sequence for MAOA (NM_000240.2,656-674).
gagctcattgacaaaatct

SEQ ID NO: 225833 - DNA, 19 bp, Homo sapiens
  siRNA target sequence for MAOA (NM_000240.2,687-705).
ctgctaggcggtttgctta

SEQ ID NO: 225834 - DNA, 19 bp, Homo sapiens
  siRNA target sequence for MAOA (NM_000240.2,690-708).
ctaggcggtttgcttatct

SEQ ID NO: 225835 - DNA, 19 bp, Homo sapiens
  siRNA target sequence for MAOA (NM_000240.2,694-712).
gcggtttgcttatcttttt

SEQ ID NO: 225836 - DNA, 19 bp, Homo sapiens
  siRNA target sequence for MAOA (NM_000240.2,822-840).
gccaggaacggaagtttgt

SEQ ID NO: 225837 - DNA, 19 bp, Homo sapiens
  siRNA target sequence for MAOA (NM_000240.2,926-944).
cagtcaagtgacaacatca

SEQ ID NO: 225838 - DNA, 19 bp, Homo sapiens
  siRNA target sequence for MAOA (NM_000240.2,952-970).
gacgctgaaccatgaacat

SEQ ID NO: 225839 - DNA, 19 bp, Homo sapiens
  siRNA target sequence for MAOA (NM_000240.2,954-972).
cgctgaaccatgaacatta

SEQ ID NO: 225840 - DNA, 19 bp, Homo sapiens
  siRNA target sequence for MAOA (NM_000240.2,955-973).
gctgaaccatgaacattat

SEQ ID NO: 225841 - DNA, 19 bp, Homo sapiens
  siRNA target sequence for MAOA (NM_000240.2,965-983).
gaacattatgagtgcaaat

SEQ ID NO: 225842 - DNA, 19 bp, Homo sapiens
  siRNA target sequence for MAOA (NM_000240.2,974-992).
gagtgcaaatacgtaatta

SEQ ID NO: 225843 - DNA, 19 bp, Homo sapiens
  siRNA target sequence for MAOA (NM_000240.2,976-994).
gtgcaaatacgtaattaat

SEQ ID NO: 225844 - DNA, 19 bp, Homo sapiens
  siRNA target sequence for MAOA (NM_000240.2,1141-1159).
ctgtggctgcatgatcatt

SEQ ID NO: 225845 - DNA, 19 bp, Homo sapiens
  siRNA target sequence for MAOA (NM_000240.2,1147-1165).
ctgcatgatcattgaagat

SEQ ID NO: 225846 - DNA, 19 bp, Homo sapiens
  siRNA target sequence for MAOA (NM_000240.2,1163-1181).
gatgaagatgctccaattt

SEQ ID NO: 225847 - DNA, 19 bp, Homo sapiens
  siRNA target sequence for MAOA (NM_000240.2,1454-1472).
caacccgtgggcaggattt

SEQ ID NO: 225848 - DNA, 19 bp, Homo sapiens
  siRNA target sequence for MAOA (NM_000240.2,1457-1475).
cccgtgggcaggattttct

SEQ ID NO: 225849 - DNA, 19 bp, Homo sapiens
  siRNA target sequence for MAOA (NM_000240.2,1458-1476).
ccgtgggcaggattttctt

SEQ ID NO: 225850 - DNA, 19 bp, Homo sapiens
  siRNA target sequence for MAOA (NM_000240.2,1544-1562).
gcagctagggaggtcttaa

SEQ ID NO: 225851 - DNA, 19 bp, Homo sapiens
  siRNA target sequence for MAOA (NM_000240.2,1577-1595).
gtgaccgagaaagatatct

SEQ ID NO: 225852 - DNA, 19 bp, Homo sapiens
  siRNA target sequence for MAOA (NM_000240.2,1619-1637).
gacgttccagcggtagaaa

SEQ ID NO: 225853 - DNA, 19 bp, Homo sapiens
  siRNA target sequence for MAOA (NM_000240.2,1622-1640).
gttccagcggtagaaatca

SEQ ID NO: 225854 - DNA, 19 bp, Homo sapiens
  siRNA target sequence for MAOB (NM_000898.3,257-275).
ggcaggacttacactctta

SEQ ID NO: 225855 - DNA, 19 bp, Homo sapiens
  siRNA target sequence for MAOB (NM_000898.3,270-288).
ctcttaggaaccaaaaggt

SEQ ID NO: 225856 - DNA, 19 bp, Homo sapiens
  siRNA target sequence for MAOB (NM_000898.3,301-319).
ccttggaggatcctatgtt

SEQ ID NO: 225857 - DNA, 19 bp, Homo sapiens
  siRNA target sequence for MAOB (NM_000898.3,320-338).
ggaccaacccagaatcgta

SEQ ID NO: 225858 - DNA, 19 bp, Homo sapiens
  siRNA target sequence for MAOB (NM_000898.3,321-339).
gaccaacccagaatcgtat

SEQ ID NO: 225859 - DNA, 19 bp, Homo sapiens
  siRNA target sequence for MAOB (NM_000898.3,324-342).
caacccagaatcgtatctt

SEQ ID NO: 225860 - DNA, 19 bp, Homo sapiens
  siRNA target sequence for MAOB (NM_000898.3,329-347).
cagaatcgtatcttgagat

SEQ ID NO: 225861 - DNA, 19 bp, Homo sapiens
  siRNA target sequence for MAOB (NM_000898.3,331-349).
gaatcgtatcttgagatta

SEQ ID NO: 225862 - DNA, 19 bp, Homo sapiens
  siRNA target sequence for MAOB (NM_000898.3,363-381).
gattggagacctacaaagt

SEQ ID NO: 225863 - DNA, 19 bp, Homo sapiens
  siRNA target sequence for MAOB (NM_000898.3,395-413).
cgtctgatccaccatgtaa

SEQ ID NO: 225864 - DNA, 19 bp, Homo sapiens
  siRNA target sequence for MAOB (NM_000898.3,406-424).
ccatgtaaagggcaaatca

SEQ ID NO: 225865 - DNA, 19 bp, Homo sapiens
  siRNA target sequence for MAOB (NM_000898.3,407-425).
catgtaaagggcaaatcat

SEQ ID NO: 225866 - DNA, 19 bp, Homo sapiens
  siRNA target sequence for MAOB (NM_000898.3,452-470).
gtatggaatccaattacct

SEQ ID NO: 225867 - DNA, 19 bp, Homo sapiens
  siRNA target sequence for MAOB (NM_000898.3,457-475).
gaatccaattacctactta

SEQ ID NO: 225868 - DNA, 19 bp, Homo sapiens
  siRNA target sequence for MAOB (NM_000898.3,468-486).
cctacttagatcataacaa

SEQ ID NO: 225869 - DNA, 19 bp, Homo sapiens
  siRNA target sequence for MAOB (NM_000898.3,487-505).
cttttggaggacaatggat

SEQ ID NO: 225870 - DNA, 19 bp, Homo sapiens
  siRNA target sequence for MAOB (NM_000898.3,598-616).
gctctgctggactgaatct

SEQ ID NO: 225871 - DNA, 19 bp, Homo sapiens
  siRNA target sequence for MAOB (NM_000898.3,707-725).
cagtgtggaggcacaacaa

SEQ ID NO: 225872 - DNA, 19 bp, Homo sapiens
  siRNA target sequence for MAOB (NM_000898.3,726-744).
gaatcatctcgacaacaaa

SEQ ID NO: 225873 - DNA, 19 bp, Homo sapiens
  siRNA target sequence for MAOB (NM_000898.3,832-850).
gaggcctgtgatctacatt

SEQ ID NO: 225874 - DNA, 19 bp, Homo sapiens
  siRNA target sequence for MAOB (NM_000898.3,882-900).
ccctaaaccatgagatgta

SEQ ID NO: 225875 - DNA, 19 bp, Homo sapiens
  siRNA target sequence for MAOB (NM_000898.3,966-984).
ctctgccaatgatgagaaa

SEQ ID NO: 225876 - DNA, 19 bp, Homo sapiens
  siRNA target sequence for MAOB (NM_000898.3,1005-1023).
ctttgggttcagtcatcaa

SEQ ID NO: 225877 - DNA, 19 bp, Homo sapiens
  siRNA target sequence for MAOB (NM_000898.3,1010-1028).
ggttcagtcatcaagtgta

SEQ ID NO: 225878 - DNA, 19 bp, Homo sapiens
  siRNA target sequence for MAOB (NM_000898.3,1011-1029).
gttcagtcatcaagtgtat

SEQ ID NO: 225879 - DNA, 19 bp, Homo sapiens
  siRNA target sequence for MAOB (NM_000898.3,1016-1034).
gtcatcaagtgtatagttt

SEQ ID NO: 225880 - DNA, 19 bp, Homo sapiens
  siRNA target sequence for MAOB (NM_000898.3,1021-1039).
caagtgtatagtttattat

SEQ ID NO: 225881 - DNA, 19 bp, Homo sapiens
  siRNA target sequence for MAOB (NM_000898.3,1071-1089).
gtggaaccatgattattga

SEQ ID NO: 225882 - DNA, 19 bp, Homo sapiens
  siRNA target sequence for MAOB (NM_000898.3,1109-1127).
gcctacacgttggatgata

SEQ ID NO: 225883 - DNA, 19 bp, Homo sapiens
  siRNA target sequence for MAOB (NM_000898.3,1148-1166).
gctgccataatgggattta

SEQ ID NO: 225884 - DNA, 19 bp, Homo sapiens
  siRNA target sequence for MAOB (NM_000898.3,1149-1167).
ctgccataatgggatttat

SEQ ID NO: 225885 - DNA, 19 bp, Homo sapiens
  siRNA target sequence for MAOB (NM_000898.3,1215-1233).
ggttgaagaaactttgtga

SEQ ID NO: 225886 - DNA, 19 bp, Homo sapiens
  siRNA target sequence for MAOB (NM_000898.3,1266-1284).
ctctggagccagtgcatta

SEQ ID NO: 225887 - DNA, 19 bp, Homo sapiens
  siRNA target sequence for MAOB (NM_000898.3,1319-1337).
gggggctgctacacaactt

SEQ ID NO: 225888 - DNA, 19 bp, Homo sapiens
  siRNA target sequence for MAOB (NM_000898.3,1385-1403).
ccagtggacaggatttact

SEQ ID NO: 225889 - DNA, 19 bp, Homo sapiens
  siRNA target sequence for MAOB (NM_000898.3,1386-1404).
cagtggacaggatttactt

SEQ ID NO: 225890 - DNA, 19 bp, Homo sapiens
  siRNA target sequence for MAOB (NM_000898.3,1610-1628).
ctgctcaggctgattggat

SEQ ID NO: 225891 - DNA, 19 bp, Homo sapiens
  siRNA target sequence for SMOX (NM_019025.2,473-491).
cccatgggaaccctatcta

SEQ ID NO: 225892 - DNA, 19 bp, Homo sapiens
  siRNA target sequence for SMOX (NM_019025.2,479-497).
ggaaccctatctatcatct

SEQ ID NO: 225893 - DNA, 19 bp, Homo sapiens
  siRNA target sequence for SMOX (NM_019025.2,480-498).
gaaccctatctatcatcta

SEQ ID NO: 225894 - DNA, 19 bp, Homo sapiens
  siRNA target sequence for SMOX (NM_019025.2,553-571).
cgcatcagcctctattcca

SEQ ID NO: 225895 - DNA, 19 bp, Homo sapiens
  siRNA target sequence for SMOX (NM_019025.2,558-576).
cagcctctattccaagaat

SEQ ID NO: 225896 - DNA, 19 bp, Homo sapiens
  siRNA target sequence for SMOX (NM_019025.2,577-595).
ggcgtggcctgctacctta

SEQ ID NO: 225897 - DNA, 19 bp, Homo sapiens
  siRNA target sequence for SMOX (NM_019025.2,634-652).
gaattcagcgatttataca

SEQ ID NO: 225898 - DNA, 19 bp, Homo sapiens
  siRNA target sequence for SMOX (NM_019025.2,678-696).
gttcttccggcacgataaa

SEQ ID NO: 225899 - DNA, 19 bp, Homo sapiens
  siRNA target sequence for SMOX (NM_019025.2,681-699).
cttccggcacgataaacca

SEQ ID NO: 225900 - DNA, 19 bp, Homo sapiens
  siRNA target sequence for SMOX (NM_019025.2,700-718).
gtcaatgctgaaagtcaaa

SEQ ID NO: 225901 - DNA, 19 bp, Homo sapiens
  siRNA target sequence for SMOX (NM_019025.2,1000-1018).
cctgtccgctgcattcact

SEQ ID NO: 225902 - DNA, 19 bp, Homo sapiens
  siRNA target sequence for SMOX (NM_019025.2,1067-1085).
gtgagggcgaccacaatca

SEQ ID NO: 225903 - DNA, 19 bp, Homo sapiens
  siRNA target sequence for SMOX (NM_019025.2,1195-1213).
gcggaccatgtgattgtga

SEQ ID NO: 225904 - DNA, 19 bp, Homo sapiens
  siRNA target sequence for SMOX (NM_019025.2,1238-1256).
ggcagtacaccagtttctt

SEQ ID NO: 225905 - DNA, 19 bp, Homo sapiens
  siRNA target sequence for SMOX (NM_019025.2,1313-1331).
ccaccgacaagatctttct

SEQ ID NO: 225906 - DNA, 19 bp, Homo sapiens
  siRNA target sequence for SMOX (NM_019025.2,1362-1380).
gtgcaacagcctacagttt

SEQ ID NO: 225907 - DNA, 19 bp, Homo sapiens
  siRNA target sequence for SMOX (NM_019025.2,1429-1447).
ctctggtaccgcaagatct

SEQ ID NO: 225908 - DNA, 19 bp, Homo sapiens
  siRNA target sequence for SMOX (NM_019025.2,1440-1458).
caagatctgcggctttgat

SEQ ID NO: 225909 - DNA, 19 bp, Homo sapiens
  siRNA target sequence for SMOX (NM_019025.2,1591-1609).
gggaaccccaacattccaa

SEQ ID NO: 225910 - DNA, 19 bp, Homo sapiens
  siRNA target sequence for SMOX (NM_019025.2,1592-1610).
ggaaccccaacattccaaa

SEQ ID NO: 225911 - DNA, 19 bp, Homo sapiens
  siRNA target sequence for SMOX (NM_019025.2,1593-1611).
gaaccccaacattccaaaa

SEQ ID NO: 225912 - DNA, 19 bp, Homo sapiens
  siRNA target sequence for SMOX (NM_019025.2,1607-1625).
caaaacctcggcgaatctt

SEQ ID NO: 225913 - DNA, 19 bp, Homo sapiens
  siRNA target sequence for SMOX (NM_019025.2,1637-1655).
ggggcagcaacccttactt

SEQ ID NO: 225914 - DNA, 19 bp, Homo sapiens
  siRNA target sequence for SMOX (NM_019025.2,1753-1771).
cccatgcaggtgctgtttt

SEQ ID NO: 225915 - DNA, 19 bp, Homo sapiens
  siRNA target sequence for SMOX (NM_019025.2,1780-1798).
gccacccaccgcaagtact

SEQ ID NO: 225916 - DNA, 19 bp, Homo sapiens
  siRNA target sequence for SMOX (NM_019025.2,1782-1800).
cacccaccgcaagtactat

SEQ ID NO: 225917 - DNA, 19 bp, Homo sapiens
  siRNA target sequence for PNPO (NM_018129.1,208-226).
ggacccatgcgcaagagtt

SEQ ID NO: 225918 - DNA, 19 bp, Homo sapiens
  siRNA target sequence for PNPO (NM_018129.1,209-227).
gacccatgcgcaagagtta

SEQ ID NO: 225919 - DNA, 19 bp, Homo sapiens
  siRNA target sequence for PNPO (NM_018129.1,233-251).
gggaccgagaggcatttga

SEQ ID NO: 225920 - DNA, 19 bp, Homo sapiens
  siRNA target sequence for PNPO (NM_018129.1,422-440).
gcttccgcttcttcactaa

SEQ ID NO: 225921 - DNA, 19 bp, Homo sapiens
  siRNA target sequence for PNPO (NM_018129.1,441-459).
cttcgagagtcgaaaagga

SEQ ID NO: 225922 - DNA, 19 bp, Homo sapiens
  siRNA target sequence for PNPO (NM_018129.1,484-502).
gcttcccttgtcttctact

SEQ ID NO: 225923 - DNA, 19 bp, Homo sapiens
  siRNA target sequence for PNPO (NM_018129.1,640-658).
cctgatcgggagtatctga

SEQ ID NO: 225924 - DNA, 19 bp, Homo sapiens
  siRNA target sequence for PNPO (NM_018129.1,781-799).
ctgcatgaccggatagtct

SEQ ID NO: 225925 - DNA, 19 bp, Homo sapiens
  siRNA target sequence for PNPO (NM_018129.1,783-801).
gcatgaccggatagtcttt

SEQ ID NO: 225926 - DNA, 19 bp, Homo sapiens
  siRNA target sequence for DAO (NM_001917.3,298-316).
ggcagccctacctttctga

SEQ ID NO: 225927 - DNA, 19 bp, Homo sapiens
  siRNA target sequence for DAO (NM_001917.3,346-364).
gccaacagacctttgacta

SEQ ID NO: 225928 - DNA, 19 bp, Homo sapiens
  siRNA target sequence for DAO (NM_001917.3,402-420).
ctgggcctgttcctaatct

SEQ ID NO: 225929 - DNA, 19 bp, Homo sapiens
  siRNA target sequence for DAO (NM_001917.3,539-557).
gttccacacaagcctaatt

SEQ ID NO: 225930 - DNA, 19 bp, Homo sapiens
  siRNA target sequence for DAO (NM_001917.3,581-599).
gtggctgactgaaaggtta

SEQ ID NO: 225931 - DNA, 19 bp, Homo sapiens
  siRNA target sequence for DAO (NM_001917.3,584-602).
gctgactgaaaggttaact

SEQ ID NO: 225932 - DNA, 19 bp, Homo sapiens
  siRNA target sequence for DAO (NM_001917.3,601-619).
ctgagaggggagtgaagtt

SEQ ID NO: 225933 - DNA, 19 bp, Homo sapiens
  siRNA target sequence for DAO (NM_001917.3,626-644).
gcggaaagtggagtctttt

SEQ ID NO: 225934 - DNA, 19 bp, Homo sapiens
  siRNA target sequence for DAO (NM_001917.3,664-682).
gcgcagacgtgattgtcaa

SEQ ID NO: 225935 - DNA, 19 bp, Homo sapiens
  siRNA target sequence for DAO (NM_001917.3,875-893).
gggaaactggagtgaacta

SEQ ID NO: 225936 - DNA, 19 bp, Homo sapiens
  siRNA target sequence for DAO (NM_001917.3,876-894).
ggaaactggagtgaactaa

SEQ ID NO: 225937 - DNA, 19 bp, Homo sapiens
  siRNA target sequence for DAO (NM_001917.3,877-895).
gaaactggagtgaactaaa

SEQ ID NO: 225938 - DNA, 19 bp, Homo sapiens
  siRNA target sequence for DAO (NM_001917.3,881-899).
ctggagtgaactaaacaat

SEQ ID NO: 225939 - DNA, 19 bp, Homo sapiens
  siRNA target sequence for DAO (NM_001917.3,883-901).
ggagtgaactaaacaatat

SEQ ID NO: 225940 - DNA, 19 bp, Homo sapiens
  siRNA target sequence for DAO (NM_001917.3,956-974).
gaatgcaagaattattggt

SEQ ID NO: 225941 - DNA, 19 bp, Homo sapiens
  siRNA target sequence for DAO (NM_001917.3,1002-1020).
ccccagattcggctagaaa

SEQ ID NO: 225942 - DNA, 19 bp, Homo sapiens
  siRNA target sequence for DAO (NM_001917.3,1007-1025).
gattcggctagaaagagaa

SEQ ID NO: 225943 - DNA, 19 bp, Homo sapiens
  siRNA target sequence for DAO (NM_001917.3,1032-1050).
cgcactggaccttcaaaca

SEQ ID NO: 225944 - DNA, 19 bp, Homo sapiens
  siRNA target sequence for DAO (NM_001917.3,1051-1069).
cagaggtcatccacaacta

SEQ ID NO: 225945 - DNA, 19 bp, Homo sapiens
  siRNA target sequence for GLDC (NM_000170.1,396-414).
ggggctggcgagcattgat

SEQ ID NO: 225946 - DNA, 19 bp, Homo sapiens
  siRNA target sequence for GLDC (NM_000170.1,400-418).
ctggcgagcattgatgaat

SEQ ID NO: 225947 - DNA, 19 bp, Homo sapiens
  siRNA target sequence for GLDC (NM_000170.1,403-421).
gcgagcattgatgaattga

SEQ ID NO: 225948 - DNA, 19 bp, Homo sapiens
  siRNA target sequence for GLDC (NM_000170.1,404-422).
cgagcattgatgaattgat

SEQ ID NO: 225949 - DNA, 19 bp, Homo sapiens
  siRNA target sequence for GLDC (NM_000170.1,439-457).
gccaacatccgtttgaaaa

SEQ ID NO: 225950 - DNA, 19 bp, Homo sapiens
  siRNA target sequence for GLDC (NM_000170.1,531-549).
ccagatctggagatcgtat

SEQ ID NO: 225951 - DNA, 19 bp, Homo sapiens
  siRNA target sequence for GLDC (NM_000170.1,553-571).
ggcatgggctattataact

SEQ ID NO: 225952 - DNA, 19 bp, Homo sapiens
  siRNA target sequence for GLDC (NM_000170.1,585-603).
gacgattttgcggaactta

SEQ ID NO: 225953 - DNA, 19 bp, Homo sapiens
  siRNA target sequence for GLDC (NM_000170.1,587-605).
cgattttgcggaacttact

SEQ ID NO: 225954 - DNA, 19 bp, Homo sapiens
  siRNA target sequence for GLDC (NM_000170.1,616-634).
ggatggatcacccagtata

SEQ ID NO: 225955 - DNA, 19 bp, Homo sapiens
  siRNA target sequence for GLDC (NM_000170.1,662-680).
ggaggctggagagtttact

SEQ ID NO: 225956 - DNA, 19 bp, Homo sapiens
  siRNA target sequence for GLDC (NM_000170.1,850-868).
cagactcgagccaaatata

SEQ ID NO: 225957 - DNA, 19 bp, Homo sapiens
  siRNA target sequence for GLDC (NM_000170.1,852-870).
gactcgagccaaatatact

SEQ ID NO: 225958 - DNA, 19 bp, Homo sapiens
  siRNA target sequence for GLDC (NM_000170.1,1022-1040).
gctgtgctactgacctttt

SEQ ID NO: 225959 - DNA, 19 bp, Homo sapiens
  siRNA target sequence for GLDC (NM_000170.1,1027-1045).
gctactgaccttttagctt

SEQ ID NO: 225960 - DNA, 19 bp, Homo sapiens
  siRNA target sequence for GLDC (NM_000170.1,1067-1085).
gagaatttggggtagacat

SEQ ID NO: 225961 - DNA, 19 bp, Homo sapiens
  siRNA target sequence for GLDC (NM_000170.1,1133-1151).
gaccccatgcagcattttt

SEQ ID NO: 225962 - DNA, 19 bp, Homo sapiens
  siRNA target sequence for GLDC (NM_000170.1,1162-1180).
gaaagcttggtgagaatga

SEQ ID NO: 225963 - DNA, 19 bp, Homo sapiens
  siRNA target sequence for GLDC (NM_000170.1,1230-1248).
gtatcgtcttgctcttcaa

SEQ ID NO: 225964 - DNA, 19 bp, Homo sapiens
  siRNA target sequence for GLDC (NM_000170.1,2223-2241).
cctagcagctatcatgatt

SEQ ID NO: 225965 - DNA, 19 bp, Homo sapiens
  siRNA target sequence for GLDC (NM_000170.1,2227-2245).
gcagctatcatgattacat

SEQ ID NO: 225966 - DNA, 19 bp, Homo sapiens
  siRNA target sequence for GLDC (NM_000170.1,2228-2246).
cagctatcatgattacata

SEQ ID NO: 225967 - DNA, 19 bp, Homo sapiens
  siRNA target sequence for GLDC (NM_000170.1,2252-2270).
ccaccaatggggtgtttga

SEQ ID NO: 225968 - DNA, 19 bp, Homo sapiens
  siRNA target sequence for GLDC (NM_000170.1,2326-2344).
ctagacggggcaaatatga

SEQ ID NO: 225969 - DNA, 19 bp, Homo sapiens
  siRNA target sequence for GLDC (NM_000170.1,2393-2411).
cgcacctaaatcttcacaa

SEQ ID NO: 225970 - DNA, 19 bp, Homo sapiens
  siRNA target sequence for GLDC (NM_000170.1,2456-2474).
ccatcggagtgaagaaaca

SEQ ID NO: 225971 - DNA, 19 bp, Homo sapiens
  siRNA target sequence for GLDC (NM_000170.1,2457-2475).
catcggagtgaagaaacat

SEQ ID NO: 225972 - DNA, 19 bp, Homo sapiens
  siRNA target sequence for GLDC (NM_000170.1,2497-2515).
catcccgtcatttcactaa

SEQ ID NO: 225973 - DNA, 19 bp, Homo sapiens
  siRNA target sequence for GLDC (NM_000170.1,2584-2602).
cccatttcctgggcttata

SEQ ID NO: 225974 - DNA, 19 bp, Homo sapiens
  siRNA target sequence for GLDC (NM_000170.1,2585-2603).
ccatttcctgggcttatat

SEQ ID NO: 225975 - DNA, 19 bp, Homo sapiens
  siRNA target sequence for GLDC (NM_000170.1,2637-2655).
cacggaaactgcgatatta

SEQ ID NO: 225976 - DNA, 19 bp, Homo sapiens
  siRNA target sequence for GLDC (NM_000170.1,2639-2657).
cggaaactgcgatattaaa

SEQ ID NO: 225977 - DNA, 19 bp, Homo sapiens
  siRNA target sequence for GLDC (NM_000170.1,2640-2658).
ggaaactgcgatattaaat

SEQ ID NO: 225978 - DNA, 19 bp, Homo sapiens
  siRNA target sequence for GLDC (NM_000170.1,2667-2685).
catggccaagcgattagaa

SEQ ID NO: 225979 - DNA, 19 bp, Homo sapiens
  siRNA target sequence for GLDC (NM_000170.1,2670-2688).
ggccaagcgattagaaaca

SEQ ID NO: 225980 - DNA, 19 bp, Homo sapiens
  siRNA target sequence for GLDC (NM_000170.1,2672-2690).
ccaagcgattagaaacaca

SEQ ID NO: 225981 - DNA, 19 bp, Homo sapiens
  siRNA target sequence for GLDC (NM_000170.1,2687-2705).
cacactacagaattctttt

SEQ ID NO: 225982 - DNA, 19 bp, Homo sapiens
  siRNA target sequence for GLDC (NM_000170.1,2706-2724).
caggggtgcaagaggttat

SEQ ID NO: 225983 - DNA, 19 bp, Homo sapiens
  siRNA target sequence for GLDC (NM_000170.1,2708-2726).
ggggtgcaagaggttatgt

SEQ ID NO: 225984 - DNA, 19 bp, Homo sapiens
  siRNA target sequence for GLDC (NM_000170.1,2746-2764).
gacacgagacccttcaaaa

SEQ ID NO: 225985 - DNA, 19 bp, Homo sapiens
  siRNA target sequence for GLDC (NM_000170.1,2799-2817).
gagactccaggattatgga

SEQ ID NO: 225986 - DNA, 19 bp, Homo sapiens
  siRNA target sequence for GLDC (NM_000170.1,2801-2819).
gactccaggattatggatt

SEQ ID NO: 225987 - DNA, 19 bp, Homo sapiens
  siRNA target sequence for GLDC (NM_000170.1,2925-2943).
cattcggcaggaaattgct

SEQ ID NO: 225988 - DNA, 19 bp, Homo sapiens
  siRNA target sequence for GLDC (NM_000170.1,2972-2990).
gggtcaatccgctgaagat

SEQ ID NO: 225989 - DNA, 19 bp, Homo sapiens
  siRNA target sequence for GLDC (NM_000170.1,2974-2992).
gtcaatccgctgaagatgt

SEQ ID NO: 225990 - DNA, 19 bp, Homo sapiens
  siRNA target sequence for GLDC (NM_000170.1,3003-3021).
cctgacctgcgttacatct

SEQ ID NO: 225991 - DNA, 19 bp, Homo sapiens
  siRNA target sequence for GLDC (NM_000170.1,3025-3043).
cactgggaccggccttatt

SEQ ID NO: 225992 - DNA, 19 bp, Homo sapiens
  siRNA target sequence for GLDC (NM_000170.1,3090-3108).
caaattctggccaacgatt

SEQ ID NO: 225993 - DNA, 19 bp, Homo sapiens
  siRNA target sequence for GLDC (NM_000170.1,3104-3122).
cgattgcccggattgatga

SEQ ID NO: 225994 - DNA, 19 bp, Homo sapiens
  siRNA target sequence for GLDC (NM_000170.1,3133-3151).
gatcagcacctggtttgta

SEQ ID NO: 225995 - DNA, 19 bp, Homo sapiens
  siRNA target sequence for GLDC (NM_000170.1,3155-3173).
gcccacccatggaagttta

SEQ ID NO: 225996 - DNA, 19 bp, Homo sapiens
  siRNA target sequence for GLDC (NM_000170.1,3156-3174).
cccacccatggaagtttat

SEQ ID NO: 225997 - DNA, 19 bp, Homo sapiens
  siRNA target sequence for GLDC (NM_000170.1,3158-3176).
cacccatggaagtttatga

SEQ ID NO: 225998 - DNA, 19 bp, Homo sapiens
  siRNA target sequence for GLDC (NM_000170.1,3160-3178).
cccatggaagtttatgagt

SEQ ID NO: 225999 - DNA, 19 bp, Homo sapiens
  siRNA target sequence for GLDC (NM_000170.1,3169-3187).
gtttatgagtctccatttt

SEQ ID NO: 226000 - DNA, 19 bp, Homo sapiens
  siRNA target sequence for GLDC (NM_000170.1,3193-3211).
caaaagagggcgtcttctt

SEQ ID NO: 226001 - DNA, 19 bp, Homo sapiens
  siRNA target sequence for MEGF11 (NM_032445.1,168-186).
cccttcgatcagatctatt

SEQ ID NO: 226002 - DNA, 19 bp, Homo sapiens
  siRNA target sequence for MEGF11 (NM_032445.1,169-187).
ccttcgatcagatctatta

SEQ ID NO: 226003 - DNA, 19 bp, Homo sapiens
  siRNA target sequence for MEGF11 (NM_032445.1,173-191).
cgatcagatctattacaca

SEQ ID NO: 226004 - DNA, 19 bp, Homo sapiens
  siRNA target sequence for MEGF11 (NM_032445.1,624-642).
gcgctgcccctgtcagaat

SEQ ID NO: 226005 - DNA, 19 bp, Homo sapiens
  siRNA target sequence for MEGF11 (NM_032445.1,1113-1131).
ctgccctgttggctactat

SEQ ID NO: 226006 - DNA, 19 bp, Homo sapiens
  siRNA target sequence for MEGF11 (NM_032445.1,1893-1911).
gtgtgctggaggatacttt

SEQ ID NO: 226007 - DNA, 19 bp, Homo sapiens
  siRNA target sequence for MEGF11 (NM_032445.1,1953-1971).
gacctgcagccctatcgat

SEQ ID NO: 226008 - DNA, 19 bp, Homo sapiens
  siRNA target sequence for MEGF11 (NM_032445.1,2148-2166).
gcgctgcccagcagcattt

SEQ ID NO: 226009 - DNA, 19 bp, Homo sapiens
  siRNA target sequence for MEGF11 (NM_032445.1,2187-2205).
cgtatgccagtgtcagaat

SEQ ID NO: 226010 - DNA, 19 bp, Homo sapiens
  siRNA target sequence for MEGF11 (NM_032445.1,2353-2371).
gtcaccggcacctgttact

SEQ ID NO: 226011 - DNA, 19 bp, Homo sapiens
  siRNA target sequence for MEGF11 (NM_032445.1,2494-2512).
ggcatcatgctcctgttat

SEQ ID NO: 226012 - DNA, 19 bp, Homo sapiens
  siRNA target sequence for MEGF11 (NM_032445.1,2659-2677).
gatagacgtcagaacacat

SEQ ID NO: 226013 - DNA, 19 bp, Homo sapiens
  siRNA target sequence for MEGF11 (NM_032445.1,2713-2731).
gaatccgtgtgcagttcta

SEQ ID NO: 226014 - DNA, 19 bp, Homo sapiens
  siRNA target sequence for MEGF11 (NM_032445.1,2762-2780).
cttacgccacaattaagga

SEQ ID NO: 226015 - DNA, 19 bp, Homo sapiens
  siRNA target sequence for MEGF11 (NM_032445.1,2932-2950).
gaaggttgcggtcataact

SEQ ID NO: 226016 - DNA, 19 bp, Homo sapiens
  siRNA target sequence for MEGF11 (NM_032445.1,2990-3008).
gccatattcctggtcatta

SEQ ID NO: 226017 - DNA, 19 bp, Homo sapiens
  siRNA target sequence for MEGF11 (NM_032445.1,3046-3064).
ccgtcccaggacaagcaat

SEQ ID NO: 226018 - DNA, 19 bp, Homo sapiens
  siRNA target sequence for QP-C (NM_014402.2,43-61).
cgcgagtttgggaatctga

SEQ ID NO: 226019 - DNA, 19 bp, Homo sapiens
  siRNA target sequence for QP-C (NM_014402.2,62-80).
cgcggatgcggcatgtgat

SEQ ID NO: 226020 - DNA, 19 bp, Homo sapiens
  siRNA target sequence for QP-C (NM_014402.2,120-138).
gcacgtcttcactaaagga

SEQ ID NO: 226021 - DNA, 19 bp, Homo sapiens
  siRNA target sequence for QP-C (NM_014402.2,157-175).
cgcattcgggagtctttct

SEQ ID NO: 226022 - DNA, 19 bp, Homo sapiens
  siRNA target sequence for QP-C (NM_014402.2,159-177).
cattcgggagtctttcttt

SEQ ID NO: 226023 - DNA, 19 bp, Homo sapiens
  siRNA target sequence for QP-C (NM_014402.2,179-197).
gcgtggtgccgcagtttgt

SEQ ID NO: 226024 - DNA, 19 bp, Homo sapiens
  siRNA target sequence for QP-C (NM_014402.2,180-198).
cgtggtgccgcagtttgta

SEQ ID NO: 226025 - DNA, 19 bp, Homo sapiens
  siRNA target sequence for QP-C (NM_014402.2,187-205).
ccgcagtttgtagtgtttt

SEQ ID NO: 226026 - DNA, 19 bp, Homo sapiens
  siRNA target sequence for QP-C (NM_014402.2,188-206).
cgcagtttgtagtgtttta

SEQ ID NO: 226027 - DNA, 19 bp, Homo sapiens
  siRNA target sequence for QP-C (NM_014402.2,189-207).
gcagtttgtagtgttttat

SEQ ID NO: 226028 - DNA, 19 bp, Homo sapiens
  siRNA target sequence for QP-C (NM_014402.2,261-279).
gctgcctatgaaaatgaca

SEQ ID NO: 226029 - DNA, 19 bp, Homo sapiens
  siRNA target sequence for UQCR (NM_006830.2,75-93).
gtcccgacggcctacacat

SEQ ID NO: 226030 - DNA, 19 bp, Homo sapiens
  siRNA target sequence for UQCR (NM_006830.2,150-168).
gactgggtaccttacatca

SEQ ID NO: 226031 - DNA, 19 bp, Homo sapiens
  siRNA target sequence for UQCR (NM_006830.2,152-170).
ctgggtaccttacatcaat

SEQ ID NO: 226032 - DNA, 19 bp, Homo sapiens
  siRNA target sequence for UQCR (NM_006830.2,172-190).
gcaagtttaagaaggataa

SEQ ID NO: 226033 - DNA, 19 bp, Homo sapiens
  siRNA target sequence for UQCRB (NM_006294.2,323-341).
ccttgaaccgtatctgaaa

SEQ ID NO: 226034 - DNA, 19 bp, Homo sapiens
  siRNA target sequence for UQCRFS1 (NM_006003.1,535-553).
ctggcgaaaatcgaaatca

SEQ ID NO: 226035 - DNA, 19 bp, Homo sapiens
  siRNA target sequence for UQCRFS1 (NM_006003.1,538-556).
gcgaaaatcgaaatcaagt

SEQ ID NO: 226036 - DNA, 19 bp, Homo sapiens
  siRNA target sequence for UQCRFS1 (NM_006003.1,678-696).
ggacccacagcatgatcta

SEQ ID NO: 226037 - DNA, 19 bp, Homo sapiens
  siRNA target sequence for UQCRFS1 (NM_006003.1,681-699).
cccacagcatgatctagat

SEQ ID NO: 226038 - DNA, 19 bp, Homo sapiens
  siRNA target sequence for UQCRFS1 (NM_006003.1,753-771).
ctgtgtacccattgcaaat

SEQ ID NO: 226039 - DNA, 19 bp, Homo sapiens
  siRNA target sequence for UQCRFS1 (NM_006003.1,823-841).
gcatctggcaggatcagat

SEQ ID NO: 226040 - DNA, 19 bp, Homo sapiens
  siRNA target sequence for UQCRFS1 (NM_006003.1,851-869).
ctcctctcaaccttgaagt

SEQ ID NO: 226041 - DNA, 19 bp, Homo sapiens
  siRNA target sequence for UQCRFS1 (NM_006003.1,890-908).
gtgacgatatggtgattgt

SEQ ID NO: 226042 - DNA, 19 bp, Homo sapiens
  siRNA target sequence for AKR1B10 (NM_020299.3,402-420).
cctatgtctatcagaatga

SEQ ID NO: 226043 - DNA, 19 bp, Homo sapiens
  siRNA target sequence for AKR1B10 (NM_020299.3,1157-1175).
gcctgtaacgtgttgcaat

SEQ ID NO: 226044 - DNA, 19 bp, Homo sapiens
  siRNA target sequence for PCYOX1 (NM_016297.2,94-112).
gcgtgctccgccagataaa

SEQ ID NO: 226045 - DNA, 19 bp, Homo sapiens
  siRNA target sequence for PCYOX1 (NM_016297.2,95-113).
cgtgctccgccagataaaa

SEQ ID NO: 226046 - DNA, 19 bp, Homo sapiens
  siRNA target sequence for PCYOX1 (NM_016297.2,96-114).
gtgctccgccagataaaat

SEQ ID NO: 226047 - DNA, 19 bp, Homo sapiens
  siRNA target sequence for PCYOX1 (NM_016297.2,105-123).
cagataaaatcgcgattat

SEQ ID NO: 226048 - DNA, 19 bp, Homo sapiens
  siRNA target sequence for PCYOX1 (NM_016297.2,187-205).
gaagatagacctgtttgaa

SEQ ID NO: 226049 - DNA, 19 bp, Homo sapiens
  siRNA target sequence for PCYOX1 (NM_016297.2,190-208).
gatagacctgtttgaaaga

SEQ ID NO: 226050 - DNA, 19 bp, Homo sapiens
  siRNA target sequence for PCYOX1 (NM_016297.2,351-369).
gcctactggggatatataa

SEQ ID NO: 226051 - DNA, 19 bp, Homo sapiens
  siRNA target sequence for PCYOX1 (NM_016297.2,352-370).
cctactggggatatataat

SEQ ID NO: 226052 - DNA, 19 bp, Homo sapiens
  siRNA target sequence for PCYOX1 (NM_016297.2,391-409).
ggagagcaactggttcata

SEQ ID NO: 226053 - DNA, 19 bp, Homo sapiens
  siRNA target sequence for PCYOX1 (NM_016297.2,392-410).
gagagcaactggttcataa

SEQ ID NO: 226054 - DNA, 19 bp, Homo sapiens
  siRNA target sequence for PCYOX1 (NM_016297.2,394-412).
gagcaactggttcataatt

SEQ ID NO: 226055 - DNA, 19 bp, Homo sapiens
  siRNA target sequence for PCYOX1 (NM_016297.2,396-414).
gcaactggttcataattaa

SEQ ID NO: 226056 - DNA, 19 bp, Homo sapiens
  siRNA target sequence for PCYOX1 (NM_016297.2,406-424).
cataattaacgtgattaaa

SEQ ID NO: 226057 - DNA, 19 bp, Homo sapiens
  siRNA target sequence for PCYOX1 (NM_016297.2,468-486).
gggtagaggacgtgttaga

SEQ ID NO: 226058 - DNA, 19 bp, Homo sapiens
  siRNA target sequence for PCYOX1 (NM_016297.2,470-488).
gtagaggacgtgttagaca

SEQ ID NO: 226059 - DNA, 19 bp, Homo sapiens
  siRNA target sequence for PCYOX1 (NM_016297.2,507-525).
gctaccagtctcatgacta

SEQ ID NO: 226060 - DNA, 19 bp, Homo sapiens
  siRNA target sequence for PCYOX1 (NM_016297.2,508-526).
ctaccagtctcatgactat

SEQ ID NO: 226061 - DNA, 19 bp, Homo sapiens
  siRNA target sequence for PCYOX1 (NM_016297.2,518-536).
catgactatgccttcagta

SEQ ID NO: 226062 - DNA, 19 bp, Homo sapiens
  siRNA target sequence for PCYOX1 (NM_016297.2,529-547).
cttcagtagtgtcgaaaaa

SEQ ID NO: 226063 - DNA, 19 bp, Homo sapiens
  siRNA target sequence for PCYOX1 (NM_016297.2,532-550).
cagtagtgtcgaaaaatta

SEQ ID NO: 226064 - DNA, 19 bp, Homo sapiens
  siRNA target sequence for PCYOX1 (NM_016297.2,534-552).
gtagtgtcgaaaaattact

SEQ ID NO: 226065 - DNA, 19 bp, Homo sapiens
  siRNA target sequence for PCYOX1 (NM_016297.2,537-555).
gtgtcgaaaaattacttca

SEQ ID NO: 226066 - DNA, 19 bp, Homo sapiens
  siRNA target sequence for PCYOX1 (NM_016297.2,572-590).
gacttccttggaatgctta

SEQ ID NO: 226067 - DNA, 19 bp, Homo sapiens
  siRNA target sequence for PCYOX1 (NM_016297.2,574-592).
cttccttggaatgcttaat

SEQ ID NO: 226068 - DNA, 19 bp, Homo sapiens
  siRNA target sequence for PCYOX1 (NM_016297.2,577-595).
ccttggaatgcttaatcga

SEQ ID NO: 226069 - DNA, 19 bp, Homo sapiens
  siRNA target sequence for PCYOX1 (NM_016297.2,578-596).
cttggaatgcttaatcgaa

SEQ ID NO: 226070 - DNA, 19 bp, Homo sapiens
  siRNA target sequence for PCYOX1 (NM_016297.2,586-604).
gcttaatcgaacacttctt

SEQ ID NO: 226071 - DNA, 19 bp, Homo sapiens
  siRNA target sequence for PCYOX1 (NM_016297.2,594-612).
gaacacttcttgaaacctt

SEQ ID NO: 226072 - DNA, 19 bp, Homo sapiens
  siRNA target sequence for PCYOX1 (NM_016297.2,599-617).
cttcttgaaaccttgcaaa

SEQ ID NO: 226073 - DNA, 19 bp, Homo sapiens
  siRNA target sequence for PCYOX1 (NM_016297.2,659-677).
cctgttatgagggtcaatt

SEQ ID NO: 226074 - DNA, 19 bp, Homo sapiens
  siRNA target sequence for PCYOX1 (NM_016297.2,681-699).
gccaaagcacggacatcaa

SEQ ID NO: 226075 - DNA, 19 bp, Homo sapiens
  siRNA target sequence for PCYOX1 (NM_016297.2,682-700).
ccaaagcacggacatcaat

SEQ ID NO: 226076 - DNA, 19 bp, Homo sapiens
  siRNA target sequence for PCYOX1 (NM_016297.2,750-768).
cagtagaaggtggcaataa

SEQ ID NO: 226077 - DNA, 19 bp, Homo sapiens
  siRNA target sequence for PCYOX1 (NM_016297.2,790-808).
gcaggcatccaaaagcaat

SEQ ID NO: 226078 - DNA, 19 bp, Homo sapiens
  siRNA target sequence for PCYOX1 (NM_016297.2,795-813).
catccaaaagcaatcttat

SEQ ID NO: 226079 - DNA, 19 bp, Homo sapiens
  siRNA target sequence for PCYOX1 (NM_016297.2,799-817).
caaaagcaatcttatatct

SEQ ID NO: 226080 - DNA, 19 bp, Homo sapiens
  siRNA target sequence for PCYOX1 (NM_016297.2,809-827).
cttatatctggctcagtaa

SEQ ID NO: 226081 - DNA, 19 bp, Homo sapiens
  siRNA target sequence for PCYOX1 (NM_016297.2,816-834).
ctggctcagtaatgtacat

SEQ ID NO: 226082 - DNA, 19 bp, Homo sapiens
  siRNA target sequence for PCYOX1 (NM_016297.2,863-881).
ggaaatccaacaaagatgt

SEQ ID NO: 226083 - DNA, 19 bp, Homo sapiens
  siRNA target sequence for PCYOX1 (NM_016297.2,887-905).
gtggtctaccaaattggaa

SEQ ID NO: 226084 - DNA, 19 bp, Homo sapiens
  siRNA target sequence for PCYOX1 (NM_016297.2,910-928).
gactcgttcagacttctat

SEQ ID NO: 226085 - DNA, 19 bp, Homo sapiens
  siRNA target sequence for PCYOX1 (NM_016297.2,912-930).
ctcgttcagacttctatga

SEQ ID NO: 226086 - DNA, 19 bp, Homo sapiens
  siRNA target sequence for PCYOX1 (NM_016297.2,940-958).
ggtggccactccgttgaat

SEQ ID NO: 226087 - DNA, 19 bp, Homo sapiens
  siRNA target sequence for PCYOX1 (NM_016297.2,944-962).
gccactccgttgaatcgaa

SEQ ID NO: 226088 - DNA, 19 bp, Homo sapiens
  siRNA target sequence for PCYOX1 (NM_016297.2,945-963).
ccactccgttgaatcgaaa

SEQ ID NO: 226089 - DNA, 19 bp, Homo sapiens
  siRNA target sequence for PCYOX1 (NM_016297.2,946-964).
cactccgttgaatcgaaaa

SEQ ID NO: 226090 - DNA, 19 bp, Homo sapiens
  siRNA target sequence for PCYOX1 (NM_016297.2,948-966).
ctccgttgaatcgaaaaat

SEQ ID NO: 226091 - DNA, 19 bp, Homo sapiens
  siRNA target sequence for PCYOX1 (NM_016297.2,950-968).
ccgttgaatcgaaaaatgt

SEQ ID NO: 226092 - DNA, 19 bp, Homo sapiens
  siRNA target sequence for PCYOX1 (NM_016297.2,1025-1043).
caacatatagtgacaactt

SEQ ID NO: 226093 - DNA, 19 bp, Homo sapiens
  siRNA target sequence for PCYOX1 (NM_016297.2,1055-1073).
gaattgaatacatctatct

SEQ ID NO: 226094 - DNA, 19 bp, Homo sapiens
  siRNA target sequence for PCYOX1 (NM_016297.2,1077-1095).
gctctagacccatagataa

SEQ ID NO: 226095 - DNA, 19 bp, Homo sapiens
  siRNA target sequence for PCYOX1 (NM_016297.2,1078-1096).
ctctagacccatagataaa

SEQ ID NO: 226096 - DNA, 19 bp, Homo sapiens
  siRNA target sequence for PCYOX1 (NM_016297.2,1080-1098).
ctagacccatagataaatt

SEQ ID NO: 226097 - DNA, 19 bp, Homo sapiens
  siRNA target sequence for PCYOX1 (NM_016297.2,1103-1121).
cttaatacagttttaacca

SEQ ID NO: 226098 - DNA, 19 bp, Homo sapiens
  siRNA target sequence for PCYOX1 (NM_016297.2,1124-1142).
gataattcagatttgttca

SEQ ID NO: 226099 - DNA, 19 bp, Homo sapiens
  siRNA target sequence for PCYOX1 (NM_016297.2,1194-1212).
catcaacagatggaacata

SEQ ID NO: 226100 - DNA, 19 bp, Homo sapiens
  siRNA target sequence for PCYOX1 (NM_016297.2,1241-1259).
cttactaaagcacaaattt

SEQ ID NO: 226101 - DNA, 19 bp, Homo sapiens
  siRNA target sequence for PCYOX1 (NM_016297.2,1267-1285).
ctttctgtcctatgattat

SEQ ID NO: 226102 - DNA, 19 bp, Homo sapiens
  siRNA target sequence for PCYOX1 (NM_016297.2,1303-1321).
gcttgcatatcctcactat

SEQ ID NO: 226103 - DNA, 19 bp, Homo sapiens
  siRNA target sequence for PCYOX1 (NM_016297.2,1331-1349).
gagaaatgcccctctatca

SEQ ID NO: 226104 - DNA, 19 bp, Homo sapiens
  siRNA target sequence for PCYOX1 (NM_016297.2,1333-1351).
gaaatgcccctctatcatt

SEQ ID NO: 226105 - DNA, 19 bp, Homo sapiens
  siRNA target sequence for PCYOX1 (NM_016297.2,1352-1370).
ctccatgatcgactttatt

SEQ ID NO: 226106 - DNA, 19 bp, Homo sapiens
  siRNA target sequence for PCYOX1 (NM_016297.2,1462-1480).
cgggcacacagacatgatt

SEQ ID NO: 226107 - DNA, 19 bp, Homo sapiens
  siRNA target sequence for MSRA (NM_012331.2,344-362).
ccctgtagcggccaaacat

SEQ ID NO: 226108 - DNA, 19 bp, Homo sapiens
  siRNA target sequence for MSRA (NM_012331.2,346-364).
ctgtagcggccaaacatca

SEQ ID NO: 226109 - DNA, 19 bp, Homo sapiens
  siRNA target sequence for MSRA (NM_012331.2,352-370).
cggccaaacatcatgtcaa

SEQ ID NO: 226110 - DNA, 19 bp, Homo sapiens
  siRNA target sequence for MSRA (NM_012331.2,353-371).
ggccaaacatcatgtcaat

SEQ ID NO: 226111 - DNA, 19 bp, Homo sapiens
  siRNA target sequence for MSRA (NM_012331.2,461-479).
ggtcttgaaaggagtgtat

SEQ ID NO: 226112 - DNA, 19 bp, Homo sapiens
  siRNA target sequence for MSRA (NM_012331.2,462-480).
gtcttgaaaggagtgtatt

SEQ ID NO: 226113 - DNA, 19 bp, Homo sapiens
  siRNA target sequence for MSRA (NM_012331.2,498-516).
gcaggaggctatacttcaa

SEQ ID NO: 226114 - DNA, 19 bp, Homo sapiens
  siRNA target sequence for MSRA (NM_012331.2,499-517).
caggaggctatacttcaaa

SEQ ID NO: 226115 - DNA, 19 bp, Homo sapiens
  siRNA target sequence for MSRA (NM_012331.2,504-522).
ggctatacttcaaatccta

SEQ ID NO: 226116 - DNA, 19 bp, Homo sapiens
  siRNA target sequence for MSRA (NM_012331.2,582-600).
cagccagaacacatgagtt

SEQ ID NO: 226117 - DNA, 19 bp, Homo sapiens
  siRNA target sequence for MSRA (NM_012331.2,584-602).
gccagaacacatgagtttt

SEQ ID NO: 226118 - DNA, 19 bp, Homo sapiens
  siRNA target sequence for MSRA (NM_012331.2,586-604).
cagaacacatgagttttga

SEQ ID NO: 226119 - DNA, 19 bp, Homo sapiens
  siRNA target sequence for MSRA (NM_012331.2,699-717).
ccgacctctgccaagcaaa

SEQ ID NO: 226120 - DNA, 19 bp, Homo sapiens
  siRNA target sequence for MSRA (NM_012331.2,700-718).
cgacctctgccaagcaaat

SEQ ID NO: 226121 - DNA, 19 bp, Homo sapiens
  siRNA target sequence for MSRA (NM_012331.2,736-754).
ccaaagagaactaccaaaa

SEQ ID NO: 226122 - DNA, 19 bp, Homo sapiens
  siRNA target sequence for MSRA (NM_012331.2,798-816).
cgggagggacagactttct

SEQ ID NO: 226123 - DNA, 19 bp, Homo sapiens
  siRNA target sequence for MSRA (NM_012331.2,803-821).
gggacagactttctactat

SEQ ID NO: 226124 - DNA, 19 bp, Homo sapiens
  siRNA target sequence for MSRA (NM_012331.2,895-913).
cctgcccagtgggtattaa

SEQ ID NO: 226125 - DNA, 19 bp, Homo sapiens
  siRNA target sequence for RRM1 (NM_001033.2,258-276).
gccaagaacgagtcatgtt

SEQ ID NO: 226126 - DNA, 19 bp, Homo sapiens
  siRNA target sequence for RRM1 (NM_001033.2,263-281).
gaacgagtcatgtttgaca

SEQ ID NO: 226127 - DNA, 19 bp, Homo sapiens
  siRNA target sequence for RRM1 (NM_001033.2,266-284).
cgagtcatgtttgacaaaa

SEQ ID NO: 226128 - DNA, 19 bp, Homo sapiens
  siRNA target sequence for RRM1 (NM_001033.2,267-285).
gagtcatgtttgacaaaat

SEQ ID NO: 226129 - DNA, 19 bp, Homo sapiens
  siRNA target sequence for RRM1 (NM_001033.2,271-289).
catgtttgacaaaattaca

SEQ ID NO: 226130 - DNA, 19 bp, Homo sapiens
  siRNA target sequence for RRM1 (NM_001033.2,293-311).
cgaatccagaagctttgtt

SEQ ID NO: 226131 - DNA, 19 bp, Homo sapiens
  siRNA target sequence for RRM1 (NM_001033.2,294-312).
gaatccagaagctttgtta

SEQ ID NO: 226132 - DNA, 19 bp, Homo sapiens
  siRNA target sequence for RRM1 (NM_001033.2,304-322).
gctttgttatggactcaat

SEQ ID NO: 226133 - DNA, 19 bp, Homo sapiens
  siRNA target sequence for RRM1 (NM_001033.2,305-323).
ctttgttatggactcaata

SEQ ID NO: 226134 - DNA, 19 bp, Homo sapiens
  siRNA target sequence for RRM1 (NM_001033.2,309-327).
gttatggactcaatatgga

SEQ ID NO: 226135 - DNA, 19 bp, Homo sapiens
  siRNA target sequence for RRM1 (NM_001033.2,342-360).
ctcagatcaccatgaaagt

SEQ ID NO: 226136 - DNA, 19 bp, Homo sapiens
  siRNA target sequence for RRM1 (NM_001033.2,359-377).
gtaatccaaggcttgtaca

SEQ ID NO: 226137 - DNA, 19 bp, Homo sapiens
  siRNA target sequence for RRM1 (NM_001033.2,390-408).
cagtggaactagatacttt

SEQ ID NO: 226138 - DNA, 19 bp, Homo sapiens
  siRNA target sequence for RRM1 (NM_001033.2,521-539).
gtgatggaagacctctata

SEQ ID NO: 226139 - DNA, 19 bp, Homo sapiens
  siRNA target sequence for RRM1 (NM_001033.2,527-545).
gaagacctctataactaca

SEQ ID NO: 226140 - DNA, 19 bp, Homo sapiens
  siRNA target sequence for RRM1 (NM_001033.2,530-548).
gacctctataactacataa

SEQ ID NO: 226141 - DNA, 19 bp, Homo sapiens
  siRNA target sequence for RRM1 (NM_001033.2,535-553).
ctataactacataaatcca

SEQ ID NO: 226142 - DNA, 19 bp, Homo sapiens
  siRNA target sequence for RRM1 (NM_001033.2,580-598).
ggccaagtcaacattggat

SEQ ID NO: 226143 - DNA, 19 bp, Homo sapiens
  siRNA target sequence for RRM1 (NM_001033.2,581-599).
gccaagtcaacattggata

SEQ ID NO: 226144 - DNA, 19 bp, Homo sapiens
  siRNA target sequence for RRM1 (NM_001033.2,583-601).
caagtcaacattggatatt

SEQ ID NO: 226145 - DNA, 19 bp, Homo sapiens
  siRNA target sequence for RRM1 (NM_001033.2,588-606).
caacattggatattgttct

SEQ ID NO: 226146 - DNA, 19 bp, Homo sapiens
  siRNA target sequence for RRM1 (NM_001033.2,620-638).
cgcctgaattctgctatta

SEQ ID NO: 226147 - DNA, 19 bp, Homo sapiens
  siRNA target sequence for RRM1 (NM_001033.2,625-643).
gaattctgctattatctat

SEQ ID NO: 226148 - DNA, 19 bp, Homo sapiens
  siRNA target sequence for RRM1 (NM_001033.2,644-662).
gaccgagatttctcttaca

SEQ ID NO: 226149 - DNA, 19 bp, Homo sapiens
  siRNA target sequence for RRM1 (NM_001033.2,646-664).
ccgagatttctcttacaat

SEQ ID NO: 226150 - DNA, 19 bp, Homo sapiens
  siRNA target sequence for RRM1 (NM_001033.2,679-697).
gacgctagagcggtcttat

SEQ ID NO: 226151 - DNA, 19 bp, Homo sapiens
  siRNA target sequence for RRM1 (NM_001033.2,681-699).
cgctagagcggtcttattt

SEQ ID NO: 226152 - DNA, 19 bp, Homo sapiens
  siRNA target sequence for RRM1 (NM_001033.2,683-701).
ctagagcggtcttatttgt

SEQ ID NO: 226153 - DNA, 19 bp, Homo sapiens
  siRNA target sequence for RRM1 (NM_001033.2,686-704).
gagcggtcttatttgttga

SEQ ID NO: 226154 - DNA, 19 bp, Homo sapiens
  siRNA target sequence for RRM1 (NM_001033.2,689-707).
cggtcttatttgttgaaga

SEQ ID NO: 226155 - DNA, 19 bp, Homo sapiens
  siRNA target sequence for RRM1 (NM_001033.2,722-740).
gctgaaagaccacaacata

SEQ ID NO: 226156 - DNA, 19 bp, Homo sapiens
  siRNA target sequence for RRM1 (NM_001033.2,723-741).
ctgaaagaccacaacatat

SEQ ID NO: 226157 - DNA, 19 bp, Homo sapiens
  siRNA target sequence for RRM1 (NM_001033.2,729-747).
gaccacaacatatgttgat

SEQ ID NO: 226158 - DNA, 19 bp, Homo sapiens
  siRNA target sequence for RRM1 (NM_001033.2,731-749).
ccacaacatatgttgatga

SEQ ID NO: 226159 - DNA, 19 bp, Homo sapiens
  siRNA target sequence for RRM1 (NM_001033.2,756-774).
ctgttgggatccacaaaga

SEQ ID NO: 226160 - DNA, 19 bp, Homo sapiens
  siRNA target sequence for RRM1 (NM_001033.2,785-803).
gcagcaattgaaacatata

SEQ ID NO: 226161 - DNA, 19 bp, Homo sapiens
  siRNA target sequence for RRM1 (NM_001033.2,834-852).
cttcgcccactctcttcaa

SEQ ID NO: 226162 - DNA, 19 bp, Homo sapiens
  siRNA target sequence for RRM1 (NM_001033.2,862-880).
caaccgcccacaactttct

SEQ ID NO: 226163 - DNA, 19 bp, Homo sapiens
  siRNA target sequence for RRM1 (NM_001033.2,920-938).
ggcatttatgacactctaa

SEQ ID NO: 226164 - DNA, 19 bp, Homo sapiens
  siRNA target sequence for RRM1 (NM_001033.2,977-995).
ggtgttgctgtgagttgta

SEQ ID NO: 226165 - DNA, 19 bp, Homo sapiens
  siRNA target sequence for RRM1 (NM_001033.2,1012-1030).
ctacattgctgggactaat

SEQ ID NO: 226166 - DNA, 19 bp, Homo sapiens
  siRNA target sequence for RRM1 (NM_001033.2,1022-1040).
gggactaatggcaattcca

SEQ ID NO: 226167 - DNA, 19 bp, Homo sapiens
  siRNA target sequence for RRM1 (NM_001033.2,1023-1041).
ggactaatggcaattccaa

SEQ ID NO: 226168 - DNA, 19 bp, Homo sapiens
  siRNA target sequence for RRM1 (NM_001033.2,1024-1042).
gactaatggcaattccaat

SEQ ID NO: 226169 - DNA, 19 bp, Homo sapiens
  siRNA target sequence for RRM1 (NM_001033.2,1049-1067).
gtaccgatgctgagagtat

SEQ ID NO: 226170 - DNA, 19 bp, Homo sapiens
  siRNA target sequence for RRM1 (NM_001033.2,1053-1071).
cgatgctgagagtatataa

SEQ ID NO: 226171 - DNA, 19 bp, Homo sapiens
  siRNA target sequence for RRM1 (NM_001033.2,1058-1076).
ctgagagtatataacaaca

SEQ ID NO: 226172 - DNA, 19 bp, Homo sapiens
  siRNA target sequence for RRM1 (NM_001033.2,1109-1127).
cgtcctggggcatttgcta

SEQ ID NO: 226173 - DNA, 19 bp, Homo sapiens
  siRNA target sequence for RRM1 (NM_001033.2,1110-1128).
gtcctggggcatttgctat

SEQ ID NO: 226174 - DNA, 19 bp, Homo sapiens
  siRNA target sequence for RRM1 (NM_001033.2,1113-1131).
ctggggcatttgctattta

SEQ ID NO: 226175 - DNA, 19 bp, Homo sapiens
  siRNA target sequence for RRM1 (NM_001033.2,1116-1134).
gggcatttgctatttacct

SEQ ID NO: 226176 - DNA, 19 bp, Homo sapiens
  siRNA target sequence for RRM1 (NM_001033.2,1132-1150).
cctggagccttggcattta

SEQ ID NO: 226177 - DNA, 19 bp, Homo sapiens
  siRNA target sequence for RRM1 (NM_001033.2,1136-1154).
gagccttggcatttagaca

SEQ ID NO: 226178 - DNA, 19 bp, Homo sapiens
  siRNA target sequence for RRM1 (NM_001033.2,1198-1216).
gcagcgtgccagagatctt

SEQ ID NO: 226179 - DNA, 19 bp, Homo sapiens
  siRNA target sequence for RRM1 (NM_001033.2,1199-1217).
cagcgtgccagagatcttt

SEQ ID NO: 226180 - DNA, 19 bp, Homo sapiens
  siRNA target sequence for RRM1 (NM_001033.2,1202-1220).
cgtgccagagatcttttct

SEQ ID NO: 226181 - DNA, 19 bp, Homo sapiens
  siRNA target sequence for RRM1 (NM_001033.2,1249-1267).
gaaacgagtggagactaat

SEQ ID NO: 226182 - DNA, 19 bp, Homo sapiens
  siRNA target sequence for RRM1 (NM_001033.2,1336-1354).
gaaactatatgcaagttat

SEQ ID NO: 226183 - DNA, 19 bp, Homo sapiens
  siRNA target sequence for RRM1 (NM_001033.2,1340-1358).
ctatatgcaagttatgaga

SEQ ID NO: 226184 - DNA, 19 bp, Homo sapiens
  siRNA target sequence for RRM1 (NM_001033.2,1365-1383).
gtcgtgtccgcaaagttgt

SEQ ID NO: 226185 - DNA, 19 bp, Homo sapiens
  siRNA target sequence for RRM1 (NM_001033.2,1367-1385).
cgtgtccgcaaagttgtaa

SEQ ID NO: 226186 - DNA, 19 bp, Homo sapiens
  siRNA target sequence for RRM1 (NM_001033.2,1431-1449).
caggcaccccgtatatgct

SEQ ID NO: 226187 - DNA, 19 bp, Homo sapiens
  siRNA target sequence for RRM1 (NM_001033.2,1437-1455).
ccccgtatatgctctacaa

SEQ ID NO: 226188 - DNA, 19 bp, Homo sapiens
  siRNA target sequence for RRM1 (NM_001033.2,1438-1456).
cccgtatatgctctacaaa

SEQ ID NO: 226189 - DNA, 19 bp, Homo sapiens
  siRNA target sequence for RRM1 (NM_001033.2,1440-1458).
cgtatatgctctacaaaga

SEQ ID NO: 226190 - DNA, 19 bp, Homo sapiens
  siRNA target sequence for RRM1 (NM_001033.2,1441-1459).
gtatatgctctacaaagat

SEQ ID NO: 226191 - DNA, 19 bp, Homo sapiens
  siRNA target sequence for RRM1 (NM_001033.2,1490-1508).
ctgggaaccatcaaatgca

SEQ ID NO: 226192 - DNA, 19 bp, Homo sapiens
  siRNA target sequence for RRM1 (NM_001033.2,1547-1565).
gatgaggttgctgtttgta

SEQ ID NO: 226193 - DNA, 19 bp, Homo sapiens
  siRNA target sequence for RRM1 (NM_001033.2,1575-1593).
ccctggccctgaatatgta

SEQ ID NO: 226194 - DNA, 19 bp, Homo sapiens
  siRNA target sequence for RRM1 (NM_001033.2,1604-1622).
gaacacacatacgacttta

SEQ ID NO: 226195 - DNA, 19 bp, Homo sapiens
  siRNA target sequence for RRM1 (NM_001033.2,1611-1629).
catacgactttaagaagtt

SEQ ID NO: 226196 - DNA, 19 bp, Homo sapiens
  siRNA target sequence for RRM1 (NM_001033.2,1627-1645).
gttggctgaagtcactaaa

SEQ ID NO: 226197 - DNA, 19 bp, Homo sapiens
  siRNA target sequence for RRM1 (NM_001033.2,1646-1664).
gtcgttgtccgaaacttga

SEQ ID NO: 226198 - DNA, 19 bp, Homo sapiens
  siRNA target sequence for RRM1 (NM_001033.2,1648-1666).
cgttgtccgaaacttgaat

SEQ ID NO: 226199 - DNA, 19 bp, Homo sapiens
  siRNA target sequence for RRM1 (NM_001033.2,1649-1667).
gttgtccgaaacttgaata

SEQ ID NO: 226200 - DNA, 19 bp, Homo sapiens
  siRNA target sequence for RRM1 (NM_001033.2,1652-1670).
gtccgaaacttgaataaaa

SEQ ID NO: 226201 - DNA, 19 bp, Homo sapiens
  siRNA target sequence for RRM1 (NM_001033.2,1654-1672).
ccgaaacttgaataaaatt

SEQ ID NO: 226202 - DNA, 19 bp, Homo sapiens
  siRNA target sequence for RRM1 (NM_001033.2,1655-1673).
cgaaacttgaataaaatta

SEQ ID NO: 226203 - DNA, 19 bp, Homo sapiens
  siRNA target sequence for RRM1 (NM_001033.2,1702-1720).
ggcatgcctatcaaataaa

SEQ ID NO: 226204 - DNA, 19 bp, Homo sapiens
  siRNA target sequence for RRM1 (NM_001033.2,1721-1739).
cgccatcgccccattggaa

SEQ ID NO: 226205 - DNA, 19 bp, Homo sapiens
  siRNA target sequence for RRM1 (NM_001033.2,1722-1740).
gccatcgccccattggaat

SEQ ID NO: 226206 - DNA, 19 bp, Homo sapiens
  siRNA target sequence for RRM1 (NM_001033.2,1751-1769).
ggtctggcagatgctttta

SEQ ID NO: 226207 - DNA, 19 bp, Homo sapiens
  siRNA target sequence for RRM1 (NM_001033.2,1752-1770).
gtctggcagatgcttttat

SEQ ID NO: 226208 - DNA, 19 bp, Homo sapiens
  siRNA target sequence for RRM1 (NM_001033.2,1763-1781).
gcttttatcctgatgagat

SEQ ID NO: 226209 - DNA, 19 bp, Homo sapiens
  siRNA target sequence for RRM1 (NM_001033.2,1796-1814).
gcagaagcccagttactga

SEQ ID NO: 226210 - DNA, 19 bp, Homo sapiens
  siRNA target sequence for RRM1 (NM_001033.2,1797-1815).
cagaagcccagttactgaa

SEQ ID NO: 226211 - DNA, 19 bp, Homo sapiens
  siRNA target sequence for RRM1 (NM_001033.2,1803-1821).
cccagttactgaataagca

SEQ ID NO: 226212 - DNA, 19 bp, Homo sapiens
  siRNA target sequence for RRM1 (NM_001033.2,1877-1895).
gagcagggcccatacgaaa

SEQ ID NO: 226213 - DNA, 19 bp, Homo sapiens
  siRNA target sequence for RRM1 (NM_001033.2,1882-1900).
gggcccatacgaaacctat

SEQ ID NO: 226214 - DNA, 19 bp, Homo sapiens
  siRNA target sequence for RRM1 (NM_001033.2,1933-1951).
gtatgatatgtggaatgtt

SEQ ID NO: 226215 - DNA, 19 bp, Homo sapiens
  siRNA target sequence for RRM1 (NM_001033.2,2115-2133).
gagtcttgtcaggagaatt

SEQ ID NO: 226216 - DNA, 19 bp, Homo sapiens
  siRNA target sequence for RRM1 (NM_001033.2,2126-2144).
ggagaatttcagattgtaa

SEQ ID NO: 226217 - DNA, 19 bp, Homo sapiens
  siRNA target sequence for RRM1 (NM_001033.2,2150-2168).
cacttattgaaagatctta

SEQ ID NO: 226218 - DNA, 19 bp, Homo sapiens
  siRNA target sequence for RRM1 (NM_001033.2,2178-2196).
gcctatggcatgaagagat

SEQ ID NO: 226219 - DNA, 19 bp, Homo sapiens
  siRNA target sequence for RRM1 (NM_001033.2,2197-2215).
gaaaaaccagattattgca

SEQ ID NO: 226220 - DNA, 19 bp, Homo sapiens
  siRNA target sequence for RRM1 (NM_001033.2,2325-2343).
gaggtgctttcattgatca

SEQ ID NO: 226221 - DNA, 19 bp, Homo sapiens
  siRNA target sequence for RRM1 (NM_001033.2,2327-2345).
ggtgctttcattgatcaaa

SEQ ID NO: 226222 - DNA, 19 bp, Homo sapiens
  siRNA target sequence for RRM1 (NM_001033.2,2365-2383).
cattgctgagcctaactat

SEQ ID NO: 226223 - DNA, 19 bp, Homo sapiens
  siRNA target sequence for RRM1 (NM_001033.2,2375-2393).
cctaactatggcaaactca

SEQ ID NO: 226224 - DNA, 19 bp, Homo sapiens
  siRNA target sequence for RRM1 (NM_001033.2,2428-2446).
gaagactgggatgtattat

SEQ ID NO: 226225 - DNA, 19 bp, Homo sapiens
  siRNA target sequence for RRM1 (NM_001033.2,2431-2449).
gactgggatgtattattta

SEQ ID NO: 226226 - DNA, 19 bp, Homo sapiens
  siRNA target sequence for RRM1 (NM_001033.2,2472-2490).
caatccagttcactctaaa

SEQ ID NO: 226227 - DNA, 19 bp, Homo sapiens
  siRNA target sequence for RRM1 (NM_001033.2,2566-2584).
gtgctctttggagaataga

SEQ ID NO: 226228 - DNA, 19 bp, Homo sapiens
  siRNA target sequence for RRM2 (NM_001034.1,444-462).
cccatcgagtaccatgata

SEQ ID NO: 226229 - DNA, 19 bp, Homo sapiens
  siRNA target sequence for RRM2 (NM_001034.1,445-463).
ccatcgagtaccatgatat

SEQ ID NO: 226230 - DNA, 19 bp, Homo sapiens
  siRNA target sequence for RRM2 (NM_001034.1,459-477).
gatatctggcagatgtata

SEQ ID NO: 226231 - DNA, 19 bp, Homo sapiens
  siRNA target sequence for RRM2 (NM_001034.1,551-569).
gaaacccgaggagagatat

SEQ ID NO: 226232 - DNA, 19 bp, Homo sapiens
  siRNA target sequence for RRM2 (NM_001034.1,557-575).
cgaggagagatattttata

SEQ ID NO: 226233 - DNA, 19 bp, Homo sapiens
  siRNA target sequence for RRM2 (NM_001034.1,1191-1209).
ctggaactgggttttagca

SEQ ID NO: 226234 - DNA, 19 bp, Homo sapiens
  siRNA target sequence for RRM2 (NM_001034.1,1224-1242).
gagaacccatttgacttta

SEQ ID NO: 226235 - DNA, 19 bp, Homo sapiens
  siRNA target sequence for RRM2 (NM_001034.1,1236-1254).
gactttatggagaatattt

SEQ ID NO: 226236 - DNA, 19 bp, Homo sapiens
  siRNA target sequence for RRM2 (NM_001034.1,1260-1278).
gaaggaaagactaacttct

SEQ ID NO: 226237 - DNA, 19 bp, Homo sapiens
  siRNA target sequence for RRM2 (NM_001034.1,1264-1282).
gaaagactaacttctttga

SEQ ID NO: 226238 - DNA, 19 bp, Homo sapiens
  siRNA target sequence for RRM2 (NM_001034.1,1330-1348).
cagagaattcttttacctt

SEQ ID NO: 226239 - DNA, 19 bp, Homo sapiens
  siRNA target sequence for RRM2B (NM_015713.2,266-284).
gcagaagaggtcgacttat

SEQ ID NO: 226240 - DNA, 19 bp, Homo sapiens
  siRNA target sequence for RRM2B (NM_015713.2,269-287).
gaagaggtcgacttatcaa

SEQ ID NO: 226241 - DNA, 19 bp, Homo sapiens
  siRNA target sequence for RRM2B (NM_015713.2,274-292).
ggtcgacttatcaaaggat

SEQ ID NO: 226242 - DNA, 19 bp, Homo sapiens
  siRNA target sequence for RRM2B (NM_015713.2,297-315).
ctcactggaacaagcttaa

SEQ ID NO: 226243 - DNA, 19 bp, Homo sapiens
  siRNA target sequence for RRM2B (NM_015713.2,362-380).
gccagtgatggaattgtaa

SEQ ID NO: 226244 - DNA, 19 bp, Homo sapiens
  siRNA target sequence for RRM2B (NM_015713.2,422-440).
ccagaggctcgctgtttct

SEQ ID NO: 226245 - DNA, 19 bp, Homo sapiens
  siRNA target sequence for RRM2B (NM_015713.2,486-504).
gtttgctgatagacactta

SEQ ID NO: 226246 - DNA, 19 bp, Homo sapiens
  siRNA target sequence for RRM2B (NM_015713.2,589-607).
gcgatggatagcagataga

SEQ ID NO: 226247 - DNA, 19 bp, Homo sapiens
  siRNA target sequence for RRM2B (NM_015713.2,590-608).
cgatggatagcagatagaa

SEQ ID NO: 226248 - DNA, 19 bp, Homo sapiens
  siRNA target sequence for RRM2B (NM_015713.2,595-613).
gatagcagatagaaaatct

SEQ ID NO: 226249 - DNA, 19 bp, Homo sapiens
  siRNA target sequence for RRM2B (NM_015713.2,680-698).
gctatattctggctaaaga

SEQ ID NO: 226250 - DNA, 19 bp, Homo sapiens
  siRNA target sequence for RRM2B (NM_015713.2,784-802).
gttccaatacttagtaaat

SEQ ID NO: 226251 - DNA, 19 bp, Homo sapiens
  siRNA target sequence for RRM2B (NM_015713.2,823-841).
cagggagatcattgttgat

SEQ ID NO: 226252 - DNA, 19 bp, Homo sapiens
  siRNA target sequence for RRM2B (NM_015713.2,832-850).
cattgttgatgctgtcaaa

SEQ ID NO: 226253 - DNA, 19 bp, Homo sapiens
  siRNA target sequence for RRM2B (NM_015713.2,931-949).
gtttgtagctgacagatta

SEQ ID NO: 226254 - DNA, 19 bp, Homo sapiens
  siRNA target sequence for RRM2B (NM_015713.2,1045-1063).
gaaacgagtttcagagtat

SEQ ID NO: 226255 - DNA, 19 bp, Homo sapiens
  siRNA target sequence for MDGA1 (NM_153487.2,1409-1427).
gtagcgcctcggacaagtt

SEQ ID NO: 226256 - DNA, 19 bp, Homo sapiens
  siRNA target sequence for MDGA1 (NM_153487.2,1458-1476).
gcgcatcgagcgtattgca

SEQ ID NO: 226257 - DNA, 19 bp, Homo sapiens
  siRNA target sequence for MDGA1 (NM_153487.2,1603-1621).
gatgtgcgaggcaacttct

SEQ ID NO: 226258 - DNA, 19 bp, Homo sapiens
  siRNA target sequence for MDGA1 (NM_153487.2,2152-2170).
ctggtgcgatccatgaaga

SEQ ID NO: 226259 - DNA, 19 bp, Homo sapiens
  siRNA target sequence for MDGA1 (NM_153487.2,2162-2180).
ccatgaagaacgctacatt

SEQ ID NO: 226260 - DNA, 19 bp, Homo sapiens
  siRNA target sequence for MDGA1 (NM_153487.2,2187-2205).
cactcctgacgtgatcaaa

SEQ ID NO: 226261 - DNA, 19 bp, Homo sapiens
  siRNA target sequence for MDGA1 (NM_153487.2,2189-2207).
ctcctgacgtgatcaaaga

SEQ ID NO: 226262 - DNA, 19 bp, Homo sapiens
  siRNA target sequence for MDGA1 (NM_153487.2,2331-2349).
gctggtgacccgcaatgat

SEQ ID NO: 226263 - DNA, 19 bp, Homo sapiens
  siRNA target sequence for MDGA1 (NM_153487.2,2894-2912).
cggctgtgtggcgtttcaa

SEQ ID NO: 226264 - DNA, 19 bp, Homo sapiens
  siRNA target sequence for MDGA1 (NM_153487.2,3079-3097).
gcctacagcccggagtttt

SEQ ID NO: 226265 - DNA, 19 bp, Homo sapiens
  siRNA target sequence for MDGA1 (NM_153487.2,3080-3098).
cctacagcccggagtttta

SEQ ID NO: 226266 - DNA, 19 bp, Homo sapiens
  siRNA target sequence for MDGA1 (NM_153487.2,3127-3145).
cacaagctgtccaagaact

SEQ ID NO: 226267 - DNA, 19 bp, Homo sapiens
  siRNA target sequence for MDGA1 (NM_153487.2,3190-3208).
gaccctgtgctcaactaca

SEQ ID NO: 226268 - DNA, 19 bp, Homo sapiens
  siRNA target sequence for MDGA1 (NM_153487.2,3547-3565).
ggtccccccaccgacataa

SEQ ID NO: 226269 - DNA, 19 bp, Homo sapiens
  siRNA target sequence for MDGA1 (NM_153487.2,3572-3590).
cccctgagggctactacat

SEQ ID NO: 226270 - DNA, 19 bp, Homo sapiens
  siRNA target sequence for MDGA1 (NM_153487.2,3574-3592).
cctgagggctactacatgt

SEQ ID NO: 226271 - DNA, 19 bp, Homo sapiens
  siRNA target sequence for MDGA1 (NM_153487.2,3575-3593).
ctgagggctactacatgtt

SEQ ID NO: 226272 - DNA, 19 bp, Homo sapiens
  siRNA target sequence for MDGA1 (NM_153487.2,3577-3595).
gagggctactacatgttca

SEQ ID NO: 226273 - DNA, 19 bp, Homo sapiens
  siRNA target sequence for MDGA1 (NM_153487.2,3625-3643).
gaccgtgcaaggttagtga

SEQ ID NO: 226274 - DNA, 19 bp, Homo sapiens
  siRNA target sequence for MDGA1 (NM_153487.2,3732-3750).
ggtgcggtcccggaacaaa

SEQ ID NO: 226275 - DNA, 19 bp, Homo sapiens
  siRNA target sequence for MDGA1 (NM_153487.2,3773-3791).
ggtctctcagtggcaataa

SEQ ID NO: 226276 - DNA, 19 bp, Homo sapiens
  siRNA target sequence for MDGA1 (NM_153487.2,3873-3891).
gggctacctgggggatatt

SEQ ID NO: 226277 - DNA, 19 bp, Homo sapiens
  siRNA target sequence for FDXR (NM_004110.2,186-204).
cggcccaacacctgctaaa

SEQ ID NO: 226278 - DNA, 19 bp, Homo sapiens
  siRNA target sequence for FDXR (NM_004110.2,287-305).
cccgaggtgaagaatgtca

SEQ ID NO: 226279 - DNA, 19 bp, Homo sapiens
  siRNA target sequence for FDXR (NM_004110.2,288-306).
ccgaggtgaagaatgtcat

SEQ ID NO: 226280 - DNA, 19 bp, Homo sapiens
  siRNA target sequence for FDXR (NM_004110.2,555-573).
gtgacacagccgtgattct

SEQ ID NO: 226281 - DNA, 19 bp, Homo sapiens
  siRNA target sequence for FDXR (NM_004110.2,743-761).
caagtggccttcaccatta

SEQ ID NO: 226282 - DNA, 19 bp, Homo sapiens
  siRNA target sequence for FDXR (NM_004110.2,1151-1169).
ccaagcgtgccctttgact

SEQ ID NO: 226283 - DNA, 19 bp, Homo sapiens
  siRNA target sequence for FDXR (NM_004110.2,1392-1410).
gggtccggccagtctcttt

SEQ ID NO: 226284 - DNA, 19 bp, Homo sapiens
  siRNA target sequence for SC4MOL (NM_006745.2,131-149).
ccttggctgtggaatatgt

SEQ ID NO: 226285 - DNA, 19 bp, Homo sapiens
  siRNA target sequence for SC4MOL (NM_006745.2,132-150).
cttggctgtggaatatgta

SEQ ID NO: 226286 - DNA, 19 bp, Homo sapiens
  siRNA target sequence for SC4MOL (NM_006745.2,135-153).
ggctgtggaatatgtagat

SEQ ID NO: 226287 - DNA, 19 bp, Homo sapiens
  siRNA target sequence for SC4MOL (NM_006745.2,141-159).
ggaatatgtagattcactt

SEQ ID NO: 226288 - DNA, 19 bp, Homo sapiens
  siRNA target sequence for SC4MOL (NM_006745.2,142-160).
gaatatgtagattcacttt

SEQ ID NO: 226289 - DNA, 19 bp, Homo sapiens
  siRNA target sequence for SC4MOL (NM_006745.2,196-214).
gcttggaactatatgttga

SEQ ID NO: 226290 - DNA, 19 bp, Homo sapiens
  siRNA target sequence for SC4MOL (NM_006745.2,242-260).
catggggatcccttatagt

SEQ ID NO: 226291 - DNA, 19 bp, Homo sapiens
  siRNA target sequence for SC4MOL (NM_006745.2,245-263).
ggggatcccttatagttca

SEQ ID NO: 226292 - DNA, 19 bp, Homo sapiens
  siRNA target sequence for SC4MOL (NM_006745.2,246-264).
gggatcccttatagttcat

SEQ ID NO: 226293 - DNA, 19 bp, Homo sapiens
  siRNA target sequence for SC4MOL (NM_006745.2,248-266).
gatcccttatagttcatga

SEQ ID NO: 226294 - DNA, 19 bp, Homo sapiens
  siRNA target sequence for SC4MOL (NM_006745.2,259-277).
gttcatgaagccctttatt

SEQ ID NO: 226295 - DNA, 19 bp, Homo sapiens
  siRNA target sequence for SC4MOL (NM_006745.2,521-539).
gttgtgcagtcattgaaga

SEQ ID NO: 226296 - DNA, 19 bp, Homo sapiens
  siRNA target sequence for SC4MOL (NM_006745.2,567-585).
cttacaccacaaaagaata

SEQ ID NO: 226297 - DNA, 19 bp, Homo sapiens
  siRNA target sequence for SC4MOL (NM_006745.2,621-639).
ggctccatttggaatggaa

SEQ ID NO: 226298 - DNA, 19 bp, Homo sapiens
  siRNA target sequence for SC4MOL (NM_006745.2,699-717).
cgtgcttttgtgtgatcat

SEQ ID NO: 226299 - DNA, 19 bp, Homo sapiens
  siRNA target sequence for SC4MOL (NM_006745.2,710-728).
gtgatcatgtaattcttct

SEQ ID NO: 226300 - DNA, 19 bp, Homo sapiens
  siRNA target sequence for SC4MOL (NM_006745.2,733-751).
gcatgggtgaccattcgtt

SEQ ID NO: 226301 - DNA, 19 bp, Homo sapiens
  siRNA target sequence for SC4MOL (NM_006745.2,734-752).
catgggtgaccattcgttt

SEQ ID NO: 226302 - DNA, 19 bp, Homo sapiens
  siRNA target sequence for SC4MOL (NM_006745.2,824-842).
ctggttctcggcatcatga

SEQ ID NO: 226303 - DNA, 19 bp, Homo sapiens
  siRNA target sequence for SC4MOL (NM_006745.2,826-844).
ggttctcggcatcatgatt

SEQ ID NO: 226304 - DNA, 19 bp, Homo sapiens
  siRNA target sequence for SC4MOL (NM_006745.2,830-848).
ctcggcatcatgatttcca

SEQ ID NO: 226305 - DNA, 19 bp, Homo sapiens
  siRNA target sequence for SC4MOL (NM_006745.2,841-859).
gatttccaccacatgaact

SEQ ID NO: 226306 - DNA, 19 bp, Homo sapiens
  siRNA target sequence for SC4MOL (NM_006745.2,846-864).
ccaccacatgaacttcatt

SEQ ID NO: 226307 - DNA, 19 bp, Homo sapiens
  siRNA target sequence for SC4MOL (NM_006745.2,870-888).
ctatgcttcaacatttaca

SEQ ID NO: 226308 - DNA, 19 bp, Homo sapiens
  siRNA target sequence for SC4MOL (NM_006745.2,887-905).
catggtgggatcgaatttt

SEQ ID NO: 226309 - DNA, 19 bp, Homo sapiens
  siRNA target sequence for SC4MOL (NM_006745.2,891-909).
gtgggatcgaatttttgga

SEQ ID NO: 226310 - DNA, 19 bp, Homo sapiens
  siRNA target sequence for SC4MOL (NM_006745.2,917-935).
ctcagtataatgcctataa

SEQ ID NO: 226311 - DNA, 19 bp, Homo sapiens
  siRNA target sequence for AKR1D1 (NM_005989.1,93-111).
ccgcatacctctaagtgat

SEQ ID NO: 226312 - DNA, 19 bp, Homo sapiens
  siRNA target sequence for AKR1D1 (NM_005989.1,185-203).
catcggtgaaggttgctat

SEQ ID NO: 226313 - DNA, 19 bp, Homo sapiens
  siRNA target sequence for AKR1D1 (NM_005989.1,209-227).
cagggtaccgacatattga

SEQ ID NO: 226314 - DNA, 19 bp, Homo sapiens
  siRNA target sequence for AKR1D1 (NM_005989.1,230-248).
gggcctacatctaccaaaa

SEQ ID NO: 226315 - DNA, 19 bp, Homo sapiens
  siRNA target sequence for AKR1D1 (NM_005989.1,231-249).
ggcctacatctaccaaaat

SEQ ID NO: 226316 - DNA, 19 bp, Homo sapiens
  siRNA target sequence for AKR1D1 (NM_005989.1,234-252).
ctacatctaccaaaatgaa

SEQ ID NO: 226317 - DNA, 19 bp, Homo sapiens
  siRNA target sequence for AKR1D1 (NM_005989.1,301-319).
cggagggaagatatcttct

SEQ ID NO: 226318 - DNA, 19 bp, Homo sapiens
  siRNA target sequence for AKR1D1 (NM_005989.1,390-408).
ggtcctccagctagattat

SEQ ID NO: 226319 - DNA, 19 bp, Homo sapiens
  siRNA target sequence for AKR1D1 (NM_005989.1,411-429).
ggatctttacatcattgaa

SEQ ID NO: 226320 - DNA, 19 bp, Homo sapiens
  siRNA target sequence for AKR1D1 (NM_005989.1,475-493).
gagaatggcaaatggttat

SEQ ID NO: 226321 - DNA, 19 bp, Homo sapiens
  siRNA target sequence for AKR1D1 (NM_005989.1,477-495).
gaatggcaaatggttatat

SEQ ID NO: 226322 - DNA, 19 bp, Homo sapiens
  siRNA target sequence for AKR1D1 (NM_005989.1,481-499).
ggcaaatggttatatcaca

SEQ ID NO: 226323 - DNA, 19 bp, Homo sapiens
  siRNA target sequence for AKR1D1 (NM_005989.1,525-543).
ggcgatggaagcttgcaaa

SEQ ID NO: 226324 - DNA, 19 bp, Homo sapiens
  siRNA target sequence for AKR1D1 (NM_005989.1,544-562).
gacgctggcttggtgaaat

SEQ ID NO: 226325 - DNA, 19 bp, Homo sapiens
  siRNA target sequence for AKR1D1 (NM_005989.1,563-581).
ccctgggagtgtccaattt

SEQ ID NO: 226326 - DNA, 19 bp, Homo sapiens
  siRNA target sequence for AKR1D1 (NM_005989.1,564-582).
cctgggagtgtccaatttt

SEQ ID NO: 226327 - DNA, 19 bp, Homo sapiens
  siRNA target sequence for AKR1D1 (NM_005989.1,565-583).
ctgggagtgtccaatttta

SEQ ID NO: 226328 - DNA, 19 bp, Homo sapiens
  siRNA target sequence for AKR1D1 (NM_005989.1,695-713).
gccaacaacatgacattgt

SEQ ID NO: 226329 - DNA, 19 bp, Homo sapiens
  siRNA target sequence for AKR1D1 (NM_005989.1,697-715).
caacaacatgacattgtca

SEQ ID NO: 226330 - DNA, 19 bp, Homo sapiens
  siRNA target sequence for AKR1D1 (NM_005989.1,737-755).
ggaccagtaggaatccaat

SEQ ID NO: 226331 - DNA, 19 bp, Homo sapiens
  siRNA target sequence for AKR1D1 (NM_005989.1,773-791).
ctccacctttgttaaagga

SEQ ID NO: 226332 - DNA, 19 bp, Homo sapiens
  siRNA target sequence for AKR1D1 (NM_005989.1,813-831).
gaaaaggtacaataagaca

SEQ ID NO: 226333 - DNA, 19 bp, Homo sapiens
  siRNA target sequence for AKR1D1 (NM_005989.1,830-848).
cagcagctcaaattgtttt

SEQ ID NO: 226334 - DNA, 19 bp, Homo sapiens
  siRNA target sequence for AKR1D1 (NM_005989.1,864-882).
gcgaggggtggttgtcatt

SEQ ID NO: 226335 - DNA, 19 bp, Homo sapiens
  siRNA target sequence for AKR1D1 (NM_005989.1,870-888).
ggtggttgtcattcctaaa

SEQ ID NO: 226336 - DNA, 19 bp, Homo sapiens
  siRNA target sequence for AKR1D1 (NM_005989.1,961-979).
gacattgaagccttgaata

SEQ ID NO: 226337 - DNA, 19 bp, Homo sapiens
  siRNA target sequence for AKR1D1 (NM_005989.1,1010-1028).
ggcgcgatcatcctgaata

SEQ ID NO: 226338 - DNA, 19 bp, Homo sapiens
  siRNA target sequence for AKR1D1 (NM_005989.1,1022-1040).
ctgaatacccatttcatga

SEQ ID NO: 226339 - DNA, 19 bp, Homo sapiens
  siRNA target sequence for ALDH1B1 (NM_000692.3,541-559).
caaggtgtatcggtacttt

SEQ ID NO: 226340 - DNA, 19 bp, Homo sapiens
  siRNA target sequence for ALDH1B1 (NM_000692.3,597-615).
ccatggatggccagcattt

SEQ ID NO: 226341 - DNA, 19 bp, Homo sapiens
  siRNA target sequence for ALDH1B1 (NM_000692.3,720-738).
gcaacactgtggttatgaa

SEQ ID NO: 226342 - DNA, 19 bp, Homo sapiens
  siRNA target sequence for ALDH1B1 (NM_000692.3,865-883).
gcacgtggatgttgacaaa

SEQ ID NO: 226343 - DNA, 19 bp, Homo sapiens
  siRNA target sequence for ALDH1B1 (NM_000692.3,1032-1050).
gccacgaagccctgttctt

SEQ ID NO: 226344 - DNA, 19 bp, Homo sapiens
  siRNA target sequence for ALDH1B1 (NM_000692.3,1034-1052).
cacgaagccctgttcttca

SEQ ID NO: 226345 - DNA, 19 bp, Homo sapiens
  siRNA target sequence for ALDH1B1 (NM_000692.3,1082-1100).
cggaccttcgtggaagaat

SEQ ID NO: 226346 - DNA, 19 bp, Homo sapiens
  siRNA target sequence for ALDH1B1 (NM_000692.3,1097-1115).
gaatccatctacaatgagt

SEQ ID NO: 226347 - DNA, 19 bp, Homo sapiens
  siRNA target sequence for ALDH1B1 (NM_000692.3,1101-1119).
ccatctacaatgagtttct

SEQ ID NO: 226348 - DNA, 19 bp, Homo sapiens
  siRNA target sequence for ALDH1B1 (NM_000692.3,1412-1430).
gttgagagggccaacaaca

SEQ ID NO: 226349 - DNA, 19 bp, Homo sapiens
  siRNA target sequence for ALDH1B1 (NM_000692.3,1508-1526).
gggaccgtgtgggtaaaca

SEQ ID NO: 226350 - DNA, 19 bp, Homo sapiens
  siRNA target sequence for ALDH1B1 (NM_000692.3,1543-1561).
ctgccacacgccatttgga

SEQ ID NO: 226351 - DNA, 19 bp, Homo sapiens
  siRNA target sequence for ALDH8A1 (NM_022568.2,58-76).
ctggaacaaacgcactttt

SEQ ID NO: 226352 - DNA, 19 bp, Homo sapiens
  siRNA target sequence for ALDH8A1 (NM_022568.2,60-78).
ggaacaaacgcacttttga

SEQ ID NO: 226353 - DNA, 19 bp, Homo sapiens
  siRNA target sequence for ALDH8A1 (NM_022568.2,61-79).
gaacaaacgcacttttgat

SEQ ID NO: 226354 - DNA, 19 bp, Homo sapiens
  siRNA target sequence for ALDH8A1 (NM_022568.2,142-160).
catcaacaggggaagtgta

SEQ ID NO: 226355 - DNA, 19 bp, Homo sapiens
  siRNA target sequence for ALDH8A1 (NM_022568.2,316-334).
cccaggccgagtctaaaga

SEQ ID NO: 226356 - DNA, 19 bp, Homo sapiens
  siRNA target sequence for ALDH8A1 (NM_022568.2,501-519).
ctgatcagcccctggaatt

SEQ ID NO: 226357 - DNA, 19 bp, Homo sapiens
  siRNA target sequence for ALDH8A1 (NM_022568.2,651-669).
ccaccaggtgtggtcaata

SEQ ID NO: 226358 - DNA, 19 bp, Homo sapiens
  siRNA target sequence for ALDH8A1 (NM_022568.2,917-935).
ctgtaccagcaggatcttt

SEQ ID NO: 226359 - DNA, 19 bp, Homo sapiens
  siRNA target sequence for ALDH8A1 (NM_022568.2,936-954).
gtccagaagagcatctata

SEQ ID NO: 226360 - DNA, 19 bp, Homo sapiens
  siRNA target sequence for ALDH8A1 (NM_022568.2,975-993).
gtagaagctaccagaaagt

SEQ ID NO: 226361 - DNA, 19 bp, Homo sapiens
  siRNA target sequence for ALDH8A1 (NM_022568.2,1025-1043).
gagcataggtgctctgata

SEQ ID NO: 226362 - DNA, 19 bp, Homo sapiens
  siRNA target sequence for ALDH8A1 (NM_022568.2,1028-1046).
cataggtgctctgataagt

SEQ ID NO: 226363 - DNA, 19 bp, Homo sapiens
  siRNA target sequence for ALDH8A1 (NM_022568.2,1114-1132).
gcggtgagggagtggataa

SEQ ID NO: 226364 - DNA, 19 bp, Homo sapiens
  siRNA target sequence for ALDH8A1 (NM_022568.2,1117-1135).
gtgagggagtggataagtt

SEQ ID NO: 226365 - DNA, 19 bp, Homo sapiens
  siRNA target sequence for ALDH8A1 (NM_022568.2,1151-1169).
gaaccaggcaggctacttt

SEQ ID NO: 226366 - DNA, 19 bp, Homo sapiens
  siRNA target sequence for ALDH8A1 (NM_022568.2,1172-1190).
gcttcccacggtgataaca

SEQ ID NO: 226367 - DNA, 19 bp, Homo sapiens
  siRNA target sequence for ALDH8A1 (NM_022568.2,1178-1196).
cacggtgataacagacatt

SEQ ID NO: 226368 - DNA, 19 bp, Homo sapiens
  siRNA target sequence for ALDH8A1 (NM_022568.2,1184-1202).
gataacagacattaaggat

SEQ ID NO: 226369 - DNA, 19 bp, Homo sapiens
  siRNA target sequence for ALDH8A1 (NM_022568.2,1210-1228).
gctgcatgacggaagagat

SEQ ID NO: 226370 - DNA, 19 bp, Homo sapiens
  siRNA target sequence for ALDH8A1 (NM_022568.2,1211-1229).
ctgcatgacggaagagata

SEQ ID NO: 226371 - DNA, 19 bp, Homo sapiens
  siRNA target sequence for ALDH8A1 (NM_022568.2,1213-1231).
gcatgacggaagagatatt

SEQ ID NO: 226372 - DNA, 19 bp, Homo sapiens
  siRNA target sequence for ALDH8A1 (NM_022568.2,1244-1262).
gtgtgtcgtcccctttgat

SEQ ID NO: 226373 - DNA, 19 bp, Homo sapiens
  siRNA target sequence for ALDH8A1 (NM_022568.2,1250-1268).
cgtcccctttgatagtgaa

SEQ ID NO: 226374 - DNA, 19 bp, Homo sapiens
  siRNA target sequence for ALDH8A1 (NM_022568.2,1281-1299).
gaaagagccaacaacgtta

SEQ ID NO: 226375 - DNA, 19 bp, Homo sapiens
  siRNA target sequence for ALDH8A1 (NM_022568.2,1285-1303).
gagccaacaacgttaagta

SEQ ID NO: 226376 - DNA, 19 bp, Homo sapiens
  siRNA target sequence for ALDH8A1 (NM_022568.2,1405-1423).
gggagctgaaccttccttt

SEQ ID NO: 226377 - DNA, 19 bp, Homo sapiens
  siRNA target sequence for ALDH8A1 (NM_022568.2,1433-1451).
gaagagttctggaataggt

SEQ ID NO: 226378 - DNA, 19 bp, Homo sapiens
  siRNA target sequence for ALDH8A1 (NM_022568.2,1493-1511).
caaaaccatcaccgttaaa

SEQ ID NO: 226379 - DNA, 19 bp, Homo sapiens
  siRNA target sequence for ALDH8A1 (NM_170771.1,895-913).
ccaaccaggtcagaagtta

SEQ ID NO: 226380 - DNA, 19 bp, Homo sapiens
  siRNA target sequence for AMACR (NM_014324.3,331-349).
gcggtgtcatggagaaact

SEQ ID NO: 226381 - DNA, 19 bp, Homo sapiens
  siRNA target sequence for AMACR (NM_014324.3,350-368).
ccagctgggcccagagatt

SEQ ID NO: 226382 - DNA, 19 bp, Homo sapiens
  siRNA target sequence for AMACR (NM_014324.3,441-459).
ggttagctggccacgatat

SEQ ID NO: 226383 - DNA, 19 bp, Homo sapiens
  siRNA target sequence for AMACR (NM_014324.3,446-464).
gctggccacgatatcaact

SEQ ID NO: 226384 - DNA, 19 bp, Homo sapiens
  siRNA target sequence for AMACR (NM_014324.3,447-465).
ctggccacgatatcaacta

SEQ ID NO: 226385 - DNA, 19 bp, Homo sapiens
  siRNA target sequence for AMACR (NM_014324.3,449-467).
ggccacgatatcaactatt

SEQ ID NO: 226386 - DNA, 19 bp, Homo sapiens
  siRNA target sequence for AMACR (NM_014324.3,450-468).
gccacgatatcaactattt

SEQ ID NO: 226387 - DNA, 19 bp, Homo sapiens
  siRNA target sequence for AMACR (NM_014324.3,565-583).
gtgtgcactgggcattata

SEQ ID NO: 226388 - DNA, 19 bp, Homo sapiens
  siRNA target sequence for AMACR (NM_014324.3,567-585).
gtgcactgggcattataat

SEQ ID NO: 226389 - DNA, 19 bp, Homo sapiens
  siRNA target sequence for AMACR (NM_014324.3,613-631).
caagggtcaggtcattgat

SEQ ID NO: 226390 - DNA, 19 bp, Homo sapiens
  siRNA target sequence for AMACR (NM_014324.3,618-636).
gtcaggtcattgatgcaaa

SEQ ID NO: 226391 - DNA, 19 bp, Homo sapiens
  siRNA target sequence for AMACR (NM_014324.3,708-726).
ctcgaggacagaacatgtt

SEQ ID NO: 226392 - DNA, 19 bp, Homo sapiens
  siRNA target sequence for AMACR (NM_014324.3,734-752).
ggagcacctttctatacga

SEQ ID NO: 226393 - DNA, 19 bp, Homo sapiens
  siRNA target sequence for AMACR (NM_014324.3,740-758).
cctttctatacgacttaca

SEQ ID NO: 226394 - DNA, 19 bp, Homo sapiens
  siRNA target sequence for AMACR (NM_014324.3,762-780).
cagcagatggggaattcat

SEQ ID NO: 226395 - DNA, 19 bp, Homo sapiens
  siRNA target sequence for AMACR (NM_014324.3,792-810).
caatagaaccccagttcta

SEQ ID NO: 226396 - DNA, 19 bp, Homo sapiens
  siRNA target sequence for AMACR (NM_014324.3,808-826).
ctacgagctgctgatcaaa

SEQ ID NO: 226397 - DNA, 19 bp, Homo sapiens
  siRNA target sequence for AMACR (NM_014324.3,845-863).
gatgaacttcccaatcaga

SEQ ID NO: 226398 - DNA, 19 bp, Homo sapiens
  siRNA target sequence for AMACR (NM_014324.3,972-990).
ctccggttctgacttttga

SEQ ID NO: 226399 - DNA, 19 bp, Homo sapiens
  siRNA target sequence for AMACR (NM_014324.3,1019-1037).
gaacggggctcgtttatca

SEQ ID NO: 226400 - DNA, 19 bp, Homo sapiens
  siRNA target sequence for AMACR (NM_014324.3,1070-1088).
gcacctctgctgttaaaca

SEQ ID NO: 226401 - DNA, 19 bp, Homo sapiens
  siRNA target sequence for AMACR (NM_014324.3,1175-1193).
gagatttatcagcttaact

SEQ ID NO: 226402 - DNA, 19 bp, Homo sapiens
  siRNA target sequence for AMACR (NM_014324.3,1177-1195).
gatttatcagcttaactca

SEQ ID NO: 226403 - DNA, 19 bp, Homo sapiens
  siRNA target sequence for AMACR (NM_014324.3,1187-1205).
cttaactcagataaaatca

SEQ ID NO: 226404 - DNA, 19 bp, Homo sapiens
  siRNA target sequence for C10orf33 (NM_032709.1,104-122).
gcgtggagacgagataaca

SEQ ID NO: 226405 - DNA, 19 bp, Homo sapiens
  siRNA target sequence for C10orf33 (NM_032709.1,331-349).
gaggccgcagatttacact

SEQ ID NO: 226406 - DNA, 19 bp, Homo sapiens
  siRNA target sequence for C10orf33 (NM_032709.1,689-707).
gcccagcttccccgatatt

SEQ ID NO: 226407 - DNA, 19 bp, Homo sapiens
  siRNA target sequence for C10orf33 (NM_032709.1,691-709).
ccagcttccccgatattat

SEQ ID NO: 226408 - DNA, 19 bp, Homo sapiens
  siRNA target sequence for C10orf33 (NM_032709.1,716-734).
ctcacagctcccattacca

SEQ ID NO: 226409 - DNA, 19 bp, Homo sapiens
  siRNA target sequence for C10orf33 (NM_032709.1,754-772).
cgagtctgagcctttaaaa

SEQ ID NO: 226410 - DNA, 19 bp, Homo sapiens
  siRNA target sequence for C10orf33 (NM_032709.1,1164-1182).
cgcctgtcaccaagatcaa

SEQ ID NO: 226411 - DNA, 19 bp, Homo sapiens
  siRNA target sequence for C10orf33 (NM_032709.1,1165-1183).
gcctgtcaccaagatcaat

SEQ ID NO: 226412 - DNA, 19 bp, Homo sapiens
  siRNA target sequence for C10orf33 (NM_032709.1,1487-1505).
gcagacagagtgtttgatt

SEQ ID NO: 226413 - DNA, 19 bp, Homo sapiens
  siRNA target sequence for C10orf33 (NM_032709.1,1566-1584).
caccagatttggagagaat

SEQ ID NO: 226414 - DNA, 19 bp, Homo sapiens
  siRNA target sequence for C10orf33 (NM_032709.1,1568-1586).
ccagatttggagagaatct

SEQ ID NO: 226415 - DNA, 19 bp, Homo sapiens
  siRNA target sequence for C10orf33 (NM_032709.1,1569-1587).
cagatttggagagaatctt

SEQ ID NO: 226416 - DNA, 19 bp, Homo sapiens
  siRNA target sequence for C10orf33 (NM_032709.1,1596-1614).
ctggagggaacatattcca

SEQ ID NO: 226417 - DNA, 19 bp, Homo sapiens
  siRNA target sequence for C21orf59 (NM_017835.1,615-633).
cagcggaggtgcagtgttt

SEQ ID NO: 226418 - DNA, 19 bp, Homo sapiens
  siRNA target sequence for C21orf59 (NM_017835.1,617-635).
gcggaggtgcagtgtttaa

SEQ ID NO: 226419 - DNA, 19 bp, Homo sapiens
  siRNA target sequence for C21orf59 (NM_017835.1,618-636).
cggaggtgcagtgtttaaa

SEQ ID NO: 226420 - DNA, 19 bp, Homo sapiens
  siRNA target sequence for C21orf59 (NM_017835.1,628-646).
gtgtttaaaaaggatgata

SEQ ID NO: 226421 - DNA, 19 bp, Homo sapiens
  siRNA target sequence for C21orf59 (NM_021254.1,581-599).
ggggttgccaccgtatgat

SEQ ID NO: 226422 - DNA, 19 bp, Homo sapiens
  siRNA target sequence for C21orf59 (NM_021254.1,602-620).
catccgcatggagtttgaa

SEQ ID NO: 226423 - DNA, 19 bp, Homo sapiens
  siRNA target sequence for C21orf59 (NM_021254.1,649-667).
cagggctcaacgtcattaa

SEQ ID NO: 226424 - DNA, 19 bp, Homo sapiens
  siRNA target sequence for C21orf59 (NM_021254.1,798-816).
gcccgagagcctattatta

SEQ ID NO: 226425 - DNA, 19 bp, Homo sapiens
  siRNA target sequence for C21orf59 (NM_021254.1,801-819).
cgagagcctattattagca

SEQ ID NO: 226426 - DNA, 19 bp, Homo sapiens
  siRNA target sequence for C21orf59 (NM_021254.1,845-863).
gtactatcacagaagacaa

SEQ ID NO: 226427 - DNA, 19 bp, Homo sapiens
  siRNA target sequence for C21orf59 (NM_021254.1,922-940).
cggataacactgctttgaa

SEQ ID NO: 226428 - DNA, 19 bp, Homo sapiens
  siRNA target sequence for C21orf59 (NM_021254.1,923-941).
ggataacactgctttgaaa

SEQ ID NO: 226429 - DNA, 19 bp, Homo sapiens
  siRNA target sequence for CED-6 (NM_016315.1,471-489).
catacacctgaagctttat

SEQ ID NO: 226430 - DNA, 19 bp, Homo sapiens
  siRNA target sequence for CED-6 (NM_016315.1,475-493).
cacctgaagctttatcaaa

SEQ ID NO: 226431 - DNA, 19 bp, Homo sapiens
  siRNA target sequence for CED-6 (NM_016315.1,505-523).
cctataatgcaaagtttct

SEQ ID NO: 226432 - DNA, 19 bp, Homo sapiens
  siRNA target sequence for CED-6 (NM_016315.1,566-584).
gagagatgctgtaaggaaa

SEQ ID NO: 226433 - DNA, 19 bp, Homo sapiens
  siRNA target sequence for CED-6 (NM_016315.1,631-649).
ctaaagtggagttgcaaat

SEQ ID NO: 226434 - DNA, 19 bp, Homo sapiens
  siRNA target sequence for CED-6 (NM_016315.1,636-654).
gtggagttgcaaatatcaa

SEQ ID NO: 226435 - DNA, 19 bp, Homo sapiens
  siRNA target sequence for CED-6 (NM_016315.1,638-656).
ggagttgcaaatatcaatt

SEQ ID NO: 226436 - DNA, 19 bp, Homo sapiens
  siRNA target sequence for CED-6 (NM_016315.1,707-725).
ccagcttcatagaatatct

SEQ ID NO: 226437 - DNA, 19 bp, Homo sapiens
  siRNA target sequence for CED-6 (NM_016315.1,708-726).
cagcttcatagaatatctt

SEQ ID NO: 226438 - DNA, 19 bp, Homo sapiens
  siRNA target sequence for CED-6 (NM_016315.1,724-742).
ctttttgtgcagatgataa

SEQ ID NO: 226439 - DNA, 19 bp, Homo sapiens
  siRNA target sequence for CED-6 (NM_016315.1,869-887).
ggcatacaggaaatttcta

SEQ ID NO: 226440 - DNA, 19 bp, Homo sapiens
  siRNA target sequence for CED-6 (NM_016315.1,923-941).
gatcgcagggttacaaaaa

SEQ ID NO: 226441 - DNA, 19 bp, Homo sapiens
  siRNA target sequence for CED-6 (NM_016315.1,1010-1028).
gagaataactcaagtatca

SEQ ID NO: 226442 - DNA, 19 bp, Homo sapiens
  siRNA target sequence for CED-6 (NM_016315.1,1060-1078).
cgccctccactgacatctt

SEQ ID NO: 226443 - DNA, 19 bp, Homo sapiens
  siRNA target sequence for CED-6 (NM_016315.1,1069-1087).
ctgacatctttgatatgat

SEQ ID NO: 226444 - DNA, 19 bp, Homo sapiens
  siRNA target sequence for CED-6 (NM_016315.1,1146-1164).
cctccagtacctagtagat

SEQ ID NO: 226445 - DNA, 19 bp, Homo sapiens
  siRNA target sequence for CED-6 (NM_016315.1,1149-1167).
ccagtacctagtagatcta

SEQ ID NO: 226446 - DNA, 19 bp, Homo sapiens
  siRNA target sequence for CED-6 (NM_016315.1,1159-1177).
gtagatctactgagattaa

SEQ ID NO: 226447 - DNA, 19 bp, Homo sapiens
  siRNA target sequence for CED-6 (NM_016315.1,1200-1218).
ccttttgacccatttaact

SEQ ID NO: 226448 - DNA, 19 bp, Homo sapiens
  siRNA target sequence for CED-6 (NM_016315.1,1236-1254).
cctccagatattcaatcaa

SEQ ID NO: 226449 - DNA, 19 bp, Homo sapiens
  siRNA target sequence for CED-6 (NM_016315.1,1277-1295).
gttcaaaatgggactaact

SEQ ID NO: 226450 - DNA, 19 bp, Homo sapiens
  siRNA target sequence for CHDH (NM_018397.1,834-852).
cgctcaccgaggacatgaa

SEQ ID NO: 226451 - DNA, 19 bp, Homo sapiens
  siRNA target sequence for CHDH (NM_018397.1,1014-1032).
cagtgggcgtggagtatgt

SEQ ID NO: 226452 - DNA, 19 bp, Homo sapiens
  siRNA target sequence for CHDH (NM_018397.1,1062-1080).
ccagcaaggaggtgattct

SEQ ID NO: 226453 - DNA, 19 bp, Homo sapiens
  siRNA target sequence for CHDH (NM_018397.1,1385-1403).
ccggacatccagttccatt

SEQ ID NO: 226454 - DNA, 19 bp, Homo sapiens
  siRNA target sequence for CHDH (NM_018397.1,1386-1404).
cggacatccagttccattt

SEQ ID NO: 226455 - DNA, 19 bp, Homo sapiens
  siRNA target sequence for CHDH (NM_018397.1,1491-1509).
gtgtgggctggctcaaact

SEQ ID NO: 226456 - DNA, 19 bp, Homo sapiens
  siRNA target sequence for CHDH (NM_018397.1,1493-1511).
gtgggctggctcaaactga

SEQ ID NO: 226457 - DNA, 19 bp, Homo sapiens
  siRNA target sequence for CHDH (NM_018397.1,1544-1562).
cagcccaactacttgtcaa

SEQ ID NO: 226458 - DNA, 19 bp, Homo sapiens
  siRNA target sequence for CHDH (NM_018397.1,1595-1613).
gtgaagctcaccagagaaa

SEQ ID NO: 226459 - DNA, 19 bp, Homo sapiens
  siRNA target sequence for CHDH (NM_018397.1,1597-1615).
gaagctcaccagagaaatt

SEQ ID NO: 226460 - DNA, 19 bp, Homo sapiens
  siRNA target sequence for CHDH (NM_018397.1,1669-1687).
ccacattcagtcagataaa

SEQ ID NO: 226461 - DNA, 19 bp, Homo sapiens
  siRNA target sequence for CHDH (NM_018397.1,1733-1751).
ccctcgtgcacctgtaaga

SEQ ID NO: 226462 - DNA, 19 bp, Homo sapiens
  siRNA target sequence for CHDH (NM_018397.1,1926-1944).
cactctgggacaaagatgt

SEQ ID NO: 226463 - DNA, 19 bp, Homo sapiens
  siRNA target sequence for CRYL1 (NM_015974.1,194-212).
gcttccaggtgaaactcta

SEQ ID NO: 226464 - DNA, 19 bp, Homo sapiens
  siRNA target sequence for CRYL1 (NM_015974.1,201-219).
ggtgaaactctatgacatt

SEQ ID NO: 226465 - DNA, 19 bp, Homo sapiens
  siRNA target sequence for CRYL1 (NM_015974.1,236-254).
ggaacgccctggaaaacat

SEQ ID NO: 226466 - DNA, 19 bp, Homo sapiens
  siRNA target sequence for CRYL1 (NM_015974.1,279-297).
gcaggcaggttctctgaaa

SEQ ID NO: 226467 - DNA, 19 bp, Homo sapiens
  siRNA target sequence for CRYL1 (NM_015974.1,335-353).
gtggttgtcccaatatcca

SEQ ID NO: 226468 - DNA, 19 bp, Homo sapiens
  siRNA target sequence for CRYL1 (NM_015974.1,389-407).
gtgttccagaagatctaga

SEQ ID NO: 226469 - DNA, 19 bp, Homo sapiens
  siRNA target sequence for CRYL1 (NM_015974.1,432-450).
gttagattccatcattgat

SEQ ID NO: 226470 - DNA, 19 bp, Homo sapiens
  siRNA target sequence for CRYL1 (NM_015974.1,448-466).
gatgatcgagtgatcttaa

SEQ ID NO: 226471 - DNA, 19 bp, Homo sapiens
  siRNA target sequence for CRYL1 (NM_015974.1,451-469).
gatcgagtgatcttaagca

SEQ ID NO: 226472 - DNA, 19 bp, Homo sapiens
  siRNA target sequence for CRYL1 (NM_015974.1,545-563).
ctgtgaatccgccatacta

SEQ ID NO: 226473 - DNA, 19 bp, Homo sapiens
  siRNA target sequence for CRYL1 (NM_015974.1,547-565).
gtgaatccgccatactaca

SEQ ID NO: 226474 - DNA, 19 bp, Homo sapiens
  siRNA target sequence for CRYL1 (NM_015974.1,694-712).
gaaccgcctgcaatatgca

SEQ ID NO: 226475 - DNA, 19 bp, Homo sapiens
  siRNA target sequence for CRYL1 (NM_015974.1,797-815).
gcatgcggtatgcattcat

SEQ ID NO: 226476 - DNA, 19 bp, Homo sapiens
  siRNA target sequence for CRYL1 (NM_015974.1,798-816).
catgcggtatgcattcatt

SEQ ID NO: 226477 - DNA, 19 bp, Homo sapiens
  siRNA target sequence for CRYL1 (NM_015974.1,840-858).
caatgcagaaggtatgtta

SEQ ID NO: 226478 - DNA, 19 bp, Homo sapiens
  siRNA target sequence for CRYL1 (NM_015974.1,845-863).
cagaaggtatgttaagcta

SEQ ID NO: 226479 - DNA, 19 bp, Homo sapiens
  siRNA target sequence for CRYL1 (NM_015974.1,938-956).
ctgctgagaaggttaacca

SEQ ID NO: 226480 - DNA, 19 bp, Homo sapiens
  siRNA target sequence for CYB5R1 (NM_016243.1,278-296).
cctctccacccgaattgat

SEQ ID NO: 226481 - DNA, 19 bp, Homo sapiens
  siRNA target sequence for CYB5R1 (NM_016243.1,383-401).
gggtgtgcaccccaaattt

SEQ ID NO: 226482 - DNA, 19 bp, Homo sapiens
  siRNA target sequence for CYB5R1 (NM_016243.1,472-490).
caagcgggttgctcactta

SEQ ID NO: 226483 - DNA, 19 bp, Homo sapiens
  siRNA target sequence for CYB5R1 (NM_016243.1,476-494).
cgggttgctcacttacact

SEQ ID NO: 226484 - DNA, 19 bp, Homo sapiens
  siRNA target sequence for CYBB (NM_000397.2,41-59).
gctctccatttttgtcatt

SEQ ID NO: 226485 - DNA, 19 bp, Homo sapiens
  siRNA target sequence for CYBB (NM_000397.2,95-113).
ctggtattaccgggtttat

SEQ ID NO: 226486 - DNA, 19 bp, Homo sapiens
  siRNA target sequence for CYBB (NM_000397.2,97-115).
ggtattaccgggtttatga

SEQ ID NO: 226487 - DNA, 19 bp, Homo sapiens
  siRNA target sequence for CYBB (NM_000397.2,98-116).
gtattaccgggtttatgat

SEQ ID NO: 226488 - DNA, 19 bp, Homo sapiens
  siRNA target sequence for CYBB (NM_000397.2,104-122).
ccgggtttatgatattcca

SEQ ID NO: 226489 - DNA, 19 bp, Homo sapiens
  siRNA target sequence for CYBB (NM_000397.2,114-132).
gatattccacctaagttct

SEQ ID NO: 226490 - DNA, 19 bp, Homo sapiens
  siRNA target sequence for CYBB (NM_000397.2,266-284).
gtgctgctcaacaagagtt

SEQ ID NO: 226491 - DNA, 19 bp, Homo sapiens
  siRNA target sequence for CYBB (NM_000397.2,302-320).
gaatctcacctttcataaa

SEQ ID NO: 226492 - DNA, 19 bp, Homo sapiens
  siRNA target sequence for CYBB (NM_000397.2,342-360).
cttcactctgcgattcaca

SEQ ID NO: 226493 - DNA, 19 bp, Homo sapiens
  siRNA target sequence for CYBB (NM_000397.2,359-377).
caccattgcacatctattt

SEQ ID NO: 226494 - DNA, 19 bp, Homo sapiens
  siRNA target sequence for CYBB (NM_000397.2,362-380).
cattgcacatctatttaat

SEQ ID NO: 226495 - DNA, 19 bp, Homo sapiens
  siRNA target sequence for CYBB (NM_000397.2,393-411).
gtgaatgcccgagtcaata

SEQ ID NO: 226496 - DNA, 19 bp, Homo sapiens
  siRNA target sequence for CYBB (NM_000397.2,395-413).
gaatgcccgagtcaataat

SEQ ID NO: 226497 - DNA, 19 bp, Homo sapiens
  siRNA target sequence for CYBB (NM_000397.2,400-418).
cccgagtcaataattctga

SEQ ID NO: 226498 - DNA, 19 bp, Homo sapiens
  siRNA target sequence for CYBB (NM_000397.2,401-419).
ccgagtcaataattctgat

SEQ ID NO: 226499 - DNA, 19 bp, Homo sapiens
  siRNA target sequence for CYBB (NM_000397.2,407-425).
caataattctgatccttat

SEQ ID NO: 226500 - DNA, 19 bp, Homo sapiens
  siRNA target sequence for CYBB (NM_000397.2,473-491).
caattttgctcgaaagaga

SEQ ID NO: 226501 - DNA, 19 bp, Homo sapiens
  siRNA target sequence for CYBB (NM_000397.2,480-498).
gctcgaaagagaataaaga

SEQ ID NO: 226502 - DNA, 19 bp, Homo sapiens
  siRNA target sequence for CYBB (NM_000397.2,541-559).
gcatcactggagttgtcat

SEQ ID NO: 226503 - DNA, 19 bp, Homo sapiens
  siRNA target sequence for CYBB (NM_000397.2,560-578).
cacgctgtgcctcatatta

SEQ ID NO: 226504 - DNA, 19 bp, Homo sapiens
  siRNA target sequence for CYBB (NM_000397.2,562-580).
cgctgtgcctcatattaat

SEQ ID NO: 226505 - DNA, 19 bp, Homo sapiens
  siRNA target sequence for CYBB (NM_000397.2,569-587).
cctcatattaattatcact

SEQ ID NO: 226506 - DNA, 19 bp, Homo sapiens
  siRNA target sequence for CYBB (NM_000397.2,601-619).
ccatccggaggtcttactt

SEQ ID NO: 226507 - DNA, 19 bp, Homo sapiens
  siRNA target sequence for CYBB (NM_000397.2,605-623).
ccggaggtcttactttgaa

SEQ ID NO: 226508 - DNA, 19 bp, Homo sapiens
  siRNA target sequence for CYBB (NM_000397.2,626-644).
cttttggtacacacatcat

SEQ ID NO: 226509 - DNA, 19 bp, Homo sapiens
  siRNA target sequence for CYBB (NM_000397.2,631-649).
ggtacacacatcatctctt

SEQ ID NO: 226510 - DNA, 19 bp, Homo sapiens
  siRNA target sequence for CYBB (NM_000397.2,632-650).
gtacacacatcatctcttt

SEQ ID NO: 226511 - DNA, 19 bp, Homo sapiens
  siRNA target sequence for CYBB (NM_000397.2,637-655).
cacatcatctctttgtgat

SEQ ID NO: 226512 - DNA, 19 bp, Homo sapiens
  siRNA target sequence for CYBB (NM_000397.2,722-740).
ggctgtgcataatataaca

SEQ ID NO: 226513 - DNA, 19 bp, Homo sapiens
  siRNA target sequence for CYBB (NM_000397.2,726-744).
gtgcataatataacagttt

SEQ ID NO: 226514 - DNA, 19 bp, Homo sapiens
  siRNA target sequence for CYBB (NM_000397.2,741-759).
gtttgtgaacaaaaaatct

SEQ ID NO: 226515 - DNA, 19 bp, Homo sapiens
  siRNA target sequence for CYBB (NM_000397.2,804-822).
ggaaaccctcctatgactt

SEQ ID NO: 226516 - DNA, 19 bp, Homo sapiens
  siRNA target sequence for CYBB (NM_000397.2,809-827).
ccctcctatgacttggaaa

SEQ ID NO: 226517 - DNA, 19 bp, Homo sapiens
  siRNA target sequence for CYBB (NM_000397.2,814-832).
ctatgacttggaaatggat

SEQ ID NO: 226518 - DNA, 19 bp, Homo sapiens
  siRNA target sequence for CYBB (NM_000397.2,830-848).
gatagtgggtcccatgttt

SEQ ID NO: 226519 - DNA, 19 bp, Homo sapiens
  siRNA target sequence for CYBB (NM_000397.2,872-890).
gcggttttggcgatctcaa

SEQ ID NO: 226520 - DNA, 19 bp, Homo sapiens
  siRNA target sequence for CYBB (NM_000397.2,1019-1037).
ggagtggcacccttttaca

SEQ ID NO: 226521 - DNA, 19 bp, Homo sapiens
  siRNA target sequence for CYBB (NM_000397.2,1053-1071).
gaggaagacttctttagta

SEQ ID NO: 226522 - DNA, 19 bp, Homo sapiens
  siRNA target sequence for CYBB (NM_000397.2,1150-1168).
cgtggaaactacctaagat

SEQ ID NO: 226523 - DNA, 19 bp, Homo sapiens
  siRNA target sequence for CYBB (NM_000397.2,1214-1232).
ctatgaggtggtgatgtta

SEQ ID NO: 226524 - DNA, 19 bp, Homo sapiens
  siRNA target sequence for CYBB (NM_000397.2,1253-1271).
cacacccttcgcatccatt

SEQ ID NO: 226525 - DNA, 19 bp, Homo sapiens
  siRNA target sequence for CYBB (NM_000397.2,1257-1275).
cccttcgcatccattctca

SEQ ID NO: 226526 - DNA, 19 bp, Homo sapiens
  siRNA target sequence for CYBB (NM_000397.2,1258-1276).
ccttcgcatccattctcaa

SEQ ID NO: 226527 - DNA, 19 bp, Homo sapiens
  siRNA target sequence for CYBB (NM_000397.2,1277-1295).
gtcagtctggtacaaatat

SEQ ID NO: 226528 - DNA, 19 bp, Homo sapiens
  siRNA target sequence for CYBB (NM_000397.2,1281-1299).
gtctggtacaaatattgca

SEQ ID NO: 226529 - DNA, 19 bp, Homo sapiens
  siRNA target sequence for CYBB (NM_000397.2,1283-1301).
ctggtacaaatattgcaat

SEQ ID NO: 226530 - DNA, 19 bp, Homo sapiens
  siRNA target sequence for CYBB (NM_000397.2,1467-1485).
gagtctcaggccaatcact

SEQ ID NO: 226531 - DNA, 19 bp, Homo sapiens
  siRNA target sequence for CYBB (NM_000397.2,1553-1571).
gcccaactgggataatgaa

SEQ ID NO: 226532 - DNA, 19 bp, Homo sapiens
  siRNA target sequence for CYBB (NM_000397.2,1554-1572).
cccaactgggataatgaat

SEQ ID NO: 226533 - DNA, 19 bp, Homo sapiens
  siRNA target sequence for CYBB (NM_000397.2,1555-1573).
ccaactgggataatgaatt

SEQ ID NO: 226534 - DNA, 19 bp, Homo sapiens
  siRNA target sequence for CYBB (NM_000397.2,1584-1602).
gcaagtcaacaccctaata

SEQ ID NO: 226535 - DNA, 19 bp, Homo sapiens
  siRNA target sequence for CYBB (NM_000397.2,1640-1658).
ggctgaaaccctgagtaaa

SEQ ID NO: 226536 - DNA, 19 bp, Homo sapiens
  siRNA target sequence for CYBB (NM_000397.2,1687-1705).
ctcggggagtgcatttcat

SEQ ID NO: 226537 - DNA, 19 bp, Homo sapiens
  siRNA target sequence for DCXR (NM_016286.1,388-406).
ggggccatcgtgaatgtct

SEQ ID NO: 226538 - DNA, 19 bp, Homo sapiens
  siRNA target sequence for DCXR (NM_016286.1,419-437).
cccagcgggcagtaactaa

SEQ ID NO: 226539 - DNA, 19 bp, Homo sapiens
  siRNA target sequence for DCXR (NM_016286.1,424-442).
cgggcagtaactaaccata

SEQ ID NO: 226540 - DNA, 19 bp, Homo sapiens
  siRNA target sequence for DCXR (NM_016286.1,584-602).
cccacaaggccaagactat

SEQ ID NO: 226541 - DNA, 19 bp, Homo sapiens
  siRNA target sequence for DECR2 (NM_020664.3,419-437).
ggcagaatcgacattctca

SEQ ID NO: 226542 - DNA, 19 bp, Homo sapiens
  siRNA target sequence for DECR2 (NM_020664.3,427-445).
cgacattctcattaactgt

SEQ ID NO: 226543 - DNA, 19 bp, Homo sapiens
  siRNA target sequence for DECR2 (NM_020664.3,519-537).
ccagcggcaccttcaatgt

SEQ ID NO: 226544 - DNA, 19 bp, Homo sapiens
  siRNA target sequence for DECR2 (NM_020664.3,540-558).
ctcgtgtgctctatgagaa

SEQ ID NO: 226545 - DNA, 19 bp, Homo sapiens
  siRNA target sequence for DECR2 (NM_020664.3,578-596).
ggggtgatcgtgaacatca

SEQ ID NO: 226546 - DNA, 19 bp, Homo sapiens
  siRNA target sequence for DECR2 (NM_020664.3,689-707).
gagtggggtccccaaaaca

SEQ ID NO: 226547 - DNA, 19 bp, Homo sapiens
  siRNA target sequence for DHCR24 (NM_014762.1,217-235).
ctgccgctctcgcttatct

SEQ ID NO: 226548 - DNA, 19 bp, Homo sapiens
  siRNA target sequence for DHCR24 (NM_014762.1,223-241).
ctctcgcttatcttcgata

SEQ ID NO: 226549 - DNA, 19 bp, Homo sapiens
  siRNA target sequence for DHCR24 (NM_014762.1,227-245).
cgcttatcttcgatatcta

SEQ ID NO: 226550 - DNA, 19 bp, Homo sapiens
  siRNA target sequence for DHCR24 (NM_014762.1,229-247).
cttatcttcgatatctact

SEQ ID NO: 226551 - DNA, 19 bp, Homo sapiens
  siRNA target sequence for DHCR24 (NM_014762.1,403-421).
ctacgtgtcgggaagtaca

SEQ ID NO: 226552 - DNA, 19 bp, Homo sapiens
  siRNA target sequence for DHCR24 (NM_014762.1,406-424).
cgtgtcgggaagtacaaga

SEQ ID NO: 226553 - DNA, 19 bp, Homo sapiens
  siRNA target sequence for DHCR24 (NM_014762.1,407-425).
gtgtcgggaagtacaagaa

SEQ ID NO: 226554 - DNA, 19 bp, Homo sapiens
  siRNA target sequence for DHCR24 (NM_014762.1,705-723).
cactccgtccgaaaactca

SEQ ID NO: 226555 - DNA, 19 bp, Homo sapiens
  siRNA target sequence for DHCR24 (NM_014762.1,847-865).
gctatctgtgccaagttca

SEQ ID NO: 226556 - DNA, 19 bp, Homo sapiens
  siRNA target sequence for DHCR24 (NM_014762.1,922-940).
gatgaggctgtcattatga

SEQ ID NO: 226557 - DNA, 19 bp, Homo sapiens
  siRNA target sequence for DHCR24 (NM_014762.1,964-982).
gagcccagcaagctgaata

SEQ ID NO: 226558 - DNA, 19 bp, Homo sapiens
  siRNA target sequence for DHCR24 (NM_014762.1,967-985).
cccagcaagctgaatagca

SEQ ID NO: 226559 - DNA, 19 bp, Homo sapiens
  siRNA target sequence for DHCR24 (NM_014762.1,968-986).
ccagcaagctgaatagcat

SEQ ID NO: 226560 - DNA, 19 bp, Homo sapiens
  siRNA target sequence for DHCR24 (NM_014762.1,996-1014).
ctacaagccgtggttcttt

SEQ ID NO: 226561 - DNA, 19 bp, Homo sapiens
  siRNA target sequence for DHCR24 (NM_014762.1,1002-1020).
gccgtggttctttaagcat

SEQ ID NO: 226562 - DNA, 19 bp, Homo sapiens
  siRNA target sequence for DHCR24 (NM_014762.1,1090-1108).
cacacgcgcagcatcttct

SEQ ID NO: 226563 - DNA, 19 bp, Homo sapiens
  siRNA target sequence for DHCR24 (NM_014762.1,1366-1384).
ctagtgcaccccaaaggaa

SEQ ID NO: 226564 - DNA, 19 bp, Homo sapiens
  siRNA target sequence for DHCR24 (NM_014762.1,1423-1441).
gagccgcgtgtgaaacact

SEQ ID NO: 226565 - DNA, 19 bp, Homo sapiens
  siRNA target sequence for DHCR24 (NM_014762.1,1425-1443).
gccgcgtgtgaaacacttt

SEQ ID NO: 226566 - DNA, 19 bp, Homo sapiens
  siRNA target sequence for DHCR24 (NM_014762.1,1427-1445).
cgcgtgtgaaacactttga

SEQ ID NO: 226567 - DNA, 19 bp, Homo sapiens
  siRNA target sequence for DHCR24 (NM_014762.1,1428-1446).
gcgtgtgaaacactttgaa

SEQ ID NO: 226568 - DNA, 19 bp, Homo sapiens
  siRNA target sequence for DHCR24 (NM_014762.1,1612-1630).
gaggtgtacgacaagatct

SEQ ID NO: 226569 - DNA, 19 bp, Homo sapiens
  siRNA target sequence for DHCR7 (NM_001360.1,310-328).
cactggcgagcgtcatctt

SEQ ID NO: 226570 - DNA, 19 bp, Homo sapiens
  siRNA target sequence for DHCR7 (NM_001360.1,607-625).
gggttgtgaacaagtatca

SEQ ID NO: 226571 - DNA, 19 bp, Homo sapiens
  siRNA target sequence for DHCR7 (NM_001360.1,808-826).
gcgccagagactgcaaatt

SEQ ID NO: 226572 - DNA, 19 bp, Homo sapiens
  siRNA target sequence for DHCR7 (NM_001360.1,1027-1045).
ccatctacgtgattgactt

SEQ ID NO: 226573 - DNA, 19 bp, Homo sapiens
  siRNA target sequence for DHRS1 (NM_138452.1,357-375).
gcaggcgccacagtttaca

SEQ ID NO: 226574 - DNA, 19 bp, Homo sapiens
  siRNA target sequence for DHRS1 (NM_138452.1,358-376).
caggcgccacagtttacat

SEQ ID NO: 226575 - DNA, 19 bp, Homo sapiens
  siRNA target sequence for DHRS1 (NM_138452.1,360-378).
ggcgccacagtttacatca

SEQ ID NO: 226576 - DNA, 19 bp, Homo sapiens
  siRNA target sequence for DHRS1 (NM_138452.1,447-465).
cctgtggtgtgcgattcaa

SEQ ID NO: 226577 - DNA, 19 bp, Homo sapiens
  siRNA target sequence for DHRS1 (NM_138452.1,531-549).
gtgctggtcaacaatgctt

SEQ ID NO: 226578 - DNA, 19 bp, Homo sapiens
  siRNA target sequence for DHRS1 (NM_138452.1,533-551).
gctggtcaacaatgcttat

SEQ ID NO: 226579 - DNA, 19 bp, Homo sapiens
  siRNA target sequence for DHRS1 (NM_138452.1,536-554).
ggtcaacaatgcttatgca

SEQ ID NO: 226580 - DNA, 19 bp, Homo sapiens
  siRNA target sequence for DHRS1 (NM_138452.1,606-624).
gcctccatgtgggatgata

SEQ ID NO: 226581 - DNA, 19 bp, Homo sapiens
  siRNA target sequence for DHRS1 (NM_138452.1,610-628).
ccatgtgggatgatatcaa

SEQ ID NO: 226582 - DNA, 19 bp, Homo sapiens
  siRNA target sequence for DHRS1 (NM_138452.1,727-745).
gaagcctgcagtatatgtt

SEQ ID NO: 226583 - DNA, 19 bp, Homo sapiens
  siRNA target sequence for DHRS1 (NM_138452.1,730-748).
gcctgcagtatatgttcaa

SEQ ID NO: 226584 - DNA, 19 bp, Homo sapiens
  siRNA target sequence for DHRS1 (NM_138452.1,914-932).
gttgaagcagttcaaatca

SEQ ID NO: 226585 - DNA, 19 bp, Homo sapiens
  siRNA target sequence for DHRS1 (NM_138452.1,943-961).
ctgcggaaaccacagaatt

SEQ ID NO: 226586 - DNA, 19 bp, Homo sapiens
  siRNA target sequence for DHRS1 (NM_138452.1,945-963).
gcggaaaccacagaattga

SEQ ID NO: 226587 - DNA, 19 bp, Homo sapiens
  siRNA target sequence for DHRS1 (NM_138452.1,1080-1098).
cccgtccaagactatttgt

SEQ ID NO: 226588 - DNA, 19 bp, Homo sapiens
  siRNA target sequence for DHRS1 (NM_138452.1,1082-1100).
cgtccaagactatttgtct

SEQ ID NO: 226589 - DNA, 19 bp, Homo sapiens
  siRNA target sequence for DHRS1 (NM_138452.1,1083-1101).
gtccaagactatttgtctt

SEQ ID NO: 226590 - DNA, 19 bp, Homo sapiens
  siRNA target sequence for DHRS1 (NM_138452.1,1086-1104).
caagactatttgtctttga

SEQ ID NO: 226591 - DNA, 19 bp, Homo sapiens
  siRNA target sequence for DHRS1 (NM_138452.1,1167-1185).
cgtgtgcccaagtggatta

SEQ ID NO: 226592 - DNA, 19 bp, Homo sapiens
  siRNA target sequence for DHRS1 (NM_138452.1,1168-1186).
gtgtgcccaagtggattat

SEQ ID NO: 226593 - DNA, 19 bp, Homo sapiens
  siRNA target sequence for DHRS10 (NM_016246.1,580-598).
caccaagggggcagtaaca

SEQ ID NO: 226594 - DNA, 19 bp, Homo sapiens
  siRNA target sequence for DHRS10 (NM_016246.1,619-637).
cctggatgaaagtccatat

SEQ ID NO: 226595 - DNA, 19 bp, Homo sapiens
  siRNA target sequence for DHRS10 (NM_016246.1,622-640).
ggatgaaagtccatatggt

SEQ ID NO: 226596 - DNA, 19 bp, Homo sapiens
  siRNA target sequence for DHRS10 (NM_016246.1,638-656).
ggtgtccgagtcaactgta

SEQ ID NO: 226597 - DNA, 19 bp, Homo sapiens
  siRNA target sequence for DHRS10 (NM_016246.1,639-657).
gtgtccgagtcaactgtat

SEQ ID NO: 226598 - DNA, 19 bp, Homo sapiens
  siRNA target sequence for DHRS10 (NM_016246.1,641-659).
gtccgagtcaactgtatct

SEQ ID NO: 226599 - DNA, 19 bp, Homo sapiens
  siRNA target sequence for DHRS10 (NM_016246.1,820-838).
cttctgcacgggcattgaa

SEQ ID NO: 226600 - DNA, 19 bp, Homo sapiens
  siRNA target sequence for DHRS7 (NM_016029.1,165-183).
ggcgacctgacgctactat

SEQ ID NO: 226601 - DNA, 19 bp, Homo sapiens
  siRNA target sequence for DHRS7 (NM_016029.1,210-228).
gaatgggagctgactgata

SEQ ID NO: 226602 - DNA, 19 bp, Homo sapiens
  siRNA target sequence for DHRS7 (NM_016029.1,214-232).
gggagctgactgatatggt

SEQ ID NO: 226603 - DNA, 19 bp, Homo sapiens
  siRNA target sequence for DHRS7 (NM_016029.1,358-376).
gcctagagaatggcaattt

SEQ ID NO: 226604 - DNA, 19 bp, Homo sapiens
  siRNA target sequence for DHRS7 (NM_016029.1,359-377).
cctagagaatggcaattta

SEQ ID NO: 226605 - DNA, 19 bp, Homo sapiens
  siRNA target sequence for DHRS7 (NM_016029.1,360-378).
ctagagaatggcaatttaa

SEQ ID NO: 226606 - DNA, 19 bp, Homo sapiens
  siRNA target sequence for DHRS7 (NM_016029.1,507-525).
cgttctctgtgcatggata

SEQ ID NO: 226607 - DNA, 19 bp, Homo sapiens
  siRNA target sequence for DHRS7 (NM_016029.1,570-588).
gggacggtgtccttgacaa

SEQ ID NO: 226608 - DNA, 19 bp, Homo sapiens
  siRNA target sequence for DHRS7 (NM_016029.1,571-589).
ggacggtgtccttgacaaa

SEQ ID NO: 226609 - DNA, 19 bp, Homo sapiens
  siRNA target sequence for DHRS7 (NM_016029.1,572-590).
gacggtgtccttgacaaaa

SEQ ID NO: 226610 - DNA, 19 bp, Homo sapiens
  siRNA target sequence for DHRS7 (NM_016029.1,592-610).
gtgttctgcctcacatgat

SEQ ID NO: 226611 - DNA, 19 bp, Homo sapiens
  siRNA target sequence for DHRS7 (NM_016029.1,703-721).
ctctccggggtttttttaa

SEQ ID NO: 226612 - DNA, 19 bp, Homo sapiens
  siRNA target sequence for DHRS7 (NM_016029.1,741-759).
gccacatacccaggtataa

SEQ ID NO: 226613 - DNA, 19 bp, Homo sapiens
  siRNA target sequence for DHRS7 (NM_016029.1,742-760).
ccacatacccaggtataat

SEQ ID NO: 226614 - DNA, 19 bp, Homo sapiens
  siRNA target sequence for DHRS7 (NM_016029.1,743-761).
cacatacccaggtataata

SEQ ID NO: 226615 - DNA, 19 bp, Homo sapiens
  siRNA target sequence for DHRS7 (NM_016029.1,745-763).
catacccaggtataatagt

SEQ ID NO: 226616 - DNA, 19 bp, Homo sapiens
  siRNA target sequence for DHRS7 (NM_016029.1,754-772).
gtataatagtttctaacat

SEQ ID NO: 226617 - DNA, 19 bp, Homo sapiens
  siRNA target sequence for DHRS7 (NM_016029.1,833-851).
gactataggcaataatgga

SEQ ID NO: 226618 - DNA, 19 bp, Homo sapiens
  siRNA target sequence for DHRS7 (NM_016029.1,852-870).
gaccagtcccacaagatga

SEQ ID NO: 226619 - DNA, 19 bp, Homo sapiens
  siRNA target sequence for DHRS7 (NM_016029.1,855-873).
cagtcccacaagatgacaa

SEQ ID NO: 226620 - DNA, 19 bp, Homo sapiens
  siRNA target sequence for DHRS7 (NM_016029.1,880-898).
gttgtgtgcggctgatgtt

SEQ ID NO: 226621 - DNA, 19 bp, Homo sapiens
  siRNA target sequence for DHRS7 (NM_016029.1,904-922).
gcatggccaatgatttgaa

SEQ ID NO: 226622 - DNA, 19 bp, Homo sapiens
  siRNA target sequence for DHRS7 (NM_016029.1,937-955).
cagaacaacctttcttgtt

SEQ ID NO: 226623 - DNA, 19 bp, Homo sapiens
  siRNA target sequence for DHRS7 (NM_016029.1,942-960).
caacctttcttgttagtaa

SEQ ID NO: 226624 - DNA, 19 bp, Homo sapiens
  siRNA target sequence for DHRS8 (NM_016245.1,213-231).
ctgcttctcccgttactga

SEQ ID NO: 226625 - DNA, 19 bp, Homo sapiens
  siRNA target sequence for DHRS8 (NM_016245.1,248-266).
gtccttcgtgaagcttttt

SEQ ID NO: 226626 - DNA, 19 bp, Homo sapiens
  siRNA target sequence for DHRS8 (NM_016245.1,254-272).
cgtgaagctttttattcct

SEQ ID NO: 226627 - DNA, 19 bp, Homo sapiens
  siRNA target sequence for DHRS8 (NM_016245.1,286-304).
cagtcaccggcgaaatcgt

SEQ ID NO: 226628 - DNA, 19 bp, Homo sapiens
  siRNA target sequence for DHRS8 (NM_016245.1,347-365).
ctatgaatttgctaaactt

SEQ ID NO: 226629 - DNA, 19 bp, Homo sapiens
  siRNA target sequence for DHRS8 (NM_016245.1,439-457).
gtgccaaggttcatacctt

SEQ ID NO: 226630 - DNA, 19 bp, Homo sapiens
  siRNA target sequence for DHRS8 (NM_016245.1,470-488).
cagcaaccgagaagatatt

SEQ ID NO: 226631 - DNA, 19 bp, Homo sapiens
  siRNA target sequence for DHRS8 (NM_016245.1,472-490).
gcaaccgagaagatattta

SEQ ID NO: 226632 - DNA, 19 bp, Homo sapiens
  siRNA target sequence for DHRS8 (NM_016245.1,555-573).
gtagtctatacatcagatt

SEQ ID NO: 226633 - DNA, 19 bp, Homo sapiens
  siRNA target sequence for DHRS8 (NM_016245.1,583-601).
cacaagatcctcagattga

SEQ ID NO: 226634 - DNA, 19 bp, Homo sapiens
  siRNA target sequence for DHRS8 (NM_016245.1,657-675).
cctgcaatgacgaagaata

SEQ ID NO: 226635 - DNA, 19 bp, Homo sapiens
  siRNA target sequence for DHRS8 (NM_016245.1,661-679).
caatgacgaagaataacca

SEQ ID NO: 226636 - DNA, 19 bp, Homo sapiens
  siRNA target sequence for DHRS8 (NM_016245.1,792-810).
gaactggctgccttacaaa

SEQ ID NO: 226637 - DNA, 19 bp, Homo sapiens
  siRNA target sequence for DHRS8 (NM_016245.1,797-815).
ggctgccttacaaataact

SEQ ID NO: 226638 - DNA, 19 bp, Homo sapiens
  siRNA target sequence for DHRS8 (NM_016245.1,834-852).
ctgtgtcctaatttcgtaa

SEQ ID NO: 226639 - DNA, 19 bp, Homo sapiens
  siRNA target sequence for DHRS8 (NM_016245.1,941-959).
gactgagcagaagatgatt

SEQ ID NO: 226640 - DNA, 19 bp, Homo sapiens
  siRNA target sequence for DHRS9 (NM_005771.3,1514-1532).
gggtgctaggcctcctaat

SEQ ID NO: 226641 - DNA, 19 bp, Homo sapiens
  siRNA target sequence for DHRS9 (NM_005771.3,1527-1545).
cctaatcctctgtggtttt

SEQ ID NO: 226642 - DNA, 19 bp, Homo sapiens
  siRNA target sequence for DHRS9 (NM_005771.3,1546-1564).
ctgtggactcgtaaaggaa

SEQ ID NO: 226643 - DNA, 19 bp, Homo sapiens
  siRNA target sequence for DHRS9 (NM_005771.3,1550-1568).
ggactcgtaaaggaaaact

SEQ ID NO: 226644 - DNA, 19 bp, Homo sapiens
  siRNA target sequence for DHRS9 (NM_005771.3,1686-1704).
gactgaatcaggatcaaca

SEQ ID NO: 226645 - DNA, 19 bp, Homo sapiens
  siRNA target sequence for DHRS9 (NM_005771.3,1694-1712).
caggatcaacagctttaaa

SEQ ID NO: 226646 - DNA, 19 bp, Homo sapiens
  siRNA target sequence for DHRS9 (NM_005771.3,1817-1835).
gtctctggggtctgatcaa

SEQ ID NO: 226647 - DNA, 19 bp, Homo sapiens
  siRNA target sequence for DHRS9 (NM_005771.3,1819-1837).
ctctggggtctgatcaata

SEQ ID NO: 226648 - DNA, 19 bp, Homo sapiens
  siRNA target sequence for DHRS9 (NM_005771.3,1821-1839).
ctggggtctgatcaataat

SEQ ID NO: 226649 - DNA, 19 bp, Homo sapiens
  siRNA target sequence for DHRS9 (NM_005771.3,1887-1905).
ggactacagagaacctatt

SEQ ID NO: 226650 - DNA, 19 bp, Homo sapiens
  siRNA target sequence for DHRS9 (NM_005771.3,1926-1944).
catcagtgtgacactaaat

SEQ ID NO: 226651 - DNA, 19 bp, Homo sapiens
  siRNA target sequence for DHRS9 (NM_005771.3,1931-1949).
gtgtgacactaaatatgct

SEQ ID NO: 226652 - DNA, 19 bp, Homo sapiens
  siRNA target sequence for DHRS9 (NM_005771.3,1966-1984).
gctcaagggagagttatta

SEQ ID NO: 226653 - DNA, 19 bp, Homo sapiens
  siRNA target sequence for DHRS9 (NM_005771.3,1967-1985).
ctcaagggagagttattaa

SEQ ID NO: 226654 - DNA, 19 bp, Homo sapiens
  siRNA target sequence for DHRS9 (NM_005771.3,2016-2034).
cgttggagggggctatact

SEQ ID NO: 226655 - DNA, 19 bp, Homo sapiens
  siRNA target sequence for DHRS9 (NM_005771.3,2027-2045).
gctatactccatccaaata

SEQ ID NO: 226656 - DNA, 19 bp, Homo sapiens
  siRNA target sequence for DHRS9 (NM_005771.3,2028-2046).
ctatactccatccaaatat

SEQ ID NO: 226657 - DNA, 19 bp, Homo sapiens
  siRNA target sequence for DHRS9 (NM_005771.3,2056-2074).
ggtttcaatgacagcttaa

SEQ ID NO: 226658 - DNA, 19 bp, Homo sapiens
  siRNA target sequence for DHRS9 (NM_005771.3,2070-2088).
cttaagacgggacatgaaa

SEQ ID NO: 226659 - DNA, 19 bp, Homo sapiens
  siRNA target sequence for DHRS9 (NM_005771.3,2075-2093).
gacgggacatgaaagcttt

SEQ ID NO: 226660 - DNA, 19 bp, Homo sapiens
  siRNA target sequence for DHRS9 (NM_005771.3,2100-2118).
gcacgtctcatgcattgaa

SEQ ID NO: 226661 - DNA, 19 bp, Homo sapiens
  siRNA target sequence for DHRS9 (NM_005771.3,2111-2129).
gcattgaaccaggattgtt

SEQ ID NO: 226662 - DNA, 19 bp, Homo sapiens
  siRNA target sequence for DHRS9 (NM_005771.3,2218-2236).
ggagaaggttacattgaaa

SEQ ID NO: 226663 - DNA, 19 bp, Homo sapiens
  siRNA target sequence for DHRS9 (NM_005771.3,2258-2276).
gcaataaatcctatgtgaa

SEQ ID NO: 226664 - DNA, 19 bp, Homo sapiens
  siRNA target sequence for DHRS9 (NM_005771.3,2304-2322).
catggaccacgctctaaca

SEQ ID NO: 226665 - DNA, 19 bp, Homo sapiens
  siRNA target sequence for DHRS9 (NM_005771.3,2307-2325).
ggaccacgctctaacaagt

SEQ ID NO: 226666 - DNA, 19 bp, Homo sapiens
  siRNA target sequence for DHRSX (NM_145177.1,136-154).
gaccgtgtcgctatagtga

SEQ ID NO: 226667 - DNA, 19 bp, Homo sapiens
  siRNA target sequence for DHRSX (NM_145177.1,203-221).
gacttggcatgcatgttat

SEQ ID NO: 226668 - DNA, 19 bp, Homo sapiens
  siRNA target sequence for DHRSX (NM_145177.1,248-266).
ccaaacaagttgtaagcaa

SEQ ID NO: 226669 - DNA, 19 bp, Homo sapiens
  siRNA target sequence for DHRSX (NM_145177.1,249-267).
caaacaagttgtaagcaaa

SEQ ID NO: 226670 - DNA, 19 bp, Homo sapiens
  siRNA target sequence for DHRSX (NM_145177.1,285-303).
gaacgacaaagtggaattt

SEQ ID NO: 226671 - DNA, 19 bp, Homo sapiens
  siRNA target sequence for DHRSX (NM_145177.1,374-392).
ctctccatgtcctgatcaa

SEQ ID NO: 226672 - DNA, 19 bp, Homo sapiens
  siRNA target sequence for DHRSX (NM_145177.1,431-449).
gagatggattcgaagaaca

SEQ ID NO: 226673 - DNA, 19 bp, Homo sapiens
  siRNA target sequence for DHRSX (NM_145177.1,433-451).
gatggattcgaagaacatt

SEQ ID NO: 226674 - DNA, 19 bp, Homo sapiens
  siRNA target sequence for DHRSX (NM_145177.1,790-808).
cttctcggctggttgcttt

SEQ ID NO: 226675 - DNA, 19 bp, Homo sapiens
  siRNA target sequence for DHRSX (NM_145177.1,796-814).
ggctggttgcttttcaaga

SEQ ID NO: 226676 - DNA, 19 bp, Homo sapiens
  siRNA target sequence for DHRSX (NM_145177.1,889-907).
ctatacaacgagaaagaga

SEQ ID NO: 226677 - DNA, 19 bp, Homo sapiens
  siRNA target sequence for DHRSX (NM_145177.1,949-967).
cagctgtggtctaagagtt

SEQ ID NO: 226678 - DNA, 19 bp, Homo sapiens
  siRNA target sequence for DKFZp566O084 (NM_015510.3,428-446).
gctatgtcgacatacttgt

SEQ ID NO: 226679 - DNA, 19 bp, Homo sapiens
  siRNA target sequence for DKFZp566O084 (NM_015510.3,533-551).
gcccagttgctctaacgaa

SEQ ID NO: 226680 - DNA, 19 bp, Homo sapiens
  siRNA target sequence for DKFZp566O084 (NM_015510.3,621-639).
gatgagcattccttttcga

SEQ ID NO: 226681 - DNA, 19 bp, Homo sapiens
  siRNA target sequence for DKFZp566O084 (NM_015510.3,695-713).
ccgagatggaacagtatga

SEQ ID NO: 226682 - DNA, 19 bp, Homo sapiens
  siRNA target sequence for DKFZp566O084 (NM_015510.3,696-714).
cgagatggaacagtatgaa

SEQ ID NO: 226683 - DNA, 19 bp, Homo sapiens
  siRNA target sequence for DKFZp566O084 (NM_015510.3,748-766).
cacaccaacctctctgtaa

SEQ ID NO: 226684 - DNA, 19 bp, Homo sapiens
  siRNA target sequence for DKFZp566O084 (NM_015510.3,777-795).
cgcggatggatctaggtat

SEQ ID NO: 226685 - DNA, 19 bp, Homo sapiens
  siRNA target sequence for ERO1LB (NM_019891.2,400-418).
gagagactattttcgttat

SEQ ID NO: 226686 - DNA, 19 bp, Homo sapiens
  siRNA target sequence for ERO1LB (NM_019891.2,402-420).
gagactattttcgttatta

SEQ ID NO: 226687 - DNA, 19 bp, Homo sapiens
  siRNA target sequence for ERO1LB (NM_019891.2,404-422).
gactattttcgttattaca

SEQ ID NO: 226688 - DNA, 19 bp, Homo sapiens
  siRNA target sequence for ERO1LB (NM_019891.2,461-479).
gatggccactgttcaataa

SEQ ID NO: 226689 - DNA, 19 bp, Homo sapiens
  siRNA target sequence for ERO1LB (NM_019891.2,465-483).
gccactgttcaataaaaga

SEQ ID NO: 226690 - DNA, 19 bp, Homo sapiens
  siRNA target sequence for ERO1LB (NM_019891.2,499-517).
ctgtccagagagtaaaatt

SEQ ID NO: 226691 - DNA, 19 bp, Homo sapiens
  siRNA target sequence for ERO1LB (NM_019891.2,510-528).
gtaaaattccggttggaat

SEQ ID NO: 226692 - DNA, 19 bp, Homo sapiens
  siRNA target sequence for ERO1LB (NM_019891.2,533-551).
gctgggcattctaataagt

SEQ ID NO: 226693 - DNA, 19 bp, Homo sapiens
  siRNA target sequence for ERO1LB (NM_019891.2,534-552).
ctgggcattctaataagta

SEQ ID NO: 226694 - DNA, 19 bp, Homo sapiens
  siRNA target sequence for ERO1LB (NM_019891.2,536-554).
gggcattctaataagtact

SEQ ID NO: 226695 - DNA, 19 bp, Homo sapiens
  siRNA target sequence for ERO1LB (NM_019891.2,562-580).
ggcaaacaataccaaagaa

SEQ ID NO: 226696 - DNA, 19 bp, Homo sapiens
  siRNA target sequence for ERO1LB (NM_019891.2,563-581).
gcaaacaataccaaagaat

SEQ ID NO: 226697 - DNA, 19 bp, Homo sapiens
  siRNA target sequence for ERO1LB (NM_019891.2,622-640).
cagcacattaagtaatcaa

SEQ ID NO: 226698 - DNA, 19 bp, Homo sapiens
  siRNA target sequence for ERO1LB (NM_019891.2,627-645).
cattaagtaatcaaagcaa

SEQ ID NO: 226699 - DNA, 19 bp, Homo sapiens
  siRNA target sequence for ERO1LB (NM_019891.2,655-673).
cattgactgggcaagatat

SEQ ID NO: 226700 - DNA, 19 bp, Homo sapiens
  siRNA target sequence for ERO1LB (NM_019891.2,677-695).
gattcacgggatcactttt

SEQ ID NO: 226701 - DNA, 19 bp, Homo sapiens
  siRNA target sequence for ERO1LB (NM_019891.2,681-699).
cacgggatcacttttgtga

SEQ ID NO: 226702 - DNA, 19 bp, Homo sapiens
  siRNA target sequence for ERO1LB (NM_019891.2,720-738).
cagctgctcagtatgtaga

SEQ ID NO: 226703 - DNA, 19 bp, Homo sapiens
  siRNA target sequence for ERO1LB (NM_019891.2,726-744).
ctcagtatgtagacctatt

SEQ ID NO: 226704 - DNA, 19 bp, Homo sapiens
  siRNA target sequence for ERO1LB (NM_019891.2,748-766).
gaacccagagcgttacact

SEQ ID NO: 226705 - DNA, 19 bp, Homo sapiens
  siRNA target sequence for ERO1LB (NM_019891.2,757-775).
gcgttacactggctataaa

SEQ ID NO: 226706 - DNA, 19 bp, Homo sapiens
  siRNA target sequence for ERO1LB (NM_019891.2,826-844).
caagcctcgatctgtttat

SEQ ID NO: 226707 - DNA, 19 bp, Homo sapiens
  siRNA target sequence for ERO1LB (NM_019891.2,829-847).
gcctcgatctgtttatcgt

SEQ ID NO: 226708 - DNA, 19 bp, Homo sapiens
  siRNA target sequence for ERO1LB (NM_019891.2,837-855).
ctgtttatcgtcctttaaa

SEQ ID NO: 226709 - DNA, 19 bp, Homo sapiens
  siRNA target sequence for ERO1LB (NM_019891.2,946-964).
gcttatatcgggacttcat

SEQ ID NO: 226710 - DNA, 19 bp, Homo sapiens
  siRNA target sequence for ERO1LB (NM_019891.2,1021-1039).
gcccagttggggacctaat

SEQ ID NO: 226711 - DNA, 19 bp, Homo sapiens
  siRNA target sequence for ERO1LB (NM_019891.2,1022-1040).
cccagttggggacctaata

SEQ ID NO: 226712 - DNA, 19 bp, Homo sapiens
  siRNA target sequence for ERO1LB (NM_019891.2,1023-1041).
ccagttggggacctaatat

SEQ ID NO: 226713 - DNA, 19 bp, Homo sapiens
  siRNA target sequence for ERO1LB (NM_019891.2,1024-1042).
cagttggggacctaatatt

SEQ ID NO: 226714 - DNA, 19 bp, Homo sapiens
  siRNA target sequence for ERO1LB (NM_019891.2,1034-1052).
cctaatattaaagaattca

SEQ ID NO: 226715 - DNA, 19 bp, Homo sapiens
  siRNA target sequence for ERO1LB (NM_019891.2,1035-1053).
ctaatattaaagaattcaa

SEQ ID NO: 226716 - DNA, 19 bp, Homo sapiens
  siRNA target sequence for ERO1LB (NM_019891.2,1098-1116).
ggctcaagaatctttactt

SEQ ID NO: 226717 - DNA, 19 bp, Homo sapiens
  siRNA target sequence for ERO1LB (NM_019891.2,1169-1187).
cgctcaattgtcgatcttt

SEQ ID NO: 226718 - DNA, 19 bp, Homo sapiens
  siRNA target sequence for ERO1LB (NM_019891.2,1263-1281).
ccatgcactttgatgagaa

SEQ ID NO: 226719 - DNA, 19 bp, Homo sapiens
  siRNA target sequence for ERO1LB (NM_019891.2,1264-1282).
catgcactttgatgagaaa

SEQ ID NO: 226720 - DNA, 19 bp, Homo sapiens
  siRNA target sequence for ERO1LB (NM_019891.2,1308-1326).
gggccaagtcactaaagga

SEQ ID NO: 226721 - DNA, 19 bp, Homo sapiens
  siRNA target sequence for ERO1LB (NM_019891.2,1324-1342).
ggaggaattccgattacat

SEQ ID NO: 226722 - DNA, 19 bp, Homo sapiens
  siRNA target sequence for ERO1LB (NM_019891.2,1325-1343).
gaggaattccgattacatt

SEQ ID NO: 226723 - DNA, 19 bp, Homo sapiens
  siRNA target sequence for ERO1LB (NM_019891.2,1334-1352).
cgattacatttcaagaata

SEQ ID NO: 226724 - DNA, 19 bp, Homo sapiens
  siRNA target sequence for ERO1LB (NM_019891.2,1373-1391).
gttggatgtgacaaatgca

SEQ ID NO: 226725 - DNA, 19 bp, Homo sapiens
  siRNA target sequence for ERO1LB (NM_019891.2,1424-1442).
ggaactgccctgaagatat

SEQ ID NO: 226726 - DNA, 19 bp, Homo sapiens
  siRNA target sequence for ERO1LB (NM_019891.2,1430-1448).
gccctgaagatattattct

SEQ ID NO: 226727 - DNA, 19 bp, Homo sapiens
  siRNA target sequence for ERO1LB (NM_019891.2,1473-1491).
cagagaatagtccatctaa

SEQ ID NO: 226728 - DNA, 19 bp, Homo sapiens
  siRNA target sequence for ERO1LB (NM_019891.2,1504-1522).
cacccgacaggaaatagtt

SEQ ID NO: 226729 - DNA, 19 bp, Homo sapiens
  siRNA target sequence for ERO1LB (NM_019891.2,1541-1559).
ggaaggctttctacaagta

SEQ ID NO: 226730 - DNA, 19 bp, Homo sapiens
  siRNA target sequence for ERO1LB (NM_019891.2,1554-1572).
caagtataagagacttaca

SEQ ID NO: 226731 - DNA, 19 bp, Homo sapiens
  siRNA target sequence for FADS2 (NM_004265.2,333-351).
gcactacgctggagaagat

SEQ ID NO: 226732 - DNA, 19 bp, Homo sapiens
  siRNA target sequence for FADS2 (NM_004265.2,590-608).
catggttcactgtctttta

SEQ ID NO: 226733 - DNA, 19 bp, Homo sapiens
  siRNA target sequence for FADS2 (NM_004265.2,676-694).
ggatggctgcaacatgatt

SEQ ID NO: 226734 - DNA, 19 bp, Homo sapiens
  siRNA target sequence for FADS2 (NM_004265.2,677-695).
gatggctgcaacatgatta

SEQ ID NO: 226735 - DNA, 19 bp, Homo sapiens
  siRNA target sequence for FADS2 (NM_004265.2,700-718).
cacctgtctgtctacagaa

SEQ ID NO: 226736 - DNA, 19 bp, Homo sapiens
  siRNA target sequence for FADS2 (NM_004265.2,702-720).
cctgtctgtctacagaaaa

SEQ ID NO: 226737 - DNA, 19 bp, Homo sapiens
  siRNA target sequence for FADS2 (NM_004265.2,912-930).
gaaatacctgccctacaat

SEQ ID NO: 226738 - DNA, 19 bp, Homo sapiens
  siRNA target sequence for FADS2 (NM_004265.2,1007-1025).
ccatgatcgtccataagaa

SEQ ID NO: 226739 - DNA, 19 bp, Homo sapiens
  siRNA target sequence for FADS2 (NM_004265.2,1043-1061).
gggccgtcagctactacat

SEQ ID NO: 226740 - DNA, 19 bp, Homo sapiens
  siRNA target sequence for FADS2 (NM_004265.2,1246-1264).
gtggagcagtccttcttca

SEQ ID NO: 226741 - DNA, 19 bp, Homo sapiens
  siRNA target sequence for FADS2 (NM_004265.2,1328-1346).
ggcacaacttacacaagat

SEQ ID NO: 226742 - DNA, 19 bp, Homo sapiens
  siRNA target sequence for FADS2 (NM_004265.2,1351-1369).
ccgctggtgaagtctctat

SEQ ID NO: 226743 - DNA, 19 bp, Homo sapiens
  siRNA target sequence for FADS2 (NM_004265.2,1353-1371).
gctggtgaagtctctatgt

SEQ ID NO: 226744 - DNA, 19 bp, Homo sapiens
  siRNA target sequence for FADS2 (NM_004265.2,1464-1482).
ggacgcctaccttcacaaa

SEQ ID NO: 226745 - DNA, 19 bp, Homo sapiens
  siRNA target sequence for FADS2 (NM_004265.2,1465-1483).
gacgcctaccttcacaaat

SEQ ID NO: 226746 - DNA, 19 bp, Homo sapiens
  siRNA target sequence for FADS3 (NM_021727.3,414-432).
cctacagcccctgttgatt

SEQ ID NO: 226747 - DNA, 19 bp, Homo sapiens
  siRNA target sequence for FADS3 (NM_021727.3,975-993).
gctcaccctggtgaacttt

SEQ ID NO: 226748 - DNA, 19 bp, Homo sapiens
  siRNA target sequence for FADS3 (NM_021727.3,1066-1084).
gcccgcttcttcttatcct

SEQ ID NO: 226749 - DNA, 19 bp, Homo sapiens
  siRNA target sequence for FADS3 (NM_021727.3,1325-1343).
ggatgccgagacacaacta

SEQ ID NO: 226750 - DNA, 19 bp, Homo sapiens
  siRNA target sequence for FLJ11042 (NM_018308.1,86-104).
ggatattaatatttgacaa

SEQ ID NO: 226751 - DNA, 19 bp, Homo sapiens
  siRNA target sequence for FLJ11042 (NM_018308.1,127-145).
ctgctggataagtttggtt

SEQ ID NO: 226752 - DNA, 19 bp, Homo sapiens
  siRNA target sequence for FLJ11042 (NM_018308.1,163-181).
cagtaccattcgcctatta

SEQ ID NO: 226753 - DNA, 19 bp, Homo sapiens
  siRNA target sequence for FLJ11042 (NM_018308.1,186-204).
caagagtgcaagattcaat

SEQ ID NO: 226754 - DNA, 19 bp, Homo sapiens
  siRNA target sequence for FLJ11042 (NM_018308.1,222-240).
gaccccttcgagattagct

SEQ ID NO: 226755 - DNA, 19 bp, Homo sapiens
  siRNA target sequence for FLJ11042 (NM_018308.1,679-697).
gaactgctggcccaataca

SEQ ID NO: 226756 - DNA, 19 bp, Homo sapiens
  siRNA target sequence for FLJ11042 (NM_018308.1,690-708).
ccaatacaccaaacagtat

SEQ ID NO: 226757 - DNA, 19 bp, Homo sapiens
  siRNA target sequence for FLJ11042 (NM_018308.1,735-753).
ccaaaactgggctgaatct

SEQ ID NO: 226758 - DNA, 19 bp, Homo sapiens
  siRNA target sequence for FLJ11042 (NM_018308.1,792-810).
catggacacagttgatgat

SEQ ID NO: 226759 - DNA, 19 bp, Homo sapiens
  siRNA target sequence for FLJ11042 (NM_018308.1,805-823).
gatgatctcgcctttctgt

SEQ ID NO: 226760 - DNA, 19 bp, Homo sapiens
  siRNA target sequence for FLJ11042 (NM_018308.1,862-880).
ggtttggtggccagaattt

SEQ ID NO: 226761 - DNA, 19 bp, Homo sapiens
  siRNA target sequence for FLJ11042 (NM_018308.1,863-881).
gtttggtggccagaattta

SEQ ID NO: 226762 - DNA, 19 bp, Homo sapiens
  siRNA target sequence for FLJ11042 (NM_018308.1,867-885).
ggtggccagaatttattat

SEQ ID NO: 226763 - DNA, 19 bp, Homo sapiens
  siRNA target sequence for FLJ11042 (NM_018308.1,966-984).
cactcaccgagttacctta

SEQ ID NO: 226764 - DNA, 19 bp, Homo sapiens
  siRNA target sequence for FLJ11042 (NM_018308.1,1021-1039).
caagaggaccagactttgt

SEQ ID NO: 226765 - DNA, 19 bp, Homo sapiens
  siRNA target sequence for FLJ11042 (NM_018308.1,1091-1109).
cctggtatttagaacataa

SEQ ID NO: 226766 - DNA, 19 bp, Homo sapiens
  siRNA target sequence for FLJ11577 (NM_025159.1,327-345).
ctggagttgtgcctcttat

SEQ ID NO: 226767 - DNA, 19 bp, Homo sapiens
  siRNA target sequence for FLJ11577 (NM_025159.1,332-350).
gttgtgcctcttataatga

SEQ ID NO: 226768 - DNA, 19 bp, Homo sapiens
  siRNA target sequence for FLJ11577 (NM_025159.1,436-454).
ctctacgtgagctgcaaat

SEQ ID NO: 226769 - DNA, 19 bp, Homo sapiens
  siRNA target sequence for FLJ11577 (NM_025159.1,438-456).
ctacgtgagctgcaaatca

SEQ ID NO: 226770 - DNA, 19 bp, Homo sapiens
  siRNA target sequence for FLJ11577 (NM_025159.1,537-555).
ccccaatcctgtgtttgaa

SEQ ID NO: 226771 - DNA, 19 bp, Homo sapiens
  siRNA target sequence for FLJ11577 (NM_025159.1,567-585).
ggctgcagttgaaatatgt

SEQ ID NO: 226772 - DNA, 19 bp, Homo sapiens
  siRNA target sequence for FLJ11577 (NM_025159.1,568-586).
gctgcagttgaaatatgta

SEQ ID NO: 226773 - DNA, 19 bp, Homo sapiens
  siRNA target sequence for FLJ11577 (NM_025159.1,606-624).
ctacttggttccatcttct

SEQ ID NO: 226774 - DNA, 19 bp, Homo sapiens
  siRNA target sequence for FLJ11577 (NM_025159.1,675-693).
ggtgatggccattaattca

SEQ ID NO: 226775 - DNA, 19 bp, Homo sapiens
  siRNA target sequence for FLJ11577 (NM_025159.1,713-731).
ctgagagcagttttgaata

SEQ ID NO: 226776 - DNA, 19 bp, Homo sapiens
  siRNA target sequence for FLJ11577 (NM_025159.1,814-832).
cctatccagcggtactcat

SEQ ID NO: 226777 - DNA, 19 bp, Homo sapiens
  siRNA target sequence for FLJ11577 (NM_025159.1,819-837).
ccagcggtactcatcctat

SEQ ID NO: 226778 - DNA, 19 bp, Homo sapiens
  siRNA target sequence for FLJ11577 (NM_025159.1,823-841).
cggtactcatcctattgga

SEQ ID NO: 226779 - DNA, 19 bp, Homo sapiens
  siRNA target sequence for FLJ11577 (NM_025159.1,842-860).
gaataacaagcatcaaaga

SEQ ID NO: 226780 - DNA, 19 bp, Homo sapiens
  siRNA target sequence for FLJ11577 (NM_025159.1,873-891).
gcaaatgcagaatcctatt

SEQ ID NO: 226781 - DNA, 19 bp, Homo sapiens
  siRNA target sequence for FLJ11577 (NM_025159.1,927-945).
ggttgtggagttatataaa

SEQ ID NO: 226782 - DNA, 19 bp, Homo sapiens
  siRNA target sequence for FLJ11577 (NM_025159.1,997-1015).
gcgtctgaactcatcatga

SEQ ID NO: 226783 - DNA, 19 bp, Homo sapiens
  siRNA target sequence for FLJ11577 (NM_025159.1,1070-1088).
caaaagccagagatatagt

SEQ ID NO: 226784 - DNA, 19 bp, Homo sapiens
  siRNA target sequence for FLJ11577 (NM_025159.1,1075-1093).
gccagagatatagtcttta

SEQ ID NO: 226785 - DNA, 19 bp, Homo sapiens
  siRNA target sequence for FLJ11577 (NM_025159.1,1089-1107).
ctttagccgcctattgcaa

SEQ ID NO: 226786 - DNA, 19 bp, Homo sapiens
  siRNA target sequence for FLJ11577 (NM_025159.1,1094-1112).
gccgcctattgcaattgat

SEQ ID NO: 226787 - DNA, 19 bp, Homo sapiens
  siRNA target sequence for FLJ11577 (NM_025159.1,1096-1114).
cgcctattgcaattgatgt

SEQ ID NO: 226788 - DNA, 19 bp, Homo sapiens
  siRNA target sequence for FLJ11577 (NM_025159.1,1136-1154).
gcactcctagtctccatat

SEQ ID NO: 226789 - DNA, 19 bp, Homo sapiens
  siRNA target sequence for FLJ11577 (NM_025159.1,1137-1155).
cactcctagtctccatatt

SEQ ID NO: 226790 - DNA, 19 bp, Homo sapiens
  siRNA target sequence for FLJ11577 (NM_025159.1,1142-1160).
ctagtctccatatttctca

SEQ ID NO: 226791 - DNA, 19 bp, Homo sapiens
  siRNA target sequence for FLJ12661 (NM_025138.2,1255-1273).
gaagacctagccgcataaa

SEQ ID NO: 226792 - DNA, 19 bp, Homo sapiens
  siRNA target sequence for FLJ12661 (NM_025138.2,1260-1278).
cctagccgcataaatggaa

SEQ ID NO: 226793 - DNA, 19 bp, Homo sapiens
  siRNA target sequence for FLJ12661 (NM_025138.2,1261-1279).
ctagccgcataaatggaat

SEQ ID NO: 226794 - DNA, 19 bp, Homo sapiens
  siRNA target sequence for FLJ12661 (NM_025138.2,1264-1282).
gccgcataaatggaatttt

SEQ ID NO: 226795 - DNA, 19 bp, Homo sapiens
  siRNA target sequence for FLJ12661 (NM_025138.2,1284-1302).
ccaggaactcctttgaaaa

SEQ ID NO: 226796 - DNA, 19 bp, Homo sapiens
  siRNA target sequence for FLJ12661 (NM_025138.2,1285-1303).
caggaactcctttgaaaaa

SEQ ID NO: 226797 - DNA, 19 bp, Homo sapiens
  siRNA target sequence for FLJ12661 (NM_025138.2,1336-1354).
gaatagctgcacgaattct

SEQ ID NO: 226798 - DNA, 19 bp, Homo sapiens
  siRNA target sequence for FLJ12661 (NM_025138.2,1443-1461).
gcaccaagtgcttataaca

SEQ ID NO: 226799 - DNA, 19 bp, Homo sapiens
  siRNA target sequence for FLJ12661 (NM_025138.2,1444-1462).
caccaagtgcttataacaa

SEQ ID NO: 226800 - DNA, 19 bp, Homo sapiens
  siRNA target sequence for FLJ12661 (NM_025138.2,1473-1491).
gtaccattagcgaatgtca

SEQ ID NO: 226801 - DNA, 19 bp, Homo sapiens
  siRNA target sequence for FLJ12661 (NM_025138.2,1538-1556).
gaatgaagacctttcgaat

SEQ ID NO: 226802 - DNA, 19 bp, Homo sapiens
  siRNA target sequence for FLJ12661 (NM_025138.2,1547-1565).
cctttcgaatccgtcaaaa

SEQ ID NO: 226803 - DNA, 19 bp, Homo sapiens
  siRNA target sequence for FLJ12661 (NM_025138.2,1552-1570).
cgaatccgtcaaaacctat

SEQ ID NO: 226804 - DNA, 19 bp, Homo sapiens
  siRNA target sequence for FLJ12661 (NM_025138.2,1553-1571).
gaatccgtcaaaacctata

SEQ ID NO: 226805 - DNA, 19 bp, Homo sapiens
  siRNA target sequence for FLJ12661 (NM_025138.2,1557-1575).
ccgtcaaaacctatacaga

SEQ ID NO: 226806 - DNA, 19 bp, Homo sapiens
  siRNA target sequence for FLJ12661 (NM_025138.2,1558-1576).
cgtcaaaacctatacagaa

SEQ ID NO: 226807 - DNA, 19 bp, Homo sapiens
  siRNA target sequence for FLJ12661 (NM_025138.2,1559-1577).
gtcaaaacctatacagaat

SEQ ID NO: 226808 - DNA, 19 bp, Homo sapiens
  siRNA target sequence for FLJ12661 (NM_025138.2,1566-1584).
cctatacagaatcaaacat

SEQ ID NO: 226809 - DNA, 19 bp, Homo sapiens
  siRNA target sequence for FLJ12661 (NM_025138.2,1591-1609).
ccccagcaagtcaactctt

SEQ ID NO: 226810 - DNA, 19 bp, Homo sapiens
  siRNA target sequence for FLJ12661 (NM_025138.2,1592-1610).
cccagcaagtcaactcttt

SEQ ID NO: 226811 - DNA, 19 bp, Homo sapiens
  siRNA target sequence for FLJ12661 (NM_025138.2,1593-1611).
ccagcaagtcaactctttt

SEQ ID NO: 226812 - DNA, 19 bp, Homo sapiens
  siRNA target sequence for FLJ12661 (NM_025138.2,1669-1687).
cagtcaaggcaattaatca

SEQ ID NO: 226813 - DNA, 19 bp, Homo sapiens
  siRNA target sequence for FLJ12661 (NM_025138.2,1708-1726).
ccaccgtttctggaatgaa

SEQ ID NO: 226814 - DNA, 19 bp, Homo sapiens
  siRNA target sequence for FLJ12661 (NM_025138.2,1833-1851).
cccactgcacctgttacat

SEQ ID NO: 226815 - DNA, 19 bp, Homo sapiens
  siRNA target sequence for FLJ12661 (NM_025138.2,2137-2155).
ccaacccgactcctgtaat

SEQ ID NO: 226816 - DNA, 19 bp, Homo sapiens
  siRNA target sequence for FLJ12661 (NM_025138.2,2138-2156).
caacccgactcctgtaatt

SEQ ID NO: 226817 - DNA, 19 bp, Homo sapiens
  siRNA target sequence for FLJ12661 (NM_025138.2,2194-2212).
gtgtgaacagtcctctttt

SEQ ID NO: 226818 - DNA, 19 bp, Homo sapiens
  siRNA target sequence for FLJ12661 (NM_025138.2,2213-2231).
gtctgcgttaaaaggtttt

SEQ ID NO: 226819 - DNA, 19 bp, Homo sapiens
  siRNA target sequence for FLJ12661 (NM_025138.2,2215-2233).
ctgcgttaaaaggttttct

SEQ ID NO: 226820 - DNA, 19 bp, Homo sapiens
  siRNA target sequence for FLJ12661 (NM_025138.2,2340-2358).
gcttcagcccctaacaagt

SEQ ID NO: 226821 - DNA, 19 bp, Homo sapiens
  siRNA target sequence for FLJ12661 (NM_025138.2,2432-2450).
gtctcccgtggctaactca

SEQ ID NO: 226822 - DNA, 19 bp, Homo sapiens
  siRNA target sequence for FLJ12661 (NM_025138.2,2436-2454).
cccgtggctaactcaactt

SEQ ID NO: 226823 - DNA, 19 bp, Homo sapiens
  siRNA target sequence for FLJ12661 (NM_025138.2,2569-2587).
gtacctcagatctgcatat

SEQ ID NO: 226824 - DNA, 19 bp, Homo sapiens
  siRNA target sequence for FLJ12661 (NM_025138.2,2573-2591).
ctcagatctgcatatttca

SEQ ID NO: 226825 - DNA, 19 bp, Homo sapiens
  siRNA target sequence for FLJ12661 (NM_025138.2,2605-2623).
caacaactcttcctgttat

SEQ ID NO: 226826 - DNA, 19 bp, Homo sapiens
  siRNA target sequence for FLJ12661 (NM_025138.2,2608-2626).
caactcttcctgttatgat

SEQ ID NO: 226827 - DNA, 19 bp, Homo sapiens
  siRNA target sequence for FLJ12661 (NM_025138.2,2663-2681).
caaaggtccatctcattct

SEQ ID NO: 226828 - DNA, 19 bp, Homo sapiens
  siRNA target sequence for FLJ12661 (NM_025138.2,2690-2708).
ctctcatggcactttaggt

SEQ ID NO: 226829 - DNA, 19 bp, Homo sapiens
  siRNA target sequence for FLJ12661 (NM_025138.2,2692-2710).
ctcatggcactttaggttt

SEQ ID NO: 226830 - DNA, 19 bp, Homo sapiens
  siRNA target sequence for FLJ12661 (NM_025138.2,2717-2735).
gacattgggccgtgcatat

SEQ ID NO: 226831 - DNA, 19 bp, Homo sapiens
  siRNA target sequence for FLJ12661 (NM_025138.2,2723-2741).
gggccgtgcatatacttca

SEQ ID NO: 226832 - DNA, 19 bp, Homo sapiens
  siRNA target sequence for FLJ12661 (NM_025138.2,2726-2744).
ccgtgcatatacttcaaca

SEQ ID NO: 226833 - DNA, 19 bp, Homo sapiens
  siRNA target sequence for FLJ12661 (NM_025138.2,2743-2761).
catccgtgcccatcagttt

SEQ ID NO: 226834 - DNA, 19 bp, Homo sapiens
  siRNA target sequence for FLJ12661 (NM_025138.2,2747-2765).
cgtgcccatcagtttatct

SEQ ID NO: 226835 - DNA, 19 bp, Homo sapiens
  siRNA target sequence for FLJ12661 (NM_025138.2,2771-2789).
ccttaatcctgcattgtca

SEQ ID NO: 226836 - DNA, 19 bp, Homo sapiens
  siRNA target sequence for FLJ12661 (NM_025138.2,2790-2808).
ggtctctccagcttgagta

SEQ ID NO: 226837 - DNA, 19 bp, Homo sapiens
  siRNA target sequence for FLJ12661 (NM_025138.2,2798-2816).
cagcttgagtactccttta

SEQ ID NO: 226838 - DNA, 19 bp, Homo sapiens
  siRNA target sequence for FLJ12661 (NM_025138.2,2800-2818).
gcttgagtactcctttaaa

SEQ ID NO: 226839 - DNA, 19 bp, Homo sapiens
  siRNA target sequence for FLJ12661 (NM_025138.2,2804-2822).
gagtactcctttaaatggt

SEQ ID NO: 226840 - DNA, 19 bp, Homo sapiens
  siRNA target sequence for FLJ12661 (NM_025138.2,2869-2887).
ctcccattgcaccagtatt

SEQ ID NO: 226841 - DNA, 19 bp, Homo sapiens
  siRNA target sequence for FLJ12661 (NM_025138.2,2873-2891).
cattgcaccagtattcact

SEQ ID NO: 226842 - DNA, 19 bp, Homo sapiens
  siRNA target sequence for FLJ12661 (NM_025138.2,2915-2933).
gaccaacaattttccttta

SEQ ID NO: 226843 - DNA, 19 bp, Homo sapiens
  siRNA target sequence for FLJ12661 (NM_025138.2,2918-2936).
caacaattttcctttaact

SEQ ID NO: 226844 - DNA, 19 bp, Homo sapiens
  siRNA target sequence for FLJ12661 (NM_025138.2,2965-2983).
ctctcccagggtcattaat

SEQ ID NO: 226845 - DNA, 19 bp, Homo sapiens
  siRNA target sequence for FLJ12661 (NM_025138.2,3166-3184).
cctatccaggcttttctgt

SEQ ID NO: 226846 - DNA, 19 bp, Homo sapiens
  siRNA target sequence for FLJ12661 (NM_025138.2,3354-3372).
gttgcacaagccggtttat

SEQ ID NO: 226847 - DNA, 19 bp, Homo sapiens
  siRNA target sequence for FLJ12661 (NM_025138.2,3357-3375).
gcacaagccggtttatcat

SEQ ID NO: 226848 - DNA, 19 bp, Homo sapiens
  siRNA target sequence for FLJ12661 (NM_025138.2,3387-3405).
gctgcaggcagttctgttt

SEQ ID NO: 226849 - DNA, 19 bp, Homo sapiens
  siRNA target sequence for FLJ12661 (NM_025138.2,3470-3488).
gcaagaattacagcataat

SEQ ID NO: 226850 - DNA, 19 bp, Homo sapiens
  siRNA target sequence for FLJ12661 (NM_025138.2,3496-3514).
cgcagtcagcattgttaca

SEQ ID NO: 226851 - DNA, 19 bp, Homo sapiens
  siRNA target sequence for FLJ12661 (NM_025138.2,3559-3577).
ctgatgggtttcctagtta

SEQ ID NO: 226852 - DNA, 19 bp, Homo sapiens
  siRNA target sequence for FLJ12661 (NM_025138.2,3564-3582).
gggtttcctagttatcctt

SEQ ID NO: 226853 - DNA, 19 bp, Homo sapiens
  siRNA target sequence for FLJ20643 (NM_017916.1,361-379).
gaccagaatcgacacaaat

SEQ ID NO: 226854 - DNA, 19 bp, Homo sapiens
  siRNA target sequence for FLJ20643 (NM_017916.1,364-382).
cagaatcgacacaaatcca

SEQ ID NO: 226855 - DNA, 19 bp, Homo sapiens
  siRNA target sequence for FLJ20643 (NM_017916.1,418-436).
cggaagggaaggttttcat

SEQ ID NO: 226856 - DNA, 19 bp, Homo sapiens
  siRNA target sequence for FLJ20643 (NM_017916.1,420-438).
gaagggaaggttttcatca

SEQ ID NO: 226857 - DNA, 19 bp, Homo sapiens
  siRNA target sequence for FLJ20643 (NM_017916.1,681-699).
ggccttgaggacaaataca

SEQ ID NO: 226858 - DNA, 19 bp, Homo sapiens
  siRNA target sequence for FLJ20643 (NM_017916.1,714-732).
ccggaatggcgcatgatga

SEQ ID NO: 226859 - DNA, 19 bp, Homo sapiens
  siRNA target sequence for FLJ20643 (NM_017916.1,715-733).
cggaatggcgcatgatgaa

SEQ ID NO: 226860 - DNA, 19 bp, Homo sapiens
  siRNA target sequence for FLJ20643 (NM_017916.1,754-772).
ccatctcgcagcagaacat

SEQ ID NO: 226861 - DNA, 19 bp, Homo sapiens
  siRNA target sequence for FLJ20643 (NM_017916.1,982-1000).
cccagcagctgtatcatct

SEQ ID NO: 226862 - DNA, 19 bp, Homo sapiens
  siRNA target sequence for FLJ20643 (NM_017916.1,1053-1071).
caccggaagagaaagcaat

SEQ ID NO: 226863 - DNA, 19 bp, Homo sapiens
  siRNA target sequence for FLJ20643 (NM_017916.1,1055-1073).
ccggaagagaaagcaatta

SEQ ID NO: 226864 - DNA, 19 bp, Homo sapiens
  siRNA target sequence for FLJ20643 (NM_017916.1,1056-1074).
cggaagagaaagcaattaa

SEQ ID NO: 226865 - DNA, 19 bp, Homo sapiens
  siRNA target sequence for FVT1 (NM_002035.1,253-271).
ctatcgagtgctataaaca

SEQ ID NO: 226866 - DNA, 19 bp, Homo sapiens
  siRNA target sequence for FVT1 (NM_002035.1,263-281).
ctataaacaaggagctttt

SEQ ID NO: 226867 - DNA, 19 bp, Homo sapiens
  siRNA target sequence for FVT1 (NM_002035.1,286-304).
ctctggttgcacgaaatga

SEQ ID NO: 226868 - DNA, 19 bp, Homo sapiens
  siRNA target sequence for FVT1 (NM_002035.1,365-383).
ggtgctttgcatatcagtt

SEQ ID NO: 226869 - DNA, 19 bp, Homo sapiens
  siRNA target sequence for FVT1 (NM_002035.1,374-392).
catatcagttgatgtatct

SEQ ID NO: 226870 - DNA, 19 bp, Homo sapiens
  siRNA target sequence for FVT1 (NM_002035.1,384-402).
gatgtatctcaagactata

SEQ ID NO: 226871 - DNA, 19 bp, Homo sapiens
  siRNA target sequence for FVT1 (NM_002035.1,398-416).
ctataaccaagtagagaat

SEQ ID NO: 226872 - DNA, 19 bp, Homo sapiens
  siRNA target sequence for FVT1 (NM_002035.1,452-470).
ggacatgctggtaaattgt

SEQ ID NO: 226873 - DNA, 19 bp, Homo sapiens
  siRNA target sequence for FVT1 (NM_002035.1,507-525).
gaagttagtacctttgaaa

SEQ ID NO: 226874 - DNA, 19 bp, Homo sapiens
  siRNA target sequence for FVT1 (NM_002035.1,713-731).
ggaggtgaagccatataat

SEQ ID NO: 226875 - DNA, 19 bp, Homo sapiens
  siRNA target sequence for FVT1 (NM_002035.1,723-741).
ccatataatgtctacatca

SEQ ID NO: 226876 - DNA, 19 bp, Homo sapiens
  siRNA target sequence for FVT1 (NM_002035.1,774-792).
ggctttgccgaagaaaaca

SEQ ID NO: 226877 - DNA, 19 bp, Homo sapiens
  siRNA target sequence for FVT1 (NM_002035.1,802-820).
ctttggagactcgacttat

SEQ ID NO: 226878 - DNA, 19 bp, Homo sapiens
  siRNA target sequence for FVT1 (NM_002035.1,806-824).
ggagactcgacttatttca

SEQ ID NO: 226879 - DNA, 19 bp, Homo sapiens
  siRNA target sequence for FVT1 (NM_002035.1,854-872).
ggtggccaaacaaattgtt

SEQ ID NO: 226880 - DNA, 19 bp, Homo sapiens
  siRNA target sequence for FVT1 (NM_002035.1,855-873).
gtggccaaacaaattgtta

SEQ ID NO: 226881 - DNA, 19 bp, Homo sapiens
  siRNA target sequence for FVT1 (NM_002035.1,857-875).
ggccaaacaaattgttaaa

SEQ ID NO: 226882 - DNA, 19 bp, Homo sapiens
  siRNA target sequence for FVT1 (NM_002035.1,945-963).
gggatggctccagtaactt

SEQ ID NO: 226883 - DNA, 19 bp, Homo sapiens
  siRNA target sequence for FVT1 (NM_002035.1,947-965).
gatggctccagtaacttct

SEQ ID NO: 226884 - DNA, 19 bp, Homo sapiens
  siRNA target sequence for FVT1 (NM_002035.1,1001-1019).
ccttttccgcactattgct

SEQ ID NO: 226885 - DNA, 19 bp, Homo sapiens
  siRNA target sequence for FVT1 (NM_002035.1,1002-1020).
cttttccgcactattgctt

SEQ ID NO: 226886 - DNA, 19 bp, Homo sapiens
  siRNA target sequence for FVT1 (NM_002035.1,1007-1025).
ccgcactattgctttgttt

SEQ ID NO: 226887 - DNA, 19 bp, Homo sapiens
  siRNA target sequence for FZD7 (NM_003507.1,345-363).
ctcccgaactccgcttttt

SEQ ID NO: 226888 - DNA, 19 bp, Homo sapiens
  siRNA target sequence for FZD7 (NM_003507.1,347-365).
cccgaactccgctttttct

SEQ ID NO: 226889 - DNA, 19 bp, Homo sapiens
  siRNA target sequence for FZD7 (NM_003507.1,348-366).
ccgaactccgctttttctt

SEQ ID NO: 226890 - DNA, 19 bp, Homo sapiens
  siRNA target sequence for FZD7 (NM_003507.1,349-367).
cgaactccgctttttctta

SEQ ID NO: 226891 - DNA, 19 bp, Homo sapiens
  siRNA target sequence for FZD7 (NM_003507.1,778-796).
caacggcctgatgtacttt

SEQ ID NO: 226892 - DNA, 19 bp, Homo sapiens
  siRNA target sequence for FZD7 (NM_003507.1,1348-1366).
gttcgtctacctcttcata

SEQ ID NO: 226893 - DNA, 19 bp, Homo sapiens
  siRNA target sequence for GFOD1 (NM_018988.1,815-833).
ctacactagccgcattgat

SEQ ID NO: 226894 - DNA, 19 bp, Homo sapiens
  siRNA target sequence for GFOD1 (NM_018988.1,1732-1750).
cgggcgagtggcagaacat

SEQ ID NO: 226895 - DNA, 19 bp, Homo sapiens
  siRNA target sequence for GMIP (NM_016573.1,150-168).
gcctggacaacctcgaaat

SEQ ID NO: 226896 - DNA, 19 bp, Homo sapiens
  siRNA target sequence for GMIP (NM_016573.1,152-170).
ctggacaacctcgaaatct

SEQ ID NO: 226897 - DNA, 19 bp, Homo sapiens
  siRNA target sequence for GMIP (NM_016573.1,246-264).
ctacagccactgttaccaa

SEQ ID NO: 226898 - DNA, 19 bp, Homo sapiens
  siRNA target sequence for GMIP (NM_016573.1,361-379).
ggacgcagccctggaatat

SEQ ID NO: 226899 - DNA, 19 bp, Homo sapiens
  siRNA target sequence for GMIP (NM_016573.1,413-431).
cttgcctggactgaaaaga

SEQ ID NO: 226900 - DNA, 19 bp, Homo sapiens
  siRNA target sequence for GMIP (NM_016573.1,625-643).
cgccaaacggactgagatt

SEQ ID NO: 226901 - DNA, 19 bp, Homo sapiens
  siRNA target sequence for GMIP (NM_016573.1,627-645).
ccaaacggactgagattga

SEQ ID NO: 226902 - DNA, 19 bp, Homo sapiens
  siRNA target sequence for GMIP (NM_016573.1,1208-1226).
cctctggacatcagaaaga

SEQ ID NO: 226903 - DNA, 19 bp, Homo sapiens
  siRNA target sequence for GMIP (NM_016573.1,1786-1804).
gaagtgcacggctgagata

SEQ ID NO: 226904 - DNA, 19 bp, Homo sapiens
  siRNA target sequence for GMIP (NM_016573.1,1791-1809).
gcacggctgagatagaaca

SEQ ID NO: 226905 - DNA, 19 bp, Homo sapiens
  siRNA target sequence for GMIP (NM_016573.1,2108-2126).
cagctgcctgactctaact

SEQ ID NO: 226906 - DNA, 19 bp, Homo sapiens
  siRNA target sequence for GMIP (NM_016573.1,2111-2129).
ctgcctgactctaactaca

SEQ ID NO: 226907 - DNA, 19 bp, Homo sapiens
  siRNA target sequence for GMIP (NM_016573.1,2167-2185).
ggctgcacgatttatggaa

SEQ ID NO: 226908 - DNA, 19 bp, Homo sapiens
  siRNA target sequence for GMIP (NM_016573.1,2172-2190).
cacgatttatggaaaacaa

SEQ ID NO: 226909 - DNA, 19 bp, Homo sapiens
  siRNA target sequence for GMIP (NM_016573.1,2332-2350).
gcactacgagcagatcttt

SEQ ID NO: 226910 - DNA, 19 bp, Homo sapiens
  siRNA target sequence for GMIP (NM_016573.1,2865-2883).
cgctgcccaagcattttga

SEQ ID NO: 226911 - DNA, 19 bp, Homo sapiens
  siRNA target sequence for GMIP (NM_016573.1,2867-2885).
ctgcccaagcattttgaga

SEQ ID NO: 226912 - DNA, 19 bp, Homo sapiens
  siRNA target sequence for GMIP (NM_016573.1,2869-2887).
gcccaagcattttgagatt

SEQ ID NO: 226913 - DNA, 19 bp, Homo sapiens
  siRNA target sequence for GMIP (NM_016573.1,2870-2888).
cccaagcattttgagatta

SEQ ID NO: 226914 - DNA, 19 bp, Homo sapiens
  siRNA target sequence for H17 (NM_017547.2,339-357).
gaacgggaccacacgtatt

SEQ ID NO: 226915 - DNA, 19 bp, Homo sapiens
  siRNA target sequence for H17 (NM_017547.2,343-361).
gggaccacacgtattcaca

SEQ ID NO: 226916 - DNA, 19 bp, Homo sapiens
  siRNA target sequence for H17 (NM_017547.2,446-464).
ctttctacggaacatcaat

SEQ ID NO: 226917 - DNA, 19 bp, Homo sapiens
  siRNA target sequence for H17 (NM_017547.2,450-468).
ctacggaacatcaatgagt

SEQ ID NO: 226918 - DNA, 19 bp, Homo sapiens
  siRNA target sequence for H17 (NM_017547.2,618-636).
gatcagcttcggaacaagt

SEQ ID NO: 226919 - DNA, 19 bp, Homo sapiens
  siRNA target sequence for H17 (NM_017547.2,635-653).
gtttccctggataaacaca

SEQ ID NO: 226920 - DNA, 19 bp, Homo sapiens
  siRNA target sequence for H17 (NM_017547.2,683-701).
ggaggacgaaggttggttt

SEQ ID NO: 226921 - DNA, 19 bp, Homo sapiens
  siRNA target sequence for H17 (NM_017547.2,769-787).
gagaggtgacacgttttgt

SEQ ID NO: 226922 - DNA, 19 bp, Homo sapiens
  siRNA target sequence for H17 (NM_017547.2,771-789).
gaggtgacacgttttgtct

SEQ ID NO: 226923 - DNA, 19 bp, Homo sapiens
  siRNA target sequence for H17 (NM_017547.2,821-839).
caaagcggtggtcttgaaa

SEQ ID NO: 226924 - DNA, 19 bp, Homo sapiens
  siRNA target sequence for H17 (NM_017547.2,825-843).
gcggtggtcttgaaaagga

SEQ ID NO: 226925 - DNA, 19 bp, Homo sapiens
  siRNA target sequence for H17 (NM_017547.2,826-844).
cggtggtcttgaaaaggat

SEQ ID NO: 226926 - DNA, 19 bp, Homo sapiens
  siRNA target sequence for H17 (NM_017547.2,1008-1026).
ccgaggaaaaggtatgtgt

SEQ ID NO: 226927 - DNA, 19 bp, Homo sapiens
  siRNA target sequence for H17 (NM_017547.2,1079-1097).
caccagtggagcctatttt

SEQ ID NO: 226928 - DNA, 19 bp, Homo sapiens
  siRNA target sequence for H17 (NM_017547.2,1272-1290).
ggctattacgactacaaca

SEQ ID NO: 226929 - DNA, 19 bp, Homo sapiens
  siRNA target sequence for H17 (NM_017547.2,1318-1336).
cccacccgctagttgtcaa

SEQ ID NO: 226930 - DNA, 19 bp, Homo sapiens
  siRNA target sequence for H17 (NM_017547.2,1323-1341).
ccgctagttgtcaacatgt

SEQ ID NO: 226931 - DNA, 19 bp, Homo sapiens
  siRNA target sequence for H17 (NM_017547.2,1324-1342).
cgctagttgtcaacatgta

SEQ ID NO: 226932 - DNA, 19 bp, Homo sapiens
  siRNA target sequence for H17 (NM_017547.2,1326-1344).
ctagttgtcaacatgtact

SEQ ID NO: 226933 - DNA, 19 bp, Homo sapiens
  siRNA target sequence for H17 (NM_017547.2,1443-1461).
ctgagccccttcctcttta

SEQ ID NO: 226934 - DNA, 19 bp, Homo sapiens
  siRNA target sequence for H17 (NM_017547.2,1455-1473).
ctctttacccgcttttact

SEQ ID NO: 226935 - DNA, 19 bp, Homo sapiens
  siRNA target sequence for H17 (NM_017547.2,1488-1506).
caggagaacaacatcatct

SEQ ID NO: 226936 - DNA, 19 bp, Homo sapiens
  siRNA target sequence for HSD17B12 (NM_016142.1,137-155).
ctagccctgcgtatttcgt

SEQ ID NO: 226937 - DNA, 19 bp, Homo sapiens
  siRNA target sequence for HSD17B12 (NM_016142.1,240-258).
caggtagtactgatggaat

SEQ ID NO: 226938 - DNA, 19 bp, Homo sapiens
  siRNA target sequence for HSD17B12 (NM_016142.1,294-312).
gaatgaaggttgtccttat

SEQ ID NO: 226939 - DNA, 19 bp, Homo sapiens
  siRNA target sequence for HSD17B12 (NM_016142.1,315-333).
gcagatcaaaggataaact

SEQ ID NO: 226940 - DNA, 19 bp, Homo sapiens
  siRNA target sequence for HSD17B12 (NM_016142.1,395-413).
gactttgcatcagaagata

SEQ ID NO: 226941 - DNA, 19 bp, Homo sapiens
  siRNA target sequence for HSD17B12 (NM_016142.1,449-467).
gaaatcggcatcttagtga

SEQ ID NO: 226942 - DNA, 19 bp, Homo sapiens
  siRNA target sequence for HSD17B12 (NM_016142.1,473-491).
gtgggaatgtcgtatgagt

SEQ ID NO: 226943 - DNA, 19 bp, Homo sapiens
  siRNA target sequence for HSD17B12 (NM_016142.1,475-493).
gggaatgtcgtatgagtat

SEQ ID NO: 226944 - DNA, 19 bp, Homo sapiens
  siRNA target sequence for HSD17B12 (NM_016142.1,483-501).
cgtatgagtatcctgaata

SEQ ID NO: 226945 - DNA, 19 bp, Homo sapiens
  siRNA target sequence for HSD17B12 (NM_016142.1,570-588).
gtaagatgacacaattggt

SEQ ID NO: 226946 - DNA, 19 bp, Homo sapiens
  siRNA target sequence for HSD17B12 (NM_016142.1,598-616).
catggtggaaagatccaaa

SEQ ID NO: 226947 - DNA, 19 bp, Homo sapiens
  siRNA target sequence for HSD17B12 (NM_016142.1,609-627).
gatccaaaggggctattct

SEQ ID NO: 226948 - DNA, 19 bp, Homo sapiens
  siRNA target sequence for HSD17B12 (NM_016142.1,719-737).
ctccatgaggagtatagga

SEQ ID NO: 226949 - DNA, 19 bp, Homo sapiens
  siRNA target sequence for HSD17B12 (NM_016142.1,735-753).
ggagcaagggcgtctttgt

SEQ ID NO: 226950 - DNA, 19 bp, Homo sapiens
  siRNA target sequence for HSD17B12 (NM_016142.1,768-786).
catacttcgtagctacaaa

SEQ ID NO: 226951 - DNA, 19 bp, Homo sapiens
  siRNA target sequence for HSD17B12 (NM_016142.1,799-817).
ccggaagccaactttggat

SEQ ID NO: 226952 - DNA, 19 bp, Homo sapiens
  siRNA target sequence for HSD17B12 (NM_016142.1,800-818).
cggaagccaactttggata

SEQ ID NO: 226953 - DNA, 19 bp, Homo sapiens
  siRNA target sequence for HSD17B12 (NM_016142.1,825-843).
ctccggagacgtttgtgaa

SEQ ID NO: 226954 - DNA, 19 bp, Homo sapiens
  siRNA target sequence for HSD17B12 (NM_016142.1,835-853).
gtttgtgaagtctgcaatt

SEQ ID NO: 226955 - DNA, 19 bp, Homo sapiens
  siRNA target sequence for HSD17B12 (NM_016142.1,865-883).
cctgcaatcccgaaccaat

SEQ ID NO: 226956 - DNA, 19 bp, Homo sapiens
  siRNA target sequence for HSD17B12 (NM_016142.1,869-887).
caatcccgaaccaatggat

SEQ ID NO: 226957 - DNA, 19 bp, Homo sapiens
  siRNA target sequence for HSD17B12 (NM_016142.1,899-917).
gctcttatgggctcgataa

SEQ ID NO: 226958 - DNA, 19 bp, Homo sapiens
  siRNA target sequence for HSD17B12 (NM_016142.1,900-918).
ctcttatgggctcgataat

SEQ ID NO: 226959 - DNA, 19 bp, Homo sapiens
  siRNA target sequence for HSD17B12 (NM_016142.1,902-920).
cttatgggctcgataatct

SEQ ID NO: 226960 - DNA, 19 bp, Homo sapiens
  siRNA target sequence for HSD17B12 (NM_016142.1,929-947).
ccttcttggatttatttga

SEQ ID NO: 226961 - DNA, 19 bp, Homo sapiens
  siRNA target sequence for HSD17B12 (NM_016142.1,970-988).
gtctacacgggctcactat

SEQ ID NO: 226962 - DNA, 19 bp, Homo sapiens
  siRNA target sequence for HSD17B12 (NM_016142.1,972-990).
ctacacgggctcactatct

SEQ ID NO: 226963 - DNA, 19 bp, Homo sapiens
  siRNA target sequence for HSD17B12 (NM_016142.1,975-993).
cacgggctcactatctgaa

SEQ ID NO: 226964 - DNA, 19 bp, Homo sapiens
  siRNA target sequence for KIAA0769 (NM_014824.1,242-260).
gcagaagttggctagtcaa

SEQ ID NO: 226965 - DNA, 19 bp, Homo sapiens
  siRNA target sequence for KIAA0769 (NM_014824.1,243-261).
cagaagttggctagtcaat

SEQ ID NO: 226966 - DNA, 19 bp, Homo sapiens
  siRNA target sequence for KIAA0769 (NM_014824.1,258-276).
caatacctgaagagagatt

SEQ ID NO: 226967 - DNA, 19 bp, Homo sapiens
  siRNA target sequence for KIAA0769 (NM_014824.1,294-312).
gatgatcggaatgattaca

SEQ ID NO: 226968 - DNA, 19 bp, Homo sapiens
  siRNA target sequence for KIAA0769 (NM_014824.1,320-338).
gtatcccgtttggaaatct

SEQ ID NO: 226969 - DNA, 19 bp, Homo sapiens
  siRNA target sequence for KIAA0769 (NM_014824.1,337-355).
cttttctcgagggaacaat

SEQ ID NO: 226970 - DNA, 19 bp, Homo sapiens
  siRNA target sequence for KIAA0769 (NM_014824.1,363-381).
gcccagtctcggatgaata

SEQ ID NO: 226971 - DNA, 19 bp, Homo sapiens
  siRNA target sequence for KIAA0769 (NM_014824.1,368-386).
gtctcggatgaatatatgt

SEQ ID NO: 226972 - DNA, 19 bp, Homo sapiens
  siRNA target sequence for KIAA0769 (NM_014824.1,370-388).
ctcggatgaatatatgtga

SEQ ID NO: 226973 - DNA, 19 bp, Homo sapiens
  siRNA target sequence for KIAA0769 (NM_014824.1,372-390).
cggatgaatatatgtgaaa

SEQ ID NO: 226974 - DNA, 19 bp, Homo sapiens
  siRNA target sequence for KIAA0769 (NM_014824.1,373-391).
ggatgaatatatgtgaaaa

SEQ ID NO: 226975 - DNA, 19 bp, Homo sapiens
  siRNA target sequence for KIAA0769 (NM_014824.1,421-439).
ggacagtgagaagcttaaa

SEQ ID NO: 226976 - DNA, 19 bp, Homo sapiens
  siRNA target sequence for KIAA0769 (NM_014824.1,460-478).
gtgtggaccagttgacaaa

SEQ ID NO: 226977 - DNA, 19 bp, Homo sapiens
  siRNA target sequence for KIAA0769 (NM_014824.1,468-486).
cagttgacaaagatccaaa

SEQ ID NO: 226978 - DNA, 19 bp, Homo sapiens
  siRNA target sequence for KIAA0769 (NM_014824.1,479-497).
gatccaaactgaattacaa

SEQ ID NO: 226979 - DNA, 19 bp, Homo sapiens
  siRNA target sequence for KIAA0769 (NM_014824.1,579-597).
gacatcgaggcaaaatcta

SEQ ID NO: 226980 - DNA, 19 bp, Homo sapiens
  siRNA target sequence for KIAA0769 (NM_014824.1,600-618).
cttagtctttttcaatcaa

SEQ ID NO: 226981 - DNA, 19 bp, Homo sapiens
  siRNA target sequence for KIAA0769 (NM_014824.1,630-648).
cagaaggcaagtgtaaagt

SEQ ID NO: 226982 - DNA, 19 bp, Homo sapiens
  siRNA target sequence for KIAA0769 (NM_014824.1,632-650).
gaaggcaagtgtaaagtta

SEQ ID NO: 226983 - DNA, 19 bp, Homo sapiens
  siRNA target sequence for KIAA0769 (NM_014824.1,666-684).
gagtgtaattccaaagcta

SEQ ID NO: 226984 - DNA, 19 bp, Homo sapiens
  siRNA target sequence for KIAA0769 (NM_014824.1,685-703).
cccacgcaaggaatgatta

SEQ ID NO: 226985 - DNA, 19 bp, Homo sapiens
  siRNA target sequence for KIAA0769 (NM_014824.1,686-704).
ccacgcaaggaatgattat

SEQ ID NO: 226986 - DNA, 19 bp, Homo sapiens
  siRNA target sequence for KIAA0769 (NM_014824.1,689-707).
cgcaaggaatgattatctt

SEQ ID NO: 226987 - DNA, 19 bp, Homo sapiens
  siRNA target sequence for KIAA0769 (NM_014824.1,735-753).
caggatcgctactatcaaa

SEQ ID NO: 226988 - DNA, 19 bp, Homo sapiens
  siRNA target sequence for KIAA0769 (NM_014824.1,737-755).
ggatcgctactatcaaaca

SEQ ID NO: 226989 - DNA, 19 bp, Homo sapiens
  siRNA target sequence for KIAA0769 (NM_014824.1,741-759).
cgctactatcaaacagatt

SEQ ID NO: 226990 - DNA, 19 bp, Homo sapiens
  siRNA target sequence for KIAA0769 (NM_014824.1,743-761).
ctactatcaaacagattta

SEQ ID NO: 226991 - DNA, 19 bp, Homo sapiens
  siRNA target sequence for KIAA0769 (NM_014824.1,746-764).
ctatcaaacagatttagtt

SEQ ID NO: 226992 - DNA, 19 bp, Homo sapiens
  siRNA target sequence for KIAA0769 (NM_014824.1,750-768).
caaacagatttagttaaca

SEQ ID NO: 226993 - DNA, 19 bp, Homo sapiens
  siRNA target sequence for KIAA0769 (NM_014824.1,777-795).
gctcttgatggaaatgtgt

SEQ ID NO: 226994 - DNA, 19 bp, Homo sapiens
  siRNA target sequence for KIAA0769 (NM_014824.1,801-819).
catctcaaggattatttaa

SEQ ID NO: 226995 - DNA, 19 bp, Homo sapiens
  siRNA target sequence for KIAA0769 (NM_014824.1,831-849).
cggactgagctagaaacat

SEQ ID NO: 226996 - DNA, 19 bp, Homo sapiens
  siRNA target sequence for KIAA0769 (NM_014824.1,899-917).
ggtggtccgggactacaat

SEQ ID NO: 226997 - DNA, 19 bp, Homo sapiens
  siRNA target sequence for KIAA0769 (NM_014824.1,975-993).
cagccttgtgacagtgata

SEQ ID NO: 226998 - DNA, 19 bp, Homo sapiens
  siRNA target sequence for KIAA0769 (NM_014824.1,977-995).
gccttgtgacagtgatact
